United States Patent Application Publication US 2024/0327476 A1 - sequence listing, part 104

SEQ ID NO: 199600 - DNA, 807 bp, synthetic construct
  misc_feature 1..807: note = Description of Artificial Sequence: Synthetic coding sequence
  source 1..807: mol_type = other DNA
atgttctgcgtgaccccccccgagctggagaccaagatgaacatcacgaaagggggtttagtactatttagcgcaaatagcaatagtagctgcatggagctctcaaagaaaatagcagaaaggctgggagtggaaatgggaaaagtgcaggtgtaccaagagccgaacagagagacccgggtgcagatccaagagtcagtgaggggcaaggatgtgttcatcatacagacggttagtaaggatgtcaatacaaccatcatggaactgctaatcatggtgtatgcctgcaagacaagctgcgcaaagtctatcattggggttattccctatttcccctactcgaagcagtgtaagatgcgaaagcgcggctctattgtgtccaaactccttgcttccatgatgtgcaaggccgggcttacgcatctgattacgatggacctccaccagaaagaaatccaggggttctttaatatccccgtcgacaacctccgagcctcacccttcttgttacagtatattcaagaggaaatcccagattatcgaaatgccgtcatcgtagccaaatcaccagcatcggccaagagagctcagagcttcgctgagagactgaggctggggatcgcagtcatccatggagaagcgcaggatgccgagagcgatctggtggatggcaggcattcaccacccatggtcaggagtgttgcagctatccaccccagtctcgagatccccatgttgattcccaaggagaaaccccctattacagtggtcggcgatgtcggaggacgaattgctatcattgtgtag

SEQ ID NO: 199601 - DNA, 423 bp, synthetic construct
  misc_feature 1..423: note = Description of Artificial Sequence: Synthetic coding sequence
  source 1..423: mol_type = other DNA
atgttctgcgtgaccccccccgagctggagaccaagatgaacatcacaaaaggtggcctggtgctgtttagcgctaattctaatagctcatgtatggaattgtccaaaaagattgccgagaggctgggggtagaaatgggaaaagtgcaggtatatcaagaaccaaacagggaaactagggtccagatccaggagtctgtccgaggcaaggatgtcttcattattcaaactgtgagcaaggacgttaataccaccatcatggaactgctgatcatggtatatgcatgtaaaacaagctgcgccaaatccatcattggggttattccatacttcccctactccaagcagtgtaaaatgaggaagcggggaagcatagtgtctaaactacttgccagcatgatgtgcaaggccggcctgacttag

SEQ ID NO: 199602 - DNA, 807 bp, synthetic construct
  misc_feature 1..807: note = Description of Artificial Sequence: Synthetic coding sequence
  source 1..807: mol_type = other DNA
atgttctgcgtgaccccccccgagctggagaccaagatgaacatcaccaaaggaggactcgtgctgttttcagcgaactcgaactcgtcctgcatggagttgagcaaaaagattgcggaacgcctaggggtggagatgggcaaagtgcaggtgtatcaggaacctaatcgcgagaccagagtgcagatacaagagagcgtacgagggaaggacgtatttatcatccagactgtgagcaaagacgttaacaccaccatcatggaactgcttatcatggtctacgcctgcaaaactagctgcgcgaagtccatcatcggagtgatcccgtactttccgtactctaaacaatgtaagatgcggaagagagggtccatcgtgagcaaactccttgcctccatgatgtgtaaggctggcctcacccatctcatcacaatggatctacatcagaaagagatccaggggttttttaacatccccgtggataatctgagggcctctccctttctactgcagtatatacaggaagagataccggactatcgaaacgccgtaatagtcgccaaaagccccgcctcagccaagagagcacaatcctttgcggagaggctaagattgggaatagccgtgatccatggggaagcacaagacgccgagtctgatttggtggacggccgtcacagccctcccatggtcagatccgttgctgcgatccatccctcacttgagattccaatgctgatccctaaggagaagccccccattaccgttgtgggggacgtcggtggaagaatagccatcatcgtatag

SEQ ID NO: 199603 - DNA, 852 bp, synthetic construct
  misc_feature 1..852: note = Description of Artificial Sequence: Synthetic coding sequence
  source 1..852: mol_type = other DNA
atggagctgctgatcatggtgtacgcctgcaagaccagctgcgccaagagtattatcggtgtgatcccttacttcccttacagtaaacagtgcaaaatgcgaaaacgggggagtatcgtgtcaaaacttttggcctccatgatgtgcaaggcaggcttaacacatctgatcacgatggacctgcaccagaaggagatccaaggcttttttaacatacccgtagacaatctgagggcttctccgttcttactgcagtacattcaggaagaaatccccgactatcgtaatgctgttatcgtggcaaagtctcctgccagtgctaagagagcacagtcatttgctgagaggctgagacttgggatagctgtgatacatggagaggcgcaggacgccgaatcagacctggtcgatgggcggcacagcccccctatggtgaggagcgtggcggctattcatccatctttagaaataccaatgttgatccccaaggagaaaccaccgatcacagtagtaggagatgtgggaggccgcatcgctataatcgtggatgatattatcgatgacgtagactcattcctggccgccgctgaaacgttgaaagaacgaggcgcatacaaaattttcgtgatggccacccatggactactcagctcagatgccccacgccgtatcgaggagtctgccatagacgaggtagtcgtaacaaatacgatcccccatgaggttcagaagctgcaatgtcctaagattaagacagtggacatctcgatgattctctcagaagctatccgtagaatccataatggtgaatcaatgtcatatctgttccgtaacatcggacttgacgattag

SEQ ID NO: 199604 - DNA, 963 bp, synthetic construct
  misc_feature 1..963: note = Description of Artificial Sequence: Synthetic coding sequence
  source 1..963: mol_type = other DNA
atgttctgcgtgaccccccccgagctggagaccaagatgaacatcaccaaaggtggattggtgctgtttagcgccaattctaatagctcatgtatggagcttagtaagaaaatcgccgaacgattaggagtggaaatgggaaaagtccaggtgtaccaagagcccaacagggaaaccagagtgcaaatacaagagtccgtgcgcgggaaggacgtatttattatccagaccgtctctaaagatgtgaacaccaccataatggagcttctgatcatggtttatgcatgcaagaccagctgcgccaaaagtattatcggtgtgattccatattttccttatagcaagcaatgtaagatgcgaaagcggggctccatagtcagtaaactcctagcctccatgatgtgcaaggccgggctgacccatttgatcaccatggatttgcatcagaaagaaattcaaggctttttcaacatcccagtagacaacctgcgtgctagcccttttcttctgcagtatattcaggaggaaatccctgattatcggaatgccgtgatcgtcgccaagagcccagcctcggccaagcgcgcccaaagcttcgcagagcggcttcgtctagggattgctgtcatacatggggaggcccaggatgcagaatccgacctggtggacgggcgtcattctcctcccatggttcggagtgttgctgctattcacccctccctagagatccctatgcttatacccaaggagaagccgcccatcacagtagtgggcgacgtggggggcagaattgcgatcattgtggtggtcgtgaccaatacgataccccatgaggttcagaagcttcagtgccccaaaatcaaaaccgtcgatatctcaatgatcctgtctgaagctattagaaggatccacaatggggaaagtatgagctacttgttcagaaatatcggactggatgactag

SEQ ID NO: 199605 - DNA, 237 bp, synthetic construct
  misc_feature 1..237: note = Description of Artificial Sequence: Synthetic coding sequence
  source 1..237: mol_type = other DNA
atgttctgcgtgaccccccccgagctggagaccaagatgaacatcactaaaggtggtctagtcctgttcagcgctaactctaatagtagctgcatggagctgagcaagaagattgccgaaaacaaaagtactaatagcagggtgtgtgaaggaaagcgatgctttcaccatcccaattgctttgagggcagggagcaccatcaccacggagccccagatcatggtgtgtgcatgtag

SEQ ID NO: 199606 - DNA, 678 bp, synthetic construct
  misc_feature 1..678: note = Description of Artificial Sequence: Synthetic coding sequence
  source 1..678: mol_type = other DNA
atggccggcagcagcgaggaggcccccgactacggccggggcgtggtaattatggatgactggcccggctacgatctaaatttgtttacctatcctcagcattactacggcgatctcgaatacgtgttaatacctcacggaatcatcgtggataggattgagcgcttggcgaaagacatcatgaaagatataggctatagcgatataatggttctttgcgttctgaaaggcggttataaattttgtgctgaccttgtggaacatctgaagaacattagccgaaatagcgaccgtttcgtcagtatgaaggttgattttatcagactgaagtcctacaggaatgaccagtctatgggcgagatgcagattattggcggggacgacctgtctacacttgccgggaagaatgtcctgatcgtggaggacgtcgtcggcacgggccggactatgaaggcgttgttatctaacattgagaagtataagccaaacatgatcaaagtggcgtctctccttgtgaaaagaacgtcccgatcggacggctttagaccagactatgccggatttgaaatcccaaatttattcgtggtcggctatgctctggactataacgagtacttcagggatctgaaccatatctgcgtaatcaatgaacacgggaaggaaaagtaccgggtgtag

SEQ ID NO: 199607 - DNA, 573 bp, synthetic construct
  misc_feature 1..573: note = Description of Artificial Sequence: Synthetic coding sequence
  source 1..573: mol_type = other DNA
atggccggcagcagcgaggaggcccccgactacggccggggcgtggtaattatggatgattggccagggtacgacctgaatctgtttacatacccacaacactattatggcgatctggagtacgtcctgattccacacgggattatcgtggaccggattgagcgtctggctaaggacattatgaaagacattgggtacagcgacattatggtgctgtgtgtgcttaagggtgggtacaaattttgcgctgacctggtggagcacctcaagaatatatccaggaactccgaccgcttcgtgagcatgaaagttgacttcataaggcttaaatcttaccgaaacgaccaaagtatgggggagatgcaaatcatcggcggtgatgacctgagcacattggcgggcaagagcgttctctttgcaaaagacgtggttggaacaggtcgaacgatgaaggctcttttaagtaacatcgagaaatataaacctaacatgatcaaggtagcaagcttacttgtgaagcggactagccgttcggacggattccgcccagatagccacatgagacaccagtag

SEQ ID NO: 199608 - DNA, 522 bp, synthetic construct
  misc_feature 1..522: note = Description of Artificial Sequence: Synthetic coding sequence
  source 1..522: mol_type = other DNA
atggccggcagcagcgaggaggcccccgactacggccggggcgtggtgattatggatgactggcccggctacgatcttaacctttttacataccctcagcattactatggggacctcgagtatgtcttgatcccacacggtattattgttgacaggattgagaggttggctaaggacataatgaaggacatcggctatagcgatatcatggtgctgtgcgtgctgaaggggggctataaattttgcgctgacctcgtagagcaccttaagaacatttcaaggaatagtgaccggttcgtctcaatgaaggtggatttcatcagactgaaatcatatagattgcgcgcacggctcaagcggaccaccatatgtgataggggcgggctggcgtttagtcagggatacatgagcagttgcgccccgctgcaggaatcccccaacacgctctggcgcggatacctgcaagtacttatcccctgcttccatatacggtttcagcttcctcgatctgaacagaattag

SEQ ID NO: 199609 - DNA, 573 bp, synthetic construct
  misc_feature 1..573: note = Description of Artificial Sequence: Synthetic coding sequence
  source 1..573: mol_type = other DNA
atggccggcagcagcgaggaggcccccgactacggccggggcgtggtgattatggatgactggcctggttatgatctgaatctgttcacctacccacagcattactatggcgatctggaatacgtccttatcccacatggtatcatcgtagataggatcgagagattggctaaagatattatgaaagacatcggttattccgatataatggttctgtgtgtgcttaaaggtggatataagttttgcgccgacctcgtggaacatctaaagaacatttcccgcaattccgacagatttgtcagtatgaaagttgactttatccgcctgaagagttataggaacgatcagtccatgggtgaaatgcagatcatcgggggcgacgacctgagtactttagccggtaagaatgttttgattgtggaggatgtggtggggacaggcaggacaatgaaggctctgttgtcaaatattgagaaatataagcccaacatgatcaaggtggctagcttgctggtgaagcggacaagtcggtccgacgggttccgcccagatagtcatatgaggcatcagtag

SEQ ID NO: 199610 - DNA, 1299 bp, synthetic construct
  misc_feature 1..1299: note = Description of Artificial Sequence: Synthetic coding sequence
  source 1..1299: mol_type = other DNA
atggccaccgccgaggtgctgaacatcggcaagaagctgtacgaggggaagaccaaggaagtgtacgagcttcttgatagtcctggaaaggtgctcctgcagagtaaagatcaaattacagctggtaacgctgctcgtaagaatcacctggaaggcaaggccgcaataagcaataaaattaccagttgtatcttccagctcctgcaggaagcagttaccagttacaagtccaacaggattaaaacagcctttacccgaaaatgcggcgagaccgcattcatcgcaccgcagtgtgaaatgattcctatcgaatgggtctgccgccggatcgcaacagggtctttcttgaagcggaatccaggagtgaaggaaggttacaaattctatccaccaaaagtggagttgttcttcaaggacgacgcaaataacgacccccagtggtcagaggaacagttgatagcggccaagttctgttttgccgggctgctgatcggacagaccgaggtggacatcatgtctcacgccacccaggccattttcgaaatcctggaaaaaagctggctaccccagaactgcaccctcgttgacatgaaaatcgaattcggcgtggacgtcacaactaaagagattgttctggccgatgtgatcgacaacgattcatggagactgtggccatccggtgaccgcagccagcagaaggataaacagtcatacagagacctgaaagaagtaacccctgaaggactgcagatggtcaagaaaaattttgagtgggtggcagaacgagtggaactcttacttaagtccgaaagccagtgccgggtggtggtcctgatggggagtacaagtgatctggggcattgcgagaaaataaagaaagcgtgtgggaactttggcattccttgcgagctgagagtgacctctgcgcataaggggcccgacgagacactcaggatcaaagctgagtacgagggtgatggcattcccacagtgtttgttgccgtcgcgggacgcagcaacggcctcgggcccgtgatgagcggcaatactgcctatccagtgattagctgcccgcccctgacgcctgactggggcgtgcaggatgtctggtcgtctctcagattacccagcgggctgggatgtagtaccgtcctttcacctgagggctctgcccagttcgcagcccagattttcggcctgtcaaatcacctggtgtggtcaaagctcagagcttcaattctgaacacctggatcagcctaaagcaggcagataaaaagattcgggagtgcaacctctag

SEQ ID NO: 199611 - DNA, 1278 bp, synthetic construct
  misc_feature 1..1278: note = Description of Artificial Sequence: Synthetic coding sequence
  source 1..1278: mol_type = other DNA
atggccaccgccgaggtgctgaacatcggcaagaagctgtacgagggaaagactaaggaggtttacgaactactggactctccgggtaaagtgctgctgcagtctaaagaccagatcaccgccggaaacgcggcccgaaaaaatcatctggaaggaaaagccgctatcagtaataaaatcacaagctgtatattccaactgcttcaggaagcggggatcaaaacagcattcacgagaaagtgtggcgaaacagcattcattgccccgcagtgcgaaatgattcccatcgagtgggtatgtcggaggattgcgaccggctccttcctgaagcgtaacccgggcgtaaaagagggatacaagttctaccctcccaaagtcgagttattctttaaggacgatgctaataatgaccctcagtggtctgaggaacagctgatagcagcaaagttctgcttcgcgggtctgcttatcggccagacagaggtggatatcatgtcccatgccacccaggctatttttgaaatcctcgaaaaatcctggctcccacagaactgcaccctggtggatatgaaaattgaatttggggtcgatgtgacgactaaagagattgtgctggctgatgtcatcgataatgactcctggcggttgtggcctagtggagaccggagccagcaaaaggataagcagtcttacagggacttgaaggaggttaccccagagggtctgcagatggtcaagaagaacttcgaatgggtggcggagagggtagagctgctcctcaaatccgaaagtcaatgtagagtggtcgttttgatggggagtacgtccgaccttgggcattgcgaaaaaattaaaaaggcttgcgggaatttcggaatcccttgcgagttgcgggtgacatctgctcacaagggacccgacgaaacacttcgaataaaggcagaatacgagggagacgggatccctactgtgttcgtggccgtggccgggcgctctaatggcttaggcccagtcatgagcgggaacactgcctatcccgtgatctcatgcccccccctgacccccgactggggcgtgcaggatgtatggtcaagcctgcggttaccctccgggctaggctgctccactgtgctatccccagagggctccgctcagttcgcggctcagatctttggtttatccaatcacctcgtatggtctaaattacgggcgtctattctaaacacctggatttcacttaaacaagctgacaagaaaatccgggagtgcaacctttag

SEQ ID NO: 199612 - DNA, 1278 bp, synthetic construct
  misc_feature 1..1278: note = Description of Artificial Sequence: Synthetic coding sequence
  source 1..1278: mol_type = other DNA
atggccaccgccgaggtgctgaacatcggcaagaagctgtacgaggggaagacaaaagaagtgtacgagctattagactcgcctggcaaggtcttactgcaaagtaaggatcaaatcacagcaggcaacgccgcgcggaaaaaccacttggaaggcaaggctgccatttctaataagatcacgtcctgcatcttccagcttttacaggaggcaggaataaaaaccgctttcactcggaaatgtggcgaaactgctttcatcgccccacagtgcgaaatgatcccaattgagtgggtttgtcggcgcatcgccactggaagctttcttaagcggaacccaggtgtgaaggaaggatacaaattttatcctccgaaggttgagctgttttttaaggatgacgctaataatgacccccaatggagcgaagagcaactgatcgctgccaagttttgctttgcgggattactgataggccagaccgaagttgacattatgtcccacgcaacccaggccatctttgagattcttgagaaatcttggctcccacagaattgcacgctggtcgatatgaaaatagaattcggagtggacgtcactaccaaagagattgtgttggctgatgtgatcgataatgattcgtggcgactgtggcccagcggcgatagatcacagcagaaggataagcagagttatagagatctaaaggaggttacccctgaggggttacagatggtcaaaaaaaattttgagtgggtggcggaacgggtcgagctgctcctcaagtcagaatctcagtgtcgagtagtggtgctaatgggctcaacttcggatttaggacactgcgaaaaaattaagaaggcatgtggcaactttggcattccctgtgagctcagagtgacgtcggctcataagggccccgacgagaccttgcggataaaggccgaatacgaaggcgatggaatcccaactgtgtttgtcgccgtggccgggcgaagcaacggactggggccagtgatgtcagggaacacagcatatccagtgatttcctgcccacccctgacacccgattggggggttcaggacgtgtggtcttccctgcggctccctagcggactgggttgcagtacagtactcagcccggagggatctgctcaatttgccgcacaaattttcggccttagtaatcacctcgtgtggtcaaaactccgggcatctatcctgaatacctggattagcttgaaacaagctgataaaaagataagggaatgtaatctctag

SEQ ID NO: 199613 - DNA, 4017 bp, synthetic construct
  misc_feature 1..4017: note = Description of Artificial Sequence: Synthetic coding sequence
  source 1..4017: mol_type = other DNA
atgagccccgtgctgcacttctacgtgcggcccagcggccacgagggtgccgcacctgggcacactcggcggaagttgcagggtaagttaccagagcttcagggcgtggaaacggaactctgctataacgttaattggaccgctgaggccctaccatctgcagaggagaccaaaaagctgatgtggctatttggttgcccactactgctggacgacgtcgctcgggaaagttggctcttgcctgggagcaacgatctccttctcgaagtaggcccacggctgaatttctccacccctaccagcaccaatattgtctccgtctgtagggccaccggcttaggaccagtggatagagtcgaaacaaccaggcggtacagactgtcttttgcacaccctcccagcgctgaggtagaggctattgcccttgccactctgcatgaccgaatgacagagcagcactttccacacccaatccaatctttctctccggagagcatgcctgagcccctgaatgggcctatcaacatattgggcgaaggtagactcgcccttgaaaaagcaaaccaggagttgggtctcgctctggactcctgggacctggacttttacactaagcgcttccaagagctgcaacgtaacccaagcacagtggaggcctttgacctggcacagagtaattctgaacacagcaggcactggttctttaaaggacagttgcacgtagacggccagaaattggtgcatagcctctttgaatctatcatgagcacccaggagtcctccaaccccaataatgtgcttaaattctgtgataatagctccgcaatacagggtaaagaagtacggtttcttagaccagaagatccgaccagacccagtagatttcagcagcagcagggcctgaggcacgttgtgtttaccgcggagacccacaactttcccaccggagtgtgcccattcagtggcgcaactacggggactgggggcagaattcgggatgtgcagtgcacaggccggggagctcacgtcgtggcagggacggccggctattgtttcggaaatcttcacattccaggttataacctgccctgggaggatccatcttttcagtaccccgggaacttcgcaaggccactggaagtcgccattgaagcctccaatggcgcgagtgattacgggaataagttcggagagccggtattggccggcttcgccagaagcttgggccttcagctccccgatggccagcgccgggagtggatcaaacctatcatgttctctggtgggatcggatctatggaagctgatcatatttctaaagaagcacccgagccaggaatggaagtagtcaaagtgggcggacctgtgtacagaattggggtgggaggaggcgccgcttcatccgtgcaagtgcagggcgataacaccagcgacctggatttcggagccgtccagcgaggcgaccctgagatggagcagaagatgaaccgggtgatccgcgcatgcgttgaggcccccaaggggaatcccatctgcagcctgcacgaccagggtgcaggcggcaatggcaatgtgttgaaagagctgtctgatcctgctggcgccataatctacacaagccgctttcagctgggcgacccaacgttaaacgcgctggagatctggggagccgaataccaagagagtaacgcgcttcttctacgctcacctaacagggactttttaacccacgtcagtgccagggaaaggtgcccggcttgctttgtcggtacgattacaggggacaggaggattgttctagtggatgacagagagtgcccggtgagacgcaacgggcagggtgacgcccccccaacccctttgccgactccagtggatcttgagctggaatgggtcctggggaagatgccaagaaaagagttctttttacagaggaagccccccatgctccagccgctcgctctaccaccaggactgtccgtgcaccaagctttggaacgtgttctgagattacccgctgttgcttccaagcggtatcttacaaacaaggtcgaccgaagtgtgggaggattggtcgctcagcagcagtgtgtaggccctctgcagaccccactggcggatgttgcagtggttgcactgtctcacgaagaacttattggcgcagccaccgcccttggtgagcagccagttaaatcacttttggaccctaaggtggctgcccggctggcggtcgcggaagccctgaccaatctggtgtttgccctggtgacggatcttagagatgttaaatgcagcggcaactggatgtgggctgccaaactgccgggcgagggggcggcgctagccgatgcgtgcgaggccatggtggcagtcatggcagccctgggggttgccgtggatggtggaaaggactcgctcagcatggctgcgagggtgggaacagagacggtgagagctccagggagcctggtgatttctgcctatgctgtttgccccgatattacggcaactgtgactcccgatcttaagcacccggaagggagaggtcacctcttgtatgtggccttgagtccaggacaacaccggttgggcggtaccgctctggctcagtgtttttcccaacttggagagcatccgcccgacctggatttacccgagaacttggtgagggcattttcaatcactcaaggcctgctgaaggatcgactcctgtgctctgggcacgacgtgtcagacggaggacttgtgacatgcctcctcgagatggctttcgctggaaactgtggactacaggtggacgtcccggtgcctagggtggatgtgctctcggtactattcgctgaagagcccggcttggttctagaagttcaggaacccgatcttgcacaggtactgaaacggtatagagacgccgggttgcactgcctggaactgggacacaccggcgaggcaggaccccatgccatggtgcgcgtgtctgttaacggggctgttgtcctggaggagccagtgggcgagctgcgagcactctgggaggaaactagctttcagttggacagactgcaggccgagccgcgctgcgtagccgaagaggaaaggggcctgagagagaggatgggtcctagttattgcctgccacccacattccccaaggcgagcgtgccccgagagcccgggggcccatcccccagagtggcaattctgcgagaggaaggtagtaacggtgatcgagaaatggcagacgcttttcacctcgccggctttgaggtgtgggacgtgaccatgcaggacctgtgcagtggcgccattggcctggataccttcaggggagtggccttcgtaggaggcttctcctatgccgatgtgctgggatcagccaaggggtgggccgccgcggtcacattccatcctagggccggagctgagttgcggcggttcagaaagcggccagataccttctcactgggggtgtgtaatggttgtcagttactcgccttgctgggctgggtgggcggcgacccaaatgaagacgctgcagagatgggaccagactcacagcccgcccgtccaggactcctgctgcgccacaatcttagtggcagatacgaaagtaggtgggcctccgtgcgggttggccctggaccagcactgatgttgaggggcatggagggggcagtattgcctgtatggagtgcacatggtgagggatatgtggctttctcctctcccgagctgcaagctcaaatcgaagcaaggggtctcgcccccctccattgggctgacgacgatggaaaccccactgagcaatatcccctcaaccctaatggctcgcctggtggtgtcgccggcatatgttcctgtgacgggcgacacctcgcggtgatgccgcatcctgagcgggctgtgagaccttggcaatgggcgtggcggcccccacccttcgacaccctcactactagcccctggctgcagttgtttatcaatgccagaaactggacgctggagggctcatgttag

SEQ ID NO: 199614 - DNA, 2745 bp, synthetic construct
  misc_feature 1..2745: note = Description of Artificial Sequence: Synthetic coding sequence
  source 1..2745: mol_type = other DNA
atgttcagcggcggcatcggcagcatggaggccgaccacatcagcaaggaggcacccgagcctgggatggaagtagtgaaggtcggaggtccagtttatagaatcggagtgggggggggggcggctagttccgtccaagttcagggggacaatacttcggacctcgactttggggcagtgcagcgaggggaccccgagatggaacagaaaatgaaccgcgtcatcagggcttgcgtggaggcacccaaaggcaatcccatctgttcactacatgatcagggcgcggggggaaacggtaatgtgttgaaggaattgtcagaccctgctggtgcaattatttacacctccagattccagctgggagaccccacactgaatgctctggagatctggggggctgaataccaggagagcaacgccctgttactccggagccccaatcgcgacttcctgactcacgtgtcagcccgagaaagatgccctgcttgctttgtgggtaccattaccggtgatcgccgcattgttttggtggacgatcgggagtgccccgtgaggcggaacggccagggggatgcgcctcccacccccttacctacccccgttgatctggagttggagtgggtgctaggcaaaatgcctcggaaggaattttttctgcagagaaagcctcctatgctgcagcctttggctctcccgccaggcctgtccgtgcaccaggccttggaacgtgtgttaagactcccggctgttgcgtcaaagagatatttgactaataaggtggatcgctcagtgggcggactagtggcacagcagcagtgcgtgggtcctctgcagacaccgctcgccgacgtggccgttgtcgccctgtcacacgaagaacttatcggagcggccactgcattgggcgagcagcccgttaagagtctcttggacccaaaggtagctgcacgtctggccgtggccgaggcgctgaccaacttggtgttcgcgctcgttacagacctgagagatgtgaagtgttctgggaactggatgtgggccgctaaacttcctggtgagggggccgccttggctgacgcgtgcgaggcgatggttgcggtcatggcggcacttggggtggctgtagatgggggcaaagacagtctgtctatggcggctagagtgggcactgagacagtgagggcccctggctctctcgtcattagcgcatatgcagtctgtccagatattacggctaccgttacaccagaccttaaacaccccgaaggtagggggcatctgctgtacgttgctctgagcccaggccagcaccgactgggcggcacagccctggcccagtgcttctcacagctgggagagcaccctcccgacctggatctcccagaaaatctcgtaagagccttctctatcacgcaggggctcctgaaagaccggctgctgtgctcgggacatgacgttagcgatggaggattggtgacctgcctgttggagatggccttcgccggcaattgcggccttcaagtggacgtacctgtccctcgcgtggatgtgttgtctgtgctgtttgctgaggagcctggactcgtgctggaggtgcaagagccagacttagctcaggtgctgaaacggtatagggacgcagggttacattgcctcgagcttggtcacactggcgaggcaggaccacacgccatggtgcgagttagcgtgaacggggccgtggtgttggaagaacctgtgggagagctccgcgccctctgggaggagacttcatttcagctcgatagactgcaagcggagcccaggtgtgtggccgaggaggaaagaggcctgcgcgagcggatgggccctagctactgcttgccacctacttttccaaaggctagcgtaccaagagaacccggcgggcctagccccagagttgccattctgagggaagagggcagtaatggcgatagagagatggctgatgctttccacctcgctggcttcgaggtctgggacgtgacgatgcaagatttgtgctccggtgctatcggcctagacacgttcagaggcgttgcttttgtcggcggattcagctatgcggacgtcctgggatcggcaaaggggtgggctgcagccgtcactttccacccccgtgctggcgcagagctcagacgtttcagaaagcgcccagatacttttagccttggagtctgcaacggatgccagctgctcgcccttttgggttgggtggggggcgatccaaatgaggatgcggcagaaatgggccccgactcacagccggccaggcctgggttgttgctccggcataacctgagtggtcgttatgaatcacgttgggccagcgtgcgagtgggtccaggccccgcactgatgctccgggggatggagggcgctgtgctcccagtgtggtccgcacatggcgagggatatgtggcatttagcagtccggaactccaggcccagatcgaggcaagagggctcgccccactgcactgggcagacgacgatgggaacccaaccgaacaataccccttgaaccctaatggttccccaggaggggtggccggaatctgcagctgtgacgggagacatcttgccgtcatgccacaccccgagagggctgtgcggccatggcagtgggcgtggcgaccgccgcccttcgatacattgacaacatctccatggctgcagctttttattaatgcaaggaactggaccttggaaggttcctgctag

SEQ ID NO: 199615 - DNA, 2244 bp, synthetic construct
  misc_feature 1..2244: note = Description of Artificial Sequence: Synthetic coding sequence
  source 1..2244: mol_type = other DNA
gtgaagggcgagcggcggatcgtgctggtggacgaccgggagtgccctgtgagaagaaacggccagggtgatgccccaccgaccccccttcctacaccagtcgaccttgagctcgagtgggtactgggcaaaatgcctagaaaggaattctttctccagagaaagcctcctatgttgcagcccctggctcttcccccaggtctgtccgtgcaccaggcgctagaaagggtgcttcgtctgcctgccgtggcctctaagcgatatttaaccaacaaagtcgaccgatcagtaggcggcctggtggctcagcaacaatgcgtcggccccttgcagacaccattggctgatgttgcagttgtggcccttagccacgaagagctgatcggtgctgccaccgcactgggcgaacagcctgtgaagagcctgctcgacccaaaggttgccgcgcgactggccgtagctgaagctctcaccaacctcgtgttcgccctggtgacagatctgcgcgatgtcaaatgttccggaaactggatgtgggccgccaaactccccggcgagggcgccgcgttggccgatgcctgtgaggctatggtcgctgtgatggctgcactaggggtggctgtagacgggggtaaggactcgctttccatggccgcccgggtagggacagagacagtgcgcgctccaggctccctggtcatcagtgcatacgcagtctgcccggatattaccgctacagtgacgccagatttgaaacatccagaaggacgtgggcatctcctgtatgtggctttatctcctggccaacaccgacttggcggtacagcactggctcagtgtttctcccagctgggggagcatccaccagatctggatctgcccgagaacctggtgcgcgcattctccattacacagggcctactgaaggatcgcttgctctgcagcggacatgatgtctcagacggcggcctcgtgacttgtttgctggaaatggccttcgctggcaactgtggccttcaggtagatgtgcccgtgccaagggtggatgttctatctgtgttgttcgctgaggagcctggtctcgttctggaggtacaagagcccgacctcgctcaggtgctgaaaagatatcgtgatgccgggctgcactgtctagagctcggccatactggcgaagcagggccccacgcaatggtgcgagtctccgtaaatggagctgtggtgctggaggagccagtcggagagcttagggctctgtgggaggaaactagcttccaactcgaccgccttcaagctgagccaaggtgcgtggccgaagaagagcgcggtctgagggaaagaatggggccttcatactgtctgccacctacattccctaaagctagcgtccctcgggaacctggcgggccatctcctcgggtggctattcttcgggaggagggtagcaacggagacagggagatggctgacgcctttcacctggccggattcgaggtgtgggatgttactatgcaggatctgtgtagcggggccattggcctggatacattcagaggggtcgccttcgtcgggggcttctcttatgccgatgtgctgggcagcgcaaaaggctgggcagcggctgtaacattccaccctcgggcgggagccgagttgcgacgatttcggaagagaccagacaccttctctttgggtgtatgcaacggctgccaactcctggccttgctgggatgggttggtggcgacccaaacgaagatgcagccgagatgggccctgactcccagcccgcacggccgggcttactgctgagacacaatttgagcgggcggtacgaaagcagatgggcctcagtgcgggtggggccaggccctgccttgatgctgcgcggaatggaaggtgccgttcttcctgtctggtcggcccatggggaaggatatgtagcgttcagcagcccagagctccaggctcagatcgaagctagagggctggcgcccctgcactgggctgacgatgacggcaatccgactgaacagtatcccctgaacccaaatgggagccctggaggtgtggccggaatttgtagctgtgacgggcgccatctggccgtgatgccccatcctgagagagccgtccgaccctggcaatgggcctggcgtcccccaccgttcgacacgcttaccacctcaccatggctccaattatttatcaacgctcgaaattggacactggaaggaagttgctag

SEQ ID NO: 199616 - DNA, 1302 bp, synthetic construct
  misc_feature 1..1302: note = Description of Artificial Sequence: Synthetic coding sequence
  source 1..1302: mol_type = other DNA
atggccgcccgggtgctgatcatcggcagcggcggccgggagcacaccctggcttggaagctcgcccagagccatcacgtgaagcaggtgctcgtagcccccggaaacgccggcacagcctgctccgagaagatcagcaataccgccatctccatcagcgaccacactgcgttagcccagttctgtaaggaaaagaagatcgaattcgttgtcgtgggccccgaggcgcccttggccgctggtattgtcgggaatctgaggagtgcgggggttcagtgttttggacccaccgccgaggccgcgcagctggaatcgtccaagcgcttcgccaaggagtttatggatcgacacggtatccccactgcccagtggaaggcctttactaagcctgaggaggcctgtagtttcatattatccgcagatttcccagccctcgtcgttaaagcctcaggtttagcagccggtaaaggagtcatagtggctaagtcaaaggaagaggcctgcaaagctgtgcaggagattatgcaggaaaaggctttcggagctgcgggcgaaacaatcgtcattgaggaactgctggacggcgaggaggtcagctgtctctgcttcacagacgggaagacagtagcaccgatgcccccagcccaggatcacaaacgcctcctggagggcgacggcgggcctaataccgggggaatgggcgcttactgtccagctcctcaagtcagtaacgatttactcttaaaaatcaaagatactgtgcttcagcgtacagtggacggcatgcagcaggagggaactccttacaccggaatcctgtatgccggtattatgctcaccaagaacggtccaaaagttctggagttcaattgtaggttcggcgacccagagtgtcaggtgatactgccattgctcaagtccgatctctatgaagttatccagtccactctggacggcttgttatgcaccagcttacccgtatggctggagaaccacacagcgctcacggtggtcatggcatctaaggggtatcctggagattatacaaagggggttgaaataactggatttcccgaagcgcaagccttaggcctggaagtctttcatgccggaaccgccctgaaaaacgggaaagtggtgacccacggaggccgggtgctcgctgtcacagccatccgagaaaatctcatcagcgcactagaagaggccaagaaaggccttgctgcgattaagtttgaaggagccatctacaggaaagatgtgggattccgcgcgatcgcattcctacagcagccccgttag

SEQ ID NO: 199617 - DNA, 3033 bp, synthetic construct
  misc_feature 1..3033: note = Description of Artificial Sequence: Synthetic coding sequence
  source 1..3033: mol_type = other DNA
atggccgcccgggtgctgatcatcggcagcggcggccgggagcacacactcgcctggaagcttgctcagtctcaccatgtcaaacaagtacttgtcgcccctgggaatgccggcactgcttgttccgagaagataagcaacaccgccatctcaatttccgatcacaccgccctagctcagttttgcaaggagaaaaagatcgaattcgtggtggtgggacctgaagccccccttgcggctgggatcgtaggaaaccttaggtctgctggagtacagtgttttggccccaccgcggaggcggcacaattggaatcttccaagagatttgccaaagaattcatggaccgccacggaattcctactgctcagtggaaggcattcacgaaacctgaagaggcctgttcctttatcctgtccgccgactttccagctttagtggtgaaagctagtggactggccgctgggaaaggagtgattgtggccaaatcgaaagaagaagcctgcaaggccgtgcaggagattatgcaggagaaagctttcggcgcagcaggagagacaatcgtgatcgaggagctcctggatggagaggaagtcagttgtctgtgttttaccgacggcaagacggtggcaccaatgccccctgctcaggatcacaagcgccttcttgagggagatggcggcccaaataccggggggatgggtgcctactgccctgctcctcaggtaagcaacgacctcctgctgaagataaaagacaccgtcctgcaaagaacagtggatgggatgcaacaggagggcactccatacactggcatcctgtatgcaggaatcatgcttacaaaaaatgggccgaaggttctggagtttaactgtaggttcggcgatcccgagtgtcaggtgatcttgccactcctgaaaagtgacttatatgaggttatccagagcaccctggacggcttgctgtgtacgagcttgcctgtgtggctcgagaatcatactgccttgacggtcgtcatggcttccaaaggctatcccggagattacaccaagggcgtcgagattaccgggttccctgaagcccaggcactaggattagaggtgtttcatgccgggactgcgctaaaaaacgggaaagttgtaactcatggcggacgggtgcttgcagtcacggcgataagggagaacctcattagcgccctggaagaggccaaaaagggactggcagctattaaatttgagggcgccatttatcggaaagacgtcggcttccgcgccatcgcgttcctgcagcagccacgctctctgacctacaaagaatccggcgtagacattgccgcaggaaatatgttggttaaaaaaatacagccactggcaaaagcaacttctcgcagtggctgtaaggtggatttgggggggtttgcagggctatttgatttgaaagccgcaggattcaaggatccacttctagcaagtggaacggatggcgtgggtaccaaactcaaaatcgcccagctgtgtaacaagcacgatactatcggacaggacttagtcgccatgtgtgtcaatgatatcctggcccagggcgccgagccgctgtttttcttggattacttctcatgtgggaaactggacctcagcgttaccgaagcagtcgtcgcagggatcgccaaggcgtgcgggaaggcagggtgtgctcttctcggaggggagactgctgagatgcctgatatgtaccctccaggcgaatacgacttggcagggttcgcggtgggggccatggaaagggaccagaagttacctcacctcgagcggatcacagagggtgatgtcgtggtaggcatcgccagtagcggcttgcacagcaacggcttctccttggtgcgaaaaattgttgctaagagctcactacaatacagcagcccagcacccgacggttgtggggaccagaccctgggggaccttctcctgacacctacgagaatctactcacacagcctcctccccgtgctgcgaagtggtcatgtgaaggcctttgcgcacatcaccggcggcggtctgctggaaaatatcccacgagtgctaccagaaaagcttggggttgacctcgatgctcagacctggcggataccaagggtgtttagctggctccagcaggagggacacctctcagaagaagagatggcgcgaacgttcaactgcggagtgggagcagtgctggttgtcagtaaggagcagaccgaacagatcttgagagatatccagcagcacaaggaggaagcctgggtgatcggatctgtggtcgcacgggccgagggctcacctagggtgaaagtgaagaaccttattgaatcaatgcaaattaacggttctgtcttaaagaatggcagtctcactaaccacttctcgtttgagaagaaaaaggcacgagttgcagtactgatcagcggcactggatctaacctccaggcactgatcgacagtacacgcgaacccaattcttcagcccaaattgacatagtgatttccaacaaagccgcagtggccggcctggacaaggccgaaagagctggcattccaacacgtgtcataaatcacaagttatacaaaaacagagtggagttcgacagtgccatcgatctggtcctagaggaattcagcattgacattgtgtgtctggccgggttcatgcgcatcctttctggccctttcgtgcagaagtggaacggcaaaatgctgaacatacacccctctttactcccgagcttcaagggttccaacgctcacgaacaggctctggagaccggggtgactgtgacgggctgtaccgtacattttgtggccgaagatgtcgacgcaggacagatcatactgcaggaggctgtccccgttaaacgcggggacactgttgccaccctgtcagagagagtaaaacttgcagagcataaaatatttcccgcagcactgcagctggttgcatctgggacggtgcaactcggtgagaatggcaagatttgttgggtcaaagaagaatag

SEQ ID NO: 199618 - DNA, 3033 bp, synthetic construct
  misc_feature 1..3033: note = Description of Artificial Sequence: Synthetic coding sequence
  source 1..3033: mol_type = other DNA
atggccgcccgggtgctgatcatcggcagcggcggccgggagcacacgctggcatggaaactggcacaaagccaccacgttaagcaggtcctggttgcccctggcaacgctggaactgcttgctcagaaaaaatttctaataccgccataagcatcagcgaccatactgcactggcgcaattctgtaaggaaaaaaagatcgaatttgtggtggtcggccctgaagccccgcttgccgccggcatcgtggggaatttgcggtccgcaggcgttcaatgcttcggccctaccgcagaggcagctcagcttgaaagttctaaaagattcgccaaggaattcatggaccgacatggcatccccaccgcacagtggaaggccttcacgaaacctgaggaagcatgcagcttcatcctctctgccgattttcctgccctagtggtaaaagcgtccggcctcgccgcaggcaagggggtcattgtcgccaaaagcaaggaggaagcctgtaaggcggtgcaggaaattatgcaggagaaagcattcggggctgccggggaaacgattgtgatcgaagagcttttagatggagaagaagtatcctgtctgtgctttacagatgggaaaactgtcgccccgatgccgccggcccaggatcataagcgactcctggagggagatggaggaccaaacactgggggaatgggagcctattgtccagccccgcaagtgtctaatgatctgctactcaagatcaaagacaccgtcctccagagaactgtggacggtatgcaacaagaaggcaccccatatactggtattctttacgccgggatcatgctgaccaagaacggccctaaagtcctggagttcaattgcagatttggagatcccgagtgccaggtcatcctacctctgctcaagagcgacctgtacgaagtcatccagtcaaccctcgatgggctcttatgcacttctctgcccgtgtggctggagaaccataccgcgcttacagtcgtgatggccagcaaaggctatcccggagattacacaaaaggagttgagatcacagggttccctgaagcccaggccttgggcctggaggttttccacgctggcactgcgctcaaaaatggtaaggtggtgacccacggcggcagagtgctcgcagtcaccgccattagggaaaacctgatctccgctctggaggaggcaaagaaggggctcgctgcaatcaagttcgaaggcgctatctaccgaaaggacgtaggcttcagagccatcgctttccttcaacagccaaggagtctcacttataaggagtccggggtcgacatcgccgcagggaatatgcttgttaaaaagatccagcctttagctaaggccaccagtagatccggatgtaaagtcgacctggggggtttcgccggcctgttcgatctcaaggctgcaggctttaaggacccactgctagcctctggcacagatggggtgggtactaagctgaaaatagcccagctgtgcaacaaacatgatacaattgggcaggacctcgtcgcaatgtgcgtgaatgatatccttgcccagggcgctgaaccactgttcttccttgattattttagctgcggcaaattggacctgtccgttacagaagccgtggttgccggcatcgccaaagcctgtggcaaggccggctgcgcactgctgggaggggagactgccgagatgcccgatatgtatcctcctggggaatatgacctggccgggttcgctgtgggtgctatggaaagggaccagaaacttccacacctggagcgcattacagaaggagatgtggtggtgggtatcgccagcagtggcctacactccaacggattttctctggttcgaaagattgttgctaaaagctcgctgcagtattcatcacctgcccctgacggctgtggagaccagaccctgggcgacctcctgctcacgccgacacgaatttactcccactcgctcctgcccgtactcaggagcgggcacgtgaaagcttttgcccatataactggagggggtctcctcgagaacatacccagagttcttccggagaagcttggggtggatctcgacgctcagacctggagaatcccccgtgtgttctcatggttgcagcaggaaggacatctatctgaggaggagatggcccgcactttcaattgcggagtgggtgccgtgctcgtggtaagcaaagaacagactgaacaaatcctacgggacatacagcagcataaggaggaggcctgggtgatcggtagcgtggttgcccgagccgaagggagtccccgggtgaaggtcaagaaccttatcgaatcaatgcagatcaacggctctgtcctgaaaaacggcagtctcacaaaccacttttccttcgagaaaaaaaaagcgagggtggctgttctgattagcggcacaggatccaacctgcaagcgctgatcgattccaccagggagccaaatagctccgcccagattgacatcgtaatcagcaataaagcagccgtagctgggcttgacaaagcagaaagggctgggatccccacacgcgtgatcaaccacaaactgtataaaaacagagtggaatttgatagtgccatcgatcttgtgctcgaggagttctctattgacatagtgtgtctggccggatttatgcgcatcctctctggcccttttgtgcagaagtggaatggaaagatgttgaatattcatccatctctgcttccctccttcaagggaagcaacgcacacgagcaggctctggaaacaggggtgactgtcacaggatgcacggtgcattttgtggccgaagatgtcgacgcaggccagatcatcctccaagaggctgtgccggtgaaacgaggcgataccgtggctaccctaagcgagcgggtcaaactggccgaacacaaaatctttccggccgccctgcagctggtcgctagcggtactgtccagcttggagagaatggcaagatctgctgggttaaggaggagtag

SEQ ID NO: 199619 - DNA, 3033 bp, synthetic construct
  misc_feature 1..3033: note = Description of Artificial Sequence: Synthetic coding sequence
  source 1..3033: mol_type = other DNA
atggccgcccgggtgctgatcatcggcagcggcggccgggagcacacactcgcctggaaactggcccaaagccatcacgtgaagcaggtgctggtggcgcccggtaacgcgggcacggcctgcagtgagaagatatcgaacactgccatttctatttccgatcatacggccttggctcagttttgcaaagaaaaaaaaatcgagttcgttgtagtcggacccgaagctccactggcagctggaattgtcggaaacctgcgctctgctggagttcagtgttttggacccaccgcagaggccgctcaactggagagctcaaaaagatttgccaaagagttcatggatcgccatggaatccctaccgcacaatggaaggcattcactaagcccgaagaggcatgctcatttattcttagcgctgattttccggcactggtggtcaaagcgtccgggcttgccgcaggtaagggcgtcattgtggccaagtctaaagaagaggcttgcaaagccgttcaggaaataatgcaggagaaagcgtttggtgccgctggagaaaccatcgtaatcgaagagctcctagacggagaagaagtgtcctgcttgtgcttcacagatgggaaaacagtggccccaatgcctcccgcgcaggatcacaagagactgctcgagggcgatggcggacccaatacaggaggcatgggcgcgtactgtcccgcaccccaggtttctaatgacctgcttctcaaaatcaaagataccgtgctacagcgaaccgtggatggaatgcagcaggaaggaaccccctacaccgggatcttatacgcgggaatcatgttgaccaagaacggaccaaaggtcttagagtttaactgcagatttggggatccagagtgtcaggtaattttgcctttactgaagtccgacctatatgaagtgatccagagtactctggatgggctgctgtgcactagcctgcccgtctggctggaaaaccacactgctctgactgtggtgatggcctccaagggatacccgggagactatacaaagggggttgagataacggggttccccgaagcccaagccctcgggttggaagtcttccacgcggggacggctctgaagaacggcaaggtggtaactcacgggggaagagtcctcgctgtaactgccatccgtgagaatctgatcagtgcactcgaggaagcaaagaaggggttggcagctatcaagttcgaaggcgcaatctatagaaaggatgttgggttcagagctatcgcattcctgcaacagccaagatccctcacgtacaaagagtccggtgtggacatcgcggctggaaatatgctggtgaaaaagattcagccgctcgcaaaggccaccagccgatcaggctgtaaggtggatctgggcggcttcgctgggctctttgacctcaaagctgcagggtttaaagaccccctcctggcatctggcactgacggcgtggggacaaaattgaagatcgcgcagctgtgcaataagcatgatactataggccaggaccttgtagccatgtgcgtcaatgacattctggctcaaggagctgaacctctctttttcctggactacttctcttgtggaaaactggatctcagcgttaccgaggccgtcgtggctggtatcgctaaagcctgtggtaaagcaggctgcgccctgctcggcggtgaaaccgccgaaatgcctgacatgtaccctcctggagagtatgacctcgcaggattcgctgtgggggccatggagagggatcagaagttgccacatctagaaaggattacagagggcgacgtcgttgtgggaatcgccagtagcggcttgcattctaacgggttctcactggtccgtaagatcgtcgccaagtcctccctgcaatattccagccccgcgcctgacgggtgcggagatcagacgctcggggatctgctcctcacccctacccgtatttattcccatagtctcctgcctgtcctgcgttccgggcacgtaaaggcgtttgcacacatcacagggggcgggttattagaaaatatccctcgggtgttaccggagaaactgggggtggacctcgacgcacagacttggcgaattcccagagtctttagctggcttcagcaggagggccatcttagtgaagaggaaatggctaggacatttaattgtggcgttggcgcagtcctggttgtctctaaagaacagactgagcagatcctccgcgatatccagcagcacaaagaggaagcctgggtcatcggtagtgtcgtggcccgcgccgaaggtagcccacgagtcaaagttaaaaatctaattgagagcatgcagataaacgggagcgtgctgaagaacggaagcctgacaaaccacttctctttcgaaaagaaaaaagcccgggtggcagtgctgatatctggaacaggaagcaaccttcaggccctgattgatagcactcgagaacccaatagctccgcacagatagacatcgtgatctcaaataaggccgccgttgccggtctggataaagccgaaagggccgggattccgacccgggttataaaccataagctttacaaaaaccgggttgaattcgattccgcaatcgaccttgtactggaggagttttctatagacattgtatgcctggctggtttcatgaggattctctccggaccattcgtgcagaagtggaatgggaaaatgctgaatatccacccctctcttctgccatctttcaaaggcagcaacgctcacgagcaggcgctggagactggagtgactgtgaccggatgcacagtccactttgttgcagaagatgtcgatgcgggccagattatactgcaagaagcggtgcctgtgaaacgcggagacactgtggcaactttaagcgagcgcgtaaaattggccgaacacaaaatctttcctgccgccctgcaactggtggcttctggtaccgtccagctgggtgagaacggaaagatttgttgggtgaaggaggaatag

SEQ ID NO: 199620 - DNA, 699 bp, synthetic construct
  misc_feature 1..699: note = Description of Artificial Sequence: Synthetic coding sequence
  source 1..699: mol_type = other DNA
atggccgcccgggtgctgatcatcggcagcggcggccgggagcacacactggcatggaagttggcgcagtctcatcacgtcaaacaggtgttggtggccccgggtaacgctggcacagcctgctctgaaaagatatcgaacacagcaatttccatcagtgatcatacagccttagcacagttctgcaaagagaaaaagatcgagtttgttgtagtcggccctgaagcccctctggccgccggaatagtggggaatctgcgatcagcaggcgtgcaatgcttcgggcccaccgccgaggccgctcagctggaatcttccaaaaggttcgccaaggagttcatggatcgacacggcattccaaccgcccagtggaaagcgttcaccaagcctgaagaagcttgctcattcatactgtctgcggactttcctgctctggtggtaaaagctagtgggctggccgcaggcaagggggtgattgtagcgaaatccaaggaagaggcatgcaaggcagtgcaagaaattatgcaggagaaggccttcggcgccgctggcgagacaattgtgattgaagaattgttggacggcgaagaagtgagctgcctgtgttttaccgacgggaagactgtggcacccatgccccccgcccaagaccataagcggctgctcgaaggagacggcggacccaatactggtggatag

SEQ ID NO: 199621 - DNA, 726 bp, synthetic construct
  misc_feature 1..726: note = Description of Artificial Sequence: Synthetic coding sequence
  source 1..726: mol_type = other DNA
atggccgcccgggtgctgatcatcggcagcggcggccgggagcacactcttgcatggaaactcgcgcagtctcatcatgtgaagcaagtcttggtggctccaggcaacgctggaaccgcgtgctcggagaaaataagcaacacagcaatctcaatcagcgaccacactgcacttgcccagttttgcaaagagaagaaaatcgaattcgttgttgtaggccccgaagcccctctcgctgctggcattgtgggcaacctgcgttcggcaggagtgcagtgttttgggcctactgcggaagctgcccagctcgagagtagtaaacgatttgcaaaggagttcatggacaggcatggcataccgactgcacagtggaaagcattcactaagcccgaggaggcctgcagctttattttgtccgccgacttccccgctcttgtggtgaaggcctctggcctggcggccggaaaaggggtaatcgtcgcaaaatcaaaggaggaagcttgtaaggctgttcaggaaattatgcaggaaaaggccttcggcgccgccggggaaacaattgtgatcgaagaacttctcgatggagaggaggtgagttgcctgtgcttcacagatgggaagaccgtggcccccatgccaccagcccaggaccacaagcgactgttagagggagatggtggacccaacacaggcggcatgggagcctattgtcctgctccgcagtag

SEQ ID NO: 199622 - DNA, 417 bp, synthetic construct
  misc_feature 1..417: note = Description of Artificial Sequence: Synthetic coding sequence
  source 1..417: mol_type = other DNA
atggccgcccgggtgctgatcatcggcagcggcggccgggagcacaccctggcctggaaactggcacagtctcatcacgttaaacaggtgctagttgctccaggcaatgcaggaaccgcatgcagtgagaaaatttcaaacactgcaatttctatcagtgatcacacagcgctggctcagttctgcaaagaaaagaaaatcgagttcgttgttgtcggtcctgaggccccactggccgccggtattgtcggaaatctgagatccgctggggtacagtgctttggcccaaccgccgaggccgcccagcttgagtcttccaagagatttgccaaggagtttatggaccggcacggaatcccaaccgctcagtggaaggcattcaccaagcccgaggaggcatgctccttcatcctctag

SEQ ID NO: 199623 - DNA, 411 bp, synthetic construct
  misc_feature 1..411: note = Description of Artificial Sequence: Synthetic coding sequence
  source 1..411: mol_type = other DNA
atggccgcccgggtgctgatcatcggcagcggcggccgggagcacacactagcctggaaactcgcccagagccaccacgtgaagcaggtactggtcgctcccgggaatgcaggcacagcctgcagcgaaaagatcagcaacactgccatcagtatctccgaccacactgcgctggcccagttctgtaaagaaaaaaagatcgagttcgtagtggtgggccccgaggcgcctctggcagcaggaatcgtcgggaacctccgatcagcaggagtccagtgcttcggtcctactgccgaagcggcacaactggagagtagtaagaggttcgccaaggaatttatggaccgtcacgggatcccaactgcccagtggaaggcctttacaaaacctgaggaagcttgtagcttttag

SEQ ID NO: 199624 - DNA, 1689 bp, synthetic construct
  misc_feature 1..1689: note = Description of Artificial Sequence: Synthetic coding sequence
  source 1..1689: mol_type = other DNA
atgctggtgaagaagatccagcccctggccaaggccaccagccggtctgggtgtaaggtggaccttggaggatttgctggcctgtttgatttaaaggctgccgggttcaaggacccactcctcgcctcaggcaccgatggcgttggcactaagctcaagattgcccaactgtgcaacaaacacgatactataggacaagatttagtggcaatgtgtgtaaacgatatcttagcccaaggggcggagcctttgttctttctggactacttctcctgtgggaaactggatctctcagtaacagaggccgtggtggccggaattgctaaggcctgtggtaaagcaggttgtgccctgttgggcggtgagacggccgagatgccggacatgtaccctcccggcgagtatgacctcgcagggtttgcagtcggagccatggagagagatcagaagttaccccacctggaacgcatcaccgaaggggacgtcgtggtgggcattgccagctctggcctccacagtaatggattttctctggttcgcaagattgtggccaagtctagtctgcaatattccagcccagctcccgatggctgtggcgatcaaaccctgggggacctgctgctgacgccaacgagaatttacagtcactctctgctacccgtgctcaggagtggtcacgtcaaagcttttgctcacattaccggcggtggcttgctggaaaatatcccacgcgtattgccagagaagttgggcgtggaccttgatgcacaaacctggcgtataccaagagtgttctcttggctccagcaagagggccatctatcagaagaagagatggcccggacattcaactgcggagttggcgctgtgctcgtggtgtccaaagagcagacagaacaaatcttgcgcgatatccagcagcacaaggaagaggcctgggtgatcggcagcgtggttgcgagggccgagggaagtcccagagtgaaggtgaaaaatctcatcgagtccatgcagatcaacggaagcgttctgaaaaacggatcactgaccaatcattttagctttgagaaaaagaaggctcgcgtggcagtacttatcagtggcacagggagtaaccttcaggcgcttatagatagtactagagaaccaaattcttctgctcagatagatatagtgataagtaataaagccgccgtggccggattggataaagctgagcgtgccgggatccctacacgcgtgatcaaccataagctctataaaaatagggtggagttcgactctgccatcgacctggtactcgaagagttctcaatcgatatagtttgcttagccggctttatgagaattctgtcagggccatttgtgcagaaatggaacggcaagatgctcaacatccaccctagtttactgccctcttttaaggggtcaaatgcccacgagcaagctttggagactggcgtcaccgttacgggctgcaccgttcacttcgtggctgaggatgtggacgccggccaaatcatcctgcaagaggcagtcccggtgaaaaggggtgatactgtcgctacgctgtcggaaagagtgaagctcgccgagcacaagatcttcccagcagcgttacagttggtggcaagcggcaccgttcagctcggtgagaatgggaaaatatgttgggtgaaggaggagtag

SEQ ID NO: 199625 - DNA, 2265 bp, synthetic construct
  misc_feature 1..2265: note = Description of Artificial Sequence: Synthetic coding sequence
  source 1..2265: mol_type = other DNA
atgagccggcccctgagcgaccaggagaagcggaagcagatcagcgtgagaggcctggccggtgtcgagaacgtcacagagttaaaaaaaaattttaaccggcatctgcactttaccctggttaaggaccgtaatgtcgccacacctcgtgactattatttcgctctggctcacacagttagagaccatctggtgggacgctggattagaacccagcagcattactatgaaaaggatcccaaaaaaatctcaggcgggtggcaaatggaggaggccgacgattggctccgctatggcaacccctgggagaaggcccgcccggaattcaccctgcctgtgcatttttacgggcatgtcgaacatacaagccaaggagcgaagtgggttgacactcaagtagtgctcgccatgccatatgatacaccggtccccggctaccggaacaatgtagtcaataccatgcggctctggtccgccaaagcaccgaacgatttcaacctaaaggattttaatgtcggaggctatattcaggctgtcttggacaggaatctcgctgaaaacatctcaagggttctttaccccaacgacaatttcttcgagggtaaggaacttcgcctgaaacaagaatatttcgtggtagcagctacacttcaggatattattaggcgattcaaatcgtcaaagtttggctgccgcgacccggtccgcactaattttgacgcattcccagacaaagtggctattcaactcaacgatacccacccatccttagctataccagagcttatgcggattctggtggatctggagaggatggattgggacaaggcttgggatgtgaccgtgcgaacttgcgcctacactaatcacaccgttctgcctgaggcactggaaaggtggcccgtgcacctgctcgagacattgcttccacggcatctgcagataatatatgagatcaaccagcgcttcctaaaccgggtggcggccgcctttccaggagacgttgatcgcttgagaagaatgtccttagtggaggagggagccgtgaagaggatcaatatggcacatctatgcattgccggctcacacgccgtcaacggagtggcacgaatccactccgagattctgaaaaagaccatattcaaagacttctacgagctggagccccataaatttcagaacaaaactaacggtatcactccccggcgttggctcgtcctttgcaaccctggtctggccgaggtgattgctgaacggatcggcgaagattttatttcagacctcgatcaattaagaaaattgctctcatttgtggacgatgaggccttcatccgcgacgtagcgaaggttaagcaagagaacaagctgaaatttgccgcctacctggaaagggaatacaaggtgcacattaaccctaactctctctttgacattcaggtcaagcggatccatgagtataaacggcagcttctgaactgtctccatgtaatcacactctacaacaggatcaagcgcgaacccaacaagttcttcgtgccccgaaccgttatgatagggggtaaggccgctcccgggtaccacatggcaaaaatgatcataaggctggtgaccgctatcggtgatgtggtcaatcatgacccagccgtgggcgatcggctgagggtcatttttttagagaattaccgggtgtccctggctgagaaggtgatccccgcggccgacttaagtgagcagatttcaacagcagggacagaggcctcaggcaccggtaacatgaagttcatgctcaatggggccttaactattggtacgatggatggtgctaacgtggagatggccgaggaggcaggagaggagaactttttcatcttcggcatgcgggtcgaggacgtggataagctggatcaacgtgggtataacgctcaggaatactacgatcgcatacccgaactccgccaggtgatcgagcagctcagctctgggttcttcagtcctaagcagcctgacttgtttaaagatattgtcaatatgctcatgcatcacgatagatttaaggtcttcgctgattacgaagattacatcaagtgccaagaaaaagtttctgcattatacaagaaccctcgagaatggactcgcatggtgatcaggaacattgctacctccggcaaatttagcagtgaccgaaccatcgcacagtacgctcgagaaatttggggcgtcgagccttctcgacagagacttcccgctcccgacgaggcaatctag

SEQ ID NO: 199626 - DNA, 3633 bp, synthetic construct
  misc_feature 1..3633: note = Description of Artificial Sequence: Synthetic coding sequence
  source 1..3633: mol_type = other DNA
atgcggagccggagcaacagcggcgtgcggctggacggctacgccaggctcgtacagcagactatattgtgtcaccaaaatccggtaaccggtctcctccccgccagctatgatcagaaagacgcctgggtgcgggataatgtgtattcaattctggctgtgtggggactggggctggcttaccggaagaatgcagacagagatgaagataaagctaaggcatacgaacttgaacagtccgtggtgaagctcatgcgtggcctcctccattgtatgataagacaagtagacaaagtcgaatctttcaagtacagtcagtcgaccaaagactctcttcacgcaaagtataacaccaagacctgcgctaccgtggtgggcgacgaccagtgggggcacttacagctcgatgcaacaagtgtgtacctgttgtttcttgctcagatgacggcctctggattgcatatcatacatagtctggatgaagtgaacttcatccagaacctggtgttctacatcgaggcagcctataagaccgctgattttggcatttgggagaggggggacaagacaaaccagggcatttccgagttaaatgccagttccgtggggatggctaaagcggcactggaagcccttgacgagctagatctctttggagtcaagggaggaccccaatccgttattcatgtactagccgatgaagtccagcactgtcagtcaatcttaaactccctgctccccagagcctccacatctaaggaggttgacgcttccctgctgtctgttgtctctttccctgcatttgccgtggaagacagccagctggttgagttaactaaacaggagataattacaaagttgcagggccgttacgggtgctgtagatttctccgcgatggatacaagacccccaaggaggaccctaaccgtctatattatgaacccgccgaactgaaactgtttgaaaatattgagtgcgaatggcctctcttctggacttacttcattctggacggtgtgttcagcggcaatgccgaacaggtccaggaatacaaggaagctctggaggccgtactgataaagggaaaaaatggggtgccactgttacccgaactgtacagcgtccctccggatcgtgtcgacgaggaataccagaacccacacaccgtcgatcgagtgcctatgggcaaattgcctcacatgtggggccagagtttgtatatccttggctctcttatggctgaaggattcttggcgcccggagaaattgaccctttaaatcgacgtttcagtacagttcctaagccagacgtggtggttcaggtcagcatactagccgaaacagaagaaatcaagaccatcctgaaagacaaaggcatatacgtggaaaccatcgccgaggtctacccaatacgcgtgcagccggctaggatactctcccacatctacagttctttaggatgcaacaatcgcatgaaactttcagggcgaccctacagacacatgggtgtactgggcaccagcaagctatacgacatccggaaaacaattttcacattcaccccccagttcattgatcaacagcaattctatttggcactggataacaaaatgatcgtcgagatgctcaggactgacctgtcctacttgtgcagccgttggagaatgacgggacaacccaccatcacattccccatcagccactcaatgcttgatgaagacggaacttctttgaattctagcatcttggcggctctccgtaagatgcaggacggctattttggcggcgcaagggtacagaccgggaagctgtctgagtttctgaccaccagttgctgcacacatctgtccttcatggacccaggtcctgaaggaaagctctactccgaggattatgatgacaattacgattatcttgagagtgggaactggatgaatgactacgactcaacttctcatgccaggtgtggagacgaggtggccagatatttagaccatctcttggcccatactgcccctcaccccaagctggcccctacaagtcagaaaggggggctggaccgatttcaagcagccgtgcagaccacctgcgacctgatgtcactcgtgactaaagccaaggaactgcacgtgcagaatgtccacatgtatttgcccaccaagttgttccaggcatctcgaccaagtttcaatctcttagatagcccgcaccccaggcaggaaaatcaagtgccctccgttagagtggagatacatcttcctcgagaccaaagtggggaggtggattttaaagcgcttgttctgcagttaaaggagacctccagtttacaggaacaagccgacattctatacatgttatacactatgaaggggccagactggaatacagagctctacaacgaacggtccgcgacggtgcgggaattgcttactgaactttacgggaaagtaggcgaaatccgtcactggggcctgatacgatacataagcggcatattgcggaaaaaagttgaagcactggacgaagcatgtacagatcttctgagccaccagaaacacctgaccgtcggtctgcctcctgagccccgggaaaaaactatctcggcaccacttccctacgaggcacttacccaactgatcgatgaggctagcgaaggcgatatgtctatcagtatcctgacccaagagatcatggtttacctcgctatgtatatgcggacacagcccggactcttcgcggagatgtttagattacgcatagggctgatcattcaagtcatggcgacagaactcgcacattcgctccgctgtagcgccgaggaggccacagaaggccttatgaatctgtctccgtctgccatgaagaacctcctgcaccacatcctgagtggaaaagagttcggagttgaaagatctgtaagaccgacagactctaacgtttcacctgcgatcagcatccacgagattggagcagtgggtgccacaaagacagagcggactggtatcatgcagctcaagagcgagattaaacagtcccccgggacatcgatgaccccatcttcaggaagcttccccagcgcatacgaccagcaatcatcaaaggattctcggcagggacaatggcagcgccgacggagactagacggagctttaaatcgagtgccagtaggattctaccagaaagtttggaaagtgctacagaagtgccacggacttagcgtcgagggctttgtcctccccagctcaaccactagggagatgacaccgggtgagattaaattttccgtgcacgtggaatccgtgctgaatagagtgcctcaacctgagtatagacagctgctcgtggaggcgatcttggtcttaacaatgcttgccgacatcgagatccactccatcggctctataattgccgtggagaaaatcgtccatattgctaacgatttgttcctgcaggagcagaaaacactgggggctgacgataccatgcttgctaaagaccctgctagcggaatttgcaccctactgtacgactctgccccctctggccggtttgggacgatgacctatctgtctaaggcagccgccacttacgtgcaagagttcctgccacattcaatatgcgccatgcaatag

SEQ ID NO: 199627 - DNA, 3723 bp, synthetic construct
  misc_feature 1..3723: note = Description of Artificial Sequence: Synthetic coding sequence
  source 1..3723: mol_type = other DNA
atgcggagccggagcaacagcggcgtgcggctggacggctacgccagactcgtgcagcaaacgattctgtgtcaccagaacccggtcacagggcttctgcccgccagttatgaccagaaggatgcttgggtgagagataatgtgtacagcatactggccgtctggggattggggctggcctaccgcaagaatgccgatagggatgaggataaggccaaagcatatgagctcgagcaatcagtggtcaagttgatgcgtgggctgctgcactgtatgatccgccaggtggacaaggtcgagtcatttaagtacagtcagtcaaccaaggactctcttcacgcaaaatacaatactaagacatgtgcaacggtggtgggagatgaccagtggggacatttacagcttgacgccacgtccgtatatctactgttcctggcccaaatgacggcttcagggctgcatattatccacagcctcgatgaggttaacttcatccagaaccttgtgttctatatcgaggctgcatacaagactgccgactttggcatttgggagcgaggggacaagaccaaccagggtatctctgagctgaacgcaagttcagtgggcatggccaaggcagccctggaagctctggacgagctggatctgttcggggtgaagggcggtccccaatccgtgatccacgtcctcgcagatgaagtccaacattgccagtccatcctgaacagtctgctgcctcgtgcctcaacttctaaggaagttgatgcaagtcttcttagtgtggtgagcttccccgccttcgcggtagaagacagtcaactagtggagctgactaagcaggagattatcactaaactgcagggacgctacggctgttgcaggtttttgcgagacggctataagacccctaaggaagacccaaacaggctgtactatgaacctgccgaactcaaactattcgaaaatatcgagtgcgagtggccactcttttggacttacttcattctcgacggggtctttagcggcaatgctgagcaggtgcaggagtataaagaggcacttgaagctgtgctaatcaagggaaagaatggagtaccactcctacccgaactctacagcgttccccccgatagggtcgatgaggagtaccagaacccccacaccgtggatagggtgccaatgggaaagctgccacacatgtggggacaaagtctttatatcttgggctcactgatggctgaggggtttctggcaccaggcgagatcgaccccctgaaccggcggttcagcactgtccctaagcccgacgtcgtggtgcaggtgtcaatcctagccgaaaccgaagaaataaaaaccattttgaaggacaaggggatctatgtggagacaatcgcagaagtgtatcccatccgcgtgcagcctgccaggatattaagtcatatttacagctccctcggctgcaataacaggatgaaactgagtgggcgaccctaccgccacatgggcgtgttagggactagcaagctgtatgacatccgaaagaccattttcacattcacccctcagtttatagatcagcaacagttctacttagcattagataataagatgattgtggaaatgcttcgaaccgatttaagttacctgtgtagccgatggagaatgacaggccagcccacgattacgttcccaattagccattctatgctggatgaggatggcaccagcttgaactcctccattctggcagccttacgcaagatgcaagatgggtacttcgggggcgctcgcgtgcaaactggcaagctaagcgagttccttacaacatcttgttgtacacacctctctttcatggatcccggtcctgaggggaagctttactccgaagattacgatgataattatgactacctggagagcggcaactggatgaatgactacgatagcactagccatgctaggtgtggagatgaggtggctcgttacctggatcatttgctggcccacaccgcccctcaccccaagctggctcccaccagtcagaaaggcggcttagaccgatttcaggctgcagtgcaaacaacttgcgaccttatgagcttggtgaccaaggctaaggaactgcacgttcagaacgttcatatgtatctgccaacaaaactctttcaggcttcccgtccatcatttaatctgctcgactcaccgcatccacggcaggagaaccaggtccctagtgtgcgggtagaaatccatcttccaagagatcagagcggggaggttgattttaaggccctggtgctccagctgaaagaaacctcttcccttcaagaacaggctgatattctctacatgttgtatacgatgaagggccctgattggaacacggagctttacaatgaacgcagcgcgaccgttagagaactgctgacggaattgtatggcaaagtgggggaaatccggcattgggggttgatccgatacatctcaggtatcctcaggaaaaaggtcgaggcgctggatgaggcttgtacagatcttttgagccaccagaagcacctaaccgtggggttgccccctgaacctagagaaaaaacaattagcgcaccattaccctacgaggccttaactcaactcattgatgaagcatctgaaggagatatgtcaatttccatattgacacaggagatcatggtttacctagccatgtatatgcggacgcagccgggactgttcgccgagatgttccgcttgcggattggtctgattatccaggttatggcgaccgagttagcccatagtttgcggtgcagcgcagaagaagccaccgaaggactcatgaacctctccccctcggcgatgaaaaatcttctccaccacattctgtccggaaaggagtttggcgtggagaggtctgtaaggcctacggactctaacgtatcacctgccataagtatccacgagatcggggctgtgggcgctactaaaaccgagcggacaggcattatgcagctaaaatctgaaatcaagcaggtggaatttaggcggcttagcatttccgccgagagccagagtaatggaggacaccccctggggattgatctcatgtctcctagctttatgagccccggaacttcaatgacccctagctctggtagcttcccttcagcctacgaccagcaatcctctaaagatagtcggcagggacagtggcagcgcagacgaagattggacggagccttaaatcgggtgcctgttggcttctaccaaaaggtttggaaggtgctgcaaaagtgccacggtctgagcgtggaagggttcgtgctcccttccagtactacccgcgaaatgactccaggtgagatcaaattctcagttcatgttgagagcgtcctcaacagggtgccacaacccgaataccgacagctactggttgaggccattttagtgcttacgatgttggcagacatcgaaatccactccatcgggtctattatcgctgtggagaagatcgtccacatcgccaatgacctgtttctgcaggaacagaaaacgctgggggcagacgacacgatgttagctaaagatcctgcttcaggtatatgcaccttgctgtatgacagcgcccctagcggccggttcggtaccatgacatatctaagtaaggccgccgcaacgtacgttcaggagttcctcccccactcaatctgcgcaatgcagtag

SEQ ID NO: 199628 - DNA, 3672 bp, synthetic construct
  misc_feature 1..3672: note = Description of Artificial Sequence: Synthetic coding sequence
  source 1..3672: mol_type = other DNA
atgcggagccggagcaacagcggcgtgcggctggacggctacgcccgcttagtccagcagacaatactttgtcaccagaacccagtcaccggccttctgcccgcatcttatgatcagaaggacgcttgggttcgtgataatgtgtactctatactggcagtctggggactgggcctggcctacaggaagaacgctgacagggacgaggataaggccaaagcctacgagttggagcaatcagtggtgaagcttatgcggggactccttcactgcatgatccgtcaggtcgacaaagtcgaatcatttaaatatagtcaatctacaaaagactctctgcacgccaaatacaacacaaaaacgtgcgcgactgtggtcggcgacgatcagtggggccacctacagctcgacgccacaagcgtgtacctgctttttctggctcaaatgaccgccagtggactacacattatccatagtctggatgaggtgaattttatccagaaccttgtgttctacatcgaggccgcttataagacagcggatttcggtatctgggagcggggcgataaaacaaaccaggggatttcggagctgaatgcttcctccgtcgggatggctaaagccgcacttgaagcattggatgaactggacctatttggcgtaaagggcggaccacagtctgtcattcatgtcctggctgatgaggtgcagcactgtcagtctattctgaatagcctactccccagagctagtactagcaaggaggtcgacgcctcccttctatccgtcgtatcatttcccgcgttcgccgtcgaggactcacagctggtagaattgacaaagcaagagatcattacaaaactgcagggcagatacggctgctgcaggtttctgagagatggatataagaccccaaaggaagatccaaatcgcctgtattacgagccggcagaactgaagttatttgaaaatatagaatgtgagtggccacttttctggacctacttcatcctggatggcgtatttagtggcaatgccgaacaagtacaggagtacaaagaggccctagaagccgtactgattaaaggaaagaacggtgtgccgctgcttcctgaattatattcagtgcctccggatcgcgtggatgaagaataccagaacccccacaccgttgacagggtaccgatgggaaagctgcctcacatgtggggtcaatcattatacatacttggctccctgatggctgaaggtttcctggctccaggcgaaatcgaccccctaaataggaggttctctactgtgccaaagcctgacgttgtggttcaggtctcaatccttgccgaaacagaggaaattaagacgatcctgaaggataaggggatctatgtggagaccatcgccgaggtgtatcccattagagtccaaccagcccgcattctgtcgcatatatactctagtctgggctgtaacaacagaatgaagctcagcggtagaccctacaggcacatgggcgtcctcggcacaagtaaactgtatgacattaggaagacaatctttacctttaccccccagttcattgatcaacagcagttctacctcgcgctggataataagatgattgtggagatgctcagaactgacctctcgtatctgtgtagtaggtggaggatgacaggacagcccaccatcacctttcctatctcccattctatgctcgatgaggacgggacttccttaaactcaagtattcttgcagccctgagaaagatgcaggatgggtactttggaggcgcccgggtgcagactgggaagctgtcagagttcctgactacaagttgctgtacccatctgtcttttatggaccccggacctgaggggaagttgtatagcgaggattacgacgataactacgattacctagagtccggtaactggatgaacgactatgattctacatcacatgctcgctgtggcgacgaggtagccaggtacttagaccacctgctggcgcataccgccccacaccctaagttagcacccacctctcagaaagggggattggatcgctttcaggctgccgtccagacaacgtgcgatctgatgagccttgtcacaaaagcgaaggagctccacgtgcagaacgtgcacatgtacctacccacgaagctctttcaggcatcgcgacctagctttaacttactcgatagtccccatcctaggcaggaaaatcaagtgcccagtgtcagggtcgagattcacctcccaagagatcaaagcggagaagtggattttaaggctctggtgttgcagttgaaggagacctcttcattgcaggagcaagccgatatactgtacatgctctatacaatgaaaggcccagattggaatactgagctgtacaatgagcgctctgctacagtccgggagcttttaaccgagctgtatggtaaggttggagaaattcgacactggggactgattagatatatctccgggattcttagaaagaaagttgaggctctggatgaggcctgtacagatcttctgagccaccagaagcacttaacagttggattgccaccggagcctagggagaaaacaatctctgcgccactgccatacgaggcattaacccaacttatcgatgaggcatccgaaggagacatgagtatctcgattctgacacaggaaatcatggtgtacctagccatgtatatgcgcacccagcctgggctgtttgccgaaatgtttagactgaggattggtctcattatccaggtcatggccaccgagctggcgcactccttacgatgtagtgccgaggaggctacagaaggacttatgaatctctcaccttccgctatgaaaaatctgttgcaccacatcctctcaggtaaggaattcggggtggagagatcggttcggcccaccgactcgaacgtgtcccccgctattagcatccacgagattggcgctgtaggcgctaccaagacagagcgcaccggcatcatgcagctcaagagtgagattaagcaggtagagttccgaaggctgtccatatctgccgaaagccaaagccctggtacatctatgacaccatcttccggctcattcccatcagcgtacgatcagcagagcagcaaagactcaagacaggggcagtggcaaaggaggcgccggttggatggagccttgaaccgggtcccagtgggtttttaccagaaggtatggaaagtgttgcagaagtgccatgggctctccgtagaaggctttgtgctgccaagctcaactactcgcgaaatgacccctggtgagattaaatttagtgttcacgtggaatccgttctgaatagggttccacagcccgagtaccggcaactgttggtggaggccatcctagttctgactatgctggccgatatcgagatccactcaatcggatcaataattgccgttgaaaagatcgtacatattgccaatgacctcttcctgcaggagcaaaaaactttgggcgccgacgataccatgctagctaaagaccccgcctccgggatttgtactttactctacgattctgcaccgtcaggtcgtttcggtacaatgacttacctcagcaaagctgccgccacctacgtccaagaattcctgcctcattcgatctgtgctatgcaatag

SEQ ID NO: 199629 - DNA, 3546 bp, synthetic construct
  misc_feature 1..3546: note = Description of Artificial Sequence: Synthetic coding sequence
  source 1..3546: mol_type = other DNA
atgcggagccggagcaacagcggcgtgcggctggacggctacgccaggctagtacaacagacaatactctgccaccagaaccctgtcacaggattactacctgccagctatgaccagaaggatgcctgggtccgagacaacgtgtacagcattttagcagtctggggtctgggtttagcttatcggaagaatgccgatagggatgaggacaaggctaaagcttatgaactcgagcaatctgtggtgaagttgatgcggggtttgctccactgtatgatcaggcaggtggacaaggtggagagctttaagtatagtcagagcactaaagattctctgcatgcaaaatataacaccaagacgtgcgctactgtagtcggagacgatcaatggggacacctccagctggacgccacgtctgtgtatctccttttcctcgcacaaatgacagcatctggcctccacataattcactctctggacgaagtgaattttatacaaaatctcgtcttttacatcgaggctgcctacaagacggcagactttggcatatgggagagaggcgacaagaccaaccaaggaataagtgagctcaacgcttcttccgtgggaatggctaaagctgcactcgaggccttggacgaactcgacctttttggcgtcaaaggggggcctcaaagcgttatccacgtcttagcggacgaggtccagcactgccagtcaatattgaattccttgttaccgcgggcctcaacctctaaagaagtagacgcatcacttctgtcagtcgtcagcttccccgccttcgctgtcgaggacagtcagctggtggaactgactaaacaggagataattacaaagctgcagggccgctacggctgttgtcgctttcttagagacggttataaaacacctaaagaagacccgaatcgcctctattacgagcccgcagagctgaagttgttcgagaacatcgaatgcgaatggccattgttctggacatatttcattttggatggagtgttttcagggaatgcagagcaggttcaggagtataaggaggccctggaagcagtgctgattaaggggaagaacggagtgcctctgctccctgaactatattccgttcctcctgaccgggtggacgaggagtaccagaatccccacactgtagacagggtgcctatgggtaagttgccgcacatgtgggggcagtccctgtacatactcgggtctctgatggccgagggctttttagccccaggggagatagatcccctgaaccgccgattttccaccgtaccgaaacccgatgtcgtggtgcaggtctctatcctcgccgagacggaggagatcaaaaccattctgaaagacaaaggaatttatgttgaaactatcgcggaagtataccctataagagtgcagcccgctcgaatactgagccacatatactcctctttaggctgcaacaaccggatgaagcttagcggcagaccgtacagacacatgggagtgcttggaactagtaagctgtacgacatcagaaagacgatcttcactttcacacctcaatttatcgatcagcagcagttctacttggcactggacaacaaaatgatcgtcgagatgttacggactgatctgagctatctgtgcagtcgctggaggatgactggacaacccaccattacgttccctatcagtcattccatgcttgatgaagacggtacctccctgaacagttcaattttggctgccttgcgtaaaatgcaggatggctactttggcggcgcccgtgttcagacaggcaagctgagtgagtttttgaccacatcctgctgcacgcatctttcattcatggaccctggaccagaaggtaagctatactctgaggactacgatgataattacgattacttagagtctgggaattggatgaatgattacgacagcactagccacgatgtccatatgtacctccccaccaagctcttccaagctagtcgaccctcctttaaccttctggatagcccacaccctcggcaagaaaaccaagtcccctctgtgagggtggagatccatctgcctcgagaccagtcaggcgaggttgacttcaaggccctggtgttacagctcaaggaaacatcgagtctacaggaacaggccgatattctctatatgctgtatacaatgaagggtccggattggaatacagagttatacaatgagcgctccgccacagttagggagctcttaacagagctctacgggaaggtgggcgagattaggcactggggtttgatccggtacatttcgggcattctcaggaaaaaggtggaagcactcgacgaggcttgcactgaccttctgtcccaccagaagcacttgacagttggactgcctccggagcctcgcgagaaaacgatctcagcgcccctcccgtacgaggctctaacacagctaattgatgaggcctcagaaggcgatatgagtatctccatccttactcaggaaattatggtctacttggctatgtatatgcgcactcagcctggactgttcgccgaaatgtttaggttgcgaatcggccttatcattcaggtcatggccacggaactcgctcattctctgcggtgcagcgctgaggaggccaccgagggcttaatgaaccttagtccatctgctatgaaaaacctgttacatcatatcctgagcgggaaggagttcggggttgagcgctccgtgcgacctactgactccaacgtgagtccagcaatttccattcacgagataggagccgtcggcgctactaaaacagagagaaccgggatcatgcagctgaagtcagaaataaagcaagtcgagttccggaggctgtcaatcagcgccgaaagccagtcgaacggaggtcacccactgggcatcgacctaatgtcaccctcattcatgagcccgggaacttccatgaccccaagttcaggaagcttcccatccgcatacgatcaacagagttcgaaagactcacggcagggacagtggcaaaggcggagacgtctggatggagccctgaaccgggtgcctgtcggcttctaccagaaggtgtggaaggttctccagaagtgccatggccttagcgtggaggggtttgtcctcccttcgtctactactagggagatgacgcctggtgaaataaaattttctgttcacgttgagagcgttctgaatcgagtgccccagccggagtaccgccaactgctggtggaagcgattttggtattaacaatgttagccgacattgagattcacagcataggcagtatcatcgcagtcgaaaaaattgtgcatatcgcaaacgacctgttcctgcaggagcagaaaacactgggcgctgatgacaccatgctcgcaaaggacccggcttctggaatctgcactctcctgtacgactcagcaccctcagggaggttcggtaccatgacgtatttgtccaaggccgcagccacctatgtccaggaatttctgccgcattctatctgcgctatgcaatag

SEQ ID NO: 199630 - DNA, 3456 bp, synthetic construct
  misc_feature 1..3456: note = Description of Artificial Sequence: Synthetic coding sequence
  source 1..3456: mol_type = other DNA
atgcggagccggagcaacagcggcgtgcggctggacggctacgcccgactcgtgcagcaaactattctgtgtcatcagaacccggtcacaggattactgcccgccagctatgatcagaaagacgcttgggtgcgggataatgtgtactcgattctagcagtgtggggcctaggcctggcttaccggaagaatgccgaccgcgacgaggataaggctaaagcatacgaactcgagcagagcgtagtgaagctgatgaggggcctattgcactgcatgatccgccaggtggacaaggtggagtctttcaaatattctcagagcaccaaggatagcctccacgcaaagtacaataccaaaacatgtgctactgtggttggtgatgatcagtggggccacctgcagcttgacgccacgtctgtgtatctccttttcctagcacaaatgaccgcctccggtctgcatattatccattctctggatgaagtcaatttcattcagaaccttgtcttctatatagaggcagcctacaaaaccgctgattttggaatttgggaacggggagacaagacaaaccagggcatctccgagctgaacgcctcaagcgtgggtatggccaaagccgccctcgaagcactggatgagctggatttattcggggtgaaaggaggccctcaaagcgtgatccacgtgctggctgacgaagtccagcattgtcagagtatactgaattctctcctcccgagggccagcacctctaaggaagtcgacgcctcactgctgagcgtggttagcttcccagccttcgccgtcgaagacagccagttggtagagctgactaagcaagaaatcattactaaactgcagggccgctatggatgttgtagattcctccgcgatggatataagacacctaaggaagatcctaatagactatattatgagcctgccgagctcaaacttttcgagaatatagagtgcgagtggcctctattttggacttacttcattcttgatggagtttttagcggcaacgcagaacaagtccaggagtataaggaggccctagaagcagtcctgattaagggcaagaatggggtgccccttttgccagagttgtacagcgtgccgcccgaccgtgttgatgaggaatatcagaacccccacacagtggaccgcgtacccatgggtaaactcccccatatgtgggggcagtctctttatatactgggttctctgatggcggagggttttcttgcccccggggaaattgatcctctcaacaggaggttcagcaccgtaccaaagcctgacgtagtcgtgcaagtgagcatcctggccgaaaccgaggagattaaaacaatcctgaaggacaagggcatctatgttgaaacgattgcggaagtctatccaatcagggtacagcctgctaggattctgagtcacatttactcctctctaggttgcaataaccgaatgaagctaagcgggcggccttataggcatatgggggtcctgggaacaagcaagctgtacgacataaggaaaactatctttacattcactcctcagttcatagaccaacagcagttctacctggcactggacaataaaatgatagtagaaatgcttaggacagacctatcctacctctgcagcaggtggcgcatgacaggtcagccaactataactttccctatctctcacagcatgttggatgaggacggcacctccctgaattccagtatcctcgccgcactacgtaaaatgcaagatggatacttcggaggcgcccgggtccaaaccggcaagttgtccgagtttcttactacatcctgttgtacgcatctgtccttcatggaccccggacctgagggtaagctatactctgaggattacgacgacaattacgattacctggagtcaggcaattggatgaatgattacgattccacaagccacgacgtccatatgtacctgcccactaaattgtttcaagcttcaaggccgtctttcaatctcctggacagtccgcaccctcgacaggaaaaccaagttccatcggttcgagtggagattcatttaccaagagaccaaagcggtgaagttgattttaaagctttagtactccagttaaaggagacaagctctctccaggaacaggctgacatcctctacatgctctatacaatgaagggaccggactggaacactgaactctacaatgaacggtcagctactgtacgggagctcctgaccgagctttatgggaaagtgggggaaatccggcattggggacttatccggtatatctctggtattctgaggaaaaaggtggaggccctggacgaagcatgcaccgatctactctcacatcagaagcacctcaccgtgggattgccccctgagccacgtgaaaagacaatctctgctccgctcccgtatgaagccttgacccagttgatcgatgaagcaagcgaaggggacatgagtattagtattctgacccaggagatcatggtctaccttgcaatgtacatgaggactcagcccggcctgtttgccgagatgttccggcttcgaatcggcttgattatccaggtaatggctacggagctcgcacactcactacgttgctcggccgaagaggcaactgagggcctgatgaatctgtccccaagcgcgatgaagaacctgttgcaccatattctgtccggcaaggagtttggagtggagcgcagcgttagaccaaccgattccaacgtgagtcccgccatctctattcacgaaataggcgcggtgggggctacgaagaccgagagaacgggaatcatgcagctcaaatccgaaatcaagcagtcccctgggacctcgatgactccctctagcggctctttcccttctgcttacgatcagcaatccagcaaggatagtagacaaggccagtggcaaagacgccgccggctagatggggcattgaaccgggtgccagtggggttttaccagaaggtgtggaaagtattgcagaaatgtcacggactgtcagtggaagggtttgtcctgccttcatccactacacgcgagatgacccctggggaaatcaaattcagtgtgcatgtagagagcgttcttaaccgcgtgccacagccggagtacagacagcttctcgtggaagctattctggtgctgacgatgctcgctgatattgaaattcacagcatcgggtctattattgcagtggagaagattgtacacattgcaaacgacctgtttctccaggaacagaaaaccctgggagccgatgacaccatgctggccaaagatcctgcttccggcatctgcactctcttatatgattccgccccatctgggcgtttcggcacgatgacttatttaagcaaggccgccgccacttacgtacaagaatttttacctcacagtatatgtgccatgcagtag

SEQ ID NO: 199631 - DNA, 1164 bp, synthetic construct
  misc_feature 1..1164: note = Description of Artificial Sequence: Synthetic coding sequence
  source 1..1164: mol_type = other DNA
atgacccgggacgaggccctgcccgacagccacagcgcccaggacttctatgaaaactacgagcccaaagaaatactcggaagaggcgtatctagtgtggtacgacgctgtatacacaaaccaactagccaggagtacgcagttaaggtaatcgatgtgacaggcggcggcagcttctcacctgaagaggtgagggaactccgggaagccaccctaaaagaagtggatatcctccgcaaggtatccgggcatcccaacatcatacagctcaaagatacgtatgaaaccaacaccttctttttcctcgtgtttgaccttatgaagcgaggagaactgttcgattacctgacagaaaaggtcacattgtccgagaaggagaccaggaaaatcatgcgcgcgcttttggaagtcatctgcacactgcacaaattgaacatagtgcaccgcgaccttaagccagagaacattctgcttgacgacaacatgaatatcaaactcacagactttgggtttagttgtcagctggaacctggcgagagacttagggaggtgtgtggaacaccgagttatcttgcacccgaaattatcgaatgctctatgaacgaagatcaccccgggtatggtaaagaggtagacatgtggtctacgggagtgatcatgtatacccttctggcaggctccccccctttctggcacagaaagcagatgctgatgttgagaatgatcatgtctggcaactatcagtttggctcaccagagtgggatgactactcagacaccgtcaaagatctcgtgtcaaggtttctggtcgtgcagccccagaaccggtacactgcagaggaggcgctggctcacccatttttccaacaatatctggttgaagaagtgagacatttctcacctcgcggcaagtttaaggtgattgcgttgacagtactggcaagcgtgaggatttactatcagtaccgaagggtcaagcctgtcactagggagatagttatcagggatccctatgctttgcggcccctccggcgcctcatcgatgcatacgcatttaggatctatggacattgggttaaaaaaggccagcaacagaaccgcgccgccctgtttgaaaatactcctaaagcggtgcttctgagcttagcggaagaggattactag

SEQ ID NO: 199632 - DNA, 1260 bp, synthetic construct
  misc_feature 1..1260: note = Description of Artificial Sequence: Synthetic coding sequence
  source 1..1260: mol_type = other DNA
atgacccgggacgaggccctgcccgacagccacagcgcccaggacttctacgagaattacgagccgaaggaaattctcggaaggggcgtctcttctgttgttagaagatgtatccataaacctacatcccaagaatatgctgtgaaggtaatcgatgtgactggcggagggtctttctctcctgaagaagtgcgcgaattgagggaagcgactctgaaggaagtggatatcctgcgcaaagtatctgggcatcccaatattatccagctcaaggacacttatgaaacaaatacattttttttcctggtcttcgacctgtgggaggataccgacactatggaaatggaacaaaagtggtgcctcgggtgggattctcccaagtcaacaaatttccgcgcgcagggccgggcaaggatgaagcgcggagaattgttcgattacctaaccgagaaagtgaccctatctgagaaggagacaaggaagatcatgcgggctctgttggaggtgatctgtactctgcataaactcaacatcgtgcacagagatctgaagcccgaaaatattctcctggacgataatatgaacattaaacttaccgatttcgggttctcttgccaactcgaacccggtgagcggctgagggaggtgtgcggtaccccctcctaccttgctccggagatcatcgagtgttccatgaatgaagaccacccgggctacggtaaggaagtcgatatgtggagcaccggagtcatcatgtatactctcctcgctggcagtcctcccttctggcaccgcaaacagatgcttatgttacgtatgattatgtctgggaattatcagttcgggtccccagagtgggacgattattcagataccgtgaaagatttagtgtcccggtttttggtcgtgcagcctcaaaacaggtatactgccgaagaggccttagcgcaccctttcttccaacagtatctggtggaggaagttcgacacttctcgccgcgaggcaagtttaaggtgattgcattaactgtgctggcatctgtacggatctactatcagtaccgtagagtgaaacccgtcacccgggaaatcgtaatccgagacccgtatgcactgcgccccttacggcgtcttatcgacgcttacgcttttcgaatctacggccattgggttaaaaagggacaacagcagaatcgggccgcactgtttgagaatacccccaaggccgtcctactatccctagcggaagaggactattag

SEQ ID NO: 199633 - DNA, 1002 bp, synthetic construct
  misc_feature 1..1002: note = Description of Artificial Sequence: Synthetic coding sequence
  source 1..1002: mol_type = other DNA
atgcacccccaggcccacgagcccggcgtgcggcgggagggccaccgaaggcacaggtggcggcagctccagccgggcgggggcgctggagcggcgcggtctcacgccgaggggggcgggcaccccgctcaaggcttgcgggcccctcagcaccagatgaagcggggagagctgtttgattacttgaccgagaaggtcacacttagtgaaaaggagacaaggaagattatgagggccctgcttgaagtgatttgcactctccacaagcttaatattgtgcacagagacttgaaacccgagaatattctgttggacgacaatatgaacattaaacttacagacttcggattttcatgccagctcgagccaggtgaacgattgcgtgaagtttgtggcacaccatcctaccttgccccggagataatagaatgcagcatgaacgaagaccaccctggatatggaaaagaggttgacatgtggagcaccggcgtgatcatgtacactctcttagccgggtctcccccattctggcacaggaagcaaatgcttatgctgagaatgattatgtcgggcaattaccagttcggcagccctgaatgggatgattactccgatactgtgaaggaccttgtgagtcgctttctggtggtccagccacagaatcggtataccgctgaagaggctctggcgcacccgttcttccaacagtacttggttgaagaggttcggcatttcagtcccaggggtaagtttaaggtgattgcgttgaccgtgttagcttccgtgcggatatattaccagtatagacgggtaaaaccagtgactagggaaatcgtcattcgcgacccatatgcgctaagacccctacgaagactgatcgatgcttacgctttcagaatctatggccattgggtcaaaaagggccagcagcagaacagggccgccctcttcgagaatactcctaaagcagtgctcctatcgctggccgaagaggattactag

SEQ ID NO: 199634 - DNA, 2529 bp, synthetic construct
  misc_feature 1..2529: note = Description of Artificial Sequence: Synthetic coding sequence
  source 1..2529: mol_type = other DNA
atgagccggcccctgagcgaccaggagaagcggaagcagatcagcgtccggggactcgctggcgtggagaatgtgaccgaactaaagaaaaacttcaatcgccacctgcacttcactctggttaaagatcggaacgtggctacacctcgcgattactacttcgctctcgcgcacacagtgcgggaccatcttgttggcagatggatccggactcaacagcactactacgaaaaagaccccaaacggatctactatctgagtctcgagttttatatgggccggacattgcagaacactatggttaatctggcactagaaaatgcctgcgatgaggctacataccaactgggactggacatggaggaacttgaagagattgaggaggacgcggggctgggtaatggtggcctcgggagactggcagcatgtttcctggactcaatggccacactaggtctagctgcttacgggtatggcatacgctacgaatttggaatttttaatcagaaaatcagtggtggctggcagatggaagaagccgacgactggctgaggtatggaaatccgtgggaaaaggctcggcccgagtttacccttcccgtgcatttttacggacacgtggagcacacaagtcagggcgcgaagtgggtggatactcaggtggtgctggctatgccctacgacacgcctgttccaggatatagaaacaatgttgtgaacactatgagattgtggtccgcaaaggcccccaacgatttcaacctgaaagactttaatgtgggaggctatattcaggcagttctcgatcggaacctggcggaaaacatcagtcgagttttgtacccaaatgataatttcttcgaaggaaaggagctgcggttgaaacaggaatatttcgtcgtggccgctacattacaggatataatccgcaggttcaagtctagcaagttcgggtgccgcgaccctgttagaactaacttcgacgccttccccgacaaagtggcaatccagcttaacgacactcatccctccctggccatccctgaattgatgcggattctggtagacctggagcgcatggactgggacaaagcttgggacgtgacagtgcggacttgcgcctacacaaaccacacagtgttgcctgaagctcttgagcggtggcccgtgcacctgctggagaccctgctgccacgacacctgcagattatatatgagataaatcaacgattcctaaacagggtggccgctgcattccccggagatgtggacagacttcgtaggatgtccctagtggaagaaggcgcggttaagaggattaacatggcccatttatgcattgcgggttcccacgcagttaacggtgtggcccggattcactcagagattctgaagaaaaccatcttcaaggatttctatgagctggagccacacaaattccagaacaagaccaacgggatcactccaaggaggtggctggtgctgtgtaaccccggactggcggaagtgattgcagagaggatcggcgaagactttatttctgatctggatcaactaaggaagctgttgtcatttgtcgacgatgaagccttcatccgggacgtcgctaaagtgaagcaggaaaataaacttaagtttgccgcttatttggagcgggagtacaaagtgcatatcaaccccaacagcctcttcgatatccaagttaaaaggatccacgaatacaagaggcaattgctcaattgtttgcacgtgatcacactgtataataggataaagcgcgaacctaacaagttttttgtcccaagaacagtgatgatcggggggaaagctgcacctggataccacatggcaaagatgatcattagactggtgactgcaattggtgacgtggtaaaccatgatccggcagtgggcgataggctgagagttatttttctggagaactatcgggttagtttggctgagaaagtgatccctgcagcagacctgtctgaacagatttccaccgctgggaccgaggcctcaggcaccggcaatatgaagtttatgctaaatggggcccttactatagggactatggatggcgccaacgttgagatggccgaggaggctggagaggaaaactttttcatctttggcatgcgcgttgaagacgtggacaaactcgaccagagaggctacaatgcacaggaatactatgacagaatacccgaactgaggcaggtgattgagcagctgagcagcggttttttcagcccaaagcaaccagacctgttcaaagacattgtcaacatgctcatgcaccatgaccggttcaaagtgttcgctgactacgaggattatattaaatgccaggagaaagtaagcgctctctataaaaaccccagggaatggacccgaatggttattaggaatatcgcgacgagcgggaagtttagttctgacagaacaattgcccagtatgcacgcgagatctggggggtcgaaccgtcaaggcagcgcctgcctgctccggacgaggcaatctag

SEQ ID NO: 199635 - DNA, 2499 bp, synthetic construct
  misc_feature 1..2499: note = Description of Artificial Sequence: Synthetic coding sequence
  source 1..2499: mol_type = other DNA
atgagccggcccctgagcgaccaggagaagcggaagcagatcagcgtaagaggcctagccggggttgagaacgtgactgaacttaaaaaaaattttaatagacacttacactttactctcgtgaaggaccggaacgtcgccacccctcgtgactattacttcgccctggcccataccgtgagggaccacttggtagggcggtggatccgtacccagcagcattactatgagaaggatcccaaaagaatttactatttatctctggagttttatatgggaaggacactgcagaacactatggtcaatttagcactggaaaatgcatgcgatgaggccacttaccaggtcgggcttggtcgcctggcagcctgtttcttggactcgatggccaccctaggactggccgcctacgggtatggcatccggtacgaattcggcatcttcaaccagaagatcagcgggggctggcagatggaagaggccgacgattggctgcgctatggaaacccctgggagaaggccaggcctgaattcacgctcccagtacatttttatggacatgtcgaacacactagccagggggcgaagtgggttgatacacaggtggttctcgcaatgccctatgatacccccgtgcccggctatcgaaataatgtggtgaacactatgcggctctggtcagccaaagcccctaatgatttcaatcttaaggattttaatgtgggagggtacatccaggcagttctcgacagaaacctcgccgaaaacatcagtagagtgttgtaccccaacgataacttcttcgagggcaaagagctccgattgaaacaggaatattttgtggtggccgcaacactgcaggacattatccgtagattcaaaagctcgaaattcggctgtcgcgatcccgttcgtactaactttgatgcattccccgataaagttgcgattcagctgaacgacacccatcctagcctcgccatccctgagctgatgcgaattctcgtagacctcgagcggatggactgggataaggcatgggacgtgacagttcggacgtgcgcttacaccaatcacaccgtgctcccggaggcattagagagatggcccgtacatctgctggaaacactgttacctaggcacctgcagatcatatatgagatcaaccagagattcctgaatagggtcgccgctgccttcccgggagacgttgataggttaaggaggatgagtctggtggaggaaggtgccgtgaagcgaatcaacatggcccacctctgtattgcaggttcgcacgctgtgaatggcgtcgcaaggatccatagcgaaatcctcaagaaaactatatttaaggatttctacgaactggagccacataaatttcagaataagactaatggaatcacgccgaggagatggctggtgctttgtaaccctggcttggcggaagttattgccgaacgcatcggcgaggactttataagtgatttagatcaactcagaaaattgttatcattcgtggacgatgaagcctttatccgagatgtggccaaagtgaaacaggaaaacaaactcaaatttgccgcctatttggaacgcgagtacaaggtccacatcaaccctaatagtctgtttgatatccaggtgaaacgcatccacgaatacaagcggcaactccttaattgcctccacgtgatcacactatacaatagaatcaaacgcgaacccaacaaatttttcgtcccccggacagtcatgattgggggtaaggcagcccccggctatcatatggctaagatgatcatccgcctggtgactgctatcggtgatgtggtgaaccacgatcctgccgtcggagaccgcttacgcgtgatctttctggagaattacagagttagcttagccgagaaggtcatcccagctgccgatttgagtgaacagatctccacagccggaactgaggcaagtgggacaggaaacatgaagtttatgctcaatggagcattgacgatcgggaccatggatggtgcaaatgtggaaatggccgaggaagcaggagaagagaattttttcattttcggaatgcgagttgaggatgtcgataaattggatcagcgcggatacaacgcacaagaatactacgaccgaatcccagagctcagacaagttatagaacagctttcctctggattctttagcccaaaacagcctgaccttttcaaagacatcgtgaatatgctgatgcatcatgaccgtttcaaggtgttcgctgactacgaggactatatcaagtgccaggagaaagtatcagcactctacaagaacccgagagagtggacccgaatggtgataagaaatatcgcaactagcggtaagttttcatccgatcgcaccatcgctcagtacgcccgggagatctggggggtggagccgtcacgccagcggctccctgctcctgcgccccacgctgagggaggtgttctggagctagacttgtag

SEQ ID NO: 199636 - DNA, 1425 bp, synthetic construct
  misc_feature 1..1425: note = Description of Artificial Sequence: Synthetic coding sequence
  source 1..1425: mol_type = other DNA
atggccaccaactggggcagcctgctgcaggacaagcagcagctggaagaactggcgcggcaggcagtggacagagcgttggctgagggtgtcctcctcagaacgtctcaggagcccacttcctcggaagtggtcagctacgctcccttcacactcttcccaagcctggtgcctagcgctttactggagcaggcctacgccgtgcagatggacttcaatctgctggtcgatgcagtctcacaaaatgcagcctttctggagcagactctgagcagtacgatcaagcaggacgacttcaccgcgcggctgttcgacattcacaagcaggtactcaaagaaggcatcgctcagaccgtttttctaggtctaaataggtcagactatatgttccaacgcagcgccgacggatctcccgcactaaaacagatagaaattaatactattagcgccagttttggaggcctggcttcaagaacaccagccgttcacaggcacgttttgtccgtactctctaaaacgaaggaggccgggaaaatactgtctaataacccctccaaaggcctcgccctcggtattgcaaaggcatgggagctgtacggctctcccaacgcactcgtgctgttaatagcccaggagaaagaaagaaatatattcgatcaaagagccattgagaacgaattgcttgcgcgtaatatccacgttattcgcaggacctttgaggatattagtgagaagggcagccttgaccaagatcgacgactgtttgtcgacggccaagagattgcagtcgtgtactttcgcgatgggtatatgccaagacaatattcactacaaaattgggaggcacgtctgctgttagagaggtcacacgctgccaagtgccccgacattgccacgcagttggcaggcacaaagaaggtgcagcaggaactgagtagacccggaatgcttgaaatgcttcttcccgggcagcccgaagctgtcgccaggctccgggcgacgttcgccggactgtactccttagacgtcggggaagaaggcgaccaagctattgctgaagcgcttgccgccccttcccgattcgttctcaagcctcagcgggagggcggaggaaacaatctgtacggcgaagaaatggttcaggccttaaaacaactcaaagactcagaggagcgtgccagctatatactgatggaaaaaattgagcccgagccctttgaaaactgtctgctacgacccgggtcccctgcacgggtcgtgcagtgtataagcgagttgggaattttcggggtgtacgtcagacaggagaaaacgctcgtgatgaataaacacgtgggccatttattgcggaccaaggccattgagcacgcggatggaggtgtcgcagccggggtcgccgttctggataacccttaccccgtttag

SEQ ID NO: 199637 - DNA, 738 bp, synthetic construct
  misc_feature 1..738: note = Description of Artificial Sequence: Synthetic coding sequence
  source 1..738: mol_type = other DNA
tgaaagcaccaccacaccgtgccccccagcgtgacccccaaggccctggacaggtccccaccatgtccagagatgtttaccagggccgctccaggatatcacatggctaaattgataatcaagctggtgacctccatcggcgacgtcgtgaaccacgatccagtggtgggtgaccggctaaaggttatcttcctggagaattaccgcgtgtcgctggcggaaaaagtgatcccagcagccgacctctcccaacagataagcacagcggggacagaggccagtgggactggcaacatgaagttcatgctgaatggagccctcacgatcggtacaatggatggggccaatgtcgagatggccgaggaagccggcgccgagaatttattcatcttcgggctgcgcgtggaggatgtggaagcattagaccgtaaaggctataatgcccgggagtattacgatcatctgccggaactcaagcaggctgtggaccagatctccagtggcttcttctcaccaaaagagcccgattgctttaaagacatcgtcaatatgttaatgcaccacgataggttcaaggttttcgcggactacgaagcttatatgcagtgtcaggcgcaggtggatcagctctaccgcaatccaaaagaatggaccaagaaggtcattagaaatattgcatgctccggaaagttctctagcgataggactatcacggagtacgcacgggaaatttggtag

SEQ ID NO: 199638 - DNA, 975 bp, synthetic construct
  misc_feature 1..975: note = Description of Artificial Sequence: Synthetic coding sequence
  source 1..975: mol_type = other DNA
atggacgccccccggcaggtggtgaacttcggccccggccccgccaagctgccccactccgtcttgctggagatccagaaggaattgctcgattacaaaggcgttggaatcagtgttctcgagatgtctcataggtcctctgacttcgctaagatcattaacaacaccgaaaacctggtgcgggagctcctggcggtgccagacaattacaaagtcatttttctacagggcggtggatgtgggcaattttcagccgttcctctaaatctgattgggctgaaggctgggcggtgtgctgactacgtggtgacaggtgcctggtccgccaaagccgcagaagaggctaaaaagttcgggactataaacatcgtgcatccaaaactcggaagttacacgaaaatccccgacccctctacctggaatcttaacccagatgccagctatgtgtactactgtgctaatgaaaccgttcatggcgtagaattcgacttcattcctgacgtcaaaggggctgttctcgtgtgcgacatgtccagcaactttctgtccaagcctgtggacgtatccaagttcggtgtcattttcgcaggtgcccaaaaaaacgtgggatctgcaggggtgacagtggtgatcgtgagggatgatctgctcggttttgcactgcgtgagtgccccagtgtgctcgaatataaggtccaggccggcaattctagtctatataatacaccaccttgtttcagtatctacgtcatgggactggtgctggagtggattaaaaacaacggtggtgccgctgccatggagaaactgtccagtatcaaatcacagacaatttacgagatcatcgataacagccaaggattttatgtctcggtgggcgggatccgcgcatccctgtataacgctgtcacaattgaggatgtccagaaactagcagcctttatgaaaaagtttttggagatgcatcagctttag

SEQ ID NO: 199639 - DNA, 1113 bp, synthetic construct
  misc_feature 1..1113: note = Description of Artificial Sequence: Synthetic coding sequence
  source 1..1113: mol_type = other DNA
atggacgccccccggcaggtggtgaacttcggccccggccccgccaagctgccacattcagtactgctagagatccagaaggaactgctggattataagggtgtgggaatctccgtgctggagatgtcgcacaggagctcagactttgccaagatcatcaataataccgaaaatctcgtgagagaactactggccgtccctgataattacaaggtgatttttctgcagggtggtgggtgcggtcagttctccgcagtgccccttaatctgattggccttaaagccggtcgctgtgctgactacgtggtaacaggagcatggtctgccaaggcggccgaggaagccaaaaaattcggcacgatcaatatcgtgcatcctaagctcggctcttataccaaaattcctgatccttctacctggaatctaaaccctgacgcttcatatgtttactattgcgctaatgaaaccgttcacggtgtggaatttgattttattcccgatgtgaagggcgccgtgttggtttgcgatatgtccagtaatttcttgagcaaacccgtggacgtgtcaaaattcggggtgatttttgctggcgcccagaagaacgtcgggagtgcaggcgtgactgtcgtcattgtcagggacgacctcctcggtttcgccctcagggaatgccccagtgttcttgagtacaaagtgcaggcaggcaattcctcactatataacacacccccttgcttcagtatttatgtcatgggcctcgtgctggaatggattaagaataacggcggcgcagccgcgatggagaagctgtcgtctattaagtcacagactatctatgaaattattgacaacagccagggcttctacgtatgtcctgtcgagccccagaaccgtagcaagatgaacattccttttcgcatcggcaatgccaaaggtgacgatgcgctggaaaagcggtttctggataaggccctggagttgaacatgctctcgctgaaagggcatcggagtgtcgggggaattagggcctcgctgtacaatgctgtgacaatcgaggatgtgcagaaacttgccgccttcatgaaaaaatttctcgaaatgcatcaactctag

SEQ ID NO: 199640 - DNA, 585 bp, synthetic construct
  misc_feature 1..585: note = Description of Artificial Sequence: Synthetic coding sequence
  source 1..585: mol_type = other DNA
atgagcagcaacttcctgagcaagcccgtggacgtgagcaagttcggtgtgatcttcgctggtgcccagaagaatgtcggttctgccggggtcaccgttgtcatagtgagagatgacttgttgggcttcgcattaagagaatgtccctccgttctggagtacaaagtgcaggccgggaacagttctctttacaacactccaccctgcttctctatctatgtcatgggcctcgttctggagtggattaaaaacaatggaggagccgcggctatggagaagctttcgagcatcaagagccagacgatatatgaaatcatcgacaactctcagggtttttacgtatgcccggttgagccgcagaacaggtctaagatgaacatcccttttcgaatcgggaatgcaaaaggcgatgacgcgctggagaagcgcttcctagacaaagctttggaactgaacatgctgtcactgaaaggccatcgttccgtcggcggtatccgagcttcactctataatgccgtcacaatcgaggacgtgcagaagcttgccgcattcatgaagaagtttctcgaaatgcaccagctgtag

SEQ ID NO: 199641 - DNA, 1050 bp, synthetic construct
  misc_feature 1..1050: note = Description of Artificial Sequence: Synthetic coding sequence
  source 1..1050: mol_type = other DNA
atgagcagcctgagcggcaaggtgcagaccgtgctgggcctggtggagccttcaaaactggggcgcaccttaacccacgagcacctagccatgactttcgattgttgctactgtcctcctccgccttgccaagaggcaatcagcaaagagcccatcgtcatgaagaacttgtattggatacaaaaaaatgcctactcccacaaggaaaatcttcagttgaatcaggagacagaggcaataaaagaagagctcctgtatttcaaggccaacggaggaggcgcattggtcgagaataccacgacgggcatctcccgcgacactcagactctaaagagactcgctgaggaaaccggtgtgcacatcatttctggcgccggcttttatgtagatgcaacacactcgtccgaaacccgcgccatgagtgtagagcagcttactgacgtgctaatgaacgagatcctccatggagcagacgggacttctattaaatgtggcatcatcggcgaaattgggtgctcctggccacttacagagagtgagagaaaagtcttgcaggccacagctcatgcccaggcccagcttggatgccccgtgattattcaccctggaagatcaagccgggccccgttccaaataatcaggatactacaggaagcaggcgccgacatttccaagactgtgatgtctcacctagatcggaccattttggataagaaggagctgctggaatttgctcagttaggatgttatctggaatatgacctatttggaactgagcttctacattatcagctggggcctgacatcgatatgccggatgacaacaagaggatccggcgcgtacggttattagtcgaggaaggatgtgaggatcgcatattggtggcccacgacattcacacaaaaactcgtctgatgaaatatgggggccacgggtacagccacatactgacaaacgtcgtgcccaaaatgctgcttagagggatcacagagaatgtcctggataagattctaatagaaaacccgaaacagtggctcaccttcaagtag

SEQ ID NO: 199642 - DNA, 1050 bp, synthetic construct
  misc_feature 1..1050: note = Description of Artificial Sequence: Synthetic coding sequence
  source 1..1050: mol_type = other DNA
atgagcagcctgagcggcaaggtgcagaccgtgctgggcctggtggagccctccaagctgggccgcaccctgacccacgaacatctggctatgaccttcgactgctgttactgtccccctcctccctgtcaggaggccattagcaaagaacccattgtgatgaaaaatctgtattggatccagaagaacgcatatagtcataaggaaaacctgcaactcaatcaggaaactgaagccataaaagaggaactgctgtatttcaaggcgaacggaggcggcgccctggtggagaacacaaccacaggaatcagccgggatacacaaaccctgaagcggctcgccgaggaaacgggggtacacatcatctctggagccgggttttacgttgacgctacccactcttctgagacaagggccatgtctgtggaacaactcactgacgtgctgatgaatgagatccttcacggcgccgatgggacatctattaagtgtggaatcatcggcgagatcggttgtagttggccactcacagagtcggagagaaaagtcctgcaggctacagcccatgctcaggcccaattggggtgccctgtcattattcaccctggcagatccagcagagcacctttccagataatccgtatactgcaggaggctggcgccgacatatctaagaccgtgatgtcacatctggaccgtacgattcttgacaagaaggagctgctggaattcgcccagctgggttgttatcttgaatacgatctctttggcaccgaactgctgcactaccagctggggcccgacattgacatgccagatgataacaagagaattcggcgtgtgcggctgctggtggaggaaggctgcgaggatcgcatactcgtggctcatgatatccatactaaaactcgcctaatgaagtatggaggccatggatatagccacatcctgaccaacgtggtgcctaagatgcttctgaggggtatcaccgagaatgttcttgacaagattcttatcgagaatcccaaacagtggcttacttttaagtag

SEQ ID NO: 199643 - DNA, 1050 bp, synthetic construct
  misc_feature 1..1050: note = Description of Artificial Sequence: Synthetic coding sequence
  source 1..1050: mol_type = other DNA
atgagcagcctgagcggcaaggtgcagaccgtgctgggcctggtggaaccctccaagctcgggcgcaccctcacccacgagcacttagctatgacctttgattgttgctactgcccgccccccccttgccaagaagctatcagcaaggaaccaatcgtgatgaagaatttgtactggatccagaagaacgcctattctcataaggagaatctccagctgaaccaggaaaccgaggccattaaagaggagctgctgtattttaaggcaaatggcggtggagcactcgtagagaatacaaccactgggatctctagggatacccaaaccctgaaaagactcgcagaagaaacgggcgttcatattatttctggggccggattctacgtcgacgccacgcatagttcggagacacgggcgatgtccgtggagcagctgactgacgtcctgatgaatgaaatattgcacggtgctgacggcacatctatcaaatgcggcattataggtgagatcggttgctcatggccactgaccgagtctgagcgtaaggtgctgcaggccactgcccacgcgcaggcccagcttggctgtcccgtgattatccatcccggcaggtccagcagggccccttttcagatcatccgcatcctccaggaagctggggctgacatcagcaagacagttatgagtcaccttgatcggacaattttggacaagaaagagctgcttgagtttgcccaactagggtgctatctggaatacgacctgttcggaactgaactcctgcactatcagctgggtccagacatagacatgcccgacgacaacaagcgtattcgccgcgtgcgactgctggttgaagaaggctgcgaagaccggattttggtcgcacacgatatccacacaaaaactaggcttatgaaatatggcggacacggatatagccacatcttgacgaacgtggtcccaaagatgctgctacgaggaattactgaaaatgttctggataaaatccttatcgagaatcctaagcagtggttgaccttcaaatag

SEQ ID NO: 199644 - DNA, 909 bp, synthetic construct
  misc_feature 1..909: note = Description of Artificial Sequence: Synthetic coding sequence
  source 1..909: mol_type = other DNA
atgagcagcctgagcggcaaggtgcagaccgtgctgggcctggtggaaccatctaagctaggacgcacattaacgcacgagcacctggcgatgacctttgattgttgttactgccctccccctccatgccaggaggcaatcagcaaggaaccgatcgtgatgaaaaacctctattggatccaaaaaaacgcctattcacacaaagagaatctccagttgaatcaagaaacagaggccattaaggaggagctgttgtactttaaagcgaatggggggggcgcacttgtggagaacaccaccactggaatcagcagggatacccagactctgaaaagactggctgaagagacgggcgtccacatcatttccggcgctgggttctacgtcgatgccacgcactccagtgagacaagggccatgtctgtggaacagttaaccgacgtcctgatgaatgaaatcctacacggggcggacgggactagcattaagtgtgggatcatcggcgaaatcggatgttcgtggcccctcacggaaagcgaaagaaaagttctgcaggctaccgcccacgcacaggcacagttgggctgtcccgtcatcatccaccccggacgcagtagtagggcgccgtttcaaatcattaggattttgcaggaggctggcgcggatatttcaaagactgtgatgtctcatctggatcgagtgaggctgctggttgaggaaggctgtgaagataggatccttgtcgcacacgacatccacactaagacccgattaatgaagtacggcggtcacggctacagtcatatcctcaccaacgtggttcccaagatgttgcttcgtgggatcactgaaaacgtcctcgacaaaattttgattgagaaccctaagcagtggctcacatttaaatag

SEQ ID NO: 199645 - DNA, 1050 bp, synthetic construct
  misc_feature 1..1050: note = Description of Artificial Sequence: Synthetic coding sequence
  source 1..1050: mol_type = other DNA
atgagcagcctgagcggcaaggtgcagaccgtgctgggcctggtggagccttccaaactcggaaggacactgacgcacgagcacctcgctatgactttcgactgttgttactgtccacccccaccttgccaggaggctatctcgaaggagcccatcgtgatgaagaacttgtattggatccagaaaaacgcctattcccacaaggagaatctgcagctgaatcaggaaaccgaggccataaaggaagaactgctgtacttcaaggcgaatggcggcggagccctggtagagaacaccaccaccggaatatcacgcgatacccaaacactcaaacgacttgctgaggaaaccggtgtgcatatcatcagcggagccggcttttacgtcgatgccacccactctagcgagaccagggcaatgtccgtggaacaactcaccgatgtcctcatgaacgagattctgcacggggctgacggaacatccataaaatgtggaatcattggtgagatcggctgctcctggcctctcaccgaaagtgagcggaaggtactgcaagccactgcacacgctcaggcccaactgggttgccccgtaatcatccacccgggtcgctcctcgagggcaccatttcaaatcatccgcatccttcaagaggcaggggccgacatctcaaagaccgttatgtcacatctggaccggactattctggataaaaaagaacttctcgagttcgcccaactgggatgctacctggaatacgacttatttggcactgaacttctccactaccagcttggtcctgacatcgatatgccggacgacaataagagaattagacgcgttcgcctcctggtcgaggagggatgtgaggacaggatccttgtcgcacacgatatccatacaaaaacaagactgatgaaatacggcggtcacggttactcccacatcctgactaacgtggtccccaagatgctgctgcggggaataaccgagaatgtgctggataagattctcatagagaatcccaaacaatggctgactttcaaatag

SEQ ID NO: 199646 - DNA, 753 bp, synthetic construct
  misc_feature 1..753: note = Description of Artificial Sequence: Synthetic coding sequence
  source 1..753: mol_type = other DNA
atgttcagcctgcccctgagcctgcccctgtgcgaggacaccgcctttctgcctagcaagtgttgttcgagtcataagaccataaaacaggcaaggactcttatcatgatcttccttgcctctggtacccattttcagactatgttgaaatccaagctaaacgttctcacactgaaaaaagagccgttacctgctgtgattttccacgaacccgaggctattgagctctgtactacaactccgctgatgaagaccaggacacatagcgggtgtaaggtcacttacctggggaaagtgtcgactaccgggatgcaattcctgtccggctgcacagaaaagccagtgatagagctctggaagaaacacacgttagccagggaggacgtgtttccagctaatgccttactcgagattagacccttccaggtgtggctgcatcatttggatcataaaggtgaggcgactgtgcatatggacacatttcaggtggcacgcatcgcttactgtacagccgatcataacgttagccccaacatctttgcttgggtgtacagggagatcaacgacgacctgagttaccaaatggattgccacgccgtggagtgcgagagtaagctggaggctaaaaagctcgctcacgcgatgatggaggcctttagaaaaactttccacagcatgaaatcagacggtcggatccatagcaacagctcgtcagaagaggtctcccaggagctcgaatcagacgacggctag

SEQ ID NO: 199647 - DNA, 747 bp, synthetic construct
  misc_feature 1..747: note = Description of Artificial Sequence: Synthetic coding sequence
  source 1..747: mol_type = other DNA
atgccccggatcgccggcaaccacctgatgctggaggagagccggacatgctctagtcccgagttgctcgacggcgtctggccatgtcagcctctccactttgggctgccagccagtgagatgcattttcaaacaatgctaaagtctaaacttaatgtgcttacgctcaagaaggaaccgctaccagccgtgattttccatgagccagaggccatcgagctctgcacaactacacctttgatgaaaacgcgcacacactctgggtgtaaggtgacctatctcggcaaagtatccaccaccggcatgcaattcctctctggttgcaccgagaaaccagtgatcgagctgtggaaaaaacatactctagccagggaagatgtctttccagcaaatgcacttctggagataaggcccttccaggtctggcttcatcatttggaccacaagggcgaagccacagtgcatatggatacgtttcaggtcgcccgcatcgcttattgcacagcagaccataatgtgagccccaatatctttgcatgggtgtaccgggaaattaacgacgatctatcataccagatggactgccacgcagttgagtgcgagtctaaactggaggcgaagaaactggcccacgccatgatggaggcattccggaagacgtttcacagcatgaagtccgacggcaggatacacagtaatagcagtagtgaagaggtgagccaggagctggaatctgatgatggctag

SEQ ID NO: 199648 - DNA, 654 bp, synthetic construct
  misc_feature 1..654: note = Description of Artificial Sequence: Synthetic coding sequence
  source 1..654: mol_type = other DNA
atgtggcagcccgccaccgagcggctgcagcacttccagaccatgctgaaaagcaaactaaatgtgctcaccctgaagaaggagccgttaccggcagtgatattccacgagcccgaagctatcgagttgtgtaccactacccctttaatgaagacaaggacacactcaggctgcaaagtgacgtatctgggaaaggtttctactacaggaatgcaatttttgtctgggtgcacagagaagcccgtaattgaattgtggaaaaagcacactctggcccgtgaggatgtgtttccggccaacgccctgttggaaattcgaccatttcaggtgtggctgcaccacctggatcacaaaggggaagctaccgtacatatggataccttccaggtggcaagaattgcatactgtaccgcggatcataacgtcagcccaaatatctttgcatgggtgtacagagagatcaacgatgatctttcttaccagatggactgtcacgcagtggaatgtgaatctaaactcgaggctaaaaaactcgctcatgccatgatggaggcatttagaaaaacgttccatagcatgaagtccgacggtcgcatccatagtaacagtagttcagaagaggtttctcaggaacttgagagtgacgatggttag

SEQ ID NO: 199649 - DNA, 507 bp, synthetic construct
  misc_feature 1..507: note = Description of Artificial Sequence: Synthetic coding sequence
  source 1..507: mol_type = other DNA
atgtggcagcccgccaccgagcggctgcaggtgacctacctgggcaaggtgagcacgactgggatgcagtttctgagcggctgcaccgagaagccagttattgagttgtggaagaagcatacccttgcccgagaggatgtcttcccagccaacgccctgctggagatccgaccatttcaagtgtggctgcaccatctcgatcataaaggggaagctaccgttcacatggatacttttcaggtggcccgaatcgcctactgtactgctgaccacaacgtgtctccgaacatctttgcttgggtgtatcgtgagatcaacgatgacctttcctaccagatggactgtcatgcggtggaatgtgaatccaaactggaggctaagaaactagcccacgccatgatggaggccttcagaaaaacgttccacagcatgaaatcagatggtaggatccactctaatagctcaagcgaagaagtgagccaagaactcgaaagtgatgatggctag

SEQ ID NO: 199650 - DNA, 753 bp, synthetic construct
  misc_feature 1..753: note = Description of Artificial Sequence: Synthetic coding sequence
  source 1..753: mol_type = other DNA
atgttcagcctgcccctgagcctgcccctgtgcgaggacaccgccttcctgccaagcaagtgctgttcctctcacaaaaccataaagcaggcccgtacattgataatgatcttcctcgcttctggtactcactttcagactatgctgaaatccaagctgaatgtgctaactctgaaaaaagaacctttgccggccgtgatcttccacgaaccagaggcaatagagctttgcactactacgcctttgatgaaaactaggacacattctggctgcaaggttacttacctgggtaaagtgtccacaacaggaatgcagtttctgtcgggctgtaccgagaagccagtcattgaactatggaaaaagcacaccctggcccgggaggatgtatttcccgccaacgctttgctggaaattagacctttccaggtgtggctccaccatttagaccataaaggggaagctaccgtacacatggataccttccaggtggccaggatagcctactgcactgctgaccataacgtgagcccaaatatcttcgcatgggtgtaccgagagattaacgatgacttaagctaccagatggattgccatgccgttgagtgcgaaagtaaactggaagctaagaagctagctcacgctatgatggaagctttcaggaagacattccactctatgaagagtgatggccggattcacagtaactcgtcctccgaagaagtgtcacaggagttggaatccgatgatggatag

SEQ ID NO: 199651 - DNA, 1017 bp, synthetic construct
  misc_feature 1..1017: note = Description of Artificial Sequence: Synthetic coding sequence
  source 1..1017: mol_type = other DNA
atggagcagctgcgggccgccgcccggctgcagatcgtgctgggccatcttggtcgcccttccgccggcgccgtagtggcccatcctacctctggaacgatctcctccgccagttttcacccacaacagttccagtacacgctggacaacaatgtcttgactcttgaacagaggaagttctatgaggagaacggattcctcgtgattaaaaacctggttccagatgcagacatccagcgcttcagaaacgagttcgaaaagatttgtcgcaaggaagttaaaccgttgggcttaactgttatgcgggatgtgactatctctaagagcgaatatgcccccagcgaaaagatgattaccaaggtgcaagattttcaagaagacaaggagctgtttcggtattgcactctgccggagatattgaagtacgtggagtgctttacgggaccgaacatcatggctatgcacacaatgctgatcaataaacctccggacagtggaaaaaagacatctagacatcctctccaccaggacctccactactttccattcagaccttctgacctgatcgtgtgtgcatggactgcaatggagcatatttccaggaacaatggctgcctggtggtccttccagggacccacaaagggagtctgaagccacacgactacccgaagtgggaagggggcgttaacaaaatgttccatggaatccaggactatgaagagaataaggctagagtgcacctcgtgatggagaagggtgacaccgttttcttccatcccttacttatccatggatctgggcaaaataagacacaaggcttccgcaaagccatctcatgccattttgctagtgccgattgccactacatcgacgtcaaaggaacaagccaggagaacattgaaaaagaggtagtcggaatcgctcataagttctttggggccgaaaactccgtgaacctcaaagatatctggatgttccgtgctagactggtcaagggtgagagaaccaacctgtag

SEQ ID NO: 199652 - DNA, 717 bp, synthetic construct
  misc_feature 1..717: note = Description of Artificial Sequence: Synthetic coding sequence
  source 1..717: mol_type = other DNA
atgcgggacgtgaccatcagcaagagcgagtacgcccccagcgagaagatgattacaaaggttcaggatttccaggaagataaggagctttttcgctattgtaccctaccagaaattctcaaatatgtggaatgcttcacagggcctaacataatggctatgcataccatgctgattaacaaacctccagattccgggaagaagacctcacgccacccactccatcaggaccttcactactttccgttcagaccttctgacctcatcgtgtgtgcctggacagcaatggaacatattagcaggaataacggctgcctggtggttttgcccgggactcacaaaggtagtctgaagccccacgattatccaaaatgggaaggtggcgtgaataagatgtttcatgggatacaggactatgaggagaataaggcgcgagtacacctagtgatggagaaaggggatactgtgttcttccatccactgctaatccatggctccggtcagaacaaaacccagggattccgtaaggcaatctcatgccactttgcgtcagccgattgccactacatcgacgtgaagggaacctcacaggaaaatatagagaaggaggtcgtcggaattgctcacaagttcttcggcgccgaaaattcggtcaatcttaaagacatctggatgtttcgcgcaagactggtcaaaggcgagagaacaaatctctag

SEQ ID NO: 199653 - DNA, 15429 bp, synthetic construct
  misc_feature 1..15429: note = Description of Artificial Sequence: Synthetic coding sequence
  source 1..15429: mol_type = other DNA
atgggcaacgaggccagcctggagggcgagggcctgcccgagggcctagctgcagctgccgccgctgggggaggggcatccggtgcaggctccccatcacacaccgctattcccgcaggcatggaagctgacctctcccagttatcggaggaagagcggcgacagatcgccgctgtcatgagcagagcacagggtctgccaaaaggatccgtgccacccgcagcagcggagtcaccatccatgcaccgcaagcaggagttggatagctcccatcccccgaaacaaagcgggcggccacccgatcctggccggccagcgcagcctggcctctcaaagtctagaacaacagacaccttccgttcagagcaaaaattgcccgggcggagcccaagcaccattagtctcaaagagtctaagagccggactgacctgaaagaagagcataaaagctccatgatgcccggctttctttccgaggttaatgccctgagtgcagtgagtagcgtggtgaataagtttaaccctttcgatctgatttcagattcagaggctagccaggaggagacgactaagaaacagaaagtagtacagaaagaacagggtaagcccgaaggtatcattaagccccccctgcagcagcagccacccaagcccatcccaaaacaacaggggcccgggcgagacccactgcagcaggacggaaccccaaagtccatttcttcccagcaacctgaaaagattaagagccagccgcccggcaccggcaaaccaatccaggggcccacccagacacctcagacagaccacgctaagctgcccctgcagcgggatgcctcgcgcccgcagacgaagcaagcagatatcgtaaggggcgaatctgtcaagccctccttacctagtccgagtaagccccctatacagcagccaactccaggaaagccgcctgctcagcaacctggccacgagaagtcccagcccgggccagccaagcccccagctcagcccagtggtctgaccaagcccttggctcagcagcccggcaccgtgaagccgcctgtccagcctcccggtacaaccaagcctccagcccagcccttaggacctgccaagccccccgcccaacaaacgggcagcgaaaagcctagctcggagcagcctggcccgaaagcactcgcacagcccccaggagtcggcaaaacaccagctcagcagcctgggccagcgaagccccccactcaacaagtcggaacacctaagccactggctcagcaaccagggctacagagtcctgctaaagctccaggtcctaccaagactccagtacagcagccagggcccggaaaaatcccggcgcaacaagcaggacccgggaagacgtctgcccagcagacaggcccaacaaagcccccttctcaattgccgggtccagctaaaccacccccacagcagccagggcctgcaaagcctccaccccagcagcccggctctgcgaaaccgccctcccagcaaccaggttctacaaagcccccccctcagcagccaggcccggcaaagccgagtcctcagcagccaggttcgacgaaaccgccatcccagcagcctggctccgctaaaccaagcgcacagcaaccaagccccgccaaaccatcagcccagcagtccacgaagcccgtatcacagaccggttcaggaaagcctctccagccgcccactgtttcgccgagtgccaagcagcccccatcacagggactccctaagactatttgtcccctctgcaacacgaccgagctgctgctgcatgtcccagaaaaggccaatttcaatacctgtactgagtgccagactaccgtatgtagcttgtgtggattcaatcctaacccccatctaacggaagtgaaagagtggctttgtctgaattgtcagatgaagcgggcacttggcggagatctggcccctgtgccaagttcaccccaaccaaagctgaaaacagcgccagtgacgactacctctgccgtctctaagtcaagcccacagccccaacaaacaagtccaaaaaaggacgccgcgccaaaacaggacctgtccaaggcacccgaacctaaaaaaccccccccactcgtgaaacagcccaccctacacggtagccccagcgcgaaggctaaacagccccctgaggcagattcattaagcaagccagcaccgccgaaggaacccagcgtgcctagtgaacaagacaaggcgcctgttgctgacgacaaaccaaaacaacctaaaatggtgaagcccacaaccgatcttgtcagtagctctagcgcaacaaccaagcctgatataccatcctctaaagtgcagtctcaagccgaagagaaaacaaccccacccctgaaaaccgatagcgctaagccctcgcagtcctttccccctaccggcgagaaggtctccccttttgacagcaaggcaattccacggcctgcaagcgattctaagatcattagtcacccagggccaagttcagagagtaaggggcaaaaacaggtcgatcccgtccagaaaaaagaagagccaaaaaaggctcagacaaagatgtcacccaagcctgatgccaagcctatgccaaagggtagccccactccccccggaccccgccctacagccgggcagaccgtgccaacgccccagcagagccctaagccacaggagcagagcaggaggttcagtctgaacctgggatctatcacggatgctcctaagtcacagcctaccactccacaggaaacagtgactgggaaactattcgggttcggcgccagtattttctcgcaagcgtccaatctcatctcaaccgccggccagcccggcccacactcccagagcggtcccggagcaccaatgaagcaggccccagccccctcacagccccccaccagtcaggggccacccaaaagcactggccaggcccctcccgctcctgcaaagtccatccctgtcaagaaggagaccaaggcgccagctgcggaaaagctcgaacccaaagcagaacaggcccccaccgtgaaaagaacagagacagaaaagaagcctccacccatcaaggattctaagtcgctgaccgccgaacctcagaaggcagtgctgcccaccaaactcgaaaaatctccaaaacccgaatcaacctgccctctctgtaagacagaactcaacataggatctaaggatccacctaactttaatacatgcacggaatgtaagaatcaggtctgcaacctgtgcgggtttaacccaacccctcacctaaccgaaatacaggagtggttgtgtttgaattgtcagactcagcgagccatatctggccagctgggggatatccgtaaaatgccacctgccccaagcggacctaaggcttctccaatgcctgtgcctacagaaagcagttcacaaaagaccgctgttcctccccaggtgaagcttgtgaagaaacaggagcaggaggtaaaaacagaagctgaaaaagtgattttggagaaggtcaaggagactttgtccatggaaaaaataccccccatggtgacgacagaccagaagcaggaggaatccaagctggagaaagacaaggccagcgctttgcaagagaagaagcctctcccagaggagaagaaactcatccctgaggaggaaaaaattagaagtgaggaaaaaaaaccccttcttgaggaaaaaaaacccaccccagaggataagaaactacttcctgaggccaaaacttctgctcccgaagaacagaagcatgacttgctgaagagtcaggtgcagatcgctgaagagaaactggagggtcgggttgctcccaagacggtccaggaaggcaaacagccccagacaaagatggagggtttaccttcgggcactccccaatcacttcccaaagaagacgataaaacaactaagacgataaaagagcagccacagcccccctgcacggcaaaacccgaccaggttgagcctggcaaagaaaaaaccgaaaaggaggatgataaatcagacacttcttcgtcccagcagcccaaaagtcctcaaggtcttagtgacacagggtactcctctgacggaatttcttcctcactgggggagatacctagcctgatcccaaccgacgaaaaggacatattaaagggactcaagaaggacagcttttctcaggagagcagcccgtcctccccaagtgacctcgccaagctggagagtacagtgctgtccatattggaggctcaagcttcaacactggctgatgagaaatctgaaaagaagactcagcctcacgaagtatctccagaacagcccaaagaccaggaaaaaacacaatcactgtctgaaacactcgagatcaccattagtgaagaagaaatcaaggagtctcaggaagagagaaaagataccttcaaaaaggatagccagcaggatatcccatcaagcaaagatcacaaggagaaaagcgagtttgttgatgacataaccacccgccgcgaaccttacgatagcgtggaggaaagcagcgagtccgagaatagtcctgttccgcaaaggaaacggcgcacctcagtaggatccagctcctctgatgaatataaacaggaggattcccagggtagcggggaggaggaagacttcatccggaaacaaatcatcgagatgtctgcagatgaggacgccagcggatccgaggacgacgagttcataaggaaccagctcaaagagatcagttcctccacagagagccaaaagaaagaggaaaccaagggcaaggggaagatcacagcagggaaacatcggcgccttaccagaaaatcaagtacatcaatcgatgaggacgccggccggagacatagttggcatgacgaggatgacgaagcattcgacgagtccccggaactgaagtaccgtgaaactaagtcacaggagtccgaggaattggtggtgacaggcggcgggggtttgagaaggttcaaaacaatagagctcaattctaccattgccgacaagtatagtgcggaaagctcccaaaagaaaaccagtttgtactttgatgaagagccagaactcgagatggaaagtctgactgacagccctgaggaccggagtcgcggtgaagggagcagttcactacatgcttcctcattcacgcctgggacatcccccacctccgtgtcatccctggatgaggactcagacagttcaccttcccacaagaagggagaatccaagcagcaacgcaaagcacgacatcgaccccacggccctctgttgcccacaatcgaggattcaagcgaagaggaggaattacgggaggaagaagagttgctgaaggaacaggaaaagcagagggaaatagagcagcagcaacggaagagctctagcaagaaaagcaaaaaagacaaggatgagttacgcgcccagaggagacgggagcggccaaagacaccaccgtccaatctgtcccccattgaagatgcgtcaccaaccgaggaattgcgtcaagctgccgaaatggaggaactgcacagatcaagttgtagcgagtattctccctcaatcgagagtgatcccgaggggttcgagatcagcccagagaaaatcattgaagtacagaaggtgtacaagctccctacagcagtgagcctgtattcaccgactgacgagcagtccatcatgcagaaggaaggctcacagaaagccctcaagtcagccgaggagatgtacgaagaaatgatgcataaaacccacaaatataaagcttttcctgctgcaaacgagagagatgaagtgtttgaaaaagaaccactgtacgggggcatgttaatcgaggactatatctacgagagcctcgtcgaggatacctacaatgggagtgtggacggatctcttctcacccgtcaggaggaggaaaacggctttatgcagcagaagggccgcgagcagaagatcaggctctccgaacaaatctatgaagaccctatgcagaaaatcaccgatctccagaaagagttttacgaactcgaatcactccacagtgtggtgcctcaagaagacatcgttagttcctcctttatcattcccgaatctcacgaaattgtcgatctcggaacgatggtgacctccaccgaagaggagaggaagctgctcgatgcagatgctgcgtatgaggaattaatgaagcggcaacagatgcagttgacaccaggatcctcacctacacaggcccccatcggagaggatatgacagaaagtaccatggattttgatcggatgcccgatgcatcattaacctcttcggtgcttagcggggcctcgctcaccgactccactagcagcgccacattgtctatcccagatgttaagataactcaacatttttccacggaagagatcgaagacgagtatgtcacagactatacacgggaaattcaggaaattatagctcacgagagtttgatcctgacctactccgagccttctgagtcagccacgagtgtgcccccctccgacacaccttcccttacctcatccgtgtcatctgtgtgtacaactgattcatcgtctcccattacaacattagatagcatcactaccgtatatactgaacctgtcgacatgattactaagttcgaggacagtgaggagatatcatccagcacatacttccccggcagcataattgattatcctgaggagatctccgtgtctcttgaccggactgccccgccagacgggagagcaagcgctgatcacatcgtgatctctctctctgatatggcttctagcataatagagagcgtcgtcccaaaaccagaggggcccgtggctgacaccgtgtcgaccgatctattaatttctgagaaagacccggtaaaaaaggctaagaaggagacaggaaacgggattatcctggaagtgttagaggcctatagggataaaaaggagcttgaggcggagcgcacaaaatcctccctgtctgaaactgtttttgaccaccctccaagcagtgtgattgccttgcccatgaaagaacagcttagcaccacttatttcacttccggagagaccttcggccaggagaagcctgcctcccagttgccgtccggcagcccgtcagtctcttctctacctgctaagccgcgcccttttttccgctctagtagcctcgacatatcggcacagcccccacccccaccgcccccaccacccccacctcctccacctcctcctccacctccacccccaccattacctcctcctacttcaccaaagcccacgatcctgcctaaaaaaaaattaacggtggcttcccctgttacgacagcgacgccgttatttgacgctgttactaccttagaaacgaccgccgtactccgcagcaatggcctgccagtgacacggatttgtaccacagcacctccccccgtgccacccaaaccttcgtccattccatccggcttagtgtttacccacagacctgagccatccaagccaccaatcgcaccgaagcctgtgatcccacagctgcctaccactacacagaaacccacagacattcacccgaagccaaccggactgtctctgacgagttccatgacgttgaatctggtgacaagcgcagattacaaactgccgtcacctacctctccactcagcccccatagtaacaaaagcagcccgagattctcaaagtctctgacagagacttacgtggtgattacgctgccctcggaacctggaacaccaacagacagttcagcttcacaggcgatcacctcatggccccttggtagtccctctaaagatctggtgtcagtggaacccgtgttcagtgtggtcccccctgtcacagcagtggaaatccctatttcttcagaacagacattttacatcagtggagcactccagactttctctgctaccccagtcactgctccgtcttccttccaagctgccccaacgtcagttacacaatttctgacgaccgaggtttcgaagaccgaggtgtcagctacaagaagtactgctccttcagtcggactatcttcaatctctatcactatacctccagaacctctcgcgctggataatatccatctcgagaaacctcagtacaaagaagacgggaaactgcaattggtaggcgacgtgatagatttgcgcacagttccgaaggtggaggtcaaaactaccgataagtgtattgatctctccgcatcaaccatggatgtcaagaggcagatcacagctaatgaggtgtatggaaagcagatttcagcggtgcaaccgtcgattattaatctgagcgtcaccagctcaatcgtcacaccggtaagcttagccactgaaaccgtcaccttcgtgacttgcactgcgtctgcatcgtacacaactggcacagagagcctcgtgggggcggaacatgctatgaccactcccttgcagttaaccacaagtaagcatgccgaacccccctaccggatcccctcagaccaggttttcccgatcgcacgggaagaggcccctataaatctctcgctggggacccccgcgcacgccgtgactctggctatcactaagcccgttaccgttccccccgtgggagtgaccaatggctggactgacagcaccgtttcccaggggattaccgacggggaagtggtagacctgtccacgacgaagtcccatagaaccgtagtcacaatggacgagtccacctctagcgtaatgacaaagatcatcgaggacgagaagccagtagatctgacagctgggaggagggccgtttgctgcgacgtcgtctacaagctaccattcggccggtcctgcacagcgcagcagccggctacgacacttccagaggacagattcggctaccgggatgaccattatcagtacgaccgctctgggccatacggctatcgtggcataggggggatgaagccttctatgtcagatacaaacctggccgaggccggtcatttcttttataagagcaagaacgcatttgattactcagaagggacagacacagccgtcgacctgaccagcggccgggtcaccacgggggaggtgatggactactcaagcaaaactacagggccttaccctgaaacgaggcaagtgatctctggggctggaatcagtacccctcagtattccaccgccaggatgacccctcctccaggcccacagtactgtgttggatctgtcctccgctcatcgaacggtgtggtttattcgtctgtcgccacccccacaccttccacattcgctatcacaacacagccagggagcatcttctccaccacagtacgcgacttgtcaggtattcacaccgcggacgccgtgaccagcctccctgccatgcatcacagccagcctatgccacgctcctacttcatcaccactggcgcctcagagactgatatcgcagtcacaggaatagacattagtgcctcactccagaccattaccatggagtccctcacggcggaaaccatcgatagtgttcctactttaacaaccgcttctgaagtgttccctgaggtcgttggcgacgaatctgcgctccttattgtgccagaagaggacaaacagcagcagcagttagatctggagcgggagctgctcgagctcgagaaaatcaagcaacagaggttcgcagaggaactagagtgggaacggcaggagatccaaaggttccgagagcaggagaaaatcatggtccagaaaaagctggaagaactgcagtctatgaagcagcacctactgttccagcaggaagaagagcggcaagctcagttcatgatgaggcaggaaaccctggcccaacagcagttacagctggagcaaatccaacagctacagcagcaactgcatcagcagctcgaagagcagaagattagacagatttatcagtataattacgacccctccggcactgcgtcgcctcagacaaccacagaacaagctattctggagggacagtatgccgcccttgagggttctcaattctgggctactgaggacgcaaccaccaccgcgagcgccgtagtcgctatcgagataccccaatcccaaggctggtacacagttcagtctgatggcgtgacccagtacatagctcccccaggtattctcagtacagtgagtgaaatccccctgactgacgtcgtggttaaggaagaaaagcagccaaagaaacgaagttctggcgctaaggtccgcggacagtacgacgatatgggcgaaaatatgacggacgatcctagatctttcaaaaagatcgttgattcgggagttcagaccgacgacgaggatgccaccgacagaagctatgtttcccggagacgccgcactaagaagtcggtggataccagtgtccaaacggacgatgaggaccaggacgagtgggatatgccaactagatcaagaagaaaggctcgggttggcaaatatggtgacagtatgacagaggccgacaagacaaagcccctgagcaaagtgtcgtcaattgccgtgcagactgtggcggagatttcggtccaaaccgaacctgtgggcactatcaggactccttctattcgagcaagagtggatgcgaaagtcgagatcatcaaacatattagcgcccccgagaaaacatataaagggggcagcctgggctgtcaaacggaagccgactctgatacccagtcgcctcagtacctgtcagcaacttctccgccaaaggacaaaaagcggccaactccccttgaaatcggttattccagccacctgcgtgccgactctacagtccagctcgcaccatctccccccaaatcgcctaaagtgctctattccccaatttcccctctcagcccaggaaaggctctcgagtcagcatttgtcccgtatgagaagcccctgcccgacgacatctcacctcagaaagtgctgcaccccgacatggcaaaggtgccccccgcctcccccaagaccgccaaaatgatgcagcggtctatgtctgacccgaagcctcttagcccaacagctgacgagtcatctagagcaccctttcagtacaccgagggctacaccaccaagggctcccagacgatgactagttctggcgctcagaagaaggttaagcggaccctccccaatcctccaccagaagagatttcgaccggcacgcagagcaccttctctactatgggaacagtttcacggcgccggatctgtcgtactaatactatggccagagcaaaaatcctgcaggacatcgacagagaactcgacctcgtcgagagggaatccgccaagctgcgaaaaaaacaggcagagctggatgaggaggagaaagaaatcgatgcaaagctcagatatctcgaaatgggaatcaatagacgaaaggaggctctgctgaaggaaagagaaaagcgggaacgagcatacctccagggggtggcggaggaccgtgattatatgagtgacagtgaggtgagttctactagacccacacggattgaatcccagcacggtatcgagcggcctcgcaccgcgccccagactgagttctcccagtttattccaccccagacccaaaccgagtcacaactggtcccccctacaagcccgtacactcagtaccagtattcaagcccagctcttccaacccaggctcctacgtcatacacacagcagtcccactttgagcagcagactctgtatcaccagcaggtctctccataccagacccagcccacctttcaggcggtagccaccatgtcctttactcctcaggtccagcccactccaacaccacaacctagttaccaactcccgtcccaaatgatggtcatacagcagaagccaaggcagacaacgctgtacctggagcccaaaataacctccaattacgaagtaatcaggaaccagcctttgatgatagcaccagtctcaacagataacacgtttgctgtttcccacctggggtccaaatataattcccttgatctgaggattggcctcgaagagaggagttcaatggcatcctcacctatatctagtatctccgctgactccttttatgctgacatcgatcaccataccccacgcaattacgttctgatcgacgatatcggggagattaccaagggtactgcagctctgagcaccgcattctcattgcacgaaaaagatttgagcaagacagatcgactcctccgtactacagagacacgtaggtcccaggaggtgacagacttcctggcacccctccaatcgagttcacgcttgcattcttacgtaaaagccgaggaggatcctatggaagatccctacgaactgaagcttcttaagcaccagatcaaacaagaattccggagggggaccgaaagtctggaccatctggccggactttcccactattaccatgcagacacttcgtaccgccactttccgaagtctgaaaagtacagcatctccagactgacgctcgagaagcaggcagccaaacagttaccagcagccattctctaccagaagcagtctaagcataagaaatcgctcatagaccccaagatgagtaagttttctcctatccaggaatccagggatttggagccggactatagctcttatatgaccagctctacctcttctatcgggggcattagctcacgagcaagactgctgcaggacgatattacattcggattacggaaaaacatcaccgaccaacagaagttcatgggatcttcactcggcaccggactgggaactcttggcaatactattagaagcgctttacaagatgaggccgataagccttacagcagcggcagccggtcacggccttcaagcaggccatcttccgtgtacgggctagacctatcaattaagcgcgacagcagctcaagctcccttaggctgaaggcacaggaagctgaagctctagacgtgtctttctcacatgcatcgtcaagcgctcggacaaaacctacctctttgcccatctcccagagcagggggcgaatcccaatcgtggcccaaaactcagaggaggagtcacctctctcacctgtggggcagcccatgggtatggctagagctgcggctggccctctgccgcccatctctgcagacacccgagaccagttcggttctagccatagtctcccagaagtgcagcagcatatgcgagaggaatcccgcacgcgggggtacgaccgggacatcgccttcatcatggatgacttccaacacgctatgtccgattctgaggcctatcatctcaggagagaggagacagattggttcgataagccccgcgagagccgcctggagaacggccacggccttgatcgcaagctcccagaacgtctcgtccatagccggccattgagtcagcatcaagagcagatcattcagatgaacgggaagacgatgcattatatttttcctcatgcccgaataaagataactagggacagcaaagatcacactgtgtcggggaacggacttgggatccggattgtgggcgggaaagagattcctggccactcgggcgagattggcgcttatatcgctaaaatcctgcctggagggtcagcagagcagaccggcaagctgatggaaggaatgcaagtcttagagtggaacggcatacctctcacgagtaagacttatgaggaggtgcagagtattatttcccaacagtctggagaggcagagatctgtgtgaggctggatctgaatatgctatctgatagcgaaaattcacagcacctggagttgcacgaaccacctaaggcagtcgacaaggcaaagtcaccgggcgtggatcccaagcagttggcagccgaactgcaaaaggtaagcttgcagcagagccctctggtgctgagcagtgtcgtcgaaaaggggtcccatgtccatagcggtcccacatcagctgggagcagtagcgtgccctccccaggacagcctggtagtccttccgtcagcaagaagaagcatggatcgtcgaaacccaccgatgggactaaggttgtctcccacccgattaccggagagatacagttgcaaataaactatgacctgggcaatctaataattcacattctgcaggcaagaaacctggttccaagagacaacaatggctactcagatccctttgtgaaagtgtatctcctgccaggcagaggccaagtaatggtggtgcagaacgcaagtgctgagtataagaggagaaccaagcacgttcaaaaaagcctgaatcccgagtggaaccagaccgtcatttacaagagcatatctatggaacagctgaagaagaagacactcgaggtgacagtttgggactatgatcgcttttctagtaacgatttcctcggagaggtgctcatagatctgagttctacaagccatctcgacaacacaccccgctggtaccctcttaaagaacaaactgaatccattgatcacggaaagagccacagttcccagagtagccagcagtccccaaaacccagtgtaattaaatcccggtctcacggcatcttccccgacccaagcaaggatatgcaggtccctaccattgaaaagtctcactcatccccaggctccagcaagagttcatctgagggtcacctcaggtctcacgggcctagcagaagtcagagcaagacatcagtcacccagacccatttggaagacgcgggagccgctatagccgctgctgaagccgccgtacagcagttgagaatacagccgactaagcccccaaaccaccgccccgcagagagctctgtctcaaccggatcaagcggatctagttttggctccggctacagtgtggattctgagggctcttctagcactgccggagagaccaatttgtttcccattcccaggatcggcaagatgggacaaaatggacaggagccagtaaaacagcccggagtcggcgtaggactcgccgatactgaggccaagacacaggtaatgggagaaattaaaatcgcccttaagaaggaaatgaaaactgatggagagcagctcattgtcgaaattctccagtgcagaaatattacatataagttcaaatccccagaccacctgccggatctttatgtaaagatatacgtaatgaacattagtacacaaaagaaagtgattaagaaaaaaacacgggtgtgtagacatgatcgagaaccctcattcaacgaaaccttcaggttctccctctctccagcaggccactcattacagatattgctgttttctaacggtggcaaatttatgaagaagacactcattggtgaagcttgtatctggctggataaagttgatctacgcaaacggattgtgaattggcacaaactgctggtctcgcctacacaaactcactag

SEQ ID NO: 199654 - DNA, 1269 bp, synthetic construct
  misc_feature 1..1269: note = Description of Artificial Sequence: Synthetic coding sequence
  source 1..1269: mol_type = other DNA
accaaggtgtggaacagcaacggcctgggcatccggatcgtgggcgggaaagaaattccaggtcactccggcgaaatcggcgcctacattgcaaagatcttgcccggcggaagcgcggagcagacggggaagctcatggaaggtatgcaagtattggaatggaatgggatcccactaactagcaagacatatgaagaagtccagtcgatcatctctcagcaaagcggcgaagcagaaatatgtgtgcgcctcgaccttaacatgctgtcagactcagagaatagtcagcatctcgagttgcacgaaccaccaaaggccgtagataaggccaaaagccctggtgtggatccgaagcaactggctgctgagctgcagaaagtgagcctgcagcagagccccctcgtgctctcatccgtggtagagaaagggagccatgttcattcagggcccaccagcgcaggctcatccagtgtgcctagccccgggcagcctggctcaccctctgtctctaagaagaagcatggcagctcaaagccaacagacggtactaaggttgttagccaccctatcactggggagatccagctgcaaattaactatgatctcgggaacctaatcattcatatactacaagcgcggaacttagtgcccagggacaataacggatatagcgacccatttgtaaaggtataccttctccctggtcgaggcgctgaatataagagacgaaccaaacacgttcagaagtccctgaatcccgaatggaatcagaccgtaatttacaagtcaatttctatggaacaactgaagaagaagactctagaagtgaccgtatgggattacgacaggttcagctccaatgatttcctgggcgaggtgttaatagatctgtcgtcaacttcgcacctggacaacactccccgatggtacccactgaaagaacagaccgaaagcattgaccacgggaagtcccactccagtcagtcttcacagcaaagcccaaaaccctctgtcattaagtctaggtctcacggcattttccccgacccctctaaagatatgcaggtcccaaccatcgagaagtcccattcctccccgggctcatccaagagctcgtctgaaggccatctccgctctcatggcccaagtcgctcacagtccaaaacaagcgtcacacagacccatctcgaggacgcaggagcagccatcgctgctgccgaagctgcagtccagcaacttcgcattcaaccgtctaagcgccgaaagtag

SEQ ID NO: 199655 - DNA, 14808 bp, synthetic construct
  misc_feature 1..14808: note = Description of Artificial Sequence: Synthetic coding sequence
  source 1..14808: mol_type = other DNA
atgggcaacgaggccagcctggagggcgagggcctgcccgagggcctagccgcggctgctgctgctggcggtggggcgtccggagctggctccccttcacatacagccatacccgctggcatggaggccgacctgtcacagttaagcgaagaagaacggcgacagatcgcggcagttatgtcacgcgcgcagggcctgcctaagggctccgtgcccccagcagccgccgagtccccctccatgcatcgcaagcaggaattggatagttcccatccccctaagcagtctgggcgcccccctgatcccggtaggcccgctcagccaggtctgagtaaatctcgtaccaccgacaccttccggagtgagcagaaattacctggccgcagcccaagcaccatctccttaaaagagtccaaaagtcgaacggatctgaaagaagagcacaagtccagtatgatgcccggtttcttgtctgaagtcaatgccttaagcgcagttagcagtgtcgtgaataagtttaatccatttgacctcatctctgactcagaggcatcccaagaggaaaccaccaaaaaacagaaggttgtacaaaaggaacagggcaagccagagggcattatcaaacctccgctgcagcagcagccacccaagcccatcccaaagcagcaagggcccggcagggatccactgcagcaggatggtactccaaagagcatcagctcacagcagcccgagaaaattaagtctcagccgcccggcacaggcaagcccattcaggggcccacacagactccacagactgaccacgccaagcttcccctccagagggacgcctcacgtccacagacgaagcaggctgacatcgtgcgcggagagtctgtgaagccttctcttccatccccgagcaagcctcccattcagcagcctacacccgggaaaccacccgcacagcagcctgggcacgagaaatcccaacccggccctgctaagcctccagctcagccaagcggactgaccaagccgctcgcccagcagccaggcacagtgaagcccccagtgcagccgcctgggacgacgaagcctcccgcccaacccctggggccggccaagccgcctgcacagcagaccggctctgagaagcccagctccgagcagcctggccctaaggcactggcccaaccccctggtgtgggtaaaactcccgcccagcagcctggaccagctaaacctcccactcagcaggtcggtacacccaagcccctagcccagcagcccggtctccagtccccggccaaagcaccaggacctaccaagactcccgtacagcagcctggcccagggaaaatccctgcccaacaggccggtcccggcaagacctccgcccagcaaactggcccaacaaaaccccctagccagctccctggccctgcaaaaccgcctccacaacaacccggccccgctaagcctccgcctcaacagccaggttccgcaaaacccccttcccagcagcccggaagtacaaaaccaccccctcagcagcccgggcccgccaaacccagtccgcagcagccggggtctaccaagccccccagtcagcagcccgggagtgccaagccatcagctcagcagccaagtcctgccaagccttcagcccagcagagcactaaacccgtgagccagacaggcagcggaaagcccctgcagccacccaccgtcagtcctagcgcaaaacagcccccctcacagggtctacccaagaccatctgtccactgtgtaacacaactgaactgcttctgcatgtccctgagaaggccaactttaacacttgcaccgagtgccagaccacagtatgttccttgtgcggctttaatccaaatccccacctaactgaggttaaagagtggctctgtctgaactgccagatgaaacgggccctgggtggggatctggcgccagttccatcatcaccccaacccaagttaaagacagcgcccgtgacaacaacatctgcggtgtccaaatccagtccccagcctcagcagaccagtccaaagaaagacgcggcgcctaaacaggatctgagcaaggcacctgagccaaaaaaaccaccccccctggtcaagcagccaactctccatggctctccaagcgcgaaagcaaagcagccccccgaggctgattcactgagcaaaccagcaccccctaaggagccctcggtgccctcagaacaagacaaggcgccggtcgccgacgacaaacctaaacagccgaagatggtgaagcccacaacggacctggtgagtagttcctctgccacaacaaagccagacataccctcctctaaagtgcaatctcaggccgaggaaaagactacccctcccctaaaaacggactccgcgaagcctagccagagctttcctcccaccggagaaaaagtttcacctttcgacagtaaggcgatcccaagaccagccagcgattccaagattatatctcacccggggcccagcagtgagtctaagggccagaagcaagtggaccctgttcagaaaaaagaagagccgaagaaggctcagacaaagatgagtcctaaacccgacgcaaaaccaatgccaaaagggtctcctacaccacctggaccccgaccaaccgccggacagaccgtgcctaccccccaacaaagtcctaagcctcaagagcagtcacgccgtttcagtctgaatctgggcagcattaccgacgcccctaagtctcagccaaccactcctcaagagaccgtgacaggcaagttgtttggcttcggcgcctcgatttttagccaggctagcaatttaatcagtaccgccggccaaccgggccctcacagtcagagcgggcccggtgcccctatgaagcaggcgcccgccccttcccaaccccccacgagccaagggcctcctaaatctacagggcaggcaccccctgctccagctaagtcaataccagtgaagaaagagaccaaggctccggcagcagagaaactggaaccaaaggctgagcaagccccgacagtcaagaggaccgaaactgagaagaaaccaccccccatcaaggacagcaaaagccttactgctgaacctcagaaagcggttctgccaacaaaactggagaagtctcccaaaccagagtcaacttgtcccctgtgcaagaccgaattaaatattgggagtaaggatcctccaaactttaatacttgcactgaatgcaagaatcaagtctgtaacctgtgcgggtttaatccaactccacatctgaccgagatccaggaatggctctgcctcaattgccagactcagcgggccataagcggccaattgggggacatccgtaagatgccgcccgctccatccggtcccaaagcctctcccatgcctgtacccaccgaatcctccagccaaaagactgctgtgccaccacaggttaagctggtaaaaaagcaggagcaggaagtaaagaccgaggcagaaaaggttatactggagaaggtgaaggaaactctgagcatggagaaaatacctcccatggtcacgacagatcagaagcaagaggagagcaagctcgagaaagacaaagccagtgccctccaggagaagaagccactcccagaggaaaagaagctgattccggaagaagagaaaattcgcagcgaggaaaagaagccacttctggaggagaagaaaccgaccccagaagacaaaaagctgcttcccgaagcgaagacatccgcacccgaggaacagaaacacgacctgcttaagtcacaggttcagatcgcagaagagaaactagagggcagagtcgcaccaaagaccgtccaggaaggaaaacaacctcaaacaaagatggaagggctcccatccgggacccctcagagccttcctaaagaggatgacaaaaccacaaagacaattaaggaacagcctcagcccccatgcacagctaagcccgaccaggtcgagcctggtaaagaaaagaccgaaaaagaagatgacaaatctgacacctctagttcacagcagccaaaatcacctcagggcctgtctgataccggatattccagtgatggcatctccagtagtctcggtgaaattccaagcctcatcccgacggatgagaaagatatactgaaggggctgaagaaggatagcttcagccaagaaagctcgccaagttccccatctgacctggctaagctagagagcaccgtgctttcaattctcgaggctcaggccagcacccttgcggatgaaaaatccgagaagaagactcaaccccatgaagtgagccctgagcagcctaaagaccaagagaagactcagagcttgagcgagaccctagagatcacgatcagcgaggaggaaattaaggagagtcaagaggaacgtaaggacacatttaaaaaggatagtcaacaagacattcccagcagcaaggatcataaggaaaagtctgaattcgtggatgatatcactactagacgcgaaccatacgattcagtggaggagagtagtgagtcagaaaactcacctgtgccacagaggaaaaggagaacgtcagtagggagctcaagctcagacgaatataagcaggaagatagtcaagggagtggcgaagaggaggactttattagaaaacagatcatcgagatgtcagccgacgaagatgcgtctggctctgaggatgatgaattcattcgtaaccagctgaaagagatcagtagctctacagagtctcaaaagaaggaggagactaaagggaagggaaaaatcactgctgggaagcaccgccgcctcacccggaagtcgtctacgagcatcgacgaggatgctgggagacggcacagttggcacgatgaggacgacgaggcgtttgacgaatccccagagctcaagtacagagaaactaagtcccaggaatcggaggagctggtggtcactggtgggggaggtttacgacgctttaaaaccatcgaattaaactccaccattgccgataaatactcggcggagagttctcagaagaaaacaagcctctacttcgatgaagaacctgaactcgaaatggagtctctgacagactctccagaggaccggagtagaggagaagggtccagctctctccacgctagctcctttaccccaggaacttcacctaccagcgtgagctctctcgacgaagacagtgattcgtctccgtcccacaaaaagggagaatctaagcaacagcggaaagcccggcaccgtccccacggtcccttattgcccaccatcgaggacagtagcgaagaagaggaactgcgggaggaagaagagcttctgaaggaacaggagaagcagagagagattgaacaacaacagcgaaagtccagcagtaagaaatccaagaaagacaaggacgaactgagagcgcagcgtagacgcgaaaggcctaaaactccccctagcaatttaagccccatcgaagacgctagcccaactgaagagttgcgccaggctgcggaaatggaagagctccaccgctccagctgcagtgagtattcgccgtctatcgaatctgacccggaaggattcgaaatctccccagagaagatcatcgaggtgcagaaggtgtataagcttcctactgcggtgtctctgtactcccccacagacgagcagagtatcatgcaaaaagaaggctctcagaaggctttaaagagcgccgaagaaatgtacgaagaaatgatgcacaagactcacaagtataaggctttccctgctgccaatgaaagagacgaagtgttcgagaaagagcctctgtacggcgggatgttaatcgaagactacatctacgaatcactcgtcgaggatacctataatggatcagtggacggtagcctactaaccagacaggaggaagagaacggcttcatgcaacagaaaggaagggaacagaagataagactttctgaacagatatacgaagaccccatgcagaaaatcacagacctgcagaaggaattttatgaactcgagagcttgcactccgtagtgccccaggaagacattgtgtcatccagcttcataatacctgagtcacacgaaatcgtggatttgggaactatggtcaccagtaccgaggaagaaagaaagctgctggatgctgacgccgcatacgaggaactgatgaagcgtcagcagatgcaactgacaccgggttctagtccaactcaagcgccgattggagaagacatgaccgaatccacaatggattttgataggatgccagacgcatccctcaccagcagtgtgttgtctggggcgagcttgactgacagtaccagttctgcgactctgagcatcccagacgtcaaaataacccaacacttttccaccgaggaaattgaggacgagtatgttacagactatacccgcgaaatccaagagatcatcgcacatgagtctctcatcctgacttatagcgaaccctccgagagcgctacctccgtcccaccaagcgatactccctctctcacctccagtgtgtcttccgtttgtacaacggattcttcttcccccattacaacactagacagcattaccaccgtgtacacagaacctgttgacatgattactaaattcgaggatagcgaggagatttccagctcaacctactttccgggctcgattattgactatcccgaagaaattagtgtgtcccttgatcggacagcccccccggatgggcgtgccagcgcggaccatatagtgataagcttaagtgatatggctagcagtataatagagagtgttgtgcccaagcctgaggggcccgtggctgatacagtatccaccgatcttctgatttccgagaaggatccagtgaagaaagcgaagaaggaaacaggcaacggtatcatcctggaggtccttgaggcctatcgggataaaaaggaactcgaggccgagcgaaccaaatcatctctgtctgagaccgtgtttgaccatcctccttcctccgtgattgctttgccgatgaaggagcaattgtccaccacctacttcacttccggcgaaacattcggacaggagaagcctgcaagccaactaccaagtggatctccaagcgtgagtagtctccccgccaagcctaggcctttctttaggagctcctctctcgatatctctgctcagcctcctccccctcctcctccgccgccgccaccaccgccaccaccacctccacccccgccgccccccctacctccaccaacgagccccaaacccaccatactgccaaagaaaaagttaacagttgcatcacccgtcacgactgcaacgcctttgtttgacgccgtcaccaccttggagaccacagccgtgctgagatcgaacggcttgccagttaccaggatctgtacgaccgcaccacccccggttccaccaaagccgagtagtatcccatcgggactcgtcttcacacatcgccctgaaccctcaaagcccccaatagccccaaagccagtgattccccagttacccactaccactcaaaagccaacagacatacatcctaaacctactggactgtctctcacctcatcgatgactcttaacctcgtcacctcggccgattacaaactcccatccccaacctctccactgtcccctcattcaaataaatctagtccccgattttcaaagtctctgactgagacctacgtggtaatcacccttccaagtgaaccaggtacaccaaccgattcctcagctagccaggcgataacgagctggccattaggatccccaagcaaggatctagtatccgttgagcctgtgttcagtgttgtgccgcccgttacagcggtggaaatccccattagtagcgaacagactttttatatctcaggagcactgcagacgttctcggctacacctgtgactgcccctagcagctttcaggctgctccaaccagtgtgacgcagtttttgacaacggaagtcagtaagacggaagtatctgctacacggagcaccgctccctctgtgggcctgagctccatcagcatcaccataccaccggaacctctcgcccttgacaatattcacttggaaaaaccacagtacaaggaggacggaaagcttcagctcgttggcgacgtaatcgacctgaggactgtgcccaaggtggaagtgaagacaactgacaaatgtatcgatctgtccgcgtcaactatggacgttaagcgtcagattactgcaaatgaagtgtacggaaagcagattagcgccgtgcaaccaagcatcattaatctctccgtgacgtcttccatcgtcacgcctgtaagtctggcgacggagaccgtgacatttgtgacgtgtacagctagcgcaagttacaccacaggcactgaatctctggttggggcagaacacgccatgactactcccctacaactgacaacctctaagcacgccgagcctccatatcggatcccttccgatcaggtgttcccaatagctagggaagaggcgcccatcaaccttagccttggtactccagcccacgcagtgacccttgccatcaccaaacccgtgaccgtgccaccagtcggcgtgactaacggctggaccgactccaccgtaagccagggaatcacagatggcgaagtggtagacctttccaccacaaagtctcatcgaacggttgttactatggatgaaagcacctccagtgtcatgaccaagataatcgaggacgaaaagccggtggatttgactgccgggaggagggcagtgtgctgtgacgtcgtatataagcttccctttggcagatcctgcacggcacagcaacccgccacaactctgccggaagaccgattcggttatagagatgaccattaccagtacgaccggagcgggccatatggatacagaggcatcggcgggatgaagccatcgatgtccgacaccaatttagcagaggcaggccatttcttctacaagtctaagaacgctttcgactactccgagggcaccgataccgctgttgatctgacctctggacgcgtcactacaggcgaggttatggattactcttcgaagaccaccgggccttatcccgaaacccgccaagtcatttcgggtgccggtatcagtactccgcagtactcaactgcccggatgacccctccacctggccctcaatattgcgttgggtctgtgctgcgctcttctaacggtgtggtgtactcctctgttgcaacccctacgccatcaaccttcgcaataaccacccaacctggcagcatcttcagcaccaccgtgcgggatttgagcggcattcacactgcagacgctgtgacatcactgcccgcgatgcaccactcacagcccatgccccggagttactttatcacaaccggggccagcgaaacagacattgcggtgaccgggatcgacatcagcgcatccctgcagaccattaccatggaaagcctaaccgcagagactatcgattctgtcccaacactgacgactgccagcgaggtgttccccgaggtagttggagacgagtccgcattgcttattgtacctgaggaggacaagcagcaacaacagctcgatctcgaacgcgagctcttggagctcgagaagatcaagcaacagaggttcgcggaagagttggagtgggaaagacaggagatccagcgtttcagagagcaggaaaaaattatggtccagaagaaactggaggagctgcaatcaatgaaacagcatttactctttcagcaagaagaagaacgccaggcccagttcatgatgaggcaagagacgcttgcccagcagcagctgcagctcgagcagatccagcagctccagcagcagctccaccagcagctcgaggagcagaagataaggcaaatataccagtacaactacgacccctctgggaccgcctcaccacagaccacaacagagcaagctatcctcgagggacaatacgctgccttagagggtagccagttctgggccaccgaggatgccaccactaccgcttctgccgttgtggccattgaaattccgcagtcccagggttggtacactgtgcagtctgacggagtcactcaatacatcgccccacccggcattctgagtaccgttagcgaaataccactgacggatgtggttgtcaaagaggaaaaacagccgaaaaaacgttcttctggcgctaaagtgcggggacagtatgacgacatgggcgagaatatgacggatgatcctcgctcttttaaaaagattgtcgactcaggcgtgcagactgatgatgaagacgccaccgaccgtagctatgttagccgccggagacggacaaagaagagtgtggatacttctgtacagaccgacgatgaagaccaggacgaatgggatatgcctaccagatcaagacgtaaggccagagtgggtaaatacggtgatagcatgacagaagcagataaaaccaaaccgctctcaaaagtgtcttccatcgccgtgcagaccgtggccgagatttccgtccagaccgagcctgtgggtacaatccgaaccccatcaatccgggcaagagtggatgctaaggtcgaaataatcaagcacattagcgcaccggaaaagacctacaaaggtggctcattaggctgccagaccgaagcagattccgacacgcagtctccacagtacctcagtgcaacttccccccccaaggataaaaagagaccaacccctctggaaattggttatagctcacatctacgggctgatagtaccgtgcagctagccccatcccctcccaagtccccgaaggtcttatatagccccatctcccccttatcccccgggaaggcacttgagtcagcattcgttccgtacgagaagcctctgccagatgacattagtcctcagaaagtgctgcatccagacatggctaaggttcctccagccagtcccaagaccgctaaaatgatgcagcggagcatgtcagatccaaagcccctttcgcccaccgctgacgaatcatcccgggctcccttccagtatactgagggttacaccaccaaagggtctcaaacaatgacgtcctcgggggctcagaaaaaagtcaagcgcacactccccaatcccccccctgaagaaatctccactggaactcagtctaccttttcaacaatggggaccgtgagccgccgacgcatttgtcgcaccaacacaatggcccgggcgaagatcttgcaggacattgacagggagctagatttagtggagagagagtccgccaaattgcgcaagaagcaggcagaactggacgaggaggaaaaagaaatcgacgccaagcttcggtatttggagatgggcattaatcgccggaaagaggccctgctgaaggaacgggaaaaacgagagcgcgcgtatctgcagggtgtggcggaggacagagattacatgtctgactcagaggtaagctcaacacgtcccaccaggatagagtcccagcacggcattgagagaccccgcactgctccacagaccgagtttagccaatttatcccaccccagactcagactgagtctcagttggtgccacccacttcgccttatacccagtatcaatactcatccccggccctccccacacaggcgcccacttcctacactcagcagtcacacttcgagcagcagacactgtaccatcagcaggttagcccataccagacccagccaacgttccaggcggtggccaccatgagttttactcctcaagtgcagcccacgcctacacctcagcccagctatcagctccccagccagatgatggtcatacagcaaaaaccgcgccaaactaccttgtacctagaacctaagattacctccaactatgaggttatacggaaccagcccttaatgattgcaccagttagcactgacaataccttcgccgtatcccacctcggcagcaagtataattcgctggatttacgcatagggctggaagaacgctcgagcatggcctcgtctcccatatccagcatttcggctgattcgttttacgccgatatagatcatcacacaccccgtaactatgtactcattgacgacatcggtgagataaccaaagggactgccgccctctctactgcctttagtctccatgaaaaggatttatctaagacagaccgcctgctgcgtacaaccgaaactaggagatctcaggaagttaccgatttcttagcccccttgcaatccagctctcggctgcattcctatgttaaagcggaagaagatcccatggaagatccatacgaacttaagctgttaaaacaccagattaagcaggagtttcgtagaggaacagagagtctggaccaccttgcgggcctctcacactactaccatgccgatacaagttatcgccacttcccaaagagcgaaaagtatagcatttctcgactcaccctggagaaacaggcagctaaacagttgcccgccgctattctttaccaaaagcaatcaaagcataagaagtccctgatagatccgaagatgtcaaagttcagtcccatccaggagtcacgggacctggagcctgattacagctcgtatatgacatcgtcaacttcgtccataggcggaattagctcccgagctcgcctcttgcaggacgatatcacatttggtctccggaaaaacataaccgaccagcagaaatttatgggaagctcgcttgggacaggattaggcacactcgggaatactatcaggtcggctcttcaggacgaagcagacaagccatactcctccggaagtaggagtcgcccttcaagtagaccctcatctgtctacggcctggatctgtcaattaaacgtgacagctctagctccagtcttcgcctgaaggcccaagaggctgaagcccttgacgtgtctttcagtcacgccagcagcagtgcgcggacaaagccaacttccctgcccatatcacagtcccgagggcggattccaatcgtagctcagaactctgaggaggaatcgcccctttccccggtgggccagcctatgggcatggcaagggccgcggccggacctctgccacctattagcgcagacactagggatcagttcggatctagccacagtctgccagaggtgcaacagcacatgcgtgaagaatcacgtactcgcggttatgaccgtgatattgcctttatcatggatgacttccaacacgctatgtctgattctgaggcctaccaccttcgcagggaggaaacagactggttcgataaaccccgagaatcccgcttagagaacggacacggcttggatagaaagctgcctgagcgcttggtccattctagacccttatcccaacatcaggaacagatcattcagatgaatggcaagacgatgcactacatattcccacacgcacgcattaagattaccagagactctaaggaccacacagtgtctgggaatggtttggggatccggatagttgggggaaaagagataccggggcattccggcgaaatcggcgcctatatagcaaagatcttaccaggaggatctgctgaacagactggaaagctgatggaagggatgcaagtgctcgaatggaatggcatccctctgacaagcaaaacatacgaggaggtccaatctatcatctcccaacagtctggcgaggcggaaatatgcgtccgtctagacctcaatatgctctccgacagtgagaacagccagcacttggagttacacgaacccccaaaggccgtagataaagccaaaagcccaggagtcgatcctaagcagcttgccgccgagctccaaaaggtgtccctccagcaaagccctctcgttctgagctctgttgtggagaaaggtagccacgtgcactctggaccaactagcgccggatcttcttccgtgcccagcccgggccagcccggcagccctagtgtgagtaagaaaaagcacggaagctcaaaaccgactgacggaactaaggttgtgtcgcaccctattacgggagagattcagttacagatcaattatgatctgggaaatctgattatccacatcctgcaggcaagaaatctggtgcctcgcgataacaacggctattctgacccattcgtgaaagtgtacctcttacccggacgggggcaagtcatggtcgtgcagaacgcctccgcagaatataaaagacgcaccaagcatgtgcagaaatctctaaaccccgaatggaaccagactgtgatctacaaatcgatcagtatggagcagctcaaaaaaaaaacacttgaggtgaccgtatgggactacgatcggttcagctctaacgacttccttggcgaggtactcattgacctgtcttccacttctcacctggataacacgcctcggtggtacccactaaaagaacagactgagagcattgatcacggtaagtcccactcaagccaatcaagccagcagtcccccaagccctctgtgatcaagtctcgtagtcacggtatattccccgaccccagcaaagacatgcaggtgccaaccatcgaaaaatcccattcctccccggggtcctccaagagcagcagcgagggtcacttgcggagtcacgggccctcacggagtcagtccaaaaccagcgtcacacagacccatctcgaagatgccggagcagcgatagccgctgccgaggctgctgtgcagcagttaagaattcagccaagcaaaaggcgaaagtag

SEQ ID NO: 199656 - DNA, 10908 bp, synthetic construct
  misc_feature 1..10908: note = Description of Artificial Sequence: Synthetic coding sequence
  source 1..10908: mol_type = other DNA
atgggcaacgaggccagcctggagggcgagggcctgcccgagggcctcgcggcagccgctgccgcgggaggcggagcttctggcgcaggttctccttcacacacagcgatccctgccggtatggaagcggacctctcacagctatctgaggaagaacgacgtcagattgcagccgtgatgagtcgggcccagggcctgcccaagggctcagtgccaccagcggccgccgaaagtcccagtatgcatcggaaacaggaactggattcttctcaccctcctaaacagagcggacgcccgcctgaccccggcagacccgcacagcctgggttgagcaagtcacgcacaacagatactttcaggagtgagcaaaagttgccagggagatccccctctactatctcactgaaggaatctaaatctcgaaccgatctgaaggaggaacacaagtcttctatgatgccgggcttcctgagcgaggtgaatgccctgagtgccgtgtcttccgtggtgaataagtttaacccattcgacctgatcagtgattctgaagcttcccaggaggaaacaaccaaaaagcagaaggtggtccagaaagagcagggaaaaccagagggcatcattaaaccacctttgcaacagcaacctccaaagccaattcctaaacagcaaggacctgggcgcgacccactccaacaggatgggacaccaaagtcaataagctcacagcagccagaaaaaatcaagtcacagcctcccgggaccgggaagccgatccagggccccactcagaccccccagacagaccatgccaaattacccttacaacgggacgcttctcgaccccagactaagcaagccgatatagtcaggggcgagagtgtcaaaccaagtctaccttcgccctccaagccaccgatccagcagccaactccaggtaaaccacctgcccagcagccagggcacgagaaatctcagccagggcctgccaagcccccagcccaaccttctgggcttacaaagccgctcgctcaacagccgggaacggtgaaaccccccgtccaaccccctgggaccaccaaaccccccgcccagccgctggggcccgccaagcccccggcccagcagaccggcagcgagaagcccagctctgaacaacctggcccgaaagctctggcacagcctcccggagtcgggaagacacctgcccaacagcccggtcccgccaagcccccgacccagcaggtgggcacacccaaacccctggcacagcagccgggtctccagagcccagctaaggcaccagggcctacgaagaccccggtgcagccaaagccaccatctcagcagccaggatcaacaaagcccccccctcaacaacccggacctgccaagccctcccctcagcagccagggtcaacaaagccgccatcccaacaacctggcagcgccaagccatccgcgcagcagccctcacccgcgaagcctagtgctcagcagagtacaaaacccgtctcccaaacgggctcaggcaaacctctgcagccccctaccgtgtctccatcggcaaaacaaccaccgagtcaggggctgcctaaaacaatctgcccactatgtaacactactgagctgttgctgcacgtgccggagaaagcaaattttaatacttgtactgaatgtcagacaactgtatgttctctctgcgggttcaacccaaacccccatctaacagaggtgaaagagtggctttgcttaaattgccagatgaagcgagctctgggcggagatctcgcccccgttccctcaagcccccagccaaagctaaagaccgctcctgtgaccaccacatcagcagtgtctaagagcagcccccagccgcaacagaccagcccaaaaaaagacgccgcacctaagcaagacctgagtaaagcaccagagcccaagaagccccctcccctggtcaagcagccgactctccatgggtccccaagtgctaaagccaagcagccccctgaggcagattccctgtcaaagcctgctcctcctaaggagcctagcgtgcccagcgagcaggacaaggccccggtggccgacgataagcccaaacagccgaagatggttaaacccactaccgatctagtgagctcgtcaagcgctaccactaagcccgacataccatccagcaaggtgcagtctcaggccgaggagaagaccaccccccccttaaagactgattctgctaaaccgagtcagagcttcccccccacgggggaaaaggtatccccgttcgactccaaggcaataccgcgacccgctagcgacagtaagatcatcagccatcctggaccaagttcggaatcgaagggacagaagcaagttgacccggtgcagaaaaaggaagaaccaaaaaaagctcaaaccaaaatgtcaccgaagccggacgccaaaccaatgccgaagggtagcccaacgcccccagggcctagaccaacggcaggccagacagtccctacaccgcagcagagtcccaaaccacaggaacaatcaagaaggttctccctgaatctgggttcaattacagacgctccaaaaagccagccgactacccctcaggagactgtgactggtaagctcttcggcttcggagcctcaatcttcagtcaagcctctaatttaatctctactgccgggcagcccggtccccacagccagagcggcccaggcgcgcccatgaaacaagcccccgctcctagccagccgccaactagtcaggggcctcctaagagcaccggccaggccccaccagcgcctgctaagtccattcccgtcaagaaggaaaccaaggcccctgctgctgagaagcttgaacctaaagccgaacaggcccctactgtgaagcgtaccgaaaccgagaagaaaccaccacccattaaagatagtaaatcattgaccgctgagcctcagaaagcggtcctgccaaccaagctcgaaaagtcacctaaacccgagtcaacttgtcccctgtgtaagactgaactgaatattggaagcaaggacccccccaatttcaacacttgtactgagtgcaaaaaccaagtttgcaatctgtgcggatttaaccctaccccgcatctgactgagaactgccagactcagagggcgatttctgggcaactgggtgatatacggaaaatgccaccagcccccagtgggcccaaggccagtcccatgcctgtgccaacggagagcagctctcagaagacagcagtacctcctcaggtgaagttagtcaagaagcaggagcaagaagtgaagactgaggcagagaaagtgatcctggagaaagttaaggagaccctttctatggagaaaattcctccaatggtcactacggatcagaagcaggaggagtcaaagctggagaaggataaggcaagcgccctgcaggaaaaaaagcccctgccagaagaaaagaagctgatcccagaggaggagaaaatcaggtcagaagaaaagaagccccttctggaagaaaaaaagcccactcctgaagataaaaagcttctacctgaggccaaaacatcggcccctgaggaacagaagcacgacctcttgaagtcgcaggttcagatcgccgaggagaaactggagggcagagtcgcaccgaaaaccgtccaagaaggaaagcaaccgcaaactaagatggaaggtctgccatcagggacgccacagtcattacccaaggaggacgataagaccacaaagaccatcaaagaacagccgcagccaccatgcactgccaaacctgatcaggaaaaagaggatgacaaatccgacacaagcagtagccagcagccaaaatctccccagggcctgagcgataccggctactctagtgacggcatttcttccagcctgggagagatccctagcctgattcccaccgatgagaaggacatccttaaaggcctaaaaaaggactcgttttctcaggaatctagtccgagttctccgagtgacctggccaaactagagtccaccgttctgtccatactggaagcccaggcgagtacactcgcagacgagaagtctgagaaaaaaacgcagccgcatgaagtgtcacctgaacaacctaaggatcaggaaaagactcaaagcttgtccgagaccctggagataaccatctcagaagaagagattaaggaaagccaggaagagcggaaggacacatttaagaaggactctcagcaggatattccctcctcaaaggaccacaaggagaagagtgagttcgtagacgatatcacaaccagaagggaaccctatgacagtgtcgaagaatctagtgagtcagagaactctccagttccccagcgcaagagacgcaccagcgtgggcagtagttcgtcagacgagtataagcaagaggacagtcagggatccggtgaggaggaagatttcattcgtaagcagatcattgagatgtctgccgacgaagacgccagtggcagcgaggatgatgaatttatccggaatcaacttaaagagataagctcgtcaaccgaatcccagaagaaggaggaaacgaaagggaagggaaagattaccgcggggaagcatcgccgcctgaccagaaagtcctcaaccagtattgacgaagatgcagggcgccgtcactcctggcacgatgaggatgacgaggcctttgatgagtcccctgaattgaagtaccgcgagactaaaagccaggagagcgaggaactcgtggtgacaggaggcggcgggttacggaggttcaaaactatagagctgaattcaaccatagcggataaatattcagccgagtcctcccagaaaaagacttctttatattttgatgaggaacccgaactggaaatggagtcgctcaccgattctccagaggatagatccagaggcgagggcagctcatctctgcacgcctcgtctttcacacctggcacctcacctacctccgtctcgtcactggatgaggacagcgatagttcgccaagccataaaaagggggagagtaaacaacagcgcaaagcccggcacaggccccatggcccactactgccgacgatcgaagacagctccgaggaggaagagctccgggaggaagaggaattgttgaaagaacaggagaagcagagagaaatagagcagcagcagaggaagtctagtagtaagaagtccaaaaaagacaaagacgaactccgggcgcagaggcgtcgggagcgacccaaaaccccaccttcaaacttatccccgatcgaggacgccagccctacagaagagctccggcaagctgcagagatggaggaactccacaggtcttcttgcagtgaatacagtccttccatcgaatccgatcctgagggcttcgagattagcccggaaaaaatcatcgaggtccaaaaggtctataagctgcccactgccgtgtccctgtattcaccaaccgatgaacaatccattatgcagaaagaaggatcccagaaggcactgaagtctgccgaagagatgtatgaagagatgatgcacaagacacacaaatataaggctttcccagcagcgaatgagcgggacgaggtctttgagaaggagcctctgtacggggggatgttgattgaagactacatctacgagagcctggtagaggacacctataatggtagcgtcgacggaagcctgctcacacgccaggaggaggagaacggcttcatgcaacagaagggacgtgagcagaagatccgactgtccgaacagatttacgaggatcctatgcagaagataaccgaccttcaaaaggaattttatgaacttgagtcactacacagcgtggtcccgcaggaagacatcgtgtcaagtagcttcatcataccggaatcgcatgaaattgtcgatttggggaccatggttaccagcaccgaggaagaacggaagctgctcgatgccgacgcggcctacgaagagcttatgaagcggcagcagatgcagcttactcctggtagtagccccacccaagccccaataggagaggacatgacagaaagtacgatggattttgatcgcatgccagatgctagcctgacgtcaagtgtgctgtcaggtgcatctctgactgacagcacatcttctgcaaccctctccattcccgacgtgaagattactcagcatttctccacagaagagatcgaagatgagtatgtgactgattatacccgcgagattcaggaaataatcgcccacgagagcttgattctgacctacagcgaaccatccgagagtgcaacctctgtaccaccgtccgacacaccatctctgaccagtagcgtgtcaagcgtttgcacaactgattcatctagtcctataaccactcttgatagcattactaccgtgtacaccgaacccgtagacatgattaccaagttcgaggatagtgaggaaatttctagtagcacctactttccaggctccatcattgactatcccgaagaaatctcagtctctttggaccggacagctccccccgatggcagggcatccgcagatcatatcgtgatctctttaagcgatatggctagctcgattattgaaagtgttgtccctaaacccgagggccccgtggctgacacggtctccacggacctccttatctctgagaaggatccagtgaaaaaggcaaagaaggagaccgggaatggcataatcctggaagtcctggaggcctatcgggataagaaggaactggaggccgagagaaccaaaagcagcctcagcgagacagtcttcgatcatccaccatctagtgtgattgccctccccatgaaggagcaattatctactacctactttacaagtggtgaaactttcggacaggagaaaccagcatcacagttgcctagcggctccccctcagtcagcagtctccccgcaaagccgcgccctttcttcagaagctcctccctggatatttccgcacaacctcctccacccccaccgcctcccccccctccacctcccccccctcctccacctccacccccaccacttcccccccctacgtctccgaagcctaccattctgcccaaaaagaaactaactgtagcaagcccagtcaccactgctacaccactattcgacgccgttaccaccctggaaactaccgctgttctccgcagcaacggcctgccagtgaccagaatctgtaccaccgcccccccaccggttcctcctaagccctcttccatcccctcaggacttgtctttacgcaccgaccagagccaagcaagcctcctatcgcgcccaagcctgtgataccgcaactgcccacaaccacacaaaagccaactgacattcacccaaaaccgaccggattgtctctgaccagctcaatgacactgaacctggttactagtgctgattataaattgcccagcccaacatcacccttatcccctcactccaacaagtcaagccctaggttttctaagagcctcactgagacttacgtagtcatcacgctcccgtccgaacctggaacacccacagattcaagtgcaagtcaagctatcaccagctggcccctcggttccccctccaaagatctggtgtcagtggagccagtcttttccgtcgtaccgcctgttaccgccgtggagatccctatctctagcgagcagaccttttatatctccggcgccctccagacattctcagccactcccgtaaccgctcctagcagttttcaggccgctcccacgagcgttacccagtttctgacaaccgaggtctccaagacagaggtttccgcaacccgcagcaccgccccctcagtagggttgagcagtatcagtattactatccctcctgagcccctggcattggataacatacacttagaaaaaccacaatataaggaagacggtaaattgcagttagtcggagacgtaattgacttgcggaccgtccccaaggtagaggtgaagacaaccgataagtgcatagacctttctgcaagtacaatggacgtcaagcgccagataacggctaatgaagtttacggcaaacagatatccgccgtgcaaccgtctataatcaaccttagcgtcacaagctccatcgttactcccgtatccctggccactgaaaccgtcacattcgtgacttgtactgcttctgcatcctacactacaggcacagaaagcctcgtgggagccgaacatgctatgaccacaccattgcagctgaccacgtctaagcacgccgaaccaccataccgcattccctccgatcaggtgtttcctatcgctcgtgaggaagcacctattaacctgagtttgggcacccccgctcatgccgtcacccttgcaattacaaagccagttacagtgccgcccgtgggggtcactaatggctggaccgattcgacagtgagccaggggatcaccgatggagaagttgtcgatttgtctactacaaaaagtcaccgcacagtggtgacaatggatgaaagcaccagtagtgttatgacaaaaattatagaagacgaaaaacctgttgacctgacggctggtagacgcgctgtctgctgtgacgtcgtctacaagctcccatttgggaggagctgcacagcccagcaacccgccactacattgcccgaggatcgttttggctaccgcgacgaccattatcagtacgatcggagcggcccttatgggtatcggggtatcggaggcatgaagcccagtatgagcgatactaatctagctgaggctggtcattttttttataagtctaaaaatgctttcgattactccgagggcactgatacagccgtcgacctcacgagcggtagggtgacaacaggagaggtgatggattatagcagcaaaacaactgggccataccctgagactaggcaggtgatttcaggcgccggcatcagtactccccagtatagcacagcaagaatgactcccccacccgggccccagtactgcgtgggctcagtgcttcgcagctctaatggagtggtgtacagttcagtggctacccctaccccatccactttcgcaatcaccactcaacctggaagcatatttagtactactgtgagagatctcagcggaatccacacagccgatgcagtcaccagtcttccggcaatgcaccatagtcagcccatgcctcggtcctattttatcactaccggggcgtcagagacagatatcgcagtgactgggattgatatcagtgccagtcttcaaacaattacgatggagtctctgactgcagaaaccattgattccgtgcctaccttaaccactgcaagcgaggtgttcccagaggtggtgggggatgaaagtgccctgctcatcgtgccagaggaggacaaacagcagcagcagctggatctggagcgcgagttgctggagttggagaaaatcaagcagcaaagattcgccgaggaacttgagtgggagaggcaggaaattcaaagatttagggaacaggagaaaattatggtgcagaagaagctcgaagagctgcagagcatgaaacaacatcttctctttcagcaggaggaagaacgccaggcgcagtttatgatgaggcaagagacactcgctcaacagcaactgcagctcgagcaaattcaacaactgcaacagcagctacaccagcagctggaagaacagaagatcaggcaaatctatcagtataactacgatccttcaggaactgcctcacctcagaccacgactgaacaggccatcctggagggtcaatacgctgcacttgagggcagtcagttctgggcaactgaagacgcgacaacaacggcatccgcggtggtcgcaatcgagatcccccagtcacaggggtggtatactgtacagtcagatggcgtaacccagtatattgcccctcccggtatcttatctacggtgtccgagataccactcacggatgtggttgtgaaggaagaaaagcagccgaaaaaacgatcgtcaggcgctaaagtacggggtcagtacgacgacatgggggagaatatgaccgacgaccccagatcgtttaagaagattgtggattcaggcgtgcagacagacgatgaggacgcgactgacagatcttacgtatcgaggcgtaggagaactaagaagtcagtcgatacgtctgtacagaccgacgatgaggaccaggacgagtgggacatgccgactcggtctcggcgtaaggcccgagtcggcaagtatggagattccatgactgaggctgacaaaacgaaaccgttgtcaaaggtgtccagcatcgccgttcagaccgtcgcggaaatctctgtgcagacagaacctgtcggcacaatccgaacaccgtccattagggctcgcgtcgatgccaaggttgagatcataaagcacatcagtgcccccgaaaaaacctacaagggcggatcccttggctgccagactgaagcagactccgacacccagtctccccagtatctgagcgcaacttctccgcctaaggacaagaaacgacccactccactagagattggatacagcagccacctacgggccgatagcacggtccaactggccccctctcctcctaagagccctaaggtactctactccccaataagcccactgagccctggtaaggccctggagtcagcctttgtaccctatgagaagcccctgccagacgacatcagccctcagaaggtgctgcatcccgatatggccaaggtccctcccgcttcacctaaaaccgctaagatgatgcagcggtcaatgagcgatcctaaaccactttcccctacggccgacgagtccagccgcgccccatttcagtacacagagggctatacgtag

SEQ ID NO: 199657 - DNA, 1635 bp, synthetic construct
  misc_feature 1..1635: note = Description of Artificial Sequence: Synthetic coding sequence
  source 1..1635: mol_type = other DNA
atggagaagctgcaggagcacctgatcaaggccaaggccttcaccatcaagaagaccttagagatatacgtcccaatcaagcagttcttctacaacctcatccacccagaatactccgccgttaccgatgtatacgttctgatgttccttgcagataccgtagactttattataattgttttcggcttttgggcctttggaaagcactctgcggccgccgacatcacatcatcactgagtgaggatcaggtacctggtcctttccttgttatggttttgatccaatttggcactatggttgtggatagggccctgtatctacggaaaaccgttctcggtaaagtaatctttcaggtgattctggtgttcggtattcacttttggatgttcttcatactcccaggtgtaactgagcgcaagttcagccaaaacctcgtggcacaactctggtattttgttaaatgtgtctactttggtttatccgcataccagattagatgtggatacccaacgcgcgtcttaggaaacttcctcaccaaatcatacaattacgtgaatcttttcctgttccaaggcttccgactggtgcctttcctgactgagcttcgggccgtcatggattgggtgtggaccgacactacactttccctatccagttggatctgcgttgaagacatttacgcccacatttttatactcaagtgctggagagagtccgagaagcccatctttacaatgagtgctcagcagtcgcagctgaaagtgatggatcaacagtctttcaacaaattcattcaggcttttagccgcgacactggggctatgcagtttctggaaaattacgaaaaggaggacatcaccgtggctgagctcgaaggaaacagcaactccctgtggacaatcagtcccccctctaaacagaagatgatccacgagttgctcgatcccaatagtagtttttcggtagttttctcatggagcatccagcggaatctctcactgggcgcaaagtcagaaatcgccactgataagctgagttttcctctcaagaacattactcgaaagaatatcgcaaagatgatcgcaggaaacagcacggagtcaagtaagactcccgtcaccatcgaaaaaatctacccatactatgtgaaagcgccctctgacagtaattcaaaacctatcaaacagttgctgtccgaaaataattttatggatatcacaatcatcctgtctagagataataccaccaaatacaactcggaatggtgggtgctgaatcttacaggcaatagaatctacaacccaaactcccaggctctggagctggtcgtctttaatgataaggtaagcccgcctagtctgggctttttggcagggtatggcattatgggcctgtacgcaagcgtggtgctcgtaattggaaaattcgtgcgtgagttttttagcggcattagtcactctattatgtttgaagaactgcctaacgtagaccgcatactgaaactgtgcaccgacatcttcttagtacgggagacaggagagttggagttggaagaagacctatatgcaaagcttattttcttatacagaagtcccgagaccatgatcaaatggacaagggagaagacaaactag

SEQ ID NO: 199658 - DNA, 8259 bp, synthetic construct
  misc_feature 1..8259: note = Description of Artificial Sequence: Synthetic coding sequence
  source 1..8259: mol_type = other DNA
atggccagcgaggtggtgtgcggcctgatcttccggctgctgctgcccatctgcctcgccgtggcatgtgcattccggtataacgggctttcgttcgtgtacctgatctatctgttgttgatacctttgttcagtgaacccacaaaaacaactatgcaaggacacacaggccgccttctgaagagcctttgcttcattagcctatcttttctcctcctgcatattatctttcacatcacactcgtaagcctggaagcccagcacagaatcgctccaggttataactgttctacctgggagaagacgtttaggcaaattggattcgagtccttgaagggtgcagatgccgggaacggtattagggtatttgttccagatattgggatgtttattgctagcctgactatatggctgctgtgtcgcaatattgtgcagaagcctgttacagacgaagccgcccagagcaatccggagtttgaaaacgaggaactggccgaaggtgagaaaatcgactccgaggaggctcttatttacgaagaagacttcaatggcggtgacggagtggagggcgaactggaagagtccaccaagctcaagatgttccgcaggctcgcctccgtggccagcaagttaaaggagtttatcggaaatatgattacaactgcggggaaggtggtcgttacaatccttctgggcagctcggggatgatgctgccttctctcacctcttcagtgtacttctttgtgttcctgggcctatgtacctggtggtcctggtgtagaacatttgatccactcctgttctcctgcctctgcgtgttgctggcaatctttaccgccggtcatctcatcggtctctacctgtaccagttccagtttttccaagaggcagtacctccaaatgactattatgcacgcctgttcggcataaagtccgtgattcaaacagattgtagttctacgtggaagataattgtcaaccccgacttgagctggtaccaccacgccaatccaatactgttattggtgatgtactacaccctggccaccctcattcgtatctggctgcaggagccactcgtgcaggacgaaggcaccaaagaagaagacaaagctctcgcgtgctcacctatccaaattactgcagggcggcgccgctctctgtggtacgccacacattatccaaccgatgaacgaaagctactctcaatgactcaagacgattacaaacctagtgatggactcttggtcaccgtgaatggtaatcccgtggattatcacacgatccacccttcccttccgatggagaacgggccaggcaaggcagacctttatagcacacctcagtatcgatgggagccctcagatgagtcttcggaaaaaagggaggaggaggaggaggagaaggaggagtttgaagaggaaagatctagagaggaaaagagatccatcaaggtccacgccatggtctcagtcttccaatttattatgaagcagagttacatctgtgcgcttattgctatgatggcctggtctattacctaccactcttggttgacatttgttctgttgatttggagctgcactctgtggatgatcaggaatcgcaggaaatatgccatgattagttcacccttcatggtcgtgtatggaaatctgctcctgattctgcaatatatatggagttttgaactgcccgagattaagaaagtgcccggattccttgagaagaaagagcctggagagctcgccagcaaaatacttttcaccattactttttggttactcctaaggcagcatctgactgaacaaaaggctctgcaggagaaagaagcactgttgtccgaggtcaagatcgggtcccaggagaacgaggagaaggatgaagagctgcaagatatccaggtcgaaggagagcccaaggaggaggaagaagaggaagctaaggaagagaagcaggagcgtaagaaagttgaacaggaggaagcagaggaagaagacgagcaggatattatgaaagtcctggggaacctggtcgtcgctatgttcatcaagtactggatatacgtatgtggcgggatgtttttctttgtctctttcgaggggaagatagtcatgtacaagattatctacatggtgttattcctcttctgcgtagccctctaccaagtgcactatgagtggtggcgcaaaatcctaaagtatttttggatgagcgtagtaatctacaccatgctcgtgctcatctttatatacacctatcagttcgagaatttccctggactctggcagaatatgacaggactgaaaaaagaaaaactagaggatttggggttgaaacagtttactgtggcagagctgttcactcggatctttatccctacctcctttttgttagtgtgtattctacatttgcactactttcacgacaggtttctcgaactaaccgacttgaagtcaattcccagcaaagaggacaataccatttataggctggcgcatcccgaaggctccctgccggacctaaccatgatgcaccttactgcttcgctagaaaaacccgaggttaggaagcttgcagaacccggcgaagagaagctggaaggttattctgagaaggcccagaagggcgatctgggcaaggacagcgaagagtccgaagaggacggcgaagaagaggaagaatcggaggaggaggaggaaacatctgacttgcggaacaaatggcatctggtcattgaccggctgaccgtcttatttctgaagtttctcgagtactttcacaaactccaagtcttcatgtggtggatactagagctccatattatcaagattgttagctcctatataatttgggtgtccgtaaaagaagtaagcctgttcaattacgtcttcctgatcagctgggcctttgcactgccgtatgctaagctgcgtcggctggcctcctctgtctgcaccgtttggacatgcgtcattattgtgtgcaagatgctgtatcaattgcagactataaaacctgagaatttttccgtgaactgctccttaccaaatgaaaaccagaccaacattccgtttaatgagcttaataaaagcttactgtattcagcccccattgaccctaccgagtgggttgggctgcgcaaatcaagtccgttgctggtttacctgaggaataacctactgatgctggctatacttgcttttgaggtgactatctacaggcaccaggagtattacaggggtcgtaataacttgaccgcccctgtgtcaagaaccatattccacgacatcactcgcctgcacctggacgatggattgattaactgtgcaaaatactttatcaattactttttttacaagttcggcctggagacttgctttcttatgagtgttaacgtgataggtcagcggatggatttttacgctatgatacacgcctgctggctgatcgccgtcctctataggcgcaggcgcaaggcgattgctgagatatggcccaagtactgctgctttttagcatgcattatcacctttcagtacttcatctgcatcggcatcccacccgctccctgccgcgactacccgtggcgctttaagggagcctcctttaacgataatataattaagtggctctactttccagattttattgttaggcctaatcccgtctttctggtgtatgatttcatgctcctgctctgtgccagcctgcagagacaaattttcgaggacgagaataaagccgcggtgaggataatggcgggcgacaatgttgagatttgtatgaatctcgacgccgctagcttttcccaacataacccagtccccgacttcatccattgtcgctcttacctagatatgagcaaggtcatcatcttctcctatctgttctggttcgtgctcactattattttcatcacgggcacaactagaatcagtattttctgcatgggttatctagtggcttgtttctattttttacttttcggtggtgatctgctcctcaaacccattaagagcattctgcggtattgggactggctgatcgcctacaatgtgttcgtgatcaccatgaagaacattctgagcattggagcctgtggctatattggcaccctagtgcacaacagttgttggttgatccaggcctttagcctggcctgcacagtgaagggctaccagatgcctgccgcaaactccccatgtacactgcctagtggagaggccggaataatctgggactctatctgctttgcctttctactactccagagaagagtattcatgagttactatttcttgcatgtagtggctgatataaaggcaagccagatcctggcttcaaggggggctgagctgttccaggccactattgtgaaagccgtgaaagcaagaatcgaggaggagaaaaaatcaatggaccagctgaaacggcaaatggatagaataaaagcaaggcagcagaagtacaagaaaggaaaggaacgaatgttaagtttgacccaggagcccggcgaaggccaggacatgcagaaactctctgaggaagatgacgagcgcgaggcagacaagcagaaggcgaagggcaagaagaagcagtggtggcgcccctgggtcgatcacgcttccatggtacggagtggagattattatctgtttgagacggactctgaggaggaggaagaagaggagctgaagaaggaagatgaggagcctcctcgccgcagcgcttttcagttcgtttatcaggcctggataactgaccctaaaacagctcttcggcagcgccacaaggaaaaaaaacggagtgcccgagaggagcgcaaaagacggagaaagggtagcaaagagggtcctgtggagtgggaagatagggaggacgagcctattaagaaaaaaagtgatggccctgataacattattaagagaatcttcaatatcctcaaattcacctgggtgctgttcctggctacagttgactcgttcaccacttggctgaacagcatctcccgcgagcatatcgacatctctaccgtgttaaggatcgagaggtgtatgctcacaagagagatcaagaagggaaacgtccccactagagagtcaattcacatgtattaccagaatcacattatgaacttaagccgcgagtccgggttggatactatagatgagcaccccggggcggcatctggcgcgcagaccgctcaccgcatggattccctggattcacatgactccatcagctcagaacccacgcagtgtaccatgctatattcgcgtcaggggacaaccgagaccatcgaggaagtggaagccgaacaggaagaggaagctgggtctacagccccagaaccacgggaggcaaaagaatatgaagccacaggatacgacgtgggagcaatgggggccgaggaggcttccctcacccccgaggaggagctgacccagttcagcaccctcgacggcgacgtggaggcccctcccagttacagcaaggccgtgtctttcgaacacctcagtttcgggagccaggatgactctgccggcaaaaatcggatggccgttagccccgacgattcacggacagacaagttgggtagcagcatcctgccccccctcacccacgaactgactgcctctgaactgctgctaaagaagatgttccatgatgatgaactggaggaaagcgaaaagttttacgtgggacaaccgcgcttcctactgctcttctacgcaatgtataacactctggtggccaggtcagaaatggtgtgctacttcgtgattatcctaaaccacatggtgtccgcctccatgatcacactgctgctcccgatcctcatttttctctgggctatgctcagcgtgccccggccaagcagacggttttggatgatggccatcgtgtatacggaggtcgccattgtagttaagtacttcttccaatttggttttttcccttggaataagaatgtcgaggtgaacaaggataagccatatcaccccccaaatatcattggggtggaaaagaaagagggatatgtcctctatgacctgatacagctcctcgcactttttttccaccgatcaatcttgaagtgccatggactctgggatgaggatgatatgaccgagtccggtatggcaagagaggaaagcgacgacgagctcagcctaggtcacggccgcagggattcctcggactctctgaagagtatcaatctcgccgcctctgtggaaagcgtgcacgtgacatttccagaacagcagactgcagtcagacgcaagcgatctggatcgagcagcgagccatcgcagagaagctccttcagcagtaatcgcagccaaagagggtcaacatcaactcgcaacagctctcagaagggttcttccgtgttgagcattaaacagaaaggaaagagagagttatatatggagaagctgcaggaacatctgatcaaagccaaggccttcacaatcaaaaaaactttagagatctacgttccaattaagcagtttttctataatctaatacaccctgaatattccgcggtcacagacgtgtacgtcctgatgtttcttgcggacacggttgacttcatcatcattgtgtttgggttttgggcttttggaaagcactccgcagcagcagacataacatcttccctctccgaagatcaggtgccaggtccatttctcgtgatggttttgatacagttcggaacaatggtcgtcgaccgcgccctgtatctgcgaaagacagttctcggaaaggttattttccaggtgatcctcgtgtttggcatccatttctggatgttcttcatcctgccaggcgttaccgaacgaaagttcagccaaaatttagtggcacaactgtggtacttcgtcaagtgtgtttatttcggccttagcgcctaccagatccggtgtggctacccgacccgggtcttgggaaatttcctcaccaaaagctacaactacgtgaacctctttctatttcaaggattcaggttagttcccttcctgaccgagctgcgagcagttatggactgggtttggacagacaccacactgtcgctctcctcctggatctgcgtcgaggatatttacgcccatattttcattctgaagtgctggagagaatcggaaaagagatatccacagccacgcggccagaaaaaaaaaaaggtggtgaagtatggcatggggggtatgatcatcgtcctcctcatttgcattgtgtggtttccactgctattcatgagtttaatcaaaagcgtcgccggcgtgatcaaccagcccctggacgtatcggtgactattacgctcggtggataccagccgattttcacaatgtcagcccagcaaagccagctgaaagttatggaccagcagtcatttaataaatttatccaggcttttagtcgagacactggggccatgcagttcttagaaaattatgaaaaggaggacatcactgtggcagagttggaggggaactcaaatagtttgtggacgatttcccctccgtcaaaacagaaaatgatccatgaattgctggatccaaacagctccttttctgtggtttttagttggagtatccaacgcaatctcagcctgggtgctaagagtgagatagctacagacaaacttagcttcccactaaagaacattacccggaaaaacatcgcaaaaatgattgccggaaactccacagaaagctctaagacccctgtcaccatcgaaaagatctacccttattatgtgaaagccccttccgacagtaactcaaagcctataaagcagttgctttctgaaaataactttatggatattacgatcattctgtccagggataatactaccaagtataattcagaatggtgggtactgaatctgaccggaaatcgtatctataacccgaatagtcaggcccttgaactagtcgtctttaatgataaagtgtctcctccctctctgggattcctggctggctacggcattatggggctctatgcatcggtggtcctcgttatcggtaagttcgttcgcgagttcttttctggaattagccactccattatgtttgaagagctgcccaatgtggaccgaatcttgaaactgtgcaccgacatttttcttgtgcgggagacaggggagctcgaactggaagaagatctgtacgccaaattgattttcctgtaccgctcccccgagaccatgatcaagtggacaagagagaaaaccaattag

SEQ ID NO: 199659 - DNA, 1692 bp, synthetic construct
  misc_feature 1..1692: note = Description of Artificial Sequence: Synthetic coding sequence
  source 1..1692: mol_type = other DNA
atgagcgtggtgatctacaccatgctggtgctgatcttcatctacacataccagtttgaaaacttcccaggcctctggcaaaacatgacaggactcaagaaggagaaactggaggacctagggctcaaacagtttacagttgcagaattgtttactcgaatctttatcccaactagcttcttgttagtttgtatactgcacttgcattactttcatgatcgcttccttgagcttacagatttaaaatccatcccttctaaggaagataacaccatttactcgcatgcaaaggtgaatggacgcgtatacctaattattaactcaattaagaagaagttgcccatccatcagaacgagctcgctcacccagaggggagcctgcctgatttaaccatgatgcatctgaccgccagtctagaaaaaccagaggtcagaaaacttgccgaaccaggtgaagagaaactggagggctattcagagaaagcccagaaaggggatctggggaaggattcggaggaatccgaagaagatggcgaagaagaggaagaatcagaggaggaggaagaaaccagcgatttgaggaacaagtggcatctggtgatagataggctcacagtgctcttcctgaaattcctcgagtattttcataagcttcaggtgtttatgtggtggatcttagagctgcatatcattaagattgtcagcagctacattatctgggtgagtgtgaaggaagtcagtctatttaattacgtgtttttgatctcatgggctttcgccctgccatacgctaagcttcgccgcctggcatccagtgtgtgcaccgtgtggacatgcgtgataatcgtttgtaaaatgctgtaccagctgcagaccatcaaacctgaaaatttcagcgtgaactgcagtttaccaaatgagaatcagactaatatcccctttaacgaactgaataagagcttgctgtattctgcccccatcgaccccacagaatgggtcggcttgcgcaagagcagcccacttctagtctacctgaggaataacttgctgatgttggccattcttgcgtttgaggtcacaatctatcggcatcaagaatactatagaggccgaaacaatttgacagccccagttagcagaactatctttcacgacataactagattgcatctcgatgacgggttgatcaattgcgcaaagtacttcatcaattacttcttctacaaatttggtcttgaaacatgtttcttaatgtccgtgaatgtgattggacagcgtatggatttttatgctatgattcacgcctgctggttgattgcggtgctgtaccgacgaaggcggaaagcaattgctgagatctggccgaagtactgctgttttctcgcttgcattataacctttcagtattttatctgcattggtattccccccgccccctgtagggattacccatggaggttcaagggcgcgtcgtttaacgataatataatcaagtggctgtacttccctgatttcatcgtcagacctaaccctgtgtttctagtgtatgattttatgctgctcctttgtgcatctctacagagacagatctttgaggacgaaaacaaagctgcagttcgtattatggccggggacaatgtggaaatttgtatgaatctggacgccgcttccttcagccagcacaatccttag

SEQ ID NO: 199660 - DNA, 1941 bp, synthetic construct
  misc_feature 1..1941: note = Description of Artificial Sequence: Synthetic coding sequence
  source 1..1941: mol_type = other DNA
atgaccgagagcggcatggcccgggaggagagcgacgacgagctgtctttaggacacgggaggagggattcctcggactctttaaaaagcatcaacctggccgcctccgtggagagtgtgcacgtgacattccctgaacagcaaactgctgtacggagaaaaagatcaggctcttcatctgagccttctcagcgttcatcattttcaagcaacagatctcagagaggcagcacaagcacaagaaacagctcccagaagggcagcagtgtactttccatcaagcagaagggaaaaagagaactgtacatggagaagctgcaggagcatcttattaaggctaaggctttcactattaaaaaaacgctggaaatatacgttccgatcaaacagttcttctataacctaatccatccggagtactccgctgtgacagatgtatacgtccttatgttccttgcggacacagtcgatttcataatcatcgttttcggcttctgggccttcggcaagcactcagctgcagcagatatcacctccagcctctcggaggaccaggtgcctgggccttttctagtgatggtcctgatccagttcggaacaatggtcgtggatcgcgccctgtatttgcgcaaaacagttctcgggaaagttattttccaggtgatattggtcttcggcatccatttctggatgttctttattctgccgggagtcacagaacggaagtttagtcagaacttggttgcacagctgtggtattttgtcaagtgcgtgtactttggcttgagtgcctatcagattaggtgcggctatcccactcgcgttttgggtaacttccttactaaatcctacaactacgtgaacctttttcttttccaggggttcagactggtcccatttctgacggaacttagggctgtaatggactgggtgtggactgacacgaccctaagtctcagctcatggatctgcgtggaggacatttatgcccatatttttattctgaaatgctggagagagtccgagaaacctatttttacaatgtccgctcagcaatctcagttgaaggtgatggatcagcaatcatttaacaaatttattcaggccttctcccgcgacactggcgccatgcagtttctggagaactatgagaaggaagatattacagtcgccgagttagagggcaattccaactccctgtggaccattagccccccatctaagcagaagatgatccacgagttattagatccaaactcttcatttagcgtggtttttagctggagcattcaacgcaatctctccttgggcgctaagtctgaaatcgccacagataaattatcttttccactgaagaacatcacaagaaaaaacatcgccaagatgatcgcgggtaattcaaccgagagcagcaagaccccggtgacaatcgagaagatatacccttattatgtcaaggctccaagtgactcgaactcaaagcctattaagcagttgctttcagaaaataactttatggatattactatcatactcagccgagacaacaccactaaatacaacagcgaatggtgggtattgaacttaaccgggaacaggatctacaacccgaacagccaagctctggaactggtggtgttcaatgataaggtgtcaccaccgtctcttggctttttggctggctatggcattatgggcttgtatgcatcagtggtgctggtaatcggcaagttcgtccgagagttcttttcaggcatcagccacagcatcatgttcgaagagctgccaaacgtcgaccgcatcctcaaactatgcacggatattttcttggtgagagaaacgggggagctggagttagaggaggacttatatgccaagctgattttcctttacagatcccctgaaacaatgatcaaatggactcgcgaaaagacaaactag

SEQ ID NO: 199661 - DNA, 2130 bp, synthetic construct
  misc_feature 1..2130: note = Description of Artificial Sequence: Synthetic coding sequence
  source 1..2130: mol_type = other DNA
atgaccgagagcggcatggcccgggaggagagcgacgacgagctgagcctgggccatggcaggagagattcctctgattctttgaagagtattaatcttgccgcatccgtggagagcgtgcacgtgacctttcctgaacaacagactgccgtgaggaggaagcggagcggatctagctctgagcctagccaacgtagttcatttagctcaaatagaagtcagagggggagcacctcaactaggaattcttcccagaaagggtccagtgttctgtccatcaaacagaaaggcaagcgtgagctctacatggagaagctccaggagcatttgattaaagccaaggctttcactattaagaaaaccctggagatctacgtgcctatcaaacagttcttctacaatttgattcatcccgagtattcagccgttaccgacgtctatgtgcttatgtttcttgcggacactgtggatttcataattatcgtattcggcttctgggcttttggaaaacacagtgctgccgcggatatcacatccagcctcagcgaggatcaggtgccaggccctttcctggtgatggtgctgatccaatttggcactatggtggttgaccgcgccctgtacctccgtaaaactgtgctgggaaaggtcatctttcaagtcatcctggtctttggcatacacttctggatgtttttcatcctccccggcgtgacggagcgcaagtttagtcagaacttggttgcgcagttgtggtactttgtaaagtgcgtctatttcggcctgtcggcctatcagatccgctgcgggtaccccactcgcgtgctcggtaatttcctgactaagtcgtacaattatgttaatcttttcctgttccaaggtttcaggctcgtgcccttcctaacagaacttcgcgcagttatggattgggtttggacggatactacactttcactgtcaagttggatctgcgttgaagacatatatgcccatatttttattctaaagtgttggagagaatctgagaaacgatatccccagccacgcggccagaaaaagaagaaggtggtgaaatacggaatgggggggatgataattgtgctacttatctgcatagtctggtttccactcctgttcatgtctttaatcaaatctgtggctggcgtcatcaaccagccactggacgtgagtgtgacaatcactctggggggctatcaacctatcttcaccatgtccgcccagcagtcccagctgaaggtcatggaccagcaaagcttcaataaatttatccaggctttcagtagggatacgggggctatgcagtttcttgaaaactacgaaaaggaggatattaccgtggccgaactagaaggcaactctaacagtctctggacaatctctccacctagtaagcagaagatgattcacgagctcctggatccaaatagcagtttttccgtagttttcagttggtccatccagagaaacctctccctgggcgcgaaatccgagattgctaccgacaaactctccttccccctaaagaatataacccgcaagaacatcgccaaaatgattgccggcaattctaccgagagctcaaaaactccagtcactattgaaaagatctatccttattatgtaaaggccccctctgattctaactccaagcctatcaagcagctgctgagcgagaataacttcatggacatcaccattattttgagccgggataacaccacaaagtacaattctgagtggtgggtcctgaacctcactggaaaccgcatttataaccccaattctcaggcccttgagcttgtggtgttcaatgataaggtgtccccaccttcgctaggatttctggccggctacggaattatgggcctatacgccagtgtcgtcctcgtaataggcaagtttgtgagagaattcttttctggaatcagccattcaattatgtttgaagagctgccgaatgtcgacagaattcttaaactgtgcactgacatattcctggtgcgcgagactggggagttagagttagaagaggatctgtatgccaaattaattttcctgtatcgttcccccgagacgatgatcaagtggacccgcgagaagactaattag

SEQ ID NO: 199662 - DNA, 2565 bp, synthetic construct
  misc_feature 1..2565: note = Description of Artificial Sequence: Synthetic coding sequence
  source 1..2565: mol_type = other DNA
atggccctgcggctggtggccgacttcgacctgggcaaggacgtgctgccgtggcttagagcccagcgtgccgtaagcgaggcctcgggcgcaggaagtggcggggccgatgtattagagaacgattatgaaagcctgcacgtcctaaacgtggagagaaacggaaacattatatacacttacaaggacgacaaggggaacgtggtgttcgggctctatgactgccagaccagacaaaacgagctgctctatacttttgagaaagacctccaggtcttctcttgttcagtgaattctgagcgcactctgcttgccgcatctctcgtacagtcaacgaaagaaggaaagagaaatgagttgcagccgggctctaagtgcctcacactgttagtagaaattcacccagtcaacaacgttaaggtcctgaaggcagtggactcctatatttgggttcaatttctttaccctcatatcgaaagtcaccccctgccagaaaatcatctcctcctcatctctgaggagaaatatatcgagcagtttaggattcatgtagcccaggaagatggcaaccgtgtcgtaattaagaattccggccacctgccccgcgatcggatcgctgaagatttcgtatgggcccagtgggatatgagtgagcagcgcctttactacattgatctgaagaaaagccgttctattttaaagtgcatccaattttatgccgacgagtcttataatctgatgtttgaagtacccttggacatcagtctatcgaacagcggcttcaagctggttaacttcggctgcgactaccatcagtatcgcgacaaattttcaaaacacctcaccttatgtgtgttcactaaccatacaggttccctgtgcgtgtgttacagtccgaagtgtgccagttggggccagatcacctatagcgttttctacatccacaaggggcattctaagactttcacaacgtccttggagaacgtcgggtcacacatgacaaaaggcatcaccttcctgaatctggactactatgttgcagtatacctcccgggtcactttttccatttgctaaatgtccagcatccagacctgatttgtcataatcttttcctaacagggaacaacgaaatgatcgacatgctgcctcattgtcccctgcagtcgctgtctgggtcactagtgcttgactgttgctcaggcaagttatacagagccctactatctcaaagttccctcctgcagctcctccagaacacatgcctggattgcgaaaagatggcagccctccactgcgccttgtactgcggccagggagcacagttcctggaggcccagatcattcaatggataagtgagaacgtgtctgcttgtcactcgtttgaccttatccaagaatttataatcgcgagctcatattggtcggtgtatagcgagaccagcaatatggacaagctgctgccacacagcagtgtgctcacctggaatacggaaattcctggaatcacgctggtcactgaggatatagccctgccactgatgaaggttctctcttttaagggatattgggagaagctcaactctaatctggagtatgtcaagtatgcaaagccacattttcactacaataacagcgttgtgaggcgggagtggcacaatctcatctctgaggaaaagacaggaaagcgacggagcgccgcatatgttcgcaacatcttggataacgccgtgaaggtaataagcaatctcgaggcccggaatctcggtcctagactgacccccctgttgcaggaggaggattcccaccagcgtctcctgatgggattgatggtcagcgagctaaaagaccacttccttaggcacctgcagggcgtagaaaaaaagaaaatcgaacaaatggtgttagattacatttccaaactcttggacctaatatgccacattgtggaaacgaactggaggaagcataatctgcatagttgggtgcttcatttcaattcacgtggtagtgccgcggagtttgcagttttccacattatgactcggatcctcgaggcaactaacagcctttttctcccccttccccctggatttcacaccttacacacgatcttgggggtgcagtgtctgcccctgcataatctgctgcactgtatagatagtggagttcttttgctaacagaaactgccgtgattagactgatgaaggatctcgataacaccgaaaaaaatgagaagctcaagttctccatcatcgtgcgcttgccccccctcattggtcagaagatttgtaggctgtgggaccatccaatgagttccaatattatcagccgtaaccacgtgactcgccttctacagaactataaaaagcagcctcggaatagtatgattaataaaagttcattctccgttgagttcttaccattgaactacttcattgagatcctgaccgatatcgagtccagcaatcaggcactttacccgttcgagggacatgacaacgttgatgcagagttcgtggaggaggccgccttgaaacacactgctatgctgctgggactctag

SEQ ID NO: 199663 - DNA, 528 bp, synthetic construct
  misc_feature 1..528: note = Description of Artificial Sequence: Synthetic coding sequence
  source 1..528: mol_type = other DNA
atgacccggatcctggaggccaccaacagcctgttcctgcccctgccgccagggtttcatacattgcatactatcctgggcgtgcagtgtctgccactacacaatcttcttcattgcatcgattcaggggtcttactcctcacagaaacggcagtaatcaggctgatgaaggacctggacaacaccgaaaagaacgagaagttaaagttcagcatcattgtccgtctgcctcctctgattggccagaagatctgtaggctttgggatcaccccatgagttctaatatcataagccggaatcatgtaactaggctgctccaaaattacaagaagcagccccgtaatagcatgatcaataaaagcagcttcagtgttgaatttttaccactgaactacttcatagaaattctgacagacatcgaatccagtaatcaggcactgtatcccttcgaaggccatgacaacgtcgatgccgaattcgtggaagaggcagccctgaaacataccgccatgctcctcggtctgtag

SEQ ID NO: 199664 - DNA, 873 bp, synthetic construct
  misc_feature 1..873: note = Description of Artificial Sequence: Synthetic coding sequence
  source 1..873: mol_type = other DNA
atggccaaccccaagctgctgggcatgggcctgagcgaggccgaggcaatcggcgccgacagcgccaggttcgaggagctccttcttcaggcctctaaagagctgcagcaagctcagaccactcgaccagagtctactcagatacagccccagccggggttttgcattaagactaattcaagcgaaggcaaggttttcataaatatctgccactctcccagcatccccccacctgccgacgtcactgaggaggagctgctccagatgctcgaagaggaccaggctggcttccgcatcccgatgtcactgggggaaccccacgcagaattagatgcgaaggggcagggctgcacagcttacgatgtagcagtgaacagtgatttttatagacggatgcaaaattccgatttcctgagagagctcgtgatcactattgcgagagaaggactggaggataagtacaaccttcaactcaaccccgaatggaggatgatgaaaaacaggccgttcatgggatcaataagccagcaaaacatcagatctgagcagcgcccccgcatacaggaactgggcgatctctacacccctgcacccggtcgggcagaaagcgggccagagaagcctcatttaaacctgtggctggaggctccagatttgctgctggctgaggtagacctccccaagctggacggggcactgggactgagtcttgagattggcgagaatcgcctcgtaatgggcggcccacagcagctctaccacctcgatgcatatattcccctacagatcaactcacacgaatctaaagcggccttccaccgaaagaggaagcaattaatggtcgccatgcctctcctccctgtgcctagttag

SEQ ID NO: 199665 - DNA, 942 bp, synthetic construct
  misc_feature 1..942: note = Description of Artificial Sequence: Synthetic coding sequence
  source 1..942: mol_type = other DNA
atgctgctgagcaagatcaacagcctggcccacctgcgggccgccccctgtaatgatctgcacgccacgaaacttgccccaggtaaggagaaggaacccctagaatcacagtatcaggtgggtcctctgctaggaagtggaggttttggtagtgtgtactccggaatccgggtgtccgacaacctcccagtggccatcaaacacgtcgagaaagaccgtattagcgactggggagaactgcccaacggtacccgcgtacccatggaagtcgtcctcttgaagaaggtgtcctctggtttcagtggggtgattaggctgctcgactggttcgagaggcctgactccttcgtgctgatcttagagaggcctgagcctgtgcaggacctgtttgatttcataactgagcgcggcgctctacaggaggagctggcccggtcatttttctggcaggttcttgaagctgtgcgccattgtcataactgtggagtcctgcatcgggatatcaaggatgaaaatattctcattgatctgaatagaggagaactgaagctcattgactttggtagtggggccttactgaaagacaccgtgtacacggacttcgacggcacgcgggtgtatagtccgccagagtggattagataccaccgctaccacggaagatcagccgctgtgtggtccttgggaattctgctgtatgatatggtgtgcggcgatattcccttcgagcacgatgaggagatcattagaggccaggtgttcttccgccagcgcgtgtctagtgaatgtcagcacctgatccgatggtgcctggcactccggccttctgacagacccaccttcgaggaaatccagaaccacccttggatgcaggacgtattacttcctcaagaaactgccgaaatccacttacacagcctctcaccagggcctagcaaatag

SEQ ID NO: 199666 - DNA, 936 bp, synthetic construct
  misc_feature 1..936: note = Description of Artificial Sequence: Synthetic coding sequence
  source 1..936: mol_type = other DNA
atgctgaccaagcccctgcagggcccccccgccccccccggcaccccaactcctcctcccgggggtaaggatcgagaggcattcgaggccgagtatcggcttggtccattgctgggcaagggaggcttcgggactgtgttcgcaggtcacaggttaaccgacagactgcaggtagcgatcaaagtgattccgcgcaatcgagtgctcggttggtcaccgttgtctgattcggtgacctgccccttggaagttgcactgctttggaaggtaggcgccggcggtggacatcccggtgttattcgactcctggactggttcgaaactcaagagggcttcatgctggtcctggaacgccctttacctgcacaagatctgtttgattacatcactgaaaaaggtcccttaggcgaaggcccatcaaggtgcttctttggacaggtagttgctgccattcagcactgtcacagtcggggcgtcgtccacagggacataaaggatgaaaatatcctcatcgacctgcgtagggggtgcgctaagttgattgacttcggaagcggcgcactccttcacgacgagccttataccgattttgacggcactcgcgtctacagcccgcccgaatggatttcacgccaccagtaccatgccctgccggccactgtgtggtcccttggaattctgttgtacgacatggtttgcggcgacatcccatttgagagagaccaggagatcctcgaggccgaattacatttccctgcccatgttagcccggactgctgtgctctcattaggcgttgcctcgcccccaaaccatccagtcgaccttcactcgaggagatcctgttggacccctggatgcagaccccagcagaggatgtgcctctcaaccccagtaaaggtggacccgccccactggcttggtcccttcttccttag

SEQ ID NO: 199667 - DNA, 438 bp, synthetic construct
  misc_feature 1..438: note = Description of Artificial Sequence: Synthetic coding sequence
  source 1..438: mol_type = other DNA
atgctggtgctggagcggcccctgcccgcccaggacctgttcgactatattacggagaagggccccctcggagagggcccctcaagatgcttcttcggtcaggtcgtcgcggccatccagcattgccattcacgaggagtggtgcacagggatattaaggacgagaacatcctgatagacttgcgtcgtggctgcgccaagctcatcgacttcggctcaggcgccctgctccacgatgaaccctacactgatttcgacggcacgcgtgtatactctccccctgagtggatcagtcggcaccaatatcacgcactgcccgccacagtgtggtcgctgggtattctgctctacgatatggtgtgtggagatattccttttgagagggaccaggagatccttgaagcggagttgcatttcccggcccacgtgagtccttag

SEQ ID NO: 199668 - DNA, 2925 bp, synthetic construct
  misc_feature 1..2925: note = Description of Artificial Sequence: Synthetic coding sequence
  source 1..2925: mol_type = other DNA
atggccaaggccggccgggccggcggccccccccccggcggcggcgccccctggcacctgagaaacgtgttgtccgattcagttgaaagttcggatgatgaatttttcgacgcccgtgaagaaatggccgaaggtaagaacgctatcctaattggaatgagccagtggaacagcaatgatttggttgagcagatcgagacaatgggcaagctggacgaacaccaaggcgaaggcaccgcaccctgtacatcctccattctccaggagaaacagcgagagttatatcgggtgtctctacgtcgacagcggtttccagctcaggggtctatcgagatccacgaggactcggaggaaggctgcccccagcggagctgcaagacccatgtgttgctgctggtgttacatggcggtaatattctggataccggggccggagacccttcctgcaaagccgccgatattcataccttctcgagcgtcctcgagaaggtaacccgtgctcattttccggccgctctgggacacatactcatcaagttcgttccctgccctgcaatatgctccgaagcattcagcttggtgagccatttgaatccttacagccacgacgaaggctgtctttcatcttcgcaggaccacgtcccactggcggcgctacccttactggcgatttcttctccccagtaccaagacgccgtcgccacagtgattgagcgggcaaatcaggtgtatcgcgagtttttgaagagctcagacgggattggcttttcaggtcaagtttgtctgattggcgattgcgttggcggacttctggcttttgatgccatttgttatagcgccggcccgagcggggatagtcctgcatcaagtagccgcaaagggtccatctcttccacccaggatactcccgttgctgtggaagaggattgttcactggctagcagcaagcgtctgtccaaatcaaacatcgacatatcctcaggccttgaggacgaagaaccgaagaggcctttaccccgaaaacagtcagatagctccacctatgactgcgaggccatcacccagcatcacgcttttctgtccagcattcacagtagcgttctgaaggatgaatcagagacacctgccgctggaggcccgcagttgcctgaggtcagccttgggagatttgacttcgatgtttcggacttcttcctgtttggcagccccttgggactggtgttagccatgcggcgaaccgtgctgccgggcctagacggcttccaggtgcggcccgcgtgcagccaggtgtatagcttttttcattgcgcagatccctccgcttcccggttagaacccttgttggagcccaagttccacctggtgcctcctgtgtcagtcccccggtaccaaaggtttcccctcggcgacgggcagagcttgctcttagccgacgccctccatacacactctcccctttttctggaggggtcttcccgggattcccccccgctgctggatgcccccgcttctccgccacaggcttcacgttttcaaaggccaggccggcgcatgtcagaggggagtagtcattcggagtccagtgagagttccgacagcatggcacctgtcggagcctctcggattactgccaagtggtggggatcgaagaggattgactatgcgctgtattgccctgatgtcctgaccgccttccccaccgtggcccttccccaccttttccacgcttcctattgggaatccacagatgtggtcgcctttattctgagacaggtgatgcgctatgaatccgtaaatatcaaggaatctgcacgactagaccccgctgctttatctccagctaaccccagagagaagtggctgcggaagagaacgcaggtaaagctgagaaatgttaccgcaaaccacagggctaatgatgtcatcgcggctgaggatgggccacaggtgctggttggccgatttatgtacggacctctggacatggtggcactaacgggggagaaggtggatatactggttatggccgagccaagctcaggtcggtgggtgcacctcgacacagagatcacaaattcaagcggcaggataacatacaatgtgccccgccctaggcggctaggagtgggcgtttacccagtcaagatggtggtccggggtgaccagacctgcgcaatgagctatctgaccgttctgcctagagggatggagtgtgtcgtcttctcaatagacgggtctttcgcggcttccgttagcattatgggatctgatccaaaggtccgacctggagctgtcgacgtcgtgaggcattggcaggatctgggctatatgatcctgtacattactggccggcccgatatgcaaaagcagcgcgtggtgtcttggctgagccagcataacttcccacaggggatgatattttttagcgatggcctggtacacgaccccttgcggcaaaaggccatcttcctgaggaacttgatgcaagagtgcttcattaaaatttcagcggcatatggttctacaaaggacatcagtgtgtattctgtgttgggcctgcctgcgtcccagatatttatcgtgggccgaccgaccaaaaaatatcagacacaatgtcaatttttaagtgaggggtacgcagcgcatctggccgcccttgaagcatcacacaggtcacggcctaagaaaaataattccagaatgatcttacgtaaggggtcttttgggttgcacgctcagcccgagtttctgcgcaagcggaatcatctaaggagaactatgtccgtgcagcaaccagacccaccagctgctaaccctaaaccggaaagagcacagagccagcccgaatccgataaggaccacgagcggcctctgcccgcattatcatgggccagggggccaccaaagtttgagtcagtaccttag

SEQ ID NO: 199669 - DNA, 2817 bp, synthetic construct
  misc_feature 1..2817: note = Description of Artificial Sequence: Synthetic coding sequence
  source 1..2817: mol_type = other DNA
atggccaaggccggccgggccggcggccccccccccggcggcggcgcaccatggcacctccgaaacgttctctcagactccgtggagtcaagtgacgacgaatttttcgatgcacgtggagagggtactgctccttgtacatccagtatcttgcaggagaagcagcgggagttgtatagagtgagtttgaggcgtcaacgatttcctgcccagggaagcattgagattcacgaggacagcgaggaagggtgtcctcagcggagttgcaagacccacgtgctgctgctggtgctgcatggtgggaacattctggatacaggagccggtgatccttcctgtaaggcagccgacattcatacgtttagcagtgtcttagagaaggtgacccgggcacactttcccgccgccctggggcacatcctgatcaaatttgttccctgtccggcgatctgttctgaagcctttagtctcgtctcacatctcaatccttacagccacgacgaaggctgtcttagctcttcacaggaccacgtgccattagcggcgctgcctctgctggcaattagttcacctcagtaccaggacgccgtggctaccgtgattgaacgggccaaccaggtgtatcgagaatttttaaaaagcagtgacggaatcgggtttagtggccaggtctgcctcataggggactgtgtggggggcttgctggcattcgatgcgatctgctattctgcagggccttcgggcgactcaccagccagttcttccaggaagggctctataagcagcacacaagatactccagtggctgtggaggaagactgcagtctggcgagctcgaaaagactgtcaaagagtaatatcgacatctccagcggcctggaagatgaggagccgaagaggccactgccgcgtaagcagtccgattccagtacatacgattgtgaagccattacccagcaccacgcctttctctccagtatccacagttctgttttgaaagacgaaagcgaaacacctgcagccgggggcccacagctgcctgaagttagcctgggccgctttgactttgacgtctctgacttttttctatttggctccccgcttgggctcgtccttgcgatgagaaggaccgtgctcccggggctcgatggctttcaagtgcgccccgcctgttcccaagtttactccttcttccattgcgcagatccctcggcctccagacttgaaccgctgctagagcctaagtttcacctagttccacctgtgtcggtgcctaggtatcagcgctttccactcggtgacggacaatcacttctgttggccgacgccttgcatactcactctcccctgttcctggagggcagcagcagggactcgccgccgcttctcgatgccccagcctcccccccacaggcctcacgatttcagcgccctgggaggagaatgtctgagggttcttcacactcagagtcatcggaatcaagcgacagcatggcccctgtgggggccagtcgtattacagcaaagtggtgggggtctaagaggatcgattacgccctgtattgtcccgacgtgctgaccgcatttccaaccgttgcactgccccacctgttccacgcctcatactgggagagtaccgatgttgttgcctttatcttgcgacaggtcatgaggtacgaaagtgtcaacattaaagagtctgcaaggctcgaccccgcggcactcagcccagcaaatccacgagagaagtggttaaggaagcgaacgcaggtgaaacttaggaacgtaactgcgaatcatagggccaatgacgtgatagctgccgaagatggacctcaggtgctggtggggagattcatgtatggtcctttagatatggtggctctcactggcgagaaggtggatatccttgttatggctgagccttcctctggcagatgggtgcatcttgatacagagatcacaaacagttccggcaggatcacatataacgttcccagaccgcgacggctaggagtgggggtgtatccggtgaagatggtggtgcgaggtgaccaaacctgcgcgatgagttatctgactgtcctccccagggggatggaatgcgtggtattttctatcgacggatcttttgctgctagcgtaagcatcatgggctccgaccctaaggtgcgccccggcgccgtagatgttgtgcgtcactggcaggacttggggtacatgatcctttatattactggaagacccgacatgcagaagcagagagtggtgtcatggctaagccaacacaattttccccagggcatgatcttctttagcgatggtctggttcacgatcccctgagacaaaaggcaatcttcctccgtaatctcatgcaggagtgcttcatcaagatctccgccgcttacgggtccacaaaagatatcagtgtctatagtgtactcggactgcctgcttcccagatttttatcgtagggcgccctacaaagaagtaccagactcagtgtcaattcctgtccgaaggctacgccgcgcacctggcagcactggaagccagccataggagcaggccaaagaagaataattccaggatgatcctcagaaaaggatcctttggcctgcatgcacagcctgaattcctcagaaagaggaatcacctcaggcgcacaatgtctgtgcagcaaccagaccctcccgcggctaatccaaaacccgagcgggctcagagccagcctgaaagtgataaagaccacgagaggcccttacctgcccttagctgggccaggggacctcctaaattcgagagcgtaccttag

SEQ ID NO: 199670 - DNA, 609 bp, synthetic construct
  misc_feature 1..609: note = Description of Artificial Sequence: Synthetic coding sequence
  source 1..609: mol_type = other DNA
atggccaccctgatctacgtggacaaggagaacggcgagcccggcacacgggtagtggccaaagatggactgaagttgggaagcggcccctctatcaaggcactcgatggccgctctcaggtgagcacacctagattcggcaagacttttgacgcaccaccagctctgccgaaggcaacacgcaaagccttgggtaccgtgaaccgagccaccgagaagtccgtgaagacgaaaggccctctgaagcagaaacagccgtcattcagtgccaaaaagatgaccgagaagacagtgaaggctaagtcctcagttcccgcttccgacgacgcgtaccctgaaatcgagaagttcttcccatttaatcctctggatttcgagagctttgatctcccagaggagcaccaaatcgctcacctacccctcagtggcgtgccccttatgattctggatgaggaacgggagctggaaaagctgtttcaactcggacctccatctccagtcaagatgccaagcccgccatgggagtctaacctgttacaatctccctcttctatcctatctaccctggacgtcgagttacctcccgtctgttgcgacattgatatctag

SEQ ID NO: 199671 - DNA, 609 bp, synthetic construct
  misc_feature 1..609: note = Description of Artificial Sequence: Synthetic coding sequence
  source 1..609: mol_type = other DNA
atggccaccctgatctacgtggacaaggagaacggcgagcccggcacacgggtagtagccaaggatgggctgaaactcggctcaggaccatctattaaagctctagatggcaggagccaggtgtccacccccaggtttggtaagacattcgatgcccctcccgcacttcccaaggctacgagaaaggcactgggcacagtgaaccgggccacagagaaaagcgtgaagacgaagggaccgctgaaacagaagcagccatccttcagcgcgaagaagatgaccgagaagacagtgaaagcaaaaagttccgtgcctgcttccgacgatgcttatcctgagatcgaaaaattcttcccgttcaatccgctggactttgagagttttgatctgccagaagagcaccagatcgcccacctaccacttagcggagtgcctctgatgatcctggacgaggagcgggagctggaaaagcttttccaactgggcccacctagccccgtgaagatgcctagccccccatgggaatccaatctgctgcagtcaccaagttccattctgagtactctcgatgtggagttaccgcctgtctgttgtgatatcgatatttag

SEQ ID NO: 199672 - DNA, 609 bp, synthetic construct
  misc_feature 1..609: note = Description of Artificial Sequence: Synthetic coding sequence
  source 1..609: mol_type = other DNA
atggccaccctgatctacgtggacaaggagaacggcgagcccggcacacgcgtggtcgcgaaagatgggctgaagctgggaagtggccctagtattaaagctcttgatggaaggagccaggtctccaccccaaggtttggcaaaactttcgacgccccccccgccctccctaaggcaactcgcaaggctttaggcacagtcaacagggcgaccgaaaagtctgtgaagacaaagggtcccctgaagcagaagcagccaagttttagtgccaagaagatgaccgaaaaaactgtgaaagctaaaagctctgtgcctgccagtgacgatgcataccctgagattgaaaagttctttcccttcaaccctctggattttgaaagtttcgacttacccgaagaacatcagatcgcgcacctcccactaagtggggtgccactcatgattttggatgaagagagagagctagagaaactcttccagttagggccaccctctccagtgaagatgccaagccctccatgggagagcaacttattacaaagtcctagctccattttatcaacgctggatgtggagttgccacctgtgtgctgcgatatagacatatag

SEQ ID NO: 199673 - DNA, 543 bp, synthetic construct
  misc_feature 1..543: note = Description of Artificial Sequence: Synthetic coding sequence
  source 1..543: mol_type = other DNA
atggcccccggcgtggcccggggccccaccccctactggcggctgcgattaggaggcgcagccctgctactgttactcatccctgtggccgccgctcaggagcctcccggagcagcatgctctcagaacaccaacaaaacttgcgaagaatgcctgaagaacgtttcatgtttatggtgcaacactaataaggcgtgcctcgattaccccgtcacctccgtcctccccccagcctcgctatgcaaattaagttctgctaggtggggcgtgtgttgggtaaatttcgaggcactgatcatcaccatgagcgttgtcggcggcacattgttgttggggattgccatctgttgttgctgctgctgcagaaggaaaagaagccgaaagccagaccgctcagaagaaaaggctatgagggagagggaagaaagaaggattcggcaggaagaaagacgggcggagatgaaaacgagacacgatgagatcagaaagaagtacgggctgttcaaggaggaaaatccttacgctcggttcgaaaacaactag

SEQ ID NO: 199674 - DNA, 429 bp, synthetic construct
  misc_feature 1..429: note = Description of Artificial Sequence: Synthetic coding sequence
  source 1..429: mol_type = other DNA
atggcccccggcgtggcccggggccccaccccctactggcggctgaggctggggggggctgcgcttctcttactgctgatacctgtggctgccgcacaggagccccctggcgccgcatgttctcaaaacaccaacaagacctgcgaggaatgcttgaaaaatgtgtccgcatgtctaaagaaaaagactcggatgctggatcttaagactacgaaggctctccaacatatatctcctgatgcatcctgcgaagtgcatgccccccagccatccccagctggccggccacgggggcactgtggactgctgacccttgccagcgaacctgcctcactcccaggccaagcagccggcgaactccctttgaaggacagccccctcgtccttcagacaggcgatttactgtttcccgtgcacctgtgcttttag

SEQ ID NO: 199675 - DNA, 576 bp, synthetic construct
  misc_feature 1..576: note = Description of Artificial Sequence: Synthetic coding sequence
  source 1..576: mol_type = other DNA
atggccaccctgatctacgtggacaaggagatcggcgagcccggcacacgggttgccgctaaggacgtgctgaagcttgaatcccggcccagcattaaggctctagacggaatatcgcaggtgctgacgcgccgctttgggaagacatacgatgccccgtccgccctgcccaaggccactaggaaggccttagggactgttaaccgtgctaccgaaaagagtgttaaaacaaatgggcctaggaagcagaaacagccgtcattctcagcaaagaagatgaccgagaaaacagtcaaaaccaagtctagtgtgcccgctagcgacgatgcttaccctgagattgagaaattttttccctttaatctgctggactttgagtccttcgaccttcccgaagagcggcaaatagcacacctgccgttatcaggcgtgccacttatgatcctcgatgaagagggggagctggaaaaactgttccagcttggtcctcccagccctgtaaaaatgccctctccgccatgggaatgcaacctatttgcggtgtcgtttaagcatagcgtggatcctggttgttag

SEQ ID NO: 199676 - DNA, 2586 bp, synthetic construct
  misc_feature 1..2586: note = Description of Artificial Sequence: Synthetic coding sequence
  source 1..2586: mol_type = other DNA
atgaccggccgggcccgggcccgggcccggggccgggcccggggccaggaaaccgcacagcttgtaggcagtacagcatctcaacagccaggctacatccagccgagaccacagccaccccccgcggagggtgagctctttggtcggggcaggcaacgtggcactgcaggaggaaccgccaaatctcagggactgcagataagcgctggttttcaggagctatctctagcagagcggggtgggagacggagagattttcacgacctgggggttaataccaggcaaaacctggaccacgtgaaagaatccaagaccggaagttctggcataatcgttcgcttgtctacaaatcactttagactgacctcgaggccccagtgggccctgtatcagtatcatattgattataatcccctgatggaggcacggcgactgcgaagcgccctgctgttccagcatgaggacctcattggcaaatgtcacgcttttgatggcactattctgttcttgcctaaaagactgcaacagaaggtcaccgaggtcttttccaagacccggaatggcgaagacgtgcgtatcaccattacactcactaatgaactgccgcccaccagcccgacttgcttgcagttctataatatcatcttccgcagactgctcaagattatgaacctacagcaaattggtcgcaattattacaaccctaatgaccctattgacataccatctcaccggttagtgatttggcccggcttcaccacaagcatcctacagtacgagaactccataatgctctgcactgacgtgagtcacaaggtgcttagatccgagaccgtgttagatttcatgtttaacttctaccatcaaaccgaggagcacaaattccaggagcaagtgagcaaggaacttattggccttgtcgttctgacaaagtacaacaataaaacttatagggtcgacgacatcgattgggatcagaaccctaagtctacattcaagaaagctgatggaagcgaggtaagttttctcgagtattaccggaagcagtacaatcaagaaatcaccgatctcaagcagcccgtgctggtgtcacaacccaagaggagaaggggccctggcggcaccctccccggacctgcaatgttaattcccgagctttgttacttgactggtctaacagataaaatgagaaacgatttcaatgttatgaaggatctggcagtgcatactaggctgaccccagagcagaggcagagggaagtgggccggctgatcgattacatccacaagaatgacaacgtgcagagagaactcagggattgggggctcagtttcgattccaacctgttatcattctctggaaggatcctgcagaccgaaaagatccaccagggaggaaagacgttcgactacaacccgcagttcgcagactggtccaaggagactaggggcgcccctctaatttctgtgaaacctctcgacaattggttgttgatctacacccggcggaactacgaggccgctaattccctgatccagaacctgtttaaagtaactcctgcgatggggatgcagatgcgaaaagcaattatgatcgaggtggacgaccggaccgaggcctacctgagggtcttacaacaaaaagttacggcggacacacagatagtggtgtgtctactctcttcaaacagaaaggacaagtacgacgctatcaagaaatacttgtgcacggactgtccaacacccagtcagtgcgttgtagcacggactctcggaaaacagcagaccgtcatggctatagcgaccaaaattgccctgcaaatgaactgcaaaatggggggagagttgtggcgtgtggatatccctctgaaactggttatgatagtgggaatcgactgttaccacgacatgactgcaggacggcgatccatcgcaggtttcgttgcttcaatcaatgaggggatgacccgttggtttagccggtgcatatttcaagaccggggccaggagttagtagatggactgaaggtttgcctgcaggcggcactccgggcctggaatagttgtaatgaatacatgccttcccgaattatcgtgtaccgggacggagtaggggacggccagttgaaaacactggtaaactatgaggtaccccagtttctcgattgtctcaagtcaatcgggcgaggatataatcctcgcttgaccgtgatagtggtgaagaaacgggtgaatacccgtttctttgctcaaagcggcggccgcttgcaaaacccactcccaggcaccgtcatcgatgtggaggtgaccaggcccgagtggtacgatttttttatagtgtctcaggcagttaggtccgggtctgtgagccctactcattataacgtcatctacgacaactctggcttgaaaccggaccacattcagcgattaacctataagctgtgtcacatatattacaactggcctggagtgattagagtacctgcaccatgtcagtatgctcacaaactcgcctttttggtagggcaaagtattcatcgcgaacccaacctgtcattaagtaataggttgtactacctgtag

SEQ ID NO: 199677 - DNA, 369 bp, synthetic construct
  misc_feature 1..369: note = Description of Artificial Sequence: Synthetic coding sequence
  source 1..369: mol_type = other DNA
atgaccggccgggcccgggcccgggcccggggccgggcccggggccaggagaccgcgcagcttgtcgggagcacagcttcccagcagcccggctacattcagccaagaccccaacctccacctgcggaaggcgagctctttgggagaggcagacaacgcgggactgcaggaggtacagctaagagtcagggtctgcagatctctgcggggtttcaggagctgagcctggccgagagggggggacggcgacgggactttcacgatctgggagtgaacactaggcagaacttagaccacgtaaaggaaagcaaaacgggaagttccggcattatcgttcggttgtccaccaatcacttccgtttgacctag

SEQ ID NO: 199678 - DNA, 453 bp, synthetic construct
  misc_feature 1..453: note = Description of Artificial Sequence: Synthetic coding sequence
  source 1..453: mol_type = other DNA
atgaccggccgggcccgggcccgggcccggggccgggcccggggccaggagacagctcagcttgtcggcagcaccgcatctcagcagcctggctatatccagcccagacctcagcctccaccggcagagggtgagctgtttggtcgtgggaggcagcgggggaccgcaggagggactgccaagagccaggggctccagatttctgctgggtttcaggaattatcgctggcggagcgtggaggccggagacgagactttcacgacctaggggtcaacactcgccagaatttggatcacgtgaaggagagcaagaccggctctagtggaatcatagtccgtctttctacaaatcacttccgtctgactagcaggccacagtgggcactgtatcagtaccatatcgactacaatccacttatggaggctcggcgcttgaggtccgccctcttatag

SEQ ID NO: 199679 - DNA, 519 bp, synthetic construct
  misc_feature 1..519: note = Description of Artificial Sequence: Synthetic coding sequence
  source 1..519: mol_type = other DNA
atgaccggccgggcccgggcccgggcccggggccgggcccggggccaggagactgcccagcttgtcggaagcactgcttctcagcagcctggatatattcagcccagaccccagccaccaccagccgagggcgagttatttggacgggggcgccagcggggaactgctggcggaactgccaaaagccagggccttcagatctctgcgggctttcaggagttgtctttggcggaaagaggagggcggaggcgcgatttccacgacctgggcgtgaataccaggcagaatttggaccatgtgaaggagtcaaagacggggagcagcggcataattgtcaggctatcaacgaaccattttcgcttaaccagccggccccaatgggctctttaccagtatcacatcgattataatcccctgatggaagctcgtaggctccgctcagctctgctttttcaacacgaagatctgatcggcaaatgccacgccttcgacggtactatcctctttctccccaaatag

SEQ ID NO: 199680 - DNA, 498 bp, synthetic construct
  misc_feature 1..498: note = Description of Artificial Sequence: Synthetic coding sequence
  source 1..498: mol_type = other DNA
atgaccggccgggcccgggcccgggcccggggccgggcccggggccaggaaaccgctcagctggtcggaagcactgccagccagcagcccggatatatccagccccgccctcagccccctcctgcagagggcgagctgtttgggcggggccgacagcgcggcactgcgggtgggaccgccaaaagccagggcctgcagatcagcgcaggctttcaggaactgtccctagccgaaagaggtggcaggcgaagagacttccatgacttgggagtgaatactcgccagaacctagatcatgtgaaggaatcaaagacgggtagtagcggcatcatagtgagactttccaccaaccattttagactcacaagtaggcctcagtgggctctgtaccaataccatatcgattacaatccactgatggaggcccgtagactgcgttcagccctgcttttccagcacgaggacttgataggcaagtgccatgccttcgatggatag

SEQ ID NO: 199681 - DNA, 2922 bp, synthetic construct
  misc_feature 1..2922: note = Description of Artificial Sequence: Synthetic coding sequence
  source 1..2922: mol_type = other DNA
atggaccccttccggcccagcttccggggccagagccccatccacccctcccagtgtcaagcggtccggatgccaggctgctggccgcaggcctccaagcctttagaccccgccctcggtcgaggagcaccggctggcaggggacacgtgttcggcaaaccagaggaaccatcgacccagcggggcccagcgcagagggagtctgtgggactggtgagcatgttccgagggttgggcattgaaaccgtgtccaagactcccctcaaaagggagatgttgccgagcgggcgcggtattttaggcagaggtttgagcgctaacctcgtgagaaaagatcgagaagagcttagtcctactttctgggatcccaaagtcctggccgcaggcgacagcaaaatggctgagacaagcgtgggttggtcccgtacgctagggagaggatcttcagacgcatcgctactaccactaggacgtgcagcggggggcatttcaagagaagtggacaaacccccctgcacatttagtaccccatcccgaggacctcctcagctgtctagtccaccggctttgcctcagtcacctctccactctcccgaccggccccttgtcctgacggtggagcataaagagaaggaactgatcgtcaaacagggtagcaaggggactccccagagtctcggattaaatctcgtcaagatccagtgtcacaatgaagctgtgtatcaataccatgttaccttctctcctaacgtggagtgcaagtccatgcgtttcggtatgctgaaggatcaccaggccgtgaccggaaacgtgactgcctttgatggatcgatcctctatttacctgtgaagctccaacaagttttagagctgaaatcccagcgtaagaccgatagcgctgaaattagcatcaaaatccaaatgacaaaaatcctggaaccctgtagcgatctgtgtatccccttctataacgtagtattccggagggtaatgaagctgctcgatatgaaattggttggacgaaacttctacgatcctacatcagccatggtcctccagcagcatcgattgcagatctggccagggtatgctgctagcatcagaagaactgacggaggattgttcctcttggcagatgtgtcgcacaaggtgattaggaacgactgtgtcctggacgtcatgcatgcaatctatcaacaaaataaggagcacttccaggatgagtgtaccaagctgctagttggcaatatcgtgatcactcggtataataatcgaacttataggatcgatgacgtggattggaataaaacccctaaggacagttttaccatgtctgacgggaaggagattaccttcttggagtattatagcaaaaactatggcattacggtcaaggaggaggaccaaccattgctgatccatcgtccaagcgagcgtcaggacaaccacggaatgctgctgaagggagaaatcctgcttctccccgaactgtcattcatgaccggcattccggagaagatgaagaaggacttcagagcaatgaaggacctagcccaacagattaatctttcacctaagcaacaccatagcgccctcgaatgccttctccagcgcatcgcaaagaacgaggccgcaaccaatgaacttatgaggtggggactcagattgcagaaggatgttcacaaaattgagggaagggttcttcccatggagagaataaatctgaaaaacacctcttttattacctctcaagagctaaactgggtgaaggaagttacgagagacccatccattctgacaatcccgatgcacttctgggccctgttttatccaaaacgggcaatggaccaggcccgggaactggtcaacatgcttgagaaaattgcagggcccatcggcatgaggatgagcccccccgcttgggttgaattaaaagacgacagaatcgagacctatgttcgtaccattcagtccaccctgggagcagagggaaagattcagatggtcgtctgtattataatggggcctagggacgacctctatggagccatcaagaagctctgttgcgttcaatctcctgtgccatcccaggtcgtgaatgttcggactatcggacagcccacccgcctcagatcagtggctcaaaagatactactgcagatcaattgcaagttagggggagaattgtggggtgtggatatccccttgaaacaactcatggtaattggaatggacgtgtatcacgaccccagtagagggatgcgatctgtggtggggttcgtcgcatccataaatctgactcttactaagtggtatagccgggtggtttttcaaatgccacatcaggagattgtggattcattgaagttgtgtcttgtgggctcactgaagaaattctatgaggtcaatcactgcttacccgagaagattgtagtttacagagatggcgtaagcgatggtcagttaaaaaccgtggccaattatgagatcccgcagctccagaaatgctttgaagcttttgagaactatcaacccaaaatggtggttttcgtcgtgcagaaaaaaattagcaccaatctctatctcgctgcgccgcaaaatttcgttactccaaccccaggcacggtcgttgaccacacaatcaccagttgcgagtgggtggacttttatctgcttgcccaccatgttcgccagggctgtgggattccaacacattacgtgtgtgtgttgaacacagctaacttgtcccctgatcatatgcagcgcctcacgttcaagctgtgtcatatgtattggaactggcccggcactattcgcgtaccagccccttgtaagtacgcgcataagttagcctttctttccgggcacatcttgcatcatgaacccgcgatccagctgtgtgagaatctgttcttcctctag

SEQ ID NO: 199682 - DNA, 2922 bp, synthetic construct
  misc_feature 1..2922: note = Description of Artificial Sequence: Synthetic coding sequence
  source 1..2922: mol_type = other DNA
atggaccccttccggcccagcttccggggccagagccccatccacccgtctcagtgtcaggccgtcagaatgccagggtgttggccccaggccagcaaacctctggatcccgccctcggacggggagcacccgcgggcaggggtcacgtcttcggcaaacccgaggaacctagtactcagaggggacctgcccagcgcgagtctgtgggtctggtgtcaatgtttcgaggcctgggcatcgagaccgtgagcaagacgcctctcaaaagggagatgctgccctccggcaggggaatcctggggcgtggccttagcgccaacctagtgcggaaagaccgggaggagctgtctcctaccttctgggaccctaaggttctcgccgccggcgacagcaagatggctgagacatcggtgggctggagtaggactcttggcaggggttcctcagacgccagtcttctccccctgggtagggcagctggcggcatcagccgagaggtcgataagcctccgtgtaccttttccactcccagtcgaggaccccctcaactttcaagcccacccgcgttgcctcagtcccccctccacagccccgaccgtccactcgtgctgaccgtcgagcacaaagagaaagagctgatcgtcaagcagggatctaaggggaccccacagtccctagggctgaatctggttaagatacagtgccacaacgaagcggtttaccagtatcatgtgacgttctctccgaatgtagaatgcaagagcatgcgtttcggaatgctgaaggatcaccaggccgtgactgggaatgtaacagcattcgatgggagtatcttgtatctacctgtgaaactgcagcaggtgcttgagttgaagtctcagcgtaaaaccgactccgctgaaatctcgatcaagatccagatgacgaagatcctggagccttgttctgatttatgtatccctttttacaatgttgtgttccgacgagttatgaaactcctggatatgaagctggtgggacgaaacttctatgatcctacatccgcaatggtgctacagcagcaccgactccagatttggccgggctacgctgcgtccatccgacgcaccgacggcgggctgtttctgctggctgacgtgagccataaagtcattagaaacgattgcgtattggacgtcatgcatgctatttaccagcaaaataaggagcacttccaggacgaatgcacgaagctgctggtgggcaatatcgttatcacaagatacaataatcgcacttataggatcgatgatgtcgattggaacaagactcctaaggatagctttactatgagtgacgggaaggagatcactttcttagagtactacagcaagaactacggtatcaccgttaaagaggaagatcagccgctgttaatacataggcccagcgagcgccaggataaccatggaatgctgcttaaaggcgaaatcctgcttttgcctgagctttcattcatgacaggaatacctgaaaagatgaaaaaggacttccgcgcgatgaaagacttggctcaacagattaacctatctccaaaacagcaccattcagctctggaatgtctcttacagagaattgccaaaaacgaggccgctactaatgaattgatgcggtgggggcttagactccagaaagatgtgcacaaaattgagggccgagtgctgccgatggagagaattaatttgaagaatactagtttcattacctctcaggagcttaactgggtgaaggaggtgacccgggacccttcgatcctgaccattcccatgcatttctgggcgttattttatccaaagagggccatggatcaggcccgggaactcgtgaatatgctggaaaagatcgccgggcctataggcatgagaatgagcccccctgcatgggtggagctgaaggatgatcgtattgagacgtatgtccgaacaattcaatctaccctgggcgccgaggggaagattcaaatggtggtttgtatcattatgggccccagggatgacctttacggggccatcaagaaactctgctgtgtgcaatcccccgtgccgagccaggtcgtcaatgtccgtaccattggtcagccaacacggctaaggtccgtcgcacagaaaattctgctgcagattaactgcaaactggggggtgagctttggggggtcgatatacccctgaaacagctcatggtgatcgggatggatgtataccacgacccttctagaggtatgcgcagtgtggtcggcttcgtagcttcaattaacttgaccttaacaaaatggtacagcagggtcgttttccaaatgccccatcaggaaattgttgattccctgaagctgtgtctggtcggctccttgaaaaaattttacgaagtcaatcactgcctgcccgaaaagattgtggtttatcgtgacggggtgtctgacggacaactgaagaccgtagcaaactatgaaattccccagctgcagaagtgcttcgaagcctttgagaattaccagccaaagatggttgtgttcgtggtacagaaaaaaatttctactaacttgtacctggcggcaccacagaacttcgtgactcctactcctgggactgtggtggaccacaccattacaagctgcgagtgggtagatttctatcttctcgcacatcacgtaaggcagggatgcgggatacccacacactacgtctgtgtgctcaatactgcgaacctgtcacctgaccatatgcagagactgacctttaaattgtgccacatgtactggaactggccaggaaccattcgggttccggcgccctgtaaatacgcacacaagctggcttttctgagcggacacatcctgcatcatgagcctgccatacagctgtgtgagaatctgtttttcctgtag

SEQ ID NO: 199683 - DNA, 639 bp, synthetic construct
  misc_feature 1..639: note = Description of Artificial Sequence: Synthetic coding sequence
  source 1..639: mol_type = other DNA
atgaaggtgttcaagttcatcggcctgatgatcctgctgaccagcgcattcagcgctggcagcgggcagagccccatgaccgtgttgtgttcaatcgactggtttatggttactgtgcatccgttcatgctgaacaatgacgtgtgcgtccacttccatgagctccaccttggcctgggttgccctcccaaccacgtgcagccgcatgcttatcagtttacgtaccgcgtgaccgagtgcggtatacgcgcaaaggcagtgtcacaggacatggtcatttactcaacagagatacattattcaagcaagggaacccccagtaagtttgtcattcctgtgtcgtgcgccgccccacagaagagtccatggcttaccaagccgtgctccatgcgagttgcgtccaaatcacgcgctaccgctcagaaagatgaaaagtgctacgaagtcttttcgctgtcccagtctagtcagcggcctaattgcgactgccctccttgcgtgttcagcgaggaagagcatacccaagtaccgtgtcatcaggcaggagcccaggaagcacaaccactgcagccttcacattttctcgatatttccgaggactggtccctgcacactgatgacatgatcgggagcatgtag

SEQ ID NO: 199684 - DNA, 294 bp, synthetic construct
  misc_feature 1..294: note = Description of Artificial Sequence: Synthetic coding sequence
  source 1..294: mol_type = other DNA
atgcggcccctgctgtgcgccctgaccggcctggccctgctgcgggcggctgggagtctggccgcagcagagcccttctctcctccgaggggcgatagtgctcagtctaccgcctgcgacaggcatatggctgtccagaggcgcttggatgtcatggaagagatggtggagaaaactgtagatcacttgggaacggaggtcaagggcttgttgggactgctagaggagttagcttggaacttgcctcctgggcccttctccccggctccagacctgcttggcgacggcttctag

SEQ ID NO: 199685 - DNA, 264 bp, synthetic construct
  misc_feature 1..264: note = Description of Artificial Sequence: Synthetic coding sequence
  source 1..264: mol_type = other DNA
atgcggcccctgctgtgcgccctgaccggcctggccctgctgcgggcggccggatcgttagctgccgctgaacccttttctcctccccgcggagacagtgctcaatccaccgcgtgtgacaggcacatggcagttcagagaaggctcgacgtcatggaggaaatggcctccgagccttggtcctggagcccagctgtcggcgggggcgctcccgctcgacagagaccacagaaccagccatgtccccttgactttttgccctag

SEQ ID NO: 199686 - DNA, 168 bp, synthetic construct
  misc_feature 1..168: note = Description of Artificial Sequence: Synthetic coding sequence
  source 1..168: mol_type = other DNA
atggccgtgcagcggcggctggacgtgatggaggagatggtggagaagacggttgatcatctgggaacagaggtgaagggcctgctgggcctactggaagaactagcttggaatctgcctccaggacccttcagccctgcgccagacctgctcggggacggtttctag

SEQ ID NO: 199687 - DNA, 2244 bp, synthetic construct
  misc_feature 1..2244: note = Description of Artificial Sequence: Synthetic coding sequence
  source 1..2244: mol_type = other DNA
atgaaccacagccccctgaagaccgccctggcctacgagtgcttccaggatcaggacaattccacccttgcactcccaagtgaccagaagatgaagaccggtacttccggccgccagagagtgcaggaacaagttatgatgaccgtcaaaagacagaagtccaagtccagtcagagctctactctgtctcattctaaccgcgggtccatgtatgacgggttggcagataattataactacggtacaacaagccggagctcttactattcgaagttccaggcaggcaacggaagctggggctaccctatatataacgggactctgaagagagagccagacaacagaaggttctcctcctatagtcagatggagaactggtccagacactaccctagagggagctgtaataccactggagcggggtccgacatttgttttatgcaaaaaatcaaggcgagtaggtccgaacccgatctgtattgtgacccacgcggaactctacggaaggggactcttggcagcaaaggtcagaagaccacgcaaaatcggtactctttttactccacatgcagcggtcaaaaagcaattaaaaagtgccctgtgagacccccctcttgtgcctcaaagcaggatcctgtgtacattcctccaatttcctgcaacaaggatctctctttcggtcactctcgagcctcttctaaaatctgcagcgaggacatagagtgctctggcttaaccatccctaaggccgtgcagtatttatcatctcaggacgagaagtatcaggccataggcgcatactacatccagcatacgtgctttcaggatgagtctgccaaacaacaggtgtatcagctcggcggaatctgtaagctagtggacctattaaggagcccaaaccaaaatgtacagcaggcggcagctggcgccttgcggaacctggtgttccgcagcacgactaacaagctcgagacccgtcgtcagaacgggatacgggaggccgtcagtctcttgcggcgtacgggcaatgcagaaatccagaaacagctgacaggcttgctgtggaatctatcaagcactgatgaactcaaggaggaacttatcgccgatgcccttcccgttttggcagaccgggtcataattcccttttcaggctggtgcgacggcaactctaacatgagccgggaggtggtcgacccagaggttttcttcaacgccaccggctgcctgaggaaaaggctggggatgcgagagcttcttgccttagttcctcaacgggccacatcatcccgagtcaacctctcgagtgccgatgcaggcaggcagacaatgcggaactattctggccttatcgactctctcatggcctacgttcagaattgcgttgccgcaagtcgatgcgatgataagtcggtcgagaactgcatgtgcgtcttacacaacttgagctatcggctggacgccgaagttccgacacgctacagacaacttgagtacaacgctaggaatgcctacaccgagaagagctctacgggatgcttttctaacaaatccgataagatgatgaacaataactatgattgccctcttcccgaagaagaaaccaatcccaagggctcaggatggctttaccatagcgatgctataaggacttacctcaacctgatgggcaaatctaagaaggacgccacacttgaagcatgtgcgggtgcattacagaatctgaccgccagtaaagggttaatgagcagcgggatgagccagctcattggactgaaagaaaaaggcctgccccagatcgcgagactgctccagagcggaaactctgacgtcgtccgcagtggggccagcttgctttcaaacatgtccagacatcctctattacaccgagtgatgggtaaccaggtctttcccgaggtgacgaggctactcacaagccatacggggaatactagcaactcagaggacatcctcagctcagcctgttacaccgtcagaaaccttatggcaagccagccacaactcgccaagcagtacttcagtagctccatgctgaataatattattaacctctgccggagcagcgcgtcgcctaaggccgctgaggcagccaggcttttactgtctgacatgtggtcctccaaagaactgcagggtgtcctgaggcagcagggtttcgatcgcaacatgctgggcaccttagcaggcgccaactctctccgtaactttacatcacgcttctag

SEQ ID NO: 199688 - DNA, 2244 bp, synthetic construct
  misc_feature 1..2244: note = Description of Artificial Sequence: Synthetic coding sequence
  source 1..2244: mol_type = other DNA
atgaaccacagccccctgaagaccgccctggcctacgagtgcttccaggaccaagacaatagcaccctggcactcccctccgaccagaagatgaagaccgggacttcgggacggcagcgcgtgcaggagcaagttatgatgactgtgaaacgccaaaaatctaaaagtagccaatctagcacattgagtcacagtaataggggtagcatgtacgatggactcgctgacaattacaactatggtacgaccagcaggtccagttactatagcaagttccaggccgggaacgggagctggggctatcccatatataacggaacccttaagcgagagcccgataacagacgattttcatcttattcgcagatggaaaactggtcaagacattaccccaggggttcttgcaacaccactggggcgggttccgatatatgcttcatgcagaaaatcaaagcctcaagatcggaacctgacctctattgtgatcctagaggtacactgaggaaagggacgcttggctctaaaggacagaaaactacacaaaacaggtattcattctactcaacttgcagcggacagaaagcaataaaaaagtgccccgtaaggccaccgtcttgtgcatcaaaacaggatcctgtgtatatcccaccaatctcctgcaataaggatctttcatttggccactctcgtgcaagctctaagatctgttcagaggatatcgagtgtagcggactgacaatcccaaaagcagttcagtatctttcctcccaggacgagaagtaccaggccatcggagcctactatatacagcatacctgcttccaggacgagagcgctaagcaacaggtctaccagctggggggaatctgtaagctggttgatctccttagatccccaaatcaaaatgtgcagcaagccgcagccggggctcttcgtaatctagtcttccggtctactactaacaaattggagacccgaaggcagaacggtatccgggaggccgttagtctgctccggcgcaccggaaatgccgaaattcagaagcagctcactgggctgctttggaacttgagctctactgacgagttgaaggaggaactcattgcagatgctctgccggttcttgccgacagagttattatcccttttagcgggtggtgtgacggcaattctaacatgtctcgggaggtcgtcgatcccgaagtctttttcaatgcaacagggtgtctacgaaaaagattgggcatgagggagctcctggccctcgtccctcagagggcaacaagttcacgtgtgaatctgtcatctgcagacgctggccgccaaacaatgagaaattattccgggctaatcgactcactgatggcatatgtgcagaactgcgtggctgccagtaggtgtgacgataaatcagtcgagaattgcatgtgcgtgttacacaacttgtcttataggctggacgccgaggtgccaacgcgctatcgccagctggaatacaacgcccgaaacgcctataccgaaaagtcgtccacaggttgtttctctaacaaatcagacaagatgatgaataataattatgactgcccactgccagaagaggagaccaaccctaaaggcagcggctggttatatcacagcgatgcgatccggacatacctcaaccttatggggaagagcaagaaggacgccaccctcgaggcctgcgctggtgctcttcagaacctgacagcatctaaagggctcatgagttctggaatgtctcagttgatcggtctgaaggaaaaaggactgcctcaaattgcacgtttgttacagagtggaaactccgatgtcgtaagatctggagcctctctcctgagcaatatgagcaggcatcctcttcttcatcgggtcatgggaaaccaggtgttccccgaggtcactaggctcctgacctcacatacaggcaacacgtcgaattccgaagacattctgtcttctgcttgctatactgtgcggaacctcatggcatcacaaccccagctcgcaaaacaatatttcagcagttcaatgttgaataatattataaacttatgccggtccagcgcatcacccaaagctgctgaagctgctcgcctgcttcttagtgatatgtggtcatctaaggagttgcagggagtgctgcgccagcagggtttcgatagaaatatgctcggaacactggcaggggcaaattccctgcggaactttaccagtagattttag

SEQ ID NO: 199689 - DNA, 2181 bp, synthetic construct
  misc_feature 1..2181: note = Description of Artificial Sequence: Synthetic coding sequence
  source 1..2181: mol_type = other DNA
atgaaccacagccccctgaagaccgccctggcctacgagtgcttccaggaccaggataactccactctggccttgccatccgaccaaaagatgaaaacaggcacttctggacgtcagagggtgcaggagcaagtgatgatgacggtgaagagacagaagagcaaaagcagccaatcctcaacacttagccattccaatagaggcagcatgtatgacggcctagcagacaattataattatggcactacgagtagatctagctactattcaaagttccaggctgggaatggctcttggggttaccctatttataacggcactctgaagagagagcccgataacagacgtttctcttcctatagccagatggaaaattggtcgcggcattatccgaggggcagctgcaatacaacaggggcagggagcgatatttgcttcatgcagaagattaaggcaagtcgtagtgagcctgacctatactgtgatcctagagggacattaagaaagggcacgctgggttctaagggacagaagacaacgcagaataggtatagtttctattccacttgtagtggacagaaggccatcaaaaaatgccccgtaaggcctcctagctgcgcttctaagcaagatccagtctatatcccacccatctcctgtaataaggacctttctttcgggcactcccgcgcgagctcaaagatatgcagtgaggacatcgaatgctctgggctgacaatccccaaagccgtacagtatctgagttcgcaggacgaaaagtaccaagccataggagcttattacattcagcacacgtgctttcaggacgaaagcgctaagcagcaagtataccagctcggcggcatctgtaaattagttgatctgctgcgctccccgaaccagaatgtgcaacaggccgcagcaggggccctacgcaacttagtatttagaagcacaaccaataaactagagacccgaaggcagaatggaatacgagaggcagtgagcctcctacgcaggacgggcaatgccgagatccagaaacagctgaccggcttgctttggaacctgagctcaactgacgagctgaaagaggagctgattgcggacgcccttcctgtcctagctgaccgcgtgattatacctttttcagggtggtgcgacggcaatagcaatatgtccagagaggttgtcgatcccgaggtgttcttcaatgctacgggctgcctccgcaatctgtccagcgcggatgccggccggcagacaatgcgaaattacagcggcctcatcgatagtctcatggcctatgttcagaactgtgttgcagcaagtaggtgtgacgataaatctgtggaaaattgcatgtgtgtgcttcataacctgtcgtaccggctggacgccgaagtgccaacgcggtacagacagctggagtacaatgcccgcaacgcctacaccgagaagagttctaccggttgtttctccaacaaatccgataaaatgatgaataacaactacgactgtccccttccagaggaggagaccaacccaaaggggtcgggttggctctatcattccgacgccatccggacttacctgaacttgatgggcaagagcaaaaaggacgcgaccctcgaagcttgcgcaggagcgctacagaatctgacggcttctaagggtctaatgtcttcaggcatgtctcaactcattggcctcaaggaaaaggggctcccgcaaattgctaggctgctgcaatctggaaattccgatgtggtgcgcagcggagcctccctgttgtctaacatgtcccgtcatcctctgcttcatagagttatgggtaatcaagttttccccgaagttactagacttctcacatcccatactggcaatacctctaacagcgaggacatcctaagttcggcctgctataccgtacgtaatctgatggccagtcagccccaactggccaaacagtacttcagctcatccatgctgaacaatataataaacctgtgtagatcgtccgcctctccaaaggctgctgaggctgcgaggctgctgctctcagatatgtggagcagtaaggagcttcagggcgttctacgccaacagggatttgacagaaacatgttgggaacccttgcaggagcaaatagtctccgaaattttacatctcgcttctag

SEQ ID NO: 199690 - DNA, 2646 bp, synthetic construct
  misc_feature 1..2646: note = Description of Artificial Sequence: Synthetic coding sequence
  source 1..2646: mol_type = other DNA
atggccgcccccggcgcccccgccgagtacggctacatccggaccgtgcttggacagcagatcctgggccagttggattccagctccctggcactgccgtccgaggccaagctaaaacttgcgggctcttctggcagggggggccagaccgtcaagtcattgcggattcaagagcaggtgcagcaaacactggcacgcaagggaaggtcctccgtaggaaatgggaatctccacagaacatctagtgtgcctgaatacgtgtacaatctgcatctagtcgagaatgacttcgttggtggcaggagcccagttccgaagacatacgacatgctcaaggctggcaccaccgccacctacgaagggcgttgggggagaggcacagcccagtattcctcacagaagtccgtggaggaaagaagtctgaggcatccacttcggaggctggaaatctcccctgactcctcaccagaaagggcacactatacccactccgattatcagtattcgcagaggagccaggccggacataccctgcatcatcaggaatcgagaagagccgcccttttggttcccccaagatatgctcgcagcgagatagtcggcgtgagtagagccggaacgaccagcaggcaacgacatttcgacacctatcaccgtcagtaccagcacggttcagtcagcgacacagtgtttgacagcataccagcaaaccccgcactgctcacgtaccccaggccaggcaccagtagatccatgggcaaccttctagagaaagaaaattatctcacagcaggcctgactgtgggccaggtgcggccattggtcccactgcagcccgtcacccagaacagggcctctcgctctagttggcaccagagctccttccactctactcggacactgcgagaggctgggccttcagtggctgtggatagctccggtaggcgcgcccacctaacagtggggcaggctgccgcgggcggatccggcaacttactgaccgaacgctccacatttaccgatagccagctgggcaacgccgatatggagatgaccctagaaagggccgtgtccatgctggaagccgatcatatgctgccatcccgcatttcggcggctgccacatttattcaacacgagtgcttccagaagagcgaagctcgcaaacgggtaaaccagttaagaggaattttgaagcttctgcaattgttgaaagtgcagaacgaagatgtgcaacgggccgtgtgcggagcccttcgaaaccttgtattcgaggacaacgataacaaactggaggtagctgagctcaacggcgtccctagacttctgcaggttctgaagcaaacgagggacttagaaactaagaagcagatcactgatcatactgtgaatctgaggtctcgcaatggctggcctggagccgtcgcacatgcctgtaacccctccaccctggggggccagggtggcagaatcactcggtccggggttagggaccagccggaccagcatggcctgctgtggaatctgagttctaacgataagctgaaaaacctgatgatcactgaggcactgctgactctgacagaaaacattatcatccccttttcaggatggcctgagggagactaccctaaggccaacggactcctcgactttgacatcttctataacgtaactgggtgcttaaggaacatgagtagtgcaggcgctgacggacgcaaagctatgcggagatgtgatggattgattgacagtcttgtccactatgtgagggggaccatagccgattaccaaccagacgacaaggctaccgagaattgcgtgtgcattctccacaacctctcttatcagctggaagccgaactgcccgagaagtattcccagaacatatatattcagaatcgtaacatacagaccgataacaacaagtccattgggtgtttcggcagccggagcagaaaggtaaaagagcaatatcaggacgtcccgatgccagaagagaaatccaaccccaaaggggtcgaatggctctggcactccatcgtcatcagaatgtatctgagtctcattgccaaatctgttcgtaattatactcaggaggcttcattaggcgctctccagaacctgacggccggcagtggcccaatgcctacctccgtcgcccagaccgtggtccagaaagagtctgggctccagcacactagaaaaatgctccatgtgggagatcctagtgtgaaaaagacggcgattagcttgctgagaaatttgagtcggaatctgtctctccaaaatgagatagctaaggagaccttgcccgaccttgtgagcattatccccgacaccgtgccttccactgatctgctgattgaaacgactgccagcgcctgctacaccctcaataacataatccagaacagctatcaaaatgctagggacctgctgaataccggtggaatccaaaaaattatggcgatcagtgccggcgacgcatatgcatctaacaaggcttctaaagccgcatccgttctgctttactccttgtgggcccacactgagctccaccacgcctacaagaaggcccaatttaaaaagactgatttcgtcaattccagaacagcgaaagcataccacagtctcaaggattag

SEQ ID NO: 199691 - DNA, 2514 bp, synthetic construct
  misc_feature 1..2514: note = Description of Artificial Sequence: Synthetic coding sequence
  source 1..2514: mol_type = other DNA
atggccgcccccggcgcccccgccgagtacggctacatccggaccgtgctgggccagcagattcttggacagcttgattcctctagtctagccctgcccagcgaagcgaagctcaaactggccggcagcagcggccgaggcggacagacagtgaagagcctccggatacaagagcaagtgcaacagaccctagctaggaaaggtaggtcatccgtgggcaatggtaacctgcacaggacttcctctgtgcccgaatacgtttataatctccatttggtggagaatgatttcgtcggtggccgctctcccgttcctaagacctatgacatgctgaaggccggtaccacagccacttacgagggtcgttggggtcgcggcactgcccagtatagttcccagaagagtgtcgaagagagatccctcagacaccctctccgcaggctagagatcagccccgactcctcccccgagcgcgctcactacactcattccgattaccagtattcacagcggagtcaagccggccataccctccaccatcaggaaagtagaagggccgccctgttagttcctcctagatatgccagatccgagattgtgggtgtgagccgggccggaactactagccgtcagcgtcatttcgacacctaccatagacagtaccagcacggatcagtctccgacacagtattcgacagtatccctgctaatcctgcacttttgacgtaccctagacccgggacttctaggagtatgggcaatctgctggaaaaggaaaactaccttaccgcgggccttacagttggtcaggtccggccattagtgccattgcagcctgtaacacagaaccgggccagtagatcatcatggcaccagtccagttttcactctactcgaaccttgagggaagccggaccttctgtggcagtcgactcctccggccgtagagcccacttaaccgtgggccaggccgctgcaggggggagtggtaatttactgaccgagcgctcaacgttcacggattcccagttaggtaatgcagacatggagatgacactggaacgagccgtgtctatgcttgaggctgatcatatgctgccctctagaatctctgcagctgcgacattcatacagcatgaatgctttcagaaaagcgaggcgagaaaaagggtgaaccagttgcgcggtatcctcaagttattgcaattactaaaagtgcaaaatgaagatgtgcagagggcagtttgtggcgccctgaggaatcttgtgttcgaggataacgacaataaactcgaggtggccgagctgaacggagtgccccgtctattgcaggtgttaaaacagacgagggacttggagaccaagaaacaaatcacaggactgctatggaacctgtctagtaatgataagttgaagaacctgatgatcacggaggccctccttaccttgacagagaatattatcatcccattctctggttggcccgaaggtgactaccccaaggccaatgggctgctcgacttcgatatattctacaatgtcacaggatgtctgcgcaatatgtcttccgccggtgctgacggccggaaagccatgaggaggtgcgatgggctgatcgatagtttagttcattatgtgaggggaacaatcgcggattaccagcccgacgacaaggcaaccgagaactgcgtttgtattctccacaacttgagttatcagctagaggccgaactcccagaaaaatatagccagaacatctacatccaaaatcgcaatattcagaccgacaacaacaaatctatcgggtgcttcggctctcggtccagaaaggttaaggagcagtatcaagatgttccgatgcccgaggagaaatccaatccaaagggcgtggaatggttatggcactcgatcgtgatacggatgtacctgagcctgattgccaagagcgtgaggaactacacgcaggaggcgagcctgggcgctctgcagaacctcaccgcggggtcaggcccaatgcctacctcagtggcgcagactgtggtccagaaggaatctggcctccagcacacccgtaagatgctccacgttggcgatccatcagttaaaaagaccgctatctcccttctgaggaacttatccagaaaccttagtctgcaaaacgagattgccaaggaaacgctgcccgatcttgtgagcattataccagacacagttcctagtactgacctcctcatcgagacaacagcatccgcctgctatacactgaacaatatcattcaaaattcttatcagaacgcccgggatctgctgaacacaggtggaattcagaaaattatggccatatccgccggggatgcctacgcaagcaataaagcatccaaagccgcaagcgtccttctgtactcactatgggctcacactgagctgcaccacgcttacaaaaaagcgcagttcaaaaaaaccgacttcgttaactctcgcacggctaaggcataccatagtctcaaagattag

SEQ ID NO: 199692 - DNA, 2475 bp, synthetic construct
  misc_feature 1..2475: note = Description of Artificial Sequence: Synthetic coding sequence
  source 1..2475: mol_type = other DNA
atggccgcccccggcgcccccgccgagtacggctacatccggaccgtgctgggccagcaaattttgggtcagctcgactcatcctctctggccctgccaagcgaggccaaattgaagttggctgggagcagcgggcgcggcggacaaacagtgaagtcacttcggattcaagagcaggtgcagcagaccctggcccggaaaggacggtcatccgttggcaacggcaatctgcaccggacttcctccgtaccagaatatgtgtacaatcttcatctggtggagaacgattttgtgggggggagatctccagtcccaaagacgtacgacatgcttaaggctgggaccactgccacctacgaggggcgttgggggcgcggcaccgcccagtattcgtctcagaaaagcgtggaggagcgctctcttcgccaccctctccggaggctcgaaatcagccctgattcctcccccgaacgtgcccattacactcacagtgactatcagtattcacagaggtctcaggccgggcatacattgcatcaccaggagagcaggagggcagccctgctggtgccgccacgttatgcaaggtcagagatcgttggcgttagcagggctggaaccacatcgcggcagcgccattttgatacataccatcgccagtaccaacacggaagcgtaagcgacacagtgtttgatagcattccagctaacccagcactcttaacctatccacgcccaggcactagcagatcgatggggaatctgctcgagaaggagaattacctgaccgctggcttgacagtgggccaggttcggcccttagttccgcttcagcctgtaactcagaaccgcgcttcacgctccagctggcaccagtcttcatttcattctaccaggactctgcgggaagctgggccatctgtggccgtcgatagcagtgggcggagagcacacctgactgtgggacaagcagccgcgggtggatcaggaaacctcttaacagaaagatctacattcaccgattcccagctcggaaatgcggacatggagatgaccctagagcgagccgtcagcatgctcgaagcggatcacatgctgcctagcagaattagcgctgctgctacctttatccagcacgaatgctttcagaagtccgaggcacgaaaacgcgtgaatcagcttaggggcatattgaagctcctgcagctcctgaaagtccagaatgaggatgtacagcgggctgtttgcggagccctaaggaacctcgtgtttgaggacaacgacaataagttggaagtcgccgaacttaatggcgtacccagactcttgcaggtgctcaaacagacccgggacctggagaccaagaaacagattaccgatcataccgtcaacctaaggtccagaaatggatggccaggtgccgtcgcccacgcttgtaatcccagtaccctaggaggccaggggggtaggattactcgcagcggagtgcgggatcagcccgaccagcacgggttactctggaacctatccagtaatgataagctgaagaacctgatgatcacagaagcactgctcacgctaaccgagaacataatcatcccattcagtggatggccagagggagactacccaaaagcgaacggcctcctggacttcgatatcttttataacgttactggatgtcttaggaatatgtcctctgcgggagccgatggccggaaggccatgagaagatgtgacgggttgattgacagcctggtgcattatgtaaggggaaccatcgccgattatcagccggacgataaagccacagagaattgtgtttgcatactgcataatctcagttaccagctggaggccgaactgcctgagaagtattcccagaatatctacatccagaataggaacatccagactgataataataaatcaatcggctgttttggttcaagatccaggaaagtcaaggaacaataccaggatgtccccatgcctgaggaaaaaagcaaccccaaaggagttgagtggctgtggcacagtattgttattcgcatgtacctctcgttaattgccaagtccgtgagaaattacacacaggaagcatcactcggcgcgttgcagaacctgaccgctgggtccggccccatgcccacctccgtggcacagaccgtggttcaaaaagaatctggactgcaacatacacgcaagatgctgcacgtgggcgatccctcagtcaagaagacggccatttcactgcttaggaacctgtcacggaatctcagcttacaaaatgagatcgcgaaggagactctgccggacctggttagcattattcccgataccgtgcccagcacagacttactcattgaaactacagctagcgcatgttacacactgaataatatcatacagaatagctaccagaatgccagagacctgctgaacaggggacatcctgaaaactacggccattag

SEQ ID NO: 199693 - DNA, 2394 bp, synthetic construct
  misc_feature 1..2394: note = Description of Artificial Sequence: Synthetic coding sequence
  source 1..2394: mol_type = other DNA
atgcaggacggcaacttcctgctgagcgccctgcagcccgaggccggggtctgtagcctcgctctcccgtcagaccttcagctggacaggcggggagccgaggggcctgaggccgagagattgcgggctgcgagagttcaggaacaggttcgagccaggctgctccagcttgggcagcagcctaggcacaacggcgcagccgagcccgagcccgaggccgaaactgcgagaggaacgtcccggggccagtaccacacactccaggcaggtttttctagccgatcccaaggcctctccggtgataaaactagtgggttccgtccaatcgcaaaacccgcctattcccccgcctcatggtcctctagatcagctgtagacctgagttgctctcgcagattgtcatcagcacataacggaggttctgcattcggagccgctggctatgggggggcccaacccaccccacctatgccaacacgacctgtcagcttccacgaaagggggggagtcggcagcagggccgactacgacacactaagcttgagatctctgagactcggcccaggcgggcttgacgatcgctactcactggtcagcgaacagctggaaccggccgcaacatctacatatagagcctttgcctatgagaggcaagcctctagctcttcttctcgggctggaggcttggactggccagaggcgaccgaagtgtctccgagcaggacaatcagggcacccgcagtgcgcactttgcagagatttcaaagcagccatcgttctagaggcgtgggtggagccgtgcccggcgcagtactggagcctgttgcacgcgcgccaagcgttagatcattatcattgtctctggccgactcaggccatcttcccgacgtacacggcttcaatagttatggatcacatcgaacgctgcaacgcctgagctctggattcgacgatatcgatttaccttcagccgttaagtatctgatggcaagcgaccctaacctgcaagtcttgggcgcagcatacatacagcacaagtgctacagtgacgcagcagccaagaaacaagcccggtctctccaagctgttcctaggttagtaaaacttttcaaccatgctaaccaagaggtccagcgccacgcaaccggcgccatgagaaatcttatctatgataacgccgacaacaagttagcactggtcgaagagaatggcatttttgaactgctgagaacactgcgtgaacaagacgatgagctgagaaagaacgtgactggtatcttatggaacctttcgagtagcgaccacctcaaagaccgattagctcgggatactcttgagcagttgaccgacttggtgctatcccccctatcaggggccggcggacctcccttgattcagcaaaatgctagcgaagccgaaattttctacaacgccacaggtttcctgcgcaacctcagctccgcaagccaagcaaccaggcaaaaaatgcgagaatgtcacgggctggtggacgctctcgttacatcgattaatcacgcccttgacgcagggaagtgcgaagacaagtccgtggaaaatgccgtgtgtgtgctgaggaacttgtcataccgcctgtacgacgagatgccccccagcgcccttcaacgcctggagggccgcgggaggagggacctggcaggggctccacccggtgaggttgtcggctgcttcacgccccaatcccgccggctgcgggagctacccttggccgccgatgcccttacattcgctgaagtgtcgaaagatcccaaagggctggaatggctgtggtccccccagattgtagggctatataacagattgctgcagcgatgtgagctcaataggcatactaccgaagccgccgcaggcgcactacagaacattacggctggtgatcgccgctgggcgggtgtcctcagcagactcgctctggaacaggagcggattctgaaccctctcttggatcgagtgagaactgccgatcaccaccaacttagaagcctgactggactgatccggaatctgagccgcaatgctcggaataaggacgagatgagtacaaaagttgtgagccatctgattgagaagctcccagggtctgtgggtgaaaagtcacctcccgcagaggtgctggtcaatatcattgccgttctgaataatttagtagtggcttcgcctatcgctgcgagagacctcctttacttcgatggattgcgaaagttgatttttatcaaaaagaaacgcgactcgcctgattcggaaaaaagctcccgtgctgcttcctcacttttagccaacttgtggcagtataacaagttgcatcgtgacttcagggccaaagggtacagaaaggaggactttttaggaccctag

SEQ ID NO: 199694 - DNA, 276 bp, synthetic construct
  misc_feature 1..276: note = Description of Artificial Sequence: Synthetic coding sequence
  source 1..276: mol_type = other DNA
accgccttccggcggacccccggcgaggagttcgcctggcgggaccctgagttacctgaggtcatccacatgctccaacaccagtttccaagcgtgcaggctaatgcagctgcctacctgcagcacctctgctttggagataacaaagttaagatggaagtgtgtcggctgggcggcatcaagcacttggtagatctgctggatcatcgggtgggctcctccgaagaatgtttatggtgcccttccaagcctagattctggcaggtgtacagatag

SEQ ID NO: 199695 - DNA, 3450 bp, synthetic construct
  misc_feature 1..3450: note = Description of Artificial Sequence: Synthetic coding sequence
  source 1..3450: mol_type = other DNA
atgcccgcccccgagcaggccagcctggtggaggagggccagccccagactagacaagaagccgccagtacaggtccaggaatggagcccgaaactaccgcgaccactattcttgcaagtgtgaaggaacaggaactgcaatttcagcgactgactagggagctggaggtggaacgtcagatcgtagcctctcagctcgaaaggtgtcgccttggggcagagtccccgtcaatcgcaagcacttcgagcaccgagaagtccttcccctggcgctctaccgacgtacccaacaccggagtaagcaaaccgcgcgtgtcggacgctgtgcagcctaacaactacctgatcaggacggaacctgaacaaggtaccctctacagtcccgaacagaccagcctgcacgagtctgagggaagtttggggaactcgaggagtagcactcagatgaatagctattcagattcaggatatcaagaggccgggtcctttcataatagccagaacgtcagcaaggctgacaaccgccagcagcactcttttattgggagcacaaacaatcacgtggtgcgcaactcacgcgctgaaggccagactctggtgcagcccagcgtcgctaatagggccatgcggcgggtcagttctgttcctagtcgtgcgcagagccccagctatgtaatctccaccggcgttagccccagcagaggcagccttcggacctcactggggagcgggttcggcagtccctctgtgactgacccacgcccgctaaacccttccgcctattcgtctacaacattaccagctgcacgagccgccagcccgtatagtcagagacctgcttcaccgactgccataaggcgcattgggagtgtgacaagccggcaaacgagtaaccctaacggacctacaccccagtatcaaactacagctagggtgggcagcccgctcacgttgaccgatgcgcagacaagagtggcttcaccgagccaagggcaggtggggtcttccagccctaaacggagtggcatgaccgcggttcctcaacatctgggtccttcccttcagcgcactgtccatgatatggaacagttcggccaacagcaatacgatatctacgagcgcatggtgcctccgaggcctgatagcctgactggacttcgctcttcctacgcttcccagcattcccagctgggccaggatctcaggtccgcagtaagcccggacctgcacatcactcccatctatgaaggacgcacatactatagtcctgtgtaccgatcccccaaccacggtacagtggagctgcagggctctcaaaccgcactttacaggaccgggagtgtgggtattggcaatttgcaacggaccagcagtcaaagatcaaccctgacataccaacgaaataactacgccttgaatactaccgccacctatgcagagccctataggcctatacagtaccgtgtgcaggagtgtaactacaacagactgcagcatgcagtgcccgcagatgatggcaccactagatctccttccatcgactccatccagaaagacccccgggaatttgcttggagagacccagaactgcccgaggtcatccatatgctgcaacaccaatttccttctgtacaggcaaatgccgccgcatacctgcagcacctgtgtttcggagataacaaagtgaaaatggaggtctgtcgccttggcggcatcaagcacctggttgatctactagaccaccgggtgctggaggtccagaagaacgcgtgcggcgcccttcgtaacctcgtgtttggcaaaagcacagacgaaaacaaaatcgctatgaagaatgtgggaggcatccccgccctgttaagattgcttcgcaaatctattgacgccgaagtgcgggagcttgtgactggggtactgtggaatctcagctcatgtgacgccgtgaaaatgaccatcatcagagatgcactgtccacattgaccaataccgtgatcgtgccacatagtggttggaacaatagttccttcgacgacgatcacaagatcaagtttcagacctccttggttttaagaaatactaccggctgcttaagaaatctgagttcagccggggaagaggcaagaaagcaaatgcgcagctgtgagggactggtagatagcttactttacgttattcacacgtgtgttaacaccagcgactatgatagcaaaactgtggaaaattgcgtttgcacgctgcgtaacttgagctatcggttggagctggaggtgccacaggcgaggctacttggtctgaatgaattggacgacctgctcggaaaagagagcccatccaaagattcagagccttcatgttggggcaagaaaaaaaaaaagaaaaagcgaactcctcaggaggaccagtgggatggagtcggacccattcctgggctctcaaaatccccgaagggagtggaaatgctgtggcacccctcggtggtcaagccttatctgacgctgctcgctgagtcatctaatccagcaacactggagggttctgcaggatctctacaaaacttgtcagcaggcaactggaaattcgccgcatacattagagctgcagtgcggaaagaaaagggactgccaattctggtggagttattaaggatggacaatgaccgcgttgtttcttcggtcgctaccgcccttaggaatatggcactcgacgtgcgtaataaagaactcatagggaagtacgccatgcgagaccttgtgaatagactgcctggcggaaatggaccatcagttttgagcgacgaaactatggccgctatctgttgcgctctgcacgaagtcactagcaagaacatggaaaatgccaaggctctagctgactctggcgggattgaaaagttagtgaatataacgaagggcaggggggaccgatcatctctgaaagtggtgaaggctgctgcccaagtccttaacactctatggcaatatcgggatttacgctcaatatataaaaaagacggatggaaccagaatcattttatcacgcccgtctccaccctcgagcgggatcggttcaagtcccatccctccttatccacgacaaatcagcaaatgtctcctatcatccagagcggaagcagcaagcctagccccatttacatcagctcttactctagtcctgctagggagcagaatcgcaggctccaacatcagcaattgtactacagccaggacgattctaatcgaaaaaactttgatgcatatagactctacctgcaaagcccgcattcttatgaagatccctattttgatgaccgcgtgcattttccagcctccacggactacagcacacagtacggcttaaagagcaccaccaattacgtcgacttctactccactaaaaggccatcctaccgggccgagcaataccctggatcccccgatagctgggtctag

SEQ ID NO: 199696 - DNA, 3579 bp, synthetic construct
  misc_feature 1..3579: note = Description of Artificial Sequence: Synthetic coding sequence
  source 1..3579: mol_type = other DNA
atgcccgcccccgagcaggccagcctggtggaggagggccagccccagacgaggcaggaggctgcatccaccgggcccgggatggagcccgaaactaccgctaccactatactggctagtgttaaggagcaggagctgcaattccagcggttaacccgtgagctggaagttgagaggcaaatcgttgctagccagctggaacgctgcaggttgggggcggagtccccaagtatagcctcaacgtcatccacggagaaatcatttccttggcgttccactgatgtccccaatactggggtttcaaaaccccgggtcagtgatgcggttcagcctaacaattatctaatccgaaccgaacctgagcaggggaccctctattctccagagcagacttcccttcacgaaagtgaaggatcgctgggcaatagtaggtcaagcactcagatgaacagctatagtgattccggctaccaagaagccgggtcgtttcataactcacagaacgtgtccaaggctgacaatagacagcagcatagctttataggatctactaataatcatgtcgtgagaaatagcagggcagaggggcagaccctggttcagcccagcgtcgcaaatagagccatgcgcagggtctcaagcgtgccctccagagctcagagcccctcttacgttatcagcactggagtaagtccctctaggggctccttaaggacttcccttgggtcaggcttcggcagtccctcagtcacagaccctaggcccctgaatccaagcgcctacagcagcaccactttacccgccgcccgagctgcctcaccatatagccagcgaccagcgtcccctactgcaatcaggcgaattggcagcgtgacctctcgccagactagcaatcccaatggccctacccctcagtaccagacaaccgctcgggtcggtagcccactgactctaacagatgctcaaactagggtggccagcccatcccaggggcaggtgggatcttcctcgcctaaacgcagcggaatgaccgctgtcccacaacacttggggccttctctccagagaaccgtccatgatatggagcagtttggccaacagcagtatgatatctatgagcgtatggttccaccacgtcctgattcacttactggcctgcgtagctcatacgcatctcaacacagccagctgggccaagatctgcggtcagcggttagtcccgacctgcatatcactccaatctatgaagggcgcacttattatagtcctgtctatcggagccctaaccacgggactgtggagctgcagggtagccagactgcactgtaccgtaccggctctgtcggaatcggtaacctacaacgcacctcatcccagaggagcacattgacttatcagcgaaataactacgccttgaataccacagcaacttatgcggagccgtatagaccgattcagtaccgcgttcaggagtgcaactacaacagacttcaacacgcagtcccagcagacgacggtaccacaaggtcacctagtatagactccatccaaaaagaccctagggagttcgcctggcgtgatcccgaattacccgaggtgatccatatgctgcagcatcagtttcccagcgtgcaggcgaacgccgctgcttacctccagcatctctgcttcggcgacaacaaggtgaagatggaagtgtgtcggctgggcggaatcaaacacttggtggacctgctggaccatagagtgctggaggtgcagaaaaatgcctgcggggctctgaggaatctcgtgttcggaaagtctactgatgagaataagatcgctatgaaaaatgtgggtggtattcccgccctgttgagactgctgaggaaatctatcgatgccgaggttagggaactcgtcaccggggtgctgtggaacttgtccagttgtgacgctgtgaagatgacgatcatccgtgacgcattgtccacgctcactaacactgttattgttccgcactccgggtggaataacagcagtttcgatgatgatcacaagatcaagtttcaaacatccctggtgctgcgcaataccacaggctgcctgcggaacctgtcatctgctggcgaagaggcccgcaagcagatgcggtcgtgcgaaggactcgttgatagtctgctctacgttattcacacgtgcgtaaatacatccgattacgatagcaagaccgtggagaattgtgtgtgcactctgagaaacctcagctatcgcctggaactcgaggtgccccaggctcggctgcttgggttgaatgagctggacgatctacttgggaaggagtccccctctaaggatagtgaacccagctgctggggcaagaagaaaaagaaaaagaaacgcaccccgcaggaggatcagtgggacggcgtggggccaatcccaggactgagcaaaagcccaaaaggagtagaaatgctgtggcacccgagcgtggtaaagccttacttgacactgctcgctgaaagcagtaaccctgctactctggaaggcagcgccgggtccctgcagaatctctcagccggcaactggaaattcgcagcctacatcagagccgcagttcgcaaagagaaggggctgcccattttagtcgaactgctgcggatggataatgaccgggtggtatccagtgttgcgactgctctcagaaacatggctctggacgttcgaaacaaagagcttattggaaaatacgctatgcgagatctggtcaacagactgccaggtggcaatggcccatcagtactgagcgacgaaacaatggccgccatctgttgtgctctgcacgaagtgacctcaaaaaatatggagaatgccaaagcattagctgacagcggcgggatcgaaaagttggttaatataacaaaggggaggggagatcgctcttcactcaaagttgtgaaagccgccgcccaggtcctgaacaccctatggcagtatagggaccttcgctccatctataagaaagacgggtggaaccaaaaccatttcatcacaccagtgtctactctcgaacgggaccggttcaaaagccatccctccctgagtactactaaccagcagatgagtcctatcattcaatccgtagggtcaacttcatcctctccggccttgttgggcataagagacccaaggagcgaatatgaccggacacagccaccaatgcagtattacaatagtcaaggtgacgccactcacaagggcctgtacccaggctctagcaaacctagtcccatctacatcagcagctactcttcaccagctagggaacagaaccgtcggctccagcatcaacagctatactacagccaggatgacagtaataggaaaaatttcgacgcgtacaggctgtatctgcaatcaccccattcttacgaagatccatatttcgatgatcgagtacacttccccgcgtcgacagactactcaacccagtacgggctgaaatcgacaaccaactatgtggatttttactcaacgaagaggccaagctaccgggcagaacaatacccaggcagcccagacagctgggtgtag

SEQ ID NO: 199697 - DNA, 1845 bp, synthetic construct
  misc_feature 1..1845: note = Description of Artificial Sequence: Synthetic coding sequence
  source 1..1845: mol_type = other DNA
atgaacagctacagcgacagcggctaccaggaggccggcagcttccacaacagccaaaatgtgtccaaggctgacaaccggcaacagcatagttttatagggagtacaaacaaccacgttgtcaggaactctcgggccgagggccagacattggtgcaaccttccgtggcgaaccgcgccatgcgaagagtcagtagcgtgccatcccgagcacagtcaccgtcctacgtaatttcgaccggcgtctccccttctcgcgggagcttgagaacaagtctcggcagtggttttggaagcccttcagtaacagatcctaggccacttaatccttctgcctattccagtacaacactcccggctgctcgcgcagcttcgccctattctcagaggccggcttccccgacggctatccggcgcatagggtctgtgacatctaggcagacatccaacccaaatggtccaacgccacagtaccagaccactgcaagggtgggttctcccctgactctgaccgacgcacagacaagggtggcctctccctctcagggacaggtggggtctagcagccccaaaagatcaggcatgacagctgtcccccagcacctcgggccctccctgcagcgtacagtgcacgatatggaacagttcgggcagcagcagtatgacatctatgagaggatggtgccgccaagaccggattcactgactgcctatggggtccctatgctcgtgtctatcgtgtctcttgggaagacctttgtgctgccctgtccagacctccacatcaccccaatctacgaggggcggacctactacagcccggtttacagaagcccaaatcacgggaccgtggagctgcagggcagccaaacagccctgtaccgcacaggatctgttggcataggcaatcttcagcgcacatcttctcaacggtcaacactgacctaccaaagaaacaattacgccctgaatactaccgccacctacgcggagccttatcgccctattcaataccgggtgcaggagtgtaattacaacagactccagcatgctgttcctgccgacgacggtacgactagaagtccatctatcgattcaatccagaaggacccccgtgaattcgcttggagagaccccgaactcccagaggttatacacatgctgcagcaccagtttccaagtgtgcaggccaatgccgctgcctatctgcagcacctgtgtttcggggataacaaagtcaagatggaggtgtgtagacttggtggtattaagcatctagttgacctgctagaccatcgagttctcgaggttcagaagaacgcatgtggggctcttaggaacctcgtattcggcaaatctactgacgagaacaagatcgccatgaaaaacgtggggggcatccctgccctgttgcggctcctgagaaagtcgatcgacgccgaggtgcgcgagctcgtgaccggcgttctgtggaacctctccagctgcgacgccgtgaaaatgacgatcattagggatgccctgtccacgctcactaacactgtaattgtacctcattcaggctggaataacagtagcttcgatgatgaccacaaaatcaagtttcagacctcactcgtcctccgtaacaccaccggatgtctgcggaatctctcctccgcaggcgaagaagctcggaagcaaatgagaagctgtgagggtctggtggattctctgttgtacgtcatccacacatgcgtcaacacatcagactacgattccaagaccgtcgaaaactgcgtctgcacactgcgcaacctgattggttggtcttggagatgtccacgccctggatactgggattag

SEQ ID NO: 199698 - DNA, 1329 bp, synthetic construct
  misc_feature 1..1329: note = Description of Artificial Sequence: Synthetic coding sequence
  source 1..1329: mol_type = other DNA
atgggcctggccatggagcacggcggcagctacgcccgggccggcggaagttcaagggggtgttggtactatttgcggtacttttttctgttcgtctccctgattcaattcctgatcattctgggactggtgctttttatggtctacggaaatgttcacgtttccaccgagagcaatctccaggccaccgagaggcgcgcagagggtctgtactctcagctcctcggcttgaccgcctcgcagtcaaaccttactaaggaactgaactttaccaccagagcgaaggacgcaatcatgcagatgtggttgaacgcacgaagagatttggatcgcattaatgccagctttcgacagtgtcaaggcgaccgcgttatctatactaataaccagcggtacatggccgccattatcctgagtgaaaagcaatgcagggaccagtttaaggacatgaataaatcctgtgacgccctgcttttcatgcttaaccaaaaggtaaagacactggaggtcgagatcgccaaagagaagacaatctgcactaaggataaggaatctgttctcctgaacaagagggttgctgaggagcaactcgttgaatgcgtgaagactagagagctgcaacatcaggagcgccagcttgccaaagaacagcttcagaaggtccaagctctgtgccttcccttggataaagataaattcgaaatggacctgcgaaacttatggcgagatagtattattccacgctcactcgacaaccttggttacaatttgtaccaccccctgggctcagaattggcatctatccgacgcgcctgcgaccacatgccatcactcatgagcagcaaagtagaagaactggctcgatctctgcgagccgatatcgagcgcgtcgcccgcgaaaactctgatctccagcgacagaagcttgaggcgcaacaagggctgcgggcatcccaagaagcaaaacagaaggttgagaaggaagcgcaggccagggaggcaaagctccaagccgaatgcagccgccaaacccagctcgccctggaggagaaggccgtgttgagaaaagagcgggataaccttgcgaaggagttggaagagaagaaacgggaggcggagcagctgagaatggagctggccatccgaaactcagcactcgatacatgtataaaaaccaaatcacagccaatgatgccagtttcccgaccaatgggccccgtcccaaacccccagcccattgaccccgcttcccttgaggagtttaaaaggaaaatcctcgaatcacaacggccaccagcaggtatacccgtcgctccatcatctggctag

SEQ ID NO: 199699 - DNA, 291 bp, synthetic construct
  misc_feature 1..291: note = Description of Artificial Sequence: Synthetic coding sequence
  source 1..291: mol_type = other DNA
atggagcacaaggaggtggtgctgctgctgctgctgttcctgaagtccggtcagggtgagcccctggacgattacgttaatacacagggaccctctttgttctcggtgaccaagaaacagctgggggccggctcccgcgaggaatgcgcggcaaagtgcgaggaggacaaagagttcacatgcagggcattccagtaccatagcaaagagcagcagtgcgtaatcatggctgagaaccgaaaatcaagcattataataaggatgcgggacgccgttctgtttgaaaaatag

SEQ ID NO: 199700 - DNA, 291 bp, synthetic construct
  misc_feature 1..291: note = Description of Artificial Sequence: Synthetic coding sequence
  source 1..291: mol_type = other DNA
atggagcacaaggaggtggtgctgctgctgctgctgttcctgaagtctgggcagggagagcctctagatgactatgtcaatacacagggaccttcgctttttagcgtaaccaagaaacagctgggcgccggaagcagggaagagtgcgccgccaagtgtgaggaagataaagaatttacctgccgcgcgttccagtatcactcaaaagaacaacagtgcgtgataatggctgagaaccgaaaaagctctatcattattcgcatgcgagacgccgtcctgtttgaaaaatag

SEQ ID NO: 199701 - DNA, 291 bp, synthetic construct
  misc_feature 1..291: note = Description of Artificial Sequence: Synthetic coding sequence
  source 1..291: mol_type = other DNA
atggagcacaaggaggtggtgctgctgctgctgctgttcctgaagtctggccagggcgaaccactcgacgattatgttaacacccagggcccttctcttttcagtgttacaaagaaacagttaggggcaggatcaagagaagaatgcgcagctaaatgtgaggaagacaaggaattcacctgcagggcttttcagtatcattcaaaagagcaacagtgcgtaattatggctgagaatcgtaagtctagcataatcattagaatgagagacgccgtcttatttgagaagtag

SEQ ID NO: 199702 - DNA, 492 bp, synthetic construct
  misc_feature 1..492: note = Description of Artificial Sequence: Synthetic coding sequence
  source 1..492: mol_type = other DNA
atggacgccctggagggcgagagcttcgccctgagcttcagcagcgcctcagacgcagagtttgacgccgtggtcggctacctggaggacatcataatggacgatgagttccagctgttacagaggaattttatggacaagtattacttagagttcgaagatacagaggagaacaagttaatctacactccaatcttcaacgagtacatctccctggttgagaaatacatagaggaacagttgctccaacgcattcctgaattcaacatggcagcctttacgactaccctgcagcatcataaggacgaagtagctggcgacatatttgatatgctccttaccttcactgatttcttggcctttaaggagatgttcctcgattatagagccgaaaaggagggtcgcggactggacctcagctcaggtctcgtcgtcacgtctttgtgcaaatccagcagcctacccgcgagtcagaataatttacggcattag

SEQ ID NO: 199703 - DNA, 1890 bp, synthetic construct
  misc_feature 1..1890: note = Description of Artificial Sequence: Synthetic coding sequence
  source 1..1890: mol_type = other DNA
atggagaacagcaccaccaccatcagccgggaggagctggaggagcttcaggaagcttttaataaaatcgacatcgacaactccggttatgtcagcgactacgagctccaggacctgttcaaggaagcaagcttgccgctgccaggctacaaagtgcgagagattgtggagaagattctaagtgtggccgacagcaacaaagatggcaagattagctttgaagagtttgtttccctgatgcaggaactaaagagcaaggacatttccaagacattcaggaagataattaacaaaagagaagggatcacagccattgggggaacatcgacaatcagcagcgaaggaacacagcactcatactccgaggaggagaaggtggccttcgtcaactggatcaacaaagcgctggagaacgatccggattgcaagcatttgattcctatgaatccgaatgatgacagcctgttcaaatccctggcagatgggatccttctctgtaaaatgatcaatctctcagagcctgacacaatcgatgaacgcgccattaacaagaaaaaactgacgccattcacaataagcgaaaatctcaatttggccttgaactctgccagcgcaatcggctgcacagttgtcaacatcggggcgagcgatctgaaagagggcaagccgcacttagttctcggtttattgtggcagatcatcaaagtggggctgttcgccgatattgagataagcagaaatgaggcactcatcgccttactgaatgaaggagaggagctggaggaactcatgaagcttagccctgaggagttactccttcggtgggttaactaccacctgaccaatgcgggctggcacaccatttctaactttagtcaggacatcaaggactcccgggcatactttcacctgctgaatcagatcgcacctaaaggaggcgaagatggccccgcaatcgctatcgacctgtcaggaatcaatgaaacaaatgacttgaagagggctggcctcatgctgcaagaggccgataagctgggatgcaaacagtttgttacccctgcagacgtcgtatctggcaaccctaagctgaacctggcgtttgtggccaatctattcaatacctatccatgtctgcataagccaaataacaatgacatcgatatgaacctgctcgaaggcgaaagcaaagaagaaaggactttcaggaattggatgaacagcctcggcgtgaacccttatattaaccatctttatagtgaccttgctgacgccctggtgatcttccagctttatgagatgatcagggttcctgtgaattggtcacacgtcaacaaacccccatacccagccttaggtggtaacatgaagaaaatcgaaaattgtaattatgcggtggagctaggtaagaataaggcaaaattctccctcgtcggtatcgcgggccaggacctcaatgaaggcaactcaaccttgactcttgcactcgtgtggcagctcatgcgaaggtacacactgaacgtccttagcgatctgggcgagggcgagaaggtgaacgacgagattattattaagtgggtgaaccagacgctaaagagcgctaataagaaaacctccattagctcattcaaggacaagtcaatttccacaagtctgcccgtcctggacctgattgacgctatcgcgccgaacgcagtgcgccaagagatgattagaagagagaacctgagtgatgaagataaacttaacaacgccaaatacgccatttctgtcgctaggaagatcggcgcccgaatttatgccctgcctgacgatctcgtcgaagtgaagcccaaaatggttatgacagttttcgcctgcttgatgggtaagggcctgaaccggatcaagtag

SEQ ID NO: 199704 - DNA, 1890 bp, synthetic construct
  misc_feature 1..1890: note = Description of Artificial Sequence: Synthetic coding sequence
  source 1..1890: mol_type = other DNA
atggagaacagcaccaccaccatcagccgggaggagctggaggagttgcaagaggcatttaacaaaatcgatatcgataactccggatacgtttcagattacgaactccaagacttgttcaaggaggcctccttgccgctacccgggtacaaggtgagggaaatcgtggagaagatcttgtctgtggcagactctaacaaggatggaaagattagctttgaggaattcgtatctcttatgcaggagttaaaatctaaagacatcagcaagacattccgcaagattatcaacaagcgcgaggggatcaccgctatcggaggaacctcaacaatctcctcggaaggcacccagcattcgtacagcgaagaagaaaaagtcgcatttgtgaactggattaataaggctttagagaacgacccagattgcaaacatttgatccccatgaacccaaatgacgattccctgttcaaaagtctggctgacgggatcctgctgtgcaaaatgattaacctctccgagccggacacgatcgacgagagagccatcaataagaaaaaactgaccccgttcactatctctgagaacctcaatctggccctcaactctgcaagcgcaataggctgcactgtggtgaacattggcgcttcagacctgaaagagggcaagccacacctggttttggggcttctgtggcagatcattaaggtcggcttgtttgcagacatcgaaatctcccgcaatgaggctctaattgcattgttaaacgaaggcgaggagctcgaagagctcatgaagctttcaccagaggagctgcttctccggtgggtaaactaccacctgaccaacgccggctggcatacgatctctaacttcagccaggatattaaggactcccgagcctacttccacctcctaaatcaaattgcccccaaaggcggggaggatgggcccgctattgcaattgatttgtcgggcattaacgaaaccaacgatcttaaaagggctggacttatgcttcaggaagctgataaactggggtgtaaacagttcgtgacaccagcagacgtggttagcggcaaccctaagctgaacctggccttcgtagccaatctcttcaatacctacccttgccttcacaaacccaataacaacgacatcgacatgaatctcttggaaggagaatcgaaggaggagcggaccttccgcaactggatgaacagcctgggggttaacccttatatcaatcacctttacagcgacctcgccgatgccctcgttatattccagctttacgaaatgattcgtgtgccggtgaattggagccacgttaacaagcctccttaccctgcactcggcggtaacatgaaaaaaattgagaattgcaattacgccgtggagttgggtaaaaacaaggccaaattttctctggttggcattgccgggcaggatctgaatgagggcaactcaactctgactttggctctggtgtggcagcttatgcggcggtatacattgaacgtactgtcagacctgggggaaggcgagaaggttaatgacgaaatcataattaaatgggtgaaccagacacttaaaagcgcaaacaagaaaacgtccattagttctttcaaggataaaagcataagtaccagtctgcccgtgctggatctcatcgacgcaatcgctccaaacgcagtgcggcaagagatgattagaagagaaaatctgtccgatgaagataagctcaataatgccaaatacgctatttcggtggcccgaaagataggcgcccgtatctatgccctccccgacgatttagtggaggtaaagccgaagatggtgatgaccgtgttcgcctgcttaatgggcaaaggcctgaatcgtattaagtag

SEQ ID NO: 199705 - DNA, 165 bp, synthetic construct
  misc_feature 1..165: note = Description of Artificial Sequence: Synthetic coding sequence
  source 1..165: mol_type = other DNA
atggagaacagcaccaccaccatcagccgggaggagctggaggagctgcaggaggccttcaacaaaatagacatcgataatagcgggtatgtgagtgactatgagctgcaggacttgttcaaggaagcaagccttccgctgccggggtataaggtccgagaatag

SEQ ID NO: 199706 - DNA, 363 bp, synthetic construct
  misc_feature 1..363: note = Description of Artificial Sequence: Synthetic coding sequence
  source 1..363: mol_type = other DNA
atggagaacagcaccaccaccatcagccgggaggagctggaggagttgcaggaagctttcaacaaaatagatatagataacagcggttacgtctcagattacgaactgcaggacctctttaaagaagccagcctcccactgcccggatacaaggttcgggaaatcgtggaaaagatcctgagcgtcgccgattccaacaaagacggtaaaatctccttcgaagaatttgtgtcactcatgcaggagttgaaaagtaaggacattagcaaaacatttcgaaaaataattaataaaagagaaggcatcaccgctattggcggaacctccactattagttctgaggggacacaacatagctattag

SEQ ID NO: 199707 - DNA, 360 bp, synthetic construct
  misc_feature 1..360: note = Description of Artificial Sequence: Synthetic coding sequence
  source 1..360: mol_type = other DNA
atggagaacagcaccaccaccatcagccgggaggagctggaggagttgcaggaggccttcaacaaaattgatatagataatagcggttacgtgtctgactacgagctccaggacctcttcaaggaggcatctctgcccctgcccgggtacaaagtgagagaaattgtagagaagatcctgtccgtcgccgattccaataaagacggcaaaatatctttcgaggaatttgtgtctctgatgcaagagctgaaaagcaaggacatctccaaaacttttagaaaaatcattaacaaaagagagggcattacagcaatcggcggtacctcaacgatctcatccgaaggtacacaacacagctag

SEQ ID NO: 199708 - DNA, 102 bp, synthetic construct
  misc_feature 1..102: note = Description of Artificial Sequence: Synthetic coding sequence
  source 1..102: mol_type = other DNA
atggagaacagcaccaccaccatcagccgggaggagctggaggagcttcaggaggcgttcaacaagattgatatagacaatagcggttatgtatcggattag

SEQ ID NO: 199709 - DNA, 177 bp, synthetic construct
  misc_feature 1..177: note = Description of Artificial Sequence: Synthetic coding sequence
  source 1..177: mol_type = other DNA
atggagaacagcaccaccaccatcagccgggaggagctggaggagcttcaggaggcatttaacaaaatagatatcgataactccggctacgtcagtgactacgagctccaggacttgtttaaggaagctagtttacccctgcccggctacaaggtgagagaaatcgtggagaaatag

SEQ ID NO: 199710 - DNA, 1890 bp, synthetic construct
  misc_feature 1..1890: note = Description of Artificial Sequence: Synthetic coding sequence
  source 1..1890: mol_type = other DNA
atggagaacagcaccaccaccatcagccgggaggagctggaggagctccaagaggccttcaacaaaatcgatatcgacaactcgggctacgtgagtgactatgagctccaggatttgtttaaggaggcctccctcccgctgccaggctataaagtgagagaaatagttgaaaagatcctttctgtggcagattcgaacaaggatggtaagatatccttcgaggaatttgtctccttaatgcaggagctgaaatctaaggatatttcgaagacctttcgcaagataattaacaaacgggaaggcattaccgctatcggaggtacgagcacaatcagctctgaaggaacacagcactcgtactcagaggaggagaaggtggccttcgtcaactggattaataaggcccttgagaatgaccctgactgcaagcatctaatcccaatgaatccaaacgacgactccctgttcaagtctttggcggatggtatcctcctatgtaagatgattaacctgtctgagcccgacaccatagatgagagggccattaataaaaagaagctgactccatttaccatctcggagaacctgaacctcgccctgaattcagcatccgctatcggatgtacagtagtcaatattggggcttctgacctcaaagaaggcaagccccatttggtcctgggcctgctgtggcaaattattaaggttggcctttttgccgatatcgaaatctctcgcaacgaggccttaatcgccctcctcaacgagggagaagaactcgaggagctgatgaagctgtcacccgaggagctactgctgcgctgggttaactaccatctgacgaacgccggctggcataccatttccaacttcagccaggacatcaaagattcacgagcctatttccatctgctgaatcaaatagcccccaaggggggcgaagatggtcccgccatcgctatagatctgtcaggcatcaacgagacaaatgatctgaagagggccggtttgatgctccaggaagctgacaaacttggctgcaagcaatttgtgacgcctgccgacgtggtgtcagggaacccgaagctgaatttggcctttgtggcaaatctgtttaacacctacccatgccttcacaagccgaataataacgacattgacatgaatttgctcgaaggcgaatccaaggaagagaggacctttaggaattggatgaactcactcggtgtgaatccatacataaaccacctttacagtgacctcgctgatgcactcgtaattttccaactctatgaaatgatacgggtacccgtcaattggagtcacgtgaacaagcccccatatcccgcccttggtgggaatatgaaaaaaattgagaattgtaattatgcagtcgaactcgggaaaaacaaagccaaatttagcctcgtgggcatcgctggccaagacctgaacgagggtaattctaccttgacactggcccttgtttggcagctgatgaggcgatacacactgaatgtgctgtctgaccttggcgagggcgagaaggttaacgacgaaattattatcaaatgggtcaaccagaccctcaagtctgctaacaagaaaacctccattagctccttcaaggataagtctatttcaacatccctgcccgtgctcgatttgatcgatgccatcgcgccgaatgccgtcaggcaagagatgattagacgggagaacctctccgatgaggataaattaaacaatgccaaatatgctatctcagtggcaagaaagattggcgcacgaatttatgccctgcctgatgatttggtggaggtgaaacctaaaatggttatgaccgtgttcgcctgccttatgggaaagggtttaaacaggatcaagtag

SEQ ID NO: 199711 - DNA, 162 bp, synthetic construct
  misc_feature 1..162: note = Description of Artificial Sequence: Synthetic coding sequence
  source 1..162: mol_type = other DNA
atggagaacagcaccaccaccatcagccgggaggagctggaggagctccaggaggcctttaacaagatagacatagacaactccgggtacgtgagtgattacgaattacaagacctattcaaggaagcttccctccctttgcctgggtacaaagtgagatag

SEQ ID NO: 199712 - DNA, 1785 bp, synthetic construct
  misc_feature 1..1785: note = Description of Artificial Sequence: Synthetic coding sequence
  source 1..1785: mol_type = other DNA
atgcccctgcccggctacaaggtgcgggagatcatccagaagctgatgctggatggcgacaggaataaagacgggaagatctcatttgatgaattcgtctacatttttcaggaggtcaagtcgtcagacatagctaaaaccttcagaaaggcaataaaccgcaaagaggggatttgcgcgctgggaggcacttctgagctctcatccgaaggcacgcagcacagttacagcgaagaagagaaatatgcattcgtgaattggatcaacaaagccctggagaacgaccccgactgccgccatgtcatccctatgaaccccaatacagacgatctctttaaagcagtaggcgacggaattgtcctctgcaagatgattaacttatcagtacctgataccatcgatgagagagcaattaacaaaaaaaaactgacgccgttcatcatacaggagaaccttaatttggctctgaactccgcaagcgcaataggatgtcatgtcgtgaacataggggctgaggacttgcgggccggcaaaccccacctagtactgggacttctgtggcagattatcaagattgggctcttcgcggatatcgagctgtctagaaatgaagcactcgccgcactgttgcgcgatggggagaccctcgaagagctgatgaagctgagtccggaggagctgcttcttaggtgggccaatttccatctggaaaactcaggttggcagaaaatcaacaacttctctgctgatattaaattaattgatttttctaactccgttaaggatagtaaggcatatttccacctcttgaaccagatagctccaaagggccaaaaggaaggtgagccccggatcgacattaacatgagtggctttaacgagaccgacgatctgaaacgggccgaaagcatgctgcagcaggcagacaaactaggctgccgccagtttgtgactcctgctgatgtcgtgtctggtaacccaaaattgaatcttgcgttcgtggccaacctgttcaataagtaccccgctcttactaaacccgagaaccaggacattgactggacgttactggaaggagagactagagaggagcggacctttaggaattggatgaattcacttggagtgaatccgcatgttaaccacctctacgcggacttacaggacgcactggtgatccttcagctttatgagcgcatcaaggtgcccgtggactggtctaaagtgaacaagcctccctatcccaagttaggcgctaacatgaagaagcttgaaaattgtaattatgccgttgagttgggcaagcaccccgcaaagttctcacttgtgggcatcggggggcaggatcttaacgacggtaatcagactctgacattggctcttgtctggcaactcatgaggcgctataccctgaacgtgctcgaggacctgggggatggtcagaaagctaacgatgacataattgtcaattgggtgaatcggactctttccgaggccggtaaatccacatcaatacaatcatttaaagacaaaacgatctcgtcctcattggcggtagtggacttgatcgacgctatccagcccggttgtattaactacgatctggtgaagtccggaaacctcaccgaggacgacaaacacaataacgctaagtacgcagtttccatggctagacggatcggagcgagggtatacgcccttcccgaagacctggtcgaagtcaaacctaaaatggtcatgaccgtattcgcttgcctgatgggaagagggatgaagcgtgtctag

SEQ ID NO: 199713 - DNA, 1893 bp, synthetic construct
  misc_feature 1..1893: note = Description of Artificial Sequence: Synthetic coding sequence
  source 1..1893: mol_type = other DNA
atggacgagatggccaccacccagatcagcaaggacgagctggacgaacttaaagaagcctttgctaaggtagatctgaactccaatggctttatatgcgattacgagctgcatgagctgttcaaggaagccaacatgcccctccccggatataaggtgcgcgagatcattcaaaagttgatgctggatggggacaggaataaggatggaaaaatcagttttgatgagtttgtctacatctttcaggaagtgaagtcttcagacatcgcaaaaacattccggaaagctatcaaccggaaggaaggaatctgcgctctgggtggcaccagcgaactgtcctccgagggtactcaacacagctacagtgaggaggaaaaatacgccttcgtgaactggattaacaaggctctggagaacgaccctgattgtcgccacgttatccccatgaaccccaacactgacgatctgttcaaagctgtcggggatggaattgtgctgtgcaagatgattaacctgagcgtgcctgacaccatcgacgagcgcgcaatcaacaagaagaaacttaccccctttatcattcaagagaatctgaacctggccctgaattctgcctctgccattggctgccacgttgttaacatcggcgctgaagatctgcgggccgggaagccacacctcgtgctgggccttttatggcagatcattaagatcggactctttgccgatatcgagcttagtcgcaacgaagcacttgccgctctccttcgcgatggagaaaccctcgaagagctgatgaagctttctcccgaggagctgttgctcagatgggctaattttcatctcgagaactctgggtggcagaagatcaataacttttccgcagacattaaggacagtaaagcttacttccacctgctgaatcagatagcacctaagggacagaaagaaggggagccacgcattgatataaacatgtccgggtttaacgagaccgacgatctgaaacgggccgaatctatgctgcagcaggccgacaaactcgggtgccgacagtttgtcacccccgcggacgtggtgtctggcaatccaaaactgaatctcgcctttgtggccaatttgtttaacaagtatcctgcgcttactaagcctgagaaccaggatattgattggaccttgctagaaggcgaaacgcgtgaagagcgtacctttaggaattggatgaatagcctaggagtaaatccacacgtgaaccatctgtatgctgacctgcaagacgcactggttatcctccagctgtacgaacggatcaaggtgccggtcgactggtccaaggtcaacaagcctccgtatcctaagctgggggccaacatgaagaaactggaaaactgcaactatgccgttgaactgggtaagcatccagctaaattttcattagtgggcatcggcggacaggatctgaacgatggaaatcagaccctgaccttggcgctcgtctggcagttgatgaggaggtataccttaaatgtgctggaggacctgggtgacggacagaaggccaatgacgatattattgtcaactgggtgaatcgtaccctgagcgaggccggaaaatctactagcatccaaagcttcaaggacaaaacgattagcagctcactggcagtggtcgatttgatcgacgcgattcagcctggttgcattaattacgaccttgtcaaatccggaaacctgactgaggacgataaacacaacaatgcaaagtacgctgtctcaatggccagacgcatcggcgctcgagtctatgccctgcctgaagatctggttgaggtaaaacctaaaatggtcatgactgtctttgcatgtcttatgggcagagggatgaaacgggtctag

SEQ ID NO: 199714 - DNA, 1893 bp, synthetic construct
  misc_feature 1..1893: note = Description of Artificial Sequence: Synthetic coding sequence
  source 1..1893: mol_type = other DNA
atggacgagatggccaccacccagatcagcaaggacgagctggacgagttaaaggaggcattcgccaaagtcgatctgaacagcaatggatttatctgcgactacgaactccacgagttgttcaaggaagctaacatgcccttaccagggtacaaggtgcgcgagataatccagaaactcatgcttgacggagacaggaataaggacgggaagatcagttttgatgagttcgtgtatattttccaggaagtgaaatcttctgacatcgctaagacctttcgtaaggcaattaatcggaaggagggaatctgcgcactaggcggcaccagcgaattaagctccgaggggacacagcatagctacagcgaggaagaaaaatacgctttcgtgaactggattaataaagccttggaaaacgatcctgactgccgacatgtgataccaatgaatccgaacacagatgatttgtttaaggccgtgggagatgggatcgtcctgtgtaagatgatcaacctgagcgttcccgatactattgacgagagagctattaacaagaagaagctcaccccttttattattcaagaaaatctcaatttggcactgaattctgcatcggctatcggctgtcacgtcgtaaatattggggccgaggatcttcgtgctggcaagcctcacctagtgcttggactgctatggcagatcatcaagatcgggcttttcgccgacatcgaactgtcccggaatgaagccttggccgccctattaagggatggcgagacactcgaagaacttatgaagttatctcccgaggagctgctcctgaggtgggcaaactttcacctggagaacagtggctggcagaaaataaacaacttctccgccgacattaaggacagcaaggcttactttcacttactgaatcagattgcacctaagggacagaaggagggcgaaccacggatcgatatcaacatgtcaggttttaacgaaacagacgatctgaagcgtgccgagtctatgctgcagcaagccgacaaactcgggtgtagacagtttgtcacgccagccgatgtggtgagcgggaaccccaagcttaatctggcatttgttgcgaacctatttaacaaataccctgcactgacaaagcctgaaaatcaagacatcgactggactctgctggagggtgagacccgagaagagcgcaccttccgcaattggatgaactctttaggtgtgaatcctcacgttaatcacctctatgcagacctgcaggacgctttggttattctacagctgtatgagaggattaaagtgcccgtggattggtcaaaggtgaataagccgccctaccctaagttaggagcgaatatgaaaaagctcgagaattgtaattatgccgtcgagctggggaagcacccagcaaagttctcactggtgggaatcggaggacaggatttgaatgatggcaatcagaccctgactctggccttggtgtggcagctaatgcgtaggtacactctgaacgtcctggaagacctgggcgacggtcaaaaagcaaacgacgacataatcgtgaattgggtgaataggactctatctgaggcggggaagtctacctccattcaatcttttaaggataagactatcagctcgtcccttgccgtggtggatctgatagacgctattcagcctggatgcattaactatgacctcgtgaaaagcggcaacctcactgaggacgacaagcacaataatgcaaagtacgccgtgagtatggcccgaagaataggagcacgtgtttacgccttgccagaggatctcgtagaagtgaaaccaaagatggtgatgacagtgtttgcgtgtcttatgggtagaggaatgaagagagtgtag

SEQ ID NO: 199715 - DNA, 1854 bp, synthetic construct
  misc_feature 1..1854: note = Description of Artificial Sequence: Synthetic coding sequence
  source 1..1854: mol_type = other DNA
atggaggacctgaacagcaacggcttcatctgcgactacgagctgcacgaactgtttaaggaggccaacatgccactgccaggttataaggtgagagaaatcattcagaagctgatgctcgatggcgataggaacaaggatggcaaaatatcctttgatgagttcgtgtatatctttcaggaggtcaaatcatcagacatcgcgaagaccttccgtaaggccatcaaccgtaaggaggggatctgcgcactgggcggcacgtccgaactgagttcggagggcacacagcactcttatagtgaggaggaaaagtatgccttcgtgaattggatcaataaagcccttgagaacgacccagattgtcggcacgtaatccctatgaatcccaatacggacgatctgttcaaggcagtgggagacggaatcgtcctttgcaagatgatcaatctgtccgtgccagataccatcgacgaaagggctatcaataaaaagaagctgactcccttcatcatacaagagaacctgaacctcgccctgaatagtgccagtgccattgggtgtcatgtggttaatattggggccgaggacctgcgggctgggaaaccccacttggtacttggactcctgtggcaaattatcaagatcgggcttttcgcagacatcgaactgagtcgcaatgaggccctggccgcactgctgagggacggggaaactctagaggaactgatgaagctgtcccctgaggaactactcttgcgatgggcaaacttccacctcgaaaactccggatggcagaaaataaataatttttccgccgatatcaaactcatcgactttagtaactccgtgaaagattccaaagcttattttcatctgctcaatcaaatagcaccgaaagggcagaaagagggggaaccaaggattgatattaacatgtctggattcaatgagacggatgacttgaaaagagccgagtcaatgttgcagcaggcagacaagctgggctgtagacagttcgtgaccccggccgatgttgtctcaggaaaccccaagttaaatctggcattcgtggccaacctcttcaataagtatcccgcgctgactaagcctgagaatcaagatatcgattggaccctcctggagggggaaactcgagaagagcgtacgttccggaattggatgaacagcctgggagtgaaccctcacgtcaaccacctctatgcagatctgcaagatgccctggttatcttacagctgtacgaacgcattaaagtgccagtggactggtcaaaagtgaataagccaccctatcccaaacttggggctaacatgaaaaaactggagaactgcaattatgctgtcgaacttggaaaacaccctgccaagttcagtctcgtcgggatagggggccaggacctcaatgacggaaatcagacccttacactcgcactggtgtggcaactgatgcgccggtacacccttaacgtgctggaggacctgggtgacggacagaaggctaacgatgacatcatcgtgaattgggtaaacagaactctcagtgaggccggcaaaagcacgagcattcaatcctttaaggacaagactatctcaagttctctcgcagtagttgatctgattgacgccatccagcctgggtgcatcaactatgatttagtaaagagtgggaatctgaccgaagatgacaaacataataacgctaagtatgcagtatcaatggcacgaagaattggagctcgggtttatgcgctacccgaagacttggtggaggtgaaaccaaaaatggtgatgactgtatttgcctgtctcatgggaaggggaatgaagcgagtctag

SEQ ID NO: 199716 - DNA, 1758 bp, synthetic construct
  misc_feature 1..1758: note = Description of Artificial Sequence: Synthetic coding sequence
  source 1..1758: mol_type = other DNA
atgcccctgcccggctacaaggtgcgggagatcatccagaagctgatgctggacggcgacagaaacaaggacggaaaaatctccttcgacgaatttgtttacatcttccaggaggtgaagagctctgacatcgctaaaacattcaggaaagcaataaacagaaaagaaggaatttgtgccttgggtggtacttccgagctgagtagcgagggcacgcagcactcctactctgaggaagaaaagtacgcctttgttaattggataaacaaagccctggaaaatgatcccgactgtaggcacgtgattcccatgaatcctaatacggacgatttatttaaggccgtcggcgatggtattgtgctgtgcaagatgatcaacctctccgtccccgatacgatcgatgagcgggctatcaacaagaaaaaactgacaccattcattattcaagaaaacctgaacctggccttgaactcagccagcgcaattggctgccacgtggttaacatcggggctgaagacctgcgtgcgggtaagccacatcttgtcctggggctcctgtggcagatcataaaaattggcctgttcgccgatatcgagttgtctcggaatgaagctctcgccgccctgttgcgcgacggagaaactctggaggaactgatgaaactgtctccggaagaactcctgctgcgctgggctaatttccatctcgaaaactcaggatggcagaagatcaataacttttcagccgatataaaggactccaaggcatatttccacttgctcaaccagatagcacccaaagggcagaaggagggtgagcctaggatcgatatcaacatgtctgggttcaacgaaactgacgacctcaaacgggcagagagtatgctacagcaggctgataaactgggctgtaggcagtttgttacacccgcggatgtagtatccggtaaccccaaactgaatctcgcctttgtcgccaatcttttcaacaagtatccagcacttacaaagcctgagaaccaggacatcgactggacccttcttgagggggagacccgcgaggaaaggacattccgcaattggatgaacagcctaggtgtcaacccccacgtgaatcatctttatgccgatttgcaagatgctctggtaatcctccagttatacgaaaggataaaggtgcccgtggactggtctaaggtgaataaacctccttatccgaaactcggcgcgaacatgaagaaactcgaaaattgcaactatgctgtggaacttggcaaacatcctgcgaaattctcactggtgggtatcgggggccaagacctcaacgacggaaaccagacactcactcttgctttggtgtggcaactgatgcggagatatactctcaacgtactggaggatttaggcgacggacagaaggctaacgacgatattatagttaactgggtgaatcgaaccctgtcagaggcaggcaaatcaaccagtatacagagcttcaaagataaaacaatcagttcatcccttgcggtagtagatctgatagatgccattcaacctgggtgcatcaactatgacctggtcaaatctgggaatctaacagaagatgataagcacaataacgccaagtacgcggtgtctatggctcggagaataggagcccgggtctacgccctaccagaggaccttgtagaggtcaagccgaaaatggtgatgacggtattcgcctgtttgatgggtagaggcatgaagcgcgtctag

SEQ ID NO: 199717 - DNA, 675 bp, synthetic construct
  misc_feature 1..675: note = Description of Artificial Sequence: Synthetic coding sequence
  source 1..675: mol_type = other DNA
atgaacagcctgggcgtgaacccccacgtgaaccacctgtacgccgatctgcaggatgctctggtgatcctacagctgtacgaacgcatcaaagtcccagttgactggagtaaggtgaacaaaccgccttacccaaaactcggagcgaatatgaaaaagctggaaaattgcaattacgctgtggaactgggcaaacatccagctaaattctctttggtcggcatcggtggccaggatcttaatgatggcaatcaaactctgaccctggctctggtgtggcaactcatgcgaaggtatactctgaacgtgctagaggacttgggcgatggacagaaggccaacgatgacatcatcgttaactgggtcaatcggaccctgtcggaggctggcaaatctacatctatccagagctttaaagacaagaccatttctagttcactggcagtggtcgatttgattgatgccatccagccaggatgcatcaactatgacctggtaaaaagtggcaacctcacagaagacgataaacacaataatgcaaagtacgcagtgtcgatggctagaaggatcggagctcgtgtgtatgctttaccagaggatctggtggaggttaagcccaaaatggtgatgaccgtctttgcgtgtctcatgggcaggggcatgaagagagtgtag

SEQ ID NO: 199718 - DNA, 306 bp, synthetic construct
  misc_feature 1..306: note = Description of Artificial Sequence: Synthetic coding sequence
  source 1..306: mol_type = other DNA
atgagcagcgccgccggcttctgcgccagccggcccggcctgctgtttttgggcctcctgctgctgccgttagtagttgcgtttgccagtgctgaagctgaagaagacggagatctgcagtgtctgtgcgtgaagacaacttcccaagtgcgcccgcgacacatcacttccctcgaggtgattaaggccggaccccactgtccgacggctcagcttatcgcgacgctgaaaaacggaaggaagatctgtttagacttacaggcccctttgtacaagaagattatcaagaagctccttgaaagttag

SEQ ID NO: 199719 - DNA, 405 bp, synthetic construct
  misc_feature 1..405: note = Description of Artificial Sequence: Synthetic coding sequence
  source 1..405: mol_type = other DNA
atgaagagcctgacctggatcctgggcctgtgggccctggccgcctgtttcaccccgggagagtctcagcggggaccaaggggtccttatcctcccggacccctggcccccccgccacccccctgttttcctttcggcaccggattcgttccgcccccacacccccctccatatgggccgggacggtttccgcctcccctgagtcctccctacggccctggaagaatacccccttcacctccacccccctatggaccgggccggatccagagtcactccctccctcccccgtacggccctggctacccccagccgccttcccagccccgcccatacccccccggacccccttttttccctgtcaacagccccacagatcctgcgctccctacgcctgccccctag

SEQ ID NO: 199720 - DNA, 399 bp, synthetic construct
  misc_feature 1..399: note = Description of Artificial Sequence: Synthetic coding sequence
  source 1..399: mol_type = other DNA
atgagccagggcgacagcaaccccgccgccatcccccacgccgccgaggatatccagggggatgacaggtggatgtcacagcacaatagattcgtcctggattgtaaggataaggaacctgatgttctgttcgtgggggactcgatggtgcagctgatgcaacagtacgagatttggcgcgaactgttcagtccactgcatgctcttaactttgggataggtggagacactactcggcacgtattatggaggctgaaaaacggagaactggaaaacatcaagcccaaggtgattgtcgtttgggtggggacgaacaaccacgaaaacactgcagaagaagtagccggggggatcgaggctatcgtgcaattaattaacactcgccagccgcaggcttag

SEQ ID NO: 199721 - DNA, 690 bp, synthetic construct
  misc_feature 1..690: note = Description of Artificial Sequence: Synthetic coding sequence
  source 1..690: mol_type = other DNA
atgagccagggcgacagcaaccccgccgccatcccccacgccgccgaagacatccaaggcgatgatcgttggatgtcacagcacaaccggtttgtgctcgattgcaaagacaaagaacccgatgtcctatttgttggtgactctatggtgcagctgatgcagcagtatgaaatctggagggagctgttctcccctctgcatgccctcaatttcggcataggtggcgacacgactaggcatgtactgtggaggcttaaaaacggagaactggaaaatatcaagcccaaagttatagtcgtctgggtcggtaccaataaccatgaaaataccgcggaggaagtcgcgggaggaattgaggctatcgtgcaactgatcaacacacgccaacctcaagcaaaaattattgtgctcgggttgcttccgagaggagagaaaccaaatcctctccgccaaaaaaacgctaaggtgaaccagttgttaaaagtgtccctgcccaaacttgcaaatgtacagttgctcgacacagacggaggcttcgtgcatagtgatggcgccattagttgtcatgatatgttcgactttctgcatttgacaggcggcggctacgccaagatatgcaagcccctgcatgagctgattatgcagctgctagaggagacgcctgaggagaagcagactaccatcgcttag

SEQ ID NO: 199722 - DNA, 468 bp, synthetic construct
  misc_feature 1..468: note = Description of Artificial Sequence: Synthetic coding sequence
  source 1..468: mol_type = other DNA
atgagccagggcgacagcaaccccgccgccatcccccacgccgccgaggacatccaaggtgacgatcggtggatgtctcaacacaatcgcttcgtcctggactgcaaagacaaggagcctgatgtcctgtttgttggcgacagtatggtgcagctgatgcagcagtatgagatctggagagagctgttttcacccctgcatgctctgaatttcggcataggcggcgacactaccaggcatgtactatggagacttaagaacggagagctcgagaacatcaagcctaaggtgatcgtagtatgggtggggacaaacaaccacgagaacaccgccgaggaggtagctggtgggatcgaagctatcgtgcagctgattaacactaggcagccccaggctaaaattatcgtgttaatcatctattggcaggatgaacaggattatcacgagagaaaggttcaaatggactag

SEQ ID NO: 199723 - DNA, 609 bp, synthetic construct
  misc_feature 1..609: note = Description of Artificial Sequence: Synthetic coding sequence
  source 1..609: mol_type = other DNA
atgagccagggcgacagcaaccccgccgccatcccccacgccgccgaagatatccagggtgacgatagatggatgtcacagcacaataggttcgtgttggattgtaaagataaggagcccgacgttctatttgtcggagactcaatggtgcagctcatgcagcaatacgagatctggagggagttgtttagcccacttcatgcactgaatttcggaatagggggcgacaccactagacatgtgctgtggcgcctaaagaacggcgagcttgagaatatcaaaccgaaagtgatcgtggtgtgggtgggtacaaacaaccacgagaacactgcagaagaggtggccggcgggatcgaggcaatcgtgcaactaataaatacgcgccaaccgcaggctaaaatcatcgtgctcgggaaggccgctgctagtaaatatagtatctctgaaattgtgcggttagagcagggatcagtcaactggtctatcggcacctaccccgacgacacaccagctactacccgaccggcaattttacaactgttcaccggcaaaatgagtagaattaccatgaaggagaaatcacgatggaccgaagaaattttgcactag

SEQ ID NO: 199724 - DNA, 696 bp, synthetic construct
  misc_feature 1..696: note = Description of Artificial Sequence: Synthetic coding sequence
  source 1..696: mol_type = other DNA
atgagcggcgaggagaaccccgccagcaagcccacccccgtgcaggacgtgcaaggcgacggcagatggatgtcactgcaccacaggttcgtggcagacagtaaagataaagagcccgaagtggtatttataggggattcactggtgcagctgatgcatcagtgtgaaatctggagggagctcttcagcccgctccacgcattgaactttggcatcggcggcgacggtacccaacatgtcctttggcgactagagaacggggagttagagcatatcagacccaaaatcgtcgtggtgtgggtagggactaacaatcacgggcacacagcagagcaagtgacaggcggcattaaggctatcgtgcagctcgtcaacgaaaggcagcctcaggcacgggtggtagtcctgggattactgccccgcgggcaacacccgaacccactgcgcgaaaagaaccggcaggtgaatgagctggttagggccgccctggccggacatcctagagctcatttcctagacgctgaccctggcttcgtacactctgacggaacaattagtcatcacgacatgtatgactacctacatctcagcaggctcggctacacccccgtgtgtcgggcactgcacagcctactcctccgcctgctggcccaggaccagggtcaaggagcccccctcctggagccagcgccatag

SEQ ID NO: 199725 - DNA, 696 bp, synthetic construct
  misc_feature 1..696: note = Description of Artificial Sequence: Synthetic coding sequence
  source 1..696: mol_type = other DNA
atgagcggcgaggagaaccccgccagcaagcccacccccgtgcaggacgttcaaggcgacgggcggtggatgagtcttcatcatcggttcgtcgctgatagcaaggacaaggagcccgaagtcgtctttatcggggattcactggtgcaactgatgcatcagtgcgaaatctggagagagctgtttagcccactccacgctctcaactttggtatcggcggggacggcacccagcatgtgttatggcgactggaaaatggagagctggaacacataagaccaaagatcgttgtcgtgtgggttggtacaaataaccatggacacacagccgagcaggtcaccggcggtattaaggccattgtccagctggttaacgagagacagccccaggcgagggtcgtcgtactggggctgcttcctcgtggccagcacccaaaccctctccgcgagaagaacaggcaggtgaatgagcttgtccgggctgctctggcgggccaccctcgtgctcactttctggatgctgaccctggttttgtacatagcgatggaacaattagtcatcatgacatgtacgattatctgcatctctcaagacttggctatacgccagtgtgtcgagccctacatagcctgctgctgaggttacttgctcaagatcaagggcagggcgcacccctgcttgagcccgcaccctag

SEQ ID NO: 199726 - DNA, 720 bp, synthetic construct
  misc_feature 1..720: note = Description of Artificial Sequence: Synthetic coding sequence
  source 1..720: mol_type = other DNA
atgaccatcaagctgtgggacttccagggcttcgagtgcatccggacaatgcatggccacgatcataatgtgagcagtgtggccattatgcccaatggagaccacatcgttagcgccagccgggacaagactatcaagatgtgggaagtgcaaactggttactgcgtcaaaacctttacaggccaccgagaatgggtaaggatggtccggcccaatcaggacggtaccctaattgctagctgtagcaacgatcagaccgtaagggtgtgggtggtggctacaaaggagtgcaaggccgaactgagggagcatgaacacgtggtggagtgtatttcctgggcgccagaatcctcttatagttccatcagcgaagccacgggctcagagaccaaaaagtccggtaaaccgggacctttcttactgagtggaagccgcgacaagactattaaaatgtgggatgtgtccacagggatgtgcttaatgacactggttggtcacgataattgggtccggggcgtgctcttccacagcggaggcaagttcatactgtcatgcgccgatgataagacactcagagtgtgggattataaaaacaaacgatgtatgaagacactaaacgctcacgaacatttcgttacatccctcgacttccacaagacagcaccctatgtggtgactggctccgtggaccagacagtcaaggtttgggaatgtagatag

SEQ ID NO: 199727 - DNA, 1233 bp, synthetic construct
  misc_feature 1..1233: note = Description of Artificial Sequence: Synthetic coding sequence
  source 1..1233: mol_type = other DNA
atggtgctgagccagcggcagcgggacgagctgaaccgggccatcgcagattatcttagaagcaatgggtacgaggaggcctattccgtgttcaagaaggaagccgaactggacgttaatgaggaacttgataaaaaatatgctggattactggagaagaagtggaccagcgttatccgcctccaaaagaaagtgatggaattagaatcaaagctgaacgaagcgaaggaagagttcacctctggggggccactgggccaaaagagagatcccaaagagtggattccacgtcctcccgagaagtatgcgctgagcggacacaggagccctgtaacacgggtgattttccatccggtttttagcgtcatggtaagcgcctccgaagacgctactatcaaggtttgggactatgagacaggcgactttgaacggactttgaaaggccacactgattcggtgcaggacatcagttttgatcattctggaaagttgctggcttcttgcagcgctgacatgacaattaaactctgggacttccaggggttcgagtgcattagaaccatgcatggtcatgatcacaacgtctcaagtgtagccatcatgcccaacggggatcacattgtgagcgctagccgggacaaaacaattaagatgtgggaagtccagaccggctattgtgtgaaaacatttaccgggcatcgggaatgggtgcgcatggttcgcccaaatcaggatgggaccctaatcgcttcctgttcaaacgaccagacggtaagggtgtgggtggttgctacaaaggaatgtaaggctgaactgcgcgaacacgaacacgtggtggagtgcatttcgtgggcccctgagtcatcttattcaagtatctcagaggccactgggagtgagactaaaaaaagcggcaaacccgggccgttcctgttgtctgggagcagagacaaaacaatcaaaatgtgggacgtgagcacagggatgtgtctgatgaccctggtcgggcacgacaattgggttaggggggtgcttttccactctggtggaaaattcattttgtcttgcgctgacgataagactctgagggtctgggactacaagaacaaaaggtgcatgaagaccttgaatgcccacgaacatttcgtgacgagcctggattttcataaaacggcgccctacgtggttacgggtagcgtggatcagaccgttaaggtctgggaatgtcgctag

SEQ ID NO: 199728 - DNA, 618 bp, synthetic construct
  misc_feature 1..618: note = Description of Artificial Sequence: Synthetic coding sequence
  source 1..618: mol_type = other DNA
atgaccatcaagctgtgggacttccagggcttcgagtgcatccggacaatgcacggacacgatcataatgtgtcctcagtggccattatgcccaacggtgatcacattgtgagcgccagccgggacaaaacaattaaaatgtgggaagtacagaccgggtattgcgttaagactttcaccggacaccgcgagtgggtcagaatggtgcgtccaaaccaggacgggactttgattgcgtcttgctcaaatgaccagactgtgagggtttgggtggtcgcgacaaaggaatgtaaggctgaactgcgggagcatgagcacgttgtcgagtgcatcagctgggccccggaaagtagctactctagtatatcagaggctaccggctcagaagtcggccacgataactgggtgcggggtgtattgttccacagcggaggaaagttcatcctgtcctgtgcagatgacaaaactctgcgggtgtgggattacaagaacaaacgttgtatgaaaacgctgaacgcccacgaacacttcgtgacttcacttgacttccacaagacagcaccgtacgtcgtaactgggtcagtggatcagactgtcaaagtgtgggagtgtaggtag

SEQ ID NO: 199729 - DNA, 1029 bp, synthetic construct
  misc_feature 1..1029: note = Description of Artificial Sequence: Synthetic coding sequence
  source 1..1029: mol_type = other DNA
atggagccccacgacagcagccacatggacagcgagttccggtacacgctgtttcctattgtgtattcaatcatattcgtgttaggcgttattgcgaacggatacgtgctgtgggttttcgcacgactgtatccttgcaaaaaatttaacgagattaagattttcatggttaatcttactatggccgacatgctgtttctgattaccttacccttgtggattgtctattatcaaaatcaagggaattggatactcccgaaatttctgtgcaacgtggctggatgcctgttctttattaatacttattgtagcgttgctttcctgggcgtaattacttacaatcgcttccaggccgtcacacgtcccataaagacagcccaggctaacacccgaaaacgtgggatatcattgagcctcgtcatctgggtggccattgtcggagcagcctcttacttcctgatcctcgattctactaacactgtaccagactctgccggatctggcaacgtaacacgctgcttcgaacattacgagaaaggcagtgtccccgtgcttatcatccacatcttcatcgtcttctctttctttctggtgtttttgattatcctgttttgtaatctcgtcatcattcgaacgctgctgatgcagcctgtgcagcagcagcgaaatgccgaagtcaagcggagggctctatggatggtttgcactgtccttgcagtttttatcatttgctttgtgccgcatcacgtggtgcaactcccatggaccctagctgagctcggatttcaggatagcaagtttcaccaagccataaatgacgcccaccaggttaccctgtgcctcctttcaactaactgcgttctggaccccgtgatatactgcttcctcacaaaaaagtttaggaagcacctgacggaaaagttttactctatgaggtcctcgcggaaatgttcccgagcaaccactgatactgtcacagaagtagtggtacccttcaaccagatccctgggaacagtctgaaaaactag

SEQ ID NO: 199730 - DNA, 1029 bp, synthetic construct
  misc_feature 1..1029: note = Description of Artificial Sequence: Synthetic coding sequence
  source 1..1029: mol_type = other DNA
atggagccccacgacagcagccacatggacagcgagttccggtacaccttgttccctattgtttattccatcatctttgtgctgggcgtcatcgctaatggatacgtgctctgggtatttgctaggctgtatccctgtaaaaagtttaatgagattaaaatctttatggtgaacctgaccatggcggatatgttgtttctcatcacactgcccctgtggatcgtgtactatcaaaaccaaggcaactggatattacccaagttcctctgcaacgtcgccggctgtctgttttttataaacacatactgttccgtcgcattcctgggtgtaattacttataaccgctttcaggccgtgacccggcctattaaaactgcacaggcgaatacccgaaaaagagggatcagcctttcccttgttatatgggtcgcaatcgtgggcgcagcatcctacttcctgatccttgacagcaccaacaccgtccctgactccgcaggttctgggaatgttacccgctgcttcgaacactacgagaaagggtcagtgccagtgctgataattcacatttttattgtcttttcctttttcttggtatttctcatcatcctcttctgcaacctcgtgatcattcgtacacttctgatgcagccggtgcaacagcaacggaatgccgaggtgaagcgccgagctttgtggatggtttgtaccgtgctggcagtcttcatcatttgtttcgtccctcatcatgttgtccagctcccttggacactggccgagcttgggttccaagacagcaaattccaccaggccataaatgacgcacatcaagttaccctttgtttgttgtcaacaaattgtgtcttagatccagtgatctattgcttcttaacaaagaagttcaggaaacatctaactgagaagttttacagcatgcgcagctcaagaaaatgctcccgtgcaactactgacaccgtaacagaagtggtggtgccctttaaccagattcccgggaattccttgaaaaactag

SEQ ID NO: 199731 - DNA, 1029 bp, synthetic construct
  misc_feature 1..1029: note = Description of Artificial Sequence: Synthetic coding sequence
  source 1..1029: mol_type = other DNA
atggagccccacgacagcagccacatggacagcgagttccggtacaccctctttccaattgtttatagtatcatttttgtgcttggtgtaatcgccaacggatacgtgctatgggtgttcgcacgcctatacccatgcaagaagtttaatgagatcaaaatttttatggtgaatctaactatggcagacatgctttttttgataactttacccttgtggatcgtctactaccagaaccagggaaactggattctgcccaaatttctgtgcaatgtggccggctgtctcttcttcattaacacatactgctcagtggcatttctgggagtgattacatataatcgatttcaggccgtgactcggcctataaaaacagcgcaggcgaatacacggaagcggggtatctctctcagcttggtcatctgggttgctatcgttggcgccgcaagctactttttgattctggactcaactaacacagtcccagattcagctggctctgggaacgtcacccgttgtttcgaacattacgagaagggaagcgtgccagtcttaatcatacatatctttatcgtgttttccttctttctggtcttcctgatcatccttttttgtaacctcgtcatcatcaggactctcttgatgcaaccagtccaacagcaacggaacgccgaagtcaagcgccgagctctttggatggtatgtaccgtgcttgccgtcttcatcatatgcttcgtgccccaccacgtggttcagctgccttggaccctcgcagagctcgggttccaggacagcaagttccatcaggcaatcaacgatgcacaccaggtgacactgtgtctgttgagcacaaactgcgtgttggacccggtgatttactgctttctgacaaagaaatttcggaagcacctgacagagaagttttatagcatgcgtagctcccggaaatgttcgcgagctacaacagatacagtgactgaagtggtagtgccattcaaccagataccgggcaacagccttaaaaattag

SEQ ID NO: 199732 - DNA, 1128 bp, synthetic construct
  misc_feature 1..1128: note = Description of Artificial Sequence: Synthetic coding sequence
  source 1..1128: mol_type = other DNA
atgaaggtgtggctgctgctgggcctgctgctggtgcacgaggccttggaggacgtgaccggccagcatcttcccaaaaataagcggcccaaagagcccggcgagaacagaatcaagcccactaataagaaggtaaaaccaaaaatccccaaaatgaaagaccgtgatagcgcgaattccgccccaaagacccagtctatcatgatgcaggtcttggataaaggtcggtttcagaagcctgcagcaacactttccctgctggccggccagacggtcgagcttaggtgcaaggggtccaggatcggatggagctacccggcctaccttgacacattcaaagactcacgactctccgtaaagcagaacgaaaggtacggccagctgacactggtgaattccacctcagcggacaccggagagttcagttgctgggtccagctgtgcagcggctatatttgccggaaagacgaagccaagactggatctacctacatattctttaccgagaagggagaacttttcgtaccatccccaagctactttgacgtggtctatctgaaccccgacaggcaagctgtggtcccctgccgagttactgtgctgtcggccaaggtgacacttcaccgggagttcccagcaaaggagatccctgcaaatggaactgacattgtttatgatatgaaacgaggattcgtgtacctccagcctcatagcgaacaccagggcgttgtgtattgcagagcggaggcaggcgggcgctcccagatttccgttaagtatcagttgctttatgtggcggtgccgtctggaccccctagcacgacaattctcgcttccagtaacaaggtgaaatccggcgacgacatatcagtcctatgcactgttctgggcgaacccgacgtcgaggtggagtttacttggatttttccgggtcagaaggacgaaaggcccgttacaatccaggacacgtggcggctgatccaccgtggcttggggcacacaactcgcatatcacagtctgtgatcacggtcgaagactttgagaccattgatgccggttactatatctgtaccgcccagaacttacaggggcagaccaccgtggcaactaccgtggagttttcctag

SEQ ID NO: 199733 - DNA, 1128 bp, synthetic construct
  misc_feature 1..1128: note = Description of Artificial Sequence: Synthetic coding sequence
  source 1..1128: mol_type = other DNA
atgaaggtgtggctgctgctgggcctgctgctggtgcacgaggccctagaggacgtgaccgggcagcatttgcctaaaaataagcgtcctaaagagcccggagagaaccggatcaagcctaccaataagaaagtgaaaccaaaaatcccgaaaatgaaggaccgggactccgccaattctgcccctaaaacacaaagtattatgatgcaagttctcgacaaggggcgattccagaagccagcagctaccttgagcctcctggcaggacagacagtggagctcagatgcaaagggagccgcattggttggtcgtatcccgcctatcttgataccttcaaggacagtagactgtccgttaagcaaaacgaacgctatggtcagctgactcttgtcaatagcaccagcgctgatactggagaattcagctgttgggtgcagttatgtagtggctatatctgtaggaaggatgaagccaagaccggatcgacatatatttttttcaccgaaaaaggcgagcttttcgtcccctctccctcttactttgatgttgtctatctgaatccagatcggcaagcagtcgtaccttgtcgtgtcacggtgctgtctgccaaagtcacattgcaccgggagtttccagctaaggagattccagctaacggcacggatattgtctacgatatgaagagggggttcgtataccttcaaccacatagcgagcaccagggagtggtttactgccgcgcagaggcgggcggcaggagccagattagcgtgaaataccagctgctgtacgtggctgttcctagcgggcctccaagtactaccattctggctagctctaataaggtgaagtcaggggatgatatctccgttctatgtaccgtgttgggtgagcccgacgtggaagtggaattcacctggatatttcccggccagaaagacgaaaggccagtgaccatccaggacacttggaggctgattcaccgcggactggggcatacaacacgcattagtcaaagtgtgattactgtcgaggactttgagaccatcgatgcaggctattacatctgcacagctcagaacctgcaggggcagacgacagtggcaaccactgtcgagttcagctag

SEQ ID NO: 199734 - DNA, 1128 bp, synthetic construct
  misc_feature 1..1128: note = Description of Artificial Sequence: Synthetic coding sequence
  source 1..1128: mol_type = other DNA
atgaaggtgtggctgctgctgggcctgctgctggtgcacgaggccctggaagatgtcaccgggcagcatcttcccaagaacaaaaggccaaaggagcccggtgaaaaccgtatcaaacccacaaacaagaaggttaagcctaaaatcccaaaaatgaaagatagagattccgccaacagcgccccaaaaacacagtccattatgatgcaggtcctcgacaaaggcaggtttcagaaacctgcagctacactgtccctgctggcgggccaaaccgtggagctgagatgcaagggttcccggatcgggtggtcttacccagcctatttggacacatttaaagattcgcggctgtctgtcaaacagaacgagcgctacggacagctgaccctggtgaactcaaccagtgctgatactggcgagttttcatgttgggtccagctttgtagtggctacatttgccgaaaggatgaagccaaaacagggtctacctacatctttttcactgagaagggagagctgttcgtgccctcaccttcatactttgatgtggtgtacctgaatccagaccgccaggcggtcgtaccatgtcgcgtcactgtgttaagtgccaaggtgaccttgcatcgtgaatttcccgctaaggagatcccagccaacggcacggatattgtgtacgacatgaagaggggtttcgtttacctgcagccacactccgagcatcagggcgtggtatattgccgggcggaagcaggaggtcgtagccagatctcggtgaaatatcaactcctgtacgtcgctgtcccttcagggcccccatcaaccaccattctcgccagctctaacaaggtgaaatctggcgatgatatcagcgtgctttgtactgtgttgggcgagcccgacgtggaggtagagttcacctggatcttccccggacaaaaggacgaacgccccgtgactatccaggatacttggagacttattcacagaggcctagggcatactactcgcattagtcaatctgtgataactgtggaggactttgagacaatcgatgctgggtactatatttgcacagcacagaatctgcaagggcagaccaccgtcgccacaaccgttgagttctcatag

SEQ ID NO: 199735 - DNA, 3075 bp, synthetic construct
  misc_feature 1..3075: note = Description of Artificial Sequence: Synthetic coding sequence
  source 1..3075: mol_type = other DNA
atggcccagggcgccatgcggttctgcagcgagggcgactgcgccattagtccacctcgctgcccccggagatggctcccagaaggccctgtgccccagtcgcctcctgcatctatgtacgggtctacaggaagtctattgcggagagttgccggtcccggcccacgtggacgggaactcggtcgcgttactgccccgtgtacgcccttaagaggccctccaagtcccagggtggccccaagtccttgggctccctcctctccaacgggccagccgccacctggcgcccagagctctgtggtaattttccggttcgtggagaaggctagcgttagacccctgaacggcctgccagccccaggcggcctgtcacggtcgtgggatctcggcggcgtttctccgcctagacctaccccagccctggggcccgggagcaacagaaagctgaggcttgaggccagcacttccgaccccttgccagctcgagggggctccgcactgccaggctctaggaatctcgtgcacgggccacctgccccgcctcaggtgggggcagatggactgtactcttcactcccgaatgggctggggggtccaccggagcgcctcgctacgctgtttgggggtcccgccgacactggattccttaaccaaggagacacctggagcagtccacgggaggtcagtagccacgctcagagaatcgccagagccaaatgggaatttttctacggcagcctggatcccccgagctccggtgcaaagcctcccgaacaggcccccccatcccccccaggtgtcggctccagacaagggtccggcgttgccgtggggcgcgcagcaaaatactccgagaccgacctcgacacagtgcctttaagatgctatagggagaccgacatcgatgaggtgttggccgaaagagaggaggcagactctgctattgagtctcagccctccagtgagggaccgcccggaacggcctatccgcctgccccacggcctggacctctgcctgggcctcatccaagcctcggctctggcaatgaggacgaagatgacgacgaggcaggcggggaagaagacgtggacgatgaggtgtttgaggcctctgagggggcaagaccagggtctcgcatgcccttaaagagtcccgtgccatttctgcctggcacaagcccgtcggctgatggccccgactcttttagttgtgtgttcgaagcaattctggaatctcacagggccaaagggacctcttatacgtcactggctagcctggaggctcttgccagccctggacctacccagtcccccttttttaccttcgagctgcccccacagccccccgccccgagacctgaccctcctgcgcctgctcctctcgccccacttgaaccagattcaggaaccagttccgccgcagacggaccatggactcaaaggggcgaagaggaggaggcagaagcccgtgctaagctggcccctggtcgtgaaccaccgtccccttgtcacagtgaagactcacttgggctaggggcagccccactaggctcagaacctcctctttcccagctggtgtctgacagcgattcggaattggatagtactgagaggctggcactcggcagtaccgatacattaagcaacggtcaaaaagccgacctggaagcagcccagcgactggccaagcgactctatcggctcgacggatttaggaaagccgatgtggccagacacctgggtaagaacaatgacttttcaaagctcgtcgctggcgagtacctgaaattctttgtgtttacaggcatgaccctggatcaggcactgcgcgtatttttgaaggagctcgccctgatgggtgaaacccaggaaagagaacgcgttctcgctcactttagccagaggtacttccagtgtaatccagaggcgttgagcagcgaggacggcgctcacacactgacatgcgccctgatgctgctgaacaccgaccttcacgggcataacatcggaaaacggatgacatgtggagactttattgggaatctagagggcctcaatgatggcggggacttccctagagaactcctgaaggctttatactcatctatcaagaatgagaagctacagtgggcaatcgacgaagaggagctgaggagatcattgtccgaactcgccgatcctaatccgaaagtcatcaaacgaattagtgggggaagtggctccggcagctctccctttctcgatctcaccccagagcccggcgctgccgtgtacaagcacggcgccctggtcagaaaggtacacgctgaccccgattgtcgcaaaacacctcgcgggaaacggggctggaagagctttcacggcattctcaagggcatgatcctgtatcttcagaaagaggagtataaacccggcaaagcactctctgagaccgagctcaagaacgccatatctatccaccatgctctggccacccgggcctccgattactcgaagcgccctcacgttttttacctgcggaccgccgattggagggtgttcctcttccaagcaccgagcctagagcagatgcagtcctggatcacacgaatcaatgtggttgctgccatgttctctgcaccacctttccccgctgctgtatcctcccagaagaagtttagcaggcctttgctgcccagtgccgctacgcgcttgtcccaagaggagcaggttcgcactcacgaagctaagctgaaggctatggcaagtgaactgagagaacacagagcagctcagctgggaaagaagggaagaggtaaagaggcggaggagcagaggcaaaaggaagcatacctggagtttgagaagtccagatactctacctatgccgctttgctccgcgttaagctgaaagccggatcagaggagctggatgcggtagaagcggccttagcccaggccgggtctacagaggacggtctgcctcctagccatagcagcccttcactgcagcccaaaccatcttctcagcctagggcacagcggcattcctcagagccccggccaggcgcgggatccggccggcgcaagccttag

SEQ ID NO: 199736 - DNA, 3075 bp, synthetic construct
  misc_feature 1..3075: note = Description of Artificial Sequence: Synthetic coding sequence
  source 1..3075: mol_type = other DNA
atggcccagggcgccatgcggttctgcagcgagggcgactgcgccatttctccacctagatgtccacggagatggctgcccgaggggccggtgccccagtctccaccggcttccatgtacggatcaaccgggtctctgctgcggcgtgtcgcaggacctggtccaagaggccgggagttggggagggtaaccgccccatgcacaccccttcgcgggcctccatctcccagagttgcaccatcaccttgggctccatcctcccctaccggacagccacctcccggggcccagagtagtgtcgtgatatttagattcgtggagaaagcctctgtacgcccgctgaatggcttgcctgcgcccgggggactaagcaggagctgggacctcggtggggtatccccgcctcggcctacacccgcgctaggtcctggctccaaccgaaaactcagactcgaagccagcacgagcgacccgctccccgcaagaggcggcagcgcgctcccaggctctaggaacttggtacatggtccgccggcccctccacaagtgggtgctgatggcctatactcctccctacctaatgggcttgggggcccacctgagcgtctggcaacactcttcggcggcccagctgatacgggctttctaaaccagggtgatacttggtcatcgcctagagaagtaagctctcatgcacagcgtatcgcaagagccaaatgggagttcttctacggaagtctggaccccccctcatctggggcaaagcctccagagcaggctccgccaagccctcctggtgtgggatcgagacaaggcagcggggtggcagtggggcgggccgccaagtacagcgagaccgacctggacaccgtcccattgagatgctaccgcgaaactgacattgacgaggtgttggccgagagagaagaagctgacagtgctatcgagagtcagccttcaagtgaaggcccgccagggacggcttaccccccagcccccaggcctggcccactgcccggtcctcatccatctttgggctccggcaacgaggatgaggatgatgatgaagcagggggggaagaagacgtcgacgacgaagtatttgaggcgagtgaaggcgcccggcccggctcgcgcatgcctttgaaatccccagttcccttcttgccaggtacatctccctcagcggacgggccagatagcttttcatgtgtatttgaagccatcttggagagccaccgtgctaaaggcaccagctatacaagcttggcaagcctggaagctctggctagtccaggaccaactcagagtcccttcttcactttcgaactgcctccacagcctcccgccccgcggcctgaccccccggcaccagccccgctggctccattggagcccgacagcggcacgtccagcgctgcagatggaccttggacccagcggggtgaagaagaggaggcggaggccagagctaagctggccccaggaagggaacccccttccccgtgccactccgaagatagcttaggcctgggcgcagctcccttgggctccgagcctccgttgtcccagctcgtgtccgattccgatagcgagctggacagtactgagcggctggccctgggctccacagacactctgagtaatggtcagaaggccgacttagaggccgcccaacgcctggctaagcggctttatagacttgatgggttccgcaaggcggatgtggccaggcacctgggtaagaacaacgacttctccaaacttgtggctggggaatatctcaaattcttcgtatttaccggtatgactctggaccaggcgcttcgtgtgtttttgaaggagctggccctcatgggagagacccaggagagagagagagtgttagcacacttcagccaaaggtattttcagtgtaacccagaagctctaagctccgaggacggcgcgcacacgctgacgtgcgccttgatgctgctgaacaccgacctgcacgggcataatatcggtaagcggatgacttgcggagacttcattggtaacctggaagggctcaatgacggtggagactttcccagggaacttctcaaagccctttatagttcgataaaaaatgaaaaattacagtgggccatcgatgaagaggaactgcgccgaagtctgtctgagctagcagatcctaatcctaaggtgatcaaacgtatctctggtggctccgggtccgggagctcgccgtttctggacttgacacccgaacctggagctgctgtatataagcacggagcgctcgtgagaaaagttcatgccgaccctgactgtcggaagacacctagaggcaagcgaggctggaaatcctttcacggcattctgaaggggatgatactgtatctgcagaaggaagagtataagccggggaaagccctttctgaaactgaactcaaaaacgctatcagcattcaccatgccctggccaccagagcctccgactactccaagcgcccccacgtgttctacctccgaacagcagactggcgagtgtttttattccaggccccctcccttgagcagatgcaaagttggattactaggattaacgtcgtagcggccatgttttccgcccccccttttcccgctgccgtctccagccagaagaaatttagtcgaccactcctgcctagcgctgcaactcgactgtcacaggaagaacaggttcgcacccacgaggctaaactcaaagctatggcgagcgaattacgggagcatagagctgcacagctggggaaaaaaggtcgaggtaaggaggctgaggagcagcgacagaaagaggcttacctggaatttgaaaagagcaggtacagtacatatgcggcgctgttgcgcgttaaattaaaagccgggagcgaggaactcgacgcagtagaagctgctctggctcaggctggctctacagaggacggcctgccaccttcgcactccagcccctctttgcagcccaaaccgtcttcccagccccgtgcccagaggcactctagcgagcctcgacccggtgctggctccggccggcggaagccatag

SEQ ID NO: 199737 - DNA, 2784 bp, synthetic construct
  misc_feature 1..2784: note = Description of Artificial Sequence: Synthetic coding sequence
  source 1..2784: mol_type = other DNA
cagatctggcggtgccccctgcagcaccacgccgagagcgcccccccactacctgcactcagctgggcacagcccctgctctgtctttcatccgtttccgcattaggagagcagaggcctactcccgctctagggcccgggagtaacaggaaactgcggctggaagcctccaccagcgaccccctgccggctagaggagggtcggctctgcccggatcccgcaacctggttcatggcccaccagctccaccccaggttggcgctgacggcctgtattcatccctgcccaatggtctggggggcccccctgaaaggctggcaacacttttcgggggccccgccgatacgggcttcctgaatcagggtgacacttggtccagtccgcgggaagtgagttcgcacgcccagagaatcgcccgggcaaagtgggagttcttctatggaagccttgatccaccatccagcggagccaaaccaccagagcaagccccccccagccctcctggtgtgggctcacggcagggctcaggggtggccgtgggaagggccgccaagtacagtgagacggatttggatacagtcccactgcgctgttacagggagactgatatcgacgaggtgctggccgagagggaagaagcagatagcgcgattgagtctcaaccttccagcgaaggtccgccaggaaccgcgtatcctcctgcaccaaggcctggaccactaccaggcccacatccgtcgctcgggtctggcaacgaggacgaggacgatgacgaggcgggcggtgaggaggatgtggatgatgaggtgttcgaggcgtccgagggtgctcggcccggctcaagaatgccactgaagagccccgttcctttcttaccaggcactagcccatccgccgatgggccagattccttttcctgtgtttttgaagccatacttgaaagtcatagggccaagggcacaagttacaccagtttagcaagcctggaggctctcgcctctcccggccccacccagtctcctttcttcacattcgaactgcccccccagcctccagctccacgaccggatccccctgcccctgctcccctcgcgccactcgagcctgactccggcacatcatcggccgccgatggcccttggacgcagaggggagaggaggaggaggcggaggcacgggctaagttagccccaggaagggagcctccctcaccttgccacagcgaagatagcctggggctcggtgctgccccactgggtagcgaacctccgctgtctcagttggtgtccgattcagactccgaattggatagcactgaacgcctcgctttgggatcgacagataccctcagtaatggccagaaggctgacctcgaagccgcacagcgcctggccaagcggctctacaggctggacggtttccgcaaagcagatgttgcgcgtcacctgggaaagaacaacgattttagcaagcttgtcgccggtgagtatctgaagtttttcgtgttcaccggaatgaccttagaccaggcactgagagtgtttctgaaggagctcgccctaatgggagaaactcaggagagagaacgcgtgctggcccacttttcccagcgctacttccaatgcaatcctgaagccttgagcagtgaggacggcgcccataccttgacatgcgctctgatgctcttgaatacggacttgcacggccacaacattggcaagcgcatgacctgcggtgattttatcggcaaccttgaggggctaaacgacggcggagattttcctcgagagctgctcaaggccctctactcttcaatcaaaaacgagaagttgcaatgggccattgacgaagaagagctgagacggtctcttagtgaacttgcggaccctaatccaaaagtgattaagagaatttccggcgggagcggttccggcagtagcccctttctcgatttgacaccagagcccggggcagcggtgtataaacatggcgctctggtccggaaggtgcacgcagaccccgattgtcgaaagacccctagggggaagcgggggtggaaatccttccatggaatcctcaagggaatgatactgtatctgcagaaggaagagtacaagcccggaaaggcgctgtctgagaccgaactgaaaaacgctatatccatccatcacgctcttgctacccgtgcctcagactactccaaacgccctcatgtgttctatttgaggacagcagattggcgtgtgtttctgttccaggccccttcgctggagcagatgcagtcttggattactcgtataaatgtcgtagccgccatgttctctgcacctccgttcccagctgctgtctctagccagaagaaattttcccgtccgttgctacccagtgcggcaacccgtctgtcacaggaagagcaggtgaggacgcatgaggcgaaactgaaagcaatggcgagtgagttgcgcgagcatagggctgcccagcttggcaagaagggcagggggaaggaggctgaagaacaaagacagaaggaggcgtacctagaattcgagaagagccgttatagtacctacgccgctctgctacgcgtcaagctgaaggccggctcagaggaactggatgctgtggaggcagctctggcacaagctggaagtacagaggacggcctcccaccgagccattcctcaccgtctctgcagccaaaaccatcctctcagcctcgcgcacagagacacagctctgaacccagacccggagcgggtagtggtcggaggaaaccctag

SEQ ID NO: 199738 - DNA, 1542 bp, synthetic construct
  misc_feature 1..1542: note = Description of Artificial Sequence: Synthetic coding sequence
  source 1..1542: mol_type = other DNA
atgggcagcagctggtgcctgtacggctgctgcaacgccggcgtgaagacaacccggctggaggcccactctgagatggggtctacagagattctggaaaaggagacacctgaaaacctgtctaacggcacatctagcaatgtggaggccgccaaacgtctggctaagcggttgtaccagctggatcgtttcaagcgtagcgatgtggccaaacatctgggcaagaataatgagttttcaaaattggtcgctgaagagtacctgaaattttttgatttcactgggatgactctggatcaaagcctacgatacttcttcaaagctttctctcttgttggtgagactcaggaacgtgagcgggtactgattcattttagtaatcgctatttctactgtaatcccgacacaatcgcttcacaggacggagtgcattgtctgacttgcgccatcatgttgttaaatacagatctgcacgggcacaatataggcaagaagatgacatgtcaagaatttattgcaaacctgcagggtgtgaacgagggagtcgatttcagcaaggatctactcaaagcattatacaattctattaagaacgagaagctggagtgggcagtggacgacgaggaaaaaaaaaagtccccttcagaaagcactgaggaaaaagccaatggtacccatccaaaaacaattagccgcatcggcagcacaaccaacccattcttagatatcccccacgaccctaacgccgctgtgtataaatccggctttctggctcgcaagatacatgccgacatggacgggaagaaaaccccccgcgggaagagaggttggaaaacattctatgcagttctaaagggcactgtcctttatctccagaaggacgagtacaaacccgaaaaagccctatcagaagaagacttgaaaaacgccgtgtcagtgcaccacgcactcgctagcaaggccacagactatgagaaaaaaccaaacgtgtttaaattgaagaccgctgactggagggttctgctgtttcagacgcagtccccagaagagatgcagggttggataaataagataaactgcgtagctgccgttttcagcgcccctcctttcccggctgcaataggcagtcagaaaaaattttccaggccactgttgcctgccacaactactaaactttcccaggaagagcagcttaaaagtcacgaatcaaaacttaaacagatcaccaccgagttagctgaacatcgaagctatccgcccgataaaaaggtgaaggccaaggacgttgacgagtacaagctgaaggatcactatctggagtttgagaagaccaggtatgagatgtatgtgtctattctcaaggaggggggcaaggagttactctcgaacgatgagtctgaggctgctgggctcaagaaatcacactcgtcaccctctttaaaccccgatacttcacctatcaccgccaaggtcaaaaggaacgtgtctgaaaggaaagaccaccgtcctgaaacccccagcattaagcagaaggtgacttag

SEQ ID NO: 199739 - DNA, 3144 bp, synthetic construct
  misc_feature 1..3144: note = Description of Artificial Sequence: Synthetic coding sequence
  source 1..3144: mol_type = other DNA
atggagggccggagcgccgccgccgagaccttcgtgtgggtgaacaacgcaagcgctcactcccagtctgtggctaaggctaagtacgaattcctcttcgggagatccgagggcaaggccccagataccagcgatcatgggggttcaaccctgctgccacctaacgtaaccaatgagttccctgaatatgggacaatggaggaagggggagagggtctgcgcgcaagcctggagttcgacggggaagctcttccctgccacccccaagagcagcagggcgttcagccactcaccggttgccactctggcttagatagcgtaacagaggggcctaaggacgtgcgcgaagctcccagccaatcacatctgaaggagcaaagcctccagcccatcgattcattaatcagtgcgctgaaggcaaccgaggcgcgcattatcagtggtacccttcaggccaccaaagtgctagaccaggacgcagtgtcatctttttctgttcagcaggtagagaaggaactagatacagcgtcacgaaaaacacagcgggtaaataaaactctccctgcgggccaaaagaacctgcctgaaatcccactctcggcggaggtaacaacggaggagtcattctacctaagcattcagaaagacctgacggcactgcttactggggatacgcaggccgaaatatcgcagatcatgaacaatgggcgaaagggggcagtctgtgtgcaggagcccagctgcccgctggccagtttagggtcatctgcggtcacctgccattctgctggatctgtcgggttccttaaagaacaacgatctgccctgggacgtgagcaccctggtgggtgtgaccgctccagttctatgggtcgaccgggaagggtgaaacacgttgaatttcaaggtgtcgagatcttatggactgggggggataagagggagactcagcacccaatcgattttgagacatccctgcagaggactgccagtcctgactctaaagagtcctcaaaagtgccgcggcatctgatttcaagtgctgggctttgtaattcctcttcactgaccgagaacgtgtgggacgaatcttggaaggcccccagcgaacggcccggtacatcatctggtacctttagcccagtccgtcttgacgaatccggcgaagatgaggtttttctccaggagaacaaacagcacctggagaaaacccctaagcctgagcgcgatcgggaaagaatctcagagcaggaggagcatgtgaaaggagaggacgaggatatacttggacctgggtataccgaagattcaactgatgtgtactctagccagttcgagacaattttggacaacacgagtctgtattactctgccgaaagtttggagacactgtattccgagccagacagttacttctcgtttgagatgcccttgactcccatgatccagcaaagaatcaaggaaggtggccagttcctggagagaaccagcggaggtgggcaccaggacatactttccgtttcagccgatggcggtatcgtgatgggctattcttcgggcgtcaccaatgggttgaatgacgcaagtgattccatatacactaagggtacccccgagatcgctttctggggctcgaacgccggagtgaaaactactagattagaggctcattcagagatgggaagcacagagatcctcgagaaggaaaccccagaaaatctgagcaatggcacttcctctaacgtggaggccgctaaaagattagccaagaggctgtatcagctcgatagattcaaaaggtcagacgttgctaaacatcttggtaaaaataacgaatttagtaagctggttgccgaggaatatctgaagttttttgactttaccggtatgacactggaccagtcactcagatacttcttcaaggcattttccctggtgggtgaaacacaggagcgtgagagagtccttattcacttctccaatagatacttctactgcaatcccgataccatagctagccaggatggcgttcattgtcttacgtgtgccatcatgctgttaaacaccgatctacatggtcacaatatcggtaagaagatgacgtgccaggagtttattgctaatcttcagggagtgaatgagggagtcgatttcagtaaggatctccttaaggccctctataacagcattaaaaacgagaaactggaatgggccgtggacgacgaggagaagaaaaaatcccctagcgagagcaccgaagagaaggccaacggaacacatccaaaaaccattagcaggataggcagtacaaccaatcccttcctagacatcccccatgatccgaatgcagctgtgtataagagcggcttcctcgcccgcaagattcatgccgacatggacgggaagaagaccccccgtggcaaacgtgggtggaagactttctacgccgttttgaagggtacagttctgtacctgcaaaaggatgaatacaagcctgagaaggccctctcagaagaagatctgaagaatgccgtatctgtccatcacgcactggcgtctaaggccacagactacgagaaaaagcctaatgtatttaagcttaaaacagcagattggcgcgtgctcttatttcagacccagtcgccggaggaaatgcaaggctggattaataagattaactgtgtggcagctgtattcagcgcacctccgttccccgcagcaattggcagtcaaaagaaattctcacgccctctcctgccagccactaccacgaaactatcccaggaggagcagcttaagagccacgaatcgaaactgaaacagataaccaccgaattagcagagcacaggtcctatcctcctgataagaaggtcaaagctaaagacgtagacgagtacaagttaaaggaccattatctggaatttgagaagacccgctacgagatgtatgtatctatactgaaggaaggcggcaaagagctgctgagtaacgacgaaagtgaggccgccgggcttaagaagtcccattcctctccaagcctcaatccagatacatcccccataactgccaaggtcaagaggaacgtgagcgaacggaaggatcacaggcccgaaactccttcaattaagcagaaggtaacatag

SEQ ID NO: 199740 - DNA, 810 bp, synthetic construct
  misc_feature 1..810: note = Description of Artificial Sequence: Synthetic coding sequence
  source 1..810: mol_type = other DNA
atgatcggcgtgaacagcgtgcagagcgccagcaaggtgcgggtgagaacatctggcagcgtaaagtattcgcgcgaggactcaatacggcgtcagagtcaccggtcgaaatccatgaagatatctaatagcagcgaattctccgccaaagagaacaaggctctgtataatagcatcaagaatgagaagcttgaatgggccgtggacgacgaagagaagaaaaagtcaccttcagaatctacagaagagaaggctaatggaacccatcctaagactatctcacgcataggttccaccacaaacccgtttctggatattcctcatgacccaaacgcggctgtgtacaagtccggattcctcgcaaggaagattcacgccgatatggacggtaagaaaacacctaggggcaaaagaggttggaagacattctacgctgtcctcaagggtacggtactgtacttacagaagcacgagagcaaactaaagcaaatcacaactgagctggccgagcatagaagttatccgccggacaagaaggttaaggctaaggacgtggatgaatataagttgaaagaccactacctggagttcgagaaaacccgctatgagatgtatgtttccattctaaaggagggtggaaaggagttgctttctaacgacgagtccgaggccgccggattaaagaaatcacattctagcccatcactgaatcccgatacgagcccaattactgcaaaagtcaagcgcaacgtgagcgagcgaaaagatcaccgaccagagactccgtcaatcaaacaaaaggttacatag

SEQ ID NO: 199741 - DNA, 3150 bp, synthetic construct
  misc_feature 1..3150: note = Description of Artificial Sequence: Synthetic coding sequence
  source 1..3150: mol_type = other DNA
atggagggccggagcgccgccgccgagaccttcgtgtgggtgaacaacgcatcagcacattctcagagcgtggcaaaggccaagtacgagttcctctttggaagatcagaaggaaaagctcccgacacatcagatcatggagggtccaccctcctgcccccgaatgtgacaaacgaattccctgagtatggcactatggaggagggaggcgaaggcctacgcgcttcactggaattcgatggcgaggcattgccttgccatcctcaggaacaacagggcgtgcagcctttgaccggatgccatagcggactcgattccgtcacggaaggacctaaagatgtgagagaggctccctctcagagccatctcaaggaacagtccctccagcccatcgatagtctaatttcagccttaaaggctactgaggcccggattattagcggtaccctgcaagctacaaaagtccttgaccaggatgcagtatcgtctttctccgtgcagcaggtcgagaaagaattggatacagcgagtcgtaagactcagcgggtgaacaaaacacttccagcgggccaaaagaatctccctgagatccccctgagtgctgaagtgacaaccgaggaaagtttctatcttagcatccagaaggacctgacagcccttctgaccggcgacacacaggccgaaatctcacaaatcatgaataatgggaggaaaggggcggtttgtgtgcaggagcccagctgtcctttggcctcccttggctctagcgctgtcacgtgtcattcagctggttctgtcggatttctaaaagaacagaggtctgcgcttggtcgagaacaccctggaggatgcgacagaagttcctctatggggcggcctgggcgggtgaaacacgtagagtttcagggagtggagattttgtggacaggtggcgataaaagagagacccagcacccaatcgacttcgagacaagtctccaacggaccgctagccctgattccaaagagtcatctaaagtgcctcgccacttgatctcgtcggccggtctctgtaactcttccagcctcactgaaaacgtgtgggacgagtcctggaaggctccttcagagagaccaggcacctcctccggcaccttcagtcccgtgcgcctggacgaatctggcgaagacgaagtgttccttcaggaaaacaaacaacacctcgagaagacacctaaacctgaaagagatagagagcgtatctccgagcaggaggagcatgtgaaaggtgaagatgaggatattttggggccggggtacactgaggattctacggatgtgtattcaagtcagtttgagactatactggacaatacgagtctgtattacagcgccgagtcactggagaccctctacagcgaaccagatagctattttagctttgaaatgccacttacacccatgattcagcagaggattaaggagggtggacagttcctggagcgaacctccgggggagggcaccaagatatcctcagtgtgtcggccgacgggggtatcgtgatgggctacagttcaggtgtgactaatggcctgaacgatgcaagtgattcaatatacacgaaaggcacacctgagatcgcattctggggttccaacgcaggggtgaagacgaccagacttgaggctcacagcgagatgggctccacggagatacttgagaaggaaacccctgaaaatctatccaatggcacctcgagcaacgtcgaggcagctaagcgtctggcgaaaaggctgtaccaactggatcgtttcaagagatctgatgtggctaagcacctgggcaaaaataatgagttttccaagttggttgcagaggaatatctgaagttttttgactttaccgggatgactctcgaccagagcttacgatacttctttaaagccttttcgctcgtgggcgagacccaggagcgtgaacgggtactgatccattttagtaatcggtacttttactgtaaccccgatacaatagctagccaagatggggtgcactgtctgacctgcgccatcatgctgttgaacactgacttgcatggtcatgtgtcgaacatcgggaagaagatgacatgccaggagtttatagcgaaccttcagggcgttaacgagggtgtggatttcagtaaggacctgctaaaggcgctctataatagtattaaaaacgaaaaactggaatgggcagtcgacgacgaagagaaaaagaaaagtcccagcgaaagcacagaggagaaggccaatgggacccatcccaaaacgatatctagaatcgggagcaccacaaaccctttccttgacataccccatgacccaaatgccgccgtgtacaaatctggttttcttgcacgcaagatccacgctgatatggatgggaaaaagacacctaggggtaaacgcggctggaaaacattttacgccgttctcaaggggactgtgctttatttgcagaaagatgaatacaagccagaaaaggccctgagcgaagaagacctgaagaacgccgttagcgtacaccacgctctggcaagtaaggctacagactatgagaaaaagccgaacgtctttaagttgaagaccgcggactggagagtcctcctgtttcagacacagagtccagaggaaatgcaggggtggataaataaaattaattgtgtcgccgccgtattcagtgctccccctttccccgctgccatagggtcacagaagaaattctctcgccccctgttgcccgcgacaaccacaaaactaagccaggaggaacagctgaaaagccatgaatctaaattaaaacaaatcactacagagttggctgagcaccgatcctaccccccggataagaaggtgaaggcaaaggacgtcgacgaatataagctgaaagatcactatctggagtttgagaagactcgatacgagatgtacgtgtctatccttaaggaaggagggaaagaacttctcagcaacgatgagagtgaagcagccggactgaagaaatcccatagcagcccctcactgaaccctgatacatcccccatcaccgccaaagttaaacggaacgtgtccgagagaaaggatcaccgacctgaaacacctagcatcaaacagaaggtgacatag

SEQ ID NO: 199742 - DNA, 3171 bp, synthetic construct
  misc_feature 1..3171: note = Description of Artificial Sequence: Synthetic coding sequence
  source 1..3171: mol_type = other DNA
atgatgggcgactaccggctgcccgaccacccccagcccatggagatcctgaatctttacctgggagactccctggagccacacccaggcgagtgtcctcgcgagacctgctcacacgaggaccctccagagccctttgaagagcagacctgggctacagatcctcctgagccgactcggcagaatgtgccaccttggggcagcggtgttgagctgacacacctggggtcatgggtccatcaggatggactggaaccgtgtcaagaacagacaagggccaccgaccctcctgagagcaccaggcaagacgctcccccatggggctcgggcgtagagctgacgcatttgggatcccccagcgctcaaagggaacataggcagaatacggcatcacccgggagcccagtcaacagtcacctgccagggagccccaaacaaaataggtcgacatcaactcaggttgtgttttgggcgggcattctgcaagcccagatgtgcgtactggacctggaagaggaattggagaaaaccgaagggttgaaggccggtctgaaatgctgtcttcctactccgcccgtggatttacctggcgatacgggactgcactcaagcccccccgagaatgaagattcaggggaagattcgtcggagccggagggtgaaggccaagcttggcttcgcgagggaacaccagattcctcaccccaatggggagcagaggaggaatcaatgtttttctccaatccactatttctcgcctcaccttgttccgagaatagtgcatccggagaatgctttagctggggtgccagcgattcgcacgccggcgtccgcacaggccctgaatctcctgccacactagagcctccacttcctgaggacactgtgctgtgggaactggaatccgaacctgatctgggcgatggggccgctataagtgggcactgtaccccaccatttcccgtgcccatttacaaaccacactctatttgctgggctagcgtggccgccgcagaaggggctcccgccgccccgccaggtcatggagaaagcgagggagaccgactcgggccagccccgagtgcagcaccatgcgtcgatgaagctcttacatgggagagcggctgtgtggggtctgatttagggcctgccgcccaccctgttcagccctgggcatctttaagccctgagggttggcagcgcggcggtcctttttggccccaggtcacattaaattcacaagatagagacgaacgcgagggtggtcacccgcaggaatcactgccttgcacactggcaccatgtccatggcgcagtccggcctcttcacctgaaccttcatcccccgagagcgaatccagaggacccggcccacgcccttcgccagcgtcctctcaagaaggatcccctcagctccaacaccattcgtccggaatcctccccaagtggaccctcgatgctagtcagtcgtctttattagagactgatggcgagcagccatcatccttaaagaagaaagaggctggagaagctccaaaaccaggcgaagaagtaaagagtgaaggcactgcccggccagcggagactggcgacgtgcagcctgatattcacctcacatcggcagaacacgagaacctgagaacacctatgaactcttcctggctgcccggatctcctatgcctcaggcccagagcccagaagaaggtcaaaggccccctgcaggagacaagctcgctaatggcgttaggaataacaaggttgcttggaatttagccagtaggctgtaccggttggaaggcttcaggaaatccgaggttgctgcctaccttcagaagaacaatgatttctcccgggccgtcgcagaggaatatcttagcttcttccaatttggaggccaaagtctcgaccgggccctgagaagtttcttacaggctctggttttgagtggcgagacccaggaaagagagcggattttatatcagttcagccggcggttccatcactgtaaccccggcatcttcccgtctgtggactccgtccacaccctgacctgcgccattatgctgttgaatactgacctccacggtcaaaacatcggaaagagcatgtcctgtcaggaattcatcaccaacctgaacggactgcgcgacggggggaattttcccaaggagctgctcaaagcactctactggagcattcggagtgaaaagctggaatgggccgttgacgaggaggatacggctcggccagagaaggcccaaccgagtcttccagccgggaaaatgtcaaagcccttcttacagctagcccaggatccaaccgtcccaacctacaaacagggcattctggccagaaagatgcaccaagatgccgacggaaagaaaactccttggggcaaacgcggatggaagatgttccatacccttctgagaggtatggtcctctacttcctgaaacagggtgaggatcactgcctggagggggagtccctggtgggccaaatggtggacgaaccagtgggcgtccatcatagtcttgcgactcctgctacacactacaccaagaagccccacgtgttccaattgagaacagccgattggcgcctgtacctctttcaggctcctaccgccaaggaaatgtcaagttggattgcaaggattaatctggcggctgccacccacagcgctccaccgtttcccgctgcggtgggttctcaacggcggttcgtaagacctatcctaccagttggaccagcacagagctccctcgaggaacagcatcggagtcacgagaactgtctcgatgcggcggcagatgaccttctggatttgcagcggaacctgcccgaacgtcgaggcaggggtcgcgagctggaggagcacaggctgcgaaaggaatatctggagtatgagaagactcgctatgagacgtatgttcaactgttagtggcgagactccattgcccgtctgatgccttagacctttgggaagagcagctcggtcgagaggctggaggtactagagagcctaaactgagcttaaagaagtcccacagcagcccttctttgcaccaggatgaagccccaacaactgccaaagtgaagagaaacatctctgaaaggcgaacttacaggaagatcattcctaagaggaacagaaaccaactatag

SEQ ID NO: 199743 - DNA, 1152 bp, synthetic construct
  misc_feature 1..1152: note = Description of Artificial Sequence: Synthetic coding sequence
  source 1..1152: mol_type = other DNA
atgccctacgtggaccggcagaaccggatctgcggcttcctggacatagaagaaaatgaaaactccggaaagttcctccgacgttatttcattctggataccagagaggactcattcgtgtggtacatggacaacccccagaatctcccatcaggcagcagtcgtgtaggagctatcaaactaacttacatctctaaggtcagcgacgccacgaagctgcgaccaaaagccgagttctgcttcgtcatgaacgcagggatgcgcaagtacttcctgcaagctaatgatcagcaggatctggtcgaatgggtcaatgtgctgaacaaggctattaaaattactgtgcccaagcaatctgattcacaaccgaactccgataacttatctcggcacggtgagtgtggaaaaaagcaggtgtcgtaccgaaccgatatcgttgggggcgtgcccatcattacccccacccagaaggaagaggtaaatgagtgcggggaatcaatcgatagaaacaatctcaaacgctcacagtcccatctgccttactttacccccaaacctccacaggacagcgccgtgatcaaggctggatactgtgtcaagcaaggtgccgtgatgaaaaattggaagcgtagatacttccagctagatgagaacactatcggatactttaaaagtgagctcgagaaagagcctctaagggtgatcccacttaaagaagtccataaggttcaggagtgcaagcagtctgatatcatgatgcgggataacctgttcgagatcgtgaccacaagcaggaccttttatgtgcaggccgacagtcctgaggagatgcattcttggattaaagccgtttccggcgctatcgtcgctcagcggggcccaggccgtagtgcttcgtctatgcgccaggccagacgactatcaaacccctgcatccagcgctccattcctccagtactgcagaatccaaacactttatcagtgcttcctacacagcccccgcctcctcacattcctcagccgttagctgccaccctctggtctcagccattaccatggcggtcggaggatttcacgtctctgctgccacgatcttcccaaggcacatcacggagcaggctttcattgcaggaaaaccagctcccgaagtag

SEQ ID NO: 199744 - DNA, 1152 bp, synthetic construct
  misc_feature 1..1152: note = Description of Artificial Sequence: Synthetic coding sequence
  source 1..1152: mol_type = other DNA
atgccctacgtggaccggcagaaccggatctgcggcttcctggacatcgaagagaatgagaatagcggaaaattcctaaggcggtatttcatactagacactagagaggattcattcgtctggtatatggacaatcctcagaatctgccctccggctcttcaagggtcggcgccattaagcttacctatatttcaaaagtgtctgacgccacaaagcttagacccaaggctgaattctgtttcgtgatgaacgctgggatgagaaaatactttctccaggctaacgaccagcaggatttagtcgagtgggtcaacgtgttaaataaggctattaagattaccgtcccaaagcagagtgatagtcagcctaattctgacaacctgtcccggcacggtgagtgcggtaagaaacaggtatcatataggaccgatatcgtgggtggcgtccctatcattacacccacacaaaaggaggaagtaaatgaatgtggcgagtctatcgatcgaaataatcttaaacggagccagtcgcatctaccatattttacaccaaagccaccccaggactcggccgtcattaaagctggatattgcgtgaaacagggcgccgtgatgaagaattggaaacgccggtatttccagctggacgagaataccatcggatacttcaaatcagaactggagaaagagccactgagagtcatcccacttaaggaggtgcataaggtccaggagtgcaagcagtccgatataatgatgcgtgataatttgttcgagatcgtcacgactagcagaacattctacgtccaagcggactcaccggaggaaatgcacagttggatcaaggccgtcagtggcgcaatcgtcgcgcagcggggccccggcagaagcgcatctagcatgaggcaagctcgacgcctcagcaacccatgtattcagaggagcattccgccagtgctccaaaaccccaatacactcagcgttctgccaactcagccacctcctccacatataccccaaccactggctgccacactgtggagtcagcctttaccctggaggagcgaggactttacctctcttctccctcgatcctcacagggcacctcgcgctctcgtctgtctctccaggagaatcagcttcctaagtag

SEQ ID NO: 199745 - DNA, 1215 bp, synthetic construct
  misc_feature 1..1215: note = Description of Artificial Sequence: Synthetic coding sequence
  source 1..1215: mol_type = other DNA
atgccctacgtggaccggcagaaccggatctgcggcttcctggacattgaggagaatgagaactctgggaagtttctgagacggtactttatactggacacccgagaagattcatttgtgtggtacatggataatccccagaacttgcctagcgggtctagccgggtgggagccatcaaactaacatatatctctaaggtatccgacgccaccaagctgcggcctaaggcagagttttgtttcgtcatgaatgcggggatgagaaagtatttccttcaagctaacgaccagcaagaccttgttgaatgggtgaacgtgttgaataaagccatcaagatcacggtgccgaaacaaagcgacagtcagccaaacagcgataacttgagcagacacggcgagtgtggcaagaagcaagtaagctaccgcaccgacatagtaggcggcgtacccatcatcactcccactcagaaggaggaggtaaacgagtgtggggagtctattgataggaataacctgaaacggtcccagtctcatcttccatactttacacctaagccaccgcaggacagcgccgtgattaaggcggggtattgcgttaagcagggtgcagtgatgaagaactggaagcgtcggtacttccagctggatgaaaacactatcggatacttcaaaagcgagttggaaaaggaaccactccgcgttattccgcttaaggaagttcacaaggtccaagaatgcaagcagtctgatattatgatgcgggacaacctctttgaaatcgtgaccacatccaggaccttttacgtgcaggctgattcgcctgaggagatgcattcttggatcaaggcagtcagtggagccatagttgcgcagcgcggcccaggcaggagtgcgtcatctgaacatccacccggaccatccgaatctaaacatgccttccgcccaactaatgccgccacggcgacttcacattccacagccagcaggtcaaactcactggttagtacatttactatggagaaaagaggcttctacgagagccttgccaaggtaaaacccggcaactttaaagtgcagaccgtatctcctcgagagcccgcctccaaagtaactgagcaagctcttctcaggcctcagtcgaagaacgggcctcaagaaaaggactgtgacctggtcgatttggatgatgcatcattgccggtctcggacgtttag

SEQ ID NO: 199746 - DNA, 345 bp, synthetic construct
  misc_feature 1..345: note = Description of Artificial Sequence: Synthetic coding sequence
  source 1..345: mol_type = other DNA
atgccctacgtggaccggcagaaccggatctgcggcttcctggacattgaagaaaacgagaactccggaaaattcttgcgaagatattttatcctggatacacgcgaagactcgttcgtttggtacatggacaacccgcagaaccttccaagcggatcttcccgggtaggcgccatcaaacttacttacatttcaaaggtcagtgatgcaaccaagctgaggcccaaagcagaattttgttttgtaatgaacgctggaatgagaaagtactttttgcaggctaatgatcagcaggaccttgtcgaatgggtgaatgtgctaaataaggccataaagatcacatag

SEQ ID NO: 199747 - DNA, 1215 bp, synthetic construct
  misc_feature 1..1215: note = Description of Artificial Sequence: Synthetic coding sequence
  source 1..1215: mol_type = other DNA
atgccctacgtggaccggcagaaccggatctgcggcttcctggacatcgaggaaaacgaaaatagcggtaaatttctgcggcgttacttcattctggacacaagggaggatagctttgtgtggtatatggataatccacagaaccttccttctggttcatccagagttggcgctattaagcttacgtatatttctaaagtctctgacgccaccaagctccggccaaaagccgagttctgttttgtgatgaacgccgggatgcggaaatatttcttgcaggcaaacgatcagcaagacctggtggagtgggtgaatgtgctgaacaaagccatcaagatcacagttccaaagcagtccgattcccagccaaattccgataatctgagtcggcatggagaatgtggcaagaaacaggtatcatatcgaacagacattgtgggaggcgtgccaattattacccccactcaaaaggaggaagttaacgaatgcggggagagcattgaccggaacaatctgaagcgctctcagtcacatttaccctacttcactcccaagcctcctcaggattcagccgtgattaaagcgggctattgcgttaagcagggcgctgtaatgaaaaattggaaaagacggtattttcagcttgatgagaacactatcggctattttaaaagcgaactggagaaagagccgttgcgggttattcccctgaaagaagtgcacaaagtgcaagagtgcaaacaatcagacatcatgatgcgggataatctgtttgagattgtgactacctctcggacgttttacgttcaggcggactcaccagaagaaatgcactcctggatcaaggctgtgtcaggagccatagtcgcacagcggggccctgggaggtctgcgagctccgagcatccacccggcccgtccgaatctaagcatgcttttaggcctactaatgctgcaactgcgacatctcacagcacagcaagcagatccaattctctcgtttccacctttacgatggaaaagcggggattttacgaaagtctagcaaaggtcaaacccggaaactttaaagtccagactgtgagcccacgtgaacccgccagtaaagtcacagaacaggctcttctccgacctcagtctaagaacggtccacaggaaaaagattgcgacttggtggatcttgacgacgctagcttacccgtaagcgatgtgtag

SEQ ID NO: 199748 - DNA, 1215 bp, synthetic construct
  misc_feature 1..1215: note = Description of Artificial Sequence: Synthetic coding sequence
  source 1..1215: mol_type = other DNA
atgccctacgtggaccggcagaaccggatctgcggcttcctggacatcgaagagaatgaaaattcggggaaattcctccgtagatacttcatcttggataccagagaggattccttcgtgtggtatatggataatcctcagaacctcccctccgggagttctcgtgtgggagccattaagctcacctacattagcaaggtgtccgacgctaccaaactaaggccaaaggctgagttttgttttgtaatgaacgccggaatgcgaaagtactttttacaggcgaatgatcagcaggacctagtggaatgggtcaatgtgctgaataaagcaattaagatcacagttccaaagcagtctgattctcagccgaacagcgacaacctcagccgccacggtgaatgcggaaagaagcaagtgagttataggacagatattgtgggtggagtgccaatcattacacccacacagaaggaagaggtgaacgaatgtggggagagcattgacagaaacaacctgaagcgtagccagagccatttgccctattttactccaaaaccaccccaagattctgccgtcataaaggctggatattgtgtgaaacaaggggctgtgatgaagaactggaagaggagatacttccaattagatgagaatacgatcggatattttaaaagtgaattggagaaagagccccttagagtaataccactgaaagaagtccataaggtccaggagtgcaagcagtccgatattatgatgagggataacctgttcgaaattgtgacaacatcgagaaccttctacgtgcaggccgactctcccgaggagatgcatagttggatcaaagcagtctctggcgccatcgtggctcagcgcggccctggcagaagtgcgtcatctgagcacccgcccggtcccagtgagtccaaacacgcatttcggcctaccaacgctgcaacagccactagtcactcgactgcatcccgaagtaactctcttgtatcaactttcaccatggaaaaacgcgggttttacgaaagtttggcaaaggtgaaacccggcaacttcaaggttcagacagtgtcgccccgggagcctgcctcgaaggtcaccgagcaagcgcttctgaggccacagagcaagaacggtccacaggagaaggactgcgatcttgtcgacctggatgatgcatctttacccgtgtcagatgtgtag

SEQ ID NO: 199749 - DNA, 1005 bp, synthetic construct
  misc_feature 1..1005: note = Description of Artificial Sequence: Synthetic coding sequence
  source 1..1005: mol_type = other DNA
atgccctacgtggaccggcagaaccggatctgcggcttcctggacatcgaggagaacgaaaactctggaaaattccttcgtcggtatttcattcttgatacccgggaagacagttttgtgtggtacatggacaatccccagaacctccctagcggctctagccgggttggagccattaagttaacctacattagcaaggtatccgacgccacgaagctgaggcctaaggcggagttttgtttcgtaatgaatgcagggatgagaaaatatttcttgcaagccaatgatcagcaggacctggtagagtgggtcaatgtgctcaataaggcaatcaagatcactgtgcccaagcagtcagattcgcaacccaattcggacaatttgagccgacacggcgagtgcggcaaaaagcaggtgagttaccgaacagacatagtcgggggggttcccattatcacaccaactcagaaggaagaggtcaacgaatgtggagaaagcatcgaccggaacaatcttaagcgatcccagtctcacctgccgtattttaccccgaagccaccccaggactccgcagtaattaaagctggctactgtgtgaaacagggtgctgtgatgaaaaactggaaacgacgctactttcagctggatgaaaacacaatcgggtactttaaatctgagttagaaaaggagccattgcgcgttattccattgaaggaggtgcacaaagtccaggagtgtaaacaaagcgatataatgatgcgagacaatttatttgagatcgtgactacgtcgcggaccttttacgtacaggctgactcaccagaggaaatgcactcttggatcaaggccgtatccggcgctatcgtagcgcagaggggtcctggcagaagcgcgtctagcatgcgccaggctcggagattgtccaatccctgtatacagcgctacaccagcagagcaggagaatgcagcacatatgtgggaagccacgctaatgtcccttcctag

SEQ ID NO: 199750 - DNA, 1278 bp, synthetic construct
  misc_feature 1..1278: note = Description of Artificial Sequence: Synthetic coding sequence
  source 1..1278: mol_type = other DNA
atgccctacgtggaccggcagaaccggatctgcggcttcctggacatcgaggaacatgagaactcgggcaaattcctgagaagatacttcatccttgatacgcaagccaactgccttctttggtatatggataacccacagaacctggccatgggagccggtgctgttggggctctgcagttgacgtacatttccaaagtctctatcgccactccaaaacagaaacctaagactccgttctgctttgtcataaatgcacttagtcagcggtatttcctgcaggcaaatgaccagaaagacatgaaggattgggtcgaggcgcttaaccaggcatccaaaatcaccgtgcccaaaggcggtggcctcccaatgacaaccgaggtccttaaatcattggcagccccccccgcgctggagaagaagccccaggtagcctataaaactgaaatcattggcggggttgtggtgcacactcctatcagccaaaacggcggggatgggcaggaaggttctgagccaggaagccacactatcttgagacggtcccagtcttatattccaactagtgggtgtagggcgagcacgggccctcctcttattaagagcgggtactgtgtgaagcagggtaatgttcgcaagtcctggaaacgcagatttttcgcattggatgattttacgatttgctactttaagtgtgagcaggaccgggagcccctccgcacaatctttctcaaagacgtgttaaagacacatgagtgcctggtcaaaagtggtgacctcctcatgcgcgataacctgtttgaaatcatcaccagcagtagaaccttctatgtccaggcagactctcccgaagacatgcatagctggataaaggaaattggggccgccgtccaggccctgaaatgccatccacgggaaacctcattcagccggtccattagtctgactcgaccagggagctcatccctgagtagtggccccaactcaatactgtgtcgagggcgcccaccactagaggagaagaaggctttgtgcaaagcacctagcgtggcttcaagctggcagccctggacccctgtgccccaggccggcgagaagctcctgccacccggggacacaagcgaggattctttgtttactccacgcccgggtgaaggcagtgccccgggggtcctccccagcagcaggatccggcaccgcagtgagccacagcacccaaaagagaagccattcatgttcaacttagacgacgagaacattagaacgtccgatgtctag

SEQ ID NO: 199751 - DNA, 348 bp, synthetic construct
  misc_feature 1..348: note = Description of Artificial Sequence: Synthetic coding sequence
  source 1..348: mol_type = other DNA
atgccctacgtggaccggcagaaccggatctgcggcttcctggacattgaggagcatgaaaacagcgggaagtttctgcggcgatactttatcttggatactcaggctaactgtctcctatggtatatggacaaccctcagaatctggcaatgggggctggtgccgtaggcgccctccagttgacctacatatcaaaagtcagtatagcaacccctaagcagaaaccaaaaactccattctgtttcgtgatcaacgctctctcacagcggtactttctgcaagccaacgatcagaaagacatgaaggactgggtagaagcactaaaccaggcatccaaaatcacctag

SEQ ID NO: 199752 - DNA, 1128 bp, synthetic construct
  misc_feature 1..1128: note = Description of Artificial Sequence: Synthetic coding sequence
  source 1..1128: mol_type = other DNA
atgggcgccggcgccgtgggcgccctgcagctgacctacatcagcaaagtgtccatcgcaacaccaaagcagaaaccaaaaacccctttctgcttcgtcattaatgcactctcccaaagatactttttgcaagcaaacgatcagaaggacatgaaagattgggtggaggcactgaatcaggctagtaagatcaccgtcccaaagggcggaggtctgcctatgaccactgaggtgcttaagtccctggccgcacctccagcactggaaaagaagcctcaggttgcttacaagacggaaatcattggcggtgtcgtcgtgcacacaccaattagccagaatgggggggatggccaggagggaagcgagcctggatcccataccattctccgaaggtctcaaagttacattcctacaagtggctgccgagctagcactgggccccctttgatcaaatctggctattgcgtcaaacaggggaacgtacgcaagagttggaaaaggagattcttcgcactcgatgattttacaatatgctatttcaaatgcgaacaggacagagaacctctgaggacaatctttctgaaggacgtgctgaaaactcatgaatgcttagtgaagagcggcgacctgctcatgcgtgataatttattcgagattatcaccagctccagaacattttatgtgcaggctgattcccccgaagatatgcactcttggatcaaggaaattggagcagccgttcaggctctgaaatgtcatccacgggaaacaagtttcagcagaagtatttctctgaccaggcccgggagctcatctctcagcagcggccctaattctattctatgccgagggcgcccgcctcttgaggagaaaaaagctctctgcaaagccccctccgtggccagctcctggcagccctggacaccagtgcctcaggccggcgaaaagctacttcctcccggtgacacgagtgaagactccctgttcacccctaggcctggggaggggagcgctcctggtgtgttaccaagttctaggatcaggcaccgatcggagccacagcaccctaaggagaaaccttttatgtttaacttggacgatgaaaatattcgcacatccgacgtatag

SEQ ID NO: 199753 - DNA, 4083 bp, synthetic construct
  misc_feature 1..4083: note = Description of Artificial Sequence: Synthetic coding sequence
  source 1..4083: mol_type = other DNA
atgagccggcagagcaccctgtacagcttcttccccaagagccccgccttgtctgacgcaaataaggcctcagctagggcttctagggaaggcggcagggctgcagcggcccctggcgcgtctccttctccgggtggggatgcagcttggtccgaggccgggccgggcccgaggccattggcacgctccgcttcccctcccaaagccaagaatctcaatggtggtctgcgcaggagtgtcgcccccgctgctcccacctcttgcgatttctctcctggagatttggtttgggccaagatggagggttacccctggtggccctgcctggtttataatcacccattcgacggcacctttatcagggagaagggcaagtctgtgagagtgcacgtgcaatttttcgatgactctcctacacggggttgggtgtccaaaagactgctcaaaccgtatacagggagtaaatccaaagaggctcaaaagggcggccatttttatagcgccaagccagaaattcttcgcgctatgcagagggcagacgaggcgctgaacaaagataagataaagaggctcgaactggcagtgtgtgatgagcccagcgaacctgaggaggaggaggaaatggaagtggggacaacctatgtcactgacaaatccgaggaagacaatgaaatcgagtcagaagaggaggttcagcccaaaacacagggcagtcggcgatcgtctcggcaaattaagaaaagacgagtgatctcagactcggaatccgatatcggcggatccgacgtggaattcaaaccagatactaaggaagagggctctagcgatgagatcagcagtggcgtgggtgacagcgagtctgagggtctcaactccccagtgaaggtggcacgtaaacgcaaaagaatggttaccggtaatggatcattgaagaggaagagcagccgcaaagagacccccagcgcgacaaaacaggccaccagcatatcttccgaaactaagaacaccctaagagcattcagcgcccctcaaaattctgaatcccaggctcacgttagtggcggtggcgacgactccagtcgcccaaccgtgtggtatcacgagactctcgaatggctaaaggaggaaaagcggcgagatgagcatcgccgccgccccgaccacccagacttcgatgccagtacgctgtatgtgcccgaggacttcctgaattcatgtacccccggcatgcgaaaatggtggcagattaagtctcagaatttcgacctggtgatatgctataaagtgggcaagttttatgaactgtaccacatggatgccctgattggggtgtcggagttaggtctcgtgttcatgaagggtaattgggcacattccggatttcccgagatcgccttcggccgctatagcgactcccttgtccaaaagggatacaaagttgcgagggtcgaacaaaccgagaccccggaaatgatggaagcccgctgccgcaagatggcccacatcagcaagtacgatcgcgttgtaaggagagagatttgcagaatcataacgaaaggaacgcagacctactctgtcctagaaggtgacccttctgaaaattattcaaagtatctcctgtctctgaaggaaaaggaagaggatagcagtggccacactagagcttatggagtgtgctttgtcgatacctctctgggtaagtttttcataggacagttcagtgatgacaggcactgttcccggttcaggactcttgttgcccattatcccccagttcaagtgttatttgagaaagggaatctgtccaaggaaaccaaaaccatcctgaagtctagcctctcatgctccctccaggaaggattgataccggggtcacaattctgggatgcctccaagaccttgagaacgctgctcgaagaggaatatttccgagagaagttatctgatgggattggcgttatgttaccccaggtgctgaaggggatgacaagcgagtcagatagtattggcctgacccccggggagaagtctgagctggcccttagcgctctgggggggtgtgtattttatctcaaaaagtgccttatagatcaggaactcctgtcaatggcgaactttgaggaatacataccactggatagtgatacagtctccaccacacgcagcggagcaattttcacaaaggcctatcagagaatggtgcttgacgccgtcaccctgaataatttagaaatctttctaaatggcacaaatggttctactgaaggaactctcctcgagcgggtggatacttgccacacaccattcggaaagcgccttttgaagcagtggttgtgcgcacctctttgcaatcactacgccatcaacgaccgcttagatgcaatcgaagacctgatggtggtgcccgacaagatcagcgaggtcgtcgaactgttgaagaaactgcctgatcttgagaggctcctcagcaagatacacaatgtgggctccccacttaagagccaaaatcatcccgactctcgagccattatgtacgaggagacaacctactcaaagaaaaaaattattgacttcctgagcgcactcgaaggcttcaaagtgatgtgcaaaatcattgggattatggaggaggttgctgacggattcaagagcaagatcttaaagcaagtgatcagtcttcagaccaaaaaccccgaaggccgatttcccgatcttacagttgagttaaaccgctgggatacggcatttgatcacgaaaaggctcgaaagactggccttatcacaccaaaggctgggttcgattctgattatgatcaagcactagccgacattcgagaaaacgagcaatcacttcttgagtacctggaaaaacagagaaaccgcattggttgtaggactatcgtgtactggggaatcggcaggaaccggtatcagctggagattccagagaatttcacaacacggaacctccctgaggaatatgaattgaaaagcaccaagaaaggctgtaaacgctactggacaaagactattgagaagaagttagctaacctgataaatgcggaagaaaggagagacgtgtccttgaaagactgcatgcgcagactgttctacaattttgataaaaactacaaagactggcagtcagctgtcgagtgtatagccgtgctggatgtgctgctttgcctggccaactattcacggggaggcgatggcccaatgtgccggcccgtgatactgcttcctgaggacactcccccgtttcttgaacttaaaggcagtcgccacccgtgtatcaccaagacattttttggggacgacttcattcccaacgacattctgattggctgtgaagaagaggagcaagaaaatgggaaggcctattgtgttctcgtaaccggcccaaacatgggggggaagtccaccctgatgcgacaggccggcctgctggcagtgatggcccagatgggctgctacgtccctgcggaagtgtgccggttaactcccattgaccgggtgtttactagactcggagcgtcggatcggatcatgtctggagagtcgacattctttgtggaactgtccgagactgctagcattttaatgcacgccaccgcccacagtctcgtcttggtcgatgaactgggcagggggactgctactttcgacggaaccgcaattgccaacgctgtggtgaaggaactggctgagactataaagtgtcggacactgttttccacacactatcactccctcgtggaagattattcacagaacgtggctgtaagactgggccatatggcgtgcatggtcgaaaacgagtgcgaggacccaagtcaggaaaccatcactttcctgtacaaattcatcaaaggggcctgccctaagtcctacggctttaacgcggcccgtctggccaatttgccagaggaagtgattcagaagggacataggaaggcccgcgagtttgagaaaatgaaccagagcctcaggctttttcgggaggtctgtctggcctccgaacgatcaaccgttgacgcagaggccgtgcataaactccttacattaattaaggagctgtag

SEQ ID NO: 199754 - DNA, 2340 bp, synthetic construct
  misc_feature 1..2340: note = Description of Artificial Sequence: Synthetic coding sequence
  source 1..2340: mol_type = other DNA
atggagggcagccggccccggagcagcctgagcctggccagcagcgcctccaccatcagctcgctctcatccctcagccctaagaaacctacacgggctgtgaataagattcatgcattcggaaaaagaggcaacgctttacgtagagaccctaaccttcccgtgcacattagggggtggctgcataaacaggacagcagtggtttgagactatggaaacggagatggtttgttctgtccggccactgtctgttctattataaggattcacgcgaggagtctgttctagggagcgtgctgcttccatcatacaatataaggccagacgggcctggagcacctaggggtaggcgttttactttcaccgccgaacatccaggtatgcggacatatgtgctggccgcagatactcttgaagatctccgggggtggctgagagccttgggtcgggcatcaagagccgagggggatgattatggacaacctagatctcctgccaggccacagccaggagagggacccggcgggcccgggggacccccggaggtcagtcggggagaggaagggcgcatctccgagtctcccgaggtcaccaggctctcacgcggccggggacggccccgcctgttgactccaagcccaaccacggatctgcactctggactccaaatgaggagagctaggtcgcccgaccttttcacccctctttcccggcctcctagccccctcagcctgccacgacctcgatctgcccccgcacggcgccctcctgccccaagtggagatacagctccccctgctcgaccgcacaccccattatctaggattgacgtacggccccctctcgactggggaccccagagacagaccctctctaggccacccactccacgcagaggaccaccttctgaggctggtggtggcaaaccaccccgcagcccacagcattggagtcaagaacctagaacccaggcacacagcggtagcccaacatacctccagctaccacctcgaccgcccggcacgcgcgcttctatggtgcttctacctggaccaccactggagagtacatttcaccagtctttagaaactgacacactactcacaaaattatgtggccaggatcgattactgcgtcggctccaggaagaaatagaccagaaacaggaggagaaggagcagctagaggctgcattggagctcacaaggcagcagttggggcaggccacaagagaagccggtgcaccgggaagagcctggggacggcagcgcttattacaggaccggctcgtgagtgtgagagctacactttgtcacttaacacaggaacgcgaaagagtctgggacacttattcaggactggagcaggaattaggtacactcagggagaccctagaatacctcttgcatcttggaagtccccaggatcgagtgtctgcccagcagcagctgtggatggttgaagacacccttgccggcctcgggggcccgcagaaacctcctccccatacggagcccgactctccctcccccgtactgcagggtgaggagtcctccgagcgggagtccttgcctgaaagtctggaactatcctccccacgcagccccgagactgactgggggcgccctccgggtggagataaggacctggcctccccgcacctgggcctggggagccccagagtctcaagggcgtcctcaccagaaggcaggcatctcccttccccgcaactcggcaccaaggcccccgtcgcacggccccggatgtccgcccaggagcagctggagcggatgcgacgtaatcaggagtgcggacgcccatttcccaggcctactagcccaaggctcctgacccttgggagaacgctgagtcctgcacgacgacagcccgatgtggagcagcggccagtcgtgggacactccggggcgcagaaatggctgaggtcaagcggatcctggtcctcaccacgcaatactaccccgtacctgccaacttctgaaggacacagggagcgcgtattaagcctttcccaggcactggccactgaagcctcccagtggcaccgtatgatgaccggcggcaatttggactctcaaggagaccctttgcccggggttcccctgcccccaagcgatcccactaggcaagaaaccccacccccccgaagccctccagtcgctaattcaggatctaccgggttttctcgaagaggctctgggagaggtgggggccccaccccttggggaccagcatgggacgccgggattgcacctcctgtcctgccccaggacgagggtgcatggcccttaagggtgaccttactccagagcagtttctag

SEQ ID NO: 199755 - DNA, 1752 bp, synthetic construct
  misc_feature 1..1752: note = Description of Artificial Sequence: Synthetic coding sequence
  source 1..1752: mol_type = other DNA
atggagggcagccggccccggagcagcctgagcctggccagcagcgccagcacaataagcagcctgagctcgttgagccccaagaagccaacccgtgcggtcaacaagatacacgctttcggtaaacgcggcaatgctctccgccgggatcccaatttacccgtgcatattcgtggttggctgcataagcaggatagttccggtctgcgtctctggaagcggcgctggttcgtgctgagtggacattgtctgttctactacaaggacagccgcgaggagagtgttctgggaagcgtgctactgccatcgtataatatccgaccagacgggcctggcgctccccgcggaagacggttcacctttacagctgagcatcccgggatgcggacttacgttctcgccgctgacacactggaggacctccgaggttggctgcgcgctctgggacgtgcctcccgcgcagagggcgacgactacggacagcctagatctcccgcccggccacagcccggtgagggccccgggggccccgggggcccacccgaggtgtctaggggagaagagggacgcatctccgagagtcccgaggtgacaagattatcccgtgggcggggccgacctcgtctgctaacaccttcaccaaccacagacctccactccggtctgcagatgcgcagagctcgaagccccgatctctttactcctttatctcgccccccgtccccactgagccttccgcgcccgcggtctgcccccgcccggcgtccacctgctccaagcggtgacaccgccccaccagctcgcccccacacacctctgagccggattgacgtgcggccccctctggattgggggccgcaaagacagaccctctcccgccctccgacaccccgccgtggtcccccttcggaggcaggaggaggaaaaccacctaggtccccgcagcattggtcacaagaaccgcgaacccagccggggccccctctcgagtcaactttccaccaatctctggaaaccgacacgctgcttaccaaactgtgcggccaggatagactcttacgaaggctgcaggaagagatcgatcagaagcaggaggaaaaagagcagttagaagctgccctggagctcacccgacagcagcttggccaggctacaagggaggcgggagctccgggccgagcttggggacggcaaaggctactgcaggatcggttagtgagtgtgcgcgccaccctgtgccacttgacacaggagcgagaacgagtgtgggacacgtacagtgggctggagcaagaattgggcaccctgcgtgagactcttgagtatctcctccatctggggtctcctcaggatcgcgtttctgctcagcagcagctctggatggtggaggacactctggctggtctcggggggccccagaaacccccaccgcacaccgagccagactctcctagtcctgttctgcagggcgaagagtcatcggagcgtgagtccctcccagagtctctcgagctgtcctcaccccgctccccagaaactgattggggccgtccgccaggcggggacaaagacctggcttccccacatttggggctgggtagtcccagggtgtccagagccagttctccagaggggcgccatttaccttcaccccagctgggtacaaaatcaaaggagcaccatcctctcttagccgacttccgtagatctccaggcgctggatctcaacccctcccctccccagggtactag

SEQ ID NO: 199756 - DNA, 3366 bp, synthetic construct
  misc_feature 1..3366: note = Description of Artificial Sequence: Synthetic coding sequence
  source 1..3366: mol_type = other DNA
atggccgccgccaccgtgggccgggacaccctgcccgagcactggtcctatggcgtatgtagagacggccgcgtctttttcattaacgatcagctccgctgtactacctggctgcaccccaggacaggcgagcctgtaaatagcggccacatgattcgctccgaccttccacgaggctgggaggaaggttttaccgaagagggggcaagctacttcatcgatcacaatcaacagaccactgcctttcgccaccctgttacagggcagttttctcctgaaaatagtgaatttatcctgcaggaagaacccaaccctcatatgtctaaacaagacagaaaccaacgaccaagctcgatggtgagcgagacttccactgctgggactgcgtcaactttagaagcaaaacctggcccgaaaataatcaagagctcttcgaaagttcattcctttggtaagcgggatcaggccatcagaaggaatccaaacgtgcccgtggtagtaagaggctggcttcacaaacaggactcgtctggtatgcgcctgtggaagaggcgatggttcgttttagcggactactgtctcttctattacaaggacagcagagaggaggcagtgctcggcagtatccccttgccatcttacgtgatctcccccgtggcccctgaagacaggatttcaagaaagtatagctttaaggccgtacacactggaatgagagcgttgatttataatagttccactgctggatcccaagccgagcagagtgggatgaggacatattattttagcgctgatacccaggaggacatgaatgcttgggtgcgagccatgaaccaggctgcacaagttctgtcacgttcttctctgaaacgggatatggagaaggttgagaggcaggccgtgccccaagccaatcacaccgagtcttgccacgagtgtggccgcgtcggccccggccacactcgggactgcccacatcgggggcatgacgatattgttaattttgagcgacaggagcaggagggcgagcagtacagatcacagcgtgatccgttagaaggtaagagggataggtcaaaagcgcgctcaccctactcccctgccgaagaggatgcgttgttcatggacctcccaactggacccagaggacagcaagcccagccccaaagagccgagaaaaacggaatgctgccggccagttatggcccgggtgagcagaacggaaccggcgggtatcagagagcattcccaccccgcaccaatcccgagaagcattcccaaaggaaatccaatctggcacaggtggagcattgggcacgagctcagaagggtgacagcaggtcgctaccactcgatcagactcttcctcgacaggggcccgggcagtccttatcctttccagagaattaccaaactctgcccaaatcaacacggcatcccagtggaggcagctctccaccacctcggaatctaccctcagattataagtatgcccaggacagggcatctcaccttaagatgtcatctgaagaacgtcgggcccacagggacggcacagtgtggcagctctatgaatggcagcagcggcagcagtttcgccacggctctccgaccgctcccatttgtctgggtagcccggagttcacagatcaggggcgaagcagaagtatgctggaggttccccgatccattagcgttccaccctcccctagcgatattcccccacctggaccccctagagttttcccccccagacgaccgcacacacccgccgaacgagttacagtgaaacctccagaccagaggcgctccgtggatatctcattaggcgactctccacggcgcgcaagaggtcatgccgtgaagaatagcagccatgttgacaggagatcgatgccttctatgggttacatgactcacaccgtgagcgccccatccctgcacggtaagtcagctgacgatacatacctccagttaaagaaggatctggagtacctggaccttaaaatgactggacgtgatcttctcaaggacaggtccctgaagcctgtcaaaatagccgaatctgatactgacgtgaaactttccatcttctgtgagcaggacagagtgcttcaggaccttgaagacaaaattcgggccttaaaagaaaacaaggatcaactggagtcagttctggaggtgctgcaccggcagatggagcaatatagagatcaacctcagcacctggagaaaattgcctaccagcaaaaactcctccaggaagacctcgtgcacatcagagcagagttatcgagggagagcacagagatggaaaatgcctggaatgagtatcttaagctggagaacgatgtagagcagctgaagcagaccctccaggaacagcatcgccgcgctttttttttccaggagaaatcacaaatccaaaaagatctatggagaatcgaggatgtgaccgctggactgtctgctaacaaggagaacttccgaatcctggtggaatcagtcaagaatcccgagagaaagactgtgccgttgttcccccacccgcctgtgcccagtttgagtaccagtgagtccaagcccccaccgcagcccagcccccctacctcacccgtgagaactcctctggaggtacggctattcccacagctgcagacatatgtcccataccggcctcacccccctcagctgaggaaggttacaagcccactccagtcccctacaaaagcaaaaccgaaagtggaagacgaggcaccccctcgcccccctctgcccgaactctactcccccgaagaccaaccccctgcggtcccaccactgcccagggaagcgacaattatcagacacacgtccgtacgtggcctgaaacgccaatcagatgaacggaaacgagacagagaactgggccaatgtgtgaacggggactctagagtcgagctgaggtcatacgtgagcgagcccgaacttgcaaccctgtccggagatatggctcagcccagcctgggattagtgggaccagagagcagatatcaaacactcccaggaaggggcctgagcgggagtacctcccgtttgcagcagtcgtccactatcgcaccctatgtgacgctgcgccgcggactgaatgccgagtctagcaaggcaactttcccgagacctaaatcggctctggagcgattgtattccggcgaccatcagcgcggcaaaatgagtgccgaggaacagctggagcgcatgaagcgtcatcagaaagccttagtgagggagcgaaaacgtaccctgggtcagggagagcggacgggccttcctagctcgagataccttagtcggcccctgccgggagacctggggagtgtgtgctag

SEQ ID NO: 199757 - DNA, 3369 bp, synthetic construct
  misc_feature 1..3369: note = Description of Artificial Sequence: Synthetic coding sequence
  source 1..3369: mol_type = other DNA
atggccgccgccaccgtgggccgggacaccctgcccgagcactggtcttatggcgtgtgcagggatggacgcgtcttctttataaacgatcaattgaggtgcaccacctggcttcatccacggacaggggagcccgtgaatagcggccatatgatccgttcggacctcccccgcgggtgggaggaggggttcaccgaggaaggcgcctcatattttatagatcacaaccagcagacaacggcctttcgccatcctgtgaccggacaattctctccagagaatagtgagtttattctccaagaggagccgaatccccatatgagtaagcaagacaggaatcaacgtcctagttccatggttagcgagacctctaccgccggaaccgctagcacgctcgaagcgaagcccggtcccaagataatcaagtcctctagtaaggtgcatagttttggcaagagagatcaggcaattcggcgtaatcccaatgtgccggtcgtcgtccgagggtggcttcacaaacaggatagcagcgggatgaggctgtggaagagacgatggtttgtgctcgcagattattgccttttttattacaaggattcccgggaggaggccgtcctgggttctatcccactgcccagttacgttattagtccagtcgcaccagaggaccgaatcagcaggaaatactctttcaaggcggtacataccgggatgcgggctttaatttacaattcctctaccgctggcagccaggctgagcagtcgggtatgagaacatactacttcagtgccgacacccaggaggatatgaatgcctgggtgcgggcaatgaaccaggccgctcaagtgttgagcaggagcagcctgaaaagggacatggagaaagtcgaaaggcaggccgtcccacaagcgaatcatactgagtcttgccacgagtgcgggagggtgggacccgggcatacgcgcgactgtccacacaggggccacgatgatatcgttaatttcgagcgacaagaacaagaaggcgaacaatataggagtcagcgagatcctctcgagggaaagcgggacagatccaaagccagatctccctacagccccgccgaggaagacgccttgttcatggacctgcccacaggtcctcggggacagcaggcacagccccaacgggccgagaaaaatggtatgctccccgcaagttacggcccaggcgagcagaatgggactgggggctatcagagggctttcccgccacggactaatccagagaagcactctcagaggaaaagtaacctagctcaagtggagcattgggccagggcccagaagggtgactcacgctccttgcctttggaccaaacactgcctagacaggggccaggccaatctctgagcttccctgagaactaccagaccttgcctaagagcacaaggcacccgagcggtggttcttctccgcctcctcggaatctgccttccgactataaatacgctcaggatcgcgcctcgcatctaaaaatgagctctgaagaacgccgcgcccacagagatgggactgtctggcagctgtacgagtggcaacagaggcagcagtttaggcatggctcccccacagctccaatttgtcttggctcaccagagtttaccgaccaggggcgcagtcgcagcatgctcgaagtgccccgttcgatctctgttccaccgagcccgtcagatatcccaccccctggcccccctcgggtattccccccccgacgcccacacactcctgccgagcgggtaacagttaagccccccgatcagcgcagaagcgttgacatttctctaggggacagcccgagacgggctagaggccacgctgtaaagaatagcagccacgtagacagacgttccatgccgagcatgggctacatgactcatactgtgtcagccccctccctgcacggcaagtccgccgatgacacatacctccagctgaagaaggacctggagtaccttgatctcaaaatgactggaagggatctgcttaaggaccgatcgttaaagcccgtcaagattgccgagagcgacaccgatgtgaaattgtctattttttgcgaacaagaccgagttttacaggacctggaggataaaattcgggctcttaaagagaacaaagaccagctagagagtgtcctcgaggtccttcataggcagatggaacagtaccgcgaccaaccccagcacctcgaaaaaatagcctaccagcagaagcttctccaggaggacctggtccacattcgggcggaactttcacgcgaaagtactgaaatggagaacgcgtggaacgaatatctgaagctcgaaaatgatgtggaacagctgaagcagactctccaagaacagcataggagagcttttttttttcaagaaaagtcacaaattcaaaaagatttatggcgaatcgaggatgtcaccgctggcctatcggcaaacaaggagaattttagaatcctcgtcgagtccgttaaaaaccccgaacgtaaaaccgttcctctattcccccatcctcctgtgccatccttgagcacctcggagtcaaagccccccccacagcccagccctcctacatcccctgtgagaactccattagaggtcagactatttccacagctccagacctacgtgccctacaggcctcacccaccacagctcagaaaggtgacttctcccctgcaatctcccactaaagccaagcccaaagttcaagaggatgaggctccaccccgaccaccactgccagagctgtattcccctgaggatcagccacctgccgtcccgccactaccgcgtgaggcgacgataattcgccataccagtgtgcgaggtctgaagcgccaaagtgacgagcgtaagcgggaccgggaactcggacaatgcgtcaacggagactcacgggtggaactgagaagctacgtttctgagcccgagctcgcaactttatcaggggacatggcgcaacccagcctgggtttggttgggcctgagagcaggtaccagactctacctggtcggggactctcaggctctacctcgcgcttgcagcagtctagtaccattgccccttacgtcacgttacgcagaggccttaacgcagagtcatcaaaggcaactttccctcgcccaaagagtgccttggagcggttatatagcggggaccaccagcgtgggaagatgtctgccgaggagcaactggagcgcatgaaacgccaccaaaaagccctggttagagagaggaagcggactctgggtcagggggaaaggaccgggctaccaagcagccgttaccttagtcgccctttgccaggagacctcgggagtgtttgctag

SEQ ID NO: 199758 - DNA, 2262 bp, synthetic construct
  misc_feature 1..2262: note = Description of Artificial Sequence: Synthetic coding sequence
  source 1..2262: mol_type = other DNA
tgagacgccctgttcatggacctgcccaccggcccccggggccagcaagctcagccccagagggccgaaaagaacgggatgctccctgcctcctacggcccgggagagcagaacggcaccggtggctatcagcgggcatttcctcctaggacgaatcctgagaagcattcgcagcgcaaaagcaacctcgcccaggtggagcattgggcgagggcccagaaaggggattcccggtcattgccattagaccagacactgcctcgccagggccccggccagtccctctccttccctgagaactatcagacacttccgaaaagtactagacacccgagtggaggaagctctccacccccccggaatctcccaagcgactacaagtacgcgcaagatcgcgctagccacctgaagatgtcctctgaagagagaagggcgcacagggatggtacagtctggcagttatacgagtggcaacagaggcaacaatttcggcacggatctcctactgctcctatttgtctcggaagtcctgaatttaccgaccagggcagatcccgcagcatgctcgaggttccccggtcaatttctgtgcccccaagtcctagcgacattcctccacccgggcccccgcgcgtgttccctccaagaagaccccataccccggccgaacgtgtcaccgtgaaaccaccggatcagaggcggagcgtcgatatatcattaggcgatagtccgcggcgagcaagaggacatgccgttaagaattctagccatgtcgacagacggagcatgccttctatggggtatatgacccataccgtaagcgctccctccctgcacggaaagtccgcagacgacacctacctgcagttgaaaaaagacctcgaatatctagacctgaaaatgactgggagggatctccttaaagaccgtagcctcaaacccgttaagatcgcggagtccgacactgatgtgaagttatctattttttgcgagcaggatcgggttcttcaggacctcgaagacaaaattagggcgctgaaagaaaacaaggaccagctggagagcgtgctcgaggttctgcatcgccagatggaacaatacagagaccagccacagcatctggagaaaatagcttatcagcagaaactgcttcaagaggacttggtccacatcagagctgagctctcgagagaaagcacagaaatggaaaatgcctggaacgagtatcttaagctcgagaatgacgtggaacagttgaagcaaacgctgcaggagcagcatcggagagccttctttttccaggagaagtctcagatccagaaagacttgtggaggatcgaagacgtcacggctggattatccgctaataaggaaaatttccggattcttgttgagtccgttaaaaatcctgagcgcaaaaccgtacccctgttcccgcatcccccggtccctagcctctcgacgagcgagtctaagccacctcctcagcccagtccccctacctcccctgtgaggactccactggaggttagactatttccgcagctgcagacctatgtcccttatagaccccatcctcctcagctgaggaaagtcacatcccccttacaaagtcccaccaaggccaaacccaaggtgcaggaggatgaggctccgccaagacccccgctccctgaattatattcgcctgaggaccagccacccgcagttcccccactgcccagagaggcgaccattatacgccacacatcagtacgaggactgaaacgccagtcggacgagagaaagagagatcgggagttaggtcagtgcgtaaacggtgacagtcgggtggagcttagatcctacgtctctgaaccggagttggcgacactgagtggcgacatggcacaaccaagtcttggattagtggggcctgaatccaggtatcagactctgccagggagaggcctctcggggagcaccagcaggttacagcaatcaagcactatcgctccttatgtgacccttcgcagggggctaaacgctgaaagcagcaaagccacatttccccggccaaagtcagcactggagcgcttgtattccggcgatcaccagaggggaaaaatgtccgccgaggaacaactggagcgcatgaagcgtcatcagaaggcactcgtgcgggagcgaaaacggaccttgggacagggggaaaggacggggctcccttcatcaaggtatctgagtaggccactgccaggagacctgggatctgtttgttag

SEQ ID NO: 199759 - DNA, 816 bp, synthetic construct
  misc_feature 1..816: note = Description of Artificial Sequence: Synthetic coding sequence
  source 1..816: mol_type = other DNA
atgctgcaggcctgcaagatggagggcttccccctggtgcccccccagccatctgaggacctcgtcccttacgacaccgatctctatcagcgccaaacccatgaatattatccatatttatcgtctgacggcgagtcgcattccgatcactattgggacttccatccacaccacgtgcactccgaattcgagtctttcgctgaaaacaattttacggaattacaatcagtccagccaccacagctgcagcagctgtacagacatatggagctagagcaaatgcacgtgcttgacacaccaatggttccaccgcatccatcactgggacaccaggtatcctatctaccacgcatgtgcctccagtacccatccctgagtcctgctcagccctccagtgacgaagaggaaggcgagaggcagtcaccacccctcgaagtctccgacggagaagccgatggcctcgagcctggccctgggctcctacccggagagaccggatcaaagaagaaaatccgcctgtatcagtttcttctggacttactgcgcagtggagatatgaaggattctatctggtgggtcgataaagataaggggacattccaattctcctctaagcataaggaggcattagctcaccggtggggcattcagaagggaaaccgaaaaaagatgacttaccagaaaatggcacgagctttgcgaaactatggcaaaacgggtgaagtgaagaaggtgaagaaaaaactgacttaccagttttcaggcgaagttctgggacgaggcggactggctgagaggaggcacccaccacattag

SEQ ID NO: 199760 - DNA, 732 bp, synthetic construct
  misc_feature 1..732: note = Description of Artificial Sequence: Synthetic coding sequence
  source 1..732: mol_type = other DNA
atgagccccgccgcccccgtgccccccgacagcgccctggagagcccattcgaggagatggccttagtgaggggaggatggctgtggaggcagtcttccatcctgaggcggtggaaacggaactggtttgccttatggttggacggaacacttggctattatcacgatgagaccgcccaggatgaggaagatcgggtgttaatccattttaacgtgagggacatcaagattggcccagagtgccacgatgtgcagcctcccgagggcagaagccgtgatggcttgctgaccgtgaaccttcgggaagggggcagactgcatctgtgtgcggagacgaaggacgatgccctggcctggaaaaccgccttgctggaagccaatagcacaccagctccggccggggcaacagttcccccccggtccaggagggtgtgttccaaagtaaggtgtgtgacccgcagttggtctccttgtaaggttgaaagacgaatttgggttagagtgtatagcccctaccaagactactacgaggttgtgcctcccaacgcccacgaagcaacttacgtccgatcctattatggcccgccttatgcaggtcccggggtgacacacgtgatagttagggaggacccatgttatagtgcaggcgccccactggccatgggaatgctggctggcgctgccaccggcgctgctcttggcagcctcatgtggagcccatgttggttctag

SEQ ID NO: 199761 - DNA, 627 bp, synthetic construct
  misc_feature 1..627: note = Description of Artificial Sequence: Synthetic coding sequence
  source 1..627: mol_type = other DNA
atgagccccgccgcccccgtgccccccgacagcgccctggagagcccttttgaggagatggccctggtacgcgggggttggctttggcgtcaaagttcgatcctacggcgatggaaacgaaattggtttgcactgtggctcgacggaaccctcggatactatcatgacgaaacagcacaggatgaggaggatcgagtgcttatacattttaacgtgcgggacattaagatcgggccagagtgccacgacgtgcagccaccggagggccgtagtagggatgggctgctgaccgtgaacctgagagagggggggcgattacacctttgcgccgaaaccaaagacgatgcattggcctggaagacagcgctgttggaggcaaattccacgccagtgagggtatactccccctatcaggactactacgaggtggtgccacctaatgctcatgaggccacttacgttagaagctattatggcccaccttacgccggcccgggggtgactcatgttattgttcgcgaagatccctgctactctgctggcgcaccgttagctatgggtatgctggcaggggcggctacgggtgcagccctagggtccctaatgtggtcgccctgctggttctag

SEQ ID NO: 199762 - DNA, 675 bp, synthetic construct
  misc_feature 1..675: note = Description of Artificial Sequence: Synthetic coding sequence
  source 1..675: mol_type = other DNA
atggccctggtgcggggcggctggctgtggcggcagagcagcatcctgagaaggtggaagaggaactggttcgcactgtggctggatggtactttggggtattatcatgacgagactgctcaggacgaggaggatcgggtactcattcatttcaacgtgcgcgacatcaagatcggacccgagtgccacgacgtccagccacctgagggccggtctcgcgacgggctgctgacagtaaacctgagggagggcggacggctgcacctgtgcgctgagaccaaagacgacgcactcgcatggaagactgctctgctagaagccaatagtacgcccgcacccgctggcgctaccgtccccccccggagcaggcgagtttgttctaaggttagatgcgtgacacgttcctggtctccctgtaaagttgagcgtagaatctgggtgcgagtatacagtccctaccaggattattacgaggtggttccacctaatgcacacgaggccacatatgttcgtagttactacggccctccttacgccgggcccggtgtgacacacgtgatcgtacgggaagatccttgttattcagcaggtgctccgctggctatgggcatgttggccggggcagctaccggggcagccctggggtctctgatgtggagcccttgctggttttag

SEQ ID NO: 199763 - DNA, 570 bp, synthetic construct
  misc_feature 1..570: note = Description of Artificial Sequence: Synthetic coding sequence
  source 1..570: mol_type = other DNA
atggccctggtgcggggcggctggctgtggcggcagagcagcatcctacgcagatggaagcgcaattggttcgccctctggctggacggcactctgggatactatcatgacgaaactgcgcaggacgaggaagaccgtgtcctcatccactttaatgtgcgagacatcaagatcggcccagagtgccacgacgtgcagccgcctgaaggccgaagccgtgatgggctgctaaccgtaaacttaagagaaggaggaagattgcacctttgtgccgagacaaaggatgacgccctcgcctggaaaaccgcattgttggaggccaattcaacgcctgtgcgtgtctactccccttatcaggattactacgaggtcgtgcctcccaacgctcatgaggccacatacgtgaggtcctactatggacctccgtatgctggaccgggtgtgacacacgtgatcgtgcgcgaagacccctgttacagtgcaggcgccccactcgcaatgggaatgctcgcgggggctgcaacgggcgcggccctcggctctctgatgtggtctccatgctggttttag

SEQ ID NO: 199764 - DNA, 354 bp, synthetic construct
  misc_feature 1..354: note = Description of Artificial Sequence: Synthetic coding sequence
  source 1..354: mol_type = other DNA
atggccctggtgcggggcggctggctgtggcggcagagcagcatcctacgtcggtggaagaggaattggtttgctctgtggctggacggtactctagggtattatcacgacgagacggcccaggacgaggaggaccgcgtcctaatccactttaacgtgcgtgatatcaaaatcggtccagagtgccacgacgtccagccccccgaggggcgcagcagagacgggctgctgaccgtgaatctccgcgaagggggcagattacacctgtgcgccgagactaaggacgacgccctggcgtggaaaaccgccctcctagaggccaacagcacacccgtccgcgtgtactccccttag

SEQ ID NO: 199765 - DNA, 492 bp, synthetic construct
  misc_feature 1..492: note = Description of Artificial Sequence: Synthetic coding sequence
  source 1..492: mol_type = other DNA
atggccctggtgcggggcggctggctgtggcggcagagcagcatcctgcgcagatggaagagaaattggtttgcgttgtggcttgacggaactcttggatattatcacgatgagaccgctcaggacgaagaagaccgcgtacttattcactttaacgtgagagatataaaaatcggcccagaatgccacgacgtccagcccccagagggtagaagcagagatggcttattgactgtgaatctgcgtgagggcggtagacttcacctgtgtgcagagaccaaagatgatgccctcgcgtggaagactgctctgctcgaggcaaacagcacccctgtacgggtctacagcccttaccaggactattatgaggtcgtaccgccaaatgcgcatgaagctacctatgtgcgttcctactatggccccccctacgccgggccgggagtaacacatgtgattgtgcgcgaagatccatgctacagtgcaggtgcctag

SEQ ID NO: 199766 - DNA, 480 bp, synthetic construct
  misc_feature 1..480: note = Description of Artificial Sequence: Synthetic coding sequence
  source 1..480: mol_type = other DNA
atggccctggtgcggggcggctggctgtggcggcagagcagcatcttgcggaggtggaaaaggaattggttcgcactgtggctcgatgggacattgggttattatcacgacgaaactgcacaagacgaagaggaccgggtgctgattcacttcaacgttagagatatcaagatcgggcccgagtgtcatgacgtccaacctcccgagggcagaagtcgagacggcctgcttactgttaacctcagggagggcggcagactgcatttatgcgccgaaactaaagacgatgccctggcttggaaaacggcgctcctggaagcaaactctacacctatgatccggctaaagctgattcatccacacaataagtatctcttaagttgttacagcgccggagcaccgctggcaatggggatgttggcgggtgccgctaccggtgccgccctaggatcgcttatgtggtccccttgttggttctag

SEQ ID NO: 199767 - DNA, 483 bp, synthetic construct
  misc_feature 1..483: note = Description of Artificial Sequence: Synthetic coding sequence
  source 1..483: mol_type = other DNA
atggccctggtgcggggcggctggctgtggcggcagagcagcatcttgagaaggtggaagaggaactggtttgccctctggttggatggtactctcggctattaccatgacgagacagcccaggacgaggaagaccgggttctcatccacttcaatgttcgagatatcaagatcggaccagagtgtcacgacgtgcaacctccagaaggacgctctagagatgggctgctgacagtgaacctgagggaaggcggaaggctgcacctgtgtgccgagaccaaggatgatgcactcgcctggaaaaccgccttgctagaggccaattccacccccgcccccgcaggtgctaccgtgcctccgaggtctcgccgtgtgtgttccaaggtccgatgcgtgaccaggagctggagtccctgtaaggtagagcgccggatatgggtaagggtttattcaccctatcaggactactatgaggtagtctag

SEQ ID NO: 199768 - DNA, 465 bp, synthetic construct
  misc_feature 1..465: note = Description of Artificial Sequence: Synthetic coding sequence
  source 1..465: mol_type = other DNA
atggccctggtgcggggcggctggctgtggcggcagagcagcatcctgcggcggtggaaaaggaattggtttgctctgtggttggatggcaccctggggtactaccacgatgaaactgcacaagacgaggaggaccgtgtacttattcattttaacgtacgggacatcaagatcggaccggaatgccacgacgtccagccaccagaagggcgtagtagagatggattgttaaccgtaaatctgcgggaagggggcagacttcatttgtgtgccgagactaaggacgacgcactggcttggaagaccgccctcctggaagctaactctacccccgtgagggtttacagcccctatcaggattactacgaagtcgttccccctaatgctcatgaggcgacatacgtgcggtcctactacgggcccccatacgccgggcctggtgtgacccacgtaatcgtgagatag

SEQ ID NO: 199769 - DNA, 258 bp, synthetic construct
  misc_feature 1..258: note = Description of Artificial Sequence: Synthetic coding sequence
  source 1..258: mol_type = other DNA
atggccctggtgcggggcggctggctgtggcggcagagcagcatcctgagaaggtggaagaggaattggttcgccctctggctggatggcactctagggtactaccacgatgagaccgcacaggacgaggaagaccgagtcctaatccattttaacgttcgggacattaagattggcccagaatgccatgacgttcagccaccagaaggccgttcaagggacggtcttttgacagtgaatctccgcgaaggcggctag

SEQ ID NO: 199770 - DNA, 3576 bp, synthetic construct
  misc_feature 1..3576: note = Description of Artificial Sequence: Synthetic coding sequence
  source 1..3576: mol_type = other DNA
atggagcggcccctggagaacggcgacgagagccccgacagccagggacacgccacggattggcgctttgcagtgtgttctttccgtgatgcctgggaggaggaggagcctgcctcacaaatgcatgtcaaagacccaggccctcctcgccctcctgccggagccactcaggacgaggagctccagggttctcctctttctagaaaatttcagctgcccccggccgcagacgagagcggcgatgcacagcggggaaccgtagaatctagtagcgttctgagcgaggggcctggcccctccggagttgagtccctgttgtgtccgatgtcgagtcaccttagtctagcacagggtgagtccgacacacccggggtcggcctagttggggaccccggaccctcccgggcaatgccttcgggactgagtccaggagctcttgattccgatcctgtcggcctcggtgaccccctctcagaaattagtaagctgctagaggccgcaccctctggatctggtctgcctaagcccgctgactgcctgttggcacaagacctctgctgggagctcttagcctctggaatggccacgcttccaggcacaagggacgtgcagggccgagccgtgctcctcctgtgcgcacatagcccagcctggctgcagtctgagtgcagctcacaggagctcattcggctcctactctacttgagatccattccaagacctgaagttcaggctttgggactgacagtgctcgtggatgcaaggatttgtgccccctcatcaagcctcttttccggactgtcccagctgcaggaagccgcgcctggtgctgtgtatcaggtgctgttagtgggtagtaccttactgaaggaggtaccaagtgggttacaactagagcagcttcctagccagagcctgctgacccatatcccaaccgccggcctgcccacttccttgggtggaggcttgccttactgtcatcaagcctggctagattttcggagaaggctggaggccctgttgcagaactgccaggccgcgtgtgcgttgttacaaggagccattgagagcgtgaaagccgtacctcaacccatggagcccggtgaggtgggccagctcctgcagcaaacagaggttctgatgcagcaagttctggactctccctggttggcttggcttcaatgccaaggcggcagggaactgacttggctgaagcaggaggtgcctgaggtgactctctctcccgactaccgtacagccatggataaagccgacgagctctacgacagagtggatggactgctgcatcaactgacccttcaaagcaatcagaggattcaggctttggaactggtccaaaccctagaggcccgcgagtctgggctgcaccagatcgaggtgtggctgcagcaagtgggatggcctgctctcgaggaggccggagaaccttccttggacatgttactccaagcacaggggtctttccaagagctttaccaggtagcccaggagcaggtcagacagggggaaaagttccttcagcccctcaccggctgggaggccgctgagcttgaccctccgggggctaggttcctggccttaagggctcaactgaccgagtttagcagggctttagctcagaggtgccagaggctggcggacgcagaacggctgtttcagctctttcgcgaagcactcacctgggctgaggaggggcagcgcgttctggcagagctggaacaggagcggccaggcgtggtactgcagcagctacagttgcactggacccgccaccctgacttgccacctgcacacttccgcaaaatgtgggccctcgccacagggctgggttccgaagcgatcagacaagagtgtcgctgggcgtgggcccgatgccaggacacctggcttgcactggatcagaagctcgaagctagtctaaaactgccacccgttggaagcactgctagtctttgtgtatcccaagtgcccgcagccccagcccatcctcctctgcgtaaggcatattcattcgatagaaacctggggcagtcactaagcgagcccgcttgccactgtcatcacgccgccaccattgctgcgtgtcgtcgccctgaggcgggaggtggcgcactccctcaagcctcccccaccgtgccgcctcccggatcaagtgaccctcgttcccttaataggctacagcttgtcttggccgaaatggtggctacagagcgcgagtatgtacgcgcattagagtataccatggaaaactactttccagagctcgacagaccggatgtgccccagggcctcaggggccagagggctcacctgttcggaaacttggagaagcttagggatttccactgtcacttttttttaagagagctggaggcctgcacacgccaccctcctcgggtcgcctatgccttccttcggcatcgcgtgcagttcggcatgtatgcgctctattccaagaacaagccacgttcggacgctttgatgagttcatatgggcatacatttttcaaagataagcagcaagcactgggggatcatttagacctggctagttacctgctcaagcctatacagcgcatgggtaagtacgcacttcttctccaggaacttgctcgagcttgcggcggcccgacccaggagctcagtgctctgagagaggcccagtccttagtgcacttccagctgcgccacggcaatgatctgttggctatggatgccattcagggatgtgatgttaacttaaaggagcaaggccagctcgtaagacaggatgagtttgtggtccgcaccggacgccacaaatctgttcgtagaattttcctatttgaagagctcctgctcttcagcaagcctcggcacggccccacaggggttgacactttcgcttacaagcggagctttaaaatggcagatctcggcctgactgaatgctgcggaaactctaatctgcgctttgaaatctggtttcgcagaagaaaagctcgtgataccttcgtactgcaggctagctcacttgcaatcaagcaggcctggaccgctgacatttcccatctgctgtggcgccaggccgtgcacaacaaggaagtgagaatggccgagatggtgtccatgggtgtcgggaataaagcattccgagatatcgctccaagcgaggaagccattaacgatcgtaccgtgaattacgtgcttaaatgccgagaggtgcggtcccgtgcctccatcgccgttgctccattcgatcacgatagcctgtatctcggcgcctccaatagccttcccggggatcctgcctcctgtagcgtcttgggaagcttgaacctccacctctaccgggatcccgctctgctgggcctgcggtgtccactttacccaagcttccccgaagaagctgctctggaggccgaagccgagcttggaggccagccctccctgaccgcggaggactctgaaatcagctctcagtgtccgtccgccagcgggagcagcggctccgattcctcttgcgtgtctggtcaggccctaggacgtggactggaagatctgccctgcgtatag

SEQ ID NO: 199771 - DNA, 3576 bp, synthetic construct
  misc_feature 1..3576: note = Description of Artificial Sequence: Synthetic coding sequence
  source 1..3576: mol_type = other DNA
atggagcggcccctggagaacggcgacgagagccccgacagccaggggcacgctacagattggaggtttgctgtgtgtagcttccgggacgcatgggaagaggaagagccggcctcccagatgcacgtgaaagatccaggaccccccagaccgccggcaggcgccacccaagatgaggagctgcagggttctcctctgagccgcaaattccaactgcccccagccgcggatgaatccggagacgcccaaagaggaacagttgaaagcagttccgtcctaagcgaaggaccgggcccttccggagtggagtcgctcttgtgtccaatgtcctctcatctctcactggctcagggtgagtctgacaccccaggagtgggacttgtgggcgatcccggtccttcaagagctatgccttccggcttgtctccgggcgctctggatagtgatccggtcggactgggtgacccactgtcggaaatttctaagttgctggaggccgccccctctggctctgggttgccaaagcccgcagactgcctgctcgctcaggacctctgctgggaattgttggcgagtggcatggcgactcttccaggcacccgagacgtgcagggacgggctgtgcttttgttgtgtgctcattcacccgcctggttgcagtcagaatgtagctcacaggagcttattagactgttgttgtatctgaggtccataccccggcccgaggtacaggccttgggtcttacagtgcttgtagatgctcggatatgcgccccaagcagctcactgtttagtggcttgtcacagctccaggaggccgcccctggggccgtgtaccaggtactgctcgtcggctccacgctgttaaaggaagtgccgtccggactgcagctggaacagctgcctagccaatcactgcttacgcacattcctaccgccggccttcccacatcgctaggtgggggacttccatactgtcaccaggcctggctggactttcggcggcgtttagaggcactgcttcagaactgtcaggcagcatgcgcattgctgcagggagccatagagtccgtgaaggctgtgcctcagcccatggaacccggagaggtgggccagcttttacagcaaacagaggtgcttatgcagcaggtactcgattctccctggctggcttggttgcagtgtcaaggaggccgggagctcacttggctcaaacaggaagtgcccgaggtcacactgagtcctgactaccgaacggctatggacaaggccgacgaactgtacgaccgggttgatggcctcctgcaccagttgactctacagagcaatcagcgtattcaagctctcgagctcgtacaaacactggaggctcgggaaagtggcttgcatcagatcgaggtttggctccagcaggtcggctggcctgccctggaagaagctggtgaaccttctttagatatgctgcttcaagcccaagggtccttccaagagctgtaccaggtggcgcaggaacaggtccggcaaggcgaaaaattcctccaacctctcaccggatgggaggccgccgaactggatccccccggagcacgatttctcgccctcagagcccaactgaccgaattcagcagggcccttgctcagcggtgccaaaggctcgctgacgccgaaaggctgttccaactcttccgagaagctctcacctgggcggaagagggacagagggtgctcgctgagctcgaacaggagcgcccgggggtggtcctccagcagctgcagcttcattggacgcggcaccccgacctgccgccagcacatttccgcaaaatgtgggcgctggcaacgggactcggatccgaggccatcagacaggagtgcaggtgggcctgggcgcggtgccaggatacgtggctggctcttgaccagaaactcgaggcctctctcaaactaccccccgttggctccacagccagcctatgcgtgtcacaggtgcccgctgcccctgctcaccctcctttaagaaaggcttacagctttgatcgaaaccttggccagagcctcagcgaaccggcctgccactgtcatcatgctgccacaatcgccgcatgtcgccgccccgaggccggtggcggcgccttaccccaggcctcaccaaccgtcccaccaccagggtcctctgacccgaggtctctgaacagactccagctcgtgttggccgagatggtcgccactgaacgggagtatgtgcgcgccctagagtacacaatggagaactactttccggaattggaccgcccagatgtcccgcagggactgagaggacaaagagctcacctgttcggaaacctggaaaagctgcgggactttcactgccatttttttctaagagagttagaagcttgcactcggcaccctccaagagtggcatatgccttcctccggcaccgggtccagtttggaatgtatgcactgtattctaagaacaaacccagatcagacgccctcatgtccagctacggacatacattttttaaggataaacagcaggcactgggtgatcacctcgatcttgccagttacctgctgaaacccatacagcggatgggaaagtacgccctcctgttacaggagcttgctagagcttgcggcgggcctacccaggaactctcagcgttacgtgaggcccagtcactggtccatttccagctgcgccatgggaatgatttgcttgccatggatgctattcaaggatgtgatgtcaatctcaaagagcagggccaactggtacgtcaggacgagtttgtcgttaggacagggaggcacaagagcgtgcgcagaatcttcttgttcgaagaactgcttcttttcagtaagcctcgtcatggccccactggggtggacacattcgcatataagcggagcttcaagatggccgatcttggacttactgagtgctgcggcaattcaaacctgcggtttgaaatctggttcaggcgccggaaggcaagagatacattcgtgcttcaggcctccagccttgccatcaagcaggcttggacagctgatattagccatcttctttggcgccaggctgtgcacaacaaagaagtcaggatggctgaaatggtcagtatgggcgtgggtaataaggccttcagggacatcgcacccagcgaggaggcgatcaacgacaggaccgttaattacgtgctaaagtgccgggaagtgcgctcacgtgctagcatcgctgtggcaccatttgatcacgattctctgtatttgggcgccagcaacagtctccctggggatccagccagttgttcagtcctgggatccctcaatctgcacctgtacagggaccctgctctgctgggcctgagatgccctctttatccatcctttccagaggaggccgcactggaagccgaggcagagttgggtggccagccctctctgaccgcagaagattcagaaatttccagtcagtgcccttccgccagcgggagcagtggctcggacagcagttgcgtaagcggtcaggccctcggacgaggcctggaggatctgccatgtgtctag

SEQ ID NO: 199772 - DNA, 582 bp, synthetic construct
  misc_feature 1..582: note = Description of Artificial Sequence: Synthetic coding sequence
  source 1..582: mol_type = other DNA
atggagcggcccctggagaacggcgacgagagccccgacagccaggggcacgccacggactggagattcgccgtttgtagcttccgagatgcgtgggaagaagaggaaccagcatcacagatgcatgtgaaggaccctgggccaccacgcccccccgctggcgcaacacaggatgaagagctccaaggtagccccctgtccaggaagtttcagctgcctcccgctgccgatgaatctggcgatgcccagagagggacagtggaaagctcatccgtgctgagcgaaggtccagggccaagcggcgtggaaagtctgctctgcccgatgagcagccacctttccctcgcacagggagaatctgacacccctggagtcgggcttgtgggcgaccccgggcccagtagggccatgccatccgggcttagccccggagctctggactccgatcctgtaggactgggcgacccattgagcgaaattagcaaattactcgaggctggcaaggagggttgggccagggaagtatgggagggtaacggagatgcgtggcgggacgaatgtcaggactttggcgggctgtag

SEQ ID NO: 199773 - DNA, 3576 bp, synthetic construct
  misc_feature 1..3576: note = Description of Artificial Sequence: Synthetic coding sequence
  source 1..3576: mol_type = other DNA
atggagcggcccctggagaacggcgacgagagccccgacagccagggccatgccaccgattggaggttcgctgtgtgcagctttcgggatgcatgggaagaggaggaaccggctagtcagatgcatgtcaaggatcctgggccgccccggccccctgcgggcgccacacaggatgaggaattacaaggttcgccactgtcgagaaaatttcagcttccccccgccgccgatgaatctggcgacgctcaacgcggcaccgtggagtcctcttctgtgctttctgaaggtcccgggccatctggggtggagtccttactgtgccctatgagttctcacctctccctggcacagggtgaaagcgacacacccggggtggggcttgtgggcgatcccggtccaagccgcgcgatgccttcagggctgtctcctggcgctctagactctgaccccgttggattgggcgatccgctgagcgagatctcaaagttgttagaagcggcaccatcaggttccggcttgccaaaacctgcagactgcttactcgcccaggacctttgctgggagctgttggcctcaggaatggctaccctgcccggaaccagagatgttcagggacgggcggtgctccttctttgcgcgcactcccccgcctggttgcagtcagagtgtagcagccaggagctgattaggcttctcctgtacctgcggagcatccctcggccagaagtccaggcactaggactgacagtgctcgtcgacgcacgaatttgtgcacccagtagctctctgttttccgggctttctcaacttcaagaggcagcccccggcgccgtctatcaggtgctgctcgtcggcagtacactgctcaaagaggtgccgtccggcctgcagctcgagcaacttccaagccaaagcctattaacacacatccccaccgccggtcttcccaccagtttaggcggcggtctgccttattgtcatcaggcctggctggactttaggcggcgtctggaagcactcttacagaactgccaggcagcatgcgccctcctccagggtgccatagagtcagtaaaggccgtccctcagccaatggagccaggcgaagtaggtcagttgctgcagcagacagaggtgctaatgcagcaggtgctggattcaccctggctagcctggctgcagtgccagggcggccgggagctcacatggcttaagcaggaagttcccgaggttaccctgagcccggattatagaacagcaatggataaagcagacgaactctatgaccgcgttgatggcctgcttcaccaattgacacttcagagtaaccagcggattcaggctcttgaacttgttcagacattggaggcgcgcgaaagcgggctgcaccagattgaagtgtggctacaacaagtgggctggcccgccctcgaagaggccggtgagccaagcctagatatgctgttacaggcccagggcagtttccaggaactctatcaggtggctcaggaacaagtccggcagggcgaaaagttcttgcaaccgctcactggatgggaggccgctgaacttgatcctcctggcgctcgattcctcgctctccgagcccagctgaccgaattctcacgcgctctggcccagcgatgccagagacttgccgacgcagagcgcctttttcaactctttcgagaggctcttacctgggccgaggagggccagcgggtgctggccgagttggaacaggagagacctggagtggtgctacagcaacttcagttacactggacacggcaccccgacctaccaccagcgcatttcaggaagatgtgggccttagctacaggcctaggatcagaagctatccgccaagaatgccgctgggcatgggcacggtgccaggatacttggctggccttagatcaaaagctcgaggcctcattaaagctcccacccgtgggtagcaccgccagtctatgtgtttcgcaggttccagctgcccctgcgcaccctccactgaggaaggcctattccttcgacagaaacctgggccagtccctctcagaaccagcctgtcattgtcatcacgcggccaccatcgcagcctgtcgccgtccagaggccggaggcggggcactccctcaagcttctccgaccgtgccacctcctggaagttctgatccgcggtcactgaaccgactgcagctggttctcgccgagatggtggccaccgagcgggagtatgtccgcgctctcgaatacaccatggagaactatttccctgaattagataggcccgatgtcccacaggggctgaggggccagagagcccatctgttcggcaacctggagaagctaagggatttccactgtcatttcttcctgcgagaactcgaggcgtgcacccggcatcctccgcgagtagcctacgcctttcttcgccatagggtccaattcggcatgtacgcactttatagtaaaaataagccaaggagcgatgcgttaatgagcagctatggtcataccttctttaaggacaagcaacaggcgcttggagatcatctagatctggcctcatacttgctgaagccgatccagagaatgggaaaatatgccctcctcctccaggaactcgccagggcttgtggtggtccaactcaggagctgtcggctctacgtgaggcacagagtttggtgcactttcagctaagacacggaaatgacctgctggctatggatgccatccagggatgtgacgttaacctgaaggagcagggtcaacttgttcggcaggatgagtttgtagtgcgaactggcagacacaaatctgttcgtagaatatttctgtttgaggagctactacttttctcaaagccacggcacggacctactggtgttgacacctttgcttacaagagatccttcaagatggcggacctaggcctaaccgagtgctgcgggaatagcaatctaagattcgagatttggttccgcaggcggaaagcaagagacacttttgtccttcaggcctccagcctggcaataaagcaggcatggaccgcagacatcagtcacctgctttggcgccaggccgtacacaacaaggaggtgaggatggcagaaatggtctcaatgggggtcgggaataaagcatttagggacatcgccccatccgaagaagccatcaacgatcggacggtcaattacgtgctgaagtgccgcgaggtaaggagccgggctagcattgccgtggctccgttcgatcacgattctctgtacctgggagccagcaattcactgcctggtgatcccgcgtcttgtagcgtgctcgggagtctgaatttgcatctctatcgcgaccccgcacttctcggcctgcggtgcccgctctacccttcattcccagaggaggcagcccttgaggctgaagctgaactcggtggccagccatcactgacagccgaggattctgagattagcagccagtgcccatctgctagtggaagctctgggtctgatagctcttgtgttagcggccaggccctaggcagaggcctggaggatttgccttgtgtgtag

SEQ ID NO: 199774 - DNA, 3333 bp, synthetic construct
  misc_feature 1..3333: note = Description of Artificial Sequence: Synthetic coding sequence
  source 1..3333: mol_type = other DNA
atggagcggcccctggagaacggcgacgagagccccgacagccagggccacgccacagactggaggttcgccgtctgttctttcagggatgcttgggaagaagaagaacctgccagccagatgcacgtgaaggatccgggcccgcccaggcccccagcgggtgctacccaggatgaggaattgcaaggctctccattatctcgcaaatttcagctgcccccagcggccgatgagagtggggacgcacagagaggcacggtggaatcaagctctgtgttgtctgaggggcctgggccttctggagttgaaagcctgctgtgccctatgagttcccatctctctcttgcacagggaacaagagacgtgcaagggcgagctgtgttacttctgtgtgcccatagcccagcctggctacagtccgagtgctcttctcaggagctgatacgcttgctgctctacctcagaagtatccccaggcccgaagtccaggcgctcgggctgacagtgctggtagacgcacggatctgcgctcctagttcctctttgttttctggtctgtctcagctgcaggaggcagctccgggggctgtgtaccaggttcttctggtaggcagtaccttgttgaaagaggtcccatctggactccagctcgaacagctgcccagccagagtctcctgacccacatcccaacagcaggcctccccactagcctgggtgggggcctgccttactgtcatcaggcctggctggacttccggaggagactggaggcactgctgcagaactgccaggccgcttgcgctttactccagggggcgatcgagagcgtgaaagctgtgccccagcccatggagccaggcgaagtgggccaattgctccagcaaactgaggtgctcatgcagcaggtcctagacagcccttggctggcctggcttcagtgccagggaggcagagagcttacctggcttaaacaggaggtgcctgaagtgactctgagcccagattatagaacggcaatggacaaagccgatgagctgtacgatcgggtggatggcctgcttcaccagctaacactccaatcaaatcagaggattcaggccttggagctggtgcagactttagaggcccgggaaagcggcctgcaccagatagaggtgtggttacaacaggtgggctggcctgctctcgaggaagccggcgaaccgagtctggacatgctattgcaggcgcagggcagttttcaagaattataccaagtggctcaggaacaggtcaggcaaggagagaagttcttgcaaccattaacgggctgggaggccgctgagctggacccgccaggggcccggttcctcgcattacgggcccagttaacagagttcagccgagccttagcacagcggtgtcagagattggcggacgccgagcggctattccaactctttcgcgaggcactaacctgggcagaagaaggacagagagtgctcgccgaactggaacaagagcgacctggggtggtgctgcagcagctccagctccattggacccggcatccagatctgccgcctgctcacttccggaaaatgtgggctcttgcgaccggattgggctcagaggctatccggcaggaatgtagatgggcgtgggccagatgccaggatacctggttagctcttgaccagaaactggaggcttctctgaaactgcctcccgtgggaagcactgccagcctttgtgtctctcaagtgccagctgcacccgcgcacccccccctgagaaaagcctacagctttgaccggaatctgggccagagtctgagtgagccagcatgccactgccaccacgccgccaccatcgccgcgtgtaggagacctgaagccggagggggcgcactcccacaggcgagtccgaccgtgccccctccaggcagcagcgacccgcgcagtctgaatcgattacaactggtactcgcagagatggtagccacagagagagaatatgtccgagcactcgagtacaccatggagaactactttcctgaactagacagacctgatgtgcctcagggtctacgcggacagagagcccatctctttggaaatttagagaagctgagggatttccactgtcatttctttttgagggaactcgaggcatgtacacgtcacccccctagagtggcatatgctttcctccggcaccgagtccagttcggcatgtatgccctctattcaaagaacaaaccccggtcagacgctctcatgtcttcatatggacacacgtttttcaaagataagcagcaggccctcggggatcatctggacttggctagttacctgctgaagccgatccagcggatgggcaaatatgcactcttgctgcaggagctggcgcgtgcttgtgggggcccaactcaggagctcagcgccctccgtgaggctcagtctctggtgcatttccagctgagacatggcaacgatttgctggccatggacgctatccaagggtgcgacgtgaatcttaaagagcagggtcagttggtgcgccaagacgaattcgtggttcgaaccggcaggcataagagtgtgcgtcggatatttctgtttgaggagctcttactattttccaaaccacgtcacggcccgactggcgtcgatacttttgcctacaaacgtagcttcaagatggctgatctagggctcacagagtgttgcgggaactcgaatctgaggtttgaaatttggttccgccgccgtaaggctcgcgacacatttgtcttgcaggcaagtagtcttgccataaaacaggcttggactgcggacatctctcacctgttgtggcggcaggccgtccataacaaggaagtaagaatggccgagatggtctctatgggtgtcgggaacaaggcattccgggacatcgcaccgtccgaggaagccattaacgacaggacagtcaattatgtcttaaaatgccgcgaggtccgctcccgagcgagtatcgcagttgccccattcgaccatgacagcctctacctgggggcctccaactcattacctggcgaccctgcctcatgctctgttctaggatcacttaaccttcacttgtaccgcgaccctgcgcttcttggacttcgctgtccactttacccctcattccctgaagaagccgcgctcgaagccgaagctgagctgggcggtcaaccgagtctgaccgctgaagattccgagatcagctcacagtgccccagcgcaagtggatcctcaggttctgactcatcctgcgttagcggccaggccctcgggcgtggcctggaggatttaccgtgcgtctag

SEQ ID NO: 199775 - DNA, 3021 bp, synthetic construct
  misc_feature 1..3021: note = Description of Artificial Sequence: Synthetic coding sequence
  source 1..3021: mol_type = other DNA
atgcactacgacggccacgtgcggttcgacctgcccccccagggcagcgtgctggcacggaacgtgtcaacacgaagttgccctcccaggacttcccctgccgtggacctggaagaggaagaagaggaatcaagtgtcgatggtaaaggcgacagaaaatccacaggcctcaagctgtccaagaaaaaggccagaagaaggcacaccgatgaccctagtaaggaatgtttcactttaaagtttgatctcaatgtcgatatcgagactgagattgtgcctgccatgaaaaagaagtctctgggggaggtgcttctgcccgtctttgaacgaaagggtatcgctctaggaaaagtagatatttacttggaccagagtaataccccattatcccttacctttgaggcctatagattcggtggccactacctccgggttaaagcccccgccaagcccggcgacgagggaaaagtggagcagggcatgaaggatagcaaatcattatctcttccgatactgcggccagccggcaccggaccgcctgcactggaacgggtggacgcacagtcaagaagggagagccttgacatcttagcccctgggagaaggcggaaaaatatgagcgaatttcttggtgaagcgagtatccctggtcaagaaccgccaacaccttcatcctgctctctgccgagcggatcttctgggtctacaaacaccggcgactcttggaagaatagggcagcaagccggttctctggcttcttctccagcggccccagtacatctgcgtttggtcgggaggttgataagatggaacaattagaagggaaactacatacctactctttgtttggtctcccgagactcccccgggggctccgcttcgatcacgatagctgggaagaggaatacgacgaggatgaagacgaggacaatgcatgccttcgcctggaggactcttggagagaactgatagacgggcacgaaaaattgacacgtcgtcagtgtcatcagcaggaggctgtttgggagttgcttcacaccgaagcgagctatattagaaaactgcgagtgattatcaatctatttctctgctgtttactgaatctgcaggaatcgggtctcctttgtgaggtcgaggccgaacgattgttcagtaatatcccggagatagctcagctccatcgacgcttgtgggcttctgtaatggcaccagtgttagagaaggccaggcgcaccagagcactgttgcaacctggggacttcctaaaagggtttaaaatgttcggaagcctgttcaaaccatacatccgctactgtatggaggaggaaggttgcatggaatatatgcgtgggctactccgtgataatgacctgtttagggcttatatcacctgggctgagaagcatcctcagtgtcagcgcctaaagctgtctgacatgttagctaaaccccaccagaggttaacaaagtacccactgttactcaaatctgtcctgcgaaagacagaggagccccgggccaaagaagcagtggtcgccatgatcggctccgtagagagatttattcatcacgtgaacgcttgcatgcggcaacggcaagaaaggcagagattggccgccgtggtttcgcgcattgacgcctatgaggtcgtcgagtcctcttctgacgaagttgacaagctcctgaaggaattcttacaccttgatcttaccgctccgataccgggtgcgtcccccgaagagacaagacaactgttgctggagggctcccttcgcatgaaggagggaaaggatagtaagatggatgtctattgcttcctgttcacggatttgttacttgtcactaaggctgtgaagaaggcagaaagaaccagagtcattcgtcccccactgctcgttgataagatcgtgtgccgagagctgcgcgacccaggatccttcctgctgatctacctgaatgaatttcatagcgctgtcggggcatacacctttcaagcctccggacaagccctctgccggggctgggtggatacaatctacaacgcacagaatcagttacagcaacttagagcccaggagccgcctggcagccaacaacccttgcaatcgctcgaggaggaggaggacgaacaggaagaagaggaggaagaggaggaagaggaggaagaaggggaagacagcggcacgtccgctgcgtctagcccaaccatcatgcggaagtcttctggatcccccgacagccagcattgtgcgagcgatggctccacggagactttggcgatggtagtagtggagcccggtgacactctgtctagtcctgaattcgactccgggcccttttcctcacagtctgatgaaacctccctcagtacgaccgcttcaagcgcaacccccacatcagagctgttgccgctggggcccgtggacgggcgatcgtgttcaatggactctgcgtatggaacgctctcacctacatccctccaggacttcgtggccccaggcccaatggctgagctcgtgccacgcgctccagagagccctcgggtaccctctcctcccccaagccctcgtctccggcgacgaacacccgtgcaactgctgagttgccccccacacttactgaagagtaaatcagaggcctcactcctgcaactgctggcaggcgcaggaacacatggcaccccctcagccccatcccgatcacttagcgagttatgcttggctgttccggctccgggcatacggacacagggctccccccaagaagctggcccttcctgggactgcagaggggcacctagtcccggctcaggccctgggctggttggctgcctcgccggggagcccgctggttcacacagaaagagatgcggggacctcccaagcggcgctagtccccgcgtccagcccgagccaccaccaggcgtgtctgcccagcaccgtaagctgacactggcccagctgtaccgcatacggaccaccctattgctcaacagcaccctgactgcttcagaggtttag

SEQ ID NO: 199776 - DNA, 2793 bp, synthetic construct
  misc_feature 1..2793: note = Description of Artificial Sequence: Synthetic coding sequence
  source 1..2793: mol_type = other DNA
atgcactacgacggccacgtgcggttcgacctgcccccccagggctcagtgctcgccaggaacgttagtacaaggtcctgccctccccggaccagcccagcagtggatctcgaggaagaagaggaagaatcctcagtagacgggaaaggcgaccgtaagtccacaggcttaaagcttagtaaaaaaaaggcccgccggaggcacactgacgacccaagcaaggaatgttttaccttgaagtttgatctaaacgtggacattgaaacagagatcgtgcctgccatgaagaagaagtctcttggggaggtcctgctgccagttttcgaacgtaagggcatcgccctggggaaggttgacatctacctggatcagtcaaacacacctctttcgctgacttttgaggcctatcgtttcggaggtcactatctccgggtgaaagcacctgcaaaacctggagacgaggggaaagtggagcaaggtatgaaagattctaagagcttaagcttacccattctcagacctgcaggaaccggaccgcccgcgctcgaacgggttgacgcccaatcacgccgagagtctctcgatattctggcacctggacgcagaaggaaaaacatgagcgagtttctgggggaagccagtatcccaggtcaggagccccccacccctagtagctgttccctcccatccggatccagcggttctaccaacacaggggactcatggaagaaccgcgcagcaagtagatttagtggatttttttctagcggtccttcgacctcggcctttggacgggaggtggataaaatggaacaactagagggaaagctgcacacctattctttattcggcttgccacgactgcccagaggattgagatttgatcacgactcctgggaagaggagtacgacgaggatgaagatgaggacaacgcctgcttgcggctcgaggatagctggcgcgaactgatcgatgggcatgagaaacttaccagacggcagtgccatcaacaggaagctgtgtgggaactgctgcacacggaagccagttatatccgaaaactgagagtcattatcaaccttttcttgtgctgtttactgaatctgcaagaatctgggcttctctgcgaagtcgaagccgagcgcctgtttagcaacatccctgaaattgcccagctacaccgcagactatgggctagcgttatggcaccagttcttgaaaaggcccgcaggacacgcgccctgttgcagcccggagacttcttgaagggttttaagatgttcggaagcttgtttaagccttacatacgatattgcatggaagaagaaggatgtatggagtatatgaggggcctactaagggataatgacttatttagggcgtacattacctgggcagaaaagcatcctcagtgccagagactaaagctttctgacatgctggccaagccccatcagcggctgacaaaatacccattgctgctgaaatcagtgttacggaagacggaggaaccccgcgccaaggaggccgtcgtagctatgattggatcagtggagcgctttattcatcatgtgaacgcatgcatgcgccagaggcaagaaaggcagcggttggcagccgtagtctcacgaatcgatgcatacgaggtcgtggagtcttctagcgatgaggtagacaaactgctcaaagagttcctgcacttggatctgacggcgcctatccctggtgcttccccggaagaaacacgacagctcctgttagaggggtccctacgcatgaaagagggcaaagattcaaagatggatgtgtactgctttctctttactgacctgctcctcgtgacaaaagccgtaaagaaggctgagcgtacacgcgttattagacctcctctgctggtagataaaatcgtttgcagggagcttagagacccgggaagcttccttttaatatacctgaatgaattccactctgcggtaggggcatatacttttcaagcatcaggtcaggcactgtgtcgaggctgggtggacaccatttataacgcacagaaccagctgcagcagcttcgtgcccaggagcctccaggctctcagcagcccctgcagtcactggaggaggaggaagacgagcaggaggaggaagaagaggaggaagaggaggaagaggagggggaggatagtggcacgtccgccgcctcgtcccccacgatcatgcgaaaaagcagcggctctccagatagccagcattgcgcaagcgacgggtctacagaaactctggcaatggtcgtggtcgagccaggagacaccttgagttcacctgagtttgacagcgggccgttcagttctcaaagcgacgagacaagtctctcgacaacagccagctccgctaccccgacctcagaattgctcccgctaggtccagtggatggcagaagctgttcaatggattccgcttatggcaccctcagccccactagcctccaggactttgtggcacctgggccgatggctgagctcgtcccaagggctccagaatcccccagggttcccagcccccctccctcaccacgtctcagacgacgaacacccgtgcaactcctcagttgccccccacatctcctgaaaagtaaatcggaggcctctctgctccaactattggcaggagctggtactcacgggaccccgtcggctccttcgcgctccctctcagaactctgcttagcggtgccagcccccgcacaggaggccgatcccggcccagcactgcctaaccaggaccaccctgctgcgtag

SEQ ID NO: 199777 - DNA, 3021 bp, synthetic construct
  misc_feature 1..3021: note = Description of Artificial Sequence: Synthetic coding sequence
  source 1..3021: mol_type = other DNA
atgcactacgacggccacgtgcggttcgacctgcccccccagggctccgtcctcgctcggaatgtgtctacaagatcttgtcctcctaggaccagcccagcggtggatctggaagaagaggaggaggaatcaagcgtcgacggaaaaggggacaggaagagcacaggccttaaactgagcaagaagaaggctagacgacgacacaccgacgacccaagcaaagagtgcttcactttgaagttcgatctgaacgtagatatcgagacggagatagtccctgctatgaagaagaagagtttgggggaggtgctgctgcctgtcttcgagcgcaagggcatcgcgctgggaaaagtcgatatctatctagaccaatcaaacactcctctgtctctcaccttcgaggcctaccgatttggtggccactatcttagggttaaggcccctgcaaagccaggcgacgaaggcaaggtggagcagggaatgaaggacagcaaatccctgagcctccctattctgcggccagcgggaactggtcctccagcactggagcgcgttgacgcacaatcccgtcgagagtcattggatattctggccccagggcgcagacggaagaacatgtccgagtttcttggagaggcctctatccctgggcaggaacctccgactccatctagctgctcactacccagtggctcttccggatctacaaatacaggggacagctggaaaaatcgggccgccagtagattctccggattcttctcctctgggccatctacatctgccttcgggagagaagtagataaaatggaacagctcgaggggaagctgcacacctatagcttattcggactcccgagactgcccagaggtctgcgctttgatcacgattcatgggaagaggagtacgatgaggatgaggacgaggacaacgcatgcctgcgactcgaggactcatggagggaactgatcgatggtcacgaaaaactgacaaggcggcagtgccatcaacaggaagcagtgtgggaattgctgcacaccgaagcttcctatattcggaaactgcgggttatcataaacctgtttttgtgctgcttgcttaatctgcaggaatctggtttgctatgcgaggtcgaggcagagagattattctctaatataccagaaattgctcaactacatcggcggttgtgggctagtgtaatggcgccagtgttggaaaaagcacggaggacacgagctctgctgcagcccggcgactttctaaagggcttcaagatgtttggcagcttgtttaagccctatattcgctactgcatggaggaggaggggtgtatggaatatatgcgaggccttctcagggacaacgacctgttccgcgcctacatcacttgggccgaaaagcacccccagtgccagcgcttaaaactttccgatatgctggctaagcctcaccagcgcctgaccaaataccctctgctcctcaagagcgtcctcaggaagactgaggaaccaagagccaaagaggccgtcgtggctatgataggcagcgtggaacggttcatacaccacgtcaatgcttgcatgaggcagcgccaagagcgacaaaggctcgcagcggtagtgtcccgcatcgatgcctatgaggttgtggaatcgagctctgatgaggtggacaagctcctgaaggagttcctgcacctcgaccttactgcaccaatccctggggcttcccccgaagaaactcgtcagctgctactggagggaagcctgaggatgaaggaagggaaggatagtaaaatggacgtttactgcttcctgtttaccgacctgctgctcgtcactaaggcagtgaagaaggcagagcgcaccagggtgattcggcccccacttcttgtggataagatcgtatgccgcgagctgagagatcctggttctttcctgctcatctaccttaatgagttccactcggctgtcggggcatatacctttcaggcctccggtcaggccctttgcagaggttgggtggacactatctataacgcccagaatcagttacagcaactccgggcacaggagccccctgggtctcagcagcctctgcaaagcctagaagaagaggaagatgagcaggaagaggaagaagaagaggaggaagaggaagaggaaggcgaggatagcggaacgagtgctgcttcgtctccaactatcatgaggaagtccagcggctctcctgattcacagcactgtgcgagtgacggctcgaccgaaacactcgctatggttgttgttgaacccggggacaccctaagctcgcccgagttcgattccggccccttctcctcacaaagtgacgaaacctccctgagcacaaccgcgtcatctgccactccgacctcggagctgctgcccctgggacccgtggacggacgaagctgttctatggatagcgcgtatggcaccctgagccccacctctctgcaggacttcgttgcacctgggcccatggccgagctcgtacccagggcccctgagtcaccaagggtcccaagcccccctccatctcctaggcttcgacgaaggacacctgtccagcttctctcatgtcccccacacctgctcaagtcaaaatcggaagcgtccctgctgcagctgctggctggcgccggcacccacggcacaccctcagccccctcaaggtcactgtcagaattgtgcctggccgtgcccgcacccgggattcgaactcagggctctcctcaggaggctggcccaagttgggactgcagaggggccccctcaccgggctccggccccggtctggtgggatgcctcgctggagagcccgctgggagtcatagaaaacgctgtggtgatctcccatcgggcgccagccctagggtgcagcctgagccacctcctggcgtaagcgcacagcaccggaaactgactcttgctcagctctaccgtatcaggactactcttctgctgaacagcacgctgactgcatccgaggtgtag

SEQ ID NO: 199778 - DNA, 3132 bp, synthetic construct
  misc_feature 1..3132: note = Description of Artificial Sequence: Synthetic coding sequence
  source 1..3132: mol_type = other DNA
atggacaagggccgggccgccaaggtgtgccaccacgccgactgccaacaactccacagacggggacccttaaatctttgtgaggcctgcgatagcaaatttcattcaactatgcactacgacgggcacgtgagattcgacctccctcctcaggggagcgtgctcgcccggaatgtgagtactagatcctgcccaccaagaacctccccagctgtcgatctcgaggaggaggaagaggagtcctcagtcgatggaaaaggcgaccggaaatctaccgggctgaagctgtccaaaaaaaaggccagaagacgacacactgacgatcctagtaaggaatgctttaccctgaagtttgatctaaacgtggacattgagacagaaatcgtgcctgccatgaaaaaaaagtctctcggagaagtacttttgccagtgttcgagagaaagggcattgctttaggaaaagtcgacatttacctagatcagtccaacactcctctgagcctgacattcgaagcctacagattcggcggccactacctgcgcgtgaaggccccggctaaacccggcgacgaaggtaaagtcgagcagggcatgaaggactcaaagagtctctctttgcctattctgcgaccagctggaaccggcccccctgccctcgagagggttgacgctcaaagccgccgggagtcgctggacattctggctccgggtaggcggaggaagaacatgtcagagtttctcggcgaggcaagtattcccggccaggagcctcccactccaagctcatgcagcctaccctctggctcctccgggtcaacaaacaccggagactcctggaagaatagggccgcttcacgcttcagcggctttttctcttccggtcccagtacatccgcattcggacgtgaggtcgataagatggagcagcttgaggggaaactccacacctattcattatttgggctgccaaggctgcccagaggtctacgcttcgatcatgactcgtgggaggaggaatatgacgaagacgaagatgaggacaacgcctgccttcgattggaggacagttggcgggagttaatcgatggccacgaaaagcttacacggcggcaatgccaccagcaggaagctgtgtgggagctacttcacactgaagctagttacatccgcaaactccgagttatcattaatcttttcctgtgttgcctcctgaacctgcaggaaagtggattactgtgtgaggtggaggccgaacgcctcttcagcaatattcctgaaatcgcccagctccacagaaggctctgggcctcagtgatggcacccgttttggagaaggctcgtcgaacacgggccctccttcagcccggggacttcctgaaagggtttaaaatgtttgggagtctatttaaaccatacatcaggtactgtatggaggaggaggggtgtatggagtacatgcgcggcctgctgagagacaacgacctgttccgcgcatacataacatgggcagaaaagcacccacagtgtcagcggctcaagctatctgatatgctggcgaagccacaccagcgcctgaccaagtatccgctccttttgaagagcgttctgcgcaaaactgaggaaccaagggccaaggaggcggtggtcgctatgatcggttctgtggagagatttattcatcatgtcaacgcatgcatgagacagagacaagagcgacagagattggcagctgttgtgagccgtatagacgcctatgaggtggtggaatcatcctctgacgaggtcgacaagcttctgaaggaattcttgcatctcgatctgactgcacctattccaggggccagtcctgaggagaccaggcagttgcttctggaagggtctttgcgaatgaaggagggcaaagactcaaaaatggatgtttactgtttcctgtttaccgacctgctgctggtgaccaaggccgtgaagaaagcagagaggacaagggtgatccggccacctctcctggtggataaaatcgtatgtcgggagctacgcgacccggggtcttttctgctgatctacttgaatgagtttcacagcgcagtgggcgcctacacgtttcaggctagcggccaggccctgtgcaggggatgggtggacactatatacaatgcccaaaaccagctccagcagctgagagctcaggagccccctggcagccagcagccgctccagtctctggaggaggaagaagacgagcaggaagaggaggaggaagaagaggaggaggaggaggaaggagaagatagtggcaccagcgccgcttcatcgcccaccattatgaggaagagctcaggttctcctgatagccagcattgtgccagcgacgggtcaactgagacactggccatggtggtagttgaaccaggtgataccctgtcctcacccgaattcgactccggcccatttagtagccagtcagacgaaactagtctttcaacaactgcatcgtctgccacgccgacaagtgagctcctgcccctgggcccagtcgatggacgctcctgctctatggactccgcctatggcacactgtcacctactagcttgcaggattttgtggcacctggacctatggccgaacttgtgcctcgcgcccccgagagtccgcgggtgccctctcctccaccttcaccgcgtcttcgccgcaggactccagtccagcttctgagctgtccaccacatctcctgaagtcaaagagtgaagccagtctcctacagctgctggcaggcgccggcacccacgggaccccttcagcccctagccgctctctgtccgaattatgcctggccgtgcctgcccctggcatccgaactcaggggtccccccaggaagcaggacccagttgggactgccgaggggcaccaagtccaggctcaggcccgggcctggtgggctgtctcgctggcgaacctgccggatcccatcggaaacgctgtggggacctcccttcaggagcctccccaagggtacagcccgagccccctcctggtgtgtctgcacagcatcggaaattgacactcgctcagttgtaccggatccgaactactttgctgctaaatagcacactgacggcctccgaggtgtag

SEQ ID NO: 199779 - DNA, 3021 bp, synthetic construct
  misc_feature 1..3021: note = Description of Artificial Sequence: Synthetic coding sequence
  source 1..3021: mol_type = other DNA
atgcactacgacggccacgtgcggttcgacctgcccccccagggctccgtgctggcaaggaatgttagcaccaggagctgtccccctaggacttcccctgcggtggatctcgaagaggaggaagaggaatcttccgtcgatgggaaaggggaccgaaaatctaccggcctgaagctctcaaagaaaaaagccaggcggagacataccgacgacccgtccaaggagtgcttcaccttgaaatttgacctgaacgtagacatcgagactgagattgttcctgcaatgaagaagaaaagcctcggtgaagtactgctacccgtatttgaacgcaagggcattgccctgggaaaagtggatatataccttgaccagagtaacactcctctatctctgaccttcgaggcatatcggttcggaggacactacttgagggtcaaggccccggccaagcctggggatgaaggcaaagtcgaacagggcatgaaggattccaagtctttatctctgccaattttgcgtccggctgggactgggccaccagcactcgagcgggtcgacgcgcagtctcgccgcgagagcctggatatcctggcgccaggcaggaggaggaagaacatgtcagagttcctgggggaggcaagcattcctggccaggagcccccaactccctcgtcgtgcagtctcccgagcggatcttcaggtagcacaaataccggtgatagctggaaaaatcgcgccgccagccggttcagtggattttttagctcagggccctctacttccgccttcgggcgggaagtagataaaatggagcaattggaaggcaaactccacacctattctctcttcggacttcctcgattgccgagggggcttagattcgatcacgacagctgggaggaggaatatgacgaagatgaggacgaagacaacgcatgcctgcgtctggaagacagctggcgcgaactgattgatggacacgaaaaactcacaaggcggcagtgccatcaacaagaagccgtctgggagttgctccatactgaagcctcttatatccgtaagcttagggtgattatcaatctctttctttgttgcctgctaaaccttcaagaatctgggctcttgtgcgaagtcgaggctgagcggctgttttctaatatcccagagatcgctcagttgcacaggaggttgtgggcctcagtcatggcacctgtgttggagaaagctcgtcgcaccagagccctgctgcagcctggggactttctgaagggatttaagatgttcggcagtctcttcaagccttacatacgctattgtatggaggaggaagggtgtatggaatatatgagagggctgctgagagacaacgaccttttcagggcctatataacttgggccgagaaacacccgcagtgtcagcggctgaagttatcagacatgctggcaaagccccaccagcgcttaacaaaataccctctcctgcttaagagtgtactgcgaaaaaccgaagagcctcgggcaaaagaggcagtggtggctatgatcggctccgtcgaaaggttcattcaccacgtaaatgcctgcatgcggcagagacaagaaagacagcggttggccgccgttgtctccaggatcgacgcttacgaagttgtggaatcgtctagtgacgaggtcgacaaactgctgaaagaatttctgcacctcgatctgaccgcccctatacccggggcgtctccagaggaaacaaggcagctcctgctggagggtagtctaagaatgaaggagggtaaggattccaagatggacgtgtactgtttcctgttcaccgatctgctgctcgttaccaaagcagttaaaaaagctgaacgtaccagggtgatcagacctcccctgctggtagataaaattgtgtgcagagagcttcgcgaccccgggtcattcctgctgatctacctgaatgagtttcacagcgctgtcggagcctatacattccaggccagtggacaggcactgtgtcgtggctgggtggacaccatatataacgcccaaaatcaattgcagcagctgcgcgcgcaggagcctccgggatctcaacagcctctccaaagcttagaagaggaagaagatgagcaagaggaagaggaagaggaagaggaagaggaagaggagggtgaagatagcggaactagcgcagccagcagtccgactataatgcgcaaaagcagtggcagccccgattctcaacattgcgcgagcgacggatccaccgaaaccctcgctatggttgtcgtggaacctggggataccctgtcctccccagagtttgactctggcccattttcaagtcaatctgacgagacctcgctgtctacaaccgccagcagtgccacaccgacttcagagctgctccctctgggacccgtcgatggccgcagctgctcaatggacagcgcctatgggactctgagcccgacctcgctgcaggactttgtcgctcccggacccatggcagagctcgtgcctcgggcccccgaatcacctagagtgccctcccctccacccagccctcggctaaggcgaagaacacctgtgcagctgttgagctgtcctccgcatctcttgaagtcgaagagtgaggccagtcttttacagcttcttgctggcgctggcacacatggcacccccagtgccccttcgaggtcactgtctgagctgtgcctggccgtgcctgcaccgggtattagaacgcagggcagcccacaggaggctggcccttcttgggactgtaggggtgccccctccccaggaagcggccctggactggtgggctgtctggcgggcgaacccgctggttcccatcgcaagcggtgcggtgatctgccaagcggcgcctcgccgagagttcaaccagaacctcctcctggggtgtccgcacagcacagaaagctgactttggcgcagttgtaccggattaggacaaccttactgttaaacagcacgctaaccgcgtcagaggtatag

SEQ ID NO: 199780 - DNA, 2559 bp, synthetic construct
  misc_feature 1..2559: note = Description of Artificial Sequence: Synthetic coding sequence
  source 1..2559: mol_type = other DNA
atgaacagcgtgctgaccaagcacggcagccccccccggagctggctgagtctgtgctccggcacagacgaccaatcgccggctgaaaaaaaggggctccgctgccagaaccccgcctgtatggataaaggccgggcggcaaaggtgtgtcaccacgctgactgccaacagctccacaggcgagggcccctgaatttatgcgaggcttgcgatagtaagttccactccaccatgcactacgatggtcacgtcaggtttgatcttccacctcaagggtctgtgttagcacgcaacgtgagcacgaggagctgtccccccaggacctctcccgcggtggacctggaagaggaagaagaggaaagctccgttgacggaaagggcgataggaaatcaaccggtctaaaactgagcaagaaaaaggcacgccgtcgacatacagacgacccttcaaaggagtgcttcacactgaagttcgacttaaacgtggacatcgagactgagatcgttccagccatgaagaaaaaatctttgggagaggttttactgcccgttttcgaaaggaagggcatagccctcggtaaggtggatatctatctcgaccaaagtaatactcctctctctctaacgtttgaggcttatcgtttcgggggccactatctcagggtcaaagcacctgcaaaacctggggatgagggaaaggtggaacagggtatgaaggattcgaagagtcttagcctgcctatactccggccagccggtacaggaccacctgcactggagagggtagatgcacagagcagacgcgagagcctcgacattcttgcccccgggaggagacggaagaatatgtcagagtttctcggcgaagcaagtataccggggcaggagccacctacaccctctagttgttccctgcccagtgggagctccggctcgactaataccggggactcctggaaaaatagagctgcgtccagattcagcgggttcttcagtagcggaccctcaacctcggcctttggtagggaggtggacaagatggagcagctggaggggaagctgcacacttacagcctcttcggtctcccgagactcccgcgcggcctgcgttttgatcacgatagctgggaggaagaatacgatgaggacgaggacgaggataacgcatgcctaaggctggaagacagttggagggaactcattgacggacacgagaagctcaccaggagacagtgccaccagcaggaggccgtgtgggagctcttgcacacagaagcctcctacattaggaaactcagagtgataatcaacctgttcctgtgctgtctactcaatctgcaggagtccggcctactgtgcgaggtggaggctgagcgcctctttagtaacatacccgaaatcgcgcagctccaccgccgcttgtgggcctccgttatggcccccgttttggagaaggcgcgtcgcacacgtgctctgttgcagccaggggactttctgaaggggtttaagatgttcggctccctctttaaaccttatattagatattgtatggaagaggagggatgtatggaatacatgagggggctgctaagggacaacgacctgttccgcgcttacattacctgggccgaaaaacacccccagtgccagcgcctgaaactctccgacatgttggcaaagccccaccaaagactgacgaagtaccccctgctgctcaaatctgtcctccggaaaaccgaagaacctagggcaaaagaggccgtcgtggccatgatcggctccgttgagcgcttcatccaccacgtgaatgcatgtatgcggcaacggcaagagagacagagacttgctgctgtggttagcaggattgatgcctatgaggtcgtggagagcagctccgacgaggtggataaattgctgaaggagtttttgcatctcgatctaaccgcacctatccctggtgcgagccctgaggagacccgtcagctgttactggagggttcactccgcatgaaagagggaaaagactcgaagatggacgtatactgctttctttttacggacttactgttagtgactaaggccgtaaagaaggccgagcggacccgcgtgatacgtccgcctctgctcgtggataagattgtgtgtcgggaactgcgggatccaggaagttttctactcatatatctcaacgaatttcactcagcagtcggggcctacacctttcaggcatccggacaggccttgtgcagggggtgggtggacactatttacaacgctcaaaatcaattgcaacagcttagagcgcaagagcctccgggatcccagcaacccctgcagagcttggaagaagaagaggacgaacaagaggaggaagaggaggaggaggaggaggaggaggaaggggaagatagcggtaccagcgccgcttcctcccccactatcatgcggaagtcctctgggagcccggattctcagcactggaagctgacccttgcccagctgtacagaatacggaccaccctcctattaaattctaccttaacagcctctgaggtttag

SEQ ID NO: 199781 - DNA, 3252 bp, synthetic construct
  misc_feature 1..3252: note = Description of Artificial Sequence: Synthetic coding sequence
  source 1..3252: mol_type = other DNA
atgaacagcgtgctgaccaagcacggcagccccccccggagctggctcagcttgtgctcgggtacggatgatcagagccctgccgagaaaaagggcctgcggtgccagaaccctgcttgtatggacaaaggacgagccgccaaggtgtgccaccacgcagactgtcagcagcttcaccggagaggaccgctgaatttgtgtgaggcttgtgattctaagttccatagcactatgcattacgacgggcatgtgcgcttcgatcttccccctcagggctcagtcctcgctagaaatgtaagcacgaggtcttgccctcctcgcaccagccctgctgttgatctagaagaagaagaagaggaaagctcagtggatggcaagggcgatagaaaatctaccggattgaaactgagcaaaaagaaggcccggcgtagacacacagacgacccttcgaaggagtgttttacattaaagtttgatctgaacgtggacattgaaaccgagattgttcccgccatgaagaaaaaatcgctgggagaggtgcttctgcccgtgttcgagcgcaaagggatcgcactgggcaaagtcgatatttacctggatcagtccaatacccccttgtctctcacatttgaagcctatcgcttcggggggcactacctgagggtgaaagctccagccaagcccggcgacgaaggcaaggtcgagcaaggcatgaaagattcgaaatctctgtccctgcctatattaagacctgccgggacgggtcctccagcgttagaacgagtcgatgctcaatcacggcgagaatctctggatatcttagctcctggtcgcaggagaaaaaacatgtctgagttcctgggagaggcatcaattccgggccaagagccccctactccttcgtcgtgcagtctcccaagcggatctagtgggagcacaaacaccggggacagttggaagaaccgcgccgcgagtagattttctggcttcttttctagcggcccgtcaaccagtgcatttggtagagaagtggacaaaatggaacagctggaaggaaaactgcatacctattctctgtttgggcttccccgactcccgaggggactgcgtttcgaccatgacagctgggaagaagagtacgatgaggacgaagacgaagataacgcctgtcttaggctggaagacagctggcgggaactcatcgacggccacgagaagctcacgagaagacagtgccatcagcaggaagcggtgtgggagttgctccatactgaagcctcctacatccgaaagttacgcgtcataatcaatctgtttttgtgctgtcttctgaatctccaagagtccgggctgttgtgtgaagtagaagccgaacggctgttcagtaatattcctgagatcgcccagttgcatagaaggctttgggcatccgtcatggcgcccgtgttggagaaggccaggcgcacgagagcgctgctacagcccggagacttcctgaagggcttcaagatgttcgggtctctgtttaaaccatacatcaggtactgcatggaagaagaaggatgcatggagtacatgagaggccttttgagggacaatgacctcttcagagcctatattacctgggctgaaaagcaccctcagtgccagagactgaaattaagcgatatgttggccaaacctcatcagcgcctgaccaagtatcccctcctcctgaaaagcgtgctgaggaagaccgaggagcccagggccaaggaggccgtagtagctatgataggttctgtcgagaggttcatccatcatgtgaacgcatgcatgcggcagcgccaagagcggcaaaggctcgccgccgtagtctcacgaatcgatgcttacgaagtggtcgaaagctcctctgacgaggttgataagctacttaaggaattcctgcatctggaccttacagctcccatccctggtgcctctccagaagagactcgccagttactcctcgagggctctctgcgaatgaaggaagggaaagactccaagatggatgtttattgcttcctctttacagacttgctgctggtcacaaaagctgtgaagaaggccgaaagaactcgagtaatacggccacccctactcgtggacaagatagtgtgccgggagctgcgggacccaggctccttcctgttaatatacctgaatgagttccatagtgctgtgggggcttatacattccaggcttccggccaggccctgtgccgaggttgggtagatactatctataacgcccaaaatcagctccaacagttacgagcccaggaacccccaggttctcagcagccattgcagagcctggaagaagaggaggacgagcaggaggaagaggaagaagaggaggaggaggaggaggagggagaagactccggcactagcgctgcctccagtcccacaatcatgagaaaatctagtggctctccggatagccagcactgcgcatccgatggttccaccgagacccttgctatggttgtcgtcgagcccggcgacactctgtcctctccagagtttgattcgggcccatttagctctcagagcgacgagaccagtctatctactacagctagctccgccaccccgaccagcgagctgcttcccctgggcccagtggacgggcgcagttgttctatggatagcgcttacggaacactcagcccaacctctcttcaggattttgtcgcccccgggccaatggcagaactagtgccccgtgctccagaatctccacgggtaccatctccaccaccaagcccacggctgagacgccgaactccagtccagcttttatcctgccccccccacttgctcaagagcaagtccgaggctagtctgctgcagctcctcgccggcgccgggacacacgggacaccgtctgctccaagcagaagtctaagcgagttgtgtctggccgttccggctcctggaattcggactcagggatcaccccaagaagccgggccttcttgggactgcagaggtgctccatcgccaggtagtggaccaggcttggtgggctgcttggccggggaaccagctggctcccacaggaaacggtgcggggatctcccatcaggtgcgtcgccccgggttcagcctgagcctcctccaggggtctctgctcagcatcgcaagttgaccttagcccaactataccgcattcggacaactttactgctgaatagcaccctcactgcgtcggaggtgtag

SEQ ID NO: 199782 - DNA, 3021 bp, synthetic construct
  misc_feature 1..3021: note = Description of Artificial Sequence: Synthetic coding sequence
  source 1..3021: mol_type = other DNA
atgcactacgacggccacgtgcggttcgacctgcccccccagggctctgttctggcccgcaatgtcagcacacggagctgtccaccaaggaccagccctgcagtggacttagaggaagaggaggaggagtcatcagtggacggcaagggcgatagaaagtcaacggggctcaagctgagcaaaaagaaggccagacgacgccataccgatgatccgtcgaaggaatgtttcacgctgaagttcgatctgaacgtggatattgagacagaaatcgtgcctgccatgaagaagaaatcactgggcgaggttttgttgcctgtcttcgaacgtaaggggatagcgctggggaaggtagacatttatttagatcagtctaataccccgctgagccttaccttcgaggcatacagattcggaggacattatcttcgagtgaaagcgcctgccaaacctggtgatgagggtaaggtagagcagggaatgaaggattcgaagtccctatcacttccgattctgaggccagccggcacggggccacctgcactcgaacgagtggacgcccagtccagacgggaatcgttggacatactggctcccggccggagacgtaaaaacatgtcagagttcctgggagaggctagcatccccggtcaggaaccccccactccaagttcctgttcattaccatctggcagctctggttccaccaatacaggtgactcttggaaaaatcgggcggctagtcgattctcagggtttttctcaagtggccctagcaccagcgcattcgggcgggaagtagacaagatggagcagctggaagggaaactccacacatacagcctttttggcctgcccaggttgcctcgcggtctacgcttcgaccatgacagttgggaagaggaatacgacgaggatgaagacgaggataatgcctgcctgcgcttggaagatagctggagagaactcattgacgggcatgagaaactgacacggcgacagtgccatcaacaggaagccgtgtgggagctcctccataccgaggcatcctacatccggaagctgagggtcataatcaacttgtttctgtgctgcctactcaacctccaggaaagtggacttctatgcgaggtggaggctgaaagactcttctccaatatcccagagatcgctcagctgcaccggcgtttgtgggctagcgtcatggcacccgtgctggagaaggcacgccggacaagggccctgctgcaaccgggtgactttttgaaggggtttaagatgtttggaagtctgttcaaaccctatatccgatattgcatggaggaggaaggctgtatggagtacatgcgaggcctgttgcgagacaacgacctgttccgcgcttacattacttgggcagaaaagcacccacagtgccagagactcaagctgagcgatatgctcgcaaaaccccatcaacgtctgactaagtacccgctcttacttaaaagcgttctgaggaaaacagaggagccaagagctaaggaagctgtggtcgctatgattggaagcgtcgagcggttcattcaccacgtaaacgcgtgtatgagacaaagacaagagcgtcagagattagcagcagtcgtgtcccggattgacgcctacgaagttgtggaaagttcctctgacgaagtggataagctgctgaaagaattcctgcacctggatctgacagctcctatcccaggcgcttccccagaagaaacccgccagcttctcctggaaggaagcttgcgaatgaaggagggtaaggatagcaagatggacgtatactgtttcctgttcactgatctgttactggtgactaaggcagtaaaaaaggcggaaaggacccgcgtgatcaggccaccattgttggtcgacaaaatcgtctgtagggaacttagggatcccgggagcttcctactgatctacctgaatgagtttcactcggcggtcggtgcctatacgttccaggccagcggccaggcattatgcaggggatgggtggacacaatttacaatgcacaaaaccagctccaacagttgcgcgcacaagagcctcccggttcccagcaacccctccagagtctggaagaagaggaggacgaacaggaagaggaggaggaggaggaagaggaagaggaggagggagaggatagcggtaccagtgccgcgagctctccgacaatcatgaggaaatcctctgggagccctgacagccagcactgcgcatcagatggttccacagaaacgctggccatggtagtggtggagccaggtgacaccctgtcgtcgcctgaatttgatagtggtccattctccagtcagagtgacgagacttccctgtcaacgacagcctcctcagctactcccacctcagaactccttccactcggtcccgtcgatgggaggtcttgctccatggattcagcatatgggacactgtcccccacttcactgcaggactttgttgcccctgggcctatggctgagttagtgcctcgcgccccggaaagtcctcgcgtaccgtccccccccccgtctccaaggcttaggcgccgaacaccagtccaattactctcatgcccaccccacctgctcaagagcaaatccgaggcatcactgctgcaattactggcgggagctgggacacatgggacacccagtgcaccttccagatccttgtcggagctgtgtcttgcagtgcccgcacctggaattcgcacccaaggcagtccacaggaggccggtccttcgtgggattgccgaggtgccccatctcccggctccggtcctggcctggtagggtgtctggcgggagagcctgcaggctctcaccggaagcggtgcggcgacctcccgtctggtgcaagtccacgggtgcaaccagagccacctcccggagtaagcgctcagcaccgcaaattgacccttgctcagctctatcgtattcggactactctgctgcttaacagtactttgacggcttcagaagtttag

SEQ ID NO: 199783 - DNA, 3189 bp, synthetic construct
  misc_feature 1..3189: note = Description of Artificial Sequence: Synthetic coding sequence
  source 1..3189: mol_type = other DNA
atggacgaccagagccccgccgagaagaagggcctgcggtgccagaaccctgcttgtatggacaaagggcgtgctgccaaggtctgtcatcatgccgattgccagcagttgcatcggcgtgggccacttaacctgtgtgaagcttgcgatagcaaatttcattccacaatgcactatgacggccacgtcaggttcgacttgccaccacagggatctgtgttagcgcggaatgtttcaacgcgctcatgtccacctcgaaccagccctgccgtggacttagaggaggaggaagaagaaagcagcgtcgacgggaagggggacagaaaatctacaggactgaagctctcgaagaagaaggcccgcaggcggcatacagatgaccccagcaaagagtgttttacgctcaagtttgatttaaacgtcgatattgaaaccgagatcgtgccagcaatgaaaaagaagagcctaggggaagttttactgcctgttttcgagcgtaaggggatcgccctggggaaggtcgatatctacctcgaccagagcaacacccccttgagtctgacgttcgaagcgtataggtttgggggacattatctgcgagtgaaagctcccgctaagccaggcgacgaaggaaaggtggaacaagggatgaaggactctaaatcgctgtcactgccgatcctgcggcctgccggtaccgggcctcctgcgctcgagagagtggacgcgcaaagtagacgcgaatccctggatatcctggcgcctgggaggagaagaaaaaatatgtctgagtttttaggcgaggcttccatccctggccaggagccccctacgccttcttcctgttccctgcctagtggatcatctggctccacaaacacgggcgattcctggaaaaatcgagctgcatccagatttagcggttttttttcaagtggtccatccacgtctgcatttgggcgggaggttgacaagatggagcagcttgagggcaagctacatacttacagcctttttggcctccctcgcctccctagagggctccgattcgatcacgattcctgggaagaggagtacgacgaggacgaggacgaggataacgcttgtctgcgcctggaggattcgtggcgagagctaattgacgggcacgagaaactaactcgtcggcagtgtcaccagcaagaggctgtctgggaactactgcacaccgaggcaagctacatcagaaaattaagggtgataatcaatttatttctatgttgtcttctgaatttgcaggagagcggcctgttgtgcgaagtggaggctgagaggctgttctctaatattccggagatcgctcagttacataggaggctgtgggccagcgtgatggctcccgtgttggagaaggctcgaagaaccagagccttacttcagccaggggatttcctgaagggctttaagatgttcggttctctattcaagccctacattaggtattgtatggaggaagaggggtgcatggagtacatgcgagggctgctgcgcgataatgacttatttcgagcgtatataacctgggctgagaaacacccacaatgtcaacggctgaagttgtccgacatgttagccaaaccccaccagcggcttaccaaatatcccctgctgttgaaaagtgtattacgaaagaccgaggagcctagggccaaagaggcagtagttgcaatgattggtagcgtagaaagattcatccaccacgtgaatgcgtgcatgagacagcgccaggagcgccagagacttgctgctgtcgttagtcggatcgatgcttatgaggtcgtggagagcagctctgatgaagtcgacaagctgttaaaagaatttcttcatctggacctgactgccccaatacctggagcctcacctgaagaaacccgacagctgctgctagaagggagccttaggatgaaggagggaaaagattctaaaatggacgtttattgttttctctttacagacttgcttttggtgaccaaggccgtcaagaaagccgaaagaacccgcgtgatcaggcctccactgctggttgacaaaatagtgtgtcgtgaattgagggatcccggaagctttcttcttatttacctgaacgaatttcactcagccgtgggggcttatacattccaagccagtgggcaagctctgtgtagaggatgggttgacacgatctataatgcccagaatcagctgcagcaactgcgggcacaggaaccaccaggctcccaacaacccttgcaatcgcttgaggaggaagaagatgaacaggaggaagaggaggaggaggaagaggaagaggaagaaggtgaggacagtggcacttcagcagccagttcccccacaattatgaggaagagttccggttctccggatagccagcattgtgccagcgacggctcgaccgagacattggccatggttgtcgtggagcccggggacaccctgtcctccccggaatttgactctggacctttcagctcacagtctgacgaaacctcactgtcaaccacagcctctagcgccaccccgacatcagagctacttccactggggcctgtggacggtaggtcttgttccatggattctgcctacggtactctgagcccaaccagcctgcaggacttcgttgccccaggtccaatggcagagctggtcccacgcgcccctgaatcccctagagttccaagtccccccccgagcccacgcctgagacgccgaacccctgttcagctgctgtcatgccccccacatcttctcaagtctaagagcgaggcttcgcttctgcagctgctggctggggccgggacgcacggaacgccctcagctccatcccgaagtttgtctgagctgtgtctggccgttccagctcctggcatcaggactcaggggagcccccaggaggcagggccgtcctgggactgtcgcggggctccctcgcccgggagcggcccgggcctagtggggtgtctcgctggcgagcccgccggttcccacaggaagcgctgtggcgacctcccgagtggtgcctccccgagggtgcagccagaaccaccaccaggcgtcagcgcccagcaccgaaagctgacacttgcacagctttacagaattcgtaccacacttcttctgaattctacgttgaccgcaagcgaggtgtag

SEQ ID NO: 199784 - DNA, 3228 bp, synthetic construct
  misc_feature 1..3228: note = Description of Artificial Sequence: Synthetic coding sequence
  source 1..3228: mol_type = other DNA
atgggcaccggccccggcgtgagcggccggctggccgccagccggcctggcccaggtcttcctctaagggactctgaacccagctgggctggtggacgggctagggatggagacagccaagtgtgtcatcacgccgactgccagcagctgcaccggaggggtccactgaatttgtgcgaggcctgcgatagcaaattccactcaacaatgcattatgatggccacgttcggtttgacctgccaccacagggaagcgtcctagctcgtaatgtgtctacaagatcttgcccacctcgtaccagtcctgcagttgacctggaggaggaggaggaagagtcttctgtagatgggaagggcgaccggaagtctacaggcttgaaactgtctaagaaaaaagcacggcggcgccacacagatgatcctagcaaggagtgctttaccctgaagtttgatcttaacgtggacatcgaaactgagatcgtaccagccatgaaaaaaaaatccctgggagaagttctgttgccagtcttcgagagaaaggggatcgcacttgggaaggttgacatctacctggaccagtctaacactcctctgagcctgaccttcgaggcgtatcgcttcggtgggcactacctgagagtgaaggccccggctaaacccggagatgagggcaaggtggagcagggtatgaaagactctaaaagtcttagcctgccaatactgcgcccggccgggacaggcccccccgccttagaaagggttgatgcccagtcgaggcgcgaatccctggatattttggcccctggccgacgacgaaaaaatatgagcgaatttctgggtgaagcatccatccctgggcaggagcccccaacaccgtcctcatgttctctgcctagcggcagctctgggtctacaaatacaggcgactcctggaaaaatagagctgcgtctaggttttctggattcttctcatcaggaccgagcacttctgcttttggtagagaagtggataagatggagcaactggaaggtaaattacacacctattctctatttggattgcctagactgccaagggggctccgattcgaccacgattcatgggaagaagagtatgatgaggatgaggacgaagacaacgcctgcttgcgccttgaggacagctggcgggagttgattgacgggcacgaaaagctaacacgcagacagtgtcatcagcaagaggcagtgtgggaattgttgcacactgaggcaagttacatacgaaaattgcgggttatcattaacctctttctgtgttgcctcctgaacctccaggagtccggcctgttatgcgaagtcgaggctgagcggctgttctcgaatatccccgagatcgcgcagctgcatcggcggttatgggcttcagtgatggcaccagtcctggagaaagcacgtaggactagggcacttctgcagcctggagattttctaaaggggtttaagatgtttggcagcctgttcaagccctatatcaggtactgcatggaggaggagggctgtatggaatacatgcgcggactcctccgggacaatgatctctttagagcttacataacatgggccgagaaacacccacaatgtcagaggctgaagctgtctgacatgctggctaagccacaccagaggcttactaaataccctctactcctgaaaagcgtgttgcggaagacagaagagccacgagctaaggaggcagttgtggctatgatcgggtcagttgaaagattcatccatcatgttaacgcatgtatgcgccagaggcaggaacgacaacgcttggccgccgtcgtctctcgcattgacgcgtacgaggtagttgaaagcagctctgatgaagtagacaagcttctgaaggagtttcttcacttggatttaacagctccgatcccaggagcctcacccgaagaaacaaggcagctgttgctggagggcagcctgaggatgaaagagggaaaggattccaagatggatgtgtattgctttcttttcaccgatctgttgctggtgactaaggccgtgaaaaaggcggaaaggactagggttatcaggccccctttgctcgttgacaagatcgtctgccgcgagttgagggaccccggctcattcttgcttatctacctgaatgaatttcattccgccgtgggtgcgtacaccttccaggcctccggtcaggctctctgtcgaggctgggttgacactatctacaacgcgcagaaccaactccaacagttacgcgcccaggaacctcccggatcacaacagcctctgcagagtctagaagaagaggaggacgaacaagaggaagaggaggaagaggaggaggaagaagaagagggggaagattccggtacatccgccgcaagtagccctacaataatgcgcaagtcctcaggaagccccgattctcagcactgcgccagtgatggctctacagagacactagccatggttgttgttgaaccgggggatacgttgtcaagcccagaatttgatagcggcccttttagcagccagtcggatgagacttcactcagtaccaccgccagtagcgccaccccaacttccgagctcctgcctctgggtcccgttgatggcagatcttgctcgatggacagcgcgtatggcacactcagtccgacatctctgcaggactttgtggcccccggtccaatggccgaactggtaccaagggcaccagaatctcctagagttccgagtccacctcccagccctcgcctaagacgccgaacacccgttcaattactgtcatgtcctccacacctgttgaagtccaaatcagaggccagcctcctgcagttattggcaggagcagggacacacgggacgccctctgctccatctcgctccctctccgagctctgtctggccgtgcccgctccaggtattaggactcagggtagtccccaagaggcggggccatcatgggattgccgcggggcgccttctccgggatctggacccggactggtcggctgcctggccggggagccagctgggtcacacaggaagcgttgtggtgacttgccatcaggggcatctcctcgagtgcaacctgaacctccgccgggagtctccgcccagcacagaaagcttacgcttgcccagctgtacagaattaggactacattgctgctgaacagcacgctcacagcttccgaagtctag

SEQ ID NO: 199785 - DNA, 2739 bp, synthetic construct
  misc_feature 1..2739: note = Description of Artificial Sequence: Synthetic coding sequence
  source 1..2739: mol_type = other DNA
atgaagaagaagagcctgggcgaggtgctgctgcccgtgttcgagagaaaagggattgcactcggaaaagtagacatttatctggatcagtccaacacacccctgtcactgactttcgaggcatacagatttggggggcattatctccgagtcaaggctcctgccaaacccggtgacgagggaaaggttgagcagggcatgaaggactctaaaagcttgagcctacccatccttcgccctgcagggacgggaccacccgccttggagagggttgacgcgcaaagcaggagggaaagccttgatatactggctccaggccggcgccgtaagaatatgtccgagtttctgggcgaagcctcaattccaggacaagaacctcccactccatcaagctgctctcttccctcagggtcatctggtagcaccaataccggggattcctggaaaaatagggctgctagcagattttcagggttcttttcttccggcccatcaaccagcgcgtttgggcgagaggtggacaaaatggaacagcttgaaggtaagttgcacacctactccctttttgggctgcctaggctaccacggggtctcagatttgatcacgactcatgggaagaggaatatgatgaggatgaggacgaagataacgcttgcctcaggctcgaggatagctggagagagctgatagatggccacgaaaagctgactcgccgccaatgccatcagcaggaagccgtgtgggagctactacataccgaggcatcctatatccggaagcttcgggttattattaacctgttcctgtgctgcttactgaacctgcaagagtcaggactgttatgcgaggtggaggcagagagactgtttagcaatattccagaaattgcacagctacatcgtcgcctgtgggcttctgttatggcccccgtactagaaaaggccagacgcacccgggctctgttgcagcccggggatttcctgaaagggttcaaaatgtttggctcactgttcaaaccatatatccgctattgcatggaagaagagggatgcatggaatatatgaggggtctcttgagagataacgacctctttagagcatatatcacttgggccgagaagcatccgcagtgtcaacgcctaaaactgtccgacatgttggcaaagcctcaccagcgcctgacaaagtacccgctactgctcaagtctgtgttgaggaaaaccgaagagccacgcgcaaaggaagctgtggtggctatgattgggtctgtcgaacgttttattcaccatgttaacgcatgcatgaggcagcgccaggagagacagcggctcgccgccgtagtcagtagaattgatgcctatgaagtggtggagtcttcatccgacgaagtggacaagctgctgaaggaatttctccatctcgatctgactgcgcccatacctggggcctcgccagaggaaacgcgacagctgctgctcgagggctctcttagaatgaaagaggggaaggattcaaagatggacgtgtattgtttcctcttcacggatctgctgctcgtcactaaggccgtgaaaaaggccgaaagaacccgcgtgatcaggccacccctgttagtcgacaaaatcgtgtgccgcgagctgagggatcctggctcatttcttctgatttacctaaacgaattccattccgctgtgggcgcatacacatttcaagctagcggacaggctttatgtcgaggttgggtggacaccatttataacgcgcaaaaccagctccagcagttgagggctcaggagcctcccgggtcacaacagcctttacaaagcctcgaggaagaggaagacgagcaggaggaggaggaggaagaagaagaggaggaggaggagggggaagatagcggtacaagcgcggcaagcagccccaccatcatgaggaagtcaagcggctcacctgactctcagcattgcgctagtgatggcagcacagagaccctcgctatggtagtcgtggagccaggggataccctgagtagcccagaattcgatagcggacccttcagttctcagagtgacgaaacatcactgtccacgaccgcttcttctgccacaccgacatctgaacttcttccgctggggcctgtggatggcaggagttgcagcatggactctgcctatggcacactctcccccactagtcttcaagattttgtggctcccggacctatggcagagctggtcccgcgagcccccgaatcccctagagtcccttctccacccccttccccgaggttacggagacgcacaccagtgcagctccttagctgccctccacacctgttgaagagcaaaagcgaggcttccctcctgcagctgctcgccggggccggcactcatggtacgccctccgccccatcacgctccttgtcagagttgtgccttgctgttccagctcctgggattcggactcagggtagcccgcaggaagcgggcccctcatgggactgtaggggcgcgccttcaccaggaagcgggccaggactggttggatgtctggccggagagcccgctggatctcaccgaaagcgttgcggcgaccttccctcgggcgcgagtccacgcgtacagccggaaccccccccaggggtgtctgctcagcatcgcaaactcactctagcccaactgtacaggataaggaccacactcttactcaactcaaccctgactgctagcgaggtatag

SEQ ID NO: 199786 - DNA, 3258 bp, synthetic construct
  misc_feature 1..3258: note = Description of Artificial Sequence: Synthetic coding sequence
  source 1..3258: mol_type = other DNA
atgagcctgggcgagcggggcagcccccagaccttcggcggcagcagtgttagcaaaggctccgacgccggacacgatcaatcccctgccgaaaagaagggtctaagatgccagaaccccgcatgcatggacaaaggaagagccgctaaagtttgtcatcacgcggactgccagcagctgcacaggcgggggccccttaacctgtgtgaggcttgtgattccaagtttcactcaaccatgcattatgacgggcacgtgagattcgacctaccaccacagggctcagtgttggccagaaatgtgtcgactagatcatgtcctccaagaacctccccggcagtggacctggaagaggaggaggaggaaagctctgttgatggaaaaggagatcggaaaagtaccggcttaaagttatcaaagaagaaggctaggaggagacatacagacgatccgagcaaggagtgttttacactcaaatttgatttgaacgtggacattgagacggaaattgtgcccgcgatgaaaaaaaagtcactgggagaggtgctgctgccggtgttcgaacgaaagggcatagccctgggcaaagtggacatctatctggatcagtcaaacactccactctctttgaccttcgaggcgtacagatttggcgggcactacctccgggtcaaggcccccgcaaagcctggggatgaaggcaaggtggaacagggcatgaaggacagtaagtcgctatcattacccatccttcggccagctggcactgggccacctgctctggaacgggtggacgctcagagcaggagagagtcactagacatcctggctccaggtaggcgacggaaaaacatgagcgagtttttaggcgaggccagcatccctggccaggaaccccctacaccatcatcttgtagtctcccaagcggctcctccggatcaacaaataccggggactcttggaagaatagggccgcctcgagattctcaggcttcttttcgagcggaccctcaactagcgcattcggtcgtgaggtagacaaaatggagcagctggaggggaagttacacacctattccctgttcgggctgcctagactccctagaggtctcaggttcgatcatgatagttgggaggaagagtacgacgaggatgaggacgaggacaatgcctgcctgaggctggaggacagctggcgcgaactgatagacggacatgaaaaactaactcggcgtcagtgtcaccagcaagaggcagtctgggagttgctgcatacagaggcctcatacatccgtaaactgcgcgttatcataaatctttttctttgttgtttgctcaacctacaagagtctgggctgctgtgcgaagtcgaggccgaacgactcttttcaaacataccggagatcgcacaactccataggaggctatgggcaagcgtaatggctccggtgttggaaaaagccaggcgcactagagcactcctgcagcctggagactttctcaaaggattcaagatgtttggatccctgttcaagccttatattcggtattgcatggaagaagagggctgtatggaatacatgcggggtctgctgcgggacaatgacctattccgggcctatatcacatgggccgaaaagcacccacaatgccagagactgaaactgtctgacatgctggcaaaaccgcaccaacgcttaacaaaataccccttactgctaaaaagcgtactccggaagacggaagaacccagggccaaagaagctgtggttgcaatgatcggatcagtcgaacgcttcatccatcacgtcaatgcttgtatgagacagaggcaagaacggcagcgactggctgccgtggtgtctcgcatcgacgcttacgaggtagttgagtcgagttcggatgaggtcgacaagctcctcaaagagtttctgcatcttgatttaaccgctccaattcccggtgcatcccccgaggaaacaaggcagctgcttttggagggatccttgagaatgaaagaaggcaaggatagtaagatggatgtgtattgttttcttttcacagacttgctgctagtaaccaaagccgtgaaaaaggcagagcggaccagagtcattagaccacctctcttagtagataaaatcgtctgtagagaattgagggaccccggtagtttcctcctaatctatcttaatgagttccactccgcagttggagcgtatacatttcaggcaagcggccaggctctctgcagagggtgggtggatacaatatataatgcgcagaatcagttacagcagctgagagcccaggagccacccggatctcagcagccactgcagtccctggaggaggaggaggacgagcaggaagaggaagaagaagaagaggaagaggaggaagaaggtgaggatagcggcacgagcgccgcctccagccccaccataatgcgtaaaagcagcggttctccggattctcagcactgcgcctctgacggcagtacagagacactggccatggtggtagttgagcccggcgacacgctgagcagcccggaattcgattccggccctttttctagtcaatctgacgagacatccctgtcaacaaccgcctcatccgctaccccaacctccgagttactccccttagggcctgtggacgggcggtcttgttctatggacagcgcttatgggaccctctcgcctacatcactccaggattttgtcgccccaggtcccatggccgaactggtcccccgagccccagagtctcccagggtgccctctcccccaccttctccccggctaagacgtcgaacaccggtgcagttactgtcctgtccacctcatctactgaaaagtaagtccgaggcttccctcctgcaactgctggctggcgccggaacccatggaacaccttcggccccaagtagatcgttgtcagaactgtgtttagcggtcccagccccaggcatccgcacgcagggaagtccccaggaggctgggccaagctgggattgtaggggcgcaccatctcccgggtctgggccaggactggttggatgtttggccggggaacctgccggaagccaccgtaaaaggtgcggcgaccttcccagcggagcctcacctagagtgcagcccgagccccccccgggcgtgagcgctcagcataggaagctcactttggctcagttatatcggatccgcacaaccctgctactgaattctacactcacagctagcgaggtgtag

SEQ ID NO: 199787 - DNA, 2793 bp, synthetic construct
  misc_feature 1..2793: note = Description of Artificial Sequence: Synthetic coding sequence
  source 1..2793: mol_type = other DNA
atgcactacgacggccacgtgcggttcgacctgcccccccagggctccgtgcttgccagaaatgtgagcactcgttcttgtccgccacggaccagtcccgccgtggacctggaagaagaggaggaagagtccagcgtggacggcaagggagaccgtaagtcaactggtctgaaactcagcaaaaagaaggccaggaggcgacacacagatgatccatcaaaagaatgcttcacactgaagttcgatctgaatgtagacatcgagacagaaatagtaccagccatgaagaagaagagtctgggcgaggttttacttccagtgtttgagcgtaagggaattgcgctaggcaaggtagacatatacttagatcagtccaacacgcccctatccctgaccttcgaggcctataggtttggtggacattatcttcgggtgaaggctcccgccaagcctggagacgaggggaaggtggaacaaggcatgaaagacagcaaaagtctcagcttaccaatactgagaccagcgggaacaggaccccccgctctcgaacgcgtagacgcgcagtcccgcagagagagcttagatatccttgccccagggcggcgtagaaaaaacatgagcgaatttcttggcgaagctagcatcccgggccaggaaccgccaacgccttcgtcatgtagcttgccctcaggatccagtgggtctacgaacacaggagactcttggaaaaatcgtgccgccagtagattctcaggtttcttctcctctggaccgagcacctcagcttttggacgggaggtggacaagatggagcagctggaggggaaactgcacacctattcactgttcggattgcctagactcccgcggggcctgcgctttgatcatgatagctgggaagaagaatatgatgaggatgaagatgaagacaacgcctgtctgcgcttggaggacagttggagagagctgatcgatgggcacgagaagctgaccagacgacagtgtcatcagcaggaggctgtgtgggagctgcttcacaccgaggctagttacattagaaagctgcgggtgatcatcaacctgttcttgtgttgcctgttaaatctccaggagagcggtctactgtgtgaggtggaagcagaacggctgttcagtaatatccccgagatcgcacaattgcatcggcggctctgggcgagtgtaatggctcccgtgctggagaaagcgcggcgcaccagagctcttctccagccaggtgacttcctgaagggctttaaaatgtttggcagcttattcaaaccttacatcagatattgtatggaggaggagggatgcatggagtatatgaggggattgttgagagacaacgacctgtttagagcctacattacttgggcagagaaacatccccagtgccaacgcctcaaacttagcgatatgcttgccaaaccgcaccagcggcttacaaagtacccgcttctgctgaagtccgtgcttcgtaagaccgaggagccccgcgcaaaggaagctgtcgttgctatgattggaagcgtggagaggttcattcaccacgtgaacgcctgtatgagacagcggcaggaaagacagaggctggccgctgttgtaagcaggattgacgcgtacgaggtggtcgaaagcagctcagatgaagtcgataagctgctaaaagagttcttgcaccttgatctcacagcccccatacctggcgcttcaccagaggagacaagacagcttttactggaaggcagcttgcgaatgaaagaggggaaggatagcaaaatggacgtatactgttttttattcactgatctcctgctcgtgaccaaagccgtgaagaaagctgaaaggacgcgggtcatacgacccccccttcttgtcgataaaatagtttgtcgggaactccgtgatcctggctccttcctgctgatctacctgaacgaatttcacagcgctgtaggcgcttatacattccaggctagcggccaggcattgtgccgcggctgggttgatactatctataatgcacagaaccaactccagcagctccgcgcacaggaacccccagggagccaacagccattgcagagcttggaagaggaagaagatgagcaggaggaggaggaggaagaagaggaagaagaggaggagggagaagatagcggcacctccgcggcctctagccccaccattatgagaaaatcgtccggaagccccgattcccagcactgcgcttctgatggcagcaccgagacactggctatggtggtcgtcgagcctggagataccctgagctctcctgaatttgattctggccctttttcttcacagtctgatgagacctctctgagcaccactgctagctcagcaactccgacaagcgaacttcttcctctcgggccagtcgatggcagatcctgcagtatggatagcgcttacggaacgctaagtcccactagtctgcaggattttgtcgcgcctggacccatggctgaattggtacctcgggctccggaatcccccagagtgccctcaccccctccgtcaccccggcttagacggcgcacgcccgtacaactgttatcatgccctccccatcttctgaaatcaaagtctgaagcctcactgcttcagctccttgccggcgccggaacacacgggactccttccgctccaagccgtagccttagtgagctgtgcctggccgttccggcacccgcccaggaggccgatcctggaccagccctccccaaccaagatcatcccgcggcttag

SEQ ID NO: 199788 - DNA, 2373 bp, synthetic construct
  misc_feature 1..2373: note = Description of Artificial Sequence: Synthetic coding sequence
  source 1..2373: mol_type = other DNA
atgaaggccttcggccccccccacgagggccccctgcagggcctggttgctagccgaattgaaacgtatgggggtagacacagagcctcagctcagtctactgcaggccgattatacccgagagggtatcccgtgctcgacccaagcagacgccgtctccaacagtatgtgccgttcgcaagaggttccggacaagcccggggcctcagcccaatgcgactccgggacccggagcccgagaaaagacatggaggacatgtaggagccggactcctgcactcccccaagctgaaagagcttacaaaagcccatgaactggaagtgcggctccatacattttccatgttcgggatgcccaggttgccaccagaggacagacggcactgggagataggtgagggcggtgacagcgggttaaccatcgaaaagtcctggagagagcttgtaccaggtcacaaggagatgtcgcaggaactatgccaccagcaggaggccctgtgggagcttcttacaacagaactgatttatgttcgaaagcttaagatcatgacagatctcttagcagctgggctcctgaatctccaacgcgtcggacttttgatggaagtttccgctgagaccctttttggcaacgttccatctcttatcaggacacaccggtctttctgggatgaagtgcttggccctacacttgaggagactcgggctagcgggcaacccttggacccaattgggttacaatctggtttcctcaccttcgggcagcgctttcatccctatgtccagtactgcctcagagtgaaacagaccatggcgtacgcacgggaacaacaggagactaatcccctttttcacgcctttgtgcagtggtgtgaaaaacataagcgttccggccgccaaatgctgtgtgaccttctgataaagccacatcagagaatcactaagtatccattgttactccatgccgtgctcaaacggagcccagaggcacgggctcaggaggctctcaacgcgatgattgaggctgtggagagcttcctccggcatatcaacggccaggtgagacagggtgaggaacaggagtcgctcgcggccgcggcccagagaattggaccctacgaagttctagagccaccaagcgatgaagtagagaagaatctcaggcccttcagcaccctcgacctgacttcccccatgctcggcgtcgcatcagagcatacaagacagttgctactggagggccctgttcgggttaaggaaggaagagagggcaagcttgacgtttatctgtttcttttttctgacgtgctcctcgtgactaaaccccagcggaaggcagataaagccaaggtcatccgccccccgctgatgctggagaagctggtttgccagcccctaagggacccaaatagttttctgctgatccacctgacggagtttcaatgtgtctccagcgctcttctagttcattgtccctccccgaccgatagggcacagtggctggagaaaactcagcaggcacaagcagctctgcaaaagttaaaggccgaagagtacgtgcagcagaaacgagaacttctcaccctctatcgtgaccaggatagagagtcaccgtccacacgcccaagtactccctccctggaagggagtcagtcaagtgctgaaggcagaacgccagagttctctacgatcatcccccatctcgtggtcacggaggacaccgatgaggacgctcccctggtccctgacgacaccagcgattcaggttatggcacgctaataccagggacaccaaccggctcccgctctccactttccaggcttaggcagagggccttacgtagagatccacggctcacgttctctacacttgagctcagggatatacctctgcggcctcacccgcccgacccacaggcccctcaaagaagatctgctccggaattgcctgaaggaatcctgaagggcgggagccttccgcaggaggatcctccaacctggtctgaagaggaggacggagctagcgaacgcggcaatgtggtggtcgagaccctgcaccgcgcgcgactgaggggccagctgccctcaagtcccacccacgcagattccgcgggcgaatcaccttgggaatccagtggggaggaagaggaagagggcccgctgttccttaaggctggccacacctctctcaggccaatgagagccgaagatatgctgagagagataagggaagaattggcttcccagcggatagagggggccgaggaaccccgggattccagacctaggaagttaacacgagctcagttgcagcggatgaggggtcctcatattattcagctggacactcccctcagcgcttccgaagtttag

SEQ ID NO: 199789 - DNA, 963 bp, synthetic construct
  misc_feature 1..963: note = Description of Artificial Sequence: Synthetic coding sequence
  source 1..963: mol_type = other DNA
atgtgcccccgggagggcggccgggccagcaccatccaccagaagaccgaaaaggcattcggtcagctgttgtgccagcctcttggtgagcccaagattcagcaccctctgaaggccgctctgcaaaaactgaaggctgaagaatacgtgcagcagaaaagagagttactaacgctgtaccgggaccaggatcgcgaaagcccttctacccggccctccacgccgtccctggaaggcagtcagagttcggcggagggcaggacaccagaattctccactattattccacacctcgtcgtcacagaagacactgatgaggacgcacctctggtgccagatgacacatccgactcaggttacgggacgctcattcctgggaccccaacaggcagccgttctcctttaagcagattgcgccagcgggctttgcggcgggacccccggctgacattcagtactcttgagttgcgggatattcctttaagaccccaccctcctgacccgcaggcccctcagaggagatccgcaccggagctgccagaaggaatactgaagggcgggagcctgccgcaggaggatcctcctacttggagcgaggaagaagacggcgcctccgagcggggtaacgtggttgtcgagactttgcatagagctcgcctccgcggtcagctcccatccagcccaacacacgccgactcagccggcgagtccccttgggaatcatccggcgaggaggaggaggaaggtcccctgtttctgaaggccggtcacacttctctgagaccaatgagagccgaagatatgctcagggaaatccgagaggaactcgcttctcagagaatcgagggtgccgaggagccccgcgactcaaggccccgcaagctcacgcgagctcagttgcaacggatgcgcggcccccacataatccagctggacacccccctatccgcttctgaggtctag

SEQ ID NO: 199790 - DNA, 2373 bp, synthetic construct
  misc_feature 1..2373: note = Description of Artificial Sequence: Synthetic coding sequence
  source 1..2373: mol_type = other DNA
atgaaggccttcggccccccccacgagggccccctgcagggcctggtcgcctctaggatcgagacttatgggggccgacaccgcgctagtgcccaatccacggctggacgcctctatccacgtggctaccccgtgttagatccaagcagaagaagattgcagcagtacgtcccctttgcccggggtagcggacaggcacgtggcctctccccgatgaggctgcgtgatccagagcctgagaagcgtcatgggggacatgtgggcgcgggtctgctgcattctccaaaactgaaagagctcactaaagctcacgagctggaggtgcgactgcacacatttagtatgtttggtatgcctcgcctgccgccagaggatagaagacactgggagattggagaaggaggggactctggcctgactattgaaaaatcttggcgtgagttggtgccaggtcacaaggaaatgtctcaggaactctgccaccagcaagaggctctgtgggaactccttaccactgagctcatttacgtcaggaaactgaagatcatgactgatctcctcgccgctggactgctcaatctgcagagagtgggcctcctaatggaagtctctgcggaaactctctttggcaatgtaccaagcctgatacgcacccataggtcattctgggatgaagtgctgggacccactctggaggagacacgggcttcgggacagcccctggaccccatcggtctgcaatccgggttcctgacattcggccaaagattccacccgtatgtccaatattgcctgcgcgtgaaacagactatggcctacgctcgcgaacagcaggagaccaaccccctcttccatgcctttgtgcaatggtgcgaaaaacacaaacgctccgggcgccagatgctttgcgacttactgataaagccccaccagcgcattacaaagtatcctctgctgctgcacgctgtgttgaagcggagtccggaagcccgcgcacaggaggcactaaacgcgatgatagaagccgtggagagcttcctcaggcacatcaatggtcaggtgcgacagggcgaggagcaagagagtctggccgcagcagcccagaggattggaccatacgaagtgctcgagcctccctcggacgaggtggagaagaacctgcggccttttagcacactggatttgacctctccaatgctcggggtggccagcgagcacaccaggcaactgctgctcgagggcccagtcagagtaaaagaggggcgggaaggcaaactggacgtgtacctgtttttgttttcagatgttctcctggtcaccaagccccagcgcaaagccgacaaggccaaagtgatcagacccccactgatgcttgaaaaactggtgtgccaaccgctgcgtgatccaaacagcttccttctgatccatttgacagagtttcagtgcgtaagcagcgctctattggtgcactgcccatccccaaccgaccgcgctcagtggctggaaaagactcaacaagcccaggctgccctgcagaagctgaaggccgaagaatacgttcagcaaaagcgggagctgttgactttgtaccgagaccaggacagggaatccccctcaaccagaccttcaacgccttctttggaaggctctcagagttcggctgagggccgaactccggagtttagtaccattatccctcacctggtcgtcactgaagatactgacgaagacgccccccttgtgcctgacgacacttctgattccggctatgggactctcattcctgggacaccaaccggatcccggagccccctgtcacggctgcgacagcgagctttaaggcgggacccccggctcacattttcgacccttgagctgcgtgacattcctttaagaccacaccccccggacccccaggccccacagcgccgcagtgcccctgagttgcccgaaggaatcctaaaggggggttctcttccgcaagaggatcccccgacttggtctgaggaggaggacggagcctccgagcgggggaacgtagtcgttgagactctacacagagctagacttagagggcagttgccttcctcaccaacccacgcggactctgccggcgagagcccctgggaaagttctggggaggaggaagaggaaggccctctgttcctcaaggccgggcacacatcacttagaccgatgcgcgccgaagacatgctgcgcgagatccgagaggaactggccagtcaacgtatagagggcgctgaggaaccacgcgactctcgacctaggaaactcacgcgtgctcagttgcagcggatgcgcggccctcacattatacagcttgacactcctttgtctgcctcagaagtctag

SEQ ID NO: 199791 - DNA, 2277 bp, synthetic construct
  misc_feature 1..2277: note = Description of Artificial Sequence: Synthetic coding sequence
  source 1..2277: mol_type = other DNA
atgggctgccggctgcacgcccccggcgagaaggccgcccacgacccaagcagacgacggctgcagcaatacgtgccattcgcccggggctctggccaagcccgtggcttatctcctatgcgcctgcgtgaccccgagcccgagaagcggcacggaggccacgtgggcgccgggctacttcattctcctaaactgaaagaactcacaaaggctcacgaactggaagtgaggctgcatactttctccatgttcggtatgcctcgactcccacccgaggaccgccgccactgggaaatcggtgaggggggagacagcggactcacaattgaaaagagctggcgggagctggtgccaggacacaaggagatgtcacaggagctctgtcaccaacaggaggcactatgggagttgctgacaaccgaactgatctatgttcgcaagctgaaaatcatgaccgatctgctggcagccggcctgctcaatctgcagcgggtgggactgctgatggaagtctccgcggagacactctttggcaatgtgccttctttaatccgcacacacaggagcttctgggacgaggtgttaggtccgaccctcgaggagacacgcgccagcggtcaacccctcgatcccattggcctgcaaagtgggttcctgacatttggacagcgattccatccctatgtgcagtattgcttgagagtgaagcaaaccatggcctacgcccgggagcaacaagagaccaatcccttgtttcacgcctttgtgcagtggtgtgagaaacataagcgatctggcaggcagatgctctgtgacctgctgataaagcctcatcagaggatcacaaagtaccctctactgctgcacgcagtgctgaaacgaagccccgaggcccgagctcaggaggcccttaacgccatgatcgaggccgtggaaagctttctgaggcatatcaacggacaggtccgccagggtgaagaacaggagagccttgccgccgcagctcagcggattggcccctatgaggtactggagcctccctctgacgaggtcgagaaaaacctcagacctttctcaacactggatttgaccagccctatgctcggagtcgccagtgagcatacaagacagctattgttagaaggccccgtgcgagttaaagaaggaagggagggcaagctcgacgtgtatctgttcctgttttcggacgttctgttggttaccaagccccaacgcaaggcagacaaagcaaaagtaattagaccccccctgatgctcgaaaagctcgtctgtcagcctctgagagatcccaactctttcctcctcattcacctcacagagttccaatgtgtttcctccgctctgctggtccattgcccttctccaaccgatcgagcacaatggctggagaagacccaacaggcacaggcggccctacagaagcttaaagcagaggaatacgtgcagcagaaacgcgagcttctgaccctctaccgggatcaagaccgggagtccccttcaacacgcccctccactcccagtctggagggttctcaatcatccgccgaggggcgaacaccggagttcagtacgataatacctcatttggtggttacggaggacaccgatgaagatgcgcccttggttccggacgatacatcagattccggttacggaaccctgattcctgggactcccactggcagcaggtcacctctgagccgattgaggcagcgggccctccgcagagacccgagactcaccttcagtacgctggaactgcgcgacatccccttgaggccacaccccccagatccccaggctccacagcgccggagtgcacccgaactgcccgagggaatcttgaagggcggaagcttaccgcaggaggacccccctacatggtccgaagaggaggacggcgcctctgaacgaggcaatgtggtggttgagacgctgcaccgagctcggctgcgggggcagctgccctcctcaccgacgcacgccgactctgccggtgagagcccatgggaatcgtctggagaggaagaggaggaggggccactctttctcaaggcggggcacacgtccctcagacccatgcgcgccgaagacatgctgcgtgagatcagagaagagctcgcatctcagcggatcgagggtgccgaagagccaagagacagcaggccaagaaaattaaccagagcacagctacaaagaatgaggggcccacatatcatccagctggatacccccctgagtgcctccgaagtttag

SEQ ID NO: 199792 - DNA, 4482 bp, synthetic construct
  misc_feature 1..4482: note = Description of Artificial Sequence: Synthetic coding sequence
  source 1..4482: mol_type = other DNA
atggccgagctgagcgagcccgagggccccgtggactggaaggagaggtgcgttgcattagagagccagctgatgaagttcagggtacaagccagcaaaattagggagttgctggctgagaaaatgcagcaactggagcggcaagtaatcgatgccgagaggcaggctgaaaaggcattccagcaggtccaggttatggaagataagcttaaggctgctaacattcagactagtgagagtgagactagactgtacaacaagtgccaggacctggaatccctaattcaggagaaggatgatgtcatccagaatctggagctgcagcttgaggaacaaaagcagattcgcattcaagaagctaagatcatcgaagagaaggcagccaaaataaaagagtgggtcactgttaaactaaatgagttagagctggaaaatcagaatctgcgcttgatcaatcaaaatcagacagaggaaattaggactatgcagtcaaaactccaggaggtccagggaaaaaaatctagcactgtctcgactctcaagctaagtgagggccagagactaagtagcctaacttttggatgttttctcagcagggcgcggagcccaccgcaggtagtgaaatctgaagaaatgtcaaagatatccagcaaggagccagagttcacggaaggaaaagacatggaagagatggagattccagagaaatccgtggataaccaggttctcgaaaacaatcgaggacagcggaccttgcatcaaaccccctgtggttctgagcagaaccgcaagacgagaacaagtttcgctactgacggaggcatcagtcagaatagcggcgcaccggtgagcgattggagctctgatgaggaagatgggtcgaagggccgatctaagtcacgttgcacatccacgctgtcaagccatactagcgaagagggcgtacaatgcagccggatggggtctgagatgtatctgactgcttctgatgactcttcaagcatttttgaggaagagacatttgggatcaagaggccggagcacaaaaagctttattcctggcagcaagaggctcagtggaaggcactgaacagccccctcggcaagggcaattccgaactcagtaagaaggaacaggacagttccagtgatgaactgaataaaaaatttcagagccagcgactagactactcaagcagcagtagcgaagctaacacaccaagtccgatactgacccctgctcttatgcccaagcaccccaattctctgtcaggtaaggggactcagctagtgccatcttcccatctgcccccaccaaagctccgaattcccaacgtgttcagtatttctgtggctctagccaagaggcacttgtctcagccgcagctctctagtgatcgtatgtttggcaccaacagaaacgcgatttccatgattagacccttgaggcctcaggagactgacttggatctagtggatggggacagcactgaagtcttggaaaatatggacaccagctgtgacgatggattgttctcgtacgactccctggactccccgaactccgacgaccaggagcactgcgattccgcaaaaaaggttgcgtattcaaagcctccaaccccaccccttcatagatttcccagctgggaatctcgaatatatgcggttgctaagagcggcatccgtatgagtgaagcttttaacatggagagcgtgaataagaactccgccgcaacattgagttatactacatctgggctctatacatctttgatctacaagaacatgaccacacccgtgtacacaacactcaaaggcaaggccacacagatctcatcctctccatttttagacgactcctcaggctctgaggaggaagacagtagcaggtcatcatctcgcaccagtgaaagcgatagcagaagcaggagcggccctggaagcccccgcgcaatgaaaagaggggtgagtctgtcctccgtggcctcggaatccgactatgctatacccccggatgcctattcaacggacaccgagtactcccagcctgagcaaaagttgccgaaaacatgttcctcttccagtgacaatgggaaaaatgaacccctagaaaaaagcggttacctgctcaagatgtcaggaaaagtaaaaagctggaaaaggcgctggtttgtgttgaaaggaggagaactgctttactataaatctccaagcgatgtgattcgaaaaccacagggtcatattgagctgagcgccagctgttcaattctgcgcggggacaataagcagacagtgcagttaacaaccgaaaaacacacatactatctcacggcggatagtcccaacatcctggaagagtggatcaaggtgttgcagaacgtcctccgtgtccaagcggccaacccactgagcctgcaacctgagggtaaaccaaccatgaagggacttctgacaaaggtgaagcacggatattctaaacgggtgtggtgcactttaatcgggaagaccctgtactactttcgatcccaggaggataagtttcctctgggtcagatcaaactctgggaagccaaagtggaggaggtcgaccggagctgcgattctgacgaggactacgaggcttctggccgtagtttgctctctacccattacactatcgtgattcacccaaaagatcagggaccaacctatttattaatagggtctaaacacgagaaagacacttggctatatcatctgaccgtcgcagcaggtagcaataatgttaatgtgggtagtgagttcgaacaattggtgtgtaaactgctgaatattgacggcgaacccagttctcagatttggcgccacccgacactctgtcactcaaaggagggcattatttctccgctgacgacgctgccgtctgaggccctgcagaccgaggctattaagctctttaagacctgccagctgttcataaatgcagccgtggattcacccgcaatagattaccacatttctttggctcagtcagctttacagatttgcttaacacacccggagctgcaaaacgagatatgctgccagctgattaagcagacccggcgacgtcaacctcagaaccaacccggaccactgcagggttggcagctactggccctgtgcgtggggctgttcctgccgcaccaccctttcctgtggcttcttcgcttgcatctgaaaaggaacgccgactcccgtactgagttcgggaagtatgccatctattgccagaggtgcgttgagcggactcaacagaacggggatcgtgaggcaaggccatcccgcatggaaattctgagtaccctgcttcggaatccttaccatcacagcctcccgttcagcatccccgttcatttcatgaacggcatctatcaggttgtgggctttgatgcaagtacaaccgttgaagagttcctgaataccctcaaccaggacacaggtatgaggaaacctgcacagtccggcttcgcactgtttaccgacgatccttctgggcgcgacctagaacactgcctgcaaggtaatatcaagatctgcgacattatttccaagtgggaacaagcttcaaaagagcagcagcctgggaaatgtgagggaactcggactgtacgactcacctacaaaaatagactgtactttagtgtccaggcccggggcgagactgatcgagagaagttgctgctcatgtaccagactaacgaccagatcataaatggactgtttcccctgaacaaggatctggcacttgaaatggccgctttgctgtctcaggtggagattggagattttgagcgtccgtttagtacccccgcagggcacgtgacaaatcagtgcaaggtgaaccagactctcaaacaggtcatcgagaagttctacccgaagcggtaccgcgacggatgtagcgaggaacaactgaggcagttgtgtcaacggttgagcacacgatggatggcgcttcgaggccattcagctgccgattgcgtcaggatatacctgacagtcgcacgcaaatggccttttttcggcgccaaactctttcttgcaaagcccataactccttcaagccttggtagcacgttcctctggttggccgtgcatgaggatggcttaagtctgcttgagtacaatagcatgcggctgatagtgtcatatgtgtataaatctctcatgacattcggtggctaccaggacgactttatggtcgtcatcaacaatacacattcaaaggataaacccacagagaagctcttattcgcgatggctaagcctaagattctggagattactctcttaattgcttcttatatcaacaacttccatcagcagaaagccgcctttcatcatctctcagctcccgctctccttagtgctcagactagagggccccaggcaagaatgatgggatcgcagcctctgctgagttcctctcggcctacaaaagggcctacgttactgtag

SEQ ID NO: 199793 - DNA, 2904 bp, synthetic construct
  misc_feature 1..2904: note = Description of Artificial Sequence: Synthetic coding sequence
  source 1..2904: mol_type = other DNA
atggactggaccccccggctgcccagccggcacatcatcagcgagctcgaacatttaacttttgtcaacacagatgtgggtcgctgtcgggcctggctccgactggcactgaacgacggtttgatggagtgctacctgaaactcttgctccaggagcaggctcgtctccacgagtattaccaaccaaccgctctcttgagagatgctgaggaaggggaatttctgttgtccttcctccagggactgacgtccttatcttttgaactatcttacaaatccgctatcctgaacgagtggacgctgactccgctcgctctgtccgggttgtgtcctctgagcgaacttgacccgttgagcacctccggcgctgaactgcagagaaaggaatccctagacagtatctcacacagtagcgggtcagaagatatcgaagtccatcactcagggcataagattcgtcggaatcagaagttgactgcctcctccctctcattggatacagcgtcatcctcccagctgtcctgcagcttaaattcggatagctgcctcctccaggagaacggctccaaatccccagatcactgcgaggaacccatgtcatgcgacagcgatcttggcacagccaacgcagaagacagtgatcgtagtcttcaggaggtcctgctggagtttagtaaagcccaagtaaactctgtaccaactaacgggctctcccaggaaaccgagatccccacacctcaagccagcctctccctccatggactgaacacatccacatatctgcactgcgaagctccagccgaacctttgcctgcccaagccgcttccggaacacaagacggagttcatgtgcaggaacctcgtccacaggccccatcaccgctcgatctgcagcaacctgtggagtccacatcgggccagcagccatcatccaccgtcagcgaaacagcccgcgaggttgggcaggggaacggcctgcaaaaggcacaggcccacgacggcgccggcctcaagctcgtggtgtcaagcccaacaagccccaaaaataaatcttggatctctgaggatgatttttatcgtccaagtcgcgaacagcccctggaatctgcaagcgaccaccccatagcctcataccggggtacccccggctcaaggccgggtcttcacagacactttagtcaggaaccaaggaaaaattgctcactcggggctctggatcaggcatgtgtcccaagtcctggaagaagacaggcccaagccgctcctagtcagggacacaaatcatttagggtcgtgcatcgacggcagatgggtttatcaaatccattccggggcctgatgaagctcgggaccgtggagaggaggggagccatgggaatttggaaggagctcttttgcgagttgtccccactggagttccgcctgtatctgtcaaatgaagagcacacgtgtgtggaaaattgctcgctcttacggtgcgagtccgtcggacctgcccacagcgacggtcgcttcgaactggtgtttagtgggaagaagttggccctgcgcgccagctcccaggacgaggcagaggattggctggatagagtgagggaggccttgcagaaagtccgcccccagcaggaggacgaatgggtaaacgtgcagtatccagaccagccagaggaacccccagaagccccacagggctgtctgtcccctagcgacttgctatcagaacctgctgcccttcaggggacacaatttgactggtcctcagctcaggtgcctgaacctgacgcaatcaaagaatcccttttgtacttgtatatggaccggacgtggatgccctatatatttagcctctccttggaggccctcaagtgcttccgcatcagaaacaacgagaagatgctgtccgattcccacggggtcgaaacgatacgggacatattgcctgatacgtctctgggcggaccctcctttttcaagatcatcacagctaaggcagtactaaagcttcaggcaggcaatgccgaggaggctgccttatggagggatcttgttagaaaggtcctcgcctcctatctggaaaccgccgaggaggccgtcactctcggagggtctctcgacgaaaattgccaagaagtcctcaagtttgcgacacgggaaaatggcttcctgctgcagtacctggtggccataccgatggagaagggcctggattcccaggggtgtttctgtgctggatgcagccggcaaatcggcttttcctttgtgcggcctaagctctgcgcatttagtgggttgtactactgcgatatttgccaccaggacgacgcctctgtgattccagctcgaataatccacaattgggacctgacgaaacgccccatctgccgacaggcgctgaaattcctcacacagatcagagctcagcccctcattaatctccaaatggtcaacgcatctctgtacgagcacgtcgaaagaatgcacttgatcggcagacgtcgcgaacagctgaaattactgggggattacctggggctgtgtcggtccggtgccctgaaagaactgagtaaacgactaaatcaccgcaactacttacttgaatccccacaccggttctccgtggctgaccttcaacagatagcagatggcgtatatgaagggtttttgaaagctctcatcgaattcgcaagccagcatgtttatcactgtgacctttgtacgcagagaggatttatttgtcagatctgtcagcaccacgacataatctttccctttgagttcgatactactgtaagatgcgcagagtgtaagaccgttttccatcagtcctgccaagcagtggtgaaaaaaggatgcccccggtgtgctcgacgcaggaagtaccaggaacagaacatctttgcttag

SEQ ID NO: 199794 - DNA, 3171 bp, synthetic construct
  misc_feature 1..3171: note = Description of Artificial Sequence: Synthetic coding sequence
  source 1..3171: mol_type = other DNA
atgctgagcgtggtggagaacggcctggacccccaggccgccatcccagtgattaaaaaaaaactggtgggcagtgtgaaagccctccaaaaacagtatgtctccctggacactgtcgtgactagtgaagacggggacgctaatactatgtgctcggccctcgaggctgtttttatacacggccttcacgcaaaacatattcgcgcagaggccggcgggaagagaaagaagtctgctcaccagaagccactgccacagccggtgttctggcctttactgaaggctgtcacacataagcacattattagcgagctggagcatctgacgttcgtgaatacagacgtgggcagatgtcgtgcatggttgcgactggccctcaatgacggattaatggagtgttatctaaagttactgctccaggaacaagctaggctccacgagtactaccagccaaccgccctgttgagagatgccgaggaaggggaattcttactgagcttcctgcaggggttgacatctctaagcttcgaactatcctacaaatccgccattctgaatgagtggaccttgacccccctggccctgtctggcttatgcccgctcagcgagctggatccactctcgaccagcggtgcagagcttcagagaaaagagtcactagattctatctcgcacagctctggcagcgaggacatcgaggttcatcactctggacacaagatcaggaggaatcagaaactgacagcctcgtcgctttcattggatacagccagtagttcacaactttcttgtagtctcaattcagatagctgcctgctgcaggaaaacggctccaagagtcccgatcactgtgaggaacccatgagttgcgactcagacctgggtacagctaacgctgaggactcagatagatcccttcaagaggttctgctcgaattcagtaaggcccaggtcaatagtgtgcccacaaacggcctgtcccaggagaccgagatacctacccctcaggcaagcctgtctctgcatgggctcaacaccagtacctatttgcattgcgaggcccccgcagaacctcttccagcccaggcagcctcagggacccaggatggggtccacgtgcaggaaccaagaccccaggccccgagccctctggaccttcagcaacccgttgagtccaccagtggtcagcagccatcttctactgtgtccgaaaccgcacgtgaggttggacagggcaatggcctccagaaggcacaagcacacgacggagctggactgaaattagtcgtgagttctcctacgtctcccaaaaacaaatcatggatctcagaagacgatttctaccgcccctccagagaacagccgctggaatcagccagtgaccatccgatcgccagctaccgaggaactcccgggtctcgcccaggcctccatcgccacttttcgcaggagccgagaaaaaattgcagcctaggtgcccttgaccaagcctgtgtcccatcacccggtagacgccaggcccaggccgccccctcccagggacacaaaagctttcgggtcgtccacaggcgccagatggggctgagcaatccgtttagagggctgatgaaattgggaacagtcgaacgcagaggcgccatgggaatctggaaggagctgttctgcgagctgtcccctctcgagttccggctctacctctcaaacgaggaacacacatgtgtcgaaaactgtagcctccttaggtgcgagtccgtaggccctgcacattccgacggccggtttgaacttgtatttagcgggaaaaaacttgcgttaagggcatctagccaagatgaggccgaggattggttggatagggtcagagaagccctccagaaggttcggccccagcaagaagacgagtgggtaaatgtacagtatcccgaccaacctgaggaaccacccgaggctccccagggctgtctttccccttccgacctgctctcagagcctgccgccctccaagggacacagttcgattggtctagcgctcaagtgccggaacctgatgcaatcaaagagtccctcctttacctgtacatggataggacgtggatgccatacatcttttcactttctctggaagcccttaaatgttttagaatacggaacaatgagaagatgctctccgactctcacggggtcgaaaccattcgcgatattctgcctgacactagtcttggaggtccttcttttttcaaaataatcaccgcaaaggccgtcctgaaacttcaagccgggaacgccgaagaggcagcgctctggcgtgatcttgttcggaaagttctagcttcctacctggaaacggctgaggaggcagttacgctggggggatcactagatgagaactgccaggaggtgctaaagtttgccacaagagagaatggatttttgcttcagtacctagttgcaatccccatggagaagggactggactcccagggatgcttctgtgctggatgctcccgtcagatcggcttctcctttgttagacctaagctttgcgcgttcagcggattatattattgcgatatctgtcatcaggatgatgcctcagtcatccctgcaaggataatacataattgggacctcaccaagcgacccatatgtagacaggctctgaagtttctgacacagatcagggctcagccgctgatcaatcttcagatggttaacgcatctctgtacgaacacgtggagcggatgcatcttattggcagacggagagagcagcttaagttgctcggagactatctggggctgtgccggagtggcgcactaaaggagctatccaaacggctgaaccatcggaactatttgctcgaatctccacataggttttccgtggcagatctgcagcagatagcagacggtgtgtacgaagggtttctgaaggctttgatagagtttgctagccagcacgtgtaccactgcgacctgtgcacccagagagggttcatttgccaaatctgtcagcaccacgacatcattttcccatttgagtttgatacaaccgttcgctgcgcggagtgcaaaacagtatttcatcagtcctgccaggcggtcgtgaagaaaggctgtccaaggtgcgcacggcgcagaaagtatcaggaacagaacatctttgcatag

SEQ ID NO: 199795 - DNA, 3003 bp, synthetic construct
  misc_feature 1..3003: note = Description of Artificial Sequence: Synthetic coding sequence
  source 1..3003: mol_type = other DNA
atggtggagtgcttcgagagcggcggcacccggctgagcctgagctcatttaacgtttcatgtgactccctccgtgaacaattgagagaatggcgttgtttccagtggtggcggatggactggacgccgaggctgccctcacggcacattatctcagaactggaacacctcaccttcgtgaataccgacgtcgggaggtgccgcgcatggctgcggctggcactgaacgatgggctcatggaatgctatttaaagttgttactccaagaacaagcccgcctgcatgaatactaccaaccgacagccctcctgcgagacgccgaggaaggagagtttttattgagctttcttcagggactgacctcacttagcttcgaattgtcctataagtctgcaatcttgaacgagtggacactgacaccattggcacttagtggcctgtgtccactgagcgaattggatcctttatctacctccggcgcggagctgcagcgcaaggaatcactcgattcaataagccactcttcaggcagcgaagacatcgaagtgcaccactccggtcacaaaatcagacgaaatcagaaactgacagctagctctctgagcctggatactgcgtcctccagccagctgagctgttccctgaatagtgactcttgtctcttacaggaaaatggtagcaagagccccgaccattgtgaggaaccgatgtcatgtgattccgatttgggaactgccaatgcagaagactcagatagatcactgcaggaagtgctgctggaattttctaaagctcaggtaaattccgttcccaccaacggcctctcacaggagacagaaatccccactccacaagcttctctcagtctccacggcttaaacacatctacctatctgcattgtgaggccccagccgaaccactaccagctcaggccgctagcggaacccaggatggtgtccacgtccaggagcctcgccctcaggccccttcgccgctcgatctgcaacagccagtcgagtccaccagcgggcagcagcctagtagcaccgtttcggaaactgccagagaagtcggccagggtaatggactgcaaaaagctcaagcgcacgatggagcgggcctgaagctagtggtgtcctcccctacttctccgaagaataaatcttggatctccgaagatgacttttatcggccctctagggagcaacccttggagagtgcaagcgatcatcctattgccagttacagggggacacccggttcaaggcccgggctacataggcacttctcccaggagccccgaaaaaattgtagcctcggcgcccttgaccaagcctgtgtccccagtcctggaagacgccaggctcaagccgctccctcccaaggccataaaagctttagagtggtacataggcgacaaatggggctcagtaaccccttccgcggactcatgaagttaggcacagtagaacggcgaggcgctatgggcatttggaaagagctgttttgtgaattgtctcctctggaatttcgactgtacctatccaatgaggagcacacgtgtgttgaaaattgctcactactgcgttgtgaatccgtgggaccagcccacagcgatggcaggttcgaactggtattttctggaaagaagttagcgctgagagcttcctctcaggacgaggccgaggactggcttgatcgtgtgcgggaggccctacaaaaagtccggccgcagcaagaggacgagtgggtcaacgtgcaatatcccgaccagccggaggagccaccggaagcaccccaaggctgcttgtcccctagtgacctgctgtccgagcctgccgccttgcagggaactcaattcgactggtcttccgcacaggttccggagcctgatgctatcaaggaatctttgttatacctttacatggacagaacatggatgccatatatattctccctctcgttggaggcacttaaatgctttcgcatcaggaataatgaaaaaatgctgagcgatagtcacggggtggagacaattcgagacatactcccggatacctccctgggtggaccttctttctttaaaatcatcaccgcaaaggccgtgctcaaacttcaagccggcaacgccgaggaagctgcactctggcgtgatcttgtccgtaaggtgttagctagctacctggagacggccgaggaggcagtaacattgggcggcagcctggatgagaattgccaagaggtactcaaatttgctaccagagaaaacgggtttttgctacagtaccttgtggccataccaatggaaaagggcttggatagccagggatgtttttgtgccggctgtagcaggcaaattggattttcttttgtgaggcctaaattatgcgctttcagcgggctgtactactgcgacatttgtcatcaagacgatgcctcagtcatacccgccaggataatacacaactgggacctgactaagcggccaatatgtaggcaggctctcaaattccttactcaaatccgagcacagcctctaatcaatctgcagatggtcaacgcatctctgtatgagcacgtggagcggatgcatttaattggacggcggagagaacagctgaaacttctcggagactaccttggactatgtaggagtggtgctctgaaggagttgtcaaagaggctcaatcaccgaaattacctgctggagtccccccacagattttcggtcgccgatctgcagcagatcgccgacggggtgtatgaggggttcagccctaaagtacctagcgaggccgctgggttgcgcccgtggggggcacggagtcctgaggctgcatccgccttccggtgtatcgatagctctcgcttaccctcactgcggaaggtcgtacccactctgtttctgaagtgctatttcatgcagtacactgtgcctagtgagcagggctcgggacccgaggaaagcctgcaatgcatcgaaggcatcgcagccgtgtag

SEQ ID NO: 199796 - DNA, 5466 bp, synthetic construct
  misc_feature 1..5466: note = Description of Artificial Sequence: Synthetic coding sequence
  source 1..5466: mol_type = other DNA
atgagctgcgagcggaagggcctgagcgagctgcggagcgagctgtactttttgattgctcgattcctggaggacgggccctgccagcaagccgcccaggtccttattcgcgaggtcgctgagaaagaactgctgcccaggcgcaccgactggaccggcaaagagcatccccggacctaccagaacctagttaagtactaccggcacttggctcccgaccatctgttgcagatctgtcataggctgggcccacttctggagcaagagattccccagagcgttcctggcgtacagacattgctgggcgctgggcggcaaagcttattgagaacaaacaagtcttgtaagcatgtagtctggaaaggatccgcccttgcggccctgcattgcggcagaccgcccgaatctcccgttaattacggctcccccccctcaattgctgataccttatttagtcgtaaactgaacggcaaatatcgtttggagcggctggtcccaaccgccgtatatcaacacatgaaaatgcataaaaggatactcggccaccttagctccgtttactgtgtcacattcgatcgtacaggacgtcgtattttcacaggcagcgatgactgtctggtaaagatctgggccacggacgacggtagattactcgcaaccctgagaggtcatgcggcagagattagtgacatggccgtgaattatgagaatactatgatcgctgctggcagctgtgataagatgatccgggtgtggtgcctgcggacatgcgccccattagcagtgctgcaaggccattccgccagtattacctctttacagtttagtcctctctgcagcgggtcgaagagatacctttcaagcaccggagccgacggaacgatttgtttttggctgtgggatgccgggaccctaaaaattaacccccgccccgcaaagtttactgaacggccccggccgggcgtgcagatgatttgcagctccttctccgccgggggcatgttccttgcaaccggctccacggaccatatcattcgtgtgtacttcttcggatctgggcagcccgaaaagatttcagagcttgaatttcacactgataaagttgatagtatccagtttagcaacacatccaacaggttcgtgagtggatcaagggacggtacagcccgcatttggcagttcaagaggagggaatggaagtctattctgctagacatggcaaccagacccgcgggacagaatctgcagggaatcgaggacaagattactaaaatgaaagtcaccatggtagcatgggacaggcacgataacacagttattacagccgtgaataacatgaccttaaaggtgtggaactcctatacagggcagctcattcacgtcctgatgggacacgaagacgaggtttttgtgcttgagccgcatccttttgatcccagggtcttattctccgctggccatgatgggaatgtaatcgtgtgggacctcgcaagaggcgttaagattcgctcctattttaatatgattgaagggcagggtcatggcgcggtgtttgactgcaagtgcagccccgacggtcaacactttgcctgcacagatagccacggtcacctgctcatcttcggctttggcagctcatcgaaatacgataagatcgctgatcagatgtttttccacagcgactaccgccccctaattagggatgccaataatttcgtgctggacgagcagacgcagcaggcgcctcatctgatgccccctccattcctggtcgatgtcgacgggaacccgcacccatcacgctaccaaagactagttcctggcagggaaaattgccgcgaggagcagctgatcccccagatgggagtgacgtcctccggtctcaaccaggttttatcgcagcaggcgaaccaagagatctcaccgctggacagtatgatccagcgtcttcaacaagagcaggatctgcgcaggagcggagaggcggtcatctctaacacttccagactctctcggggttcgatcagctcaaccagcgaagtgcactcgccacctaacgtgggtctgcgaaggagcgggcagatcgaaggcgtgcggcagatgcatagcaatgcccctcgctctgaaattgccacagagcgggacttggtagcgtggtcacggcgggtagtggttccagagctgtcagccggcgtggccagtaggcaggaagaatggagaacggccaagggggaagaagaaatcaagacgtacaggtccgaggagaaaagaaaacacttaacggtcccaaaagaaaacaaaatccctactgtcagtaaaaaccacgcccatgagcatttcttagatctaggggagtccaagaaacaacagaccaaccagcacaactatcggactcggtccgccctcgaagaaacacctcgaccaagcgaggagatagagaacggctcctcatcttcagacgaaggcgaggtcgtggcagtgagcggagggacttcagaggaggaggagcgggcttggcactctgacgggtccagctctgactacagcagtgactatagtgattggactgctgacgccgggatcaatctgcagcctccaaaaaaagtccctaagaacaaaactaagaaagccgaatcctctagtgatgaggaggaagagagtgaaaagcagaagcagaaacagatcaagaaagagaagaagaaagtgaacgaagagaaggacggacccatcagccctaaaaagaagaaacccaaggaacgcaagcaaaagcgcctggcggtaggagagctgaccgagaacgggctgacactagaagagtggcttccaagcacctggatcacagatacaatcccacgaaggtgccccttcgtgcctcagatgggcgatgaagtttactactttcgtcagggccacgaagcatacgtggaaatggcccgaaagaacaaaatctactcaatcaatcctaaaaagcagccctggcacaaaatggagcttagggaacaggaattaatgaagatcgtcggaataaagtacgaggtcgggttgcccaccctgtgctgcctcaaactcgcctttctcgaccctgacactggaaagctcactgggggcagtttcactatgaaataccacgacatgcccgacgttatagactttcttgtgctgcgacaacaattcgacgatgccaagtaccgcagatggaatatcggcgatagattcaggagcgttattgacgacgcctggtggttcggaaccatcgaaagtcaggagcctctgcagctggagtaccccgacagcctgttccagtgctataatgtgtgttgggataatggtgataccgagaaaatgtctccctgggatatggagctgattccgaataacgcagtgtttcccgaagagctgggaacaagcgtgccgctaacagatggagagtgcagaagccttatttataagcctttggatggagagtgggggaccaatcctagagacgaagaatgcgaaaggatagtcgctggcatcaaccaactcatgacactggatattgcctcagctttcgtggctccagttgacttacaggcttatccaatgtactgcaccgtagtagcctatcccaccgatctctctactatcaagcagcgcctagaaaatcggttttaccgcagggtgagcagcctgatgtgggaagtgcggtatatcgaacacaatacacgcacattcaatgagcccggatcccccatcgtcaaaagtgccaaatttgtgaccgaccttctgctgcatttcatcaaggatcagacttgctacaatatcatccccttgtataacagcatgaaaaagaaagttctaagtgactccgaagacgaagaaaaggacgcagatgtgcccggcacatcaactcgcaaaaggaaggatcaccaacccagaagacgcctgcggaacagggctcaatcatacgacatacaggcctggaaaaagcagtgtgaggagctacttaatttgatcttccaatgcgaggattccgaaccattccgacaacccgtggacctgctggagtacccagactacagagacataatcgacactccaatggacttcgcaacagtgagagaaacactcgaagccgggaactatgagtccccaatggaactctgtaaagatgtgaggttaatcttctccaactccaaggcctataccccgtctaaaagaagccgcatatatagcatgtccctgcgcctgagtgccttcttcgaagaacacatctcatcagtgttgtccgattacaaatctgccctccggtttcataaaagaaacacaatcactaagagaagaaagaagcgcaaccgctcctcttcagtgagcagctccgctgccagtagccccgaacggaaaaagagaatcctgaagcctcagctcaaaagcgaaagctccacatccgccttttctacccctacaaggagcatccccccccgccataacgctgcccagatcaatggaaaaacggaaagctccagcgtggtccggaccaggtctaatcgagttgtggtcgatcccgttgtgacagagcagccgtccacgagcagtgccgccaagacattcatcactaaggcaaatgcatccgccattcccgggaaaactattcttgagaattctgtgaaacattctaaggcactaaatacactctcctctcctggccagtccagcttttcccacggtacccgaaataacagcgcaaaggaaaatatggaaaaagagaagcccgttaaaaggaagatgaagtcgtcagtacttcccaaggcttcaaccctgtccaagagctctgccgttatagagcagggagattgtaagaataacgcgctcgttccagggaccatacaggtcaacggccatgggggacagccttccaaactggttaaacgtggccctgggagaaagcctaaagtagaggtgaatactaattcaggagagataatacataaaaagcggggcagaaagccgaagaaacttcagtatgctaagcctgaagatctcgagcagaacaatgtccatcctattcgggatgaggtcctgccctcatccacttgcaatttcctatctgaaaccaacaatgtcaaagaggacctgctccagaagaaaaaccggggcggacggaaaccgaagcggaagatgaaaacccagaagctggacgccgatctgcttgtgccggcctctgtaaaggtgctgaggagaagcaacaggaagaagatcgacgaccctatcgacgaagaggaagagttcgaagagctaaagggatcagagccacacatgcggacgcgcaaccagggccggcgcaccgcattttataacgaagatgattcagaagaggagcagcgccagctgctgtttgaagacacttctctcaccttcggtacgtcgagccgaggaagggtgcggaaactcacggagaaggccaaggctaacttgatcggctggtag

SEQ ID NO: 199797 - DNA, 1197 bp, synthetic construct
  misc_feature 1..1197: note = Description of Artificial Sequence: Synthetic coding sequence
  source 1..1197: mol_type = other DNA
atgaagaagaaggtgctgagcgacagcgaggacgaggagaaggacgcagacgtgcccgggacgagcacgaggaagaggaaagaccaccagccaaggagacggctcagaaatcgcgcgcagtcctatgatattcaagcctggaaaaaacagtgtgaggaattgctcaacctgatcttccagtgcgaggacagcgagccctttcgacaaccagtagatcttttggagtatcccgactaccgagatatcatcgacaccccgatggactttgccacggtccgcgagactttggaggctggcaattatgaatccccaatggaactctgtaaggacgtccgactgatattttctaattctaaggcatacaccccgagtaaacgcagtaggatttatagtatgagccttcgtctgtccgcattttttgaagagcacatcagttccgttctctccgattataagagcgcactacggtttcataaacgaaacacgattaccaaaaggaggaagaaacgcaacaggagcagctcagtgagctcatctgctgccagctcacctgaacggaagaagaggatcctgaaacctcagctgaaatctgaaagctccactagcgcctttagcacccctacgcgctctattccgcctcggcataatgcagctcaaataaatggaaagactgaaagctcttcagtggttaggacacgttcaaatagggtggtggtcgatccggtagtgacagaacagcctagcacatcctcagcggccaagaccttcatcacgaaggcgaatgctagcgcaatccccggcaaaactatactggaaaattcagtgaagcatagtaaggccttaaatactctgtcgtctccaggacagtcctccttcagccatgggactcgcaacaattccgcaaaggagaatatggaaaaagagaagcctgtgaaaagaaaaatgaagtcttctgtcctgcccaaagccagcaccctgagcaaatcgtctgccgtcatagagcagggagattgcaagaataatgccctggtgccagggacaatccaggtgaatggccatggaggccagcccagcaagctggttaaaaggggccccgggagaaaacctaaagtggaagtgaatatagtggtgaaattgtatactcgtaagggagtcgaaagtcctaagagttattccatgcagtctcagaaaatctag

SEQ ID NO: 199798 - DNA, 1206 bp, synthetic construct
  misc_feature 1..1206: note = Description of Artificial Sequence: Synthetic coding sequence
  source 1..1206: mol_type = other DNA
atgcggcgggcccccgccgccgagcggctgctggagctgggcttccctcccaggtgcggaagacaggagcccccattcccccttggggttacccgtggctggggacgttggcccattcaaaaacggagagaaggggcccggcccgtgcccttttccgaaagatctcaggaggacgggcggggtcctgcagcgagatcttccggtaccctatggcgaatcagaaccaggctctcactttgtagagatcctgagccccctcctcctttgtgcctgttgcgggtcagcctgctctgcgctctgcgggcaggcggtcgggggtcccgatggggagaagatggggcacgcctgctccttttgcctcccgcccgcgcggccgggaacggagaagccgagccctcggggggtcctagttatgctggtaggatgttggagtcttccggctgcaaggccttaaaagagggagtgctggagaagcgatcggacggactattacagctatggaaaaaaaaatgttgcatcttgacagaggagggccttctgctcatacctcccaagcagttacagcatcagcagcagcagcagcagcagcagcaacagcagcagcaacaacagcctggccagggtccagctgagccttcacaaccgtcgggccctgccgtggcctcgctggaacctccggtcaagttaaaggagctacatttttcaaacatgaagaccgtggactgtgtggaacgtaaagggaagtacatgtattttactgtggttatggccgagggtaaggaaattgacttcagatgtccacaggaccagggctggaatgctgagatcactctgcaaatggttcagtataagaatcgccaggccatcctcgcagtgaaaagcacgcgacagaaacagcagcacttggtccagcaacagcccccatcgcagccgcagccgcagccacagctgcagcctcagccccagcctcaaccacagccacagccacaaccacaatcacagccacagccgcagcctcagccaaaaccccagccacagcagctgcacccatacccccaccctcacccacacccacattctcatcctcacagtcaccctcacccccatccccatccccatccccaccaaattccgcatcctcatccccagccacacagtcagcctcacggacaccggttgctgcggtccaccagcaatagcgcctag

SEQ ID NO: 199799 - DNA, 660 bp, synthetic construct
  misc_feature 1..660: note = Description of Artificial Sequence: Synthetic coding sequence
  source 1..660: mol_type = other DNA
atgctggagagcagcggctgcaaggccctgaaggagggcgtgctggaaaagagatccgacggtttgctccaactctggaagaaaaagtgttgcatcttaaccgaagaagggctgttacttatcccacctaaacagctgcagcatcagcagcagcagcaacagcagcaacagcagcagcagcagcagcagccgggtcaagggcctgccgagcccagtcagccttctgggcctgcggtcgcttcattggagcctccagtaaagttgaaagagctgcacttctcaaatatgaagaccgttgattgtgttgagcgtaaaggcaagtatatgtattttacagtcgttatggccgagggaaaggaaatcgattttagatgcccacaggaccaagggtggaatgctgagatcaccctacagatggtgcagtataaaaacagacaagccatcttagctgtcaaatctactagacagaagcagcagcacctggtgcagcaacagctgcacccttacccacacccacatccccaccctcatagccatccacattcccatccacacccgcatcctcatccacacccacaccagataccgcatcctcatcctcaaccgcacagccagcctcatggacaccgcctgcttcgatccacatccaatagtgcttag

SEQ ID NO: 199800 - DNA, 459 bp, synthetic construct
  misc_feature 1..459: note = Description of Artificial Sequence: Synthetic coding sequence
  source 1..459: mol_type = other DNA
atgaagagccccgacgaggtgctgcgggagggcgagctggagaagaggtcagactctctgtttcagctctggaaaaagaaacgtggagtcctcacctctgatcgcctgtcattgtttccggcatcccccagggctagaccaaaggaactgcggttccattccattctgaaggtggattgcgttgagcggacgggaaagtatgtgtatttcaccattgtcaccaccgaccacaaggaaatcgacttcagatgtgccggagagtcctgctggaatgccgcaattgccttggctctaatcgattttcagaatagaagagctttacaggatttcagaagtagacaagagaggaccgctcctgctgcccccgctgaagacgccgtcgctgcggctgccgcagctccgagcgagccctctgaacccagccgcccgtcaccccagccgaaaccaaggacgccttag

SEQ ID NO: 199801 - DNA, 3960 bp, synthetic construct
  misc_feature 1..3960: note = Description of Artificial Sequence: Synthetic coding sequence
  source 1..3960: mol_type = other DNA
atggacgccctgaaccggaaccagatcggccccggctgccagacccagacaatggtccaaaaagggccccttgacctcatcgaaacaggcaaaggtttaaaggtccagactgacaaaccccacctcgtttctttaggttccgggcgcctttctactgccattactttattgcccctcgaggaggggagaaccgtcatcggctcggccgccagagacatctccttacaaggaccaggtctggccccagaacattgttacatagaaaatctgcgagggacactcaccctttacccttgcggcaacgcctgcaccatcgacggcctgcctgtgaggcagcccacacggctaacgcaaggctgcatgctgtgcttaggccagtcaacgtttctcagatttaatcaccccgccgaggctaagtggatgaagagtatgatccccgcaggcggcagagctccgggacccccgtactcaccggtgccggctgaatctgagagcttagttaatggcaaccatacaccccagaccgccacgcggggccccagcgcctgcgcgagtcacagttctctcgtaagcagcattgagaaagatctccaagagattatggacagtctggttctcgaggaacccggcgccgcgggtaaaaagcccgccgccacttctccgctgtcacccatggccaacggcggacgctatctgctcagcccacctacctctcccggtgcgatgtctgtcggttccagttacgagaatacctctccagccttctcaccgctgagcagccccgcatcatctgggagttgtgcttcccactctccaagcggtcaggaaccgggcccctcagtccctccattggtgcccgcaagatcctcatcttaccacctggccttacagcccccccagagcagacccagcggcgcacgctctgagagtccccgcttgagccgtaagggaggccacgaaagacctccatcccccggtcttcgggggcttcttacagatagtccagctgcgactgtgctcgctgaggccaggcgggctaccgagagtccgcggctgggaggacagttgcccgtggtagctatttccctgtctgagtacccagccagcggagctctctcccagccaacgtccatccctggcagcccaaagttccagcctcccgtgcccgctccacggaataaaatcgggactttgcaagatagaccaccatcgccattccgtgagcccccagggagtgagcgtgtgctcacgacctctcctagccggcagcttgtgggtcgtacgtttagtgacgggcttgcaacccgaacgctgcagccacccgaatccccccgactcggcaggaggggcctcgatagcatgagggaattgcctcccctcagccccagcctctcacggagggccctgtctccattgcctacccgtactaccccggatccaaagttaaacagggaagtggccgagagccctaggccccgccgttgggctgctcatggggcctcccccgaggatttcagcctgacccttggggcacgcggcagacgtacccgcagtccctccccgaccttgggagaatcactggccccccataagggcagctttagcgggcggctctcaccagcctattccctgggctccctcacaggggcctcaccctgccagtcgccttgcgtccagcggaagctgtcatccggggatttgcgtgtcccggtgacaagggagaggaagaactcgatcaccgagatctccgacaacgaggacgacctgctggagtaccataggcggcagcggcaggaacgcctgcgggaacaggagatggaacgacttgaacgccagaggctggagaccattcttaacttgtgcgctgagtactctagggctgatggggggcctgaagcaggcgaattgccgagcattggcgaagcgaccgctgctctggctttagctggccggcgaccaagccgtgggctcgccggtgcatcaggacgaagtagtgaagagccaggcgtcgctacacagcgcctgtgggaatccatggagaggagtgacgaagaaaacctgaaggaagaatgttcctcgacagaatcgacgcagcaggaacacgaggatgctccctcaacaaaactgcagggggaggtgctggccctggaggaagagcgggcccaggtgttaggacacgtcgagcagctcaaagtgagagtgaaagaattagaacagcagctacaggaatccgccagagaagcagagatggaacgtgccttgctgcaaggagagcgcgaagccgaaagagcactgctgcagaaagagcagaaagctgtggatcaactccaggagaagctggtggcgctggaaacaggaattcaaaaggagagggacaaggaggccgaagcgctcgagacagagacgaagctgtttgaagaccttgagttccagcagttggagcgagagagcagagtagaggaggagagagagttagccggccagggactgctccggtctaaagccgagctcctgcgctcgatcgccaagagaaaggagcgccttgctatcctggattctcaagcaggacagattcgcgcacaggcagtgcaagagagcgagagactggccagggataagaatgcttcactgcagttactgcagaaggaaaaggaaaagttgacagtgctggaacgtcgctaccacagtctgaccggaggccggccttttcctaagactacaagcacacttaaagaagtgtacaggagtaaaatggacggtgaggcaacttctccactcccacgcaccaggtcaggcccactgccttcctctagtgggtctagctctagttccagccagctctcagtggcaaccctcggtcggtcccctagtcctaagtctgctctcctaacccagaatggcaccgggtccctcccaagaaacctggccgcaaccttacaggacattgagactaagagacagctggctcttcagcagaaaggtcaacaggttatcgaagaacagcgcaggcggctggccgaattaaagcagaaagcggcagctgaggcccagtgccagtgggatgcgttgcacggtgcagctccattccctgcgggtcctagcgggtttcctccattaatgcaccactccattctccatcatctgccagccggcagggagcgcggtgaagagggggaacatgcgtacgatacactgtcccttgagtcctctgatagcatggagactagcatcagcactgggggtaacagtgcttgttctcctgacaatatgagttccgcctctggactggacatgggaaaaatagaggagatggagaagatgctgaaagaggcgcatgctgaaaagaacaggctcatggagtcccgtgagcgggagatggagctgcgcaggcaggccctggaagaggagaggaggaggcgggaacaggtggagcgccggcttcagtctgagagtgcaaggcggcagcagctggtcgagaaggaagtgaaaatgagggagaagcagttcagccaggcacggcctcttactaggtacctcccaattaggaaagaagactttgatttaaagacgcacattgaatcaagtgggcatggggtggacacctgtctacatgtagttctgagctccaaggtctgccgcggctacttagtaaagatgggtggcaagataaaaagctggaagaagaggtggtttgtcttcgaccggctcaagcggaccctgtcttattatgtggacaagcacgaaactaagctcaagggagttatttacttccaggcaatcgaggaagtgtactacgatcatcttcgcagtgccgcaaaaagtccaaatccagcacttaccttttgtgtcaagacccacgatcggttgtattacatggtagcaccaagtgcagaagccatgagaatttggatggatgtgatcgttaccggggcagagggatacacacagtttatgaattag

SEQ ID NO: 199802 - DNA, 2193 bp, synthetic construct
  misc_feature 1..2193: note = Description of Artificial Sequence: Synthetic coding sequence
  source 1..2193: mol_type = other DNA
atggagcggagcgacgaggagaacctgaaggaggagtgcagcagcacagagtctacccagcaggagcatgaagacgcaccttccaccaaactgcagggcgaagtgctggctctagaggaggagcgggcacaggtcctgggccacgtcgaacagctaaaagtgagggtgaaggaactcgaacagcagctgcaggaatcggcacgggaagcggagatggagcgggccctgcttcagggcgagagggaagctgaaagagctttactacaaaaggagcagaaagccgtggaccagctccaagagaaactggtcgcgttggaaaccgggatacaaaaagagcgcgacaaggagagggccgaactggccgccgggcggcgacacctggcccggcaagcactgtacgctgagctgcaaacacagttagataactgtccagagagtgtgcgtgagcagcttcaggagcagctgaggagagaagctgaagcactggagacagagacaaagctgttcgaagatctggagttccagcagctcgaaagagaatcaagagtagaagaggaacgggagcttgcaggtcaggggctgttgcgctccaaggccgagctgctacgctcaatagcaaaacgcaaggagagactggcgatcctagactcacaggccggtcagattagagctcaggccgtgcaagagtcagagcgcctggcccgggacaagaacgcctctctacaactccttcagaaagagaaggaaaaattaaccgtgttagaacggcggtatcactccctgacagggggccgcccctttccaaaaactactagcacactgaaggaaatggagaaattgctgttgccagccgttgacctcgaacagtggtaccaagagctgatggccggcctgggcacaggccccgctgcagcgtcaccccactcttctcccccaccccttcccgccaaggcatcaagacagctgcaggtgtaccgcagcaagatggatggggaagcaacgtcccccctcccacgcacacgatccggccctctgccttcctccagtggcagttccagctctagcagccagctgtctgtggcgaccctcgggcgatccccgtcgccaaagagcgctctgctgacacagaacggaacgggttcattgccaagaaatctggccgcaacgctgcaggatattgaaaccaagaggcagttagccttacagcagaagggacagcaggtcatcgaagagcaacgcagaagactggccgaacttaagcagaaagccgctgctgaggcacagtgccagtgggacgcactgcatggcgctgccccgttcccggccggcccctctggcttccccccactgatgcaccactccattctgcaccaccttccagcaggccgcgaaagaggagaggaaggagaacacgcctatgatacattgagtcttgagtcctctgactcgatggagacatctatctccacgggaggcaactccgcatgttctcctgataatatgagctcagcctcagggctcgatatgggcaaaatcgaggagatggagaaaatgctgaaggaggcccatgccgaaaaaaaccggctgatggagtctagagagcgagagatggagctgcggaggcaggctctggaggaggaacgaaggaggagagagcaagtcgagagaaggctacagagcgaatctgcaagaaggcaacagctggtggagaaagaggttaaaatgagagaaaaacaattcagccaggcgagacctcttacacgctacctccctattcgaaaggaagatttcgacctgaagacccatatcgaaagctccggccatggagtcgatacttgtctacatgtcgtcctcagctcgaaagtgtgcagaggatacctagttaagatgggagggaagatcaagagctggaaaaagcggtggttcgtttttgaccggctgaagcgcacgttgtcttactacgtggataaacatgaaacgaaactgaagggagtcatttactttcaagccatagaagaggtgtattatgatcaccttcgaagcgcagccaaaagcccaaacccagccttaaccttctgtgtcaaaacccacgacaggctgtactacatggtcgcaccatccgctgaggctatgcgtatctggatggacgttatagtgacaggcgccgagggctacacccagtttatgaattag

SEQ ID NO: 199803 - DNA, 4134 bp, synthetic construct
  misc_feature 1..4134: note = Description of Artificial Sequence: Synthetic coding sequence
  source 1..4134: mol_type = other DNA
atggacgccctgaaccggaaccagatcggccccggctgccagacccagacaatggtgcagaagggcccactcgatctgatcgagacagggaagggtctgaaagtccagacagataaaccacacctcgtctccctaggttcgggccggctctcgactgccatcactctgctgcccttggaggaaggccgcaccgttatcgggtccgccgcccgcgatatctccctccaaggccctggactggccccagagcattgctatattgaaaatctccgcggaacactgactctgtacccatgtggcaatgcctgcacaatcgacggcttgcccgtacgccaaccaactcggcttacccaggggtgtatgttgtgtctcggtcagtcaacctttctgcggttcaaccatcctgccgaagcgaaatggatgaaatctatgattcccgcaggaggacgcgcgcccgggcccccatactcccctgtacccgctgagagtgagagcctcgtgaacggcaaccacactccacagaccgccactaggggcccatcggcgtgtgcttcccactcatctctcgtcagttcaatcgaaaaggacctgcaggaaatcatggacagcctggtgttggaagagcctggtgctgctgggaaaaagccagctgccacctctccattatccccgatggccaatggaggacggtacctgctgagccccccgacctcccccggcgccatgtcggtgggtagcagttacgaaaatacatcgccagccttttcacccctcagcagtcccgctagcagtggcagttgtgccagtcactccccctccggtcaggagcctggtccatctgtgccaccgctagtccctgccaggtcgagttcctatcacttggccctacagcctcctcagagccgaccttccggcgcccggtccgagtcacctagactgagcaggaagggggggcatgagaggccaccctctcctggactccgcggcctcctaaccgacagccctgcagcaacggtcctagcggaagccagacgtgctaccgaatcgccgcgccttgggggacagctgcccgtcgtcgccatttctctatccgagtatccagcttcgggcgccttgtcccagccgacatcaatccccgggtcccctaagtttcagccacctgtccctgccccccgcaacaagataggtactctgcaagaccgcccaccttccccttttagggaacctccagggagcgagagggtgctgactacgtccccgtctcgccagttggtaggcaggacattttcagacggactcgccactcgcacacttcagccccccgaatcgcctcggctgggacggcgcgggctcgatagtatgagggagctgcctcccctttctccgtccctttctaggagagctttatcaccactgccaacacggacaacccccgatcccaagctcaaccgcgaggtcgcagaatccccccggccacggcggtgggccgcccatggtgcatcaccagaggacttctctctgacgctgggagcccgcggaagacgcacacgatctccgtctcccaccctgggcgaatcccttgctccccataagggctcattttccgggaggctgtcccccgcttatagcctggggtcattgaccggagcgtcgccctgtcaatcaccatgcgtccagcgtaagctttctagcggtgacttgcgtgtgcccgtgacaagagaaaggaagaactcaattacagagatatcagataacgaggatgacctgctagagtaccacaggaggcagcgtcaggagcgactgcgtgagcaggagatggagaggctggaaaggcagcgtcttgagacaatcctcaacctctgtgccgaatactcacgcgcagatggcggcccagaggccggcgaattgcctagcattggcgaggccacggccgcactcgcactggccggtcgccgcccaagccgaggcctggccggggcttctgggcgctcttcagaggagcccggcgtggccacccagcggttatgggagtctatggagcgatcagacgaggagaatctgaaagaagagtgcagttcgactgagagtactcagcaagagcatgaggatgccccatctaccaaactgcagggtgaagtactagcattggaagaggagcgcgctcaggtgctgggccacgtcgagcagctcaaagtgcgcgtgaaggaactggagcagcagttacaggagtccgctcgggaggcagagatggagcgggctttacttcaaggtgagcgcgaagcagagcgtgccttgttacagaaggagcagaaggcggtggaccagcttcaggaaaagctggttgcactggaaactggtatccagaaggaaagggacaaggaggcagaggcactggaaacagaaaccaagctctttgaagacctggaatttcagcagctcgagcgggagtcaagagtcgaggaagaacgggaattggctggccagggtctcctccgcagcaaggctgagctgctgagaagtatcgccaaaagaaaagagcgcctcgctattctcgattctcaagcaggacagattagggctcaagccgtccaggaaagcgaacgccttgctagagacaaaaatgctagtctgcagcttctccagaaggaaaaggaaaaactaacagtactggaaagacgctaccactcacttacaggagggcgccctttcccaaagacaacatctactttgaaggaaatggaaaagttgttactccctgctgtcgatctagaacagtggtatcaagagctgatggctggactgggtactgggccagccgccgcttcgccgcattctagtccccctccacttcctgcgaaagcaagcaggcagcttcaggtgtacaggagcaagatggatggcgaggctacttcacccctgcccaggactagaagcggtccacttcctagctctagcgggagcagctcatcctcctcccagctatcagtagctaccctcggaaggtcaccctcaccaaaatcagccctgctgacccagaacggaacaggtagtctgccaagaaacctggccgcaacccttcaggacatcgagactaagcgacaattggctctccaacagaaaggtcagcaggttattgaagaacagaggcgccgtctcgcagaattgaagcagaaagcagcggctgaggcacaatgtcagtgggacgcgttacacggcgcggcccccttccccgctggaccatctgggtttccacctttgatgcaccattccattctgcaccacctgccggcagggcgcgagcggggagaggagggcgagcatgcctatgatacactttctctggaaagtagtgattctatggagacctcaatttccaccggggggaactctgcatgcagccccgataacatgtccagcgcctccggcctggatatgggcaaaatcgaggagatggagaagatgcttaaagaggctcatgctgagaaaaatcgcctaatggagtcaagagaaagggaaatggaacttcggagacaggccctcgaggaggagaggaggaggcgtgaacaagtggagcgaaggctccagagtgagtcggcacggcgtcagcagctggtggaaaaagaagtgaagatgcgagaaaaacagttttcccaggcacgccccctaacccggtacctgcctattagaaaagaggatttcgatttaaaaacacacatcgagagtagcggccacggagtcgatacatgtctgcacgtggtactttcctctaaggtgtgtcgtggataccttgttaaaatgggaggcaaaatcaaaagctggaagaagcggtggttcgtcttcgataggctgaaacggaccctcagctattacgtggataagcacgagaccaagttaaaaggggtgatctactttcaggccatcgaagaggtatactacgatcatctcaggtctgcggccaagaaacggtttttccgctttacaatggtgaccgagtcacccaatccagccctaacgttctgcgtgaaaacccacgacaggctttactacatggtcgctcccagcgcagaagctatgcgaatttggatggacgttatcgtgactggagcggaaggctacacccagttcatgaattag

SEQ ID NO: 199804 - DNA, 3423 bp, synthetic construct
  misc_feature 1..3423: note = Description of Artificial Sequence: Synthetic coding sequence
  source 1..3423: mol_type = other DNA
atgagcgtgggcagcagctacgagaacaccagccccgccttcagccccctgtcttcccctgcaagtagcgggtcctgcgcctcccatagtccttcagggcaggagcctggacctagcgtgccccccctggtccctgccaggtccagtagttaccacctcgcactccagcctccccaaagtagacccagtggcgctaggtcagagagtcctagactcagccggaaaggcgggcacgagcggccaccgtcacctggcctgcgcggacttcttaccgactccccggccgcaaccgttctggcggaggcccgtagagctacggagagcccacggctgggcggacaacttcccgttgtcgccatctccttaagcgagtatcctgctagcggcgccctgtctcagcccacctctattcctggctcacctaagttccagcctcctgtgcctgcacctcggaataaaatcgggacgcttcaggatcggcctccgtcgccctttagagagccgccaggtagcgagcgcgtgttaaccacttcgccgtcccggcagttagtgggcagaacatttagtgacggcctggcaacccgaacgctgcaaccccctgagtcaccacggctgggccgacggggactggactctatgagggaacttccacctttgagtccttcactgtcaagacgggccttaagccccctgcccacaagaaccactcccgacccgaaactcaaccgtgaggtggctgagtcgccacgtcccagacgctgggccgcacacggcgccagccccgaagatttttcactgaccttaggcgctcggggccggcgcaccagatctccgtcgcccacattgggtgagtctttggcgccacataaggggtctttcagcggaagactgagcccagcctactccttggggtccctcactggagccagcccatgtcagtctccctgcgtgcagcgaaaactgagctccggggacttgcgggtgcccgtgacccgcgagcgcaaaaactcaattacagagatctccgacaacgaggatgacctgttagagtaccaccgacgccaacgccaggagaggcttcgggaacaggagatggaaaggcttgagcgccagaggctggaaacaattctcaacctgtgcgcagagtacagccgtgctgacggcgggcccgaggctggagagctcccttcaatcggcgaagcaacagctgccctcgccctggccggaaggaggccatcaaggggactggcgggagcctccgggcgttcatcagaggagccaggcgtcgcaacccagaggctttgggaaagcatggagcgatctgacgaggagaatctgaaggaggaatgcagctctactgagagcactcagcaagaacatgaagatgcaccctctacaaaactccagggggaggtgctcgcactcgaggaggaaagggctcaggtcctgggacatgttgaacagctgaaagtgagagtcaaggagcttgagcagcagttacaagaaagtgcacgcgaagctgaaatggaaagagcgctgctacagggtgagagagaagcagagcgggcacttctgcagaaagagcaaaaagccgttgatcagctgcaagagaagctcgttgcattagagacgggcattcagaaggagagggacaaggaagcagaagcattagagaccgagaccaagctgttcgaggatctggaatttcagcagctcgagcgggagtcacgtgttgaagaagagagggagcttgctgggcaggggctgctgcgatcaaaagcggaactgcttcggtccatcgccaaacgcaaggagcgtctggcaatcctcgactcccaggcaggccagataagggcccaagctgtccaagaaagtgaaaggctggcaagagacaaaaatgccagccttcagctactgcagaaagagaaggaaaagctcacagtactggagcgcaggtatcattccctgaccggcggacgaccatttcccaagactacttctactctcaaagagatggagaagcttctgctgcccgcggtcgatctggaacaatggtaccaagagctgatggcaggcttaggaactgggcctgccgccgcctccccccattcatcaccacccccactgcctgcaaaggccagtcggcagcttcaggtatatcgatcaaagatggacggtgaagccacatcccccctgccgcggacccgctcaggtcctctgccatcttctagcggctctagctcttcatcttcccagctgtccgtggccaccctcggacggagccccagtcccaaatcagcattgctcacccagaacggcaccggctccttgcccagaaaccttgctgccacactgcaggatattgaaacgaaaaggcagctagctctccagcagaaagtggagtctctcccagctgagccactccccaccgacgaccccgccgggcagcaggtgattgaggagcaaaggcggcgtctagccgaactgaagcagaaagccgccgctgaggcgcagtgccagtgggacgcccttcatggggccgcccctttcccagccggcccgtccgggtttcccccactgatgcatcactccatcctgcatcacctgccggcgggtcgggaacgcggagaggagggcgaacacgcatatgatacgctatctcttgagtcttccgattccatggaaacctctatcagcacagggggcaatagtgcctgtagccctgataacatgtcatcggcatccggtttggacatggggaagatcgaggaaatggaaaagatgttgaaggaggcacacgccgagaaaaaccgcctgatggagtcccgcgagcgcgagatggagcttcgcaggcaggcactagaggaggaaagacgcaggagagagcaggtggagaggaggctgcagagtgaaagtgcacgcagacaacaactggtggagaaggaggtgaagatgagggaaaagcagttctctcaggctcgtccccttacccgatacctgccaatccgcaaagaagatttcgacctgaagacccacatagagagctccggccatggtgttgacacctgcctacacgtggtgttaagttcaaaggtttgcagagggtatctggtgaagatggggggcaagattaagtcctggaaaaagcgctggtttgtattcgaccggctcaaaagaactctgtcctactacgtagacaagcatgaaacaaagctgaagggtgttatctactttcaggcaatcgaagaggtctattacgatcacctgagaagtgctgccaaatcacctaacccagcccttacattttgtgttaaaacacatgaccggctgtattacatggtggccccatccgccgaggccatgcgcatctggatggacgtcatagtgaccggagccgagggctacacccagtttatgaactag

SEQ ID NO: 199805 - DNA, 306 bp, synthetic construct
  misc_feature 1..306: note = Description of Artificial Sequence: Synthetic coding sequence
  source 1..306: mol_type = other DNA
atgggcggcaagatcaagagctggaagaagcggtggttcgtgttcgacagattaaaacgtactctctcttactatgtggataagcatgagaccaagttgaaaggggtgatttacttccaggcaatcgaggaagtctattacgaccaccttaggtccgccgccaagagccccaatcccgcattgaccttctgtgtgaaaacacatgacagactttattacatggttgctccctctgccgaagccatgcgaatctggatggacgtgattgtgactggagccgaaggatacacacagttcatgaattag

SEQ ID NO: 199806 - DNA, 1119 bp, synthetic construct
  misc_feature 1..1119: note = Description of Artificial Sequence: Synthetic coding sequence
  source 1..1119: mol_type = other DNA
atggacgccctgaaccggaaccagatcggccccggctgccagacccaaactatggtgcagaagggacccttagacctgattgaaactggcaaaggtctgaaggtgcagactgataagccacacttggtctccctcgggtctgggcgcttatctacagctatcacactgctgccactggaggaggggcggaccgtgattggctcagccgcaagagatatttcacttcaaggacccggtctggcccctgagcactgctacattgagaacttgcgtggcacgctgactctgtatccttgtggcaatgcctgcactatcgacggcctgcccgtccggcagccaacccggttaactcagggctgcatgctttgtctcgggcagtcaacatttttaaggttcaatcatcctgccgaggctaagtggatgaaaagcatgattcctgccggcggaagggctccaggcccaccctactctcctgttccagagagcgaaagcctggttaatgggaaccacacccctcaaaccgcaaccaggggtccttccgcttgtgcctcccattcttctctggtgtccagcatcgaaaaagacttgcaggagattatggacagtctggtgttggaagaaccgggggcagctggcaaaaaaccagccgcgacctcacccctgtccccaatggccaatggcggtaggtacctgctgtcaccaccaacctcaccaggggccatgtctgtggggagttcatacgaaaatacaagtccagcattttcgccactctcctcacctgcatccagcgggtcatgcgctagccactctcctagcggacaagaacccggcccttcagttccccccctcgttccggccaggtccagctcctaccacttagccttgcagcctccgcaatcccggccttctggggcccgctctgagtcacctcgcctgtcacgaaagggtggccacgagcgcccgccaagccctggtctgcgcggtctgttgacagacagtccggccgcaaccgtcctggccgaggcacgcagagccactgagtcgcctagactgggcggacagctgccggtggtggctatctcactgagcgaatatcccgccgccaggcgatgtacttag

SEQ ID NO: 199807 - DNA, 744 bp, synthetic construct
  misc_feature 1..744: note = Description of Artificial Sequence: Synthetic coding sequence
  source 1..744: mol_type = other DNA
atggacgccctgaaccggaaccagatcggccccggctgccagacccagacaatggttcaaaaggggcctctggatctcatagagaccgggaaaggtctgaaggtgcagaccgataagccacatttggtgagtcttggtagtgggcggcttagtaccgccattacattactccccctggaggagggccggacagtgataggtagcgccgcaagagacatctcactgcagggccccggccttgctccagagcactgctacattgagaacttgcgcggcactctgacgctctacccctgcggtaatgcctgcaccattgatggtctgcccgtcagacagcccacgcgcctcactcagggctgcatgctatgcttggggcagagtaccttcctgcggtttaatcaccctgccgaggcaaagtggatgaaatcaatgatccctgctggcggcagagctccaggccccccatacagtcccgtgcccgccgagagtgaatcccttgtcaacggtaatcacacaccccagacagctacccggggaccaagtgcctgcgcttcccacagctctctggtgtcaagcatcgagaaagatttgcaggagataatggattccctggtcctggaagagcccggcgctgctggcaaaaagcccgctgctacaagtcctctgagccctatggcaaacggcggccgctacctcttgtctccccctacttcccccggccatgtgtgcgggcttcagctatag

SEQ ID NO: 199808 - DNA, 14055 bp, synthetic construct
  misc_feature 1..14055: note = Description of Artificial Sequence: Synthetic coding sequence
  source 1..14055: mol_type = other DNA
atggtggccggcatgctgatgccccgggaccagctgcgggccatctatgaagtgttatttagggaaggtgttatggtggctaaaaaagacagacgcccccggagtctccatccccatgtaccaggcgtgaccaacctgcaggtcatgagagcaatggcttctcttcgagcccgaggcttggtgcgggagacctttgcgtggtgccatttctattggtacctgaccaatgagggtatagcacatctaagacagtacctccacctgcctccagagattgtccccgcgtcattacagcgcgtccggaggcctgtggcgatggtcatgcctgctcggcggacaccacacgttcaagcagttcaaggacctctaggctccccgcccaagagggggcctttaccaaccgaggaacagagggtgtacagacgcaaagagctggaagaggtttctcccgagacgcctgtggtgcctgctacaacccaacggactctggcgcggccgggcccagagccagcacctgccacagatgagagggaccgagtgcaaaaaaagaccttcacaaaatgggtaaataaacacctgatcaaagcccagaggcatatatcagacttgtacgaggatctaagggatggacacaaccttatctccttgttggaggttctgtccggcgactcactcccccgggagaagggaaggatgagatttcacaagttgcaaaatgtacagatcgctctcgattacctgagacaccggcaggtgaagctcgtgaacatccggaatgacgatattgccgatggaaatcccaagctcaccttgggtctgatctggactataatcctgcattttcagatatcggacattcaggtttcgggccagtccgaagacatgacagctaaagaaaaactcctgctctggtcgcagcggatggtggaaggttaccaaggactgagatgcgataacttcacttccagctggcgggacgggagactgttcaacgcaattatacacagacataagccactgctcatcgacatgaacaaagtttacaggcagacaaatctagaaaacctggaccaggctttcagtgtggccgagagagatctgggcgtaactcgacttctggatcccgaggacgtggacgtacctcagccagacgaaaaatccattatcacttatgtgtctagtctgtacgatgccatgccccgggtcccagatgtgcaggacggagtgcgcgccaatgagcttcagcttcgctggcaagaataccgcgagctcgtactcttactgttacagtggatgaggcatcacactgccgccttcgaggaaagacggttccccagctcatttgaggagatagagatactgtggagccagtttctgaagttcaaagagatggagctacctgcaaaagaagctgacaagaacagaagtaagggaatttatcagtctctggaaggcgctgttcaggctggacaactgaaggttccgcccgggtatcaccctctggatgtcgagaaggagtgggggaagctgcacgtggccattctggagcgggagaaacagctgagaagtgaatttgaacggcttgagtgcttacagcggatagtgaccaaactccagatggaggcaggcctctgcgaggaacaactcaatcaggcagatgcactgctccagtccgacgttagattactggccgcaggtaaagtcccccagcgggcgggtgaggttgagagggatttggacaaggccgactcgatgattagattactctttaacgatgtgcagacactgaaggacggacgccacccccagggcgagcagatgtacaggcgcgtgtaccgattacacgaacgactcgttgccatacggaccgagtacaaccttaggctcaaggcaggagtggccgctcctgcaacccaggtggcccaggtaaccctgcaatctgtgcagcgccgccctgaactcgaagacagcacattgcgatacctgcaggacctgttagcgtgggtcgaagaaaatcagcatcgggtagacggcgcggaatggggtgtggatttaccctctgtcgaagcacagttgggatcccaccgtggattacatcagagcattgaggaatttcgtgcaaaaatcgagagggcgcgctcggatgaaggccaactgtccccggcaactcggggggcgtatcgagattgcctgggccgattagacctgcagtacgcgaagcttctgaattcgagcaaagcgcgacttcggtcgcttgagtctctacattccttcgtggccgccgccacgaaagagctgatgtggctcaatgaaaaagaggaagaagaagtaggtttcgattggagcgacagaaataccaacatgaccgcaaagaaagaaagttactcagcacttatgcgcgaactcgagttgaaggagaaaaagattaaagaactccaaaatgctggtgacaggctcctccgggaggaccaccctgcaaggcccaccgtggaatctttccaggctgcgctgcaaacacaatggagctggatgctccagctctgttgttgcatcgaggcccacctaaaagagaatgcagcttatttccaattcttttccgatgtgcgcgaagccgaagggcaactgcagaagttgcaggaggctctaagaaggaagtactcttgcgaccgcagcgcgacagtcacacgactcgaggacttgctgcaggacgctcaggacgagaaggaacagcttaacgaatacaaggggcatctcagtggcctggcaaaaagagctaaagcagttgtgcagctgaaacctcggcaccctgcccacccgatgaggggaaggttgcctctgctggctgtatgtgattacaaacaggtcgaggtcacggtacacaagggcgacgagtgtcagctggtgggtccagctcagccctcccactggaaggtcctcagttcctctgggagtgaggccgccgttccttcagtgtgttttctggtgccaccacccaatcaggaagctcaggaggctgtcacccggctggaagctcagcaccaggccctggtgaccttatggcaccagctccacgtcgatatgaagtccctgttggcctggcagagcctgagaagagatgttcagctgataagaagctggtccctggctaccttccgcacactgaaaccagaagagcagagacaggcccttcattccctggagttacactaccaagccttcttgagggacagccaggacgccggcggatttggtcctgaagatcgactcatggccgaacgggaatacgggagctgctcacaccattatcaacagctcctacagtcactggaacagggagcccaggaagagagccgttgccagcgttgtatcagtgagctgaaagacattcggctgcagcttgaggcctgtgagacgcgcaccgtgcatcgacttcgactcccactggacaaggaaccggctagagagtgtgcccagagaattgccgagcagcaaaaggctcaggccgaggttgaggggctcggcaaaggggtagcacgactctcggctgaagcagagaaggttctggcacttccagaaccctcccctgctgcccctacactccgatccgagcttgaactgacattggggaagttggaacaggttagaagcctaagcgccatctaccttgagaaattgaaaacgattagcctggttatccgtggtacgcagggggccgaggaggtcctgcgcgcccacgaagagcagttaaaagaggcgcaggccgttccggccacgctccctgagctcgaagccaccaaggctagcctgaaaaagcttagggcccaagcggaagctcaacagccaacctttgacgcactgcgggatgaactgcgaggggctcaagaagtgggagagaggttacagcagaggcatggcgagagggacgtggaggtggaaagatggcgcgagcgcgtggcacagctccttgaaagatggcaggccgttctggctcagaccgatgtgagacagagagagctggagcagttgggacgccaactgcgttactatagagagtccgccgaccctctgggcgcctggcttcaggatgccaggaggagacaggaacagatccaggctatgccactggccgattcccaggctgtgagggagcagttacgccaagaacaagctctgctggaggaaatcgaacgacatggggagaaagttgaagaatgtcagcgttttgctaaacagtacattaacgccattaaggattacgaactgcaactggtaacatacaaagcccagctggaaccagtggccagcccagccaagaagcccaaggtgcagtcgggctccgagtcagtcatacaggagtatgtcgacctacgaactcattattctgagttaacaaccctaacaagccaatacatcaaatttatcagcgaaacactgagacggatggaagaggaagaaaggctggccgaacagcagcgggccgaggaacgagagcgcctcgcagaagtagaggccgccctggaaaaacagagacagctcgccgaggctcacgctcaggcaaaagcgcaggccgaacgtgaggccaaggagctgcaacagcgaatgcaggaagaagtggtgcgtcgcgaggaagccgctgtagacgctcagcagcagaaacgatcaattcaagaggaactgcagcagctccggcagagtagcgaggcagaaatccaggctaaggctagacaggcagaagccgccgaaagatcacggctgcgcattgaagaagagataagagtggtcagactgcagttagaagcaacagagcgtcagagggggggcgcggagggcgagctgcaggcccttcgcgctcgcgccgaagaagcggaggcacaaaaaaggcaggctcaggaggaggctgaacggctacgtcgccaggtccaggatgaatcccagaggaagaggcaggcggaggtggaactggctagcagagtaaaagctgaagctgaagcggcccgggagaaacagagagctctacaagcattggaagagctacgcctgcaggccgaagaagctgaacggcggctgcgtcaggccgaagttgagagagcacggcaggtgcaggtggctctggaaaccgcccagcgcagcgcagaagcagagctgcagtccaaacgcgcttccttcgccgagaaaaccgctcagctcgaaaggtctcttcaggaagagcatgtcgccgtggctcagcttagagaagaggccgagcggagggcacagcagcaagccgaagcagaacgagcacgggaagaagccgagagagagttggagcgttggcagcttaaagcgaacgaggcactgagactccggctacaagcagaggaagtagctcagcagaaaagtctcgcccaagccgaggctgagaaacagaaagaagaggccgaaagggaggctaggagacgcggcaaggctgaggagcaggcagtccggcagcgcgagctcgccgaacaagaactcgagaagcagagacaactggcagagggtaccgctcagcagaggcttgccgctgagcaggagctgatccggttgagagcggagaccgagcagggtgaacagcaacgccagctgttggaagaggaactggcaaggctgcaaagggaagctgccgcagctacccagaagcggcaggaactggaggccgaacttgccaaagtccgggccgagatggaggtgttattagcgtcgaaagctagagccgaagaagagagcagaagcaccagcgagaaatccaagcagcgactggaggctgaggctggccgcttcagagaactcgctgaagaagctgcccgactacgtgccttagcagaggaagccaaacgtcaacgacagctggcagaggaggacgcagccaggcaacgcgcagaggctgaacgagtgctggcggagaaacttgcggccatcggtgaggctacaaggttaaaaactgaggctgagatcgccctcaaagagaaggaggctgaaaatgagagactgagaaggctcgccgaagacgaagcattccagcgtaggcggttagaagagcaagctgcccagcacaaagccgacatcgaggagcgactcgcccaactccgaaaagcctcagactccgagcttgagagacagaaggggctcgtcgaagataccctccgccagagaagacaggtcgaagaggaaattttggccctgaaggcgtcctttgagaaagccgccgccggcaaggctgagctcgaactcgagctgggccgcatccgtagcaacgctgaggacacattaaggagtaaggagcaagccgagcttgaagcagcacgccagaggcagctagctgccgaagaagaaagaaggcgccgcgaagccgaggagagggttcagaagtccttagctgccgaggaagaggccgccaggcaacgtaaggctgcccttgaggaagttgagaggctcaaggcaaaagtggaggaggcaaggcggttacgggagagagcagaacaggagagtgccagacaactgcagctggctcaggaggctgcacagaagcgcctgcaagctgaggagaaggcccatgctttcgccgtccagcagaaggaacaggagctgcaacagactctgcaacaggaacagtctgtgctcgaccagctgcggggcgaggccgaagctgctcggcgtgcggcagaggaagcagaggaagccagggtgcaagctgagcgggaagctgcacaaagccgtcggcaagtggaagaagcggagaggctgaagcagtcggcagaggaacaggcccaggctcgggcccaagcacaggctgctgcagaaaagctccggaaggaggctgagcaagaagctgcccggagggcacaggccgagcaggcagcattaagacagaaacaggctgccgatgctgaaatggagaagcataagaagtttgcggaacagacactgagacaaaaggctcaagttgaacaggagctcactacgctcagactgcagctcgaggagactgatcaccagaagaacttactggacgaagagttacaacgactgaaggctgaggccacagaggctgcgagacagagaagtcaagtggaagaggaactcttcagcgtcagagtgcagatggaagagctaagcaaattaaaggctcggatcgaagcagagaatagagcgctaatcctgagagacaaggataacactcagcgattcctgcaggaagaagccgagaaaatgaaacaagtcgcagaagaagctgccaggctcagtgttgccgcacaggaggccgcccggctgcggcagctggcggaagaggatctagcccagcagagggccttggcagaaaaaatgctcaaagagaaaatgcaggcagtgcaggaggccacccgactcaaagctgaagcagaactgcttcagcagcagaaggaacttgctcaggaacaagccagacgattgcaggaggataaagagcagatggcccagcagttggctgaggagacccaaggattccagagaacactggaagccgaacgccaacgccaactggaaatgtcagccgaagccgaacgcctcaagttgcgagttgccgagatgtctagggcacaggcgcgagctgaagaagatgcccagcggttcaggaagcaagccgaagaaatcggagaaaaattgcacagaactgaactcgccacacaggagaaggtgacgctggttcagacactggaaatccagcgtcagcagtcagatcacgacgcggaacgactgagagaggccatcgccgagcttgagcgcgagaaagagaagctgcagcaggaagccaagttactccagctgaagagtgaagagatgcagaccgtccagcaggagcagttgctgcaagagacacaagccctgcagcaatctttcctgagcgaaaaggactccctcctccagagagaaagatttatcgaacaagaaaaggctaagctggagcagctatttcaggatgaggtcgcgaaggcccagcagctaagagaggaacagcaaagacagcagcagcaaatggagcaggaacggcagagactggtggccagtatggaagaagcccggagacgccaacacgaagccgaagaaggagtgcgaaggaaacaagaagagctacaacagctggagcagcagcgtcggcagcaggaggaacttctggctgaggagaaccaaagactgcgcgagcaacttcagctcctagaggagcagcaccgggctgctttggcccattcagaggaggtgacggccagtcaggttgctgctacaaaaacactccccaacgggagagatgctctggatggtcctgctgccgaagctgagccagaacactccttcgacggtctgcgccgaaaagtgagcgctcaaaggctgcaggaggccggtatcctgagcgctgaagagctccagaggctggcccagggacacacgaccgtggatgagctcgccaggagagaggatgttcgccactatcttcaggggcgttcgtctattgcggggctcttgctaaaagcaacaaacgaaaagttatcagtgtatgccgcattacagcgacagctcctaagcccaggaacagccctcatcttacttgaggctcaggctgcaagcggttttttgctggatccagtacgaaatagacgccttacagtcaatgaggctgtgaaagagggggtagttggccctgagctacatcacaaactgctctccgcagagcgggccgtcaccggttacaaggatccttacaccggacaacaaatcagcctctttcaggcgatgcagaaaggccttattgtgcgcgagcatggaatccgtcttctggaggcccagattgccacaggaggcgtcatcgacccagtccattcccatcgtgtacctgtggacgttgcatataggcggggttattttgacgaagaaatgaatcgcgttctcgccgacccatccgacgatacaaaaggtttctttgaccccaacacacacgagaatctaacatacctgcagcttttggagcgttgcgtggaggatcccgaaacaggactgtgcctgttaccactgactgacaaggctgccaaggggggagaactggtgtatactgactctgaagcccgcgatgttttcgagaaagctacggtgtcggcgcccttcggaaaatttcaaggaaaaacagtcacaatatgggaaatcattaactctgagtatttcaccgcagagcagagaagggatttactgcggcagtttaggacaggaagaatcacagtcgagaaaattattaaaatcataattaccgtcgtcgaggaacaggagcaaaaaggaaggctgtgtttcgaaggtctgcgaagcctggtgccagcagccgagttgctagagtctagggtcatcgaccgagagttataccagcaactgcagagaggggagaggtcagtccgcgatgtggccgaggtggacacagtgcgtcgggccctgagaggcgccaacgtgatagcaggagtatggctggaggaagcaggccagaagttaagtatttacaatgccctcaagaaagacctgcttccgtcagatatggccgttgctcttctcgaagctcaagctgggaccggtcatattattgacccagcaacgagcgccagattaactgtcgacgaagccgtgcgggctggcctggtcggacctgagttccatgagaagctcttatccgctgagaaagcagtcactggttatcgcgatccgtacactgggcagtccgtttccttattccaggctctcaagaagggactgataccccgtgagcagggtctccggctcttggatgctcagctttctacgggggggatagtcgaccccagtaagtctcatagagtgcccctcgatgttgcctgcgccagaggttgtctcgatgaagagacatctcgtgcgctttctgcaccgagggccgacgctaaggcctattccgacccctcgaccggcgaacccgcgacttatggggagctgcagcaaagatgtcggcctgaccagcttaccgggttatccttgttgcccttaagcgagaaagccgcccgtgccagacaggaggagctctatagcgagcttcaggctcgggagacctttgaaaaaacaccggtagaggtccccgtgggcggttttaagggccggacggtgaccgtgtgggagctcatctcctctgaatatttcaccgccgagcagcgccaagagttgctcagacagtttagaaccggaaaggtgaccgtggagaaggtcataaaaattctaattactatcgtggaggaggtggaaaccctcagacaagaacggttgagttttagcgggctcagagcccctgttccagcaagtgagctgctggcgtctggggtgctgagtagggcgcagttcgagcagctgaaggacggcaagaccacggttaaggatctgtcagaactgggctcagtcaggacacttctccaggggagcgggtgcttggccggtatttacctggaggataccaaggagaaggtgtccatctacgaggcgatgagaagaggactgctgcgcgccaccactgccgccctgctccttgaagctcaggcggcaactggctttctggttgaccccgtccgaaatcagcgtctatacgttcacgaggctgttaaagcgggagtggtggggccggagctccacgaacaattgttgagcgccgagaaggcagtgaccggatatcgcgatccatatagcggtagcactatctctttgttccaggctatgcaaaaaggcttggttctgcgccagcatggaatcagactgttggaggctcaaatcgctacaggcggaattatcgacccagtccactctcaccgggtcccagtggatgtggcctatcagcgtgggtacttttcagaagaaatgaatcgcgtacttgccgacccttccgatgatacaaagggtttctttgatcccaatactcacgagaatctaacataccggcagctgctagaacggtgcgttgaggatcccgagacgggattgcgcctgcttccactcaagggcgcagaaaaggcagaagttgtcgagacaacccaggtatacaccgaagaagagacacgcagagcttttgaagaaactcagatcgacatccccggaggtggttcccatggaggcagcactatgtcgttatgggaagtgatgcagagcgacctcatacctgaggaacagcgagcacagttgatggccgattttcaagccggcagagtgacaaaagaaaggatgattataataataatagagatcattgaaaagaccgagattatacgccagcagggcctggcctcatacgactatgtgcggaggagattgacggctgaggacctgttcgaggccaggatcatttccctcgaaacatataatctgctgagagaaggcacccggtcattacgagaggcattggaagccgagagcgcgtggtgctacttatacggaactggaagtgtagcaggcgtctacctccccggatcacgacagactctgagcatctaccaggccttgaagaaagggctgctgtcagcagaggtcgcaaggcttctgttggaggcccaggcagcaacaggtttcctcctggatcccgttaaaggtgagaggctgacagtcgacgaagcagtgcggaagggccttgttggtccagaactgcacgacagactgttgagcgctgagcgggcagtcactggctatcgggacccctacactgagcaaacaatctcgttattccaggccatgaagaaagaactgattcctaccgaggaggccctgcggctgttagacgcccagctggctaccggggggatcgtcgatccacggctgggctttcacttgcctctggaagtcgcgtatcagcgggggtatctcaataaagacacccacgaccagctgtctgaaccctccgaagttagaagctatgtggatccctcaacagacgagcgacttagttatacacaattgctgaggcgctgtcggcgagatgatggaacaggccaattacttcttccactgtctgatgcacggaaactgactttccgcggactcagaaaacagatcaccatggaagagctagtaaggtcccaggtgatggacgaggccactgcccttcagctgagggagggcctgaccagcatcgaggaagtgactaaaaacttacagaagttcctggaaggtacgtcttgcatcgcgggagtctttgttgatgctacaaaggagcgactgagtgtgtaccaggcaatgaagaaaggcataatcagacctggcaccgccttcgaattactggaggcccaggccgccaccggatacgtcatcgaccctataaagggactgaagctgactgtggaggaagcagtgaggatgggcatcgtagggcctgagtttaaggacaaattactgtctgctgaaagggcggtgacgggctacaaggacccttattccgggaaactcattagtctcttccaggctatgaagaaggggctgattcttaaggaccacgggattaggctactcgaggcccagatcgcaacagggggcatcatcgaccccgaggagtcccacaggcttcccgtggaggtggcttacaagaggggtctgttcgacgaggaaatgaatgaaatccttacagatccttcagacgacacaaagggtttctttgaccccaacaccgaggagaacctgacctaccttcagctgatggaacgctgcatcactgacccgcagacagggctttgcctgctgcctcttaaggagaaaaagagagaacgtaagactagtagtaagtctagcgttcggaagcgacgcgtcgtcatagtcgatccagagaccggtaaagagatgtccgtgtatgaggcgtatcgcaagggactgatcgatcaccaaacctatctagagctttctgaacaagaatgtgagtgggaagaaattacaatcagtagctcagacggagtggttaagagtatgatcatcgatcgacggagcggccgccagtacgacatcgacgacgccattgcgaagaaccttatcgaccgctcagctttggatcagtatcgagccggaactctctctatcaccgaatttgcagacatgcttagcggcaacgccgggggattccggagccgttcctcgagcgtgggctccagctccagttaccccatcagccctgccgtctcaaggactcagctagcttcttggtctgatcctaccgaggaaaccggaccggtcgcgggcattctggatactgagaccctggaaaaggtctccatcaccgaagctatgcaccgcaatctggtagataatattaccgggcagcggcttctggaagcccaagcttgtacaggaggtattatcgaccccagtaccggagagaggttccccgttaccgatgccgtgaataagggactggtggataagataatggttgacagaattaatctcgcccaaaaggccttttgcggcttcgaagacccaaggactaaaaccaaaatgagcgccgctcaagcactcaaaaagggatggctctattacgaggccggtcagagatttctagaggtccagtatcttacaggtggtctaatcgaacccgatacccctggcagggttcctttggacgaagccttacagagaggaaccgtagacgccagaacagctcaaaagctgagagatgtgggagcatatagtaaatatcttacctgccccaaaacaaaactgaaaatcagttacaaagatgcgcttgacaggtcaatggtggaggagggaacaggccttcggctgctggaggcagccgcacaaagcactaagggctattattccccatacagcgtgtccgggagcgggtcaactgccgggtctagaacgggaagtaggaccggttcaagagccggctctcgaagaggttcttttgacgcaactggctcgggctttagtatgacctttagctcctcatcttatagttcctcagggtacggcaggcggtacgcctctggatcatcggcatccctgggaggacccgagtccgcagttgcctag

SEQ ID NO: 199809 - DNA, 13644 bp, synthetic construct
  misc_feature 1..13644: note = Description of Artificial Sequence: Synthetic coding sequence
  source 1..13644: mol_type = other DNA
atgagccagcaccagctgcgggtgccccagcccgagggcctgggccggaaaaggactagctcggaggacaacctctatttagccgtgctgcgagcttccgaggggaagaaggatgagagggacagagtgcaaaaaaaaacattcacaaagtgggtgaacaaacacctcatcaaggcccagagacatatcagcgacctttacgaggatttacgcgacggccataatctaattagtctgcttgaggtcctgtctggcgactccctgccacgagagaaaggcagaatgagatttcataagttgcaaaacgtccagatcgctctggattatttgcgccaccggcaggtgaagctagttaacatccgcaatgatgacatcgccgatgggaaccccaagcttactcttggacttatttggaccatcattttgcatttccagattagtgatatacaggttagcggacagagcgaggacatgactgccaaggagaagctgcttctgtggagccaaaggatggtcgagggctaccagggcctgaggtgtgacaacttcacaagctcatggcgtgacggacggctcttcaacgcgatcattcaccggcacaagccgctgttaattgacatgaataaggtgtatagacagacaaatctcgaaaatctggatcaagcgttttccgtcgctgagagagatctgggggtgacccgcctgctggaccccgaagatgtagacgttccacaaccggatgagaagtcgataatcacatatgtgtcatccctctacgacgcaatgccccgggttccggacgtgcaggacggggtgagggcaaatgagctccaactgcggtggcaggaatatagagagctggtgcttctactgctacagtggatgcgccatcataccgcggcgtttgaagaaagaagatttccttcttcatttgaagagatcgaaatcctatggtctcagttcctaaagttcaaggagatggagctcccagcgaaggaagctgataagaataggagcaaaggcatctatcagagcctcgaaggcgccgtgcaggcaggacaactgaaggtaccccccggctaccatcctctggatgtggagaaagagtggggaaagcttcacgttgcaattcttgagcgcgagaagcagctgaggagtgagtttgagcggctcgaatgcttgcagcggatcgtcacaaagctccaaatggaggccggcctctgcgaagaacagttgaatcaagctgacgctttattacaatccgatgtgaggctgctggctgcaggcaaagtgcctcagcgagctggtgaagtggagcgggacttggataaagccgacagcatgattagactgctattcaacgatgtccaaacgctcaaggacgggagacaccctcaaggtgaacagatgtaccggagggtgtatcgcctgcatgagcgtctggtggccatcagaaccgaatataatctgaggctcaaggcaggggtggccgccccggccacccaagtggcccaggtaaccttgcagtcagtccagaggcgccctgagctggaagattctactctgagatatctgcaggacttactcgcctgggtcgaggaaaatcagcacagggtcgatggagcagagtggggggtggacctgccaagcgtggaggcccagctgggaagccacaggggtctacaccagagtatcgaggagtttcgtgccaagattgaaagagcacgcagtgatgaaggacagttgtcccccgctactaggggggcttacagagattgcctcgggagacttgacctgcaatacgcgaaacttctaaactctagtaaagcccgcttaagatcccttgaaagtctgcactcctttgtggctgcggctactaaagagcttatgtggctgaacgagaaggaggaagaggaagtcggattcgattggtcagataggaacacaaatatgactgccaagaaggagtcatactccgcactgatgcgggaactggagttgaaggagaagaagatcaaagagctgcagaacgccggtgaccgtctgttgcgggaggaccaccccgctcggccaacagttgagtctttccaagcagcgcttcaaactcagtggagttggatgctgcagctctgctgttgtatcgaggctcaccttaaggaaaacgccgcttacttccagttcttctctgacgtccgcgaagctgaaggacaattgcagaagctccaggaggcccttcgacgaaagtacagttgtgatcgatcggcaacggtgacacgcctggaggacctcttgcaggacgcacaggatgagaaggagcagttgaatgaatacaaaggccatctgtccggcttagctaagcgcgccaaagccgttgttcaacttaaaccaaggcacccagctcaccctatgcggggcaggttgcctctgcttgctgtgtgcgactacaaacaggtggaggtgaccgttcataagggagatgaatgtcagttggtaggcccagctcagccttcccactggaaggttcttagtagctctgggtcggaagccgctgtccccagcgtctgctttttggtaccccccccgaaccaggaggctcaggaagcagtgactcggctggaggcccagcatcaggcgcttgttaccctgtggcatcagctccatgttgacatgaagtccctcttagcctggcagagcctaagacgggacgtgcaactgatacgctcttggagcttggccacatttcgtacactgaagcccgaagaacagcggcaggccctccacagcctggagctgcattatcaagccttcctcagagactctcaggatgccgggggcttcggccccgaagaccgcctgatggctgaacgggagtacgggagttgcagtcatcattatcaacagctgctccagtccctcgagcagggggctcaagaggagtctcggtgccaacgctgtataagtgaactgaaagacattcgactgcagctggaagcgtgcgagacacgtactgtgcaccggttgcgcctccctctcgataaagaacctgccagggagtgtgcccaaagaatagcagagcaacagaaggcacaggcggaagttgagggcctgggaaagggagtagctaggttgtcggcagaagccgagaaagtcctcgcgcttcctgagcccagccctgctgcaccaacgcttcgtagcgagttagaacttactctgggcaaacttgagcaggtccgctccctctcggccatttaccttgagaaattaaagacaatttctcttgtgattcgcgggactcagggcgctgaagaagtcctcagggcccacgaagaacagttgaaggaggcacaagctgtaccggctacgctgccggaactggaggctaccaaagcctcactgaaaaaattaagagcacaggccgaagctcagcagcctaccttcgacgcacttcgagatgagctgcgcggcgcccaggaggtcggagaaagactccagcagaggcatggagaaagggacgtggaagttgaacgctggagggagcgagtggctcagctcttggagcgctggcaggccgtgctggcacagacagatgttcggcaaagagaattggaacagctagggaggcagctccggtactaccgggaatcagcagatcccttgggagcttggcttcaggacgctcgcaggcggcaggagcagatccaggccatgccccttgccgacagtcaagcggtgagagaacagctgcggcaggaacaggctctgctcgaagagattgagcggcacggcgagaaggttgaggagtgtcaacgcttcgcgaagcagtacattaacgccattaaagattacgaactccaactcgttacatacaaggcccagctggagcccgttgcttccccagccaagaaaccaaaggtgcagagcggctcggagtcggtcatccaggagtacgttgatctgaggacacactattcggagttgacgaccctaacttctcagtatatcaagttcatctccgagacccttcgcaggatggaggaggaggagcggttagccgagcaacaacgggctgaagaacgggagaggctggctgaagttgaggccgcactagagaaacagcggcagctggcagaggcgcatgctcaggccaaggcccaagccgagagagaggcaaaggaacttcaacaacgaatgcaggaggaagtagtccgcagggaggaggcggcagtcgatgcccagcagcagaaaagaagcatccaagaggaacttcagcagctcaggcagagcagcgaagccgaaatacaggccaaagcacgccaggctgaggccgctgaacgcagtagactgagaatcgaggaagagattcgcgtcgtgcggctgcagctggaggcaacagaaagacaacgcggcggcgccgagggggagctccaggccctgcgcgcaagggctgaagaggcagaggcacagaaaaggcaggcgcaggaagaagccgagcgccttagacggcaggtgcaggatgaatcccagaggaagcggcaagctgaagtggagctggccagcagggtcaaagccgaagctgaggccgcacgagagaagcagagagcccttcaggcccttgaagagctccggctccaggccgaagaagccgaacgacgcctgcgccaggccgaggttgagcgggccaggcaggtccaagtggccctcgagacggcacaacggtcagcagaagccgagctccagagcaaaagggcctccttcgcagagaaaactgcacagctggaacggagccttcaggaggagcacgtcgccgttgctcagcttagggaggaagcagagagacgcgctcagcaacaggccgaggcagagcgcgcaagggaggaggccgagcgcgagctggaacgttggcagcttaaggctaatgaggccctgaggctcagacttcaggccgaggaggtcgcacagcagaaatcgttagcccaggctgaggcagagaagcaaaaggaagaggccgaaagagaagctcgtagaaggggaaaagcagaggaacaggctgttcgtcagagggagcttgccgagcaggaactagaaaagcagaggcaattggctgaaggaaccgcacaacaacgactggctgccgaacaagagctaataagactccgcgcagagacagagcagggcgagcagcagagacagcttttggaggaggaattggcccgcctccagcgtgaggccgccgccgctactcaaaaaagacaagaattagaggccgaactcgctaaggtgagggccgagatggaggtcctgttggcatctaaggcacgcgcagaggaggagtcgaggtccactagcgagaagtccaaacagcggctagaagccgaagctggtaggttccgggaattggcagaagaggccgcacggctgcgcgctttagctgaggaggccaagcgccagaggcaacttgccgaggaggatgcagctcgtcagagagctgaagctgagcgggtcctggctgagaaactggccgccataggggaagccacccgccttaaaaccgaagccgaaatcgcactgaaggagaaagaagctgaaaacgagcgccttagacgtcttgctgaggatgaggccttccaacgacggagactcgaagagcaggcagcacaacataaggcagatatcgaggaaaggctggcccagctgaggaaagcaagcgactcggaactcgaaagacagaagggcctggttgaagatacccttaggcaacgcaggcaggtggaggaggagatcttagcactcaaggccagcttcgagaaagccgcagccggcaaagcagaactggaactcgagctgggtagaatcagatctaacgctgaagatactctcaggtcaaaagaacaggcggaactcgaagccgctaggcagaggcagttagccgcagaagaggagcgacgcaggcgtgaggctgaagaaagagttcagaaaagtcttgctgccgaagaggaggccgcgagacaacggaaggcggctctggaggaggtggaaagattaaaggccaaggtggaagaggcccgcaggctgcgcgaacgagctgaacaggagtctgctaggcagttgcagctggcccaagaggcagcacagaagagactgcaagctgaggagaaggcgcatgctttcgccgtgcagcaaaaagagcaggaactccagcagacccttcaacaggaacaatccgtcctcgaccaactgcgcggcgaagcggaggctgcccgccgcgcagccgaagaagccgaagaagccagggtccaggccgaacgggaggccgcgcagtctagacggcaagtagaggaagctgagcgactaaaacagagtgccgaggagcaggcccaggcgcgagcgcaagcccaggccgcagctgaaaaactccgaaaggaggccgagcaagaggctgcccggcgtgcccaagccgagcaggctgccctgcggcaaaagcaggcagcggacgccgagatggagaaacacaagaagttcgctgagcagactttacgccaaaaagcccaggtggagcaagagctcactaccctgaggctgcagttggaagaaaccgatcaccagaagaatctgttagatgaagagctgcaacggttgaaggctgaggctaccgaggccgcaagacagcggtctcaggtcgaggaagagttatttagcgtgcgcgttcagatggaggaactatctaagttaaaggcgaggatagaggcagagaacagggcgcttatcttgcgcgataaggataatacacaacgcttcctgcaagaagaggccgagaagatgaagcaggtagccgaggaagctgcaaggttaagcgtagcagcccaggaggccgctcgcctcagacagttggcagaagaggatctagcgcagcagagagcattggctgagaaaatgctgaaggagaaaatgcaggcagttcaggaggctacaaggcttaaagcagaggcggagcttctccagcagcagaaagaactggcacaggagcaagctcggcgtctgcaagaagataaggaacaaatggcacagcagctggcggaggaaacccagggatttcaacgtacgctggaagctgagcgacagcggcagctagagatgtccgctgaggccgaaaggctgaaactgcgcgtcgcggagatgagccgcgcgcaggcacgagcagaagaagacgcccagaggtttaggaaacaggcagaagagatcggagaaaagctccatagaaccgagttagctacacaagagaaggtgacgctggtgcagactttagagattcagagacaacaatccgatcacgacgcagagcggctgcgtgaggccatcgcagagcttgagagggaaaaagagaaactgcagcaggaggccaagctgctgcagctgaaatccgaggagatgcaaacagtgcagcaagaacagctgttgcaggagacacaggccctccagcagtccttcctgagtgagaaggatagcctcttgcagcgtgagcgcttcatcgaacaggaaaaagccaagttagaacaactgtttcaggatgaggttgctaaggcccagcagctgagggaagagcagcagcggcaacaacagcagatggagcaagaacgtcagagactcgtagcttctatggaggaagcaaggcgtcggcagcatgaagccgaggaaggtgtgcgccgcaagcaagaagagttgcagcaattggaacagcaacgacgtcagcaggaagaactgttagccgaggagaatcagcgacttagggagcagctccagctactcgaggaacaacaccgcgcagcgctggcccattccgaggaggttaccgcaagtcaggtagcggccacgaaaaccctgccgaacggtagagatgcattagacgggcctgcggcggaggcggaaccggaacattctttcgatgggttgaggcggaaggtgtcagcccaaagattgcaggaggctgggatcttgagcgccgaagagctgcaaaggttggcccagggccacactacggtcgacgagctagcgcgccgcgaagatgttagacattaccttcagggcaggtcttccatcgcagggcttcttctgaaagctacaaacgagaaactgtctgtttatgccgcgctccagcgccagctccttagcccaggaacagccttaatcctgcttgaagctcaagcagcgtccggtttcctgctggaccctgtgcgaaacaggagactgacagtgaatgaagcagttaaagaaggcgtggtgggccccgagctccaccataaactgctgagtgctgagagagcggtgacagggtacaaggatccttacacgggccagcaaattagtctctttcaggccatgcaaaagggtttgattgtccgtgagcatggcatccgactgctcgaggctcaaattgctaccggaggtgtaatcgatcctgtgcactcacatagagttccagtggatgttgcctatcgcagaggctacttcgacgaggagatgaatcgggtgcttgctgatccttccgatgacaccaagggcttcttcgatcctaatacccatgaaaatctgacttacctgcagctgctggagaggtgcgtggaggaccctgaaaccggactgtgtcttttaccgctgacagataaagcagcgaagggcggcgaattggtctacacagatagcgaagccagggatgtgttcgagaaagccacagtgtcagcaccctttggaaagttccaaggaaaaacagttactatatgggagataattaattctgagtatttcactgccgagcaacgcagggacctgctgaggcagtttaggaccggccgaatcacagttgagaagattataaaaatcattataactgtggtagaggagcaggagcaaaagggtcgcctgtgctttgaaggacttcggagcctcgtcccggcagccgaactgttggaatcccgtgtaattgacagggaactgtaccagcagctgcaaagaggagaacggtccgttagggacgtggctgaggtagacaccgtgcggagagcacttcggggggcaaacgtgatcgccggcgtatggctcgaggaggcaggacagaaattatctatttataatgccctgaaaaaagacctgttgcccagtgatatggccgttgcactcttagaggcccaggcaggcactggacacatcatagaccctgccacttcagcacggttgaccgttgatgaggccgtccgagctggcctggttggcccagaattccatgagaaattgctgtctgcagagaaagccgtgacaggttacagagatccgtacaccggtcaaagtgtctccctgtttcaggccctgaaaaagggactgatcccccgagagcagggcctgaggctgctggatgcacagcttagcaccggaggcatcgtcgatccctcaaaatcccatagggtccccctagatgtggcttgcgcccgcggatgtctcgacgaagagacctcacgggcgctgtctgcgccaagagctgatgcaaaagcttactcagacccgtcaacaggggagcccgccacctatggggagctgcagcagagatgtagacctgatcagctgacagggctctcgttactgccgctcagcgagaaagctgcaagagcacgccaggaggagctgtactccgagctgcaggcgcgggaaacttttgaaaaaacgccagttgaggtgcctgtgggcggctttaagggccggacagtaacagtttgggaactgattagcagtgagtattttacagctgaacaaaggcaagagctgcttagacagttcaggacaggaaaggtgacagtggaaaaggtcataaaaatcctgatcactattgtggaggaggtcgagacgctgcggcaggagcgtctttcttttagcggactacgagctcctgttccggcctcggaattactggcttccggcgtgctctcacgggcacagttcgagcagctgaaggatgggaagacaaccgtcaaagatctgagcgagctgggctctgtcaggactctgctgcaagggagcggctgcctcgcaggaatatacctggaagataccaaagagaaggtctccatatatgaggccatgcgcagaggtttgctgagagccacgactgccgcccttctcctcgaagcacaggccgcaacggggttccttgtggatccagtgaggaatcaacgcctttacgtccacgaggcggtgaaggctggggtcgtcgggcccgagctccatgagcaactgttatcagccgaaaaagcagtcaccggttatcgtgacccctactcagggagtaccatctctctgttccaagcaatgcaaaagggacttgtattgcgtcaacatgggattagattgctggaggctcagattgccaccgggggcatcattgatcctgtacacagccaccgggttccagtcgatgttgcctatcagagggggtacttctccgaggagatgaaccgggtcctggcagatccttccgatgataccaagggattcttcgacccaaacacgcacgaaaaccttacttaccgccaattgctggaacggtgcgtggaggatcccgaaacagggcttaggctgctgcccctgaagggagccgagaaggccgaggtggtcgaaaccacccaagtttacacagaagaggagacccggcgggccttcgaggaaacacaaatcgacatacctgggggggggtctcatgggggttctaccatgagcttgtgggaagtgatgcagtccgatttaattccagaggaacagcgtgcgcaactaatggctgattttcaggctgggagagtgacaaaggagaggatgataataataataatcgaaattattgagaagaccgaaataatccgtcaacaaggcctcgcctcatacgattacgtgaggagacgtctcactgccgaagatctttttgaggcccgcattatctctctggaaacatacaatctccttagagaggggacccggagcctgagagaggccttggaggccgaatccgcctggtgctacctctacgggacaggcagcgtcgccggggtatacctaccggggtcccgccagacattatccatataccaggctttgaagaagggactcctgagcgccgaggtggcacgactgcttctggaagctcaggccgcgaccgggttcctgttggacccggtaaagggggaacgtcttactgtagacgaggcagtccgaaagggattagtaggccccgagctgcatgatcgcttgctgtctgccgagcgagcagtgactggctaccgtgacccctataccgagcagaccatcagtctgttccaggccatgaagaaggagttaattcccaccgaagaggctttgaggcttctggatgcgcagctggccactggagggattgtggatccacggctcggcttccatttgccactggaagtcgcctatcagagggggtatctgaataaggatacacacgaccagcttagtgagccttctgaagtgcggtcctacgtagacccatctacagacgagaggctgtcctacacccagttgctgcgacgttgcagacgggacgatggaaccggccagttgttgctcccattaagtgacgcgcgaaaactaacttttagaggtctccggaagcagatcaccatggaagaactggtccgttcgcaagtcatggacgaggccacagccttgcaattgagggagggtctgacttctatagaagaggtgaccaaaaacttacagaagttcctggaagggacctcatgtatcgccggcgtgtttgtggacgctacaaaggagcgtctgagtgtgtaccaggcaatgaaaaaaggaatcatcaggcccggcacagcattcgagctcctggaggcccaggctgccaccggctacgtgattgacccaatcaaggggttgaaactgacggtggaggaggctgtccgcatgggaattgtcggtcccgagtttaaggacaaattattaagtgctgagagggccgttaccggctacaaggatccatactctggtaaactcatctccctttttcaggccatgaagaagggcctgattttgaaagatcacggtattcgtcttctagaggcacaaattgctacaggtggtattattgatcctgaagaatcccataggctgcccgtggaggtggcatacaagagggggcttttcgatgaggaaatgaatgaaatccttacagaccccagcgacgacacaaagggtttcttcgatcccaacaccgaagaaaacctaacctatctgcagctcatggaaaggtgtattactgacccccagaccggtctatgccttctgcctcttaaggagaaaaagagagagaggaagacgtcctccaaatcctccgtgcggaagcggcgggtggtaattgtggacccggaaacaggcaaggagatgtccgtgtatgaggcatacaggaagggcctcatcgaccatcagacgtatctcgagttatccgagcaggagtgcgagtgggaagagataactataagttccagtgacggtgtggtgaagagcatgatcatcgacaggcgtagcggccgtcagtatgatatagacgacgcaatcgcaaaaaacctgatagaccggagcgccctggaccagtacagggccggaactctgtcgatcacggagttcgctgacatgctgagtggcaacgccggcggttttcgaagccgctcttccagtgtcggatcttcatcgtcctaccctatcagcccagccgtgagtcggacacagttggcgagttggtccgaccccaccgaagaaactgggcctgtggcaggcattctagacacagaaacactcgaaaaggtgagtattaccgaggccatgcacagaaacctcgttgataacatcacgggtcagcggctgctagaggcccaagcctgcacgggcggtataatcgatcctagtacaggggagcgctttccagtgacggacgcagtaaataaagggctcgtggacaaaatcatggtggaccgcattaacttggcccagaaagccttctgtggctttgaggatcccagaacaaagacgaagatgagcgcagcccaggcgctgaagaaagggtggctgtattacgaggccggccagcgattcttagaagtgcagtacctgaccgggggcctgatcgagcctgatactcccggacgagtacccctggatgaagctctgcagaggggcactgtggatgcaaggacagctcaaaaattgcgcgacgtgggggcatactccaaatacctgacatgtcccaagacaaagctcaaaattagttacaaagatgctctggacaggtctatggtagaagagggcacagggctgcgactgttggaggccgccgcacagagcaccaagggttattatagcccctacagcgtgtctggatcaggctctaccgccggctccaggaccgggtcccgtaccgggagccgtgccggcagcaggcggggatcatttgatgccacaggaagtggttttagcatgacgttctcctcatcctcatactccagtagtggatacgggcgccgctatgccagtggatcctctgcatctcttggcggccccgaatccgccgtggcatag

SEQ ID NO: 199810 - DNA, 13644 bp, synthetic construct
  misc_feature 1..13644: note = Description of Artificial Sequence: Synthetic coding sequence
  source 1..13644: mol_type = other DNA
atggagcccagcggcagcctgttccccagcctggtggtggtgggccacgtcgtgacccttgccgcagtgtggcattggagacgcggccgccggtgggcccaggacgaacaggatgaacgtgaccgggtccagaagaagaccttcaccaaatgggtcaacaaacacttgataaaggcccaacgacacatttccgacctgtatgaagatctgcgggatggccataatctgatcagtctcctggaggtgctctccggggattcgctgccaagggagaaaggaagaatgcgattccataagttacagaatgtgcaaatcgcactggattacctgcggcatcgtcaagtaaaacttgtaaacattcgaaacgacgacattgccgatggaaacccaaagcttaccctaggcctgatttggacgattatactgcatttccaaatttctgatattcaagttagtgggcaaagcgaagacatgacagctaaggagaaattgctgctctggtcgcagcgcatggtggagggatatcagggcctgcgctgcgataatttcacttcgtcctggagggatggccgcctcttcaacgcaatcatccacaggcacaagcccctcttgattgacatgaacaaagtgtacagacagaccaacctggagaaccttgatcaggcatttagtgtggccgaaagagatttgggcgtaactcgcctgctggatccagaggatgtcgatgtgcctcagcccgacgagaaatcaatcattacctatgtatccagtttatacgatgctatgcctcgagtgcctgatgtgcaggatggggtgagggctaacgagctacagctgcggtggcaagaatatcgtgaattggtgctcctgctgctccaatggatgcgtcatcatactgccgcttttgaggaacggaggtttcccagttcctttgaagaaatcgaaatcttatggagccaatttctcaaattcaaagagatggagctcccggccaaagaagcagataaaaaccggagtaaggggatttatcagagcctagaaggggccgtgcaggcaggtcaactgaaagtgccgccggggtaccaccctttagatgtggaaaaagagtggggcaagctccatgttgctatccttgaacgcgaaaaacagctgcggtcagagtttgagagacttgagtgcctccagagaattgtgaccaaattgcagatggaggcagggctttgcgaagagcagcttaaccaggccgatgcccttctgcagagtgacgtccgattacttgctgctgggaaagtgccgcagcgtgctggagaagtagagcgcgatctggacaaggcggattctatgatcaggctgctttttaatgacgttcagacgctaaaggacggtagacatccccagggggagcagatgtatcgacgagtttaccgtttacatgaaagattggtggccattagaaccgaatacaacttaaggcttaaggcaggggttgccgctccagcgacacaggttgcccaagttactctgcaatcggtccagaggaggccagaactagaggactcaactttgcgctatctccaggatctactggcttgggtggaagaaaaccagcacagagtcgacggcgcagaatggggcgttgatctgccgtccgttgaagcccaacttggttcccacagagggctccaccagagcattgaggagttccgtgccaagatcgagcgcgctcgtagtgatgagggccagctctcaccggctacacggggtgcctaccgcgactgccttggcagactcgacctgcagtatgccaagctgctgaattcttctaaggcacgccttcgttcattagagtctctacacagcttcgtggcagcagccactaaagaactgatgtggttgaacgagaaagaggaggaagaggtggggtttgactggtcagacagaaacaccaatatgactgctaagaaagaatcatactccgctctcatgcgcgagttagagcttaaggaaaaaaagattaaggagttgcagaacgctggagatagactcctgcgcgaggatcaccccgcaagaccaaccgtcgaatcctttcaggcagcgctgcagactcagtggtcttggatgcttcagctgtgttgctgcatagaggcccatctgaaagagaacgccgcctatttccagttctttagtgacgtacgggaagccgaaggtcagctccagaagctccaggaagctctaagacggaaatacagctgtgaccggagcgcgactgtgacccggctcgaagacctgctgcaagacgcccaagacgagaaggagcaactgaacgagtacaagggccatctctcaggcctggccaaacgcgccaaggccgtcgtccaactcaagccacggcacccagcacatcctatgcgtggccggttgcccctccttgccgtctgcgattacaagcaggtagaggtaacggtgcacaaaggagacgaatgccaactcgtgggaccggcccagcccagccattggaaggtgctctcctcctctggcagtgaagcggccgtaccgagcgtttgtttccttgtgcctccgcccaaccaagaggcccaagaggcggtgacccggctggaagcccagcaccaggccctggtcactttgtggcaccagctccacgttgacatgaagagcctattagcttggcaaagtctgagaagggacgtccagctgataagaagctggagtctcgccacctttcgcactctaaaaccggaggaacagcgccaggcattacatagtttagaactgcactaccaggcattccttcgcgactctcaggatgcggggggatttggtcctgaggacaggctgatggctgaaagagagtacggctcgtgttcgcatcactaccagcagctgcttcagtccttggagcagggagcccaagaagagagtagatgccagcgctgtattagcgaactgaaagatattcgcttgcagttagaggcctgtgaaactaggaccgtgcataggctgagactccccctggataaggagcctgccagggaatgcgcccaacgaatagccgagcagcagaaagcccaggctgaagttgagggcttaggtaaaggtgttgcccgtctgtccgctgaagctgagaaggtgttggccctgcctgaacctagccccgctgcaccaacactgcggtctgaactcgagttaaccctgggcaaactagagcaggtgcgctcattatcagctatctacctggagaagctgaagaccataagtctggtcatcagggggacccagggcgcagaggaagtgctgagagcacatgaggaacagctaaaggaagcacaggcagttcccgccaccctgccggagctggaagctaccaaagctagcctgaagaaactcagagcacaggccgaggctcagcagcctacatttgatgcccttcgcgacgagctccgaggcgcccaggaagtcggagaaagactgcagcagcgccacggagaaagggatgtggaagtagagaggtggcgggaaagggtggctcagctgctggagcgttggcaggctgtgttggcccaaaccgacgtaaggcagcgggagcttgaacagctcggtcggcagcttaggtattatagagagagcgctgatcctctcggcgcctggctgcaggacgctaggagaaggcaggaacagatacaggcaatgccgttagccgattcacaggctgtgagggaacaacttcggcaggaacaggccctgcttgaggagattgagagacatggcgaaaaggttgaagaatgtcagaggtttgccaagcaatatatcaacgcgataaaggactacgaactgcagctggtgacctacaaggcccaattggagcccgttgcgtctccagccaagaaacctaaagtgcagagcgggtcagagtctgtgatccaggagtacgtcgacctgagaacccactacagcgaactgactactctcacgtcccagtacatcaaatttatttctgaaacactccgcagaatggaggaagaggaacgcttagccgagcaacaaagagctgaggagcgtgagcggctggctgaggtcgaggcagcccttgaaaagcagaggcagctcgccgaggcacatgcccaagcgaaggcccaggcagagagagaagcaaaagagctgcagcaacggatgcaagaggaggtagtgcgcagggaagaggcagccgtggatgcccagcagcagaaacgctcaatccaggaggagctgcagcagcttcgacaatcttccgaggcggaaatccaagccaaggctcgccaggctgaggccgccgagcgtagcaggttgcgaatagaagaggagataagggtggtccgcctgcaattggaggctaccgagcgtcagaggggcggtgctgagggggagcttcaggcactcagagcaagggcagaggaggcggaggcccagaagaggcaagcccaagaggaggcagagcgcttgaggagacaggtgcaggatgagagccagcgcaagcggcaggcagaggtggaattggcaagccgtgtgaaagcagaagctgaggctgccagggagaagcagagggcactgcaggccctcgaggagcttcgcctccaagccgaggaagctgagcgacgactacgccaggctgaagtggaacgagcccgccaggttcaggtggcactggaaacagcccagcggtccgcggaggctgaactgcagtcaaaacgagcgtcattcgccgagaagacagctcagctggagaggagtctccaagaagagcacgtcgccgtggctcagttgcgagaagaggcggaaaggcgggcccaacagcaggctgaagctgaacgtgcccgggaagaagcggagagagagctggaaaggtggcagctcaaagccaacgaggcactccgactccggttgcaagccgaagaggtcgcccagcagaagtcactggctcaggccgaggcagaaaaacagaaggaagaggccgaacgcgaggctcgccgaaggggtaaagccgaagagcaggctgttcgccagcgggagctggctgagcaggaattagagaagcagcgccagctggcagagggtaccgcccaacagcgtctggccgcggagcaggagctgatacggttgagagcagaaaccgagcagggcgaacagcaaaggcagttgttggaagaagagctggcaagattgcagagagaggctgccgccgccacacagaagcgccaggaacttgaggccgaactggccaaagtaagagcagagatggaggtgctgctggcctccaaggcgagggcagaggaggagtccaggagcactagcgagaagagcaaacaacgattggaggccgaagccggacgcttccgggagttggcggaagaagcagcacgccttcgcgcactcgcagaggaagctaagagacagagacagctggctgaggaagacgccgcacgacaaagggcagaagccgaacgcgtgctggctgagaagcttgcagccataggtgaggcaactcgactaaagaccgaagctgagatcgcactcaaagaaaaggaagcagagaacgaacgcctgaggcgattggctgaggatgaagccttccagagaaggcgcctggaggagcaggccgcacaacacaaggcagatatcgaagagagactggcccagctcagaaaagctagtgatagcgaactggaaagacagaaagggctggtggaagacactctgcgacagaggcgccaggtggaagaagaaattctagcactgaaagcctcgttcgagaaggcagccgctggtaaggccgaactggagttggaacttggaagaatcaggtctaacgctgaagatacccttaggtccaaagaacaggctgagttggaagccgcaagacaacggcagctggcagcagaagaggagagacgcaggagggaagccgaagaacgcgtacagaagagtctggccgccgaggaggaggctgcccgccagagaaaagcggccctcgaagaggtggagaggctaaaggctaaggtggaagaggctcgccggctgagggagagagccgaacaggagagcgcgagacaactgcaattagcccaagaggccgcacagaagaggctgcaggcggaagaaaaagcgcacgccttcgccgtgcagcagaaagagcaggagctgcagcagacgctacagcaggagcagagcgtcctggatcagctgcggggggaggccgaggctgctcgacgggctgccgaagaagcagaagaggctcgcgtacaggctgagagagaggctgcccagagccgtcgccaggtcgaggaggctgagcggctgaagcagagtgctgaagaacaggctcaggcaagggcacaggcacaggccgccgccgaaaagctccgcaaagaggctgagcaggaggccgccaggcgcgcccaggccgagcaggccgctctgcggcagaagcaagccgctgatgctgaaatggaaaaacacaaaaagtttgctgagcagacattgcgacagaaagcccaggtcgagcaggagttgacaacactgagactgcaactggaagaaactgatcatcagaaaaatctgctcgacgaagaacttcagagactgaaggccgaggccaccgaagcggcccggcaacgcagtcaggtcgaggaagaactgttttccgtgcgcgtacagatggaggaacttagcaagctgaaagctagaatagaggcggagaatcgagctttaatattgagggataaagataacacacagcggtttctccaggaggaggcagaaaagatgaagcaagtcgcggaagaggcggcccgcctctcggttgctgctcaagaggctgcccgcttgagacagttagctgaggaagacctggcccagcagcgggcgctggctgaaaaaatgttgaaggagaagatgcaggccgtacaggaggccacccggctcaaggctgaggccgaactcttgcagcagcagaaggagctggcccaggaacaggcaaggcggctgcaggaggacaaagagcagatggcacagcagctggcagaagagacccaaggattccagcggaccctcgaggccgagaggcagcgacagttggagatgtctgcggaagctgagcgactgaagcttagggtagcggaaatgtctagagcccaggctagggctgaggaggatgcacaacgctttagaaaacaagctgaggagattggagagaagctgcatagaacggagctggcaacccaagagaaggttactttggtgcagacattggagattcagagacagcagagtgaccatgacgcagagagactcagggaggcaattgccgaattagagagggagaaggagaaattgcaacaggaggctaagctgctgcaattgaagagtgaagagatgcagacagtccagcaggagcaactgcttcaggaaactcaggcattgcagcaatcttttttatcagaaaaggattctctcttgcaacgggagcggtttatagagcaggagaaggccaaactggagcagctgttccaggatgaggtggcaaaagcacagcagctgagggaggagcaacagaggcagcagcagcagatggagcaagagcgtcaacgactcgtagcatctatggaagaggccaggcgccgtcagcacgaagccgaggagggggtgaggcggaaacaagaagagctgcagcaattagagcagcagcgccggcaacaggaagagctgttagcggaggagaaccaacgactgcgggagcagctgcagttacttgaggagcagcacagagctgccttggctcactccgaagaagtgaccgcaagccaggtggctgccaccaaaacattgcctaacggccgggatgccctggacgggcccgctgcggaggcagaacccgagcatagtttcgatgggctgcgccggaaggtttcagcccagaggctgcaagaggccggcattctgtccgccgaggagctgcagcgcctggcccagggccacaccactgtggatgaactggctaggcgggaagatgtccgccactatctgcagggtagatcgagtattgcaggcttgctcttaaaagccacaaacgaaaagctgtctgtgtacgctgccctccagcgccagctcctcagtcccggaactgccttgatactgctcgaagcccaggctgcttctgggttccttctggatccagtccgtaaccggcgtctaaccgttaacgaggcagtcaaggaaggagttgtgggccctgaactacaccacaagctacttagcgcggaacgagctgtaactgggtacaaggacccctataccggtcagcaaatttctttgtttcaggcaatgcagaagggcctgattgttagagaacacggtattcgactcctcgaagcccagattgccaccggcggcgttattgacccggtgcatagtcatcgtgtgcccgtggatgtcgcatatcgcaggggatactttgacgaagagatgaacagagtgctggcggatccaagtgacgatacaaagggcttttttgacccaaacacccatgagaatttgacctatctgcagttgctggagcgatgcgtggaagatccagagacaggattgtgcttgctgcccctgacggacaaggccgcaaaaggcggagagctggtgtatacggattctgaagctcgagatgtttttgagaaagcgacggtctcagcccccttcgggaagtttcagggaaagaccgttacaatctgggagataataaacagtgagtactttaccgcggagcagaggcgagacctgttacgccaatttcgcaccggccgaatcaccgttgaaaagatcatcaagatcattatcaccgtagtggaggaacaggaacaaaaaggacgtctctgcttcgagggcttgcgctccctggtcccagcagccgaattgctcgaatcacgcgttatcgatcgagagttgtaccaacaactccagagaggcgagaggagtgtgagagacgtggccgaagtggataccgtcagaagggcactcaggggagcaaatgtgatcgctggagtctggctcgaagaagcaggacagaaactgtctatatataatgctctaaagaaagacttgctgccttctgacatggcagtggctctcctggaggcacaagccggcaccggccacattatcgacccagcaacgtccgcaagactgactgtggatgaggccgttagggcaggtctggtgggcccagaattccatgaaaagctcctctcagcagagaaagcagtgaccggatacagggacccatacacaggtcaaagcgtgtccctattccaggcattaaaaaaagggctgattccgcgagaacagggccttcgcttgctagacgctcagctgagtaccggaggtattgtggacccctctaagagccatcgagtgccactcgatgtggcctgcgcacgcggatgtctggacgaggagacatcgagagcactttctgccccacgggccgatgccaaagcatattcagaccccagtaccggcgagcctgccacatacggcgagctccaacaacgatgtagacccgatcagctcaccggcctgtctttgctaccattgtcagagaaagccgctcgtgcccgccaagaagaactttactctgagctccaagctagggaaaccttcgagaagacacctgtggaggtccctgtgggtggattcaagggcaggacagtaaccgtttgggaattgatctccagtgaatacttcaccgctgagcagcggcaggagttgttaaggcaattccgcaccgggaaagttaccgttgagaaagtgattaaaatccttatcacaattgtagaagaagtggagaccctgagacaggaacgattaagttttagtggtctccgcgcccctgtacccgccagtgagcttctggcttccggtgtgctttcccgggcccagttcgagcagctaaaggatggcaaaacaacagtgaaagatctatctgaactggggagtgtgagaactctgctccagggatctggttgtctggcgggaatctacctcgaggacacaaaagaaaaggtgagcatctatgaagcaatgcggcgaggacttctgagggccacaaccgcagcactactattggaagcgcaagcagctacagggttcttggtagatcctgtccgcaaccaaaggctatacgtgcacgaagcagtcaaagccggcgtggtcggccctgaactccatgagcaactgctcagtgccgaaaaggccgtcaccggttaccgcgacccctacagtgggagcacgatttccctgttccaggcaatgcagaaggggctggttctcagacagcatggtattcgccttctggaggcgcaaatcgcaaccggtggcattatcgaccctgtacactcccacagggttcctgtcgacgtagcataccagagaggctactttagcgaggaaatgaatagggtcttagccgacccatccgacgacactaaagggttctttgacccgaacacccacgagaacctcacttatcggcagctcctcgagaggtgtgtcgaggacccagaaacaggcctcagattgctgcctctgaaaggagctgaaaaggctgaagtggtggagacgacccaggtgtacacggaggaggaaactagaagagcttttgaggagacacagatcgacatccctgggggagggtcccatggagggagcacaatgtctttatgggaggtaatgcagtctgatctgatcccggaagagcagcgagcacagttaatggccgactttcaggcgggccgcgttactaaggaaagaatgataatcatcatcatcgagatcatcgaaaagactgaaattatccggcagcagggcctcgcctcttacgactacgtgcgaagaagactgactgctgaggatctgttcgaggctaggattatcagcctggagacgtacaatctgttgagggaggggaccagatcactcagagaggccctggaggccgagtctgcatggtgctacctctacggcaccggcagcgtcgctggtgtctacctacccggatctcggcagactttgagtatctaccaggctcttaagaaaggcttgctgtcagccgaggtggctcgcctgcttctcgaagcacaagctgcgaccggattcttactggaccctgtgaagggagaacgccttactgtcgatgaggcggtacgaaaaggccttgtgggtcccgaattgcacgatcgactgctttcagccgaacgtgccgtgacaggctaccgagatccctatactgaacagactattagcctcttccaggctatgaagaaagagttgattccgacagaagaggcactgcgtctgttggacgctcaactggccaccgggggaatcgttgatcctcggcttggcttccacctcccattggaggtagcataccaacggggctacttaaacaaagatacccacgatcaattatctgagcctagcgaagttcgcagttacgtggatccttccactgacgagcggctgtcttatacccaactgctgaggcgatgcaggcgcgatgacggcacaggccagctgctgctacccctgtctgacgctaggaagttaacttttcggggccttagaaagcaaattactatggaggagctcgtgcgcagccaggtcatggatgaagcgaccgccctgcagctgagggaagggctcactagcatcgaagaggtcactaaaaatctgcagaagtttctggaggggacatcttgtatcgctggcgtttttgtcgatgctactaaggaaaggctttctgtttaccaggctatgaaaaagggcatcatcagacctgggaccgcttttgaactcttggaggcccaagccgccaccggttatgttattgacccaataaaaggcttgaaattgacagttgaggaagccgtgcgcatgggaattgtggggcccgagttcaaagataaactcctcagcgccgagcgggcagtcaccggatataaggacccatacagcgggaagcttatttctctatttcaagctatgaagaaagggctgattctgaaggatcacggcatccggctgctggaagcacagatcgctaccgggggaatcattgaccctgaagagtcgcatcgactgccagtggaggttgcctataaaagaggactattcgatgaggagatgaatgagatcttaaccgaccctagcgatgatactaaggggttcttcgaccccaataccgaagagaatctgacctatctccaactgatggagcggtgtatcacagacccccagactggcctatgtctgcttcccctaaaagagaaaaaacgcgagaggaagacctcatctaaatcatccgttcggaagaggcgtgtcgtgatcgttgatccggagacaggcaaagaaatgagcgtgtatgaggcctaccggaagggcctcatcgatcatcagacgtatttggagctgtccgaacaggagtgtgaatgggaagagattacaattagctctagtgacggtgtggtcaaatcgatgattatcgacagaaggagcggcaggcagtacgacatcgacgacgcaattgcaaaaaatctgattgatcgctccgcactggaccagtacagggcgggcaccctgtcaatcactgagtttgcggatatgctctccgggaacgctggcgggttccggagccggtcctcttccgttggctcgtccagctcctaccccatctccccggcagtcagtcggactcagctggcttcctggtccgatcccactgaagagaccggtcccgttgccgggattctcgacactgagacactggagaaggtgtctatcacagaagctatgcatagaaacctggtggacaatatcaccgggcagcgcttgctggaagctcaggcctgcaccggcggcattatcgatccaagcacgggcgaacggttcccggtgactgacgccgtgaataaaggattggttgataagatcatggtggacagaattaatttagcccagaaggcgttttgtgggttcgaagatcctaggacaaagaccaagatgagcgcggcgcaggcactgaagaaaggctggctctactacgaagctgggcagcgttttctggaagtgcagtatctgacaggcggcctgatagaacctgacactcccggaagagtgccccttgatgaagccctgcagagagggacggtcgacgcacgaacagcccagaagctgcgcgatgtgggagcctattcaaagtacttgacctgtccaaagacgaagctgaagatttcctataaagatgcgctggatcgatcaatggtggaagagggcactggtctacggctcctggaagcagctgctcaatccaccaagggctactattcgccttattcggtgtctggctcaggaagcacggctggatctcgcacaggctcccgtacgggctctcgagctggctctagacgtggcagctttgacgctaccggctccggcttttccatgacattcagctcctccagctattcctcctccggttatggccgcagatacgcgagcggcagttcagcttctttgggaggaccagaatcggccgtggcctag

SEQ ID NO: 199811 - DNA, 13578 bp, synthetic construct
  misc_feature 1..13578: note = Description of Artificial Sequence: Synthetic coding sequence
  source 1..13578: mol_type = other DNA
atggaccccagccgggccatccagaacgagatcagcagcctgaaggacgagagagacagggtacagaagaaaacgttcactaagtgggtgaataaacatctaatcaaggcacaaaggcacatctcagatttgtatgaggacctaagggacggtcataacctgataagcctgctggaagtcctatccggagattccctaccgagagaaaaaggacgcatgcgatttcacaagttacaaaatgtgcaaattgcacttgattacctccggcacaggcaggtcaaactggtcaatatcaggaatgacgatatagctgatggtaatcctaagctgacgcttggattaatttggaccatcattttacacttccagatctccgacattcaagtttccggacagtcagaggatatgaccgccaaggagaagctactgctatggtcccagaggatggtcgaggggtatcagggtcttcgttgtgacaactttacttcttcttggagggatggcagactgttcaacgcaatcattcaccggcataaaccactgctgatcgacatgaataaagtataccgtcagactaatctcgaaaacctagatcaggcattctctgttgcggagcgcgacttaggagtcaccaggctgctggacccggaagatgtggacgtcccacagccagacgagaaaagcataatcacctatgtatcttccttatacgacgctatgccccgcgtccctgacgtccaggacggggttagggcaaatgaactgcaactcaggtggcaagagtaccgagagctggtgcttctcctcctgcagtggatgaggcaccataccgccgccttcgaggaaaggagatttccctcctctttcgaggagattgaaatattatggtcacagtttctgaagttcaaagagatggagctcccagctaaagaggcggacaaaaatagaagcaagggcatatatcagtcactcgagggcgcggttcaggctggacagttaaaggtgccaccagggtaccacccgttggatgtggagaaagagtgggggaagctgcacgtggcaatccttgaaagggaaaaacagttgcgcagcgagttcgagcgtctggagtgcctgcagcgcatcgtgacaaagttacagatggaggctggcttatgcgaggaacagctcaaccaggcggatgcactcctccagtctgacgtacgcttgttagccgccggcaaggttccacagcgggccggggaggtagagcgggatctggataaagctgattctatgatccggctgttgtttaatgatgtacaaaccctgaaagacggacgccatccgcagggcgaacagatgtatcgcagggtgtataggctgcacgaaaggctggtggctatccgcactgagtataacctcaggcttaaggcaggggtggctgcccctgcaacgcaagttgcccaggtaacactacaaagtgtccagaggcgacctgagctcgaggattctacactgcggtatctgcaggatttgcttgcctgggtcgaggagaaccagcaccgagtggacggcgccgagtggggcgtggatttaccgagcgtcgaggcgcaactgggcagtcaccgtggcttacaccaatccatcgaagaattccgggctaagattgagagagcacggagcgatgaaggccaactcagccctgcaactagaggtgcataccgggattgcctggggcgcctggatttgcagtacgctaagttgctcaattcttctaaagctcgattgagaagcttggaatccctgcactctttcgttgccgccgccacaaaggagctgatgtggctgaacgagaaggaagaagaggaggtgggattcgactggtctgacagaaatacgaatatgacagccaagaaggaatcttatagcgctctcatgagggaactggagctaaaggagaaaaaaatcaaagaattacagaacgccggagacaggctgctgcgggaagaccaccctgctcgtccaactgtagaaagctttcaagctgctttgcagactcaatggagctggatgctgcaactgtgctgctgtattgaagcacatctcaaggagaatgcagcatacttccagtttttttcagacgtaagagaggcggagggtcagctccagaagcttcaagaagcacttcggcggaagtactcatgtgatagatcagctacggtgacgcgcctcgaggacctcttacaggacgctcaagatgaaaaagagcaactcaacgagtataaaggccacctgagcggactggcgaaacgggcaaaagctgtagtccagcttaaacctcgccatcccgcacatcccatgaggggccgcctgcccctgctggcagtgtgtgattacaaacaggtggaagtgacagtacataagggcgacgaatgtcaactggttgggcccgcccaacccagccactggaaagtgctcagttcctccgggtccgaagcagcagtgccctctgtttgcttcctggtgccgccccccaaccaggaagcccaggaagcggtgacccggctggaggcccagcaccaggccttagtgacactatggcatcagctgcatgtggatatgaagtctctgcttgcctggcagtccttacggcgggatgtgcaactcatacggtcatggagtctggctacgttcaggaccctcaagcctgaggaacagcgtcaagctttgcacagccttgaactccattatcaagccttcctgcgcgatagccaggatgccggtggctttgggccagaagacagactgatggccgagagggagtacgggtcatgctcccaccactatcagcaattgctgcagtctcttgaacagggcgctcaggaagagtcaaggtgtcagagatgtatttcagaactgaaagacattaggctgcagctcgaggcctgcgagaccagaacggtgcataggttaaggcttccgctggacaaagaacccgcacgggagtgcgcccagcggatcgccgaacagcagaaagcccaggccgaagtggaaggtttaggcaaaggtgttgccagactgagtgccgaagctgaaaaggttctggccctgcccgaaccatctcccgccgccccgactcttagaagtgaactggagctcacattgggcaagctggagcaggtgcggtcccttagcgcaatctacttagagaagctgaagacaataagtttagttattcgcggcactcagggggccgaggaagttctgagggcacacgaggaacagcttaaagaggcccaggccgtgccggccaccctgccggaactggaggcaaccaaagcctccttgaagaagctccgggcgcaggccgaagcccagcagcctacattcgacgctcttagggacgagctgagaggggcacaggaggtgggcgaacgactgcagcagagacacggtgaaagagatgtcgaagtcgaaagatggcgcgagcgtgtggcccagctcctggagcggtggcaggccgtgctggcccaaacagatgttcgacagcgcgaactcgagcaactgggcaggcagctcaggtactatagggagtcagccgaccctcttggagcatggcttcaagatgcacggcgccggcaggaacagatccaagccatgccccttgcagattcacaggccgtaagagagcagttaaggcaggagcaagccttgctcgaggagatcgagcgccacggcgaaaaagtcgaggagtgccagagatttgctaaacaatacattaatgccatcaaggactacgagctacagcttgtcacctacaaggctcagctggagcctgtggcctcaccagctaagaaacctaaagtgcagagcggttccgaaagcgtcatccaggaatacgtcgacctgcgcacgcattactcggagctcacaaccctgacatctcagtacatcaaattcatcagcgagaccctgcgtcgcatggaagaagaagaacgactagcggagcagcaacgtgcagaagagagggagagactggccgaggttgaagccgctctagagaagcagagacagttagccgaggcgcatgcacaagccaaggcacaggcggagagggaagctaaggagctacagcagaggatgcaggaagaagtagtccggcgcgaagaggccgcagtcgacgcacaacagcaaaagcggtcaattcaggaggaactgcagcagctgaggcaaagcagcgaggctgaaatccaggcgaaggcccgtcaagccgaggccgccgagaggtcccggctgcgaattgaggaggagatccgtgtggtgcgcctgcagctggaagccaccgaaaggcagcgcgggggcgccgagggcgaactgcaagccttaagagccagagctgaggaagcggaggctcagaaaagacaagctcaggaggaggctgagagattgcgaagacaggtgcaggacgaatctcagagaaagagacaggccgaggtggaactcgcaagtcgagtgaaagcagaggccgaagccgctcgtgaaaaacagcgcgcgcttcaggctctggaggagcttcgactgcaagcagaggaagcagagaggcgtctgcgacaggccgaggttgaacgagcccgccaggtacaggtggctttagagactgcacagcggtctgccgaggccgagctgcagtcaaaacgggcttcatttgcagaaaagacagctcaactggagagaagccttcaggaggagcacgtagccgttgcgcagctgagggaagaagctgagaggcgggctcagcagcaggctgaggctgaacgggcccgtgaggaagccgaaagggagttggagagatggcaacttaaggccaacgaagctctccgtctgcgccttcaagccgaggaggttgcccagcagaagagtctggcacaggcggaggccgagaaacaaaaggaggaggcagagcgcgaggctaggagaaggggcaaagctgaggagcaggccgtgcggcaacgcgaattggcggagcaagaactggagaaacagcgacagttagccgagggaacagcccagcagcgcttggctgccgagcaggagctaatacgcctgcgagccgagactgagcagggagagcagcagcgccaactgctcgaagaagagcttgctcgccttcagagggaagcggcagccgccacccagaaacggcaggagctagaagccgaacttgctaaggtcagggcagagatggaagtgcttcttgccagcaaagctcgagccgaagaagagtcacgctccaccagtgaaaaatccaaacagcgcctggaggctgaggccggcagatttcgggaacttgcggaggaggccgcccgcctccgcgcccttgctgaggaagctaagcggcagaggcaactggccgaagaagatgccgctcgccaacgcgccgaggcggagcgggtgctagccgaaaaactcgccgctattggggaagctacccgtctaaagaccgaagcagagattgctctcaaagaaaaggaggctgaaaatgagcgcttgcgccggttggctgaggatgaggcctttcaaagaagacgactggaagagcaggctgcgcagcacaaggcagacattgaggaacgcttggcccagctccgaaaagcttctgatagcgagcttgaaaggcaaaaaggactggtcgaagacacactcagacaacgacgtcaggtggaagaggagatactcgccctcaaagcaagcttcgaaaaagcagccgccggcaaagctgagttggagctggaactaggcagaatccggtcaaatgcagaggacactctacgaagcaaggaacaagccgagctggaggctgcaagacaacgccagctggctgccgaggaagagcggaggcgaagggaggccgaggaacgggtgcagaaatccctcgcagccgaggaggaagcggcaagacagcggaaggcagccctggaggaggttgaaagactcaaagccaaagtcgaggaggctagaaggcttcgggagcgcgctgaacaggaaagcgctaggcagttgcagctggcgcaggaagccgctcagaagaggttgcaggcggaagaaaaggcacacgcctttgctgttcagcagaaggagcaggagttgcagcagactcttcagcaagaacagtctgtgttagatcagctaaggggggaagctgaagcagccaggagagccgccgaggaggccgaggaggctagggtacaggctgagcgggaggccgctcagtctagacggcaggtggaagaggctgaaagattaaagcagagcgctgaggagcaggcccaggcccgcgcccaggcccaagcggctgccgagaagctgcgcaaagaggctgaacaggaggcggcccgccgtgctcaggctgagcaggccgccttgcgacaaaagcaggccgcagatgccgagatggaaaagcacaagaagttcgccgagcagactctgcgtcagaaggctcaggtcgagcaagaactaaccacattgagactgcagcttgaagaaaccgatcaccagaagaacctgcttgatgaagaattgcaacggctcaaggcggaagccacagaagccgcccgtcaacgctcccaagtggaggaggagttgttctcagtgcgtgttcagatggaagaactttccaagctcaaagctagaatagaggctgaaaaccgcgccctcatactgcgggacaaggataatacgcagcgattcttgcaagaggaagcggagaaaatgaagcaggtggcagaggaagccgcacgactctctgttgcggcccaagaggccgcacgtctgcgacagctggctgaggaagatctcgctcaacagagggctctggctgagaagatgttgaaggagaaaatgcaggctgtgcaggaggcaacgcggttaaaggctgaagcagagctgctgcaacagcagaaggagttagcgcaggaacaggcccgtcggctgcaggaggataaggagcagatggcccagcagctggctgaggaaactcagggctttcagaggacactagaggcagaacgacagcgtcagctcgaaatgtcagcggaagctgagcggcttaaactgcgagttgcggaaatgtcacgggcacaggcgcgggccgaagaagatgcgcagcggtttagaaaacaagcggaggaaattggagaaaagctgcaccgcaccgagctagctacacaggaaaaagtgacgctggtgcagactctcgaaatccagcgacagcagagcgatcacgacgccgagcgactgagagaggcaatcgccgaactcgaacgggagaaggagaaactgcagcaggaggctaaattgctgcagttaaagagcgaagagatgcagacagttcaacaagaacagctcctgcaagagactcaggcactgcagcagtcctttttgtctgagaaagattctctgctgcagcgtgagcgctttattgagcaagaaaaagccaagctcgaacagttgttccaggacgaggtcgcgaaagcacagcagttgcgggaggagcagcagcgccagcagcagcaaatggagcaggaaagacagaggctagtcgctagtatggaagaggcaaggagacgacaacacgaagccgaagagggtgtgcgccgaaagcaggaggagctgcagcagctggagcagcaaaggcggcagcaggaggaactacttgcggaggaaaatcagcgcctcagggagcaactccaactccttgaagagcaacaccgcgctgcgttggcacattccgaagaagtcaccgcctcacaggttgccgccaccaaaaccctcccaaatgggcgggacgctcttgatggtccagcggccgaggccgagcccgaacatagcttcgacgggttaagacggaaggtgtcagcccagcggcttcaggaggcgggtatcctgtccgcagaagagctgcagcgcctggcccaagggcatactaccgtggatgaattggctcggcgggaagatgtgaggcactaccttcaagggcgctctagcatcgccggtctccttttaaaggcaacgaacgagaagttgtctgtgtatgctgcactgcaaagacagctgttgagccccggcacagcactcattttgctggaagctcaggctgccagcggctttctgctagacccagtgagaaataggcgactgacagtgaacgaggccgttaaagagggcgtggtgggccccgagttacatcataaattactgagtgcagaacgtgctgtcaccggatacaaggatccttatacaggacagcagatttctctgtttcaggccatgcagaagggactcattgtccgcgaacacggtatcaggcttttagaagctcaaattgcaacgggaggggtaattgacccagtccatagccatagagtgccagtggatgtggcctaccggcgagggtatttcgatgaggaaatgaacagggtgctggcggatccgtctgacgatacgaagggttttttcgacccaaacactcatgagaatctgacttacctccagcttctggagagatgcgttgaggatcccgaaacaggcctctgcctgctgcctctgacggataaagcagctaagggaggagagcttgtgtatacagattctgaggcgagggacgtcttcgagaaggccactgtcagcgcgcctttcggcaagttccaggggaagacagtgaccatttgggaaattattaacagtgaatacttcacagcagagcagcgcagggacttactgcgacaatttagaacaggtagaataacagttgaaaagatcatcaagattataatcaccgtagtggaagagcaggaacagaagggaaggctctgtttcgagggactcaggagtctggttccggccgcggaactattggagtcacgcgttatcgatagggagctgtatcagcagctccaaaggggagagcgcagtgtgagggatgttgctgaggtggataccgtcaggcgagcactgcgcggcgccaacgtcatagctggcgtctggctggaggaggccggacagaagctgtccatatacaacgctctgaaaaaggatttgctgcccagcgacatggctgtcgccctgctggaagctcaggctgggaccggccacattatcgatcccgctacaagcgcacggttaacggttgatgaggctgttcgagccgggctcgtcggtcctgagtttcacgaaaaacttctgagtgctgagaaggccgttactggctatcgggatccatacactggccaaagcgtcagcctattccaggctctgaaaaagggcctgatccctagggaacagggactcagactgctcgacgcccagctaagcactggagggatagtggatcccagcaaatctcacagagtgcctttggatgtagcttgtgccaggggctgcctggatgaagaaacttccagggctctaagtgcccctcgagccgacgccaaagcctattctgacccgagtactggagaacccgccacatatggcgagctgcagcagcggtgtcgcccagatcagcttacaggactaagtctgctgccacttagtgagaaggccgcacgggcgcgtcaggaggagttgtatagcgagttacaggcaagggaaacctttgaaaaaacacccgtcgaagttcctgtggggggcttcaaaggaagaaccgtcactgtgtgggagctgatctccagcgagtacttcacagccgaacagaggcaggaactattgagacaatttcgcactgggaaggtgaccgttgaaaaagtgataaagattctgattaccatcgtggaggaggtcgagaccctccgccaggaacggctgtctttttccggactgagggcccccgtgccggcctccgagcttctggcatcaggagtgctgtcgagagcacagtttgagcagctgaaagatggaaagacgactgtgaaggacctctctgagctgggcagcgtgcggacgctgctacaggggtccgggtgcctcgctggaatctatctcgaagacactaaggaaaaagtcagtatttatgaagctatgcgaagaggccttctccgcgctaccacagctgccttgttgctggaggctcaggccgctaccgggtttttggtggatcccgtgaggaaccaaagattatacgtgcatgaggcagtcaaggcaggtgtggtgggcccagagcttcatgagcagcttttgtcagctgagaaagctgtgacgggctaccgggatccctattccggaagtacaatctccctgtttcaggccatgcagaagggcctcgttctgagacaacacggcatccgcctactcgaggctcagattgcaaccggtgggataatcgaccccgtgcacagtcacagagtgcctgttgatgtagcctaccagcgaggctacttctccgaggaaatgaatcgggtactggcagatcccagcgacgataccaaagggttcttcgatcccaacacgcatgagaacctgacctatcgccagcttctggagaggtgcgttgaagacccggaaactggtctgcggctgctgcccctaaagggcgccgaaaaagcagaagtcgtggaaacaactcaggtttataccgaggaagagactcggcgcgcatttgaggagactcaaatcgacatacccggaggcggcagccatgggggatcaacgatgagcctctgggaagtaatgcagagtgatctgatccccgaggaacagcgggcccagctcatggccgactttcaggctggacgtgtgaccaaggaaagaatgataataatcattatagaaatcattgaaaagacagaaataatacggcaacagggactggccagttacgactacgtgaggcgccgtcttacagctgaagatctcttcgaagcacggatcatttccttagagacctataacctgttgcgcgaaggaacccggtctctgagggaagccctggaagccgagagtgcctggtgctatttgtacggcacaggtagcgtggcgggcgtgtacctccccggctcgcggcagaccctaagcatttaccaagccctgaagaaggggctgttgagtgcagaagtcgccagactactgctggaggcccaggctgctaccggctttcttctggatcccgtgaaaggggaacggcttactgttgatgaagccgttagaaagggactcgtgggccccgagttgcacgatcgactcttatccgctgaacgtgccgtcaccggctacagagatccctataccgagcagactatttcgttgttccaggctatgaaaaaggagctgatccctacagaggaggccctacgcctgttagacgcacagctggccacgggaggcatcgtcgatccccggcttggctttcacctacccctggaggtggcttaccagcggggctatctgaacaaggacacacatgatcagctcagcgaaccgtctgaggttaggagttacgttgacccctccaccgatgagcggctgtcctacacacagttgctgagacgatgcagacgcgacgacgggaccggccagctattactgcctttatccgacgcccggaagctgacattcagaggcttacggaaacagatcacgatggaggaactggttcgatcccaggtgatggacgaggcgacggctttacagctgcgagagggtctaacgagcatcgaggaagtgacaaagaacttgcagaagttcttggagggcacgagctgcatcgccggtgtgttcgtggacgcgacgaaagagcgtctgagtgtgtaccaggctatgaagaagggaatcatacggcccgggacagcttttgaactacttgaagcacaggctgctacaggctatgtaattgatcctataaaaggactgaagctcactgtcgaagaagcagtgcgcatgggcatcgtaggaccagagtttaaggacaagctgttgagcgctgaaagggccgtgacaggctacaaagacccatactccgggaagctcatcagcctgttccaggccatgaaaaagggtttgattcttaaggatcacgggatccgcctcctggaggcacagattgcgaccgggggaatcatcgaccccgaagagagtcacagactccctgtggaggtggcatataaaaggggactgttcgacgaagagatgaatgagatattaacagatccctccgatgacaccaagggcttctttgatcctaatactgaagagaatctaacgtacctccagctcatggaacggtgcattaccgatcctcaaactggactttgtctccttcctctcaaggaaaaaaagagggaacggaagacctccagcaagagcagcgtgcgaaagaggcgggtagtgatagtggaccctgagactggtaaagaaatgtccgtctatgaagcgtacagaaagggcctaattgaccaccagacctacctggagctttccgaacaggagtgcgaatgggaagagatcaccattagctcgtctgatggcgtggttaaatcgatgatcatcgatcgcagaagcggcagacagtatgacatcgatgatgcaattgctaaaaacctaatcgataggtccgccctggatcagtacagagccggtaccctgagtattaccgagttcgcagacatgctgagcggtaacgcaggtggcttccgctctcggtccagcagcgtgggctcaagctcctcgtatcccattagtcctgcggtgagccgcacccaactggcgtcctggagcgatcccacagaggagaccggtcccgtggccgggatactcgataccgagactctggaaaaggtgtcaataaccgaggccatgcaccgtaatttagtggacaatattacgggacagcggctgcttgaggctcaggcttgtaccggggggatcatcgatccaagcaccggagaacgttttccagttacagatgcggttaataaaggcttagtcgataagattatggtcgatagaatcaatttggctcagaaggcgttctgcggctttgaggaccctcgtacaaagaccaaaatgagcgccgcccaggccttaaagaaaggatggctgtactacgaagctggccagaggtttctggaagtgcagtatttaactggtgggctcatcgagcccgacacaccagggcgggtgccactggatgaggcactgcagcggggaactgtggatgctcggacagcccagaagctgagagacgtgggcgcatatagtaaatacctcacctgccccaagacaaagttgaagatttcttataaagatgctctggatcggtcaatggtggaagagggcaccgggctgaggctgcttgaagcggccgctcagagtacgaagggctattacagcccttactctgtgagtggctccgggagtacagcagggtcgaggaccggcagtcggaccggaagcagggcaggcagtaggcgaggatcatttgatgctaccggaagcgggttctcaatgaccttcagctcttcttcttatagcagctccggatacggaaggcggtacgcttccggatctagtgcttcattgggaggtcctgaaagcgctgtcgcatag

SEQ ID NO: 199812 - DNA, 13602 bp, synthetic construct
  misc_feature 1..13602: note = Description of Artificial Sequence: Synthetic coding sequence
  source 1..13602: mol_type = other DNA
atggccggccccctgcccgacgagcaggacttcatccaggcctacgaggaggtgcgggagaaatataaggatgaaagggacagggtgcagaagaaaacgttcacaaagtgggttaacaagcaccttattaaggcccagcggcacattagcgacctgtacgaagatttgagagacgggcataacctcatctcgctcctggaagtgctgtcaggcgattcactcccccgagagaagggcagaatgcgcttccataagctccagaacgtgcagatagctctagactacctgcgtcacaggcaggttaaactggtgaatatccggaatgatgatatcgcagatgggaaccccaagcttacactcggcttgatttggacaatcatcctacatttccagatatctgacattcaggtctccggtcaatccgaggatatgactgcgaaagagaagctacttctgtggtctcagaggatggttgagggctatcaaggtctccggtgtgacaacttcacttccagttggcgtgatggccgcttatttaatgctatcatacataggcacaaaccgttactcattgacatgaacaaagtttaccggcagaccaaccttgagaacctggatcaagccttttctgtggctgagcgagatcttggtgtgacgcgtttgctggaccctgaagatgttgatgtcccacagcctgatgaaaagagtatcatcacttacgtttctagtctctacgatgccatgccccgagtccccgacgtgcaggatggcgtgcgggccaacgaattgcaactgcgctggcaggagtacagggagctggtcctgctgcttttgcagtggatgcgccaccataccgcagccttcgaggagcgacggtttccttcaagctttgaggagatcgagatcttgtggagccaattccttaagtttaaggaaatggagctgcctgctaaggaggcagacaaaaataggtctaagggaatatatcaatccctcgagggagcagtccaggccggacaacttaaggtgccccctgggtatcacccccttgatgtggagaaagagtgggggaaactgcacgtcgctattctcgagagggaaaagcagttgcgaagcgaattcgagagactggagtgtctgcagcggattgtgacaaaattgcagatggaggccggactgtgcgaggaacagctgaatcaggccgatgctctcctacagtccgacgttagattactcgccgccggaaaagttcctcaacgcgccggcgaagttgagagagacctggacaaagccgactctatgattaggttgctgtttaacgacgttcaaacccttaaagacggcaggcatcctcaaggagaacaaatgtacaggcgcgtatatagactgcatgagcggttagtggctattaggacagagtataacctccgtctaaaggcgggggttgccgcccccgctactcaagtggcacaggtgaccttacagtctgtgcagcgccgacctgagctggaggactctaccctccgctatctccaagatctgctagcctgggtggaggaaaatcagcacagggttgacggggccgagtggggagttgatctccccagcgtagaagcccagctgggctctcaccgtgggctgcaccagagcatcgaggagttccgcgccaagatagagcgcgctcgcagcgatgaaggtcaactctcccctgcaacacgcggcgcttaccgcgactgtctcggaaggctggatcttcagtatgccaaattattaaattctagtaaggcgagactgaggtctttagaatcattgcattcttttgttgccgcagccacaaaggagctgatgtggctgaatgagaaggaggaggaagaagtggggtttgattggtctgacagaaacacgaacatgacagctaagaaggaaagctattccgcgctaatgcgggaattggagcttaaggagaaaaaaatcaaagagcttcagaacgcgggggatagacttctaagggaggaccacccggcccggcctaccgtcgaatcattccaggctgcattgcagacacagtggtcttggatgctccagctctgttgttgtatcgaggcccacctcaaggagaacgccgcttatttccagttcttctctgatgtccgggaagctgaaggacagctccagaagctccaggaggccctgcgtcggaaatactcttgcgaccgatctgccacggttactagactggaggatttgttgcaagatgctcaggacgagaaagagcagctcaacgagtataaaggccacttgagcgggttggctaaacgtgcaaaggcggttgtgcagctgaagcccaggcaccccgctcaccctatgcgaggacgactgcccttattagccgtctgcgactacaaacaggtggaggtgaccgtgcacaagggggacgaatgccagctggtaggtcctgcccagcccagccattggaaggttctcagcagtagcggctctgaggcagccgttccctccgtgtgtttcttggtgcccccacccaatcaagaggcccaagaggcagttaccagattagaagcccaacaccaggcattagttaccctctggcatcaattacatgtcgacatgaaaagccttctggcatggcaatcgcttcgtcgagatgtccagcttattcgatcatggtcgctagcgacattcagaacactgaagcctgaagaacaaaggcaggcactgcatagtctcgagctgcactatcaagctttcttgcgcgacagtcaggacgccgggggctttggtccggaagatcggctgatggccgaaagagagtatgggtcatgttcccaccactaccaacagctactccagagcctggagcaaggagcacaggaagaaagccggtgtcaaagatgcatttccgaactcaaggacataagactccagctcgaggcatgtgaaacccgcacagttcatcgcctgcgccttcctcttgacaaggagcctgcgagggagtgtgcccagcgaatcgcagagcagcagaaggcgcaggccgaagtggagggcttagggaagggcgttgcccggctgtccgcagaagcggaaaaggttctagctctccccgagccaagtcccgctgccccaaccctgcgtagcgagcttgaattgactctcgggaagcttgagcaagtgaggagcctcagtgccatttacctcgagaaattgaagaccatctctctggttattcgtggcactcagggggctgaggaggtactgcgggctcacgaagaacagttgaaggaagctcaggctgtgccggctaccctgccggagttggaggccacaaaagcctctctgaaaaaactgagagcccaagctgaggcgcagcagccaacattcgatgctctgcgggatgagctgagaggagcacaagaggttggggaaagactgcagcagcggcacggtgagagagatgttgaggtggagcggtggagagaaagggttgctcaactcttagagagatggcaagccgtacttgcgcagactgacgtgaggcagcgagagctggagcagttgggacgacagctccggtactaccgagaatccgcggatccactgggagcctggctccaggatgcgcggcgtagacaggagcagatacaggcaatgcctctggccgactctcaggccgtgagggagcaactgcgtcaggaacaggctctcctagaggagatcgagcgccacggagaaaaggttgaggaatgccaacggttcgccaagcaatatatcaacgcgatcaaagactacgaattgcagctggtgacttacaaggcccaactcgaaccggtggcatctcccgcgaagaaacctaaagttcagagcggcagcgaaagcgtgatacaggagtatgtcgacttgcggacgcattatagtgagctgaccacattgacgtctcaatacatcaagtttataagcgaaaccttgcgacggatggaggaagaagaacgactcgctgagcaacagagagcagaagaaagagagaggcttgccgaagtggaagctgctttagagaaacagcgacagttagccgaagcccacgcacaagccaaagcccaggccgagcgggaggctaaggaactgcagcagagaatgcaggaagaggtagtgagacgggaggaagcggctgtcgacgctcaacagcaaaaacgcagcattcaggaagagctgcaacagctgagacagtcatctgaggctgagattcaagcaaaggcccggcaagccgaggccgcggaacgcagtaggcttcgtattgaggaggaaattagggtagtgagactgcagcttgaagccacggaaaggcagcgggggggcgccgagggagaactgcaggccttgcgcgctagagccgaagaggctgaagcacagaaacgccaggcccaggaagaggcggaaaggctccggcgccaggtgcaggacgagtcccagcgaaaacggcaggcagaagtggaactggcgtctcgggtgaaagctgaagcggaggccgcacgggagaaacaaagagccctgcaggctcttgaagagctgagacttcaagctgaggaggccgagcgcagactgagacaggccgaagtggagcgcgcaaggcaagtgcaggtagctctggagaccgcccagagaagtgccgaggccgagttgcagtctaagcgggcttccttcgcagagaagactgcacagttggagaggagcctccaagaggaacatgtggccgtggcgcaactccgcgaagaggctgaacgaagagcacagcagcaagcagaagcagaacgagcaagagaagaagcggaacgagagttagagcgatggcaactgaaggccaatgaagcccttcgtctaagactgcaagctgaagaggttgcccagcaaaaatcacttgcgcaggccgaggcagagaaacagaaggaagaggccgagcgggaggccaggcggaggggaaaagcagaggagcaggccgtcaggcagcgcgaactggccgaacaggagctggaaaagcagcgtcagctggccgagggaaccgcacagcagagactcgccgccgagcaggagctgatccggttgagggccgagacggagcagggagaacagcaaaggcagttgctcgaggaagagctcgccaggttacagcgggaggcagcagccgctacccagaagcggcaggagcttgaggctgaacttgctaaagttcgggctgagatggaggtcctgctggccagcaaagcacgcgcagaggaggaaagtcgctccacctccgagaagtctaagcaacggctggaagccgaagcaggccggtttagagagctcgccgaagaagcagctcgattgagggccctggcagaggaggcgaagcggcagagacaactggctgaggaggatgcggcaagacagcgggctgaggctgagagagtactggccgagaagctcgccgccatcggcgaggctaccaggctgaagacagaagccgagatcgctttgaaggagaaggaagccgagaacgaacgtctgagaagactggcagaagacgaggcctttcagcgtaggcgactcgaggaacaggctgcacaacacaaggcagatatcgaggagaggctggcgcaactgcgcaaagcatcggatagcgaactcgaaagacagaaaggactcgttgaggataccctgcggcagaggagacaggtggaagaagaaatacttgcacttaaagcgagttttgagaaggccgcggctgggaaggctgaactggaactggaactgggccgcataaggagtaacgctgaagacactttgcggtccaaagaacaggcagagctggaagctgcccgccagcggcagctggcagccgaagaggagcggcgacggagagaggctgaggaacgcgtccagaaatccctggccgcggaagaagaagcagcccgccagcgtaaagccgcactggaagaggtggaacggttgaaggcaaaagtcgaagaggcacggcggctgcgtgagcgggccgagcaggaatcagcgcgccagctgcagctcgcacaagaagccgcgcaaaagcgactccaggctgaagaaaaggcccatgcctttgccgtgcaacaaaaagaacaggagttacaacagacactccaacaggaacaaagcgtcctcgatcaactgcggggggaagccgaggcagcacgaagagcagccgaggaggcagaagaagcaagagtacaggccgaacgcgaagccgctcagtccaggagacaggtggaggaggctgagagactcaagcaaagcgcggaggaacaagctcaggcaagggcgcaggctcaggctgccgctgagaagctccgcaaagaggccgagcaggaagcagcgcgccgtgcccaagccgaacaggctgcgttgcgtcaaaaacaagccgcggacgctgaaatggagaagcacaaaaagtttgctgagcaaacattacgccaaaaagctcaggtggaacaggaactaaccacacttagactccagctggaggagactgatcaccagaaaaatctcctggatgaggaacttcagagactgaaggcagaggccactgaagcggccagacagcgcagccaggtggaagaggagttgttttccgtaagagtacagatggaggagctgagcaaactgaaagcccgtattgaggcagagaaccgcgcccttattctgagagataaagacaatactcagcgattcctacaagaagaggctgagaaaatgaagcaggtggccgaggaagccgccagactctcggtggctgctcaggaggctgctcgtctacgacaactcgcagaagaggatttggcccagcaacgagcactggccgaaaagatgcttaaggagaagatgcaggccgtccaggaggccacccggttaaaagcagaagctgagctgctgcagcagcagaaagaattggcccaagagcaggcgcggagattacaggaggacaaagaacagatggcccagcaactcgctgaggaaactcagggcttccagagaacactggaggccgagcggcaaaggcagctggaaatgtctgccgaggcagagcgccttaaattgagagtagcagaaatgtcaagggctcaggcgagagccgaggaggacgcgcagcggttcaggaaacaggccgaggaaatcggcgagaaactgcaccgcacggaacttgctacccaggaaaaggttaccctagtacagactctcgagattcagcgccagcaatctgatcacgacgccgagagactcagagaagccattgctgaactggagcgggaaaaagaaaaacttcagcaggaggctaagctccttcagttgaaaagtgaggagatgcagacagttcagcaggaacagttgctgcaggagactcaggcactgcagcagagtttcttaagtgaaaaggactctcttctccaacgcgagcggttcatcgagcaagagaaggccaaacttgaacaactatttcaggatgaagttgcgaaggcgcagcagcttcgagaagagcaacagcgccagcaacagcaaatggagcaggaacgccagcgcctagttgcctcaatggaggaggcacgcagaaggcaacacgaggcagaggaaggagttcggcggaaacaagaggagttgcagcagcttgaacaacagaggcggcagcaagaggaattgcttgcggaggagaaccagcggttgagggagcaactacaactgctcgaagaacagcatcgagcagccctggcccactccgaggaggtgactgcctcccaggtggccgccacgaagacattgcccaatgggcgcgacgctctagacggacccgctgccgaagcagagcccgagcattctttcgacggtctccgccgcaaggtcagcgctcagcggctgcaggaggcaggcattctgagcgctgaagagctgcagcgcttggcccaaggccacacaaccgtcgatgagctggctcgccgggaggatgttcgccactacctccagggacgaagctctatagctgggctgctcttaaaggctacaaatgagaagctgtccgtgtacgctgcattgcagaggcagctcctgtcccccgggactgcgctgatactgttggaagcccaggctgcctcgggcttcctgttggatccagtgcggaaccgccggcttaccgtaaatgaagccgtaaaagaaggcgtggtcgggcctgagctccaccataaattgttatccgcagagcgagcggtgaccggttacaaggacccctacaccggacagcaaatctccctcttccaagctatgcagaaggggctcatcgtgagagagcacggcattcggctgctggaggcacagattgcgactggcggtgtcattgatcccgttcattctcacagggttccagtcgatgtggcataccgtcgtggctatttcgacgaagaaatgaatagggtgctggctgatccctccgatgatacaaaaggcttctttgacccaaacacacacgagaacctgacttacttgcagttattagagcgctgcgtggaggaccctgagaccgggctgtgcctgttgcctctgactgataaagcggcaaaaggcggagaacttgtttacaccgacagtgaggctcgggacgtttttgaaaaagctaccgtatccgctccttttgggaaatttcagggcaagactgtcacgatttgggaaattatcaacagcgaatacttcaccgccgagcagcgccgtgatctgctcagacaattccgcaccgggagaattaccgtggagaagatcatcaaaatcataataacagtggtggaagagcaggaacagaagggacgactgtgttttgaaggcctgcgttcacttgttccagccgcagagctgctggagtccagggtaattgatcgggaactgtaccaacagctgcagaggggagaacgctccgtgcgagatgtggcggaggtcgacaccgtccgaagggccctgaggggagccaatgtaatcgcgggggtgtggctagaagaagccggccaaaagttgtctatctacaacgctctaaaaaaggatctccttccttctgatatggcagtagctctgctggaggcacaggccggaacaggacacataatagatccagctacttcagcccggctgactgtggatgaggcggtgagggctggtctggtcggcccagagtttcacgaaaagcttctgtccgccgagaaagcagtcacagggtacagggatccatataccggtcagagtgtgtctttgttccaagccctaaagaagggactaatccctagagagcaaggactccgcctcctagatgcccagctgtcaacaggcggaatcgtggaccctagtaaatctcaccgagtgccactggatgtggcgtgcgctaggggatgcttagacgaggagaccagtagagctctttcagccccacgagccgatgctaaggcctatagcgatccctctaccggcgagcctgctacgtacggggagttgcagcagaggtgccgcccggatcaattaacagggctgtctctgctccccttgtccgaaaaggccgcacgggcaagacaggaagaattgtattcagaactgcaggccagagagacctttgagaagactccggtggaagtgccggttgggggctttaaaggccggaccgttaccgtgtgggaattgataagtagcgaatatttcaccgctgaacagcgtcaagagctcttgcggcaattccgaacgggcaaggtgactgtagagaaggtgatcaagattttaattaccatcgtagaagaggtggagaccctgcggcaagagcggctctctttctctggactgagggctccagtacctgcttctgagctgttggcttccggcgtgctgtcaagagcccagtttgaacagcttaaagatggcaaaaccaccgtgaaggacctcagtgagctgggttccgttaggacgctgctgcaggggagtgggtgcttagcagggatttatctggaggacacaaaagaaaaggtgtcaatttatgaggcgatgagacgcgggctgctcagggcaacaactgcagccttactgctcgaagcccaggctgctactggatttcttgttgatccagtccggaaccagagactgtacgtgcacgaagccgtgaaagctggcgtagtcggtcccgaactgcacgagcagctcctctctgccgaaaaggcagtgacaggatatcgggatccatactccggaagcactatctcgctgtttcaggccatgcagaagggcctggttcttcgccagcatggcatccggctgctggaagctcagattgccactggcggtataatcgacccagtgcactcccaccgcgttcccgttgatgttgcatatcagagagggtatttctctgaagaaatgaaccgagtgctggcagaccccagcgacgacaccaagggcttcttcgaccccaacactcacgagaacctcacttacaggcaacttctggaacgctgtgtggaagatcctgaaacaggcctgcgcttactcccactgaagggagccgaaaaggccgaggtcgtggagaccactcaggtctatacagaggaggaaacgagaagagcatttgaagagacgcagatcgatatacccggcggcggaagtcatggggggagcactatgagtttatgggaagtgatgcagagcgacctcatcccagaggagcaaagagcacagctgatggccgactttcaagccggccgcgtcactaaggagagaatgatcattatcatcatcgaaatcattgagaagacggagatcatacgacagcaagggttggccagctacgattacgtccgccgccgcctcacagccgaggatctctttgaggccagaataatttccctggagacatacaatctgttacgcgagggtacgcgaagcctgcgggaggctttggaagccgagtctgcatggtgttatctgtatggaacggggagcgtcgcaggagtttatctcccaggttcgaggcagactctgtctatttaccaggctttaaagaagggactattgagcgcggaggtagcgcgtctgttgttggaggctcaggccgcgactggcttcttattagaccctgtgaagggagagcggctaaccgttgacgaggctgtgagaaagggtctggtgggacccgagctgcatgaccgattgctgagcgcggagagagccgtaactgggtatcgcgacccttacaccgagcagactatcagtctgttccaagcaatgaaaaaggagctgataccaacagaagaggccctgcgcctgctggacgcccagctggctactggggggatcgtcgaccccaggttaggtttccacctgcccctggaggtggcctaccaaaggggatacctaaataaggatacacatgatcaattgagtgaaccttccgaggtgaggtcgtatgtcgacccctctacagacgagaggctctcctacacccagctgctgcgcaggtgtcgccgagatgacggaaccggacagctcctcctccccctgtccgatgccaggaaactgacctttcgcgggctgaggaagcagatcaccatggaggaactcgtaaggagccaagtcatggatgaggctactgccctccagctccgagaagggttgacctccatagaggaggtaacgaaaaatttacagaaatttttggagggcacatcttgtattgctggagtgtttgtggacgccactaaagagaggctgagtgtgtaccaagcaatgaaaaaggggataatcaggcctgggaccgcttttgaacttctggaggctcaagctgctaccggatatgtgatcgatcccataaaagggctgaaactgacagtggaagaagcagtgcgcatgggaatcgtgggaccggagttcaaggataagctcctatcggccgagcgcgccgtgactggctacaaagatccatattcggggaaactgatctccttgttccaggccatgaagaaggggctgatcctcaaggaccacggcataaggctcctggaagcgcagatcgccacaggcgggataatcgatcctgaggagagccatagattacccgtcgaggtagcatacaaaaggggtttgttcgatgaggagatgaacgagatactcacagacccatcagacgacacaaaaggcttcttcgacccaaacacagaggagaatctcacgtacttgcagctcatggagcgctgcattacagatccacagacaggattgtgtctcctccccctgaaagaaaaaaaacgggagaggaaaacctcctctaaatcatccgtgcgaaaaaggcgggtagtcatcgtggatcccgagacaggtaaggaaatgtctgtttacgaggcctacaggaagggcttaatcgatcaccagacctatctagaattgagtgagcaagaatgcgaatgggaagagatcaccatttcctcctcagatggcgtggtgaagtctatgattatcgaccgtagaagcgggagacagtacgatatcgatgacgccatcgcaaaaaacttaattgacagaagcgccctggaccagtaccgagctggaactctttccatcactgagtttgctgacatgttatccggtaatgccggaggatttcgctcccgtagttcatctgtcggctctagcagctcctacccaatttcgcccgccgtttccaggactcaattagctagctggagcgatcccacagaggaaactggtccagtcgccgggattttggatacagaaaccctggagaaggtgagcatcacggaggcaatgcaccgcaaccttgtggataacatcacaggacaacgactgctcgaagcccaggcatgtacaggcggcattatagacccatccacaggcgaaagatttcccgtcactgacgcagtgaacaaaggtttagtcgacaaaattatggtggatagaatcaacctggcacagaaggctttttgcgggtttgaggatccgagaacaaagactaagatgtccgccgcccaggctcttaagaagggatggctgtactatgaagccggacagcgctttttggaagtgcaatatcttaccggcgggttgattgagccagacacaccaggtcgagtgccattggatgaggcattgcagcgcggcactgtagacgcccggactgcccagaagctgcgagacgttggcgcctattctaagtacctgacatgtcctaaaactaaactcaaaatttcgtataaggatgctctggataggagtatggtcgaggagggcactggactccggctgctcgaagctgcagctcagtccacaaaaggatattattcaccctattctgtcagcggctctggcagtactgccgggtcccgcactggctcccgcactggatcccgggccggaagccggcgagggagtttcgatgcaaccgggtccggcttctccatgaccttttccagctccagttatagttccagtggctatggccgcagatatgcttccggctctagcgcgagcctgggaggcccagaatccgcagtggcctag

SEQ ID NO: 199813 - DNA, 13656 bp, synthetic construct
  misc_feature 1..13656: note = Description of Artificial Sequence: Synthetic coding sequence
  source 1..13656: mol_type = other DNA
atgagcggcgccggcggcgccttcgccagcccccgggaggtgctgctggagaggccctgttggctggacggtggctgcgaacccgcccgtcgcgggtacttgtaccaacagctgtgttgcgtggacgagcgcgaccgggtccagaagaagacctttacgaaatgggtgaacaaacatctcattaaagctcagcgacacattagcgacctctatgaagacctccgggacggtcacaacctaatttccctcctagaggtgctttccggcgactcgctcccacgtgagaagggacgaatgcgattccataaacttcagaacgtccagattgccctggactacctgagacacaggcaggtgaagctggtcaacatccgcaacgatgacatcgcggacggtaatcctaaattaaccctgggccttatctggactattattctgcacttccagatatcagatattcaagtctcgggccagagcgaggacatgaccgcaaaagaaaagctgctgctgtggtctcaacggatggtcgagggctaccaggggttgcgatgcgataattttacaagcagctggcgagacggccgcttatttaacgccatcatccatagacataagcctctcttgatagacatgaataaggtgtaccgacagaccaatctggaaaacctcgaccaggccttttctgtggccgagcgagacctcggcgtgactaggctgctggaccccgaggatgtggatgtgccgcagcccgatgaaaagtctataatcacctatgtctcgtcgctgtacgatgcaatgccccgcgttccagacgtgcaggatggcgtgcgagccaatgagctacaactgagatggcaagaataccgggaattggtgttgctgctacttcaatggatgaggcaccacacagccgcctttgaagagcgacgattcccctctagctttgaggaaattgagattctatggtcacaatttttgaaattcaaagagatggaactgccggctaaggaggctgacaaaaaccgatccaaggggatctaccagtctcttgaaggggccgtgcaggctgggcagctgaaggtgcctcccggatatcacccgctggatgttgagaaggaatggggcaaacttcatgtggcaatcttggagcgggagaagcagctccgcagcgaatttgaacgactcgagtgcctgcaacggattgttacaaagctgcagatggaggcagggttgtgcgaagaacagctcaatcaggccgacgcactccttcaaagtgatgtgaggctcctggctgccgggaaggtgccgcagagagcaggagaagtagagcgagacctggataaggccgactccatgatcagactcctctttaatgacgttcagacactcaaggatggaaggcacccccaaggcgaacagatgtatcgaagagtttatcgcctgcacgagagactcgtggccattcgaacggaatacaatctgcgattaaaggctggagttgctgcacctgccactcaggtcgctcaagttacacttcagagtgtgcagcgccggccggagttagaagattctactctccggtacctgcaggatcttctagcttgggtagaagaaaaccagcatagggtggacggggccgaatggggggttgaccttccctccgtcgaggcccagctcggttctcacagggggctgcatcaaagcattgaagagttcagggcgaagattgaacgcgcccgttctgatgaagggcagctgtcacccgctactcgcggagcttatcgggattgtctcggacgcctggacttacagtacgccaagttgctgaactcatccaaggcgcgtctgagaagcctggaaagcctccactcctttgtggctgcagcgacaaaggaattgatgtggctcaacgaaaaagaagaagaagaggtcggctttgactggagcgacagaaatactaatatgaccgctaagaaggagtcatacagcgctcttatgcgagaactagaactcaaggagaaaaagatcaaagagctgcagaacgcaggggatagacttctgagagaggaccatcccgctcggccaactgttgaatcatttcaggccgcactgcagacgcaatggtcatggatgctacaactatgctgctgcattgaggcccatctgaaagagaacgccgcctactttcagttttttagcgatgtgcgagaggcggagggccagctgcagaagttgcaggaggccctacgcagaaagtacagctgtgatagaagcgccaccgtaactcgactggaggacctgttgcaggacgcacaggacgagaaggaacagctcaatgaatataaagggcacctctcaggtctcgccaaaagagccaaagcagtggtacaattgaaaccacgacatcccgcccaccccatgagaggcaggctgcctctgctggcagtctgcgactataaacaggtcgaagtgaccgtgcacaaaggcgacgagtgccaattggtaggacctgcccaaccttcccactggaaagttctctcgtctagcggaagcgaagctgctgtccctagcgtttgctttctggtgccacctcccaaccaggaagcccaagaagcggtgacccgcttggaggctcagcaccaggccttagtaactctgtggcatcagctgcacgttgacatgaagtccctcttggcctggcagtctctccggagagacgtgcagctgattagatcttggagtcttgctaccttccgcacgcttaagcccgaagagcaacgccaagcccttcatagcctggaactccactaccaagcctttctccgggattcacaagatgctgggggatttggccccgaggataggttaatggccgagcgtgagtacggctcttgcagccatcattaccagcagttgctgcaatcacttgagcaaggagcacaggaggagtctcgctgtcaaagatgtatttccgagttgaaggacattagactgcagctagaagcttgtgagacccgtaccgtgcacaggctaaggcttcctctggataaagaaccagcgcgcgagtgtgcccagcgaatagctgaacagcagaaggcccaggcggaagtggaagggttaggcaaaggagtggcccgcctgtccgctgaggcagaaaaagtgttggccctccctgaaccatctcccgctgcaccaacccttaggtccgagcttgaactgacgctcggaaagctggagcaggtgcggagtttgagtgcgatttatcttgaaaaacttaagaccattagccttgtaattcgcggcacccagggtgccgaagaagtcctgcgtgcacatgaagagcaacttaaggaggcacaggctgtgccagctaccttgcccgaactcgaggctacgaaagcttctttgaagaagctgagagctcaggcggaagctcagcagcccacgtttgacgcacttagggatgagctacgcggcgcccaggaagtgggcgaaaggctccaacagagacacggcgagagggatgtagaggtggaacgatggcgagaaagagtggcccagctactagaacggtggcaggccgtactggcacagacagatgtacggcagcgcgagttagagcaactcgggcgccagctaaggtattatcgggaaagcgcggacccactcggcgcctggctgcaggacgcacgacggagacaagaacagatacaggcgatgcccctcgcagacagccaggccgttcgggagcagcttcgccaggaacaagctctcctggaggaaatcgagcggcacggggagaaagtagaagaatgtcagcgattcgcaaagcagtatataaacgctatcaaagattatgagctgcaactcgttacatataaagcccaactggaacccgtcgcctctccggcaaaaaagccaaaagtgcagtccggcagcgagtctgtgatccaagaatacgtcgacttgcgcacgcactacagcgagttgaccaccctcacttctcaatacatcaaattcatctccgaaacactccggagaatggaggaagaggaaaggctcgccgaacagcagcgggcagaggagcgtgaacgccttgcagaggtggaagcagccctagagaagcagcgccagttggccgaagctcacgctcaagctaaggcacaggctgagcgcgaggctaaagagttacagcaacggatgcaggaggaggttgtccgtcgcgaggaggccgccgtggacgcccagcagcagaaaagatcaattcaggaagagctccagcagctgcgtcagtcctcagaagccgaaattcaggccaaggcaaggcaagctgaagctgctgaaagatctcgcctgcgcatagaggaggaaatacgcgtcgtgagactgcagctggaagcaacagaacgccagagaggcggtgcggagggcgaactccaggccctgagggctagagccgaagaggccgaggcacagaagaggcaagctcaagaagaagccgaaagacttaggaggcaagtgcaggacgagagtcagcgtaagagacaagctgaagtggagctggcctcacgagtcaaggctgaggccgaggctgcgcgtgagaaacagagagcactacaggccctggaagaattgaggctgcaggcggaggaagctgagcgcagattaagacaggctgaagttgaacgagcaagacaggtgcaagtcgcccttgagactgctcagcgatctgccgaagctgaactgcagtccaagagagcctcgtttgccgaaaagaccgctcagctggagcgcagccttcaggaggaacacgtggccgtggcacagctgagggaggaagctgagcgccgggcacagcagcaggccgaagccgagcgcgcgagggaggaggctgagagagagcttgagcggtggcaactgaaagcaaatgaggctctgagactgcgcctgcaagcggaggaagtggctcagcagaaatcacttgctcaggccgaagcagaaaagcaaaaagaggaggcggagcgggaggcaagaaggagaggcaaagcagaagagcaggctgttcggcagcgggaattggccgagcaggaactcgagaagcagagacagcttgctgaggggactgcacagcagcgactggcagccgagcaggaactgattcgacttagagctgagactgagcagggagaacaacagcggcagctcttagaggaggagcttgccaggctccagcgggaagcagccgcggcaacacaaaagaggcaagagctggaagccgagttggcaaaggtgagggctgaaatggaggttctcctggcaagcaaggctagagccgaggaggaaagtagatcgaccagcgaaaagagcaagcagaggctcgaagctgaggctggcaggtttcgggagctggccgaggaagcagccagattgagagccctcgccgaagaggctaagagacaaaggcagctggccgaggaggacgctgcccggcagcgtgccgaagccgagcgcgtgctggcagaaaagctcgctgctatcggggaggccacacgactgaaaactgaagcagagatagcacttaaggagaaggaggcggagaacgaaagactgcgccgactggcagaggacgaggccttccagcgccgcagactggaagagcaggctgctcagcataaagccgatattgaagaacgtcttgctcaattgaggaaggcctcagactctgaactggagcggcagaaggggcttgttgaggacacattgcggcagcgccgccaggtggaagaggagatcctggccctcaaggcctcattcgaaaaagccgctgccggcaaggcagagttggaactggagttagggcgtataaggtcaaatgcggaagacactctgcgttccaaggagcaggccgaactggaagccgccagacaacgacagctcgccgccgaggaggagagaagacgacgcgaagcagaagagcgggtgcagaagagcctggctgccgaagaggaggccgccaggcaaagaaaggccgctttagaggaagtagagagactcaaagccaaggttgaggaggctaggcgcctcagagaaagggccgaacaagaatctgcccggcagctccagctggcacaggaagccgctcaaaaacgcctgcaggcagaggagaaggcgcacgcattcgccgttcagcagaaagagcaggagctccaacagacattacagcaggaacaatctgtactggaccagctgaggggggaggccgaggcggcccggagggctgccgaagaggcagaggaagcacgcgtgcaggctgaacgggaggccgctcagtcccgacgccaggttgaggaagcggaaagactaaaacagtcagcagaggaacaggctcaggcacgggctcaggcccaggcagctgctgaaaaattgagaaaagaggccgaacaggaggcagcaaggcgcgcacaggctgagcaagcggccctcagacagaagcaggccgctgatgctgagatggagaagcacaaaaaattcgcggagcagaccttgcgacagaaagcgcaggtggagcaggagctgaccacccttcgccttcagctcgaggagactgatcaccagaagaaccttctggacgaggagttgcagaggctgaaggcagaagctactgaagccgccagacagcggagccaggtggaagaggaactcttcagcgtacgcgtacagatggaagaactgtcgaaactgaaggcacgtatcgaagcagaaaacagggccctcattttacgcgacaaagacaacactcaaaggtttctccaggaagaggctgagaagatgaaacaagtggcagaggaagctgcacgcctttccgtggccgcccaagaggcagcgcggctccgacagttggccgaggaggacctggcccagcagagagctctggccgaaaaaatgttaaaggagaagatgcaggccgtacaggaagccactcggttgaaggcggaggccgagctgttgcaacagcagaaggagctcgcccaggagcaagcccgaaggcttcaggaagacaaggaacagatggctcaacagctcgctgaagaaacccaaggatttcagaggacactggaagctgaaagacagaggcagctggaaatgtctgccgaagccgagcgtttgaaattacgagtggctgagatgtcgcgtgcgcaagcgcgagccgaagaggatgcccagagatttcggaaacaggccgaggaaatcggggagaagctccatagaactgaactggccacccaagaaaaagtgacgctggtgcagacgcttgagatacaaaggcagcagtccgaccatgacgccgaacggttgcgggaagccatcgccgaactcgagcgtgaaaaggaaaaactgcagcaagaggccaagcttcttcagctcaaatcagaagagatgcagaccgtgcagcaggaacagctgctgcaggaaacacaggcgctgcagcagagtttcctctcagagaaggacagccttcttcagcgcgagaggttcattgaacaggagaaagctaaactggaacaactgttccaagacgaggttgctaaggcccagcagctgcgggaagagcagcaaaggcagcagcaacagatggaacaagagcgacagcgactggtcgccagcatggaggaagcgagacgcagacaacacgaagccgaagaaggtgttagaaggaagcaggaggaattgcagcaactggagcaacagaggcggcagcaggaagagcttctggccgaagagaaccagcgtctgcgcgagcaacttcagcttctggaggagcagcacagggctgctctcgcacattctgaagaggtcactgcaagccaagttgccgccacgaaaacgcttccaaatggcagagatgctctggatggacctgcagccgaagcagagcctgagcacagctttgacggtctgcgccgtaaggttagtgcacagagactccaggaagcgggaatactgagtgccgaggagttacagagactcgcccaggggcacaccacagttgacgaactcgcacgccgtgaagacgtacggcactatttacagggccgctcatcaattgcggggttgctgttgaaggctacgaacgaaaagctgtcagtctacgccgcattacaacggcagctgctgtccccgggaactgccctgattctgctcgaagcccaggcagcgagtggctttttgttggatcccgtgagaaaccgcagactgacagtgaatgaagctgtgaaggagggtgtcgtcgggcctgagctgcatcataagctgctgagcgcagaacgggcggttaccgggtacaaggatccttacaccggacagcagatctccttgtttcaggccatgcagaaaggcttgattgtgagggagcatgggatacgccttctggaggcccagatcgcaactgggggcgtcatagatccagtgcactctcatagagtgcctgttgacgtggcctatagaagaggatattttgatgaggagatgaaccgcgtgctggccgacccctctgatgacactaaagggttctttgaccccaatacgcacgaaaacctgacataccttcagctgctggaaaggtgtgtggaggaccctgaaacaggcctgtgtctgttgcctcttaccgataaggccgccaaaggaggggagctggtgtacacagacagcgaggcacgagatgtgtttgaaaaagccacagtgagcgccccctttggtaagtttcagggaaagaccgtaacaatctgggaaatcattaattcagagtatttcacggcagagcagaggcgggatctgctgagacaattccgaactggcagaatcaccgtagagaaaattattaagattatcataacggtggtggaagagcaggaacagaagggaaggttgtgctttgaggggcttcgttccttggtccccgccgctgaacttctcgagagtcgcgttatcgatcgtgagctatatcaacagctgcagagaggcgagcgcagtgtgagagacgtggccgaggtcgacaccgttcgtcgggccttaagaggcgccaatgtgattgccggcgtgtggttagaagaggcgggacaaaaactgtccatttacaatgccttgaagaaagacttgttaccgagtgatatggccgttgctctgctcgaggcccaggccggcacagggcatatcatcgatcctgcaaccagtgctcgcctgaccgtggatgaggccgttagagccgggctcgtgggaccagaattccacgaaaagttactgtcagctgagaaagcagtgactggttatcgcgatccatacacaggccagtccgtcagcctgttccaagccctgaagaaaggcttgatcccaagagagcaaggtcttagactgttggatgctcagctgtccaccgggggcattgtcgaccctagcaagagtcatcgcgttcctctagacgtggcctgtgccagaggctgcttagatgaggaaacttcacgcgccctctcagcccctcgcgctgacgctaaggcttacagcgatccatcaaccggtgagccagcaacatacggggaactccagcaaaggtgtcggccagatcagctaacaggcctctcccttctacccctatcggagaaagctgcacgggcgagacaagaggagctgtattcagagctgcaggcacgggagacatttgagaagactccggtggaggttcctgttggaggcttcaagggtaggactgtgactgtttgggagttgatctcatcagaatacttcacagctgagcagagacaagagctactccgccaatttagaaccggcaaggtgacagtcgaaaaggtgatcaagatcctgattacaatcgtggaagaggtggagacactgagacaagagcgccttagcttttctggcctgcgggctccggtcccagcttcagagctgctcgctagcggcgtcctgagtcgtgcacagttcgaacagttgaaagacgggaaaactacagtgaaggacctctcagaactgggctcggtccgcaccctgctgcagggctctggctgtctggcaggtatctacttggaggatacaaaagagaaagtctccatctatgaggccatgcgacggggtctcttacgggcaacaacagccgccctgcttctggaggctcaggctgccaccggctttctggtggaccccgtccgtaaccagaggctctatgtgcacgaggccgtaaaagccggagtcgtcggccccgagcttcacgagcagctgctgtccgcagaaaaagcggttactgggtatcgcgacccctatagcggatctacgattagccttttccaggcaatgcaaaaaggtctcgttctcagacagcatggaattcgccttttagaggcccagatcgccactggcggcataattgatcctgtacatagccaccgcgtgccagttgacgttgcctatcaaagaggatacttcagcgaagagatgaatagggtcttagctgaccccagcgacgataccaaaggcttcttcgatcctaatacccatgaaaatctgacatataggcagctgttggaacgatgtgtggaagatcccgagacaggcctaagactattgcccctcaagggagctgagaaagccgaagttgtggagaccacccaggtttatacagaagaggagactcggcgagccttcgaggagacgcagatcgacattcccggcggtggatctcacggcgggagtaccatgagtctctgggaggtgatgcagagcgatctgattcccgaagagcagcgcgctcagctcatggctgattttcaggcagggcgggtgactaaggagaggatgattatcatcatcatcgagatcatagaaaagaccgagattattaggcagcaggggctggccagttacgactacgtgcgcaggcgactaacggcagaggacttattcgaggcccggatcatctctctggagacctacaatcttttaagggagggcacacgatccctacgggaggcactggaagccgagtcagcttggtgctatttgtatggaactggtagtgtggccggagtgtacctcccagggagtcgtcaaaccctcagcatataccaggccctgaagaaaggactcctgtcggccgaagtggccagacttctgctggaggctcaggccgccaccggtttccttctggaccccgttaagggcgaacgtctgaccgttgacgaggccgtcagaaaaggccttgttgggcccgaactgcacgaccgcctcctgagcgccgagagagcagttacaggttatcgggatccctacactgaacagacaataagtctgtttcaggctatgaaaaaagagctgattcccaccgaggaagcacttcgcctcttagacgcccagctggctaccggaggcatagtggatcctcgcctagggtttcacttgcctctggaggtggcctaccagcggggatacctgaataaggatacacacgaccaactctcagagccatctgaagttcgctcttacgtcgaccccagtacggacgaacggctatcatacacgcagctccttcggcgctgccggcgggatgatggcactggacagctcctcctaccgttgagtgacgccaggaagttaacctttagaggcctgcgcaaacagatcactatggaagaattagtcagatctcaggttatggacgaggccacagccttgcagttacgtgaagggctcacttctattgaggaagtaaccaagaacctgcagaagttcttggaagggaccagctgcattgctggagttttcgtcgatgctacaaaagagcggctgagcgtttaccaggctatgaagaaggggattattcggcccggcacagcctttgagttgctggaagcccaggctgccacgggatatgtgatcgaccccataaagggcctgaagttaacagtggaagaggctgtgaggatgggtatagtgggcccggagtttaaagataaattattgagcgctgaacgcgccgtcactggttataaagatccctacagcggcaagctcatctctctgtttcaggcaatgaaaaaaggactgattctgaaggaccacgggatccgcctgcttgaggctcagatcgctacgggagggattattgaccctgaagaatcgcacaggctgcccgtggaagtcgcttataagaggggcctgttcgatgaagaaatgaacgagatcctgacggatcctagcgacgatacgaaaggattctttgatcccaatactgaagaaaacctcacctacttgcagttaatggaacgttgcattaccgatccgcaaactgggctttgcctgcttccactgaaggaaaaaaagcgcgagcgcaaaacgtcatccaaaagcagcgttagaaaaagaagagttgtcatagtggaccccgaaaccgggaaggagatgtctgtgtatgaagcatatcgcaaaggcctgattgaccatcaaacctatctggagctgtctgagcaggaatgcgagtgggaagagatcacgatctccagcagcgatggcgtcgtgaaatctatgatcatcgacagacggagcgggcggcagtatgatatcgacgatgctattgcaaagaatctgattgatcgctcggctctggaccagtacagggccggtaccctgtccatcaccgagttcgccgacatgctaagtggcaacgccgggggcttcaggagcagatctagctccgttggatcgtcttccagttaccccatcagcccagccgtgtcaaggacacagctagcttcatggagtgacccaacggaggagaccggacctgtggcagggattctcgataccgagacgctggagaaggtgtccatcacagaggccatgcatcggaacttagtggataatatcactggtcaacgactgcttgaagcccaggcttgcacaggcgggatcattgatcctagtactggcgaaaggtttcctgtgactgacgctgtcaataaaggcctggtagacaagattatggtcgatcgtattaacttggcccagaaagcattctgtggctttgaggaccctaggactaaaacgaagatgtcagccgcccaggcccttaaaaagggctggctgtactatgaggccggccagcggttcctggaggtgcagtacctgacagggggactcatcgaaccagatacacccggacgcgtgccgttggacgaagccctccaacgtggtaccgtggacgcacggactgcccaaaaactgcgcgacgtgggggcttattccaaatatctgacttgtcccaagaccaaacttaaaattagttacaaggacgcgttggacagatctatggttgaggaaggcaccggtcttcggctcctagaagctgccgctcagtctaccaaaggctattactctccatactccgtttccggatctggaagcaccgctggctcgagaacggggtccaggacaggtagtcgggcagggagcagacgcggatctttcgatgccaccggctcaggcttctctatgacgtttagcagttcctcctactcctctagtggatacggccgccggtatgcaagtgggtcttcggcctccctgggcgggcctgaaagtgccgtggcttag

SEQ ID NO: 199814 - DNA, 13548 bp, synthetic construct
  misc_feature 1..13548: note = Description of Artificial Sequence: Synthetic coding sequence
  source 1..13548: mol_type = other DNA
atgaagatcgtgcccgacgagcgggaccgggtgcagaagaagaccttcacaaaatgggttaataagcatctgatcaaagcccagaggcacataagtgacctgtacgaggaccttagagacggccacaatttgatctctctgctggaagtgctcagtggagatagtctcccacgagagaagggcaggatgcgtttccacaagctacagaacgtgcagatcgctttggattacttgagacacagacaggttaaactggtgaacatacgcaatgatgacatagccgacggtaaccccaaactgaccctcggattgatttggactattatactacacttccagatctccgacatccaggtctccggacagagtgaggacatgactgctaaagaaaaattgctcctttggagccaacggatggtggagggctatcagggactgcggtgcgacaatttcacgtcgtcatggagggacgggcgtctgtttaatgccataattcatcgccataagcccctcctgatcgacatgaataaggtgtatcggcagaccaaccttgagaacctcgaccaagccttcagcgtagccgaacgtgacctaggagtcacgaggctgcttgacccggaagatgtggatgttccacagcctgacgagaagtctatcattacatatgtgtccagcctgtatgatgccatgccacgggtccccgacgtgcaggacggtgtccgtgccaacgagctgcagctcaggtggcaagagtaccgggagctcgtcctattgctgctgcagtggatgagacatcacacagccgcgttcgaagagagacgttttccctccagcttcgaagagatcgaaatactttggtcccaattccttaaatttaaggagatggaattgcccgcaaaggaggccgacaagaatcgctctaaaggcatctatcagtccttggagggcgccgttcaggccggacaactcaaggtaccacccggctaccacccactagacgtcgaaaaagaatggggaaaacttcatgtggctatactggagcgggaaaaacagctgcgctccgaattcgaacggctcgagtgtctgcagcggattgtgaccaagctgcaaatggaggccggattgtgtgaagaacaactgaaccaggctgacgctctgcttcagtccgatgtacgactgctggcggccggtaaggtgccccagcgcgcaggggaggtagagagggatcttgacaaagccgacagcatgattaggttactgttcaatgatgtgcagaccttgaaggatggtagacaccctcaaggggagcaaatgtataggcgagtctaccgcttacatgaaaggcttgtggcgatccgcaccgaatataatctccgtttaaaggcaggagttgccgctcccgcgacacaggtagctcaggtaaccctgcagagcgtgcagagaaggcctgagctggaagacagcaccttgaggtatcttcaggatctgctggcttgggtggaggagaatcagcatcgggttgacggggccgagtggggtgtcgatctccccagcgttgaggctcagctggggagtcatcgcggcttgcaccagagcatcgaagaattcagagcgaagatagagagagccaggagcgacgagggccaactgagccctgccacacggggagcctaccgagattgcctgggccgcttggatttgcagtacgctaaattgttgaacagctctaaagcccgcctgaggtctctggaatccctgcattcattcgttgctgccgccacaaaagagttgatgtggctgaatgagaaagaggaagaggaagttggcttcgattggtcagaccggaataccaacatgaccgcgaaaaaggaatcgtactcggctctcatgcgggagcttgaactcaaagaaaagaaaatcaaggagctgcagaacgctggcgacagactcctacgtgaggaccatccagcccgtccaaccgtggagagcttccaagctgctctgcagacccagtggtcctggatgttacagctttgctgctgtatcgaagcccacctaaaggagaacgcagcctattttcagttttttagcgatgtgcgagaagccgaagggcagctacagaaactgcaagaagctctacgaagaaaatattcttgcgaccggtccgccactgttacacgtctcgaagaccttctgcaagacgctcaggatgagaaagagcaactgaatgagtataaaggacacctttctggcctggccaaaagggctaaagccgttgtacagcttaagcctcggcaccctgcccacccaatgcgtggaagactgccactgctggccgtctgcgactacaaacaagtggaggtgacggtacacaaaggggacgagtgtcaattagtgggaccagcccagccttcgcactggaaggtgttatcctcatccgggtcagaagcggcggtgcccagcgtttgctttttagtgcccccacccaaccaggaagcccaggaagccgtgacccggcttgaggcccagcatcaggctctggtgactctgtggcatcaattacatgtcgacatgaagtctctactggcttggcagtcactgcggcgagacgttcagctcatccgatcctggagtctcgcgacattccgaactctcaaaccggaggagcagagacaagcgctccactcccttgaattacattatcaggcattcctccgagacagccaggacgcaggcggatttggacccgaggatcgcctcatggcagaaagggaatacggtagctgctcccatcattatcagcaactgttgcagtctcttgaacagggggcccaagaggagtccaggtgccagagatgcatatccgagctgaaagacatccgactgcagcttgaggcatgcgaaacccgtacagttcatcggctgcggttaccactggataaagagccagctcgcgaatgtgcccagaggattgcagaacagcagaaggctcaagcggaagtcgagggactaggcaagggggtggcaaggcttagcgcagaggcagagaaagtgcttgccttaccagaaccatcaccggccgcccccacgctgagaagcgaattggaactgacgctggggaaactggagcaggtgcggtcgctgagcgccatctacctggagaagctgaaaacgatatcactggttattagaggcacccaaggtgccgaggaagtgctccgagcgcatgaagagcagctaaaggaagctcaggcagtgcctgccacactgcctgagctcgaggcaaccaaagcatccttgaaaaaactgagggcccaagccgaggctcagcaaccgacgtttgacgccttacgggacgagctgcggggagctcaggaagtgggagaacgcctgcagcaaagacacggtgagcgtgatgttgaggtggagagatggagagaaagagtggcacagcttttggaaagatggcaggcagtgctggcccaaacggatgtgcggcaacgggaactggagcagttgggccgccagttgcggtattatcgcgaaagtgctgatcccctgggcgcctggctgcaggatgccagaaggagacaggagcagatccaagcgatgccactggccgactctcaggctgtgcgcgaacaactgcgtcaggaacaagcgttgctggaggaaatcgaaagacatggtgaaaaggtggaggagtgccagcgttttgctaaacaatatatcaatgctatcaaagactacgagctgcagctagtgacctacaaagctcagctggagcctgtggccagccccgctaagaaaccgaaagtccagagcgggtctgagtccgttatccaggaatacgtggacctacgaacccactacagcgagttgacgacactgacaagtcagtatatcaagttcattagcgagacactgaggcgaatggaggaagaagagcggcttgccgaacagcaacgggccgaggaacgggagcgtctggctgaggtagaagctgctctggagaagcaacggcagttggctgaggcacatgcccaggccaaggcccaagccgaacgggaggcaaaagagctgcagcagagaatgcaggaggaggtggtgcgcagagaggaagccgcggtggacgctcagcagcagaagcggagcatacaggaagagctgcagcagctacggcaaagttctgaggccgagatacaggccaaagcccgccaggcggaggccgcggaacgttctcgtttgcggattgaggaggagatccgggtggtccgactgcagctcgaggctacagagagacagcggggaggggcggaaggcgaactgcaggccttgcgcgctagggccgaagaggcggaggctcagaaaaggcaggcccaggaggaggctgagcggttgagacgacaggttcaggacgagtctcaaagaaaaaggcaggccgaggtggagctagcttcacgggtgaaagccgaggccgaagccgcacgcgagaaacaaagagctctgcaggcgttggaggagctccgccttcaagccgaagaagccgagaggcgcttgcgtcaggccgaagtcgagagggcccggcaggttcaggtggctctagaaacagcgcagagatcagctgaggccgagctgcagagcaagcgagcatctttcgccgaaaaaacagcacagctcgaacgaagcctgcaggaggaacatgtggctgtggcacagctgcgcgaggaggctgagcggcgagctcagcaacaggcagaagcggaacgggcgagggaagaggccgagcgggagctggagcggtggcaactgaaggcaaacgaagcccttagattacgccttcaggccgaggaagtcgctcagcagaaatctctggcccaggcggaggccgagaaacagaaagaggaagccgagagggaggctagaaggcggggcaaagccgaagagcaggccgtgagacagagggaactggctgagcaagaattagagaaacagaggcaactggccgaaggaactgctcagcagcgcctcgccgctgaacaggaactgattcgattgcgtgctgagaccgagcaaggtgagcagcagcgacaattacttgaagaggagctggcccggctccaacgtgaggctgctgctgcaacacagaaaagacaggaacttgaggccgagcttgcgaaggtgagggccgagatggaagtcctcttagccagcaaggccagagctgaggaggagtccagaagcaccagtgaaaaatccaagcagcgcttggaagccgaggcaggaagattccgggaactcgccgaagaggccgcccgtttgcgagcactagccgaggaagccaagcggcagcggcagcttgcggaggaggacgccgctcgtcaacgtgcagaagcagaaagagtgctcgccgaaaaactggctgctatcggggaggccactcgactgaagactgaagcagaaattgccctaaaggaaaaagaggctgagaatgaaaggttgcgcaggcttgccgaagacgaagcatttcagcgccgccgccttgaagagcaggcagcccaacataaggccgatattgaggagaggctggcacaattgaggaaagcgagcgacagtgaattggagagacagaagggattggtggaagacacacttagacagaggcgtcaggtggaggaagagattctggcgctgaaggcttcttttgagaaagccgccgccggaaaggcggagctggaactcgagctcgggcgaatccggagtaatgctgaggataccctgaggtccaaggaacaggccgagcttgaggcggctcggcagcgccaactagccgccgaagaagagcggagacgtcgagaagcagaagaacgagtgcagaagagccttgcagcggaggaggaggcggcaagacagagaaaagccgccttggaggaggtggaacggctgaaggctaaggtggaggaagccagacggctgagggagcgcgccgagcaagagtctgctcgccaactgcagctcgcgcaggaagccgctcaaaaaagattgcaggcagaagagaaagcccatgccttcgccgtccagcagaaagagcaggagctgcagcagactctgcagcaggaacaatctgtccttgatcaactgcgaggtgaggccgaggccgctagaagggctgctgaagaggctgaggaagcccgagtgcaagctgaacgcgaggcagcccaaagccgccgtcaggtcgaggaggccgaaaggttaaagcagtccgccgaggaacaggcgcaggcccgagcccaggctcaggctgccgcagaaaagcttaggaaagaagccgagcaagaggccgcccgccgagcccaggccgaacaggccgccctccggcaaaaacaagctgccgacgccgagatggaaaagcacaagaagttcgcggagcagaccctccggcagaaagcccaagtggagcaggagctgacaaccctcaggctgcaattggaagagaccgatcatcagaagaacttgctggacgaggagctgcaacgtcttaaggccgaggcgaccgaggccgcccggcagaggtcccaagttgaagaggaactgtttagcgtgcgggtacagatggaagagctgtcgaaactgaaagcaagaatcgaggcagagaaccgcgctttgatcctcagagataaggataacactcaaaggttccttcaagaggaggccgagaagatgaaacaggtagctgaagaggctgcgcggctgtcagtggcagctcaagaggctgctaggctgcggcagcttgcggaggaggacctggcccagcagagagcgttagcagagaaaatgcttaaggagaaaatgcaggcagtgcaggaggcaactaggctgaaagctgaggcagaattactacagcaacagaaggaactggcccaggagcaggcacgcagactgcaggaagacaaggaacaaatggcccaacaactggctgaggagactcagggatttcagcgaaccctcgaagccgagagacaaaggcagctagagatgtccgcagaagctgaacgcctcaaactcagggttgccgagatgtcgagagcccaggccagggcagaggaagatgcccagagatttagaaaacaggcggaggagattggggagaaacttcacaggactgaactggctactcaagagaaggtgacccttgttcaaactctggagattcaacgccagcagtctgaccacgacgccgagcgtctgcgcgaggcgattgctgagctggagagggaaaaagagaagttgcagcaggaagcaaagttgctgcagctgaagtctgaagagatgcagactgtgcagcaggagcagctgctccaggagacacaggccctgcaacagtcgtttctgagcgagaaggactccctgctccagagagagagattcattgagcaggaaaaggctaaactggaacagctcttccaggacgaagtggcaaaggcccagcagctcagggaagaacagcaaaggcagcaacaacaaatggagcaggaacggcagcgtttggtcgcctctatggaggaggcacgcaggcgccagcatgaggctgaggaaggcgtccgtcgcaagcaggaggagcttcagcagctggaacagcagaggcgccagcaagaggagttacttgccgaggagaaccagcgcctgcgggagcagctccagttgctagaggagcagcatcgggctgcactcgcccattctgaagaggttactgcttcgcaggtggcagctaccaaaaccctgccgaacggcagggacgccctggacggccccgcagcagaggccgagcccgaacatagttttgacggacttagacggaaggttagtgcacagcgccttcaggaagctggaatcctttctgcagaggagctgcagcgactggcccagggtcacactacagtggatgaactagcacgccgtgaagacgttcggcactacctgcaggggcggagctccatagctggtcttttgcttaaggctaccaacgagaagctgagtgtctacgccgcactccaacggcagctcctgagcccaggcacagccctcatcctccttgaggcacaggcagccagtgggttcttactggatcctgtgcgcaataggcggctgactgtgaacgaggcggtcaaagaaggagtcgtgggcccagaactgcatcacaaactattgtccgccgaaagagccgttacgggttacaaagatccctataccggtcagcagatatctttgtttcaggccatgcagaaggggctgattgttcgtgagcatggaatccggctcctcgaggctcagatcgccacaggcggggtaattgatccagttcacagtcaccgtgtccctgttgacgtcgcctacaggcgtggttacttcgacgaggagatgaacagggtgctggccgacccatccgacgacaccaaaggtttttttgaccctaacacacatgagaatctcacatacttacagttgctggaaagatgtgttgaggacccagagaccggattgtgtcttctgccgttgacagacaaggccgcgaaggggggcgaactcgtgtacaccgactcagaggctagggacgtcttcgaaaaagcaaccgtttcagcccccttcgggaagtttcagggcaagaccgtgacgatttgggaaattatcaatagcgagtacttcacagctgagcagaggcgagacctcctgcgccagttccgcacaggtcggattacagtggaaaaaatcataaagattatcattaccgtagtcgaggagcaggagcagaagggccgcctgtgttttgaagggctgcggtctcttgtgcccgctgctgaattactagagtcgcgagtgattgatcgagagttataccaacagttgcagagaggtgagaggagcgtaagggatgtggctgaggtagacactgtcaggcgcgctctgcggggggctaacgtcatcgcaggggtgtggctggaggaagccggtcagaagctgagtatctataacgccttaaaaaaggatttgctcccaagtgacatggctgtcgcactgctcgaggcgcaggctgggacaggtcatattatcgaccccgctacttctgctagacttacagtggatgaggctgtgcgggcaggactcgtgggacccgaattccatgaaaagctgctgtccgctgaaaaggccgtgaccgggtatcgagacccctacactggccaatccgtttctctattccaagccttgaagaaaggcctcatcccccgggaacaggggctacgcctcctggacgctcagctgagtaccggggggatcgttgatccttccaaatcgcatagagtgccgttggacgttgcctgtgcaagagggtgtttggacgaggaaacttccagagcactttccgcacctcgagctgacgccaaggcatattccgatccatctaccggcgagcctgccacttacggggagctgcagcagcgttgtcgcccagaccagctgactggcttgtctttgctgcctctgtccgaaaaggctgctcgggcgcgtcaggaggaattgtactcggagctgcaggcgcgcgagacctttgaaaaaactcccgttgaggtccccgtaggcggctttaagggccgcactgtcacagtctgggagctgatttcgtcagagtactttaccgcagaacagcgccaggagctgctcagacaattccgcaccggtaaagtcaccgtggagaaagttattaagattctcatcactatcgtagaggaagtggagacactgcggcaggagcggttgagtttcagtgggttgagagcaccagttccagcatcagaactcctggcgtcaggggttctgagcagggcccagttcgagcaacttaaggacgggaagactaccgtgaaggacctgagtgagctgggatctgtcaggaccctgctgcagggctcagggtgtctggctggcatctatctcgaagacactaaagagaaggtgtcgatctacgaagctatgcgaaggggtctgctccgcgccaccacagccgcattgttgcttgaggcccaggctgccaccggttttctcgtggatccagtcagaaatcagagactatatgtccacgaagcagttaaggcaggtgtagtaggtcctgagttgcacgagcagttactctcggccgaaaaagcagtaacggggtacagggatccctactcaggttctacaatctcactgttccaagcaatgcagaaaggactggtgttacggcagcatgggattcgtctcctggaggcccagatagctacaggaggaattatagaccctgtgcactcacaccgcgtccccgttgacgtggcctaccagcgtgggtatttttctgaagaaatgaatagggtgctcgctgatccgagtgatgatactaaagggttcttcgacccaaatacacatgagaatttgacgtacaggcagctgctggaaaggtgtgtcgaggaccccgagacaggtctcaggctgctgcctctgaagggcgccgaaaaggccgaagtggtggaaacaactcaggtctacacagaagaagagaccagaagagcgttcgaggagacccagatcgacattccaggtgggggcagccacggggggagcactatgtcactgtgggaggtgatgcagagtgatttaatcccagaggaacagagggctcagttgatggctgactttcaggcgggcagagtgacaaaagaaaggatgattatcattatcatcgaaatcatcgagaaaacagaaattatcaggcaacaagggctcgccagctacgattacgtaagacggagactcaccgccgaggacctcttcgaggcccgtattattagtctggagacttataacctgctgcgcgaggggacaagaagcttacgagaagccttggaggccgaaagcgcctggtgctatctatacggcaccgggtccgttgccggcgtgtatctgcccgggtcacggcaaaccctttcaatttaccaggccctgaaaaaggggctgcttagcgcagaggtggcccgccttttactcgaggcccaggccgctacaggtttcctgttggaccccgtaaaaggcgaacgactaacagtggacgaagctgtgagaaagggtctggtcggccctgagttgcatgataggctcctgagtgctgagagagccgtgaccggctatcgggatccttatactgagcagacgatcagcctttttcaagccatgaaaaaagaactgatccctacagaggaggcattaagacttctagacgcacagctggctaccgggggcattgtggaccccagattggggttccatctacccctagaagtagcctatcagcgtggatacctgaataaagacactcacgatcagctctctgaaccaagcgaagtgcgttcctacgtggatccgtccactgatgaacgccttagctacacccagcttctacggaggtgtagaagagatgacggtacggggcagttactcctacccttgagtgatgccaggaagttgacattcaggggcctccgtaagcagatcaccatggaagagctggttcgatcccaggttatggacgaagcaaccgccttgcagctacgtgaaggtctcacttcaattgaagaggtcacgaagaacctgcagaaattcctggagggtacatcgtgcattgctggtgtgtttgtagacgctaccaaggaaagactgtccgtctaccaggccatgaagaagggtatcattcgcccagggaccgcctttgaacttctggaggcgcaagccgccacaggctacgtcatcgaccccattaaaggtctgaagctcacggttgaggaagcggtccggatgggtatcgtgggccctgaattcaaggacaaactgctcagcgcggaacgggccgtcacagggtataaggacccatattcaggcaaacttatctcgcttttccaggcgatgaagaagggcctgatactcaaggaccacggaatcagactcctggaggcccagatcgctacagggggcattatagaccccgaggagagccataggttaccagttgaagtggcttacaagcgtggtctgttcgacgaggagatgaatgaaatacttacagacccctcagatgacaccaaggggttcttcgacccgaataccgaggagaatcttacatatcttcaactgatggagcgatgtattactgatcctcagaccggcctatgcctcctccccttgaaagaaaagaagcgagagcgcaaaacaagtagcaagtcgagcgtgagaaaaagacgggttgtaattgtggatccggaaactggaaaggaaatgtccgtgtatgaggcgtatcgaaagggcctgatcgaccaccagacctatttggaattaagtgagcaggaatgcgagtgggaggagattactatatcttcctcagacggagtggtgaaatcgatgatcatcgatcggagatcaggccgccaatatgacatcgatgatgctattgcaaaaaacttgatagatagatcagccttagatcaataccgggcaggaaccttgtccataaccgaatttgccgacatgttatctgggaatgctggcgggttccgatcgcggtctagctccgttggtagttcaagtagctacccgatcagccccgccgttagccggactcagctcgcaagttggtctgatcccacagaggaaactggtcccgtagctgggatcctcgacaccgagacactcgagaaagtgtcaattacagaagcaatgcatcggaatttggtcgataatatcactgggcaacgtttacttgaggcccaggcatgtaccggagggattatcgatccctcaacaggggaacgcttccctgtgacagacgccgtgaacaagggcctagtcgacaaaataatggtcgaccggataaacctggcccagaaggctttttgtgggttcgaagatcctaggactaagaccaaaatgtcggccgcccaagccttaaagaaggggtggctgtactatgaggctgggcagcgcttccttgaagtccaatatcttactggaggccttattgagcccgatactcccgggcgcgtgcctctcgatgaggccctgcagagaggtactgtggatgctagaacagctcagaaacttagggacgtaggtgcctactcaaaatatctgacctgtcctaaaaccaagctaaagattagttataaggatgccctcgaccggtccatggtggaggagggaacaggactgcgccttctcgaagccgctgcgcaatctaccaagggctactacagcccttattcagtgagcggaagtggaagcaccgctgggagcagaactggcagcaggacaggcagtagagctgggtctaggcgcggcagctttgacgcaaccggaagtggcttcagcatgacctttagttcgtcttcctatagctcatccgggtacggtaggcgttacgcctccggttcttctgcaagtctgggagggcccgagtccgccgtcgcttag

SEQ ID NO: 199815 - DNA, 13725 bp, synthetic construct
  misc_feature 1..13725: note = Description of Artificial Sequence: Synthetic coding sequence
  source 1..13725: mol_type = other DNA
atgagcggcgaggacgccgaggtgcgggccgtgagcgaggacgtgtcaaacgggagtagcggctccccaagccccggtgacactctaccctggaacctggggaagacccagaggagtcggcggtctggcgggggtgccgggtcaaatgggtccgttctggaccctgccgagcgcgctgtgatccgcattgccgacgagcgcgatagagtacagaagaaaacatttaccaagtgggttaataagcacctcattaaggcccagaggcacatcagcgacctctacgaggacctaagagatggacataatctaatctctttgcttgaggttttgagcggggatagccttcccagggagaagggacgtatgcggttccacaaactccagaacgtgcagatcgctctggactatctacgacacagacaagtcaaactagtgaacattagaaatgacgatatcgcagacggcaatcccaaactcacgctgggactgatatggaccataattttacatttccagatatccgacatacaggtcagcgggcagtctgaggacatgacagcaaaagaaaagctgttactttggagccagagaatggtggagggttatcagggtttgcgctgcgacaacttcacttcttcctggagggatggtcgcctcttcaacgcgattattcatcgtcacaaacctctgctgattgacatgaacaaagtgtatcggcagaccaacctggagaacctcgatcaagctttttccgtcgcagagcgggacctgggcgtcactaggctgctggatccagaggatgtggacgttccccagcccgacgaaaagagtatcatcacgtatgtaagcagcctctacgatgctatgccccgggtgcccgatgtgcaggatggtgtgcgggccaacgaattacaattaagatggcaagagtatcgcgaactggtgctactgcttctgcagtggatgagacatcataccgcggcattcgaggagcgaaggtttccctcctcatttgaagagatcgaaattttgtggtctcagtttttgaaattcaaagagatggagttacctgcaaaggaagctgacaaaaataggtctaagggtatatatcagtctctggagggcgccgtgcaggcagggcaactaaaggtaccccccggctaccatcccctcgatgtcgagaaggagtggggaaaattacacgttgctattctagagagagagaaacagctgaggtcagagtttgagcgactggaatgtctgcagcgtatcgtcacgaagttgcagatggaggcaggactctgtgaagaacagctcaaccaggcagatgccctactgcaatccgacgtgcggctgcttgctgcaggcaaagtgccccagagagccggcgaggtcgagcgcgacttagacaaagcggatagtatgattaggttactttttaatgacgtgcagactctgaaggacggccgccatccccaaggagaacaaatgtatcgcagggtgtaccgactccatgagcgcttggtggctattcggactgaatacaacttgagacttaaggccggcgtggccgccccggctacgcaggtggctcaggtgactcttcagtcagtgcagcgcaggcccgagttagaggactcaactctgaggtatctgcaggaccttctcgcatgggtcgaggaaaatcaacaccgcgtggacggtgctgaatggggtgtggaccttcccagcgtcgaggcccagctcggcagtcatagaggtcttcaccagtcaatcgaggagtttcgagctaagattgagcgcgcaaggagcgatgaagggcaattatcacctgccaccagaggggcctaccgcgactgcctcggcaggctcgatctgcagtatgctaagcttctgaactcttctaaagctcgactgaggagtcttgagtcactgcattcattcgtagcggccgcaaccaaggaactgatgtggttaaatgaaaaggaagaggaggaggtcggtttcgattggtcggaccgaaacactaacatgaccgctaaaaaagaaagttacagcgctttgatgagagaattggagttgaaagagaagaagatcaaggagctgcagaatgcaggagaccggctcctgagagaagatcatcccgccaggcccacagtcgagagtttccaggctgccctccagacccagtggtcctggatgttacagctttgctgttgcattgaggcccacctaaaagagaacgccgcctactttcagtttttttccgatgtgcgcgaggcagaggggcagctacagaagttacaggaggcgctgaggagaaagtactcctgtgacaggtctgccaccgttactcgccttgaagatctgcttcaggacgcccaggatgaaaaggagcagctgaatgagtataaaggccacctctccgggctcgctaagcgggccaaggctgtcgtgcagctcaaacctcgtcacccagcccacccaatgcggggacgcctcccgcttctggctgtctgcgactacaagcaggtcgaagtgacggttcacaagggggacgaatgtcagctggttggacccgcacagccctcccattggaaggtgttgtccagttctggtagcgaggcagctgtgccttctgtgtgtttcttagtgcccccaccaaatcaggaggcccaagaagcagttaccagattggaggcccaacaccaggctctagtgacattgtggcatcagctacatgtcgacatgaaaagcctattggcctggcagtctttgcgccgtgacgtgcagctcatcagatcctggagcctcgcaacctttaggaccctgaaaccagaggagcagcggcaggctctgcacagcctcgagctgcattaccaagccttcctccgagattctcaggatgccggcggattcggccccgaagatagactcatggcagaaagggaatacggcagttgttcgcatcactaccagcagctgttacagtcattagagcagggggcccaggaagagtctcgctgccagcggtgcatttcagaactcaaggacatcagactgcagctcgaggcatgtgaaactagaacagtacatcgtttgcgcctcccgctcgacaaagaacccgctcgggagtgtgcccaacgcattgcagagcagcaaaaggcccaagctgaggtggagggcttaggtaagggagtagctagacttagcgcagaggccgagaaagtcttggccctacctgagccaagcccagcagcaccaactctgcgttcggagcttgagctgacactgggaaaattggaacaggtgcgtagtctctccgcaatatatttggagaaattgaaaacaatttccctggtcatccgcggcacccaaggcgcggaagaagtactccgagcccacgaagaacagctcaaagaggcacaggccgttccggcgaccctgccggagctggaagcaaccaaggcgagcctcaaaaagttgcgggcccaggctgaggcccagcagccaacctttgatgccttgagagacgagttgcgtggcgcccaggaggtgggtgaacggttgcagcagcggcacggggagagggacgtggaagtcgaacggtggcgagaaagggtggcacagcttctggagcgatggcaggctgtactggcgcaaactgacgtgaggcagagggagcttgaacaactcggcagacagctgaggtactaccgggagtcagctgatccacttggcgcctggttgcaggatgccagaagacggcaggagcagatccaggcaatgcccttagctgactctcaggcggtacgggaacagcttaggcaggaacaggccctccttgaagagattgagcgtcacggtgaaaaggtggaggagtgccagaggtttgctaaacagtatattaacgccatcaaggactacgaactccagctagtaacatacaaggcccagttggagcctgtggcctcaccagctaagaaacctaaagtccagtccggaagcgagagcgtcattcaagaatatgtggacttgcggactcactattccgaactgacgacactcacaagccagtacataaagttcatctccgagaccttgaggagaatggaggaggaagagcgcctggccgagcagcagcgagcagaggagagagagcggttagcagaggtcgaagcagccctcgagaaacagagacagttagcggaagcccacgctcaggccaaggcacaggccgagcgggaagctaaggaactgcagcagaggatgcaagaggaagtcgttcgtcgggaagaagctgccgtcgacgctcaacagcagaaaagaagcatccaggaggaactgcagcagcttcggcagagctcagaagcagaaatccaggccaaggcacggcaggccgaagcggcagagcggtcaagactacgaatcgaggaagaaattcgggtcgtacgactgcaattagaagccacagaacgtcagagggggggggccgaaggggaattgcaggctttgcgagcccgcgcggaggaagccgaggcccaaaaaagacaggcccaggaggaagccgaacggctccggcgacaggtgcaggatgaaagtcagagaaaaagacaggcagaggtggaactggcaagtagagtaaaagctgaagccgaagccgccagggaaaaacagcgagcgctacaggcccttgaagagctgcgattgcaagctgaagaggccgagcgaaggctgaggcaggccgaggtggagcgggcacggcaagtgcaggttgcactagagactgcacaaagaagtgctgaggccgagcttcaatcaaagcgcgcctcttttgctgagaagactgctcagctcgaacgatcactccaggaagagcacgtcgcagtggcccaactccgggaggaagccgaaagaagggcccagcagcaggccgaggccgagcgcgcccgggaggaggcagaaagagaacttgaaagatggcagcttaaggccaacgaggccctccgcctgcgcttgcaggcagaggaggtagcacagcagaaatccctggctcaggccgaagccgaaaagcagaaggaggaagcggaaagagaagcaaggcgaagaggcaaagcggaggagcaggccgtgcgccagcgagaactggctgagcaggagctggagaaacaacgccagttagcagagggcaccgcgcagcagagactcgctgcagagcaggagctcatacgcctcagggcagagaccgagcagggcgagcaacagcggcagctgcttgaagaggagctcgcccgcctccagcgggaggccgccgcagcaacccagaagcggcaggagctggaggctgaactggcgaaagtgcgggccgagatggaagttctcctggcgtcaaaggcaagggccgaggaggaaagtcggtccacttccgagaagagtaaacagcggctagaggccgaggctggacggttcagagaactcgctgaggaggcggctcggctgagggcccttgcagaggaagcaaagaggcagagacaactcgccgaggaggatgccgctagacagcgtgccgaggccgagcgggtgttagctgagaagttggctgcgattggcgaagccaccaggctcaaaaccgaggctgaaatcgcactcaaagaaaaggaggctgaaaacgaacggctcagaaggctcgcagaggacgaggcgttccagaggcggagactggaggagcaagccgcgcagcacaaggccgacatcgaagaacgcctcgctcagctgcgcaaggcctctgactctgagcttgagcgacagaagggtttggtcgaagacactcttagacagcgtcgccaggtggaggaagagattctggctctaaaggcatcttttgaaaaagccgcagcaggcaaggccgaattagaactcgagctgggaaggatcagatccaacgccgaggatacgctgcggtccaaggaacaggccgagttggaggccgcacgacagagacagctcgcggccgaagaagaacggcggagaagggaggcagaagagcgcgttcaaaaaagcctggcagccgaggaggaagcagcgcggcagcgaaaggctgcgctggaggaggtagagcgcctgaaggccaaggtcgaggaagccagacgtctgagagaaagagctgagcaggaaagtgcacgccagctgcagctcgcgcaggaggctgcgcagaagcggcttcaagcggaggaaaaggcccacgccttcgccgtgcagcagaaggaacaggagctgcaacaaactttacaacaggaacaaagcgttttagatcaactgcggggggaggccgaggccgcccggcgcgcagctgaagaggcagaggaagctcgggtccaagctgaaagggaagcggcgcaaagcagaagacaggtggaggaggccgaacgactcaagcaaagtgccgaggagcaggcccaggcccgtgcgcaggctcaggcggccgctgagaagctgaggaaggaagccgagcaggaagcagcgcgccgcgctcaggcggaacaggctgccttgcgccagaagcaagcagctgacgctgagatggagaagcataaaaagttcgctgaacagacattaaggcaaaaggcacaagtggagcaagaactgactactctgcgactgcaactagaagagacagaccaccagaaaaaccttctcgacgaggaactccagcgcctaaaagccgaagccactgaggcggcacgacagcggtcccaggtcgaagaagagctgttctccgtgcgggtgcagatggaggagctatcaaagctcaaggccagaatcgaagctgaaaatagagcactgattttacgtgataaagataacacacagagatttttacaagaggaggcggaaaaaatgaaacaggtagctgaggaggccgctcgactgagcgtggctgctcaagaggctgccaggttgcgtcagctcgcagaagaagatttagcacagcagagagccctcgctgagaaaatgctgaaagaaaaaatgcaggccgtgcaggaagcgactcgtctgaaggcggaagccgagctgttgcaacaacagaaagagctggcacaggagcaggcaaggaggctgcaggaggataaagagcagatggcccagcagttagcggaggagacgcaagggttccaaaggaccctcgaggctgagcgtcagcggcaactggaaatgtcagctgaggccgagaggttaaagctgcgggtcgccgaaatgtcgcgggctcaggcccgtgcggaggaggacgcacagaggttccggaagcaagcagaagagataggtgagaagttacacagaactgagctagcgacccaggagaaggtcacattggtgcagaccctagagatacagcggcagcagagtgatcacgacgcggagcggctgcgcgaggccatcgctgagcttgaaagagagaaggagaagttgcaacaagaagctaaactcttgcagttgaagagtgaggagatgcagacggttcaacaggagcagctgctgcaggaaacccaagctctccagcagtcctttctgtccgaaaaagattctctcctgcagagagaacgttttatagagcaggagaaggcaaaactggagcaactgttccaggatgaggttgcaaaggctcaacagcttagggaggagcagcagcgccagcaacagcagatggagcaggaacgccagcgtctagttgcctcaatggaagaggctcgcagacggcagcatgaggccgaggagggggtcagacggaaacaggaggaactgcaacagttagagcagcaacggaggcagcaggaagagctcctggcagaggaaaaccagcggctgcgggagcaactccagctgttagaggagcaacacagagctgctctcgcacatagcgaggaagtgacggcctcgcaggtcgcagccacaaaaaccctgccgaatggacgcgatgcgttagacggtccagctgctgaagctgaaccagagcattcctttgatggcctgcggagaaaggtgtcagcccaacggctccaggaagccggtatcttgtctgcggaggagctccagcgccttgctcagggccacactactgttgatgagctggctcgcagagaggatgtgagacactacctgcagggacgtagtagcattgcagggttactgctgaaagcaacgaacgagaagctcagtgtgtacgcagccctccaaagacagttgctgtctccagggaccgccctgatccttctggaggctcaggctgcctctggtttcctcctcgaccccgtaaggaaccggcggttgacagtgaatgaagccgttaaggagggagtggtcgggcctgagctccatcacaagctcctgagtgccgagcgcgccgtcacagggtacaaagatccctataccggccagcagataagcctgtttcaagcaatgcagaagggattgatagtgagggaacatggtattaggttgttagaggcccagattgccactggtggagttatagacccggtccattctcacagggtaccagtcgacgttgcgtaccgccgggggtacttcgatgaggagatgaatagggtcctagcggatccttccgacgacacaaagggcttcttcgatcccaacactcatgagaacctgacatacctgcagctgcttgagcgctgtgtagaagatcccgaaaccggtctatgtttactcccactcactgacaaagccgctaagggtggggaactcgtgtatactgactcagaagccagggacgtcttcgaaaaagccacagtttccgcccctttcgggaagtttcaaggaaagaccgtaacgatctgggagataatcaacagtgagtacttcaccgccgagcagcgaagagatcttctaagacaattcaggaccggcagaatcaccgttgagaagatcatcaaaattataatcacggtcgttgaggaacaggagcaaaagggcaggctctgcttcgaggggctccgctcccttgtgcctgccgcggaactgctggaatctagggttatcgaccgtgagctttatcagcaactccagcgaggtgaacgctctgttagggacgtggcagaggtagacaccgtgcgccgcgctcttcggggcgccaatgtaatagcaggcgtctggctagaggaggcaggccagaaactgtcaatatacaacgctctgaaaaaagacctgctgccatctgacatggctgtggccctgctcgaagcacaagcggggactgggcacattatcgaccctgctacgagtgcgaggctgaccgtagacgaagcagtgcgagctgggcttgtcggccccgagttccacgaaaagcttcttagtgccgagaaggctgtcacgggttacagagacccctacactgggcagagtgtgtccttgttccaggccctcaaaaaaggactgatcccacgtgagcagggcctccggctcctggacgcccagctgagcactggtggaattgtcgatccgtcgaaaagtcaccgcgtgcctctcgacgttgcctgtgctcgcggatgcctggatgaagaaaccagtagggccctcagcgccccaagggcggatgcaaaggcctattcggacccgtctacaggggagcccgccacatacggcgagctccagcaacgatgcagaccagaccagttgacagggctgtctttactccctctgagcgaaaaagccgccagagccagacaggaggagttatatagcgaactgcaggcgagagagacattcgaaaagactccagttgaggtgcccgtcggtggattcaagggacggaccgtgaccgtctgggagttgatttcctcagagtactttacagctgagcagaggcaagagctcctacggcagtttaggaccggtaaggtgaccgtggagaaggtcataaaaatccttatcactatagtggaggaagtcgagacactacgccaggagaggttaagctttagcggcctgagggcccctgtgccagccagcgagctgctcgcatcaggcgtactgagccgagctcagtttgagcaattgaaggatgggaagaccaccgtcaaagacctcagcgagctcggcagtgtgagaacattactccaggggtccggttgcctggccggcatttacttagaagacacgaaagagaaggtaagtatctatgaggcgatgaggcgaggtctcctacgcgccaccacggctgctctacttctggaagcccaagcggctacagggtttttggtggaccccgtgcgcaatcagcgcttatacgtgcacgaagccgtcaaagccggagtcgtgggtcccgaactccacgagcagttactgagcgcagagaaggccgtgacaggttaccgggacccatactcagggagcacaatttctcttttccaagcgatgcagaaaggactcgtattgcgacagcacggcatcagattgctggaagcccagatcgccaccggggggatcatcgaccctgtacatagccacagggtcccggttgatgtcgcctatcagaggggatacttctcggaagagatgaaccgtgttcttgcggatccctccgatgacaccaagggcttttttgaccccaacacccatgagaatttgacttaccgacagctgctggaaaggtgtgtcgaagatccagaaaccgggctgcgcctcctgcccttaaaaggagccgagaaggctgaagttgtcgaaacgacccaggtctacaccgaggaagagacacgaagggcctttgaggaaacacaaattgacatccctggcggaggctctcacggaggctccactatgtccctgtgggaggtgatgcagtccgacctgattccagaagaacagagagcacagttgatggctgattttcaggccgggcgcgtgacgaaggaaagaatgattatcattatcattgaaattattgaaaaaacagaaattattcgtcagcaggggctcgcgagttacgactacgtacgccgtagactgacggctgaagatctgttcgaagcaaggatcatttcactcgagacttataacttactgagagagggcactagatccttgcgcgaagccctggaggccgagagtgcgtggtgttacctttacggaacagggagcgtggcaggtgtatacctgccgggttcgcgacaaaccttgtcaatataccaggcactcaaaaagggtttactgagcgccgaggttgcacgtctgctcctggaggcgcaagccgcaaccggttttctgttggatcccgttaaaggcgagaggctgacagtggacgaggccgtgcggaagggactggtgggccctgagttgcacgaccgactgctcagtgctgagcgggccgtgaccggctatcgggacccctatactgaacaaaccatctctctgtttcaggcaatgaagaaggagctcatccccaccgaagaggccttgcggctcttagacgcccagttggcgacaggcggaatagttgatccacgcctaggattccaccttcctttggaagtggcataccaaagggggtacttgaacaaagatacccatgaccaactgtcggagccctcggaggtgcgatcttatgtggatccatccaccgatgagaggctgagttacacacagctgttgaggcggtgtagaagggacgatgggaccgggcagctgctgttgccactgtcagacgccaggaaactgacgttccgcgggcttcggaagcagatcactatggaggaactagtgaggtcccaggtgatggatgaggccactgcgctgcaactgcgagaggggctgacatcgatcgaagaggtgaccaagaacctgcagaagtttctggaaggcactagttgcattgccggggtgtttgttgatgccacaaaagagcgtctgtcagtttaccaagccatgaaaaaaggaatcattcggcctggtacagcttttgagctcctggaagcccaggcagccacaggttacgtgatagacccaatcaagggcctgaaacttaccgtggaggaggccgtgaggatgggcattgtgggccctgagttcaaagataagctcctgagcgccgagcgcgccgtgacggggtataaagatccctattctggcaaacttattagtctgttccaggctatgaagaaaggcctaattctgaaagatcatggcattagactcctggaggcccagatcgctacaggcggtattatcgaccccgaggagtcccaccgcctgccggtagaggtcgcttataaacgaggcctatttgatgaggagatgaacgagattctgaccgacccgtctgacgacaccaaaggcttttttgacccaaataccgaagagaacctaacatatcttcagctgatggagaggtgcatcaccgaccctcaaacagggctctgtctgctccccctcaaagagaagaaacgcgaaagaaaaacatccagcaagtctagtgtgaggaagcgccgagtggtgatcgtggatccggagaccggcaaagaaatgtccgtctatgaagcttaccgcaaaggccttattgatcaccagacctatttggagctatcggaacaggaatgtgaatgggaagaaattactatttcgtcaagcgacggtgtggtaaaatcaatgatcatcgatcgacggtcaggacgacagtacgatatcgacgacgccatagctaaaaatttgattgaccggtctgccttggaccaatatagggcaggcaccctctcgattacagaattcgcagacatgctttcaggcaatgctgggggctttaggtcccgttcttcttcagtcggatcatccagcagttatccaatctcacccgccgtttcccgcacacaactcgctagctggtctgatcctactgaggagacaggacccgtggctggaatccttgacacagagactctggaaaaggtgagtatcactgaagccatgcatcggaaccttgtggataacatcacaggtcagagactgttggaagcccaggcatgtaccgggggcattatagatccatccacgggcgagcgctttccggtcactgacgctgtaaacaagggactagtggataagatcatggtggatagaatcaacctcgcccagaaggccttttgcgggttcgaggatcccaggaccaagaccaaaatgtccgccgctcaagcccttaagaaaggctggctgtactatgaggccggccagcgctttctggaggttcagtatttaaccggcggcctgattgaaccagatacacctgggcgagtgccgcttgatgaagcgctgcagagaggtacagtagacgcacgaaccgcccaaaagctgcgggacgtaggcgcttattccaaatacctgacttgcccaaagaccaagctcaagatcagttacaaggacgcactcgatcggtccatggttgaggagggaacaggccttcgcttgctggaggctgccgcccagtccacgaagggatattactctccctattccgtatctgggtccggctctactgcggggtcaagaaccgggagccgcactggatcccgtgcgggaagtagaaggggatctttcgatgcaactggttcaggtttttctatgaccttttcctctagctcatactcctcctcaggctatggtaggcgctacgcgtctggctctagcgcgagcctcggggggcctgagtcagcagtggcatag

SEQ ID NO: 199816 - DNA, 13713 bp, synthetic construct
  misc_feature 1..13713: note = Description of Artificial Sequence: Synthetic coding sequence
  source 1..13713: mol_type = other DNA
atgagcggcgaggacgccgaggtgcgggccgtgagcgaggacgtgtctaacggcagtagcggcagcccgtctcccggagacacgctgccatggaatctgggtaagacccaacgctccagacggagcggaggaggtgcaggctctaatggaagcgtgctggatccagctgagcgcgctgtaattcgtatcgccgacgagcgagaccgtgtccagaaaaagacctttacgaagtgggtgaacaagcaccttattaaagctcaaaggcacatttccgacctttacgaggatttaagggacggacataacttaatttccctgttagaggtgttgtcaggtgatagtctgccacgagagaagggccgtatgcggttccataagcttcagaacgtccagattgcgttagattacctgcgtcataggcaggtcaagctcgtgaacatacgcaacgacgatatagcggacggcaaccccaaactgaccctgggcttgatctggactattatcctgcactttcagatttcagacatccaagtctctggccagagtgaggacatgaccgccaaggagaagctgttgctatggtcccagcggatggtcgagggataccagggcctcagatgtgataactttaccagctcttggagggatggccgtctgtttaatgcaattattcataggcataagccactgctgatcgacatgaataaagtttacaggcagaccaacttagaaaacctggatcaggctttttctgtcgctgagcgggacctgggggtgactagacttcttgatccagaggatgttgatgtgccccagcccgacgaaaagtccatcattacctatgtgagctccctttatgatgccatgccacgggtgcctgatgtgcaggacggggaactgcaactccggtggcaggaatacagagaactggtactcttgctcttacagtggatgagacaccacacagccgcctttgaggaacggcgctttccatcttctttcgaggagattgagatcctgtggtcccaatttttaaaattcaaagagatggaactacctgcaaaagaggctgacaagaatcggtcgaaaggcatttaccagagcctagagggcgctgtgcaggccggtcaactgaaggttcctccgggttatcacccactggacgttgagaaagaatgggggaaactacacgtggctatcttggagcgagagaaacaactgcgtagcgagttcgagcgactggagtgtctgcagagaatagtgacaaagctgcaaatggaggccggactgtgtgaggagcagctgaaccaggcagacgcactcctgcaatctgacgttcgactgttagctgctgggaaggtgccacagcgtgcgggcgaagtggagagggacttggataaagcagacagtatgatccggctgctgtttaacgacgtccagacattgaaggatggcaggcacccccaaggggaacaaatgtacaggcgcgtctatagactgcacgaacgcttggtggcaatacggacagaatacaaccttagactcaaagcaggtgttgccgcacctgctacgcaggtggcccaagtgaccctgcagtctgtgcagagacgacccgaactcgaagactctactctcagatacctgcaggatctgcttgcttgggtggaagagaaccaacaccgtgtggacggcgctgagtggggtgttgatctcccaagtgttgaggctcagctcggttcgcacagaggccttcatcaaagcatcgaagagtttagggctaagatcgaacgagccagaagcgacgagggtcagctttctcccgctactcggggagcttaccgagattgtctggggcgactggacctacagtatgcgaaactcctgaactcaagtaaagcccggctgaggtctctagagtctctgcacagtttcgtggcagctgcaactaaggagcttatgtggctaaatgagaaggaagaggaggaggtcggttttgattggtccgaccgtaacacgaacatgaccgcaaagaaggaaagctactcagcgctcatgagggagttagagctgaaagagaagaaaatcaaagagctccagaatgcgggcgaccgactgctgcgtgaggatcatcctgccagaccaaccgtggagtcttttcaggccgcactgcaaactcaatggagctggatgctccagctctgctgttgcatcgaagctcacctgaaggagaatgctgcttattttcagttcttttctgacgtccgcgaggctgaaggtcagctccagaagctgcaggaagcattgcgccggaagtactcctgtgatcggagcgcaactgtgactaggctggaagatcttctccaggacgcccaggatgagaaggaacaacttaatgaatataaaggacacctgtcgggactggcaaagcgagctaaggcagtagtacagctaaagcctcggcaccccgcccacccaatgagggggagactgccgctcctggcagtgtgtgactacaaacaggtcgaagtgaccgtgcacaagggagacgagtgtcagttagtcgggcctgcacagcctagccattggaaggtgctgtcctccagtggatccgaggcagccgtgcccagtgtgtgctttctggtgcccccacctaatcaggaagcgcaggaggcagtcaccaggctcgaggctcagcaccaagctcttgtcaccctctggcaccaactacacgtagatatgaaatctttgcttgcgtggcagagtctgcgccgcgacgtgcagctcattcgttcatggtccctcgcaacctttcggacactcaagcctgaggaacagcgtcaggcacttcactcattggagctgcactaccaggcgttcctgcgggacagccaggacgcagggggatttggccctgaggataggctcatggctgagcgcgagtatggctcctgttcccatcattatcagcagcttctgcagagcctcgagcagggggcccaagaagagtctagatgtcagcgctgtatcagcgagctcaaagacattcgcctgcaattggaagcatgtgaaacccggactgtacatcgcctgcgccttccgctggacaaagagcctgcccgcgagtgtgcacagagaatcgctgagcagcaaaaagcgcaggcggaggtcgaagggctggggaagggcgtcgccagactcagcgctgaagccgaaaaagtcctcgcccttccggagccgtcccctgcagcacctaccttaaggagtgagctggagctgactctgggcaaattagaacaggttaggtccctgtctgcgatctacctcgaaaagctgaaaacaatttccctcgtgatcagaggcacccagggcgccgaggaggttcttcgcgctcatgaagagcagctaaaggaggcgcaggctgttccagcaacactgcccgaattagaagccactaaggcgtccctcaagaaactgagggcacaggccgaggcacagcagccaactttcgacgcgctgcgtgacgagctgcgaggtgctcaggaagttggagaaaggctccagcaaagacatggtgagagggacgtagaagtggagcgttggagggagcgggtcgcccaacttttagagcgctggcaggcggtgttggcacaaacggacgtgcgacaaagggaattagagcagttggggcgccaactgcggtattatcgggagtcagccgatcccctcggagcctggctgcaggatgcaagacgtcggcaagagcaaatccaagccatgccgctggcggactcccaagctgtgcgtgagcagttgagacaagaacaagctcttctggaagagattgaacgtcatggagaaaaggtggaggaatgccagcgattcgccaagcagtatataaatgccatcaaagactacgaactccagctcgttacctacaaggcccagctcgaaccagtggccagtcctgccaagaaacccaaagtgcagtccgggagcgagagcgtcatccaggaatacgtggatctgcgcacgcattactccgagttaacaacactaacttcacagtatatcaaattcatatctgaaaccttacgacgcatggaagaagaggaacggttagccgagcaacagcgggctgaggagcgcgaaagattagcagaagtggaggcagctctcgaaaaacaaaggcagctagcagaagctcatgctcaggccaaggcccaagccgaacgcgaggccaaagagttgcaacagaggatgcaggaagaggtggtgaggcgcgaagaggccgccgtggacgcccagcaacaaaagagaagcatccaggaggagctgcaacagctacggcagagcagtgaagctgagatccaagccaaggccaggcaggctgaggcggccgaaagatcacgcctccggatcgaggaagaaatacgggtggttagattacagcttgaggccaccgaaaggcagagggggggcgccgagggggaactacaggcattacgggcccgagctgaggaggcagaggctcagaagcggcaggcacaggaagaggctgagcgtctcaggaggcaggttcaggacgaatcccagagaaagagacaggctgaggtggaactggcatccagggtgaaagccgaggctgaagcggcccgggaaaaacagagggccttgcaggctctggaagaattgaggctacaggcagaggaggccgaaagacggctcagacaggctgaggtagagcgggctcgtcaagtgcaggtcgccttggagacagcccagcgcagcgcagaggctgaactgcagagcaagcgagcctcatttgctgagaagaccgctcagctggagcggagcctacaggaagaacacgtcgctgtggctcagctgcgcgaggaagctgaacggcgtgcccagcagcaagccgaagccgaaagagctcgcgaggaggcagaacgagaactggaacgttggcagctgaaggctaatgaggctctcaggctgaggctacaggccgaagaggtcgcacaacagaaatctctcgcacaggctgaggctgagaagcaaaaagaggaggctgagagagaggcacgacggagaggcaaagctgaggagcaagccgtgagacagcgcgaactcgccgagcaggaactggagaagcagcggcaactggcagagggtaccgctcagcagcggctagccgccgaacaggaacttattagactgagagcagaaaccgagcagggcgaacagcagaggcagcttctggaggaagaacttgcgcggctccaacgggaagctgccgcagccacgcagaaacgacaggagctggaggccgaactggcaaaggttagagccgaaatggaggtgttgcttgcctctaaagcgagggccgaagaggaatcccgttccacttccgaaaagagcaagcagcggctggaggccgaggctggtaggtttagggaactggcagaagaggctgctagattgcgtgctctggcagaggaggctaagcgtcagcggcagcttgccgaagaggacgcagcaaggcagagggctgaggcagagcgagtgcttgctgagaagctcgccgcgattggagaggcgaccagactgaagacggaggcagagattgccctcaaggagaaggaagccgagaatgaaagactacggcgccttgcggaggatgaggcatttcagaggcgtagactcgaggaacaggctgcacagcacaaggctgacatcgaggagcggctggcacagctccgcaaggcatcagatagtgagttagagcggcagaaaggtttagtcgaggacacacttcgccagaggagacaggtcgaagaggaaatcctggcactgaaggcatcctttgagaaagctgctgccggcaaagccgagctagaacttgagctgggacggatcaggtccaacgccgaggacacactgcgctctaaggaacaggcagagctggaagcggccaggcagaggcaactggcggctgaggaggaacgcagacgccgtgaggcggaggaaagggttcagaaatcactcgccgcagaagaggaagccgcccgccagaggaaggcagccctggaagaagtggaacgtttaaaggcgaaggtggaagaagcccggaggctccgtgaacgcgctgagcaggaatccgcccgccagctgcaactggcccaggaggccgctcagaagagattgcaggccgaggagaaggcgcacgcatttgccgtccagcagaaggaacaggagttgcagcagacgctgcagcaggagcagagtgtcttggatcaactgagaggggaggcagaagccgctagacgagccgctgaggaagccgaagaggcacgggtacaggcggagcgtgaagccgctcagagcaggaggcaagttgaggaggcagaacgccttaaacagagcgctgaggagcaagctcaggcgagagcccaagcgcaagctgctgcagagaaactgagaaaggaagcagagcaggaagctgccagacgcgcgcaagccgagcaggcggctcttagacaaaagcaagctgcagatgccgagatggagaaacacaaaaagttcgcggaacagacgttgaggcagaaagcacaggtagagcaggaacttactaccttacggctgcagctcgaagagacagatcaccagaaaaatctgctggacgaagagctccagcgtctgaaagcagaggctaccgaggcagcccgccagcgaagccaggttgaggaagaattattctcggtgagagtgcaaatggaggagttgtcgaaactaaaagctaggattgaggctgagaacagggcactgatcctgagagataaggataacacgcagcgttttctgcaggaagaagccgagaaaatgaagcaggtcgcggaggaggccgctcggctaagcgtcgcagcccaggaggccgcaagattacggcagctagcagaggaagacctcgctcaacagcgggctctagcagaaaagatgctgaaggagaaaatgcaggctgtgcaggaagcaacccgcctgaaagccgaggccgaactgctgcagcaacaaaaagaactggctcaagagcaggctagaagactgcaggaggacaaagaacagatggcacagcaattggcagaggaaacccagggctttcagagaaccttggaggcagagcggcagcgtcagctggaaatgagcgcagaggccgagcgcctcaagcttcgcgtggcagaaatgagtagggcccaggcacgagcggaagaggatgcccagcgctttagaaagcaggcagaggagattggtgaaaagctccatcgcacggagctcgcaacacaggagaaagtaaccttagtccaaaccctcgaaattcagagacagcagtcggatcacgacgctgagcggctcagagaggccattgcagaactcgagcgtgagaaagagaagctgcaacaggaagcaaaactgttgcagctcaaatccgaggagatgcaaacagtgcagcaagagcagctgttgcaggagacgcaggcgctccagcagtctttcctctccgaaaaagattccctgctgcaacgggaaaggttcatcgaacaggagaaggccaaactggaacagctgtttcaggacgaggtggctaaggcacaacagttgcgcgaagaacaacagcgacagcaacagcagatggagcaggagcggcagcggctggtggcttcaatggaggaggcgcggaggcggcagcatgaagcggaggaaggagtacggcggaaacaagaagaattacagcaacttgagcagcagcgccggcaacaagaagaacttcttgcagaagagaaccagaggctgagagaacagctgcaactgctcgaagagcagcaccgcgcggccctggcacacagcgaagaggtgaccgcaagccaggtagcagctactaagaccctgccaaatggacgagacgccttggacgggcccgctgcagaggcagaacccgaacattccttcgatgggctgaggcggaaagtgtctgcacagcgcctgcaggaagctggcatcctgtctgctgaagagctccaaaggctggcccagggtcacaccaccgtggatgaactggcccgacgagaggatgtcagacactacctgcagggccgcagcagtattgccggtctgctgctaaaggccaccaacgagaagctttcagtttacgccgccctgcagcgccagcttctgtcccctggaaccgcccttatcctgctggaggctcaggccgcctccgggttcctgctggaccctgttagaaacaggcggctgaccgtcaatgaggctgttaaagagggggtggttggacccgagctgcaccacaagctgctatcagcagaacgggctgtgaccggttacaaagacccttacacaggccagcagatttccctctttcaagccatgcagaaaggattgatagtccgcgagcatgggatccgcttattagaggctcagattgccactgggggggtgatagaccctgtgcatagccaccgcgtgcccgtggatgtggcatacaggagaggctatttcgacgaggaaatgaatcgggttctcgcagatcctagcgacgacactaaagggttctttgacccaaacacccatgaaaatctgacctacctgcagctactagagcggtgtgtggaggaccctgagactggcttgtgccttctgcctcttacagacaaggccgccaaagggggggagttggtctacaccgacagtgaggcgagagacgtctttgagaaagctacagtgagcgcaccctttgggaaattccagggcaagaccgtgacaatctgggagattataaatagcgagtatttcacagccgagcagcgccgagatttgctgcgccaatttcgtaccggccggataaccgtagagaaaattattaagataattatcaccgtggtcgaggagcaggaacagaagggacggttgtgcttcgaggggctccggtccctggtcccggcagcagagcttctggagtcccgggtcatcgaccgagaactgtatcagcagctgcagcgaggggagcgctcagttcgcgatgtagcggaggtcgatacagtgcgccgagcactacgaggggccaatgtcatcgcgggtgtttggctggaggaggcaggtcaaaagctgtcaatttataacgctctcaaaaaagatttgctaccttccgatatggccgtggctttgttagaagcccaggccggaactggccatatcattgacccggccacgagcgcacgtctcacagtagacgaggcagtgcgcgcgggcttggttggtccggagtttcatgagaaattgctctctgcagagaaagccgtgacagggtaccgcgatccctacactggacagtccgtatcactctttcaggcactcaaaaaaggcttgatccctagggagcaggggctccgtctgctggacgctcagctgtcaaccggaggcattgtagacccatctaaatctcaccgcgtgcctttggacgtggcttgcgcccgagggtgtctcgacgaggaaacatctcgagctctctctgctcctagagcagatgcaaaagcctactccgaccctagcaccggcgaacccgctacttacggagagctgcagcagcgctgccgccccgaccaactgacaggtctcagcctgctacccctctccgaaaaggccgcccgtgcccggcaagaggagctgtactcagaactgcaggcgcgggagacatttgagaagactcccgtggaggttccagtgggcggttttaaaggacggactgtcactgtttgggagctgattagcagcgagtattttactgccgagcagcgccaggagctgcttcgtcagttcaggactgggaaagttaccgttgagaaggttattaaaattttgatcacaattgttgaggaagtcgagacgttacggcaagagcggctgtctttttctggtctacgcgctccagttcccgcttccgagttgctcgcttctggcgttttatcccgcgcccaattcgaacaactaaaggacgggaaaacaacagtaaaggatctgtccgaactgggcagcgtgaggactctgcttcagggatccggctgtctggccgggatttacctggaggatactaaggagaaggtttctatttacgaggccatgcgccggggcctgctcagggccaccaccgccgccctgcttctggaagcccaagctgctacaggattcctggttgatcccgtgcgaaatcaaagactgtacgtgcatgaggcggtaaaggctggcgtggtgggccccgagctccacgagcagctgctcagtgccgagaaggcagtgactggataccgagacccctatagtggatctaccatttcactctttcaagccatgcagaagggccttgtattacggcaacacgggattcgcctgcttgaagcgcagattgcgacaggcggaattattgatccagtgcactcacatagagttcccgttgacgtggcttatcagagaggctacttcagcgaggagatgaaccgagtactcgctgacccatccgatgacaccaagggtttctttgatcccaatacccacgagaacttaacgtataggcagcttctggagcggtgcgtagaagaccccgagactggactcaggctactgccacttaaaggggcggagaaggcagaagtagttgagaccactcaagtgtatacagaagaagagacacggcgggcctttgaggagacccagatagatatcccgggaggggggtcacacggcggctccacaatgtcactatgggaagtcatgcagtctgacctgatcccagaggagcagcgcgcccagcttatggccgactttcaagcaggacgggtaacaaaggagagaatgatcataatcataatcgaaatcattgaaaagacagagataatcaggcagcagggactcgcttcatatgactatgtccgtagaaggctgaccgccgaagacctattcgaagccagaattatatctctggaaacctacaatctgctcagggaaggcacccgttctctgagagaggcactggaggccgagtcagcttggtgctatctctacggaacaggaagcgtcgcaggagtctatctgcccggcagccgtcagaccctttcaatctaccaggctctgaaaaagggattgctttcagccgaggtcgcacggctcctgttggaagcccaagccgcaactggattcttgctggaccccgtgaagggcgaacggcttacagtggatgaggctgtgcgcaaaggtctcgtgggacctgaacttcatgacagattactttccgctgaacgggcagtaaccgggtatagggatccctatacagagcagacaatttcactgtttcaggccatgaaaaaggagctcattcccactgaggaggccctacgccttctagatgctcagctcgctacaggaggtattgtggatccaagactaggatttcacttgcccctcgaagtagcctaccaacgggggtatcttaataaggatacgcatgaccagctgagtgagcctagcgaagtcaggagctatgtggatcccagcacggacgagcgcctgagctacactcagctcttaagaagatgtaggcgcgacgacggcacaggccagctgctactgcccttgtcggatgcccgtaagcttacgtttcgtggcctccgcaagcaaatcaccatggaggagctagtgcggtcacaggtgatggacgaagctacggctttgcagttgcgggagggcctcacctctatagaagaggtgacaaagaatcttcagaaattcttagagggcacaagttgcattgctggtgtgttcgtggacgctaccaaagaaaggttgagcgtgtaccaggccatgaaaaaaggtatcatcagacccggaacagcttttgagctcttggaggctcaagcagccaccggctacgttatcgaccccataaaggggctaaagcttaccgtggaagaggccgttaggatgggaattgtaggacctgaatttaaggataaactcctctctgcagaaagagcagtaacaggttacaaagacccctacagtgggaaacttatttctctgtttcaagccatgaaaaaaggtctgatcctgaaggaccacggcataagattactggaggcgcagatcgccacaggcggcatcattgaccctgaagagtcacaccgacttccggtggaagtggcctataagagggggctattcgatgaggagatgaacgagattctgacagatcccagcgacgacacaaagggattcttcgacccaaacactgaggagaacctcacgtatctccagctgatggaacggtgtataaccgacccacagacaggactttgtctcctgccactcaaggagaagaaacgggagcggaagacctccagcaaatcaagcgtgagaaagagaagggtggtgatcgtggaccccgagaccggcaaagagatgtccgtgtatgaagcataccgcaaaggcctaatagatcatcagacctatctcgagctgtcagaacaagagtgcgaatgggaggagatcacgatttcctctagcgacggtgtggtcaaaagtatgataatcgacagaaggtcaggcaggcaatatgacatagacgacgctatcgccaagaatttaattgatcggtccgcactcgatcagtatcgagctgggactctgtcgatcaccgaattcgccgatatgctgtcagggaatgccggagggttccgctcccggtccagtagcgtgggctcatcttcctcatatccgatctcgccagctgtcagcaggacccaactggcctcatggtctgacccaacagaagagacaggaccggtagcaggaatactcgacacagagactctcgagaaggtaagtattacagaggccatgcaccggaacctcgtggataacatcaccggacagcggcttttagaggcccaggcctgcacaggcggaatcatcgatcctagcaccggtgaacgcttccccgtgaccgacgccgtcaataaaggcttggtggacaagatcatggtggatcgcattaacctcgcccaaaaagctttttgtgggtttgaggatccacggacaaagacgaaaatgtctgccgcccaggccctcaagaaaggttggctctactatgaagctggacagcgttttctggaggtacaatacctgactggtggccttatcgagccggacacccccggcagagtcccactcgatgaggctctccagaggggtactgttgatgcacgaacagcccagaaacttcgggatgtgggagcctatagcaaatatctcacttgtccgaagacaaagctcaagattagctacaaagacgccctggacagaagcatggttgaagagggaacgggccttcggttgctggaagcggccgcgcagtctactaaaggctattattctccttacagcgtgtccggttccggctccacagccggaagtcggacagggagccgaacagggagccgagccggtagtcgccgagggagtttcgacgctaccggttccggttttagcatgactttcagtagctctagttatagctctagcggatacggccgacgatatgcttctgggtcttctgccagcctcgggggccctgaatcagctgtggcgtag

SEQ ID NO: 199817 - DNA, 1503 bp, synthetic construct
  misc_feature 1..1503: note = Description of Artificial Sequence: Synthetic coding sequence
  source 1..1503: mol_type = other DNA
atggccaccgtgatccccggcgacctgagcgaggtgcgggacacccagaaggtgccgtccgggaaacggaaaagaggagagacaaaacctcggaagaacttcccttgtcagctctgtgataaagccttcaatagcgttgagaaacttaaagtgcactcctactcacatactggcgagcgtccttacaagtgcatccaacaagactgtacaaaggcattcgtgtcaaagtataaacttcagcgccatatggccacccacagccccgagaaaactcacaagtgcaactattgcgaaaaaatgttccaccggaaggatcacctgaaaaatcacctgcacactcacgacccgaataaggaaacctttaagtgcgaagagtgtggaaaaaattataacacaaagctcggtttcaaacgacatctggcactgcatgccgccacttctggcgacctgacctgtaaggtctgtttgcaaacattcgaatctacaggggtgcttctggagcatctgaagtcccacgctggtaaatcaagcggaggcgtaaaagagaaaaaacatcagtgtgaacactgtgataggcggttttacacacggaaagacgtgagacgacacatggtagtacacactggacggaaggacttcctgtgccagtactgtgctcaacgatttgggcgtaaggatcacctgacccgacacatgaaaaagtcccacaatcaggaactactgaaggttaaaactgaacctgtggatttcttggatccattcacttgcaatgtctccgttccgattaaagacgagcttctgcctgtgatgagccttccaagctcagaactgcttagtaaaccattcaccaatacactccagttaaacctttataatactccctttcagtccatgcagtcaagtggctctgcacaccagatgataacaactttgcctcttggaatgacctgtcccattgacatggacaccgtacaccctagccaccacttatcgttcaagtacccattcagtagcacctcatacgccatttctatacccgagaaggaacagccccttaaaggcgagatcgaaagctacttaatggaattgcagggcggcgtgccatccagcagtcaggacagccaagcgtccagctccagcaagcttgggctggacccccagatcggtagcctggacgatggggcaggtgacctgtcgctctccaagagcagcatatcaatatcagaccccctgaatacacccgctttggattttagtcaactgtttaactttattccgctaaatgggccaccctacaatcctctgtccgttggctctctgggaatgtcctatagtcaggaggaggcgcattccagcgtttctcagcttccaccccagacccaagacttgcaggatcccgccaataccattggcctgggctcattgcattctctgtccgcagccttcacctcaagcctctcaacttccactactctgcctaggtttcatcaagcgtttcagtag

SEQ ID NO: 199818 - DNA, 1257 bp, synthetic construct
  misc_feature 1..1257: note = Description of Artificial Sequence: Synthetic coding sequence
  source 1..1257: mol_type = other DNA
atggccacccacagccccgagaagacccacaagtgcaactactgcgagaagatgttccacaggaaggaccacctgaagaaccatctgcatacccatgaccctaataaggagacgtttaaatgcgaagaatgcggcaagaattacaataccaagctaggtttcaaaagacacttggcattgcatgccgcaacaagtggcgaccttacttgtaaggtctgtttgcagacatttgagtctaccggggtgctgttggagcacctgaaatcccacgctggcaagagcagcggaggcgtgaaagaaaagaagcatcagtgcgagcactgcgatcggcgcttctacactcggaaagacgtgcgcagacacatggtggtccacaccggcaggaaagacttcctgtgtcaatattgcgctcagcggtttggaaggaaggaccacctgacccgtcacatgaaaaaaagccataatcaggaactattgaaagttaagaccgagcctgtcgacttcttggacccctttacgtgcaacgtgtcggttcctatcaaagacgaacttttgccagttatgtcactgcccagttctgaattgttaagcaaacccttcactaacacgctccagctgaatctctacaacactcctttccaatcgatgcagagctctggctcagcccaccagatgatcacaaccctgcccctcggcatgacatgtcccatagacatggacacagtgcatccctcccatcacctgagcttcaaatacccattctccagcacctcatacgccatcagcatccccgagaaggaacagccacttaagggcgagattgaaagctacctgatggagctgcaaggtggagtccccagtagttcccaagacagccaagcctcatccagctcaaaactaggtctggacccgcaaatcggtagcctagatgacggtgcgggcgacctgtcactgtcaaagtcttcaatttcgatcagtgatccactgaacacaccagctctagatttctcccagctgttcaactttattccactgaatggaccgccatataacccgcttagcgtcggaagtctgggcatgtcatattctcaggaagaggcccacagctcagtgtctcagcttcccccacagacacaggaccttcaggaccctgctaataccatagggctgggcagcctgcatagtctctcagccgccttcacatcaagcctgagtacatccaccaccttaccccgattccaccaggcattccaatag

SEQ ID NO: 199819 - DNA, 1503 bp, synthetic construct
  misc_feature 1..1503: note = Description of Artificial Sequence: Synthetic coding sequence
  source 1..1503: mol_type = other DNA
atggccaccgtgatccccggcgacctgagcgaggtgcgggacacccaaaaggtgcccagtggtaaaaggaaaagaggagagaccaaacctcggaagaactttccctgccagctctgcgataaagccttcaattccgtggagaagttgaaggttcactcatattcgcacacgggagaaagaccttacaagtgcattcagcaggactgcaccaaagccttcgtctccaaatataagcttcagcggcacatggccacccacagtccagagaagacacacaagtgcaactattgcgagaaaatgttccatagaaaagatcacctgaagaaccatttacacacgcacgaccccaataaggaaacattcaaatgtgaggagtgtggtaagaattacaacaccaagctgggattcaagcgacatttggcccttcacgccgccacatcaggagatttgacctgtaaggtctgtttacagacattcgagtcaaccggcgtgctgctggaacatctgaaatcacacgccggtaaatcttcaggaggtgtgaaggagaagaagcaccagtgtgagcactgtgatcgtagattctacacgcgaaaggatgtaagaaggcatatggtcgtacatactggccgcaaggatttcctgtgccagtattgtgcccagcgtttcgggcgcaaggaccatctgacaaggcacatgaaaaaaagtcacaatcaggagctgttgaaagtgaagaccgaacctgtcgacttcctcgacccgttcacatgtaacgtgtctgtaccaataaaagatgagctactgcccgtgatgtccctaccaagcagtgaactgttgtcgaagccattcactaacaccttgcagttgaacctctataatacccccttccaatctatgcagtcatcgggtagtgcgcaccagatgattactactttaccacttgggatgacatgcccgatcgacatggatacagtccatccctcccaccaccttagtttcaaatatcctttcagctcaaccagttacgccatatccattcctgagaaggaacagcctctgaagggggagatagagtcctacctcatggagttgcaaggaggagtgccatctagttctcaagactcgcaagcctcgagttcaagcaagcttggacttgaccctcaaataggtagcctcgacgacggggcgggcgatctgtctctttcaaagtcttccatctcaatttctgaccccctgaatacgccggcattagatttctcacaactgtttaactttattccgctcaacggacctccatacaaccccctctctgttggcagcttaggtatgtcctactctcaggaagaggcacacagttccgtgtcccagctaccgcctcagactcaagacctgcaggatccagctaacactatcggtctcggctctctgcactccctgtccgccgcttttaccagctccctttctacatcaaccacgctgcctagatttcatcaggcttttcagtag

SEQ ID NO: 199820 - DNA, 1392 bp, synthetic construct
  misc_feature 1..1392: note = Description of Artificial Sequence: Synthetic coding sequence
  source 1..1392: mol_type = other DNA
atggccaccttcccctgccagctgtgcggcaagaccttcctgacccttgagaagtttactatacataattactctcacagccgcgaacgaccttacaagtgtgttcagcctgattgcggtaaagcgtttgtgagcaggtataagctcatgcggcacatggccacccacagtccccagaagtcacaccagtgcgcccattgcgagaagacttttaaccgaaaggatcacctgaaaaatcatctccagacacacgatcctaataagatggctttcggatgcgaggaatgtggaaagaaatataatacgatgctgggatacaaaaggcacctagccttgcacgccgcatcatccggcgatcttacctgtggcgtttgcgcactcgaattggggtcaacggaggtgctccttgaccacctcaaagcccacgcagaagagaagcccccctccgggaccaaagaaaagaaacatcagtgcgaccattgcgaacgctgtttttatactaggaaggatgttagaagacatcttgtcgttcacacaggatgcaaggacttcctgtgccaattctgtgcacagcgcttcggaaggaaggaccacctgacacggcacaccaagaaaactcattcccaggaacttatgaaggagagcctgcagacaggtgatctgctaagcactttccacaccatcagtccaagttttcagctgaaagccgccgccctcccacccttcccactgggagcatccgcccaaaatggactcgcatcaagcctgcctgcggaggtccattctctgaccttgtctcccccggagcaggccgctcagcctatgcagccgctacccgagagcctggctagtttacaccccagcgtttcacctggtagtcctcctccacccctgcccaaccataagtacaatacgaccagcacatcgtacagtccccttgcctccctccctttgaaggccgacaccaaagggttctgtaatattagcctgttcgaggacctcccactccaggagcctcaatccccacagaaactcaacccaggattcgacctggctaagggcaacgctggaaaagtcaatcttcccaaagaactcccagcagatgcggtgaacctgactattcctgctagtcttgatctctctccgctcctcggtttctggcagctccccccgccagccacccagaataccttcggtaactcgacattagccctagggcccggtgagtccctgcctcacagactgagctgcttgggccagcagcagcaagagccacccctcgctatgggtacagtgagcctgggtcagctgcccctgccgcccattccccacgtgtttagcgccgggacagggagcgcgattttgccacactttcatcacgcattccgttag

SEQ ID NO: 199821 - DNA, 1392 bp, synthetic construct
  misc_feature 1..1392: note = Description of Artificial Sequence: Synthetic coding sequence
  source 1..1392: mol_type = other DNA
atggccaccttcccctgccagctgtgcggcaagaccttcctgaccctggagaaattcacgatccacaactacagccactcaagagagaggccgtacaagtgtgtgcagcccgattgtggaaaggcttttgtgtctagatacaaactcatgcgtcatatggctacacattccccgcagaagtcccaccaatgtgcccactgtgagaagaccttcaatcgaaaggatcacctgaagaatcacctgcagacccacgatcctaacaaaatggcattcggatgcgaggaatgtggcaaaaaatataatacaatgctcggctacaagagacacctggccctccacgccgccagctctggggacctgacttgcggagtgtgtgctctcgagctgggatccaccgaagttctgctggaccacttgaaggcacatgcggaagagaagccccctagtggcactaaagagaagaagcatcaatgcgaccactgcgagcgctgcttctacacgcggaaagatgtgcggaggcaccttgtcgtgcacacagggtgtaaggatttcctgtgtcagttctgtgcacaaagattcggacgcaaggaccatctgacacgccacaccaaaaaaactcatagtcaggagcttatgaaagaatcactacaaacaggcgacctgctatctacattccatactataagcccatcatttcaactgaaagccgccgccctaccaccattcccacttggagccagcgcccaaaacgggttggcatcatccctgcccgcggaagtacacagcctgacccttagccctcccgagcaggccgcacagcccatgcagcctctcccggaaagccttgcgagcctacatccatctgtctcacccgggtctcctcccccaccactgcccaaccacaagtacaatacaacatccaccagctattcccctctggcgtctttgcctctaaaggcggacactaagggtttttgcaatataagcctgttcgaagacctgccgctgcaggagccgcaatctcctcagaagctcaaccccggttttgatctggctaaaggtaatgctgggaaggtgaacctccccaaggaactcccggccgacgccgtaaacctcaccatccctgcttctttggatctctccccactgttaggtttctggcaactcccccctccagctactcaaaatacttttggaaactcgacattggccctgggcccaggagagagcctgccccatcgcctgagttgccttggccagcaacagcaggagccgccactcgccatgggcactgtgtccctgggacagctgccactccctccaattcctcatgtgttttctgccggaactgggagtgctatcttacctcattttcaccatgccttccgctag

SEQ ID NO: 199822 - DNA, 1392 bp, synthetic construct
  misc_feature 1..1392: note = Description of Artificial Sequence: Synthetic coding sequence
  source 1..1392: mol_type = other DNA
atggccaccttcccctgccagctgtgcggcaagaccttcctgacccttgagaagttcactatccacaattactcccattcacgcgagcggccttataagtgtgttcaacccgattgcggaaaggcgtttgtttcccggtataagttaatgcggcatatggctacccacagcccccaaaagtctcatcagtgcgctcactgcgagaagaccttcaatcgaaaggaccatctgaaaaatcatttacagacgcatgaccccaacaagatggccttcggctgtgaagagtgtggaaagaaatacaataccatgctcggctataaaaggcatctcgctctgcacgccgccagtagcggtgatctgacatgtggcgtctgcgccttggaactgggttctacagaagtgctgctggatcacttgaaagcacacgccgaagagaaacccccatctgggaccaaggagaagaaacaccagtgcgaccactgtgaacgctgcttttatacccgcaaggatgtgaggaggcacttggtggtgcatacgggatgtaaagactttctctgccagttttgtgcccagcggttcggccggaaagaccacctgaccagacatactaagaaaacccactcccaggaacttatgaaagaaagcttacaaacaggcgacctgctttcaacttttcacaccatctcaccctcctttcagcttaaggccgcggctctccctcccttccccctgggagctagcgctcagaacgggctcgcaagcagcctccccgccgaagtacacagcctcactctgagtccaccagaacaggcagcgcagccgatgcagcccctgcctgagtctctcgctagtctgcacccgagtgttagtccaggttcgccccccccccctctccctaaccacaaatacaataccacatcaacgtcctattcccccctggcatcgctgccgctgaaggctgacactaagggattctgtaatattagcctgttcgaggatctgccgttgcaagaaccacagtctccacagaagctcaacccgggctttgacttagccaaggggaatgccgggaaagtcaacttgccaaaagaactgccggccgatgccgtcaatctcacaatccctgcctcattggatttatcacctcttttggggttctggcaactaccccctccagcaactcagaatacctttggaaatagtactcttgcactcggtcccggggaatcactgccacaccggttatcttgtctgggccagcaacagcaagaacccccgctggccatgggcaccgtgagcctgggccagcttcctctgcccccaatcccccacgtgttcagtgctgggaccggctcggctattctgccccactttcaccatgcattcagatag

SEQ ID NO: 199823 - DNA, 1236 bp, synthetic construct
  misc_feature 1..1236: note = Description of Artificial Sequence: Synthetic coding sequence
  source 1..1236: mol_type = other DNA
atggccacccacagcccccagaagagccaccagtgcgcccactgcgagaagacctttaatcggaaagaccatttgaagaatcacctgcagacacacgatcctaacaagatggcattcgggtgcgaggaatgtggaaagaagtacaacactatgttaggctataaacgacatcttgccttgcatgccgccagctcgggcgatctcacatgtggggtttgcgcccttgaattgggatcaaccgaggtgttgcttgaccatctgaaagcccacgccgaagagaaacctccctccgggaccaaagaaaaaaagcaccagtgtgaccactgtgagcggtgtttttacacaagaaaggacgtgaggagacacctggtggtccacactggctgcaaggacttcttgtgtcagttttgtgcccagcgctttgggcgcaaagatcacctgacacgtcacaccaaaaagacacattcgcaagaattgatgaaggagagtctgcagacaggcgatctattaagcacgtttcatacaatttcaccatctttccagctgaaggcggcggctttaccaccattccccctcggcgcaagtgcccagaacggactggcatcctctttgcccgccgaagttcattcgttaaccctgagccccccagaacaggctgcccagcctatgcaacccctaccagagagcctagcctcccttcacccttccgtgagcccaggatcgccccctcctcctttgcccaaccacaagtataacaccacaagtacttcttatagtcctcttgccagccttcccctgaaagcagacacaaagggattttgcaacatctcattgtttgaagatctgccactgcaggagccgcaatcccctcagaaacttaatcccggtttcgacctggctaaaggaaacgctggcaaggtcaaccttcctaaagagctccccgccgacgcagttaaccttaccatccctgcaagcctggacctcagtcctctgctgggcttctggcagttacctcccccggctacacagaatacattcggcaactctaccctggcgctcgggcccggagagagtcttcctcatcgcctgtcatgtctgggacaacagcagcaggagcccccacttgcgatgggcactgttagcctcggtcagctgcccctcccaccaatccctcatgtcttttcggctggaacgggctctgccattttaccgcattttcatcacgcctttcgctag

SEQ ID NO: 199824 - DNA, 1236 bp, synthetic construct
  misc_feature 1..1236: note = Description of Artificial Sequence: Synthetic coding sequence
  source 1..1236: mol_type = other DNA
atggccacccacagcccccagaagagccaccagtgcgcccactgcgaaaagacttttaaccggaaggaccacttgaaaaatcatctccagacccacgatcctaataaaatggcatttggttgcgaggaatgtgggaagaagtacaatacaatgctcggctacaaaaggcaccttgccctgcatgcagcttccagtggggacctcacctgtggtgtgtgcgcactggaattaggttccacagaagtcctgctagatcatctgaaggcccacgcagaagaaaaacccccctcaggcaccaaggagaagaagcaccagtgcgaccactgcgagcgatgcttttatacacgcaaggacgtccggcgccatttggtcgtgcacacaggttgcaaggatttcctttgccaattctgtgcccagagatttggccggaaggatcatctcacgcgacacaccaagaaaacccactctcaagagctgatgaaggagtccttacagaccggagatctgctcagcactttccataccatctccccctctttccagctcaaggcagctgctctgcctccattccccttgggcgcgagcgcccaaaacggactcgcctcctcactgcccgctgaggtccattctcttaccctcagtcctccagagcaggccgcccaacccatgcaacctctgcccgagtctctggcctccctccacccatcagtttcgccaggttctcctccccccccattgcccaatcacaagtataacaccaccagcacaagctatagtccgcttgcttcccttccactgaaagccgataccaagggtttttgtaatatcagtttgttcgaagacctgcccttgcaggagccacagtctccccagaaactgaatcctggtttcgacctggccaagggcaacgccggtaaggtgaatcttcccaaagaattgcccgcggacgcagtcaaccttaccatcccggcgagcctggatttgagccccttgctcgggttctggcaacttcctccacccgcaacccagaacaccttcggtaactcaacccttgctttaggacctggtgaatcactcccgcatcgtctgagttgcctgggacagcagcagcaggaaccccccctggcgatgggcacagtgagcctcggtcagctgcctctgcctcccatcccacacgtattctcggctggcacgggcagcgctattctgccacatttccaccacgcctttaggtag

SEQ ID NO: 199825 - DNA, 1392 bp, synthetic construct
  misc_feature 1..1392: note = Description of Artificial Sequence: Synthetic coding sequence
  source 1..1392: mol_type = other DNA
atggccaccttcccctgccagctgtgcggcaagaccttcctgaccctggagaaattcaccatacacaactatagccacagccgggaaagaccatacaagtgtgtgcagcccgattgtgggaaagccttcgtgtctcgatataaactgatgcgacacatggccactcactctccccaaaaaagccatcaatgtgcccactgtgagaagacttttaaccggaaggaccacttaaaaaaccatctgcagactcacgaccctaacaagatggccttcgggtgcgaagagtgcggaaagaagtataacacgatgcttgggtacaagagacatctggcccttcatgccgcctcatctggggacctgacctgtggggtctgtgccctggaactgggctctactgaggttttgcttgaccatctgaaggcccatgctgaagaaaagcccccatccggcactaaagaaaaaaagcatcagtgcgaccattgtgaaaggtgtttttatacccgcaaagacgttaggcgacatctcgtggtacatacgggctgcaaagattttctgtgtcagttttgtgctcagcgcttcggacgcaaagaccacctcactagacataccaaaaaaactcattctcaggagctgatgaaggaaagcctgcagaccggtgacctgttatccacttttcatacaatcagcccctcctttcagttaaaggcagccgccctccctccattccccctgggcgcttctgcccagaacgggttagctagctccctgcccgctgaggtgcacagcttaaccctctccccccctgagcaggctgcccagccgatgcagcctctgcctgagtccttggcttccctgcacccttccgtgtctccgggaagccctccgccgcccttacctaaccacaaatataacacaacctcaactagctactcacccctcgcctcactgcccctgaaggcagatacaaaagggttttgtaacatctctctgttcgaggatctccccctgcaggagcctcagagtccacagaaactaaatcccggctttgacctcgccaaggggaacgcgggcaaagttaacttgccaaaagagttaccagccgacgccgtcaatctgactatccccgctagccttgacctgtctccactgcttggcttttggcagctgcccccccctgctacacagaataccttcggaaacagcacactggcactgggtccaggagaatctcttcctcaccgattgtcgtgcctcggtcagcagcaacaggaaccgccgctggcgatgggaacagtctctctggggcagcttcctctaccacctattcctcatgtcttctcggcgggcacaggctccgccatccttcctcactttcatcacgcgtttcgctag

SEQ ID NO: 199826 - DNA, 1392 bp, synthetic construct
  misc_feature 1..1392: note = Description of Artificial Sequence: Synthetic coding sequence
  source 1..1392: mol_type = other DNA
atggccaccttcccctgccagctgtgcggcaagaccttcctgacccttgaaaagtttacaattcataattatagtcatagccgggagaggccatacaagtgcgttcagcccgattgcgggaaggcatttgtgagccgatacaaactcatgcggcacatggctacacatagcccgcagaaaagtcaccagtgcgctcattgcgaaaagacgttcaacaggaaggatcacttgaagaatcatttgcagacccacgatccaaacaagatggcatttggctgcgaggagtgcggtaagaagtataacacaatgctcggttacaagcggcaccttgcactgcatgctgcatcctcaggagacctgacatgtggagtctgcgctctcgagctcggatcaaccgaggttttactggaccatctgaaagcacacgccgaggagaagcctccctccggaacgaaagaaaaaaagcaccagtgtgaccactgtgagcggtgcttttatacccggaaagacgtgaggaggcacttagtcgtacacacaggctgcaaagatttcctgtgtcagttctgcgcgcagaggtttggcagaaaggatcacctcacacggcacacaaagaaaacgcactcacaggagctaatgaaggagtcattgcagacgggagatttgttgtcgaccttccatactatctctcctagtttccagctcaaagctgccgccctgccacctttcccgcttggggcctccgcgcagaacgggctggctagctctttacccgccgaggttcattctctgacactttctcccccggagcaggccgcccagcccatgcagcccctcccagagagcctggcttccctgcacccgagcgtgagccctggaagtccacctccaccccttccgaaccacaagtacaataccacatcaacttcatattctccgctggcttctttaccattgaaagctgatacaaaggggttttgcaacattagtctcttcgaggacctgcctctccaggaacctcagagtcctcaaaaattgaaccccggcttcgacttagccaaaggaaatgcaggcaaagtaaatcttcctaaggagctgcctgcagatgccgtgaacctgacaatccctgcatcccttgatttgtcccctcttttagggttttggcagttaccccctcccgctactcaaaatactttcgggaattccactttggcactgggcccaggcgaaagcctgccccatcgcctatcctgcctcggacagcagcagcaagagccccctttggccatgggcactgtatcactcggccagctccccctgcctccaatcccacacgtgttcagcgccgggaccgggtctgccatcctgccccattttcatcacgcttttaggtag

SEQ ID NO: 199827 - DNA, 531 bp, synthetic construct
  misc_feature 1..531: note = Description of Artificial Sequence: Synthetic coding sequence
  source 1..531: mol_type = other DNA
atggccacccacagcccccagaagagccaccagtgcgcccactgcgagaaaacctttaaccgtaaggaccacttaaagaatcaccttcagacccatgatccaaataaaatggctttcgggtgtgaggagtgtggcaaaaagtacaacacgatgctggggtacaagcggcatctggccttgcatgctgcttcatctggagacctcacctgtggggtttgtgctctagagctggggagcacggaggtgctactggatcatcttaaggcccacgctgaagagaagcccccgtctggcaccaaggagaaaaagcaccagtgcgaccactgtgagcgctgtttctatacacgcaaggacgtgcgaagacacctggtggtccacactggttgtaaagactttttgtgccagttctgtgcccaacgcttcggtaggaaagatcatttgacccgccacacaaagaaaacccacagtcaggaactgatgaaagaatcactccagacgggggatcttttgtctacattccacaccatctag

SEQ ID NO: 199828 - DNA, 1392 bp, synthetic construct
  misc_feature 1..1392: note = Description of Artificial Sequence: Synthetic coding sequence
  source 1..1392: mol_type = other DNA
atggccaccttcccctgccagctgtgcggcaagaccttcctgaccctggaaaagttcaccatccacaactactctcatagccgagagcgcccctacaagtgcgtccagcccgactgtggcaaggcgttcgtgagccgctataagttgatgaggcatatggccacgcatagcccccagaagtctcaccagtgcgcacactgcgagaaaactttcaacagaaaagaccatcttaagaatcacctgcagacacacgatccgaataaaatggcattcggatgcgaggaatgtggaaaaaagtacaacacgatgctaggctataaaaggcatttagcactccacgctgcctcctctggcgatctgacatgtggagtgtgtgccttagagttgggctctaccgaggttttgttagaccacctgaaggcccacgccgaggagaaacccccgtcaggaacaaaggagaaaaaacatcaatgcgatcactgcgaaagatgcttttacactaggaaggatgtcagacgccacctggtagttcataccggttgcaaagacttcctgtgccagttctgcgctcagcgctttggacggaaggatcacctaaccaggcacaccaagaagacccacagtcaggagctcatgaaagagtcactccaaaccggggacctgctgtctacgttccacaccatttcgccatccttccagttgaaggccgccgcactgcctcctttccccctcggagctagtgcccagaatggactggcatcaagcctccctgccgaggtgcatagcctgactctgtccccacccgaacaggctgcgcagcccatgcaaccccttccagaaagcctggcaagcctccatccctctgtatctcctggcagtccccccccacctctcccgaatcacaaatataatactacctctactagttattctccgctggcctcgctccctctcaaggccgacacaaaggggttttgcaatatttcgctgtttgaggatctgcccttgcaggagccccagtccccacagaagctgaacccgggatttgacctggcaaaaggcaacgccggcaaggtaaatctgccaaaggagctgccagcagacgccgtaaatcttacaatccctgccagccttgatttgagcccattgctcggcttttggcagctgcccccacccgctacacagaacacctttggcaattcaacactcgctctcggacccggcgagagcctgccacacagactcagttgccttggacaacaacagcaggagccacccctggccatggggactgtgagtctcggacagctgcccctgccgccgattccacatgtattctcagccgggacaggaagtgccattctgcctcattttcatcacgcattcagatag

SEQ ID NO: 199829 - DNA, 1236 bp, synthetic construct
  misc_feature 1..1236: note = Description of Artificial Sequence: Synthetic coding sequence
  source 1..1236: mol_type = other DNA
atggccacccacagcccccagaagagccaccagtgcgcccactgcgagaagacctttaaccgcaaagatcatttaaagaaccacctccagacccacgatcctaacaagatggcttttggctgtgaggaatgcggcaagaagtataataccatgttgggctacaaacgtcatctcgctctgcacgctgcctcttcgggagatcttacctgtggggtctgcgccctggagctgggtagcactgaggtgttgttggatcatctgaaagcccacgctgaggaaaaacctccgtccggcaccaaagaaaaaaagcaccagtgtgatcactgtgagcggtgtttctacactcgaaaggatgtgcgccgccacctggtggtccacacaggatgcaaagatttcctttgccagttttgtgcacaacggttcggacgtaaagatcatcttacccgtcacacaaagaagacccacagccaggagctcatgaaagaatccctccagactggcgacctcctgagcacattccatacaatctcaccgagtttccagttaaaagccgccgcactgccccctttccccctcggggcgtcggcacaaaacgggctggcttcttcacttccggcagaggtgcactcattaacattaagcccacccgagcaggcggcccagccaatgcaacccctgccagaatccctcgcttctcttcatccttctgtgagtcctggcagccccccccctcctttacccaaccataaatataacaccacaagcacgagctattcacctttagcctccctgcccctgaaggccgacactaagggcttctgcaatatcagcctatttgaggatttgccattgcaggagccacagtctcctcagaaacttaatcccggcttcgacttagcaaaaggcaatgcggggaaggtaaaccttccgaaggagctgccagcagatgctgtgaatctcaccatccccgcttcccttgatctttcaccactgctggggttctggcaattgcctccacctgccacccagaatacctttggcaatagcactctggctctagggcccggcgaatccctgccgcaccgcctttcctgtcttggtcaacagcagcaggagcctccactagcaatggggaccgtcagcctgggacaacttcctctccctcccataccgcacgtgttcagcgcaggtaccggcagtgcgatactgccacacttccatcacgcttttagatag

SEQ ID NO: 199830 - DNA, 1392 bp, synthetic construct
  misc_feature 1..1392: note = Description of Artificial Sequence: Synthetic coding sequence
  source 1..1392: mol_type = other DNA
atggccaccttcccctgccagctgtgcggcaagaccttcctgaccctggaaaaattcacaatacataattactcacacagtcgcgaaaggccatacaagtgcgtgcagcccgactgtggaaaagctttcgtttcacgctataagctcatgagacacatggccacacacagccctcagaaaagccatcagtgcgctcattgcgaaaaaacctttaaccgaaaggatcatttgaaaaatcacctccagactcacgatcccaacaagatggctttcggatgtgaggaatgcggcaaaaagtacaataccatgttgggctacaaaaggcacttggccctgcatgccgcatcgagtggcgaccttacatgtggagtatgtgctctcgagctgggctctacggaagtgctgctggaccacctgaaggcccacgcggaggaaaagccccccagtggcactaaggaaaaaaaacaccagtgcgatcactgcgagcggtgcttctacacacggaaggacgtgcgccgacacctagtggtgcatacaggctgcaaggatttcctgtgccaattttgcgcccagaggttcgggcgtaaggaccacttaactcgccataccaagaagacacacagccaggagctgatgaaggaatcattgcagaccggcgatctgctgtccacatttcatacaatctcccctagttttcagttgaaagccgccgccctacccccttttccactgggtgcaagcgcccagaatgggctggcctcatcactgcctgccgaggtgcattccctaaccctgagcccccctgagcaagccgcccagccgatgcagccactgccagaaagcctggcaagcctacaccctagcgtgtcacctgggagccccccaccaccgctaccaaatcataagtataacaccaccagcaccagctactcaccactagcatctctgcctttaaaagcagatactaaaggtttttgcaacatatccctcttcgaggatctgccgctgcaggagcctcagtcacctcagaaacttaacccgggctttgatctagccaaagggaatgccgggaaggtgaatctgcccaaggaactaccagctgatgcagtgaatttgacaatccctgcctcactggatctgagccctctcctgggattttggcaactgccacctcccgctacgcagaacaccttcgggaattcaaccctagcgcttggacctggagagtccctgccccataggctgagttgcctcggtcagcagcaacaagaacctcctttggctatgggcactgtctcactgggccaattgcccttgcctcctattcctcacgtgttctctgccggaaccggctctgctatccttccacactttcaccacgccttcaggtag

SEQ ID NO: 199831 - DNA, 759 bp, synthetic construct
  misc_feature 1..759: note = Description of Artificial Sequence: Synthetic coding sequence
  source 1..759: mol_type = other DNA
atgaaggagagcctgcagaccggcgacctgctgagcaccttccacaccatttcccccagttttcagctgaaggcagctgccctcccccccttcccacttggtgcgtccgcacagaacggcctggcatctagtctccccgcggaagtgcactccctcaccctgagtcctcccgagcaagccgctcagcctatgcagcccctcccagaaagcctggcctccttgcacccctctgtgagtcctggctcaccgccccccccacttccaaaccataagtacaacacaaccagcaccagctactcccccctggcttctttgccacttaaagctgataccaagggcttctgcaacattagtctattcgaagacctgcccctccaggaacctcagtctccccaaaagcttaaccccggcttcgacctggccaagggcaacgctggtaaggtcaacctgcccaaggaactccctgcagacgcagttaacctgaccattcctgctagccttgatctcagccctctcctcgggttttggcagctgccacccccagccacacaaaatacatttggcaactccacgctggctcttggtcctggtgagtcactgcctcaccgtctgagttgcttagggcaacagcagcaggagccccccctggcgatggggaccgtcagccttgggcagctcccactgccaccaatcccacacgtttttagcgcaggaaccggttctgctatcctacctcactttcaccacgctttccgttag

SEQ ID NO: 199832 - DNA, 1491 bp, synthetic construct
  misc_feature 1..1491: note = Description of Artificial Sequence: Synthetic coding sequence
  source 1..1491: mol_type = other DNA
atgaccaccttcttcaccagcgtgcccccctggatccaggacgccaagcaggaagaggaggtgggctggaagctcgtgcccagacctcgaggcagagaggccgagagtcaagtcaaatgccagtgcgagatttccggcacacctttctctaatggagagaaactgcgacctcactccctgccccagccagagcagaggccctacagctgtccccagctgcattgcgggaaggcttttgccagtaagtacaagctgtatcgccacatggccacgcactccgcacagaagccacaccaatgtatgtactgtgataagatgtttcacagaaaggatcacctgcgcaaccacctgcagactcatgatcccaacaaggaagcgttgcactgttctgaatgtggcaagaactataatacgaaactgggatacaggcggcatctggccatgcacgctgcatcttctggagatctgagctgtaaagtttgcctccagacatttgaatcaactcaagctctgcttgagcacctgaaggcccatagtaggagagttgcaggaggtgcaaaggaaaagaaacacccatgcgaccactgcgaccggcgcttctatacgcggaaagacgtgcgtagacatttggtagtccataccggccggaaggacttcctctgtcagtattgcgcccagcgcttcgggcgcaaagatcacctgacgcgtcatgtgaagaaatctcatagccaggaattgttaaagattaagactgagcccgtggatatgctgggtctgctgtcatgctcctcaacggtatctgtaaaggaagaactcagccccgtgttatgtatggcttctcgcgatgtgatgggcaccaaagcgtttcccggtatgctgcctatgggaatgtatggggcccacattccaactatgccgtccaccggggtgccacactctctggttcataacacactgcctatgggaatgtcatatcctctggaatccagtcctatctcatctccggctcagctccccccaaagtaccagctaggttcaacttcttatttgcctgataaactgcccaaagtggaagtggattcgtttcttgccgaactacccgggtctctgtcactctcttccgcagaacctcagcccgccagccctcagcctgcggccgctgccgcactgctggatgaggccctgctggccaagagcccggcaaatctgtccgaggctttgtgcgccgctaatgtagacttctcacacctcctcggattcctgccactcaatctgccaccttgcaacccacctggcgcaaccggtgggcttgtaatgggatactcccaggcagaagcacagcctctgctgaccactctccaggcccagcctcaggatagccctggagcaggtggccccctcaacttcggcccgctccatagtcttccccctgtatttactagcggactgtccagtaccactctgcctcgctttcaccaggcgttccagtag

SEQ ID NO: 199833 - DNA, 507 bp, synthetic construct
  misc_feature 1..507: note = Description of Artificial Sequence: Synthetic coding sequence
  source 1..507: mol_type = other DNA
atgcaggcccagcagtaccagcagcagcggcggaagttcgccgccgcctttttagcctttattttcattcttgcagccgtcgacactgctgaggccggaaaaaaggaaaagccagagaagaaggtaaagaagagtgactgtggggagtggcagtggtcagtttgcgtgccgacaagtggggattgtggcctgggaactcgcgagggcacacgtacaggggccgaatgcaaacaaaccatgaaaactcaaaggtgtaagattccttgcaattggaagaagcagttcggcgcagaatgtaaatatcagtttcaggcctggggagaatgtgaccttaacacagctcttaaaacccgaaccggcagcctgaaacgggccctccataacgctgagtgtcagaagacagttacaatttccaagccctgtggcaaattgacaaaacctaaaccacaggcagagtcaaaaaagaagaagaaggagggtaaaaagcaggagaagatgctcgattag

SEQ ID NO: 199834 - DNA, 1518 bp, synthetic construct
  misc_feature 1..1518: note = Description of Artificial Sequence: Synthetic coding sequence
  source 1..1518: mol_type = other DNA
atggtggaggaggtgcagaagcacagcgtgcacaccctggtgttccgatctctgaaacgtactcacgacatgtttgttgctgacaatggcaagcctgtgcctctggacgaggaatcacacaagagaaaaatggcgatcaaactgaggaatgaatatgggccagtgttacacatgccaaccagcaaagagaatctaaaagaaaagggccctcagaatgcgactgactcttacgtgcataagcaatacccagccaatcaaggccaagaggtggagtattttgtcgcaggagtggccctgaccgcagacaccaaaatacagcgcatgcccagtgagagtgcagcccagagcctggccgtcgccctgccccttcagaccaaggcagacgccaaccggacggccccaagcgggtccgaatacaggcatcccggggcaagtgatcgaccacaacccactgccatgaacagcattgtaatggagacgggcaacactaagaatagtgcactcatggcaaagaaggctcccacgatgcctaaacctcagtggcatccaccctggaagttgtaccgagtaatcagcggccaccttggctgggtccgctgtatcgcggtggaaccgggcaaccagtggtttgtaacgggctcagcggaccgaaccatcaaaatctgggatctggccagtggaaaactgaaactgtcattgacgggccacataagcactgtccggggcgtgattgtgtccacccggtcaccatatttattttcctgcggagaagataagcaagtaaagtgttgggatctcgaatacaataaggtcatcaggcactatcacggacatctcagtgcagtgtatggtctggacctacaccctactatcgacgtgctcgttacctgcagccgtgactctacggcccgcatctgggatgtccgaaccaaggcttccgtgcacaccctgtcaggccacaccaatgccgtggctaccgtgcgctgtcaggctgcagaacctcagataattaccgggtcccatgatacgaccattcggctttgggatctggtggccggcaagacccgggtgactctcacgaaccacaagaagagtgttagagccgtcgtcctgcatcccagacactacacctttgcttcaggctctcctgataatatcaagcagtggaagtttcctgatggatctttcattcagaacttgtcgggacataatgccattatcaacactttgacagtgaattccgacggtgtcctggtgtctggggcagacaatgggacaatgcacttgtgggactggcggaccggctacaatttccagcgggtccatgctgcagtgcagccgggaagtctggattccgaatccggcatctttgcctgtgcgttcgatcagtccgaaagcaggctgctgacagctgaagccgacaagaccattaaggtatacagagaagatgacactgcaactgaagaaacccacccagtctcctggaagcctgaaatcattaagcggaagcgcttctag

SEQ ID NO: 199835 - DNA, 1545 bp, synthetic construct
  misc_feature 1..1545: note = Description of Artificial Sequence: Synthetic coding sequence
  source 1..1545: mol_type = other DNA
atgatctgcgaggtgcagaagcacagcgtgcacaccctggtgttcagatcactgaagaggacccatgatatgtttgtggcggacaacgggaagccagtgcctctcgacgaggagtctcacaagcgcaagatggccataaagctccgaaatgagtatggccctgtgctgcatatgcccacttctaaggaaaacttaaaggagaagggaccgcagaatgccactgactcctacgtacataaacagtatcccgccaatcagggccaagaggtggaatactttgtggccgggacccatccttacccaccaggcccaggggtggctttgaccgctgacaccaagatccagcggatgccttccgagtctgccgcacagagccttgcagtcgccttgcccctgcagaccaaggctgacgcgaatcgaactgctcctagcggctccgagtacaggcatcccggagcaagcgacaggccacaaccaactgccatgaattccatcgtgatggagactggaaatactaagaactcagccttgatggccaaaaaagccccaactatgccaaagccccaatggcaccctccctggaagctgtatcgggttatcagcggccacctaggatgggtccggtgtatagccgtcgaaccgggcaaccagtggtttgtcactggttccgccgacaggactataaaaatctgggatctggccagtggtaaactcaagttatctctgactggccacatctctactgtgcgaggcgtgatcgtgtcaacgcggtctccctacctattttcatgtggtgaggacaaacaggtcaagtgctgggatctcgaatataataaggttattcgccactatcatggacatctgtctgccgtctacggtctggatctgcaccccactattgatgtcctcgtgacttgctctcgggactctactgcacgaatttgggatgtacggacgaaggcctctgtccatacgctgtctggacacactaatgctgtggcaacagtacggtgccaggctgccgagccccagataattactggctcccacgacactaccatccggctgtgggatttggtagcaggaaagacaagggtgactttaaccaatcacaaaaaaagcgtgagagctgttgtgcttcatccacgccactacactttcgcatcaggctctcccgacaacatcaaacaatggaagttccctgatggtagcttcattcagaacctcagtggacacaatgctataatcaacacgctcactgtgaacagcgacggcgtactcgtgagcggcgccgataacggcaccatgcatctgtgggattggcgcaccggctataattttcagagagtccatgccgcagtacaacccggctccctggacagtgagagtggaatattcgcttgcgcattcgaccagtccgaaagtaggttgctcactgctgaggcggacaagactatcaaggtttatcgggaggatgacacagccacagaagaaacacatcccgtctcttggaaacccgaaatcatcaagcgcaaaaggttctag

SEQ ID NO: 199836 - DNA, 1545 bp, synthetic construct
  misc_feature 1..1545: note = Description of Artificial Sequence: Synthetic coding sequence
  source 1..1545: mol_type = other DNA
atggtggaggaggtgcagaagcacagcgtgcacaccctggtgttccgcagtctaaagcggacccacgacatgtttgttgctgataacggcaaaccggtgccactggatgaggagtcacacaagcgtaagatggctatcaagttgaggaacgaatacggtcctgtattgcacatgccaacgagcaaggaaaacttgaaagaaaaggggccacagaacgcaacagactcttacgtacataaacaatacccggccaaccagggtcaggaagtggagtactttgttgccggaacccatccgtaccctcccggtcctggagtggcgctgacagccgacaccaaaattcagcggatgccatccgaatctgctgctcagtcactggccgtggctctgcctttacagacaaaggccgatgcaaacaggaccgcacccagcggctctgagtacaggcaccctggagcgtcagacagaccccagcctactgctatgaacagcatcgtcatggagacaggcaacacaaaaaatagcgccttaatggccaagaaggccccaaccatgccaaagcctcagtggcatccaccctggaaattatacagagtgataagtggtcatttgggatgggtgcgctgtatcgcagttgagccaggaaatcagtggtttgtgaccggctctgcggatcgcacgattaagatatgggacctcgccagcggtaaactgaagctgtctctgacaggacacatctctaccgttaggggcgttattgtgagcacacgatctccatacctgtttagctgtggtgaggataagcaagtgaagtgctgggacctggaatataacaaggtcatccggcattaccacggccatctatctgctgtctatggcttagatttacaccccacaattgatgtgctggtcacctgttccagagattccactgctcgaatctgggacgtgaggacaaaggcttcggttcacaccctctctgggcataccaatgccgtggcaacagtgagatgtcaggccgccgagccccagatcataacagggagtcatgataccaccataaggttatgggatctggtcgccgggaaaacccgtgtaacactgaccaatcacaaaaagagtgtcagggccgtggttctccatccaaggcactatacatttgcttcaggctcacccgataatatcaaacagtggaaattcccagacgggtccttcatccaaaacctctcgggtcacaatgcaatcattaatacactcaccgttaacagtgacggcgttctggtttccggcgctgacaacggcacaatgcacttgtgggattggaggacaggatacaactttcagagggttcacgctgccgttcagcctgggagcctggatagcgaaagtgggatcttcgcctgcgcctttgatcagagcgagtcccggctgcttactgccgaagctgacaaaacgattaaagtctaccgggaggatgacacggctaccgaggaaacccaccctgtctcttggaagcctgaaattattaagagaaaacgattctag

SEQ ID NO: 199837 - DNA, 5622 bp, synthetic construct
  misc_feature 1..5622: note = Description of Artificial Sequence: Synthetic coding sequence
  source 1..5622: mol_type = other DNA
atgtgggccgaggccggcctgccccgggccggcggcggcagccagcctccctttagaacttttagcgcatcagactggggactgacgcatctggttgttcacgagcagaccggcgaggtgtatgtgggcgctgtgaatcgaatttacaaactgtccggaaatttgaccttgctgcgcgctcacgtgaccgggcccgtggaagacaacgagaaatgctaccctcccccttccgttcagagctgtcctcacggactgggttcgaccgataacgtgaacaaattgttactgcttgattacgccgctaacaggctcctagcctgtggcagcgcaagtcagggcatatgccagtttttgcggctggatgacctctttaagttgggcgagccacaccacagaaaggaacactacctgtcatcagtgcaggaggccggtagtatggcaggggtactgattgcggggcctccaggccagggccaggctaagctgttcgtggggacaccgatcgacggtaagtcagagtacttccccactctctcctcaaggcggctaatggccaacgaggaggacgctgacatgttcggtttcgtctaccaggatgaatttgtcagctcacagctgaagattccttccgacaccctgtcaaaattccctgctttcgatatttactacgtctattcgttcagatccgaacaattcgtttattatttgacactgcagctggacacccaactgacatctcctgatgccgccggtgaacacttctttactagtaagattgtccgattgtgtgtggatgacccaaagttttactcctacgtcgaattccccattgggtgtgaacaggctggagtggagtatcggctggtccaggacgcttatcttagccgccccggtcgggcactggcccatcagttaggcctggctgaagacgaagacgttcttttcactgtatttgctcagggtcagaaaaaccgcgttaaaccacccaaagagtccgcactctgcctattcactctcagggccatcaaagagaagatcaaagaacggattcagtcatgctaccgcggtgaggggaagctttcactgccctggctgctgaacaaggagctgggttgtataaattcccccctgcagatagatgacgatttctgcggtcaggatttcaaccagcctctcggcggcacagttacgatcgagggcacacccttgtttgtcgataaagacgatggattgaccgccgtcgccgcgtacgattacaggggacggacggttgtctttgccggcactagaagcggccgcataagaaaaattcttgtagacctgtctaatccagggggccgccccgcgctcgcttatgaaagcgtcgtggcccaggaggggtcccctatactacgtgacctcgtgctgtcgccaaaccaccaatatctatatgccatgaccgagaaacaggtgaccagagtgcctgtagagagttgtgtccagtatacctcctgcgagctgtgcctggggagccgagacccacactgtgggtggtgcgtgctccacagtatctgtagtcgccgggacgcctgcgaacgggctgacgagccacagcgctttgcagccgacctcctgcagtgtgtgcagttgactgtgcagcctagaaatgtttcagtaactatgtcccaggttccacttgtgttgcaggcgtggaatgtgcctgatctgagcgcaggtgtaaattgcagctttgaggactttactgagtcggaatctgtactggaggacggcaggattcactgtcgaagtccatcagccagagaggtggccccgattaccagggggcagggcgatcagagggtcgttaaactttacttgaagtccaaggaaacagggaagaagtttgcatcggtagatttcgtgttctataattgttccgtgcaccagtcttgcctgagctgtgtaaacggatcattcccttgtcattggtgtaaatatcgtcatgtgtgcactcacaacgtcgctgattgcgcttttttggagggcagggtgaacgtgtccgaggattgtccccagatactgccaagcacacaaatctatgtgccagtcggcgtagtaaagcccatcactctcgccgctcggaaccttcctcagccacagtccggacagcgggggtatgaatgcctcttccacattccggggtccccagcccgagtgactgctctgcggttcaactcgtcttccctgcaatgccaaaattcctcgtactcctacgaagggaacgatgtaagcgacctgcccgtcaacctctccgtggtttggaacggaaactttgtgatcgataacccccaaaacatccaggctcatctgtacaagtgtccggctttgcgggagagttgtgggctatgcttaaaggcggatccacggtttgaatgtggatggtgtgtagctgaacggaggtgctccctgaggcaccattgtgccgcagatacacctgcttcatggatgcacgctcggcatggcagctctaggtgtacagaccctaaaatactgaaactaagcccggaaaccggccctcgccagggagggactcggctcaccattacgggagaaaatttaggccttcggttcgaggatgtcagattgggtgttcgggtggggaaggtcctctgcagcccagtggagtccgaatacatcagcgccgagcagatcgtgtgcgagatcggggacgcatcgagtgttcgcgcccatgacgctctcgtggaggtatgcgtccgggattgctcccctcattatagagccctctctcccaaacggtttacatttgttactcccacgttttatcgcgtgagcccctcacgaggccccctgtccggagggacctggatcggcatagaggggtctcatctgaatgccgggagcgacgtggctgtgtctgtggggggccgcccctgttccttctcctggagaaactctcgcgaaattcggtgcttgaccccccctggccagagccccggatccgcgccaatcattattaatatcaacagagcccagttgactaaccccgaggttaagtacaattacactgaagacccaacgatccttcgtattgatcccgaatggtctatcaacagcggcggaaccctactgaccgttactggtactaatttggcgacagttagggagcccagaatacgcgcgaagtacggaggtatcgaaagggagaatggttgtctggtatacaacgacactaccatggtgtgccgagcaccctccgttgctaaccctgtgagaagtcctcccgagctgggcgaacgtccagatgagttggggttcgtaatggataacgtgcgctctttactggtgttgaattctacttcgttcctgtactaccccgaccccgtgctggagccactgagcccaaccgggctgttggaacttaagcccagttcacctctgattctgaaaggaagaaacctgctcccacccgctccagggaatagcagactgaattatactgtgctcattggctcaaccccctgtaccctgaccgtttcagagactcaactcctctgtgaggccccaaacctgacgggccaacataaagtgaccgtgcgagctggaggattcgagttctccccaggcaccctgcaggtctactccgactcccttctcacccttcccgcgattgtaggtattggagggggcggaggactgctgctattggtcattgtagcggttctgatcgcctataagcggaagtctcgggatgccgacagaactctgaagaggttacagcttcagatggataacttggaaagccgcgttgcgttggagtgtaaagaggcttttgctgaattacaaacagatattcacgagctgactaacgatctggacggagcaggcatcccattcctggattatagaacgtacgccatgagggtcctgttccctggcatcgaagatcaccctgtcttgaaggagatggaggtgcaggctaatgtcgagaagtctcttactctctttggccagctcttgacgaagaaacacttcctactcaccttcattagaacccttgaagcacagcggtcattttccatgcgtgatagggggaacgtggcttctttgattatgaccgcattacagggagagatggagtacgcgacaggcgtgcttaaacagcttttatctgacctcatcgagaaaaacctggagagcaagaaccatcccaagctgctactgagacggaccgaatcagtggcagagaagatgctaacaaattggtttacttttctgctatacaaattcctgaaggaatgtgccggagaacccctgtttatgctgtactgcgccattaagcaacagatggagaaaggtccaatcgacgccatcaccggggaagctcggtactctttgagcgaggacaagctcatccggcaacagatcgattacaaaaccctgacgctgaactgtgtgaatccagaaaacgagaacgcccctgaggtgcccgtgaaagggttagattgtgataccgttacacaggcaaaagaaaagttgttagacgccgcttataaaggggtcccctacagccaaaggccaaaggctgccgatatggatctcgaatggaggcagggtaggatggcgcgcatcattctccaggatgaggatgtgaccaccaagatcgacaatgactggaagcgcttgaacactcttgcccattaccaggtgactgatgggtccagtgtcgcactcgtcccgaagcagacatcagcttataacatctctaattccagcacattcaccaaatcgcttagcagatacgagtctatgctccgaacggcctctagccctgacagtctaaggagccgaacacccatgatcactccggacctcgagtccggcaccaagctatggcatcttgtgaaaaaccacgatcacctcgatcagcgggagggggaccgcggcagtaagatggtgtccgaaatatacctcactcgactgctggccacaaaggggacactgcagaaatttgtggacgatcttttcgagaccatattctccacggcccaccggggcagtgccctgccactggccattaagtacatgtttgatttcctggatgagcaggcagataaacaccagattcatgatgcagatgtccgtcacacatggaaaagcaattgcttgcccttgagattttgggtcaatgtcatcaaaaacccgcagtttgttttcgatattcacaaaaactccattactgatgcatgcttgtcagtggttgctcagacgttcatggactcctgctctactagcgaacacaaattggggaaggatagcccctccaataagctcctctatgccaaggacatccccaactataaatcctgggtggagcgttattatgccgatatagccaaaatgccagccatatctgatcaggatatgtcagcctatttggcagagcaaagtcgcttgcacctgtcccagtttaattcaatgtcagccttacacgaaatttatagctatatcacaaaatacaaggatgaaattctcgccgctctggagaaggatgagcaggcccgaaggcaacggttgcggtcaaaactagagcaggttgtggatactatggccctgtcctcatag

SEQ ID NO: 199838 - DNA, 5691 bp, synthetic construct
  misc_feature 1..5691: note = Description of Artificial Sequence: Synthetic coding sequence
  source 1..5691: mol_type = other DNA
atgcccctgcccccccggagcctgcaggtgctgctgctgctgctgttacttttactgttactcccagggatgtgggctgaagctggccttccccgcgctggagggggctcccagcctcctttcagaaccttcagtgccagtgattggggactgacacacctggtggtgcacgaacagacgggcgaagtgtacgtgggcgccgtaaatagaatttacaagctttctggcaatttgaccttgcttcgagcacacgtcaccggccccgtcgaagacaacgagaaatgttacccaccaccaagcgtgcagtcctgtccacatggccttggatctaccgataacgttaacaagctgttgctcctggactatgcggccaatagactcttggcttgcggatctgcttctcaaggaatttgccagttcttacgcctggatgatctgttcaagctgggcgagcctcaccacagaaaggaacactacctgtcaagtgtacaggaggccggttccatggccggagtgctcattgcaggcccccccggccaaggtcaggcaaaactatttgtgggcacacctatagatggcaaatctgaatattttcctaccctgtctagtcggcgattgatggctaacgaggaagacgccgacatgtttggttttgtgtaccaggatgaattcgtgtcatctcagttgaagataccgtccgacaccctaagtaagtttcctgcctttgacatttactacgtgtattctttcagatccgagcagttcgtgtactaccttacccttcagttggatactcagctcacctcacctgacgcagccggggaacacttctttaccagcaaaattgtgcgcctttgtgtggacgatccaaaattttattcctatgtagagtttcccattggatgtgagcaggccggggtggagtacaggctggttcaagacgcgtacctctcacgccctggccgggctctggcccaccaactgggcctggctgaagacgaggatgttctttttacggtgtttgcccagggtcagaaaaatcgcgtgaaaccaccaaaagagtcggccctctgcttattcaccctgagggcaataaaggaaaaaataaaggaacggattcaatcctgctaccgcggagagggaaagctgagcctaccttggctgctgaacaaggaactgggctgtatcaactcccctctgcagatcgacgacgacttctgcggtcaggacttcaatcagcctctagggggcaccgtaaccatagaaggcacccccctgttcgtcgacaaagatgatggactgaccgcggtcgcagcctacgactatagagggcgcaccgtggtctttgcggggactcggtcaggaagaattcgcaaaatactggtggacctgagcaatcctggcggacgacctgctctggcctatgaatctgtggtggcccaggagggttctcccattctccgcgacttagtgctgtcacccaaccaccagtatctttacgccatgactgaaaagcaagtgactagggtccctgtcgagtcatgcgttcagtatacatcctgcgaattgtgtctgggctctagggatccccattgcggctggtgcgttcttcattctatctgctcgagaagagacgcatgtgagagagccgatgagccccagcgcttcgctgccgatctgctgcagtgtgtgcagctcacagtgcagcctcgaaacgtttccgtcaccatgtctcaagtcccactggttctgcaggcatggaacgtgcccgacctttcagcaggagtcaactgctcctttgaggatttcacggagtctgaaagtgtactggaggacggacggatacactgccgaagtccgagcgcgagagaggtggcacctattactagaggccagggagaccagcgggtggtgaagctctacttaaaatctaaggaaactggtaaaaaatttgcttcagtggacttcgtgttctataattgtagcgttcaccagtcatgcttatcttgcgtgaacgggtctttcccatgtcactggtgtaaataccgccacgtctgtacccataacgtcgccgactgcgcattcttggaaggtcgggtaaacgtgagcgaggactgtccccagatcctaccctcaacacagatctatgtgcctgtgggcgtcgtgaagcctattacactggccgcccgtaatctgccacagccccaatcaggccagagagggtacgagtgcctttttcacatccccggctcccccgcgagggtgactgcattgaggttcaatagctctagtcttcagtgtcagaactccagttattcctacgaagggaatgatgtgagtgatctgccggtgaacctgagtgtggtttggaacgggaactttgtcatcgacaatcctcagaacatccaagcccacttgtacaagtgtcccgccctcagggagagctgtggcttgtgcctaaaggctgatcccagattcgagtgtggctggtgtgttgcagagcgtaggtgtagcttacgtcaccactgcgcagcagatactccggcgagctggatgcatgcccgtcatgggagttctcgttgcacagatccgaaaatcctgaagctgtctccggaaacgggcccaaggcaggggggcactcggctcactatcacgggcgagaatctgggcctacgatttgaagacgtgcgcctgggagttcgagtcggtaaggtcctgtgctcacctgtggagagcgagtacatctctgccgaacaaattgtgtgcgagatcggcgatgcatccagcgtcagagcccacgacgctcttgtcgaggtttgcgttagggactgcagcccccattatcgcgccctttctcctaaacgattcacatttgtgacccctacattttatagggtcagtcctagccgcggtcccttgtcagggggcacctggattgggattgaaggctcccacctgaacgctgggagtgacgtcgctgtttccgttgggggacgaccctgcagctttagctggcgcaattcccgagagattcggtgcttaaccccaccagggcagagtcccggaagcgcaccaatcattatcaacattaatcgtgcgcagctgactaacccggaggtcaagtataactacacagaagatcccactatattacgtattgaccccgagtggagtatcaacagcgggggcaccttattgacagttaccggaaccaatctggctacggtccgcgaaccgagaatccgtgcgaagtatggagggattgagcgagaaaacggctgtttggtttacaacgatacgaccatggtttgtcgggctccgagtgtggcaaaccccgtaagaagccccccagaactgggtgagaggcctgacgagcttggctttgtgatggacaacgttcggtccctcctggtgctgaactcaacgtccttcctttactaccctgaccctgtgctcgagccccttagccccactgggctgttggagttaaagccatcatcccctctgatcctcaagggtcgaaacctgctgcctccagcgcctggcaatagccggcttaactatactgtcctgatcgggtcgactccgtgcactctgactgtcagcgaaacgcaactgctctgtgaggcccctaacctcacgggacagcataaagttactgtgagagcaggaggtttcgagttcagtccagggactctgcaagtgtacagtgatagcctgttaacactgcccgctattgtcggtatcggtggtggcggcggcctgttactccttgttatcgtggccgtcttaatcgcttataagaggaagagtcgcgatgcagatcggaccctgaagcggctccagctgcagatggataacttagagtcccgcgttgccctcgaatgtaaagaggcttttgccgagctgcagactgatatccacgagcttacaaacgacttggatggcgctgggatccccttccttgactaccggacctatgcgatgcgtgtcctcttccccggtattgaggatcatccggtgctgaaagagatggaggtgcaggcaaacgttgagaagtcgttgaccttattcggccagcttttaacaaaaaagcattttctactaactttcattaggacgctagaggcgcagcggtccttttcgatgagggataggggaaatgtggccagcctgatcatgaccgcactgcagggggagatggagtatgctaccggtgtcctcaagcaactcctgtcagatctcatcgagaaaaacctagaaagcaagaaccaccctaagttacttctgcggcgaaccgaatcagtcgcagagaaaatgctcactaactggttcactttccttctctacaaatttctcaaggagtgcgctggagagcccttatttatgctgtactgtgcaattaagcagcagatggagaagggaccaatcgacgcaataaccggtgaagcacggtattcactctcggaggataagcttattcggcagcaaatcgactataaaacactaacgctgaactgcgttaacccagagaacgaaaatgcgccagaagtgcccgtgaagggattggactgtgatacagtgacccaagcgaaggagaaactcctcgacgctgcatacaaaggcgtaccatattcccaacgacccaaggccgctgacatggatcttgaatggagacagggccgcatggcccgtatcattctgcaggacgaagatgtgaccaccaagatcgacaatgactggaaacgcctcaatacacttgcacattaccaggtcacggatggcagttccgtcgcacttgtccctaaacagactagcgcctataatatttccaatagcagtacatttaccaaaagcctgagccggtacgagtctatgttacgaacagccagttcccccgactctctgcgatccagaactccaatgatcaccccagacctcgagtcagggacaaaactctggcatctggtaaaaaatcatgatcacttagatcagcgagagggagaccgtgggtcaaagatggtgagcgagatctacctaactcgattgcttgcgacgaagggtaccctgcagaagtttgtagatgacttgtttgaaactattttttcaactgcgcacaggggctctgcactgcccttggcaatcaagtatatgttcgatttcctcgatgaacaggctgacaagcaccagatccatgacgccgatgtgcggcatacttggaagtctaactgtctgcccttgcgattttgggtgaatgtcatcaaaaatcctcaattcgtgtttgacattcataagaacagtattaccgatgcctgtctcagtgtagtggcccagacttttatggatagttgttccacctctgaacacaaactaggaaaggactccccctctaataagctgttgtatgccaaggacattcccaattacaagagctgggtcgagaggtattacgcagatattgccaagatgcccgcgattagcgaccaggatatgtccgcctacctggccgaacagagtcgactccatctttcccagttcaacagcatgtcagctctccacgagatctattcctatataactaagtacaaagacgagattcttgctgctctggagaaagacgagcaagccaggcggcagcgcttgaggagcaaactggaacaagtggtagatacgatggcactgtcatcctag

SEQ ID NO: 199839 - DNA, 5685 bp, synthetic construct
  misc_feature 1..5685: note = Description of Artificial Sequence: Synthetic coding sequence
  source 1..5685: mol_type = other DNA
atggagcagcggcggccctggccccgggccctggaggtggacagccggagtgttgtactgctatctgtagtgtgggtcctcttagccccacccgctgctggaatgccccagttctccaccttccacagcgaaaatagagactggactttcaaccaccttacagtgcaccaaggaaccggtgctgtatacgttggtgcgattaatcgtgtatataagcttaccgggaaccttactatccaggtggcccacaagaccggtcccgaggaagacaacaagagttgttatcctccactaattgtgcaaccatgttctgaggtgttgactcttaccaataacgtcaacaaactgctgattatcgactattccgagaaccgattgcttgcctgcggatccctgtatcagggtgtgtgcaagcttttgagattggatgaccttttcatactggttgagccttcccacaagaaggaacactatcttagttccgttaataaaactggcacaatgtacggagtgatcgtgcgttccgagggagaggatggaaagctgtttatcggcacagccgtcgatggtaagcaagattactttcctactctcagcagcaggaagctcccccgcgaccccgagtcaagcgctatgcttgattatgagctgcactccgattttgttagctctttaatcaaaattccaagcgacacgctggctctcgtgtcccatttcgatatcttttacatttatggctttgcatccgggggctttgtgtactttctgacagtgcaaccagaaacccctgagggcgtcgctattaatagcgccggcgacttattctatacaagtaggattgttcgcctctgtaaggacgaccccaaattccatagctacgtgtctctgccttttggatgtacacgagctggagtggaatatcggttgttgcaggccgcttatctagccaaacccggagactctctggcccaggccttcaacattacctcgcaggacgacgtcctgttcgccatctttagtaagggccagaaacaatatcatcaccccccagacgactcagcactgtgcgccttcccaattagagctatcaacctgcaaatcaaggagaggctgcagagctgctaccagggcgagggcaacctcgagctgaactggctcctcggaaaagatgtccagtgcacgaaggctcccgtcccaatcgacgacaatttctgcgggctggatattaatcaaccccttggcgggagcacccccgtagaaggtcttacactgtacacaactagtcgcgacaggatgacgtctgtggcctcatatgtttataatggctatagtgttgtgttcgtgggaaccaagtccggcaagctaaagaagattcgagccgacggcccaccacacgggggcgtccagtatgagatggtgtctgtgcttaaggacgggagcccaatactgcgggacatggcgtttagtatcgaccagagatacttgtacgtcatgagtgaacgccaagttactagagtgccggttgaaagctgcgaacagtataccacttgcggggagtgtctgtcgtccggagatccccactgtggctggtgcgcccttcacaatatgtgttcaaggagagataaatgccagcaagcatgggagccaaacagattcgccgcctctatctcccaatgtgtttctctcgcagtgcatcctagttctatcagcgttagcgagcatagccgcctcctgtccttagttgtctccgatgcccccgatctgtctgccggcatcgcatgcgcatttggcaacctgacagaggtggagggccaggtgagcgggagtcaagtgatatgcatttctcctgggcctaaagacgtcccagtcattcccctcgatcaggattggttcggtctcgagctgcagctgagaagtaaggagactggaaaaatctttgtgtctactgagttcaagttctacaactgttccgctcaccaattgtgcttaagttgtgttaactccgcctttagatgccattggtgcaagtatagaaacctgtgcacacacgaccccacaacctgtagcttccaggagggacgaatcaatatttcggaggactgcccccaactcgtcccgaccgaggaaattttaattcccgttggcgaggttaagcctatcaccctgaaagcccggaacctgccgcagccccagagcggacaaaggggatacgagtgcgtgctgaatatacagggagccattcaccgcgtgccggcgcttcggtttaattcctccagcgtgcagtgccagaacagttcctaccagtatgatggaatggatatttcaaacctggctgtggatttcgctgtggtctggaacgggaatttcattattgataatccgcaggatttgaaagtccatctgtacaaatgcgccgcgcagagggagagttgtgggctctgcctcaaagccgaccgtaagttcgagtgtgggtggtgctccggcgaaagacgctgcacattgcatcagcactgcactagccctagttcaccctggctggactggagctctcataacgtgaaatgttccaacccgcagatcactgaaatcttaacagttagcggccctccagagggagggacgcgggtgactatacacggcgtgaaccttgggttagattttagtgagatcgcgcaccacgtgcaagttgccggcgtgccatgcacccccctgcctggggaatatataatcgccgagcagattgtgtgtgagatggggcatgccctggtcggaaccacttccgggcccgtgaggctgtgcattggcgaatgcaagccagaattcatgactaagagccatcagcagtatactttcgtgaatccatctgtcttgtctttgaatccaatccgagggccagagagtggaggcaccatggtgaccataacaggtcactacttgggagcagggtcctccgtggcagtttatttggggaatcagacttgtgagttctatgggcgctctatgtccgaaattgtatgcgtgagccctccatcctcaaatggcctgggcccggttcccgtcagcgtgtccgtggaccgcgcccacgtagactcgaatctgcagtttgagtacatcgacgatcctagagtacaaaggattgagccagaatggtctatcgcctcaggccacacccctcttacaattacaggtttcaatctggatgttatccaggagccccgaattcgagtcaaatttaatgggaaggagagcgtcaacgtctgcaaagttgtgaatactaccacgttgacatgccttgcgccttctctgacaaccgactacaggccaggactcgatacagttgaacggcccgatgagtttggttttgtgttcaacaacgtgcagtctctgctgatctacaacgataccaaattcatttattaccccaatcctacatttgagttgttatcgcccaccggagtgcttgatcagaagccagggtccccgatcattctcaaaggaaagaatctctgccctccagcatccggaggagcgaaactgaattatactgttctgataggtgagactccctgcgctgtaaccgtgtcggagacccagctgctttgcgaacctccaaaccttacaggccagcataaagtcatggtgcatgtggggggcatggtgttctcgccagggtcagtttcagtgattagcgactcattactgactctgccagccatagtcagcattgcagccggcggcagtttgctgctgatcattgttattatcgtactgatagcttataagagaaaaagtagagagaatgatcttactctgaagagactgcagatgcagatggacaatctagaatctcgggttgcattagaatgcaaggaggcattcgctgagctgcagacagatattaacgaattgacctcagaccttgaccgttccgggatcccatacctggattaccgcacctacgcaatgcgcgtgctcttcccgggaatcgaagaccatcctgtcctccgggagttggaggttcagggcaacggtcagcagcatgtggagaaagcactgaagctatttgcgcagctcatcaacaataaggtgtttctgctcacatttatccggacccttgaactgcagcgaagtttcagcatgcgagacaggggcaatgtcgcttcattgataatgactggtttgcaaggcagactggaatatgccactgacgtgctgaaacaactgctgtccgacctgatcgacaaaaacctcgaaaataagaaccacccaaaactgctgctgagacgaacagaaagcgtggcggagaagatgctgaccaattggtttgcttttctgctgcacaagttcttgaaggagtgcgctggagagcccctctttatgttgtactgtgcaatcaagcaacagatggagaaggggccaatcgatgccatcaccggagaagctcggtacagtctgagtgaagacaagcttatcaggcagcaaatcgaatacaagacattaatcctgaactgtgtcaaccctgataatgagaacagtccagaaattccggtgaaagtgctcaactgcgatacaatcactcaggttaaggaaaaaatcctcgatgccgtctataaaaatgtgccatactcccagaggccaagagcagtggacatggacttggagtggaggcaggggaggattgcacgcgtggtgctccaggacgaagatattaccactaagattgaaggtgactggaaaaggctcaatacgctgatgcactaccaggtgagtgacaggagtgtggttgcgctggtaccaaaacagacctctagttacaatattcccgcgagcgcctctatatcccgaacatctatttctcggtacgattcctcattccgctatacgggaagccccgatagcctgaggagccgtgctcctatgatcacacctgatctcgaatccggtgtgaaggtgtggcatctggtgaaaaatcacgaccacggagaccagaaggagggggatcgtggcagtaagatggtgagcgaaatataccttacccgactgctggctaccaagggaaccctgcagaaatttgttgatgatctgttcgagacccttttcagcaccgtacaccgtgggagtgccctgccacttgccatcaaatacatgtttgacttcctggatgaacaagctgaccgccattctattcatgacactgacgtgagacacacctggaaatcaaactgtcttcccctgcgattttgggtgaatgttataaaaaacccacagtttgtgtttgacatccataaggggagcataacggatgcatgccttagcgtggtggcccaaaccttcatggattcatgctcaaccagtgagcacagactgggtaaagactcaccctccaataagctgctttacgccaaggatatcccttcttataagtcctgggttgaaagatattacgctgatatcgccaaacttcccgccattagtgatcaggatatgaatgcgtacctcgcagaacagagtagactgcatgcagtcgaatttaacatgttgtcagctcttaacgaaatctattcttacgtgtccaagtactccgaggagttaatcggtgcccttgaacaggacgagcaagcacggcgccagcggttggcgtacaaagtggagcagctgatcaatgccatgtcaatcgaatcttag

SEQ ID NO: 199840 - DNA, 5685 bp, synthetic construct
  misc_feature 1..5685: note = Description of Artificial Sequence: Synthetic coding sequence
  source 1..5685: mol_type = other DNA
atgaaggccatgccctggaactggacctgcctgctgagccacctgttgatggtgggcatgggctcctcaaccctgcttactcgccaacccgctcctctttcccaaaaacaaagaagcttcgtcacctttagaggcgaaccagccgaaggtttcaaccacctggtagtggatgagcgcaccggccatatctatctgggtgcagtcaaccgaatttataagctctcctccgatcttaaagttcttgtaacacacgagaccgggccagacgaagataacccgaaatgctacccgccccggattgtccagacctgtaatgagcctctcactaccacaaacaacgtcaacaaaatgttactcatcgactataaggagaatcgcctgatcgcctgcgggagcctttatcaaggtatttgtaagctcttgaggttagaggatttgtttaagctaggtgagccttatcataagaaagaacattatctgtccggtgttaacgaatctggtagcgttttcggcgtgattgtctcatactcaaaccttgacgataagctctttatcgcgacagccgtcgacgggaagcctgaatacttccctaccattagctcacgcaagctgaccaaaaactccgaagcggacggcatgttcgcttacgtcttccacgacgaatttgtggcctccatgattaagatcccatccgacaccttcaccattatcccggactttgatatctactatgtgtacggattttcttccggaaacttcgtgtatttcctcactctgcagccagaaatggtcagcccaccaggatccacaacaaaagagcaggtgtatacatccaagctggtgcggctatgcaaggaggataccgccttcaactcctacgtggaggtgcctattgggtgtgaaagatctggggtggaatatcgtctcttacaggccgcgtatttgtcaaaggctggcgccgttcttgggaggacgttaggagtacacccggatgatgatctcctgtttacagtgtttagtaaaggccagaagaggaagatgaagtcgttggatgagagtgctctctgcatttttatcctgaagcaaatcaatgaccgaatcaaagagagattgcagtcttgctatcggggtgaaggcactctggatctcgcctggcttaaggttaaagacattccgtgtagctcagccctgctgaccattgatgacaacttttgtggcctcgatatgaacgcccccttgggcgtgagcgacatggtacgtggcatcccagtatttacagaagatcgcgatagaatgacttcagtgatcgcttacgtgtacaagaatcattctctcgccttcgttgggaccaaaagtggaaagttgaaaaaaatcagggtggatggcccaagaggcaatgcgctccaatatgaaactgtgcaggtcgtggacccggggccagtcctgcgagatatggcctttagtaaggaccatgagcaattgtacatcatgtctgagagacaacttacccgagttccggtcgaatcgtgcgggcagtatcagagttgtggtgagtgcttaggctctggggatccccactgtgggtggtgcgtcttgcacaacacatgtacccgtaaggagcgctgcgagcgtagtaaggaaccccgcaggttcgcatcggaaatgaaacaatgtgtccgtttgaccgttcatcctaacaacatctcagtgagccagtacaatgtcctattggttctagaaacatacaatgtgcctgagctatccgctggggtcaattgtacctttgaggacctgtctgaaatggatggactggtcgttgggaatcaaattcagtgttactctccagccgctaaggaagtgccaaggatcattacagagaacggagatcaccatgtggtccagttacagttaaaaagcaaagagactggaatgacatttgcctctacctcattcgtgttctacaactgctcagtgcataattcatgcctgtcctgcgttgagagtccataccggtgccactggtgtaagtatcgccatgtgtgcacccatgatcccaaaacgtgctcctttcaggagggacgcgtgaagcttccagaagattgccctcagctactccgtgtggacaaaattctggtgcctgtcgaagttattaaacctatcactctcaaggctaagaacttaccacagccacagtcagggcagcgcggttatgaatgcatcctaaatattcaaggttcagagcagagggtgcctgccctgagatttaattcttcgtccgtgcagtgccagaataccagttacagctacgaggggatggagatcaacaatttaccagttgagctgacggttgtctggaatgggcactttaacattgacaatcccgctcagaataaggtgcatttatataaatgtggggccatgagagaaagctgtggattatgtctgaaggccgaccctgattttgcctgcggatggtgtcagggtcccggccaatgtaccttaaggcagcactgtcctgcacaggaatcacagtggttagaattgtctggagcaaaaagcaaatgcacgaaccctagaatcacggaaattatccctgtgactggcccaagagagggaggtacaaaggtcaccattaggggagagaacctcgggttggaatttagagacattgcctcacacgtcaaagtggctggggtggaatgctccccgctagtcgatggatatatcccagccgaacagatcgtctgcgagatgggagaagccaaaccatctcagcacgctggctttgtcgagatctgtgtggctgtttgccgacccgagttcatggcccgctctagccagctgtattatttcatgaccctcactctgtcagatctgaagccttccagggggcctatgtcaggggggacacaggtcacgattacaggaactaacctgaatgctggcagcaacgtagttgtgatgttcggaaaacagccttgtctgtttcaccggcgcagtccaagttacatcgtatgtaataccacatcctccgacgaggtgctggaaatgaaggtgtcagtccaggtggaccgggctaaaattcatcaggatctggttttccagtatgttgaagatcccaccatagtgaggatcgagccggaatggagcatcgtgtccgggaacacgcctatcgccgtgtggggcacccatctagatctaattcagaatccccagatccgtgccaagcatggggggaaggagcacattaacatatgtgaagtcctgaatgctaccgagatgacctgtcaggctccagccttggctctcggacccgatcaccagtccgacctcactgagagaccagaagagttcggtttcatactggacaacgtgcaaagccttctcatcctgaataaaaccaactttacatactaccccaacccggtcttcgaggccttcgggcctagtggcatcctggaactaaagcctggtactccaataattctgaaaggaaaaaacctcattcccccagtcgcagggggaaatgtgaaacttaattacactgtcctggtgggtgagaagccttgcacagtaactgtgtctgacgtgcagctgctttgcgaatcacctaacctgattggtcggcataaagtgatggctcgggtcggcggtatggagtactcgccagggatggtgtatattgcgcctgactcaccgctgtcgctccccgccatcgtgtccatagctgtggcaggaggcttgctgataatcttcatcgtggccgtcctgattgcctacaaacgcaaatcaagagagtctgacctgacactgaagcgtctccagatgcagatggataatttggagtcccgggttgcgttagaatgcaaagaagcctttgcagaactgcaaacagatatccatgaactgacttccgatctggatggcgcaggcatccccttcctggactacaggacctacactatgcgtgttttgtttcccggtattgaggaccacccagtgctgcgcgatcttgaggtccccggctacagacaagaaagggtggagaaaggattgaaactattcgctcagcttatcaataacaaggtgttcctgctctctttcatcagaaccttagagtctcagcgctccttttcaatgcgtgatcgcggcaacgtcgccagcctaatcatgaccgtgctgcaatcaaagttggagtacgccaccgatgtactgaaacagctgctcgccgatctgattgataaaaatctcgagtctaagaaccacccaaagctcttgctcaggcgcacggagagcgtggctgaaaagatgctgacaaattggtttaccttcttgctttataagttcttaaaagaatgtgcaggggaacccctctttagcctattttgtgccattaaacagcagatggagaaggggccgatcgacgccatcaccggcgaagcacgatattctctgtctgaggacaagctgattcgacaacagatcgattacaaaaccctagtactaagctgcgtgagccctgataacgctaattcccctgaggtgccggtaaaaattctgaactgtgacaccataacacaggtcaaagaaaaaatcctcgacgcaatcttcaagaacgtcccttgctcccatcgtcccaaggcagctgatatggacctcgaatggagacaggggagcggtgcgagaatgattctgcaggacgaagatatcaccaccaagattgagaatgattggaaacggctgaataccctcgcacactaccaagtgccagacgggtccgtggtggctcttgtttctaaacaagtgaccgcctataacgcagttaataactcaaccgtgtctcgtacctcagcctcaaaatatgagaatatgattcgatacaccgggtccccagactccctccgttcccggacgcccatgatcacacccgatctcgagtctggcgtgaagatgtggcatctcgtgaagaaccacgaacatggggaccagaaggagggagatcggggttccaaaatggtgtcggagatctatttaacacgactgctggcaaccaagggcactctacagaagttcgtggatgacctttttgagaccattttttccacagcacatagaggatccgccttgcctctggcaatcaagtatatgttcgactttctggacgagcaagccgacaaacacggcatccatgatcctcatgtacgacacacctggaaaagcaattgcctccctctaaggttttgggtaaatatgataaagaacccccagttcgtgttcgatatacataagaatagtattaccgacgcttgcttgagtgtggttgctcagacctttatggatagctgctcaacgtctgaacaccgactcggtaaggacagtccatcaaataagctcctctacgcaaaggatatccctagctataagaactgggtcgaacgatattattccgacatcggaaaaatgcccgcgataagcgatcaggatatgaacgcctatttggccgagcagagtcgcatgcatatgaacgagtttaacactatgagtgccttatcagagatttttagttacgtcggcaaatacagcgaggagatcttaggtcccctggatcacgacgaccagtgcgggaaacaaaagcttgcctataagttggagcaggtcatcacactgatgagcctggatagttag

SEQ ID NO: 199841 - DNA, 5685 bp, synthetic construct
  misc_feature 1..5685: note = Description of Artificial Sequence: Synthetic coding sequence
  source 1..5685: mol_type = other DNA
atgaaggccatgccctggaactggacctgcctgctgagccacctgctcatggtcggaatggggagcagcactttgctgactcgacaacccgcccctctgtctcagaagcagcgctcttttgtgactttcagaggagaacctgcagaaggattcaaccacctcgtcgtcgatgaaaggacaggccacatctatctcggtgctgttaatagaatttacaaactcagctctgatctgaaggtgctggtcacacatgagacaggacctgacgaagacaacccaaagtgctacccaccgcgtatcgtgcaaacttgcaacgaaccgctgactaccactaacaacgtcaataagatgttgctgattgattacaaggagaaccgccttattgcttgtggatccttataccagggaatctgcaaattattgcgattggaagatttgttcaaactaggagagccttaccacaagaaagagcattacttgtctggagtgaatgaatccggctctgtgttcggagtcatagtatcttacagcaacctggatgacaagcttttcatcgctactgccgttgacggcaaaccagaatatttccctactatctcctcacggaagcttaccaagaactcagaggccgatgggatgtttgcttatgttttccacgacgaatttgtggctagcatgatcaagatcccctcggatacctttactattataccagactttgacatctactacgtgtatggattctctagtggtaactttgtatatttcttgacgttgcagcccgagatggtgagccccccgggcagcacaaccaaggagcaggtgtacacctccaaactggttaggttgtgtaaggaggataccgctttcaatagctacgtcgaggtgcctatcgggtgtgagaggagcggagtcgagtaccgccttttacaggccgcttaccttagtaaggcgggggcggtcctgggacgcacactcggagttcaccctgatgatgacctgctcttcacagtgttcagcaaaggacagaaacggaaaatgaagtccctagacgagtcagctttgtgcatcttcattctaaagcagataaatgatagaatcaaggaacggcttcagtcctgctatcggggcgagggaacgcttgacctggcttggttaaaggtaaaagatatcccctgttcttctgcattgctcaccatagatgataacttttgtggcttggacatgaacgcgcctctcggtgtatccgacatggtgcgaggtatcccagtgttcaccgaggaccgcgataggatgactagtgtcattgcctatgtgtataagaaccacagcctggcgttcgtgggaacgaagagtggcaagttaaaaaagatcagggtcgacggacctaggggtaacgctctgcagtatgagaccgtacaagtggtcgatcccggcccggttctccgtgatatggcattttcaaaagaccacgagcagttatacatcatgagcgaacggcagctcacgagagttcctgtggagtcttgcggccagtaccagagctgcggtgagtgcctcggatccggagatccacattgtggctggtgcgtgttacacaacacttgtaccaggaaagaacggtgcgagcgctccaaagagccgcgtcgttttgctagtgaaatgaaacagtgtgttagactaaccgttcatcccaataatattagtgtttcacagtacaacgtactcctggtgctggaaacgtataatgttcctgagcttagcgcaggcgtgaattgtacctttgaggatttaagcgaaatggatggtttggttgtgggtaatcagatccagtgttatagccccgcagccaaagaagtaccgagaatcatcacagaaaacggcgaccaccatgtcgtgcagttgcagctgaaatccaaggaaacaggaatgactttcgcgagcacgagcttcgtcttttataattgttcagtgcacaatagctgtctgtcttgtgtcgaatcaccatacaggtgtcattggtgtaaatatcgtcacgtctgtacccatgaccccaagacttgctccttccaggagggcagagttaagctaccagaagattgcccccaacttttacgcgtcgacaagatcctagtgcccgttgaagtcatcaagcccattactctgaaagcgaaaaacttgccgcaaccccaatcaggtcagcgcggatatgagtgtatattgaacatccaggggtctgaacagagggtcccagctcttagatttaactcctccagcgtgcaatgccaaaatacctcgtacagctacgagggaatggagatcaataacctgccggttgaattgaccgtagtctggaacggtcatttcaacatagacaacccagcgcaaaataaggtccacctatacaaatgtggcgccatgagggagtcttgcggattgtgtctcaaggcagatcctgacttcgcctgcggttggtgtcagggcccaggacagtgtacactgagacagcactgtccagcccaagagtcacaatggctggagctttccggcgccaagagtaagtgcaccaatccccgaattaccgaaataataccagttaccggtccccgggaaggagggaccaaggttactattagaggagagaatttggggctggagttcagagacattgcatctcacgtgaaggtggccggagtggaatgctccccgcttgtggacggctatatccctgctgaacagatagtgtgtgagatgggagaggccaaaccatctcagcacgcagggtttgtggaaatttgtgtggcggtgtgtcgacccgagttcatggcccggtcctcccagctctattacttcatgaccctcaccctttctgatctgaagccatctagagggcccatgagtggtgggacccaggtcaccattacaggaactaacttgaacgctggatccaatgtggtggtgatgttcggcaagcaaccttgcctgtttcaccggaggagcccatcctatatcgtttgtaataccacttctagtgacgaagttttggagatgaaggtgagtgttcaggtcgacagagccaaaattcaccaggacctggtgtttcagtatgtcgaagatcctaccattgtgcgaattgagcccgagtggagcattgtgagcggtaatacgcctattgcggtttggggcacacatctagatttaatccaaaatccacagattagagcaaagcatggagggaaagaacacatcaacatctgtgaagtcttgaatgctaccgaaatgacctgccaagcgccagccctggccctgggccccgaccaccagtccgatctcactgagaggccagaggagttcgggtttatcctggacaatgtgcagagtcttcttatactgaacaaaacaaacttcacttattatcctaaccctgtttttgaagcctttgggccttcagggatactggagctgaaacctggcacccctatcatcctcaaaggaaagaaccttatccccccagtggcgggtggaaatgttaaactcaattacacggtccttgtgggcgaaaagccatgtacagtgaccgtctcagacgtgcaactgctttgcgaatccccaaacctcatcggcaggcataaggtcatggctcgtgtgggtggaatggagtattctcctggaatggtgtatattgcacccgactcccctctttctttacccgccattgtctctatagccgtggccggcggactgctgatcatctttattgtcgcagtgcttatcgcgtacaaacggaagagccgtgagtcagaccttacccttaagcggttacagatgcagatggacaacttggaatcccgggtggctctcgagtgtaaggaagcctttgctgaactccagactgacattcatgagctgactagtgaccttgacggtgcagggatacccttcctggactatcggacatataccatgagggtcctttttccaggaattgaggatcacccagtcttgagggacttggaggtgccggggtatcgacaagagagggttgagaagggacttaaactgtttgcgcaactgattaacaacaaagtttttctccttagctttataagaaccctggagagtcaacgttccttcagtatgagggaccggggcaacgtggcgtctcttataatgacagtgttgcaaagtaagctggaatatgcaacggatgtcctaaagcagctcctggcggatctgattgacaaaaatctggaatctaaaaaccatcctaagctcctgcttcgccgcaccgaatctgtggccgaaaaaatgctgacaaattggtttaccttcctcctgtataagttcctcaaggaatgtgcaggcgaaccgctctttagcctgttctgtgccataaaacaacagatggagaagggcccaattgatgccattacaggggaggcgcgatacagtctttcagaagataaactcatccgtcagcagatagactacaaaactcttgtcttaagttgtgtgagtcccgacaatgcaaattcacctgaagttccagtcaaaattcttaactgcgatacaatcacacaagtaaaggaaaaaatcttggatgccattttcaagaacgtcccttgttctcaccgacccaaagcggccgacatggatctggagtggaggcagggttctggcgcgcgcatgattcttcaggatgaagacatcaccacaaaaattgagaatgactggaagcgattaaataccctggcccactaccaggtgcccgacggatctgtcgtggcattagtatctaaacaagtgacagcttacaacgcagtcaacaactcaactgtctcgcggacaagcgcatccaaatacgaaaacatgatcagatataccggctcgccagactcacttcggagcagaacccctatgattacccccgacctggaatctggagtgaaaatgtggcacttggtgaaaaatcacgagcacggtgaccagaaggagggcgatcgtggctcaaagatggtgtccgagatctatctgacgcgcctgttagctacgaagggtaccctacaaaaatttgtcgacgatttatttgaaacaatcttctctaccgcgcatcgtggttctgcgctgccactggcaattaaatacatgtttgattttctcgacgagcaagcagataaacacggcattcacgaccctcacgtgaggcacacctggaagtctaattgcctacctctccgtttctgggtcaatatgattaagaatccccaatttgtatttgatatccacaaaaattccatcactgatgcttgcttgagcgtggtggcccagaccttcatggactcctgtagtacttcagaacacaggctgggaaaagatagcccatcaaacaagctactctacgctaaagacatcccttcttataagaactgggtggagcgatattactcagatatcggaaaaatgcctgccataagcgaccaagacatgaatgcataccttgccgaacaaagccgcatgcacatgaatgaattcaatactatgtcagcccttagcgagatcttcagctatgtgggcaagtatagcgaagagattcttggtcccctcgaccatgatgaccaatgtgggaaacagaaactggcttacaagttggaacaggtcattacactgatgtccctcgattcgtag

SEQ ID NO: 199842 - DNA, 1569 bp, synthetic construct
  misc_feature 1..1569: note = Description of Artificial Sequence: Synthetic coding sequence
  source 1..1569: mol_type = other DNA
atgaaggccatgccctggaactggacctgcctgctgagccacctgctaatggtcggtatgggttcctctacattgctgacccggcagccagccccgttgagccagaagcagcgctctttcgttactttccgtggggaaccagctgaaggttttaatcacctcgtggtcgacgagagaacaggtcacatctacctcggcgccgtgaaccggatttataaactgtcttccgacttgaaggtgctcgtcactcatgagaccggccctgacgaagacaatcctaaatgctatccacctcggatcgtgcagacatgcaatgaaccacttactaccacgaataatgtaaacaagatgttgttaatcgactacaaggagaaccgtttaatcgcttgcggaagcctctatcagggcatctgtaaactcttgcgcttagaggatcttttcaaactgggcgaaccttaccacaagaaggagcactacctcagcggggtgaacgagagcggcagcgtgtttggtgtgattgtttcatacagcaatttggatgataaactgtttatcgctacggctgtcgatggaaagcctgagtattttcccacgatctcctcaaggaaactcaccaagaattcagaagccgacggaatgttcgcctacgtgtttcacgacgaattcgttgcttccatgattaagatcccgtctgacacctttaccatcatccctgatttcgatatctattacgtatacggattttcttccggaaacttcgtttattttttgacactgcaacccgagatggtgagtccccccgggagtaccaccaaggagcaggtttatacctccaagctggtccgtctttgcaaggaagatactgccttcaatagttacgtggaagttccaattggatgcgaacggtccggggtggaatatcggttgctgcaggcagcttatctgtccaaagccggtgctgttctgggccgtactctaggagtccacccagacgacgatctcctttttacagtcttttcaaaaggccagaaaaggaagatgaagagcttggacgaatcagcactttgcatatttatactgaagcagatcaacgataggatcaaagagcgccttcaatcctgttaccgtggcgaggggacattggatttggcctggctcaaagtgaaggatatcccctgttcctctgccctgttgacaatcgacgataacttctgtggactggacatgaacgcgccacttggcgttagtgacatggtacgcggcatccccgtgtttactgaggatcgggacaggatgacttccgtaatcgcttacgtgtacaaaaatcattctctagccttcgtaggcactaaatctggtaaactaaaaaagagttttggtactggaccccagggcggcattacccaggaatggattggcgtggagggggaccctccaggcgccaatatcgcctcccaagagcagatgctctgcgtgtacctgcagtgctcttcccataaggccatttccgaccaaagggtgcagccactcctctgttgctttcttaacgtccccggtaactctagttag

SEQ ID NO: 199843 - DNA, 1479 bp, synthetic construct
  misc_feature 1..1479: note = Description of Artificial Sequence: Synthetic coding sequence
  source 1..1479: mol_type = other DNA
atgaaggccatgccctggaactggacctgcctgctgagccacctgctaatggtgggtatgggatcttccactctgctgacacgacagcctgcccctctatcacagaaacaacgctctttcgtgacctttcgaggcgagccagctgaggggtttaatcacctggtcgtggacgagagaactgggcacatttacctcggagccgtcaataggatctacaaactatcttcagatttgaaagtcctcgtcacacatgagacgggcccagatgaagacaacccaaaatgttatccccctcgtatcgtccagacttgcaatgagccgctcaccactacgaataatgtgaataaaatgttactgattgactataaggagaatcggttaatcgcctgcggcagtctgtatcaggggatatgtaagcttttacgcctggaagatctgttcaagctgggggagccttatcataagaaggagcattacctgtcgggcgtgaatgagtccggttccgtgtttggagtgattgtgtcgtactctaacctcgacgacaaattatttatcgccactgccgtcgacgggaaacccgagtattttccgacaatctcttctaggaagctgaccaaaaattccgaagcagacggcatgtttgcctatgtgttccacgacgaatttgtggccagtatgattaaaattccgtctgacacattcaccatcatcccagactttgacatctattatgtctatggattctcttcaggaaactttgtgtattttttaacactccagcctgagatggtgtccccacccggaagcaccacaaaggaacaggtctacacttccaaactggttagactctgcaaagaggatacggccttcaacagctacgtcgaagttcctatcggctgcgagagatccggcgtggaataccgtcttcttcaggcagcgtacctgagcaaggcaggtgccgtgctgggacggactctcggggtgcaccctgatgacgacctgctgtttacagtgtttagtaagggtcagaagcgcaaaatgaagagtcttgatgagtctgctttgtgcatcttcattctgaagcagattaacgataggatcaaagagcgactgcagagctgttaccgcggcgagggcactctggatctggcatggttaaaggtgaaggacattccctgctcatccgctctattaactattgacgacaatttttgcggcctggatatgaacgccccattgggcgtgagtgatatggtgagggggattcctgtgtttaccgaagaccgcgaccgcatgaccagtgttattgcctacgtatataaaaatcactcgcttgccttcgtggggacaaaaagcggcaaactgaaaaagatgcctggtacttctctgtgccctactttggagttacagaccggacccaggtcccacagggctactgttacactggaactgctgttctctagctgtagttccaactag

SEQ ID NO: 199844 - DNA, 5517 bp, synthetic construct
  misc_feature 1..5517: note = Description of Artificial Sequence: Synthetic coding sequence
  source 1..5517: mol_type = other DNA
atggccctgcagctgtgggccctgaccctgctgggcctgctgggcgccggagcttccttgcggcctcggaagttggacttttttagatcggagaaggagctgaatcatctcgccgtcgacgaagccagcggtgttgtctatctcggagccgtgaatgccctgtaccagctggatgccaagttacaactcgagcagcaggtcgcaactggaccagccctcgacaacaagaaatgtacaccgcctatcgaggcatcccagtgccacgaggctgagatgaccgataacgtcaaccaactgctcctactcgaccccccccgaaagcgtctagtggagtgcggatctctgttcaaaggtatctgcgccctcagggcactcagcaacatttctctgcggctgttctacgaagatggttcgggggagaaaagcttcgtcgcctcgaatgacgaaggtgtggctaccgtgggtctggttagttccaccggtcccggaggcgatagagtactgttcgttggtaaaggtaacggccctcatgacaacggaataatagtgtccaccaggcttctagatagaacagacagtagggaagcgtttgaagcctacactgatcacgccacctacaaagccgggtatctgtctactaatactcagcagtttgtcgcagcttttgaggacgggccctatgttttcttcgtgtttaaccagcaggacaagcatcctgcccgcaacagaaccctgttggccagaatgtgcagagaggacccaaactattattcctatctggaaatggatctccagtgcagggacccagatattcacgcagctgcatttggaacatgtctggccgcgtctgtggccgccccaggatcgggaagagtcctgtatgcggtgtttagccgagactctagatcttccggcgggcccggagccgggctatgtctttttcccctggataaagtgcacgctaagatggaagcaaaccggaatgcctgctatacaggcacaagagaagcccgggatattttctacaagcctttccatggcgatatacagtgcgggggccatgcacccggatctagtaagtccttcccgtgtgggtccgagcatctgccctatccactagggtctagagatggactaagaggcaccgcagtcctgcagaggggtggattgaatctaaccgccgtcacggtcgcggcggagaataatcacacagtagccttcctgggcacatccgacggaagaattttgaaggtgtacctcacacccgacggtacctcttctgaatatgactccattctggtcgaaattaacaagagggttaaacgggacctggtgttgagtggcgatttaggcagtctctacgccatgacgcaagacaaagtgttccgcctacctgtacaggaatgcctgtcttatccaacttgtactcaatgccgcgactcccaggacccctactgcggatggtgcgtcgttgaaggaaggtgcactcgtaaggctgagtgtcctcgagcggaagaggcatcccattggttgtggtcccgaagcaagtcctgcgtggccgtaacgtcagcgcaacctcagaacatgtcaagacgcgctcaaggagaagtgcagctgacggtgagtcctctgcctgccttgagcgaggaggacgaactgctttgcctttttggggaatccccgccgcaccctgccagggtggagggagaggcggtgatttgcaattcacctagctctatccctgttactccccccggtcaagaccatgttgcagtgaccatccaattgcttctccggcgcggaaacatatttctgaccagttaccagtaccccttttacgactgccggcaggctatgagtcttgaggagaatctgccgtgtatctcatgcgtgtccaataggtggacctgtcagtgggacctcagatatcatgagtgccgcgaggcctctccaaatcctgaggatggaattgtacgggcccacatggaagactcctgtccccagttcctcggtccatctcctctagtgatccctatgaatcatgaaaccgacgtcaacttccaaggcaagaacctagataccgttaagggctcaagtttacatgtcggcagtgacttgctgaaatttatggaacccgtaacaatgcaggagagtggaacttttgcgtttcgcacccctaaactttctcatgacgctaacgagacactacccctgcacctttacgtgaagtcatacggcaagaacattgactctaaactccacgtgactctgtataactgcagctttggccgctctgattgcagtctgtgccgggccgctaatcccgactacagatgtgcatggtgtggcgggcagtcccggtgtgtttacgaggccttgtgcaacaccacatcggagtgcccacctcctgtgatcacaaggatccaaccagagactggtcctctcggaggcgggattagaatcaccatacttgggtccaatttgggcgtccaggccggtgatattcaacggatcagcgtggccggtaggaactgcagcttccagcccgagcgatattcagtaagtacaaggatcgtatgcgttatcgaagcggctgaaacacctttcaccggaggagtggaggtggatgtcttcggcaagctcggccgttccccaccaaacgtacagttcacctttcagcagccaaaacctctatcagtggagccccagcaggggccacaagccgggggtaccaccctaaccatccacggaactcacttggacaccggtagccaagaagacgtaagagtcacactgaacggtgtgccatgcaaagtgacaaagtttggcgctcagttgcagtgtgttacggggcctcaagcgactagggggcaaatgcttctggaggtgagctacggagggtcccccgttccgaaccctgggatcttcttcacatatcgggaaaatcccgtgctcagagctttcgaaccgcttagatctttcgcctccggtggacgctctatcaatgtaacagggcagggatttagtctgatccagcggttcgccatggtagtgatcgcagaacctttgcagtcttggcaacctccaagagaggcagaaagcctccagccaatgacagtggtgggaaccgactacgtgttccacaatgataccaaagtcgtcttcctatcacccgccgtgccggaggaacccgaagcctataaccttactgtgcttatcgaaatggacggccaccgcgccctattgcgaaccgaggcgggcgcttttgaatacgtgcccgatcccacttttgagaattttaccggcggagtcaaaaagcaggtgaacaagctgattcatgctcgcggaacaaacctgaataaggccatgaccctgcaggaggccgaggccttcgtcggcgctgagagatgcacgatgaaaacccttacagaaacggatctctattgcgaacctccagaggtgcagccacccccaaaacggagacagaagcgggacaccacacataacctgccagaatttattgtgaagtttgggtccagggagtgggtgctcggaagggttgaatatgatacaagggtatcagatgtcccactaagcctcatacttccactagtgatcgtgcctatggtcgtggtgatagctgtgtccgtgtattgctattggcggaaatcccagcaagcagagcgggagtatgagaagatcaaaagccagcttgaaggactggaggagagtgtccgggataggtgcaaaaaggaattcacggacctgatgattgagatggaggaccaaacaaacgacgtgcacgaggccggaatcccagtcctggattataagacatacacagatcgagtttttttccttcccagcaaggacggagataaggatgtgatgatcacggggaaattagacatcccagagcctagaaggcctgtggtggagcaggctctctaccaattttctaatttattgaactctaagagcttcctgataaattttatccacaccctggaaaaccagcgcgagttcagcgcaagagctaaagtgtatttcgcgtctctgctgactgtcgcattgcatggcaaattggagtattatactgatataatgcataccctgttcctggagctgctcgagcagtatgtggttgctaagaatcctaagctgatgctacgccgatccgagactgtggtggagagaatgcttagcaattggatgtcgatctgcctgtaccagtacctgaaagactctgcaggagaaccattatataagctgtttaaagcaatcaaacaccaggtggagaaggggcccgtggacgcggtgcagaagaaagctaagtacacactcaatgataccgggcttctaggggacgatgtagaatatgcccctctgaccgttagcgtaatcgtgcaagatgaaggggttgacgccatcccggttaaagtgctcaattgtgataccatatcgcaggtaaaagaaaaaatcatcgaccaagtctatagggggcaaccctgcagctgctggccacggcccgactccgtggtgcttgagtggcgcccgggctccacggcccaaattctgagtgaccttgatcttacctcacagcgggagggtagatggaagcgcgtgaatacgctcatgcattataacgtgcgggacggagccaccctcatactgtcaaaggtgggcgtctctcagcaaccggaggacagccagcaggacctgccgggggagaggcatgccctgctggaagaggaaaaccgcgtgtggcatctcgtgcgccctaccgacgaagtggacgaaggcaaaagcaaaaggggctcagtgaaggaaaaggagcgaaccaaggctatcactgaaatatacttgacccggttactgtctgtcaagggaacactgcaacagttcgtggataacttcttccaaagcgtgttagctccaggacatgccgtgcccccagcggtcaaatacttcttcgattttctcgacgaacaagccgagaaacataatatccaagacgaagacactatccacatctggaagacgaattctctgcccctcagattttgggtcaacatccttaagaatccccacttcatttttgatgttcacgtccatgaagtcgtggatgccagtctcagcgtgatcgcacaaacgttcatggacgcatgcactcgcactgagcataaactcagccgtgatagcccgagcaacaaactgctttatgccaaggagatttcgacctacaagaagatggtcgaggattattacaaaggcataagacagatggtgcaagttagcgatcaggacatgaatacacatcttgccgagattagccgggcccacacagacagtcttaacaccctagtggccctgcatcagctgtaccagtacacacagaagtactatgacgaaatcatcaacgccctggaggaggacccagcagctcagaagatgcagttagccttccgtctccaacagattgccgctgcactggagaacaaggtaaccgatctctag

SEQ ID NO: 199845 - DNA, 1044 bp, synthetic construct
  misc_feature 1..1044: note = Description of Artificial Sequence: Synthetic coding sequence
  source 1..1044: mol_type = other DNA
atgcacaccctgttcctggagctgctggagcagtacgtggtggccaagaaccctaaactgatgctgcgtcggtccgaaacagtggtggagcggatgttgtctaactggatgtccatttgcctctaccaatacttgaaggatagtgccggtgagccgctttataagctgttcaaggctattaagcatcaggtagaaaagggacctgtagatgcggtgcagaaaaaagccaagtacactctcaacgacacaggtctcctgggggacgatgtggaatatgcccccctgaccgtgtccgtgatcgtccaggacgaaggagttgacgccatcccagtgaaggtgctgaactgcgatacaatcagtcaagttaaagagaaaattatcgaccaggtctacaggggacaaccctgcagctgtgggcccggccaaacggcctggtcatggtctggagttagggcacctcagcggagatctgtaggcccggggcctgatgtgacagcaggcggccctgtcgaagcccgacaacacccatatgcgcttcagtgtcccggatggagccatccacaccccgtacagggaggcggcctcccggccgcaggcggccaaccagccggtcccgcctggtccgctatgcctccggggggaggagagccaggcgtcgctcccggagctgccgacagaagaggtgggcggggacaggtgcaggagcgacaaagggaaagggaaggagcggatgagggccaccacagggacctacctgatgcagcggcgctctcccagggtcacacggccgccgtgtgcggccaactgctgccggagcgcgctggcgcttggcatgctgtcccacctgccgtaaagtatttcttcgattttctcgacgagcaagctgagaaacataatatacaggacgaagatacaatccatatctggaaaacaaatagtctccccttgaggttctgggtgaacatactgaagaaccctcatttcatttttgacgtgcacgtgactagatggtggacccctagatgccaatcatcaagacgctag

SEQ ID NO: 199846 - DNA, 483 bp, synthetic construct
  misc_feature 1..483: note = Description of Artificial Sequence: Synthetic coding sequence
  source 1..483: mol_type = other DNA
ggccccgacgtgaccgccggcggccccgtggaggcccggcagcacccgtacgctctccaatgcccgggttggtcacaccctcaccctgtgcaaggggggggcttgcccgccgcgggtgggcaacccgccggtcccgcgtggggggcaccttgcccccctggagggggagagcccggagtcgctcccggagcggctgacaggagaggaggacgtggtcaggttcaggaacggcagcgcgaacgggaaggagccgacgagggacatcatagggacctaccagatgctgcagccctctcccagggtcataccgccgcggtgtgtgggcagctcctgcctgaaagggccggcctgggaactagatgtcatctacaatctagtacttcatcaaccagctggaccagccgtcagagatcaaccacttcacgcatgaagacaccctcaacctctggaaggcgcacagcctatcggtccggcagtggatag

SEQ ID NO: 199847 - DNA, 1569 bp, synthetic construct
  misc_feature 1..1569: note = Description of Artificial Sequence: Synthetic coding sequence
  source 1..1569: mol_type = other DNA
atggccctgcagctgtgggccctgaccctgctgggcctgctgggcgcaggcgcctccctgcgaccgagaaaactggatttctttcggtctgaaaaggagctgaatcacttggccgttgacgaggcgagcggtgtggtgtatctcggcgctgttaacgccctgtatcagctggacgccaagctgcagctggaacagcaggtcgccaccggccctgctctcgataataagaaatgtacgcctcccatcgaggccagccagtgccatgaagctgagatgacagacaacgtgaaccagcttttattactggacccacccagaaaaagattagtagaatgcggcagcctgttcaaaggaatctgcgccctaagggccttatctaatatctctctacgcttgttttatgaagatggcagtggcgagaaaagtttcgtagcctcaaatgatgagggggttgcaactgtcgggctggtgtcatcgacgggccctggtggtgacagggtcctgtttgtaggaaaggggaacggccctcacgataacggaattatagtttctacgcgactgctggaccgcaccgattctcgcgaagccttcgaggcatatactgaccatgccacctacaaagccggttatctgtccacgaacactcagcagttcgtggctgctttcgaggacgggccttatgtatttttcgtcttcaatcagcaagacaaacaccctgcgagaaaccgcaccctgctggccagaatgtgtcgggaagatcctaattactactcttacctggagatggatctacagtgccgtgaccccgatattcatgcagcagcatttggaacatgtttggcagccagcgtcgccgcccctggatccggacgggtgttatatgctgtgttttctcgggatagtcgctcttccggcgggcccggagctgggctctgcctttttccgctggataaggtccatgcaaaaatggaagccaatcgcaacgcatgttacacagggactcgtgaagctcgagacatcttctacaaaccatttcatggcgacattcagtgcggcggccacgccccgggatcaagtaaaagtttcccatgtggctctgaacatctgccctacccccttgggtcaagggacggcctgaggggaacagccgtgctacagaggggcggcctgaacttaacggccgtaaccgtggccgcagaaaataatcacaccgttgctttcctaggtactagcgacggaagaattttaaaggtgtatttgacaccagacggcaccagctccgagtacgatagtatcctcgtcgaaatcaataagagggtgaaaagagacttggtcctttctggggatcttggatccctgtatgcgatgacacaggataaagtctttcggctgcctgtgcaggaatgcttgtcataccccacctgtactcagttaccaccagcagccgagcccgcctctggagttcattgcagagtgtcctccgatctgaagatgtgcttaaccctgccccgctgggggcagctggcttcagcatcagcacacgcccccgcagcagcttcaatgccctag

SEQ ID NO: 199848 - DNA, 489 bp, synthetic construct
  misc_feature 1..489: note = Description of Artificial Sequence: Synthetic coding sequence
  source 1..489: mol_type = other DNA
atggccctgcagctgtgggccctgaccctgctgggcctgctgggcgccggagctagtttacgcccccgtaagttggacttcttccgaagtgaaaaggaactgaaccatcttgccgtagacgaagcctctggagttgtgtatctcggagcagttaacgcgctctatcagctggacgctaagctccagctggagcagcaggtggccacaggtccggcccttgacaacaaaaagtgcaccccaccgatcgaagcaagccaatgccatgaggcagaaatgacagataatgtcaatcagcttctcttacttgaccctcctcggaaaagactcgtggaatgtggttcactctttaaaggaatttgcgccctgagagccctgagcaacatttctctccgtcttttttacgaggacggttctggcgaaaagtcctttgtcgcctctaacgacgagggggtggccacggtcggtttggtctcatctaccggcccatag

SEQ ID NO: 199849 - DNA, 1434 bp, synthetic construct
  misc_feature 1..1434: note = Description of Artificial Sequence: Synthetic coding sequence
  source 1..1434: mol_type = other DNA
atggccctgcagctgtgggccctgaccctgctgggcctgctgggcgccggtgcctctctgcgacctaggaagctggattttttcagaagcgaaaaagagctgaaccatctcgcagtggatgaggcctccggggtcgtgtatctcggagctgtcaacgctctttatcaattggatgcaaagctccagcttgagcaacaagtagcgacaggacccgccctcgacaacaaaaaatgcacacctccaattgaagccagccagtgccacgaagctgagatgaccgacaatgtcaaccagctattgctgttagacccgccccgaaaaaggcttgtggaatgtgggtcattgttcaaaggaatttgcgcactcagagcacttagcaatatatcgttacgcctgttctacgaggacgggtccggtgagaagtcgtttgtggcgtccaacgacgagggagtcgctaccgtgggtctcgtgagctctaccggccccggaggcgacagggtattgttcgtgggcaaaggcaacggcccacacgataatggtataattgtttcaacgcgcctactcgacagaaccgatagtcgagaagcctttgaagcctatactgatcatgctacctataaggcaggctatctgtccacaaacacgcagcaattcgtggccgctttcgaagatgggccctacgtcttcttcgtgttcaaccagcaagataagcaccctgctaggaatcgtaccttgcttgccagaatgtgtcgggaagaccccaactattattcgtaccttgagatggacctgcagtgccgggaccccgacattcacgccgcggcctttggtacatgtctggctgcctctgtcgcagcgcccgggagtgggagagtactttacgccgtcttttctcgcgacagtcgatcttctggaggcccgggagccggtctgtgcctctttcccctcgacaaggtacacgcaaagatggaggccaacagaaacgcatgttatactggaacccgtgaagcccgcgatattttttataaacctttccatggagatatccagtgtgggggccacgcccccggcagctctaagtcttttccatgcggatctgagcacctgccataccccctcggctcacgtgatggactgcgtggaacggccgtgttgcagagagggggcctcaacttgacggccgttaccgtcgccgcggaaaataatcacactgtggctttcctaggcaccagtgacgggaggatcctgaaggtgtacttgactcccgacgggacctctagtgagtacgacagtattctggtggaaatcaataaaagagtgaaacgcgacttggtgctgtctggggatcttggcagtctatacgccatgactcaagacaaagttttcaggttgcctgttcaggagtgtctgtcttaccccacttgcacccaatag

SEQ ID NO: 199850 - DNA, 5517 bp, synthetic construct
  misc_feature 1..5517: note = Description of Artificial Sequence: Synthetic coding sequence
  source 1..5517: mol_type = other DNA
atggccctgcagctgtgggccctgaccctgctgggcctgctgggcgctggcgccagcctaagacctaggaaactagattttttccgaagtgagaaggagctgaatcacctggctgtggatgaagccagcggggtcgtatacctgggcgcagtgaatgccctctaccagttggacgcaaagttgcagctggagcagcaggttgccacggggcctgccctcgataacaagaagtgtactccccccatcgaagcgtctcagtgccacgaggccgagatgaccgacaacgtgaatcagttactcttgctagaccccccaagaaaaaggttggtagaatgtggaagcctgttcaaagggatttgcgccctgcgggctctctctaacatctctctgcggctgttttacgaagatggatccggagagaagagcttcgtggctagcaatgacgaaggcgtggcgaccgtgggccttgtgtccagtaccgggcccggaggcgatcgcgttctcttcgtgggaaaaggcaacggacctcacgacaacggaatcattgtatccactagactactggatagaacagatagtcgcgaagcctttgaggcctacacggatcacgccacgtataaagcagggtatctttctactaacactcagcagtttgtggctgcatttgaagacggcccttatgtcttctttgtcttcaatcagcaggataagcatccagccaggaatagaactttattggctcgcatgtgccgggaagaccccaattattactcctacctggagatggacctgcagtgtagggacccggatatccatgccgcagccttcggcacttgcctggcagccagcgtggccgcccctggtagcgggcgcgtcctttatgctgtgttctcccgtgatagcaggagttcgggaggccccggggctggcttgtgtttatttccattggacaaagtgcatgccaagatggaggctaaccgaaacgcctgctacaccggtactagggaggcacgagatatcttttataaacccttccacggggatattcagtgcggtgggcatgcccctggtagttcaaaatcatttccttgcggctccgagcacttgccatatcccttaggtagtcgtgatgggctgcgtgggactgcggtcctccagagagggggcctcaacctgacagctgtgaccgtggcagccgagaataaccacactgttgccttccttgggacctcagatggacggatcctgaaggtctatctgactcccgatggtacttccagcgagtatgactccatcctcgtcgaaatcaataaaagggtgaaacgggacctggtgctgtctggcgacctcgggagcctgtacgcgatgacacaggataaagtgttcagacttccagtccaggaatgtctttcttatcctacatgtactcaatgtagagatagccaggatccatactgtggctggtgtgtcgtggagggtaggtgtacaagaaaggctgaatgcccacgcgccgaagaggccagccactggctttggagccgatcgaagtcctgcgtcgcagttactagcgcacaaccccagaatatgagcaggcgcgcacagggcgaggtccagctgacagtctcccccctaccggccttaagcgaggaagacgagttgctctgccttttcggcgagtccccacctcacccagcacgtgttgagggggaggccgtcatttgcaactcaccctccagtatcccagtgaccccaccagggcaggaccatgtcgccgtcacaatacagctccttctacgaagagggaatatatttctcacatcttatcaatatccgttttacgattgccggcaggcgatgtcccttgaggagaatctcccatgtatttcttgcgtgtccaatcgctggacttgccagtgggacttacgataccatgaatgccgggaggctagcccgaaccccgaagacgggatagttagggctcacatggaagactcatgtcctcagtttctcggaccgagcccactggtaattcctatgaaccacgagactgacgttaactttcaggggaaaaatctggacacagtgaaaggcagctcacttcacgttgggtctgacttgctaaagttcatggagccggtcaccatgcaggaatctggtacttttgcttttcgcacgcccaaattaagccatgacgcgaacgagacactccccctgcatctgtatgtcaaatcttatgggaaaaatattgactccaagctgcacgtgacactctataactgctcatttgggcgctccgattgctctctgtgcagagccgctaatcccgattaccgatgcgcatggtgcgggggccagagtcgttgcgtgtacgaggccctctgtaacaccactagcgaatgcccacctccagtgattaccagaatacagccagaaaccggcccgctgggcggtggcattcgtattactattttagggagtaacctaggggtccaggctggtgatatccagcgcatctcagtggccggccggaactgttctttccaacccgaacgatacagcgtgtctacaaggattgtgtgcgtgatagaggctgccgaaacaccattcacaggcggagtcgaggtggacgtgtttggaaaattgggacgtagccctccaaacgtgcaattcaccttccaacaacccaaacctctgtctgttgaacctcaacaaggcccccaggctggcggaaccacgttgacaattcacgggacacatctggataccgggagtcaggaagatgttcgggttacccttaatggagtaccatgcaaggtcaccaagttcggtgctcagctgcagtgcgtgacaggccctcaggctacgcgagggcagatgctcctagaggtatcctacgggggttcaccggtcccaaacccaggaatttttttcacgtacagagagaatcccgtactgagggctttcgaacctctgagatcgttcgcttccgggggtcggtccattaacgtgaccggccagggcttcagcctcatccaacgcttcgccatggttgtgatcgcagagcccttacagtcatggcagccccctagagaggcagaaagtttacagcccatgacagtcgtcggaacagattatgttttccataacgacactaaggtcgtcttcctatctccagctgttccagaagaacctgaagcttacaatttgaccgtcctcatagaaatggacggccatagggcactactgcgcacagaggcgggtgctttcgagtatgtaccagatcccactttcgagaattttactgggggcgtcaagaaacaggtcaacaagctaatacacgcccgggggaccaacctaaacaaggcaatgaccttgcaagaagccgaggcattcgtgggtgccgaacgctgcaccatgaagacccttacagaaaccgatctgtattgtgagccccccgaggttcaaccacccccaaaacgccggcagaagagagacaccacacacaatctccccgaatttatcgtcaagtttggctctcgcgagtgggttctgggtagggtggaatatgatactcgggtctctgacgtaccactgagcttgatcctgcccctcgtaatagttcccatggtggtggtaatagccgtctcagtctactgttactggaggaaaagccaacaggccgaacgggagtatgaaaagatcaagtcccagctggagggcctcgaggagtctgtgagagacagatgtaagaaagaattcacagatctcatgattgaaatggaggatcagacgaatgatgtccatgaagccgggatcccagtgttagattacaagacatacacagacagagtgttctttctgccctcgaaggacggagacaaggacgtgatgatcacgggaaagctggacatcccggagcctcgccgcccagtggtggaacaggccctctaccagttctccaatctgttgaacagcaagagttttctgatcaacttcattcatacattggagaatcagagggagttcagcgcccgggccaaggtttacttcgcttccctgctgactgtcgctctccatggtaaattggagtactatactgacattatgcacaccctgttcctggagttattggagcaatacgttgtggctaagaatcctaaactgatgttacggaggtccgaaaccgtggtggagcgtatgctctctaactggatgtctatttgcctctatcagtacttaaaggacagcgccggcgagccactgtataaactattcaaagccattaaacaccaagtggagaaaggcccggtcgacgccgtgcagaagaaggcaaaatatacactgaatgataccggcctgctcggcgatgacgtggaatatgctcctcttactgtaagcgtaatagtccaggacgagggcgtagacgccattccagttaaggtcctgaactgtgatacaatctctcaggttaaggagaaaatcatcgatcaagtctatcgcggccagccttgttcttgttggcctcgtcccgattccgtggttcttgaatggagacctgggtctacagcacaaatcctatctgatctagacttgacctctcagagggagggccgatggaagcgggttaataccctgatgcattacaatgtaagggatggggctacgctgatcctgtctaaggtgggagtctcccagcagccagaggactctcagcaggatcttcccggagaacggcacgcgcttctcgaagaggaaaaccgcgtctggcacctcgtgcggccaaccgacgaagtggacgaaggaaagtctaagcggggcagcgtaaaggagaaggagcgcacgaaagcaatcaccgaaatttatctgaccaggcttctgtcagtaaagggcactctccagcagtttgttgacaatttcttccagtccgtgctcgcaccaggacatgccgtgccgcccgctgttaagtattttttcgactttttggacgagcaagctgagaagcacaatattcaggatgaggacactattcatatttggaaaacaaactctttaccacttcggttctgggtgaatatcctcaagaacccccacttcatctttgatgtgcacgttcacgaagtcgtcgacgcgtcactgtcagtcattgcccagacctttatggacgcttgcacccgcacagaacacaaattgtcacgagatagccccagcaataagctgctttatgcaaaggaaatctccacttataagaagatggtggaagactattataaggggatacgacagatggttcaagtgagcgaccaggacatgaacactcacctcgccgaaatttctagggcgcacactgatagtctgaatactttggtggccctgcaccaactgtaccaatacacccaaaagtactacgacgagattattaatgcgctggaggaagatccagctgcacaaaaaatgcaattggcctttcgcctccagcaaatcgccgctgctctggaaaataaagttaccgatttgtag

SEQ ID NO: 199851 - DNA, 5730 bp, synthetic construct
  misc_feature 1..5730: note = Description of Artificial Sequence: Synthetic coding sequence
  source 1..5730: mol_type = other DNA
atgtgccacgccgcccaggagacccccctgctgcaccacttcatggcaccagtaatggctcggtggcctccgttcggtttgtgtctgctgctgctgctgctatcccctccccccctgcccctgaccggtgcacatcggttcagcgcacctaacacaaccctgaatcaccttgccctggctccaggaagagggacactctacgtgggcgctgtaaatcggttgtttcaactttcacctgagctgcaactggaggccgtagcagttacaggccctgtgatcgattctcccgattgcgtgccattccgtgatccagcagaatgtccccaggcccaactcactgacaacgcaaatcagctgctgctcgtgtcctcccgcgcccaggagctggtggcctgtggtcaggtacgccagggtgtgtgcgagacccgaagactaggtgacgtggcagaagtcctgtatcaggcagaggatcccggcgacgggcagtttgtggccgctaatacaccaggtgtagcaactgttggcctggttgttcctttaccagggcgtgatttgctgctggtggcaaggggcctagccgggaagctaagcgccggagtaccgcctctcgcaatcagacagctagctggctcccaacccttcagttcggaaggtctgggcagattggtcgtcggagatttttctgattacaataatagctatgtgggcgctttcgccgatgcccgcagcgcgtactttgtgtttcggagacggggcgccagagcccaggctgagtaccgcagctacgtggcacgggtctgcctgggagacacgaacttatacagttatgtggaagttccactcgcttgtcaggggcaggggcttattcaggccgcattcttagcaccaggcacattgttaggagtatttgcggccggccccagaggcacgcaggctgcactctgcgcatttccaatggtggaactaggcgcgtcaatggagcaggcccggagactgtgttacacagcagggggacgcggacctagcggggccgaggaggctaccgtggaatatggcgtcacctcccgctgtgtgacacttccgttggactctcccgaatcctacccttgtggtgacgagcatacaccatctccaatcgcagggagacagccgctggaggtgcagccgcttcttaagctgggacaacccgtctccgccgttgcagcattgcaggctgacggccatatgattgccttcttgggagacacccagggccagctctacaaggtcttcctacatggatcgcaaggtcaggtgtatcacagccaacaggtgggacctcctggaagcgccattagtccagatcttctgctcgattcctccggctctcacttgtacgtgcttactgcccaccaagtggacagaatacccgtcgcggcctgtccccaattccctgactgcgcatcgtgcctgcaggctcaggaccctctgtgtggatggtgcgtgttgcagggaaggtgtacccgaaaaggacaatgtgggcgggccggacagctgaaccagtggctgtggtcctacgaagaagacagccactgcctccacatacagtctctgctgcctggccaccatcccagacaggaacaggggcaagtcaccctgagcgtgccgcgattgccgattctggatgccgatgaatatttccactgcgcatttggcgattacgacagcttagctcatgtggaggggccgcatgttgcctgtgtcactccaccccaagaccaggtcccattgaacccacctggcacagaccatgtgactgtgcctctcgccctgatgttcgaagacgtgaccgttgctgctacgaacttctccttctacgattgtagtgctgtccaggctctggaggccgctgcaccttgccgcgcctgtgtaggctccatttggcggtgccattggtgcccacagtcgagtcattgcgtttacggtgagcattgtccggagggtgagagaacaatatattctgcgcaggaagttgacattcaagtaagaggccccggtgcttgtcctcaagtggaaggccttgcgggcccccacctggttcctgtgggatgggagtctcatctggccctcagggtcagaaacctccagcacttccgcgggctccccgcgtcctttcattgttggttagagctgcctggagagctgagaggccttcccgccacactggaagagactgcaggtgattctgggcttattcactgtcaggcacaccagttctatccttctatgagtcagagagagttaccggtgcctatttacgttactcagggcgaagctcagaggctggacaatacccatgcattatacgtcattctatacgattgtgctatggggcatcccgactgcagccactgtcaggccgccaacagatctttaggttgcctgtggtgcgcggacggccagcccgcctgccgctacggccccctgtgccctcccggcgcggtggaacttctctgccccgccccctccattgatgcagtggagcctctcacagggcctcccgagggggggctggcactgacaatactcggctcaaacctcggcagggcctttgcagatgtgcagtatgctgtttccgtggcgtcacgcccctgcaatcctgaaccctcactctaccgcacatcagctcgaattgtatgtgtgacttcacccgcaccaaatggaacgacagggccagtgagggttgccattaagagccagcctcccggaataagtagtcaacacttcacctatcaagaccctgtgctactgtccctcagcccccgctggggtcctcaggcaggagggactcaattaaccatcagaggccaacatcttcaaaccggtggcaacactagcgcgtttgttggcggccagccgtgtccaatactcgagcccgtctgcccagaagcgatcgtatgcagaactagaccacaagccgccccaggtgaggccgcagtactagttgtgtttggacacgctcagaggaccttgctagcatcccctttccggtatacagctaacccccaactggtggctgccgagccatctgcttccttcagaggaggtggaagacttattcgggttaggggcactgggttggacgtggtgcaacgccccctgctaagcgtgtggctagaggccgatgcggaagtgcaggcttcaagagcgcagccgcaggaccctcaaccacgtaggagctgcggagctccagccgccgacccccaggcttgtatccagttggggggggggctgctgcagtgctccacggtatgtagcgtcaattcttccagcttactgctgtgtcggagcccagcagtacctgaccgggcccatcctcagcgggtgttctttactctcgataatgtgcaggtggacttcgcatctgccagcggcgggcaaggcttcctctatcagcccaaccctagactggcaccgttgagtcgtgaaggaccagctaggccgtatagattgaaaccaggccatgtgctggacgtcgaaggagaaggcctcaatctcgggatcagcaaagaagaggtgcgtgtccacattggccgcggcgaatgtcttgtgaagaccctgaccagaacacacctctactgtgagcctccagcgcacgccccacaaccagctaacggttccggactcccacaatttgtcgtgcagatgggaaatgttcaacttgcattagggccagtgcagtatgaagcagagccacctctgtctgcgttccccgtggaagcgcaagccggagtgggtatgggggccgccgtcctgatagccgcagttctgctccttactttgatgtatcgccacaaatctaagcaggcccttcgggattaccagaaggtcctcgtccagttggagagtctggaaactggggtgggagatcagtgtcgtaaggagtttacagatctgatgacagagatgaccgatctctcaagcgatctagaaggtagtgggatccccttcctggattatcggacctacgcagagagggccttttttccaggtcacggcgggtgtcccctgcagccaaaacctgaggggccaggagaagatgggcattgcgccaccgtacggcaggggctcacacagttgtccaacctcttaaattcaaagctcttcctgctaaccctgattcacaccctggaggagcagccctctttttcccagagggaccggtgccatgttgcctctcttttgtccttagccttgcacggtaagctggaatacctgactgatattatgaggactttacttggcgacctcgccgcacactacgtgcatagaaaccctaagctgatgctgcgccgcactgagacgatggtggagaagcttctgaccaattggctctccatatgtctctatgccttccttcgcgaagtagccggcgagccattatatatgttatttcgcgcaatacaataccaggttgataaaggacctgtggatgccgtgacaggaaaagccaaaagaactctcaatgattcccgactgcttagggaagatgtggagttccagccgctgaccctcatggtgctggtggggccaggagctggcggggccgccggctcgtccgagatgcagcgggtaccagcacgggtccttgacaccgacaccatcacccaggtgaaggaaaaggtcttagaccaggtctacaagggcaccccctttagccagcgcccatccgtgcacgccctcgatcttgaatggagatccggtctcgctggccacttaaccctgagtgacgaggacttaaccagtgtgacacagaatcattggaaacggttaaacactctgcaacattataaggtgcccgacggtgcgactgtgggactcgtaccccaactccatcgtggcagtactattagccagagcctggctcagaggtgtcctttgggagagaacataccgacactcgaggacggagaggaagggggggtgtgtctgtggcatctcgttaaagccaccgaagaaccagagggcgcgaaggtgcggtgttccagtttacgcgagagggagcctgctcgagctaaggccattcctgagatatacctcactagactgctttctatgaagggtaccctccagaagtttgtagacgatacctttcaggccattctgtcagtgaacagacctatccccatcgctgtcaagtatctgtttgatctgctcgacgaactcgcagagaagcatgggatcgaggacccgggcactctgcatatctggaaaaccaatagcctgctgctccgattttgggtcaatgcgctgaaaaacccccagctcattttcgatgtacgggtcagcgataatgtggatgccattctcgcagtaatcgctcagaccttcatcgattcgtgcactaccagcgagcacaaggtcggccgagactctccagtgaacaagctcctttacgctagagagataccaaggtacaaacaaatggtagagcggtattacgccgatattcggcagtcttcacctgccagttaccaggaaatgaacagcgctctggctgagctcagcggcaattacacatcggcgccgcattgtctggaagcgctacaagagctgtacaaccatatccacaggtactacgaccagattatttctgcacttgaagaggaccctgtcggacagaagcttcagctggcctgtagacttcagcaggtagctgcactcgtcgagaataaagtgaccgacctctag

SEQ ID NO: 199852 - DNA, 777 bp, synthetic construct
  misc_feature 1..777: note = Description of Artificial Sequence: Synthetic coding sequence
  source 1..777: mol_type = other DNA
tgaagcctggagaccggcgtgggcgaccagtgccggaaggagttcacagatctgatgaccgagatgacagacctgtccagcgatctggaaggttccggtataccatttctcgattacagaacatatgctgagagagccttctttcccggacatggcggctgtcccttgcaacctaaaccggagggccctggcgaggacggtcactgtgcaaccgtacggcaaggtctcacacagttatctaacctgctgaacagtaagctgtttttgctgacactgatacataccttagaggaacagccttctttctctcagcgggatcggtgtcatgtggccagtctgctttctctcgccctgcatgggaagttggagtacctgactgatatcatgcggacgttgctgggcgaccttgccgcgcactatgtgcacaggaaccctaagctcatgttgaggcggacagaaacaatggtggagaagctgctaaccaactggctcagtatctgtctctacgcttttttgagggaagtggctggcgaacccctctatatgctatttcgcgccatacagtaccaggtagacaaaggccccgtagacgcagtgaccgaatggagaagcgggctggctggccatcttactctgtccgatgaagatcttaccagtgtcacccagaaccactggaagcggttgaacacactacagcactacaaagtgcctgacggcgcgactgttggcctggtcccccaactccaccgtggaagtactatttcacagagtctgtag

SEQ ID NO: 199853 - DNA, 531 bp, synthetic construct
  misc_feature 1..531: note = Description of Artificial Sequence: Synthetic coding sequence
  source 1..531: mol_type = other DNA
tgagccagccagggcaccctgcagaagttcgtggacgacaccttccaggccattctctctgttaatagacccatccctatcgccgttaagtatctctttgatctgctcgatgagctcgccgagaaacatgggatcgaagaccccggcaccctccacatttggaaaaccaattctctcctcttacgcttctgggtgaacgccctgaaaaacccccagctaatttttgatgtccgggttagtgacaacgtcgacgcgattctggctgtaattgcacaaactttcatcgattcctgcacaacctcagaacacaaggtcgggagagtgagggctgtgcctgccgcagccgcaggcagaggtctacgtcgcaaaggcctgtggggtaaaccgcgcggcctgtgtacagagctttgggtcggctccggatccataatgggagcgccgtctccaccttctagctgcctggccccgccccttccccccgagcaggactctcctgtcaataagctcctgtacgctcgggagattccttag

SEQ ID NO: 199854 - DNA, 492 bp, synthetic construct
  misc_feature 1..492: note = Description of Artificial Sequence: Synthetic coding sequence
  source 1..492: mol_type = other DNA
tgaaagcggaccctgaacgacagccggctgctgcgggaggacgtggagtttcagccactgacgttgatggttctggtgggacccggagccggcggagctgccggatcctcggagatgcagagggtccctgcgagggtcttggataccgatacgatcacgcaagtaaaggaaaaagttctggatcaagtgtacaaagggacacctttcagccagaggccgagcgttcacgccttagacttagaatggagaagcggcttggcgggacacctgaccttgagcgacgaggatctcacctccgttacccaaaatcactggaagcggctgaacaccctccagcactataaagtgcctgacggcgccactgtaggccttgtgccgcaactgcaccgaggatccactattagtcagtcccttgctcagcggtgccctctgggcgaaagcgagtctctggggcctgatcttggccctctcgaaagtcgtttgggccgctag

SEQ ID NO: 199855 - DNA, 2967 bp, synthetic construct
  misc_feature 1..2967: note = Description of Artificial Sequence: Synthetic coding sequence
  source 1..2967: mol_type = other DNA
atgtgccacgccgcccaggagacccccctgctgcaccacttcatggatagccccgagagttacccttgtggcgacgagcacacgccgagtccaatcgccgggagacagccactggaagtccagcctttgctgaagttagggcaaccagtgtcggctgttgctgcactgcaggccgacggccacatgatcgcctttctaggcgatacccaggggcagctgtataaagtggacagaattccagtagccgcttgcccgcagtttccagactgtgcaagctgtctacaggctcaggaccccctttgtggttggtgtgtcctccagggccgatgcacgagaaaaggccaatgcggacgggcaggtcagctcaaccagtggctgtggagttacgaggaagattcgcattgcctccatatacagtctcttctgccaggccaccatccccggcaggaacagggacaggtcactttgagcgtccctcgcctgcctatcctggatgccgatgaatacttccactgtgcttttggagactatgatagcttagcacacgtggagggcccgcacgttgcctgtgtgacccccccccaggaccaggtgccgctgaacccaccgggcacagatcacgttactgtgccgttggccttaatgtttgaagatgttactgtggctgccacgaacttctctttctacgattgttccgccgtacaagctctggaagccgctgcaccctgtcgggcatgcgttggctctatatggcgatgccattggtgcccacaaagcagtcattgcgtgtatggcgagcactgccccgaaggcgaacgcactatttatagtgcccaggaggttgatattcaggtgcgaggacctggagcgtgcccgcaggtggagggcctggcggggccgcacctggtgccagtaggctgggaaagtcacctggccctgcgagtgcggaatctccagcacttccgggggctccccgcttccttccactgttggctcgagctgcctggggagcttcgaggcctgccagcaacattagaagaaaccgctggggattccggactgatccattgtcaggctcaccagttttacccatcaatgtcacagagagaactgcccgtgccaatttatgttacacagggtgaggcccagcgcctggacaatacacacgccttatacgtgattctgtatgactgtgccatgggacaccccgattgtagtcactgccaagcagcaaataggagcctggggtgcttatggtgcgcggatggacagcctgcctgccggtacggccccctctgtccccctggcgccgtggaactgctgtgccccgcgccttctattgatgccgtcgaaccactgactggaccgccagaggggggtttggcccttaccatcttgggttcaaatctgggcagagcattcgctgatgtccaatacgccgtatctgtggcctcccggccatgtaatcctgaaccatctctgtaccggaccagcgctaggattgtatgtgtgacttcacccgcacccaatggcaccaccggtccggtgcgggtagccatcaaatcccagccgccaggtatatccagtcagcactttacttatcaggaccccgttttgctgtctttgtctcctcggtggggacctcaggcaggcgggacccagttgacaatccgtggccagcacctgcaaacaggcgggaacacttcagccttcgtcggggggcaaccctgtcccatcctggagcctgtatgtccagaagccatcgtgtgcaggaccagaccccaggcggccccaggcgaagccgcagtgctagtggtgttcggccatgctcagcggactcttctggcttccccattcaggtacacagctaatccgcagctggtggctgctgagcccagtgcctcattcaggggcggaggccgtttgatacgggtgagaggcaccggcttagatgttgttcagcgcccactgttgtctgtatggctcgaggcagatgccgaagtccaagcatcaagagcgcagccacaggaccctcagccccgtcgcagctgcggcgctcctgccgccgaccctcaggcttgcatacagttggggggcggcttgctccagtgtagcactgtctgttccgttaattctagtagtctgctcttgtgccgatccccggcagttccagaccgggcccatccacagcgggtcttttttactctggataacgttcaagtggattttgcttcagcctccggcggccaggggttcctgtaccagccgaatccgcggctggccccgctttcaagggaaggacccgcccggccctaccgcctgaagcccgggcacgtactagacgtggagggcgaggggctcaatttgggcattagtaaagaagaggtgcgcgtgcatattggcaggggcgaatgcctggtaaagactttgaccaggacccacctctactgcgagccccccgcccacgcccctcagcctgctaacggcagcggcctcccccagtttgtagtgcagatgggcaatgtgcagctggcactggggccggtccaatacgaggccgaaccccctttgtccgccttccccgtggaagcacaggctggcgtgggcatgggagcggcagtgctgatagcggctgtcctcctactgacactcatgtatagacataaatcaaagcaagcgctgagggattaccagaaggtcctggtacagcttgaaagtctggaaactggggtgggcgaccagtgtaggaaagagttcacaggcggctgcggcggcggcggaacaggatatcccagagggcttaattcgcatctcggcgccagctggccaaggagaccgcatgacggagacgatcgccctcagcagcgcccgggaggccaacgggaccccctccccgggcttccacacctccgaagagctagactgctcccgtggccgtggcgtctgccagccgccgcccaggcgtag

SEQ ID NO: 199856 - DNA, 675 bp, synthetic construct
  misc_feature 1..675: note = Description of Artificial Sequence: Synthetic coding sequence
  source 1..675: mol_type = other DNA
atgtgccacgccgcccaggagacccccctgctgcaccacttcatggtagatagaatccccgtggcagcatgccctcagtttcccgactgcgcttcatgtttgcaagcccaggacccgctgtgcggctggtgtgtgctgcaaggacggtgtacacggaagggccaatgcggcagggcaggtcagctaaatcaatggttgtggtcttacgaggaagacagtcactgcctgcacatccagtctctactgcccggacatcacccccggcaggagcagggccaggttacactcagtgtgcctaggctccccatccttgacgcagatgaatactttcactgtgcattcggagactatgactcgctcgcccatgtagaagggccccacgtcgcctgtgtgacgcctccacaggatcaggttcctctgaacccgcctggtactgatcatgtgaccgtgcctcttgctctgatgttcgaagatgtcactgtagccgctaccaacttctccttttatgactgctctgcggtacaggctctggaagccgccgctccagcatgcctccctcccagtactgccgggtggtcatgcttggaaaatttcggggactgccgaccaccttggaggaggcaacaaggcatccaggcttctagtacagctcgccccacaaggtcaagtccctag

SEQ ID NO: 199857 - DNA, 4689 bp, synthetic construct
  misc_feature 1..4689: note = Description of Artificial Sequence: Synthetic coding sequence
  source 1..4689: mol_type = other DNA
atgtgccacgccgcccaggagacccccctgctgcaccacttcatggactctcctgagtcctacccttgcggcgacgagcacaccccatcgcccatcgctggccgtcaaccgctggaggttcagcctcttctgaagctgggccagcccgtcagcgcggtggcagcgctacaagcagacggtcatatgattgcctttcttggcgacacacagggtcagctttacaaagtgtttctacacggttctcaagggcaagtgtatcattctcagcaggtcggacccccaggttccgccattagcccagacctgctcctagacagtagcggcagccatttatacgtcctcacagcacatcaggtcgatcgtataccagtcgccgcgtgtccacagtttcctgattgcgcaagctgtctgcaggcccaggatccactctgcggatggtgtgtgctgcagggacgttgtacaagaaaagggcagtgtgggcgggcggggcaactgaatcaatggctgtggagttacgaagaggattcccattgtctccacatccagtccctgctgccagggcaccacccacggcaggagcagggccaagtgacactctccgtgcctaggctccccattctggacgctgatgagtatttccactgtgcgtttggtgattatgatagtctggcccacgtggaaggccctcacgtggcttgcgtgaccccgccccaggaccaagtcccactgaacccgcccgggacagatcacgtaaccgtacccctggcactgatgtttgaggatgtgacagtcgccgcaacaaacttctctttctatgattgtagtgccgtccaggccctggaggctgcagctccctgccgcgcctgtgtgggaagcatatggcgctgccattggtgtccccaatcctcccactgcgtgtacggcgagcattgccccgaaggtgaaaggaccatttacagcgcccaggaagttgacattcaggtgaggggtcccggagcttgtcctcaagttgagggcctggcaggaccccatctcgttcccgtgggttgggagtcacacctcgcccttcgggtgaggaacctgcagcactttcgcggccttccagctagcttccactgttggttagaacttcccggcgaactgcgtggcttgcctgcaactctggaagagacggccggtgacagtggcttgattcattgtcaggcccatcagttttacccctcaatgagtcagagagagctacctgtgcccatatacgtcacccaaggtgaggcccaacggctcgacaatacccacgctctctacgtgatcttatatgattgcgcaatgggccacccggattgctctcactgtcaagccgcaaaccgaagcctaggctgcctgtggtgcgccgacggccagcctgcctgtagatacggtcccttgtgtccacccggggctgttgaactgctctgtcccgcaccctctattgacgctgtggagcctttgactggcccccctgaaggtggtctggctttgaccatcctaggatctaacctaggccgagcatttgccgacgtgcagtacgctgtgtccgtggcctcgcggccctgtaaccccgaaccctccctttaccgaacttccgctagaatcgtatgtgtaacctctcccgctccaaatggtacaaccggccctgtgcgggttgcaatcaagtcccagccccccggtatatcttcccaacattttacttaccaagacccagtgctactgtcgttgagcccgaggtgggggccacaggcaggtggaacccaattaacaattcgtggccagcacttgcagacgggcggtaacacgtccgcgtttgtggggggccaaccctgccccatattggagccagtgtgccccgaggcgatcgtgtgccgcacaagaccccaggctgcccctggagaggccgcagtgcttgtggtgtttggacatgcgcagcggaccctgctggcctcccctttccgctatactgccaacccccaactcgtggccgcggagccctcagcctctttccgcggggggggcaggctaattagagtgcgcggaaccgggctggacgtggtccagcggcctctgctgtccgtgtggctggaagccgacgctgaagtccaggcctcacgcgcccagccacaggatccgcagcctaggagaagctgcggggccccagcagccgatcctcaggcatgtatccaactcggggggggcctcctccagtgcagcaccgtttgctctgttaactccagttctctgctgttatgtcgtagccctgcagttcctgatagagcacaccctcagagagtcttctttaccctggataacgtccaggtggatttcgcatcagctagtggtggacagggctttctgtatcagcccaatcctcgcctagctccacttagtcgggaaggtcccgcccgtccctataggttgaaacccggccatgttttggacgtcgagggggaaggtctgaatctcggaatctccaaagaagaggtgcgggtgcacataggccggggcgaatgcttggtcaagactctgaccaggacccatttgtactgcgaaccaccagcgcacgcgccacagcctgctaacggcagtgggctcccccagtttgttgtgcagatggggaacgtgcagctcgcactgggccctgtgcagtatgaagccgaaccgcctttatctgcttttcctgttgaggcacaagcaggtgtgggcatgggtgccgccgtcctgattgccgccgtgcttcttctaaccctcatgtaccgacacaagtccaagcaggcactgagagactatcagaaagttctggtgcagctagaatcactcgagacaggcgtaggtgatcaatgccggaaggagttcaccgacctgatgacagagatgaccgatctatcaagcgacctggagggatcaggcatcccattcttagactataggacctatgcggagagggcattcttccctggacacggcggatgcccgttgcagccaaaacctgagggtcctggggaggatggacactgcgctacagttaggcagggcctgacacagttgagtaacctgctgaatagcaagcttttccttctaacactcattcacaccctagaggagcagccttcctttagtcaaagggacagatgccacgtggcgtcccttttaagtcttgccctccatggcaagctcgaatatctaaccgatattatgaggactctgctcggggacttggccgctcactacgttcatcgtaaccccaaactgatgctccgtcggacagaaacaatggtcgagaaacttttaacaaactggctaagcatctgcctttatgcatttttgagagaagtggccggagaacctctttacatgttgtttcgtgccatccagtaccaagtggacaagggacctgtggacgcggtgaccgggaaagctaagcggaccttgaacgacagtcggctgctccgcgaggacgtggaattccagcccctgaccttgatggttctagttggccccggcgctgggggcgcagccgggagctcagaaatgcaacgtgtaccagcccgagtcttagatactgataccattactcaggtgaaagaaaaagtgctggaccaggtctacaagggcactcccttctctcagaggccctccgttcatgccttggatctcgagtggcgaagcgggctggcagggcatctgacgttatccgacgaagacctgacctcggtgacccagaatcattggaaaaggctgaacactctgcaacattataaagtgcccgatggggccacagttggcctggtcccgcagcttcatagaggaagcacaatcagtcaatcactcgcccagcgctgccccctgggggaaaatataccaaccctcgaggacggggaggaggggggggtgtgtttatggcatctcgtgaaggccactgaagaaccggaaggggccaaagtgcggtgctctagtttaagggaacgggagccagctcgcgctaaggcaatccctgaaatatatctgacgagactgctctccatgaaggggactctgcagaaatttgttgatgacacattccaggcgattctgagtgtgaatcgaccaatcccaattgcggtcaagtaccttttcgacctactggatgagttggccgaaaaacacggaatcgaagatcctggcactctgcatatatggaagaccaatagcctgctgctgcgcttctgggtgaatgcacttaagaatccacagttaatctttgacgtcagagtatccgacaacgtggatgcaattctcgctgttatagcacagacttttatagactcttgtactacgagcgagcacaaggtggggcgagatagccctgtgaataaactcctgtacgcacgggagattccccggtacaaacagatggtcgagaggtattatgccgacatccgccagtcttcacccgctagctatcaggagatgaattccgctcttgccgaactgtcaggcaactacacttcggctccgcactgccttgaagccctgcaggagctctacaatcacatccaccgctactacgatcagattatcagtgctctggaggaggaccctgtcggccagaagctccagctcgcatgtcgcttacagcaagtagctgcccttgtggagaataaggttaccgacttgtag

SEQ ID NO: 199858 - DNA, 5799 bp, synthetic construct
  misc_feature 1..5799: note = Description of Artificial Sequence: Synthetic coding sequence
  source 1..5799: mol_type = other DNA
atggagctgacccccgccagcagcctgacctgcagcctgctgagcccaaggttgccgggatcctttccccagttgcgacgcgtgcctccatgcagccgcccatggcttcctaaggccccggtgatggccagatggccccccttcgggctctgcctcctgctgctgctgctgtcaccgccccccctgcctctaactggagcccataggtttagcgcgccaaacaccacactgaaccacctggcattagcgcctggacgcgggactctctatgtgggagcagtcaaccgtctgttccagctgagtcctgaactccagctagaagccgtcgcagttacaggccctgtgattgattccccggattgcgtccccttccgggatccagctgaatgtccccaggcgcagttaacagataacgcaaatcagctacttctggtttcttccagggcccaggaattggtggcctgtgggcaggtacggcagggagtttgtgagactcgaagactgggggatgttgcggaggtactctatcaggctgaagaccccggcgacgggcagttcgtcgccgccaacacaccaggcgttgccactgttgggctggttgtgcctttgcctggacgggaccttttgctcgtggcccgcggtctcgccggcaagctgtcagcaggagtgccaccccttgctataagacagcttgcagggtctcagcctttctcttctgaaggattggggcggttggtcgttggcgacttctccgactataacaactcatacgtaggcgcttttgctgacgcacgaagtgcatattttgtcttcagaagacgaggcgcgcgtgcccaggcagaatacaggtcgtatgtggccagggtgtgtctgggagacacgaacctgtactcctatgtcgaggtccctctggcctgccagggccaggggctaatccaggctgcttttctggcaccaggtaccctgttgggagtgttcgctgcgggtccaagaggcacccaggccgcactgtgtgcctttcctatggtggaattgggcgcctccatggaacaggcgcggcgcctatgctatactgccggcggacggggaccctctggagctgaagaggctaccgtggaatacggcgttactagccggtgtgtgaccctcccactcgactcacctgaatcctatccctgtggggacgaacacacccctagcccaatcgccgggagacaaccgctggaggtgcagcctctgctcaagctgggacagccggtgtcagcagtggcggccctccaggccgatggacacatgatcgcctttctgggggatacccagggacagttatacaaagtttttctgcatgggtcccagggccaagtgtatcatagccaacaggttgggccacccggttccgcgatatcccctgatttactgcttgacagctccggcagccacttatacgtgttgaccgcgcatcaggtggatagaataccggtggcagcttgcccgcagttccccgactgcgccagctgcctccaggcacaagatcctctatgcggatggtgcgtgctccagggtaggtgtacacgtaaagggcagtgcggcagagccgggcagctgaaccagtggctttggagttatgaagaggactcacactgccttcacatccagtcattgctgcctggtcaccatccgagacaggagcagggccaagtgacgctctctgtcccacggttgcctattctcgacgcagacgagtactttcactgcgctttcggggactacgattcacttgctcacgttgagggcccccatgtggcctgtgtcaccccgccccaggatcaggtgcccctcaacccaccaggcactgatcatgtgactgtccccctggcgttgatgtttgaggacgtgacagtagcagctaccaatttttccttttatgattgctccgctgtgcaggccctcgaggctgcagccccatgccgggcctgtgtcgggtcgatctggcgctgtcattggtgcccccagtccagtcactgcgtgtacggcgagcactgtcccgagggcgagcgaacaatctactctgctcaggaggttgacatacaggtgagagggcccggggcctgccctcaggtggagggactggcaggcccccacctcgtgccagtgggctgggagagccatcttgcgttgcgggtgcggaatctgcagcactttagaggcctgccagctagcttccactgctggctagagctccctggcgagctacggggattgcctgctaccctggaagagaccgcgggcgattctggtctaatccactgccaggcccatcagttttatccatccatgtcccagagggagctgcccgtgccaatatacgttacccaaggggaagctcagcgccttgataatacccatgccctttatgttatcttgtacgactgcgcaatgggacaccctgattgttcacattgtcaggcagcaaaccgcagcctgggatgcctgtggtgtgcagacggccaaccggcctgcaggtatggccccctgtgcccccctggggcagttgagctactgtgtcctgcaccttccattgacgccgtcgaacccctcaccggtccacccgaaggcggtctggctctgacaatactgggatcaaacctgggccgtgcttttgccgacgtgcagtacgccgtcagtgtggccagtcgcccctgtaaccccgagccaagtctgtatagaacaagtgcacgcatagtatgcgtcacaagcccggccccgaatggtaccacgggtcccgtgcgcgtggctatcaaatcccaacctccaggcatttcttctcagcatttcacctatcaggaccccgtactgctctccctgtccccacgttggggcccgcaggccgggggtacacagttgactatccggggtcaacatctacaaaccggcggaaataccagcgccttcgtcgggggtcagccctgtcccattctggaaccagtgtgtcctgaggctattgtatgtcggacgcggccacaggctgcccccggagaggctgcagtgctggtggtgttcggccacgcccagaggacacttctcgcgagtcccttccgttacacggcaaacccgcaattggttgctgcagaaccaagcgcctcgttccgtggcggaggacgtctgatacgcgttcgcggcaccggactggatgtggtacagcggcccctgctgtcagtgtggctggaggcagacgccgaagtccaagcatctcgcgcgcaacctcaggacccacagccacgccggtcttgtggcgctccagctgctgatccccaggcttgtatccagctgggagggggcttactgcagtgttcgacagtgtgtagcgtcaattcttcctcactgctgttatgcaggtccccagcagttcccgaccgtgctcatccccagcgagtgtttttcacattggataacgtccaagttgacttcgcaagcgctagtggtggccagggattcctgtaccaacccaatccacgcctggcgccactgagccgtgagggtcccgctagaccctacaggcttaaacctggtcatgttctggatgtggagggtgaagggctcaatctgggtatcagcaaggaggaggtgagggtgcacatcggcagaggagagtgtttggtcaagaccctcaccagaactcacctgtattgcgagcccccggctcacgcacctcagcccgccaacggcagcggcctgccgcaatttgtggttcaaatgggaaacgtccagctcgccttaggcccagtgcaatacgaagccgagcctcccctttccgccttccctgtggaagctcaagcaggtgtagggatgggagccgcggtgttgattgccgccgtacttcttctcactctgatgtaccgtcacaagtcaaaacaggcactgcgggactatcagaaagtgctagtccagctggagagcctcgagactggagtgggcgatcagtgcagaaaggagttcacagacctcatgacagagatgaccgacttgtcatccgatctggaaggtagcgggatcccgttcctcgactatcggacttacgccgaaagggccttctttcctggacacggtggatgcccgctgcagcccaaacccgagggacccggtgaggacggacactgcgccactgttcggcagggcctcacacagctgtctaacctgctaaattccaaattattcctgcttactctgatccatacactcgaggagcagccaagttttagccagagagacaggtgtcacgttgcctcccttctttcgctcgccctccacggaaaactggaatatctcacggatatcatgcggaccctcttgggtgatctcgcggctcactacgtgcataggaacccaaagctcatgctgaggagaaccgaaacaatggttgaaaagctcctgacgaattggttgtctatatgtctatatgccttcttgcgagaagtggcgggcgagcctctttacatgctgttccgcgctatccagtaccaggttgataagggccccgtagatgcggtgactggcaaggccaaaagaacactaaacgattccagacttttacgagaggatgtggaatttcaacctctgaccttgatggtgttggttgggccaggagccggcggggccgccggcagcagtgaaatgcagcgggtccctgcgagggtgctcgatactgacacaatcacccaggtgaaggagaaagtcctagaccaggtttacaagggtacacctttttcacaacggccttctgtacatgcactggacttggagtggagatcgggcctggctggtcatctcaccctctctgacgaagacctgacttcagtgacccaaaatcattggaagcgtttaaacacattacagcattacaaagtgcccgatggcgcgacagtgggcctcgtgcctcagctgcatcgtgggtccacaataagtcagagtcttgcacaacgttgtcctcttggagagaacatacctacgctcgaagatggggaagagggtggtgtgtgcctatggcacctggtaaaagctaccgaggaaccggagggggcgaaggtgcggtgctcctctttgagagaacgagagcctgcacgcgccaaagcaatccctgagatctaccttacacggctactttcgatgaaagggacgttgcaaaaattcgtggatgacacttttcaggccatcctcagcgtgaaccggcccatacctatcgcagtgaagtatttgtttgatctgcttgacgaactggccgagaaacacggaatcgaggaccccgggaccttgcacatttggaagactaactctctgcttttacggttttgggtcaatgcacttaaaaaccctcagttaatctttgatgttcgggtgtccgataatgttgacgcgatccttgcggtgatagcacaaacattcatagactcctgcacaacatctgaacacaaagtggggcgggactcccctgtgaataagctgttgtacgcccgagaaattcctagatacaagcagatggtagagagatactacgccgatatccgacaaagcagccctgcatcctatcaggagatgaactcagctttagcagagttgtccggtaactatacttccgcaccgcactgcctcgaggctctgcaagaactgtacaatcatatccatcggtactatgaccaaattatttcggctttagaggaagatcccgtgggccagaagctccaattagcatgtaggctgcaacaggttgccgctctcgttgagaataaagtcaccgacctgtag

SEQ ID NO: 199859 - DNA, 5778 bp, synthetic construct
  misc_feature 1..5778: note = Description of Artificial Sequence: Synthetic coding sequence
  source 1..5778: mol_type = other DNA
atggccccccgggccgccggcggcgcccccctgagcgcccgggccgctgctgcgagtccccctccgttccaaaccccacctaggtgtccggtccctctgctcctgctgcttctccttggtgctgcaagagcgggggcgttggagattcaacggaggtttccatcaccgacccctacaaataatttcgccttggatggagccgcggggacagtatatcttgccgcagttaatcgcctttaccagctgtccggcgctaatctctccctggaagcggaggctgcagtcggacccgtcccagattccccattgtgtcacgctccccagttgccacaggcctcttgtgagcatccaagaagactgacagacaattataacaaaattctacagttagatcccggccaaggtctggtagtagtgtgcggaagcatataccaagggttttgtcagctgcgacgaagaggaaacatttccgccgtagccgtcagatttccaccagcagcgcctccggctgaaccagtaacggtgttcccttccatgttgaatgttgctgccaaccatccgaacgccagtaccgtgggtctcgtgctgcctcctgccgctggtgcaggtggaagtcgcttattagtcggagcgacctacactggatacggcagctctttctttcccaggaatcgcagtctggaggaccacagattcgaaaacacccccgaaatcgccatccgttccctggacacaagaggagacttagccaagctctttacgttcgatctgaacccttcggacgataacatcctcaagatcaagcagggagccaaagaacagcataagttaggctttgtgtcagccttcctgcatccgtctgaccccccccccggagcacagtcttacgcatacctcgccctaaactcggaggcgagagcgggagataaagagtcccaggcaagatctctgttagcaagaatttgcctcccacatggcgccggaggagacgcaaaaaaactgaccgaatcttatatccagctgggactgcagtgcgccggaggagctggccgaggtgacctgtactcaaggttggtctctgtgtttccggctagagaaaggctgtttgccgtgtttgagcggccacagggctccccggctgcaagagcagcacccgctgcactgtgcgccttcaggttcgccgacgttcgggcagcaattagagcagcacgcaccgcctgtttcgtggagcccgccccagacgtggtcgcagtcctggactccgtagttcagggtaccggccccgcctgtgaacggaagctgaacatacagttgcaacccgaacagctagattgtggcgcagcacacctgcagcatcccctgtctatactgcagccactgaaagccacgcctgtatttagagctcccggattgacatccgtcgctgtggcctccgtgaacaattatacggctgtctttcttggcactgtgaacggtcgactgttgaaaatcaatctgaacgagagtatgcaggtggtgtcccgtcgggtcgtgaccgtggcatatggagagcccgtgcaccacgtcatgcagtttgatcccgcggacagcggatatctatacctcatgactagtcaccagatggcccgggtgaaagtcgctgcatgcaatgtgcattcaacctgcggagactgtgtcggcgctgctgacgcctactgtggttggtgtgcactggaaacccgatgtacccttcagcaagactgcactaattctagccagcagcatttctggacgtcagctagcgagggaccttcccgctgccccgccatgaccgtgctgccttccgagattgatgttcgtcaagagtaccccgggatgatactgcagatcagcggatctcttcccagcctgtcgggcatggaaatggcttgtgactacggaaacaatatccgcactgtcgcccgtgtccctggtcctgcatttggacaccagatcgcatattgcaatctacttccacgcgaccagtttccaccattcccccccaatcaggaccatgttactgtcgaaatgtctgtgcgcgtcaacggacgcaatatagttaaagctaacttcacgatctatgattgcagccggaccgcacaggtgtacccccacaccgcctgcacctcttgtctttcagcccagtggccatgcttctggtgttcccagcagcactcctgtgtttccaaccaaagtcgatgcgaggcatctcccaaccccacttctccgcaagactgccctcgaactcttttatcgccgctcgcccctgtgccgacagggggctcccagaacattctggttcctctcgcgaacaccgccttctttcaaggggccgcgctggaatgctccttcggattggaagaaatctttgaagccgtctgggtaaatgagagcgtcgtgcgctgcgaccaagtggtgctgcatacaacacggaagtcacaggtttttccgctgagtttacaactcaagggtcggcctgctagatttctggactcacccgagcccatgaccgtaatggtgtacaactgtgccatgggttctcctgactgcagtcagtgtctgggccgtgaagacttggggcatctttgcatgtggagcgacggctgtaggctccgcggcccattacagccaatggcgggtacgtgccctgctccggaaatccacgcaatcgagcctttgtctgggcctttggacggaggaacactcttaactataaggggccgtaacctgggccggagactttctgacgtggcacacggagtgtggatcgggggagtcgcctgtgaaccgctgcccgacaggtataccgtctccgaggagatcgtctgcgtgacagggcccgctccaggtcctctttcaggcgttgttaccgttaatgcctcaaaagagggaaagtccagggatagattctcgtacgtcctgccccttgttcactctttggagccaactatgggccccaaagcaggcgggactcggatcacaatccacgggaacgacctgcacgtggggagcgagcttcaagtgctggttaacgacaccgacccatgcacagagctcatgcgcaccgacacttccattgcctgcaccatgccagagggcgcgttgcccgcccccgtgcccgtgtgtgtaagatttgagagaagaggctgcgtgcacgggaatttaactttctggtacatgcagaatcccgtcatcactgcgatcagcccaaggcgatctccggtgtccggaggccggactatcactgttgcaggcgagagatttcatatggtgcaaaacgtctcgatggccgtacatcatattggccgcgagcccacgttgtgtaaggtcctgaatagtacgctcataacttgtccgtcccccggtgcactgtcgaacgcctcggccccagtagacttttttatcaatgggagagcctatgctgacgaggttgcagtagcagaggaactgctcgatcccgaggaagctcaacggggatctagatttaggttagattatctccctaatcctcagttcagcactgcgaaacgggagaaatggatcaagcaccatcctggggagcccttgaccctggtgatacacaaggagcaggactctttaggcctgcagagccatgagtaccgcgtgaaaatcggccaggtgtcttgtgacattcagatagtctctgataggattatccactgttcggtgaacgaaagcctcggagcagcggtgggacagttgccaatcacaatccaggtcggcaatttcaaccagaccatcgcaactctgcagttgggtgggtctgaaactgccatcatcgtatctattgtgatttgttccgtattactgcttctgtcagtcgtggccctgtttgtgttctgcactaaatctcggcgcgcagagcgctactggcagaaaactctgttgcaaatggaggaaatggaaagccagattcgtgaagagattagaaagggcttcgccgagctgcagaccgatatgaccgatttgaccaaggagctgaatcgctcccaaggcattccgtttcttgagtataagcatttcgtaactagaactttcttcccaaaatgttcctcgctttatgaggagaggtacgttctacctagtcagaccctgaattcacagggcagttcccaggcccaagagacgcatcccctcctcggggagtggaaaatcccggagtcgtgccgccctaacatggaagagggcatatccctattcagctccctactcaacaacaagcactttctcatagtctttgtccatgccctggagcaacagaaagacttcgcagtaagagacaggtgtagtctagcttccctgctgactatcgcgctgcacggcaaattggagtactacacgagcataatgaaagagcttctggtggacctgatcgatgcctccgccgctaaaaatcctaaactcatgctacgaaggaccgaaagcgtagtcgaaaaaatgttaaccaattggatgtccatttgcatgtatagttgtttaagggagaccgtaggagagcccttctttctgttgttatgcgccatcaaacaacagataaacaaaggctctatcgatgccatcaccggtaaagccaggtacacgctttccgaagagtggctgcttcgggaaaatattgaggctaagcctcgaaacctcaatgtctcttttcagggatgtggcatggacagtttgagcgtaagagcaatggatacagacacgctaacgcaggtcaaagagaagattctggaagccttctgtaaaaacgttccatacagccagtggcctagagccgaggatgtggatctggagtggtttgcgtcctcaactcagtcttacattctgagggatttggatgacacctccgttgtggaagacggccgtaaaaagttaaacacactggcacactataagatccctgagggggcaagcctagccatgtctctgatcgataaaaaagataatacgcttggaagggttaaagatctcgacactgagaagtattttcaccttgttctgcccacggatgagcttgcagaacccaaaaagagtcacagacagtcccatagaaagaaggtcctgccagagatctatctgactcgcctgctctctactaaaggtacgttacaaaagtttttagatgacctcttcaaggctatattgtcaatacgggaagataagccaccactcgcagtgaaatatttctttgatttcttggaggaacaagccgagaagcgagggatatctgatcctgacacgctccacatatggaaaaccaattctttacctttgcggttttgggtgaacatactaaaaaacccacaattcgtgtttgacatcgataaaacagatcatatcgatgcctgtctgtctgtaattgcccaggcgttcatcgacgcttgctcaatatccgaccttcagctggggaaggacagcccaacaaacaagcttctatacgctaaggagatccccgaataccgcaaaatcgtgcagcggtattacaagcagattcaggacatgactcccttatctgaacaggagatgaacgcacaccttgctgaagagagccgcaagtaccagaatgaattcaatacaaatgtggctatggctgagatctataaatatgccaagcgttatcgaccccagataatggccgccttggaagctaacccgaccgcccggcgcacacagctccagcataagttcgagcaagtggtggcattaatggaggataatatatatgagtgctactcagaggcctag

SEQ ID NO: 199860 - DNA, 5358 bp, synthetic construct
  misc_feature 1..5358: note = Description of Artificial Sequence: Synthetic coding sequence
  source 1..5358: mol_type = other DNA
atggccccccgggccgccggcggcgcccccctgagcgcccgggccgccgccgcctcacctcccccttttcaaacacccccaaggtgccctgtgcccctgctgctattgttgctcctgggagccgccagggccggggctttggagatccagcggaggtttccttcacccacaccgacaaacaatttcgccttagacggggctgctggcacagtgtacctggccgccgtcaatcgactctatcaacttagcggagctaatctatcccttgaggccgaagccgccgtggggcctgtaccagatagccccctgtgtcatgctccccagctgccacaagctagctgtgaacatccgaggcggttgaccgataattataacaagatcttacagctggaccccgggcagggcctcgtggttgtatgtggcagtatttaccagggcttttgccagctcaggaggagaggtaatatatcagccgtggccgtgaggttccccccagcggccccgcctgcggagcccgtcactgtgttcccttcaatgctcaacgtggccgccaaccaccctaatgcgtccacagtgggccttgtgttacccccagccgccggggccggcggctccagattactggtaggagcaacctatacgggatatggaagctccttctttcccagaaaccggtctttggaggaccacagatttgaaaatactcccgagattgctattcggagcctcgatacccggggcgatctggcaaagctgtttacttttgatctgaacccttctgacgacaacatcctcaagatcaaacagggagccaaggaacagcacaaattgggcttcgtttccgctttcttgcatccaagcgacccacctccgggtgcccagtcttacgcttacctggctctcaattccgaagcaagggcaggggataaagagtctcaagcccggtcactgctagcaagaatctgtctgccgcatggggctggcggcgatgctaaaaagctaactgaaagttatatccaactcgggctgcagtgtgccgggggcgccggtcgcggtgacctctattccaggctggtgtcagtcttccctgctagggagcgcctttttgcagtatttgaacgccctcagggttctcctgctgccagggcagccccagccgccctctgcgcattccggtttgcagatgtcagagccgctattagagcagcccggactgcttgcttcgtggagcctgccccagacgtggtggccgttctcgacagcgttgttcagggcacaggccccgcgtgcgaaagaaaactgaacatccagctgcagccagagcagttggactgtggggcagcccacctgcagcatcccctgagcattctgcagcccctcaaggcaactccagtgttcagggcgcctggactgacctcagtggcagtggccagcgtgaacaattatacagccgtgttcctgggtactgtgaacggacgactgctcaagataaatctcaatgaatcaatgcaggtcgtgagcaggagggtggtaactgttgcatacggagaaccagttcatcatgttatgcaattcgatcccgccgattctggctatctgtatctcatgacaagtcatcagatggcacgtgtgaaggtggccgcctgtaacgtacatagcacttgtggtgattgtgtcggcgccgcagatgcgtactgtggatggtgtgctctggagacgaggtgcacactgcaacaggattgcactaatagctcccagcaacatttttggacctcagcatctgaaggtccatcaagatgccctgccatgaccgtcctgcctagtgagatcgacgtgcggcaggagtaccctggtatgatcctgcaaatcagcggatccttgccaagcctgtccgggatggagatggcatgcgattacgggaacaatattaggaccgtggcaagagtccctggccctgccttcggccaccaaatcgcctactgcaacctgttgcctcgcgaccaatttccgcccttccctccaaaccaggatcatgtgaccgtggagatgagtgtccgggtgaatggcagaaatatcgtgaaagccaactttaccatctacgattgtagccggactgcccaggtctacccacataccgcatgtacatcatgcctgagcgcacaatggccatgcttttggtgttcgcagcagcactcatgcgtgagcaaccagtccaggtgcgaggccagccccaacccaacttcgccacaggactgcccaagaaccctgctgagccctctggcacccgttcccactgggggctcccagaacattctggtgccactggcgaatacagccttcttccagggtgctgcactcgaatgctcctttggcctggaggagatattcgaggctgtgtgggttaatgagtcagtagtcaggtgtgaccaagtggttcttcataccacacggaaaagccaggtgttccctctaagcctacaactgaaggggaggcccgctaggttccttgatagtccagaaccaatgacagtaatggtgtacaactgtgcaatggggtccccagactgcagccagtgtctcggacgtgaggatttagggcatctgtgtatgtggtcagatggatgtcggctgagaggacccctgcagcccatggcaggaacgtgccctgcccccgaaattcatgctattgagcccctgagcggacccctagatggcggcacactcctaacaatccgaggcagaaaccttggacggcggctgtccgatgtggcccacggtgtctggatagggggagttgcatgcgagccactgccagatcggtatacagtctcagaggagattgtttgcgtaacaggaccagccccgggacctcttagcggagtagtcaccgtgaatgcgagcaaggagggcaagtcccgagaccgctttagctacgtgctgccattagtgcacagccttgagcccaccatggggccaaaggcgggcggtacccggataacgatccacggtaatgacctccatgtaggctccgagttgcaagtattggtaaacgataccgatccttgtactgagctgatgcggactgatacatcaattgcatgcactatgccagagggtgccctgcctgcccccgtccctgtgtgtgttcgtttcgagcgacgcggatgtgtacacggcaatctgaccttctggtacatgcagaatccagtgatcactgctatcagtccaaggcggtccccagtgtctggaggcaggactatcacagttgctggtgaaagattccacatggtgcagaatgtgtcaatggcggtccatcacatcgggagagagccgaccctctgcaaggtgctgaacagtacactaattacctgtccaagtcccggcgctttgtcgaatgcttcggctcctgttgacttcttcattaatggcagggcttacgccgatgaagtagcggtggcagaggaactgctcgaccccgaagaggcacagcgggggagcaggttcagactagactatcttcccaacccccagttcagtactgctaagcgcgagaaatggataaaacaccaccctggcgaaccgctaactctggtgatacataaagagcaggactcactgggcctgcagtcccatgaatacagagtgaaaattggacaggtctcttgtgacatccagatcgttagtgaccgtataatccattgttccgtcaacgagagtctgggtgctgcagtgggacagctacctataacaattcaggtaggcaatttcaaccagacaatcgccacgctgcagctcggcggatcagagactgcaataatcgttagcattgtgatatgtagcgtgctcttgctgcttagtgtcgttgccctttttgtcttttgtaccaagagccgacgcgccgagagatattggcagaagacgctgctgcagatggaagagatggaatcccagatccgcgaggagatcagaaagggtttcgcagagctacagactgacatgaccgacctgactaaggaattgaatcgcagccagggcattccctttctggaatataaacactttgtaacgcgaacattcttcccaaaatgcagttccctgtacgaggaaaggtacgtgctccctagccagacattgaactcccaaggttcttcccaggcacaagagacgcaccctctattgggcgaatggaaaattcccgaatcttgtaggcccaatatggaggaggggatttcactgtttagcagcctgcttaacaacaagcactttctcattgtctttgtgcacgcgctcgaacagcagaaagacttcgccgtgagagacaggtgtagcctagccagccttctcacaatcgccttacatggcaaacttgaatattatacatctataatgaaggagttgctggtggaccttattgatgctagcgcggctaagaaccctaaactcatgctgcgccgcaccgagtccgttgttgaaaaaatgttgactaactggatgtctatttgtatgtatagttgcctgcgagagactgtcggagagccattttttctcttgctgtgcgcgatcaaacagcagatcaataagggatctatagacgctattacagggaaggcgaggtacaccctcagcgaagaatggttactccgtgagaatattgaggctaagcccagaaatctgaatgtgtcctttcaggggtgcggaatggactctctgagtgtgcgggcgatggacacagacactctcacccaagtaaaggaaaagatcctcgaggccttttgcaagaacgtgccgtacagtcagtggccccgcgcagaagatgttgaccttgaatggttcgcctcttcaacacaatcctatattctccgtgatttggatgacactagcgtcgttgaggacgggcgcaagaagctgaataccctggcacactataaaatccccgaaggggccagcctggccatgagtctgatcgacaagaaagataataccctcggcagggtgaaagacctggatacagagaagtactttcaccttgttctacctactgatgagttggctgaaccaaagaagtcccacaggcaatctcacagaaaaaaagtcctacctgagatttacctgactcgcctcctctccacaaagggtacgctgcagaagttcctggacgacctgttcaaagcaatcttgagcattagagaagacaagccccctctggctgtaaagtacttcttcgacttcctggaagagcaggccgagaagcggggaataagcgaccccgatacactacacatctggaagactaatagatggcgcccttcaagccctgttttgggggagcaccctgaggagccccctgtttgtctgtag

SEQ ID NO: 199861 - DNA, 1503 bp, synthetic construct
  misc_feature 1..1503: note = Description of Artificial Sequence: Synthetic coding sequence
  source 1..1503: mol_type = other DNA
atgcggggcgagctgtggctgctggtgctggtgctgcgggaggccgctagagccctgagtccccaaccaggggccggccacgacgagggccccggctctggttgggcggccaaaggtactgtgcgtggatggaacagaagagccagagaatctccgggacacgtctcagaacccgacagaacacaactctctcaggatctggggggaggcaccttggccatggatacactgcctgacaatcgaacacgcgtggttgaggataatcacagttactatgtgtcacggctctacggaccatccgaaccccatagccgcgaactctgggtggatgttgccgaagcaaataggtctcaggttaaaattcacaccattctgagcaacacacacaggcaggcctccagagtcgtcttaagtttcgattttcccttctacgggcaccccctgcgtcagattaccatagccacagggggatttatttttatgggagatgtgattcaccggatgctgacagctactcaatatgttgcaccactgatggccaactttaatcccggatatagtgacaatagcactgttgtctactttgacaacggaacggtgttcgtagtgcagtgggaccatgtttacctccagggctgggaagacaaagggtctttcacgtttcaggctgccttgcatcacgacgggagaatcgtttttgcttacaaagagattcccatgtcggttcccgagatatcctcctctcagcaccctgtgaaaacagggttgtcagacgccttcatgatcttaaaccctagcccagatgtccccgagtcccgtaggcgatccattttcgagtaccaccggatcgagctagacccttctaaggtcacttccatgagtgccgtcgagttcactccccttcctacctgcctacagcataggtcttgtgacgcttgtatgtcttccgacctaacctttaattgtagttggtgccatgttctgcagaggtgttctagcgggttcgatcggtatcgccaggagtggatggattacggatgcgctcaagaggcagagggaaggatgtgcgaggattttcaggacgaagatcacgacagcgccagcccagacaccagcttctctccctacgacggcgatctgacgacaacctcgagcagcttgtttatcgatagtctgacaactgaagacgacactaagctcaacccatatgctggtggagatggactgcagaacaacctttcgcctaagaccaagggcactccggtgcacctcggaactattgttggaatcgtgcttgcagtgctgctggtcgctgccattatccttgccgggatctacattaatggccatcctacttcgaacgctgctctgtttttcatcgagagaagacctcaccattggcctgccatgaagtttagatctcatccggatcactcaacatacgccgaagtggaaccttccggccacgagaaagaaggctttatggaagctgagcaatgttag

SEQ ID NO: 199862 - DNA, 1014 bp, synthetic construct
  misc_feature 1..1014: note = Description of Artificial Sequence: Synthetic coding sequence
  source 1..1014: mol_type = other DNA
atgcggggcgagctgtggctgctggtgctggtgctgcgggaggccgctagagcattgagccctcaacctggtgccggccacgacgaaggtccgggttcaggctgggccgccaaaggaactgttagggggtggaacaggcgcgcgagggagtcgcctgggcacgtaagcgagcccgatagaactcagctttcacaggatctcggaggaggcactcttgccatggatacattgcccgacaatcgcacgcgtgtagtcgaagataatcacagttattatgtctcccggctctacgggccaagcgaaccccacagtagggaactgtgggtggatgtggcagaggccaaccgttctcaggtgaagatccacacaatcctctccaatacacaccggcaggccagccgggtcgtcctgtcattcgactttcctttttatggccatcctctacgccaaattacgatcgcgactggcggttttatcttcatgggagacgtaattcatcgcatgctgactgcaacccagtatgtggcgccactcatggcgaacttcaatcccggatactctgataactccacagtggtgtacttcgacaacggcactgtgttcgttgtccagtgggatcacgtttacttgcagggctgggaggacaaaggaagttttacatttcaggctgcacttcatcacgatgggagaatagtctttgcttacaaggaaattcctatgtcagtgccagagataagttcgtcccagcaccccgtcaaaactggtctgtccgatgcttttatgattttaaatcccagcccggatgtgccagagtcccgcaggcgctctatctttgagtaccaccgtattgagctggacccctccaaggtaaccagtatgtccgctgttgaattcactccactgcccacatgcttacagcatcgttcctgcgacgcttgtatgtcgtccgacctgacttttaactgcagttggtgccacgtcttgcagagccgtgatgaggttagcccatgttag

SEQ ID NO: 199863 - DNA, 1284 bp, synthetic construct
  misc_feature 1..1284: note = Description of Artificial Sequence: Synthetic coding sequence
  source 1..1284: mol_type = other DNA
atggacaccctgcccgacaaccggacccgggtggtggaggacaaccatagttattatgttagcaggttgtatggtccttcagagccgcattccagagaactttgggtggatgtagccgaagctaacagatctcaggttaagattcatacgatcctctctaacacccatagacaggcttctcgagtcgtgttgtcattcgattttcccttttatggccaccccctgcgccagattactattgccactggcggatttatcttcatgggcgacgtgatccaccggatgctgacagcaacgcagtacgtggcgcctttgatggctaatttcaatcccgggtacagcgacaactctaccgtcgtgtatttcgacaacggcaccgtgtttgtggtgcaatgggatcacgtgtatctccagggatgggaggataagggctctttcacatttcaggccgcactccaccacgatggtcgcatcgtgtttgcttataaagaaatcccaatgagcgttcccgagatctccagctcccagcacccagtgaaaacaggtctttctgacgctttcatgatcttgaatcctagccctgacgttccagaaagccgaaggaggtcaatttttgagtaccataggatagagctggacccgtctaaagtgacctccatgtcagccgtcgagttcacgccactgccaacctgtctgcaacatagatcttgtgatgcctgtatgtcaagtgatctgacattcaactgctcatggtgccatgtcttgcaacgtagccttaataatcaggacgaaaacacctacgtgaattgtctggactctcagcagtgccacggctctagtgagagtcggcgcccattccaagacgaagaccatgacagcgcgtcacccgacacgagcttctctccatacgatggagatctgacgaccaccagctcttctctgttcatcgatagccttacaacagaggatgatactaaactgaatccgtacgctgggggcgatggcttgcagaacaacctgtctcccaagaccaaaggcacccccgtacacctcggcactattgtcggcatcgtgttggccgttttgctggtggccgccatcatcctcgccggtatttacattaatgggcaccccactagcaatgcagctctgttcttcattgaaaggaggcctcatcactggcctgctatgaagttcaggagccaccccgaccacagcacatatgccgaagttgaaccgagcggtcacgagaaggaaggatttatggaagcagagcagtgttag

SEQ ID NO: 199864 - DNA, 375 bp, synthetic construct
  misc_feature 1..375: note = Description of Artificial Sequence: Synthetic coding sequence
  source 1..375: mol_type = other DNA
atggacaccctgcccgacaaccggacccgggtggtggaggacaaccacagttattacgtctcacggctgtacggccccagtgagcctcattctcgtgagctgtgggtggacgtggcggaagccaatagatcccaggtaaagatccatacaattctatccaatacacacaggcaagcttcccgcgtggtgcttagctttgactttcccttttacggacatccattgaggcagatcaccattgccacaggtggctttatcttcatgggggacgtgatacataggatgctgacggctacacagtatgtggcaccattgatggcaaactttaatcctgggtactctgataactccactgtggtgtactttgataactag

SEQ ID NO: 199865 - DNA, 669 bp, synthetic construct
  misc_feature 1..669: note = Description of Artificial Sequence: Synthetic coding sequence
  source 1..669: mol_type = other DNA
atggacaccctgcccgacaaccggacccgggtggtggaggacaaccacagctactacgtctcacggctgtacggcccaagcgaaccacacagtagagagctctgggttgacgtcgccgaagccaatcgcagccaggtaaagatccacacaatactttctaacacacatcgtcaggcatctcgggtggtactaagcttcgatttccccttctacggtcacccccttcgccaaatcactatcgccacagggggctttatctttatgggagatgttattcatagaatgcttaccgccacccaatatgttgcccccctcatggccaacttcaaccccgggtacagcgataattcaacagtcgtctactttgataatgggactgtgttcgtggtgcagtgggaccacgtgtaccttcaaggctgggaagataaaggtagctttacttttcaggctgctttacaccacgacggccgaatagtcttcgcttacaaagaaataccaatgagtgtgccagagataagtagttcccagcaccccgtgaaaactggactctccgatgcgttcatgatactgaacccatcccctgatgtgccagagagcaggcggcgtagcattttcgagtaccaccgaatcgagcttgatccgtccaaagttacgagcatgtccgcttag

SEQ ID NO: 199866 - DNA, 198 bp, synthetic construct
  misc_feature 1..198: note = Description of Artificial Sequence: Synthetic coding sequence
  source 1..198: mol_type = other DNA
tgaagcttcaccttccaggccgccctgcaccacgacggccggatcgtgtttgcctacaaggagatccccatgtccgtgcccgagatctctagcagtcagcaccctgtcaagacaggactgtccgacgcctttatgatactgaacccaagcccagatgtgcccggattctccgcagaatccgcgaaacatctgtggtag

SEQ ID NO: 199867 - DNA, 1383 bp, synthetic construct
  misc_feature 1..1383: note = Description of Artificial Sequence: Synthetic coding sequence
  source 1..1383: mol_type = other DNA
atggccctgagcgtgcggaccctgcccctgcggggcttcctggtgccacggccccagcctacgcgcagccaggatgcaccaagccctcgactcccattgtcatccgctcccgctccctgccggcataagaatgaagaagacaaccactcatattatgtatctcgactgtacggccccagcgagccccactccagagaactgtgggtcgacgtagctgaggctaatcgctcacaggttaagattcatactattctgagtaacactcatagacaggccagccgcgtggtcctaagttttgacttccccttctacgggcatccactgcgccaaattaccatcgcaacgggcggtttcatctttatgggcgatgtgattcatcggatgcttaccgccacacagtatgtagcgcccctgatggcaaactttaaccctggctactcggataattccacagtggtctacttcgacaatggcaccgtgttcgtggttcagtgggatcacgtatacctacagggatgggaggacaaaggtagttttacttttcaggcagctctgcaccatgacggtaggatcgtgtttgcctacaaagaaattccaatgtccgttcctgagattagttcgagccagcacccagtcaaaacaggactgtctgatgcatttatgatcctcaatccatctccggatgtcccagaaagtcgtagacgtagtatctttgagtaccaccgaatcgagctcgacccctccaaagtgacctccatgtcggcagtggaattcactcccctgcccacttgcctgcagcatcggtcttgtgacgcatgtatgtcctccgatttaacatttaactgttcatggtgccacgttctgcagagatgcagcagcggtttcgatcgttatcggcaggaatggatggattacggttgcgcccaggaggccgagggtaggatgtgcgaggattttcaggatgaagaccatgactctgcctccccagacaccagcttcagcccttatgatggggacctgacaactaccagttccagtctttttatagattccctgacaactgaagacgacacaaaactgaacccttacgcagggggagatggattgcagaataacttgtccccgaaaacaaagggcacccctgtacacttgggcaccatagtggggatcgttctggccgtgcttctagtggcagctattatcctcgccgggatctacattaatggtcaccccaccagcaatgccgcattatttttcattgaacggcgacctcaccattggcccgccatgaaattccgatctcaccctgatcactccacgtatgcagaagtggagccctctggacatgaaaaggaaggatttatggaagcagagcagtgctag

SEQ ID NO: 199868 - DNA, 723 bp, synthetic construct
  misc_feature 1..723: note = Description of Artificial Sequence: Synthetic coding sequence
  source 1..723: mol_type = other DNA
atggacaccctgcccgacaaccggacccgggtggtggaggacaaccattcttattatgtgtcacggctctacgggccgagcgagccccactcccgggagttgtgggtggacgtcgccgaagcaaatcgcagtcaggttaagatccacaccatcctgtccaatacacacagacaggctagcagagtggtgctgagctttgactttccgttttacggccatcctttgcgccaaatcactattgctactggagggttcatcttcatgggtgatgtgatccataggatgctgactgccacacaatacgtggctccactgatggctaattttaaccctggctattcggataatagcacggtggtatacttcgataacggtactgtttttgttgtccagtgggatcatgtgtatcttcagggctgggaggataaaggaagctttactttccaagctgcgctccatcatgacggccggattgtgtttgcatacaaagaaatccccatgtcagtgccagaaatttccagttcacagcatccagtgaagaccggcctttctgacgcattcatgatcctgaatcctagccccgacgtgccagagagtaggcggcggtcaatcttcgagtatcacaggatcgagctggatccctcgaaggtaacctccatgtcagccgtagagttcacccctctgcctagtcccagtactaccaggatgaagacacgcatgtag

SEQ ID NO: 199869 - DNA, 1179 bp, synthetic construct
  misc_feature 1..1179: note = Description of Artificial Sequence: Synthetic coding sequence
  source 1..1179: mol_type = other DNA
atggagaaggacaaggtgaagatccacggcatcctgagcaacacccacaggcaagccgcaagggtcaatctaagcttcgatttccctttctacgggcattttctgcgggagattacggttgccactggcggctttatttatacaggcgaggtggtgcaccggatgctcacagctactcagtacattgctccactgatggcaaacttcgatccttccgtgtccaggaactccactgtgcggtatttcgataatggcaccgccttagtggtccaatgggatcacgttcatctccaggataactacaatctgggaagtttcacgttccaagcaacactgctgatggacgggaggattatcttcggatacaaggagatacccgtattagttactcagatatctagcactaaccaccccgtcaaagtggggctgagcgacgcgttcgtggtcgtgcaccgtatccagcagatcccgaacgttcggagacgtacaatctatgagtatcatagggtcgaacttcagatgagcaagatcacaaacatcagcgctgttgagatgacccctttgccaacatgtctccagtttaatagatgcggcccgtgcgtgtcttctcagatcggcttcaactgcagctggtgtagtaagttgcagcggtgttcgagcggctttgacagacacagacaggattgggtggactcaggatgtcctgaggagtccaaggaaaaaatgtgcgaaaatactgaacctgtggaaacatcctctaggactaccacaaccgtgggagctaccactacacagttcagagtgctgacaaccacccgcagggctgttacctcccagtttccaacaagcctgccgacagaagatgacacgaaaatagctctgcatctaaaggacaatggagcatccaccgatgactcagccgccgagaaaaaaggggggactctacacgctggactgatcatcggcatattgattctcgttctcatcgttgctacagccatcctggtcacagtgtacatgtaccaccatcccacgtctgctgctagcattttcttcatcgagagaaggccctcccgctggcctgccatgaaatttcgacgaggcagcgggcatcctgcctatgccgaagttgagcctgtgggcgagaaggaaggcttcattgtgtcagaacagtgttag

SEQ ID NO: 199870 - DNA, 1443 bp, synthetic construct
  misc_feature 1..1443: note = Description of Artificial Sequence: Synthetic coding sequence
  source 1..1443: mol_type = other DNA
atggcccggttccccaaggccgacctggccgccgccggcgtgatgctcttatgtcactttttcaccgaccagtttcagttcgccgacgggaagccgggggatcagatactcgattggcaatatggggttacgcaagccttcccccacaccgaggaagaggttgaggttgactctcatgcctactcccatagatggaagcgtaaccttgatttcctgaaagctgtggatacaaacagagcttctgtcggacaagactccccagagccccggtcattcacagatctgctgctggacgacggacaggacaataatacccagatagaaagagtcaatctcagttttgatttccctttctatggtcacttcctgcgggaaatcactgtcgctacgggtggattcatctatacgggcgaggtggtacaccgtatgctgacagccacccagtacattgcaccactcatggctaacttcgatccctcagtgtcaaggaattccacagtgcgctacttcgataacgggacagctttggtggtccagtgggaccacgtacacctccaagacaattataacctcggctccttcactttccaagctactctgctgatggatgggcgaattatttttggatacaaggaaatcccagttctcgtcacccagatttcttccactaatcaccccgtgaaggtcgggctatctgacgcatttgtggtggtgcatcggattcaacagatcccaaacgttcgccgccgtaccatttacgagtatcatcgagtggagcttcagatgtccaagattactaatataagcgctgtagagatgacgcctttgccgacatgccttcaattcaatcggtgcggaccctgcgtgtcgtcccagattgggttcaattgttcatggtgttccaagctccagcgttgctccagcggctttgatcgtcataggcaggattgggtcgacagcggatgtccagaggaatctaaggagaaaatgtgcgaaaataccgagccagtggaaacttcaagtagaactactacgactgtaggggccacaaccactcagtttcgcgtcctgaccaccactcgtcgcgcagtcacatcgcagtttcctactagtctccctaccgaggatgatacaaagatcgcactacatctgaaggataacggagcttctactgatgatagtgccgctgaaaagaagggggggacactgcatgccggtctcatcattggcatattgatcctggtactcatcgtggctaccgccatcctagtgactgtgtacatgtatcaccatcccacatccgccgcaagtattttctttatcgagcgtcgaccaagccgttggccggctatgaaattccgcagggggtccgggcatcccgcatacgctgaggtggagccggttggtgaaaaggaagggtttatagtatcggagcagtgttag

SEQ ID NO: 199871 - DNA, 1590 bp, synthetic construct
  misc_feature 1..1590: note = Description of Artificial Sequence: Synthetic coding sequence
  source 1..1590: mol_type = other DNA
atggcccggttccccaaggccgacctggccgccgccggcgtgatgttgctatgccacttttttactgatcaattccaattcgcggacggtaagcctggcgaccaaattctagattggcagtacggcgtgactcaggcttttccacataccgaggaggaagttgaagtagactcccacgcgtactctcacaggtggaagcgcaacttggacttcctcaaagccgtcgatacaaacagggcgagcgtcgggcaggactccccggaaccaagatcattcaccgatttgctgctggatgatggacaggataacaacacccagatagaagaggacacggaccacaattattatattagccgcatatacggtcctagcgatagcgcctcccgcgacctgtgggtgaacatagatcagatggaaaaggataaggtcaaaatccacggaattctttctaacacccatagacaggcggcccgagtgaacctctcattcgattttccattttatggccattttcttagagagataacagttgcgacaggggggtttatctatacgggcgaagttgtgcaccggatgctgaccgcgacacagtacattgcacctctgatggctaattttgacccatctgtatccaggaacagcacagtgcgctactttgacaacggcacagctctagttgtccagtgggaccacgtgcacctccaagataactacaatctgggcagttttacattccaggctacactgctgatggacggcagaataatattcggctataaggagattccagtactggttacccagatttcaagcaccaatcaccctgtcaaagtgggactctctgatgcctttgttgtggtgcatcgcattcaacagatccccaatgtgcgcagaagaaccatctatgagtatcatagagtcgagctgcagatgtcaaagattacaaatattagtgctgtcgaaatgaccccactgccaacttgcctgcaattcaataggtgtgggccttgtgtgagtagccagatcggctttaattgcagctggtgctctaagctccagcggtgttcaagcggattcgaccgccatcggcaggattgggtcgattcaggatgccctgaggagagtaaggaaaaaatgtgcgagaacaccgaacccgtggagacttcatcacggaccacaaccaccgtgggcgcaactaccactcagttccgggtcctgacaaccacacgacgcgcggtgacctcacagtttcccacaagtttgcctactgaggacgacacaaagatcgccctgcacctaaaagataatggagcgtcaacggatgacagcgccgctgagaagaagggtggcaccctgcatgctggcttgatcattggaattctgattctggtgctcatcgtcgccacagccattttagtgaccgtatacatgtaccaccaccctacaagcgccgccagcatcttcttcattgaaaggaggccatcaagatggccagcgatgaagtttagaaggggctccggacacccagcctacgccgaagttgagccagtcggggaaaaagaaggtttcattgtgagtgagcaatgctag

SEQ ID NO: 199872 - DNA, 1548 bp, synthetic construct
  misc_feature 1..1548: note = Description of Artificial Sequence: Synthetic coding sequence
  source 1..1548: mol_type = other DNA
atgctgctgtgccacttcttcaccgaccagttccagttcgccgacggcaagccgggtgaccagatcctggactggcagtatggggtaactcaggcctttcctcatacagaagaggaagtcgaagtcgacagccatgcctacagtcaccgctggaaaagaaatcttgatttcctgaaagcagtcgacacaaatcgcgcctcagtcggtcaggactctcccgagccacgtagcttcaccgacctcctgcttgacgatggacaagataacaacacccaaatcgaagaggataccgaccacaactactatatcagccgtatctatggcccatccgacagtgcatcacgagacctatgggtgaacattgaccagatggagaaggataaggtgaagatacacggtattttaagcaatacccataggcaggcagccagagtcaatctttccttcgatttcccattctatggacatttcttacgggaaatcaccgtggctactggcggctttatatatactggcgaggtggtgcatcgcatgctgactgccacacagtatatcgcacctctgatggctaatttcgatccatccgttagccggaatagcacagtccgttacttcgacaatggcactgccctggtggtccagtgggatcatgtgcatctacaggataactacaatctgggctcatttacatttcaggccaccctgctgatggatggccgcatcatctttgggtacaaagaaatcccagttctagtgacgcaaatttcgtccactaatcatcccgtcaaggttgggctttcggatgccttcgtcgtagtacatcggattcaacaaatcccgaacgttcggaggcggaccatctatgaataccacagagtggagcttcagatgtccaaaatcacaaacatttctgcagtggagatgactcctctccctacgtgtctgcagttcaaccggtgcggtccctgtgtcagcagccagattggtttcaactgctcttggtgctcaaaactccagagatgctcgtctgggttcgaccgccaccgacaagactgggtggacagtggttgccctgaggagtccaaagaaaagatgtgcgagaataccgaacctgtggagacatccagcaggacaacgacaaccgtgggcgccaccaccacgcaattccgcgtccttactaccactcgccgggccgtaacgtcccagtttccaacatctctgccaactgaagacgatactaaaatagccctccacttaaaagataatggcgcatcaaccgacgattcagccgcagagaagaagggaggaactctacacgcggggcttatcatcgggatcctgatcctggtgcttatcgttgcgaccgctatcttagttaccgtgtatatgtaccaccaccccacaagcgccgcaagcatatttttcatcgaacgtcgacccagtcgatggcctgccatgaagtttaggaggggtagtggccaccctgcctacgcggaagtggaacctgtgggcgaaaaggaggggtttatagtgtctgagcagtgttag

SEQ ID NO: 199873 - DNA, 1581 bp, synthetic construct
  misc_feature 1..1581: note = Description of Artificial Sequence: Synthetic coding sequence
  source 1..1581: mol_type = other DNA
atgcggtgcgccctggccctgagcgccctgctgctgctgctgagcactccccctttattgccgagcagtccttcaccaagcccttctccctcacagaatgccacccagaccacaaccgattccagcaacaagacagccccaactcctgcatcttccgtgaccatcatggctacagatacagcacagcagagtactgtacccacttccaaagcgaatgagattctagcatctgtgaaagccactacattaggagtcagttctgatagcccaggaacgaccactctggctcagcaggtgtccggacctgttaatacaacagtggccaggggtggaggtagtgggaatcccacgaccaccatagagagtccaaaatccactaaaagcgccgatacaacaaccgtcgccacttcaactgcaacggccaagcctaacactacctcttcccaaaacggtgccgaggatacgacaaactcagggggcaaaagcagccactccgtcactaccgacctgacttctacaaaggctgaacacctgaccacaccccatcctacctcaccgctctcaccccggcagcccacatcaacgcatccggttgccaccccgacgagcagtggtcacgatcatctaatgaaaatttcatcctcctcctccactgtggcaataccaggatacaccttcacttccccaggcatgacaactacactgccctcatccgttatcagccagcgcactcagcagacatcctcccagatgccagcttcaagcacagcaccaagcagtcaagagaccgttcaacctactagcccggccacggcgctcagaacaccaaccctgccagagaccatgtcatccagcccgaccgccgcctccaccacacatcgctaccccaagacgccctccccgactgtagcccatgaaagcaactgggccaagtgtgaggatttagagacacagactcagagcgagaagcagctcgtactaaacctgaccggaaacactctctgcgctggaggggcctctgacgagaaactgattagtctgatatgccgcgcagtaaaagccacattcaaccccgcccaggacaagtgtgggataaggctggcaagtgtgcccggaagccaaaccgtggtagtaaaggagattactatacacaccaagctcccagccaaggacgtgtacgagaggctcaaagacaaatgggatgaactgaaggaggccggcgtgtccgatatgaagttgggcgaccaaggacctcctgaggaggccgaggatcgatttagtatgccgctcataatcacaatcgtgtgcatggccagcttcctcttactagtggctgcactctatggttgctgtcaccagcgcctctcccaacgcaaagatcagcagcgtcttacagaggagctgcagacagtggagaacggatatcatgacaatcctactctcgaggtgatggaaactagtagtgaaatgcaggagaaaaaggtcgtttcgcttaatggagaacttggtgactcatggatagttcctctcgacaacctgaccaaggatgatttggatgaagaagaagatactcacctgtag

SEQ ID NO: 199874 - DNA, 1677 bp, synthetic construct
  misc_feature 1..1677: note = Description of Artificial Sequence: Synthetic coding sequence
  source 1..1677: mol_type = other DNA
atgcggtgcgccctggccctgagcgccctgctgctgctgctgagcacgccccctctattgccttcaagtccaagccctagcccatcacccagtcagaacgccactcagacaaccacggattccagtaacaaaacggctccaacgcctgcctcctctgtgacaataatggccaccgacacggctcagcaatccactgtcccaaccagtaaggccaatgagatattagcctcagtgaaagctaccaccctgggggtgtcaagcgatagcccaggaacaaccactctggcgcagcaggtgtccggcccggtcaatacaaccgtagctcgagggggggggagtggaaatccaacgactacaatagaatcacctaagtcaacaaagtcagcagataccaccacagtcgctacaagtactgcgacagcgaaacccaacaccacctccagtcagaacggtgctgaagataccaccaattcaggcgggaaaagtagccactcagtaacaacagatcttaccagtaccaaagctgagcacttgacaactccacacccgaccagccccctgagccctcgccagcccactagcactcatcccgtggcaacccccacaagtagtggacacgaccatcttatgaagatttcttcatcatccagcacagttgcgatccccggatacacttttacatcaccagggatgaccaccactctactggagaccgtttttcaccatgtaagtcaggccggactcgaactgctgacatcaggcgacctacctacccttgcttcccagtcagcaggtatcacagcgagctctgtgatcagtcagcgcactcaacaaactagctcgcagatgccagcctcctccacagccccaagttctcaggagactgttcagccgaccagccctgcaacagccctcaggacccccactcttcctgaaaccatgagttcgtcaccgacagctgcctcgacaactcatcggtaccccaaaacaccttcacctaccgtagcacatgagtccaactgggccaagtgtgaagacctggaaactcagacacagtcggagaagcagttagttctgaatctcacaggaaacacactctgcgctggcggggcaagcgatgaaaaactgatctcactaatttgccgtgccgtcaaggctactttcaatccagcccaagacaagtgtggaatccggctggcctccgtgccgggatcccagacggtcgttgtaaaagagataacaatccacacaaagctcccagctaaggacgtctacgaacgattgaaagataagtgggatgagctgaaagaggccggggtgtcagatatgaaactgggggaccagggccctcctgaggaggccgaagacagatttagcatgcctttgatcatcaccattgtttgcatggccagttttctgctcttagtggctgccctttacggctgctgccatcagagactgagccagcggaaagaccagcagagattgaccgaggaactgcagactgtggagaatggatatcatgataatcccacgctggaggtgatggagactagcagcgaaatgcaggagaaaaaagtcgtgtcgttgaacggggaacttggggacagctggatcgtcccgctagacaatctgactaaggatgatctggacgaggaggaagacactcatctgtag

SEQ ID NO: 199875 - DNA, 1581 bp, synthetic construct
  misc_feature 1..1581: note = Description of Artificial Sequence: Synthetic coding sequence
  source 1..1581: mol_type = other DNA
atgcggtgcgccctggccctgagcgccctgctgctgctgctgagcacacctccccttctgccctccagcccaagtccaagtccttccccctcgcaaaatgcgacccagactacaaccgatagcagtaacaagaccgcgcctaccccggccagttccgtgacaatcatggcaaccgacacagcacaacagtctacagtgccaacctcaaaggccaacgagatactggcttcagtaaaggcaaccactctgggggtgagttccgatagcccaggaactacgactctggctcagcaggtctctgggccggttaatacgaccgtcgcaagggggggaggttcaggtaacccgactacgactattgagtccccaaaatcaaccaagtctgcggacactaccacagttgctactagtaccgctaccgcaaagccaaacacaacgtcgagccagaacggcgctgaggacactactaattccggcggtaaatcttctcattcagtgacaacggacctgacttcgaccaaggcagagcaccttacaaccccacaccccacctcaccgctctcaccaagacaaccaacatccacgcacccagtggcgacacccaccagctctgggcacgatcaccttatgaaaatctcctcgtccagcagcacagtcgctatcccaggctatactttcacaagccctgggatgactactactttgccgtcatctgtcatttcccagcgaacacaacaaaccagctctcaaatgcccgcgagtagtactgccccgtctagccaggagaccgtgcaacccacaagtcctgctactgccctacgcacgcccacgctgcccgaaaccatgagtagcagccccactgcggcaagcaccactcaccgctaccctaaaactcctagccctacagtcgcacatgaaagcaattgggtgaccccagcgggcgttggcacccagaccagggttgaggaggccctacggcaggctcttacacattccctcctgcccgcaggtggggcaagcgacgagaagctcatcagtttaatctgtcgggctgttaaagctaccttcaaccccgcccaggacaagtgcggcatccgactcgcctccgtgccgggatcacagacagttgtggtgaaggagattacgattcacaccaaactgccggctaaggacgtctacgaaaggctgaaggataaatgggatgaactgaaggaggctggggtcagtgacatgaaactaggagatcaaggtccacctgaggaggcagaagatagattctctatgccgctcattataacaattgtgtgcatggcctcgttcctgctgctggtggctgcactatatgggtgctgccaccagaggctcagtcaaagaaaggaccagcaaaggctgacagaggagctccaaactgtagaaaacgggtaccacgataatcctacattagaagtgatggaaacgagttccgaaatgcaggaaaagaaagtggtcagcctgaatggcgagctgggggattcatggattgtgccactagacaatcttaccaaagacgaccttgacgaggaagaggacacccacttatag

SEQ ID NO: 199876 - DNA, 1683 bp, synthetic construct
  misc_feature 1..1683: note = Description of Artificial Sequence: Synthetic coding sequence
  source 1..1683: mol_type = other DNA
atgcggtgcgccctggccctgagcgccctgctgctgctgctgagcacacctccattactgccttcttcaccctctccaagcccttcacctagccagaacgagactgcgacccagactaccaccgactcttccaataaaacagcccccactccagcctcaagtgtgacaattatggctaccgacacagctcagcagagtacggtcccgacttcaaaagccaatgaaatcctagcctccgtaaaagcgacgacccttggtgtatcctctgattctcccggcaccaccaccctggctcagcaggtcagtggccctgtaaacacaaccgtggctcgtgggggcggctccgggaaccctactaccacaatcgagagtcccaaatcaacaaagagtgcagatacgactactgtggccacctctaccgctaccgctaaaccaaatacgacaagttcccagaacggagcagaggacaccaccaatagcggagggaagtccagccactctgtaactaccgacctgacttctaccaaggccgaacatttgacaacccctcaccccaccagcccactgagccctaggcagcccacttcaactcatccagttgctacaccaacttcctccggccacgaccaccttatgaaaattagttctagttccagcactgtggcaattcccggctataccttcacctcacccggaatgacaactacgttacttgaaacagtttttcaccacgtgagccaagcgggactcgaactgttaactagcggggacctgccaactttggcgagtcagtctgccgggataaccgcgtcctctgtgattagtcagcggacacagcagacttcctctcagatgcctgcttcttcaacggctcccagctcccaggagaccgtgcaaccaacctctcctgccaccgccctccggacccccaccctccctgaaacaatgtcctctagcccaaccgctgcttccacaacccaccgctacccaaagactccctccccgactgtagcgcatgaaagtaattgggccaagtgcgaggacttggagacacagacacaaagtgaaaaacagctagtgctaaatttaacaggcaacacactctgcgcggggggcgcatccgacgaaaagctgatcagtcttatctgccgcgccgtgaaagcgaccttcaaccctgcacaggataaatgcggcattagactcgcatctgtgccagggagtcagaccgtagtagtgaaggagatcaccatccacaccaaactgccggccaaggacgtttacgagcgtctgaaagacaaatgggatgaactcaaggaggcaggcgtttccgatatgaagttaggtgaccaggggccccctgaagaagcggaggatcggttttctatgcctctaattataacgatcgtgtgcatggcttcttttctactgcttgtcgctgctctctacgggtgttgccaccaaaggttaagccagagaaaggaccagcagcgcttgacagaggaactgcaaacggtcgagaacggttaccacgacaatccaacactcgaagtgatggaaacgtcttctgaaatgcaggagaagaaggtcgtaagcctgaatggagaattgggtgatagctggatcgtgcctttagataatctgactaaggatgatcttgatgaggaagaagatacacatctttag

SEQ ID NO: 199877 - DNA, 1551 bp, synthetic construct
  misc_feature 1..1551: note = Description of Artificial Sequence: Synthetic coding sequence
  source 1..1551: mol_type = other DNA
atgcggtgcgccctggccctgagcgccctgctgctgctgctgagcactagcccttccccctcccaaaacgcgacccagactacaacagattctagcaataagacagcacctacccccgcctccagcgtgacaattatggctaccgacactgcccagcagtccactgtaccaacgtcgaaagcaaacgagatacttgcctccgtcaaggccaccacactgggagtatcaagcgattcacccggtactactaccctcgctcagcaagtatcaggcccagttaatactactgttgccagaggaggaggcagcggcaatcctactacaactattgagtcacccaaaagtacgaaaagcgccgatactactactgtagcaacgtccaccgcaaccgctaaaccgaacacaacctcctcacagaacggggcggaggacacgaccaacagcggcggaaaatcctcacattcggtcactaccgatctgaccagcaccaaagccgaacacctcaccacgcctcaccccacatctccgctgtcccccaggcagccaaccagtactcacccagttgctactcctacttcatctggacacgatcaccttatgaagatatcaagctcctcgtcaacagtggcgattcccggctatacctttaccagccccggaatgaccacgacactgccatcttccgttatttcccagcgcacacaacagacctcaagccagatgcccgccagttccaccgctccatcctcccaagaaacggtccagccaactagtcccgccaccgcgctccgcactcctactctccctgaaaccatgagctcaagcccaactgccgcaagtactacccatagatacccaaagactccaagcccgacagtcgcccacgagtcaaactgggccaagtgtgaagacctggagacccagacccaatcagagaagcagctggttttgaaccttactggaaatacattgtgtgcaggcggggcatcagatgagaagctgatttctctcatttgcagggccgtcaaggccactttcaaccctgcccaggataagtgcgggattcggttggctagtgtgcctggctcccagaccgtggtagtgaaagagataacaatacatacgaagttacccgccaaggatgtctatgagcggctgaaggataagtgggacgagctcaaggaggctggagtgagcgacatgaaactgggggatcaggggcctccagaggaggcggaggatcggttttccatgcctctgatcataacgattgtgtgtatggccagcttcctcctgctggtggcagccctctacggctgttgtcatcaacgattatctcagaggaaagatcagcagaggctgacagaggagctgcagacagtggagaatgggtaccatgacaatccaacactggaggttatggagacttcgtccgaaatgcaggaaaagaaagtcgtctccctgaatggggaacttggtgactcttggattgtgcccttggataacctcacaaaggatgatctcgatgaggaagaagatacccacctctag

SEQ ID NO: 199878 - DNA, 1986 bp, synthetic construct
  misc_feature 1..1986: note = Description of Artificial Sequence: Synthetic coding sequence
  source 1..1986: mol_type = other DNA
atggagggcgcccgggcccggggcgcccagctgcggctgggcgagcgggtaagaccagttggacgtagaagtgcccccggacgcagccgcttccggcagccctggcgcccgggagctagcgatagcgcgccacctgcggggaccatggcccaatcacgggtgcttctgcttctgctcctgctgccaccccagttacacctcggcccagtgctcgccgtgcgtgctccaggctttggtagatctggagggcattcactctctcccgaagaaaatgagttcgccgaagaggaaccagtattggtgctgtcaccagaggagcccggacccgggcctgccgccgtctcctgccctcgggattgtgcctgctcccaggaaggggttgtagattgcgggggaattgacctgcgcgaattccccggcgacctgcccgaacatacgaatcacctgtcattgcagaataaccagctcgagaagatttacccagaggagctatcgaggctacatcggctagagacgctcaacctgcaaaataataggctgacctctaggggactccccgaaaaagcgttcgaacatctgactaatctgaattacctatatctggccaacaataagcttacactggctccccgctttctacccaatgcgttaatcagtgtggattttgctgcgaattacctgacaaaaatctacggactcacttttggccagaagccaaacctgcgctccgtttacctccacaataataagttagcggacgctgggttgcctgacaatatgttcaacggcagctccaacgtggaggttttaattctgagtagcaactttctgcgacacgtcccaaaacatctgccacccgccttatacaagcttcatttaaagaacaataagctcgagaaaatccctcctggggctttctcagaattgagctctctgcgggagctctatctacagaacaattacctcactgatgaagggttggacaatgagaccttttggaaactttcaagcctcgaatatctcgatctttctagcaacaacttatcaagagtgccagcaggattgccgcgcagcttggtgttgcttcatttagaaaagaacgctatacggtccgtggacgctaatgtcctgacgcccattaggagtctcgaatatctgctgttgcatagtaatcaattgagagagcaggggatccacccgttagccttccaggggctaaaaaggctgcacactgtccacctttacaataacgcattggagagagtaccaagcggcctgcccaggcgcgtccgtactctgatgattctacataatcaaatcaccgggatcggtagagaggatttcgcgacgacttattttttggaagaattgaatttgtcctacaaccgcatcacgagcccccaggtacaccgagatgcctttcggaagctccgcctgcttcggtcactggatctcagtggcaatagactgcataccttacctccagggctccccagaaatgtccatgtgctcaaggtgaagcggaatgaactggccgccctggcaaggggtgccctggtgggcatggcccaactccgcgagctctaccttaccagcaatcggctgaggagccgcgctctgggacccagggcttgggtcgatctcgcccacctgcagctcttggatatcgcgggcaaccagctgactgagatacctgagggcctccccgaatctctagagtacctttatctgcagaacaacaaaattagtgccgtaccagcaaacgctttcgattccacgcctaaccttaagggtatattcctgcggtttaataaactggcagtagggagcgtggtagactcagcttttcgccgactgaagcaccttcaggttctggatatcgaaggcaatctggaattcggggacatctccaaagatcgaggcagactcggtaaagagaaggaagaagaggaggaggaagaagaggaagaggaagagacccggtag

SEQ ID NO: 199879 - DNA, 1929 bp, synthetic construct
  misc_feature 1..1929: note = Description of Artificial Sequence: Synthetic coding sequence
  source 1..1929: mol_type = other DNA
atggagggcgaggaggccgagcagcccgcctggttccggcagccctggcggccgggagcttcagatagtgctccacctgcaggaacgatggcccaatcgcgggtgcttctgctgctactgctgttgccccctcagcttcatctaggccctgttttggccgttcgggcgccaggttttgggcggtccgggggccactccctgtctcctgaggagaatgagttcgctgaggaggaacccgtactggttttaagccctgaagagccgggccctggccccgccgctgtttcttgtccccgtgactgtgcctgttctcaagaaggagtggtagattgtggcggaattgatctgcgtgagtttccaggtgacctgcctgaacacaccaatcatttatccctgcagaataaccagctggagaaaatctatcccgaagaactgtcacgccttcacaggctcgaaaccttgaatcttcagaacaatcgtcttacaagccggggcttacccgaaaaggcgttcgagcacttgaccaatctgaattacctatacctcgccaataataaactgacgctagctccaagatttttgcctaatgccctgatctccgtggattttgctgctaactacctgaccaaaatctatgggttgactttcgggcagaaacccaacctgcgatctgtatatttacacaataacaagcttgccgacgccgggctgccggacaatatgttcaacggcagtagtaatgtcgaagttctgattctgagctccaattttctccgccatgtacctaagcacctgccccctgccctctacaagctgcatctgaagaataataaactggagaagattccccctggagctttctcagagctgagctctctgcgcgagctgtaccttcaaaacaattacctcaccgatgaaggcttggacaatgagacattctggaagttatcatctttggagtacctcgacctgtcctccaacaacctttcgcgggtgccagcagggttgcctaggagcctggttctactgcacttggagaaaaatgccatccggtctgttgacgccaatgtgctgaccccgatccgcagcctcgagtacttacttctgcattcaaaccagctccgcgaacagggcatccacccattggctttccagggactgaagaggttacacaccgtccacctctacaataatgccctggagcgagttccgtccgggttgcccaggcgggtccgcactctcatgatcctgcacaaccaaatcaccggtatcggaagagaggacttcgcaacaacttacttcttagaggaacttaacctctcatataatagaatcacttccccgcaggtgcaccgcgatgccttccgcaaattgaggctgctgagaagccttgacctgagcggcaatcggctccatactctacccccagggctcccgagaaacgtccacgtgttgaaagtcaagagaaatgaactcgctgctctggcacggggtgctctcgtggggatggcacagctccgagagctgtacctgacctccaaccggctccgctcccgcgccctgggccctagggcctgggttgatctggcacatctccagctactggacatagccggtaatcaactgactgagattccagaggggctgccagagtccctggaatacctctatctgcaaaacaataagatctcggccgtcccagctaacgccttcgattccactccaaatcttaaaggaattttcctcaggttcaataagttggctgtgggcagcgtagtggatagcgcctttcggcgcctgaagcatctgcaagtgctggacatcgaggggaacctcgagtttggtgatatttccaaggatcggggccgcctgggaaaagaaaaggaggaagaggaggaggaagaggaggaggaggaagagacgcgttag

SEQ ID NO: 199880 - DNA, 1560 bp, synthetic construct
  misc_feature 1..1560: note = Description of Artificial Sequence: Synthetic coding sequence
  source 1..1560: mol_type = other DNA
atggagggcgcccgggcccggggcgcccagctgcggctgggcgagagggtgcgcccagtgggcaggcgctctgctcccggccgatccagatttcgccagccttggagaccgggtgcctccgattctgccccgcccgcaggaacaatggctcagtcgcgagttcttctgctgctccttttattaccacctcagctgcaccttgggccagtactcgcagtgcgtgctcctggcttcggcaggtccggcggtcattcgttgtctccagaagaaaacgaattcgccgaggaagaacctgtgcttgttctgagcccggaggagcccggacctggccccgcggcggtaagctgcccaagggactgcgcttgcagccaggaaggagtagtagactgtggcggcattgatctgcgagagtttccgggggatttgcccgagcatacaaaccacctgtcattacagaataacaaactggagaaaatcccaccaggcgccttttcggaactgagctctctacgggaactgtacctccagaataactacctcaccgacgagggacttgacaatgagactttctggaagctgagttctcttgaatacctcgacttgagttccaacaacttatctcgcgtgcctgcagggttgcctcgtagcttagtcctgctgcacttagagaagaacgcaatccgctccgtggatgccaacgttctgacccccatacgctcactggagtatctcctactacacagtaatcagctgagggagcagggcatacatcctctcgcttttcaggggctgaaaagactgcacactgtgcacctgtataacaatgctctagaacgtgttcctagcggactgcccagaagagtgagaactctcatgattttgcataatcagattaccggcatcgggagagaagattttgcaacgacttattttctcgaggaactcaacttgagttacaaccggataacctctcctcaagtgcatcgggatgccttccggaagctacggctcctgaggtcactggatctctccggcaataggctccatactctgccacccggcttgcccagaaatgttcatgttctcaaggtgaagcgcaatgagttggctgcccttgcacggggcgcattggttggaatggcgcagctgagagagctttatttaacctcaaacaggctgcggtcgcgcgctctgggcccccgagcctgggttgacctggcccatctgcagctgcttgatatcgcgggcaaccagctgacagaaataccagagggtctgcctgaatctctggagtacctatatcttcaaaacaataagatatcagcagttccagcgaacgcatttgattctaccccgaaccttaaaggtattttcctgcggtttaacaaattggcagtcgggtctgtggtcgatagtgcctttaggcgcctcaaacacctgcaagtgctagatatcgaaggtaatttggagtttggagatatatctaaggaccgggggcggctcggaaaagaaaaggaggaggaagaagaagaagaggaagaagaggaagagacgcggtag

SEQ ID NO: 199881 - DNA, 1095 bp, synthetic construct
  misc_feature 1..1095: note = Description of Artificial Sequence: Synthetic coding sequence
  source 1..1095: mol_type = other DNA
atggcccgggccatggccgccgcctggcccctgctgctggtggccttgttagtactttcctggcctccacccggcacaggagacgttgtcgtgcaggcccccacccaggtgcccggtttcctgggggactccgtgactctgccatgttacctccaggtccccaatatggaggtgactcacgtgagtcagcttacatgggcccgacacggggagtctggcagcatggcagtcttccaccagacgcaaggcccgtcgtatagtgagagtaagcgcctagaatttgtcgcagcccgcttgggcgctgaattgcggaacgcttcccttagaatgtttggcttgcgtgttgaagacgaagggaattacacttgtctgttcgttacattcccacaggggtctagaagcgtcgatatatggttgagggtccttgctaagccgcagaatactgccgaggtacagaaagtccagttaaccggcgagccagtgcccatggcgagatgtgtcagcaccgggggcagacccccggcccagatcacctggcacagtgatctgggcggcatgccaaatacttcccaggtccccggtttccttagcggaaccgtgaccgtcacctcactgtggattctggtgccttctagccaggtcgacggcaaaaacgtgacgtgtaaagtggaacacgagtccttcgaaaaaccccaactccttaccgtgaacctgaccgtgtattatccacccgaggtgtctatttctggctatgataacaactggtacctgggccaaaatgaggcaactttaacatgtgacgcccggtctaaccctgagcctacaggttataattggagtactaccatgggcccactgccgccattcgcagtcgcccaaggggcacagctcctgataagacccgtagacaagcctattaatacaaccctaatttgtaatgtcactaatgccctgggcgcacgacaggctgaattaaccgtccaagttaaaggaaccgagcacgcctcagcctctgcaaatggtcacgtgtcatatagtgctgttagcagagaaaattcttcttcacaagatccccagactgaaggtacacgatag

SEQ ID NO: 199882 - DNA, 1119 bp, synthetic construct
  misc_feature 1..1119: note = Description of Artificial Sequence: Synthetic coding sequence
  source 1..1119: mol_type = other DNA
atggcccgggccatggccgccgcctggcccctgctgctggtggccctgctcgtgcttagctggcccccccccggaacgggtgatgtcgtggtccaggcccccacccaagtccccggattcctaggcgattctgtcaccttgccctgttatctgcaggtcccgaatatggaagtgacacatgtatctcagttgacttgggccagacacggagagagtgggagtatggccgtgtttcatcagacccagggaccctcgtattccgaaagcaaaaggctcgaattcgtggccgctaggctgggtgcagagctgcgtaacgcttctctgcgtatgttcggcctacgcgtagaggatgaaggcaactatacatgtctgtttgtgaccttcccacagggcagcaggtccgttgatatctggttgcgcgtgctcgccaaaccacaaaataccgccgaggtgcagaaagtgcagctaactggtgaaccagtgcctatggccaggtgtgtgtccaccggtggccggccaccagcacaaattacatggcactccgacctgggaggcatgcccaatacaagccaggtccccggcttcctgtcaggaacagttaccgtaacctctctgtggatcctagtgcctagctcccaagttgatggaaagaacgtcacctgcaaggtcgagcacgagtcatttgagaaaccccaactgctcaccgtgaatttgaccgtgtattacccgcccgaggtcagtatcagcggatacgacaacaactggtacctaggccagaacgaagcaacacttacatgcgacgctagatccaacccggaacccacagggtataactggagcacaacgatgggccctctgccaccgttcgccgttgcccagggtgcccagctgttgatcagacctgtggataagccaatcaacaccacgctcatttgcaacgtcaccaatgctctgggggcccgccaagccgagttgacagtacaggtcaaggaagggcctccatcagaacattccgggaccgagcacgcttcggccagcgccaacgggcatgtctcatacagtgctgtgagtagagaaaattctagctctcaagatccccagactgaaggaaccagatag

SEQ ID NO: 199883 - DNA, 1179 bp, synthetic construct
  misc_feature 1..1179: note = Description of Artificial Sequence: Synthetic coding sequence
  source 1..1179: mol_type = other DNA
atggcccgggccatggccgccgcctggcccctgctgctggtggccctcttggtgttaagttggccaccaccggggaccggggacgtagttgtacaggctcctacccaagtgcctggctttcttggggacagcgtaaccctcccctgctacctgcaagttcccaatatggaagttacacacgtttcacagctcacatgggcgcgtcacggcgagtctggcagcatggccgtctttcaccagacccaggggccatcatattctgaatcaaagcggctagagtttgttgcagcccgactgggcgcagagctgagaaatgccagtttgcgcatgtttggcctccgagtggaagacgaaggaaattacacatgtctctttgtcacttttcctcaggggagtcgtagtgtggacatttggctgcgtgttctagccaagccacagaacacagcagaagtacagaaggtacagctgactggcgaacctgtccctatggcccgatgcgtgagcacgggagggcgtcccccagcccaaataacatggcactcagacctcgggggaatgcccaacacttcccaggtgcctggatttctgtcagggacagttaccgtgacttccttgtggatcctggtgccttcctcacaggtggatggtaaaaacgtaacctgcaaagtggagcatgagtccttcgagaaacctcaattacttaccgtgaatttaacagtttattacccgccagaagtgtctatttcaggttatgacaacaattggtatctgggccagaacgaagccactcttacttgcgacgcaagatccaatccagagcccacaggatacaactggtccacaaccatgggacctctccccccatttgcggtcgctcagggcgcccagcttctgattcgacccgtcgataaacccataaataccacactgatttgtaatgtgactaacgcgttaggcgcccgacaggccgagttaaccgtacaggtgaaggaaggcccccctagtgaacacagcgggatcagcaggaatgctatcattttcctggtactaggcatcctggtctttctgatcctgttgggcatcgggatttatttctactggtcaaaatgcagccgtgaagtcctctggcattgtcatctgtgccctagctctgagcaccaccagagctgtcgaaattag

SEQ ID NO: 199884 - DNA, 1254 bp, synthetic construct
  misc_feature 1..1254: note = Description of Artificial Sequence: Synthetic coding sequence
  source 1..1254: mol_type = other DNA
atggcccgggccatggccgccgcctggcccctgctgctggtggccctcctggtgctttcatggccaccccccggcacaggggatgtcgtcgtgcaagcaccgacccaggttcctggatttctcggggacagcgtgacattgccctgttaccttcaggttccaaatatggaggtcactcatgtatctcagcttacgtgggccaggcacggcgaatctggtagcatggctgtgttccaccaaacacaggggccttcatactccgaatccaaacgcctagagtttgttgctgcaaggctgggagccgagctgagaaacgcctccctccggatgtttggactgcgggtggaggatgagggaaactatacttgcctgttcgtaaccttccctcaaggtagccgaagcgtggacatttggctgagggtgttggcaaaaccccagaacaccgcagaagtccagaaagtacaacttacaggggaacccgtgcctatggccaggtgcgtgtccaccggaggaagaccacccgctcaaattacttggcactcggaccttggcgggatgcctaatactagtcaggttcctggctttttaagcggcaccgttaccgtgacgtccctctggatcttggtgccatcctcacaggtcgatggaaagaacgtgacttgtaaggtggaacacgaatccttcgagaagccacagctgctgacggtgaacctgacagtttactaccctcctgaagtgagtatttctggttacgacaataactggtacctcggccagaatgaagccaccctcacgtgcgatgctcggtctaatcctgagcctactggctataactggtccactacaatgggtcctcttcccccattcgctgtggcacaaggggcacagctgttgatacgtcctgtggataagccaattaatacaactctaatatgtaacgtcaccaatgccctgggggctcgccaggccgaactcactgtgcaggtcaaggagggccctccctcagaacactctggcatctcacgtaatgccattatcttcttggtcctgggcattcttgtctttctgatcctgctcggaatcggtatctatttttactggtccaagtgttctcgggaggttctgtggcactgccacctttgcccttcctcaaccgaacatgcctccgcctctgccaatgggcacgtgtcttattctgccgtgtcacgtgagaacagtagctcccaggacccacagacggaaggaacacgctag

SEQ ID NO: 199885 - DNA, 1554 bp, synthetic construct
  misc_feature 1..1554: note = Description of Artificial Sequence: Synthetic coding sequence
  source 1..1554: mol_type = other DNA
atggcccggatgggcctggccggcgccgccggccggtggtggggcttagctctgggcttaactgctttcttcctgccgggagtgcactcgcaggtggttcaagtcaacgactccatgtatggattcattggcactgacgtggtgctccactgcagcttcgcaaaccccctgccctccgtaaaaatcactcaggtgacctggcagaagtcaactaatgggtcaaagcagaatgttgctatctacaacccgtccatgggcgtttccgtcttagctccataccgggagagagttgagttcttacgccctagttttaccgacggaacgatcagactgtctcggctcgagctcgaggacgaaggagtctacatttgcgagtttgccacatttccaaccggaaatcgcgagagccaacttaacctgactgtgatggccaagcccacaaactggatagagggcacacaagccgtactccgggccaaaaaaggccaagatgataaggtgctagtcgcaacttgcaccagtgctaatggaaagccaccatccgtagtcagttgggagactcgcctcaagggagaggctgaataccaggagattaggaatcccaacggcacagtaacggtgatatcccgttatcggttggtcccttcccgcgaagcccaccagcaaagcctcgcctgtatcgtgaattaccacatggataggttcaaagagtccttgaccctgaatgtccaatacgagccagaggtaacaatcgaaggatttgatggcaattggtacctccagaggatggatgtgaaactgacctgcaaggctgacgctaaccctcccgccactgagtatcattggactacacttaacggcagcctgcccaagggagttgaagcccaaaataggactctgttcttcaaaggtccaatcaattactccctggcagggacctatatttgcgaagccaccaatcctatcggcacccgtagcggtcaggttgaagtaaacataacagagttcccgtataccccatcacccccagagcacgggcgacgagctggccccgtgcctactgcgataatcggcggcgtcgctgggagcatcctgctcgtcctcatcgtcgtgggggggatcgttgtagccctcaggaggcgaaggcataccttcaagggggactattctacaaaaaaacacgtatatggcaatggctacagcaaagctggtataccacagcatcaccccccgatggcccaaaatttacagtatccggacgattcagatgatgaaaagaaagcaggtcccctcgggggctctagttacgaggaagaagaagaagaagaggaagggggcggaggcggggagagaaaggtgggtggccctcaccctaaatatgacgaggatgcgaagcgcccatattttacagttgacgaggccgaagcacgtcaagatggttacggagaccggacgctgggctaccagtacgaccccgagcaacttgacctggcagaaaacatggtctcccagaacgatgggtcctttattagcaaaaaagaatggtacgtatag

SEQ ID NO: 199886 - DNA, 1059 bp, synthetic construct
  misc_feature 1..1059: note = Description of Artificial Sequence: Synthetic coding sequence
  source 1..1059: mol_type = other DNA
atggcccggatgggcctggccggcgccgccggccggtggtggggcctggctctggggttgacggctttttttttgccaggagtgcatagccaggtcgtgcaggtaaatgatagtatgtatggcttcattggcacggacgtagtgttgcattgcagctttgcaaatccactcccatccgtcaagattactcaggtcacctggcaaaagagcaccaacgggtcgaaacagaacgtggctatttacaacccaagcatgggtgtttccgtgttggccccatacagggagagggtggaattcctgcgtccgtcttttaccgacggtactatcaggctgtcaagattagaactcgaagacgagggagtgtatatctgcgagtttgccaccttccctactgggaacagagagtcacagctgaatttgacagtaatggccaagccaactaattggatcgaggggacacaagccgtcttaagggcgaaaaagggccaagatgacaaggtcttagtggcaacctgcacttcggcaaacggaaaaccgccatccgttgtttcctgggagactcgcttgaaaggggaagccgaatatcaggaaatcagaaaccctaatggcaccgtcacagtgatatcaaggtatcgcctggtgccaagtcgggaagcccaccagcaaagcctagcctgcatcgtgaactaccacatggaccggtttaaagagtccctaactttaaatgttcaatacgaacctgaagtgacaatcgaagggttcgacgggaactggtatctgcagagaatggatgtcaaattaacttgtaaagcggacgctaatcccccagccactgagtaccactggaccaccttaaatggttcacttcccaaaggcgtcgaggcccagaacaggacattatttttcaagggcccgatcaactatagcctggctggcacctacatttgtgaagctaccaacccaatcggaaccagaagtggccaggtggaagtgaacattacagctttctgccaactcatttatcctggtaaaggacggactcgagctaggatgttctag

SEQ ID NO: 199887 - DNA, 1377 bp, synthetic construct
  misc_feature 1..1377: note = Description of Artificial Sequence: Synthetic coding sequence
  source 1..1377: mol_type = other DNA
atggcccggatgggcctggccggcgccgccggccggtggtggggcctggctctgggcttgacagcttttttcctgccgggcgtccatagtcaagtagtccaagttaatgatagcatgtacgggtttatcggaacagacgtcgtgcttcattgttctttcgcgaatcctctgccctccgtgaagatcactcaggtgacttggcagaagtcgactaacggatcaaagcagaacgtcgccatctacaacccatcgatgggggtgagcgtgctcgcaccctatagggagcgggtcgaattccttcggcctagcttcaccgatggcacaatcaggctgtcccgcctcgagcttgaggacgagggggtgtatatttgtgaattcgctaccttccccactggaaaccgcgaaagccagctaaaccttaccgtgatggctaagccgacaaactggatcgagggaacacaggccgtcctgagggcgaaaaaaggacaggacgacaaagtactggtcgcgacctgcacgtcagctaacgggaaaccgccttcagtagttagttgggaaacccgcctgaagggtgaggcagaataccaggagatccgcaaccctaacggtacggtgaccgtgatcagcagatacagattggtaccttcaagagaagcacaccagcagtccctggcatgtatcgtgaactatcacatggaccgctttaaggagagtctgaccttgaacgtccagtacgaacccgaagtgaccatcgagggttttgatgggaactggtacctgcaaaggatggacgtgaaactgacctgtaaagctgatgccaatccccccgctacagaataccactggactactcttaatggctccttaccgaaaggggtggaggcgcagaaccggacgctcttttttaagggacccataaattactcattggccggaacatatatttgcgaggccaccaatccgattgggacccggagtggtcaggtcgaggtgaatattaccgaaaagccacgcccacagcggggcctcgggagcgccgccaggttgctggctggaacggtggccgtgtttcttattctggtggcggtgctgaccgtgttttttctgtataaccggcagcagaaatcacccccagaaaccgatggcgcgggcactgatcaaccactgtcacagaaacccgaaccttcaccctcccgacagtcttccctagtcccggaagacattcaggtggttcacctagatcccgggcgccaacagcagcaggaggaggaggacttacagaagttatccctgcaacctccatattacgacctcggagttagcccctcataccatccctcagtgaggacaacagagccgcgtggcgaatgcccttag

SEQ ID NO: 199888 - DNA, 1617 bp, synthetic construct
  misc_feature 1..1617: note = Description of Artificial Sequence: Synthetic coding sequence
  source 1..1617: mol_type = other DNA
atggcccgggccgccgccctgctgcccagccggagcccccccacccctctcctttggcccctattattgttgctgctgctcgaaactggcgcccaggatgtcagggtgcaggtactgccagaagtccgcggccaactcggtggtactgtggagttgccctgccatcttttaccaccagtccccgggctctatatatcccttgtcacatggcagagacctgacgctcccgcaaaccaccaaaacgtagctgccttccacccaaagatggggccctcgtttccgtcacctaaaccaggtagtgaaaggttgtcctttgtgagcgctaagcagagcaccggccaggacaccgaggccgagctgcaagacgccacacttgctctacacggattgacagtagaagacgaaggcaactatacctgcgaatttgccacatttccgaagggcagtgtacgcggcatgacctggttaagggtaattgctaagccaaagaatcaggcagaagcacagaaagtaacattttcccaggatcccaccacagtggctctctgcatctccaaggaaggtcgcccccctgcaagaattagctggctgagctctttagattgggaggctaaggagactcaggtctccgggacgctggctggaacagtcacagtgacctctaggtttacactcgtgccttcaggacgcgccgatggagttaccgtgacatgtaaggtggaacacgagtcttttgaagagccagcccttatccctgttaccctatctgtgcggtaccccccagaggtgagcatctctggctatgatgataattggtaccttggaagaacagatgcgacattgtcctgcgacgttcgctccaatcctgagccaaccggttacgactggtccacaacgtcaggcacatttcccacaagcgctgtggcccagggaagtcaactagtaatccatgccgtggattcactgtttaatactacgttcgtatgtactgtgaccaatgccgtaggcatgggcagagccgaacaagtgattttcgtgcgggagacccccaatactgcaggcgctggcgctaccggcggtattataggggggattatcgcagcgattattgccaccgctgtggccgcaacggggattcttatatgtcgccagcagagaaaagagcagacactccagggggccgaagaggacgaagatcttgagggccctcctagctataagccccccactccaaaggccaagctggaggctcaagagatgccctctcaactgtttactctcggtgcatccgagcacagtcccctgaaaacgccatattttgacgctggggcttcctgcaccgagcaagaaatgccgagataccatgagctgcccacccttgaggaacgctcagggcccctccacccaggggctacctcactgggaagtcccatcccagtacctccggggcccccagctgtagaagacgtgtctctagatctagaagacgaggagggcgaagaggaggaagaatatttggataaaatcaacccaatttacgacgcactgagctacagtagtccctccgactcttaccagggcaagggattcgtgatgagtagggcaatgtacgtttag

SEQ ID NO: 199889 - DNA, 1440 bp, synthetic construct
  misc_feature 1..1440: note = Description of Artificial Sequence: Synthetic coding sequence
  source 1..1440: mol_type = other DNA
atggcccgggccgccgccctgctgcccagccggagcccccccacccccctgttatggcctctgctactactgcttctcctggaaacaggggcccaggacgtgagagttcaggtactgcctgaggtacgagggcagttaggcgggacagtagaacttccttgtcacctgctcccacccgtccccggactctatatctctctcgttacctggcagaggcccgacgctcccgcaaatcaccaaaacgtcgcagcattccatccaaaaatggggccttccttccccagcccaaaacctggatccgagcgacttagctttgtgtccgccaaacaaagtaccggccaggacacagaggcggagctgcaggacgccaccctggcgctccacgggttgacagtggaggacgaaggcaattacacctgtgagtttgccactttccctaagggctccgttcgtgggatgacatggctgagggtcattgctaagcccaagaatcaagcagaggcgcagaaggtcaccttctcacaggaccctaccaccgttgcactgtgtatatccaaagaaggccggccacccgcacgcatctcttggttgtcatccctggattgggaagcaaaggagacacaagtcagtggcacattggccggcaccgtgactgtgacgtcccggttcaccctggttcccagcggcagagccgacggagtcaccgtcacttgtaaggttgaacacgagtctttcgaggaaccagccctgattcctgtgacactgtcagtgcggtaccctccagaggtttctatctcaggttatgacgataactggtatctgggccgcactgatgccactttgtcctgtgatgttcggtccaaccccgagcccacaggatatgactggtcaactaccagtggcacattcccaacctccgccgtggcccagggcagtcagctggtgatccatgcagtggattctctgttcaataccacatttgtgtgcacagttactaatgccgtcggcatgggccgggctgagcaggtgatatttgtgcgcgagaccccaagggcctctcctagagacgtaggtcctctcgtttggggtgccgttggaggcaccctcctggtgctccttttgctagccgggggctccttggctttcatcctgctgcgcgtgcggagaaggcgcaagtctcctggaggtgctggaggtggcgcttccggcgatggcggattctacgaccctaaagcacaggtcctgggcaacggtgacccagtgttctggactcccgttgtgccaggaccaatggagcccgacggcaaggatgaggaggaagaggaggaggaagagaaagctgagaagggtctgatgctgcctccccccccagcattagaggatgatatggagtcacagctggatggctccctgatatcccggagagctgtgtatgtttag

SEQ ID NO: 199890 - DNA, 1101 bp, synthetic construct
  misc_feature 1..1101: note = Description of Artificial Sequence: Synthetic coding sequence
  source 1..1101: mol_type = other DNA
atggcccggaccctgcggcccagccccctgtgccccggcggcggcaaagcgcagctctcatccgcttccctgcttggcgctggattgctcctgcagcctccgactcctcctcctcttctgcttcttctgtttcctctgcttttgttctcccgactgtgtggcgccctggccggcccaatcattgtcgagccacatgtgaccgcagtttggggaaagaacgttagcttaaagtgcttgatcgaggtgaacgagactattacacagatatcctgggagaagatccatggcaagtcttcccagacagtggccgtgcatcacccacagtacgggttcagcgtgcagggcgaataccagggccgggtgctgttcaagaattattctctcaacgacgccacaatcacactgcacaatatcggcttctccgattccggtaagtatatctgtaaggcagtgacgtttcctctgggcaacgctcaaagcagcactaccgtgacggtattagtggagcctacagtttctcttattaaagggcctgattccctcatcgacggagggaatgaaactgtcgcggcgatttgtatcgccgctacagggaagccggtcgcccatattgactgggagggtgatctaggagagatggagtcaactacaacctctttcccaaatgagacggccacaatcatttcccagtacaagctcttccccacgcgatttgccagaggccgaaggatcacctgcgtagtgaaacatcccgctctcgagaaagatatacggtattcgttcatactagatattcaatacgccccagaggttagcgtgactggttacgacggcaattggttcgtaggaagaaagggtgtgaatttgaagtgcaacgcagacgccaatccacctcctttcaaaagcgtgtggagtcggctggacggacagtggcctgatggtctcctggcctccgataatacgcttcactttgtccaccccctgacatttaactactcaggggtatacatctgtaaggttaccaattcccttggtcagcgcagtgaccagaaggtgatttacatcagcgcgtataactccgtcgctagccttaactgctag

SEQ ID NO: 199891 - DNA, 1650 bp, synthetic construct
  misc_feature 1..1650: note = Description of Artificial Sequence: Synthetic coding sequence
  source 1..1650: mol_type = other DNA
atggcccggaccctgcggcccagccccctgtgccccggcggcggcaaggcacagcttagcagcgcttccctgttgggcgctggacttctcctccaaccccctacacctccacccctgctcctccttctttttcccctgctcttattttctaggctgtgtggcgcgctggctgggccaattatcgttgaaccacacgtaaccgcagtctggggcaaaaacgtgtccctgaagtgcctgattgaggtgaatgagaccattacacagatcagctgggaaaagatccatggcaaatcctcacagactgtagccgtccaccacccacagtatgggtttagcgtgcagggcgaataccagggacgcgtacttttcaagaactattctttaaacgatgccactatcaccctccacaacatcggattcagtgattctggcaagtatatttgcaaagccgtcacctttcctctgggaaacgcgcagtcctcaactacagtgacagtgcttgttgagcctacagtgtcactgatcaaaggacctgatagcctcattgacggaggtaacgagactgttgccgctatctgcatagcggcaaccggaaaaccggtggctcacattgattgggagggggatttgggcgagatggagtctacaaccacaagttttccaaacgaaacagctaccatcatttcccaatataaactgtttcctaccagatttgcccggggacgaaggatcacctgtgtggtcaagcaccctgcgctggagaaggacatccgttatagctttatcctggacattcaatacgcacccgaggtttctgtgacgggctatgatggaaactggtttgtaggacgaaagggggttaacttgaagtgtaatgccgacgcaaacccccctccattcaaaagtgtgtggtctcggctcgacggccagtggcctgatggcctgctggcgagtgataatacgttgcacttcgtgcatcctcttacctttaactactctggggtgtacatttgcaaagtcactaattcccttggtcagcggagtgatcagaaagtgatttatattagtgatccgcctactacaacaaccttgcaacccacaatccagtggcatccctccacagcagacatcgaggacttggccacagaacccaaaaaactgccttttcctctctctactctggctactataaaggacgatacaatagccaccattatcgcatcagtggtgggaggtgcactgtttatcgtgctggtcagcgtgttggctggcatcttctgttaccggcgaagacgcacattccgaggggattatttcgcaaaaaactacatccccccgagcgacatgcagaaggaatcgcagatagatgtgttgcaacaggacgaactggatagttaccccgatagcgttaagaaggagaacaagaacccagttaataatctgatacgcaaagactatcttgaggaacctgagaagacccagtggaacaatgttgagaatttgaaccgattcgagcgccccatggattactatgaagacctgaaaatgggtatgaaatttgtgtcagatgagcactatgatgagaatgaggatgacttagtgtcccacgtcgatggatccgtgattagtcgtagagaatggtacgtgtag

SEQ ID NO: 199892 - DNA, 1464 bp, synthetic construct
  misc_feature 1..1464: note = Description of Artificial Sequence: Synthetic coding sequence
  source 1..1464: mol_type = other DNA
atggccgagggctggcggtggtgcttcgtgcggcggacccccggcctgctaagaggccctctgctgccacggagttttagcgggaacccccgcgccttagcaggccctatcatcgtggaacctcatgtgacagcggtttggggcaagaatgtttccttgaagtgcctgattgaagtgaatgagactatcacccagatctcatgggaaaaaattcatggaaaaagtagtcagactgtggcggtccatcatcctcagtatggattttctgtacagggcgagtaccagggccgggtcctgtttaaaaactacagcctaaacgacgccactatcactctccacaacatcgggttttcagacagcggaaaatacatatgcaaggccgtgacattcccgctcggcaacgctcaaagcagtaccacggtcactgtcttggttgaacccactgtttcactcataaaaggccctgatagcctgatagacgggggaaatgaaaccgtcgccgccatttgtatcgctgccacagggaaacccgtggcccacatagactgggaaggggacctgggagagatggagtccaccactactagtttccccaacgagacagctaccattatctcgcaatacaagctgttcccaacacgcttcgcgcgtggccgaaggatcacatgtgtggtcaagcaccccgcacttgaaaaggatataagatattctttcattctggacatacagtacgcaccggaggtgtccgttaccggttacgatgggaattggttcgtggggaggaaaggagtcaatttgaagtgcaatgcggatgctaacccgccccccttcaaatccgtgtggagcaggctggacggacagtggccagatggactgctggctagcgacaatactctgcattttgtacaccctctcacctttaactattcgggtgtttacatttgtaaggtcactaattcactcggccagcgcagtgaccaaaaggtcatttatatctcagatgtcccattcaagcagacatcctcaatcgcagtggcaggggctgtaatcggcgctgtcctagctcttttcattatcgcgatcttcgttacagtgctcctcacccccagaaaaaagcggccaagctacctcgacaaagttatcgacctgccgccaacccataaaccccctccactgtacgaagaacgcagcccgccccttccacaaaaagacctctttcagccagagcacctcccattacaaacacagttcaaagagagggaggtgggcaatctgcagcacagcaacggacttaactctagaagcttcgattatgaggatgaaaatcccgtgggcgaggacggaatacagcagatgtatcccctatacaaccagatgtgctatcaggaccggtccccaggcaagcaccatcagaacaacgacccaaagcgagtctatatcgaccctagggagcattatgtctag

SEQ ID NO: 199893 - DNA, 1533 bp, synthetic construct
  misc_feature 1..1533: note = Description of Artificial Sequence: Synthetic coding sequence
  source 1..1533: mol_type = other DNA
atgcccctgagcctgggcgccgagatgtggggccccgaggcctggctccttttattgctattgctcgcatcgttcaccggaagatgtcctgccggcgaacttgagacgtcagacgtagtgacggtggtactgggccaggatgccaagcttccctgcttctacagaggtgactcgggtgagcaggtgggacaggtggcctgggccagggtggatgccggcgaaggcgcacaggaactcgcccttctccattccaaatatggactccatgtgagtcctgcttatgagggccgggtggagcaaccgccccccccacgcaacccactggatggctcagtgcttctgcggaatgctgtacaggccgacgagggcgagtatgaatgccgagtgagtacctttcccgcagggagtttccaggcccgactgcgcctgagagtgctggtgcccccactgccttcattaaaccctggtcccgcgctggaagaagggcagggcctgactctcgccgctagctgcaccgctgaaggatcccctgctccttctgtgacctgggatactgaagtgaaggggaccacgtcgagtcgctcattcaagcactccaggagtgccgcggtaacttcagagtttcacctggttccgagcagatcaatgaacgggcagccactcacctgcgtcgtatctcacccaggcctcctgcaggatcagcgcataacacatattctgcatgttagttttctggcagaggccagtgtgcgagggctagaggaccaaaacctctggcacataggcagagagggagcgatgctgaagtgccttagcgagggccagcccccaccctcttataactggaccaggttggatggacccctgccgagtggggtgcgcgtggatggcgataccttggggtttccccctctaaccactgagcattcaggaatctatgtatgccatgtaagcaatgagttctcttctcgagattctcaggtgactgttgacgtgctggaccctcaggaggacagtggtaaacaggtggatttagtgtccgcctctgtggtggtcgtcggggtcatagcagccctgctgttctgcctcctggtggtcgtggttgtgttaatgagtcgttatcacaggcggaaggcccaacaaatgacacagaagtacgaagaagagctaaccctcactagagaaaacagcattaggcggcttcacagccaccacaccgatcccaggtctcaacctgaagagtcagtgggtctaagagccgaaggtcatcccgactccctgaaagacaacagctcatgtagcgtgatgtccgaggagcccgagggacgcagttactcaacacttactaccgtccgcgagatcgaaactcagaccgagctgctgtctccaggttcgggcagagcggaagaggaggaagaccaggatgaaggtatcaaacaggcgatgaaccacttcgtgcaggaaaacggaaccctacgtgctaagcccaccggcaatggcatttacatcaatggtcgaggccacctggtctag

SEQ ID NO: 199894 - DNA, 660 bp, synthetic construct
  misc_feature 1..660: note = Description of Artificial Sequence: Synthetic coding sequence
  source 1..660: mol_type = other DNA
atgctgaagtgcctgagcgagggccagcccccccccagctacaactggacaaggctggatgggccattgccctccggggtccgcgttgatggagatacattggggtttccacccctgaccacagagcattcggggatctacgtgtgccacgtttccaacgagttttcgtctcgggactcacaggtgaccgtagacgtacttgatccacaggaggactctggaaaacaggtggaccttgtgtcggcgtccgtggttgttgtgggggtaatcgctgcactcctgttttgcctcctagtggtagtggtggtcctgatgagtagataccaccgtaggaaggcccagcagatgacacagaaatacgaggaagagcttaccctgacccgtgagaactccatccggcggctgcactcacaccataccgaccccaggagccaaagcgaggagcccgaaggaaggtcgtactctaccttgactactgtgcgagaaatcgaaactcagaccgagctgctcagtcccgggagtggccgagcagaggaggaagaagatcaggacgagggcattaaacaggccatgaaccatttcgtacaggaaaacgggaccctgcgggcgaagcccacaggcaacgggatttacatcaacggccgcggtcaccttgtctag

SEQ ID NO: 199895 - DNA, 2058 bp, synthetic construct
  misc_feature 1..2058: note = Description of Artificial Sequence: Synthetic coding sequence
  source 1..2058: mol_type = other DNA
atggagctgctgcggaccatcacctaccagcccgccgccagcaccaaaatgtgcgaacaggcactgggtaaaggatgtggcgctgattccaagaagaagcgccctccccagccaccagaagagagccagcctccccagagccaagctcaagtacctccagccgcgccccaccaccaccatcaccacagccacagcggtccagagatttcgaggataatagtcgaccctactacgggaaaaaggtactgtcgcggtaaggtcctgggcaagggaggctttgctaaatgctacgagatgactgatcttaccaataataaggtttacgccgccaagatcattcctcacagtagggtggccaagccccaccagagagagaagattgataaggagattgaactccatcgaatcttgcatcacaagcacgtagtgcagttctatcactattttgaggacaaggagaacatatacatcctcttggaatactgtagcagacgaagcatggctcatatccttaaagctcgcaaagtgctgaccgaacctgaagttcgctattacctccgccagattgtgtctgggctcaagtacctgcatgagcaggaaatcctgcaccgggatttaaagctgggaaattttttcataaatgaagccatggaacttaaggtgggagacttcgggcttgctgcccgcttggaacctctggaacacaggcgcaggacgatatgtggtacgccaaactacctgagccctgaagttcttaacaaacaaggccacgggtgcgaatccgatatttgggcccttgggtgcgtcatgtacaccatgttgcttgggcgccccccgtttgaaaccacaaacctcaaagagacctatcgctgtataagggaagccagatatactatgccttcttccctcctggcacctgcaaaacaccttattgcctccatgctttccaaaaatcctgaggaccggccgtccctcgacgacatcataagacatgattttttcctccaaggttttacacccgaccgcttgtcttcctcctgttgccacacagttcccgactttcacctctccagcccggcaaagaattttttcaaaaaagcagcagccgccttattcggtggaaaaaaggataaggccagatatatagacacccataatcgggtaagcaaggaggacgaggacatatataagctgagacatgatctgaagaaaacctccataacccaacagccaagcaagcaccgcactgacgaggagttacaaccccctacgaccacagtggcccgctccggcacccctgccgtcgagaacaaacagcagattggggatgcaattcggatgattgtgaggggcactctggggagctgcagcagtagctccgaatgcctggaagacagcactatgggttctgttgcggatactgtggctcgggtcctgagggggtgtctcgagaacatgccagaggccgattgtatccctaaggaacagctgtcaacttctttccagtgggtgaccaaatgggtcgactattccaacaaatacgggtttggctatcaactatccgaccatactgtcggcgtcctttttaacaacggcgctcatatgtctctcctacccgataaaaagacagtgcactattacgcagaactggggcaatgcagcgtttttcccgcaactgacgcacccgagcagttcatctcacaggtcacagtgctgaaatattttagtcactacatggaagaaaacctgatggacgggggcgatcttccctccgtgacagatattcggcgtccacggctttatctcctccagtggcttaagtcggataaggctttaatgatgctgttcaacgacggaaccttccaggtcaacttctaccatgaccatacaaagattatcatttgctcccagaatgaagagtacctactgacatatatcaacgaagacagaatcagtacgacattcaggctaacaacattgctgatgagtggttgcagctcagagctcaaaaatagaatggagtatgccctaaacatgctgctgcaacgctgtaactag

SEQ ID NO: 199896 - DNA, 1164 bp, synthetic construct
  misc_feature 1..1164: note = Description of Artificial Sequence: Synthetic coding sequence
  source 1..1164: mol_type = other DNA
atggagctgctgcggaccatcacctaccagcccgccgccagcaccaagatgtgcgaacaggctctgggaaaagggtgcggcgccgatagcaagaaaaaacgtcctccacaacctcccgaagagtcacaaccgccccagtctcaggcccaggtgcccccagagattagcagaattattgtagaccccaccacagggaagcgctattgcagaggcaaggtattgggcaagggcggattcgcgaagtgctacgaaatgacagatctcacaaataataaggtgtacgctgctaagataatcccacattcgagggtcgccaagccccaccaacgagaaaaaattgacaaagagattgagctccatcgcattctccatcataagcatgttgtgcaattttatcattacttcgaggacaaggaaaatatatacattttattggagtattgctcccgcagatctatggctcatatcctcaaggcacgcaaagtgcttactgagcctgaggtccgctactatcttcgccagattgtaagtggactgaagtatttgcacgaacaggagatactgcaccgtgatctaaagttgggaaacttcttcattaacgaggcaatggaacttaaggtgggcgattttgggctcgcagctagattagagcccctcgagcaccgacgtcggaccatatgtggaactccgaattacctatccccagaggtgcttaacaaacaagggcatggatgtgaatcagacatctgggctcttggatgtgttatgtataccatgttgttggggcgccccccatttgaaacgaccaatctgaaggagacttacagatgtatcagggaagcccgatacactatgccaagcagcctgctcgctcccgctaagcacctaattgcctcaatgctgagcaagaatcctgaggatcggccatccctggacgatatcatccgccatgacttcttctgtcgcgccagtttgagaaccgactgtctgctggccgtggtgatccagtttcagatcagcacataccaagcgcagctcaggatttctctccggaagcagctcctcctgtttttagtggccaagaaaactaaacaggacatcctgacccacatcattgagtgcttgaagaagatgaagacgtcaacctccctcggcatgatttag

SEQ ID NO: 199897 - DNA, 1140 bp, synthetic construct
  misc_feature 1..1140: note = Description of Artificial Sequence: Synthetic coding sequence
  source 1..1140: mol_type = other DNA
atggagctgctgcggaccatcacctaccagcccgccgccagcaccaagatgtgtgaacaagcccttggtaagggttgcggtgccgactctaagaaaaaacggccccctcagcccccggaggaatcgcagccaccccagagccaggcacaggtgcctcctgctgcacctcatcatcatcatcaccacagccattctggaccagagatttctcgtataatagtagaccccacgacagggaagcggtactgcagagggaaggttttagggaaaggaggtttcgcgaagtgttatgagatgaccgatctcaccaataataaggtatatgccgccaaaataattccacatagtagagtcgccaagccccaccagcgagaaaagattgacaaggaaatcgagctccacagaatcttacaccataaacacgtcgtgcagttttatcactactttgaagacaaagagaacatctacattctgctggaatattgtagtcggcgttccatggctcacatcctgaaggctcgaaaagtgctcaccgaaccagaagtgcggtactacctgagacagatcgtatccgggctgaagtaccttcatgagcaggaaatactgcacagagatctgaaactggggaacttctttataaacgaggccatggagttgaaagtcggcgatttcggactggccgctcggctggaaccgttggagcacaggcgccgcacaatttgtggtactcctaactatctcagccctgaggtactgaataagcagggccacgggtgtgaatccgacatatgggccctcggctgcgtgatgtacactatgctgcttggacgcccccctttcgagacaacgaatttgaaagagacgtacaggtgcatcagagaagcccggtacacaatgccctcatcactcttggcgccagccaaacacttaatcgcgtccatgctcagcaagaatcccgaagatagaccgtctctggacgacatcattaggcacgacttcttcctacagggatttacaccagatcggttgtccagcagctgttgccacactgtccccgactttcatcttagctccccagctaagaatttctttaaacgggccgcggaacatatcatatcagtgggccatcagatggggtag

SEQ ID NO: 199898 - DNA, 1476 bp, synthetic construct
  misc_feature 1..1476: note = Description of Artificial Sequence: Synthetic coding sequence
  source 1..1476: mol_type = other DNA
gtggacctgctgcgggccggcgaggtgcccaagcccttccccacccattataaagatctctgggataacaagcatgtgaagatgccgtgcagtgagcagaacctgtacccagttgaggatgagaatggcgaaagaacagccggcagtcgctgggagttaattcagaccgcgctgttgaacaagttcacacggcctcaaaatcttaaggatgcaatcttaaaatacaatgtcgcctattcgaaaaaatgggatttcacagccctgatcgatttctgggacaaggtgctggaagaggcagaggcccaacacctgtaccagtcgattttgcctgatatggttaaaatagcactgtgtctaccaaatatttgtactcaacctattcctctcctcaaacagaagatgaatcactcaattacgatgagccaagagcagatagctagcctgctggcaaatgcgttcttctgtacttttccacgaaggaacgctaagatgaaaagcgagtactcatcttatcccgacatcaatttcaatcggctgtttgaaggccgctcatcacgtaagcctgagaagttgaagactctcttttgttattttaggagagtcaccgagaagaaacccaccgggctcgtaacgtttactcgccaaagcttggaggactttcccgaatgggagcggtgcgagaagcctcttacgcggctgcacgttacctacgaaggcacgattgaggagaacggacagggcatgttgcaggtggactttgctaatcggttcgtaggaggcggcgttaccagtgctggactggtccaggaagagattcggttcttgattaaccctgagctgattattagtaggctattcaccgaggtgcttgaccataatgagtgcctgattattaccgggaccgagcaatacagcgaatacaccgggtatgcagaaacatacagatggagccggagccacgaggacggatccgagagagatgattggcagcggagatgtacagaaatagttgccatcgacgccctccatttcagaagatatttggatcagttcgtgcccgaaaagatgaggagggagctgaacaaggcctactgcgggttcctaagacctggagtcagctccgaaaatctctcagccgtggcgacgggcaattgggggtgcggcgcctttggaggggacgcccgactgaaggccttgatacagatcttagccgctgcggcagccgagcgagacgttgtctacttcacgtttggtgattctgagctgatgagagatatctatagtatgcatatctttctgacagagcgcaagctaactgttggggatgtgtacaagctcctgttgaggtactacaacgaggagtgcagaaattgttccactcctggtcctgatataaagttgtaccctttcatctaccacgccgttgagtcctgtgccgagaccgcagatcatagcggtcaacgaactggaacttag

SEQ ID NO: 199899 - DNA, 579 bp, synthetic construct
  misc_feature 1..579: note = Description of Artificial Sequence: Synthetic coding sequence
  source 1..579: mol_type = other DNA
tgaaccgagcagtacagcgagtacaccggctacgccgagacctaccgctggtccagaagccacgaagatggcagcgagagagacgactggcagcgcaggtgcacagagattgtagccatcgatgctctccattttaggaggtatcttgaccagtttgtgccagaaaaaatgagaagagagctcaacaaggcgtattgtggattcctgaggcccggagtcagcagtgagaacctgtccgccgtcgccactggaaattggggttgtggggcttttggcggcgatgctcggcttaaagctttgatccagatcctggctgctgccgccgccgaacgagatgttgtttactttacctttggagactccgaactgatgcgcgacatatactcaatgcacattttcttaaccgagcggaaactgaccgtgggagatgtgtataagctcctgttgcgctattacaatgaagagtgccgcaattgctcaacccccggtccagacatcaaactgtaccccttcatctaccacgccgttgaatcctgtgcggaaaccgcagaccatagcggacagcggactggaacttag

SEQ ID NO: 199900 - DNA, 468 bp, synthetic construct
  misc_feature 1..468: note = Description of Artificial Sequence: Synthetic coding sequence
  source 1..468: mol_type = other DNA
atggccgagagcagcgacaagctgtaccgggtggagtacgccaagagtggccgcgccagttgtaaaaaatgcagcgaaagcatccctaaagattcactccgcatggctatcatggtccaaagtcctatgttcgacggcaaagtgccacactggtatcacttttcctgcttttggaaggtgggccattctattaggcatcctgatgtcgaagtagatggattttccgagctccgctgggacgatcagcagaaagtgaaaaagacagctgaagccgggggagtgaccggggtctacatactgggccagcacggtcattcggcccctactctgaaactgcccggaggtcctagactcagagaacagtcaaagcccccgcccgcttgccctctgcctcacgtccagattaaacgcatggtacctatgctgttccagcagcaccttcttgacagcgcctcttctgtggcctag

SEQ ID NO: 199901 - DNA, 327 bp, synthetic construct
  misc_feature 1..327: note = Description of Artificial Sequence: Synthetic coding sequence
  source 1..327: mol_type = other DNA
atggccgagagcagcgacaagctgtaccgggtggagtacgccaagagcggccgcgcctcttgcaagaagtgttccgagtccataccaaaggactccctcagaatggctattatggtccagagccccatgttcgatgggaaagtcccccactggtaccatttcagctgcttctggaaggttggccacagcatcagacacccggacgtcgaagttgacggcttctccgaacttagatgggatgatcagcaaaaggttaagaagactgccgaagcaggcggcgtgaccgaacctccaattccatgtggaatagaggttatgggtcgatag

SEQ ID NO: 199902 - DNA, 327 bp, synthetic construct
  misc_feature 1..327: note = Description of Artificial Sequence: Synthetic coding sequence
  source 1..327: mol_type = other DNA
atggccgagagcagcgacaagctgtaccgggtggagtacgccaagtcggggagagccagttgtaaaaaatgcagtgagagtataccgaaagattccttgcggatggcgattatggtgcagtcaccgatgttcgacggcaaggttccacattggtatcacttcagctgtttctggaaggtgggacattcaatccgacatccagatgttgaggtggatggtttttccgaactgagatgggacgatcagcagaaagtcaaaaagacagcggaggcaggcggagttacagagccccccattccctgtggcattgaggtgatgggtagatag

SEQ ID NO: 199903 - DNA, 3045 bp, synthetic construct
  misc_feature 1..3045: note = Description of Artificial Sequence: Synthetic coding sequence
  source 1..3045: mol_type = other DNA
atggccgagagcagcgacaagctgtaccgggtggagtacgccaagtcaggccgagcctcctgcaaaaagtgctcagaatctatacctaaggactctctgcggatggccattatggtgcagagtccaatgttcgacgggaaggtgccacattggtatcatttctcttgcttttggaaagtgggacattccatccgccatcccgacgtagaggtagatggtttctcggagctaagatgggacgatcaacagaaggtgaagaaaacggccgaagctggtggcgttactgggaaagggcaggatgggataggatccaaggcagagaaaacactgggggacttcgccgcagagtacgcaaagtctaatagaagcacttgcaagggatgcatggagaaaattgagaagggtcaggtgcggctctctaaaaagatggtggacccagagaagccacagctgggcatgatcgacagatggtatcaccccggctgcttcgtcaagaacagagaggaactcggctttcgtccagagtattccgctagtcagctgaagggctttagtctgctggccacagaagacaaggaagctctgaagaagcagctccccggggttaagtccgagggaaaacgcaagggtgatgaggtagacggagtggatgaagtagccaagaagaaaagcaagaaggaaaaagataaggattcaaagctggagaaggctcttaaggcccagaacgatctcatttggaacataaaagatgaactgaagaaggtgtgtagcaccaatgacctcaaggaattgttaatattcaacaaacaacaggtaccaagtggagagtctgcgatcctggacagggtggccgacgggatggtcttcggagctctcttgccatgtgaggagtgtagtggacagctcgtttttaagagtgacgcatattattgcacaggcgacgtgacggcatggaccaaatgcatggtgaagacccaaactccaaacaggaaggagtgggtaactcccaaggaattccgggagatttcctacctgaaaaagctgaaagtaaagaaacaggacagaatcttcccgcctgagacttctgcctccgttgcagctacccctccaccaagcaccgcttctgccccagcagctgtcaactcttccgccagcgcagataaacctctcagcaacatgaagattctcaccctcggcaaattatctcgaaataaagatgaggtgaaagctatgattgagaagctgggaggcaagctcacggggaccgccaacaaagcttcactgtgtatatccacaaagaaagaggtagagaagatgaacaagaagatggaggaggtgaaagaggctaacattcgcgtggtctccgaagacttcctgcaagatgtgtctgcttcgactaagagtctgcaggagctgttcctggcacatatcttatccccgtggggcgctgaggtcaaagctgaacccgtagaggtagtggcacctcggggcaaatcaggtgccgccctgagcaagaaatcaaaaggccaggttaaagaggagggcattaataagtctgagaaacgcatgaagctgacgttaaaaggcggggctgccgtggatccagactcaggcctagaacactcagcccatgtgcttgaaaaaggcggcaaggtgttcagcgccacactgggccttgtcgacattgtcaagggcacaaatagttactacaagttgcagctactcgaggacgacaaggaaaaccgttactggatctttcggagttggggcagggttggaacagtgataggctcgaacaagctggaacagatgccctctaaggaagacgccattgagcatttcatgaagctgtacgaggaaaagacaggaaacgcgtggcacagtaagaatttcaccaagtacccaaagaaattctatcccctggaaattgactacggacaagacgaagaggctgtgaaaaagctgacggttaaccccggaacgaagtctaaacttcctaaaccagtacaggatctgattaaaatgatattcgatgtagagtctatgaagaaagccatggtggaatatgagatcgacctccaaaagatgccactggggaaactctccaaacggcagatccaggctgcatattctatcctctcagaggtccagcaagccgtgtcacaaggctcatccgactcgcagattctggatttgagcaatcggttttacactcttattccacacgacttcggaatgaagaagccgcctcttttaaacaacgctgattcggtacaggcaaaagttgagatgctcgataacctgctggacattgaagtagcctatagtctgctgcgaggtggatccgacgacagcagtaaagatccgattgatgtcaactacgagaaacttaaaaccgacataaaagtggtcgacagggattccgaggaagctgagataatcaggaagtatgtaaaaaatactcatgctaccacacacaacgcatacgacctggaagtgatcgatatctttaagatcgagcgggaaggagaatgccagcggtacaagcccttcaaacaactgcacaatcgccgactgctctggcatggcagtcgcaccactaatttcgccggcatcctgagtcagggcttacgcattgcccccccagaggcacccgttaccggttatatgttcggtaagggcatttactttgccgacatggtgagcaagtcggctaattattgccacacttcacaaggggatcccataggcttaatcctcctgggtgaagtagccttgggaaatatgtatgagcttaagcatgcgtcccatatatccaagctgcctaagggcaaacattctgtgaaaggtttagggaaaacgacccccgacccctcagccaatatttccctggatggggtggatgtgccattaggcaccgggatttccagcggcgtgaacgatacaagcttgctatacaacgagtacatcgtgtacgacattgcgcaggtcaatctgaagtatctcctaaaattgaagttcaactttaaaactagcctatggtag

SEQ ID NO: 199904 - DNA, 753 bp, synthetic construct
  misc_feature 1..753: note = Description of Artificial Sequence: Synthetic coding sequence
  source 1..753: mol_type = other DNA
atggccgagagcagcgacaagctgtaccgggtggagtacgccaagtcggggagggctagctgcaaaaagtgttccgagtcaatccccaaagactcactccggatggccatcatggtgcagtctcctatgttcgatgggaaagtgcctcactggtatcatttctcctgcttttggaaggtcggccactcaataaggcatcccgacgtggaggtggacggctttagcgaattgcgctgggacgaccagcagaaagtcaaaaaaaccgcagaggccggaggggttaccggcaaaggtcaggacggaattggatccaaagcggaaaagacgctcggcgattttgccgccgaatacgcaaaatctaatagaagtacatgcaaggggtgcatggagaaaattgaaaaaggccaggtacggctctctaagaagatggtggaccccgaaaagccacagttaggcatgattgatcgttggtatcatcccggctgtttcgtcaagaacagagaagagctcggcttccggccagagtacagcgcgtcccaacttaagggcttttcactcttagccacagaggacaaggaggctcttaaaaaacagctgcctggtgtgaagtcagagggaaaacgcaaaggggacgaagtggatggtgttgacgaagtagccaagaagaagtccaaaaaggagaaggataagaagaaaaaaaagaaaaagaaaaaggaaagaaagaagaagaagaaaaagagaaagaaaaagtag

SEQ ID NO: 199905 - DNA, 2133 bp, synthetic construct
  misc_feature 1..2133: note = Description of Artificial Sequence: Synthetic coding sequence
  source 1..2133: mol_type = other DNA
atggacttcagcatggtggccggcgccgccgcctacaacgagaagagcgagaccggagctctgggagagaactatagttggcaaataccaataaatcataatgatttcaagattcttaagaacaatgaaagacagctatgcgaagtgctccagaacaaattcgggtgtattagcacactggtgagtccagtgcaggagggcaacagcaaaagcctgcaagtgttccgcaaaatgttgactccgcgaatagagctctcggtatggaaggatgatctgaccacccacgccgttgatgccgtggtgaatgccgccaatgaggacttgctgcacgggggtggtctcgccttggctctagttaaggcgggaggtttcgagattcaagaagaaagcaaacagttcgtcgcccggtacggcaaggtttctgcgggcgagattgcagtcactggggccggcaggctgccatgtaaacagatcatccatgccgtgggtccaagatggatggaatgggacaagcagggctgcaccggcaaactccaacgggcaatcgtctcaatcctgaactatgttatttacaagaatacccatatcaagaccgtggcaataccagccctgtcctccgggatcttccagttccccttgaatctttgtaccaagactatagtcgaaacgatccgtgtgtctcttcagggaaagccaatgatgagcaacctaaaagagatccacctagtgagcaacgaggacccgactgtggccgcctttaaagcagcttctgagttcatactggggaagagcgaactaggccaggaaacgacaccgagttttaacgctatggtggttaacaacctgacccttcagatcgttcaggggcatattgagtggcagacagcagatgtcattgtgaactcagtgaatccccacgacattactgtagggcctgtggccaaatccatattgcagcaggctggggttgagatgaaatccgagttccttgcgacaaaagccaaacagttccagagatcgcaactggtgctcgtgactaagggctttaacctgttttgtaagtatatttatcacgtcctgtggcactccgaattccctaaaccccaaatcttgaaacatgccatgaaagagtgtctggagaagtgcatcgagcagaatataaccagcattagtttccctgccttgggaacggggaacatggagatcaaaaaagagacagccgctgagattttattcgacgaggtgcttacatttgcaaaagaccacgtgaaacatcaactcaccgtcaagttcgtaatcttccccacagacctggaaatctataaggctttcagcagcgagatggccaaacgctcaaaaatgctctcactcaacaattactcagtgccgcagtccacgagagaggagaaacgggaaaatggccttgaagcccgcagtcccgcaatcaatctaatgggttttaacgtggaagaaatgtatgaagcacacgcatggattcaacggatcttatcccttcagaaccaccatattattgagaacaatcacattctgtatttaggtcgaaaagaacacgacatcttatcacagctgcagaagacttcatctgtttctatcacagaaatcatctctccaggcagaactgagctggagatcgaaggcgcccgtgcagatctgattgaagtggtgatgaatattgaggacatgttgtgtaaagtgcaagaagaaatggccagaaaaaaggagaggggcttgtggagatccctcggccaatggaccatccaacagcagaagacccaggacgagatgaaggagaacatcatcttcctcaagtgccctgtgccaccaacacaggaactactggaccagaagaagcagttcgaaaaatgtggcctgcaggtcctgaaagttgaaaagatcgataatgaggtactgatggcagcatttcaacggaagaagaaaatgatggaagagaaactccacagacagcctgtgtcacaccgtctgtttcagcaggtaccgtatcagttttgcaatgtcgtttgccgagtcggatttcagcggatgtacagtactccttgtggacgatgtcagtgcctgattatcggcgcgaccctgtggaacctggtgagttag

SEQ ID NO: 199906 - DNA, 2460 bp, synthetic construct
  misc_feature 1..2460: note = Description of Artificial Sequence: Synthetic coding sequence
  source 1..2460: mol_type = other DNA
atggacttcagcatggtggccggcgccgccgcctacaacgagaagagcgagacaggcgctctcggtgaaaactattcttggcagatccctatcaaccacaatgatttcaagatcctgaaaaataacgaacgacagctgtgtgaagtgctccaaaataagttcgggtgcataagtacgcttgtttctccagtacaggaggggaactcgaaatcgctgcaagtttttcggaagatgctgacccctcggattgagctgtccgtctggaaagatgacctcactacacacgccgttgacgcggtggtcaatgcggctaatgaggacctgctgcacggcgggggtctggcacttgccctcgtcaaagcgggaggattcgagattcaggaggagtccaagcagttcgtagctcgctacggcaaagtttccgccggggaaattgccgtgaccggggcagggcgcttaccttgtaagcaaattatccatgccgtgggtcctcggtggatggagtgggacaaacaagggtgtacgggaaaacttcagagagccattgtgagcatacttaattacgtgatttacaaaaatacgcatatcaaaaccgttgccatcccagcattaagctccggcattttccaattcccactcaacctttgcaccaaaaccatagtggaaacgatccgcgtgagcctccaggggaagccgatgatgtctaatcttaaggaaattcatttggtgtctaacgaagaccctaccgtcgcggcctttaaagccgcatctgaattcatcctgggcaagtccgaactcggacaggagacaacacccagctttaacgccatggtcgtgaataacctgactctgcagatcgtccagggacatattgaatggcagaccgcagacgtgatcgtcaatagtgtcaacccccacgacatcactgttggtcctgtggctaaatccattttgcaacaggcaggggtggaaatgaagtctgagtttctggccaccaaagctaagcagttccagcgttcccagcttgtactggttaccaaaggcttcaatttgttttgtaagtatatataccacgtcctttggcatagtgagttccctaagccccagattctgaagcacgctatgaaagagtgtctggagaaatgtattgagcagaacatcacttcaatcagtttccctgccttaggcacaggcaacatggaaataaagaaagaaacagccgcggagatcctgttcgatgaggtcctcacattcgccaaggatcatgtaaagcaccagctgaccgtcaaattcgttatttttccaaccgatctggagatctataaagccttcagtagtgaaatggcgaagcgcagtaaaatgttgagcttgaataactactctgtcccacagtcaacaagagaagagaaaagggaaaatggtctcgaagctcgttctcctgccatcaatctgatgggcttcaatgtagaagagatgtacgaggcacacgcatggattcaacggatcttgagtctacaaaaccatcacattatcgagaacaaccatatcctgtatctcgggagaaaagaacatgatatcctgtctcaactccaaaagacatcctccgtctctattacggagattattagccccggacggacagagcttgaaatcgaaggtgcgagggcagatctgatcgaggtggtgatgaatatcgaggacatgttatgcaaagtgcaagaggaaatggccagaaaaaaagagcgcgggttatggagaagcctcggccaatggacaatccaacagcaaaagacccaggacgagatgaaagaaaacataattttcctgaaatgtccggtgccacccactcaggaattgctggaccaaaagaagcaatttgaaaagtgcggcttacaggttctgaaagtggaaaaaatcgacaacgaggtattgatggcggccttccagcggaaaaagaaaatgatggaagaaaagctgcataggcaacctgtctctcacagactgtttcaacaagtgccctaccagttctgcaacgtcgtctgtcgtgttggatttcagagaatgtacagcactccctgtgaccccaagtacggcgcaggaatttatttcacgaagaacctgaaaaatctggccgagaaagcaaagaagatttctgcggctgataagctcatatatgtctttgaagccgaagtcctgaccggcttcttttgtcaagggcaccctcttaacatcgtgcccccacctctgtccccaggggctattgatggtcatgatagcgtggtagataacgtctccagtcctgaaacctttgtgatcttctctgggatgcaagccatcccacagtatctctggacgtgcacacaggagtacgtgcagtcccaggactactccagtggaccaatgcgtccctttgcgcagcacccctggagaggatttgccagtgggagcccagtagactag

SEQ ID NO: 199907 - DNA, 2106 bp, synthetic construct
  misc_feature 1..2106: note = Description of Artificial Sequence: Synthetic coding sequence
  source 1..2106: mol_type = other DNA
atggcccaggccggcgtggtgggcgaggtgacccaggtgctgtgcgccgctggaggcgcactcgaattaccagagcttaggagacggcttagaatgggactctccgctgacgccctggagcgcttactgagacagcgtggccggtttgtggtcgccgtgcgcgcaggtggcgccgcagctgctcctgagcgcgtcgtgttggccgcgtcccccctccgcctttgcagggcccaccaagggtcaaagcctggttgtgtcggcctgtgcgcacagctccatctatgccggtttatggtttatggcgcctgtaaatttctccgggccggtaagaactgccgcaattctcatagcctcactaccgaacacaacctgtcagttctccgaacccatggagtcgatcatctatcatacaatgagttatgccagttactcttccagaacgacccctggttgctaccggaaatatgtcaacattataataagggcgatggtccgcacgggtcatgcgcgtttcaaaagcagtgtatcaaattgcatatttgccagtatttcttgcagggcgaatgtaagttcggcacctcatgcaagagatctcacgatttcagcaactcagaaaatttggaaaagctcgagaaacttggtatgtcaagcgatctggtctcacgtcttcccactatctatcgtaacgcccatgatatcaagaataagtcatctgctccgtctcgggtgccacccctctttgtcccccaaggcactagtgaaaggaaggactcctccggtagcgtgtcaccgaacactctcagccaggaggagggggaccagatctgtctgtatcatatccggaagagctgttcatttcaggataagtgccatcgggtgcactttcacctgccctaccggtggcagttccttgacagagggaaatgggaggacctcgacaatatggaactcatcgaagaggcctactgtaatcccaaaatcgagaggatcctatgttctgagagtgcctctacattccattcacattgcttaaattttaacgccatgacctatggcgctacacaggccaggagactcagcactgcctcatccgtcacaaagcccccacacttcatcctgacgacagactggatttggtattggtctgacgaatttggcagttggcaagagtatgggcggcaggggaccgtgcacccagtgacaactgttagttctagcgacgtggaaaaggcatatctggcctattgcacacccgggtctgatgggcaggcagcaactctgaaattccaggccggtaagcataattacgaactggattttaaagcctttgtgcaaaagaatttggtctacggcaccactaagaaggtgtgtaggcgtcctaagtacgttagtccccaggacgtgacaaccatgcagacgtgcaacacaaagtttcccggaccaaaatcaataccagattactgggattcatctgccctccccgatcctggctttcaaaaaattacgttgtcttcaagtagcgaagaatatcagaaagtctggaatctattcaacagaaccctgcccttctattttgtgcaaaagattgagagagtgcagaacttggcgctgtgggaagtctaccaatggcagaagggtcagatgcagaagcagaacggaggcaaagccgtggacgagaggcagctttttcacggaacctccgctatctttgtggacgccatttgtcagcaaaattttgattggcgagtgtgtggcgtacatggaactagctacggaaaaggctcatattttgccagggacgccgcgtattcacatcattacagcaagagcgacacccagacccacaccatgttcctggcccgggtattagttggagagtttgtccgcgggaacgcttctttcgttagaccgccagcaaaagagggatggtctaatgcattttacgattcatgcgtgaacagtgtaagtgacccttccatctttgtcatctttgaaaaacatcaggtctatcccgagtacgtaattcagtataccaccagttcaaaaccatccgtgacacctagtatcctgctggcactcggctccctcttctcatctaggcagtag

SEQ ID NO: 199908 - DNA, 393 bp, synthetic construct
  misc_feature 1..393: note = Description of Artificial Sequence: Synthetic coding sequence
  source 1..393: mol_type = other DNA
atgttcctggcccgggtgctggtgggcgagttcgtgcggggcaacgcatcattcgttcggccgcctgccaaagaaggctggtcaaacgccttctacgactcctgcgtaaacagcgtgtcagacccgagcatattcgtcattttcgaaaaaacacgcagtacccagtctatgagcagtagcactcctccaccccccagccctcggagccatcctccatcatgctggccctgggcaccatgttcagccgcagactcagaaagaactggggtgtttcaggcctttcatctcctgtgcctcgaaatggcaatatgggccttcccctttcttttcaagcagaaactgctgatgaattgttctcttaatatcgacttgtcaatgaaattatgttcatag

SEQ ID NO: 199909 - DNA, 849 bp, synthetic construct
  misc_feature 1..849: note = Description of Artificial Sequence: Synthetic coding sequence
  source 1..849: mol_type = other DNA
atgagcaagctggccagcttcctgggcttcagcaagcagagcccccagaagaaaaatcacctggtgttggagaagaaaaccgagtcagcaacattcagagtttgcggcgaaaatgtgacttgtgtggaatatgcaatatcttggctccaggatttgatcgaaaaagagcaatgtccttacacgagtgaagacgagtgtatcaaggacttcgacgagaaggaataccaggagctcaatgagctgcagaaaaagctgaatatcaatatctcattagatcacaagcggcccctgatcaaggtgctggggatctcgcgggatgtgatgcaagcgagagatgagatcgaggcaatgatcaagagagtgagactcgcaaaagagcaggaaagtagggccgactgcatttccgagttcatcgagtggcagtataacgataataatacctctcattgcttcaataaaatgacgaatcttaaattagaggacgccaggagggagaaaaaaaaaaccgttgatgtgaaaataaatcaccggcactataccgttaacctgaacacatataccgcgactgataccaagggacatagtcttagcgtacaacgccttacaaagagtaaagttgatatccctgcccattggagcgacatgaaacagcagaacttctgtgttgttgaactgctgcccagcgaccctgaatacaacaccgtagcctcaaagttcaatcagacatgcagccattttcggatagagaaagtcaatgtgatgatccgtgcatgtagtccttcttactgggaggccgaggtggagggactccacgagcctagatctcttaccccggtgtgggtcacttag

SEQ ID NO: 199910 - DNA, 2394 bp, synthetic construct
  misc_feature 1..2394: note = Description of Artificial Sequence: Synthetic coding sequence
  source 1..2394: mol_type = other DNA
atgtacctgcggcggctgctgcggcccctgcagatgctgctggtgaaggagggcgtgcagaacgcaaaaacggacgtggttgtgaattcagtccctctggatctggtccttagcagaggcccactctctaagagtctgctggagaaggccggccccgagcttcaggaggagttagatacagtggggcagggagttgccgtgagcatgggaactgttctcaagacttcttcttggaatctcgactgtagatacgttttgcatgtagtcgctccagagtggcgtaacggatctacaagctctctcaagatcatggaagacatcattcgcgaatgtatggaaattactgagtccctatctctaaagtccattgcatttccagctattgggacaggaaatctgggcttccctaagaacatctttgcggaactgattatctctgaggtgtttaagttttcaagcaagaaccagttaaaaacactgcaagaggtgcactttttgctccacccttccgaccatgaaaatattcaagccttttctgatgagtttgccaggcgtgcaaacggaaatctggtttcggacaaaatccctaaagcaaaggatactcaggggttttatgggactgtgagttcaccagatagcggtgtgtacgagatgaagatcggaagtatcatatttcaggtcgcatcgggcgatattaccaaagaggaagccgacgtaattgtgaattcgacatctaactccttcaaccttaaggcgggcgtttccaaggccattctggagtgcgccggccagaatgtggaacgcgaatgctcacagcaggcccagcaaagaaagaacgactatataatcactggtggtggatttctccggtgcaagaatataattcatgtgattggcggaaatgatgttaagtcaagtgtgagcagcgtcctgcaggaatgcgagaaaaagaattattcgagtatctgtctcccagccattggcaccggcaacgcaaagcagcaccccgacaaggtcgcggaggctataatagatgcaatcgaggacttcgtgcagaagggttctgcacagtctgtgaaaaaggtcaaggtcgtcatatttctccctcaggtccttgacgtattttatgcaaatatgaagaagagggaggggacgcagttgtccagccagcagtcggtgatgtcgaagcttgcctcttttctgggatttagcaaacagtcgccgcagaagaaaaatcacctggtgctggaaaagaaaacagagagcgcaaccttccgggtttgtggagaaaatgtgacttgtgtcgagtatgccatcagctggttgcaggacttaattgagaaggaacaatgcccatacacgtcagaagatgagtgcattaaggatttcgatgagaaggagtatcaggagttaaatgagctgcagaagaaactgaatatcaatatttctttggatcacaaaagacctttgatcaaggtgcttggcatctcacgggatgtgatgcaggctcgagatgagattgaggccatgataaaaagagttcgcctcgccaaagagcaagagagtagggccgattgtatcagcgagttcattgagtggcaatacaatgacaacaatacaagtcactgtttcaataaaatgacaaacctgaaactggaggacgcccgccgtgaaaagaagaaaaccgtggacgtcaagatcaaccataggcattacacagtaaacctgaacacatacacagccacggacacaaagggacacagtctgtctgtgcaaaggctgacaaagtccaaagtcgacatacctgcccactggagtgacatgaagcagcagaatttctgcgtggtggaattactgccaagcgacccagaatataatactgtggccagtaaattcaatcagacatgctctcattttcggatcgaaaagatcgagcgaatccagaacccagacctgtggaactcatatcaagctaagaagaaaactatggacgccaagaatggccaaacaatgaacgaaaaacagctgtttcatggaactgatgccggttccgtacctcacgtcaaccgcaatggctttaataggtcctatgctggtaagaatgccgtggcgtacggaaagggaacgtactttgctgtgaacgctaactattcagccaacgacacctactcccggcctgacgccaatgggcggaaacacgtgtactatgttagggttctgaccggcatctacacgcacggtaaccactctctcattgtgcctccgtcaaagaacccccaaaatcctaccgacttgtacgataccgtgacagacaatgtccatcacccaagccttttcgtggcgttctacgattaccaggcctatcccgagtacctgattactttcagaaaatag

SEQ ID NO: 199911 - DNA, 5163 bp, synthetic construct
  misc_feature 1..5163: note = Description of Artificial Sequence: Synthetic coding sequence
  source 1..5163: mol_type = other DNA
atggccgtgcccggcagcttccccctgctggtggagggcagctggggtcctgatccccccaagaacttgaacactaagctgcagatgtatttccagtcccccaagaggagcggcggcggtgaatgtgaggtgcggcaagatcctcggtcaccgtctcgatttttggtgttcttctatcccgaggacgtccggcagaaagtgcttgaacggaagaaccacgagctagtgtggcaaggcaagggaacctttaaactgaccgtccagcttcctgcgaccccagatgagatcgaccatgtgttcgaggaggaactgctgacaaaggagagtaagactaaggaggacgttaaggaacctgatactatccggttcgtggacgactgtaccaaacatcacagtataaagcagctacaactcagcccgcggctgcttgaagtgaccaataccataagagttgaaaatttgccacctggcgcagatgactatagccttaagctctttttcgaaaatccgtataatggcggggggagagtcgctaacgtcgaatacttcccagaagagtccagtgcattgattgagtttttcgatagaaaagttctcgacacaattatggccaccaaactcgatttcaataagatgcccctctctgtgtttccttactatgccagcttgggaaccgctctctatggtaaggaaaagccgttaataaaattacccgccccatttgaggagagtctggatcttcctctttggaaattcctccagaaaaagaatcatctcattgaagaaatcaatgatgagatgaggcgttgccactgtgaattaacttggtcacagttatcagggaaagtaactattcggccggccgctacactggttaacgaaggcagacctcgtatcaagacctggcaagctgacactagtacgactctgagttctatcagaagtaaatacaaggtaaatcccattaaggtagatccgactatgtgggacacaatcaagaacgatgtgaaagatgatcggattctgattgaattcgacacacttaaggaaatggtgatccttgccgggaagtccgaggacgtgcagtctatcgaggtccaggtgagggaactcatcgaaagcaccacccaaaagattaaaagggaggagcagtcactaaaggaaaaaatgatcatctctccaggacgctatttcctgctctgtcactcgtcactcttggatcacctgttgactgaatgccctgagatcgaaatctgctatgatagagtgacccaacatctgtgcttgaagggcccctcggcagatgtgtataaagctaagtgtgagattcaggagaaggtatacactatggcccagaaaaacatccaggtgtccccagagatcttccaattcctgcagcaagtgaactggaaggaattctctaaatgcctttttatcgctcaaaagatcctggctctctatgaattggaaggcacaaccgtgctacttacctcttgcagttctgaggccctcctagaggcggaaaagcagatgctgtccgcgctgaactacaaacgcatagaggtcgagaacaaggaggtgctacatggtaagaaatggaaaggcctgacacacaacttactgaagaagcagaacagttcccctaataccgtcatcatcaatgagctcacgagcgagaccactgccgaggtgattattaccggatgtgtgaaggaggtaaacgaaacttacaagttgctattcaattttgttgagcaaaatatgaaaattgaaaggctggtggaagtgaagccttcactcgttatagactacttgaagacagaaaaaaagctgttttggccgaaaattaagaaggtgaacgtgcaggtctcctttaaccccgagaataaacagaaaggaattctcctgaccggctcaaagacggaggtcctgaaagcagttgatattgtgaaacaagtgtgggactctgtgtgcgtgaagtccgtccatacagataaaccaggtgccaaacagttttttcaggataaggctagattttaccaaagtgaaattaagcgactgtttggttgctatatcgagctacaggaaaatgaagttatgaaagaaggtggatcgcctgcaggacagaagtgcttttctaggacagtgctcgctccaggggtggtccttatcgtacagcaaggcgatctagctaggctcccagttgacgtggtcgtgaacgcttcaaatgaggacctcaagcactatggcggtctcgccgccgcgttgtccaaggctgccggccctgagctacaagccgactgtgatcagatcgtgaagagagaaggtagactgctccctgggaatgccacaatcagcaaggcggggaagcttccataccaccacgtaatccatgcggtcggaccaagatggtctggttacgaggctccaaggtgcgtctacttgctcaggagagctgtgcagttgagcttgtgcttggccgagaaatataaatatcgctccattgcgatacccgccatttcctctggcgtgttcggcttccctctcggaagatgtgtcgagactattgtgtctgctatcaaggagaatttccaattcaagaaggatggtcactgccttaaggagatctatttggtcgatgtaagcgagaagactgtcgaggctttcgctgaggctgtcaagacggtgttcaaagccactctaccagataccgccgcccccccggggctgccacccgccgcagccggaccagggaagactagctgggagaaggggtcattggtgagtcctggcggactgcaaatgctgttggtcaaagagggggtgcagaatgcaaagaccgacgtcgttgttaacagtgtaccccttgatctagttctgtcccgtgggccactgtcgaaaagcctgctggagaaggccggaccagaactgcaggaagaactcgatacagtgggacagggcgtggccgtgtccatgggaacagtattaaaaacttctagttggaacttggactgccgctacgttctgcatgtcgtggcccctgaatggagaaatggcagcacatccagtctcaaaattatggaagatattattagggaatgtatggagatcactgaaagcctcagtctaaaaagcatcgcattccctgccattggcacaggaaatttggggtttcctaagaacattttcgccgagttgatcatctccgaggtgttcaaattttccagcaagaatcagctaaagacattgcaggaggtgcacttcctactccaccccagcgatcacgaaaacatccaggctttctccgacgaatttgcgcgacgcgctaacggcaacctcgtatcagataagattccaaaggcaaaggatacgcagggattctacgggactgtctcatcacccgatagtggagtgtacgagatgaaaattggtagtataatatttcaagtggctagcggagacattaccaaagaggaggccgatgtaatcgttaactccaccagtaattcgttcaaccttaaggtgggagtatcaaaagcgatcttggaatgtgctggacagaatgttgaaagagaatgttcgcagcaggctcagcagagaaagaatgactacattattactgggggcggcttcctcaggtgcaagaacattatccacgttattggcgggaacgacgtcaaatcctctgtgtcgtctgtcctccaagagtgcgagaagaagaattatagctccatttgtttaccagccattggcaccgggaacgccaagcagcacccagataaagttgccgaagctatcatagatgcaatcgaagactttgttcagaaagggtcagcacaaagtgttaaaaaggtgaaggtggttattttcctccctcaggttctcgacgttttttatgccaatatgaagaagagagagggtacacagctctcctctcagcagtctgtgatgagcaaacttgcctcttttcttggtttcagcaaacagtctccacaaaagaaaaatcaccttgtcctcgaaaaaaagaccgaaagtgccaccttccgcgtctgcggagagaatgtcacttgcgtcgaatatgctatatcatggttgcaagacctgatcgagaaagaacagtgcccctatacctctgaagatgaatgtataaaggattttgatgagaaagaataccaggagctcaacgagctgcaaaagaagttgaatataaatatttccctcgaccacaagcggccactgatcaaggtccttggaatatcccgagacgtgatgcaggccagagacgagatcgaagcgatgattaaaagggtccgcctggctaaagagcaggagtctcgcgcagattgcatctcggagtttatcgaatggcaatataacgacaacaacacttcccattgtttcaataaaatgacaaaccttaagctcgaggatgcccgtagggagaaaaagaaaaccgttgatgtcaaaataaaccacagacattataccgtcaacctgaatacctacacggctacggacacgaagggtcactccctgagcgtacagagactgactaaatccaaggtggatatccccgcccattggagtgacatgaagcagcagaacttctgtgtagtagaactgttaccttccgatcctgagtacaacacggtggcatccaagtttaaccagacatgctctcatttcaggatcgagaagattgagcgcatacaaaatcctgacctttggaattcctaccaggcaaaaaaaaaaactatggatgccaaaaacggtcagacgatgaacgagaaacagctgtttcacggtaccgatgctggttccgtcccccacgtcaataggaacggttttaacaggtcctacgctggaaagaatgcagtggcatacggaaagggcacctattttgccgttaacgctaactactcagctaatgacacatattcccgacccgacgccaacggtcgcaagcacgtctattatgttcgagtcctcactggcatttatacccacggtaaccacagcctcatagtgccaccctcaaagaatccacagaaccccaccgacctttacgacacagtgaccgacaatgtacatcatccttctcttttcgtagcattctatgactaccaagcctaccccgagtacctaatcacattcagaaaatag

SEQ ID NO: 199912 - DNA, 5406 bp, synthetic construct
  misc_feature 1..5406: note = Description of Artificial Sequence: Synthetic coding sequence
  source 1..5406: mol_type = other DNA
atggccgtgcccggcagcttccccctgctggtggagggcagctggggcccagatcctcccaagaacctgaatacaaagctgcagatgtactttcaaagccctaagagatccggtggaggcgagtgtgaagtgaggcaggaccccaggtcgcccagccgcttcttggtcttcttttacccagaagatgtgcggcagaaagtcttagagcggaagaaccatgagctagtctggcaaggtaaaggcacctttaagctgacagtgcagctccccgctacgcctgacgagatcgaccacgtgtttgaagaagagctcctcaccaaggagtcgaaaacaaaggaagatgtgaaagagcctgacgtgagtgaagagctggatacaaagctcccactggatggcgggctggataaaatggaggacatccccgaggaatgtgagaatattagctctctggtcgcgtttgagaacctgaaggccaacgttacagacattatgctaattttgctcgtggaaaacatctccggcctcagcaacgacgatttccaggttgaaattataagggactttgacgtggctgtcgtgacattccagaagcacattgatacgataagattcgttgatgattgtacaaagcaccattctatcaaacaactgcagctatcaccaagactgctggaggttacaaacacaatccgggtcgagaatctgcccccgggtgcagacgactactctctcaaattatttttcgaaaatccatataatggaggcgggagagtggctaacgtggagtactttcccgaggaaagctccgcgcttatagagttctttgatagaaaggtgttggatacgatcatggccactaagttagattttaacaaaatgcctctgtccgtctttccctactatgcgtctcttggaacggcactgtatggcaaggaaaagcccctgatcaaactcccggcaccctttgaagaaagcctcgaccttcccttgtggaagttcctgcaaaaaaaaaatcacctcatagaagaaataaacgacgaaatgcgtcgatgccactgtgagttaacttggtcccagctttcaggcaaagtgactatccgccccgcggcaaccctggtgaatgagggtcgaccaagaatcaaaacttggcaagccgatacctccactacgctttcttctattaggtccaagtataaggtgaaccctatcaaagtagatcctaccatgtgggacacaattaagaatgacgttaaagatgaccgtattcttattgaatttgacactcttaaagagatggtgatccttgctggcaaatcagaagacgttcagagtatcgaagtccaggtgagagaattgatagagtcaactacacagaaaattaaaagggaggaacagtcgctgaaagagaaaatgattatttcgcccggacggtatttcctcctctgtcattcttccctactggaccatcttcttacggagtgccctgagatagaaatttgctatgaccgagtcacccaacacttgtgcctcaaagggccttccgcagatgtttacaaggcaaagtgtgagatccaagagaaagtgtacacgatggcccagaagaatatccaagtgtcacccgagatcttccagttcctgcaacaggtgaattggaaagaattctcgaagtgtttgtttattgcccagaaaatactggccctgtacgaactcgagggaaccaccgtgctgcttactagctgctcctctgaggcccttttagaagcagagaaacagatgctctccgcacttaactataagcgcattgaggtggaaaacaaggaagttctgcacggcaagaagtggaagggccttacccacaacctgttgaagaaacagaatagctcacccaacactgtgattattaatgagctcacctctgaaacgaccgcagaagtaatcatcaccggttgtgttaaagaagttaacgaaacatataaactcctctttaacttcgtagagcagaatatgaagattgaacggctggtcgaagtgaagccctcccttgttatcgattatctgaaaacggaaaagaaactgttttggcctaaaatcaaaaaggtcaacgttcaagtgagctttaacccagagaacaaacagaagggaatcctcctaactgggagcaaaacagaggtgttgaaggccgtggacatcgtgaaacaggtttgggacagcgtgtgtgttaaatccgtgcacactgacaagcccggagcaaagcagttcttccaggataaagcacgattttatcagagcgagattaaacggctgtttggctgctacatcgaacttcaagagaatgaggtgatgaaggaaggcgggagccccgctggccagaaatgtttcagccggactgttttagcaccaggcgttgttctgatcgtgcagcaaggggatctggcccggctgcctgtggacgtcgtagtgaacgcatcaaacgaagacctgaagcactatggtggcctcgcggccgccctgtcaaaggcagctggcccagaactgcaggcagattgtgaccagatagtgaagcgtgaggggcgtctcctgcccggaaatgccacgatctcaaaagcgggcaaattaccataccatcatgttattcacgctgtcggccctcgctggtcaggttatgaggcccccaggtgcgtgtatttacttaggagagcagtccagctcagcctctgccttgccgaaaaatataaatacaggtccatcgctatccctgctatttcaagcggagtcttcggcttcccgctggggcgatgcgtggaaaccatagtttcagccatcaaggagaactttcagttcaaaaaggatgggcactgcctcaaggagatttatctggtagatgtgtctgagaaaacagtagaggcctttgcagaggccgttaagacggtgtttaaagccactctcccagatactgcggcgcctccgggactcccgccagcggctgctggccctgggaagacctcatgggaaaaagggtcactagtgtctccgggtggcctccagatgctgcttgtcaaggagggtgtgcagaatgcaaaaacggatgtggtcgttaacagtgttccactggatctggtgttgtctagagggcccctgagtaaatccttgttggagaaggcgggacctgaactgcaagaagaactggacactgtgggccaaggtgttgcagtgagcatgggtaccgtactgaagacatcatcatggaacctcgactgcaggtatgtactacacgtcgtggcgcctgagtggcgcaatggctccacctcttcattgaagatcatggaagacataatccgcgagtgtatggagatcacagagagcctgtcattgaaaagtattgctttccctgcaatcggcactgggaatctgggcttcccaaaaaacatctttgctgaactcataatatctgaggtcttcaagttttcttcaaagaaccagttaaaaaccctccaggaagtgcattttcttcttcaccccagtgaccatgaaaatattcaggcatttagtgacgagtttgctcggcgggcaaatggcaacctcgtgagtgacaaaatccctaaggcgaaggatacccaggggttttatggcactgtgtcttccccggattccggcgtttacgaaatgaagatagggtcaatcattttccaagtcgccagcggggatattacaaaagaggaggccgacgtgattgtcaactctacgagtaatagctttaacctcaaggctggtgtttcaaaagccatcctggagtgcgccggccagaatgtggaaagggaatgctcacaacaggctcagcagcggaaaaatgactacatcattacaggggggggcttcctgaggtgtaaaaacatcattcatgtgatcggcgggaacgacgtgaaatcttccgtctcctcggttctgcaagaatgcgagaaaaaaaactactcttcaatctgtttaccggccatcggaacaggcaatgccaagcagcatccagataaagtcgctgaggccatcattgatgccatcgaggacttcgtgcaaaagggttccgcacagtctgtgaagaaagttaaggtagtaatttttctgccccaagtcctggacgtattttacgctaacatgaaaaagagggaaggaacccagctctcaagtcaacaatccgttatgagcaaacttgcatcttttctgggtttctctaagcagtctccccaaaagaagaatcatctggtactcgaaaaaaaaaccgaaagtgcaaccttcagagtatgtggggagaacgtgacctgcgtcgagtacgctatctcttggctccaggatctcatcgaaaaagaacagtgcccgtacaccagcgaggacgagtgtattaaggactttgatgagaaggagtatcaggaactgaacgagctgcaaaagaagctgaacattaatattagcctggaccataagagacccctgataaaggtgttgggtatctctagggatgtgatgcaggcccgggacgagattgaagccatgatcaagagggtccggcttgctaaggaacaggaaagtcgggcagattgcattagcgaatttatcgagtggcagtacaatgataacaatacatctcattgctttaacaagatgacgaacttgaaacttgaagacgcccgaagagagaaaaagaaaacggtcgatgtcaagatcaaccatagacattatacggttaaccttaacacatacaccgccaccgacaccaagggtcacagtttatcagttcagaggctcaccaaaagcaaagtagatatcccggctcactggtcagatatgaaacaacagaacttttgtgttgtggagctgctgccgtccgatcctgagtataatacagtggcatctaagtttaatcaaacttgtagccatttccgcattgaaaagatagaaagaatacagaacccggacctgtggaatagctaccaggctaagaaaaagacaatggacgccaaaaacgggcaaacaatgaacgaaaaacaactgttccacgggacagacgcaggctccgtccctcacgtcaatcgaaacgggtttaacaggtcctatgctggcaagaacgcagtcgcatatgggaaaggcacttacttcgctgtaaacgcaaactactctgccaatgatacttacagccgccccgacgcgaacggaaggaaacacgtatactatgttcgcgtactcacagggatctacacccacggaaaccactccctgattgtgcctccatctaagaaccctcagaaccccaccgatttatacgacaccgtcacagacaatgtgcatcaccccagcttatttgtcgctttttacgattatcaggcctaccccgaatacctgattacttttaggaaatag

SEQ ID NO: 199913 - DNA, 585 bp, synthetic construct
  misc_feature 1..585: note = Description of Artificial Sequence: Synthetic coding sequence
  source 1..585: mol_type = other DNA
tgagtgcggcggcgggccgagctgcggatggccgtgcccggcagctttcctcttcttgtggaaggctcttgggggcccgatcccccaaaaaatctgaacaccaagctgcagatgtactttcaaagccctaagagatccgggggaggggagtgcgaggtgcgccaggatccccggagtccctcgcggtttctcgttttcttctaccccgaggacgtgcgtcaaaaagtgctagagagaaagaatcacgaactcgtgtggcagggtaaaggcacattcaagctgaccgttcagttgcccgccacacccgacgagatcgaccacgtgttcgaagaggagctcctaacaaaagagtctaagaccaaggaggatgtaaaggagcctgatacaattaggttcgtggacgactgtacaaagcaccatagcattaagcagcttcagctgagcccaagactcctggaggtaactaacacaatccgagtggagaacctgccaccaggggcagatgattactcactgaagttgttttttgagaacccttataatgggggtggccgtgtggctaacgtggagtatttcccggagtag

SEQ ID NO: 199914 - DNA, 1335 bp, synthetic construct
  misc_feature 1..1335: note = Description of Artificial Sequence: Synthetic coding sequence
  source 1..1335: mol_type = other DNA
atgctgcagcggatcggcctgatcttcctgcacaacatcgtggtggttagcaattgtttctattttcaggccttccttgacgagtttacaaattggtcacggatcaatcctaataaggcccgaattcccatggcaggcgacactcagggcgtagtcgggacagtgagcaagccgtgtttcacagcctatgaaatgaagatcggggcgattacctttcaggtcgcaaccggggacatagcaactgagcaagttgatgtcattgttaactctacagcccggacctttaacagaaagtctggtgtgagtagggccattctggagggcgccggccaggcagtggagagtgagtgcgcagttctggccgcccagccgcatcgcgacttcatcataacaccaggtggatgtttaaaatgcaaaataatcattcacgtccctggagggaaggacgtccggaaaactgtgacaagtgtgctggaggaatgcgagcaaagaaaatatacgtcagtttccttgccagccattggtaccggcaatgcaggtaagaacccgattactgttgccgataacattatagatgccattgtggatttctccagccagcactctaccccttcactgaagaccgttaaggtcgtgatatttcagccggaacttttgaatatattttacgactctatgaaaaaaagagacttgtcagccagcctgaactttcagtctacgtttagtatgaccacttgcaaccttcccgaacattggacagatatgaaccaccaactcttttgtatggtgcagctagagcccggccagagcgagtacaacaccatcaaagacaagttcacacgcacctgcagctcttacgcaatagagaagattgagaggattcagaatgctttcctctggcaaagctatcaggtaaagaagcgtcagatggacattaagaacgaccacaagaataacgaacgactcctgtttcacgggacagacgccgattctgtaccttatgtgaatcaacacggatttaatagatcctgcgccggaaaaaacgcagtaagttacggcaagggtacgtatttcgccgttgatgcctcttatagcgccaaggatacgtactctaagcccgacagtaacggccggaagcacatgtatgttgtaagagttctgaccggggttttcacgaaggggcgcgctgggttggtcacccctccccctaaaaatcctcacaatccgaccgacctgtttgattccgttacaaataataccaggtcccccaagctcttcgtagtgtttttcgataatcaggcatatcctgagtacctcattacattcacagcctag

SEQ ID NO: 199915 - DNA, 2037 bp, synthetic construct
  misc_feature 1..2037: note = Description of Artificial Sequence: Synthetic coding sequence
  source 1..2037: mol_type = other DNA
atggccgcccccggccccctgcccgccgccgccctgagccccggcgccccaacacccagagaactgatgcacggcgtagctggggtgacgagtagagccggtcgagatcgtgaagccggttcagttctgcctgctggcaaccgcggagcacggaaggctagccgacgcagttcatccagatctatgagccgggacaataaattttccaagaaagactgcctctctattagaaatgtggtggcttcaatccagacgaaagaaggcctgaatctcaaactcatctccggggatgtcttatatatttgggccgatgttattgtgaacagtgtgcccatgaatctccagctggggggtggtccgctgagcagggctttcctgcagaaggctggccctatgctgcaaaaagagcttgacgatcgaaggcgagaaactgaagaaaaagttggaaatattttcatgactagtggttgcaacctagattgtaaagcagtcctccatgccgttgccccttactggaacaacggggctgagacctcatggcagataatggccaatattattaagaaatgcctgacaactgtggaggtgttatcttttagttctattacttttccgatgatcggcaccggaagcttacagtttcctaaggctgtcttcgccaagctcatcctgtctgaggtcttcgaatattccagcagcactcgccctatcacttcacctctgcaagaagtacattttctagtgtacacaaatgatgacgaaggttgtcaggctttcctggacgagtttactaactggagccgaatcaatcctaataaggccagaatccctatggccggtgacacacagggcgtggttgggaccgtgagcaaaccttgcttcacagcttacgaaatgaagattggggctatcaccttccaggtcgccacaggcgacatagcaactgaacaggtggacgtgattgtgaactctactgcacgcacctttaatcgcaaatctggagtcagcagggcgattcttgagggtgcaggacaagcggttgagagcgagtgtgctgtgcttgcagctcagcctcatcgggactttattatcacccccggcggctgtctgaagtgcaagatcataattcacgttccaggggggaaggacgtgcgcaagacagtcacatccgtgctggaggagtgcgagcaaagaaaatacactagcgttagcctacccgccataggaactggcaatgctggcaagaaccccataaccgtcgctgacaatattatagacgccattgtggatttttccagtcagcacagcacaccatcgctgaagacagtgaaagtcgttatctttcagcctgaactgctgaacatcttttatgactcaatgaaaaagagagatctgtctgcaagtttgaatttccagtcaacatttagcatgaccacctgcaacctgcctgaacattggactgatatgaatcaccagctcttttgtatggtacagctggagcccggccagtcagaatataacacaatcaaagacaagtttacgcgaacttgtagctcctacgcaatcgaaaaaatcgaaagaattcagaacgcctttctttggcagtcctatcaggtgaagaagcgccagatggatatcaagaacgaccacaaaaataacgagagactgctttttcacgggactgacgctgatagtgtgccatatgtcaatcagcacggtttcaaccggtcttgtgctggtaaaaatgctgtttcttacggcaaaggcacatacttcgctgtagacgccagctacagtgctaaggacacgtatagcaagcccgactcgaacggtaggaagcacatgtacgtggtcagagtgttaactggcgtgttcaccaaaggaagagctggcttggtcaccccccctccaaagaaccctcataatcccacggacttgttcgactccgtcacaaacaacacccgaagccccaagttgttcgtggtgttcttcgacaatcaggcataccctgagtacctaatcacatttaccgcatag

SEQ ID NO: 199916 - DNA, 1278 bp, synthetic construct
  misc_feature 1..1278: note = Description of Artificial Sequence: Synthetic coding sequence
  source 1..1278: mol_type = other DNA
atgaagcacaccgccttcctggacgagttcaccaactggagccggatcaacccgaacaaggcccggatccccatggcaggagacacccaaggagtggtgggaactgtctctaaaccctgttttactgcctacgagatgaagatcggcgcaattacctttcaagtggccacaggagatattgctaccgagcaggtggacgtgatcgtgaacagcactgctcgaaccttcaatcgaaagtccggtgtgagccgcgctatactcgagggggccggacaggctgtggagagcgaatgtgcagtgctcgcagctcagccgcacagggatttcatcatcacgcctggcggctgccttaagtgtaaaatcatcatccacgtaccagggggaaaggacgtacgtaagactgtgacatcggtactggaagaatgcgaacaaagaaagtacacctccgtttcactcccagccattgggaccggtaatgccgggaagaatcctatcactgttgctgacaatataattgacgccatcgttgacttctctagccagcattccacacctagtcttaagacagtgaaggttgtcatattccagccagagctgcttaatatcttttatgatagcatgaagaagagggatctttcagcctcccttaacttccagagcacattttctatgaccacgtgtaatctgccagagcactggaccgatatgaaccatcagctcttctgcatggtgcaattagagccgggccaaagcgaatataacacgatcaaagataaattcacaagaacctgttcctcttacgccattgagaaaatcgagcgcattcaaaatgctttcctctggcagagctatcaggttaagaagagacagatggatattaagaacgatcataaaaacaatgaacgccttttgttccacggaaccgacgctgactccgtgccctatgttaaccagcacggatttaatcgatcttgcgcaggtaaaaacgcagtgtcatatggaaaggggacttacttcgctgtcgatgccagctattccgcaaaagatacatatagcaagcctgacagcaatgggcggaaacacatgtatgtcgtgagggtccttactggagtttttacaaaggggcgggcaggactcgtaactcccccacccaagaatccacataatccaaccgacctcttcgatagcgtcaccaataatacaagatcacctaagctattcgtggtgtttttcgataatcaagcttaccctgagtatttgattacctttactgcctag

SEQ ID NO: 199917 - DNA, 2565 bp, synthetic construct
  misc_feature 1..2565: note = Description of Artificial Sequence: Synthetic coding sequence
  source 1..2565: mol_type = other DNA
atggacttcagcatggtggccggcgccgccgcctacaacgagaagtctggaagaatcacgtcgctgtcgctcctgttccaaaaagtgtttgcccagattttcccacagtggaggaaaggaaacactgaagagtgcctcccttacaagtgttccgagaccggtgctctaggcgagaattactcctggcagatacctattaatcacaacgattttaagatacttaaaaacaacgaaagacaattgtgcgaagttcttcaaaacaaatttggttgtatctctaccttagttagtcccgtgcaagagggtaatagcaaatccttgcaggtcttccggaagatgctgactccacgtattgaactaagcgtctggaaagatgacctcacaacccacgcagtggacgctgtggtgaatgccgcaaacgaggacttgttacacggcggcggactggccttggcactagtcaaagcgggtggctttgagatacaagaagaatcgaagcagtttgtcgcgcgctatggaaaagtatcagccggggaaattgcggttacgggtgcaggaaggttaccttgtaagcagattatacacgccgttggtccgcggtggatggagtgggacaagcagggatgtaccggcaaactgcagagagcgatagtcagcattctcaactacgttatctataagaatacacatatcaaaacagtcgccatacctgctttgagctccggaatcttccaattcccgctgaatctctgcactaagaccattgtagaaaccattcgcgtgtccctgcaggggaagcccatgatgtccaatcttaaggagatccacctcgtgtcaaacgaggacccgactgtagctgcctttaaggccgcatccgagttcatcctcggaaagagcgaattgggacaggaaactaccccatcctttaatgctatggtggtcaacaacttgacactgcaaatcgttcagggccacattgagtggcaaaccgctgatgttatagtgaatagcgtcaatccacacgatatcacagtgggccctgtggctaagtcaattctgcaacaggcaggcgtcgaaatgaaatccgaattcttagccaccaaagccaaacagtttcagcgatctcagctagtgctcgtaacaaaagggttcaatctgttctgcaagtacatttaccatgtgttgtggcactccgagtttccaaaaccacaaattctgaagcacgccatgaaagaatgccttgaaaagtgcatcgaacagaacatcaccagtatttcgtttcccgccttgggcactggaaatatggaaattaagaaggagacagcagctgaaatattgttcgacgaagtcctgaccttcgcaaaggatcacgtgaagcaccaacttactgtcaaattcgtgatcttcccaacagacttggaaatttataaggcattttcttcggaaatggctaaacgtagcaaaatgctgtcactcaataattacagtgtcccacagtcaactagggaggaaaagagagagaatgggttggaagccagaagtccagcgatcaacctaatggggtttaacgtggaggagatgtacgaggcacacgcctggatacaacggattctttcgctgcagaatcaccacattattgagaacaaccacatcctctacttgggccggaaagagcatgatatactgagccagcttcaaaaaaccagtagcgtatcaattactgagataatctctcccggtagaactgaactagagatcgagggagctagagctgacctcatcgaagtggtgatgaatatcgaggacatgctctgtaaggtacaggaggagatggcgcggaagaaggagaggggattgtggagatctctgggacagtggaccatacaacagcagaaaacacaagacgaaatgaaagaaaacatcatctttctcaaatgtcctgtccccccgacgcaagaactgctcgaccagaagaagcagtttgagaagtgcggcctccaggtccttaaggttgagaagattgataatgaggtgctcatggccgcgtttcaacgtaaaaagaagatgatggaagaaaaactgcatagacagccagtgtcgcaccgccttttccagcaggtcccgtatcagttctgtaatgtcgtgtgtcgagtgggattccagagaatgtacagcaccccttgtgaccccaaatatggtgcaggcatttactttactaaaaacctgaagaatctagccgaaaaggccaaaaagatttctgcagcagataagttaatctatgtgttcgaagccgaggtgctgaccggattcttctgtcagggacatccactcaacatcgtgcctccacctctcagccctggagccatcgacggacacgactctgtggtcgataacgtgagttcaccagaaacttttgtgattttctctggaatgcaagccattccacagtacctgtggacctgcacccaggagtatgttcagagccaggattattccagtggtcccatgcgaccatttgctcagcatccttggagaggatttgcctccggctcgcctgtcgactag

SEQ ID NO: 199918 - DNA, 2334 bp, synthetic construct
  misc_feature 1..2334: note = Description of Artificial Sequence: Synthetic coding sequence
  source 1..2334: mol_type = other DNA
atgagcgtgagctgcgtgaagagcagccggatcagcctggccgtgtctctgccgtggtcgctgcaatttcgcaaagccaccgctaatttatgcgtttttaggaaaatgctgacccctaggattgagctgagtgtgtggaaggatgaccttactacgcacgcagtggatgctgtggtgaacgcagctaacgaagacctcctccatggggggggacttgccttggccttagtaaaagcaggcggctttgagatccaggaggagtccaagcagtttgttgctcgttacggaaaagtttccgccggagagatagccgtgacaggagcaggtcgactcccctgtaaacagatcatacacgcagttggacctagatggatggagtgggataaacagggctgcacaggaaaattgcagcgcgctatcgtgagcatactgaactacgtgatatacaaaaacacgcacatcaaaaccgtcgcaattcctgctctgagcagcggcattttccaatttcccctgaatctgtgtaccaagacaattgtagaaaccatccgggtgagcctgcagggcaaaccaatgatgtccaacttgaaagaaattcaccttgtctccaacgaggacccgacagtggccgcgttcaaggccgcgagcgaatttatcttgggcaaaagtgaactggggcaagagacgactccatcattcaatgccatggtggtgaacaatcttaccttgcaaattgtccagggacacatagagtggcagactgccgacgttatcgtcaattcagttaatccacacgatatcacagtaggaccagtggccaagtctattctgcagcaggccggggttgaaatgaagtcagaatttctggcaacgaaagcaaagcagtttcagagaagccagcttgttctagtcactaagggcttcaatctattttgcaagtacatctaccatgtcttatggcactccgaatttccgaaacctcaaatcctaaaacatgcgatgaaagagtgtctggaaaaatgtattgagcagaatataacctctatttccttccccgctctgggaacaggaaatatggaaattaaaaaagagactgctgcagagattctcttcgacgaagtgcttaccttcgccaaggaccatgtgaagcatcagctgacagtgaagtttgtgatatttcctactgacctagaaatctataaagcttttagcagcgaaatggctaagcgatctaagatgctgtccctcaataactactctgtgccccagtcaacccgcgaagagaagcgagaaaatgggctagaagctaggagccctgcgattaatctgatgggctttaatgtagaggagatgtatgaggctcatgcctggatccaacgaatcctcagtctccaaaatcaccacattatcgagaacaaccatatcttgtatctgggccggaaagaacacgacatcttgtcgcagctccagaaaacctcaagcgtgagcatcactgagattatatctcctggacgcactgagctggagattgagggagctcgagcggatctcattgaggtggtcatgaacatagaggacatgctgtgtaaagtgcaggaggagatggcgagaaaaaaggagcgtggcctgtggcgaagcctaggccagtggacgattcagcaacaaaagactcaggatgaaatgaaagaaaacattatctttcttaaatgtcctgtcccacccacccaggagctgctagatcagaaaaaacaatttgagaaatgtggcctgcaggtgctgaaggtggaaaaaatcgacaatgaagttctcatggccgcttttcagcgcaaaaagaaaatgatggaggaaaagctccacaggcagcctgtttcacaccggctcttccagcaggtgccctaccagttttgtaacgtggtctgccgcgtgggctttcagagaatgtattcaacgccatgcgaccccaagtatggggccggcatctatttcaccaagaatcttaagaatctcgcagaaaaggccaaaaagatttccgctgccgataaattaatttacgtcttcgaagccgaggttctaaccggcttcttttgccaaggacacccccttaacatagtgccacctccactgagccctggggccatcgatgggcacgactccgtcgtggataatgtgtcatctcctgaaacttttgttatcttttcagggatgcaggctatcccccagtacttgtggacttgcacgcaggagtacgtgcagagccaggattattccagcggccccatgcgaccctttgcacaacatccatggcggggttttgcatccggttcacccgtggactag

SEQ ID NO: 199919 - DNA, 2460 bp, synthetic construct
  misc_feature 1..2460: note = Description of Artificial Sequence: Synthetic coding sequence
  source 1..2460: mol_type = other DNA
atggacttcagcatggtggccggcgccgccgcctacaacgagaagagcgaaaccggggccttgggtgagaactactcttggcaaatccccataaaccataatgactttaagatactgaagaataacgaacggcagctctgtgaagttctgcagaataagtttggctgcatctctactctggtgagtccagtgcaggaaggcaactcaaaatcgctgcaggttttccgcaaaatgctgaccccacggatcgagttgagcgtgtggaaggacgaccttaccactcatgccgtagatgccgtcgtgaacgccgctaacgaagacttacttcatggagggggcctagctcttgcgcttgtgaaagctggcggatttgagatccaggaagagagcaaacaatttgtagcccgctacgggaaggtgagcgctggtgaaatcgccgtcacgggagccggtagactgccgtgcaagcaaattatccatgccgtgggaccacgatggatggagtgggacaagcagggttgtacgggtaagctgcagcgggctatcgtctccatcctaaactacgtaatttacaagaatacgcatataaagacggtggcaattcctgccctcagcagtggcatctttcaattccctttgaacctctgcaccaaaaccatcgtggaaacaatacgagtatcactgcagggaaaacctatgatgtcaaatttgaaggagatccatctagtgtcaaatgaagatccaacagtggcagccttcaaggcagccagcgaattcatcttgggcaaatccgaactaggacaggaaaccacacccagtttcaatgccatggttgtgaacaatctgacgttacagatagtccaaggccatatcgaatggcagacagccgacgttatcgttaattccgtcaatccccacgatattactgtgggtccagtggccaagagtattctgcagcaggccggcgtggagatgaagtcagaattcttagctaccaaggccaagcagtttcagaggtcgcaactggtcctcgttaccaaaggcttcaacctgttttgtaagtatatataccacgttctgtggcattcggagtttcccaagccacagatcctgaagcacgcaatgaaagaatgcttggagaagtgcatagagcagaacatcacctctatctcatttccagcactggggactgggaatatggaaattaaaaaagagaccgctgctgaaatcctgttcgatgaggtgttgactttcgcaaaagaccatgtgaagcaccagctgacagtcaagtttgtgatattcccaacagatcttgagatctacaaagcattctcaagtgagatggccaagcggagtaagatgctctccctgaacaattattcagttccacagtctacaagagaggagaagagggagaacggcctcgaagcccgaagtccagctatcaacctcatgggattcaatgtcgaagagatgtacgaagcccatgcctggattcagcgtatcctctccttacagaatcaccatatcattgaaaacaatcatatcctgtatctgggccgtaaggagcacgacatactttcccagttgcagaaaacctctagtgttagcatcactgaaattatctcccccggacgaaccgaactggagatagaaggagctcgggccgaccttatcgaagtggtcatgaacatcgaggatatgctgtgtaaagttcaggaagaaatggctagaaaaaaagaaagaggtctgtggcgctccctgggccaatggaccatccagcaacagaagacccaggatgagatgaaggagaacattatttttctcaaatgccctgttccaccaacacaagagctgcttgatcagaagaagcagttcgagaaatgtggcctgcaggttctcaaggtagagaagattgacaatgaggtcctcatggccgccttccagcgaaagaagaaaatgatggaggagaaactgcacagacagcctgtgtctcaccgcctctttcaacaagttccgtaccagttttgcaatgttgtgtgtcgagttggctttcagcgcatgtacagcacaccctgcgaccccaaatacggcgccggaatttatttcacaaaaaacttgaagaacctagcagagaaggctaaaaaaatctcagccgcagacaaactcatctatgtgttcgaagctgaggtgttgaccggattcttctgtcagggacacccactgaatatcgtgccacccccactaagccccggagcaatcgacggccacgattcagtggtggacaacgtgtcgagccccgaaactttcgtgatcttctcaggcatgcaagccattccacagtacctctggacctgtacccaggagtatgtgcagtctcaggactacagctccgggccaatgcgtccattcgcccaacacccttggcgaggctttgcatcaggatcgccagtggactag

SEQ ID NO: 199920 - DNA, 1440 bp, synthetic construct
  misc_feature 1..1440: note = Description of Artificial Sequence: Synthetic coding sequence
  source 1..1440: mol_type = other DNA
atgagcgacggcttcgaccgggcccccggcgccggccggggccggtctcgcggactgggaaggggtggcggcggccccgagggaggcggcttcccaaatggggccgggccggcggaacgcgccagacaccagccgccgcagccaaaggcgcccggcttcctccagcccccacccctcaggcaaccaaggacaacgccgcctcccggcgcacagtgcgaagtcccagcaagcccccagcggccctctagaccgggcgccctgcccgaacaaacccggcctctgcgggcgccaccttcatcccaggataagatccctcagcaaaacagcgaaagcgccatggcgaaacctcaggttgtggttgccccggtactgatgtccaagctctcagtgaacgctcctgaattttaccccagtggttactcttcctcctacacagaaagctacgaggacggatgcgaggactatccgacactgtctgagtacgtgcaagatttcctgaatcacctgacagagcagcccggtagttttgaaaccgagatcgagcagttcgcggaaacgctgaatgggtgtgtaacaactgatgacgccctccaagagttggtagaacttatttaccagcaagctacatccatcccaaacttctcatatatgggtgcgagactgtgtaactatctctcacatcaccttacaatttcaccccagagtggaaatttccggcagcttctcttgcaacgttgccggaccgagtatgaagttaaagaccaagccgccaaaggtgatgaggttacccggaagcggttccacgcttttgttctctttctaggcgaattgtacctgaacttagagataaagggtaccaacgggcaggtcactagggcagacatactccaggtgggtctacgcgagctgcttaatgcattatttagcaacccgatggatgacaacctgatctgtgccgtgaagctgttgaagcttacaggaagtgtgctggaagatgcctggaaagagaaaggcaagatggacatggaggagataattcaaagaattgagaacgtggtgctggacgccaactgttcacgagatgtcaagcaaatgctgctgaaactggtggaactgagatcctccaattgggggagagtccatgccacgtcaacctatagggaggctaccccggagaacgatcctaattactttatgaatgagccgacattctacacaagcgacggcgtcccattcaccgctgccgacccggattatcaggaaaaatatcaggagctgctcgaaagagaggacttctttccagattacgaagaaaatgggacagatctgtctggagcaggagacccatacctagatgacatcgatgacgaaatggacccagagatcgaggaagcttacgagaaattctgcctcgaatctgaacggaaacgcaagcagtag

SEQ ID NO: 199921 - DNA, 1104 bp, synthetic construct
  misc_feature 1..1104: note = Description of Artificial Sequence: Synthetic coding sequence
  source 1..1104: mol_type = other DNA
atggccaagccccaggtggtggtggcccccgtgctgatgagcaagctcagcgtcaatgcccccgagttctatccgagcggatactcgtctagctacaccgaatcttatgaggatggttgcgaggactatcctacactgtctgagtatgttcaggatttcttaaaccatttgactgagcagccaggatcctttgaaactgaaatcgagcaatttgcggaaactttgaatggctgcgtgacaacagatgacgccctacaggaattagtggaacttatataccagcaggccacctcaatacccaatttttcctacatgggtgccagattgtgcaattatttgagccaccatttgactatctccccccagagtgggaactttcgccagttgctcctacagcggtgccgtactgaatacgaagtgaaagatcaggcagccaagggggacgaggtgacgcgcaagcgcttccacgcctttgtactgttcctaggagaactgtacctgaacctggagattaaaggcaccaatggccaagtgaccagagccgatattctgcaagtgggactacgggaactcctgaatgccctgttctcgaatcccatggatgacaatctcatctgtgctgtgaagctacttaagctaaccggaagtgtgctagaagatgcgtggaaagaaaaaggcaaaatggacatggaggagattatacagcggatcgaaaatgtagttcttgatgctaactgctcacgggacgtgaaacaaatgctgctcaagctagtggagctgcgctcctccaattgggggagggtccacgccacctcaacctaccgcgaggccactcctgaaaatgaccctaattactttatgaatgagcctaccttctacacttccgatggtgtgccgttcacagccgcagaccctgactaccaggagaaataccaagaactcttggagcgggaagattttttccccgattacgaagaaaatggtaccgacctctccggagccggggacccttacctggacgacattgatgacgagatggatccggaaattgaggaagcatacgaaaagttctgtctagagtcagaaagaaagcggaaacagtag

SEQ ID NO: 199922 - DNA, 1203 bp, synthetic construct
  misc_feature 1..1203: note = Description of Artificial Sequence: Synthetic coding sequence
  source 1..1203: mol_type = other DNA
atgagcgacggcttcgaccgggcccccgagcagacccggcccctgcgggctccccctagttctcaggacaagatcccacagcagaattccgagtctgctatggccaagccacaagtggttgttgcccctgtgctcatgtccaaacttagcgtgaatgcccctgagttttacccgagtggctattctagttcctacactgagtcgtacgaggatggctgcgaagattatcctacactaagcgagtacgtgcaggatttcctaaatcatttgacagaacaaccaggaagcttcgagacagaaattgagcagtttgccgagaccctgaatggctgcgtcaccacagacgacgccctccaggagctggttgagctgatatatcagcaagccaccagcatccctaattttagctacatgggagctcgtctttgcaactatctatcacatcatttaaccatctccccacagagcgggaattttaggcagctgttgctccagcgatgtaggaccgaatacgaggttaaagatcaggctgcgaagggtgatgaggtgacaaggaaacgatttcacgcgtttgtgctattcctgggtgagctctacctaaacctggagataaagggcacgaatggccaggtgactagggctgacatcctccaggtcggattgagggaactgctaaatgcattgttctcaaatccgatggacgacaacctgatttgcgctgtgaagttgctcaagctcaccggcagcgtgctggaggatgcttggaaggagaaagggaagatggacatggaggagattattcaaagaattgagaacgttgtgctggacgcaaattgttccagggacgttaaacagatgctgctgaaattagtcgaacttcgctcttcgaactgggggcgcgttcacgccactagtacctacagggaggcaacccccgagaacgatccaaattattttatgaatgaacccactttttataccagcgacggtgttccttttactgccgcagaccctgattaccaggaaaagtaccaggaactcctggagcgggaggattttttccccgactatgaagagaacggcactgatttaagcggagccggcgatccatatttggatgatatagatgacgaaatggaccccgagatcgaagaagcctacgaaaaattctgcctggagtccgagaggaagaggaaacagtag

SEQ ID NO: 199923 - DNA, 507 bp, synthetic construct
  misc_feature 1..507: note = Description of Artificial Sequence: Synthetic coding sequence
  source 1..507: mol_type = other DNA
atggccaagccccaggtggtggtggcccccgtgctgatgagcaagctttccgtgaacgccccagagttctatccctcaggctatagctcttcttacaccgaatcatatgaggacggctgtgaggattatcccacgttgtcggagtatgtgcaggattttcttaaccacctgaccgagcagccagggagtttcgagactgaaatcgaacagttcgccgaaacactgaacgggtgtgtcacgacagatgacgccttacaggagctcgtggagttaatttatcagcaggcgaccagcatccccaacttcagttacatgggcgccaggctgtgcaactatctctcccaccacctgactatatcaccacagagcggcaacttccgccaactcctgctgcagcggtgcagaactgaatatgaagtcaaagatcaggcagccaagggcgacgaagtcactaggaaaagatttcatgccttcgtgctctttcttggggaactgtatcttaactag

SEQ ID NO: 199924 - DNA, 603 bp, synthetic construct
  misc_feature 1..603: note = Description of Artificial Sequence: Synthetic coding sequence
  source 1..603: mol_type = other DNA
atggccaagccccaggtggtggtggcccccgtgctgatgagcaagctctccgtgaatgcccctgaattttatccaagcggctatagtagcagttacaccgagtcctacgaggacggctgcgaggactaccctaccctgtccgagtacgttcaggactttcttaatcatctgaccgaacagccggggagttttgaaactgagattgagcaattcgccgagactttgaacggctgcgtgactacggatgatgccctacaagagctcgtggagctcatttatcaacaggcaacaagcatacccaatttttcctacatgggtgctaggttgtgtaactacctgtcgcaccatcttaccatctctccccagagtggcaactttcgtcagctcctcctgcagcgatgtcgcactgagtatgaagtgaaggatcaggcagctaaaggcgacgaggtcacccgtaaaagatttcacgccttcgtgctgttcttaggggaactttatctcaatcttgaaatcaagggtacaaatggccaggtcaccagggccgacattttacaggttggcctgcgagaactgctgaacgccctgttcagtaacccgatgtag

SEQ ID NO: 199925 - DNA, 1056 bp, synthetic construct
  misc_feature 1..1056: note = Description of Artificial Sequence: Synthetic coding sequence
  source 1..1056: mol_type = other DNA
atgagcgacggcttcgaccgggcccccgagcagacccggcccctgagggctccaccttccagccaagataaaattcctcagcagaactccgaaagcgcaatggcaaagcctcaggtggtcgttgctccagtgctcatgtccaagcttagcgtgaatgcccctgaattttatccatctggttatagttcttcttataccgagtcttacgaggacggttgtgaagactacccaactctcagtgagtatgtgcaggatttcctgaatcatctcacagagcagcccgggagttttgagaccgaaatcgaacagtttgccgaaactctcaacggatgtgttacaacagatgatgctttgcaggaattggttgagctcatatatcaacaggcgacttctatcccaaatttctcctacatgggagcacggctgtgcaactatctcagccaccacttaacgatctccccacaatcgggtaatttccgccagctgctgctgcaaaggtgtcgtacagaatatgaagttaaggaccaagcagcaaagggggacgaagtcacccgcaagaggtttcacgcctttgttttattcttaggggaattatacctaaacctcgaaattaagggcaccaacggacaggttacccgcgccgatatcctacaggtgggcctgagagagctgcttaatgccctgttctccaatccgatggacgataacctgatttgtgccgtaaagctgctgaaactaaccggcagcgtgctggaagacgcgtggaaggagaaagggaagatggacatggaggaaatcatccagagaatcgagaatgtggtgctcgatgcgaattgcagccgcgacgtcaaacagatgctattaaagctggtggaactgaggtccagcaactggggacgggtgcacgctacgtctacttacagagaggcaaccccagaaaatgacccgaactattttatgaatgaacccactttctacacttctgatggggttcctttcactgcagctgaccctgacacgtggatgattctgatgatgaggtggacccagcgttag

SEQ ID NO: 199926 - DNA, 288 bp, synthetic construct
  misc_feature 1..288: note = Description of Artificial Sequence: Synthetic coding sequence
  source 1..288: mol_type = other DNA
atggccaagccccaggtggtggtggcccccgtgctgatgagcaagctatccgtgaacgcccccgagttttacccctccggctactccagtagctacaccgagagctatgaggatggttgtgaagactaccccacactctcagagtacgtccaggattttctgaatcatctcaccgagcagccgggtagtttcgagacagagatcgaacagtttgccgagacactgaatggctgcgtaacaaccgatgacgccctccaagagttagtagaactgatatatcagcagtag

SEQ ID NO: 199927 - DNA, 384 bp, synthetic construct
  misc_feature 1..384: note = Description of Artificial Sequence: Synthetic coding sequence
  source 1..384: mol_type = other DNA
atgaaggaccccagccggagcagcaccagccccagcatcatcaacgaagatgtgattattaacggtcacagtcacgaggatgataaccccttcgctgagtacatgtggatggagaacgaggaggagtttaataggcaaatagaggaagagctctgggaggaggagttcattgaacggtgttttcaagagatgctagaggaagaagaggagcacgagtggttcataccagctagggacttgccgcaaacaatggatcaaattcaggaccaattcaacgatctagtcataagtgatggttcatcactagaagacctggtggtgaagtcaaacctaaacccaaacgctaaagagtttgtgcccggggttaagtacggcaatatctag

SEQ ID NO: 199928 - DNA, 384 bp, synthetic construct
  misc_feature 1..384: note = Description of Artificial Sequence: Synthetic coding sequence
  source 1..384: mol_type = other DNA
atgaaggaccccagccggagcagcaccagccccagcatcatcaacgaggatgtgattatcaatggacactctcatgaggatgataatccgttcgccgaatatatgtggatggagaacgaggaggaatttaaccggcagattgaggaggaattgtgggaggaagaattcatagaacgctgctttcaggagatgttggaggaggaggaggaacacgagtggtttatccccgcacgggatctcccccagactatggaccagatacaggaccaattcaatgacttagtgattagcgacggatcaagtctagaggatcttgttgtaaagagcaacctgaacccgaacgcaaaagagttcgtcccaggggtgaaatacggaaatatctag

SEQ ID NO: 199929 - DNA, 282 bp, synthetic construct
  misc_feature 1..282: note = Description of Artificial Sequence: Synthetic coding sequence
  source 1..282: mol_type = other DNA
atgaaggaccccagccggagcagcaccagccccagcatcatcaacgaggacgtgatcatcaacggccactcacacgaggatgataatcctttcgccgagtatatgtggatggaaaacgaagaggagttcaacaggcaaattgaggaagagctgtgggaagaggagtttattgaacgatgctttcaagagatgctggaggaagaagaagagcacgagtggttcataccagcccgagatctgccccagacaatggatcagattcaggatcagtttaatgattag

SEQ ID NO: 199930 - DNA, 384 bp, synthetic construct
  misc_feature 1..384: note = Description of Artificial Sequence: Synthetic coding sequence
  source 1..384: mol_type = other DNA
atgaaggaccccagccggagcagcaccagccccagcatcatcaacgaggatgtgatcattaatggtcactctcatgaggacgataacccttttgccgagtatatgtggatggagaacgaggaggaattcaatcgccagatagaagaggaactgtgggaagaagaattcatagaacgatgttttcaggaaatgctggaagaggaagaggagcatgagtggttcattcctgctcgggatctcccacagaccatggaccaaatacaagaccagtttaacgatctcgtgattagcgatggcagcagcttggaggacctagttgtgaaatcaaatttgaatcctaatgcaaaggaatttgtcccgggtgtgaagtacgggaatatctag

SEQ ID NO: 199931 - DNA, 372 bp, synthetic construct
  misc_feature 1..372: note = Description of Artificial Sequence: Synthetic coding sequence
  source 1..372: mol_type = other DNA
atgaacggcagcaacatggccaacaccagccccagcgtgaagagcaaagaagatcagggactcagtggccacgacgaaaaggagaatccgtttgccgagtatatgtggatggaaaatgaggaagatttcaatcgacaggtcgaggaggagttacaggagcaggactttcttgaccggtgtttccaggaaatgcttgatgaggaggatcaggactggttcattccgtcacgagacctgccccaagctatgggacaactccaacagcaattaaatgggctgtctgtgtctgaagggcacgatagtgaagatatcttaagcaaaagtaacctgaatcccgacgccaaagaattcatcccaggggagaagtactag

SEQ ID NO: 199932 - DNA, 1896 bp, synthetic construct
  misc_feature 1..1896: note = Description of Artificial Sequence: Synthetic coding sequence
  source 1..1896: mol_type = other DNA
atgaaccccagcacccccagctaccccaccgccagcctgtacgtgggagatctgcaccctgacgtgaccgaggccatgctatatgagaaattcagcccagctggcccaattctttctattcgcatctgtagggaccttattacaagcggctcatcgaattatgcgtatgttaacttccagcacactaaggatgccgaacatgccttggatactatgaattttgacgtcataaaggggaaacccgttaggattatgtggagccagcgggacccaagtcttcggaaaagcggcgtgggcaatatcttcgtgaagaacctcgataagtctatcaacaacaaggcgctctacgacacagtgagtgccttcggaaacatcctgtcatgtaacgtcgtctgcgatgagaacggttccaaagggtacggattcgtacactttgagacacatgaagcagccgaacgagcaatcaaaaagatgaatggtatgttattaaatggtagaaaagtgtttgtgggtcagtttaaatctaggaaagaaagagaggctgaattgggagccagagccaaggagttccccaacgtgtatataaagaatttcggagaggacatggacgatgaaagacttaaggacctgttcgggaaatttggcccggccctttctgttaaagtgatgactgatgaatctgggaagagcaagggcttcggctttgtatctttcgagagacacgaagatgcccagaaggccgtcgacgagatgaatgggaaggagctgaatggaaagcagatatacgtgggccgggctcagaaaaaggtcgaaagacaaaccgaattgaagagaacctttgagcagatgaagcaggacaggatcacaaggtaccaggttgtgaatctctacgtgaagaatctcgacgatggaatcgacgatgagcgacttcgcaaagccttttcaccttttgggacaattacttccgcaaaggttatgatggaggggggcaggtctaaagggttcggctttgtatgcttctcatctcctgaggaggccacaaaggcagtgacagaaatgaatgggcgtatcgttgctaccaagcctctgtatgtggcgcttgctcagcgaaaggaagaaagacaagcttacttgaccaacgagtacatgcagcggatggcgagtgtgcgggccgtgcctaatcagcgcgcccccccatctggttactttatgactgccgtgccacaaacacaaaaccatgctgcttattaccccccatcacagattgctaggcttaggcccagcccacggtggacagctcagggcgcaaggcctcatccatttcagaacaaaccaagcgctattcgccccggggcgcctcgagtcccattttcaaccatgcggcccgcctcctcacaggtgcctagagtaatgtccacccagcgggtggccaacacgtctacccagacagtcgggccccgcccagcagcagccgctgccgccgccgccacgccagcagtacgcactgtccctcgctataagtatgccgcgggcgtgaggaacccccagcagcaccgtaacgctcagccacaagtgacaatgcaacagctcgctgtgcacgtgcagggacaggaaacgctgactgcgtccaggttggcctcggcgccaccacagaagcaaaagcagatgctcggggagagactctttcccctgatccaggcaatgcatcccaccctggccgggaagatcaccggaatgctactcgagattgacaactcagaactcctgtacatgctggagtcacctgaatcactgcgatccaaggtcgacgaggcggtggctgtgctccaagctcaccaggcaaaagaggccactcagaaagccgtcaattcagccaccggggtgcctactgtgtag

SEQ ID NO: 199933 - DNA, 1896 bp, synthetic construct
  misc_feature 1..1896: note = Description of Artificial Sequence: Synthetic coding sequence
  source 1..1896: mol_type = other DNA
atgaacgccgccgccagcagctaccccatggccagcctgtacgtgggcgacctacactctgatgtaaccgaggcaatgctatacgagaagttctccccagccggaccagtcctgagcattcgcgtctgtagagatatgatcactagaagatctttgggttatgcctacgtcaatttccagcagcctgcagatgcagaaagagcactggatacaatgaatttcgatgtcatcaagggcaagcctatccgcatcatgtggtcccagagggatccctcattgaggaaaagcggggttggaaacgtgttcattaaaaaccttgataaatctattgataataaagccctgtacgacaccttctccgcctttggcaatatcttgtcatgcaaagtagtgtgcgacgagaacgggtccaaaggctacgccttcgtccatttcgagacccaagaagctgccgacaaagctatcgaaaagatgaatggaatgctgctgaatgacaggaaggtgttcgtcggtcgattcaagtcaaggaaggagcgtgaagcagagctgggcgccaaagctaaggagttcacaaatgtttatatcaagaattttggcgaagaagtcgatgatgagtccttgaaggaactcttctcccagtttggcaagaccttgtctgtcaaggtgatgcgcgaccctaatggcaagtcaaaggggttcggattcgtctcgtatgaaaagcacgaagatgccaataaagctgtggaagaaatgaacgggaaagagattagtggaaaaattatctttgtcggtcgggcacagaaaaaggttgagcgccaagctgagctaaagagaaagtttgagcagctaaagcaggaacgcatctccagataccagggcgtgaatctgtatatcaagaatttggacgacacaatcgacgacgaaaagctgcgtaaagagtttagtcccttcggctctataacttccgcaaaggttatgctggaggatggcagatcaaagggcttcgggtttgtttgcttcagcagcccagaggaggcgacaaaagctgtcaccgaaatgaatggtcggatcgttgggtcaaagcccttgtacgttgctctggcacaacggaaggaggagcggaaggcccatctaacaaaccagtatatgcaaagagtagcaggcatgagggcactcccagccaatgcaatcctgaatcaattccaaccagcggctggggggtacttcgtgccagccgtccctcaagctcagggacgacctccctattacacgcccaaccaacttgcacagatgaggcccaatccgcgctggcagcaggggggacgccctcaggggttccaggggatgcccagcgccattagacaatctggaccccgccccacactccgtcacctggcaccaactggaaatgcacccgcgagccgcggactgccaacaaccactcaaagagttggagtacccaccgccgtgcaaaatcttgctccacgtgccgctgtagccgcggcggctcccagagccgtagccccatacaagtacgcatcttctgtcaggtcccctcatccagcaattcagccacttcaggctcctcagccggctgttcacgtccagggccaggaacccctcaccgcaagtatgctggcggcggccccccctcaagagcagaaacagatgttgggcgaacgcctgtttcctctcatccagaccatgcatagcaatctggccggcaaaattactggcatgcttctcgagatcgacaatagcgaactgctgcatatgctcgaatcccccgagtccctgcgatcaaaagtagacgaagcggtggctgttctgcaggcccaccatgccaagaaagaagcagcacagaaggtcggggccgtggctgccgccacgtcatag

SEQ ID NO: 199934 - DNA, 1935 bp, synthetic construct
  misc_feature 1..1935: note = Description of Artificial Sequence: Synthetic coding sequence
  source 1..1935: mol_type = other DNA
atgaacgccgccgccagcagctaccccatggccagcctgtacgtgggtgatctccattcagacgtaacagaggctatgctatatgagaaattctcccccgctggtcctgtgcttagtattagggtgtgtcgggacatgatcaccagacggtccctgggttacgcatatgttaatttccagcaacccgccgacgccgagcgcgccctggatactatgaactttgatgtcatcaaaggaaagcccattagaatcatgtggtctcagcgggatccatctctgcgaaagtctggggtgggaaacgtgttcattaaaaatctggacaagagcatcgacaataaggcactctacgacacattttccgccttcggtaacatcctgagctgtaaagttgtgtgcgacgaaaacggatctaagggatatgccttcgtgcactttgagacacaggaggctgctgataaggcaatcgagaaaatgaatggaatgctgctgaatgatcgtaaagtgtttgtgggaaggtttaagtcccgtaaggagcgagaggctgagctcggcgccaaggcgaaagagtttaccaatgtgtacattaagaactttggagaggaagtggacgacgaaagtctcaaagagctgttttctcaatttggtaagacactgagtgttaaggtgatgagggaccctaatggaaagtccaaaggattcggcttcgtctcatacgagaaacacgaagacgccaacaaggcagtcgaggagatgaatggaaaagagatttccggaaagattatttttgtggggcgcgcccagaagaaagtagaaagacaggccgaacttaagagaaagtttgaacagttgaagcaggagaggattagcaggtaccagggagtcaacttgtacattaagaacctagacgacaccatagacgatgagaagttgcgaaaggagtttagccccttcggctctattactagtgctaaagtgatgctcgaggacgggaggtcaaaagggttcggatttgtgtgcttttcctccccagaggaggcaaccaaggcagtaactgagatgaacgggagaattgtcggttcgaagccactgtacgttgccttggctcagcgcaaggaagagaggaaagcccacctgaccaaccagtatatgcagcgggtggctggcatgagggctcttcccgctaacgccattttaaaccagtttcaacctgctgcaggggggtatttcgtacctgctgtgccgcaggctcaggggaggccaccttattacactccaaaccagctggcccagatgagaccgaatccccgttggcagcaagggggacgaccacagggttttcagggtatgcccagtgccatccggcagtccggcccgaggcctacactgcgtcatctcgctccaactggcagcgagtgtcctgatcggctggctatggatttcggaggggctggtgcggcccagcagggactgaccgatagctgtcaaagtggtggcgtgccaaccgcggttcagaacctggcaccccgagcagctgtggccgccgctgcacctcgcgcagtggctccgtacaaatatgcctcctccgtgcgtagcccacaccctgccattcagcctcttcaggccccccagccggccgttcacgtacagggccaagaacccttgacagcgagcatgctcgcagctgctcctcctcaggaacaaaaacagatgttgggggaaaggttatttcctctcatccagacaatgcactccaacctcgcaggtaagatcaccggcatgctgctggaaatcgataactctgaattgctgcacatgctggaaagcccagagagcctgcggtcaaaggttgatgaagctgtggcagtgttacaagctcaccacgccaaaaaagaggcagctcaaaaggtgggcgctgtggcggctgcaacctcctag

SEQ ID NO: 199935 - DNA, 1983 bp, synthetic construct
  misc_feature 1..1983: note = Description of Artificial Sequence: Synthetic coding sequence
  source 1..1983: mol_type = other DNA
atgaacgccgccgccagcagctaccccatggccagcctgtacgtgggtgatctgcacagcgatgttacagaggcgatgctgtatgaaaagttctctcctgctggccccgtgctaagcattagggtgtgccgcgatatgatcacgagacggtcactggggtatgcatatgtgaacttccagcagcccgcagacgccgagagggcccttgacactatgaacttcgatgtcatcaaaggcaaacccattagaattatgtggtctcagcgcgatccttctctaagaaagtcaggggtaggtaacgtgtttattaaaaacttagacaaatctatcgacaataaggccttatatgatacgttctcagcattcggaaatattttgagctgcaaggtagtgtgtgacgaaaatggaagtaaggggtatgcctttgtccattttgagacgcaggaagctgccgataaggccattgagaagatgaatgggatgctcttaaatgatcgcaaggtgttcgtgggtcggttcaagtcacgcaaagagcgggaggcagagctgggagccaaagcaaaggagtttaccaatgtttacattaagaacttcggtgaagaggtcgacgacgagtctcttaaggaattgttttcccagttcggcaagaccttgtcggtcaaagtcatgcgcgacccaaacggcaaaagcaagggcttcgggttcgtttcctacgagaaacacgaagacgccaataaagctgtcgaagagatgaatggaaaggaaatcagcggcaaaattatcttcgtgggccgagcccagaaaaaagtggagaggcaggctgaactcaaaagaaagttcgagcagctgaaacaagaacgcatttctagatatcagggcgtgaacctgtacataaagaaccttgacgacaccatcgatgatgaaaaactgagaaaggaattctcccctttcggctccatcaccagtgcgaaagtcatgctcgaagatggccgttcaaaaggttttggatttgtttgtttcagtagccccgaggaggccactaaagccgttacggagatgaacggaaggatcgtggggagcaagccactttatgtagccttggcccagagaaaagaggagcggaaggcacatctcacgaatcaatatatgcagcgagttgcggggatgcgcgctttgccggcgaacgccattctcaatcagttccagcctgcggctggcgggtactttgtaccagctgttccacaagcgcagggccgacccccttattataccccaaatcagctggcccaaatgagacccaatccaaggtggcaacagggtggccggccacagggctttcaaggcatgccatcggcaatccgtcagtccggcccgcgccctactctgcgccatcttgccccaacagggaacgcccccgcctcccgaggcctcccgacgaccacacagcgggttggttctgaatgtcccgaccgactagccatggattttggaggggccggggctgcccagcagggccttacagacagctgccagagcggtggtgttcccacagccgtccaaaacttagcgccccgcgcagccgttgctgctgctgccccccgcgctgtggctccatacaagtatgcatcttcagtgcgaagcccgcatcccgccattcagccccttcaggcaccccagccagccgttcatgtgcagggtcaggagcctctcaccgctagtatgttggcggccgctccccctcaggaacagaaacagatgttgggcgaaagactcttcccattgatccagaccatgcattctaacctcgctgggaaaattactgggatgctcctagagatagataactctgaacttctgcatatgctcgaatccccagagagtctgagatctaaagtggacgaggcagtcgccgtccttcaagcccatcacgcgaaaaaagaagcagcacaaaaagtgggagcagtcgctgccgctactagctag

SEQ ID NO: 199936 - DNA, 390 bp, synthetic construct
  misc_feature 1..390: note = Description of Artificial Sequence: Synthetic coding sequence
  source 1..390: mol_type = other DNA
atgaacgccgccgccagcagctaccccatggccagcctgtacgtgggcgacctccactctgatgtgacagaggcaatgctgtatgaaaaattttctcctgcaggcccagtgctgagcatcagggtatgccgggatatgataacgaggaggtctctagggtatgcctatgtgaacttccaacagcccgctgacgccgagagggccttagatactatgaatttcgatgtcataaagggaaaacccatcagaatcatgtggtctcagagagatcccagcctgcgcaagtcgggcgtcgggaatgtcttcataaaaaaccttgataaatctatcgacaacaaggcactgtacgacaccttcagtgcctttggtaatattctgagctgtaaatag

SEQ ID NO: 199937 - DNA, 207 bp, synthetic construct
  misc_feature 1..207: note = Description of Artificial Sequence: Synthetic coding sequence
  source 1..207: mol_type = other DNA
tgactgatccagaccatgcacagcaacctggccggcaagatcaccggtatgctacttgagattgacaactcagaacttctgcacatgctggagtctcccgaatcgcttcgttcaaaggtcgatgaggcggtggctgtgcttcaggcacatcatgctaagaaggaagctgcacagaaggtgggagccgttgcagctgctacaagttag

SEQ ID NO: 199938 - DNA, 120 bp, synthetic construct
  misc_feature 1..120: note = Description of Artificial Sequence: Synthetic coding sequence
  source 1..120: mol_type = other DNA
atgaacgccgccgccagcagctaccccatggccagcctgtacgtgggggacctgcattcggacgtaacggaggcaatgttatatgaaaagttcagcccagcgggacccgtgttatcatag

SEQ ID NO: 199939 - DNA, 1149 bp, synthetic construct
  misc_feature 1..1149: note = Description of Artificial Sequence: Synthetic coding sequence
  source 1..1149: mol_type = other DNA
atgggcagcggcgagcccaaccccgccggcaagaagaagaagtacctgaaagccgcgctctatgtgggtgaccttgaccctgacgtcacagaagacatgctatacaaaaagtttcggccagccggtcctcttcgatttacaagaatctgccgcgacccagttactagaagccctctgggatatgggtacgttaacttcaggttccccgcggatgccgaatgggccctcaataccatgaacttcgacctgatcaatggaaagcccttcaggcttatgtggtcccagccggacgatcgcctgcgcaagtcaggagtgggaaatatattcataaagaatcttgataaatctattgataatcgagcactcttttacttgttcagcgcctttggtaatatactgtcatgtaaggtggtttgtgacgacaacggcagtaagggctacgcctatgtacacttcgattcactggctgccgctaatcgggccatatggcacatgaacggggtaagactgaataaccgccaggtgtacgtaggtaggttcaagttcccggaagaaagggccgctgaggttcggaccagggatcgcgcaacatttacgaatgtgtttgtaaagaatatcggtgacgatatagatgacgagaaactaaaagaacttttctgtgagtacggacctacggaatctgttaaggtgatcagagacgcctctggaaagagtaagggtttcggtttcgtgaggtatgaaacccacgaggcggcccaaaaggccgtcctcgatctgcatgggaaatccatagatggaaaggtgctctacgtgggcagagcacagaagaagatagagaggcttgccgagctgaggcgccggtttgaaagactcagactgaaagaaaaatcccggcccccaggggtgcctatttacattaaaaatctggacgagacgatcaatgatgagaagttgaaagaagaatttagctctttcgggtccattagtcgcgctaaggttatgatggaggtgggccagggaaagggatttggtgtcgtgtgcttctcctcctttgaggaggctacaaaagcagttgatgagatgaatggccgcatagttgggagcaaaccacttcacgtgaccttggggcaggcccggcgacgatgttag

SEQ ID NO: 199940 - DNA, 657 bp, synthetic construct
  misc_feature 1..657: note = Description of Artificial Sequence: Synthetic coding sequence
  source 1..657: mol_type = other DNA
atgaacggcgtgcggctgaacaaccggcaggtgtacgtgggccggttcaaattcccagaagagagggctgccgaggtccggacccgggatagggctaccttcactaacgtatttgtaaaaaacatcggagacgatattgatgacgaaaagctgaaggagctgttttgcgagtacgggcccaccgagagcgttaaggtcatacgagacgccagcggaaagtcaaaaggcttcggatttgtcaggtatgagacccatgaagcagctcagaaggctgtcctggacctccacggtaagagtattgacggaaaagtgctctatgtggggcgcgcacagaaaaaaatagaacgcctggccgagctgaggagaaggttcgagaggctccggctgaaagaaaagagccggccccctggagttcctatctacattaagaacttagatgagactatcaacgacgaaaaacttaaggaggaatttagtagcttcggaagtatctcacgggctaaagtcatgatggaagttggacaaggcaaagggtttggggtggtgtgcttttcaagctttgaggaagctaccaaggccgtcgacgagatgaacggacgtattgtcggctcgaagcccctccacgtcacactaggtcaggcccgcagacgctgctag

SEQ ID NO: 199941 - DNA, 1053 bp, synthetic construct
  misc_feature 1..1053: note = Description of Artificial Sequence: Synthetic coding sequence
  source 1..1053: mol_type = other DNA
atgctgtacaagaagttccggcccgccggccccctgcggttcaccagaatctgtagggaccctgtgacacggtctcctttgggatacggctacgtgaattttagattccctgcagacgcagagtgggctctcaatactatgaattttgacttgataaacggcaagccttttcgactgatgtggagccagccagacgataggctgcgcaaatctggcgtgggtaacatcttcataaaaaatctggacaagagtatcgataatcgcgcgctgttctacctcttcagtgcttttgggaatatcctgtcttgcaaggttgtctgcgacgacaacggctcaaaaggctatgcctatgtacatttcgacagtctggccgcagcaaatcgggccatatggcacatgaatggcgtgaggttgaacaatcgccaggtttacgtcggtcgctttaagtttccagaggagcgagccgcagaagtgagaaccagagatagggctaccttcactaatgtcttcgtgaaaaatattggagatgacatcgacgacgaaaaactcaaggaactgttttgcgagtacggccctaccgagtctgttaaggttatacgagatgctagtggcaagagcaaaggcttcggttttgttcgatacgaaacacacgaagccgcccagaaagctgtgctggacttgcacggcaagagcattgatgggaaagtcctgtatgtgggcagagcccagaaaaagattgaacgcctcgccgaacttagacgcagattcgaaaggctgagattgaaagaaaagtctcgccccccaggcgtgcctatatacatcaagaatcttgacgaaaccatcaacgatgaaaaactaaaggaggagttcagttctttcgggagcatctcgcgggctaaagttatgatggaagtcggccaaggtaagggcttcggagtggtttgcttcagcagctttgaggaggcaaccaaggccgtcgacgaaatgaatgggcgcatcgtaggctccaagccccttcacgtaaccctgggacaagcaaggcgacgttgttag

SEQ ID NO: 199942 - DNA, 957 bp, synthetic construct
  misc_feature 1..957: note = Description of Artificial Sequence: Synthetic coding sequence
  source 1..957: mol_type = other DNA
atgcccaagcggggcaagaagggcgccgtggccgaggacggcgacgagctacggactgagccagaagccaaaaagagcaaaacagctgccaagaaaaatgacaaagaagctgcaggcgagggccccgcactttatgaagatccccctgatcagaagacctccccaagcgggaaacctgcgacgcttaagatctgtagctggaatgttgatggactgagagcatggataaagaaaaaaggtctcgattgggtgaaggaggaagcacccgacattctttgcctccaggagacgaagtgctcagagaacaaattacctgcagagctgcaggaattaccgggcctctcccatcaatattggtccgcaccctcagataaagaagggtacagtggggtcggtctattatcacgtcagtgtcctttgaaggttagttacggaatcggtgacgaggagcacgatcaggaggggcgagtcatagtggctgagttcgattcctttgtgttggtgaccgcctacgtacctaatgccggcagagggctggtgagacttgagtaccggcagaggtgggatgaagcgttccgaaagttcctaaaaggactggcgtcgcgaaaaccacttgtgctgtgtggagacctaaatgtggcccacgaggagatcgatctgcgaaatccgaagggcaacaaaaagaatgccggatttactcctcaggagcgccagggctttggggaactgctccaggccgttccactggctgacagttttcgtcacctgtaccctaataccccttatgcatatacgttttggacctacatgatgaacgcgagatcgaagaacgtcggctggagactcgattactttctgctttcccactcactgctgcccgccctctgcgacagcaaaattcgcagtaaagccctcggatccgaccattgtcctatcacgctctacctggccctgtag

SEQ ID NO: 199943 - DNA, 891 bp, synthetic construct
  misc_feature 1..891: note = Description of Artificial Sequence: Synthetic coding sequence
  source 1..891: mol_type = other DNA
atggccgccgccgccgccgccgccgccgccgccggcgccgccggcggccggggcagcggccctggaagacgccgccacttggtccccggggctggaggggaagcaggagaaggcgctccaggcggtgctggtgactatggcaatggtctcgaaagcgaagagctggaacccgaggaactactgttagagccagagccagagccagagccggaggaggagcctccacggccaagggccccccccggagcaccgggaccaggccctggatctggggccccgggatctcaggaagaagaagaggaacccggtctcgtggaaggagaccctggtgatggagccatagaagaccccgagctcgaggccatcaaagcgagagtgcgggaaatggaagaggaagcggagaaactaaaggagctgcaaaacgaggtagagaagcaaatgaacatgtctcctcctcctggtaatgccggccccgtcatcatgtctattgaagaaaagatggaggccgacgcaaggtcaatctacgtgggcaacgtggattacggagcaacagcagaagaactggaggctcactttcacggctgtggcagcgtgaaccgagttactatcctgtgtgataagttttctggacaccccaagggcttcgcctatatcgagttcagtgataaggaaagcgttagaacctcactcgcactagacgaatctttatttaggggaaggcagatcaaagtaatccctaaaaggaccaatagacccggaatcagcaccactgacagagggtttcctcgggctaggtatcgagctcgtacgactaattacaacagctcccgctcacgattttactcaggatttaattcgcgccctcgaggacgtgtttaccgatcaggatag

SEQ ID NO: 199944 - DNA, 1557 bp, synthetic construct
  misc_feature 1..1557: note = Description of Artificial Sequence: Synthetic coding sequence
  source 1..1557: mol_type = other DNA
atgagctgcgtgaagctgtggcccagcggcgcccccgcccccctggtgagcattgaggaattggagaaccaggaactcgtaggcaagggtggcttcggcacggtcttccgggcacagcatcggaagtgggggtatgatgtcgccgtgaagattgtgaattccaaggcaatctctagggaggtcaaagcaatggcttcacttgacaatgagttcgttcttaggctggagggggtgatcgagaaggtcaactgggaccaggaccccaagccggcacttgtaacgaagttcatggagaatggaagcctctctggacttctccagtcacagtgccccaggccttggccgctgctttgccgtttgctcaaagaagtggtccttggtatgttctatctccacgatcaaaacccagtgttgctccaccgagatctgaagccttccaatgtgctgttagatcccgagctgcatgttaaacttgccgactttggtctgtccacatttcaaggaggctcacagtctggcacaggatcaggtgaacccggaggaaccctaggctatcttgctcccgagctgttcgtgaatgtgaatcgcaaagcaagcactgctagtgatgtttacagctttggaattctcatgtgggctgtacttgctgggcgcgaggtggagctccccactgaaccgtcacttgtgtacgaagccgtctgcaaccgtcaaaacaggcccagtctagccgagctgccgcaagcaggcccagaaactcctggactggaaggtctgaaggagctgatgcaactatgttggagcagcgaacccaaggaccgtcccagttttcaagagtgcctcccgaagacagatgaagtgtttcaaatggtagaaaacaacatgaacgccgccgtaagcactgtgaaggacttccttagtcaactgcggagctctaaccgccggttttcaattcctgagtcggggcagggtggcaccgagatggacggattccgccgaactatcgaaaaccagcattcgcgtaacgatgtaatggtatctgagtggctcaacaaactgaatctggaggagccccctagtagcgtccctaaaaaatgccccagcctgactaaacgaagccgcgctcaggaagaacaggtaccacaagcttggactgctgggacctccagtgactctatggcacaaccacctcagacacccgagacctccactttccgcaatcagatgccctcccccacatcaacaggaaccccctcacctgggccccgcgggaaccagggggcagagaggcagggaatgaactggtcttgcaggactcctgaacctaatccggtcacgggccgccctctagtgaacatatataactgctcgggcgtccaggtgggcgacaacaactatctgacaatgcaacagacgaccgctctgccaacatggggactggcaccgtcggggaaaggccgggggctccagcatcctccccccgtgggatctcaagaggggcctaaggatcccgaagcgtggtcccggccgcaaggttggtataaccacagcggaaaatag

SEQ ID NO: 199945 - DNA, 2223 bp, synthetic construct
  misc_feature 1..2223: note = Description of Artificial Sequence: Synthetic coding sequence
  source 1..2223: mol_type = other DNA
atgctgggccggcggggcagcgactgggccgtgcccgcccccgagacaatgccgtttcctgtcactacgcaagggtcacagcaaacgcaacccccccaaaaacattatggaattacttctccgataagcttggcggcaccaaaagagaccgactgtgttttgacgcagaagctgattgagaccctgaagccattcggcgtgttcgaagaagaggaggagctgcaacgtcgcattttaatcctggggaagctgaataacctagttaaagagtggatccgggagatttcagaatccaaaaacctgcctcagtctgtcatcgagaacgtggggggcaagatcttcacctttggtagctatcggcttggcgttcacactaaaggagctgacattgatgccctgtgtgttgcacccaggcacgtcgacagaagcgatttctttaccagcttttatgacaaactgaaactccaggaggaggttaaagaccttcgggccgttgaggaggccttcgtgccagttattaagctgtgctttgacgggattgagattgatatcctctttgctcggctcgccctgcaaaccattcctgaggacctcgatctgcgggacgattcactgctcaaaaacctagacattcgctgcatccggtctctcaacgggtgccgagtgacagacgaaattctgcacttggtccccaatattgataatttccggctgacccttagagctatcaagctgtgggcaaagagacataatatatatagcaacatcctggggtttcttggaggtgtgtcgtgggctatgctggtggccagaacttgtcagctgtacccgaacgccatagcatccacactggtccacaaattctttctggtcttttccaagtgggagtggcccaatccagtattactgaaacagcctgaagagtgtaacctcaacctgccggtgtgggatccccgggtgaacccttccgatcgttatcacctaatgccgattattacccccgcttatccacagcagaatagcacctacaacgtctcagtttccactcggatggtaatggtcgaagagttcaaacagggtctggcgatcacagacgagattctgctgagcaaggctgagtggtccaagctgtttgaggcccctaattttttccagaagtacaagcactacatcgtgcttctggcaagtgccccgacagagaagcagagactcgaatgggtcggcttggttgaatctaagattagaattctggtcggatctctcgagaagaatgagttcatcactctggctcacgtgaacccacagagctttcccgcacctaaagaaaatccagacaaggaggagtttcggaccatgtgggtcattggtctggtctttaagaagacggaaaacagtgaaaacctgagcgtcgatcttacctacgacatccagagcttcacggatacagtctaccgtcaggcaataaatagcaaaatgttcgaagtggatatgaagatcgctgctatgcacgtgaaacgcaaacaattgcaccagttactgcccaatcatgttctgcagaagaaaaagaagcactctaccgaaggagtgaagctgactgcactgaacgattcctccttagatctctccatggattcagataacagtatgagcgtgccatctccaacatctgccacaaaaacctctccattgaactccagtggctccagccaggggagaaactcacctgcccccgctgttacagctgcaagcgtgacaaatattcaggctactgaggtcagtgttccccaggtgaactccagcgaatcaagtggtggaacctcatctgaatccatcccacagaccgccacccagcccgcgattagcccacccccaaaaccgaccgtcagccgtgtggtcagcagtaccagattagtcaatccccccccacgatcttcgggcaacgccgcgacgtccggcaatgctgctacaaaaatcccaacacctatagttggagtcaaacggacctcctctccccataaggaagagagccctaagaaaaccaagacggaggaggaacagctcgatactgaaacgtctaccacgcaatcagaaacgattcagactgcggcttctctcctggcctcacaaaaaaccagctctactgatctgtctgatatacccgccctccccgcaaacccaattcccgtaattaagaattcaattaaactgcgtctgaatagatag

SEQ ID NO: 199946 - DNA, 858 bp, synthetic construct
  misc_feature 1..858: note = Description of Artificial Sequence: Synthetic coding sequence
  source 1..858: mol_type = other DNA
atgcccttccccgtgaccacccagggcagccagcagacccagccccctcagaagcattacgggatcacaagtcctatctccctggcggcgccaaaggaaaccgactgcgtactgactcagaagttgatcgagactcttaagccctttggagtctttgaagaggaagaagaactccagaggcgtattttgatccttggtaaactcaataatcttgttaaggaatggattagagaaatatctgaaagtaaaaacctcccccagtccgtcattgagaacgtggggggaaaaatttttaccttcggctcctatcgcttaggggtccatactaagggagcagatattgacgcgctatgcgtggcaccgcgccacgtcgaccgctccgacttctttacttccttttacgataagttaaaactgcaagaggaagtgaaggatctgagggccgttgaggaagccttcgtgcctgtaatcaagttgtgtttcgatggcattgagatcgatattcttttcgctcgacttgccttacagacaatcccagaggatctggaccttagggatgactcactgttaaaaaacttagacatccgatgtatccgatcactgaacggctgcagggttacagatgagatcctgcatttggtgcccaatatcgacaacttccgcctgaccctccgggctatcaagctgtgggctaaaaggcacaacatctatagcaatatcttgggctttctcggcggcgtgtcatgggccatgcttgttgccagaacctgtcagctatacccaaacgcaatcgccagcacccttgttcataagttttttcttgtattttccaaatggtatgtcttcagactgtattag

SEQ ID NO: 199947 - DNA, 1911 bp, synthetic construct
  misc_feature 1..1911: note = Description of Artificial Sequence: Synthetic coding sequence
  source 1..1911: mol_type = other DNA
atgcccttccccgtgaccacccagggccccccccagcccgccccccctccaaatagatatggcgtctcctctcccattagtctcgccgttcctaaggaaaccgactgtctcctgactcagcgtctgatcgagaccttaagacccttcggagtatttgaagaggaggaagagctgcagcggagaatcctggtgcttgagaagcttaacaatctggtgaaggaatggatccgtgagatctcagaatcaaagtctctgccacagtctgtgatagaaaacgttggtgggaagatctttacttttgggtcttatcggctgggtgtgcacaccaagggtgctgatatcgacgccctttgtgttgcgccaagtcacgttgaccgatccgatttctttactagcttttatgcaaaactcaagttgcaggaagaggtcaaggaccttagagctgtggaggaggccttcgtgcctgtgatcaagctgtgttttgatggcattgagatcgacatcctattcgccaggctggccttgcagaccatccccgaagacctcgacctccgagatgattccctgttgaagaatctagatatcagatgtatccgatcactgaatggttgccgcgttacagacgagattctgcacctcgtgcccaatatcgacaatttccggctgaccttacgagcaatcaagctctgggcaaaatgtcacaacatatattccaatatcctcgggtttctggggggggtaagctgggcaatgctggtagcccggacatgccagctctatcccaacgccgtggctagtactctagtcaggaaatttttcctggtgttctcagagtgggagtggccaaatccggtgctgctcaaggagccagaagagagaaatctgaacctacccgtgtgggacccaagagtgaatccgtcggaccgttatcacctcatgcccatcattactcccgcttatccacagcagaactccacttataatgtgtcgatctctacacggatggtgatgattgaggaattcaaacaaggtcttgctattacacatgagatcctcttgtcgaaagccgagtggtcaaagctgttcgaggctcctagctttttccagaagtataagcactacattgtactgttggcaagtgcctctacagagaaacagcatctagagtgggtaggacttgtggagtctaagatacggatcctagtgggctccttggaaaaaaacgaatttataacgctcgcgcacgtaaatcctcagtctttccctgctccaaaggagaatcccgacatggaggaattcaggacaatgtgggtgattgggttgggacttaaaaagccggacaatagcgagatcctctccattgatctcacatatgatatccagtcttttaccgatactgtatacagacaggccgtgaacagtaaaatgtttgagatgggaatgaaaatcacagctatgcatctgcgcaggaaagaactgcatcagctgcttccacaccacgtgttgcaggataagaaggctcactctacagaaggccgccgcttgaccgacctcaatgactctagttttgacctctctgcaggatgtgaaaactccatgagtgtgccatcatccactagcacaatgaaaactggccccctgatttcgtctagccaaggtcggaacagtccggctctagcagtaatgaccgcttcggttgccaatatccaagcgactgaattttctttgcagcaggtgaacactaacgagtcatctggagtggctctaaacgagtcaatcccgcacgcagtgagccagccagccatcagccccagcccaaaggccatggtagcacgtgtggtgagcagcacctgcttgatcagtcaccccgatttgcaggagacccagcagcagacttatctgatcctttag

SEQ ID NO: 199948 - DNA, 1737 bp, synthetic construct
  misc_feature 1..1737: note = Description of Artificial Sequence: Synthetic coding sequence
  source 1..1737: mol_type = other DNA
atggacttcctgctgttccagttcggcctgtgcaccttcaagtacgattacacggatagtaagtacatcactaagagcttcaatttttatgtgtttcctaagcctttcaatcgctcgtccccagacgtgaaatttgtgtgtcagagtagctctattgacttcctggcctcacagggttttgacttcaacaaggtgtttcgtaacggtatcccctacctgaatcaggaggaagagagacaactccgggaacagtacgacgaaaaacgcagccaggccaacggagccggcgctctgagttatgtttcacctaatacaagtaagtgccccgtgacaatccctgaagaccagaaaaagttcattgatcaagttgtcgagaaaattgaagacttactgcaaagcgaagaaaacaaaaatctggatctggagccttgtacaggattccaaaggaagttaatttatcagactctgagctggaaataccccaagggaatccatgtcgaaacactggaaactgagaaaaaggaaagatacattgtcataagcaaagtggatgaagaagagcgtaagaggcgagagcagcaaaaacacgcaaaggagcaggaagagctcaacgacgccgtaggctttagtcgcgtgatacacgcaatcgctaactccggtaaacttgtgataggacataacatgttactggatgttatgcacacggtccaccagttctactgcccactgcccgcagacctgtcagaattcaaggaaatgactacgtgcgtcttccctaggctgctggacaccaaactaatggcttctacccaaccattcaaggacattatcaataatacaagcttggctgaactggaaaagaggctcaaggagacccctttcaatccacccaaggtcgagagcgcggagggatttccttcttatgatacagccagcgagcagctgcatgaggctggctatgatgcatacattaccggactgtgcttcatttcaatggctaactacttgggatctttcctctcaccaccgaaaatccacgtgtccgcgcgaagcaagctgattgaacctttcttcaacaaacttttcctgatgcgggtcatggatattccttacctgaacctggagggtccagatttacaaccaaaacgggaccacgtccttcatgtgactttccctaaagagtggaaaacctctgacctctaccagctgtttagcgcgtttggcaatatacagatatcgtggatcgacgacacctccgcattcgtatccctctctcagccagagcaggttaagatagctgtcaacacatccaagtatgctgagagttaccgcatccagacatatgccgaatacatgggacgcaagcaggaggagaagcagatcaaacggaagtggaccgaggactcatggaaggaggccgacagcaagaggctgaacccccagtgtatcccatatacgttgcagaaccactattatcggaacaattcatttacagcaccatcaaccgttgggaagcgcaacctgagtccaagtcaggaagaagcagggctggaggacggcgtgtctggcgagatcagcgacacggagctggagcagaccgattcctgtgctgaacctctgtctgaaggccgaaagaaagctaagaagctgaagcgcatgaagaaggagttatctcctgcaggcagcatctcaaaaaatagtccagccactctatttgaggtacctgatacttggtag

SEQ ID NO: 199949 - DNA, 1782 bp, synthetic construct
  misc_feature 1..1782: note = Description of Artificial Sequence: Synthetic coding sequence
  source 1..1782: mol_type = other DNA
atggagatcatccggagcaacttcaagagcaacctgcacaaggtgtaccaagcaattgaagaagctgacttctttgctattgacggtgagtttagcggcattagcgacggaccttctgtctcggccctgactaatggatttgatacaccagaggaaagatcatccccagatgtgaaattcgtgtgtcaaagctcatccatcgactttttggccagccagggctttgatttcaacaaagtgtttagaaatggcattccctacctgaatcaggaagaggaacggcaactgcgcgagcaatacgacgagaagaggtcccaggcaaacggggcgggggcactgagctatgtctcccctaataccagcaaatgccccgtcacaatcccggaggatcagaagaaatttatcgaccaggtagtcgaaaaaatcgaagatctgcttcaaagcgaggagaacaaaaacttagatctggaaccctgtacaggtttccaaaggaaattaatatatcagacgttgtcctggaagtaccctaagggcatacatgtggaaaccctggagacggagaaaaaggagcggtatattgtgatctccaaggtggacgaagaggaacgaaagaggagagaacaacagaaacatgcgaaagaacaagaggagctaaatgacgccgtgggcttctctagagttattcacgcgatcgcgaactcagggaaattggtcattggtcacaacatgctcctggatgtcatgcacaccgtgcatcagttctactgcccactgcccgcagacctgtcagagtttaaggagatgactacctgcgtgtttcctcgcctattggatactaagctcatggcatcaacccagccatttaaagacataatcaacaacacatctctggctgagttagagaaacgcctgaaagagacgcctttcaatccccctaaagttgaatccgcggagggctttccatcttacgatactgccagtgagcaacttcacgaggcgggttatgatgcttacatcacgggcttgtgtttcatcagcatggccaattatctgggcagtttcctgagcccgcctaagattcatgtgtcggcccggtctaagcttatcgagccgttcttcaataagctgttcttgatgcgagtcatggacattccatacttaaacctggaagggcccgacctacagcccaagagggatcatgtgctgcatgttaccttcccgaaggaatggaagacctccgatctgtatcagcttttttccgcattcggcaacatccagatctcatggattgatgacacgagcgcctttgtctcacttagccagcccgaacaggtaaagattgccgttaacacttcgaaatacgccgagtcttacagaatccagacctacgctgaatacatgggacgtaaacaagaggaaaagcaaatcaagcgaaagtggaccgaagattcctggaaggaagctgatagcaagaggcttaacccacagtgtataccctacacactgcaaaaccattactaccggaataactcttttactgctcccagcaccgtggggaagcggaatctctccccgtcgcaggaagaggctggcctcgaggacggggtgtccggagagatcagcgatacggagctggagcaaaccgactcatgcgccgaaccgctctctgagggtcggaagaaagctaagaaactaaaacgaatgaaaaaggagctgtcacctgccggcagcattagcaaaaattctcctgccacactgttcgaggtgcctgacacttggtag

SEQ ID NO: 199950 - DNA, 1920 bp, synthetic construct
  misc_feature 1..1920: note = Description of Artificial Sequence: Synthetic coding sequence
  source 1..1920: mol_type = other DNA
atggagatcatccggagcaacttcaagagcaacctgcacaaggtgtaccaggcgattgaggaagccgactttttcgccatcgatggtgagttttctggtattagtgatgggccctctgtgtccgctctgaccaatggctttgatactcccgaggagcggtaccagaagctgaagaaacatagtatggactttctgctgtttcagttcgggctgtgtacctttaagtacgattatacggacagcaagtacataactaagtcatttaacttttatgtgttcccaaaacctttcaatcgcagctcccccgatgttaagttcgtgtgtcagtcatcctctatagacttcctggccagtcagggtttcgacttcaataaagtgtttcgaaacggtatcccctaccttaatcaagaagaggagcggcaactgcgtgagcagtatgacgaaaagcgaagtcaggcgaatggcgccggcgcactgtcttatgttagtcccaataccagcaagtgcccagtcactattcccgaggaccagaaaaaatttatagaccaggtggtagagaagattgaggatttactgcagagtgaggagaacaagaacctggaccttgagccatgtactggattccagaggaaacttatataccagaccctgagctggaaatatcccaagggtatccacgtggaaactctggagactgagaagaaggaacgctacatcgtcatcagcaaggttgacgaggaagagagaaaacggcgggagcaacagaagcatgctaaggaacaagaggagctgaacgacgcggtaggcttctccagggtgattcatgccatagccaatagcggcaaattggtaatcggacacaatatgctgttggacgtgatgcacaccgtacaccaattttactgccctctccctgccgacttgagtgagtttaaggaaatgactacctgtgtcttccctcgtctcctcgacaccaagcttatggcaagcacccagccttttaaagacatcataaataatacctctttagccgagctcgagaaacggctgaaggagactcctttcaacccccctaaagtggagagcgccgaaggatttccaagctatgacaccgccagtgagcagctgcacgaggcgggctacgacgcctacattactggactttgtttcatctccatggccaactacctggggtcgtttctatccccacccaagattcatgtttcagcacgttccaaactgatcgagccttttttcaacaaactgttcctgatgcgggtgatggatattccgtatctgaatctggagggaccagacctacagcccaaaagggaccatgtgctgcacgtgacctttcccaaggaatggaagaccagtgacctatatcagctgttctccgctttcggtaatatccagatcagctggattgacgatacctccgccttcgtctccctatctcagcccgagcaggtgaagattgctgtgaacacatcgaaatacgctgagtcttacagaatacaaacttacgctgaatatatggggagaaagcaggaggagaagcaaataaagcgcaaatggacagaggactcttggaaggaggcggattcgaagaggctcaatccgcagtgcatcccctacaccctgcagaaccattactaccgtaataacagctttacagctccctctacggttggtaagcggaatctgagtccgagccaggaggaggcggggctagaggacggcgtttccggcgaaatcagtgacactgaacttgagcagacggactcatgcgccgagcctctttccgagggacggaaaaaggccaagaaacttaaacggatgaagaaagagctcagtccggcgggatctatctccaagaatagtccagcgaccctgtttgaggtgccagatacatggtag

SEQ ID NO: 199951 - DNA, 624 bp, synthetic construct
  misc_feature 1..624: note = Description of Artificial Sequence: Synthetic coding sequence
  source 1..624: mol_type = other DNA
atggagatcatccggagcaacttcaagagcaacctgcacaaggtgtaccaggcaattgaagaggcagacttttttgcaatagatggagagttcagtggaatttcggacggccccagcgtaagcgccctgactaacggattcgatactcccgaggaaaggtatcagaagctcaaaaagcactcaatggactttctgctgtttcagtttggcctgtgtaccttcaagtacgattacactgattccaaatcatcaccagacgtgaagttcgtttgccagtcctcctcaatcgactttctcgccagccaaggctttgacttcaataaggtgtttcgcaacggaattccatatttgaatcaggaagaggagcgccagctccgggagcagtatgatgagaaacgttctcaggcgaacggcgctggtgcactatcatacgtgagccccaatacttccaagtgtccagtcactattcccgaagaccagaaaaaattcattgaccaggtcgtggaaaaaattgaggatctgttgcagagcgaggagaacaagaacttggatctggagccctgcacaggtttccagaggaagttgatttatcagaccttaagctggaaacgatccgacatatag

SEQ ID NO: 199952 - DNA, 1395 bp, synthetic construct
  misc_feature 1..1395: note = Description of Artificial Sequence: Synthetic coding sequence
  source 1..1395: mol_type = other DNA
atggagatcatccggagcaacttcaagagcaacctgcacaaggtgtaccaggccattgaggaggcagactttttcgccatcgacggggaattctctggaatcagcgacgggccatcagttagtgctctaacaaacgggtttgacacgcccgaggagcggtatcaaaaactgaagaagaaggagcgatacatcgtcatcagcaaagtggacgaagaggaacgaaagaggcgtgaacagcaaaaacacgctaaggaacaagaggaattgaacgacgccgtcgggttctcccgggtcatccacgcaattgctaacagcggtaagttggttattggacataacatgctgctagacgttatgcatactgtgcaccagttctattgtccattgcctgcagatctgtcagaattcaaggagatgactacatgtgtgttcccacggttgctcgacaccaagttgatggcaagcacacagcctttcaaagacatcatcaacaacacatccttggctgaactggagaagcgactgaaagagacacccttcaaccctcctaaggtggagtccgccgaaggcttcccatcttacgacacagcctctgagcagctccacgaggccggatacgatgcttacattaccggtctctgttttatatccatggccaactacctggggagcttcctgtcaccgcctaaaatacacgtgagtgcaagatccaagttgatagagcctttcttcaataagctgtttctgatgcgtgtcatggatataccttatctcaatcttgagggcccagatctgcagcctaaacgggatcatgttctgcacgttacattcccaaaggagtggaagacctctgatctgtaccagctcttctcagcctttggcaacatccaaatcagttggatcgatgacaccagcgcttttgtgtctctgagccagccggagcaggtcaaaattgctgtcaataccagcaaatatgctgaaagttaccgcatccaaacctatgccgagtacatggggcggaaacaggaggagaagcaaataaaaagaaagtggaccgaagactcctggaaagaagccgactctaagcgcctgaacccccagtgcatcccttacacactgcagaaccactattatagaaacaatagttttactgctccaagtacagtaggcaaaagaaatctatccccaagccaggaagaggccggcctagaggatggggtctccggcgaaatttctgacaccgaactggaacagacggattcctgtgccgagcccttatccgaaggacgcaagaaagctaagaaattaaagcggatgaaaaaagagctatctccagctggtagcatctccaagaatagtcccgcaactctgtttgaggtgcccgacacctggtag

SEQ ID NO: 199953 - DNA, 1071 bp, synthetic construct
  misc_feature 1..1071: note = Description of Artificial Sequence: Synthetic coding sequence
  source 1..1071: mol_type = other DNA
atggacgccggcgtgaccgagagcggcctgaacgtgaccctgaccatccggctcctcatgcatggaaaagaggtagggagtattataggtaagaagggagagagtgtcaagcgcataagggaagagtccggcgcgcgcatcaacatttccgagggcaattgtcctgaacgaataataacgctcacgggccccactaatgccatcttcaaggcctttgccatgattatcgacaagcttgaggaggatattaactcttcaatgaccaattcaaccgcagccagtaggcctcctgtgacattgagactcgtcgtcccagccactcagtgcggcagtttaattgggaaggggggatgtaaaatcaaggaaattcgcgaatccacaggtgcccaggtccaggttgcaggagacatgttgccgaactctacagagagagccatcactatagctggagtcccccagtcagtaactgagtgcgttaagcagatatgcttggtgatgctagaaaccctgagtcagagccctcaggggagggtaatgaccatcccctatcaacccatgccagcgtcttcccccgtgatatgcgcaggcggacaggataggtgtagcgacgccgcgggatatccgcacgctacccatgacctcgaaggacccccccttgacgcctacagcatccaaggccaacacacaatttcacctttggacctagcaaagctcaatcaggtggccagacaacaatcgcatttcgcaatgatgcatggggggacaggcttcgcagggatagattcgagcagccccgaggtcaagggttactgggcctcactggacgcctcgacgcaaacaacacacgagctgaccatcccaaacaacttaataggttgtattatcggacggcagggggctaatatcaatgagatcaggcagatgagcggcgcgcaaataaagatagccaaccccgtcgagggtagcagtgggcgacaggtgacaattaccgggtctgccgccagcattagcttggcccagtatctgataaatgcacggctgtcctctgaaaagggcatgggatgcagttag

SEQ ID NO: 199954 - DNA, 957 bp, synthetic construct
  misc_feature 1..957: note = Description of Artificial Sequence: Synthetic coding sequence
  source 1..957: mol_type = other DNA
atggacaccggcgtgatcgagggcggcctgaacgtgaccctgaccattcggttgctgatgcacggcaaggaggtgggctctataatcggaaaaaagggtgagtccgtcaaaaaaatgagagaagaatccggcgcccgcattaacatcagcgaaggcaactgccctgagcggatcatcacccttgctggaccgaccaatgccatctttaaggctttcgctatgattatcgacaaactggaggaggacatctcttcaagtatgaccaacagcactgccgcctcccgtccccctgtaaccttgcgcttggtggtccctgccagccagtgcggatccctgattggaaaaggtggctgcaaaatcaaggagatccgggagagcacaggcgcccaggtgcaggtcgcaggggacatgttgccaaactccacggaaagggccatcacaattgcaggaattccacaatccataatcgagtgcgtcaaacagatctgtgtggtgatgcttgagagcccccccaaaggagtgacgattccctacagacctaaaccttcttcaagcccagttatctttgccgggggccaggcatacacgatccagggccaatacgctatccctcagcccgatctaaccaagctccaccaattggccatgcaacagtcacactttccaatgactcacgggaacacaggcttctcggcaggcctcgacgctagcgcacaaaccacgagtcacgagctgactattcccaacgatctaatcggatgtattatcggccgccagggtgcgaaaattaacgaaattcgtcagatgtctggcgcccaaataaaaattgccaaccccgtcgaggggagcacagacagacaggtgacaatcacaggatcggcagccagcatttcactcgcccaatatctgattaacgtcagactgtccagcgaaacaggaggcatggggagcagttag

SEQ ID NO: 199955 - DNA, 1098 bp, synthetic construct
  misc_feature 1..1098: note = Description of Artificial Sequence: Synthetic coding sequence
  source 1..1098: mol_type = other DNA
atggacaccggcgtgatcgagggcggcctgaacgtgaccctgaccattagactcctcatgcacgggaaagaagtgggcagcatcattgggaaaaagggggagagtgttaaaaagatgcgggaagaatccggcgctcgcattaacataagcgaaggaaactgcccagagaggatcatcacgctggctggtcctaccaacgcaatctttaaggcattcgctatgatcattgataagctggaggaggatatatccagcagcatgactaactccaccgctgcttctcgaccgcccgtgacattacggcttgttgtgcctgcgtcacagtgcggttccttgattggcaaaggcggctgtaagattaaggagatccgcgaatctaccggtgcgcaagtgcaggttgcaggcgacatgctgccaaattcaactgaacgggcaatcaccattgccgggattccacagtcaatcatcgaatgtgtaaagcaaatttgcgtggtgatgttggagactctctctcaatctccccctaagggcgtgaccattccatacaggccgaagccctcgtcatccccggtgatcttcgccggcggccaggacaggtacagtaccggctcagacagtgcgtctttcccccatactacaccttcaatgtgtcttaacccagatttggagggaccccctctcgaagcgtataccattcagggccagtacgccatcccacaacctgatctgacaaaacttcatcagctggccatgcagcagtcccactttccaatgacccacggtaacacggggttctctggaatcgagtcaagctctccggaggtcaaaggctactgggggttggacgcttctgcccagaccacttcacatgagctcaccatcccaaatgatctgatcggctgcatcatcggaaggcaaggcgccaaaattaacgaaatccggcagatgtcgggggcccaaatcaagatcgcaaatccggttgaggggagtacagacaggcaggtcaccatcacaggttcagctgccagtatttcgttagctcaatacctgattaacgtgcgcctgtctagtgagacaggtggcatggggagttcatag

SEQ ID NO: 199956 - DNA, 1008 bp, synthetic construct
  misc_feature 1..1008: note = Description of Artificial Sequence: Synthetic coding sequence
  source 1..1008: mol_type = other DNA
atggacaccggcgtgatcgagggcggcctgaacgtgaccctgaccatacggctcctcatgcatggcaaagaggtaggttctattatcggcaagaagggtgagagcgtgaagaagatgcgcgaggagtcaggtgccaggattaacatcagcgaaggaaattgccccgagcgcataattacgcttgccgggccaactaacgctatttttaaagcttttgcgatgatcatcgacaaactcgaggaggacattagttctagtatgaccaactctactgcagctagtcgcccaccggttaccctaaggctggtcgtgccagcaagccagtgcggctcactaatcggaaagggcggctgtaaaatcaaagagattcgggagtcaacaggcgctcaggtgcaggttgcgggcgatatgcttccgaatagtaccgaaagggctattacgatcgcaggtattccgcaaagcattattgaatgtgtgaaacaaatctgtgtcgtcatgctcgagaccctatcccagtccccaccgaagggggtgaccatcccttaccgcccgaagccctctagttcaccggtgatcttcgccgggggccaagcttacactattcagggccagtacgcaatcccccagccagatctgacaaagctgcaccagctagcgatgcagcaatcccatttccccatgacccacggaaacaccgggttttctgggatagagtcctcttctcccgaggttaaagggtactgggccggccttgatgcaagcgctcaaaccaccagccacgaactgacgatcccaaacgacctcattgggtgcataatcggtcgccagggggcgaagattaatgagatccgccaaatgtcaggggcccagattaagattgcgaaccccgtggaagggagcaccgacagacaggtaactattaccggttcagccgcctcaatttccttagcgcaatacctgattaatgtgcggcttagcagcgagacaggaggaatggggtcctcgtag

SEQ ID NO: 199957 - DNA, 906 bp, synthetic construct
  misc_feature 1..906: note = Description of Artificial Sequence: Synthetic coding sequence
  source 1..906: mol_type = other DNA
atggacaccggcgtgatcgagggcggcctgaacgtgaccctgaccatccgactgttgatgcacgggaaggaagtgggcagtattatagggaagaagggcgagagcgttaaaaaaatgagggaagagagcggggcaaggattaatatcagcgaaggcaactgcccagaaagaatcatcaccctggccggacccaccaatgctatcttcaaggctttcgcaatgatcattgataaacttgaagaggacatctcttcatcgatgaccaattcaaccgccgcctcaagaccccccgtgaccctgcgcctagtagtccccgcatcacagtgtggatccctcattggaaaaggtggctgcaaaataaaagagatccgcgaatctactggagctcaggtgcaagtggccggcgatatgctacccaactctactgagagagccattactatcgccggaatcccacagagcatcattgagtgcgtcaaacagatctgcgtggtgatgctagaaagcccccctaagggagtgacaattccctaccgcccgaagccttcctcctcacccgttattttcgccggtgggcaggaccggtactcaaccgggagcgatagcgccagtttcccgcataccactccatccatgtgtcttaaccccgaccttgaaggaccaccacttgaagcgtacaccattcaagggcagtacgccataccccagcctgatctgaccaagctccaccagttagcaatgcaacaatcacatttccccatgactcacggtaatactggcttcagcggtatggacaccagcgttttcatctccgtccggtgtagcgctcgcgagcgtcctgttcctcgctcacagctcgatatttgtctgaagcagacgagcctgtcctctatccttctcgtttag

SEQ ID NO: 199958 - DNA, 1089 bp, synthetic construct
  misc_feature 1..1089: note = Description of Artificial Sequence: Synthetic coding sequence
  source 1..1089: mol_type = other DNA
atggacaccggcgtgatcgagggcggcctgaacgtgaccctgaccatacggctgctcatgcacggcaaagaggttggctccatcattggcaaaaaaggagagtccgtgaaaaagatgcgcgaagagagcggggcccgcatcaacatctctgagggcaactgcccggaacgcattattactctggctggaccaaccaacgctatctttaaagccttcgctatgataatcgataagctggaggaggacatctctagttccatgacgaactctaccgccgcttcccgaccacccgtgactctgaggctggtagtccccgcctctcaatgtggatctttgattgggaagggcggctgcaagataaaggagattcgagaatcaaccggcgcacaggttcaggtggcaggggatatgctcccaaatagcactgaacgcgccattactattgccggaattccccagagtatcattgaatgtgtgaaacagatatgtgtcgtgatgctggagtccccccctaagggggtgaccattccatacagaccaaagcccagttcctcacccgtgatcttcgctggaggccaggacaggtatagtactgggagcgacagtgcttccttcccccatacgacaccaagcatgtgcctgaatcctgatctggaaggtcctcctctggaggcatatacaattcaagggcaatacgcgatacctcagcctgacctaacaaagcttcaccagcttgccatgcagcagtctcactttcctatgacccatggcaacaccggattctccggaattgagtcctcatctccagaggttaaggggtattgggctggcctcgacgcgagtgctcagactactagccacgagctaaccattccgaatgatcttattgggtgtatcatcggccgccagggagcaaagatcaatgagattcggcagatgagtggagcacagataaagatcgccaaccccgtagaaggatctacggacaggcaggtcactatcaccgggtccgcagcatccatctccttggcccagtatctgatcaatgttcgcctgagcagcgaaacaggcggtatgggcagcagctag

SEQ ID NO: 199959 - DNA, 996 bp, synthetic construct
  misc_feature 1..996: note = Description of Artificial Sequence: Synthetic coding sequence
  source 1..996: mol_type = other DNA
atggacaccggcgtgatcgagggcggcctgaacgtgaccctgaccataagattgctaatgcatggcaaggaggtaggctccataatcggaaagaaaggtgaaagtgtgaaaaaaatgagggaggaatccggcgctagaatcaacatctccgagggcaactgccctgaaaggattattaccttggccggcccaaccaatgcaatctttaaggccttcgcaatgatcatcgataaactggaggaggatattagctctagcatgacgaacagcactgccgcttctcgccctccggtgaccctcagacttgtagttccagcttcacagtgcggctctctgattggaaaggggggctgcaaaatcaaagaaatccgtgagagcactggtgctcaagtgcaggtggccggagatatgttgccgaacagcaccgagcgagccattactatagctggcattccacaatcgatcattgaatgcgtcaaacaaatttgcgtggtgatgctggagtccccccccaaaggtgtcacaataccctatcggcccaagccgtcaagtagcccagtcattttcgcgggcggccaggcttacactattcaaggccagtatgcaattcctcagcccgacctcaccaagctccaccagctggctatgcagcagtcgcatttccctatgacccacggaaatacgggctttagcgggatcgagtcttcctctcccgaagtaaaaggatactgggcgggcctggacgctagtgctcagactacatcccacgagctgacaattcccaatgacttgataggctgtataattgggaggcagggcgcaaaaataaacgaaataaggcagatgtcaggtgcgcagatcaaaattgcgaatcccgtggagggcagcactgaccgccaggtgactatcacaggctctgctgcaagtattagcctcgcccaatatctgatcaatgtgcggctgagttcggaaacagggggcatgggttcctcgtag

SEQ ID NO: 199960 - DNA, 1101 bp, synthetic construct
  misc_feature 1..1101: note = Description of Artificial Sequence: Synthetic coding sequence
  source 1..1101: mol_type = other DNA
atggacaccggcgtgatcgagggcggcctgaacgtgaccctgaccatccggctcctcatgcacggcaaggaggttggctctattataggcaaaaagggggaatcagtgaaaaagatgcgagaggagtcgggagctaggatcaacatcagcgagggcaattgcccagaaaggatcatcacattagccggtccaaccaatgcaatcttcaaggctttcgctatgatcattgacaagctagaggaagacatctcttcctccatgacaaacagtaccgctgcatctcgcccccccgtgaccttgcgcctagtcgtgcccgcttcccagtgcggaagccttatcggcaaggggggctgtaaaatcaaagaaattcgtgagagcaccggtgcgcaggtccaggttgccggcgatatgctgccgaactccactgagagagcaattaccatcgccggtatcccccagtccattatcgagtgcgtaaaacaaatctgtgtggtgatgcttgaaacattgtcccagtccccaccaaaaggtgtcacgatcccctacagacccaaaccatcatctagcccagttatcttcgcaggggggcaggacagatatagcacaggatcagactcagcgagcttcccacacaccaccccttctatgtgtctgaaccctgatttggagggtcccccgctggaggcatacaccatccagggacagtacgcaattcctcaaccagacctcaccaagcttcaccagctggccatgcagcagtcccatttccccatgactcacggcaacacaggattctccggcattgaatcatcctcacccgaagtgaaaggctattgggcagggttggacgcttctgcgcagacaaccagccacgagctaacaatacccaatgacctcatcggctgtatcatcgggcgacagggcgccaagatcaacgaaatccgccagatgagtggggctcagattaaaatcgctaaccccgttgagggaagcactgatcgtcaggtaacaataactggctccgccgctagtatctctctcgcacagtatctgatcaacgtgaggttatcttctgagactggcggcatgggatcctcctag

SEQ ID NO: 199961 - DNA, 1086 bp, synthetic construct
  misc_feature 1..1086: note = Description of Artificial Sequence: Synthetic coding sequence
  source 1..1086: mol_type = other DNA
atggacaccggcgtgatcgagggcggcctgaacgtgaccctgaccattcgtttgctgatgcacggaaaagaggtggggtccatcattggaaaaaaaggcgaatcagtgaaaaaaatgcgggaagagtccggggcccggattaatatttctgaagggaactgccccgaacggataattacactggcggggcccactaatgctattttcaaggctttcgctatgatcattgacaagctcgaagaggacatctctagctcaatgacaaacagcaccgcagccagccgtccccccgttacactgagactggttgtgcctgcatcccaatgcggatccctcatcggcaagggaggatgtaagattaaagaaattcgcgagtctaccggcgcacaggtgcaggtcgccggcgatatgttgccaaattcaacggaacgggccataactattgcgggaataccgcagtcaatcattgagtgtgttaagcagatatgcgttgttatgctggagtctccaccgaaaggggtcaccatcccgtatagacccaaaccctcgtctagtccagttatcttcgccgggggtcaggatcgatattcaactggcagcgacagtgctagtttcccgcacaccactccaagcatgtgtcttaacccagatctcgagggaccccccctagaggcctacacaattcaaggtcagtatgccatcccccaacccgacttgaccaagctccaccaattagctatgcagcagtcgcactttcctatgactcacggaaataccggcttctcgggcatcgagagcagctccccggaggtgaagggctattggggtctagatgcgtctgcgcagacaacgagccatgagctaaccattcccaacgacctgattggatgtattatcggcaggcaaggagccaagatcaacgaaatacgccaaatgtccggcgctcagatcaaaatcgccaatcccgtagagggatcaaccgaccggcaagtgaccattaccgggtcagctgctagtattagcctcgctcagtacttaataaatgtgagactgtccagtgagactggcggaatgggtagcagctag

SEQ ID NO: 199962 - DNA, 1056 bp, synthetic construct
  misc_feature 1..1056: note = Description of Artificial Sequence: Synthetic coding sequence
  source 1..1056: mol_type = other DNA
ctgagccccggcgacgccttctgggcccccagcgtgctgccccactctactctctcaacgctgagtcatcacccccagcctcagtttggtcgccgcatggagtcgaaagtttcggagggcggactgaacgtgacgttgaccattcgactgcttatgcacggtaaggtcagaggagcagctatagtttccaaaggagagacagtcaagaaaatgcgggaggaatcaggcgcccgcatcaatatcagtgaggggaattgtcctgagcggatagtgactatcacaggacccactgatgccattttcaaggcatttgccatgatcgcttacaaatttgaagaagacatcattaactcgatgtccaacagcccagccacgagtaaaccccccgtaaccctcaggctagtggtgcctgcttcacagtgcgggagcctgatcggaaagggagggagtaaaattaaggagattagggagagtactggggcacaagtgcaggtggccggagacatgctgcccaattcgaccgaaagagctgttaccatcagcgggactcccgatgcaatcattcaatgtgtcaaacagatatgcgtggtgatgctggagtctccgccgaagggcgccaccattccctaccgacccaaacccgcctctacccctgtgatctttgcgggggggcaggcctacactattcaggggcagtatgccataccacaccccgaccagctgacaaagcttcaccagctggctatgcagcaaactccttttcccccactgggacagacaaatcctgcttttcccggattggacgcctccccacctgcctccactcacgagttaaccatccctaacgacctgatagggtgcatcatcggccgccagggaaccaaaatcaatgagatccgccaaatgagtggtgcccagatcaagattgcgaatgctacagaaggcagttccgaaagacagatcaccatcaccgggacaccagccaacatctcactggctcagtacctgattaacgctcgcttgacaagcgaggtaaccggcatggggacactctag

SEQ ID NO: 199963 - DNA, 969 bp, synthetic construct
  misc_feature 1..969: note = Description of Artificial Sequence: Synthetic coding sequence
  source 1..969: mol_type = other DNA
ccccagccccagttcggccggcggatggagagcaaggtgagcgagggcgggttgaacgtgacccttactatccgattattaatgcacggaaaggaggttggttcaatcatcggtaagaagggcgagaccgtgaaaaagatgagggaagagagtggagcgcgaattaatatttctgaagggaattgtcctgaacgaattgtgacgatcaccggtccaacagatgccattttcaaggcctttgcgatgatcgcctataagttcgaggaggacattataaacagcatgtctaattcacccgcgacatccaagcctcccgtgacactgcgcctggtcgtgccagcatctcaatgcgggtctttgatcggcaaaggaggttctaagattaaggagatcagggaatctactggggcacaggtgcaggtagcgggggacatgctgccaaactccacagagagggccgtgaccatcagcggcacgcccgatgcaatcattcaatgcgtgaaacagatctgtgttgttatgctcgaagcttacactattcagggacagtacgccatccctcaccccgaccagctgaccaagttgcaccagctggccatgcagcaaaccccctttcctccgctgggccaaaccaaccccgcgtttcccggggagaaactcccccttcattccagcgaagaagcacagaacttaatgggtcaatcgagcggattggatgcgtcccctcccgctagtacacacgaactgactatccccaatgacttgattgggtgcatcattggcaggcaggggacgaaaatcaacgagattaggcagatgagtggcgctcagatcaagatcgcaaacgccactgaaggaagcagcgaacggcagatcaccataacaggcactccggcaaacatctctctggcccagtacctaataaatgctagacttacaagtgaggtgactggcatggggaccctgtag

SEQ ID NO: 199964 - DNA, 1038 bp, synthetic construct
  misc_feature 1..1038: note = Description of Artificial Sequence: Synthetic coding sequence
  source 1..1038: mol_type = other DNA
atgggcgagggcgacgccttctgggcccccagcgtgctgccccacagtaccctatccacactgagtcaccacccacagcctcaattcggacggaggatggaatcaaaggttagcgaagggggactaaatgttaccctgacaattagactactgatgcatggcaaagaggtaggaagtattatcggtaagaaaggagagactgtgaaaaagatgagggaggagtcaggggctcgcatcaacatttctgaaggtaattgcccagagcgcattgttaccataaccggccctacagacgctatattcaaagctttcgccatgatcgcatataaatttgaggaagatattatcaactcgatgtcaaactcccccgctacgtctaaaccacccgtgacactgagactcgtggttccagcttcccaatgcggttcactgattggtaaaggtgggtcaaaaatcaaagaaattcgtgagtcaacaggggctcaagtacaggtagccggggatatgctcccaaatagcaccgagagggccgtgactatttccggtacacccgatgcgattatccagtgcgtcaagcaaatttgtgtggtaatgcttgaagcctatacaatccagggacaatatgccattccgcatcctgatttgactaagctccaccagctggccatgcagcagacgccttttccgcctctggggcaaacaaatcctgcgtttcctggcgagaaactacccctacactcgtcagaggaggctcagaaccttatgggtcagtcatctggccttgacgccagcccacccgcctctacacatgaactcaccatccccaatgatctgatcgggtgtatcattgggcgacaagggacaaagataaacgaaatcagacagatgtctggggcacagattaaaattgccaacgccaccgaggggagttccgaaaggcagatcacgataacaggcacaccagccaacatctccctggcccagtacttaatcaatgccagactgaccagcgaggtgacagggatgggtacactctag

SEQ ID NO: 199965 - DNA, 1113 bp, synthetic construct
  misc_feature 1..1113: note = Description of Artificial Sequence: Synthetic coding sequence
  source 1..1113: mol_type = other DNA
atgggcgagggcgacgccttctgggcccccagcgtgctgccccacagtactctcagtaccctgtcccaccacccccagccgcagtttggacgaaggatggagtcaaaagtaagcgagggcggactcaacgtcacgctgacaattcgactgctcatgcatggcaaagaagtcggttccataatcggcaaaaaaggcgaaaccgtgaaaaaaatgagagaggaatccggcgccagaattaacatcagcgagggcaattgcccagagcgaatcgttactataactggcccaactgacgccatattcaaagctttcgccatgatcgcctacaaatttgaagaagacattatcaactcgatgagcaattctcccgcaacctctaaaccaccagtcaccctgcggctcgtggtgccggcctcacaatgcggcagccttattggcaagggaggaagtaagatcaaggagattcgggaaagcaccggcgcacaggtccaggtcgctggagacatgctgcccaacagcaccgagagggctgttacaattagtggcactcccgatgcaatcattcaatgcgtaaaacaaatctgcgtggttatgctggagagtccccctaagggggccaccattccgtataggccgaagccggcaagtactccagtaatttttgccggcgggcaggcttatacaatccagggccaatatgccatcccgcaccccgacctgaccaagctgcaccaactggccatgcagcagacgccatttccccccctgggccaaactaatccggcattccctggcgagaaattgcctctgcacagctctgaggaggcccagaatttgatgggtcagtcatctggactggatgcatctcctccagcctctacacatgaactcactatacccaatgacctcataggatgtataatagggaggcaggggacaaagatcaatgaaatccgccagatgtcaggggcgcagattaaaattgcaaatgcaaccgaaggttccagcgagcgccaaatcacgatcactggcacacctgctaatatcagtctcgcacaatacctaattaacgctcggctaactagtgaggttaccgggatgggcaccctgtag

SEQ ID NO: 199966 - DNA, 1056 bp, synthetic construct
  misc_feature 1..1056: note = Description of Artificial Sequence: Synthetic coding sequence
  source 1..1056: mol_type = other DNA
atgggcgagggcgacgccttctgggcccccagcgtgctgccccactccacactctctaccctgagccatcaccctcagccccagttcggacgtagaatggagagcaaggtgagcgaaggcggcctcaacgtcaccctgacgattcgtttgttgatgcatgggaaggaagtgggctccatcatcggtaaaaaaggcgaaaccgtcaagaaaatgcgcgaagagtctggcgctcgtattaacatttctgaagggaattgtccggagagaatcgtgacaataactgggccaactgacgcgatcttcaaagcatttgctatgatcgcatacaagttcgaggaggacatcattaactccatgtccaattcccccgctacgtcaaagccgcctgtcactctccgtttggtggtccccgcaagtcaatgtggcagcttgatcgggaagggaggttcaaaaatcaaggaaattagagaaagcactggcgcccaggtccaggtggctggtgatatgctgccgaatagtacagagagagccgtcaccatctccggcacccctgacgccataatccaatgtgtcaaacagatctgcgtcgtgatgctggagagtccccccaaaggggccaccatcccttatagacctaaaccagcctccactcctgttatattcgcaggtggccaggcctatacgatacaggggcagtatgctatccctcaccctgaccagctgactaaactgcaccagctcgcaatgcagcagactccatttccgcctctggggcagaccaatccggctttccccgggctggacgccagcccacctgcctcgacccacgaactgacgataccaaatgatctgatagggtgtatcataggccgccaagggaccaaaatcaatgaaattcgtcagatgagtggcgcacagattaaaatagccaacgccactgagggcagctccgaacggcagattactattaccggaactcccgctaacatatctcttgctcagtaccttattaacgctcggttaactagtgaagtgacgggaatggggactctatag

SEQ ID NO: 199967 - DNA, 1116 bp, synthetic construct
  misc_feature 1..1116: note = Description of Artificial Sequence: Synthetic coding sequence
  source 1..1116: mol_type = other DNA
atgggcgagggcgacgccttctgggcccccagcgtgctgccccactccactctctctaccttgtcgcaccatccccaaccccaattcgggcgccggatggagtccaaagtcagtgaaggaggcctgaatgttacgctgacaattagattactaatgcacggcaaagaggtgggctcaattattggcaagaaaggggaaacagtgaaaaagatgcgcgaggagtctggcgcaagaatcaacatctccgaggggaactgccccgagaggatcgtcacaatcaccggacccacagatgccatcttcaaggccttcgctatgatcgcctacaaatttgaggaagacattatcaacagtatgtccaacagcccagctacaagcaagccacctgtcacactgaggctcgtagtacctgcctcacagtgtggctcccttatcggcaaggggggctctaaaatcaaagaaattagggagtcaacaggggcgcaggtgcaggtcgcgggtgacatgcttcccaacagcaccgaaagagctgtgacaatctcaggcactccagatgcgatcatccagtgcgtgaaacaaatttgcgtcgtgatgctcgaatcaccccccaagggcgccacaatcccttacagacccaagcccgccagcactccggtgatcttcgctggggggcaggcctatacaatccaaggccagtatgctatcccccaccctgatcagctgactaaattacaccagcttgccatgcagcagacaccattcccccctctcggtcagacaaatccagctttccccggggaaaaactacccttgcacagtagcgaggaggcccaaaacttgatggggcagtcttcagggttagatgcatctccaccggcgagtacccatgaacttacaattccaaacgacttaataggttgcataatcgggaggcagggcacaaagattaatgagatacggcagatgtccggagcccagattaaaatcgctaacgccacggaaggatcaagcgaacgccagattacaatcacagggactcctgccaatatcagccttgcgcagtacctgattaatgcccggctaacgtctgaggtcacagggatgggtaccctctag

SEQ ID NO: 199968 - DNA, 1116 bp, synthetic construct
  misc_feature 1..1116: note = Description of Artificial Sequence: Synthetic coding sequence
  source 1..1116: mol_type = other DNA
atgggcgagggcgacgccttctgggcccccagcgtgctgccccactccactttaagcacactctcccaccatccccaacctcaattcggccgacgaatggagagcaaggttagcgagggcgggctaaatgtgacactgacaatcagactcctgatgcacggaaaggaggtgggaagcattatcggaaaaaaaggggagaccgttaaaaagatgagggaggagtccggcgcacgaatcaatatttccgagggcaactgtcccgagagaatcgtgaccatcactggtcccaccgatgctatcttcaaagcatttgctatgatcgcttataagtttgaagaagatataatcaacagtatgtctaatagccctgccacaagcaagccgcctgtcacactacggttagtggttccagcctctcagtgcgggagcctgataggcaaaggcggatcaaagattaaagagatccgcgagtccaccggggctcaggttcaggtcgctggcgatatgttaccaaatagtaccgaacgtgctgtgacaataagcggcaccccggacgcgatcattcagtgcgtgaaacagatctgtgttgtgatgttagagtccccgcctaagggagcaaccatcccataccggccaaaaccagcctccacccccgtcattttcgcgggtgggcaagcttacacaatacaggggcagtacgcgatcccacaccccgatcagctcactaagcttcatcagctggccatgcagcagaccccattccccccattgggacagaccaaccccgccttccccggggagaaattgccactccatagtagcgaggaagcccagaacttgatgggccagtcttccggacttgacgcaagcccaccggcatccacgcatgaactgaccattcccaacgatctgatcggatgcatcattggtaggcaaggcaccaaaattaatgagatccggcaaatgtccggcgcccagatcaagattgctaatgccacggaaggttcttcagaacggcagatcactatcaccgggactcccgccaacatctcactggcacagtatttgattaatgccaggttgacatctgaggtcacaggaatgggcaccctgtag

SEQ ID NO: 199969 - DNA, 18 bp, synthetic construct
  misc_feature 1..18: note = Description of Artificial Sequence: Synthetic coding sequence
  source 1..18: mol_type = other DNA
atggagagcaaggtgtag

SEQ ID NO: 199970 - DNA, 5070 bp, synthetic construct
  misc_feature 1..5070: note = Description of Artificial Sequence: Synthetic coding sequence
  source 1..5070: mol_type = other DNA
atgggcagcaagcggcggcgggccaccagccccagcagcagcgtgtcgggcgatttcgacgacgggcatcacagcgtatctacccccggcccctcccgcaagcggagacgactgtctaatttgcctactgtggatcccatcgctgtttgccacgaactgtacaataccatccgcgattacaaggacgagcagggacggctcctgtgcgagctcttcatccgcgctccaaagaggcgcaatcagcccgattactatgaggtcgtgtcacagccaattgacctgatgaaaattcaacagaagctgaagatggaagagtacgatgatgttaatctgctgacggccgattttcagctcctgtttaacaacgcgaagagttattataagcctgattcccctgaatacaaagccgcctgcaaactttgggacctctatcttaggacacgcaatgaattcgttcagaagggagaagcagacgacgaggacgatgacgaagacggacaggacaaccagggaactgtcaccgaaggatcttcaccagcttatttgaaggaaatcctggagcagctgctggaagcaatagtcgtagcgacaaacccgtctggaaggctcattagcgagctcttccagaagctaccaagcaaagtccagtaccccgactactacgcgataattaaagaaccaatcgatttgaaaacaattgcacaacgcattcaaaacggatcttataaatctatccacgctatggccaaagacatcgaccttctcgctaaaaacgccaaaacatataatgagccaggttcacaggtctttaaagacgctaatagcattaaaaagatcttctatatgaaaaaagccgagatcgagcatcacgaaatggccaagagttcactgagaatgcgtacaccctctaacctggccgctgcaagacttaccggtccttctcactcaaagggatcgctgggtgaagagcgcaatcctactagcaagtactaccgcaacaaaagagctgtacagggagggcgcctatctgcgatcacgatggccctgcagtatggctctgagagcgaggaggacgcagcattggcagccgcccgttatgaggagggagaatccgaagctgagtcaataacgagctttatggacgtcagcaatcctttctaccaactttacgacaccgttagatcatgccgaaacaatcagggccagttaattgcagagccattttatcacctgccgtctaaaaagaagtaccctgattattatcaacagataaagatgcccatctcactccagcagatccgcactaagctaaagaaccaagagtacgaaacattggatcacctcgaatgtgatctgaatctgatgttcgagaatgcaaagagatataatgttccaaactccgccatttataaaagggtgcttaagctccaacaagtgatgcaggcaaaaaaaaaggagctggcccgtcgggatgacatcgaggacggcgattcaatgatctctagtgctacatctgacactggcagtgccaagagaaaatccaagaagaacatcagaaagcagagaatgaagatcctttttaatgtggtgctcgaagcacgtgaaccagggtctggcaggcgactctgcgatctgttcatggtcaagcccagtaagaaagattaccctgattactataagatcattctggagcctatggatcttaaaattattgaacataacattcgcaatgataaatacgccggagaggagggaatgatcgaggatatgaagcttatgttccgcaatgcccgtcactataatgaagaaggctcacaagtgtataacgatgcccacatcctggagaagctccttaaggagaaacgcaaggagcttggcccgctgcccgatgatgacgatatggcctctccgaaactaaaactcagtcggaagagcggcatctcccccaagaaatccaaatacatgacgcccatgcaacagaaactgaacgaggtgtacgaagctgtgaagaattacaccgataaacgcgggcgaaggctgagtgccatattcttacggctcccgtcgagaagcgaattacctgactattatctgaccatcaaaaagccgatggacatggaaaagatccgttctcacatgatggcaaacaagtaccaggacattgactcgatggttgaggactttgtgatgatgttcaacaacgcgtgtacatacaatgagcctgaatctttaatttacaaggatgcactggtcttgcataaagtattactggaaacaaggcgtgacttagaaggagatgaggattcacacgtgcctaacgtgacactcttgatccaggagctgatccacaaccttttcgtgtctgtgatgtctcatcaggatgacgaaggacggtgctactccgacagcctcgccgaaatccccgcagtagatcctaacttccccaacaagcccccattaaccttcgacataatcaggaaaaatgtcgagaataatcgctatcgaagactcgatttattccaggaacacatgtttgaggtgctagagcgggcaagacggatgaataggacagacagcgaaatatatgaggatgccgttgaacttcagcagttttttatcaaaattagggacgaactctgcaaaaacggagagatccttctaagtcccgccctgtcttatacaaccaaacacctccacaatgacgtagaaaaggagcggaaggagaaactccccaaagagattgaggaagacaagcttaagcgggaggaggaaaaacgggaagccgagaagtctgaggattcaagcggggcagccggactcagcgggctgcaccgaacctactcgcaagattgcagctttaaaaacagcatgtatcatgttggggactacgtctacgtggagcccgcggaagcaaatctccagccacacatcgtgtgcatcgagcggttatgggaagacagtgccggagagaagtggctgtacggatgttggttttaccgaccaaacgagaccttccacctggcaactcggaaatttttagagaaggaagtgtttaaaagcgattactataataaggtgcccgtctccaagatccttggaaagtgcgtggtgatgtttgtgaaggaatattttaagctgtgccccgagaatttccgagacgaggatgtcttcgtttgtgagtcaaggtattctgctaaaaccaagtcattcaaaaaaattaagctatggacaatgcctattagctctgtgcggtttgtgccacgggacgttccactaccggttgttagagtcgcctctgtgtttgccaatgccgataagggagacgatgaaaagaatacggacaattcagaagattcccgtgcggaggacaattttaatctcgaaaaagagaaggaggatgtgcccgtcgagatgtctaacggagagccaggctgtcattattttgagcaactccactacaacgatatgtggttaaaagtgggcgactgcgtgtttatcaagtctcatgggctggtgcgcccccgcgtgggccgaattgagaaggtttgggtcagagacggagcagcctacttttatggcccgatttttatccatcctgaggagaccgaacatgaaccaacaaagatgttctacaaaaaagaggttttcctgagtaatcttgaggaaacctgccctatgacatgtatcctgggtaaatgtgccgtactgtcgttcaaagactttctctcctgtcggccaacagaaattcccgaaaacgatatcctactgtgtgaaagtcgttataatgaatccgataagcaaatgaagaagttcaagggactgaaaaggttctccctgtctgccaaggtcgtggacgacgaaatctattactttagaaagcctatcgttccgcagaaggaaccgtcccccctcctggagaagaaaatccaactcctggaggccaaattcgcagaactggagggaggagatgatgacatcgaggagatgggcgaagaggacagcgaggttattgaacctccctctctgcctcagctccagacaccattagcgtccgaactggatcttatgccctacacgccgccacagtctacacccaaatctgctaagggttccgcaaagaaagagggctctaagaggaagatcaacatgtcaggctacatcttgttttctagcgagatgcgcgctgtgataaaagcccagcacccggattactctttcggagaactttctcgcctcgtgggaactgagtggcgcaatctggagacagccaagaaggccgagtatgaagaacgcgccgccaaggtagccgagcagcaggagagagagcgggctgcgcagcagcagcaaccctctgcaagccctagagccggcacccccgtgggggccttgatgggcgtcgtgcccccccccacccctatgggaatgctgaaccagcagctgaccccagtggccggcatgatgggagggtacccaccagggctcccacctcttcaggggcccgtggatgggctagtgtctatgggctctatgcagcctctccatcccgggggacctccaccccaccacctcccccccggggtaccggggttgccaggaattccgccccccggcgtcatgaaccagggggtggctccaatggtcggcaccccagcccctggcggatccccctatgggcaacaggtgggagtgctcggacctcccggccaacaagcccctcccccgtacccgggcccccatccagctggcccacccgtgattcaacaaccaaccacgccgatgttcgtcgcaccacctccaaaaacccagagactgctgcattcggaagcatacctgaaatatattgagggcctcagcgcagaatcaaactccatcagtaaatgggatcagactctggcagctaggcggcgcgacgttcacctgtccaaggagcaagagtcccggttgcctagccactggctcaagagcaagggagcccatacgactatggccgatgcactgtggaggctgcgcgatctgatgctgcgagataccctgaatatcaggcaagcatataatctggaaaatgtctag

SEQ ID NO: 199971 - DNA, 4749 bp, synthetic construct
  misc_feature 1..4749: note = Description of Artificial Sequence: Synthetic coding sequence
  source 1..4749: mol_type = other DNA
atgggcagcaagcggcggcgggccaccagccccagcagcagcgtgagcggtgatttcgatgacggacatcattctgtcagtacccccggaccgtcacggaaaaggcggcggttatctaacctccctactgtggacccaattgccgtctgtcatgagttgtataacacaatccgagactacaaagatgagcagggcaggctgctctgcgagctgttcattcgagcacccaagcgcaggaaccaaccagattattacgaagtcgtgagccagcctatcgatcttatgaagattcagcagaaactgaagatggaagagtacgacgatgtgaatttattaacagctgacttccagcttcttttcaacaacgctaagtcctattacaagccggattctcccgagtataaagctgcctgtaagctgtgggacctttacttaaggacccggaatgaatttgtgcagaaaggggaagctgatgatgaagacgacgacgaggacggacaggacaatcaggggaccgtgaccgaggggtcgtctccagcctatctgaaggagattctcgagcagctcctggaggctattgtggttgctactaaccctagcgggcggctgataagcgagctgtttcagaagctgccgagcaaggtgcaataccccgattactacgccattatcaaagaacctatcgatctgaaaaccatagctcagcgtatccagaacgggagctataaaagtatccatgcaatggccaaggatattgatctgctcgcaaagaatgccaagacttacaacgagcccgggagccaggtgtttaaagacgcgaattccataaaaaaaattttttacatgaaaaaggccgaaatagaacatcacgaaatggccaaaagttctttacggatgagaactccttccaacctggctgcagcgaggctcactgggcccagccacagcaagggtagcctgggcgaagaaagaaatcctacgtcaaaatactatcgcaacaagcgggccgtgcagggaggcaggctctcagctatcacaatggcattacagtatggaagtgaaagtgaggaagatgccgcgctagccgcagctcggtacgaggagggtgagagcgaagccgagagcatcacgtctttcatggatgtgagcaaccccttttaccaattgtacgatacagtgagatcctgcagaaacaatcagggccagcttatagcagagcccttttatcaccttccctctaaaaagaagtaccctgattactatcagcagattaaaatgccaatctccctccagcagattcgcacgaaattgaagaaccaggagtatgagaccctggatcacctggaatgtgatcttaatctgatgttcgagaacgctaagcggtacaacgtaccaaattccgcaatttataagcgcgtactaaaattacagcaggtgatgcaggccaaaaaaaaagaattagcacggcgagacgacattgaggacggagactccatgatctcctcagcaacaagcgataccggcagcgccaagcggaagagcaaaaaaaacattagaaagcaacgaatgaagattctgttcaacgtggtcctagaagcacgggagccaggtagcggcagaaggttgtgtgacttatttatggtgaaacctagcaagaaagactaccccgactattacaaaattatattggaacccatggatttgaaaattatcgagcataatatcagaaacgacaaatacgccggtgaggagggaatgattgaggacatgaaactcatgttcaggaacgccagacattacaatgaagaagggagccaggtctacaatgatgcccacatcttggaaaagctgttgaaagagaagcgcaaagaactgggacccctccccgacgacgacgacatggcctcaccaaagttgaaactgtcccgaaaatctggcatctcacccaagaagagcaaatacatgacacccatgcagcaaaagttgaatgaagtttatgaggcggtgaaaaattacaccgacaaaagagggaggcggctgtcggccatcttcttgcgccttccgtccaggagcgagctgcccgactactatttgacaataaagaagcctatggatatggagaaaatccgtagtcacatgatggcaaataaataccaggacatagactctatggtggaagattttgtgatgatgtttaacaacgcctgcacatacaacgaaccagagtccctcatctataaggatgctttagttttgcataaagtgctgctagaaacaaggcgcgaccttgagggtgatgaggactcccacgtgcccaacgtaacacttctgattcaggaactaatccataatcttttcgtgtccgtgatgagtcatcaggacgatgaaggcaggtgttatagcgactcgctggcggagatccccgctgtcgaccccaacttcccaaacaagcccccccttacctttgacataatccgtaagaatgtcgagaacaatagataccgtcgtctggatctctttcaagaacacatgttcgaagtgttagagcgcgccagacgcatgaaccgcacggacagcgaaatttatgaggatgcggtggaattgcaacaattctttattaagatccgggacgaactatgtaagaacggggaaatccttttgtcacccgcactgtcttatacgacaaagcacctgcacaatgacgtggagaaagaaagaaaggagaagttacccaaagagattgaagaagataagttaaaaagggaagaggagaagcgggaagcagagaagtccgaggattcgtcaggtgccgctggccttagtggcctgcacagaacttatagtcaagattgcagcttcaagaactctatgtaccacgtcggcgattacgtgtacgtagaacccgctgaggcaaatctccagccgcatattgtgtgtattgagcggctgtgggaggactctgcaggtgagaaatggctgtacggatgctggttttaccgtcccaacgagacctttcatcttgccactaggaaatttctcgagaaggaggtgtttaagtccgattattacaacaaagtgcccgtctctaagattctgggaaagtgcgttgtcatgtttgtgaaggagtatttcaaactgtgccccgaaaatttcagagatgaggatgtttttgtgtgcgagtcacgatattctgccaaaacgaagtcattcaagaagattaagctgtggactatgccaatttcctctgtacgattcgtgccccgagatgtgccactgccagttgtccgagtggcctcggtgttcgctaacgccgataaaggagacgacgaaaagaatacagataatagcgaagatagccgagctgaggataacttcaacttagagaaggaaaaagaagacgttccagtggagatgagcaatggtgagccaggatgccattacttcgaacagcttcactataacgacatgtggctcaaggtgggagattgcgtgttcattaaatctcacggtctcgtgagacccagggttgggcggatcgagaaggtatgggtacgggacggtgccgcttatttctatggtccaatttttattcaccctgaagagaccgagcacgagccaacaaaaatgttctataaaaaagaggtgttcctgtcaaatctggaggagacatgtcccatgacttgcattctcggaaagtgcgctgttcttagtttcaaagattttctgtcatgtcgacctacagagattccagaaaatgatatcctcctttgcgaaagtcgttacaatgaaagcgataaacagatgaaaaagtttaagggcctgaagaggttctccctctcggctaaggttgtggatgacgagatctattactttcgcaaaccaatcgtgccacaaaaagagccatcccccctcctggagaaaaaaattcagctcctcgaggctaagtttgccgagctggagggcggcgacgacgacatcgaggagatgggggaagaagactcagaggtcattgagcccccgtcacttcctcagttgcagaccccactggcttccgaattagacttgatgccttatactccgccacagtccacacctaagtccgccaagggctctgcaaaaaaggagggatcaaagaggaagatcaacatgagcgggtacatcctgttttcctcagagatgagagcggtcatcaaggcccagcacccagattactctttcggagagcttagccgcctggtggggaccgagtggagaaacctggaaactgccaagaaggctgaatacgaaggtgtgatgaatcagggagtggctcccatggtcggtactcctgcccccggtggcagcccgtacggacagcaagttggtgtgcttggtcctcctggccagcaggctccacccccgtaccccggcccacatcctgccggccctcctgtcatccaacagccgactactcctatgtttgtggccccccctccaaaaacacagagactcttgcactcggaggcctatcttaaatatattgagggcctcagcgccgaatctaatagtatctccaagtgggaccaaacccttgccgctcgtagaagagatgtccatcttagcaaagagcaagaatcacgcctcccgagccattggctcaagtccaagggggcccacaccacgatggctgacgcactgtggcgcctgagggacctcatgctaagagacacactaaatatccgccaggcatacaatctggaaaatgtgtag

SEQ ID NO: 199972 - DNA, 4809 bp, synthetic construct
  misc_feature 1..4809: note = Description of Artificial Sequence: Synthetic coding sequence
  source 1..4809: mol_type = other DNA
atgggcagcaagcggcggcgggccaccagccccagcagcagcgtgtctggagacttcgacgatggccaccactccgtgagcacccctgggccaagtagaaagaggagaagactgagtaacttgcctactgtggacccaattgccgtgtgccatgaactgtacaatactatccgggactacaaagacgagcagggtagactgctttgcgagctctttattcgcgccccgaagcgacgtaatcagccagactactacgaggttgtctcccaacctatagacctgatgaaaattcagcagaaacttaagatggaggaatatgacgacgtgaaccttctgactgctgactttcaactgctctttaacaacgcaaaatcctattacaaacccgacagcccagagtataaagcggcctgcaaactgtgggacctgtacttgcggactcggaatgaattcgtccagaagggtgaagctgatgatgaagacgacgatgaagacggacaggacaatcaggggactgtgaccgaaggttcaagcccggcctacctgaaggagatcttggagcagctactggaggcaatcgttgtggctactaacccctccggccggcttatcagcgagcttttccagaagctacccagcaaggttcaatatcccgattactacgcaattatcaaggaaccaatcgatcttaagaccatcgctcaacgcatccagaatggcagttacaagtccattcacgccatggctaaggatatcgatttattggccaagaacgcaaagacttacaatgagccgggaagtcaagtgttcaaggatgcgaactccattaagaaaatcttctacatgaagaaggcggaaatcgagcaccacgaaatggccaaatcgtcactgagaatgagtaataaacgggctgtacagggcgggcgcctgagtgctattacaatggctcttcaatacggttcagagagcgaggaggatgccgctttagcagccgcccgctatgaggagggagaaagcgaggcggagtctatcacaagtttcatggatgtcagcaacccattctatcagctctacgacaccgtgcggagttgcagaaacaatcagggtcagctgatagccgaaccgttttaccatctccccagcaagaagaagtatcctgactattatcagcaaattaaaatgcctatcagtctgcagcaaattagaacaaagctcaagaatcaagagtacgagaccctggaccatttagaatgcgatctgaacctaatgtttgaaaacgccaagcggtataacgtgccaaatagcgcaatatacaaacgggttttaaaactgcagcaggttatgcaggcaaagaagaaagagcttgcgcggcgagacgacattgaagacggtgattccatgatttcctctgccactagcgacactggatcagctaaaaggaaatccaagaagaatatccgcaagcagaggatgaagatactgttcaatgtggtgctagaggccagagagccaggctcgggcaggagattgtgtgatcttttcatggtgaaaccatccaagaaagattaccccgattactataagatcatactggagcctatggacttgaaaatcatcgaacacaacatccggaatgataagtacgccggcgaggagggtatgatcgaggatatgaagctcatgttcaggaacgcacggcattacaatgaggaaggctcgcaggtgtataatgatgcccatatactggaaaaactcctcaaggagaagagaaaggagcttggacccctgcctgatgatgatgatatggccagccctaagctgaagctttcaaggaagtctgggataagtcctaaaaaatccaagtacatgaccccgatgcagcagaagctgaatgaagtctacgaggccgtgaaaaattatactgacaaaagggggagacggctgagcgctattttcctaagacttccttctcgctcggagctgcccgactattacctgacaatcaaaaaaccaatggatatggagaaaatacgaagccacatgatggcgaacaagtaccaggacattgatagcatggtggaggactttgttatgatgtttaataacgcctgcacctataacgaaccggagtcgcttatatacaaggacgcccttgtgctgcataaagttctcttggaaacaaggcgcgacctggaaggggacgaggactcccacgtgccgaatgtgactcttttgatacaggaactcattcacaacctgttcgtgagcgtcatgagtcatcaggacgatgagggcaggtgttattccgacagtctggccgagataccggccgtggatcccaattttcctaataaaccccctttaacttttgacatcatccgaaaaaacgttgagaacaacaggtatcgcaggctggacctctttcaggaacatatgttcgaagtcttggagcgtgcacgacggatgaatcggactgattctgaaatctatgaagatgccgtggagctccagcagttcttcattaagattcgcgatgaattgtgtaaaaacggagagatactgctgagtcctgccctgagctataccactaagcacctccacaacgatgtggagaaggaaaggaaagaaaaactgccgaaggagatcgaggaggataaactgaaaagggaggaagagaagagagaagccgagaaatctgaagactcgagcggggccgccggcctttctggcctgcacagaacatactcacaggactgctcctttaagaactcaatgtatcatgtgggagactacgtgtatgtcgagcccgccgaggccaaccttcagccccatattgtctgcattgaacgtctatgggaggattcagccggagagaagtggctctacgggtgttggttctatcggccaaatgagactttccacttggccactagaaaattcctggaaaaagaggtatttaagagtgattattacaataaagtgcctgtgagtaagatactcgggaaatgtgtggtaatgtttgtgaaggaatattttaagttgtgtcccgaaaacttccgggacgaagatgtctttgtttgcgagtctcgatattcggctaagacaaaatcatttaagaaaataaaactctggacaatgcctataagcagtgtgcgttttgtgccgcgcgatgtgccgttaccagttgtgcgcgtggcttctgtgtttgccaacgccgataagggggacgacgagaagaacaccgacaatagcgaggattcaagggctgaagacaacttcaaccttgagaaagaaaaggaggatgttccggtcgaaatgagtaatggggaacccgggtgtcattacttcgagcaactgcactataacgacatgtggctcaaggtgggagactgtgtttttatcaagagccacgggctcgtgcggccccgagtcggccgcatagagaaagtctgggtcagggacggcgccgcgtacttctatggacccattttcattcaccctgaagagactgaacacgaacccaccaaaatgttttataaaaaagaggtcttcctctcaaacctcgaggaaacgtgccctatgacctgcattctgggaaagtgcgctgtgctatctttcaaagactttttgtcctgtcgccccacagagatccccgagaacgacattctgctgtgtgaatctcggtataacgaatcagacaaacagatgaaaaagtttaaaggactgaaaagattcagtttgtcagctaaggtggtggacgatgagatttattatttccggaagcctattgtacctcagaaggaacccagccctcttctagaaaaaaaaatccagcttctagaggcaaagttcgctgaactcgaaggaggagacgatgacatcgaggaaatgggggaagaggatagtgaagtaatagagccccctagtctgccccagctgcagacaccactggcctctgaactggacctcatgccttacacccccccccagtcgacgcccaagagcgctaaggggagtgccaaaaaagagggaagcaagaggaagataaatatgtccggttacattctatttagtagcgagatgcgggctgtgattaaggcgcagcaccccgactatagctttggagagctgtccaggttggtgggcaccgagtggcgcaatctggagaccgccaaaaaagccgagtatgagggcatgatgggaggttaccctccaggcctgcctccactacagggccccgtggatggtctggtgagcatgggatcaatgcagcccttacaccccgggggtcctccgcctcatcacttaccccctggtgtgcccggtctgcccggaattcccccccccggagtaatgaaccaaggagtagcgccaatggttggtacaccagcccctgggggctcaccctacgggcagcaggtgggggtgctgggacctcccggacagcaggcacctccaccctaccccgggccccaccccgcaggacctccagtgattcaacaaccaactacaccaatgttcgtcgcgcctccccccaagacacaacgcctgctgcatagtgaagcctatttgaaatacattgagggactcagtgccgagagtaactcaattagtaaatgggaccaaaccttagccgccagacgccgggacgtgcatctgtctaaagagcaggagtcaagactcccctcccattggctcaagtccaaaggggctcacaccaccatggcggatgctctctggaggctgagagacctcatgctcagagacacactgaacattcgccaggcttacaacctggaaaatgtgtag

SEQ ID NO: 199973 - DNA, 4749 bp, synthetic construct
  misc_feature 1..4749: note = Description of Artificial Sequence: Synthetic coding sequence
  source 1..4749: mol_type = other DNA
atgggcagcaagcggcggcgggccaccagccccagcagcagcgtgagtggagattttgatgacggccatcacagcgttagcaccccggggccatccagaaagcgaaggcgtttaagcaatctgccaactgtggaccccatagccgtgtgtcacgaactgtacaataccatccgggactataaggatgagcagggcaggttactgtgtgaactgtttatccgtgcccctaagaggagaaatcagcctgactactatgaggtggtgagtcaacccatcgacctgatgaaaatccagcagaaactcaaaatggaagagtatgatgatgtaaacttgttgacagctgattttcagcttctgtttaacaatgccaagagctactacaaacccgacagtccagaatataaggcagcctgcaagttgtgggatctttacctccggactagaaatgagtttgtccagaaaggcgaagcagatgatgaggacgacgacgaggacggacaggacaatcagggaacggtgactgagggtagcagccctgcatatctcaaggagatcctagagcagctactggaagcgatcgtcgtagccacaaatccttcaggccggctgatctccgaattgtttcagaaactcccctccaaggttcagtatcccgattattacgccatcatcaaagagccaattgatctgaagacaatcgctcagcgaatccaaaatgggtcttacaaatcaattcatgccatggccaaagacatagacctattagcaaagaacgctaaaacttataatgaacccggttctcaggtctttaaggacgccaattccatcaagaagatcttttacatgaagaaagcagagatcgaacaccacgagatggccaagtcatccctgcgtatgagaaccccttccaatctagcggcagctagacttacaggaccctcccattcaaaaggaagtctcggcgaggagcggaatcctacaagcaagtactacagaaataagagagccgtgcagggggggcggctgtcggcaataacaatggccctacagtatggcagcgagtccgaagaggatgctgccctggcagccgcacgatatgaagaaggagaatcggaggccgaatctattactagctttatggatgtgagtaaccccttctaccagctctacgacactgtgcgtagctgtagaaataatcaggggcagctgattgcggagcccttctaccacctacctagtaagaaaaagtatccagactattaccagcagattaagatgccaatcagtctacaacagatcagaactaaactcaagaaccaggaatacgagacacttgatcatctcgagtgcgatctcaacttaatgttcgaaaacgccaagaggtacaatgtccctaattcagctatctacaaacgggttttaaagctacagcaggttatgcaggctaagaagaaggagctggctagaagggatgatattgaggacggggatagtatgatctcctccgccacttcggataccgggagtgcgaaacgcaagtcaaaaaagaatattagaaagcagcgaatgaaaattctatttaacgtggttctagaggcacgggaacctggaagtggccgacgtctttgtgacctgttcatggtaaagccctccaaaaaggactatcctgattattataaaatcatcctggaacccatggacttgaaaattattgaacataacatacgcaacgacaaatatgccggagaggaggggatgattgaagatatgaaactgatgttcagaaatgctagacactataacgaagaaggatcccaagtgtacaacgacgcccatatcctggagaagctcctgaaggaaaagcgcaaagagcttggccccctacccgatgacgacgacatggcctctcctaagctgaagctgagtaggaagtcggggatttccccaaaaaagagtaaatatatgactcccatgcagcagaaactcaatgaggtatacgaggctgttaagaattacaccgacaagcggggacggcgactgtctgctatatttctgcgacttccatctagatctgaactgcccgattactacttgacaatcaaaaagccaatggatatggaaaagattcgatcccacatgatggctaacaaatatcaggacatcgatagtatggtggaggatttcgtaatgatgtttaacaatgcctgtacatataatgaacctgagagccttatttacaaggacgccttagtcctgcacaaggtgctgcttgaaaccagacgagacctggaaggcgacgaggactctcacgtgcccaacgtaactctgctcatacaggagctcatccataatctgttcgtgtccgtcatgagtcaccaagacgatgaggggcggtgctatagcgactccttggctgagatccctgccgtggatcctaactttccaaacaagccaccactcacattcgacattattagaaagaatgtggagaataataggtacagaaggctggacttgttccaggagcacatgttcgaggtgctcgagcgagcccgccggatgaatagaactgatagtgaaatctatgaggatgccgtggagctgcagcagtttttcatcaaaatccgagacgagctctgtaagaacggggagatcctgttgagccctgccctctcctacactacaaagcacctgcataatgatgtggagaaagagcgaaaagaaaaattgccaaaagagattgaagaggacaaactcaaaagagaagaagaaaaaagagaagctgaaaaatcagaagattcatccggagcggcagggctgagcggcttacatcgcacgtactctcaggactgctcattcaagaacagcatgtaccacgtgggggactatgtctatgtcgaacccgcagaggctaatctacagccccatatcgtgtgcattgaaagactctgggaggactcggccgagaaggaagtgttcaagtctgattactataacaaagttccggtgtcaaagatcctggggaagtgcgttgtgatgtttgtgaaggagtacttcaagctgtgtcccgagaacttccgggatgaagacgtgtttgtgtgcgaatctaggtactccgccaaaaccaagagctttaagaaaataaaattatggacaatgcccatcagctccgtacgattcgtaccccgagatgtaccgcttcccgttgttagagtggctagcgtcttcgcaaacgccgacaagggtgacgatgagaaaaataccgataactccgaagactctagagcggaggacaatttcaacctggagaaagaaaaggaggacgtcccagtggagatgtccaatggagagcccggctgccattatttcgaacagctccattataatgacatgtggttgaaagtgggggattgtgtctttattaaatcgcacgggctggttagacctagggtggggcggatagagaaagtttgggtgcgcgatggagcagcctacttttatggccctatttttattcatccagaggaaactgaacatgagcctactaagatgttctacaaaaaagaggtctttctcagcaacctggaagagacctgcccgatgacttgtattcttggtaaatgcgccgtcttatcgttcaaggacttcctgtcttgccgccccaccgagataccagaaaacgacattcttctgtgcgaaagtaggtataacgagtccgacaagcagatgaagaaattcaaaggtctgaagcggtttagtctgtccgctaaagtggtggacgatgaaatttattattttcggaagcctattgtgccacagaaggagccctctcctttattggagaagaagatccagttacttgaggccaagtttgccgagttggagggaggagatgacgacattgaggaaatgggggaagaggattcagaaagtaccccaaaaagcgctaagggaagtgctaaaaaggaggggtcaaaaaggaagatcaatatgtcaggctatattctgttcagctctgaaatgagggcagtgatcaaggctcagcaccctgattactcgttcggggaattgtcacgactcgtcggaactgaatggcgcaacctggagactgccaagaaagctgaatatgagggaatgatgggcggctacccccctggtttaccacctcttcagggacctgtcgacggactagtttccatgggatcaatgcagccccttcatcccggaggccctccaccccaccatctgccacccggtgtgccaggactacccggaatccctccccccggagtcatgaaccagggtgtcgcaccaatggtcggtaccccggcccctggcggtagcccatacggtcagcaagtgggcgtgcttggcccccctggccagcaggcaccccctccttatccgggaccgcatccggcaggaccaccggtcattcagcagcctacaacacctatgttcgtagctcctcctccaaaaacccaaagactgctccatagcgaggcctaccttaagtacatagagggactctctgcagagtctaattctatctcaaaatgggatcagactctagccgcccggcgaagggatgtgcacctatccaaagaacaggaaagcagactgcctagccactggctcaagtccaagggcgcccatactacgatggctgatgccttatggcgacttagggatctaatgctccgcgatacactgaatatcagacaggcgtacaatctcgagaatgtgtag

SEQ ID NO: 199974 - DNA, 4905 bp, synthetic construct
  misc_feature 1..4905: note = Description of Artificial Sequence: Synthetic coding sequence
  source 1..4905: mol_type = other DNA
atgggcagcaagcggcggcgggccaccagccccagcagcagcgtgtctggggactttgatgatggtcaccacagcgtgtctacacccggcccctctaggaagcgacggagattaagcaacctgcctacagttgatccaatcgctgtgtgccacgagttgtacaataccattcgcgattacaaggatgagcagggaaggcttctatgtgagctgttcatccgggcccctaagcgcaggaatcagcctgactactacgaggttgtttctcagcccatcgatttaatgaagatccaacaaaaattgaagatggaagaatatgatgacgtcaacttactgactgctgacttccagctgttattcaataatgcaaaatcctactacaagccagactctcccgagtataaagccgcatgtaagctgtgggatctttacctgcggactagaaatgaatttgtgcaaaagggcgaagccgacgatgaggacgatgacgaggacgggcaagataaccaaggtaccgtcacagagggctcatcccccgcataccttaaggaaattcttgaacagcttctggaagcgattgtcgttgccactaacccgtctggccgccttatttctgagctgtttcagaagcttccctcaaaggtccagtatccagattattatgctatcatcaaggaaccaatcgacctgaagactatcgcgcagcgcattcaaaacgggtcatataagtctatccatgccatggctaaggacatcgaccttctcgcgaaaaacgcaaaaacctacaacgagcccggatcccaggtgtttaaagatgccaattctatcaagaaaatcttttatatgaaaaaggccgaaattgagcatcacgaaatggctaagagcagcctgcggatgagaaccccaagtaacctggcagcagcacggctaacaggaccctctcattcaaaagggtcactgggtgaagagcgaaacccaacctcgaagtactataggaataaaagggccgttcaggggggcagattatctgcaatcaccatggccctgcagtacgggtcagagtctgaggaggacgcagccttggcagccgcgaggtatgaggaaggcgagtctgaagcagagtccataacctcctttatggacgtgagcaaccctttctaccagctttacgacaccgtccgctcctgcaggaacaatcaagggcagctgatcgctgaaccattctatcatctgccctccaaaaaaaagtaccccgattactatcagcagatcaagatgcccatttcccttcaacagatacggaccaagctgaaaaatcaagagtacgagacgttggatcacctggaatgtgatctgaacttaatgttcgagaacgccaaacggtacaacgttcctaactccgcaatttataaaagggtgctgaaactgcagcaggttatgcaggcaaaaaaaaaagaactggcacgtcgagatgacatcgaagatggggactctatgatctcctctgcaacctccgacactggatccgctaagcgcaagtccaagaagaacatcaggaagcaaaggatgaaaattctattcaatgtcgtcctagaagcaagagagcctggcagcggtcgaaggctgtgcgatctgtttatggtgaaaccaagcaagaaggactatccggactactataaaatcatattggaacctatggatctgaagattatagagcacaatatcagaaacgataagtacgccggagaggagggaatgatcgaagacatgaaactaatgtttaggaacgctaggcattacaacgaagagggtagccaggtatacaacgatgcccacatactcgagaaactgctcaaggagaaacggaaagagttgggacctttgccggatgatgacgatatggcctctccgaaactgaagctgagccgcaagagcggaattagcccgaaaaaatctaagtacatgacccccatgcagcagaaactgaacgaagtatacgaagccgttaagaattacactgacaaacgcggcagaagactgtcggccatattcctgagactgccaagcaggtccgagctccccgattactacctgaccatcaaaaaacccatggatatggagaagattcgcagccatatgatggccaacaagtatcaagacatagactctatggtagaggatttcgtcatgatgtttaataatgcctgtacatacaacgagccagagtctctgatttataaagatgccctggtgttgcataaagttctattggagacccgtagagacctcgaaggcgatgaggactcacacgtccccaacgttaccctgctgatccaagaactgatccataatctgttcgtatccgtgatgagccaccaggatgacgagggccgttgctattcagattcattggccgagatacctgcagtcgaccccaattttcccaacaaaccaccactcacgtttgatatcattcgaaagaatgtggaaaacaaccgctatcgcagacttgatctgtttcaggagcacatgttcgaggttctggaaagggcccgacgaatgaaccgaaccgactccgaaatttatgaagacgctgtggagctgcagcagttcttcataaaaatccgagatgagctgtgtaagaacggggaaatactgctgtcaccagccctaagctataccaccaagcatctgcacaacgatgtggagaaggagcggaaagagaagctcccaaaggaaatagaagaggacaaactgaaaagagaggaagagaagcgcgaagctgagaagtccgaggacagttccggcgcggccgggcttagtggcttgcatcggacctacagtcaagattgctcattcaaaaatagcatgtatcacgtgggagattatgtgtatgtggaaccggccgaggcaaacctgcagcctcatatagtgtgcatcgaacggctctgggaggacagcgcaggggaaaagtggctctacggatgttggttctatagacctaacgaaacattccatctcgcgacaagaaaattccttgagaaggaagtgtttaaatcggactactacaacaaggtgccggtcagcaaaatcttgggaaagtgtgtggttatgttcgtgaaagagtacttcaagctgtgtcccgagaacttccgcgacgaggacgtgttcgtctgcgaaagccgctatagcgctaagactaagtcattcaagaagataaagctgtggacgatgcccatctctagtgtaagatttgttcccagggatgttcctctgccagtggtgagggtcgcttctgtattcgcaaacgcggacaaaggagatgacgagaagaatacagacaattccgaggactcacgggccgaagataacttcaacctcgaaaaggaaaaggaagacgtgcctgtcgagatgtccaacggggagcccggctgccattattttgagcagctgcattataatgatatgtggttaaaagtgggcgactgcgtgtttattaagtcccacggtctggtgcggcctcgggtcggacggatcgagaaggtctgggttcgggacggtgctgcttatttttacggccctatattcattcatcccgaagaaacagaacatgagcccactaaaatgttctataaaaaagaagtgttcctgagcaatctggaggaaacctgtccaatgacttgcatactgggaaagtgtgccgttctctcttttaaggattttcttagctgtagacctacagagattcctgaaaatgatattctcctgtgcgaaagtcggtacaacgagagcgataagcagatgaagaaatttaagggattaaagcgctttagtttaagcgccaaagtggtggacgacgaaatctactacttcaggaaacccatcgttccacagaaggagccatccccgttactggaaaagaagatccagctgttggaagcaaagtttgcggaactcgagggaggggacgacgacatcgaagagatgggcgaggaggattccgaggtcatcgagccccctagtctgccccagttacaaactcccttggcaagtgaactggacctcatgccatacactccaccacaaagcactcctaagagtgctaagggatctgccaaaaaagagggatccaagcgaaagattaatatgtcagggtacatattattctcgtccgaaatgagagccgtgattaaggcgcagcatccagactacagttttggggagctctccaggttggtcggcaccgagtggcgaaatctagagaccgccaagaaggcggaatacgaaggcatgatgggcggatacccaccagggcttcccccactccaagggcctgtcgacggtttggtgtccatgggatcaatgcaacccctgcaccccgggggtccacctccccaccatctcccccccggtgtccccggtttgcccggtattccaccccccggggtaatgaatcagggcgtagccccgatggttggcacacctgctcctggcggcagtccatacggacagcaggtgggggtcttagggccacctggccaacaagctcctcctccttacccagggcctcaccccgcagggcccccagtaattcaacagccaactacgccgatgttcgtggccccccccccaaagactcagcgcttactgcactccgaggcatatctcaagtacatcgaagggctaagcgccgaatcgaattctatctctaaatgggatcaaaccctcgccgcgagacgccgcgacgtgcatctgagtaaagaacaggagtccagactgccgtctcattggctgaaatctaaaggcgcccacactacaatggccgacgccctttggaggcttcgggacttaatgctgagggacaccctaaacatccggcaggcgtataatttggagaacgtttag

SEQ ID NO: 199975 - DNA, 459 bp, synthetic construct
  misc_feature 1..459: note = Description of Artificial Sequence: Synthetic coding sequence
  source 1..459: mol_type = other DNA
atgggcagcaagcggcggcgggccaccagccccagcagcagcgtgagcggtgatttcgacgacgggcatcactcagtctccacacccggtccttctaggaagaggaggcgcttgtcaaatctgccaacagtcgaccccattgccgtgtgccatgagttgtacaatactattcgcgattacaaggacgaacaggggcggctgttgtgtgagctgttcattagggcaccgaaaaggcgtaaccagccagactattatgaggttgtgagtcaacctatcgacctgatgaaaatccagcagaaattgaaaatggaagaatacgatgatgtgaacctgctcacagccgattttcaactcctatttaataatgccaaatcctactataagcccgacagcccggagtacaaggccgcatgcaaattgtgggatttgtaccttcggacaagaaatgaattcgtatag

SEQ ID NO: 199976 - DNA, 81 bp, synthetic construct
  misc_feature 1..81: note = Description of Artificial Sequence: Synthetic coding sequence
  source 1..81: mol_type = other DNA
atgggcagcaagcggcggcgggccaccagccccagcagcagcgtgtccggagattttgatgatggccaccactcggtgtag

SEQ ID NO: 199977 - DNA, 693 bp, synthetic construct
  misc_feature 1..693: note = Description of Artificial Sequence: Synthetic coding sequence
  source 1..693: mol_type = other DNA
atgggcagcaagcggcggcgggccaccagccccagcagcagcgtgagcggagactttgacgatggccatcacagcgtatctacacctgggccatcaagaaagcggaggagacttagcaatcttcccactgtcgatcctatcgccgtatgtcacgagctctacaacactatacgagactataaagatgaacaaggtcgcctcctctgcgagctgttcatccgtgcccccaagaggaggaatcaaccagactattatgaggtcgtgagtcagcccattgatcttatgaaaattcagcagaagctaaaaatggaagagtacgacgatgtgaatctgctgaccgcagacttccagttgttatttaataatgcaaaatcatactataaaccagactctcctgagtataaagcagcttgcaagctctgggatctctatctgcgaactcggaacgaattcgtacagaagggagaagctgacgacgaagacgatgatgaggacggtcaggacaaccaggggaccgtgaccgaggggagttccccagcatatctcaaagaaatcctggagcagttactagaggctatcgttgtggccaccaaccccagcgggcggctgatctctgaactgtttcagaaactccctagcaaggttcagtatcctgattactatgcaattattaaggaacccattgatctgtag

SEQ ID NO: 199978 - DNA, 132 bp, synthetic construct
  misc_feature 1..132: note = Description of Artificial Sequence: Synthetic coding sequence
  source 1..132: mol_type = other DNA
atgggcagcaagcggcggcgggccaccagccccagcagcagcgtgtcaggcgattttgacgatggccaccactccgtgtcaacccctgggccctcacggaagcgcaggcggctctcaaacctgcccacatag

SEQ ID NO: 199979 - DNA, 357 bp, synthetic construct
  misc_feature 1..357: note = Description of Artificial Sequence: Synthetic coding sequence
  source 1..357: mol_type = other DNA
atgggcagcaagcggcggcgggccaccagccccagcagcagcgtgagtggggactttgacgacggacaccactctgtgagtacgcctgggcctagccgcaaacgacgtagactttcaaatctgccaaccgtagatccaatcgccgtgtgtcacgaactgtacaacaccatacgtgactacaaggatgagcagggtcgactcctgtgcgagctgtttatcagagctccaaaacgaaggaaccaacctgactattatgaagtcgtgtcacagccaattgacctaatgaaaatacaacagaagctcaaaatggaggaatacgatgatgttaatttgcttaccgcggatttccagttatag

SEQ ID NO: 199980 - DNA, 264 bp, synthetic construct
  misc_feature 1..264: note = Description of Artificial Sequence: Synthetic coding sequence
  source 1..264: mol_type = other DNA
atgggcagcaagcggcggcgggccaccagccccagcagcagcgtgagcggtgatttcgacgatgggcatcactccgtctccacacccggtcccagtagaaaacggcgccggctctcaaatctgcccactgtggacccaattgctgtgtgccacgaactctacaacacaatccgggactacaaggacgagcaagggaggctactgtgtgagctctttatccgagctcccaaaaggagaaatcaaccagactactacgaagtgtag

SEQ ID NO: 199981 - DNA, 132 bp, synthetic construct
  misc_feature 1..132: note = Description of Artificial Sequence: Synthetic coding sequence
  source 1..132: mol_type = other DNA
atgggcagcaagcggcggcgggccaccagccccagcagcagcgtgtctggtgatttcgatgatggacatcactcggtctctacccccgggccttctcggaaaaggagacgactgtccaacttgccgacatag

SEQ ID NO: 199982 - DNA, 828 bp, synthetic construct
  misc_feature 1..828: note = Description of Artificial Sequence: Synthetic coding sequence
  source 1..828: mol_type = other DNA
atggagggcgtggccgtggtgaccgccggcagcgtgggcgccgccaaaactgaaggcgccgcagccctccctcctccaccaccggtatcacctcctgccctgaccccagcgcctgcggccggtgaagagggtccagccccactgtctgaaaccggcgcgcccgggtgttccggatctcgaccgccagagctggaaccagaacgcagcctcggacggttccgcggtagatttgaagacgaggacgaggaattggaggaagaggaggaactcgaagaggaagaggaggaggaggaggaggatatgtcccacttctctctccgactagaggggggtaggcaagattctgaggacgaagaggaaaggctcattaacctatctgagcttacaccctacatcttgtgcagtatatgcaaaggctacctgatagatgccaccaccatcacagagtgcctgcacacattttgtaaaagttgtatcgtaaggcacttttactactcaaaccgctgtccaaaatgtaacattgtggtgcatcagacccagcctctgtacaacatcagcgcgaatgagggcaccggtcacttcaagcctttggaaaagaagtttgtgcgggtcagcggagaagcaactatcggccacgttgaaaaatttttgcgcaggaagatgggactggaccctgcttgccaagtcgatatcatctgtggtgaccatctgctggaacagtaccagaccctgagggagattcggcgggcaatcggcgatgctgctatgcaggacggacttctggtgctgcactatgggctggtcgtgtccccactgaagatcacctag

SEQ ID NO: 199983 - DNA, 1053 bp, synthetic construct
  misc_feature 1..1053: note = Description of Artificial Sequence: Synthetic coding sequence
  source 1..1053: mol_type = other DNA
atggagggcgtggccgtggtgaccgccggcagcgtgggcgccgccaagaccgaaggagcagcagctctgccaccccctccacccgtctcccctccagcacttactcccgcccccgcagcgggagaagagggccccgccccactttccgagaccggcgcgccaggctgcagcgggtcccggccacctgagctggagcccgaacggtccttgggtcgattcagagggcgtttcgaggatgaagatgaggaactggaggaagaggaggaactggaagaggaagaagaggaggaggaggaggatatgagccactttagcctgcgtttagaaggagggaggcaggattcagaggatgaggaggaacgccttattaacctgagtgagctcacaccctacattctctgcagtatttgtaaaggctacttaattgacgctacaacaattactgagtgtctgcacacgttctgtaagtcgtgcattgtccgccacttttactatagcaacagatgccctaaatgtaacattgttgtccatcagacgcaaccgctctacaacatccgcctggatcggcagctgcaggacattgtgtacaagttagtgattaacttggaagagagagagaagaaacagatgcacgacttctataaagagagggggctggaagtcccgaagcctgcagtgccccagcctgttccttcctccaagggtagatccaagaaggtcctggaatccgtgtttcgcattccccctgagctggacatgtccttgctgttagaatttataggagctaacgaaggaacaggacactttaagcccctcgagaagaagttcgtgcgggtgagcggggaggccaccattggccacgtggaaaagtttttgcgcaggaaaatggggctggacccggcttgccaggttgacataatttgtggagaccatttgcttgaacagtaccagactctccgcgaaattaggcgggccattggtgatgcagcaatgcaggacggattactggtactccactacggtctggtcgtctccccccttaagatcacctag

SEQ ID NO: 199984 - DNA, 10191 bp, synthetic construct
  misc_feature 1..10191: note = Description of Artificial Sequence: Synthetic coding sequence
  source 1..10191: mol_type = other DNA
atgaccgcctggctgatcagcctgatgagcatcgaggtgctgctgctggcggtccggcatctctccctccatattgaaccagaagaaggctctcttgcagggggcacctggatcacggtgatctttgacgggttggagttgggggtgctctaccctaataacggctcccaactggaaatacatttggtgaacgtgaacatggtcgtgcccgcactgcggtccgtgccgtgcgatgtgttcccagtcttcctcgacctgcccgtggtgacctgccgcacccggtccgtactttcagaggcgcatgaagggctgtatttcctcgaagcgtacttcggaggacaactggtgagctcacctaatcctggacctcgtgactcctgtacatttaaattctccaaagcccagacgccaattgtgcaccaagtgtatcccccaagtggtgtgcctggaaaattgatacacgtttacggatggatcatcactggaaggctggagactttcgatttcgatgcagagtacattgacagtcctgtgattcttgaggcccagggtgacaaatgggtgaccccttgtagcttgatcaatcgacagatgggaagctgctaccccatccaggaagaccacggcctgggcaccctgcagtgtcacgtggaaggtgactatattggctcccagaacgtgtcattttcggtattcaacaagggtaaatccatggtgcacaagaaggcctggctcatttccgccaaacaggatctgttcctgtaccaaacccactccgaaatcttatccgtgttccccgaaactggctccctgggcggacgaaccaatatcactatcacaggcgatttctttgacaattctgcccaggtaactatagcggggatcccttgcgatatccgtcacgtgtccccaagaaaaatcgaatgtaccactagggcaccgggcaaagatgtgcgcctgaccaccccccagcccgggaatcgcggcctgctttttgaagtgggtgacgctgtggaaggactcgagcttaccgaagctacccctggttatagatggcaaattgtgccaaacgctagctcccccttcggcttctggtctcaggaaggtcagcccttcagggcccggctcagtggcttttttgtggccccagaaactaataactacaccttttggatccaagccgacagccaagctagcctccactttagctggtcggaggaacctagaacaaaagtgaaagtcgcgtctatttccgtcgggacggcagactggtttgatagctgggagcaaaaccgcgatgaaggtacatggcagcagaagaccccaaagctggaattactgggcggcgcgatgtactatttggaagcagaacatcatggaattgcaccctcccgcgggatgagaatcggcgtccagattcacaacacctggctgaaccccgatgtcgtgaccacataccttcgcgaaaagcaccagatccgggtccgggctcaaaggctgcctgaagtgcaagtgcttaatgtgtccggacgcggtaacttttttcttacttgggataacgtgtcatcgcaacctattccagcaaacgccaccgctcacctaatccagaccaccatcgaagagctgctcgcggttaaatgcaaactggaacccctttggagcaacatcttgttgcggttgggcttcgagcgcggacccgaagtttctaattctgacggggaccttactagcggaaccgaacctttttgcgggcggtttagtctaaggcagccacggcacttggttctcacacctccagcggcccagaagggctatcggctggaccagtacacccacctttgcctggcatacaagggtcacatgaataaaatactcaaaatgatcgtgtcattcacaatcggttttcagaacatggtcaagaatactacctgtgattggtcactgacccggacttctcccgagtcatggcagtttgattgcacagatctgtgggagacctgcgtcagatgttttggcgacttacagccgccccccgctaactcccctgtgttggtccaccagataaatctgctgcccctggcccaggagaccggactgttttatgtggatgaaattataattgccgatacgaatgtcactgtatctcaggctgattctgggacggctcgaccaggaggcaatctggtggaaagtgtctctgtcgttgggagcccacccgtgtactctgtgacctcttggctggcaggttgtggcaccgaactccctctcataaccgctcggtctgtgcccaccgaagggacagaggaggggtctggactggtcctcgttaccactcagcggaggcaaagaacgtctcctcctcttggagggcactttcgtatacagctgccgaataccgtcatctcagacgttcctgtgcagatcagtgcccatcacctgcatcagcttcttcagaacaatgcagacgacttcacatctaggtacctgaatgcctccgatttcactgtgaaagaggacctgtacacctgctacgaacacgtgtggaccttaagttggtcaacacaaattggtgacttacctaatttcattcgggtgtccgacgagaatcttaccggcgtcaacccagctgccgctaccagagtggtatatgatggaggggtgtttctgggcccgatttttggtgacatgctggctaccgccaaccaacatacccaggtcgttgtcagagtaaatgatgtaccagctcactgtcccggaagttgctctttccagtacctgcagggcagcactccctgcgtccacagcgtgtggtatagcatcgacggcgatattaacctcatgatttatataacaggtacgggcttttctggggacagccagtttttacaagtgacagtcaataaaaccagttgcaaggtcatctttagtaatcagacaaacgtcgtttgccaaacagacctcctacccgtaggaatgcatagaattctgatgctggtcagacccagtggactagccatcagcgccactggcgaggacctctttctcaatgtgaaacccaggttagacatggtggaaccttctcgcgctgccgatatcggcggactatgggcgacaattaggggtagctcactggaaggagtatccctgattttgtttggctcctacagttgcgcaatcaacgtggccaccagtaatagctcccgcatccaatgcaaggtcccgcctagaggaaaagacggccgcatagtgaacgtgacggtgatccgtggggactactccgctgttctgccccgggcttttacctacgtgagcagcctgaatcccgtgattgtgaccttaagtcgtaatatctccaatatcgcggggggggagactcttgtgataggcgtcgcccgcctgatgaactacaccgacctggatgttgaggttcacgttcaagatgccctggctccagtacacactcagtcggcctggggattagaggtggcactgccccctctccctgcaggcctgcaccggatttcagtttccattaatggggtgtccatacatagccagggcgttgaccttcatattcaatacctgacggaggtcttctctattgagccctgctgcggctctctgctgggcggcacaattctttcaattagcgggataggtttttccagagaccccgctctggtctgggtgctcgtgggcaaccggtcctgcgacattgtgaatcttactgaggcaagcatctggtgtgagacgctgcccgctccccaaattcccgacgccggcgcaccaacagtgcctgcagcagtagaggtctgggcaggtaaccgatttttcgccaggggcccatctccctcgctggtggggaaaggctttacgtttatgtacgaagccgctgcgacgcctgtcgttaccgccatgcagggggagatcacaaatagtagtctctcactgcatgtaggagggagtaatctgtccaattcagtgattctattgggcaaccttaactgcgacgttgagactcagtctttccaggggaatgtgtcgctctccggttgctcaatccccctccatagccttgaagcggggatatacccactccaggtgagacagaaacagatgggattcgccaatatgtccgtggtgttacaacagttcgccgtgatgccgcggattatggctatcttcccatctcagggcagtgcctgtggcgggactatcctcactgtcaggggcctgctcttgaattcccgacgaagatcagtgcgagtagatctttcaggcccattcacttgcgtaattctctcgctgggggatcacacgatcctttgccaggtcagtttggagggtgatcctctccccggtgcctcgttcagtttaaacgtcactgttctagttaatggcctcacttccgaatgtcaagggaactgtacactttttatacgagaggaggccagccctgtgatggatgcactgtctaccaatacgtcaggctcactgacgacggttctgatcagggggcaacgacttgcaactaccgccgacgagcccatggttttcgttgatgatcagctgccttgtaacgtgacctttttcaatgcgagccacgtagtgtgtcagacacgggaccttgcccccgggccccactacctgagtgtgttttatactcgcaatggatacgcctgctcagggaacgtgagcaggcacttctacatcatgcctcaggtgtttcactacttccctaagaactttagccttcacggaggttcacttcttacaatagagggcactggcctgagaggccaaaatacgacaagcgtgtatattgatcagcaaacctgcctcaccgtgaatatcggggcagagctgattcgctgcatcgtcccgaccggtaacggatccgtggcactggagattgaggtggacgggctctggtatcatatcggcgtgattggttacaacaaggcttttacgcctgagctgattagcatctctcaaagcgacgatatcctgaccttcgctgtggcgcagatcagcggcgccgctaatattgacattttcattggtatgtctccatgcgtgggcgtttcaggtaatcacaccgtgctgcagtgtgttgtaccatccctgcccgcaggtgagtatcatgtgagggggtatgactgtatccgcggttgggcatcctcagcactggttttcactagtcgagtcatcatcaccgctgtaacagagaattttgggtgccttggaggaaggctcgtgcacgtgtttggggccggcttctccccaggcaatgtgtcagctgccgtgtgtggagctccttgccgcgtgttggcaaatgctactgtaagcgcgttcagctgcttagttctgcccctggatgtctctctcgcttttctctgcggtctgaagcgcgaagaggatagctgcgaagcagccagacatacctatgtgcaatgcgacctgactgtggccatggccacagagcaattgctggagagttggccttacttgtacatctgcgaggaatctagtcagtgcctcttcgtgccagaccattgggcagagtcgatgttccccagcttcagtggcctatttatctctcctaagctggaacgtgatgaagtcctaatatacaattcttcttgcaacattacgatggaaacagaggcagaaatggaatgtgagacccccaaccagcctatcaccgtgaagatcacggagatacggaaacgctggggccaaaacactcaaggaaatttctcactgcagttttgccggagatggtcaagaacacactcatggtttcccgagaggctcccgcaagacggcgacaacgtgaccgtggagaacggccagctcttgctgttggacaccaacacaagcatcctaaacctgctgcatatcaagggaggaaaacttatatttatggcccccggaccgatcgaacttagggctcacgccatccttgtttcagatggcggagagttgcgcatagggtccgaagataaacccttccaagggcgagctcagattaccctgtatgggagcagttactcaaccccattctttccttacggcgtgaaattcttggccgtgagaaatggtaccctgtcactgcacggcagcttacctgaggtcattgtgacctgtctgcgggctacagcccacgcgttggacactgtgttggccctcgaagacgccgtggactggaacccaggcgatgaggtggtcatcatcagcggcacaggcgttaagggggccaaacctatggaggaaatcgtgacagtcgagacggtccaggacaccgatctatacttgaagtcccccctgcgatatagtcataacttcacggaaaattgggtcgcaggagagcaccacatcctgaaggccaccgtggcgctgctctcaaggagcatcacaatacaggggaacctcaccaacgaacgagagaaattattggttagttgtcaggaggccaacgcccctgaagggaatttgcagcattgcctgtactctatgtccgaaaaaatgctcggatccagagatatgggagctcgcgttattgtccagtcctttcccgaggagccaagtcaggtgcagctgaaaggcgtgcaattccaggtgctggggcaggcgttccacaagcacctgagctcattgacattggtgggggcgatgcgagagagttttatccaaggatgtaccgtcagaaacagctttagccgtgggctcagcatgtgcggtactctggggctgaaggtggattctaatgtgttttacaacatcctcggccacgccctgctagttggcacctgtacggaaatgcgctatatcagttgggaggctatacacgggcggaaggacgattggtccggtcacggcaacatcattaggaacaacgtcatcattcaagtgtccggcgctgaaggattgagtaatccagagatgctcaccccttccggtatttatatatgttcacccacgaatgtcatcgaaggcaatagagtgtgcggggccggctacggttattttttccatctgatgaccaaccagactagtcaagcgccactgttgtctttcacccagaacatcgctcattcttgtaccagatacgggctgtttgtctaccccaagttccagcctccttgggataacgtcacaggcactaccctgttccagtctttcacagtttgggagagtgctggcggggcgcaaatatttcgcagttccaatcttcgtttaaaaaattttaaagtatactcctgccgggactttggcattgacgttttggagagtgatgctaatacgtccgtgacagactccctgcttctggggcactttgctcacaaagggtccctctgtatgagctcgggcatcaagacccctaagaggtgggaactgatggtttcaaacaccaccttcgttaactttgatttaatcaactgtgttgccatacggacctgttccgattgctcccaaggccagggtgggtttacagtgaagacgtcacagctgaagttcaccaattcatctaacctcgtggctttccccttcccccatgccgccattctcgaagacctggatggctctctcagtggcaagaataggtctcatatcctggcctctatggagacgttgagtgcctcttgcctcgtgaactccagcttcggcagagtcgtgcacggaagtgcctgcggtggtggggtccttttccatagaatgtcaatcggattggcaaacactcctgaggtaagctacgacctgacaatgacggattcacgtaataagaccaccacagtgaattatgtgagagatacactgtccaatcctcgcgggtggatggctttgctgctcgatcaggaaacctattctctgcagtccgagaacctgtggatcaatagaagccttcagtattcagcaacatttgacaacttcgcacccggcaactatttgctcctcgtgcacactgatctgcctccgtatcccgatattctgctgcgctgcggctccagggtgggactgtcgtttcctttccttcctagccctggccagaatcagggctgtgactggttcttcaatagccaattgcgccagctgacctatctagtctcgggagaagggcaggtgcaggtcatcctgagggtgaaagaagggatgccacccacgatcagcgcatctacatccgcacctgagagcgcattgaaatggagcctgccagagacttggcagggcgtggaggaaggttggggtggatacaacaacacaataccaggaccaggagatgacgtcctgatcctgccaaaccggaccgtcttagtggacactgatctgcccttcttcaagggactgtatgtcatgggaaccctcgattttcccgtcgaccgttcaaacgtgctaagcgtggcttgcatggtgatagctgggggggagctcaaggtggggactctagagaacccattggagaaggagcaaaagctgctaatcctcctacgggcctctgaaggcgtcttttgtgaccgcatgaatggtatccacattgatcctggaacaatcggggtctatggaaaggtccacctatactctgcctatccaaagaattcgtggacccatctgggcgccgatattgcatctggaaatgagagaatcattgtcgaggatgctgtggactggaggcctcacgataagatcgtactgagctctagcagctacgagccccacgaagctgaggtacttaccgtgaaggaggtgaagggtcaccatgtgaggatctatgaaaggcttaaacacaggcacattggtagcgtccacgtcaccgaggatggcaggcatattcggctcgcagcggaggtaggcctattgacacgcaatatacagatccagccagatgtttcatgccgcggcagactctttgtggggtcattccggaagagttcccgggaagaattctcgggagtgctgcagctgcttaacgtggagatacagaattttggaagccccctttactcaagcgtagaattctccaatgtgagtgccggctcttggatcatctcctcaaccttacaccagtcatgtggtggtgggatccacgcagccgcctctcacggggttctgctgaacgacaacatcgttttcggcacagccggccatggcatagatttagagggccaggcgtacactgtgactaacaacctcgtagtccttatgactcaacccgcctggagcacaatctgggtggctgggataaaggtaaaccaggtaaaggatatcaacttgcacggaaacgtggttgctggcagtgagcgcctggggttccacattcgcggccataaatgttcgagttgcgagttattgtggtcggacaacgtggcccactcaagtctccatggcctacatctctacaaggagagcggtctcgacaactgcacccgaatatctggctttcttgccttcaaaaatttcgattatggggctatgttacatgtggagaactcggtggagatcgagaacatcactcttgtggacaacacaattggtctgctggccgtcgtatatgtattctcagctccgcaaaacagcgtcaagaaggtgcaaattgtgttgaggaactccgttattgtagccacatcatcttccttcgattgcattcaggacaaggtcaagccccacagtgccaacctgactagcaccgatagggccccatccaatccccgaggggggcgtataggcattctctggcccgtcttcacaagtgaacccaatcaatggcctcaagaaccatggcacaaagtgagaaacgatcactcgatcagcggaatcatgaagttgcaggacgtcacattcagtagcttcgtgaaatcctgctattcggatgacctggacgtgtgcatcctcccaaatgcggagaattctgggattatgcacccaatcacagctgaacggacacggatgctcaagataaaagataagaacaagttctatttccctagtctgcagcctagaaaagatctgggcaaggtcgtgtgccccgaactcgactgcgcgtctcccagaaaatacttatttaaagacctcgacggccgtgcactgggacttccgcctccagtttcggtgttccccaagacagaagccgaatggacagcctcattctttaatgccgttacgactgaacaggctttaaagatttccgagtag

SEQ ID NO: 199985 - DNA, 12225 bp, synthetic construct
  misc_feature 1..12225: note = Description of Artificial Sequence: Synthetic coding sequence
  source 1..12225: mol_type = other DNA
atgaccgcctggctgatcagcctgatgagcatcgaggtgctgctgcttgctgtgaggcatcttagtctccatatcgagcccgaagaggggtctctcgcgggcgggacatggatcaccgtcatatttgatgggctggaactcggggttctatatccgaataatggatcacagttggaaattcacctggtaaacgtgaatatggtcgtccccgcactgcggagcgtgccatgtgatgtgttccccgtgttcttagatctccctgttgtgacttgccgtacccgctctgtgctgagcgaggcacatgagggcctctatttccttgaagcctacttcggtggccagcttgtttctagcccaaacccaggtccccgggattcctgcacctttaaatttagtaaagcccagacacctattgttcatcaggtgtaccctccgagcggggtccctgggaagttgattcacgtgtacggctggattatcacgggcagactggagacctttgacttcgatgccgaatatattgacagtcctgtgatccttgaggctcagggcgacaaatgggtgacaccctgctcactcattaaccgccagatgggctcctgctaccccatccaggaggatcacggcctgggcaccttacagtgtcatgtagaaggcgactacataggctcccagaacgtttcctttagcgtgttcaataagggcaagtctatggttcataaaaaggcgtggctcatatccgcgaagcaagacctcttcctctaccagacccacagcgagattctgtctgtgttcccggaaacaggaagcctgggcggacgtacaaatattactattacaggtgactttttcgacaatagcgctcaagtcacgatagctggtattccatgtgatattcgtcatgtctctccacggaagattgaatgtactaccagagcccccgggaaggacgtccgcctgacaactccgcagcccggcaaccgcggcctgttgttcgaggtgggggacgcggtggaaggcctggaactcacagaggcgacccccgggtacagatggcagattgtgcccaacgcatcgagtccgtttggcttttggagtcaggaaggacagccctttagagcacgactcagcggattttttgttgccccagaaaccaataactacacattttggatccaggctgattcccaggcttcactccacttttcttggtccgaggagccccggaccaaggtcaaggtcgcctccatttctgtcggtaccgccgactggtttgattcatgggagcagaaccgagacgagggaacgtggcagcagaaaacccccaagctcgaattgctgggtggcgcgatgtactatttggaagctgagcaccacggcatcgcgccctcaaggggtatgcgaatcggggtacagatccataacacatggctgaatccagatgtggtgacgacctatttacgagaaaaacatcagataagagtgagagcccagcggcttccagaggtgcaagtgcttaatgtcagtggaagagggaatttctttctcacctgggacaatgtgtccagtcaaccaatccctgctaatgcaaccgcccacctgattcagacaactattgaggaactgctcgccgtcaagtgtaagctggagcccctttggtcaaatatacttctgcgcttgggattcgagagaggacctgaagtgagcaatagtgatggcgatttgacatccggcaccgagcctttctgcggaagattttccctgcgtcagcctaggcacctggtgctgacgcctcctgcagcccagaaaggctacaggttggatcaatacacacacctgtgcctcgcatataaaggccacatgaacaaaatcttaaaaatgatagtgtcttttactatcggcttccagaacatggtgaagaacactacttgcgattggagcttaactcgaacttcacctgaatcctggcagttcgattgcacagatctgtgggaaacctgtgtgagatgtttcggcgatcttcagcctccaccagccaacagcccagtgctcgtgcatcagatcaaccttctgccacttgcccaggaaactggcctgttttatgtggatgaaattattatcgcagacactaacgtgacagtgtcccaagctgatagcggtactgcccggcccgggggaaaccttgtcgagtccgtttcagttgttggctctccccccgtgtactcagtgacttcttggctcgccgggtgtggaacggaacttcctctgattaccgcgaggtcggtgcccacggaaggtaccgaagagggctccggactagttcttgtcactacccaacgaaggcagaggacgagtccccccctgggcggtcacttcagaattcagctcccaaacacagtaatttccgacgtacccgttcagatctcagcgcatcacctgcatcaattgcttcagaacaacgctgatgatttcacgtcccggtacttgaatgcttctgacttcaccgtgaaggaggacttgtacacttgttacgagcatgtgtggacactttcatggtctacgcaaattggtgacctgccaaattttataagagtcagcgatgaaaatctgactggggtcaaccccgcagctgcaaccagggtcgtatacgatgggggggtgttcttaggtcctatattcggggacatgctggcaacagccaaccagcacacccaggtggtcgtgcgcgtcaatgacgtccccgcccattgccccgggtcgtgctcctttcagtatttacagggcagcacaccctgcgtccactccgtttggtactctattgacggagacattaatctgatgatttacattacaggaacagggttctctggggacagccagtttctgcaggtgactgtgaataagacttcttgtaaggtgatcttctccaaccaaaccaacgtcgtctgccagactgatcttttgcccgtaggaatgcaccggatacttatgctggtgaggccaagtggactggctatctctgccacaggtgaggacctgttcttaaacgtaaagccccgcctggacatggtggaaccatccagggcagccgacatcggcgggctctgggctaccatcaggggaagctccctggagggagtgtcccttatcctgttcggctcctatagttgcgcaataaatgtggccacaagcaacagctcccggattcagtgtaaggtaccaccccgcggtaaagacggtagaatagtgaacgtcaccgtgatacgaggcgattattcggccgtgctgcctagggccttcacttatgtgtcttctttgaatccagttattgtgacactgtctcgaaacatttcgaacattgccggcggagagaccctagttataggtgttgcccgcttgatgaattataccgacttggatgttgaggttcatgttcaagacgcccttgccccagtgcatacccaatcagcctggggactcgaggtggcgttgccacccctcccagcgggtctgcatcggataagcgtctccatcaacggcgtgtctatccactcccagggagttgacctgcacatccaatacctgaccgaggtcttttcgatagagccatgttgcggttccctgctgggagggactatcctctccatctccggcattgggttttctagagacccagccctggtatgggtgctagtgggcaatagaagctgcgatatcgtcaatcttacagaagcaagcatttggtgtgagacactgcccgccccccagattcccgatgcaggggcccctaccgtgccagccgccgtggaggtgtgggccggaaacaggtttttcgctcgcggcccatcgccatccttagtcggcaagggttttacgtttatgtatgaagctgcggccaccccggtcgtgactgccatgcaaggagagatcaccaatagttcactctcactgcatgtgggcggatctaatctctcgaactcagtcatcctactgggaaacttgaattgcgacgtagagacccagtcattccaaggcaacgtgagtctgtccggctgctccattccgttgcactctctggaggcggggatctaccccctacaggtgcgacagaaacaaatggggttcgccaatatgagcgtggtgttacagcagttcgccgtgatgcccaggatcatggccatcttcccctctcagggaagtgcctgtggtggaacaatcctcaccgtccgcggcctgcttctgaacagtagacgaaggtctgtgcgagtagacctttccggaccctttacatgtgtcatcctgagcctcggcgaccataccattctgtgtcaggtgtccctcgaaggggacccgttgccaggcgcttccttctcactcaacgtcacagtgcttgtgaacggactcacctcagagtgccaggggaactgcacgctgttcatccgggaagaggcatcgccagttatggatgctttgagtacaaacacaagcgggagcctgactaccgtcctgatcagggggcagcggctcgcaacaactgctgacgagccaatggtattcgtggacgatcaattgccgtgcaatgtgacgttcttcaacgcttcccatgtggtgtgccagactcgggacctcgcgccgggaccccattacctaagcgtgttctacactaggaacgggtacgcttgcagtgggaatgtgagccggcatttctacatcatgccgcaagttttccattatttcccaaagaatttctccctccacgggggctcgttgctaactatcgagggcacagggcttcgtgggcaaaacaccacttccgtctacattgatcagcagacgtgccttacggtgaatataggcgccgagcttatccggtgcattgtgcccacaggaaacggctctgtcgcacttgagattgaggtagatggtttgtggtaccatattggcgtgatcggatacaataaggccttcaccccggagctgatatcaatctctcagtctgacgacattctgactttcgccgtcgcccagatcagcggggccgccaatattgacatcttcatcggaatgagtccatgtgtcggagtttcagggaaccacactgtgctccagtgtgtagtgccctcgctgcccgccggagagtaccacgtgcggggctacgattgcatcaggggttgggcctcgtcagcactggtgtttacatccagggtgattattaccgctgtgaccgaaaacttcgggtgtctgggcggccggcttgtgcacgtgtttggcgccggttttagccctgggaatgtatcagccgcagtctgtggtgccccctgccgcgtattagcaaacgccaccgtatccgcattttcctgtctcgtgttgcctttagacgtgtcactcgccttcctttgtggtctgaaacgcgaggaggatagctgtgaagccgctagacatacttacgtgcaatgcgatctcaccgtcgctatggcaaccgaacagcttctggagtcctggccgtatctttacatctgtgaggaatcttcgcagtgtctgtttgtgcccgaccattgggctgagtcaatgttcccaagtttctccggtctgtttatcagccccaagctggagagggatgaggtgttgatctataatagctcctgcaacattacaatggagacagaggcggagatggagtgcgagactccgaatcagccaattactgtgaagatcaccgaaatccgaaaaaggtgggggcaaaatactcaggggaattttagcctccagttttgccgtcgatggtctcgcacgcattcctggttcccagagaggctccctcaagatggcgataacgttacggtggaaaacgggcagttgttgctcctggacacaaacacgtccatcctgaatctgctacatattaagggtggaaagttaatctttatggcccctggtcctatcgagttgcgggctcatgccatactggtctctgacggcggcgagttgcgaattggaagcgaggataaaccttttcagggcagagcccagatcacactgtatggttcttcttattctaccccttttttcccttacggggtaaaatttttagctgtgaggaatggcacacttagcttgcatggcagtctacccgaggtcatcgtgacttgccttcgcgccaccgctcacgccctggatacagtgcttgccttggaagacgcagttgactggaaccccggtgatgaggtggtcattatttccggcaccggggtgaagggcgcaaaaccgatggaggaaatcgtgactgtggagaccgtgcaggacaccgatctctatttaaaatccccattaagatattcccacaattttactgaaaactgggtggctggagaacatcatatcctcaaagctactgtggctctgctgtcaaggtccatcacaatacagggcaatctgaccaacgagagagaaaaactgctagtgagttgtcaggaggctaacgccccagagggtaatttgcagcactgcctgtatagcatgtctgagaagatgcttggatccagggatatgggcgctagggtgattgtgcagagtttccctgaggagccttctcaagtgcagctgaagggagtccaatttcaggtgctggggcaggcattccataaacacctctcatccctcactctggtgggggcgatgcgggaatcattcatccagggctgcactgtgagaaattcattctccagaggtctttctatgtgtggcactctgggtctcaaggtcgactcaaatgttttctataatatcctcggccacgctctcctcgtcggtacatgcactgaaatgaggtatatttcctgggaggccatccatgggaggaaggacgattggtctggacacgggaatatcattcgaaacaacgtgatcattcaagtgagtggagccgaaggactcagcaaccccgagatgcttacaccaagcggcatttacatctgttcgccaacaaatgtgatagagggaaaccgcgtttgcggagccggttacggctactttttccatttgatgacaaatcagacctcacaggcaccactgctgtccttcacccagaatatcgcgcatagctgcacgaggtacggacttttcgtttacccgaagttccagcccccttgggacaacgtcactggaacaaccctctttcagagcttcacagtgtgggagtctgcgggaggggctcaaatttttcgtagtagcaacttgaggttgaagaacttcaaggtgtactcatgtcgcgacttcggtatcgacgtcttggagtctgatgctaatacctcagtcactgattccctgttgctgggtcatttcgctcataagggctccttatgcatgtcctccggaatcaagaccccgaagaggtgggagctgatggtgagcaatacaacctttgtcaattttgacttaatcaactgtgtggctattagaacgtgcagtgattgttcacagggacagggagggtttactgtgaagacatcccagctgaaatttacaaattctagcaacttagtggccttcccatttccacatgcggccatactggaagacttggacggcagcctgtctggcaaaaatcgctcccacatcttagcttctatggaaacgctgtccgcttcctgtttagtcaacagcagtttcggcagagtcgttcatgggagcgcatgcggaggaggggtactattccatcggatgagcatcggccttgccaatacgcctgaagttagctatgatctgacaatgactgattcgcgaaacaaaaccaccacagttaactacgtgcgagacacactttctaatcctcgtggatggatggctctcctgctggaccaggaaacttacagcctccagagcgagaatctttggattaacaggtctctccagtattctgctacatttgacaatttcgcacccggtaattacctgctgctggtccacactgacctacccccctatccagatatcctgctaaggtgcgggagtagagtgggtctgtcttttccttttctcccttctcccggtcagaatcaaggctgcgattggttcttcaactcacagctgcggcaactcacttacctggtctcaggagagggtcaggttcaagtgatcctaagggttaaggagggcatgcctccgactatcagcgcatctacctcagcccctgagtcagccctcaagtggtctctgcccgagacatggcagggagtcgaggaggggtggggcggttacaacaacaccattccaggacctggtgacgacgtgctgattctcccaaacagaactgtgctggtcgacaccgacctccccttcttcaaagggctttatgtcatgggtacgctcgattttcctgtagaccgaagtaacgttttgtctgttgcatgtatggtaatcgctggcggcgaattgaaggtggggactctggaaaacccacttgaaaaagaacagaaattgctaatcctcctgagggctagtgagggcgtcttctgtgaccgcatgaacggcattcacatcgatccgggcactataggagtgtacgggaaggtacatctttactcagcataccctaaaaattcctggacccaccttggcgccgatattgcttctggcaatgaaagaatcattgtcgaggacgccgtggattggagacctcatgacaaaatcgttctctccagcagctcctatgaaccccacgaggctgaggtgctgaccgtgaaggaggtcaaaggacatcacgtccgcatctatgaacgcttgaagcacagacacatcggtagcgttcacgtaacagaagatggtaggcatattcgattggcagccgaggtggggttgctcactcgcaatattcagatccagcctgacgtgtcgtgtcgcggacggttgtttgtgggcagcttccgcaaatcctcaagggaagaatttagcggagtcctacagctgcttaatgtggagatacagaacttcggatccccgctgtactcctcagtggagttctctaacgtctccgctgggagctggattatatctagcactctgcatcagtcctgcggtggcggaatccacgcggctgccagtcacggcgtgctgttgaatgataatatcgtgttcggtacggcaggccacggcatcgacctggaggggcaggcttacaccgtaactaacaatctggttgtgttaatgacccaaccagcgtggtcaacgatctgggtggctgggatcaaggtaaaccaggtgaaggacatcaatctgcacggtaacgtggtggccggatccgagagactgggctttcatataaggggacataaatgctcatcatgtgaattgctgtggtccgacaacgtagcacacagcagtttacatggcctgcatctgtataaggagagtggcctggacaactgcaccaggatctctggtttcctggcattcaaaaactttgattatggtgccatgctccacgtagagaatagtgtggagatcgagaatataactttggtggacaataccatcgggctgttagccgttgtttacgtgtttagtgctccccaaaacagtgtgaaaaaggttcaaattgtgcttagaaactcagtcatcgtcgccaccagcagctctttcgactgcatacaggataaggtgaagccacactccgcaaacctgactagcacagacagagctccgtcaaaccctcgggggggccgcattgggatcctctggcctgttttcacatcggagcccaaccagtggccgcaggaaccctggcacaaggtgcgcaatgatcattccatctccggtattatgaagctccaggatgtgaccttttcaagcttcgtaaagtcctgttatagtgatgatttggacgtatgtattctgcccaatgcagaaaactcaggcatcatgcatccaataacagctgagagaacccgcatgctcaaaattaaggacaaaaacaaattctattttccctctctgcagccccgtaaggacttagggaaggtggtatgccctgagttggattgtgccagcccgaggaaatatttgtttaaagacctagacgggagggctctgggtctcccaccaccagtctccgtatttccaaagactgaagcagagtggacagcctcattctttaacgccggcacattcagggaggagcagaagtgtacctaccagttcctcatgcaggggttcatctgcaagcagacagaccaggtcgtcctaatcctggacagcgccgacgccatctgggccatccagaagctctaccctgtggtgtctgtgactagcggctttgtcgacgtcttctctagcgtcaatgccaatattccatgttccaccagcgggtccgtttctactttttactccattctccccatccggcagatcaccaaggtttgttttatggatcagaccccccaggttctgagattttttctactcggaaacaaaagcacttcaaagctcctactcgctgtgttttatcatgaacttcagagccctcacgtgtttttgggtgagtcttttatcccgccaacattagtgcaaagcgctagcctcctcctgaatgaatctatcggagccaattatttcaacattatggacaacctgctgtacgttgtgctccaaggggaggaacctatcgagattcgatcgggggtttccatccatctcgcgttgactgtgatggtgtccgtgctcgaaaagggctgggagatcgtgattctggagcggctgactaacttcttacagattggtcagaaccagattagatttatacatgagatgcccggacacgaggaaaccctgaaagcaatcgctgattctcgggcaaaacggaagcgcaattgcccgactgtgacttgcacgagccactaccggagggtcggccagagacggccactgatgatggagatgaattcccaccgtgccagcccgccaatgaccgtggagactataagtaaagtgatcgtcatcgaaattggggacagccctactgtgcggtcaactggtatgatatcatccttgtctagtaataagttacagaacctggcacatcgcgtcatcaccgcccagcagacaggagtgctagaaaacgtgctcaacatgactattggggccttgctggttacccagtccaaaggagtaattggttacggaaacacctcatctttcaaaaccggaaatctcatctacatcagaccgtacgctctcagcatcctggtgcagccaagcgatggtgaagtgggaaacgaactgccggtacagccacagcttgtctttctggacgagcagaaccggagggtggagtctttaggcccccctagtgagccttggaccatcagtgcctctcttgagggagcttctgactcagtactcaaaggttgcactcaagccgaaactcaagacgggtacgtttcgttttataatcttgccgttctcattagcggatccaactggcacttcatctttacagtgacctcaccgcccggcgtgaatttcactgcacggtctaagccattcgccgtgcttcctgtgacacgtaaggagaaatctactattattctggctgcaagtcttagttctgttgcctcttggctggccctaagctgtctggtctgttgctggctgaagcggagcaaaagccgtaagacgaaacctgaggaaattccggagtcacagaccaacaatcaaaacattcacatccacattagctctaaaaggagagagtcacaagggccaaagaaggaggacactgtggttggggaggacatgcggatgaaggtaatgttgggcaaggtcaaccaatgcccccaccaacttatgaatggcgtcagccgccgtaaggtaagccgtcacatcgtccgggaggaagaggccgctgtgccagccccgggcaccacgggaatcacttcccacggccatatttgtgctccaggagcacctgctcagcaggtctatctccaagagacaggaaattggaaggagggtcaggagcagcttctcaggtaccagctcgccggccagaatcagctcttactattatgccctgactttaggcaggagagacagcaactccccggtcagagcaggttgagcaaacaaagcggatccctgggcctatcacaggagaagaaagcttcatgcggagcaaccgaggccttttgcctgcattccgtgcaccctgaaaccatacaggaacagctgtag

SEQ ID NO: 199986 - DNA, 10191 bp, synthetic construct
  misc_feature 1..10191: note = Description of Artificial Sequence: Synthetic coding sequence
  source 1..10191: mol_type = other DNA
atgaccgcctggctgatcagcctgatgagcatcgaggtgctgctgcttgccgtcaggcacctctctctgcatatagagccagaggagggatccctcgcagggggcacctggatcaccgtcattttcgacggactggaactcggcgtcctgtaccccaataatggctcgcaacttgagatacacctcgtcaacgttaacatggttgtcccagcgctgagatcagtgccctgcgatgtgtttccggtgttcctcgatctcccagtggtaacctgccggaccagatctgtgctctccgaggcccacgagggtctctattttctggaggcctattttgggggtcaactggtgtcaagccctaaccccggtcctcgggattcttgtactttcaaattctccaaagcgcagacacccattgtgcaccaagtgtacccaccaagcggtgtccccggaaaactcattcacgtgtatggatggattatcaccgggcgcctcgagacatttgattttgatgcagaatatattgactcaccggtaattctggaagcccaaggcgacaagtgggtcactccctgctcactaattaatcggcaaatgggcagctgctatcccatccaggaggatcatggactggggacactccagtgccatgtggagggagattacatcggctcacagaatgtgagtttttcagtcttcaataagggcaaatccatggtgcacaagaaggcttggctcatatctgctaagcaagaccttttcctgtatcagacacactcagagatcttgagtgtgttcccggagacaggaagccttggagggagaaccaacataacgataacaggtgacttttttgacaattccgcccaggtgaccattgctggtatcccctgcgacattcgacacgtgtcccctcgcaaaattgagtgcacaactcgcgctcctggaaaggatgttcggctgactactccccagcccggcaatcgcggcctgctttttgaggtgggcgacgcagtagaaggcctcgagttaaccgaagccaccccgggctaccgctggcaaatcgtccctaatgcttcctcaccctttgggttctggtctcaagaagggcagccttttcgcgcgagactgtctgggttttttgtggctccagagacaaataactacacgttttggatacaggccgatagccaagctagtctccactttagctggtccgaagaacctaggacaaaggtgaaggtggcaagcatctctgtcggcacggctgattggtttgatagctgggagcaaaacagagacgaaggcacttggcagcaaaaaacccccaaattagagttgctgggaggcgcaatgtactacctagaagccgaacatcacgggattgccccctctcgcggaatgagaataggcgtgcagatccacaatacctggctgaaccctgacgtcgtgaccacttacctacgagagaaacatcagataagagttcgggcccagcggctgccggaagtccaggtcctcaatgtgagcggccgcgggaacttcttcctgacctgggacaatgttagctctcagccaattcccgcgaacgccaccgctcacctaatacaaacaactatcgaggagctgctagcagtgaaatgcaagcttgaacctttgtggtctaacattctgcttagactgggctttgagcgcggacctgaggtgagcaattcagacggggacctcacaagcggcaccgaacctttttgcggaaggttctccctccgacagccacggcatctcgttctgaccccacccgccgcacaaaaaggctaccggttggatcaatatacacatctgtgtttggcctacaagggccacatgaacaagatcttaaagatgatcgtgagtttcactattgggttccagaatatggtgaagaatacgacgtgcgattggagtttgactcggacgtctcccgagtcttggcagttcgattgcacggatctgtgggaaacgtgtgttcgttgttttggggatttgcagcctccccccgccaactccccggtgctcgtgcatcaaattaatctgctacccctggcccaggaaactggactgttttacgtggacgaaatcatcatcgccgacactaacgtgacagtgagtcaggccgatagtggcacagcgcggcctggtggcaatttggtagaatccgtttccgttgttggatccccaccggtgtattctgttacctcctggctggcgggctgcggcacagagctgccgttaatcacagctaggagcgtgccaactgagggcacggaagagggaagtggcctagtactggtgactacacagcggcggcagagaacatcgccccccctgggaggacacttcagaatacagctcccaaatactgtgattagtgacgtaccagtgcagatttccgcccatcatctccaccagctgctccagaacaacgcagacgacttcaccagccgttacctgaacgcatctgacttcaccgtgaaggaggacctgtacacctgctatgaacacgtgtggacactgtcatggtctacccagatcggagatctccccaattttattcgggtgtccgacgaaaaccttacaggcgtaaaccccgctgccgcgacccgcgtggtatacgacggtggagtatttcttgggccgatctttggagacatgctcgccacagccaaccaacatactcaggtcgtcgtgagggtcaatgacgtgcctgcacattgtccaggctcttgtagcttccagtacctccaggggagtactccctgcgtccacagtgtatggtactctatcgacggagacataaacctgatgatctatattacaggcacaggattcagcggcgattcccagttcctacaagttacggtaaataagacctcttgtaaggttatctttagcaatcagacgaacgtcgtatgccagaccgatctcctgcctgtagggatgcaccggattctaatgcttgtccgaccctctggccttgctatctccgccaccggggaggacctgttcctcaatgtaaaaccaagactggatatggtggagccctccagagctgccgatatcggcggactgtgggcaacaataagaggttcaagcctggagggcgtcagcctgatcctgttcggctcatactcttgtgctattaatgtggcgacatccaacagtagtcggattcagtgcaaggttcctccacgaggcaaggatggacgcatagtaaatgttactgtaatccgtggagattactctgcagtgctaccacgggccttcacatatgtgtcttcactgaaccctgtgattgtgaccctgtccagaaacatctctaacatagctggcggagaaacccttgtcatcggcgtagctaggcttatgaattatacagacttagacgtggaggttcacgtgcaggacgccctggcgccagtccacacgcaatcagcttggggtttagaagtcgcattaccacctttgcccgccggcctgcatagaatcagtgtaagcatcaatggggtgagcatccatagccagggcgtcgatcttcatatccagtatttgactgaggtcttcagtattgagccctgttgtggctcactacttggggggaccattttgtcaatttctgggatcggattcagtagggatcccgctctcgtgtgggtgcttgtcggaaatcggagttgcgatattgttaatctcacagaggcgtctatttggtgcgaaacccttccggccccccagatcccagatgccggcgcgccgacggtgccagccgccgtggaggtctgggcaggtaacaggttttttgctagggggccgtcccctagtctcgttggtaagggtttcaccttcatgtacgaggcagctgccactcctgttgtgactgcaatgcaaggcgagatcacgaactcctccctgtcactccatgttggagggtcgaacctaagcaactctgtcatcctgttaggaaacctgaactgtgacgtcgagacccagtcattccaaggcaatgtctccctgtcaggctgttctatccccctccatagtctcgaagccggcatatatcctctgcaagtccgccaaaaacagatgggctttgcaaatatgtctgtcgtgctgcagcaattcgctgtgatgccaagaattatggccatcttcccctctcagggctccgcatgcgggggcaccattcttaccgtgaggggcctcctcctgaatagccgtcgccgcagcgtacgggtggacttaagcgggccatttacttgcgtgattctctcactaggcgatcacaccatactgtgccaagtcagtcttgagggcgatccacttcctggcgcctccttttccctgaacgtgactgtgctcgttaatggattgacctctgagtgtcagggtaactgtacactgttcatccgagaggaggcaagtcctgtgatggacgccctgtccaccaatacgagtggtagcctgacgacagtgctgatcagaggtcagaggctcgccactactgccgatgagccaatggtctttgttgatgatcaactgccttgcaatgttacatttttcaacgccagtcacgtcgtgtgtcaaactcgcgatctggcccctgggccccactatctctcggtcttctacacacgcaacggctatgcttgcagcgggaacgtctcgaggcatttttacattatgccacaggtttttcattacttccccaagaatttcagtctccacgggggatcgctactaaccatagagggtactgggctgcggggacagaacacaactagtgtctacatcgaccaacagacctgcctgacagtgaatatcggggctgagctgattcgctgcattgttccaactgggaacggctccgtcgctttggagatcgaagtcgacggtctgtggtatcacattggcgtgataggttataataaggccttcacccctgaattaatctccatctcgcagagcgacgacatcctgacttttgcagttgcccaaatatctggggcagccaacattgatattttcattggaatgagcccctgtgtcggggtctcgggaaatcacacagtgctacagtgtgtggtgccatctttacctgccggcgagtaccatgtcaggggatatgattgcataaggggatgggctagctccgccctggtcttcacctccagggtgattataacagctgtgaccgaaaatttcgggtgcttgggaggccgcctcgttcacgtctttggcgccgggttctcgccagggaacgtttcagcggcagtttgcggggctccctgcagagtcctcgcgaacgctaccgttagcgcattttcctgcctagtattaccactcgacgtcagtctcgcgtttctctgcgggcttaaacgggaagaggacagctgtgaggctgcacggcatacctacgtgcagtgtgatctcacagtggctatggctacggaacagctattagagtcatggccatatctgtatatttgtgaggagagctctcagtgccttttcgtcccggaccactgggcagagtccatgtttccctctttctccgggctgtttattagtcccaaattggagagggatgaggtcctgatctacaattcttcctgcaacatcacaatggaaacggaggcagaaatggaatgcgaaactccaaatcagcccatcactgtgaagatcaccgaaatccgaaaaaggtggggacagaatacccagggaaacttttccctgcaattctgcagacgttggagccgcacacattcctggtttcccgaacgcctaccccaagatggggacaatgtgactgtggagaacggacagctcctcctgctggacaccaatactagcatcctgaatctcctgcacataaaaggaggcaaacttatttttatggccccagggcccatcgaacttagggctcacgcaatcctagtttctgacggaggggagctcaggatcgggagcgaagacaaacccttccaaggaagagcacagataactctgtacgggagtagttatagcactccgttttttccgtatggggtgaagttcttggccgttcgcaacgggacgctaagtttacacgggtcacttcctgaggtcattgtgacctgtctgcgggccacagcgcacgcactggacactgttctggcattagaagacgccgtcgattggaaccccggcgatgaagttgttattatttcagggaccggcgtaaaaggtgctaagcctatggaggagatcgtgacggtggaaaccgtccaggacactgacctgtacctgaagtccccactgcggtattcgcacaattttactgaaaattgggtggcgggcgaacaccacattctgaaagctaccgtggcgctgctgtcccgttccattactattcaagggaacctgactaatgaacgagagaagctcctagtctcgtgtcaggaggctaatgcacctgaggggaatttacagcactgcctttactcgatgagtgaaaagatgctcggatcacgggatatgggtgcaagagttatagtgcagtcttttcctgaagagccaagccaggtgcagttaaaaggtgtgcagtttcaagtcctgggtcaagcttttcataagcatctcagcagcctaaccctggtgggagctatgcgagagtcattcatacagggctgtacagtgagaaattctttctctaggggactgagcatgtgtgggacacttggtctgaaagttgatagtaatgtattctacaatattctggggcatgccctcctcgtgggaacgtgcactgaaatgcgatatattagttgggaagcaatccatgggagaaaggacgattggagcggccacggcaacatcattaggaacaacgtcatcatccaagtctcaggggcagaagggctgtctaaccccgaaatgctgacaccaagtggaatatacatatgctctcccacaaatgtaatcgagggtaaccgcgtttgcggagcaggatacgggtactttttccatctcatgaccaaccagacatcacaagctcctctgctgagtttcacacagaatattgcccacagctgtacacggtacggactattcgtttatcccaagtttcaacctccctgggacaatgtcacagggacaacgctgttccagagtttcaccgtctgggaaagtgccggaggagctcagatattcagatcaagcaacttgcgactgaagaactttaaagtttactcgtgcagagattttgggatcgacgttctggagtcagacgctaacaccagtgttaccgattcacttctgcttggccactttgctcacaaggggtcattatgcatgtcttccggcattaagacgcctaagcggtgggagttgatggtctctaatactacgttcgtcaattttgatctcattaactgtgtggcaattcgaacctgctcagactgtagccagggccaaggaggttttaccgtcaaaacttcccagcttaagttcactaattcatccaacctggtggcctttcctttcccccatgccgccatactggaagacctcgacggttccctgtctggcaagaaccgatcacatatcttagccagtatggaaacactgtccgcgagctgtttggttaatagcagttttggccgagttgtgcacggcagtgcctgcggagggggggttctgtttcaccgcatgtcaatagggctggcaaacacccctgaggtgagctatgatttgacgatgactgattcaagaaacaaaacaaccactgtgaattatgtacgagacacgcttagcaacccgagaggctggatggcactgctcctggaccaggagacttatagtttacagagcgagaacctgtggattaacagaagcctgcagtatagtgctacctttgacaactttgcgcctggaaattacctgctgctagtgcacacggacctgccaccttatccagacatcctccttaggtgcggatcacgagtcggcctctcttttccctttcttcccagccccggccagaaccaagggtgcgactggtttttcaatagccagctgaggcaactcacctatctcgtctccggggaaggtcaggtgcaggtcatattacgggtcaaggagggaatgccccccaccattagtgcttccacttctgctccagagtcagcactaaaatggtccttgcccgaaacttggcagggcgttgaagaggggtggggcggctataacaacacaatacccggtccgggagacgacgtgctgattttaccgaatcggaccgtcttagtagacaccgacctgccatttttcaaaggactatacgtaatgggaacgctggacttcccagtggacagatctaacgttctaagtgttgcctgtatggtcatagccggcggggagttgaaggtgggtactctggaaaatcctttagaaaaagagcaaaagctgctgattctcctccgggcatccgaaggggttttctgtgatagaatgaacggaatacatattgatcccgggaccataggggtttatgggaaagtgcatctgtattccgcttatcctaaaaacagttggacgcacctgggagccgacattgcttccgggaatgaacggattattgtggaagacgccgtggactggcgcccacacgacaagattgtgctttcctcatcatcctacgagccacatgaggctgaagtgcttaccgtgaaggaggtcaaggggcaccatgtccgcatctatgaaaggttaaagcataggcacatcgggtcagtacacgtcaccgaagacggcagacacattcgtctggcggcagaagtgggcttgctgactagaaatatccagatccagccagacgtgtcttgcagaggaagactctttgtaggttcctttcgaaagtccagccgggaggagttctcgggagtgctccagctgctgaatgtggaaatacagaatttcgggtctcccttgtattcaagcgtcgagttctcaaacgtatccgcggggagctggattatcagttccactctgcatcagtcctgtgggggggggatacatgctgcagcatcacatggtgtcttgttgaacgataatatcgtattcggtactgccgggcacgggatcgatctcgagggccaggcgtataccgttaccaacaatctggtggtgctcatgacccagccagcctggtcaactatctgggtcgctgggatcaaagtcaatcaggttaaggatattaacctgcatggaaacgtcgtggctgggagtgaacggctcggcttccatatcagggggcataagtgttccagttgtgagctgttgtggtcagacaacgtggcccactcaagcctccatgggctgcacctgtataaagagtcaggtctggataattgtacccgtatcagcggcttcctcgctttcaagaacttcgactacggagccatgctccacgtggaaaactcggtcgaaatcgagaatattacccttgtcgacaacaccatcgggctgctcgctgtggtctacgtcttttcggcaccacagaacagcgtgaaaaaagtgcaaatcgttttgcgcaacagcgtgatcgttgctacttcctccagctttgactgtattcaggacaaggtcaagccccacagtgccaatctgaccagtacagatagggcaccctcaaacccacgcgggggtagaataggcatactgtggcctgtttttacgtccgagcctaatcagtggccccaggaaccctggcataaagttcgtaatgatcactccatttcgggcataatgaaactccaggatgtgaccttcagctctttcgttaagagctgctatagtgatgatttggacgtctgtatcctgcccaacgccgagaactcaggaatcatgcacccaatcacggccgagcggacacgtatgctcaagatcaaggataaaaacaaattttattttccatcactgcagcccaggaaagatctcggcaaggtcgtgtgccccgagttggattgcgcaagccccagaaaatatctgtttaaagatctggacgggcgagcgctcggtctgccacccccggtgagcgttttccctaaaactgaggcagaatggactgctagtttctttaacgccggtactaaagaacagagtattgagattaacgtatag

SEQ ID NO: 199987 - DNA, 12732 bp, synthetic construct
  misc_feature 1..12732: note = Description of Artificial Sequence: Synthetic coding sequence
  source 1..12732: mol_type = other DNA
atgggccacctgtggctgctgggcatctggggcctgtgcggcctgctgctttgtgccgcggatcctagtacagatgggtctcagattatacctaaggtgactgaaattattcccaaatatggatcaatcaatggggccaccagactgaccatcaggggagaaggatttagtcaggctaaccagtttaactacggcgttgacaatgccgaactgggaaatagcgtgcagcttatcagttcgttccagtctattacttgcgatgtcgagaaggatgcttcacatagtacccagattacctgctacacccgtgctatgccggaagactcctacactgtacgtgtgagcgtcgacggcgtaccagttacagagaataacacatgcaagggtcacatcaattcttgggagtgtacttttaacgcaaagagtttccggacaccgaccatcaggtctatcacaccactgtccggtacacccggcactctgattaccatccaaggcaggatcttcacggatgtgtatggcagtaatatcgccctatccagtaatggcaagaatgtgcgcatcctccgcgtgtacattggaggcatgccctgtgagctgctgatcccccaatccgacaacctctatggcttgaagttggaccacccaaacggagacatgggcagtatggtttgcaagacgactggcacgtttattggtcatcacaatgtgtcctttatcttagataatgactacggacgatcctttccgcagaagatggcctattttgtctcttctctgaataaaattgcaatgtttcaaacttatgcagaggtgaccatgatctttcccagccagggctcaatccgcggcggcacgacattgacaatttccggacggttcttcgaccagaccgattttcctgtacgtgtactggtggggggcgaaccttgtgatatactgaatgtcaccgagaattccatttgctgcaaaactcctcccaaaccgcacattcttaagactgtctatcccggtggccggggcctgaaactggaagtttggaataattcccgaccaatccgcttggaagagatcctggaatacaatgagaagacccccgggtacatgggagccagctgggtggactctgcgagctatatttggttgatggagcaggatacattcgttgcgcggttcagtggatttttagtggccccagacagcgacgtgtaccggttttacattaaaggtgatgatcgctatgccatctacttcagccagaccggattacccgaggacaaggtgcgaatcgcttatcattctgccaacgctaactcttatttttcaagccccacgcaaaggtccgatgacatacacctccagaagggcaaggaatactatatcgaaatcttgcttcaggagtataggctaagcgccttcgtagacgtgggtctctaccaataccggaatgtctacaccgaacagcagacaggagatgccgtgaatgaagagcaggtcattaagtcacagagcactatattacaggaggtgcaagtgatcactctggagaactgggaaacgacaaatgcgattaatgaggtccagaaaatcaaggtgaccagcccctgcgtcgaggcgaacagttgtagcctctaccagtataggctcatttacaatatggagaagaccgtattcttaccggccgatgctagtgaattcatcttgcagagcgccctcaacgacctatggagtatcaagccagataccgtgcaagtaatccgtacacaaaatcctcagtcctatgtctatatggtcacctttatctccaccaggggggattttgacctgttaggttacgaggtagtggaaggcaacaacgtcactttggacataaccgaacagacaaagggcaaacccaacctcgagacttttacccttaactgggacggcattgcatcaaagccgcttacgctctggtctagcgaagctgagtttcaaggtgcggtggaagaaatggtgtccactaaatgtccaccccagatcgccaactttgaggagggtttcgtcgttaaatactttcgcgactatgaaacggactttaacctagagcatataaatcgcggacagaaaactgctgagacagatgcctactgtggcaggtatagcctgaagaaccctgccgtgctcttcgacagtgctgacgtcaagccaaaccggcgaccgtacggcgacatcctgctgtttccatataatcagctatgccttgcatacaagggatttttagcaaattacattggacttaagtttcagtaccaggacaacagcaagatcacacgcagtacggacacacagttcacctacaacttcgcatatggtaataattggacctatacatgtatagaccttttggatctcgtgaggacgaagtacaccgggacaaatgttagcctgcagaggatttctctgcacaaggcctctgagtctcaatcattttacgtcgacgtagtgtatattgggcacacatccacaatttccacactggatgaaatgccaaaacgaaggctgccagcacttgccaacaaggggatctttttggagcacttccaggttaaccaaactaaaaccaacggtcctacaatgaccaatcaatactctgtcacaatgactagctacaactgctcttacaacatacctatgatggccgtctcctttggccagatcatcacacacgaaacagagaacgagtttgtttacagaggtaacaattggccaggcgaaagcaagattcacattcagaggattcaggccgccagccctcctctttcaggctcttttgatatccaggcctatggccacattttaaaagggctcccggcggcagtgagtgccgctgacttacagtttgcactacagtcgctggaagggatggggaggatatctgttacccgtgagggcacttgtgcaggctacgcctggaacatcaaatggcggtccacgtgtggcaaacagaacctgctacaaattaacgacagtaatatcattggggagaaagcaaacatgacagttacacgcattaaggagggtggtctctttagacagcacgtgcttggagacttactgcggactccctcccagcagccccaggtggaagtctatgtgaatggcatccccgctaaatgtagtggagactgcggctttacatgggacagtaatataacacctctggttctcgccatatctccgagccagggctcatacgaggagggtacgatcttgactattgtgggatcaggattttcgccctccagcgctgtgacggtgtccgtcggccccgtggggtgcagcctcctgtccgtggacgaaaaagagctgaagtgccagattctgaacggctcagccggacacgctcccgtggccgtcagcatggctgatgtaggattagctcagaatgtgggcggagaagaattttactttgtctatcagtcacagataagtcacatctggccggattctgggtccattgccggcggaacccttttgaccctgtcaggattcggatttaatgaaaatagtaaggtgctggtggggaatgagacttgtaacgtgattgagggagatttgaatcggatcacctgtcgcacaccgaagaagaccgagggcacagtggacatctccgtcacaacgaatgggtttcaggcaacagctcgtgacgctttctcgtataactgtctacagactccaatcatcactgacttttcgcccaaggtccgcaccatcctgggagaagtgaatctcactatcaaggggtataatttcggaaacgagctgactcaaaatatggcagtttatgtaggcgggaaaacctgccaaatcctccactggaacttcaccgacattagatgcctacttcctaagcttagcccgggcaagcacgatatttatgttgaagttcgaaactggggctttgcgagtaccagggataagttgaactcttctatacagtatgtgctcgaagtcacttcaatgtttccgcaaaggggaagtttgttcggcggaactgaaataactatcagggggtttggcttcagcaccatacctgcagagaacacagttcttttgggatctatcccgtgcaatgtgacttcctcatctgagaatgtgattaagtgcatcctccattccacgggaaacatcttccgtatcactaataacggcaaggacagcgtacatggtttgggttatgcatggagcccccccgttctcaacgtgagcgtgggcgataccgtggcttggcactggcagacacatccctttttgcggggtataggctatagaattttcagcgtgtcctctccaggcagcgtcatctacgacgggaaagggtttacgtcagggcgtcagaaatcaacatcaggatccttcagctaccaattcaccagtcccggcatccattactactcctcgggttacgtagacgaggcccacagtatcttcctgcagggtgtgatcaatgtgctgcctgcggaaactcgccacattccattacacctgtttgtcggacgctctgaagctacctatgcgtatggtggacctgagaatctgcacctgggatcatccgtagccggttgtctcgccaccgagcctttatgttcactgaataatacaagagtgaaaaactctaagagattactctttgaggtgtctagctgcttcagtccttccatatctaacattaccccctctactgggactgtcaacgaactgattacaattatcggccacggcttcagcaatcttccctgggcaaataaggtgacaataggaagttatccctgtgttgtggaggagtcctccgaagattccattacctgtcatattgacccccagaatagtatggacgtcgggattcgtgagaccgtgacccttacggtctacaaccttggaacagctattaatacactttccaatgagtttgatagacgcttcgtcctgcttcccaatatcgatttagtcttgcccaatgccggctcaaccacagggatgacgtcggttactattaaaggctcagggtttgcagtttcttctgctggcgtgaaagtcctgatggggcactttccctgcaaggtcctctctgtgaactataccgcaatcgagtgtgaaacaagccccgccgctcagcagctcgtggatgttgaccttctgatacacggcgtccccgcgcaatgtcagggaaactgcacgttcagttatttagagtctattactccgtatatcactggcgtgtttccaaattctgttatcggatctgtcaaagtgctcatagaaggcgaaggtcttggcactgtactggaggatattgccgtgttcattggcaaccagcaatttagagccattgaagtcaacgagaataacattactgccctcgtgacccccctgcccgtgggccatcacagcgtgagtgtggtggtgggatcgaagggtctcgcccttgggaatcttactgtcagtagtccccccgtcgcctcactgtctcccacttccggcagcatcggcggcggtacaactttggtgataacaggcaacgggttctacccgggcaacactaccgtgactattggcgatgagccttgtcagataatctctatcaaccctaacgaggtctactgccgaactccagccggcactaccggaatggtggacgttaagatcttcgtgaacaccatcgcctacccaccactgctcttcacttatgctctcgaagacaccccattccttaggggcattattccaagtcgaggccctcctggaaccgagatcgagattaccggcagcaatttcggatttgagattcttgaaatctccgttatgattaacaacatccaatgcaatgtcactatggctaacgattctgtggtccagtgtatcgtgggtgatcacgcaggcggcacttttcccgtgatgatgcaccacaagacgaaaggctcagccatgtcaacagtcgtgttcgagtaccctctcaatatccagaatatcaatccctctcagggctctttcggtggcgggcagaccatgactgtgaccgggaccggcttcaatccccagaactctattatcctggtctgcggctctgagtgtgcaattgacagactccggtctgattataccacgctactctgtgagatcccatctaataacggcacaggagctgaacaggcctgcgaggtgagcgtcgttaacggcaaggatctgagccagtcgatgacacccttcacatacgctgtttcgttaactccactgatcaccgctgtgagcccaaaacggggctcgactgctggaggtacacgcttgaccgtagttggctcagggttttcagaaaatatggaagacgtgcacatcaccatcgcagaagcaaagtgcgacgtggagtactctaataaaactcatatcatttgcatgacggatgcccacactctctcaggatgggcccccgtctgcgtgcacattcgcggagtagggatggcaaagctggacaacgccgatttcctgtacgtggatgcctggtcatccaatttttcttgggggggcaagtcgcctcccgaggaaggcagtcttgtcgttatcacgaaagggcaaactattttgcttgatcagagcaccccgatcctcaaaatgctgttaatccagggcggaacactaattttcgacgaggcagacattgaattgcaggcggaaaatatcctcatcaccgacgggggggtgctgcagatcggtacagagacatcccccttccagcacaaagctgtaatcaccttgcacgggcacttacgcagccctgagttacccgtgtatggggctaagactctagccgttagggagggaatccttgatcttcatggagttccagtgcctgtgacatggacaaggttagcccatacagcaaaagcgggcgagcggattcttattctgcaagaagcagttacctggaagcctggggataatatagttatagccagcacaggacatagacatagtcaaggtgaaaacgagaaaatgaccattgcatctgtttccgccgacggcatcaatattactctgagcaatcctctgaactacactcacctggggatcaccgtgactctcccagatgggactctgttcgaggcacgcgccgaggtgggaatcctcactcgaaacatcctcatacggggctctgataacgtcgaatggaacaacaagataccagcttgcccagacggcttcgacaccggggagtttgctacccaaacatgccttcaaggaaaatttggtgaggaaattgggagcgatcagtttggagggtgtgtgatgtttcacgctcccgtcccaggcgccaacatggtgaccgggcggatagagtatgtcgaagtttttcacgctgggcaggcattccgtctgggacggtaccctatacactggcacttattgggggatctgcagtttaagagttatgtgcgcggttgtgccatccaccaagcctacaatcgcgctgtgaccattcataacacgcatcacttacttgtcgagcggaatatcatttacgatattaaagggggcgccttttttattgaggatggcattgagcacggcaacattctgcagtataacttagccgtttttgtccagcagtccacaagcctgctcaatgacgacgtaacccccgctgcattttgggtgacaaatcccaacaataccatccgacacaacgccgtcgccgggggcacccactttgggttctggtaccggatgaataaccatcccgacggcccatcctatgaccgcaatatctgccagaaaagggtgcccctcggcgagttcttcaacaacacggtgcattcacaggggtggtttgggatgtggatctttgaagaatactttcctatgcagactggttcatgtacaagtactgtacccgcaccggccatcttcaatagtctgactacatggaattgtcagaagggggctgaatgggtcaacggaggcgccctgcagttccacaactttgttatggtcaacaattacgaggctggcattgaaaccaaacgcatcctggccccctacgtggggggctggggggaaaccaacggtgccgtgataaagaacgctaagattgtgggtcatctagatgaattaggtatgggcagcgccttttgtaccgccaaagggctggtccttccctttagcgagggcctcactgtttcctccgtgcattttatgaattttgataggccgaactgtgtggccctgggagtgacatccatctcgggagtctgtaatgacagatgtgggggctggtccgcaaagttcgttgacgtgcagtattcgcatactcccaataaagcgggtttccggtgggagcacgagatggttatgatagacgttgatggctctctgacgggacataaaggccataccgtcattcctcactctagcctacttgatccctctcattgcacacaggaggccgagtggtccattggctttcccgggagcgtgtgcgatgcgagtgtaagttttcaccgacttgctttcaatcagccctctcccgtatctctcttagaaaaagacgtggtgctatccgactccttcggcacttcaatcattccattccagaagaagcggctcactcatatgtcggggtggatggccctaatacccaatgctaatcatataaattggtacttcaaaggagtcgaccacattaccaacatatcctatacatccacgttttatggattcaaagaggaagactatgtgatcatcagtcacaactttactcagaatccagacatgttcaacataattgacatgcgcaacgggtcgtcgaatccactgaactggaacacatccaagaacggagactggcacctagaggctaatacgagcactctctactacctggtgagcggaaggaacgatctccaccagtcccaactgattagcggcaacctggaccctgatgtaaaagatgtggttattaatttccaggcctattgttgcattctgcaggactgctttcccgtgcatccgccatcacgtaagcctatacccaagaagcggcctgcaacatacaacctttggtcgaacgacagtttctggcagtcaagtagagagaataattatactgttccacatcccggcgcgaatgtcatcatacccgaaggcacatggattgtggccgacatcgatatgccctccatggagaggttaatcatctggggtgtgctggagttggaggacaaatacaatgtgggagccgccgagtcttcgtatagagaagttgttcttaacgcgacgtacatctccctccaaggtggtcgactgataggcgggtgggaggataacccgtttaaaggcgacttgaagatcgtcctgagaggcaaccacacgacacaggactgggctctacccgagggacctaaccaaggggcgaaggtgctcggggtttttggtgaactggatttgcatggaattccccattctatctataaaaccaaactgtctgagactgctttcgcaggctcaaaggtcttgagtctaatggatgccgtcgactggcaggagggggaggagatcgtcattactacaacctcttacgacttccatcagactgagacaaggtccattgttaagatcctgcatgatcataagatcctgatcctgaacgactctctctcttacactcactttgcggagaagtatcatgttccaggcaccggggaaagttataccctcgcagcagacgttggtattctttcccgcaacatcaaaattgtgggcgaggattatcctggctggtctgaggattcctttggtgcccgcgtgctggtgggctcctttacagagaatatgatgacattcaagggaaatgctcggattagcaatgttgaattttaccacagtggccaagagggctttcgagactccaccgacccgcgctacgccgtgacttttctcaacttgggacagattcaagagcacgggtcttcttacatacggggttgtgcatttcatcacggattctcacccgctattggcgtcttcgggacagatggcttggacatcgatgacaacatcatccacttcactgtcggcgagggcatcaggatctggggaaacgccaatcgcgttcgtggaaaccttatcgctctgtctgtgtggccaggcacttatcagaacaggaaagaccttagcagcactttgtggcatgccgctatagaaatcaatagagggacaaacacagtcctgcagaacaacgtggtagcgggtttcggaagggcaggctacagaatcgacggggagccttgtccgggacaatttaaccctgtcgagaaatggtttgataatgaggcccacggcgggctttatggcatctatatgaatcaggacgggttgcccggctgtagcctgatccagggattcacaatctggacctgttgggattatgggatctattttcagactaccgaaagcgtgcacatctataatgttacactggtggacaacgggatggccatctttcctatgatttatatgcccgcagcaatttcccacaagatcagcagtaagaatgtccaaattaagtcttcattgatcgtgggctccagccccggatttaactgcagtgatgtcctgacaaatgacgatccaaatatcgaattaaccgcggctcaccggagcccacgttcaccctctggtgggcggtctggaatctgctggccgaccttcgcaagcgcacataacatggccccgagaaagccacatgcgggcatcatgtcttacaatgccatttccggcctgctggatattagtggaagcacctttgtgggatttaagaacgtttgttcgggggagactaatgtgatctttattactaaccccctgaatgaagatcttcagcatccaatacacgtgaagaatataaagttggtggacactacagagcaatcaaagatcttcatacatcgccctgacatttccaaagtgaacccctcagattgcgtagacatggtgtgcgacgccaagcggaaaagctttctcagggatattgatggctcctttttgggcaacgccggctccgtgatacctcaggccgaatacgagtgggacggtaactcccaggtcggtattggggattatcgaattcctaaggcaatgttaacatttctgaacggcagtcgaatcccagtgacagagaaagcaccccacaaaggaatcattcgggattctacatgtaaatacctaccagagtggcagagctaccagtgctttggaatggagtacgccatgatggtcatcgaaagccttgatcccgacacagaaactcggcgtttaagccccgtcgcgatcatgggtaatggctacgtggaccttataaatgggcctcaggaccacggctggtgcgccggttatacctgtcagagacggttgtctttattccactcaatagtggcacttaacaaaagctatgaggtctactttaccggcacctctcctcagaacctacgtctgatgcttcttaatgtggatcataataaagctgtcttggtcggcattttcttttccacattacagcgccttgatgtctatgtgaacaatcttctggtgtgtcccaaaaccaccatatggaatgcccaacaaaagcactgcgaactcaacaatcacttgtataaagaccaatttctgcctaatctggactctaccgttcttggagagaactactttgatggcacttatcagatgctctatttgctggttaaaggaaccatccccgtagaaatccacaccgccactgtaatctttgtgtcgttccagctctccgtcgccaccgaggatgacttttacacatcccacaatctggtgaagaatcttgccctgtttctcaagataccgagcgacaagatcagaatcagcaagatccggggaaaatcactgaggagaaagcgctcaatgggtttcatcattgagattgaaatcggcgacccccctattcaattcatatcaaatgggacaacaggccaaatgcaactgtccgaactacaggaaattgccggctctcttggtcaggccgtcattctgggcaacatttcaagcattctcggctttaacataagctcgatgagcattactaatcccctgccgagtccatcagactctggctggattaaggtgaccgctcaacccgtagaaagatccgcattcccagttcaccacgtagcctttgtgagcagccttctggtcatcacacaaccagtcgccgcacagcccggccagcctttcccacaacagccctcagtaaaggctactgactccgacggcaactgcgtctccgtgggcattactgcattgacccttcgggctatcctcaaggactcgaataataaccaagtaaatgggctgagtggaaacaccacaatacctttctccagctgctgggctaactatactgatctgactccgctcaggaccgggaagaactataagattgagttcattctggataatgtggtgggggtggagtcccgaacctttagcttgctggccgagagcgtttctagctccgggtctagctcttccagcaactccaaggccagcactgtgggaacttacgctcaaattatgacagtggtgatttcctgccttgtgggccgcatgtggctcctcgaaattttcatggcagccgtgtccacgttgaacataaccctccgcagttattag

SEQ ID NO: 199988 - DNA, 6762 bp, synthetic construct
  misc_feature 1..6762: note = Description of Artificial Sequence: Synthetic coding sequence
  source 1..6762: mol_type = other DNA
atgcggcccggccccgccctgctgctgctgggcgtgggcctgagcctaagcgtgggaagactacctctgcccccagtgccccgcggtgctcaggccgcagtatccggcgctcccggcggcttgttacggggcgcgcccggtcttggggtgaggggaggacgggccctgctgtcgctacggccgtcagccgtcagagctgggggggcagttctaagcggacggggttcactgtgtttcccccacggcgggacaggccggagatggtactgcctcgacttgagagtgcttctgtcagcgcagcggctcccatggccagctgccccagcgctggcccttgtcgacctgcagctatccgcaagaggggggcgcttaagccttacttggagcgttagactccctcggtctccaggacgcctcgcatgggcctttcgcctgaggctactgggtccaggggcggctcggccggcttctccggccgccagggttagtccgcgcagcgccgcccccggaccaagaccacagcaggggtttgtggcccggactgagtgccccaccgatggtcccgcacgggtcatgctccaagctgttaattcaagcagtcatcgagcagtggagagctctgtctcttgccagattaatgcatgcgtgatccagcgcgtgaggatcaacaccgatcagaagggtgcaccagtgcgcttatcaatgcaggctgaggctacaattaacgcttcagtgcagctggactgccccgccgctcgcgctatcgcccagtattggcaagtgttctctgtgccagccgttgggcaggcaccagattggacccagcctctcgatctgccgcagttggagataagaaacagccctctatttatccatatacccaacaattccctacagtggggggtgtatgtcttcaacttcaccgtttccatcacaacaggtaaccctaaaatgccagaagtcaaggacagcgacgccgtatatgtatggatcgtgcggagttctttacaggctgttatgctcggtgacgccaatatcactgccaacttcaccgaacagctgattcttgacggaagcacgagcagtgaccctgacgcggattcaccgctgcaggggttgcaattcttttggtattgcacaaccgacccgcgaaactatggtggagaccgaatcattcttggtagcaaagaagtgtgtcaccctgaacaggctaacctcaaatggccttgggcctccggacccgtactcaccctcctgcccgagactctcaaaggggaccatgtgtacttttttcggatggtgatacggaaagactccaggacagccttctctgataaaagggtgcatgtgctgcaggggcctaaggccatcgcccacatcacgtgtatcgaaaattgcgagcgcaactttatcgttagcgataggttcagtcttttcctgaactgtacaaattgcgcttctcgtgacttttataagtggtccatcctgtctagttcgggcggagagatgttgttcgactggatgggggagacagtcacggggcggaacggtgcctacctgtccattaaggcttttgcctttagacattttctggaggcggagttttccatcagcttgtacctggcctgctggtccggcgtgacaagcgtctttcgtcactctttcattattaatcatggcccacagataggggagtgtaaaataaatccggccaagggcatcgcgctgatcacgaaattcgtcgtgcagtgcagcaattttagggacaagcatgtccctctcacatataaaataatcgtgagtgacctgcactccgtgggagagatcagttccgtgaaggaaaacacactgggcaccattttgtacctggggccgcagagcaccgtgcctcccagtttcctacctgtgggtatgctagcgtcacagtatggcttgaagatttacgcacaagtttatgactcactgggtgccttcagtcaagtgacacttcacgcaactgctcaggcccctaccgacaaaaacagttctaaaacagtcctgaaccaactcctttccttcacggttgggcctagttccctcctatccacgctcatccagaagaaagacttcctccctgcgggctatctgctctacatcgtagctagcgtgctaaacaatatgaagacagaattgccactgagagacgacagggtcaacctgagaaagcacctaatcgaccaatcatttctcctcccagtttccacgctcgtggagattggccaggtagttatgaccatcacaaaactgacacagaagccttcagagttcacctgggacgcccagaagagggcaacaatgcgtgtatggcaggccaaccaggcacttcaagaatatcagcagaaggacaagagatttcgcagcgagcagatcgagatcgtgagcactggaattcttatgagtctttctaacattctcaaaatgaccagcccacaccaagtagtgaaggaccccttctatgtcatcgagtccttatctgataccattctggccaataaggtgccagggaacaagaccacttccatgaggacgcctaatttcaatatgtacgttaaaaaggtggaaaagtggggcattaaccaactgtttagaaatgaaaagcactgccgaaactgtttctaccctaccctgaatgtaagctctgtgcccggcttgtctgcaaacgggcccatcagcactatgttctgtgattttacaaatgatctcttcccctggttaaacgaccaagaaaacacatccgtggaagtttctgggtttagaatgacgggagtggccgataacggctctgtgctggaaattacacctgacgtcgccgaagtgtacctggtaagaaaaaacctcaccttcgccgctttcaatctgaccgtaggccccaatagcgaagttgatgggagtctaaaaaagacaacaggaggtttcagctttcaggtcgacagtacagtgctgcgggaggtgctcgttcacatagttacagaggtgatggtactgttcacagtccttgtgtatacaggaagccaaattactcccacggccctagtggccaccttcctcgtcccacacgacattcctccgtttgcgagtcagtctgctttgttcgaccccgcttgcacagtgaagaaagcccgcgtcgtgtgcttacctgtatccctgctacagctcatcgctcagcactctcattctccccactgcacagtgagcatcgtgctccaggccccacggtttgtgatgaagctgaatgataagcttgttagaatctccatcttctccgtgcaatgcctcgacatgtacggtatacagtccgagtggagggaggggtactgtatccttggggagaaaacttcctggtacgaggtgcattgcatttgtaagaatgtcgttcgagcaagacgccagctggggaccattggtttaacaggaattcacctgcacactcactacgttatggctaaagtaatcgtgattcccaatccggtggacctccgcctcaacattatcaagagcctgcatcagaaccctgtcaccctgtttactgtactgttcataatactgctttacgttggcctcgccttctgggccttgtatagggatgagatggaccagcatcttaggggacacgtgattgtactcccagataacgatccttatgacaatctgtgctatctggttaccatcttcacaggcagccggtgggggagcggaaccagggccaatgtgtttgtacagctccgtggcacagtttccacgagcgatgtccactgtctgtcccatcctcatttcacaactttgtaccgcgggagcatcaataccttcttattaacaactaaatccgaccttggtgacatacattcgatccgggtctggcacaataatgaagggaggtcaccttcttggtatcttagtagaattaaagtggaaaacctgttctcgcgccacatctggctattcatctgccagaaatggttgtcggtggatacgacacttgacagaacgttccacgtaacacatcctgacgagcggcttactaggaaagactttttcttcatagacgtctccagtaacctacggaagaaccacatgtggttctctatctttgctagcgtggtggccaagacattcaaccgtctgcagaggctcagctgttgtctagctatgctcttgagctcactgctttgcaatattatgttctttaaccttaacagacaggagcagactgaatcacgggagaggaaatatatgcggtccatgatgatcggcatcgaaagtgtgcttattactatccccgtacagctgctgatcacgtttctgttcacgtgctctcagagaaaacctcaggctgatcttaaagaggtaagtccacagaagcatccactcatgtctgaggcctccgagcattgggaagagtatctgcgtaagtggcatgcgtacgagaccgcaaaagtgcaccctagggaggtggccaagcccgcttccaaggggaaacctagactgcccaaggcctctccaaaggcgacttccaagcccaagcaccggcaccgaaaggcgcagatcaaaacccccgagacactcggccccaatactaattccaataacaatatcgaggacgatcaagacgttcacagtgaacagcacccatcacagaaggacctccagcagctcaagaagaaacctaggattgtgctaccgtggtggtgcgtgtatgtcgcctggtttctcgtgttcgctacctcgtcgatctccagctttttcatcgtgttctatgggctgacgtacggctacgataagagtatcgaatggctttttgctagcttttgctccttttgccagagcgtgctgttggtgcagccttcaaaaatcatattactgtctggtttcaggacgaataaacctaagtattgcaagaatctgtcatggtcaaccaagtataagtatacagaaatcagactcgacggcatgaggatgcatcctgaggagatgcaacgaatacatgatcagatcgtcaggatacgaggcaccagaatgtaccagcccctaaccgaggacgaaattaggatatttaagaggaagaaacggatcaagagacgggcgctgctgtttctaagctatatactgacccatttcatctttctcgccctcctcctgatcctgatcgtgctactgcgccacacggattgcttttactacaaccaattcattcgtgatcgattcagcatggacctagccacggtaactaagcttgaagatatttatcgctggctaaatagcgtcttgctgcccttgctgcataacgacctgaaccctacctttctaccggaatcttcatctaagatcctgggattgccattaatgagacaggtgagggctaagtcgtccgagaagatgtgcctgcccgccgaaaagttcgttcagaactcaatccgtcgggagatccattgtcaccccaaatatgggattgatcccgaggacaccaaaaattactccgggttctggaacgaggtcgacaagcaggcaattgatgagtcaaccaacggattcacctacaaaccgcagggcacccagtggttgtattactcctacggcctgcttcatacctacgggtcaggcggctacgcactgtatttttttccagagcagcaacggtttaatagtacactacgtctgaaagaactccaggaatctaattggttagatgagaaaacatgggctgtggtgctggagcttaccaccttcaatccagatattaaccttttctgttctatctcagtcattttcgaggtcagtcaactcggagttgtcaatacatcaatatcactgcacagtttttcactcgcagatttcgaccgaaaagcttccgcggaaatctacctgtatgtcgcaatccttatttttttcctggcctatgtggtcgacgagggctgcatcattatgcaggaacgcgcctcctacgtccgaagcgtctataacctgctgaattttgcactgaagtgcatcttcaccgttctgatcgtcctgttcctccgaaaacacttcctcgccacaggcatcattagattctacctgtcgaaccccgaggattttattcccttccatgccgtgagccaggttgaccacattatgagaatcatactgggcttcctgttgttcctgaccatcttgaaaactcttcgatattcacggtttttctacgatgtgcggttggcacaacgggcgatccaggctgccctcccaggtatttgtcatatggccttcgtggtatcagtatattttttcgtatacatggccttcggatacctggtgttcggtcagcacgagtggaactactctaatctgatccactccacgcagaccgtgttttcatactgcgtcagcgcatttcagaacacggaattctccaataacagaatcttaggagtgttgtttctgtccagttttatgttggtgatgatctgtgtgctaataaacctgtttcaggctgttattctaagtgcttatgaggaaatgaagcagcctgtctatgaggagcccagtgatgaggtggaggcgatgacttacctatgtcgcaaactccgcacaatgttttcgtttctgacttctcaatcgaaagccaaggacgagcctgaatttttcatcgatatgctgtacggccagccagagaaaaacagccaccgatatctcgggctgaagacccgcaatattaatggaaaaaaaatggtatacctggtcgtgtag

SEQ ID NO: 199989 - DNA, 12912 bp, synthetic construct
  misc_feature 1..12912: note = Description of Artificial Sequence: Synthetic coding sequence
  source 1..12912: mol_type = other DNA
atgccccccgccgcccccgcccggctggccctggccctgggcctggggctctggctaggcgcattggctggcgggcctggcaggggatgcggcccttgtgagcccccatgcttatgtggaccagctcctggcgccgcctgtcgagtcaactgttctggacgaggtctccgcactttagggcccgctctccgtatccccgcggacgccactgctctcgatgtgtctcacaacttactgagagccctggacgtcggcctgctagcgaacctaagcgctctggctgagctggacattagtaacaacaaaatttctacacttgaggaggggatattcgccaacctgttcaacctctctgagattaacctgagcggcaatcccttcgagtgtgactgcggactggcttggttgccccgctgggcggaagagcagcaggtaagagtggtgcagccggaagctgccacctgcgcaggccccggtagcctggccggacagcccctgctgggcatccccctgctcgattcgggctgcggtgaagaatacgttgcttgcctgcccgataactcctctgggactgtggcagccgttagttttagcgctgcgcacgaaggattactccagccagaggcctgctctgctttctgcttctcaactggacagggtctcgctgctctgtctgagcagggatggtgtctttgcggggccgcacagccgtctagtgcctcttttgcctgcctgtccctttgctcaggcccaccacctcctccagcccccacatgtcgcggccccacacttctgcagcatgtgtttcccgcgtccccaggagcgaccctggttggccctcacggccctctcgcttctggtcagctggccgcttttcacatcgctgcaccactgcctgtgaccgccacgcgatgggacttcggtgatggaagtgcagaagtggacgccgcagggcctgccgcatcccataggtatgtgctgcccggtcggtaccacgtgacggcagtcttggccctgggagcgggatccgccttgctgggcaccgacgtgcaggtggaggccgctccagccgccttggagctggtttgtcccagctccgtgcaaagcgatgaatccctggacctctccatccagaacagaggaggaagcgggctggaggcagcatacagcattgttgctctcggtgaagagcccgctagggcagtgcaccccctgtgcccttccgacacagagatctttccaggtaatggccattgttaccggctggtggttgagaaagcagcttggctgcaggcccaagagcagtgccaggcgtgggccggcgctgccttggccatggtggacagccccgccgtacagcgctttctggtgtctcgggtaacaaggagtcttgacgtgtggataggattctcaacggtgcagggtgttgaggtggggcccgccccccagggcgaggccttcagcttggaatcttgtcaaaactggctaccgggcgagccccatcctgctaccgccgagcactgtgtgcggctcgggccaactggctggtgcaatactgacttgtgttccgctccccacagttatgtgtgtgaactccagcccggagggcccgtgcaagacgctgaaaatttgctcgtaggggctccgtccggtgacctccaagggcccctgacacccttggcacagcaggatggcctgagtgctccacacgagccagtcgaggtcatggtttttccaggccttcgactttcccgtgaggccttcttgactactgcagagtttgggacacaagaactgagacgccccgcccagctgagactccaggtctatagattattaagtactgctggcactcccgaaaatggctccgaacccgagtctaggtctcccgataaccgtacacaactggcccccgcctgcatgcctggtgggaggtggtgcccgggcgccaacatatgccttcctttagacgcgagctgtcatccacaggcctgtgccaatggatgcacttctggacccggcctgcccggagcaccttatgcactgtggagagagtttctgttttcggtacccgccggacctcccgcccagtattccgtaactctccacgggcaggatgtgctcatgctgcccggcgacctggtcggcctgcagcatgacgcgggtcctggggccttattgcactgttcaccagcacccggccatcccggaccacgagctccttacctgagtgccaatgcaagctcctggctgccccacctacctgcccaactagaaggaacatgggcttgccccgcttgtgccttgcggcttctggccgccacggaacagttgacagtgcttctgggccttcgccctaaccccggactgaggctgcccggacgctatgaggtgagggccgaagtgggcaatggagtgagtcggcacaacctgtcatgctcctttgacgtggtgtcacctgtagccggtctgcgggtgatttaccccgccccccgtgacggccgcctctacgtgcctactaacggcagcgcgctcgtcctgcaggtggactctggagccaacgcaactgccaccgcacgctggccgggggggtccgtctccgccagattcgaaaatgtgtgtcctgcactggtggctacattcgtaccaggctgcccatgggaaaccaacgacacgcttttttcagttgttgctctcccgtggctcagtgagggcgaacatgtggtggatgtggtggtggagaattcggcctctcgagctaatctcagcctgagagtaacggcagaggagcccatctgtggcttacgcgctacaccaagccctgaggccagagtattacagggggtgttggtgcggtattctcccgtcgtggaagcgggatctgacatggtgtttaggtggaccattaatgataaacaatcacttacctttcagaatgtggtgtttaacgtgatctaccagtccgccgctgttttcaagctctccctcactgcctcgaaccacgtgagtaatgtgaccgttaactataatgtgacagtggaacggatgaaccgcatgcagggccttcaggttagcacggttccggccgtgctgagcccaaacgccacgctcgctctgaccgcaggcgttttagttgactctgccgtggaggtcgcttttctgtggacctttggggacggagagcaggccctgcaccagttccagcctccttacaatgagagctttcctgtgcctgacccctctgtggcacaggttcttgttgaacacaatgtgatgcacacttacgctgcccctggagaatacttgctcacagtccttgccagcaacgcctttgagaatttgacgcagcaggtcccggtgtctgtgagggcatcccttcccagtgtggcagttggtgtgagcgacggtgtcttggtcgctggccgacccgttaccttctacccccatccattgccttcaccgggaggcgttctgtacacatgggactttggtgatgggtctcctgtgctcacgcagtcccagcccgcagcgaaccacacctacgcttccagaggcacctatcacgtgcggttagaggtgaacaatacagtatctggcgcagccgcccaggcagatgtgagagtctttgaggaattaagaggtctgtccgtcgacatgtccttagctgtcgaacagggcgcccccgtggtggtaagcgctgccgtgcaaacaggggataatattacctggacattcgacatgggagacggcacagtactgagcggccctgaggctactgtggaacatgtgtacttgagggcacagaactgtactgtgacagtgggagctgcctcccctgctgggcaccttgctcggagtctgcatgtgctggtgtttgttcttgaggtgcttagggtcgagccagccgcatgtatcccgactcagcctgatgcacggttaactgcctatgttactggtaatcctgcccactacctgttcgactggacttttggcgacggatcgtccaatacaacagtgagagggtgcccaacagtcacccacaacttcacccgaagcggcacttttccgctcgctttggtgctgagctccagggtcaacagggctcattacttcacatctatctgcgtggagcccgaagtggggaacgttaccttgcaacccgagcggcaatttgttcagctcggagatgaggcttggctggtggcctgcgcatggccccccttcccctaccgctacacatgggacttcggcaccgaagaagctgcacccactagagctcgagggccagaggtgaccttcatctacagagacccagggagctatttggtgactgtcaccgccagtaacaatatctcagccgcgaacgactccgccttagtggaagtgcaggagcccgtccttgtgacatccatcaaggtgaatggctcactgggcttagagcttcagcagccttatctcttcagcgctgttgggaggggccggcccgcctcttacttgtgggatctcggagatggagggtggctcgaaggtcccgaagtgacacatgcatataattccactggcgatttcactgtgcgggtggctggatggaatgaggtgagccgctcagaagcatggctgaacgttaccgtaaagcgcagagttaggggattggtggtgaacgcatcccggactgttgttccactgaacggatcggtgtcattctctaccagtttggaagcgggtagcgacgtacgctatagctgggtgctctgtgataggtgcacacctatccccggaggccccacaatttcatacacctttaggagcgtcgggacgttcaacatcatcgtcacagccgagaacgaggtcggcagtgctcaagactccattttcgtgtacgtactacagctgatcgagggactgcaggtggtgggaggcggccggtactttccgacaaatcataccgtccagctgcaggcagtcgtgagggatggaactaatgtcagttatagttggaccgcttggagagaccgaggccctgccttggccggaagcggaaagggattttcactcacagtcctcgaagccgggacctatcacgtccaactgagagctaccaacatgctggggtcagcatgggctgattgcactatggatttcgtcgagcccgttgggtggctaatggtggctgccagtcccaatcccgccgctgtgaatacctccgtaacactgtccgccgagctggctggaggtagcggcgtggtctatacctggagtttggaggaaggcttgtcttgggagacaagcgagccgttcaccacacattcttttcccactcccgggcttcatctggtgacgatgaccgcggggaacccgctgggctctgctaatgctacggtcgaagtcgatgtgcaggtccctgtgagtggactgtccatcagggcttcagagccaggcggttcgttcgtagccgccggatcctctgtgccgttctggggtcagcttgcaacggggacaaatgtgtcctggtgttgggcagtgcccggcggatccagcaaaagaggcccccacgtcaccatggtgttccccgacgccgggactttttctatcaggctgaatgcttctaatgctgttagctgggtgagcgccacttacaatctgaccgctgaagaacctatcgtcggcttggtgctgtgggcctcgtccaaggtcgtggctcctgggcagctcgtgcactttcagatcttacttgccgcagggtccgctgttacctttcgactgcaggtaggcggagctaacccggaagtgcttccagggccgaggttcagtcattctttcccacgtgttggcgaccacgtggtctccgtgcgggggaagaaccacgtctcttgggctcaggctcaagtgaggattgtggttctcgaggcagtgagcggccttcaggtgcctaattgttgtgaacctggcattgcgacaggcaccgagagaaacttcactgctcgcgtccagcgcggttcacgcgttgcgtatgcctggtacttctctctgcagaaggttcagggcgattctctcgtgatcttgtctggccgcgacgtaacttacactccagtggcagctggactgttagaaatccaagttcgcgcattcaatgcactaggcagcgagaatagaaccctggtcctcgaagtgcaggacgcagtccagtacgttgccctgcagtctgggccgtgtttcacaaataggagtgcccaatttgaagccgccacaagtccctctccaagaagagtggcataccattgggatttcggagacggtagtcctggtcaggataccgacgagccacgcgcggagcactcatacctgagacctggggattatcgggttcaagtcaacgcgagcaatcttgtgagcttcttcgtggcccaggctactgtgacggtccaagttctggcttgccgggagcccgaggtggacgtggtgttaccactccaggtcctgatgagacgctctcagcgaaactacttggaagcccatgttgacttgcgggattgcgtgacttaccagaccgagtacaggtgggaggtatacaggacggccagttgtcagcgacctgggcgtccagctcgtgttgccctcccaggtgtggatgtgtccagacccagactggtcctgcctcggctagccctgcctgtcgggcactactgttttgtttttgtggtatcgttcggagacacccccctcacccagtcaatccaggccaacgtgaccgtggccccagaacgtctagtgccaatcattgagggaggtagctatagggtctggtcagatactcgcgacctggtcttagatggcagtgagtcttacgaccccaacctcgaagacggcgaccagacaccactgtccttccactgggcttgtgtggcatccactcagagggaagccggaggctgcgccctgaacttcgggcctagagggtcatcaacagtgaccatcccacgggaaagattagccgctggagtcgagtacaccttctccttaaccgtgtggaaagccggcaggaaggaggaagccaccaatcagaccgtgttgattcgctccgggcgtgtccccatcgtctcacttgagtgcgtctcctgtaaggcccaggcggtttatgaagtgtcacgctcgagttatgtgtatctcgagggtaggtgtctcaattgttcctctggtagtaagcgagggcggtgggccgcccggaccttttcaaataagacattggtgttggacgagacaaccacatccacaggctctgcaggtatgcgactggtcctgaggagaggagtgctgcgagacggcgaagggtacacattcacactgacggttcttgggaggagcggcgaggaggagggatgcgcatccatccgtttgagccctaaccggcctcctttggggggctcatgtcgcctctttccactgggcgccgtgcacgcgctgacaactaaagtgcactttgagtgcactggctggcatgacgccgaggacgcgggtgccccacttgtatacgccctcttactgcgacggtgtagacaaggccactgcgaggagttctgcgtctataaagggtctctgtcatcttatggagctgttcttccacctgggttcaggcctcacttcgaggtcggcttagccgttgtggtccaggaccagctgggcgcagccgtcgtggccctgaataggtctttggcaatcaccctgccagaacctaatggctctgcaactggcctgactgtgtggctgcacggtttgaccgccagcgtgctgccaggcttacttcgtcaggcggaccctcagcatgttatagaatattcactggccctggtaaccgtcctcaacgaatacgaaagagcactcgacgtagccgccgaacccaagcatgagcgccagcatagagctcagatacggaaaaatatcacagagacattggtgtcactgcgcgtgcacactgtcgacgatattcagcagattgcagctgctttagctcagtgcatgggcccgagccgcgaactggtgtgtcggtcttgtctgaagcagaccttgcacaaacttgaagctatgatgctgattctgcaggcagagacgaccgctgggactgtcacacccaccgctattggagatagtattctcaacattaccggcgatctgattcacctcgcaagcagtgatgtacgggctccccaacccagcgagctgggagctgaatccccatccaggatggtggctagccaagcatacaatctgacttcggcactcatgcggatcctaatgagaagcagagtgctcaacgaagaacccctcactttagctggtgaggagattgtggcgcagggcaagaggtctgacccccggtctctgttatgctatggtggggcacccgggcccgggtgtcatttttccattcccgaggcgttcagtggggccctggcgaatctttctgacgttgtgcagctcatctttctggttgatagcaacccgtttccttttggatatatctcgaactatacggtcagtaccaaggttgcatccatggcatttcagacacaggccggcgcccaaatccccatcgaacggcttgcctcagagagggcaatcaccgtcaaggtccccaacaattccgactgggctgctcgcggacaccggtccagcgctaatagcgcaaacagcgtggtcgtccagccgcaagcatctgtgggtgccgtggtgacgctcgacagttctaatcccgccgcaggtctgcacctccaactgaactacaccctcctggacggccactacctttctgaggagcccgagccctatctggctgtctacctccattctgagccaagacctaatgagcacaattgctctgcctcccgacggatccggcctgaaagcctgcaaggagctgaccatcggccatatactttctttatatccccagggagcagggatccagccgggtcctatcacctgaatctgtcctcccactttcggtggtctgctttgcaggtgtcggttggactgtatacgtccctctgccagtacttctccgaggaggacatggtatggaggacggagggcctgctgcctctcgaggaaactagcccacgtcaggcagtgtgtctgacaaggcatctgacggcctttggcgcgagtttattcgtacccccctcccatgtccggtttgtgttccctgagcctacggccgacgtgaactacatagtgatgctcacatgcgcagtctgcctggtgacctatatggtgatggcagccatcctgcacaaactggaccaactggacgccagtaggggtcgcgcaattccattttgcggtcagcgcggcaggttcaaatatgagattctggtgaagactgggtggggtcgcggatctggaaccaccgctcacgtgggtataatgctgtatggcgtcgattctaggtctgggcatcggcatctggatggagatcgtgccttccataggaattccttggatattttccgcatagccactccccacagtctggggagcgtgtggaaaattagggtgtggcacgacaataaaggtctaagtcccgcgtggttcctgcagcacgtaatcgtgagagatcttcagacagcccgctctgcctttttccttgtgaatgactggctcagtgtggagaccgaagctaacggaggtctggttgaaaaggaagttcttgccgcctcagatgctgcattgctccgtttccgacggcttcttgttgctgaactgcagaggggattcttcgacaaacacatctggctcagcatttgggaccggccccctcgctccaggtttacccgaattcagagagccacgtgctgtgtcttattaatctgtctgttcctgggtgctaatgctgtgtggtatggtgctgttggcgattccgcttactcaactggccatgtgtctcggttgtcccccctgagcgtggacaccgtggcggtgggcttggtctctagtgtggtcgtgtaccccgtgtatctggccatcctttttttgttccgcatgtctcgttccaaggtcgctggaagcccatcccccacgcccgcaggacagcaggtcctggacattgacagctgcctagatagctcagtcctggactctagctttctaactttcagcggactgcatgccgagcaggccttcgtaggtcagatgaagtccgatctgtttcttgacgattctaaatccctggtgtgttggccctccggggaagggacgctttcgtggcctgatcttctgtctgatccctctatcgtcggctccaacctgagacaattggcccgtggtcaggccggtcacgggctgggacccgaagaagatgggttttctctagcatccccctatagccctgccaagtctttctccgcctctgacgaggatttaatccaacaggttctggccgagggggtttcctcccccgccccgacccaagacacgcatatggagactgatctcttgagcagcctgtcctcgactcctggtgagaagaccgaaacactggccttgcaacgcctaggtgagctcggcccaccatcccccggactgaactgggagcagccccaggctgcccgcctttcccgcacgggccttgtggagggattaaggaaacgccttctccccgcctggtgcgcctctctggcgcatgggttgtctctgctgctggtggctgtggctgttgcagttagtgggtgggttggtgccagcttccctccaggcgtatctgttgcatggcttttgtccagctcagcctcttttctcgcttcctttctaggctgggagcccctgaaggttcttctcgaggccctgtattttagcttggtggcaaaaaggctgcatccagatgaggatgatactctcgtggaatcccctgccgttaccccagtaagtgctcgcgtcccccgggtgcgtccaccacacgggttcgctttgttcctggccaaggaagaggctcgaaaagtgaaacggctacacgggatgctgcggtccttgctggtatatatgctgttcctgctggtaacattacttgcgtcctatggtgacgccagttgccatggccacgcatatcggctgcagtccgccatcaagcaagaattacactcacgagcatttctggcgataactcgttcagaggaactgtggccatggatggcacatgtcctactcccatacgtgcatgggaatcagtcgagccctgagttgggtcctcctaggctgagacaggtcagactgcaggaggcgttgtatccagatccgcccggccctcgggtccatacctgctccgccgcaggggggttcagtacgagtgactatgatgtgggatgggaaagcccccataacggaagtggcacatgggcgtactccgcacctgacttgttgggtgcttggtcttggggctcctgcgctgtgtacgactcaggcggctacgtgcaggaactcgggctgtctttagaggagtctagggataggcttagattcttacagctccacaactggctcgacaacagaagcagagccgtgtttttggaactgacccgctacagccccgccgtaggcttacatgccgcagtgaccttgaggctagaatttcctgccgctgggagagcgctggccgcactttcagtgcgcccgttcgccctgagacggctctccgcaggtttgtcgcttcccctactcacatctgtttgcttactgctcttcgctgtgcattttgccgtggcagaggcgaggacttggcatagagagggccgttggagggtgctgcgtttaggcgcctgggcgcggtggctcctagtggccttaaccgctgctacggcgctggttcgcttagcccagttgggagcagccgaccgtcagtggacaaggttcgtccgtggtcggcctcgacgatttacatcttttgaccaggtagcgcagctgagctcagccgccagaggactcgcggcaagcctgctttttcttttgctggttaaggccgcccagcagctgcggttcgtgcgtcagtggtccgtgtttggcaaaactctctgtcgtgcactccccgagctcttgggggttactctagggttggtggtgctgggagtagcttatgcgcagctcgccattctattagtgagttcgtgcgtggacagcctttggagtgttgcacaggctctactcgtcctgtgccccggcacaggccttagcactctgtgccccgctgagagctggcacttgtccccactgctgtgtgtgggattgtgggcactcagattatggggagccttgagactcggtgccgtgattctcagatggcggtatcacgctctgaggggagagctgtatcgcccagcatgggaacctcaggactacgagatggttgagttgttccttcgacgtctcaggttgtggatgggattgtcaaaggtgaaggagttcaggcataaggtcagatttgaggggatggagcctctgccgagcagaagttccagggggtccaaagtgagtcccgatgttcccccacccagcgccggaagcgatgccagtcatccttcaacgtcgtctagtcaactggacggcctgagtgtgtctctgggcaggttaggtaccaggtgtgagccagagccctctcgactgcaagccgtatttgaggctctcctgacacagtttgatcgcctgaatcaagccaccgaggacgtgtaccagctcgaacagcaacttcacagcctgcagggcagacggtcatcaagagcccccgccggctcatcccgtgggcccagccctgggctaagacccgccttgcctagccgcctggcccgcgcaagccgcggagtagacttggccaccggaccaagccgcacaccactgcgtgcaaagaacaaagtccatccttcaagcacgtag

SEQ ID NO: 199990 - DNA, 10914 bp, synthetic construct
  misc_feature 1..10914: note = Description of Artificial Sequence: Synthetic coding sequence
  source 1..10914: mol_type = other DNA
atgccccccgccgcccccgcccggctggccctggccctgggcctgggtttatggctcggcgccctggcgggagggccagggcgcggctgcggcccgtgcgaacctccctgcttatgcggaccggcacccggcgctgcatgtagagtcaactgtagtggtcgagggctccggacacttggacccgctctgagaatccctgccgatgcaactgccctaacagccatggctaaggccgacggagacgtgaaaaagtatggcagtaaacgcggggcgttggcccttacccacggtcactctttgttgcgggacgtgtcgcacaatctccttcgggctctagacgtaggtctgctcgcaaatctctccgccctggctgagctcgatatatccaacaataagatctctactttagaggaagggatctttgcaaatctgttcaatctttcagagattaatctgtccgggaatccattcgagtgtgattgcgggctagcctggctgccccggtgggcggaggagcagcaggtacgggtggtgcagcccgaggccgctacttgcgcaggccccggttcactcgctggacagccactgctaggaatcccacttctggacagtgggtgtggtgcaactcttgtgggcccgcacggtcccttagctagcggccagctcgctgctttccatatagccgcacctctgccggtgacagccacacgatgggacttcggggacggatctgccgaggtcgacgccgccggaccagcagctagccatcggtatgttctgccaggacggtatcatgttaccgcagttctggccctgggggctggcagcgcactgctggggacagatgtgcaggttgaagctgctcccgccgcgctggaactggtgtgcccgagctcagtgcagtctgatgagtccttagatctctctatccagaatcgggggggctccgggttggaagcggcttactccatcgtcgctctgggcgaggagcctgctagagcagtgcacccactttgcccgtcagacactgaaatttttcctggaaatggtcattgctacagactggttgtggagaaagctgcctggctacaggcccaggaacagtgccaggcctgggccggggcggccttagctatggtcgattcaccagccgtccaaaggttcctggtctcaagggttacgaggtcccttgacgtgtggatcggattttcaactgtgcagggggtggaggttggaccggctccgcagggagaggcattctctttagaaagctgtcagaattggctgcctggggaaccacacccagctacagcagagcattgcgttcgactaggaccaacgggatggtgtaacacggacctatgtagtgcaccgcattcttatgtctgtgagttgcagccaggcgggccggtgcaggatgctgagaatctgttggtgggtgcacccagcggggacctccaggggcccctcaccccccttgcccaacaagatggcttgtctgcaccacacgaacccgttgaagctggtatgggttccgttgaattgagaaggccacctgcccaccaggtcatggttttccctggcctgaggctctcgagggaagctttcctgacaaccgccgaattcggaactcaggagctccggaggcctgctcagcttcgtcttcaggtgtacagactgctgtccactgccggtacccctgagaacggaagcgaaccagaatcgaggtctccagacaatcgcacccagttggcgcctgcgtgtatgcccggcggccgatggtgtcccggggccaatatctgcctacctttagacgcctcttgccaccctcaagcatgtgccaatggctgtaccgagggggagcacgtcgtggatgtcgtggtcgaaaattcagcctccagggcaaatctatcccttcgcgtcacggcagaagagcccatatgtggcctgagggctacaccctccccggaggcgagagtgttgcagggcgtgcttgtccgttactcccctgttgtcgaagctggtagtgatatggtgtttcgatggacaatcaatgataagcagtcgctcacattccagaacgtggtcttcaacgtcatctaccaatccgccgctgtatttaagttatccctcaccgcctcgaaccacgtatccaacgtcacggtcaactacaatgtgactgtggagcggatgaatcgcatgcaggggttgcaggtgagcactgtgcccgccgtgctgagtcccaacgccacccttgcccttacagcaggagtgctcgtggactctgccgttgaggtcgccttcctgtggacgtttggcgacggcgagcaggcgctgcaccagttccagccaccatacaacgaatcgttcccagttcccgaccctagcgtcgctcaggtactggtcgaacataacgtgatgcatacatacgccgcaccaggagagtatctgctaaccgtactggcctcaaacgcgtttgagaatctgacacagcaggtccctgtttccgttagagcctcgctgccttctgtcgctgtcggtgtatcagatggtgtgctttctcaacctgccgccaatcacacatacgcgagccgcgggacctatcacgtgaggctcgaagtgaacaataccgtgtcgggcgccgcggcacaagctgacgtgcgggtgttcgaagaactgagaggccttagtgtcgacatgagcctggccgtcgagcagggtgcccccgtggtcgtgtctgcggctgtgcagacgggcgacaatattacgtggactttcgatatgggggatggcactgtgctctccggcccagaagccaccgtggagcatgtctacctgcgggcccagaattgcactgtgactgtgggagccgctagccccgcaggacacctagctagatcgcttcacgtcctcgttttcgtattggaagttctgcgcgtagaacccgctgcctgtatacccacccagccagacgctagactgacagcgtacgtgaccggcaaccccgcgcattacctctttgactggactttcggggatggctcatcaaatactaccgttagagggtgtcccaccgttacccacaatttcaccagatcaggaactttcccactggcactggtgctatccagtcgagtcaaccgggcccattattttacctccatttgtgtagaacctgaggtcggtaacgtgacgctgcagccagagcggcagttcgtccaactcggcgacgaggcctggctagtggcatgcgcctggcctccttttccttataggtacacctgggactttggcacagaagaggccgctcctacccgggcgaggggacctgaggtgacctttatctacagagatcccggtagttacttagtgaccgtgacagcatctaataatatttctgccgccaacgattctgctttggtggaagtgcaggagcccgtgctagttactagcattaaggtgaacggctcgttaggactcgaactccagcagccgtatctgttctctgctgtcggccgcggacgtccagcgtcatacctttgggatcttggagatggtggatggctggagggcccggaggtcactcatgcctataatagcactggagacttcacaggacccggccctggtaggcagcggcagcgcttactggctcatcgtgaagctgggacttatcatgtgcaacttcgggccacaaacatgctgggttcagcttgggccgattgtactatggattttgtagaacctgtggggtggcttatggtagctgcttctcccaatcccgccgctgtgaacacatccgtcaccctaagcgcggagctggccggagggagcggagtggtgtacacgtggtcgctggaggagggcctgtcctgggagacctctgaaccttttaccactcattctttccctacccctggcctccacctggttacaatgactgcggggaacccactgggctccgccaatgccacagtggaggttgacgttcaggtgcccgtctccggcctgtctattcgggcttctgaaccaggcggatccttcgttgcagccggctcatcggtgcccttctggggacagttagcaacaggcacaaacgtctcttggtgttgggcagttccaggaggctctagtaagcggggcccccacgtaaccatggtgttcccggacgcgggaacattcagcatacgcttaaacgcgagcaatgctgtgagctgggtgtcagctacatataacctgactgccgaggaacctatcgtgggactcgttctctgggcctctagtaaggtggtcgcccccgggcagttggtacacttccagatcttgttggccgctgggagcgccgtgactttccgactgcaggacaccgatgagcccagagcagagcacagctatctgaggcccggggactacagggttcaggtgaacgccagtaacctcgtaagctttttcgttgcccaagccacagtaacagtgcaagtgcttgcatgtcgagaacctgaagtagatgtggttctgccactgcaggtccttatgcgacggagtcagcggaactatctggaagcacacgtggatcttagggattgtgtaacctatcagacagaatacaggtgggaggtgtatagaaccgccagctgtcagcggcctggtagacctgcacgtgttgccctccctggcgtggacgtaagtaggccacgcttagttttgcccaggctagcactgccggtcggccactattgctttgtttttgtggtgtctttcggagacacacctcttacacaatccatacaggctaatgtgaccgtggccccagaacgactcgtgcctatcattgagggagggagctatcgggtatggtccgacacgcgggatctagtgctcgacggctcagaatcctacgatccgaaccttgaggacggggatcagactcctctgtccttccactgggcctgtgttgcctctactcaacgggaggccggtggctgtgcactcaatttcggcccccgcggatcttccacagttacaattcctcgggagcgcctcgccgcaggcgttgagtatacttttagtctgaccgtgtggaaagccggccgaaaggaggaagcaaccaatcagactgttctcattagaagcgggagggtccccatagtgtccctggagtgtgtttcctgcaaagctcaggcagtgtacgaagtgagtcgatcctcctatgtgtatttagaggggcggtgcctgaactgttctagcggaagtaagcggggaaggtgggccgcaaggaccttttccaacaagaccttagtcttggacgaaaccaccacaagtaccgggagtgccggtatgcgtctcgtactgaggaggggagtcctaagagatggtgaagggtacaccttcaccctgaccgttctagggagatccggcgaagaagagggatgcgctagtattaggctgagcccaaatcggccgcctctgggtggatcctgccggctgttccccctgggagccgttcatgcgctcaccaccaaggttcactttgaatgtactggatggcatgacgcagaggacgcaggggcccctctggtatacgcgctgttgctgcggcggtgtcggcagggacattgcgaggagttttgcgtgtacaaggggagcctttcttcctatggggcggtactgccacctggcttccggcctcacttcgaagtaggactcgcggtggtcgttcaagaccagttgggcgccgccgtcgtggcccttaatcgctctcttgccatcacgctcccagaaccgaatgggtccgccacagggctcaccgtgtggcttcatggcttaacagcctccgttctgccgggactcctgagacaggccgatccccagcatgtgatcgaatattctttggcactggttactgtcttgaacgagcacagggctcagattcgcaagaacatcaccgagacattggtgtcgcttcgggtgcacacagtggatgacatacaacaaattgctgcggcccttgcccagtgtatgggtccctccagagagctggtatgtcgctcttgtctgaaacagacactgcacaagcttgaagcaatgatgctgattttacaggctgagaccactgccggtaccgtgacacctacagcgatcggcgactccatcctgaacattaccggcgatctgatccacctcgccagctccgacgttcgcgctccgcagcctagcgagctgggagctgagtctccttcacgaatggtggcttcccaagcatacaatttgacgtcagctctgatgcgaattcttatgcgatcaagagtgctaaatgaggagcccctgactctcgcaggcgaggagattgtcgctcagggaaaacggtctgaccccaggtcactgctctgttatgggggagcaccgggtcctggatgccacttctccatacctgaagccttctctggggctctcgcgaacctgagtgatgtggttcagcttatctttctggtagatagtaacccttttccctttggctacatatccaattacaccgtctcaactaaagtggcttcaatggcattccaaacgcaggctggagcccagattcccatagagcgcttggcttcagaacgagctataactgtcaaagtgccaaataacagtgattgggcggccagaggacatcggagtagcgcgaacagcgcgaattctgttgtcgtgcagccacaggctagcgtgggggccgttgtgactcttgattctagcaaccccgccgctgggctccacctgcagctgaattacactctgctggatggccattatcttagcgaggaaccagagccttacctagcagtctaccttcactcagaaccgaggccaaacgaacacaactgcagtgcctcccgtagaatcagacctgaatcattgcagggggccgaccacagaccttacaccttttttatctcaccgggcagccgggatcctgccgggtcttatcatctgaatctgagttcccacttcagatggagcgctttgcaggtctctgttggcctttacacttccctgtgtcagtacttctccgaggaagacatggtgtggaggactgagggcctccttccactcgaagagacaagtcctaggcaggctgtctgcctaaccagacacttgaccgccttcggggcctccctgttcgtgccacccagccacgtgaggttcgttttcccggagcctacagccgatgtcaattatatcgtgatgctgacatgcgccgtctgtttagtgacctatatggttatggctgctatcctgcataaacttgaccaattagatgcctctaggggccgggcaattcccttttgcggccagcggggtagatttaagtatgaaatcctcgtcaagactggctgggggcgggggtcaggcaccacagcccacgtcggtatcatgctgtacggtgtggacagccgctccggccatcgacacctggatggggacagagcatttcacagaaattcattggacatcttccgtatcgctacaccacattcattagggtctgtgtggaaaatcagggtctggcatgataataagggactcagccccgcttggttcctgcagcatgtcatcgtcagggacctgcagaccgctagaagtgccttttttttggtcaacgactggctgtcagtagagaccgaagccaacggtgggctcgtggaaaaggaggtcctggccgcctccgacgctgccttgcttagatttcggagactgctggtagcagagctgcagcgcggatttttcgacaagcacatttggctgagcatttgggatcgccccccacggtctcgcttcactcggattcagcgcgccacctgctgtgtgcttcttatctgcctattcttgggagctaacgctgtgtggtatggtgctgtgggtgattcggcatactcaacagggcacgttagccgattgtcacccctgtccgtcgacaccgtggcagtaggtctggtgtcaagcgttgtggtctatcctgtgtatctcgccatcttgttcctgttccgcatgtcccggagcaaggtcgccggcagccccagccccacgcccgctggccagcaggtcctggacatcgacagctgccttgattcatcggttctggatagctcatttttaactttttcgggcctccacgcagaggcatttgtaggacagatgaaaagcgatttgttcctggatgacagcaagtccctagtgtgttggcccagcggggagggcacgcttagctggcctgatcttctatcagaccccagcattgtaggaagcaacttgagacagctggcacggggacaggctggccacgggctgggcccagaagaggacggattcagtcttgcctctccatacagccctgccaaatcattcagcgccagcgacgaagacctgatccagcaagtgctggcagaaggagtgtcaagtccagccccaacacaggacacacacatggagaccgacttattaagctccctgtcctccactcctggtgagaagacagaaacgctggctctgcagagactgggagagctgggcccaccctcaccagggcttaactgggagcagccacaggccgcgcgcctctcgagaacagggttggtcgagggcttgcgcaaaagactcctaccagcatggtgcgccagcctggcacatggactctcactgttgctggttgctgttgcggtggcagtttctggttgggtgggcgccagtttcccccccggagtatccgtggcctggctgctgtccagcagcgcttcatttctggcctctttcctggggtgggagcccttgaaagtactgctcgaggccctgtattttagtctggtggcaaagagattgcaccccgacgaggatgatacattggtggaaagcccagcggtaactcctgtgagcgccagggtgcctcgtgttagacccccacacgggttcgccctgtttctcgcaaaggaagaagccagaaaagtcaaacggttacatggcatgttaaggagcctcctcgtctacatgttattcctgctcgtgacgctccttgcaagctatggcgatgcctcctgccatgggcacgcctatcgtctgcagagtgctatcaaacaagaactccattctcgggccttcctcgcaattacacgatccgaagagctttggccatggatggcccatgtgttactcccatatgtgcatggcaatcagtcttcacctgaactcgggccccctcgactcagacaagtgcgtttacaggaggccctctatccagacccacctggacccagggtccatacctgtagcgccgcaggagggttctccacaagtgattatgatgttggatgggaatccccacacaatggctctggtacttgggcctacagcgcacctgatttgcttggagcctggtcctggggcagttgtgccgtgtacgactcaggagggtatgtccaggagctcggcctttctctcgaggaatcccgcgatcggcttagattccttcagcttcataattggctcgataatcggtctcgggctgtctttctcgaactgacgcgctactcgcccgcggttggcctgcacgcagctgtgactctacgcctggagttccccgcggccgggcgggccctggcagctctatccgtgcggccatttgcactgcgccgtttgtcagccggactgtcactacctcttctgacttctgtctgcctgctattgtttgctgtgcactttgccgtggcagaagcaaggacatggcaccgcgagggcagatggcgagtgttaaggctcggggcctgggccaggtggctcctggtcgccctcacggccgctacagccctggtgagactggcccaactgggcgccgcagaccgacaatggactaggttcgtccgggggaggccaaggcgtttcacatcattcgatcaagtcgcccagcttagctctgcagccaggggcttggcggcaagtttgttatttcttctcctagtgaaagccgcccaacaactgcggttcgtgcggcagtggtcagtttttggcaaaactctgtgtagagcccttcccgaactccttggtgtgacactgggtttggttgtgctcggcgtggcttacgcccagctggcaatactactggtctcgagctgtgtggactctctttggtccgtcgcccaggccctgctcgtcctgtgtcccggcacgggtctctcaactctgtgtccagccgaatcttggcacctaagccctctgttgtgtgttggcctgtgggcactaagactctggggagccctgcgtctgggagcagttattctgcgatggcggtaccatgcgctgcgtggagaactgtacagaccagcatgggaaccccaagattatgaaatggtggagttgttcctccgcaggttacggttgtggatgggcctaagcaaggttaaggagtttcgccacaaagtacggtttgagggaatggagccgttaccatctcgctccagccggggcagcaaagttagccccgacgttcccccccccagtgctggttcagatgcatcccaccccagcacatcaagttcccagctcgacggcctatcagtgtcattaggcaggctgggaactcggtgcgagcctgaaccatcgcgactccaggctgttttcgaggcactgctgacgcagtttgatcggctgaaccaggctactgaagatgtctatcagttggaacaacaactgcattccctccaggggcgaaggtccagtcgtgctcccgccggtagctcgaggggaccttctcctggtctacgccccgctctgccaagccggctggcccgagcctcaagaggtgtagatctggctacagggccctctagaaccccgttaagagccaagaataaagtgcaccctagcagtacctag

SEQ ID NO: 199991 - DNA, 3693 bp, synthetic construct
  misc_feature 1..3693: note = Description of Artificial Sequence: Synthetic coding sequence
  source 1..3693: mol_type = other DNA
atggtggccgccagccccaaccccgccgccgtgaacaccagcgtgaccctcagcgctgaacttgccggaggatcaggcgtggtttatacttggagcctggaggaggggctctcatgggagacgtctgagccctttactacgcactcttttccaacaccgggcctgcacctcgtcacgatgactgcagggaaccctctaggatcagcaaatgcaacagtggaagttgacgtccaggtcccagtcagtgggctctcaattagagcctccgaacccggggggagtttcgtggcggcaggttcctcagtgcccttttggggccagttggcgacagggacaaacgtgagctggtgttgggcggtgccggggggcagctcaaagcgaggaccacacgtgaccatggtgttcccggacgcaggcactttttcaattaggctgaatgcttcgaatgctgtttcttgggtgagtgctacctataacctgaccgctgaagaacctatcgtgggtctggtgctatgggcgtccagcaaagtggtggccccaggtcagctcgttcacttccagatactgctggccgccgggtccgccgtgacttttcgcttgcaggtgggcggagccaatccagaagttttgcccggcccacggttcagccactcattccctagggttggtgaccacgttgtgtcagtcaggggcaagaaccatgtgagctgggcccaggctcaggtccgcatcgtggtgctggaggctgtaagtggcctgcaggttccaaactgttgcgaaccaggaattgccacaggcacggaaaggaatttcaccgcacgagtgcaacgtggatctagggtcgcttacgcgtggtactttagcctgcaaaaggtacaaggcgattcactggttatcctttcgggaagggacgtgacttataccccggtggctgcaggactgctcgagatccaggtccgggcttttaacgctctgggatcagaaaaccggactctggttctggaagttcaggatgctgtccagtacgtggccctgcagtccggtccctgttttacaaaccgaagtgcgcagttcgaggcagccacatccccgagtcccagacgcgttgcataccattgggattttggagacgggtcacccggccaggacacagacgagccgcgggccgagcactcatacttgcgacccggagattatagggttcaagtcaacgcctcaaatttggtatcttttttcgtagcccaagctaccgtaaccgtgcaggtgctggcctgtcgtgagcctgaagtagacgtggtgttacctttgcaggtgctgatgcgtcgaagccagcgtaactacctggaggcacatgttgacctgagggattgtgtcacgtaccagacagagtatcgctgggaagtgtacaggacagcaagctgtcagcgtcctggaaggcccgcccgcgtcgccctgcccggagtggatgtctctaggccccgtctagttttaccccgacttgctctgcctgtgggtcattattgcttcgtcttcgtagtgtcttttggcgacacaccacttacacagagtatccaagcaaacgtgacggtggcccccgagaggctggtgccaatcatagagggggggtcctatcgggtttggagcgataccagggaccttgttctggacgggagcgaaagctacgacccgaatctggaagatggcgatcagactcccttatccttccactgggcttgtgtggcctcgacacagcgtgaggccggagggtgcgccctgaactttggacccagggggagctccacggtgactatccctagagagagactggcagcaggcgtggagtatacattctctctcactgtatggaaggccggtcgtaaagaagaggcgacaaatcagacagtcttgattagaagtggcagggtgcccatagtgtctctcgaatgcgtctcttgcaaagcccaggctgtctacgaggtttcgcgcagcagctatgtttatctggaaggtcggtgcctaaattgctccagcgggtcaaagcgtgggcgctgggccgctcgcacttttagtaataagacgttggtcttagatgagactaccacttccaccggctctgctggcatgcggttggttctgagacgcggcgtgctcagagacggagagggctacaccttcacactcacagttttagggaggagcggggaagaggagggctgcgcgtcaatcagattgtcccctaaccgtcctccactcggtggcagctgtaggctcttccctctgggcgccgttcatgctctgacgacgaaagtacacttcgaatgtacaggatggcacgatgcagaagacgccggagctccacttgtgtatgcccttttgcttcgacgctgtcgccagggccactgtgaagagttttgcgtgtacaagggtagcctatccagctacggcgcagttctgccccccggctttcgaccccacttcgaagtaggcttagccgtcgtcgtgcaggaccaactcggcgcagccgtggtcgctttaaatcgatccctggcaatcaccctgccggagccaaacggtagtgccaccggattgacagtctggctccatggactgacagcatctgtgttgcccggactgttgcggcaggccgacccacagcatgtgatcgagtactcgttggccttagtaacggttctgaacgagtatgagagggctcttgatgtcgccgccgagcctaagcatgagcggcaacaccgggcgcagatcaggaagaatattaccgagactttggtgagtttgagggtacacacagtggatgatatccagcaaattgcagcagcgctggcccagtgcatggggcctagccgggagctggtgtgccgcagctgtttgaagcaaacgctgcataagctcgaggccatgatgttgatcctccaagcggagaccaccgccgggacggtgaccccaactgcaataggggatagcattttgaatataacgggggatctgatccacctcgccagttctgacgttagagccccgcaacctagcgaattaggtgcagagtcaccgtctagaatggtcgcctctcaggcttataacctgacgtcggcgctgatgcggattctgatgcgtagtagagttctgaacgaggagcctttgacactggctggggaagagatcgtggcccagggaaagcggagcgacccccggtctcttctctgctacggaggcgcccctggtcccggatgtcacttcagtattccagaagccttttccggcgccctggctaacctctctgatgtcgtacaactaatttttcttgtggactccaacccttttccatttggatacatcagtaattacaccgtgagtacaaaagcgccgccaaccccccccacacctctgtggagctctccccgtccaccttctgtgctatggtcaccatggaccgccgcaacgctgagacccggctgcatctgttccagcacgatccgctgttggaccgccactacctgtttaagaaacctctcacctacctggcagagcacttacacacggtccccagggccaatgtccacaaccgcccgactcgccggcggcagcgcccagagtcactccagggttcttactactgggcctactccttcttcttttccacgaggcgcagaaacccagcggggagtcacaatttag

SEQ ID NO: 199992 - DNA, 12909 bp, synthetic construct
  misc_feature 1..12909: note = Description of Artificial Sequence: Synthetic coding sequence
  source 1..12909: mol_type = other DNA
atgccccccgccgcccccgcccggctggccctggccctgggcctgggtctctggctcggggccctggccggaggcccagggcgcggttgcggaccatgcgaaccaccctgcctgtgtggcccagctccaggcgccgcttgcagggtgaactgttctggccgcgggctgcgtactctgggaccagccctgcgcatcccagcggacgccacagcgctggacgtttcccacaacctgctacgcgcccttgacgtggggctgctggccaacctcagtgccctggccgaactggatatatcaaacaataaaatctcaacactggaagagggaatcttcgcaaacctgtttaatctttcagagatcaatctgtcaggcaacccatttgaatgtgactgcgggctggcatggctccccaggtgggccgaggagcagcaagtcagagtggtgcagcccgaggccgcaacgtgcgccggaccaggctctctggccggccagccgttgctgggaatccccctcctcgactcaggctgtggtgaagaatatgtggcgtgtcttccagacaatagctctggaacagtggccgccgtgagtttttccgcggctcacgaaggactgcttcaaccggaagcatgctcagctttttgtttctcaacgggccagggactagctgcactgtctgagcaggggtggtgtttatgcggcgctgctcagcccagcagtgcctcctttgcctgcctgtctctgtgttctggaccacccccgccacctgcacctacttgcagaggtccaactctgctgcagcatgtgttccccgcaagtcctggtgccacgctggtgggtccacacgggcctctcgcctccggtcagctggccgctttccacattgccgcccctctgcctgtgactgcgaccaggtgggactttggggatggatctgcggaagtcgatgccgcaggacctgcggctagccatcgatatgtgctcccggggcggtaccacgtcactgccgtgcttgcgcttggtgcaggctcagccctgcttggcaccgatgtgcaagtggaggctgctcccgccgccctggaactggtgtgtccgagctcagtgcagagcgacgaaagcctggacctttccatccagaacaggggcggatcaggactggaggcagcttacagcattgttgctctcggggaagaacccgccagagccgttcatcctttgtgcccatccgacaccgaaattttccccgggaatggccactgctacagactggtggtggaaaaggccgcctggcttcaggctcaggaacagtgtcaagcctgggccggggccgctcttgcgatggtggatagccccgctgttcagagattccttgtgagccgggtgaccaggtcactcgacgtgtggataggattttccaccgtccagggagttgaagtgggccctgccccacagggggaggccttctcactggaatcgtgtcagaactggctccctggtgaacctcatcctgccaccgcggagcactgtgtcaggctgggccccactggctggtgcaataccgacctgtgcagcgcaccacacagttacgtgtgtgagctgcagcccggcggccctgtgcaggacgccgaaaacctactcgtaggtgcaccctcaggagatctgcaaggccccttaacgccattggctcaacaggatggcctcagcgccccgcatgagcctgtcgaagtgatggtattccctggccttagactcagtcgggaagcttttttgaccacagcagaattcggtactcaagagttgcgccgtccagcccaactgcgtctgcaagtatacaggttgttatccacagccggtacgcccgagaatgggtctgaacctgagtcacgtagcccagataatcggacccaattggcccctgcttgcatgcctgggggcaggtggtgcccaggggccaacatatgtctgcccctcgatgccagctgtcacccccaggcatgcgccaacggctgcacctctggccccggcctgccaggagctccctacgctctgtggcgagaattccttttttccgtgccggcaggtccgcctgcacagtatagtgtcacccttcacgggcaagatgttctgatgttgccaggggatttggtgggattgcagcacgacgccggtccgggcgctcttttgcattgttctcccgctcccggtcatccgggaccaagggcgccttatctaagcgccaatgcctcctcatggttgcctcatctgccggctcagctcgagggcacctgggcttgtcctgcttgtgctctgcggctcttggctgcaacggagcagctgactgtactgttgggtcttagacctaaccccggcctgaggctacctggtcgctatgaagttagagctgaagtcggaaacggagtgtctcgacataatctgtcgtgtagttttgacgtggtgtccccggtggccggcctgagggtgatttaccctgcaccacgtgacggcaggttgtacgttcccacaaacggttctgcccttgtgctacaggttgattcaggcgccaacgccacagccactgctcgatggccggggggatcagtgagtgccagatttgagaacgtttgtccggcactcgtggccacatttgtgccaggatgtccctgggagacaaacgataccttgttttcagttgttgctctgccttggctaagcgaaggcgaacacgtcgtggatgttgtagtggaaaattccgcttctagagcaaatctctcccttcgcgtcacagcggaggagcccatctgcggtcttcgtgccacaccttcaccggaggcccgggttttacagggcgtgcttgtacgctactcgcctgttgtggaggctggttcggacatggtgttccgatggacaatcaatgacaaacagtctctaacttttcagaacgttgtattcaatgtgatataccagtcagccgccgtattcaagctgtccttaacggcatcaaaccacgtgtctaacgtaactgttaactataatgttaccgtggagcggatgaatcgcatgcaaggccttcaggtgtccacagtacctgccgtgttatcacccaatgctacactcgccctcactgccggcgtactggtggactccgctgtggaggtcgcattcctttggacatttggagacggcgagcaggcgcttcatcagtttcagccaccctataacgaatctttccctgtcccggatccgtccgtggcccaggtgctggtcgagcataatgtaatgcacacatacgcagcacccggcgagtatctgctcaccgttctggcaagcaacgcgttcgaaaatttgacacagcaagtccctgtgtcggtgcgagcatctttgccaagcgtggccgtcggggtgtcagacggtgtgctcgtcgctggacggcctgtgactttttacccgcacccacttccaagcccaggaggggtcctgtatacttgggatttcggagacggcagtccggtgctgacgcaatcacagccagcagccaatcatacatacgccagtaggggcacctatcatgttcgcctagaggtgaataatacagtctctggggctgcagcacaggcagacgtgagggtttttgaagagttgagggggttaagtgtggatatgtcactggcagtggagcagggcgccccagtggtggtgagcgccgccgtgcagaccggcgacaacatcacatggacatttgatatgggggacggaacagttctgtcagggcccgaggcaactgtagaacacgtgtacctccgagcgcagaactgtaccgtcaccgtaggggccgcttcccctgcaggacacctggccaggtctctgcacgtcttggtattcgtgctggaagtcctgcgggtggagcccgctgcttgtatccctacccagcccgacgcaaggctgaccgcttacgtcacgggaaatcctgctcattatttgttcgactggacatttggagatggctcatctaacactaccgtccgcggctgcccaaccgtgacacataacttcacaaggagcggcacattccctctggcactggttctgtcgtcccgcgtaaaccgcgcacattattttactagtatctgcgtggaaccggaagtcggcaacgtaaccctccaacccgaacggcagtttgtccagttgggcgacgaagcttggcttgttgcctgtgcgtggccacctttcccgtaccggtacacctgggatttcgggacagaggaagccgcacccactagggccagaggaccagaggtgacatttatctaccgcgatcctggctcttatctcgtaaccgtgacggcttccaacaatatttctgccgccaacgactctgctctggtggaagttcaagagccagttctcgtgacctccattaaagtcaacgggtctttagggctggagctccaacagccataccttttctccgcagtgggccgtggaaggccagcttcctatctttgggacttaggcgacgggggctggctggagggccctgaggtcacacacgcctataactcaactggagacttcactgtccgggtcgccgggtggaacgaggtgtcacggagtgaggcatggctcaatgtgaccgtgaaacggcgcgtcagggggctggtggtgaacgcaagcagaaccgttgtgcctcttaacggatccgtgagcttctcaacctccctggaggcaggatctgatgtgcgatacagctgggttctctgcgaccggtgtacgcctattcctggaggtcccaccatcagctatacattccgaagtgtagggacatttaacatcattgtgaccgccgagaatgaggtcggttcagcccaggatagcatctttgtctacgtgctgcaactgatcgaaggtctgcaggttgttggtggtggccggtacttccctactaaccataccgtccagctacaggccgttgtgcgagacggcactaatgtgagctattcttggaccgcatggagagatcgggggcctgctctagctggatccgggaaaggattctctctcactgttctcgaagccggcacatatcacgtgcaactgagagcgaccaacatgctgggtagtgcttgggctgattgcacgatggactttgtcgagcccgtggggtggttaatggttgcggccagtccaaatcccgcggctgtcaatacctctgtaacactaagtgctgagttagctggaggcagcggcgtcgtttacacttggtctcttgaggaagggctgagttgggagacatccgagccttttaccacccatagtttccccactccgggactccatctggtgactatgacggctggcaatccactgggatcggctaatgcaacggtggaagtggatgtgcaagtgccggtgagtggcctttcaatcagggcctcggagccaggcggcagctttgttgccgctggatcttcagtccccttctggggccagctggcaactggaactaacgtttcctggtgttgggctgtcccagggggaagtagtaaaaggggcccacatgttacaatggtttttccggatgccggaactttctctatccgtctgaatgcaagcaatgcggtcagctgggttagcgccacgtacaatctgactgccgaagaaccgatcgtcgggctggtgctttgggcatcgagcaaggtagtcgcccccgggcagctggttcattttcagatcctgctggccgcaggctccgccgtgaccttccggctccaagtgggtggagctaaccccgaggtgttacctggaccccgattctctcactcatttcccagagtgggcgatcatgtcgtcagcgtgcgcggtaagaaccacgtgagctgggcacaggcacaggtgagaattgtggtgttggaggcagtgtccggactgcaggtgcctaattgctgcgagcccggtatcgctaccggaacagagcgaaatttcacggctcgagtccagaggggcagcagggtggcctacgcttggtatttttccctccagaaggttcagggcgactccctggtcatcctgagtggccgggacgtcacttatacacctgtggcagcgggccttctggaaatccaggtgagagctttcaacgcactgggatcagagaatcgcacattagtactggaggtgcaggacgcggtacagtatgtggcactgcagtccggcccttgcttcactaataggagcgcgcagttcgaggcggccacaagcccctcccctagacgggtggcttaccactgggacttcggcgatggaagtcctgggcaggacactgacgagccccgggctgagcactcatatcttcgtccaggcgattaccgcgtgcaggtgaatgcatccaacctcgtgagcttctttgtcgcccaggctactgtgacagtccaggtgctagcctgcagggaacccgaggtggatgtcgtcctgccgctgcaggtccttatgagaaggtctcagcggaattaccttgaggcccacgtagatcttcgggattgcgtgacctaccagaccgagtataggtgggaggtgtatcgcactgcctcatgtcagagacccggaagacctgcccgtgtggccctcccgggcgttgatgtgtctcgcccacgtctggttttaccaaggctcgccttgccagtcggtcactactgcttcgtttttgttgtgagcttcggggatacgccactcacgcagtctatccaagcaaatgttacagttgcgccagagaggctggtacctataatagaaggcggctcataccgggtgtggagtgatacgcgcgatctcgtgcttgacggttctgagtcctacgatccaaatctggaggacggagatcagacccctctgagctttcactgggcctgcgtcgcctctactcagagggaggccggaggttgcgcgctcaatttcggacctcgcgggagcagtacagtgaccatcccccgtgagcgactggccgcgggagtcgagtacacattctccctaactgtttggaaagctggacgcaaagaggaagcaacaaatcagaccgtgctcattcggtctggccgtgtccccatcgtctcactggagtgcgtgtcctgcaaggctcaggcagtctacgaagtgtccagatcatcttacgtgtatctggagggtaggtgcttaaactgttcctcgggttctaaaagagggagatgggccgccagaactttttccaacaaaacgttggtgctcgacgaaactaccacctctactggctcagcaggtatgcgactcgtgcttcgtcgaggcgtgttacgcgacggcgaggggtatacattcacactcaccgttcttgggagatccggcgaagaagaagggtgcgcttccattaggctgagtccaaacagaccacccctgggaggatcttgtcggttatttcctctgggcgctgtgcatgccctcacaacaaaggttcactttgagtgcacggggtggcacgatgctgaggatgctggcgcccccctggtttatgccctgcttctgcgacggtgtcggcaagggcattgcgaagagttctgcgtgtataagggctcgttgagctcttatggagccgtactgccacccggatttagaccacacttcgaagtggggctagctgtcgtagttcaagaccagctgggggcagccgtggttgcgctaaaccgatccctggcaatcacgctcccagagcccaacggcagcgctaccggcttgactgtgtggttacatgggcttactgcatccgttctgcctgggttgttacgccaggctgacccccaacatgtaattgagtactctcttgctctcgttactgtgctaaacgagtatgagcgggctctagatgtcgcagctgaacccaaacatgaaaggcagcacagagcacagataaggaagaatataactgagaccctggttagcctgcgggtccacacagtcgacgacatccaacagattgctgcagccctggcccagtgcatgggaccatccagagaacttgtttgcaggagctgcttaaagcagacccttcataagctggaggctatgatgctgatccttcaggcagagactaccgcaggtaccgtcaccccaacagctatcggagactctatcctgaatattacgggggatctgatacaccttgccagttcagacgtccgggcgccacagcctagtgagcttggcgctgagtccccgagcagaatggtagcgagccaggcctacaatttaacatctgccctcatgaggattcttatgcgtagccgtgttctaaatgaagagccattaacgctcgcaggagaggaaatagtggctcagggtaaaagatcggatcccagaagcctcctttgctacggaggcgctccggggccgggatgtcacttcagcattcccgaagcttttagcggggcgctggccaacttgagcgacgttgtacagctgatatttctggtcgattctaacccatttccgttcggctacatttccaactacaccgtcagtacgaaagtagccagcatggcctttcagacacaggccggcgcccagatcccgatagagcggttagctagcgagcgggccataaccgtgaaagtgcctaataacagtgactgggcagctcggggccacaggtcttccgcaaatagcgccaattcggtggtggttcagccccaggcatccgtgggggccgtcgttacactggactcttccaaccccgcagctggcctgcaccttcaactgaattatacactgctggacggtcattatctctccgaggagcctgaaccttacctggccgtgtacctgcactccgagcctcgaccaaacgagcataattgtagcgccagccgccgaattcgaccagaaagcctacagggggccgaccatcgcccctacacttttttcattagcccaggcagcagagatcctgccggatcttaccaccttaacttatctagtcatttccgctggtccgcccttcaggtttcagtgggactgtatacctccctttgccaatatttttcggaggaggatatggtgtggagaactgaaggtctgctgcccttagaggaaacaagccctcgacaggctgtctgtctcacccgacacctcacggcatttggagcatcgctttttgtccctcccagccacgttcgatttgtattcccagaacccactgccgacgtaaactatatcgttatgctgacatgcgcagtgtgcctcgtgacttatatggtgatggccgccatcctgcacaagctggaccaattggacgccagccgaggtagggctattcccttttgtggccaacgggggcgattcaagtacgaaattctggtgaaaacaggatgggggcgcggctccggaaccactgcgcacgttggcattatgctgtacggagtcgattcaaggtcgggccaccgtcatctcgatggagacagggcgttccacaggaattccctggacatttttaggatagccacccctcacagcctgggcagcgtgtggaagattcgtgtgtggcacgacaacaaaggcctatcacctgcatggttcctgcagcatgttatcgtgcgcgatctccagaccgcgcgatccgccttcttcctggtgaatgactggttaagcgtcgagacagaggctaatggaggactcgtcgaaaaagaagtgctcgcagcctccgatgcagctttactgagattccgccgactcctcgtggcagagttgcagcggggctttttcgataagcacatctggctatccatttgggaccgccctccaaggtctcgattcacacgcattcagagggcgacttgttgtgtcttgctcatttgtcttttcttgggcgcaaatgcagtctggtatggagctgtgggagactccgcatactccaccggccatgtaagtcggctctctcctctgagcgtggacactgtggctgtgggacttgtgagcagcgttgtcgtttatccagtgtacttggcaattctatttcttttcagaatgtccaggtccaaagttgccggaagcccttcgcccacaccggctggacagcaagtgttagatatagacagctgtctggatagttcagtcctcgactctagctttctgactttctcaggcctgcatgccgaggcctttgtcggccagatgaaaagtgacctttttttggacgactctaaatctctcgtatgttggccctcaggggaagggactttgtcctggcctgacttgcttagcgacccaagcatagtgggctcaaacctgaggcaactcgcccgggggcaggcagggcacggactgggtccagaagaggatgggttcagtttggcttcaccttattcaccagcaaagagtttctcagcttctgacgaagaccttatccagcaggtgctcgccgaaggcgtctccagtccggcccctactcaagacacacatatggagactgatctgctgtcttccctctccagcacgcctggcgaaaaaacagagacgctggcgctgcaacggcttggcgaattgggaccaccctctcccggattaaactgggagcagccccaggccgctcggttatccagaaccggactggtggagggactgcgaaagaggctgctacccgcctggtgcgcttcacttgctcacggcctcagtctcctcctagtagcagtggccgtggctgttagcggttgggtcggcgcctcatttcctcccggagtctcagttgcatggttgctcagctcttcagccagctttcttgcctctttcctgggctgggagccactgaaagtgctcttagaggcgctttacttcagtctggtggcgaagcggctgcaccccgacgaggacgataccctggtcgaatctccagcagtgacgccagtcagtgccagggtgcctagggttaggccccctcacggctttgccttattcctagccaaagaggaggcgaggaaggttaagcggctccatggaatgcttcggagcctgctagtttatatgttattcctgctggtgaccttattggcctcctatggcgacgcctcctgccacggccatgcttaccgccttcagtctgcaatcaaacaggaactgcatagtcgcgctttcttagccataacacgctcagaagaactttggccctggatggcccatgtccttctcccctatgtacatggcaaccagtcttctcccgagcttggaccacctcggctgcgtcaggtaagactgcaggaggccctgtacccagatcctccaggtcccagggtgcatacctgctcggcggccggaggcttttcaacatctgactatgacgtgggctgggaatctccccataacggatccgggacttgggcttattccgcacccgacctgcttggggcctggtcctggggaagttgcgccgtgtatgactcggggggctacgtgcaggagctaggactgtctctggaggagagtcgcgacaggctccgctttctgcaactccataactggctggataatcgaagccgggctgtgttcctggaactgacaaggtactctccagctgttggactgcatgctgcagttaccctgaggttagaatttccagccgcaggcagagccttggcagcattatctgtgagacctttcgcattgcgacgcttgtctgccgggctctctcttccgcttctgacctctgtctgcctgctgctttttgccgtgcattttgccgtagcggaggcccgaacatggcatagggaggggcggtggagagtgctgagactcggcgcatgggctagatggctccttgtggccctgactgctgccaccgcactggtccggctggcccagctcggagcggccgacagacaatggacacggttcgtgcggggccgcccccggcgttttacgtctttcgaccaggtggctcagctgagctccgccgctcgggggctcgctgcatctctcctcttcttgttgctggtgaaggctgctcaacagcttcgattcgtgcgtcagtggagtgtgtttggtaagactctgtgccgcgctcttccagagctgctgggcgttaccctcggactggttgttctcggcgtggcctatgcgcagctcgccatcctactggtgtcctcatgcgtggatagcctttggtctgtggcccaagctttgctggtcctctgtccagggaccgggctcagtacactgtgcccggctgaaagctggcacctatctcccctactgtgcgttgggctatgggcccttcgcctctggggtgctctgaggttaggagcagtcatcctgaggtggcgatatcatgcactacggggtgaactgtatcgacctgcctgggagccccaggactatgagatggtggagctctttctcaggcgactacgcttatggatgggactttccaaggtgaaggaattcaggcacaaggtgcgtttcgaggggatggagcctttaccaagtcggtcgagcagggggagcaaggtctctcctgatgtaccgccacccagcgcgggttctgatgccagtcacccgagtacttcttcatcgcagctcgacggactctcagtgagtctgggccggcttggtaccaggtgtgagccagaaccgtccaggttacaggcagttttcgaagctttgctgacccaatttgatagactgaatcaggcaacagaagatgtgtatcaactggaacagcagctgcactccttgcaaggtagaaggtccagccgagcacccgctggcagttcaagaggcccttcccccggactgcgcccggccctcccttcacggctggccagggcctctcgcggtgtagatttggccacaggaccctctagaacccccctgagggccaagaacaaggtgcacccctccagcacctag

SEQ ID NO: 199993 - DNA, 8550 bp, synthetic construct
  misc_feature 1..8550: note = Description of Artificial Sequence: Synthetic coding sequence
  source 1..8550: mol_type = other DNA
atggccgaggaggccgcccagaacatcagcgacgaccaggagcggtgcctgcaggccgcgtgctgcctaagttttggaggcgaattaagcgtaagcaccgataaaagctggggcttgcacctctgttcctgctcacccccgggtggtggcttgtgggtggaggtgtacgcaaatcacgtgcttctgatgagcgacgggaaatgcggctgcccttggtgcgccctgaatggaaaggctgaagacagagaaagccagtctcccagttcgagtgctagtcggcaaaagaacatctggaaaacgacttctgaagccgctctatccgtggttaatgaaaaaacacaagccgtcgtgaatgaaaaaacccaggctccactagactgtgacaatagcgcagaccggatccctcacaagccctttatcattatcgctagggcctggtcctctggggggcctaggttccatcatcgcagactgtgcgcaacggggaccgccgattcgaccttctccgccctgctacagctgcagggcacgacttcagcggcagccccatgtagtctgaagatggaggcctcttgttgcgtgctacgcctcctttgctgcgctgaagatgttgctactggattgttgcccgggacagtgactatggaaacgccgaccaaggtggcacgtcctactcaaacgtcatcccagagagtcccactctggcctatcagtcattttcccacatccccccgcagtagccatggactccctcccggcatccctcgcaccccttcattcaccgccagtcaaagtggatctgagattctgtacccacccactcaacatccccccgtcgcaatcttggctcggaattcagacaatttcatgaaccccgtactgaattgctccttagaggttgaagcccgcgcgcctcccaatctgggcttccgagtccacatggccagcggagaggcactgtgcctgatgatggatttcggggattcatccggagtggagatgaggctccataacatgtctgaggccatggcggttacagcgtaccaccagtacagcaagggaatttttttccatctcttacactttcaactcgatatgagcacctataaagaggccgagacccagaatactaccttgaatgtgtacctgtgccaatcagagaattcctgcctggaggatagcgacccctccaacttaggttacgagcttatatcagctttcgtgacgaagggcgtatacatgctgaaagccgtcatctacaatgaattccacggtacagaggtcgagctcggcccttactatgtggagatcggtcacgaggcagtctccgctttcatgaactcctcatctgtgcacgaagatgaggtcctggtgttcgctgacagccaggtgaaccagaagagcaccgtggtcattcatcacttcccctctatcccttcctacaacgtgtctttcatctctcagacacaagtcggcgattcgcaggcttggcacagtatgaccgtctggtataagatgcagtccgtgtctgtgtatactaacgggaccgtgtttgccaccgacaccgacattaccttcaccgctgtgactaaagaaactatcccactggagttcgagtggtactttggtgaggaccctccagtgcgaaccacctctcgctctattaagaagcggctctctatcccccagtggtaccgggtcatggtcaaagcttcaaatagaatgtccagcgttgtgtccgagccccacgtgattagggtccagaaaaagattgtggcaaaccggcttacctctccgtcatccgccttagtgaatgccagtgtggctttcgagtgttggattaattttggaaccgacgtggcctacctgtgggactttggggacgggacggtgtcattggggagctcctcaagctctcatgtgtattcccgggaaggagagttcactgtggaggtgctggctttcaacaatgtatcagcctctactctccgtcaacagctctttattgtgtgtgagccctgccagccaccactcgtgaagaatatgggacctggaaaggtccagatttggcggagccagcccgttaggttaggagtcacatttgaggccgcagtcttttgtgacatttcacaaggcctttcatatacctggaatttaatggattctgagggcttgccggtttctttacccgctgccgtcgacacacaccgacagacattaatcctaccttcccacaccctggaatacggtaactataccgcattggcgaaggtccaaatcgagggcagcgttgtgtatagcaactactgcgtgggactcgaagttagagcccaggcacctgtctctgttatatccgaagggacccaccttttcttttctcgcacaacatcctcacctatcgtgttgagggggacccagagctttgatccagacgatcccggtgccactctgcgataccactgggaatgcgccactgctggctcacccgcccacccctgtttcgattctagcacagcccatcagctggatgctgccgccccaactgtctcatttgaggcacagtggctgagtgattcttatgaccagttcttggtgatgctacgggtgagctcgggagggcgaaatagcagtgagacacgggttttcttaagcccctatccagatagcgctttccgcttcgttcacatttcttgggtttctttcaaggataccttcgtgaactggaatgatgaactgagtctccaagccatgtgcgaggactgttccgagatcccaaatctgtcatattcttgggatctgtttttggtcaacgcgaccgagaaaaataggatagaggtgccgttttgcagagtcgtggggttgctcggtagccttggcctaggggctatttcagagtccagtcagctaaatttactgcccaccgagcccggtacagctgatccggacgcaactaccacacctttctccagggagcccagtccagtcacgcttgggcagcccgcaacctcagccccacgcggaaccccgacggagccaatgactggggtttattggatccctccagctggagattccgctgttctcggggaggccccagaggagggatcccttgacttagaaccgggtccccagtccaagggttctttaatgacagggcgtagcgagcggagccagcctacacactcacctgatccacacctttctgacttcgaggcatattactccgatatccaggaggcaatcccgtccgggggccggcagccagctaaggatacaagtttcccaggttctggcccatctctgagtgcagaggagagccctggggacggcgacaatctggttgatccctcactgtcagccggacgcgctgaacctgtgctgatgatagattggcctaaggcactcctgggtagggccgtattccaagggtatagtagcagcggcatcactgagcagaccgttaccattaaaccctacagcctgagttccggtgaaacgtacgtcctgcaggtgtccgtcgcatcaaaacatggactgcttggcaaagcccagctatacttgacagttaatcctgcaccgcgcgatatggcctgccaggtgcagccccatcatggcctggaggcacatacagtgttttcagtcttctgtatgtccgggaagcccgacttccactacgagttctcctaccagatagggaacacgagcaagcataccttgtatcatggtcgcgatacccagtactattttgtcctacccgccggggagcatttagacaattataaagtaatggtgtctaccgagatcacagacggaaaggggagcaaggtgcagccttgtactgtcgtggtgaccgtactgccaagatatcacggaaacgattgcctgggggaggacttgtacaatagctccctcaaaaacttgtccacattgcaattgatggggtcatataccgagatcaggaattatatcactgtgataacccgaattttgtcacggctgtccaaggaagacaagacggcatcttgcaaccagtggagtaggatccaggatgcgctgattagcagcgtgtgccggcttgcttttgttgaccaggaggaaatgattggcagcgtgctgatgctcagggatctcgtgtcctttagcaataaactgggatttatgtcagcggtactcatacttaaatacactcgcgctttgctagctcaggggcaattcagcggtcctttcgtaatcgacaagggtgttagactcgaactgatcgggttgataagcagggtatgggaagtcagtgagcaggagaactcgaaggaggaggtctaccggcacgaggagggaatcactgtaatctcggacctcctcttaggctgtctgagcctgaatcatgtgagtacggggcagatggagttcaggaccctgttacactataacttgcaatcctccgtgcagtctttaggttccgtccaggttcacctgccgggggacttggccggtcattcgccagctggcgcagagacacagtcgccttgctacattagccaactcattttgtttaaaaaaaacccttatccgggcagccaggcacctggccagattgggggggtggtggggctcaacctctatacatgtagtagtaggcgccccattaatcgccagtggttgcgcaagcccgtgatggtcgaattcggcgaggaagacggactcgacaaccgacgaaacaagacaacttttgtcttactcagagacaaagtcaatctgcaccagtttacagaactctctgaaaatccacaagagagcttgcagatcgaaatagagttttcaaaaccagttacgagggcgtttccagtcatgcttttggttcgcttcagtgaaaagcccactccatcagacttcctggtcaaacagatttacttttgggacgagagtattgtccagatttacatccctgccgcaagtcaaaaggatgcctcggttggataccttagtttactggatgccgactacgaccgtaagccccccaaccggtacctggcaaaagctgtcaattataccgtgcactttcaatggattagatgtcttttctgggacaagcgagagtggaagtccgagcgattcagtccacagcccgggacgtctcctgagaaggtaaattgctcataccaccgtttagcggcgtttgctctgttgcggcggaaactcaaggcaagctttgaagtttctgacatttctaagctacagtctcatcccgaaaacctcttgcctagcatctttatcatggggagtgttattctgtacggctttctggtcgctaaaagccgccaagtggatcaccacgaaaagaaaaaggccgggtatattttcctccaagaagctagtcttccaggtcaccagctgtatgcggtcgtcatcgatactggattcagggctccagctcgcctgaccagcaaagtgtacatagtgctctgcggtgataacggtctgtcagaaactaaagagctgtcctgtcccgaaaagcctctgtttgagcggaatagtcgacacacttttatcttaagcgcaccagctcagctgggactattgcgaaagattcgactgtggcatgacagtaggggacccagccctggctggtttatctctcacgtcatggtgaaggagctccacaccggccagggctggttcttccctgctcagtgttggctgtccgccggccgccacgacgggagagtggaacgggagctgacctgtttgcagggaggacttggttttagaaagctattttattgtaagttcacagagtacctcgaggattttcatgtgtggttaagcgtgtactcccgaccctcaagttcccgctacctgcatacaccgcgattgacggtgtccttctcattactgtgtgtctatgcctgcttaacggctttggtcgcagcaggtggccaagaacagccccatctcgacgtatcccctaccctcggttcgtttcgtgtcggactgctgtgtacactcctggcgtcccccggtgcacagcttctgtccctcctgttcagactctccaaggaagcgcccgggtctgctagggtcgaaccgcactcacctcttagaggtggagcccagaccgaagcccctcacggtcccaattcatggggacggatcccagatgcccaagagcctagaaagcagcccgctagtgctatcctgagcggctcaggaagggcacagcgtaaggccgcttcggataacgggactgcctgcccagcccccaagctgcaagtacacggggctgaccactccagaacctcattgatgggtaagtcccattgttgccccccccatacacaggcgccgtcctcaggactggagggattaatgccgcagtggtcgagggccctgcagccctggtggagcagcgcagtctgggcaatttgtggcaccgcttctcttgcctgttctctgggcacgggattcctcgcttatcgatttggacaagaacagtgtgtgcagtggctacatctgctgagcctgtcagttgtgtgttgcatctttattacccaacctttgatggtctgcctaatggcactgggctttgcttggaaacggagggctgataaccactttttcaccgagtccttatgcgaagcgacgcgtgaccttgacagtgagctcgccgagcgcagttggacaaggctgccattctcaagcagctgcagcatccctgattgcgccggggaggtggagaaggtgctggcagcacgccagcaggcaaggcacctacgctgggcacacccaccctcaaaagcacaattgcgcggaactcggcaaaggatgcggcgcgaatctcggaccagggcggccctgcgggacataagtatggatatcctcatgctgctgttgcttctttgtgtgatttatggtcggttttcccaggacgagtactctctcaaccaggcaatccgaaaagagtttactagaaatgccaggaattgtctaggtggtcttagaaatatcgctgattggtgggactggagtttgaccacactccttgacggtctgtatcctggagggactccttctgcccgtgttccaggagctcaacccggggccctcggagggaaatgttacctcatagggtcctccgtgatcagacaacttaaagtgttccctcggcacttgtgcaaacccccacggcctttttcagctctgatcgaggacagcattccaacatgctccccagaagttggaggacccgagaacccttatctcattgatcccgagaaccagaatgtgacccttaacggcccgggcggttgcggtacaagagaggactgcgtactgagtctgggtcgcacgcggacagaggcccacacagccttgtcacgtttaagggcttccatgtggatcgacagatccacgcgcgctgtcagtgttcacttcacactttataatccgcccacacaactctttacaagcgtgagccttagagtggaaatcttacccactgggtctctggtgccatcatctctggtagaaagcttttcaattttcagatcagactcagccttgcagtaccacctcatgttaccccagttagtgtttctcgctctgtcgctgattcatctttgtgtgcagctctatagaatgatggacaagggcgtgctgtcctattggcgtaagccgcgaaattggttagagctttccgtggtaggagtcagtctgacctactacgccgtgagcggacacctggtgaccctcgccggcgatgtcaccaatcagtttcatcgcggactctgtagggcattcatggacttaaccctcatggcctcctggaaccagcgggcccggtggctgcgggggatcctcctgttcttgtttacgttaaagtgcgtgtatttgccgggcattcaaaataccatggcatcctgctcttcaatgatgaggcattcactgccctccatcttcgtggcaggattagtcggggctctgatgctcgccgccctgagccatctgcatcgtttccttctgtcaatgtgggtgctcccccctgggacttttactgacgccttccctggcttgctcttccacttccccagacgctctcagaaagactgcctgttggggctaagcaagtccgaccagcgcgcaatggcgtgctatttcggaatcctccttattgtgtcagctaccctgtgctttggaatgctgcgagggttcctgatgactttgccgcagaaaagaaagtccttccagtcgaagagcttcgtgagactcaaagacgtgacagcctatatgtgggagaaagtcctgaccttcctccggctggaaactcccaagctggaagaggccgagatggtcgaaaatcacaactattacctcgacgaattcgccaatctgctcgatgaactccttatgaaaattaacggactgagtgattctctccaactgccattactggagaagaccagcaataatacaggtgaggcgcgcaccgaggaatctccactcgtagatattagttcctaccaagctgctgagcccgctgacattaaagacttttag

SEQ ID NO: 199994 - DNA, 495 bp, synthetic construct
  misc_feature 1..495: note = Description of Artificial Sequence: Synthetic coding sequence
  source 1..495: mol_type = other DNA
tgagtgggcggccccgagaacccctacctgatcgaccccgagaaccagaacgtcactctgaatggtcccggcgggtgcggtacaagggaggactgcgtgctgagcctgggtcgtactcgaaccgaagcccataccgctctatcccggctgagggccagcatgtggattgaccgaagcacccgagctgtctcagtgcatttcactctgtataatcccccgactcagttgttcacatctgtgagccttcgcgtggaaatactacctaccggttcattggtgccaagctcccttgtggaatctttcagcatattccggagcgactccgctctccagtatcatttgatgctgccacagttggtgttcctggcgctgagtctcattcacctgtgtgtgcaactgtacagaatgatggacaaaggagtgctgagctactggcgcaagccaaggaattggctcgaagttgcctcccttgtgtccttctcgttcgagaaatag

SEQ ID NO: 199995 - DNA, 2907 bp, synthetic construct
  misc_feature 1..2907: note = Description of Artificial Sequence: Synthetic coding sequence
  source 1..2907: mol_type = other DNA
atggtgaacagcagccgggtgcagccccagcagcccggcgacgccaagcgaccccccgcgccacgcgctcccgacccaggccgtttaatggcgggctgcgcagctgtgggtgcaagcttggccgcacctggagggctgtgtgagcaaaggggattagagattgagatgcagaggattcgccaggccgcggcgagagaccctcctgctggagctgctgcctcacccagcccccctctctcttcctgctcaagacaggcctggagtagggataaccctggcttcgaggcagaagaagaagaagaagaggtcgaaggcgaagagggcggaatggtcgtagagatggacgtggagtggcggcccgggagccggcgctccgcagctagcagtgccgtaagcagcgtaggggcaaggtctcggggactggggggctaccacggggccgggcatccttcagggcgccgcaggagacgcgaggaccaggggcccccatgtccttcacctgtcggagggggtgatcccctccaccggcaccttcccctggaaggtcaaccccccagggtggcctgggccgagcgcttggtacgcggccttcggggcctgtggggcacacgactgatggaagaatcatcaacaaaccgcgagaagtatctaaaatctgtcctgagagagttggtgacatacctgctgttcttaatcgtgttgtgcatcctgacctacggtatgatgtccagcaatgtatactattatacgcgaatgatgagccagctgttccttgatacaccagtgagcaagacggagaagacaaatttcaagacgctcagctcaatggaagacttctggaaatttacagagggctccctcctggatggtctgtattggaaaatgcagcccagcaaccagaccgaagcagataataggagtttcatcttctacgagaatctcctacttggagtgccgcgaattcggcaactgagggttagaaacggttcttgcagtattccacaggacctccgcgatgagatcaaggaatgctatgatgtctacagcgtgtcctccgaggatagggcacccttcggccctagaaatggaacggcctggatctacaccagcgagaaggacctgaacggatccagtcactggggcatcattgcgacctattccggcgctgggtattatctggatttatcccgaacccgcgaggaaaccgccgctcaggtcgcgagtctaaagaagaatgtctggctcgataggggcacacgggcgacttttatagatttctcagtctataacgccaatataaaccttttctgcgtcgttaggcttctcgtggagttccccgctaccggtggggtcattccctcttggcagttccaacccctcaagctgatccggtacgtgaccacctttgactttttcctagctgcctgtgagattatcttctgcttcttcattttctactacgtcgtggaggagatactggaaatcaggatacacaagctccattactttcggtcattttggaactgtcttgatgtggtgatcgttgtgctttccgtggtagccataggcattaacatttacaggacctctaatgtggaggtgcttctacagtttctggaggaccagaatacattcccaaacttcgagcatctagcttattggcagatccaatttaataatattgctgcagtgacagtgttcttcgtctggataaagctcttcaaattcatcaattttaacaggacgatgtcacagctgtctaccaccatgagcagatgtgctaaagacttgtttggcttcgccattatgtttttcatcatcttcctcgcttatgcccaactggcttatctggtctttggcacccaagtcgatgatttctccacatttcaggagtgcatttttacgcagtttagaatcattcttggcgacataaactttgcagaaattgaagaagctaatcgcgtgctgggaccaatatactttacaacttttgtcttcttcatgtttttcatcctgctcaatatgtttctggccataattaatgacacctattctgaggtgaaaagtgacttggctcagcagaaagcggaaatggaacttagcgatctgatcagaaagggctatcataaagccttggtaaagcttaaattgaaaaaaaatacggtagatgatatctctgagtctctgaggcagggggggggcaagcttaactttgatgagctgagacaagacctgaaaggaaaaggacacacggacgcagagattgaagccatttttacaaaatacgatcaggacggtgatcaggagctcacagaacacgaacaccaacagatgcgcgacgacctcgaaaaggagcgagaggatctcgatctggatcactctagcctgcctaggccgatgtcttccaggagcttcccacggtctctcgacgatagtgaggaggacgacgatgaagatagtggccactcaagtcgtaggcgggggtccatctcctccggcgtgagttacgaagaattccaggtgctcgtgcgtcgcgtggatcggatggagcactcaattggcagcatcgtgagcaaaattgacgctgtgattgtaaagttagagatcatggaacgagccaagttaaaaaggcgcgaggttctgggaaggttgctcgatggcgtggcagaggacgaaaggctgggaagagattccgagattcaccgagagcagatggagcggctcgtgagagaagagctggagaggtgggaatccgacgacgcggcatctcagatttcccatggcctgggaactcctgtgggcttgaatggccagcccaggcctagatcctctcgaccgtcctcttcacagtctactgagggcatggagggagctggggggaacgggagctcgaacgttcatgtttag

SEQ ID NO: 199996 - DNA, 1161 bp, synthetic construct
  misc_feature 1..1161: note = Description of Artificial Sequence: Synthetic coding sequence
  source 1..1161: mol_type = other DNA
atgagccagctgagcaccaccatgagccggtgcgccaaggacctgtttgggtttgcaattatgtttttcatcatctttttagcctacgcacaactggcttacctggttttcggaacccaagtggatgatttttctacattccaagaatgcattttcactcagttccggataattttaggcgacattaattttgcagaaatcgaagaggcgaaccgcgtgttgggccccatctattttactacatttgtattcttcatgttttttatcctgctgaacatgttcctagccattatcaacgacacatactctgaagtaaagtccgatctggctcagcagaaagcagaaatggagctatctgacttaatccgaaagggttaccataaagcgctggtgaaactgaaacttaaaaagaatacagtggacgacatttcagaatcactacggcagggcggtggaaaactgaatttcgatgagcttaggcaggaccttaagggaaaaggacacacagacgcagagatagaggcaatcttcacaaagtacgaccaagacggggaccaggaattgacagagcacgagcaccagcagatgagggacgatctggagaaggagcgggaagatctggacctggaccattcctccttacccagaccgatgagcagccgatctttccctagatccttggacgacagcgaggaagacgatgacgaagatagtggccactcctctcgacggagaggcagcatctctagcggagtgtcatatgaggagttccaggtccttgtacggagggtcgaccgcatggaacactctatcggaagcatcgtgtccaagatcgatgccgtgatcgtgaagctcgagattatggaaagggccaagcttaagcggagggaggttctgggcaggctgctggacggggtggccgaggacgagcgacttgggagggactccgagatacaccgtgaacagatggaaaggctggtgcgggaggaactggaacggtgggaatcagatgatgccgcgtcccagatttcccatgggctcggaacccccgtggggctcaatggacaaccgcgcccgagaagctctcgtccctccagctcgcaatctaccgaggggatggagggtgcaggagggaacggaagttccaatgtgcacgtatag

SEQ ID NO: 199997 - DNA, 1161 bp, synthetic construct
  misc_feature 1..1161: note = Description of Artificial Sequence: Synthetic coding sequence
  source 1..1161: mol_type = other DNA
atgagccagctgagcaccaccatgagccggtgcgccaaggacctgtttgggtttgcgattatgtttttcatcattttcctcgcctacgctcaactggcgtatctggttttcggaacccaggttgatgacttctccactttccaggaatgtattttcacccaattccgcatcatactgggggacatcaacttcgctgagattgaagaagccaacagggtactagggcccatctactttaccacctttgtgttttttatgtttttcattctactgaatatgttcctcgccattatcaacgatacatacagtgaagttaagtcagatcttgcacagcaaaaagccgaaatggagctcagcgacctgatccggaaaggataccataaagccctcgtgaagctgaagcttaaaaaaaatacagtcgacgatatatccgagtctctgcgccagggaggcggcaagctgaacttcgacgagttgaggcaggatctgaaaggcaaaggccacaccgacgccgaaatagaggcaattttcaccaagtatgaccaggacggcgaccaagagctcacagagcacgaacaccagcagatgcgcgacgacctcgaaaaagagcgtgaggatttagacctggaccactccagcctcccgcgcccgatgagctccaggagtttcccacgttcccttgatgactcggaagaggacgatgacgaagactctggtcactcttcgcggagacgcggaagcatttcttccggcgtgtcctatgaagagttccaggtcctcgtcaggagggtggacagaatggagcactcaattggatccatcgtatcaaagatcgacgcagttatcgttaaattggagatcatggaaagggcaaagcttaaacgtcgggaagttctgggccggctgctcgatggcgtcgcagaagacgagaggctggggagagatagtgaaattcatcgtgaacagatggaacgcctcgtgcgggaggagttggagaggtgggagtccgacgacgcggcctcccagatttcccacgggttggggaccccagtgggcttgaacgggcagcctagaccgcggtcctcaaggcccagctcatctcaatctacggagggtatggagggcgccggagggaatggatcctcaaatgtgcacgtctag

SEQ ID NO: 199998 - DNA, 2418 bp, synthetic construct
  misc_feature 1..2418: note = Description of Artificial Sequence: Synthetic coding sequence
  source 1..2418: mol_type = other DNA
atgaacgccgtgggcagccccgagggccaggagctgcagaagctgggctctggcgcctgggataaccccgcttattcgggaccccccagtcctcacggcacgcttcgcgtatgcactatctcatctacaggccccttgcagcctcagcccaaaaagccggaagacgaaccacaggaaacggcttaccgcacacaggtatcctcttgctgcctgcacatctgccagggcattcgaggattgtggggaacgactctcactgaaaataccgccgagaatagagaactgtacatcaagactaccctccgcgaactactggtctatattgttttcttggtggacatatgcctcttgacttacggcatgacgagtagttcagcgtattattatacaaaagtgatgtctgagctctttttacacacccctagcgacacgggagtctccttccaagccatctcctccatggccgacttttgggatttcgctcagggcccactgttggattctctgtactggaccaagtggtacaacaaccagtcgctgggccacggaagccattcctttatctactatgagaatatgctcctgggagtgccccggctgaggcagcttaaggtccgcaatgatagctgtgtcgtgcatgaggatttcagggaggacatcttgtcgtgttacgacgtttatagtcccgacaaagaagagcaacttccattcggaccctttaacggaaccgcttggacgtaccactcacaggacgagttggggggtttcagtcactggggcaggttaaccagttacagtggaggtggctactatctagacctgcccgggagccgacagggatctgccgaggcgttgcgtgcattgcaggagggactctggctggacaggggcaccagggtcgttttcatagactttagtgtatacaacgcaaatataaacttattctgtgttctgcgactcgtcgtcgaatttccagctactggcggcgcaattccatcctggcagatcaggaccgtcaagctgatccgctatgtttccaactgggattttttcatagtgggatgcgaagtgatcttttgtgtgttcatcttctactacgtcgtcgaggaaatcttagaactgcatattcaccgactgcgatacctgtcatctatttggaatatactggacctcgtggtcatactcctgtctatcgtagcagtgggtttccacattttcaggaccctcgaagtgaacagacttatgggaaaactgctccagcaaccaaacacctatgctgatttcgagttcctggctttctggcaaacacagtacaacaatatgaacgctgtcaacctgttctttgcttggatcaagatttttaagtacatcagctttaacaagacgatgacacagttatccagcaccctggcccgttgtgcgaaggacattctgggattcgcagttatgttctttatcgtctttttcgcatacgcccagctagggtacctgctctttggaacacaggtggagaacttctcaacattcataaaatgtatttttactcagttccggattatcctgggggatttcgactacaacgctatcgacaacgcgaaccgtatccttggccctgcttactttgttacctatgtcttcttcgtattcttcgtccttctcaacatgtttctggctattataaatgatacttatagcgaggtaaaagaagagcttgctggacagaaggacgagctgcagctgtcggacctgttgaagcagggatacaataaaacgctgctgcgtcttcggctcagaaaggagcgggtttcagatgtgcagaaggttctgcaggggggcgagcaggagatacagtttgaggacttcacaaacaccctgcgggagctgggccatgccgaacacgagattaccgagctgacggcaacctttaccaagtttgacagggatggtaatcggattctcgatgagaaggaacaagagaagatgcgccaggatctggaggaagagcgcgtggccttaaacactgaaatcgaaaagctgggtcgctcaatcgtgtcttcacctcagggcaaatccggacccgaagcagcaagggctggcggctgggtttctggcgaggagttctatatgttgacaagaagggtgctacagttagagaccgtgctggaaggcgtagtatcacagatcgacgcagtgggcagcaaacttaagatgctcgagagaaagggctggttagctcctagcccaggggtgaaggagcaggctatatggaaacaccctcagcccgcccctgctgtgactcctgatccctggggagtccagggcggccaggagtccgaggttccttacaaacgagaggaggaggccctcgaggaacgcaggctgtctagaggcgaaatcccaactctgcagagaagttag

SEQ ID NO: 199999 - DNA, 2193 bp, synthetic construct
  misc_feature 1..2193: note = Description of Artificial Sequence: Synthetic coding sequence
  source 1..2193: mol_type = other DNA
atgaacgccgtgggcagccccgagggccaggagctgcagaagctgggcagtggcgcttgggataatcccgcctatagcggccctccttccccgcacggaacactgagggtgtgcactatctccagcacaggcccacttcagccccagcccaagaagccagaggacgaaccccaggagaccgcataccgaacccaggtgtcttcctgttgcctccacatatgccaagggatccggggcctctggggtacaacactaacagagaatacagccgaaaatagagagctatatatcaagaccacacttagagagttgctcgtgtatatcgtattcctggttgatatttgcctgctcacttatgggatgaccagcagctccgcctattactatacgaaagtgatgagtgaactattcctccacacaccctctgacaccggagtttcctttcaagcaatttcttccatggccgacttctgggacttcgcacaggggccccttttggatagcttgtattggaccaaatggtacaacaaccagtctctgggtcatgggagccattcatttatctactacgagaatatgctgctcggtgtgccgaggttacgtcagcttaaagtcaggaacgacagctgtgtggtgcatgaggactttagagaagacatcttgtcatgctatgatgtgtatagcccagacaaggaagagcagctcccctttgggcctttcaatgggactgcactcgtcgtcgagttcccagccactggaggggcaatcccttcctggcagattcggacggtaaagctgatcagatatgttagtaactgggattttttcatagttgggtgcgaggtcatcttttgtgtgtttattttctactacgtcgtcgaggagatcttggaacttcacatacataggctgagatacctgagtagcatctggaacattttagaccttgtggttatcctcctgtcaatcgtggcagtgggatttcatatcttcaggacattagaggtgaatcgcctcatgggtaaattacttcagcaacctaacacatacgccgattttgaatttctggccttctggcaaactcaatataacaatatgaacgcggtcaacttattcttcgcttggattaagatctttaaatacatcagcttcaacaagaccatgacacaattgtccagcactttggccaggtgcgctaaagacattttgggtttcgctgtcatgttcttcatcgtgttttttgcatatgcccagttgggatatctccttttcgggacacaggtggagaatttctccacttttatcaaatgcatatttactcaattcaggattatactgggagattttgactataatgctatcgataacgcgaaccgcattctggggccagcatactttgtgacgtatgtgttttttgtgttttttgtgctgcttaatatgttcctggccattatcaatgacacctacagtgaggtgaaagaagagctcgcgggccagaaagatgaactacagctatctgacctgttaaagcaaggttataataagactttactgagattgcgcctacgaaaggaaagggtgtccgatgtgcaaaaggtcctacagggtggtgaacaggagattcagttcgaggactttaccaatacactccgcgagttggggcatgccgagcacgagatcactgagttaaccgctactttcactaagttcgatcgggatggtaatcggattcttgacgaaaaggagcaggagaagatgcgtcaggacttggaggaggagcgtgtggccttaaacacagaaatcgagaaactgggccggagcattgtgtcttcaccacagggaaagtcggggcctgaggccgcccgggcaggaggctgggtcagcggggaggaattctatatgctcacgaggcgcgtgcttcagctcgagaccgtactagagggcgtcgtgagccagattgatgccgtgggcagtaagttgaagatgttggagcgtaagggctggttagcaccttcccccggcgtcaaggagcaagcgatttggaaacaccctcaaccagcacctgccgtaacccccgacccatggggggttcagggcggtcaggaatcagaggtgccatacaaacgcgaggaggaagccctggaagagaggcggttgagccggggagaaatcccaaccctgcaaagatcttag

SEQ ID NO: 200000 - DNA, 2328 bp, synthetic construct
  misc_feature 1..2328: note = Description of Artificial Sequence: Synthetic coding sequence
  source 1..2328: mol_type = other DNA
atgaacgccgtgggcagccccgagggccaggagctgcagaagctgggttctggcgcgtgggataatcctgcctactccggtccccccagcccccacgggaccttaagagtgtgcactatttccagcactggacccctgcaacctcagccaaagaagcccgaagacgaaccacaggaaaccgcgtatagaacccaggttagctcctgctgcctgcacatttgccagggtatacgcggactctgggggaccacactgaccgagaataccgcagagaacagagagctgtacattaagactacactgcgtgagctgctggtctatatcgtgtttctcgttgatatctgcctgctcacgtacggaatgaccagttcaagtgcgtactactataccaaagtgatgtcggagttgttcctccataccccatctgatacaggagtgtcatttcaggccatttctagcatggcggatttctgggacttcgcccagggccctttattagacagcttgtactggaccaagtggtacaataaccagtctctgggccacggttctcattctttcatctactatgaaaatatgctattaggtgtgccaaggctgcgacagctgaaggtgcgaaacgattcctgcgttgtccatgaggactttcgcgaagacatactgtcctgctatgatgtgtattcacccgataaagaagaacagttgccgtttgggcccttcaacggaaccgcatggacctaccacagccaagatgagctgggcggtttttctcattggggaaggctgacttcttattccggagggggttattatctggatctccccggaagcagacagggcagtgccgaggcattacgggcgctgcaggagggtctatggcttgatcgtgggacccgcgtcgtgttcatagacttcagtgtatacaacgctaacattaacctcttttgcgttctaagactagtcgttgagttcccggctcggcgctgtcaccccatcctggctaacccgcacagccaggccgaccccctctgccagcaactctttttcatcgttggatgcgaagtcatcttctgcgtcttcattttttattacgtggtggaggagatcctggagttgcacatccatcggctgcgttacctcagtagcatctggaacattctggacctcgtggtgatactactcagcatcgtggccgtgggcttccatattttcagaaccttagaggtaaaccgactgatgggcaagctgctgcaacagcccaacacatacgctgacttcgaatttcttgctttctggcagacccaatataataacatgaacgcagttaatctctttttcgcgtggatcaaaatctttaaatacataagtttcaacaagaccatgacgcagttgtcctccacattggctagatgtgccaaggatatcctcggattcgctgtgatgttctttattgtctttttcgcgtatgctcagcttgggtatcttcttttcggaacccaggtggaaaatttctcaacgtttatcaaatgtatctttacccagtttaggatcattctgggggactttgactataacgccattgataatgctaaccgcattctgggacctgcttattttgtgacttacgtgtttttcgtgttcttcgtgctgctcaacatgttcctggcaattatcaatgatacctactcagaagtcaaagaagagctggccgggcagaaggacgaactgcagctctctgatctcctgaagcagggctacaataagaccctgctcagactccgactgaggaaggaacgggtctcggacgtgcagaaggtcctgcagggcggggaacaagagatccagttcgaagacttcacaaacaccttaagagaactaggtcatgccgagcatgaaatcacagaactgacagcaacgtttaccaagttcgatagggatggcaacagaatcctggacgaaaaggaacaggaaaagatgcgacaggatctggaagaggagagagtggctctgaatacagaaattgaaaaacttggaagatcaatcgtgagttcccctcagggaaaatccgggccagaagctgcccgggctggcggctgggtgagcggtgaggagttttatatgctgactcgaagggtgctacagctggagacagtcctggaaggtgttgtgtctcagatcgatgccgtcggatccaagctgaaaatgcttgagcgaaagggttggctggccccttcacctggagtgaaggagcaggctatctggaaacacccccagcccgcgcccgccgtgaccccggatccatggggccctggttgggctggggaatag

SEQ ID NO: 200001 - DNA, 2283 bp, synthetic construct
  misc_feature 1..2283: note = Description of Artificial Sequence: Synthetic coding sequence
  source 1..2283: mol_type = other DNA
atgaacgccgtgggcagccccgagggccaggagctgcagaagctgggttcaggggcatgggataatcccgcatactccggacccccctcgccacatggtacgctgagagtctgcacaattagcagtaccgggccactgcagccccagcctaaaaaacccgaagacgagcctcaggaaactgcatacagaacccaggtatcttcttgctgtctccacatctgccaaggtatacgcggcctctgggggaccacgctcactgaaaacaccgccgagaatagagaactatatattaaaacaacactcagggagttgcttgtgtacatagtttttctggttgatatctgtttgctcacttatggaatgactagcagctcagcctactattatacaaaggtgatgtccgaactttttctccacacgcctagtgatactggagtgagcttccaggccatttcgagcatggccgatttttgggactttgcacagggacctctactcgattccctgtactggacaaaatggtataacaaccagtcccttggacatggatcccactccttcatttattacgaaaatatgctgttgggtgtccctcgcttacgacagctgaaagtgcgcaacgactcctgcgtcgtgcacgaggattttagggaggatatcctcagctgctatgatgtctactcccccgataaagaagagcagcttccgtttgggccattcaacgggacagcctggacatatcattcacaggacgagctgggcggcttctctcactggggtaggctcacatcgtattccggcggggggtattatctcgatctgcccggcagcaggcagggaagtgcagaggctctgcgggctttgcaggaaggcttgtggctggatcgcggtacacgagtggttttcatcgatttctccgtgtataacgccaatataaacctgttttgtgttctgaggctcgtcgtggaatttcccgccactggcggagccatcccttcatggcaaattcgtactgtgaagctcatcaggtacgtgtctaactgggatttttttatcgtgggttgcgaagtcattttctgcgtctttatcttttactatgtggtcgaagaaatcctggagctccatatccatcgactgcgatatctttcatcaatctggaatatcctagacttggtggtgattctattgtccattgtggctgtagggttccacatcttcagaactttggaagtaaaccggctgatgggtaagttattgcaacaaccgaatacttatgcagatttcgaattcctagcgttttggcagacccagtataataatatgaacgctgtcaacctattctttgcttggatcaagatcttcaaatacatatcctttaacaaaactatgacacagctctcatccaccctcgcccggtgcgccaaagacatcttggggtttgcggtcatgttcttcattgtttttttcgcctatgcgcaactgggctaccttctatttgggactcaagtggagaatttcagcacatttataaagtgcatctttacccagtttagaatcattctcggagacttcgattataatgcaatcgacaatgccaacaggattctggggcccgcttatttcgtcacctacgtgttctttgtctttttcgtgctgctgaacatgttcctagcgatcataaatgatacatactccgaggtgaaagaggagctggccgggcagaaagatgaactgcagctctctgatttgttgaagcaggggtacaataaaacgctcctgcgcttgcgactccgcaaggaacgtgtgagtgacgtgcagaaggtgttacaaggaggggaacaggaaatccagttcgaagactttactaatactctgcgggaactgggacacgctgagcacgagatcactgaactgacggccacatttaccaaatttgatcgggacggaaacagaatactggacgagaaagaacaggagaagatgcgccaggaccttgaagaagagagagtcgcccttaatactgaaatcgaaaagcttggcagaagtattgtgtcttctcctcaagggaagtccggccctgaggctgctcgggccggcgggtgggtttctggagaagagttctatatgttaacccgcagggtgcttcaactggagacggtactggagggggttgtctcacagattgatgcggtgggaagtaaactcaagatgcttgagaggaaggggtggctcgccccaagccccggtgtccggttcccaattaaagaaaagcgcaagccctag

SEQ ID NO: 200002 - DNA, 1842 bp, synthetic construct
  misc_feature 1..1842: note = Description of Artificial Sequence: Synthetic coding sequence
  source 1..1842: mol_type = other DNA
atggccgaggccagccggtggcaccggggcggcgccagcaagcacaagcttcattaccgcaaagaggttgagattaccacaaccctgcaagaactcctcctctacttcattttcctgatcaacctgtgcatactgaccttcgggatggtgaatcctcatatgtattatctcaataaggtaatgtcttctttgtttctagatacatccgtacccggcgaagagcgtactaacttcaagagcatcagaagcatcactgacttctggaagtttatggaaggcccgctcttagagggcctgtattgggacagttggtacaataaccagcaactgtacaatctgaaaaactcatccagaatctattatgaaaacattttattaggcgttccacgggtccggcagctcaaggtacggaacaacacgtgtaaagtgtacagttcgtttcagtctctgatgagtgagtgctatggcaagtatacctccgctaacgaggatctgtctaattttggcctgcaaatcaacaccgaatggcgttactccaccagtaacactaacagtccatggcattggggctttttgggagtctaccggaatggcggatatattttcacgctttccaaaagcaagtctgaaactaaaaacaagttcatcgatttgcgcttgaactcttggatcacaagaggtacacgggtgattttcattgatttctcactttataatgcaaacgtgaacctcttctgcattatcagactggtggctgaatttcctgcaacgggaggtatattgacttcgtggcagttttactccgttaagctcttacgatacgtttcatactatgactacttcattgcaagctgtgagatcacgttctgtatctttcttttcgtgtttactacccaggaagtgaaaaaaatcaaagaatttaagtccgcgtacttcaaaagtatatggaattggctggaattactgctcctgctcctttgcttcgtcgcagtgagcttcaacacttattacaatgtccagatctttctgctgttgggacagctgctcaaatccacagagaaatacagcgacttctattttctcgcctgttggcatatctactacaacaacatcatcgccatcacgatattctttgcttggatcaaaatctttaagtttatcagctttaataaaacaatgtcacagctgtcgtcaacactatcccgttgtgtcaaggacatcgtcggattcgccataatgttctttatcatttttttcgcctacgctcagctgggtttcctggttttcggatcccaggtcgacgattttagcaccttccagaattccattttcgcccagtttcgcatcgttctgggcgacttcaatttcgccgggatccagcaggcgaaccctattctggggcctatttactttataacctttatctttttcgtttttttcgtcttgctgaatatgtttctagcaatcattaatgacacgtactcagaagtcaaagctgactacagtattgggcgcagactggacttcgaactagggaagatgattaagcagtcgtacaagaatgtgctggaaaagttcagactgaagaaggcccagaaagacgaggacaagaagacaaagggctcaggtgatctggcggagcaggcacggcgagaaggattcgatgaaaatgaaatccagaacgcagaacagatgaagaaatggaaagagagactggagaaaaagtactattctatggaaattcaggacgattatcagccagtgactcaggaagagtttcgggacgggactaccactaagtacaaaatgagattcagtgaatgcctgaccaagcggatttag

SEQ ID NO: 200003 - DNA, 1773 bp, synthetic construct
  misc_feature 1..1773: note = Description of Artificial Sequence: Synthetic coding sequence
  source 1..1773: mol_type = other DNA
atggccgaggccagccggtggcaccggggcgtgaccttcggcatggtaaatcctcatatgtactatttaaataaagtgatgtcatccctatttctcgacaccagtgttcccggggaggagaggacgaattttaaatcgatccggtccattaccgatttctggaagttcatggagggccctctgctggagggcctctattgggattcttggtataataatcagcagctttataacctgaaaaattcttcacggatttactacgaaaatattctgctgggggtccctcgagtgagacagctcaaagttcggaacaacacatgtaaagtgtacagtagctttcagagcctgatgtccgagtgttatggaaagtacacctccgctaacgaagacctgtccaatttcgggctgcagataaacacagagtggcggtatagcactagtaacacaaacagtccttggcattggggcttcctcggtgtttacaggaatgggggatatatttttacactcagcaagtctaaatcagagacgaaaaacaaattcattgatctcagactgaactcgtggatcacccgaggaacacgagtgatttttattgatttttctctttacaacgccaacgtgaacctgttttgcatcattagacttgtcgccgaatttcctgccacaggtggaattttaacctcctggcagttttactccgtaaagctgttgcgctatgtgtcttactacgattatttcatcgcgtcgtgcgagatcacattctgcatctttctatttgtgttcaccacccaggaggtgaaaaaaattaaagagttcaaatctgcgtacttcaaatccatctggaattggcttgaactgctgttgctcttgctctgcttcgttgccgtctcctttaatacttactacaatgttcagattttcctgcttctaggacaactgctgaaatccactgagaagtattccgacttttactttttagcttgctggcacatatactataacaatattatcgcgattaccatattctttgcttggatcaaaatctttaaattcattagcttcaacaaaacgatgtctcagctgtccagcacactctcgcggtgtgtcaaagatatcgtaggatttgcgatcatgttcttcataatcttttttgcttacgctcagctcgggtttctggtgttcggcagccaggtcgatgacttcagcacctttcagaacagcattttcgcacaatttcgcatagttctgggggatttcaatttcgccggcatccagcaagccaatccaattttaggtccgatctactttataacctttatattttttgtgttcttcgtactgttgaacatgttccttgcaatcataaatgacacgtattcggaagtcaaagctgactacagcattggaagacgcctcgactttgaattaggcaaaatgattaagcagtcctacaagaacgtcctcgagaaatttcgcctgaaaaaagcgcagaaagatgaagataagaaaacaaagggctctggagacctggctgaacaagcacgacgcgagggtttcgacgaaaacgaaattcagaacgccgaacagatgaagaaatggaaagagcggttagagaagaagtactattccatggaaatccaggacgactaccagcccgtaacccaggaagagttcagagagctgtttctgtatgcagtcgagctagagaaggagcttcactacataaatttaaagctgaaccaggtggtcaggaaggtatccgcactgtag

SEQ ID NO: 200004 - DNA, 1875 bp, synthetic construct
  misc_feature 1..1875: note = Description of Artificial Sequence: Synthetic coding sequence
  source 1..1875: mol_type = other DNA
atggccgaggccagccggtggcaccggggcggcgccagcaagcacaaactacattacaggaaagaggttgagattaccacaacgctacaggaattgctcctctattttatctttttgattaatctttgcatcttgactttcggcatggttaatccccatatgtactacctgaataaagtgatgtccagcctatttttagacacatccgtccccggtgaggaaaggacgaactttaaatccatccggagtatcaccgatttctggaagtttatggagggaccgctactggaggggctctactgggacagttggtataacaaccaacagctgtacaacctcaaaaatagctcccgcatttactacgagaatatacttctgggagtgcctcgggtccgccagcttaaggtgcgcaataacacatgcaaagtatatagctcattccagtcgctgatgagtgaatgttacggtaaatataccagcgccaacgaggacctttctaatttcggactgcagattaatacggaatggagatactcaacttctaatacaaactccccctggcattgggggttccttggagtttaccgcaatggaggatatatattcaccctttctaaatccaagagcgagaccaaaaacaagttcattgatcttcgactgaactcgtggattacacgagggacgcgggtgattttcatcgacttttctctgtacaacgccaacgtgaatctgttttgtatcattaggctcgtggccgagtttccggcaaccggaggaatactaacatcgtggcagttttatagtgttaaactcctccgatatgttagttactatgactacttcattgctagctgtgagatcacgttttgcatttttctattcgtgtttaccacccaggaagttaaaaaaatcaaagaattcaagagcgcctactttaagtctatctggaactggttggaacttttattactactgctgtgttttgtcgccgttagcttcaacacatactacaatgtccagatttttttgttactgggacagctcttaaaatctaccgagaagtactccgacttctactttctcgcctgctggcacatctactacaataacatcatcgccatcaccatcttttttgcatggatcaagattttcaagttcatcagcttcaacaaaacaatgtcccagctgtcaagcacgctcagccgctgtgtgaaggacattgttggatttgctattatgttttttatcatcttttttgcctatgcccagctgggattcctcgtgttcggctcccaggtcgatgatttcagtaccttccagaattccattttcgcacaatttcgcatagtacttggcgactttaactttgctggtattcagcaggcgaacccaatcctgggaccgatttatttcataaccttcatattctttgttttcttcgtcctactcaatatgttccttgccataatcaacgacacatattctgaagtgaaagcagactattcaatcggcaggaggttggatttcgaactaggcaaaatgatcaagcagagttataagaatgtgctggagaagttccgcctgaaaaaggctcagaaggatgaagacaagaagaccaaaggctcaggcgaccttgccgagcaggctagacgcgagggattcgacgagaacgagatccagaacgctgaacaaatgaaaaaatggaaagagcggctagagaagaagtactatagcatggaaattcaggacgactaccaacctgtgacacaagaagaattccgtgaactctttctgtacgcggtcgaactggaaaaagagctgcactatattaacttaaagctcaaccaggtagtcagaaaagtctccgccttgtag

SEQ ID NO: 200005 - DNA, 1809 bp, synthetic construct
  misc_feature 1..1809: note = Description of Artificial Sequence: Synthetic coding sequence
  source 1..1809: mol_type = other DNA
atggccgaggccagccggtggcaccggggcggcgccagcaagcacaaacttcactaccgaaaagaggttgagattacaactaccctgcaagagctgctcttgtactttatcttcttgatcaatctttgcatcctcaccttcggcatggtcaacccacatatgtactatcttaacaaggtgatgtcttctctattcctggacacaagcgtaccaggagaggagagaaccaacttcaaaagcattaggtcgattaccgatttctggaagttcatggagggcccactgctggaaggtctgtactgggacagctggtataacaatcagcagctttacaacctcaagaactctagcaggatctactacgagaacatcttgctcggggtacctagagtgcggcagctcaaagttcggaacaacacctgcaaggtttatagctcatttcagagtctgatgagtgagtgctacgggaagtacacgagcgccaacgaagacttgtctaacttcggtctccagattaatactgagtggcgctactccacgtccaatactaacagtccgtggcactggggctttcttggggtttacagaaatggtggctatatctttacactctccaagtccaagtccgagaccaaaaataaattcattgaccttcggcttaattcttggataactagaggcacaagggttatatttatcgacttctccctgtataacgctaatgtgaatctcttctgtattatccggcttgtggcagaattcccagcgacaggtggcatcctgactagctggcaattttattctgtgaaactcctgcgatacgtttcttattatgactattttatagcctcatgtgaaattaccttttgcatctttctgttcgtctttacgacccaggaagtcaaaaagataaaagagttcaagagtgcctactttaagtctatctggaactggctcgagctgctcctacttcttctgctgaagagcaccgagaagtattctgatttctactttcttgcatgttggcacatatactataacaacatcattgccatcacaatatttttcgcgtggatcaagatattcaagtttatcagctttaataaaacaatgtcccagctaagcagtactctgtctcggtgtgttaaggatatcgttggattcgccataatgtttttcatcatctttttcgcgtatgcccagctgggtttcctcgtgttcggcagccaagtggatgatttttccacctttcaaaacagtatttttgctcagttccggatcgtgctcggcgatttcaattttgctgggattcagcaggctaatcctattttgggccctatttatttcattactttcatctttttcgtatttttcgtattactcaacatgttcctcgccattatcaacgacacttacagcgaggtgaaggccgattactccattggccggcgcttggactttgagctgggaaagatgatcaaacagtcttacaaaaatgtcctggaaaagtttcgactcaaaaaagctcagaaagatgaagacaagaaaaccaaagggtccggtgacctggctgagcaggctagaagagagggattcgatgaaaacgaaatccaaaacgccgagcagatgaaaaaatggaaagagagattagagaaaaagtactactctatggaaattcaggatgattaccagcctgtgacccaggaggaattccgggaactcttcctatacgctgtagaactggagaaagaactgcattacattaatctcaaactcaaccaggttgtcaggaaggtttcagctttgtag

SEQ ID NO: 200006 - DNA, 1572 bp, synthetic construct
  misc_feature 1..1572: note = Description of Artificial Sequence: Synthetic coding sequence
  source 1..1572: mol_type = other DNA
atggccgaggccagccggtggcaccggggcggcgccagcaagcacaagctgcactaccgaaaagaggtcgagattacaactacactccaggagctgctcctgtactttatttttctgatcaatctttgcatcctaacgttcggcatggttaatccccatatgtactatcttaataaggtcatgtctagtcttttcctggatactagtgtaccgggtgaagagaggaccaactttaaatcaatcaggtctataacagatttctggaaattcatggaaggtcctctgcttgagggactctactgggacagttggtacaataatcagcagctttataatctgaaaaatagtagcaggatttactacgaaaatatcttactgggcgtgccgcgggtcagacaactgaaggtacgaaataatacttgcaaggtttactctagttttcagagcctgatgagtgagtgctatggtaaatacactagtgccaacgaagacctgagcaatttcgggctgcagatcaatactgaatggagatatagcacatctaacacaaactccccctggcactggggatttttgggggtctatcgcaatggcggttacatcttcactttatcaaagtccaaatccgaaacaaaaaacaagtttattgacctgcggttgaatagctggatcaccagaggcacccgagtgatctttatcgatttctcgctctacaacgcaaatgtaaacctcttctgcatcatccgcctggtggctgagttcccagcgacaggaggtattctcacctcgtggcagttctatagtgtgaaactgctgaggtacgtatcttactacgattattttatcgcctcctgcgaaatcaccttctgcatattcttgttcgtgttcaccactcaggaggtgaagaagatcaaggaattcaagtcagcttacttcaagagcatttggaactggcttgagctgctgctgcttttgctgtgtttcgtcgcggtgagcttcaacacctattacaacgtccagatcttcctcctcctcggacagctgctgaaatcaacagagaaatattccgatttttatttcttggcttgctggcacatctattacaacaacataattgctatcactatattcttcgcgtggatcaaaaatatgttcctggccatcatcaatgatacctactcagaagttaaagcagattattccatcggaagacgtttggacttcgagcttggcaaaatgattaagcaaagttataaaaatgtgcttgagaagtttcgcctgaaaaaggctcagaaggatgaagataagaagaccaagggctccggagatttggcggaacaggcacggagggagggatttgacgaaaatgagattcaaaatgcagaacagatgaagaaatggaaagagcggttggaaaagaaatactacagtatggagattcaggatgactaccagccagtaactcaggaggaattcagagagctttttctctacgccgtcgaattggagaaggagttgcattatatcaacttgaagttgaaccaagttgtcagaaaggtctctgccctgtag

SEQ ID NO: 200007 - DNA, 1836 bp, synthetic construct
  misc_feature 1..1836: note = Description of Artificial Sequence: Synthetic coding sequence
  source 1..1836: mol_type = other DNA
atggaggagctggtggtggaggtgcggggcagcaacggcgccttctataaagcttttgtgaaagatgtacacgaagacagtatcaccgttgccttcgaaaataactggcagcccgaccggcagattcctttccatgacgtgagattcccaccccctgtaggttataacaaggatatcaacgaatccgatgaggtggaggtttatagtcgcgctaatgagaaagaaccctgttgctggtggctggcaaaggtacggatgattaaaggggaattctacgtgatcgagtatgccgcctgcgatgccacctacaatgagatcgtaaccattgagcgcctgcgctctgtgaaccctaataaaccggcgactaaagataccttccataagattaaacttgacgtgcccgaggacctcaggcagatgtgtgccaaagaggctgcacacaaagatttcaagaaagcagtcggtgcgttttcagtaacctatgaccctgaaaattatcagctggttatactgtccatcaacgaagtaacaagtaaaagagcgcatatgttgattgacatgcactttcgctctctgcggacaaaactgagcctgatcatgcgaaatgaggaggcctctaaacagctcgagtcttcccgccaattagcaagccgctttcacgaacagtttatcgtgcgggaggacctcatggggcttgccatcgggacacacggcgccaacattcagcaggccagaaaggtccccggggtgaccgccatcgacctggacgaggacacatgtaccttccacatttatggcgaggaccaggatgccgttaagaaagcacggtccttcttagagttcgccgaggacgtcatccaggtgcctcggaacttagttggcaaagttataggtaaaaatggtaagcttattcaggaaatcgttgacaagtccggggtggtgcgagtgcgcatcgaagcagagaacgaaaaaaacgtgccccaggaggaggagataatgccccctaacagcctgcctagtaacaactcacgtgtcggaccgaatgcaccggaggagaaaaaacatctggacatcaaggagaactccacccacttcagccagcctaatagcactaaggtacagagaggtatggtccccttcgtcttcgtgggaactaaagactcaatcgcaaacgccaccgtgctgctggattaccatttgaactaccttaaagaagtggatcagctaaggctcgaacgactccagattgacgagcagctgaggcaaatcggcgcctccagcaggccacctcctaatcgcactgacaaggaaaaaagttacgtgaccgacgatgggcagggcatggggcggggatctcgaccttatcgcaatcgggggcatgggagaaggggccccggatataccagtggaacaaacagtgaggcatccaacgcttcagaaaccgagtccgatcacagggatgaactgtccgattggagcctcgctccaaccgaagaggagcgcgagtcctttcttaggcgtggggacgggaggagacggggcggcggcgggcgggggcagggcggcaggggacgaggcggaggtttcaaaggaaacgacgaccattcccgcaccgataacaggccaaggaacccgcgggaagccaaaggacggaccaccgacggtagccttcagataagagtggactgcaataatgaaaggtcagtgcacactaagacattgcagaacaccagcagcgagggcagcagacttcgtactgggaaagaccggaaccagaagaaagagaagcccgactcagttgatgggcagcaaccactggtgaacggcgtcccatag

SEQ ID NO: 200008 - DNA, 513 bp, synthetic construct
  misc_feature 1..513: note = Description of Artificial Sequence: Synthetic coding sequence
  source 1..513: mol_type = other DNA
atgcccctgcccgtggccctgcagacccggctggccaagcggggcatcctcaagcatctcgaacctgaacccgaagaggaaattatagctgaggactacgacgatgacccagttgattacgaggcgacacggctggagggcctcccgccctcctggtataaggtgtttgatccctcttgcggactaccctattattggaacgccgatacagacctcgtttcctggctgagtccacacgatccaaattctgtcgtaactaagtcggctaaaaaactaagatccagcaacgctgcagtgtccaggaaggatgaagaacttgacccaatggatccatcttcttattcagacgccccaagggggacttggtctaccggtctgccaaagcgtaacgaggctaaaacaggggccgataccaccgctgccggccccctgttccaacagaggccataccctagtccaggcgcagtgctgcgcgccaatgccgaggcttctcggactaagcagcaggactag

SEQ ID NO: 200009 - DNA, 204 bp, synthetic construct
  misc_feature 1..204: note = Description of Artificial Sequence: Synthetic coding sequence
  source 1..204: mol_type = other DNA
atgcccctgcccgtggccctgcagacccggctggccaagcggggcatcctcaagcacttggagccagagccggaagaagagatcatcgccgaggactatgatgatgatccagtggactatgaagccacacgcctggaaggtttgcccccttcctggtataaagtgttcgatccctcctgccctggatggtctgccatggtgtag

SEQ ID NO: 200010 - DNA, 798 bp, synthetic construct
  misc_feature 1..798: note = Description of Artificial Sequence: Synthetic coding sequence
  source 1..798: mol_type = other DNA
atgcccctgcccgtggccctgcagacccggctggccaagcggggcatactgaagcacctggagcccgaacctgaggaggaaattatagcggaagattatgatgacgacccggtggactacgaagccactaggctggaaggtctcccaccttcctggtacaaggtgtttgacccctcatgcggtctcccttactattggaatgccgataccgatcttgtcagttggctgagtccacacgaccctaactcagtagttacgaagtctgctaagaaactgcggtcaagcaacgcagacgccgaagagaaactggatcgttctcatgacaaaagcgacagagggcatgacaagtctgaccggtcacacgaaaagctcgacaggggtcacgacaagtcagacagggggcacgacaaaagtgatagagatcgagaacgaggatacgacaaggttgaccgcgagcgcgaacgtgatagagagagggacagagacagaggatatgataaggccgaccgggaagagggcaaggaacggagacaccatcgcagggaggaactggccccttaccccaagtccaagaaggctgtgtcaagaaaggatgaggagttagatcccatggatccaagctcctacagcgatgctccaagaggcacgtggagtaccggattacccaaacggaacgaggctaaaaccggtgctgacacaacagctgccggacccctgttccagcagagaccctacccctccccaggagcagtactgagagcaaatgccgaagctagccgcaccaagcaacaagattag

SEQ ID NO: 200011 - DNA, 513 bp, synthetic construct
  misc_feature 1..513: note = Description of Artificial Sequence: Synthetic coding sequence
  source 1..513: mol_type = other DNA
atgcccctgcccgtggccctgcagacccggctggccaagcggggcattcttaaacatctcgaacctgagccggaagaggaaatcatagccgaggattatgatgacgatcctgttgattacgaggccacacgcctggaggggcttcctcccagttggtacaaagtctttgatccctcctgtggactcccttattactggaacgcagatacggatcttgtctcttggctgtccccacatgatcctaacagcgtggtgacaaaaagcgcaaaaaagctccgcagctccaatgccgctgtcagccgaaaggacgaggagttggaccccatggatcccagctcgtactcggatgcaccaagggggacttggtccactgggctgcctaagagaaacgaagccaagacaggggctgataccaccgccgccggtccgttgtttcaacaacgtccctatcccagccccggtgcagttctgagagctaacgctgaagcttcccgaactaaacagcaggattag

SEQ ID NO: 200012 - DNA, 798 bp, synthetic construct
  misc_feature 1..798: note = Description of Artificial Sequence: Synthetic coding sequence
  source 1..798: mol_type = other DNA
atgcccctgcccgtggccctgcagacccggctggccaagcggggcattctgaaacacctggagccagaacctgaagaagagataatagccgaagactatgacgacgacccagtggactacgaggctaccaggttagaaggactgccgccttcttggtataaggtgttcgacccgtcatgtggtctgccctattattggaacgcggatacagacctcgtgtcctggttgagcccccacgaccctaactcagtagtcactaaaagcgctaaaaaactgcgatcgagcaatgcagatgctgaagagaaactggataggagccacgacaaaagcgatcgcggacatgacaagtctgaccggtctcacgagaaactcgaccgcggacacgataaatctgatcggggacatgacaaatccgatcgggatcgagaacgaggctatgataaagtagatcgggagagggaacgcgaccgcgagcgggaccgtgaccggggctatgacaaggcggatagggaggaaggaaaagaaagacggcatcacagaagggaggaactggccccctacccgaagtctaaaaaggccgtgtcgcggaaagacgaggaactggacccgatggacccatcaagttactccgacgcaccccgcggcacatggtccactgggttgcctaaaagaaatgaagcaaagaccggagccgacaccaccgcggccggccccttgttccagcagcgtccttacccttcgccgggagcagtgttgagggccaacgcagaggcctcacggaccaagcagcaagactag

SEQ ID NO: 200013 - DNA, 642 bp, synthetic construct
  misc_feature 1..642: note = Description of Artificial Sequence: Synthetic coding sequence
  source 1..642: mol_type = other DNA
atgcccctgcccgtggccctgcagacccggctggccaagcggggcatcctgaagcaccttgagcctgaacctgaggaggaaatcatagcggaggactatgacgatgatccagtcgactacgaagctacacggctggaaggtttgccaccgtcttggtacaaagtctttgatcccagctgcggactgccctattattggaacgccgacacagatctcgtgtcctggctctccccgcatgacccgaatagcgtcgtaactaagtctgcaaaaaaactgaggtcctcaaacgcagatgcagaggagaagttggacagatcacatgataaaagcgatcggggccacgataaaagcgatagatcccacgaaaagctggaccggggccacgataagtcagacaggggacatgataaaagcgatagggaccgggagcgcggctacgacaaagtagatcgggagcgggagcgcgatcgcgagagagaccgagacagagggtacgataaggctgatagagaggagggaaaggagcgcaggcaccaccgcagagaggagctggccccatatcctaaatctaaaaaagctgtttcaagaaaagatgaagaattggatcctatggacccttcaagctattcggacgctccctag

SEQ ID NO: 200014 - DNA, 798 bp, synthetic construct
  misc_feature 1..798: note = Description of Artificial Sequence: Synthetic coding sequence
  source 1..798: mol_type = other DNA
atgcccctgcccgtggccctgcagacccggctggccaagcggggcattctcaagcacctggaaccggaacctgaagaagaaatcattgcagaggattacgacgatgaccccgtggattacgaagccacaagattggaaggcctgccccccagctggtataaggtctttgacccaagctgtgggctcccctactactggaacgcagatacagacctagttagttggctctccccacacgaccctaattcagtggtgaccaaaagcgcaaaaaagctccgtagctccaacgctgacgccgaagaaaagctcgacaggtcccacgacaaaagtgacagagggcacgacaaaagcgaccgttcacacgagaagctagatcgcggacacgacaaatcagatcgaggccacgacaagtccgaccgcgatagggagaggggctacgataaagtcgacagagagagggaacgtgacagagagcgcgacagggatagaggctacgataaggctgatagagaggaggggaaagagaggagacatcataggcgagaagagcttgcgccctatcccaagagcaagaaagctgtgagtcggaaagacgaggaactcgaccctatggacccttcatcttactcggatgccccacgcggaacatggtccacaggcctgccaaagagaaacgaggctaagacaggggcagataccactgcagccggtcctctttttcagcagcggccatatccctcccccggggcagtccttagagctaacgccgaggcttcccgcacgaaacagcaagactag

SEQ ID NO: 200015 - DNA, 453 bp, synthetic construct
  misc_feature 1..453: note = Description of Artificial Sequence: Synthetic coding sequence
  source 1..453: mol_type = other DNA
tgaatcgccacctacctgctgcacctgctggtgcagcccgaggaggagattattgccgaagactatgacgacgacccagtcgactacgaggccactcggctcgaaggcctcccaccatcctggtacaaggtatttgacccgtcttgcgggctcccctattactggaacgcggacaccgacctggtttcatggctcagtccccatgacccgaactctgtagtcactaaatccgccaagaaactccgaagcagcaatgccgctgtttcgcgcaaagatgaggagctggacccaatggacccaagtagctattctgatgcaccaaggggaacctggagcactggactgccaaaaaggaatgaagctaagaccggcgctgacacgacggccgcaggcccactctttcaacaaagaccttaccctagccctggagccgtcctacgggcgaatgcttag

SEQ ID NO: 200016 - DNA, 699 bp, synthetic construct
  misc_feature 1..699: note = Description of Artificial Sequence: Synthetic coding sequence
  source 1..699: mol_type = other DNA
atgggcagcgtgctgagcaccgacagcggcaagagcgcccccgccagcgccacagccagggctctggagagacgccgcgaccccgaactgccggtgaccagctttgattgtgccgtctgtttggaagtgctccaccagccggtgagaactcgctgcggacacgttttctgcaggagctgcatagccaccagcttaaagaacaataaatggacctgcccttattgtagggcctacctgccatctgagggtgtgcctgccaccgatgtggcaaaacgcatgaagagtgagtacaagaattgtgctgagtgtgacacactggtttgtctgtccgaaatgcgggctcatataaggacgtgtcagaagtacattgacaagtacggccccctgcaagaactggaagagacagccgccagatgcgtctgtccattctgccagcgtgagctatatgaagattcgctgctggatcactgtattacgcaccacagatccgaacggcggcctgtgttttgcccactgtgtcgtctcattccggacgaaaaccccagctcattctcggggtccttgataaggcacctgcaggtgtcgcacacccttttctatgacgacttcattgattttaatatcatcgaagaagccctcattcggcgcgtactggatagatccttgctggagtacgttaatcattccaacacaacctag

SEQ ID NO: 200017 - DNA, 1986 bp, synthetic construct
  misc_feature 1..1986: note = Description of Artificial Sequence: Synthetic coding sequence
  source 1..1986: mol_type = other DNA
atggagaagctgggcgtggagcccgaggaggagggcggcggcgacgacgacgaagaagatgccgaggcttgggcgatggagcttgctgatgtgggcgcagccgcctcgtcacaaggcgtacatgatcaggtccttccgacccctaatgcctctagccgtgtcatcgtgcacgttgatctggactgcttctacgctcaggtggagatgatatccaacccagaacttaaggataagccccttggagtgcagcagaaatacctggttgtgacatgcaattacgaagccagaaagctcggagtgaagaagcttatgaatgtccgtgatgccaaggaaaagtgcccccagctggttctggtcaacggagaagatctcacccgatacagggagatgagctacaaagtaaccgaactactcgaggagttctcacctgtggtagaacgcttaggctttgacgaaaattttgtggacctaacagagatggtcgagaaaaggctgcagcaactgcagtctgatgaactcagcgctgtcaccgtttctggacacgtgtataataaccagtgtatcgggtacaagactgctaagtgcctggaagctttgggcatcaatagcgtccgggatcttcagactttttctcctaagatcctggaaaaagagctgggcatcagcgtggcccagagaatccagaaactgagctttggggaagacaacagcccggtcatattgtcaggaccaccacagtccttttcagaagaagactcattcaaaaagtgcagttccgaagtggaggctaagaataagatcgaggagctattagccagcctactgaatcgtgtatgtcaagacggtaggaagccccatactgtgcgcctgattatcagacgatattccagcgagaaacactacgggcgcgagtctcgccagtgtcccatcccctctcacgtcattcagaaactcggtaccggcaactacgatgtgatgacccctatggtggatattctcatgaagttattccgcaacatggtgaatgtgaagatgccttttcatctgaccctgctgagcgtatgtttctgtaacctcaaggctctgaataccgcaaaaaaagggctcattgattattacctaatgcccagtctgtcaaccacgtctcgaagcggcaaacacagcttcaagatgaaagacactcacatggaggactttcccaaggacaaggaaacaaatagagacttcttaccctccggtaggatcgaatccacacgtacgcgcgagagccccctggacactactaatttttccaaggaaaaggacatcaacgagttccccttgtgcagcctgccagagggcgttgaccaagaagtgttcaaacagctgcctgtggatatccaggaagaaatcctcagtggtaaatcacgagagaagtttcaagggaaaggatccgtatcgtgtcctttacatgcctccagaggtgttctgtctttcttttctaaaaaacagatgcaggacatccccatcaaccctagagatcacctctcctcctcaaagcaggtcagcagcgtaagtccttgcgagcccggaacatcgggcttcaattcctctagtagcagctacatgtcgtctcagaaagattacagctattaccttgataatagactgaaagatgagagaatcagccagggccctaaggagccacagggttttcacttcaccaatagcaaccccgcagtttctgccttccattcatttcccaatctgcagtctgagcagctgttttcccgaaatcataccaccgactctcacaaacagaccgtggctactgactctcacgaggggcttaccgaaaatagagagccagacagcgtggatgagaagatcacattcccctctgatatcgatccacaggtgttctacgaactgccagaggccgtgcagaaggagctgctggcagagtggaaaagggctgggtccgactttcatataggccacaaatag

SEQ ID NO: 200018 - DNA, 2223 bp, synthetic construct
  misc_feature 1..2223: note = Description of Artificial Sequence: Synthetic coding sequence
  source 1..2223: mol_type = other DNA
atggagaagctgggcgtggagcccgaggaggagggcggcggcgacgacgacgaggaggatgcagaggcgtgggccatggaattagccgacgtcggcgctgctgcctcctcgcagggggtgcacgatcaggttttaccaacacccaatgctagctcacgcgttattgttcacgtggacctggattgcttttacgcgcaggtggagatgatctcaaaccccgagttaaaggacaagcctttaggcgtgcaacaaaaatatctggtcgtcacctgtaactatgaagcccgcaaactgggggtaaagaaactgatgaatgtgcgtgacgcaaaggaaaaatgccctcagctggtgctggttaacggcgaggacctgacaaggtaccgagaaatgtcttataaggtgacagagttgctcgaagaatttagccccgttgtggagcgcctgggctttgatgaaaatttcgttgatcttactgagatggtggaaaagaggttgcagcagctgcagtccgacgaactgtccgcggtcactgttagcgggcacgtctataacaaccagagcattaatcttctggatgtgttacacatacgtctgctggttgggtcccaaatcgccgccgagatgcgcgaggcgatgtataaccagcttgggcttactggatgtgccggcgtggctagcaataagctcctcgccaagcttgtttctggggtgttcaagcccaaccagcagacggtgttgctcccagaatcatgtcagcacttgatccacagcctcaaccacataaaggagatcccaggcattgggtacaaaacagccaagtgcttagaagcactgggaataaactccgtgcgagatctgcagacattctctcccaagatcctggaaaaggagctcgggataagcgtggcccagcgaattcagaagctgagcttcggggaggacaattctcctgttattctatccggtccgcctcagagtttttccgaggaggactccttcaaaaagtgtagcagtgaggtagaggcgaaaaacaagattgaggaattactggcttcgttgttgaatagggtgtgtcaggacggacgtaagcctcacactgttcgcctgatcatcaggaggtattcttctgaaaagcactatgggcgtgagtctcggcaatgccccataccctcccacgttatccagaagctggggaccggaaattacgacgtcatgacaccgatggttgacatcctgatgaagcttttccggaatatggtgaacgtcaaaatgccttttcatttgaccctactttccgtgtgtttctgtaacctgaaggcattgaatactgccaagaagggtctgatcgactattatcttatgcctagcctgagtaccacaagcaggtctggtaagcactcctttaagatgaaagacactcatatggaggacttcccaaaagataaagaaaccaatagggatttcctgccttctgggcggatcgagagtacccgcacacgagagtcaccgctggatacgacaaactttagcaaggaaaaggacattaatgaattccccctctgttcgctgcccgaaggcgtggaccaggaagtattcaagcagctgcccgttgatatccaagaagaaatactgagtgggaagtcacgcgaaaaatttcaaggaaagggtagcgtcagttgtccacttcatgcctccaggggcgtcttatcattttttagcaaaaaacagatgcaagacattcctattaatcctagagaccatctttccagctcaaagcaggtgagcagtgtgagcccctgcgaacccggaacttccggtttcaactccagttctagctcctatatgtcatcacagaaagactattcctactacttggacaatcgtctgaaggatgagcgaataagtcaggggcccaaggaaccccagggattccattttacgaattctaatccagctgtcagtgcatttcattcgttcccaaatctgcaatccgaacagctgtttagccggaatcacactacagactcacacaagcagactgttgctacagatagccatgaaggcttgactgaaaatagggagcccgactccgtcgacgagaagataacattccctagcgacatcgatcctcaggtattttatgagttgcccgaggccgtacagaaggagttactggcggaatggaagcgggccgggtctgacttccacatcgggcataaatag

SEQ ID NO: 200019 - DNA, 2613 bp, synthetic construct
  misc_feature 1..2613: note = Description of Artificial Sequence: Synthetic coding sequence
  source 1..2613: mol_type = other DNA
atggacagcaccaaggagaagtgcgacagctacaaggacgacctgcttctgagaatgggccttaatgataataaagctggaatggagggtctggataaagaaaagatcaataagattatcatggaggctacaaagggatctcgcttttacgggaatgaactgaaaaaagagaagcaggttaaccagagaatcgagaacatgatgcaacagaaggcccagataaccagtcaacaattgagaaaggcacagctccaggtcgaccggtttgcgatggagctggaacagagtcggaacttaagtaatactattgtccacatagacatggacgccttctacgcggcggtggaaatgagagataatcccgagctcaaagacaagcctatcgccgtcggctcaatgtcaatgctgagcacatccaactaccatgctaggaggtttggcgtgcgggcagccatgcccgggttcattgcaaaaaggctttgtcctcaattgatcatcgtccctccaaactttgataaataccgcgccgtatcaaaggaagtgaaggaaatattggccgattacgatcctaacttcatggcaatgagtctggatgaggcctacttgaatattacgaaacatttggaggaaaggcagaattggccagaggacaaacgccggtactttattaagatggggagcagtgtggagaatgataacccaggcaaagaggtgaataagctttctgaacacgagcggtcgatttctcctttgttatttgaagagtcaccctctgacgtgcagccgcccggtgatccattccaagtaaattttgaagagcagaataatccccaaattctccagaattccgtggtgtttggcacatcagcccaagaggttgtaaaggaaattcgtttcagaatcgagcaaaaaactaccctcacagcctcagctgggatcgccccgaacaccatgctggctaaagtttgtagtgacaaaaacaagcccaacggccagtaccagatcctacccaataggcaggcggtcatggatttcattaaagacctgcccattcgaaaggtgagcggaattggcaaagtgactgaaaaaatgctcaaggcgctggggatcattacatgcaccgaactttaccaacagcgagcactgctgtccctgctgttttctgaaacctcatggcattattttttgcacatttctctggggctgggctctacccacctgactcgtgatggcgaacgtaagtccatgtccgtggagcggacgttttccgagattaacaaagcagaggaacaatattctttgtgccaggagctctgtagcgagctggcccaggatctgcaaaaagaacgcttgaagggtcgtacagtaaccatcaagctaaagaacgtaaattttgaagttaaaactcgggccagcaccgtgtcctccgtggtgtctacagctgaagagatatttgctatcgcgaaggagctgttaaaaactgagatagacgcagactttccacatccactcaggctgagactgatgggcgtacgcatatcgtcattccccaatgaagaggacaggaagcaccagcagagatcaatcataggattcctccaggctggaaaccaggccctgtctgctacagaatgtactttagagaagactgataaagataagttcgtaaagccattagaaatgagccataagaaatccttcttcgataagaagcgctcagagaggaagtggtcgcatcaggacaccttcaagtgtgaggccgtgaataaacaaagcttccagacatcacagccattccaggtgctgaagaagaaaatgaacgagaatttagagatttcagaaaactcagatgactgccagatcctgacctgcccggtgtgtttccgagcacagggttgcatttctctagaggccttgaataagcatgtggacgaatgccttgatggaccttccatcagcgagaactttaaaatgttctcttgctctcatgtgagcgcgaccaaggtgaacaagaaagaaaatgttccagcctcctctctgtgtgagaagcaagattacgaggctcatcccaagataaaggagatttctagtgtggactgcatcgccttggtggacaccatagataactcaagtaaagccgagagcattgacgcattgtcaaataagcactcgaaagaagaatgtagctcattgccgtctaaaagtttcaatatcgaacattgccaccaaaattctagttccactgtctccctcgagaacgaagacgtgggatcattccgtcaggagtacaggcagccctatctgtgcgaagttaagactggtcaagccctcgtgtgtccagtctgcaatgtagagcaaaagaccagcgacttaacactgttcaacgttcatgtggatgtatgtctgaataagtcctttattcaagagttacggaaggataagttcaacccagttaaccagcccaaggaatcatcgcggtcaacaggctcctccagcggggtccaaaaagcagtcacccggactaagagaccaggtctgatgactaaatactctacttctaaaaaaattaagcctaacaatcctaaacataccctcgacatattttttaagtag

SEQ ID NO: 200020 - DNA, 2019 bp, synthetic construct
  misc_feature 1..2019: note = Description of Artificial Sequence: Synthetic coding sequence
  source 1..2019: mol_type = other DNA
atggacagcaccaaggagaagtgcgacagctacaaggacgacctgctgcttcggatggggctcaatgacaacaaggccgggatggagggcctggataaggagaagatcaacaaaataatcatggaggccactaagggatccaggttctatggtaatgagttgaagaaggaaaagcaggtcaaccagcgaatcgaaaatatgatgcagcagaaggctcagatcaccagccaacagcttcggaaagcccagttacaggtggatcggttcgcgatggagctggagcagtcccggaatctgtccaataccatcgtgcacattgatatggacgctttttacgccgcagtggagatgagagacaacccggagctgaaggacaaacctattgccgtggggagtatgagtatgctgagcaccagcaactaccatgccaggaggtttggggtccgtgccgccatgcctggcttcatcgccaagcgcctatgtccacagctgataatcgttccgcctaattttgataagtatcgcgctgtcagtaaagaggtgaaggaaatcctagctgactacgaccctaattttatggcaatgtcactggacgaagcatacctcaacatcaccaaacacttggaggagagacagaattggcctgaagataaacgcagatacttcatcaagatgggctcgagcgtggagaacgataatcccggaaaggaagtgaataaactgtcagaacacgaaagatcaattagccctctactctttgaagagtccccctctgacgtacagccaccaggtgaccctttccaggtcaactttgaggagcagaacaatccccagattcttcagaacagcgtcgtgttcggaacttccgcacaagaggtggtgaaggagatccggtttaggatcgagcaaaagactacccttacagcaagcgccggtgtacgaatttcatccttcccaaatgaggaggatagaaagcaccagcagcggagtattatcgggttcctccaggcagggaaccaggcactgagcgccaccgagtgcacgctggagaagaccgataaagacaaatttgtcaaaccccttgagatgtcccacaagaagagcttctttgataaaaaacggagtgaacgtaagtggagccaccaggatacattcaagtgtgaggccgtcaataagcagtccttccaaacaagccagccatttcaagttctgaaaaaaaaaatgaatgaaaatctcgagatctctgagaactcagacgattgtcagatcctaacgtgcccagtctgctttcgagctcaggggtgtatatctttggaggcattaaataaacatgtggacgagtgcctcgacgggccaagtatatcggaaaacttcaaaatgttcagttgcagtcacgtgtcagctactaaagtgaacaagaaggaaaatgttcctgcgagctcactgtgtgagaagcaggattacgaagcacaccccaagatcaaggaaattagttctgtcgactgcatcgcgctggtagatactatagataacagtagtaaggctgagagtatagatgccctgagcaataagcattcgaaagaggagtgttcctctcttccctccaagtcgttcaatatcgagcactgccatcagaattcctcttcaactgtttccctggaaaacgaggatgtcggctcttttaggcaggaataccggcagccctacctgtgtgaagttaagaccggacaagctttagtttgtcccgtgtgcaatgtggagcagaaaaccagcgacttgaccctgtttaatgttcatgtcgatgtctgtctaaataaaagcttcatccaggaactacggaaagacaagtttaatccagtgaatcaaccaaaagagtcctcaaggtccacagggtcgtcaagcggggtgcagaaggccgtgacaagaacgaagcggccgggtctgatgacgaaatacagcaccagtaagaaaataaaaccaaacaatccaaagcacaccctcgatatattttttaagtag

SEQ ID NO: 200021 - DNA, 2343 bp, synthetic construct
  misc_feature 1..2343: note = Description of Artificial Sequence: Synthetic coding sequence
  source 1..2343: mol_type = other DNA
atggagctggagcagagccggaacctgagcaacaccatcgtgcacatcgacatggacgccttctatgctgctgtcgagatgcgcgacaaccccgagctgaaagacaagccgattgccgtggggtctatgagtatgttatccacctccaactatcatgcccgcagattcggagttcgcgccgccatgcccggattcatcgcaaaaagactgtgccctcagcttatcatcgtgccaccaaacttcgacaagtaccgagcggtctccaaggaggtgaaggagattcttgccgactacgacccaaacttcatggcaatgtcattagacgaggcctatttgaacatcacaaagcacctcgaagaacgtcagaattggcctgaggacaagagacggtattttatcaagatgggctcatcagttgaaaacgacaaccctggaaaggaagtaaacaaactgtccgaacacgagcggagcatcagccctctgctgttcgaagagtcccccagtgacgttcaacctcctggagatcctttccaggtgaatttcgaggaacagaacaatccacagatcctgcagaactccgttgtttttggcacctctgcccaggaagtggtgaaggagattcgattcagaatcgaacaaaaaaccacgcttacggcatccgctggcattgcccccaacacaatgctggccaaagtgtgtagtgacaagaataaacctaacggccaataccaaatactgcctaaccgccaggcagttatggatttcatcaaggacctgcccatcaggaaggtgagcggcatcggtaaggtgacggagaaaatgctgaaggccctggggatcatcacctgcacagagctgtatcagcaacgtgcattattgtcgctgctgttcagtgagacatcatggcactattttttgcatattagcctcggcttgggatcaactcacctgacaagagatggagagaggaagtcaatgtccgttgagcgtacattttctgagattaacaaggcagaggagcagtactccctgtgtcaggagctgtgtagcgagttggcacaggatttgcagaaggagaggctgaaggggcggactgtcaccatcaaactgaaaaacgtcaattttgaggtgaaaacaagggctagcactgtgtcgagcgtcgtgtctaccgccgaagaaattttcgcaatagccaaagaattgctcaagaccgagatcgatgctgactttcctcaccctttaagactccgtctaatgggagttcggatctccagtttccccaatgaagaggataggaaacaccaacagaggtctatcataggttttctgcaggcaggaaaccaggcgctttccgccactgaatgtactctcgaaaagacggataaggataagtttgtgaagcctctggagatgtctcacaagaagagtttttttgacaaaaagaggtcggaacggaaatggtctcaccaggataccttcaaatgcgaggctgtaaataagcaatcctttcagacttctcagccgtttcaggttctgaagaaaaagatgaacgaaaacctcgagatcagcgagaactctgatgactgtcagatcttaacatgccccgtgtgcttccgggcccagggctgtatcagcttggaagcactgaataagcatgtggatgagtgcctggacggaccctctatcagtgaaaattttaaaatgttttcctgcagccacgtgtctgcgacaaaggtgaataagaaggagaatgtgcctgcatccagcctctgcgaaaaacaagactatgaggctcatccgaagatcaaagaaatatcttcagtcgactgtatcgctctcgtggataccatcgacaattccagcaaggccgagtccatcgatgctctgagcaataagcactctaaggaagagtgctcttctctcccctccaaatctttcaacattgaacactgccaccaaaacagttcttccaccgtgagcctcgaaaacgaggacgttggatctttccggcaggagtatcggcagccctatctctgtgaggtgaaaaccggccaggcccttgtttgtcccgtctgcaatgttgagcagaaaacatcagatctgaccctctttaacgttcatgtggacgtctgcctaaacaaatcttttattcaagagctgcgtaaggataaattcaatcccgttaatcagcccaaagaatcatccagaagcactgggtctagctcaggagttcagaaggccgtcacccgtactaagagaccaggtcttatgactaagtactcaacctcaaaaaagattaagccgaacaatccaaagcatactctggacatcttcttcaaatag

SEQ ID NO: 200022 - DNA, 1386 bp, synthetic construct
  misc_feature 1..1386: note = Description of Artificial Sequence: Synthetic coding sequence
  source 1..1386: mol_type = other DNA
atggacagcaccaaggagaagtgcgacagctacaaggacgacctgttgcttcgcatgggtctgaatgataacaaggctggcatggagggcttagacaaggaaaagataaataagatcattatggaggccactaaaggctcccgtttctacggcaatgagcttaaaaaggaaaagcaagtaaaccaaagaatcgagaatatgatgcaacagaaggcacagatcacttcacagcagctccgtaaggcccagctacaggtcgatagatttgccatggaactggaacagtctcgcaacttgagtaacacaatcgtgcatatcgatatggacgctttttacgccgctgtggagatgcgcgacaatccagagctgaaggacaagcccattgccgtcggctccatgagtatgctttctacttccaactaccacgctaggaggtttggtgtacgagctgcaatgcctgggtttattgcaaaaagattgtgccctcagctgattatcgtgcctccgaatttcgataagtatagggcagtgtccaaagaagtgaaagaaattctggcagactacgacccaaacttcatggcgatgtctttggatgaggcatatctaaatatcacgaaacacctcgaggaaagacaaaattggcctgaggataagaggcggtattttatcaagatgggatccagcgtggagaatgacaaccctgggaaagaggtcaacaaactttccgaacacgagcgatctataagcccattgctctttgaggagtctccttcagacgtgcagccacctggagatcccttccaggttaacttcgaggaacagaacaacccacagatcctgcaaaacagtgtggtgtttggaacaagcgcccaggaggtcgtgaaagaaataagattccgaatcgaacaaaagacgactctgacagctagcgcagggatcgctccaaatacaatgctagctaaagtatgttcagataaaaacaagcctaatgggcagtatcagattctccctaacagacaggctgtaatggattttatcaaagatttaccaatacgcaaggtttccgggatcggcaaggtgaccgagaagatgcttaaagctttgggtatcatcacgtgcacggagctttaccagcaacgcgccctgctttctctactcttttccgaaacaagttggcactactttcttcatattagcctggggctgggtagtactcacctcactagagacggagagaggaagagtatgagcgtcgagcgtacgttcagcgaaatcaataaggcagaggaacagtactcactatgtcaggaactctgttctgagctcgcacaggaccttcagaaggagcggcttaaagtcgcacaggttgagtataggagattgtag

SEQ ID NO: 200023 - DNA, 2019 bp, synthetic construct
  misc_feature 1..2019: note = Description of Artificial Sequence: Synthetic coding sequence
  source 1..2019: mol_type = other DNA
atggacagcaccaaggagaagtgcgacagctacaaggacgacctgcttctgcggatggggctcaacgataacaaggccggaatggaaggattggataaagagaaaattaataagatcatcatggaagctacaaagggaagcagattttacggcaacgaactgaaaaaggaaaagcaagtgaatcaacggatcgagaatatgatgcagcagaaagcgcagatcactagccaacaattaagaaaggcacaactgcaggttgatcggttcgccatggaacttgagcagtcacggaatctttctaatacaattgtccatattgatatggacgcgttttacgcggcggtcgagatgcgggacaatcccgaattgaaggataaacccatcgccgtgggatccatgtctatgctatccactagcaactaccacgctaggcgtttcggagtgcgcgcggctatgccaggatttatcgccaagcgactgtgtccccagctcattattgtgccacccaattttgataagtacagggcagtatcaaaggaggttaaagaaattttggcagactacgaccccaattttatggcaatgagccttgacgaagcctatctgaatatcaccaaacatctggaagaaaggcagaactggcctgaagataagcggcggtacttcatcaaaatggggtcatccgtcgaaaatgacaacccgggaaaagaggtgaacaaactgtctgaacatgagcggagcattagtccgctactattcgaggagtcgcctagtgacgtccagcccccaggggatccctttcaggtgaacttcgaggaacaaaataatccacagattctgcagaacagcgtcgtattcgggacctctgcgcaggaagtagtgaaagaaatccggttcaggatcgagcagaaaaccacactgaccgcctcggctggcgtccgtatctctagttttcctaatgaggaagaccggaaacatcagcagaggtccatcatcggctttctccaagccggcaatcaggctttgtctgctacggagtgcaccttagaaaaaaccgataaagacaagttcgtcaaaccactggaaatgtcgcacaagaaatctttttttgacaaaaaaaggagcgagcgcaagtggtctcatcaggatacattcaaatgcgaggctgtaaataagcaatcatttcaaacttcccaaccattccaggtgttgaagaaaaaaatgaacgaaaatctagaaatctccgaaaattcagatgattgtcagatcttaacctgcccagtttgtttcagagctcaaggttgcataagtctcgaggctctcaacaaacacgtcgacgagtgtctcgatgggcccagcatctccgaaaattttaagatgttctcgtgtagtcatgtgagcgctacaaaggtgaacaagaaggagaacgttcccgcaagctccctctgtgagaaacaagattacgaggctcacccaaagataaaggagatcagttctgttgattgtatcgccctggtagacaccattgataattcctcgaaagccgagagcatagatgccttaagtaacaaacatagtaaggaggaatgctctagccttccaagtaaatcttttaacatagagcactgccaccaaaattcctcatccaccgtgtcacttgaaaacgaggatgtgggaagctttcgccaggagtaccggcagccctatttgtgcgaggtcaagactgggcaggcacttgtctgcccagtgtgcaatgtcgagcaaaagacctctgatctgacactcttcaacgtgcacgtcgacgtctgcctgaataagagctttattcaggagctgcgcaaagacaaattcaatccagttaatcagccgaaggagtcatcgcgctccaccggatccagcagcggggttcaaaaggcagtgacccggactaagaggcctggtctcatgactaagtactccacttcaaaaaagattaagccaaataaccctaagcatacgctcgatatcttcttcaagtag

SEQ ID NO: 200024 - DNA, 1470 bp, synthetic construct
  misc_feature 1..1470: note = Description of Artificial Sequence: Synthetic coding sequence
  source 1..1470: mol_type = other DNA
atggacagcaccaaggagaagtgcgacagctacaaggacgacctgttgctccgcatggggctaaatgataacaaggcaggcatggaaggattggataaagaaaagataaataagatcataatggaggctaccaaggggtcacggttctatgggaacgaattaaaaaaggagaagcaggtgaaccaaagaattgaaaacatgatgcaacagaaagcacagattacgtcacaacagcttagaaaggcgcagctgcaggttgaccgattcgcgatggagctcgaacaatcccggaatctctcgaacacaatcgtccacatcgatatggatgcattctatgcagctgtcgagatgagggacaaccccgagctgaaggataaacccattgctgtgggatctatgagcatgctgagcacctctaactaccatgcacgccgtttcggcgtgagggccgccatgcctggttttatagccaagcgcctctgtccacaactgatcatcgtacctccaaattttgacaaataccgcgccgtgtccaaagaggtgaaggagattttggctgactacgaccccaattttatggccatgtctctggacgaggcctacttaaacatcactaaacatcttgaggagagacagaattggcctgaagataagagacgctacttcataaaaatgggctcctccgtggaaaatgataatcccggcaaggaagtcaataagctgtccgagcacgaaaggagtattagccctctgctgttcgaggaatccccctcggacgtgcagcccccaggggacccattccaggtgaattttgaagaacagaacaatccgcagatcctccagaactctgtggtgttcggcacttctgcacaggaagtggtgaaggagattcgtttccgcatagaacagaagacgactctgacggcctcagcgggaattgcacccaacacgatgcttgcaaaagtttgttcggataagaacaaaccaaacgggcagtaccagatcctgcctaatcgccaagccgtcatggattttatcaaagacctgcctatcagaaaggtctctggcatcggcaaggtgactgagaaaatgctgaaggcccttggaatcataacatgcacagagctttaccagcagagagccttactctctcttctcttcagcgaaacttcctggcattacttccttcatatatctctaggactgggctccacacacctaacacgcgatggggagaggaaaagcatgtctgttgagaggacatttagcgagatcaacaaggccgaggaacagtattcactatgtcaggagttgtgttcagaactggctcaggatttgcagaaagaacgattgaaagtgttcggctacctggtcttccctatgaagagaaccggcaataccaacaagggcgcattattggccttctatcgcttggagactaaaccttgtcagcccctgtcagtccactag

SEQ ID NO: 200025 - DNA, 426 bp, synthetic construct
  misc_feature 1..426: note = Description of Artificial Sequence: Synthetic coding sequence
  source 1..426: mol_type = other DNA
atggacagcaccaaggagaagtgcgacagctacaaggacgacctgcttttaaggatgggtctgaatgacaacaaggccggaatggagggcctcgataaagaaaagattaataagattatcatggaagccacgaaagggtccagattctacggcaatgagctgaaaaaagagaagcaagtcaatcaacggatagaaaatatgatgcagcagaaggcccagatcacttcccagcaactgaggaaggcacagctgcaagttgacagatttgcaatggagcttgagcagtcccggaacctctcaaatactattgtacatattgacatggacgctttctacgcagcggtggaaatgcgcgacaatcccgaactcaaggacaagccaatcgctgtcggcagtatgtcaatgctgagtacctctaactattag

SEQ ID NO: 200026 - DNA, 1419 bp, synthetic construct
  misc_feature 1..1419: note = Description of Artificial Sequence: Synthetic coding sequence
  source 1..1419: mol_type = other DNA
atggacagcaccaaggagaagtgcgacagctacaaggacgacctgctgctgaggatgggactgaacgataataaggcaggcatggagggtctagataaagagaaaatcaataagattatcatggaggccaccaaaggttcgcgattctacggcaacgaattaaagaaggaaaagcaggtgaaccaaaggatcgaaaacatgatgcagcaaaaagcacagattacgagtcagcagctgaggaaggctcagcttcaggtggataggttcgctatggaactagagcagtcacgcaacctcagcaataccatagttcacattgatatggatgcattttatgctgcagttgagatgcgggacaatcctgaattgaaggacaagcccatagcagtcggtagcatgtcaatgctcagcacttctaactaccatgctcgcaggttcggggtccgcgcggcgatgcctggattcatagctaaaagactgtgtccccagttgattatcgtccctcccaattttgacaagtacagggcggtgtctaaggaggtgaaagaaatactcgccgactacgatccaaacttcatggctatgtccctagacgaggcctatctgaacatcacaaaacatctagaggagcggcagaactggcccgaggataaacggaggtattttatcaagatgggcagctctgttgaaaatgataaccccggcaaagaggtaaataagctttcggaacacgagcgcagtatcagccccttactattcgaggaaagtcccagcgacgtccagccgcccggtgatccatttcaggtgaattttgaggaacaaaataacccccagatcttacaaaatagcgtcgtgttcggcaccagtgcacaggaagtcgtgaaagagataagatttaggatagaacagaagactacgctcacagcttcggccggcattgcccctaatacgatgcttgcaaaggtgtgctccgacaagaataaaccaaacgggcaataccaaattctcccgaacagacaggccgtcatggattttattaaggatcttcctataaggaaagtgtcaggcatcggtaaggtgaccgagaaaatgctgaaagctctgggcataatcacgtgcacggaactttatcagcagagggcccttctgtcactgttattctccgagacatcatggcactacttcctgcatatcagcctgggcctcggctctactcacctcaccagagacggagaacgcaagtcaatgagtgtggagcgtaccttcagcgagatcaataaagcagaggaacagtattccctgtgccaagagttgtgcagcgaactcgcacaagatttgcagaaagagcggctcaaggtgctctacttcgatatggtgtctttggttttcaaattctttaactcaaaaatgctgccctag

SEQ ID NO: 200027 - DNA, 1911 bp, synthetic construct
  misc_feature 1..1911: note = Description of Artificial Sequence: Synthetic coding sequence
  source 1..1911: mol_type = other DNA
atgaagtgcaagtgccccgtgatctgcttcaacgccaaggacttcgtgcgcattgtactccagttttttgggaatgacggcagctggaaacacgttgccgatttcataggcttggacccacgcattgcagcctggctgatcgatccatccgacgccactccatccttcgaagatctggtggagaagtattgcgaaaaatctataacagtaaaggtcaattccacttatggaaatagctcccgcaatatagttaatcagaatgttcgcgagaacctgaaaactctgtataggctgacgatggatctgtgctctaaactaaaagattacgggctttggcagctgtttcgaacccttgagctgccactcatacccattctggctgtcatggaaagtcacgccatccaggtgaataaggaggaaatggagaagacttcagctctgttgggagccaggctaaaggagttggagcaggaagcccatttcgtggccggcgagagattcctgattacctcgaacaatcaactaagggaaatcctgttcggtaagctgaaacttcacctactgtcacagagaaactctctacctcgaaccgggctgcagaagtatcccagcactagcgaagctgttctcaacgctttacgcgaccttcaccctctaccaaagattatactcgagtaccggcaggtccataaaatcaagtcaaccttcgtcgacggactgctcgcgtgcatgaagaagggaagtatctccagcacatggaaccagacgggcaccgtaaccggaaggttgtctgcgaagcaccccaacattcagggaatctctaagcacccgatccagatcacgacccctaaaaacttcaaggggaaagaggacaaaatcctgactatcagtcctagggctatgttcgtttcctccaagggccatactttcctggctgccgatttctcgcagatcgagctgcgcatacttactcacctctcaggcgatcccgagctgctgaaactattccaggaaagtgagagagacgacgtgtttagtaccctgacttcccagtggaaggacgtgcctgtggagcaggtaacacatgcagaccgtgagcagacgaagaaggtagtgtacgccgtcgtgtacggcgcggggaaagaaagattggctgcgtgtttgggcgtacccatccaggaggcggcccagtttctcgagagctttctgcaaaaatataaaaaaataaaggactttgccagagcagccattgcccagtgtcatcaaaccggatgcgtggtttctattatgggaaggaggagacctctcccccgcatccatgcacacgatcagcagctcagagcacaggcggagcggcaggcagtgaacttcgtcgtccagggtagcgccgccgacctctgcaaactcgcgatgatccacgtgttcactgctgtggctgccagtcacacccttaccgccaggctggtcgcgcagattcacgacgagctgctgtttgaggttgaggatccacagatccctgagtgcgctgccttggtgagacgaactatggaatccctcgaacaggtcccactaaaggtctctctgagtgctggtcgttcatggggacacctagttccacttcaggaggcttggctgcgccaggctcacgttgctctttctctgcctgccacagcctggctgcctctgggccctctcccggcccccagcccccatccttgtatctttcgcctccattttgtctgctctcctaggcagcagtgggaggaacgcacggggtttcagcagtccattgtgtggccctcaccccgcagccctgctttgtacgctcccgggcgtatcaatcctctgggcctggggtggccagccatcccttggtctaaatgcttatgcaaagccctgcttatcctgtag

SEQ ID NO: 200028 - DNA, 936 bp, synthetic construct
  misc_feature 1..936: note = Description of Artificial Sequence: Synthetic coding sequence
  source 1..936: mol_type = other DNA
atggccgtgggcagccaggactacggcctgtggcagctgttccggacgctagagcttccccttattccaatcctggcagtaatggaatcgcatgcgattcaggtcaataaggaagaaatggagaagacatctgccctacttggcgctcgtctcaaggaacttgaacaggaggcacactttgttgcaggcgaacggtttctgatcactagcaacaatcagctaagagagatcttgtttgggaagctcaagttacatctgctctcgcagcgcaattctttgcccaggaccggcctacagaagtacccaagtacttcagaggcagtgaacatacagggaatctccaaacacccaatacagatcactactcccaaaaatttcaaaggtaaggaagataaaatcctgaccatcagtcctagggcaatgttcgtgtcatcgaaaggacacaccttcctggctgcagattttagccagatcgaactgcggattctaactcacctatctggcgatccggaactgttgaagctattccaggagagtgagcgggatgatgtgttctccacattgacgagtcagtggaaagatgtgcccgtggagcaggtcacccacgccgaccgggagcagactaagaaggtggtttacgccgtagtgtacggcgccggtaaagagcgcctagcagcctgcttaggggtccctattcaggaagccgcccagtttttggagtcgttcctccagaagtataaaaagatcaaggatttcgccagggcagcaatcgcccagtgtcatcaaaccggctgtgtggtcagcattatgggccggcgccgccccttaccaaggatacatgcccacgaccagcaactccgcgcccaagccgagcggcaggccgtgaatttcgtggtgcaagcccagtcacagcacctatgcgtggaagtcccgtag

SEQ ID NO: 200029 - DNA, 2703 bp, synthetic construct
  misc_feature 1..2703: note = Description of Artificial Sequence: Synthetic coding sequence
  source 1..2703: mol_type = other DNA
atggagaactacgaggccctggtgggcttcgacctgtgcaacacccccctgtctagtgtggcccagaagattatgtcagccatgcatagtggtgatctggtcgattccaagacctggggcaagtcaacagaaactatggaagtgataaacaagtcttccgttaagtactcagtacaactggaggataggaagacccagtctcctgaaaaaaaagatctcaagagcttgcgctcccaaacaagccgcggttcagctaagctttccccccagtctttttcggtgcgattgacagatcagctgtcggctgatcagaagcagaaatcgatttccagcctgacactgtcctcttgtctgatcccacaatataaccaggaggcctccgtcttgcaaaaaaaaggccacaagcggaagcactttctcatggagaacattaacaacgagaacaaggggagcattaatctaaagcgcaagcacattacatataataacctttcagagaagacaagtaaacaaatggcactggaggaggatacagacgatgccgaaggctatttgaactccggcaatagtggagcactgaaaaaacatttctgcgacatcaggcatcttgatgattgggcaaaaagtcagctgattgagatgcttaaacaagctgctgcccttgtgattactgtgatgtacacggacggctcaacccagctgggcgcagatcagactccggtttcatctgtgagaggtatagttgtcctagtgaagagacaagcggagggaggacacggctgccccgacgccccagcctgcggcccggtgctcgagggcttcgtaagtgacgatccctgcatctacatccagatcgaacattcagctatttgggatcaggaacaagaagcccatcagcagtttgcacgcaacgttctgttccaaacaatgaagtgtaaatgtcccgttatatgttttaatgccaaggatttcgttcgtatcgtactccaatttttcgggaacgatgggtcatggaaacatgtcgctgacttcataggtttggacccccgcatcgccgcctggcttattgatccctccgatgcaacgccaagctttgaggatttggtagagaaatactgtgagaaaagtatcacagtgaaagtgaattctacctatggcaattcctctcgcaatatcgtcaaccagaatgtcagagagaatttaaagactctgtataggctcacaatggatctctgcagcaaattaaaggactatggtttgtggcagctgtttcgcacccttgaattacccctgatcccaattcttgccgtaatggaatcacatgctattcaagtcaacaaggaagagatggagaaaactagcgccctccttggcgccaggttgaaggaactggagcaggaggcgcactttgtggcaggtgagcggtttctgattacatcaaacaaccagctcagagagatcttattcggcaaactcaaattacatctcctgtcccagcggaattctttgcctagaactggactccaaaaataccccagtacttccgaggctgtcctgaacgctctgagggatcttcatcccctacctaaaattattctggaataccggcaggtgcacaagattaagtcgaccttcgtagacggtctccttgcctgtatgaagaaggggagcattagcagcacctggaatcagacaggcactgtgacaggtagactaagtgctaaacaccccaacattcagggaatatcaaaacaccccatccagattactactcccaagaacttcaagggtaaggaagacaagatcttaactatcagtccccgagctatgttcgtgagcagcaaaggccacacatttctggctgctgatttctcacagatcgagctcaggatccttacacatttgagcggtgaccctgagctgctcaagttgttccaggaatctgaacgtgacgatgtcttctcaaccctcacatctcaatggaaagacgtgccagtggaacaggttacccatgccgaccgagaacagacaaaaaaggtcgtttatgccgtcgtctatggtgccggaaaggagcgccttgctgcctgcctgggggttccaatacaggaggccgcacagtttctggagagtttcctccagaaatataagaaaatcaaggattttgctcgagctgccattgcacagtgtcatcaaaccggctgcgtcgtgtccataatgggacgccgtaggcccctccctcggattcatgcgcatgatcagcaattgcgagcacaggctgaacgacaagcagtgaatttcgtggttcagggcagcgccgccgatctttgtaaactcgccatgatccatgtctttaccgccgtggcggcaagtcacacattgactgctaggctggtggcacaaatccacgacgaactgctgtttgaagttgaggatcctcagatccccgaatgtgcagcgctggtacgcaggaccatggagagcctcgaacaggtgcaggctcttgagctgcaactgcaagtgccgcttaaagttagcctttcagcaggcaggtcgtgggggcacttggtgcccctgcaggaagcgtggggtccaccccctggaccttgcaggactgaaagccccagcaattcactcgcagcaccaggttctccagctagcactcagccccctcccctgcacttttccccctccttttgcttgtag

SEQ ID NO: 200030 - DNA, 2703 bp, synthetic construct
  misc_feature 1..2703: note = Description of Artificial Sequence: Synthetic coding sequence
  source 1..2703: mol_type = other DNA
atggagaactacgaggccctggtgggcttcgacctgtgcaacaccccccttagctccgtggctcagaaaattatgtctgccatgcactcgggagacctggtcgacagcaagacatggggtaagtccacagaaactatggaggttattaataagtcctccgttaagtatagcgtccaactggaggataggaaaacacaaagccccgaaaagaaggacttgaagtccctgagatcgcagacctctagggggtctgcaaagctgtcacctcagtctttttccgtgcgactgacggaccagctcagcgcagatcagaagcagaaatctatctccagcctcaccctaagcagctgcctgattccccaatacaaccaggaggcatctgttctccagaagaagggacacaaacggaagcactttttgatggagaacattaataacgagaataagggctctatcaacttgaagaggaagcacataacatataacaatctatcagagaaaacgtctaagcagatggctctggaggaggacactgatgacgccgaggggtatctgaattcaggaaattccggagctcttaaaaagcatttctgcgatatcagacaccttgatgactgggccaaatctcagcttattgaaatgctgaaacaggctgctgctctggtgataactgtaatgtacaccgacggctcaactcagctcggtgccgaccagactccagtttcctccgtgagaggcatcgtggtcttggtaaaaagacaggccgaaggcggtcacggatgcccagacgcaccagcgtgtgggcccgttctggaggggttcgtgtcggatgacccttgtatctatatccagatcgagcattcggcgatctgggatcaagaacaggaggcccatcagcagtttgccaggaatgttttgttccaaacgatgaaatgtaagtgcccagtgatctgctttaacgccaaggatttcgtgcgtatcgtgctacaattttttggaaacgacggctcttggaaacatgtggccgacttcatcggtctagatccccggattgccgcctggttgatagaccccagcgacgcaacccctagttttgaggatctcgtcgagaaatactgtgagaaaagtatcaccgtgaaggtcaattccacatacggaaattcaagcaggaacatcgtcaatcaaaatgtgcgagaaaacctcaaaacgctgtatcgcttgacaatggatctctgttcgaagctgaaagattatggactgtggcagctctttaggactctcgagcttccattaattccaattttggcagtgatggagagtcatgctatacaggttaataaggaggagatggaaaagacctcagccctgctgggcgccagacttaaggaactggaacaagaggcccactttgttgccggcgaaagattcttgattaccagtaacaaccagctgcgtgagattttgtttggaaagctcaagctgcacctgctgagccagagaaattcactgcctaggacaggtctgcaaaaatacccatcaacaagcgaagccgtcttgaacgctctaagggacctgcaccccctgcctaagattatattggagtatcggcaggtgcacaaaatcaagagtacctttgtggacggccttctggcttgcatgaaaaaagggtctatctcctccacctggaatcagacaggcaccgtgaccggccggctaagtgcaaagcatccgaacatccaaggaattagtaagcatccaattcagattactacccccaaaaacttcaaagggaaggaggataaaatcctgacaatctctcccagagccatgttcgtgagctcaaagggccacacatttctggctgcagatttctcgcagattgagctgcggattctcactcatctcagtggcgacccagagctgctgaaactgtttcaggaaagcgagagggatgatgtgttttctaccttgacttcacaatggaaggacgtccccgtggagcaggtgactcatgccgatcgagaacagactaagaaagtcgtgtatgctgttgtatacggggccggcaaagagcgtcttgccgcatgcctgggggtcccaattcaagaagctgcccagttcttagagtcttttctccagaagtacaaaaagattaaggatttcgcccgggcagcgatcgctcagtgtcatcagaccggttgtgttgtgagcatcatgggacgtcggcgcccccttcccagaattcatgcccacgaccagcaattgcgagcacaggctgagcggcaagcagtgaacttcgtggtacaggggtcggccgcggatctttgcaaacttgccatgattcacgtcttcaccgcagtggctgcttctcatacgctgaccgcacgacttgttgcccaaattcatgacgaactactcttcgaagttgaagatccacagatacctgagtgtgcagccttggtcaggcgcaccatggagtccctagagcaggtccaggccctggagctgcagctgcaggttcctcttaaggtcagtcttagtgcaggcagaagttggggtcacttggtcccacttcaggaggcctggggacctcctcctggcccatgccgcacggagtctcccagcaattcccttgcagctcccggtagcccggctagtacacagccgccccctctgcatttcagtccatctttctgtctgtag

SEQ ID NO: 200031 - DNA, 3033 bp, synthetic construct
  misc_feature 1..3033: note = Description of Artificial Sequence: Synthetic coding sequence
  source 1..3033: mol_type = other DNA
cggatggacggcaagcggcggcccggccccggccccggcgtgccccccaagagagctagaggaggtctctgggacgatgacgatgcaccaagaccctcccagtttgaggaggatctcgccctgatggaggagatggaggccgaacaccgcctgcaggaacaggaggaagaggaactgcagtcggtcctggagggcgtcgccgatggccaagtacctccgagcgctatcgatccacgttggctgcggcccacaccccctgccctggacccacagactgagccactgatcttccagcagcttgagatagaccactacgtcggaccagcccaacctgtcccgggaggcccaccaccatctcgaggttctgtccccgttcttcgcgcctttggagtaaccgatgagggcttcagcgtctgctgtcacatccacggcttcgccccgtacttctacactcctgccccgcctggcttcgggccggagcacatgggtgatttgcagagggaactgaatctcgctattagccgggactctcgagggggccgggaattgaccggccctgccgtgctggccgtggagttgtgttcccgagaatctatgtttggttaccacgggcatggcccttcccccttcctgcgtatcaccgtcgccctgcctagattggtagcacctgccagaaggctgcttgaacagggcatccgcgtggccggcctgggaactcctagctttgccccatatgaagccaacgttgactttgagatccggtttatggtggataccgacatcgtcggctgcaattggctcgaactcccagccgggaagtacgccctgaggctgaaggaaaaagcaacgcagtgccagctcgaggctgacgtactgtggagtgacgtggttagtcaccctcccgagggtccctggcagcggattgcgcctctgcgagtgttgagctttgacattgagtgcgctggccgaaaagggatctttccagaacccgagcgggatcccgtgatccagatttgcagtttaggcttgagatggggtgagcccgagcccttcctgcgcttggcactcacacttcggccatgtgccccaattttaggagcaaaagtccaatcctatgagaaggaggaggatcttttgcaggcttggagtactttcatcagaattatggaccccgatgttatcaccggatacaatatccagaatttcgatctaccctacctgatcagccgcgcccagacattaaaggtgcagactttcccctttctcggaagggttgccggactgtgtagtaacattcgggattcttcattccagtccaaacagacgggcagacgagacactaaagtggtttctatggtgggtagagtacagatggacatgctgcaggtcctactgagagaatataaactgaggagctacaccctgaacgctgtgtctttccatttcttgggtgagcagaaggaagacgtgcagcacagcatcatcaccgaccttcagaatggcaatgaccaaacgcgccgccgactcgccgtgtattgcctgaaggatgcctatctacctcttcgattgttagagaggctgatggtattggtaaatgctgtggaaatggccagagtgactggcgtacctctgtcctaccttctttcaaggggacaacaagtgaaggtggtgagtcaactcctccggcaggctatgcacgagggattgctgatgcccgtggtcaaatctgaggggggcgaggactatacaggcgcgaccgtgatagagccccttaaaggctattacgacgtgcctattgctactctggatttctcatctctgtatccttccataatgatggcccacaacctctgctacactacgctcttgcgcccaggaacggctcagaagctcggcctcactgaagatcagtttatcaggaccccaaccggcgatgagttcgtaaaaacttctgtacggaaaggcctgctgccacagattctggaaaacttgctctccgctcggaaacgtgctaaggcagagcttgccaaggaaactgacccactgcgaaggcaggtccttgacggcaggcagctggccctgaaagtctccgcaaatagcgtctacggattcaccggagctcaggtgggtaagctgccatgtctggagatttcccagagtgtcacaggtttcggccgccagatgattgagaaaactaagcagctcgtggaatccaagtatacagtggaaaacgggtactcaacttcagcgaaggtggtctacggcgacaccgacagtgtgatgtgccgcttcggcgtctcttccgtggccgaagccatggcgcttggcagagaggctgctgattgggtttctggtcatttcccgtctcctattcggctggagttcgaaaaggtatactttccctacctcctcatctcgaagaaacgatacgccggtctgctcttctccagccggcctgacgctcatgatcgaatggactgtaagggtctggaagccgtgcgccgcgataactgccctctggtggcaaatctggtaaccgcctccctccgacggctgttaattgatcgcgatccggagggagccgtggcacatgctcaggacgtgatcagcgatctgctctgcaacagaattgatatctcgcagcttgtcatcaccaaggaattaactagggccgcttcagattatgccggaaaacaggcccacgtggaactggctgagagaacgcggtgctcctgctggagcaccgcctgcccactgacacgttctacgacctggagtagtagctggcctagtccttcctgtgcctctagcagccctagctgggcaagggccgtgccacggctttgttattgtggcgggacaactcgcgccgctcgaaggtgtagtagggcgcggtgggccgcatcttggccctcacctaacgccgcgactgctgccttggccgcagcccagtgtagcgccacacgggagccttgcgtatccagcgcaagcccagggtcattatcctgtattaggcgtcggtaccctatctag

SEQ ID NO: 200032 - DNA, 3324 bp, synthetic construct
  misc_feature 1..3324: note = Description of Artificial Sequence: Synthetic coding sequence
  source 1..3324: mol_type = other DNA
atggacggcaagcggcggcccggccccggccccggcgtgccccccaaacgggcccgaggagggctctgggacgacgacgacgccccacggcccagccagttcgaggaagaccttgcactgatggaggaaatggaggcagaacacagactgcaggaacaggaggaagaagagttacagagcgtactggagggcgtcgctgacggccaagtcccccccagcgcgattgacccgaggtggctaagacccacaccccctgcactggatcctcagacggagcccctgattttccagcagttagagatcgaccactacgtgggcccagcacagccagtccctggggggccaccccctagtagaggatctgtcccggtgctcagggcattcggcgttactgatgagggattctctgtctgttgtcatatccacggatttgccccatacttttatacacctgcaccgccgggctttggtccagagcacatgggcgatttgcaacgcgagcttaacctcgccataagccgggattcaagaggggggcgggagttgacgggccccgctgtgttggctgtagaactctgttcaagagaatcgatgttcggctatcacggccacggtccgtcaccttttttacgaattactgtggccttgccacggctcgtcgcacccgctcgccgactcttggaacaaggtatccgggtggccggtctcggaaccccctctttcgcaccctatgaagccaacgtagatttcgaaattaggttcatggtggatactgatatcgtgggctgtaattggctcgaactaccagcgggtaagtatgcactccggctcaaggagaaagccacacaatgccaactagaagccgacgtcttgtggtctgatgtggtctctcaccccccagagggcccctggcagcgtatagctcccttgagagttctgtctttcgacatcgagtgcgctggcagaaaagggatatttcccgaacctgaaagggaccccgtaatccaaatttgttcactggggctgaggtggggcgaaccagagccattcctgaggctggccctgacgctgcggccttgcgcgcctattttgggcgccaaagttcagtcctacgagaaagaggaggaccttttgcaggcctggtcaacttttattcggattatggacccggacgtgatcacagggtataatatccagaacttcgacttaccttatcttatctcacgagcacagacactgaaggtccagactttcccattccttgggcgtgttgctggactctgcagcaacatccgtgactcaagttttcaatccaagcagacgggccggagggataccaaagtggtttctatggtggggcgggtccagatggacatgcttcaggtgctgctgcgggagtacaagctacggagctataccctcaatgccgtgtcttttcacttcctgggtgagcagaaagaagatgtgcagcatagtattatcactgatctgcagaatgggaatgatcagacgcgccgtcggctagccgtgtactgccttaaggatgcctacctgccgctgagattgctcgaaagactgatggtgctggttaatgccgtcgaaatggcacgggtgaccggagttcccctatcctacctgctctccagggggcagcaagtcaaagtcgtgtcccaactgctccgccaggcaatgcatgaaggtctgctgatgcctgtggtcaagagcgagggcggggaagactacacaggagctacagtgatcgagccactgaaggggtattatgacgtgcctatcgccaccctggatttctcttccctgtacccctccattatgatggcacacaatctttgctacaccaccttattaaggcctggaacagcccagaagctaggtctgaccgaggatcagtttattagaacaccaactggtgacgagttcgtgaagacaagtgtgcgcaagggccttcttcctcaaatattggaaaatctcctctccgcacgaaagcgcgctaaggctgagcttgccaaggaaactgaccccctgaggagacaagtcctggacggacggcagctcgcgttgaaggtgtctgctaatagtgtgtatggctttaccggtgcacaggttggcaagttgccttgcctggaaatatctcagagcgtgaccggcttcggccgacaaatgatagagaaaactaagcagttagttgagagcaagtacacagtcgaaaatgggtattctacctcggccaaggtggtctacggcgatactgacagtgtcatgtgtaggtttggcgtgagttcagtggctgaggccatggcactgggcagagaggcggccgattgggtgagtggccacttcccatcccccatccgcctcgagttcgaaaaggtatactttccgtatttattaatttcaaaaaaacgctacgccggcctgctgttctcctcaaggccagacgctcacgatcgtatggactgtaaaggactcgaggcagttagacgggataattgccccctggtggccaacctcgtgaccgcctctttacgtcggctcctgatcgatcgcgaccctgagggcgctgtcgcacatgcacaggatgtcatttctgacctgctctgtaacagaattgatatatcccaacttgttataactaaagagttgactagggctgcttccgactatgcagggaagcaggcccacgtggagctggcggagcgcatgcgtaaaagagatcccggttccgcgccaagcctaggtgaccgggtgccgtatgtcatcattagcgctgcaaagggtgtcgccgcatacatgaagtcagaggatccactgttcgtcttagaacattctctacccatcgacacacagtattatctcgagcagcagctagcaaagccgctgcttcgcatcttcgaaccaattctgggcgagggccgcgctgaagcagtccttctgagaggggatcatacccggtgtaagaccgtgctgactggaaaggtgggcgggctgcttgcatttgcaaagaggaggaattgttgcattgggtgccggacagttctgtcacatcagggtgcggtctgcgagttttgtcaacctcgagaatccgagttataccaaaaagaggtttcacatcttaatgcgctggaggaacgcttcagtcggctgtggacgcagtgtcagaggtgccaggggagcctccatgaggacgtgatttgcacctcaagagattgtcccatcttctacatgagaaagaaggttcgaaaggacctggaggaccaggagcagctgctcaggagatttggccccccaggaccagaagcttggtag

SEQ ID NO: 200033 - DNA, 1410 bp, synthetic construct
  misc_feature 1..1410: note = Description of Artificial Sequence: Synthetic coding sequence
  source 1..1410: mol_type = other DNA
atgttcagcgagcaggccgcccagcgggcccacaccctgctgagccctccttcagccaacaacgctactttcgccagagtcccggtggcaacctacacaaactcgagccagccctttcgtctcggagaaagatcattcagccggcaatacgcccacatctacgcaacccgcctgatccagatgagaccatttctggaaaatcgggcacaacagcactggggtagcggtgtgggagtgaaaaagctctgcgaattgcagcctgaggagaaatgttgtgtggttggaacgctgtttaaagcgatgcccctgcagcccagcattctgagagaggttagtgaggaacacaacctcctgccacaaccacccagatctaagtacatccatccggatgatgagctggtgctggaggacgagctgcagagaatcaaactgaagggaacaatagatgtgtcgaagcttgtaactggcacagtcctcgcggtttttgggagcgttcgggacgacgggaagttcctggtggaggactattgctttgctgaccttgctcctcagaagccagcccccccacttgacaccgatcgcttcgtactgctggtcagcgggctaggcctcggtggtggaggcggggagagtctgttaggaactcaattattggtcgacgtggtgactggacagttaggagatgagggcgaacaatgcagtgctgcgcatgtatctcgcgtcattcttgcaggcaatctgctcagccacagtacacaaagccgcgatagtattaataaggccaagtacctcactaagaagacccaggcagccagtgtggaggccgtaaaaatgttggatgagatattgcttcagctcagtgctagtgtacccgttgacgtgatgcccggtgaattcgatcccacaaattacaccctgcctcagcagccattacatccatgcatgtttcccttagcaacggcctattccaccttgcagcttgtaaccaatccataccaggctacgatcgacggggtccgctttttaggcaccagtgggcagaacgtgtccgacatctttcgttactcctccatggaggatcacctggaaattttggagtggacgctgcgtgtaagacacatatctccgacagctcctgacactttggggtgctatcccttctataaaaccgacccctttatctttccagagtgcccccatgtctacttttgcggcaatacacccagtttcggttcaaaaatcattaggggtcccgaagaccagactgtcctcctcgttaccgtgccagatttcagcgctacgcagacagcttgtttggttaatctcaggagccttgcgtgccagccaatttctttcagcggcttcggcgccgaagacgatgacttagggggtctgggcctggggccgtag

SEQ ID NO: 200034 - DNA, 447 bp, synthetic construct
  misc_feature 1..447: note = Description of Artificial Sequence: Synthetic coding sequence
  source 1..447: mol_type = other DNA
atgttcagcgagcaggccgcccagcgggcccacaccctgctgagccccccctccgctaataacgccactttcgcaagagtgcccgtggcgacatatacgaactcctctcaaccattccgactcggcgagaggtccttcagtcgccagtatgcacatatatatgcaactcgactgatccagatgaggccgttcttagagaacagggcacaacagcactggggcagtggcgtgggggttaagaaattgtgtgagctccaacccgaggagaagtgttgcgtggttgggactctgtttaaagcaatgccactgcaaccctctattctcagggaagtgagcgaagagcataacttgctcccccaaccaccacggtccaaatatatccatccagatgacgaactagtcctggaagatgagcttcagaggatcaaactgaagggcacaatatag

SEQ ID NO: 200035 - DNA, 663 bp, synthetic construct
  misc_feature 1..663: note = Description of Artificial Sequence: Synthetic coding sequence
  source 1..663: mol_type = other DNA
atgttcagcgagcaggccgcccagcgggcccacaccctgctgagccccccatcagccaacaatgcaacctttgcacgggtgccggttgcaacctacaccaacagctcacagcccttccgtcttggcgaacggtctttttctcggcagtatgcccacatctacgcgactcgactgatccaaatgcgccctttcctcgagaaccgcgcacagcagcattggggctctggagtgggagtgaagaagctgtgtgaattgcagcccgaggagaagtgctgtgtggttgggacactgtttaaggcaatgcctctccagccctctattctcagagaggtgtcagaagagcacaacctgctcccccagcctcccagatctaagtatatccatcccgacgacgagctagtgcttgaggacgagcttcagcgtatcaaattgaagggcactattgatgtctctaagctcgtgacaggaacggtgctggctgtatttggatcagtgcgggatgacggaaagtttttggtggaagactactgtttcgctgatctcgccccacaaaagccagccccaccgctggatacggatcgcttcgtgttgttggtctcaggacttggattgggcggaggcggcggcgagtccctgctaggcactcagctcctcgtcgattag

SEQ ID NO: 200036 - DNA, 1410 bp, synthetic construct
  misc_feature 1..1410: note = Description of Artificial Sequence: Synthetic coding sequence
  source 1..1410: mol_type = other DNA
atgttcagcgagcaggccgcccagcgggcccacaccctgctgagccctccctccgccaacaatgcaacctttgctcgggttcctgtcgcgacatatactaatagtagccagcctttccggctgggagaacggagttttagtaggcagtacgcccacatttacgcaactaggttgattcagatgcgtccttttcttgagaaccgcgctcagcaacactgggggtctggagttggtgtgaaaaagctgtgcgaactgcaaccagaggagaaatgttgcgtggttgggaccctgttcaaagctatgcctctgcagccctcaatactcagagaggtttctgaggaacataatctccttccccagccccctagaagtaaatacatacatcctgatgatgaactggtgttagaggacgagctccagaggattaaactaaagggaactatcgacgtcagcaaactggtgaccggtaccgtgttggcggtgttcgggtctgtgcgagacgatgggaagttcctagtcgaagactattgcttcgctgacttagcccctcagaagcccgcgcccccgctcgacaccgaccgttttgtgctcttagttagcggccttggtctcggcggcggcggcggagagagtctgctcggcacacagctcctggtcgacgttgtcaccggtcaactgggcgacgagggagaacaatgtagcgctgcacatgtgagccgggtcatcttagcaggaaatttgctgagccattcgacccagtcgcgcgatagcatcaacaaagcaaagtatctgaccaagaagacacaggctgcttcagtagaggcagtcaagatgctcgatgagattctgttacagctctccgcatccgttcccgtggacgtgatgcccggtgaattcgaccccaccaattacaccttaccccagcagccacttcatccctgcatgttccctctggcaaccgcctactctactctgcagttagtcacgaacccttaccaggcaacaatcgacggggtccgcttcttagggaccagtggacagaacgtttccgatatttttcgctattccagcatggaggatcatttagagattcttgaatggacactccgcgtgaggcacatctccccgaccgctcctgacaccctgggttgctacccattctacaagaccgatccgtttatatttcctgagtgcccacacgtgtatttttgcggtaatactccttcttttggtagtaaaattatcagaggtcctgaagaccagacagtcctgctcgtgacagttcccgacttctctgcaacccagactgcatgtctcgtgaatcttagatccctggcttgtcaacccatctctttcagtggctttggcgccgaagacgatgacctgggtggccttggtctgggaccttag

SEQ ID NO: 200037 - DNA, 468 bp, synthetic construct
  misc_feature 1..468: note = Description of Artificial Sequence: Synthetic coding sequence
  source 1..468: mol_type = other DNA
atgttcagcgagcaggccgcccagcgggcccacaccctgctgagcccccccagtgctaacaacgctacttttgctagggtccccgtggcaacttacaccaacagttcccagccctttagactgggtgagcggtcatttagtcggcaatacgcccacatctatgcgactaggctaatccaaatgagaccattcctggaaaaccgcgctcagcagcattggggctctggggtgggcgtgaagaagctgtgtgaacttcagccggaagagaagtgctgtgtcgtcggaactctgttcaaagccatgcctctgcaaccctctattttgagagaagtgagtgaggagcataatctgcttccacagccccctcggtccaaatacattcaccctgatgatgagctggtgctggaggacgagctccagcggataaagctgaagggcacaatcgatgtttcaaaattggttacgtag

SEQ ID NO: 200038 - DNA, 771 bp, synthetic construct
  misc_feature 1..771: note = Description of Artificial Sequence: Synthetic coding sequence
  source 1..771: mol_type = other DNA
atgttccccgtgctgcccggcagccacctgctgctgaacaaccccgctctcgagttcattaaatatgtgtgcaaagttttgagcctggacaccaacataaccaatcaagtaaataagctgaaccgcgacctgcttcgtctcgttgacgtaggcgaattcagtgaggaggcccagtttagagacccctgtcggagttacgtccttccagaggtgatctgcaggtcttgcaacttttgccgagacctggacttgtgtaaggatagctcattctccgaggacggggccgtgttgccccagtggctgtgttcaaactgtcaagcaccatatgatagtagtgctattgagatgaccctggtagaggtgctccagaagaaactgatggctttcaccctgcaggatctgaaggaggctgacacacctaaatgcgaagaaaaggaaagacggaagcgtgagcttcacagtagcgccactggcagatcgtgtcggggggcgtcagaacaacgcctaggagatgccccttcctgcagagtagttgtgcatggtgttcaggcctgcagaatggaaggcgtctgtctgaaatgtcgcggagtgaaagagactagcatgcctgtttattgcagttgtgccggagatttcgctctgactatacacactcaggtgtttatggaacagatcgggatctttcgtaatattgctcagcactatggaatgtcctatctgctggaaaccctcgagtggttactgcagaagaatcctcaactcggacactag

SEQ ID NO: 200039 - DNA, 6861 bp, synthetic construct
  misc_feature 1..6861: note = Description of Artificial Sequence: Synthetic coding sequence
  source 1..6861: mol_type = other DNA
atgagcctgcggagcggcggccggcggcgggccgaccccggcgccgacggcgaggcctctagggacgacggagctaccagttctgtgtccgctttgaaacgcctggaaaggtcccaatggactgacaaaatggacctgagattcggcttcgaacgactcaaggagcctggtgagaaaacaggatggcttattaatatgcacccaaccgaaattctcgatgaggataagaggttagggagcgccgtggactactacttcatccaggatgacggctccagatttaaagtcgctctgccttacaagccttacttctatatcgccacccgaaagggttgtgaacgtgaagtatcttctttcctcagcaagaagttccaggggaagattgccaaagttgagactgtaccaaaggaggatctcgatctgccaaatcaccttgtcggcctgaagcgcaactacatcagactctcctttcatactgtagaagacttggtcaaagtgcgcaaagagatatcaccagcggtcaaaaagaatcgagagcaggaccatgcttccgacgcttacaccgccctcctctcctcagtgttgcagcgggggggtgtgattactgatgaagaagagactagcaaaaaaatcgcagatcaactggacaatatcgtagatatgcgcgagtacgatgtcccataccatattcgattgagcattgacttgaaaatccatgtggcccactggtacaatgtgcggtatcgggggaatgctttccctgtcgaaatcaccaggcgggatgacctcgtggaacgccccgatcctgtggtgctggctttcgatatcgagacaacgaaattgccactcaaattcccagatgcagaaactgaccaaatcatgatgataagctatatgatcgacgggcagggttacctcatcacaaatagggagatcgtgtccgaggatatcgaggacttcgagttcacccctaagccagaatatgaggggccattctgcgtgttcaacgagccggatgaagcccatcttatccagaggtggttcgagcacgtccaggagactaaacccactattatggtcacctacaacggtgatttctttgactggccctttgtggaagcccgggccgccgtgcatggattgtccatgcaacaggaaattggattccaaaaagactctcagggagaatataaggcgccacaatgcatacatatggattgcctcaggtgggtgaaacgcgatagctacctgcccgtgggctcccataatctcaaagcggctgcaaaggccaagctaggctacgatcctgtggagctggatccagaggatatgtgtaggatggctaccgaacagccacagaccctggctacatacagcgtttctgacgccgtcgccacctattatctatacatgaaatatgtccatcccttcatctttgccctgtgtactataattccaatggagccagacgaagttttgcggaagggctccggcactctgtgtgaggcgctgctcatggtgcaagctttccatgccaacattattttccctaataagcaagagcaggagttcaacaaactgaccgatgacggtcacgtgctggactctgaaacctatgtgggtggtcacgtagaggccttagagtcaggagttttcaggtctgacatcccatgccgcttccggatgaacccagctgcatttgattttctgctacagcgagtggagaagaccctccgtcacgcactggaggaggaggagaaggtgcctgtggaacaagtcacgaatttcgaggaggtttgcgatgagataaaatcaaagctggcaagcctgaaggatgtaccctctcggattgagtgtcccctaatctatcatctcgacgttggagccatgtaccccaacatcatcctgacaaaccgcctgcagccctcagcaatggtggatgaggccacgtgcgccgcatgtgacttcaacaagcccggagcaaattgccagcgcaagatggcctggcagtggcgtggagagtttatgcccgcatctaggagtgagtaccaccgaattcagcaccagttggagtccgagaagttcccccccctcttccccgaagggccagctagagcatttcatgagctgtccagggaggagcaggcaaaatacgaaaaaaggagactggcggactattgtaggaaggcttataagaagatacacattacgaaggtcgaggagagactcactaccatctgccaacgcgagaattctttctatgtggataccgtacgagcatttagagacagaagatatgagttcaagggcctacacaaggtctggaagaagaagctctccgctgccgtggaagttggcgatgcggctgaagtgaagcgctgtaagaacatggaagtgctctacgacagtctccagctagcacataagtgcatccttaactccttctatggctatgtaatgaggaaaggagcccggtggtactctatggagatggccggcatcgtgtgcttcaccggggcaaacattataacgcaggccagagagctcattgagcagattggtaggccattggagctagacactgatggcatctggtgtgtgctgccaaactccttccctgaaaattttgtgttcaagacgacaaacgtcaaaaaacccaaggttacgatatcgtaccccggggctatgcttaacatcatggtgaaggagggtttcaccaatgaccagtaccaggaattggcggaaccctcctcgctcacttacgtcactagaagcgagaattctatatttttcgaggtcgacggaccctacctagccatgatcctcccggcatcaaaggaggagggaaaaaagctcaagaagcggtatgccgttttcaacgaagatggttctctggctgagctgaaggggtttgaggtgaaaagacggggtgagcttcagttaatcaagatctttcagagcagtgtctttgaagccttcctgaagggaagtacactggaggaggtttacggcagcgtcgccaaggtagccgactactggctggacgtgctctactctaaagcggccaacatgccagactccgaactctttgagcttataagcgaaaacaggtccatgagccgaaagctggaggactatggagaacagaagtccactagcatcagcactgctaaacgcttggcagagttcctcggagatcaaatggtgaaggacgccgggctctcctgccggtacatcatctctaggaagcctgaaggcagtcctgtaacagagcgagctatcccactggcaattttccaggccgagcccacagtgcggaagcacttcttgcgtaaatggttgaaatcttcatcgcttcaggacttcgacatccgcgctatcctcgactgggattattatattgagagactgggcagcgccattcaaaagataatcacaatccccgcagctctccaacaggtgaagaatccggtgccccgtgttaaacaccctgactggcttcacaagaagctgttagagaagaatgacgtgtacaaacagaagaaaattagcgagttgttcaccctcgaaggtcgcaggcaagttaccatggccgaggcctcagaggattcccccaggccgtcagccccagacatggaagattttggcctggtgaagttgcctcaccccgccgccccagtgaccgtgaagcgaaagcgtgttttgtgggagagccaggaggaatcccaggaccttacacccaccgtaccctggcaggaaattctggggcaacccccagccttgggcacttcccaggaagaatggctggtttggctgaggttccacaaaaaaaagtggcagctacaggctcggcaacgactcgcacgacgcaagagacagagactggagtctgccgagggagtacttcgtccgggtgctattcgcgacggccccgcaacgggcttggggtcatttcttaggcgtaccgctcggtctatccttgaccttccttggcagattgtgcagatttcagagacctcccaagcgggactattccggctgtgggctctggtggggagtgatctacattgtataaggctttctattcctcgggtcttctacgttaaccagagagtggctaaggctgaggaaggggcttcgtatcgaaaggttaaccgcgtactgccgcgcagtaacatggtatataatctttatgaatatagcgttcctgaagacatgtaccaagaacatatcaatgagataaatgcggagctctctgcgcctgatatcgaaggtgtctatgaaacccaagtgccgctgctgtttcgggccctcgttcacctgggatgcgtgtgcgtcgtaaataagcagcttgttcgacacctctcagggtgggaggccgagactttcgccctggaacacttggagatgagaagcttggcccagttctcctacctagaacccggcagtatccgccatatttacttgtaccaccatgcacaggcccataaggctttgttcggcatttttatcccaagccagcgacgggccagcgtatttgtcctagatacggtccgaagtaatcagatgccatcgctgggcgccctttattccgctgagcacggtttgctgttggaaaaagttggaccagaactgctgccgcccccgaagcatacctttgaagtcagggccgagactgatctcaaaacgatctgtagggccatccagagattcttgctggcttataaggaggaacgaagaggcccaacactgattgccgtccaaagctcttgggagcttaagagactggcgtcagaaattccagtcttagaggagttccctcttgtgccaatatgtgttgcagacaagataaattacggggtactggactggcagcggcatggggcccgccgaatgatccggcattacttaaatctagacacatgtctgtcccaggcattcgagatgtcccgctattttcatattcctattggcaatctcccagaggacatcagtacattcggttccgatctttttttcgcgcgacatcttcagaggcataatcaccttctatggttgagtccaaccgctagacctgacttgggtggcaaagaagctgatgacaactgtctggtgatggagttcgatgaccaggctacagtcgagattaactcatcaggatgctatagcaccgtctgtgtggagctcgacctgcagaatctggccgtgaacactattctgcagagtcaccatgtgaatgacatggagggcgcagattctatgggtatttcttttgacgtgattcagcaagcatcgctcgaagacatgattaccggtggacaggcagcctctgctcccgcttcttacgacgagacagcactgtgcagtaatactttccggatcctgaaatcaatggtggttggctgggtaaaagagattacacagtaccacaacatttatgccgataaccaggtgatgcatttttacagatggctgaggtctcctagcagtttactgcatgaccccgcgcttcatcgaacactccacaacatgatgaagaaactgtttcttcagctaattgccgaattcaagaggctgggcagttctgtgatttatgccaattttaatcggattattctatgcaccaagaagagacgggtggaggatgccattgcatacgtggagtatatcacaagctcgattcactccaaagagactttccactctttgacgattagcttttctcgctgctgggaatttctgctgtggatggatccctcaaattacggcggaatcaaaggtaaggtgtcctcaaggatccactgtgggctccaagactcgcagaaagcaggaggagccgaagacgaacaagagaatgaggacgacgaggaagaacgagacggagaggaggaggaagaagctgaggagagcaacgtggaagatttactggaaaacaactggaatatcttgcagtttcttccacaggccgcctcctgccagaattatttcctgatgatcgtcagtgcctatatcgtggcagtttaccactgtatgaaagacggcctgcgcaggtcggccccaggctcgactcccgtaaggcgccgtggtgctagccagctgtctcaggaggcagaaggggcagttggagcactgccaggaatgataacctttagtcaggattacgtagcgaatgagctgacccaaagctttttcaccattactcagaagatacagaaaaaagtaacaggttccaggaatagcacagaactatccgaaatgtttccagtgcttcctgggagccacctgctcctcaacaacccggctctggagttcattaagtacgtctgcaaagtgctaagcttggataccaacattacgaaccaggttaacaaattaaatcgcgatctgttgcggttagtagatgtgggagagttctctgaggaggcacagtttcgagacccctgcagatcgtatgtcctgccagaagtcatctgccggtcgtgcaacttctgtagggaccttgacctgtgcaaagactccagttttagcgaggatggtgccgtgctgccccagtggctgtgtagtaattgccaggcaccgtacgacagtagcgccattgagatgacattagttgaggtgctgcagaagaaactcatggccttcacactccaggacttagtgtgtctgaaatgtagaggagtgaaagagaccagtatgccagtgtattgttcgtgtgcgggtgacttcgcactaaccatacatacccaggtgttcatggagcaaataggtatattccgtaatatcgctcagcattacggcatgagttatctcctggaaaccctggagtggctcttgcagaaaaatccacagttaggccattag

SEQ ID NO: 200040 - DNA, 3330 bp, synthetic construct
  misc_feature 1..3330: note = Description of Artificial Sequence: Synthetic coding sequence
  source 1..3330: mol_type = other DNA
atgcaccccaccgagatcctggacgaggacaagcggctgggcagcgcggtggattactatttcatccaggacgacggaagccgtttcaaagtggccctgccctacaaaccctacttctacatcgccacgcggaagggatgtgaacgcgaggttagcagttttctgtctaagaagttccagggcaagatagcaaaggtcgaaacagtgcccaaggaagacctggacctaccaaatcatctcgtcggcttaaaacggaactatattcgcctgtcttttcacaccgtggaggatctcgttaaggttcgcaaagaaatctccccagcggttaaaaagaatcgcgaacaggaccatgccagcgacgcctacaccgcacttttatcttccgtcctgcagcgggggggcgtcatcacggatgaggaagagacatcaaagaaaatcgcggaccagttggataacattgtagacatgcgcgagtatgacgtcccctatcatattcgcttaagcatcgacttaaaaattcacgttgcccactggtacaatgtcagatatcggggtaatgcctttcctgtcgaaatcacacggcgcgatgaccttgtagaacgcccagaccccgtcgtcctggcattcgacattgagactaccaaattgcctcttaagtttcctgatgcggaaactgatcagatcatgatgatttcatacatgatagatgggcagggatatctgatcaccaacagggaaattgtatcagaggacatcgaagactttgagtttaccccaaaacccgaatacgaaggcccattttgcgtgtttaacgagccggacgaggcccaccttatccagcggtggttcgaacacgtccaggaaacaaagcctaccattatggtgacttataacggtgactttttcgactggccttttgtcgaggctcgggctgccgtccatgggctgtccatgcagcaggagatcggcttccagaaggacagccaaggagaatataaggctccacagtgcatccacatggattgtctaagatgggttaagcgagactcttacttgcccgtgggatcccataatctgaaagctgccgcgaaggccaaactggggtacgatccagtagaattggaccccgaagatatgtgtagaatggccactgagcagccccagaccctagcgacgtacagtgtgtccgacgccgttgccacatattacttgtacatgaagtacgtgcacccttttattttcgcactgtgcactatcattcccatggaacccgacgaggtccttcgaaaggggagcggcaccctatgtgaggccctcctcatggtgcaggcattccacgcgaatatcatatttccgaataaacaggaacaggagttcaataaattgactgatgacggccacgtcttagattccgagacctacgtgggaggccacgtagaagcactagagagtggcgtgtttcggtcagatatcccctgccggttccgaatgaaccctgcagcattcgacttcttactgcagcgggtggaaaagacattgcgacatgccttagaagaggaagagaaggtccccgtggagcaggtgacaaattttgaggaggtatgtgacgaaattaagagcaagttggcctctctgaaagacgtccccagccgcatagaatgtcccttgatataccaccttgacgtaggcgccatgtatcctaacatcatcctcacaaatagactccagccttccgcgatggtagacgaagctacatgtgctgcttgcgactttaacaaaccgggcgccaactgtcagcgtaagatggcgtggcagtggcgtggagaatttatgccggcctctcgcagtgagtaccacaggattcagcaccaactcgagtccgaaaaatttccgccactcttcccagagggccctgcccgggcctttcacgaattgtccagagaagagcaggcgaagtacgaaaaaagaagactcgctgattactgccgcaaggcctacaagaagattcatatcacaaaggtcgaagaacgtttgacaacaatttgccagcgcgaaaactccttctacgtcgatacagtgcgtgctttcagggacaggagatatgaatttaaagggctacataaggtgtggaaaaagaaactgtcagctgcggttgaagtgggggatgccgccgaggttaaacggtgcaagaacatggaggttctgtacgattccttacagttggcccataagtgcatcttgaactccttctacggctacgttatgaggaaaggcgctagatggtacagcatggagatggcaggcatagtgtgtttcactggggcgaacatcattacacaggctcgcgaactaatcgagcagatcggacgtccactcgagctggatacagatggcatctggtgtgtgcttcccaactcattcccagagaattttgtctttaagactacaaacgtgaaaaaacctaaggttaccatctcttatccaggagcgatgctgaacatcatggtgaaagaggggtttactaacgaccaatatcaggaacttgctgagccaagttcactgacttatgtgactagatctgaaaattcaattttttttgaagtcgacgggccttacttagctatgatattgcccgcttccaaagaagaaggcaaaaagctgaaaaagcgttacgccgtgttcaacgaagacggtagtctggccgagctgaagggcttcgaagtgaaacgacggggagagctgcaactgatcaagatatttcagagctccgtctttgaagcattcctcaagggttcaacccttgaggaggtgtacggctccgtggcaaaagtcgccgactattggttggatgttttatactcgaaagcagccaacatgccggattcagaactgttcgaattgatttctgaaaatagatcaatgtcccgaaaattggaagactacggggagcagaagagcacatctatctctactgccaagcgcttggcagagttccttggcgaccagatggtgaaggatgctggcctgagttgccggtacatcatcagccgcaagcctgaaggatctcccgttactgagcgtgcaatacccttggccatctttcaggcggagccaaccgtccgcaaacattttttgagaaaatggctgaaaagctcatccctgcaggatttcgatattcgggcaatcctcgattgggactattatatcgagcgcctgggcagtgctatccagaaaattattacaataccagccgcactacagcaggtgaaaaacccagtgccccgtgtgaagcaccccgattggctgcacaagaccgctggcgaggaatag

SEQ ID NO: 200041 - DNA, 1491 bp, synthetic construct
  misc_feature 1..1491: note = Description of Artificial Sequence: Synthetic coding sequence
  source 1..1491: mol_type = other DNA
atggagggcatcctgaagagcatggtggtgggctgggtgaaggagattacccaatatcacaacatttacgccgacaatcaggtgatgcacttttaccgctggctcagatctccgtccagtctcctgcacgacccagccctccaccgcacactacacaacatgatgaagaagttgtttctgcagttgattgctgagttcaaaaggcttggatcatctgttatatatgcgaattttaaccggatcatcctctgtactaagaaacgaagggtggaagacgcgatcgcatacgtggaatacatcacaagttcaatacactcaaaagagacattccatagcctgacaattagcttcagccgctgctgggaatttcttttgtggatggacccttcaaactacggcggaatcaagggcaaagtctcctctaggatacactgcggcctccaggattctcagaaggctggaggtgccgaggacgagcaggaaaacgaagacgacgaggaggaaagggatggagaggaggaagaagaagcagaggaatccaacgttgaagatcttctggaaaataattggaacatcctgcaattcctaccacaagccgcctcctgccagaattattttctcatgattgtgagcgcatacattgtggccgtgtatcactgcatgaaggacggcttgagacgatctgcccctgggagtactccagttcgaaggaggggcgcttcccaactttctcaagaggcagagggggcggtcggtgcattacctgggatgattacatttagccaggactacgtcgctaatgaacttacacaatctttcttcacaatcactcaaaagatccagaaaaaagttaccggctcccggaacagcactgagctgtccgaaatgttccccgtgctgccaggctcccatctcctgctcaacaatcctgcattggagtttataaagtatgtgtgcaaggtactctccctcgatacaaatatcaccaatcaggtgaataaactcaaccgcgatctcctacgcctagttgatgtgggggagtttagcgaggaagcacagtttcgagacccgtgcagatcgtacgtactgcccgaggtgatctgccgtagctgtaatttctgtagagatctggatctgtgcaaggattcctccttcagcgaagacggcgcagtgctgccgcaatggctatgcagcaactgccaggcaccgtatgactcttctgccattgaaatgaccctggtcgaagtactgcaaaaaaagcttatggccttcactctacaggacctggtctgcttgaagtgccgaggcgtcaaagagacctccatgccagtatactgtagttgcgctggagattttgccctgaccatacatacacaggtgtttatggaacagatcggtatcttcaggaatattgcccaacattacggcatgagctacctgttggaaaccctggagtggctactgcagaagaacccacagctgggccattag

SEQ ID NO: 200042 - DNA, 6894 bp, synthetic construct
  misc_feature 1..6894: note = Description of Artificial Sequence: Synthetic coding sequence
  source 1..6894: mol_type = other DNA
atgagccggcccctgggcctgaagagcttcccccggcacaagcaggccccattgccccttagcctaacattccacggctgcctgcttctccgaagagacgatggcgcaacaagcagcgtttcggccttaaagaggctggagcgctcgcaatggacagacaaaatggacctgcggttcggcttcgagaggctcaaggagccaggcgagaagaccgggtggctcattaacatgcatcccaccgaaattctggatgaggacaaacgcctaggttccgccgttgattactattttatccaggacgatggtagccgcttcaaagtcgctctgccatacaagccatatttctatattgcaacccgcaagggatgcgaaagagaagtgtctagttttttatcaaagaagtttcagggtaagatcgccaaggttgaaaccgtgcccaaggaagacctcgatctgcccaatcatcttgtaggcctgaaaaggaactacatccgcctctctttccacaccgttgaggatttggtgaaagtaagaaaggagatttccccagccgttaagaaaaatcgtgaacaagatcatgcctccgacgcctacactgctctgcttagctctgtgctccagcggggaggagtgatcactgatgaagaggagacatccaagaagattgcagatcagctggacaacattgtggatatgagagagtacgacgtgccatatcacatccgcctgtcaattgatctaaaaattcacgttgcccattggtacaatgttagataccgaggcaatgcgtttccagtagagattacccggagagatgatctagtggaacgacccgaccctgtggtgttggcattcgacatagaaaccacaaagctcccccttaagtttccggatgcagagaccgatcaaataatgatgatttcttacatgatagatggccaggggtacctcatcacgaacagggaaattgtatccgaggacatcgaagatttcgaatttacccctaaacctgaatacgaagggcctttttgtgtgttcaatgaacccgacgaagcacacttgattcagagatggttcgagcacgtgcaggaaacaaagcccaccatcatggtgacctacaatggtgatttcttcgattggccattcgtcgaagccagggctgccgtgcacggtttaagtatgcagcaagagatcgggttccaaaaagattctcagggcgagtataaggccccacagtgcattcacatggattgcctccgctgggtcaagagggactcttatttgccagtcggtagtcataatctgaaagccgctgccaaggctaaactggggtacgatccagtcgaacttgaccccgaggatatgtgtcggatggcaaccgagcagcctcagaccctggcaacctatagtgtgagtgatgcagttgcgacttactacctgtatatgaaatatgtgcacccttttatcttcgctttgtgtacaatcattcctatggagcccgatgaagtgctgaggaaaggtagtggcaccctctgcgaagcccttctgatggtgcaggccttccacgctaacatcatcttccccaacaaacaggaacaggagtttaataaactgacagatgatggccacgtgctagatagcgagacctatgtaggcggtcacgtcgaagccttggagtcaggcgtattccggtccgacatcccctgccggttccggatgaacccagccgccttcgactttcttctgcagagagtggaaaaaacactccggcatgctctggaagaagaggaaaaggtccctgtggagcaagtgaccaatttcgaagaggtgtgcgatgaaattaagtccaagcttgcgtccttaaaggacgtgccgtccaggatcgaatgccctctgatatatcacctggacgtgggagctatgtatccaaatattattttgactaacagacttcaaccgtcggctatggtcgacgaggcgacatgcgccgcgtgcgactttaacaagcccggggcgaactgccaaaggaagatggcctggcagtggcgaggagaatttatgccggcgagccgctccgagtatcacaggatacagcatcaactagagtccgagaaatttcctcccctatttcccgaaggccccgcacgagccttccacgaactgtccagagaagagcaagctaaatacgaaaagcgcagactggccgattactgcagaaaggcatataaaaaaattcacattacaaaagtggaagaacgcctgaccactatctgtcaacgagagaatagtttttacgtggacacagtgcgagcctttagagatcgtcggtacgagtttaagggcctccacaaggtatggaaaaaaaagctgagcgctgccgtggaggtaggcgacgcagctgaggtgaaacgctgcaaaaatatggaggtgctttatgatagtctgcagcttgcacacaaatgcatcttaaattctttttatggttacgtgatgagaaaaggagctcggtggtattccatggagatggcaggcattgtgtgctttaccggggctaacataattacacaagcccgtgagttgattgaacagattggaaggccactggagctggacaccgatggcatctggtgtgtactgcccaactctttcccagaaaattttgtttttaaaacaaccaacgtcaagaaacccaaggtgacaatctcctaccccggcgcaatgttaaacatcatggtgaaagaagggttcacaaatgaccaatatcaagagctggccgagccctcaagcctgacctacgtcaccaggtccgagaatagtatcttcttcgaagtggatggaccttatctggccatgatcctgccagcctctaaggaggagggcaagaaacttaaaaagagatatgctgtctttaatgaggatgggagcttggcagagctgaagggcttcgaggttaaacgtcgtggagaactgcagctgataaaaatctttcaatcctccgtcttcgaggcatttctcaaaggtagtacactggaggaggtctacggcagtgtggccaaggtggccgactactggctggacgtactttactcaaaagccgctaacatgcctgacagcgaactgtttgaactgatctctgaaaataggtccatgtcccggaaactggaggattacggcgaacagaaaagtacatccatcagcaccgcaaaaagactcgccgagttcttaggcgaccagatggtgaaagatgccggactgagctgtagatacatcatctcccgtaagcctgagggatcacccgttactgaaagagcaatacccttagccatcttccaagcagaacctacagtgaggaagcatttcctgaggaagtggctgaaatcatcttcccttcaggatttcgacattcgtgcaatccttgactgggattattatatcgagcgcctgggttcagccatacaaaagattataactatccctgctgctttacagcaggtcaaaaaccctgttcccagggtaaagcacccagactggctgcataagaagttgctggaaaagaacgatgtttataaacaaaagaaaatttctgagttgttcaccctggagggccgtcgccaggtaactatggccgaggcaagtgaggactcaccccgtccttctgcacccgatatggaggactttggtctggttaagctacctcatcccgctgcccctgtgacggtcaagagaaagcgggtactttgggagagccaggaagagagtcaggatttgaccccaaccgtgccatggcaagagatcctgggtcagcctccggctttaggcacctcacaggaagagtggttggtgtggcttcggttccataaaaagaagtggcagttgcaagcaaggcaacgattagcccggcgcaaacggcagcgattggagtctgctgagggggtgctacgcccgggcgcaattcgcgatgggcctgcaactggactgggcagctttctaaggcgtaccgcacgctctatcctggatctgccatggcagattgtacaaatctctgaaacttcccaggctgggctgttcagattgtgggccctagtgggaagtgacctgcattgcatcagactgtccataccaagagtcttttacgtaaaccagcgggttgccaaagcagaagagggcgcctcctaccggaaagttaacagagtccttccaagaagcaatatggtgtacaacctgtacgagtactccgtgccagaagatatgtaccaggagcacataaacgagatcaacgctgagctctccgcgcccgacattgaaggagtgtatgaaacccaggtgccactgctttttagggcactggtgcatctcggctgcgtttgtgtagttaacaaacagctggtgaggcatctgagtgggtgggaggccgaaacctttgctttggagcatttggagatgcgctcattggcccagttttcttatctggaacctggctccatacgccatatttatctctaccatcacgcgcaggcgcataaagcattattcggaatcttcattccgtcgcagcgaagagcttctgtgtttgtgctcgacacagtgcgctcaaaccagatgccgtcattaggcgcgctatatagcgcggaacacggccttctcctcgagaaagtgggccctgaactgctgcccccaccaaagcacaccttcgaagtacgcgcggagaccgacttgaagactatttgccgggcaatccagagattcttgctggcctataaagaagaacgccggggacctacactgatcgctgtgcagagttcctgggagcttaagcggctggcctctgaaattccagtgcttgaggaattccctctagttcctatttgtgtagctgataagattaactacggggtcctggattggcagaggcacggagctcgccgcatgatccgccactaccttaatctggacacctgcctctcccaagcattcgaaatgagcagatatttccacataccaataggaaatctgcccgaggatatttccacttttgggtccgacctcttttttgcaagacacctccagcggcataatcatctgctgtggctcagccctaccgccagacccgatctgggaggaaaggaagcagatgacaattgtctagttatggagtttgacgaccaggcgacagtggaaataaactcttccgggtgttacagcacagtttgtgtcgagctggatctgcagaatttggctgtcaacacaatattacagtcacaccacgtcaatgatatggaaggcgcagacagtatgggcatctcattcgacgtgatacagcaggccagcctagaggacatgatcactggagggcaggcagcatccgcccccgccagttatgacgagaccgccttgtgctcgaacacattcaggatactgaaatcaatggtagtgggttgggtcaaagaaattacacagtatcataacatttatgcagacaatcaggtgatgcatttttaccggtggctgagatcaccttccagtctgctgcacgatcctgcactacaccggaccctgcacaatatgatgaaaaagctattcttgcaactgattgccgagttcaagcggttggggtcttccgtgatctatgctaattttaacaggattattttgtgcactaagaaaagacgggtggaagacgcaattgcttacgtagaatatataacgtcttcgatacattcaaaggagacattccactctttaacaatcagcttttctcgatgttgggagttcctgctgtggatggatcccagcaactacggcggtattaagggtaaagtgtcatcccggattcactgtggactgcaggactctcaaaaagccggcggggcagaggatgagcaagaaaatgaggatgatgaagaggagcgggacggagaggaagaggaggaagccgaagaaagtaacgtggaagatctgctggagaacaactggaacattctgcagttcctccctcaggctgcctcatgtcagaactattttctaatgattgtgtctgcgtacatcgtggcagtgtaccattgtatgaaagacgggctgcggaggtctgcccccgggagtacccccgttagacggagaggcgcatcccaattgtcccaagaggccgagggtgcagtgggagcgctgcccgggatgatcactttcagccaggattatgtcgccaatgagctgacccagtcatttttcacaatcacacagaagatccaaaagaaggtcactggctcccggaactctactgaactgtctgaaatgttccctgtcctgcctgggagtcacctacttctaaacaacccagcactcgagtttatcaaatatgtgtgcaaagttttgtctctagacactaacattaccaaccaggtcaacaagttgaacagggatcttctgcgtttggttgatgtcggagagttctcggaggaagcccagttcagggatccatgccggagttacgttcttccagaggtgatatgccgctcttgcaacttctgtagagatctggatctctgtaaggattcctcttttagcgaggatggagcagtccttccccagtggctgtgctcaaactgtcaggctccgtatgactctagtgccatagagatgacgttagtggaagtgttacagaagaagctcatggcttttaccctccaagacttagtctgtcttaaatgtagaggggttaaggagacctcgatgcctgtctactgctcttgtgctggcgatttcgctctaaccattcacacgcaggtgtttatggaacagattggcatatttagaaacattgctcagcactacggcatgtcttacctgctggaaacgttagaatggttactccagaaaaaccctcaactaggccactag

SEQ ID NO: 200043 - DNA, 6780 bp, synthetic construct
  misc_feature 1..6780: note = Description of Artificial Sequence: Synthetic coding sequence
  source 1..6780: mol_type = other DNA
atgagcctgcggagcggcggccggcggcgggccgaccccggcgccgatggcgaggcttccagggacgacggcgcaactagcagtgtctcagctttgaagcggctggagcgtagtcagtggactgataaaatggacctccggtttggcttcgagaggctcaaggagccaggcgagaaaacaggctggttgatcaacatgcacccagtggcgctcccttacaagccgtacttctatatcgcaacccgcaagggctgcgagcgggaggtgtccagttttctgtccaagaagttccaaggcaaaattgcgaaggtggagaccgtgcccaaggaggacttggatctgcccaaccacttggttggactgaaacgcaactatattcgattgagttttcatacagtagaggatctcgtgaaagtaagaaaagaaatatccccagctgtaaaaaaaaaccgcgagcaagaccacgcctccgacgcatacacagctctgcttagcagcgtccttcaacgcggcggcgtcatcactgatgaggaagaaactagcaagaaaattgctgaccagctggataacattgtggatatgcgggaatatgatgtaccataccatattagactcagcatcgatcttaagatccacgtggcccactggtacaacgttcggtacagaggaaacgccttccctgttgaaatcacccggcgtgacgacttggtagagagacctgatcccgttgtgctcgccttcgacattgaaacaaccaagctgcctctgaaattcccagatgcggaaaccgatcagataatgatgatcagctatatgatcgatggccagggttacttgatcactaacagagagatagttagtgaggacatcgaagacttcgagtttaccccaaagcctgaatatgagggtcccttttgcgtattcaacgaacctgacgaagctcatctaattcagagatggtttgaacacgtgcaggagaccaaacccactataatggtgacatacaacggcgacttttttgattggccttttgtagaggctcgtgccgctgtgcacggcttatccatgcagcaggagattggcttccagaaagactctcagggcgaatacaaagcgccgcagtgtattcatatggattgtttaaggtgggtgaagcgggatagctaccttccagtaggttcccataacttgaaagcagccgcgaaggccaagttggggtacgatcctgtggagctggaccccgaagatatgtgccgaatggcaactgaacaaccccaaaccctcgccacgtacagcgtctccgacgccgtagcgacgtactacttgtatatgaagtatgtacaccctttcatttttgcgctttgtaccatcattcctatggagccagatgaagtccttcgcaagggttctgggacactgtgtgaagccttgttgatggttcaggcattccacgcgaacattatctttccgaataagcaggaacaggagtttaacaagctcactgacgatggccatgtgctggattcagagacctacgtgggcggccatgtagaggctcttgaatctggcgtctttaggtccgacattccctgtagattcaggatgaaccccgccgcttttgacttcctcctgcagcgcgtggaaaaaacgctgaggcatgcccttgaggaggaggagaaggtgcccgtagaacaagtgactaattttgaagaagtgtgcgacgaaatcaaatcgaaactggcatctctgaaggatgtcccatcgcgaatcgagtgccctctgatatatcacctcgatgtaggtgccatgtacccaaacataatcctgactaacagacttcaacccagcgcaatggtcgacgaggcgacctgcgcggcttgcgattttaacaagccaggagccaattgccaaaggaagatggcctggcaatggcgcggagagttcatgccagcatctcgctccgagtaccacaggattcagcatcagttggaatcggaaaagtttcccccactgttccctgagggccccgcccgtgccttccatgaactgagtagggaggagcaggctaaatatgagaagcgtcgtctggccgactattgccgcaaggcgtacaaaaagatacacataacaaaggtggaagagcgcctgacaacaatctgccagcgggagaatagtttttatgtggacaccgtgagagccttccgcgaccgccgctatgaatttaaaggcctccacaaagtctggaaaaaaaaactgtccgccgctgtggaagtgggcgatgcagcagaggtgaaacggtgtaagaacatggaggtgctgtacgatagcctccagctcgcccataaatgcattttgaattctttttatggctatgtaatgcggaaaggcgctcggtggtacagcatggagatggccggtatcgtgtgcttcaccggggccaacataatcacccaggcacgtgagctgatcgaacaaattggaagaccactggagttggacactgacgggatttggtgtgtgcttcccaattcatttcccgaaaactttgtctttaaaacaacaaatgtaaaaaagcccaaagttacaatttcatacccgggcgccatgctgaatattatggttaaggagggtttcaccaacgaccaatatcaggagctagccgaaccctcgtccttgacttatgttactagatctgagaattctatcttcttcgaggtagacgggccatacttggctatgatcctgccagcatccaaggaggagggtaagaaactaaagaagcggtacgccgtgttcaacgaggatgggagcctcgcggagttgaagggcttcgaggttaagcgaaggggcgaactgcagctgattaagatcttccagtcctctgtcttcgaggcgtttctgaaggggtctacactagaggaggtctatggctccgtcgccaaggtggcagactactggctagacgtcctatatagtaaggcagcaaacatgccggactctgagctattcgaactcattagcgagaatcgatcaatgagcagaaaactcgaagattacggggagcaaaagagtactagcatttcaactgcgaaaagactggccgagttcttgggggaccaaatggtgaaagacgccggtctatcctgccgctacatcatttcccgcaagccagaaggcagccctgttaccgaacgggccatcccactggcaatctttcaggccgagcctaccgtgcgaaagcatttcctcaggaaatggctgaagtctagctccctgcaggatttcgatatccgcgctatcctggactgggattactacatcgagcgcttggggagcgctattcagaagatcataactattcccgctgccctccagcaggtgaaaaaccccgtccccagagtgaaacacccggactggctccacaaaaaactcctggaaaagaatgacgtgtacaaacagaagaagatcagtgaactttttaccttggagggacgccggcaggtcaccatggccgaggcaagcgaagactctccccgcccatccgcaccagacatggaggactttggtctagtgaagttgccgcatcccgccgcacctgttacagtgaagagaaagagagttctgtgggaatctcaagaggaaagccaagacttgacaccaaccgtgccctggcaagagattctcggccagccacctgccctaggaacttcccaggaggagtggcttgtctggctccggttccataagaagaagtggcagttgcaggcacggcagagattagcgagacgcaagaggcagcggcttgagagcgccgaaggagttctccgccccggcgcaattagggatggccccgccaccggcttggggagttttcttcggcgcaccgctaggtctattctcgatctgccgtggcagatagtgcagatctctgagacgagccaagctggcctctttcgcctgtgggcactggtaggtagtgacttgcactgcatcaggctgtcaatcccgagagtgttctatgtgaaccagagagtggctaaggctgaggagggagcctcgtatcgcaaagttaatcgggtgttaccaagaagcaatatggtctacaatctgtatgagtactctgttccagaagacatgtatcaggaacatattaatgaaatcaatgccgagctgagtgcgcctgatatagagggagtttatgaaacccaggtaccattattattccgggcattggttcacttaggctgtgtgtgtgtggttaacaaacagctcgtgcgccacttgagcgggtgggaagcggagacattcgcactggaacacttagagatgcgtagcctagctcagttctcatatcttgagcctggcagcatacggcatatctatctgtatcatcatgcccaggctcacaaggcacttttcggcatcttcattcccagccaacgtagagcctccgtgttcgtcttagataccgtgcggagtaaccagatgccctctcttggcgccctgtacagtgctgagcatggacttctgctggaaaaggttggaccagaactgcttcctcccccaaagcatacattcgaggtgcgggcagagactgatctcaaaaccatctgccgtgccattcagagatttttgcttgcttacaaggaggagcgccgaggccccaccttgattgctgtacagagttcatgggagttgaagcgcctggccagtgagatcccggtgctggaggagtttccactggtgcctatctgcgtggccgacaagatcaattacggcgtactcgattggcagcgtcacggcgcccgaagaatgattaggcattacctaaatctcgatacttgcttaagccaggccttcgagatgtcccgctacttccatattcctatcgggaaccttcccgaagacatctcaactttcggaagcgacctgttcttcgcccgacatttacagagacacaatcacttactttggttgagcccgacagcccgacccgatcttggtgggaaagaggctgatgacaattgtttagtcatggaatttgacgaccaggcgactgtagagataaattccagcgggtgttattcaaccgtgtgcgttgagcttgacctccaaaacctggccgtgaacactatccttcagagtcaccatgtgaacgacatggaaggcgctgattcaatgggaatcagtttcgatgtgatccaacaggctagcttggaagacatgatcaccggaggccaggcagcctcagcgcccgcatcgtatgatgagaccgcattgtgttcaaatacatttagaatactcaagtctatggttgtgggatgggtcaaggagattacccagtaccataatatctatgccgacaatcaggtgatgcacttttaccgctggctcagaagtcccagctccctgcttcatgatcccgcattgcatagaacactccacaatatgatgaagaagttgtttctccaactaatcgctgagttcaaaaggttgggatcaagcgtgatatacgctaactttaaccgcatcatcctttgcaccaaaaagcggcgtgtggaagatgccatagcctatgtggagtatattacttcttccattcattcaaaagagacttttcattcattgacaatcagctttagtaggtgctgggaatttctgctgtggatggacccatcaaattatggcgggatcaaaggcaaagtctcgtcacggattcattgtggactgcaggattcccagaaggcgggtggcgccgaagatgagcaagagaatgaagacgacgaagaggagagggacggcgaagaagaagaagaggctgaggagagcaatgtggaggacctccttgaaaacaactggaacatcctgcagtttttgccccaggctgcttcttgtcagaactactttcttatgatcgttagcgcctacatagttgctgtgtaccattgcatgaaagacgggctcaggaggtcggcacctggatcaaccccagtcaggaggcgcggggccagtcagttgtcccaggaagctgaaggtgccgttggcgctcttcctggtatgatcacattcagccaggactacgttgcgaatgaactcacacagagcttctttaccataacccaaaaaatccagaagaaggtgaccggaagccgtaactcaacagaactttcagaaatgtttcccgtacttcccggaagtcatcttttgctgaacaatcccgccttggaatttatcaagtatgtgtgcaaggtgctgagtctggatacaaacattaccaatcaggtcaataaactcaacagggaccttttaagactggtggatgtgggggagttctccgaagaagcccagttcagggatccttgcaggtcctacgtgctgcccgaggttatttgtaggtcctgcaatttctgtagagaccttgatctgtgcaaggatagtagctttagtgaagatggtgccgtcttgccccagtggctctgttcaaattgccaggccccctacgattcatccgcgatcgagatgacccttgtggaggtcctacagaagaaactgatggcatttacgctgcaggatcttgtctgtctgaagtgtcgcggagttaaggaaacctccatgcccgtttattgcagctgcgccggggattttgccttgactattcacactcaggtgtttatggagcagattggcatattccgcaacatcgctcagcactacggaatgtcgtatctccttgaaacattggagtggctcctgcagaaaaatccacagctggggcattag

SEQ ID NO: 200044 - DNA, 480 bp, synthetic construct
  misc_feature 1..480: note = Description of Artificial Sequence: Synthetic coding sequence
  source 1..480: mol_type = other DNA
atgatcaagttcttcctgatggtgaacaagcagggccagacccggctttctaagtactacgaacacgtagacatcaacaagagaaccctgctggagaccgaggtgattaaatcctgcttatctcgatccaacgaacagtgctcctttatcgagtataaggatttcaaactgatctaccggcagtatgctgccctcttcattgttgtgggtgtaaacgacactgagaatgaaatggccatttacgagttcattcataactttgtggaagtgctggatgagtatttttccagagtgtccgagctggacgtgtccttttttaacactgtattccattctacctggcagatgcattctggaccctaccaggagcccattgatgaactccccaaaatctgttcggccttggagccacagcagacctgtttctcccctgactccagcagcttcaagggggctgccagcaccacaccaatttattag

SEQ ID NO: 200045 - DNA, 1506 bp, synthetic construct
  misc_feature 1..1506: note = Description of Artificial Sequence: Synthetic coding sequence
  source 1..1506: mol_type = other DNA
atggcccccgagcggctgcggagccgggccctgagcgccttcaagctgaggggcttgctgctcagaggcgaagcaatcaaatacctgacagaggcattacagtctatatcagagttagaactggaggacaagctggaaaagattatcaacgccgttgaaaagcagcctctcagctctaatatgattgagaggagtgtggtggaggcggcagtccaagagtgctcccagtctgttgacgaaactatattgctgatgaccaaccaccctgcacctaacctgtttggtactcctagggacaaggccgagatgtttcgtgagagatacacaatcctccaccagagaacgcaccgccatgagcttttcacacctcccgtgatcggtagccatcccgatgaatctggatctaagtttcagctgaagactattgaaacgctgctcggctctaccacaaaaatcggggatgccatagtgctgggaatgattactcagcttaaagagggaaaattctttctagaggaccctacgggaaccgtacagctagacttgagcaaagctcaattccacagcggcctttacaccgaagcatgcttcgtgctggccgagggatggtttgaagatcaggtgttccatgtcaatgcttttggttttcctccaaccgagccttcgtctactacccgcgcttattatggcaacatcaacttcttcggagggcctagtaacacgagcgtcaagaccagcgccaagctgaaacagttagaagaggagaataaagatgccatgtttgtgttcttgagcgacgtctggctcgatcaggttgaagtgctcgaaaaacttagaattatgttcgctggatactctcccgccccgcccacatgctttatcctctgtggcaatttctcctcagctccttacggtaaaaatcaggtgcaggcactcaaggactcgttaaagaccctggcagacataatttgtgaatatccagacatccaccagtcatctagattcgtcttcgtacccgggcctgaggacccgggatttggaagcattttgccacgtccacccctcgctgagagtattactaatgagtttaggcagcgtgtgcctttctccgtatttactacgaatccgtgccgtattcaatattgtacccaggagattactgtatttcgggaagatctggtcaacaagatgtgtcgtaactgtgtcagatttccatcttccaacctggccatacccaatcatttcgtcaagaccattctgagccagggccatctgacaccgttgccgctgtatgtatgtcccgtttactgggcgtacgactacgcgctccgcgtgtaccccgtccctgatctccttgtgatagccgacaagtacgacccttttaccaccactaacacagagtgcctgtgcatcaaccccggcagcttccctagatccggtttctcctttaaagtgttctatcctagcaacaagacggttgaggacagtaagttgcaaggcttttag

SEQ ID NO: 200046 - DNA, 1509 bp, synthetic construct
  misc_feature 1..1509: note = Description of Artificial Sequence: Synthetic coding sequence
  source 1..1509: mol_type = other DNA
atggcccccgagcggctgcggagccgggccctgagcgccttcaagctaagaggcctgctgctccggggcgaggcaatcaagtaccttactgaggcgttacaaagcatcagtgagcttgagctggaagataaactggaaaagatcataaacgcagtcgaaaaacagccgctatccagcaatatgatcgaaaggtcggtggtcgaagccgccgtgcaggaatgctcccagtcagtggatgagacgattgagcacgtcttcaacattattggcgcattcgacattcccaggttcgtctataatagcgaacgcaagaaattcttaccccttcttatgactaatcatcccgcccccaacctctttggaacgccgagggacaaagccgaaatgtttagagagagatacaccatcttgcatcaaaggactcatcgccacgagctctttacacctccggtaattggctcacatcccgatgagtcgggtagcaagttccagttaaaaactattgagacactactcggttcaacaacgaagattggagacgctatagtgctcggcatgataacccaactaaaggagggtaagttttttctagaggatcctaccggtacagtgcagttggacctatcgaaggctcagttccactccgggttatacacagaagcttgctttgtgctggccgagggatggtttgaagaccaggtgtttcatgtgaacgcgttcggattccctccaaccgagccctcatccaccacacgagcctactatggtaatattaactttttcggtgggccctctaacacaagtgtcaagacaagcgcaaagctgaaacaactggaggaggagaataaggatgcaatgttcgtatttctgtcagatgtttggctcgaccaggtggaagtgctggagaagttgcggattatgttcgccggttactcccccgcgcctccaacttgttttatcctatgtggtaatttcagttccgcaccttatgggaagaatcaggtgcaggcacttaaagatagtctcaaaactctggctgacataatttgtgagtaccccgacatccatcagagcagccgattcgttttcgtgccggggcccgaggaccctgggttcggctctattctgccaagaccgcccctagctgagagcatcacaaatgagtttaggcagcgggttcccttttcggtgttcacaacaaatccttgcaggattcaatactgtacacaagagataactgtctttcgtgaggaccttgtcaacaagatgtgccgtaactgcgtgcgattcccctccagtaatcttgccattcctaatcacttcgtcaaaaccattctgtcgcagggacacctgacgcccctcccattgtatgtgtgcccggtgtactgggcttatgattatgctctgcgcgtatatcccgtaccagacctcctggtcattgctgacaagtacgatccttttacgacgaccaacacagagtgcctgtgcataaaccccgtcagaatgtag

SEQ ID NO: 200047 - DNA, 444 bp, synthetic construct
  misc_feature 1..444: note = Description of Artificial Sequence: Synthetic coding sequence
  source 1..444: mol_type = other DNA
atggccgagcggcccgaggacctgaacctgcccaacgccgtgatcacaagaatcatcaaagaagccctccctgacggggtcaacatctctaaggaagctcgtagtgccatctcaagagccgcaagcgtcttcgtgttatacgctacatcatgcgctaacaacttcgccatgaaaggcaaacggaaaactctgaatgcgtctgatgttttgtcggccatggaagagatggagtttcagaggtttgttacaccactgaaggaagccctggaggcctacagaagggagcagaaagggaagaaagaagcatcggagcagaagaagaaagataaagataaaaagactgatagtgaagagcaggacaaatcccgggacgaggataatgatgaggatgaggagagattggaggaggaagaacagaacgaggaggaggaggtggataactag

SEQ ID NO: 200048 - DNA, 444 bp, synthetic construct
  misc_feature 1..444: note = Description of Artificial Sequence: Synthetic coding sequence
  source 1..444: mol_type = other DNA
atggccgagcggcccgaggacctgaacctgcccaacgccgtgatcacgcgcataatcaaggaggctctgcctgacggcgtgaacatctcaaaggaagcacgatctgcgatcagccgtgccgcatctgttttcgttctgtacgctacctcatgcgccaataacttcgccatgaaagggaaacgtaaaaccctcaacgcctccgacgtgctcagtgcaatggaagagatggagttccaacggttcgttaccccactgaaggaggcccttgaggcctaccggcgggaacaaaaaggtaagaaggaggcctctgaacaaaaaaaaaaagacaaggacaaaaagaccgactcagaagaacaagacaagagccgagacgaggataacgacgaggacgaggaacgtctggaagaggaagaacagaacgaagaggaggaggtagacaattag

SEQ ID NO: 200049 - DNA, 1245 bp, synthetic construct
  misc_feature 1..1245: note = Description of Artificial Sequence: Synthetic coding sequence
  source 1..1245: mol_type = other DNA
atggccaccggccaggaccgggtggtggccctggtggacatggactgtttcttcgtccaggtcgagcaacggcagaacccacatctccgcaacaaaccttgcgccgtagtgcaatataagtcctggaaagggggaggtataatagccgtgagttacgaagcaagggcatttggagttacaaggagcatgtgggctgatgatgccaagaagctttgtcccgatctgctgcttgcacaggtgcgcgagtcccgaggaaaggcaaatttgacaaaataccgggaggcctcagtagaggttatggagatcatgtcgcgcttcgctgtgatagaacgagcttctatcgatgaggcttacgttgaccttacatcagccgtacaggagaggttgcagaagttgcagggccagcccatctccgccgacctcctcccatccacatacatcgaaggcctgccgcagggtcctacaacagcagaagaaacagttcaaaaagagggaatgcgcaagcaaggactgtttcagtggcttgatagcctccagatcgataatctgacttcgcctgacttacaactgactgtgggagctgtgattgttgaagagatgagggccgctattgagcgggaaaccggcttccagtgttctgcaggcatctctcataacaaagtactcgcaaagctcgcctgtggacttaataagccaaacagacagacactggtaagtcatgggtctgttccccagctcttttctcagatgcccattaggaaaatcagaagtctgggtggaaagctcggggcctccgtgattgagatcttagggatagagtatatgggcgagcttacccaattcacagagtctcagctgcaatcccactttggtgagaagaatggcagctggttgtatgctatgtgccgtggaatcgaacacgatccagtcaaaccgcggcagctacctaagacaataggatgttccaaaaactttccaggcaaaacagctctcgctaccagagagcaggtgcaatggtggctgttgcagctggcccaagagttagaagagagactcaccaaagatcgtaatgataacgatagggtagccacgcagctggtggtatctatccgggtgcaaggtgataaaaggcttagctctctgcgaagatgctgcgcacttacccggtacgatgcccacaagatgtcacatgatgccttcactgtcattaagaactgtaatacctccggaatccaaacagaatag

SEQ ID NO: 200050 - DNA, 2142 bp, synthetic construct
  misc_feature 1..2142: note = Description of Artificial Sequence: Synthetic coding sequence
  source 1..2142: mol_type = other DNA
atggccaccggccaggaccgggtggtggccctggtggacatggactgcttcttcgtgcaagttgaacagcgtcagaatccccatctgagaaacaagccttgtgcagttgtccagtacaagagctggaaaggtgggggtattatagctgtaagctatgaggcccgggcatttggggtgacacgtagcatgtgggccgatgacgctaaaaagctctgtccggaccttctgctcgcgcaggtcagggaatcccggggtaaggcaaaccttacaaagtatcgagaagcttctgtggaggtcatggagatcatgtccagatttgccgtgatcgaacgggcgtccattgatgaggcctatgtggatctgacttcagctgtccaggaacgcctccagaagctgcaggggcagcccattagcgcagaccttcttccctctacttatatagaagggctcccacaggggcctaccacagcggaagagacagtgcagaaagagggtatgagaaaacagggtttgttccagtggttagattctttgcagatcgataacctgacctccccggatctgcagctgactgtaggggctgtgatagtagaggaaatgcgcgctgcaatagaacgggagacaggttttcagtgttccgccggtatcagccacaataaagttttggcgaagctagcatgcggcctcaacaaaccaaacaggcaaactttagtctcacatggcagcgtcccccaactgttctcgcagatgcccatcaggaaaatccggtctctgggaggcaagttaggagccagcgtgattgaaatccttggtatcgaatatatgggcgaactgacccagttcaccgagtcgcaactgcaatcgcacttcggagaaaagaacggatcctggctgtacgcgatgtgccgaggtatcgagcacgatccagtgaaacctagacagctgcctaagaccatcggctgcagtaaaaacttcccggggaagaccgctcttgccactagagagcaagtgcagtggtggctgctacagctggcacaggagctcgaggagcgactgaccaaagaccggaatgataatgatcgggtggctacccagctcgtggttagtattcgtgtgcaaggcgataaaaggctctcaagtttgcgcagatgttgcgcactcacacgctatgatgctcataagatgtctcatgatgcctttactgttatcaaaaattgcaatacttccggcattcaaactgagtggagtccaccactgaccatgctctttctgtgtgcgaccaagttcagtgcgtccgccccgagctcatctaccgatattacttcattcctaagttcagacccctctagtttgcccaaagtccccgtaacatcctcagaagctaaaacccagggtagcgggcctgccgtgaccgccaccaagaaagctacaactagcctggagtcttttttccaaaaggcagctgagaggcagaaggtgaaggaggctagcctctcctccttgaccgccccaacccaagcacccatgtcaaatagcccatcaaaaccgagtctcccctttcagacctcccagtccactggcaccgagcctttctttaaacagaagtcattgttgctgaagcaaaaacaactaaataactcttcagtgagctcgccccagcagaatccgtggagcaactgcaaagccttgccaaactccctgcctacagagtatccagggtgcgtgcccgtgtgtgaaggggtcagcaaactcgaagagagtagcaaagcaacacccgccgaaatggacctcgcccacaattcccagtccatgcacgcgtcttccgccagcaagagcgttcttgaggtgacgcagaaggctacaccaaacccatctctccttgccgccgaggatcaggtgccctgcgaaaaatgtggcagcctggttcctgtctgggatatgcctgagcatatggattaccactttgccctggaacttcaaaaatcctttctgcagccccatagttctaacccccaggtagtgtccgctgtcagtcatcagggcaagcgtaacccgaagagccccttggcatgtacaaacaaaagaccgaggcccgagggcatgcaaaccctggagtctttttttaaacctcttacccactag

SEQ ID NO: 200051 - DNA, 219 bp, synthetic construct
  misc_feature 1..219: note = Description of Artificial Sequence: Synthetic coding sequence
  source 1..219: mol_type = other DNA
atgtgggccgacgacgccaagaagctgtgccccgacctgctgctggctcaggtccgggaaagccgcggaaaggcaaacctcaccaaatatagggaggcctccgtggaggtgatggagataatgtcaaggttcgcggtaattgagcgagctagcatcgacgaggcatacgtagatcttacatcagctgtccaggagcgcctgcagaaactgcaagggtag

SEQ ID NO: 200052 - DNA, 1956 bp, synthetic construct
  misc_feature 1..1956: note = Description of Artificial Sequence: Synthetic coding sequence
  source 1..1956: mol_type = other DNA
atgtgggccgacgacgccaagaagctgtgccccgacctgctgctggcgcaagtacgtgagtctagagggaaggcaaatctaacaaaatatcgcgaagccagcgtggaagttatggaaattatgagtcgattcgccgtaattgaacgcgccagtattgatgaagcttatgttgacctcactagcgcggtccaggaacggctgcagaaactacaggggcaaccaatatccgccgacctgctgccatcaacgtacatcgagggtctgccgcagggcccaactaccgcagaagagaccgtccaaaaagagggcatgagaaaacaagggctgttccagtggctcgactctctgcagattgataacttgacatcgccagacctgcagctgacagtgggagcggtgatagtggaggagatgcgggccgccattgaacgggagactggcttccagtgcagtgctggcataagtcataataaggtgctcgctaagctggcctgtggcttaaacaagcctaacagacagactctggtgagccatggcagcgtgccccagctctttagtcagatgcctatccggaagattcggagcttggggggtaaattgggggctagcgttatagaaatccttggcatagaatacatgggcgaactgacacagttcacagaatcgcagctgcagtcccacttcggggaaaagaatgggagctggctgtatgcaatgtgtaggggcatagaacacgatccagtgaagccgcggcaactccccaaaaccattggctgctccaagaacttcccagggaagactgccctggctacaagagaacaggttcagtggtggctgctgcaactggcacaagaactggaagagaggcttactaaggatagaaatgataacgacagggttgccactcagttggttgtcagcatcagggtccagggagacaagaggctgtcatctctcaggagatgttgtgctcttaccagatatgacgcacacaagatgtcacacgacgctttcacagtgatcaaaaattgcaacacctccggtatccagactgaatggtccccgcctttgacaatgctcttcctctgcgccactaagtttagcgcctcagcaccgagttctagcactgatatcacctcatttttgtcctccgacccctccagtttgccaaaggtgccagtgacctctagcgaggccaaaacccagggttcgggcccagccgtgactgctaccaagaaggctacaactagcctggagtctttctttcaaaaagctgccgaaaggcagaaggtaaaggaagcgagtctgtccagtctgaccgccccaactcaagccccaatgtccaactcaccatctaaaccttcacttcccttccagaccagccagtccaccggaacagagccctttttcaagcagaaatccttactgctgaaacaaaagcagctgaacaactcttcagtaagcagtccacaacagaatccttggtctaactgtaaagcactccctaactccctgccgaccgagtacccaggctgtgtgccagtctgtgagggggtgtcaaagctggaggaatcctccaaggccacacccgcggaaatggatctagctcataactcacagagcatgcacgctagctctgcgtcaaagtcagtgctggaagtgactcagaaggcaactcctaatccttcactgctggccgcagaggaccaggttccttgcgagaagtgcggctcactggtccctgtctgggacatgccagagcatatggactatcatttcgccttggaactgcaaaagtctttccttcagcctcactcgtcgaacccccaggtggtctccgccgtatcacaccagggtaagcggaacccaaagagtccattggcatgtactaacaaacgacctaggcctgaaggcatgcaaaccctcgaaagtttcttcaaaccattaacccactag

SEQ ID NO: 200053 - DNA, 3720 bp, synthetic construct
  misc_feature 1..3720: note = Description of Artificial Sequence: Synthetic coding sequence
  source 1..3720: mol_type = other DNA
atgagccggctgctgtggcggaaggtggccggcgccaccgtgggccctggccctgtgccagcacctgggagatgggtcagctcatccgtgccagcctccgatccctctgatggtcagcgacgccgtcagcaacagcagcagcagcagcaacaacaacagcaacagccacagcaacctcaggtcctgtcatcagaaggcggccaattgagacataaccctctggatatccagatgctatcccgaggcctgcatgaacaaatcttcgggcagggcggcgaaatgccaggcgaagcagctgtgcgtcggtctgttgagcacttacagaaacatggtctgtggggacagccagcagttccactccctgatgtcgaactgcggctgccaccactttacggggacaacctggaccagcatttccggcttctggcacagaaacagtctctgccttacttggaagctgcgaatctcctgctccaggcgcagctccccccgaagccgccggcctgggcgtgggctgagggatggaccagatacggccctgagggtgaagctgtgccggtggctattcctgaggagagagccctcgtcttcgacgtagaggtttgtctcgccgaaggtacttgtccaaccctcgccgttgctatctcgccgtctgcttggtattcctggtgttcacaacggctggtcgaagagaggtacagttggacatcccagctcagccccgcagatcttatccctctggaggtgcctaccggagcctcctcgcccacccagcgtgactggcaggaacaattggtggtcggccataatgtgtcctttgatagagcacatatacgggagcagtacctcattcaggggagccgaatgagatttctcgataccatgtccatgcacatggcaatttccgggctgtcctccttccagaggtcactctggattgcagcgaaacagggtaagcacaaagtccagcctccaacaaaacaggggcagaagagccagcggaaagcacgccggggccccgctatctctagttgggactggctagacatcagttcagtcaactcactcgccgaagtccatcgtctgtatgtgggcggccccccactggagaaggagccacgcgaattattcgtcaaagggaccatgaaggatattcgggaaaattttcaggacctgatgcaatactgcgcacaggatgtctgggccacacatgaggtctttcagcaacaattgcctctgttcctagaacgatgcccacaccccgtgacattagccggtatgctggagatgggagtgtcatatctcccagtgaaccagaattgggagaggtatcttgctgaggcacagggtacttacgaagaactgcagagggagatgaaaaagtcactgatggatctggccaacgacgcatgtcagctgctcagtggcgaacgatataaggaggatccctggctgtgggacctagagtgggatctacaggagttcaaacaaaaaaaggcaaaaaaagtgaagaaggaacccgccaccgcgagcaagctccctattgagggggccggtgcacctggagacccaatggatcaggaagatctagggccctgctccgaggaagaagaattccagcaggatgtgatggccagggcgtgtctgcaaaaactgaaaggcactacggaactgctgccgaagagacctcaacatttgcccggacaccctggttggtacagaaagttatgcccaaggctcgatgatccagcctggactcccggcccatcgctcctgagtctgcagatgcgggtcactcccaaactgatggctttgacttgggacggattccctctccattattctgagcgacatggctggggatatctggtgcccggacgccgcgataatctggccaagctccctacaggcacgacacttgagtctgccggcgtcgtgtgtccttaccgcgccatcgagtccttgtataggaagcactgcctggagcaggggaagcagcagctgatgcctcaggaagccggactggcggaagaattcctgctcacagacaattccgctatctggcagacagtcgaggagctggactacctggaggtcgaggcagaagccaagatggaaaacttgagagcagctgtgccaggtcaacccctcgccctgacagcacgcggaggacctaaggacactcagccctcatatcaccatggtaacgggccatacaacgacgtggacattcccgggtgctggttcttcaagctgccccataaggatgggaatagttgtaatgttggatccccatttgccaaggatttcttgcctaaaatggaggacggcactttgcaggcgggccctggaggcgcctctggcccgagagccttagaaattaacaagatgatttctttctggcgtaatgcccacaagcgtatttcatctcagatggtcgtgtggttaccgagatcagcccttcctagagccgtgatccggcaccccgactatgatgaggaaggcctctacggggccattctgccacaagtggtgaccgccggcacaattacaaggagagccgtggaaccaacctggttaacagctagtaacgccaggcccgatcgggttggttccgaacttaaggctatggttcaagctccacctggatatactctggtgggggctgacgtggacagccaagagctctggatagcggcggtactgggtgacgcacatttcgctgggatgcatggctgtacggccttcggatggatgacactgcaggggcgtaaatcacgcggcacggatttgcacagtaaaactgcaaccactgtcgggatcagccgcgagcatgctaagatttttaactatgggcgcatctacggcgccgggcagccattcgccgagcggcttttaatgcagtttaaccaccggctcactcagcaggaggcagccgaaaaggcccagcagatgtatgcagccacaaaagggctgaggtggtaccgcctgtctgatgaaggcgagtggttggtgagagagttgaacctccctgttgatcgcacggaaggaggctggatttccctgcaggacctgagaaaggtccagcgcgaaactgcacgcaagagccagtggaagaagtgggaggtcgtggccgagagagcatggaagggagggacagaatctgaaatgtttaacaagctcgagagtatcgctacctctgacattcctcgcacacccgtgctcgggtgttgcatctctcgggctcttgagccctccgctgtccaggaagagttcatgaccagtagagtgaactgggtggtccaatcaagtgcagtggattatctacatctgatgctcgttgcaatgaagtggctgtttgaggagtttgctatcgatgggcgtttttgcataagtatccacgatgaggtccggtacctggtaagggaagaagacaggtatagagcagctctcgcccttcagatcaccaaccttctgacaagatgcatgttcgcgtataagctgggcctaaatgatctgccccagagcgtagcctttttttctgccgttgatatagaccgttgcctcaggaaagaggtaactatggattgcaaaacaccatccaatcctactgggatggaacggagatacggcattccgcaaggggaggccctggatatttatcagattattgaactcactaaaggatctcttgagaaacgttcacagcccggtccatag

SEQ ID NO: 200054 - DNA, 3720 bp, synthetic construct
  misc_feature 1..3720: note = Description of Artificial Sequence: Synthetic coding sequence
  source 1..3720: mol_type = other DNA
atgagccggctgctgtggcggaaggtggccggcgccaccgtgggcccaggtcctgttccagccccaggaagatgggtgtcttccagcgtgcctgcaagtgacccatcagacggtcagaggaggagacagcaacaacaacagcagcagcagcagcagcaacagcaacctcagcagccacaagtgctgagctccgagggcgggcagctgagacacaacccactggatattcaaatgttgagcagggggctgcacgaacagatatttggccagggcggcgaaatgcctggcgaagctgccgtcagacggagtgtagagcacctccagaagcatggactatgggggcagccggccgtcccactgccagacgtggaactgcggctgccacccctgtacggcgacaacctggatcagcacttcagactgctggctcagaaacagtccctgccttatctggaagcggccaacttactgctgcaggcccagctgccaccgaagcctcccgcctgggcctgggctgaggggtggacacgctacgggccagagggcgaggcagtaccggtcgctattcccgaggaacgggcgctcgtgttcgacgtggaagtttgtttggccgaggggacctgccctacgctagcggtggctatctctccctccgcctggtattcctggtgctctcagaggctagtggaggagaggtatagctggacaagtcaactttctccagccgatctgattccactcgaagtgcctacaggagcttcctcaccgactcagcgcgattggcaggaacagctcgtggtgggtcacaacgtttcgtttgaccgcgcccatatacgggaacagtatctgattcaaggctctaggatgcgtttcctcgatacaatgagtatgcatatggcaatttccggtctttcctcctttcagcggtcgctgtggatcgcagctaagcaggggaaacataaagtccagccacctacgaagcagggccaaaaatctcaacggaaagccaggcgcggacctgcaatctcaagctgggattggcttgatatctcctctgtgaactcccttgccgaagtccatagactctacgtgggcggtcccccactggaaaaagaaccacgagagttgttcgttaaggggaccatgaaggatatacgcgaaaactttcaggatctgatgcagtattgcgcccaggatgtgtgggctacccacgaggtctttcagcaacagttgcccctgtttctggagcgctgcccacacccagtcaccctggcgggcatgctggagatgggggtgagctacctgcccgtcaaccaaaattgggaaaggtacctcgcggaggctcaaggaacctacgaagaattacaacgggaaatgaagaaaagcctgatggacctggctaacgacgcgtgccagctgttaagcggagaaagatacaaggaggacccctggctgtgggatttggagtgggacctgcaggagtttaaacagaagaaggccaagaaagttaagaaagaacctgccaccgcctctaagctcccaatcgagggcgccggcgccccaggggatcctatggatcaagaggacctcgggccatgttcagaagaagaggaatttcagcaagatgtaatggctcgcgcctgtctacagaaattgaaaggaaccaccgaactcctgccgaagcgaccgcaacatttgccagggcatcctggttggtacagaaaattatgtcctcggctggacgaccccgcctggacacctggcccaagcctgctgtcactgcaaatgagagtcactcccaagctgatggctctcacttgggatgggtttcctctgcactattcagagcggcatgggtgggggtatcttgtcccagggcgtagagataatctggccaagctgccaacgggcactacgctggagtcagcaggagtcgtttgcccataccgggcaatagagagcctgtatcgtaagcattgtttagagcaaggaaagcagcaacttatgccgcaagaagctgggctcgctgaagaattcctcctgacggataattcagccatctggcagactgtcgaggaacttgattatctggaggtggaggctgaggctaaaatggagaatctgagggccgccgttccgggccagcctctcgcactgaccgcgagagggggccctaaggacacccagccgagttatcaccatggaaacggaccctataacgacgtcgacattcccgggtgttggtttttcaaactaccccacaaagacggtaatagttgtaatgtcggcagcccgtttgccaaagactttctgcccaagatggaagatgggacactgcaggctggtcctgggggggcctctggtccacgcgctttggaaatcaataagatgatttccttttggcgaaatgcccataagaggatctcctcccaaatggtagtctggctgcccagatccgcactcccaagagccgtaatacgccaccccgactatgatgaagaaggcctgtatggtgcaatattgccacaggtggttacggcagggactattacacgaagagccgttgaacctacatggctcaccgcaagcaatgcccggcccgatcgcgttgggtctgaactcaaagctatggttcaagctccacctggatacaccttggtcggcgcggacgtggattcccaagagctgtggatcgcagcagttctcggcgacgcacactttgctggaatgcatggttgcaccgcttttggatggatgaccctacagggacggaaaagccgtggcaccgatttgcactctaagacagctactaccgttggaatttccagggagcacgctaaaatctttaactatggacgcatatatggcgctggccagccattcgcggaacgcttacttatgcagttcaatcatcggttgactcaacaggaggccgcagagaaagctcagcagatgtacgctgcaacgaaaggcctgcgctggtatcggctgtccgacgagggggagtggttggttagggagcttaacttacccgtcgatcggaccgagggcggctggatcagtctgcaggatctgcgtaaggttcagagagagactgccagaaaaagccaatggaaaaaatgggaggtcgtggctgagcgggcctggaagggtggcacagaatctgagatgtttaataagcttgagagtattgctacatcagacattccacggactcccgtgctgggctgttgcattagtcgagccctcgaaccaagtgcggtccaagaagaatttatgacctcgagggttaactgggtggtgcagagcagcgctgtggattacctccatctcatgctggtggccatgaagtggctgttcgaggaattcgctatagacggtagattttgtatcagcatccacgatgaagttcggtacttggtccgagaggaagacaggtatcgagctgctctggccctgcaaataaccaatttattgaccaggtgtatgtttgcgtacaagcttgggctgaatgacttacctcagtccgtcgcattcttttccgctgtcgatatcgaccgatgtctgcgcaaggaagttaccatggattgcaagacgcccagcaacccaacggggatggaaagaagatatggcattccccagggagaagccctggacatctatcagatcatcgagctaactaaaggttctcttgagaaaaggtctcagcctggtccttag

SEQ ID NO: 200055 - DNA, 1458 bp, synthetic construct
  misc_feature 1..1458: note = Description of Artificial Sequence: Synthetic coding sequence
  source 1..1458: mol_type = other DNA
atgcggagccgggtggccgtgcgggcctgccacaaggtgtgccggtgcctgctgtcaggctttggcgggagagttgacgcaggccagcctgagctgctaaccgagcgaagctcccctaagggcggccacgtgaagtcccatgctgagctagagggaaatggcgaacatcctgaggcacccggaagtggagagggaagcgaggctctcctggaaatctgtcagcggcgacatttcctcagtggatcaaaacagcagctgtcaagggactcgctgctcagcgggtgccacccaggctttggtccattgggcgtggagctgcggaaaaatctcgctgctgaatggtggacaagcgtggtcgtattcagggagcaggtgttcccggtagacgcattgcaccataaacccggccctttactgccaggtgactccgccttccggctcgtgagcgctgagactctcagggagatcctgcaggacaaagagctgtcaaaggagcagctggtggcgtttttagaaaacgtgctaaagacatctgggaagctgcgcgaaaacctcttacacggggcattggaacactatgtcaattgtcttgacttggtgaacaagcgtcttccctatggactggcacaaatcggcgtatgctttcatcccgtgttcgataccaaacagataaggaacggggtcaagtccataggagaaaagaccgaagcttcactggtctggtttacccccccacgaacctctaaccagtggctggacttctggctgcggcacagactgcagtggtggagaaagtttgcaatgtcacctagcaatttcagttcaagcgattgccaggatgaggagggccggaagggtaataaactttactacaacttcccctggggaaaagagctaattgagacactctggaacctcggagaccatgagctgctccacatgtacccgggaaacgtgagtaagctgcacggccgtgacggtcgtaagaacgtcgtcccatgcgtccttagcgtgaacggtgaccttgatagaggaatgctcgcctatttgtatgatagctttcagttgacggagaattccttcactcgaaaaaagaacttgcaccgaaaggttctgaagctgcatccttgcttggcacccattaaggttgccctggacgtcgggcgcggccctaccctggagctgagacaagtctgtcagggcctgtttaatgagctgctcgagaatggaattagcgtttggcccggatatctcgaaactatgcagtcttccttagagcaactctacagcaaatatgatgagatgagtatcctgtttacggtgctcgtcacagaaaccacactggagaatggtctgatccatctgagatctagagatacgactatgaaggagatgatgcacatcagcaaacttaaggattttcttatcaaatatatttccagcgccaagaatgtatag

SEQ ID NO: 200056 - DNA, 7773 bp, synthetic construct
  misc_feature 1..7773: note = Description of Artificial Sequence: Synthetic coding sequence
  source 1..7773: mol_type = other DNA
atgaacctgctgcggcggagcggcaagcggcggcggagcgagagcggctctgactctttctccgggtctggtggagattcgtcagcttcccctcagtttctgtctggaagcgtactgagtcccccccctggactggggcgttgcctaaaagctgccgccgccggggagtgtaaaccgaccgttcccgactacgagcgggacaaacttctgttggcgaactggggccttcctaaagcagtcctggagaagtaccacagctttggcgtgaaaaagatgttcgagtggcaggccgagtgcttgttgttgggccaagtgctcgagggcaagaacctggtttattcggcaccaacaagcgccggcaaaacacttgtggccgagttactcattctgaagagagtgctcgaaatgagaaagaaggcacttttcattctcccctttgttagtgtcgcaaaggagaagaaatactatctgcagagcctctttcaagaagttgggattaaagtggacggatacatgggtagtactagcccgtcccggcatttttcctcactcgacattgccgtgtgtaccatcgaacgagctaatggtctcatcaaccgcctgatcgaagaaaacaaaatggatttacttggcatggtggtggtagatgaattacacatgctcggggattctcatcgaggctacctcttggaattgctgctgacaaaaatttgctatattacgcgtaagtcagcttcttgccaagcagacctggcatccagcctgtctaatgcggtacagattgtcggaatgtctgcaacgctgcccaatctggagttggtggcaagttggctgaacgccgaattatatcacactgatttcagaccagtgcccttgcttgaatccgtgaaggttggcaattcaatctatgattcctccatgaaactcgtcagagagtttgagcccatgctgcaggtgaaaggggatgaagatcatgtggtgagcctgtgctacgaaaccatttgcgataaccattcggttcttctgttttgcccatctaaaaagtggtgcgaaaaactggccgatatcattgcacgtgagttctataaccttcaccaccaagcagaaggcctggtaaagccttccgagtgcccccctgtgattttagagcagaaagagctactggaggtcatggatcagctcaggaggctgccatccggcctggattcggtcctacagaaaacggtcccatggggtgtcgccttccaccacgccggcctcacgtttgaggagcgggacatcattgaaggcgctttccggcaagggttgatccgtgtgctcgctgcaactagtacgttgagctcgggggtgaatctcccagctaggagggttattatccgtacaccaatcttcgggggcagaccacttgacattctgacctataaacagatggtaggtagagcaggcaggaaaggcgttgacaccgtcggggagtccattctgatttgtaagaacagcgagaagtccaagggcattgccctgttgcaagggtccctgaaacccgtccgcagttgccttcagcgtcgggaaggggaggaggtcactggctctatgatccgcgcaatcctcgagataatcgttgggggcgtggcttcaactagccaggacatgcatacctacgctgcatgcacttttctggccgcttctatgaaagagggcaagcagggtattcaaaggaatcaagaatctgtccaattgggagccattgaggcgtgcgtcatgtggctgctcgagaacgaattcatccaaagcactgaggccagcgatggtacggaggggaaagtttaccaccccacccacctcggcagcgccacactgtcgagcagtctgtcccctgccgacacccttgacatattcgccgatctccagcgggccatgaaggggtttgtgctagaaaacgatttgcacatcctttacttggtgacgcccatgtttgaggactggaccacaattgactggtatcgttttttttgcctgtgggagaagctgccgacatccatgaagcgcgttgcggaactcgtcggcgttgaagagggcttccttgcgagatgcgtcaagggcaaagttgtcgcccggaccgagcggcagcatcgacagatggccatccacaaacgtttctttacgtctcttgtgctcttagacctgattagcgaggtccctctgagggagattaaccagaagtatggttgtaaccgaggccagatccagtctctgcagcagtcagcagcggtctacgccggaatgatcaccgtgttctccaaccgccttggctggcataacatggagctgctactgtcccagtttcagaaaaggcttacatttgggattcagagagaactgtgtgacctggtgagagtgtccctcctgaacgcccagcgagcccgcgtgctgtatgcgtccgggttccatacagtggccgaccttgcaagagctaatatagtggaggttgaggtgatcctgaaaaatgccgtgccctttaagtcagcccgcaaggcagtcgatgaagaagaggaggctgtggaggagcggagaaatatgaggactatttgggttaccggccggaaaggactgacggagcgagaagcggcagctcttatagtggaggaggcaagaatgattctgcagcaggatctcgttgagatgggcgtgcagtggaacccctgcgctctcctgcatagctcgacgtgctctttaacccactctgagtctgaggtcaaggagcacacgttcattagtcagaccaaatcatcttataaaaaacttaccagtaagaacaagagtaacacaattttttctgatagttacataaaacattcacctaatatcgtccaagacttaaataagtctcgcgagcatacttcctctttcaactgtaactttcagaatgggaaccaagaacatcagacctgctctatcttccgggcacgtaaacgcgcctccctggacatcaacaaggagaaacccggggcctcacagaatgagggcaagacttcagataagaaagtcgtgcagaccttcagccagaagactaaaaaggcccccctcaacttcaactctgagaagatgtctaggtccttccggagctggaagaggcggaaacacctgaaaagatcacgcgactcgtcgccgttaaaagattccggcgcctgccgtatccacctccagggtcagactctgagcaatccatccctctgcgaagatccgttcactctggacgagaaaaaaacagagttcagaaacagcggaccattcgctaagaacgtctccctcagtgggaaggagaaggataacaaaaccagtttcccactccaaatcaaacagaattgctcttggaacataactctcacgaatgataacttcgtcgagcatatcgtcactggaagccagtccaagaacgtgacctgccaggccacatcagtggtgtctgaaaagggacggggcgtggccgtggaggctgagaagattaatgaggtgctgatccagaatggatcaaagaatcagaacgtctacatgaagcaccacgatatccatccaattaatcaatacctgcgcaaacagtcccacgagcagacatccacaatcactaagcaaaagaacattattgaacggcaaatgccttgtgaggctgtctcttcttacatcaatagagattcgaatgtcaccattaattgcgagcgtataaagctcaatacagaagaaaacaagccgtctcactttcaggctcttggggacgacattagtcgcaccgtgatccccagcgaggtgttaccctccgcaggtgctttttctaagtcagagggccagcacgagaattttctgaacataagtcgccttcaggaaaagacaggaacttacactactaacaagacaaaaaataaccatgtttctgacctgggattagtgctgtgcgattttgaagatagtttttacctggacacccagagtgaaaagatcattcagcaaatggcgactgagaatgccaagctgggtgctaaggacaccaatttagccgctggtataatgcaaaaatccctggtccagcagaacagcatgaattcttttcaaaaggagtgtcatataccctttcctgcagaacaacaccctttgggcgcgacaaagattgaccacttggatctgaaaaccgtcggtacaatgaagcagagctctgacagtcatggagtggatatcctaacccccgagtcacccatctttcattcccccattctgctagaggaaaacggtctcttcttgaaaaagaacgaggtcagtgtcacagattcacagcttaattccttcctgcagggctaccaaacccaggaaacggtgaaacccgtgattctcttgatccctcaaaaaaggacgcctaccggagtggaaggagagtgcttgcccgtgcccgaaacaagtctgaacatgagcgacagtcttctgtttgattctttctctgacgactacctcgtgaaagagcagctgcccgatatgcagatgaaagaaccactcccaagtgaagtcacgtccaatcacttcagcgactccctgtgtctccaggaagatcttatcaagaaaagcaacgttaacgagaatcaggacacacatcaacagctgacttgtagcaatgacgaatccatcattttctccgagatggattccgttcagatggtcgaggccctggataatgtagacatcttcccggtgcaggagaaaaaccacaccgttgtcagtcctcgtgctttggagctgagcgatccagtgctggatgaacaccaccagggcgaccaggatggaggggatcaggatgagagggcggaaaaaagtaagctcacggggacaaggcagaatcacagttttatttggtctggtgccagctttgaccttagtccaggccttcagagaattctcgacaaagtgagtagcccactggagaatgaaaaacttaagtctatgaccattaacttttccagcttaaacagaaagaatactgagctaaatgaggagcaggaagtgatatctaatctggaaaccaagcaggtccaagggattagctttagcagcaataacgaggtgaagtcaaagatcgagatgctcgaaaataatgcgaatcacgatgagacctcaagcttactcccgcggaaagaatcaaatattgtggacgacaacggactgattccgccaacccctatcccaacatccgcctctaagctgacctttcctggaatcctcgaaacaccagttaacccatggaaaacaaataacgttctccagcccggcgaatcatacttgtttggttctcccagcgacataaaaaaccacgacctcagtcccggaagtcgaaacggattcaaagataactccccgatcagcgatacatcctttagcttgcagctaagccaggacgggttgcaactcacccctgcctcctcgtcaagtgagagtctaagcatcattgatgtggccagcgaccagaatctcttccagacatttattaaagaatggcgctgcaagaagcggttctctatctcattggcctgtgaaaaaatccgcagccttacctcatcaaaaacggctaccatcggcagccggttcaaacaagcctctagtccacaggaaatccccatccgtgatgacgggttcccaattaaagggtgcgatgacactctcgtggtgggcctggccgtgtgctggggcggtagggacgcttactacttttctctgcagaaagagcagaaacattctgaaatttcagcttcccttgtaccaccaagcctagacccctccttaacactgaaagataggatgtggtacttgcagtcctgcctccggaaggagtcagacaaagagtgcagcgtggtgatatatgatttcatacagagctacaaaatacttctcctgagttgtggaataagcctggaacagtcatatgaagatccaaaagtcgcctgttggcttctggatcctgactcacaggaaccaacgctgcacagcatcgtgacgtctttcctaccgcacgaattgcccctgctcgagggaatggaaacatcccaggggattcagtcactcggactcaatgccggcagcgagcactccgggagatatcgagcatccgtagaatccatactcatctttaacagtatgaaccaactgaactccttgctacaaaaggaaaacttacaagatgtctttagaaaggttgaaatgccctcacagtactgtcttgctttattagaactcaatggaatcgggttcagcacggcagaatgtgagtcacagaaacatatcatgcaggccaaactggacgcaattgaaacccaagcatatcagttggccggccatagcttctctttcacctcttctgacgacattgctgaggtgctctttctagaactcaaactgccccccaacagggagatgaagaaccaggggtctaaaaagaccctggggagcacgaggagagggattgacaacggtaggaagctgaggctggggcgccagttctcaacaagtaaggatgttttaaataagttaaaagcattacatcccctgccgggtctgattctcgagtggcgaagaatcaccaacgccataacaaaagtcgtgttccctctccagcgcgaaaaatgcctgaatccctttctgggaatggagcgcatttatcctgtgtcacagagtcacaccgctacagggcgaatcacattcaccgaacctaatattcagaacgtgcctagggactttgagatcaaaatgcccaccctggtaggcgaatcccctcctagccaagctgtgggcaaagggctcctgccaatgggcaggggaaaatacaaaaagggattttcggttaaccccagatgccaggcgcagatggaggagagggcagctgatcgtgggatgccctttagcatcagcatgaggcacgccttcgtcccattcccaggcggaagtattctggcagccgattattcccaacttgaattgcggatcctagcacacctatcacatgaccgacggcttattcaggtgctcaatacaggcgctgatgttttccgtagcatcgctgctgagtggaagatgatagagcccgagagtgtgggtgatgacctccgacagcaggccaagcagatttgttatggaattatctacggcatgggtgccaagtctcttggagagcagatgggcataaaggagaatgacgcagcctgctatatcgacagttttaagtctcgctacacgggcattaaccaatttatgaccgagacagtgaaaaactgcaaaagggatggcttcgtgcagactatcctgggccgccggaggtatttaccaggaattaaggacaataacccctacagaaaggcccatgccgagcgtcaggccatcaacacaattgtacaagggtctgctgccgatattgtgaaaatcgctacagtcaacatccaaaagcagctggagacattccactcaaccttcaaatcgcatgggcacagggagggcatgctacagtccgaccagacggggttgagtagaaagcgcaagttacaaggaatgttttgccccatccgtggcggcttcttcattttacagctgcacgacgagctgctttatgaggtggctgaggaagatgtggtccaggtggcccagatagttaagaacgaaatggaaagtgccgttaaactgagcgtgaagttgaaggtcaaagttaagatcggcgcttcgtggggggaactcaaggatttcgatgtatag

SEQ ID NO: 200057 - DNA, 8181 bp, synthetic construct
  misc_feature 1..8181: note = Description of Artificial Sequence: Synthetic coding sequence
  source 1..8181: mol_type = other DNA
atgaacggccaccggttcaccttccggacccggagcctgctgcccctgcagaaaggacagcatcggtgtatcacaaagctgctggcacataacgacccttgggggatctttagggcaccctcatccaggcggagctatagcgtcagcggcgtctgccagcccgctattcctaattcttcactgcacatcccccataacgcttgctggctcaaatggaagctgtgtagcgagatcgccctgccttatcaccatattctcggagagcgaaggaagctgtgcagtatccggcggttcgagtttgaagattggagggaagatgtcagaagttgctgtcaggcccgagtccttccgcggggcaggacattgggactttggctagcgctgatcggtcgggaggaatttgccatgaacctgctgaggcgctccggcaaacggcggagaagtgagagcgggtctgactcttttagcggctccggaggggattccagcgcttcacctcaatttttgagcggcagcgtcctctccccaccaccgggtctgggcaggtgccttaaagcggcggctgcaggtgaatgcaagcccaccgtccccgattatgaacgcgataagctactgctcgccaactggggtctgcctaaagctgtgcttgaaaaatatcattctttcggtgttaaaaagatgttcgagtggcaggctgagtgcctgctgctgggccaagttctcgagggaaaaaatttggtctactcggctcctacctccgcagggaagacgctcgtagccgagttacttatcttgaaacgggtgctggagatgcgcaaaaaggctttgttcatcctccccttcgtcagtgtagccaaagagaagaaatattatttgcaaagcttgtttcaggaagtggggataaaggtagatggttatatggggtctacctcaccaagtaggcacttttccagccttgacattgccgtgtgtacaattgagcgggccaacggactcatcaataggctcattgaagagaataagatggatctcctgggcatggtcgttgtagatgagctccatatgctgggagacagtcaccggggatatttactcgagctgttacttaccaagatttgttatattacgaggaagtcagcctcttgccaggccgacctcgcttcttcgttatctaatgctgtacaaatagtgggtatgtctgcgacactaccaaacctggaattagtggcttcatggctgaacgcagagctgtatcacactgatttcaggcccgtgccattgctggaaagcgttaaagtcggcaactctatttacgacagctccatgaaactggtacgcgagttcgagcctatgctacaggtcaagggtgatgaagaccatgttgtatccctctgttacgagacaatctgtgacaaccatagcgtactcctcttctgcccctctaaaaaatggtgcgagaagctggccgatattatcgcccgcgaattctataatctccaccatcaggccgagggcgaagggctcgtgaagccctccgagtgtccaccagttattctagagcagaaggagcttctggaagtgatggatcagcttagaagattgccatcaggccttgattccgtcctgcagaaaactgtgccctggggcgtcgccttccaccacgccggactcacattcgaggaaagagatattattgaaggcgctttccggcagggactcatacgcgtactggccgctacaagtaccctatccagtggggtgaatctgccagcgcgccgcgtgatcatccggactcctatttttggcggcaggccattagacatcctgacctataagcagatggtaggccgggctggcaggaaaggcgtcgacacagtggaaagcatcctgatttgcaaaaatagcgaaaaatccaagggcattgccctattacaggggtcgctgaaaccagtacggtcatgcctgcagcgcagggagggcgaggaagtgacaggaagcatgatccgtgctatcctcgagattatagtgggtggagtggcgtccactagccaggacatgcacacttacgccgcatgcacattccttgcagcttcaatgaaggaaggtaaacaaggtattcagaggaatcaggaatcagtccagctgggtgctatagaggcctgtgtgatgtggttgctggagaacgaattcattcaaagcacggaagcatctgacggcacagaaggtaaagtgtatcaccctactcatctgggcagtgcaacactgtcttcctcccttagtccagcggatacccttgatatctttgcagatttgcagagagccatgaagggtttcgtcctggagaacgatctccatatcctgtatctggtaacccccatgttcgaggactggaccaccattgactggtacagattcttctgtctgtgggagaagttacccacttcaatgaaaagagtcgcggagctggtgggtgtagaggagggcttccttgccagatgtgtcaaaggaaaggttgtggcccgcacagaaagacagcacagacaaatggcaatccacaaaagatttttcactagcctcgtgctgctcgatttgatatcagaggtgcccctcagggagataaaccagaagtatggttgtaatcgcggacagattcagagtctgcagcaatccgccgcggtgtacgccggcatgattaccgtgttttccaataggctgggctggcataacatggaattgctccttagtcagttccaaaaacgcctcaccttcggaattcagagggaactgtgtgacctcgtgcgtgtctctttgctgaacgcgcaacgcgccagggtcttatatgcgagtgggttccatactgtggctgatctggcccgggcaaatattgtggaggtagaagttatactgaaaaacgctgtgccatttaagtcggcacggaaagccgtggatgaggaagaagaagctgtggaggagagacgtaacatgcgaacgatttgggtgaccggacgaaagggcctaactgaacgggaagccgctgccctgattgtggaggaggctagaatgattctgcagcaggaccttgttgagatgggtgtccagtggaatccctgcgcccttctgcacagctccacttgttctctgacccattcagagagtgaggtcaaagagcacacgttcatcagccagaccaaatcatcttataagaaactcaccagcaagaataaaagcaataccattttctctgacagctacattaagcatagcccaaacatcgtgcaggatctaaataaaagtcgggagcacacttcgtcatttaattgtaattttcagaatggcaaccaggagcaccaaacctgtagcatctttcgtgcccgtaaacgggcaagcctagacattaacaaagagaagccaggagcatcacagaatgagggcaagacgtctgacaagaaagtcgtccagactttctctcagaaaacaaagaaagcgcctctgaacttcaatagtgagaagatgtcaagatcttttaggtcgtggaagaggcgtaaacacttgaagaggtcaagagacagctctcctctgaaggacagtggcgcctgccggatccacctgcagggacagacacttagcaaccctagtctgtgtgaggacccttttacactggacgaaaagaagaccgagttccgcaattcgggaccgtttgcaaagaatgtttctttgtctggaaaggagaaagataataagaccagctttccactgcagatcaaacagaattgtagctggaacatcaccctcaccaacgataatttcgtcgaacacattgtcacgggatctcagagcaagaacgtgacctgtcaggccacatcagtggtgtccgagaagggaagaggcgtcgctgtggaagccgaaaagatcaacgaagtgctaatccagaatggttcaaaaaaccagaacgtttatatgaagcaccatgatatccaccctatcaaccagtaccttcgcaagcaatcccacgagcaaaccagcacaataaccaaacagaagaatatcatcgagagacagatgccatgcgaggcggtctcttcatacataaatagggattctaatgtaacaatcaactgcgaacggattaagcttaataccgaggaaaacaagccatcacacttccaagccttgggagacgacatatccagaactgtgattccatcggaagttctgccaagcgcaggcgcgttttcaaagagtgaggggcagcatgagaacttcctcaacatttcccgtttacaggagaaaactggaacatacactacaaacaaaaccaaaaataatcacgtgagtgatcttggtctcgtactgtgtgactttgaggattccttctacctggacacgcagtccgagaagattatacagcaaatggctactgaaaatgccaagctcggagctaaggacactaacttggccgctggaatcatgcagaagagcctggtacagcagaattcaatgaatagttttcagaaggagtgccacatcccattccctgcagaacaacacccgctcggagccacgaaaatcgaccacttggacctcaagaccgttggaaccatgaaacaatcaagtgattcgcatggggtagacatacttacccccgaatctccaatcttccattcaccgatcctgttggaggaaaacggactctttctgaagaagaacgaagtcagcgtcactgattcacagctcaattcgtttctgcaagggtatcaaacccaagagacggtcaagcctgtaatcctactgatccctcagaaaagaacaccaacaggagttgagggggaatgcctgccagtcccggaaacgtccttgaacatgtctgatagtttgctgttcgactccttctctgatgactacttagtcaaagagcagttaccagatatgcagatgaaggagcccctgccaagtgaggtgacctccaatcacttttccgacagtttatgtctacaggaggacctgataaagaagtccaatgtcaacgaaaatcaggatacccaccagcagttaacttgttctaacgacgagtctatcatcttctccgagatggatagtgttcagatggtggaagcccttgataatgtggatatcttccccgtgcaagagaagaaccatactgtcgtctcgccaagggctcttgagctatccgaccccgtccttgatgaacaccaccagggggatcaagacgggggggatcaagacgaaagagctgagaaatctaagctgaccggcacgcgtcagaaccattccttcatctggtccggtgcttcttttgacttgtctcctgggcttcagaggatcctggacaaggtgtcctcccccttagaaaacgaaaagctgaagagtatgaccatcaacttctcctccctcaatcgcaaaaacaccgagctgaacgaagagcaagaagttatctcgaatcttgagacgaagcaggtgcaggggatttcattcagcagtaacaatgaggtaaagagcaagatcgagatgttggagaacaacgccaatcatgacgaaacctccagtctactccctagaaaggaatcaaatatagtggatgataacggactgattccgcctactcctatccctacaagcgccagtaagctcacttttcccggaatactagaaactccggtaaacccttggaagaccaacaatgtgttacagcccggagagtcatatctgtttggaagtccttcagacattaagaaccacgatctgagtcccggaagtcggaacggctttaaagataatagtccgataagcgacacaagtttctcactgcaactatctcaagacggcttacagcttacaccagcatccagctcttccgaaagcctaagtattatcgacgtagcttccgatcagaacctgttccagaccttcatcaaggaatggaggtgcaagaagaggttttctattagcctggcatgcgagaagatcagatcactcacttctagcaagactgcaactatcggtagccggtttaagcaggcgagctctccccaggaaatacccatccgtgacgacggcttcccaatcaaggggtgtgacgacacactggtggtgggactggcagtctgctggggaggaagagacgcctactacttcagtctgcagaaagagcagaaacacagtgagatctccgcatcgctggttcctcccagcctcgacccatctttaaccttgaaggaccgcatgtggtatctacaaagctgtttaagaaaggaatctgacaaggaatgtagcgtcgtaatttacgactttatacaatcctacaaaattctcctgctctcctgtggtatatctctggaacagtcctacgaggatcccaaggttgcttgctggctgctggaccccgactctcaggagcccacgctgcacagcatcgtgacatcttttcttccacatgaactgccactcttagaggggatggagacttcccagggcatacaatcactgggccttaatgccgggtcagagcattccgggaggtatcgagcctcggtggagagcatcctgatcttcaattccatgaatcagctgaactcactcttacagaaagaaaatctccaagatgtgtttcgcaaagtagagatgcccagccagtactgtctcgccctgctcgaacttaacggtatcggcttttcaaccgcggagtgcgagtcccagaagcatatcatgcaggcaaagctggatgctattgagacgcaggcataccagcttgcggggcactctttctctttcacatcctcagatgacattgccgaggtgcttttcctggaattaaaactgcccccgaaccgggaaatgaagaatcagggcagcaagaagacgctgggctcaactcgccgcggtattgacaacggccgcaaattaagactgggccggcagttcagcacctctaaggatgtgctgaacaaactgaaagctttacaccctctgccagggctgattctcgaatggcggcggataacaaatgctatcactaaggtggtatttcctctgcagcgggaaaaatgccttaaccctttcctcggaatggaaagaatatatccagtgagccaatctcacaccgctactggccggattaccttcaccgaacccaacatccagaatgtcccaagggatttcgagattaagatgcctacactggtaggagagtcacccccctcacaggccgtggggaaaggccttctccccatgggcaggggtaaatacaagaaagggttttccgtgaaccctagatgtcaggcccaaatggaggagcgcgccgccgatcgaggaatgcctttctcaattagcatgagacatgcctttgtcccctttcccggtgggagcatattggccgcggattatagccagttagaactgcggatcctcgcacacctcagccatgaccgccgcctcattcaggtactgaacactggggccgacgtcttccgatcaatcgccgctgagtggaaaatgatcgaaccggaaagcgtaggtgatgatctgagacagcaggcaaaacagatatgttacgggattatttatgggatgggggctaagtctctgggagagcagatggggattaaagagaacgacgccgcatgttacatcgactcattcaaatcaaggtataccggcattaaccagttcatgacagaaactgtaaagaattgcaaacgagacggctttgtgcagacaatactcgggagacgaaggtacctgcctggaattaaagacaacaatccgtacaggaaagcacatgccgagcgccaggcgatcaacacaatagtgcaaggctctgccgcagacatagtcaagattgctaccgtgaatatacagaaacagcttgaaacctttcattctacttttaaaagtcacggtcatagggagggcatgctgcagagtgatcagaccgggctgtctaggaaaagaaagctccaggggatgttttgccctatacggggagggtttttcatcctgcagctgcacgatgaactcctgtacgaggttgccgaggaggacgtagtacaggtcgctcagatcgtgaaaaacgaaatggaatccgctgtaaagttatctgtaaagctgaaagtgaaagtcaagataggcgcgtcttggggcgagcttaaggatttcgacgtgtag

SEQ ID NO: 200058 - DNA, 6642 bp, synthetic construct
  misc_feature 1..6642: note = Description of Artificial Sequence: Synthetic coding sequence
  source 1..6642: mol_type = other DNA
atgcccaccagcaacagccagaaggagctgctggaggtgatggaccaacttcgccggttaccctcgggcctggactccgtgctgcagaagaccgtgccatggggggtggctttccatcatgccggtctgaccttcgaggaaagggacatcattgaaggtgcctttcgccagggcttgatcagagtattggccgcgacaagcacactgtcctctggggttaacctgcctgctcggcgggtgattatcagaactcctatcttcggcggcaggccactggacatccttacatataagcagatggtcgggcgcgcgggacgcaagggggtcgatacggtgggcgagagtattttgatatgcaagaattctgagaagtccaaagggatcgccctgctgcaagggagcctgaagcctgtgaggagttgtctgcagaggagagaaggcgaagaggtgaccgggtctatgatccgcgccatactggaaattatcgtgggtggggtggccagtaccagtcaggacatgcacacctacgccgcatgtaccttcctggcggctagcatgaaagagggaaagcaaggcatccaaaggaatcaggaatccgtccaactgggggcgatcgaggcgtgtgttatgtggcttctggagaacgaattcattcagagcacagaggcctctgatggtactgagggaaaagtatatcatccgactcacttgggatccgctacactgtcttcctctctgtctccagctgacacccttgatatctttgcagatctccaacgcgcgatgaaggggtttgttctggaaaacgatctacatatcctttacctggtcacacccatgttcgaggactggactaccatcgactggtatcgatttttctgcctgtgggagaaacttccaacctccatgaagagagttgctgagcttgtaggtgtcgaggagggctttttagccaggtgtgtaaagggcaaggttgtggcccgtacagaaagacaacacaggcagatggctatccacaagcgcttctttacctctctcgtgctgctggacctaatctccgaagtgccactgagggaaataaaccagaagtacgggtgtaatagagggcaaattcagagcctccaacagagcgctgccgtctatgctggaatgataacagttttttccaatcgcctcggatggcacaacatggaactgcttctgtctcagttccagaaaagacttaccttcgggattcagcgggagctctgcgatctcgtcagagtaagtttactgaacgcccaacgtgcccgcgttctgtacgccagcggattccatacagtggccgacttggcgcgcgcgaacattgtggaagtggaggtgattctgaaaaacgctgtgccctttaagagcgcccgaaaggctgtcgacgaggaagaggaagccgtggaggagcgtagaaacatgagaacgatctgggtgaccgggcggaagggtctgaccgagcgggaggcggctgccttgattgttgaagaggctcgcatgattctgcagcaggatctagtggaaatgggggtccaatggaacccttgcgcccttctgcactcatctacctgttcgttaacccattccgagagtgaagtaaaagagcacaccttcatcagtcaaacaaagagcagttacaagaagttaacatctaaaaacaaatctaacactatcttttccgactcttatatcaaacactcaccaaatatagtccaggacttaaacaagtctcgtgaacatacgtcttctttcaactgtaattttcagaacgggaatcaggagcaccagacttgttcaatttttcgagctcgcaaacgggcatccctggacattaataaagagaagcctggagcatcccaaaatgagggaaagactagcgataaaaaagtcgtacagacattctcccagaagaccaaaaaagcccccctgaatttcaactctgagaagatgtcgcgatcatttcggtcatggaaacgacgaaagcacctaaagaggagtcgggactccagcccactgaaagatagcggtgcctgtcgcattcacctgcagggccagaccttaagtaatcctagcctgtgtgaggatccattcaccctcgatgaaaaaaaaacggagtttcgcaacagtgggcctttcgccaaaaatgtcagcctgtcggggaaggagaaggataacaaaaccagtttcccactgcagatcaagcaaaactgttcatggaatattacattgacaaatgacaactttgtagagcatatcgtgacagggtcacagagtaagaacgtaacatgccaagcaactagcgtcgtaagtgagaagggaagaggggtggcggtggaggccgagaagattaatgaagtcttaattcagaacggctccaagaatcaaaatgtttacatgaagcaccatgatatacatccaattaatcagtatctgagaaagcagtcacatgaacaaacctctacaattactaaacaaaagaatatcatcgagcgtcagatgccatgcgaagcagtcagcagctacattaaccgagattctaatgtaacgatcaattgtgagcgcatcaagctcaacactgaggagaataagccttcacactttcaagccttaggcgatgatatctctcgtacggtcatccccagtgaggtgcttcctagcgcaggggcattctcaaagtcggaggggcagcatgagaacttcctgaatataagtcggctgcaggaaaaaaccgggacttacacgactaacaagactaagaacaatcacgtctccgatttaggactcgtgctgtgcgacttcgaggacagcttttatctggatacccagtctgagaagattattcagcagatggctaccgaaaatgctaaactgggagctaaagacacaaatcttgcggccggtataatgcagaaatcactcgttcagcaaaacagcatgaactctttccagaaggagtgtcacataccctttccagccgagcaacacccacttggcgctacaaaaattgatcacctagacctgaaaaccgtgggcaccatgaagcaatcttcagatagtcatggggttgacattctgacacctgagtctcccatcttccatagcccgatcctgctagaagaaaatggtctcttcctgaaaaagaacgaggttagcgtgactgatagccagctcaactctttcttgcagggatatcaaacccaggaaacagtgaaaccagtgatcctcctgatccctcagaaacggaccccaacaggcgtggaaggggaatgtctgcctgtgcctgaaacttcactaaacatgtctgacagtctgctcttcgattcgtttagcgatgattacctggtgaaggaacagctgccagacatgcagatgaaggaacccctcccatcagaggtgaccagcaaccattttagtgactccctgtgtcttcaggaagatctcatcaaaaaatccaacgtcaacgagaaccaagacacccaccagcagctgacgtgcagcaatgacgaaagcattatttttagcgagatggattccgtgcagatggtggaggcgctggataacgttgacattttcccagtacaagagaagaaccatactgtagtgtctcctcgagcgctggaactgtcagaccctgtgttagatgaacatcaccaaggtgatcaggatggcggagatcaggacgagagggcagaaaagtccaagttgactggcactaggcagaaccacagctttatttggagcggcgcttccttcgatttgagcccaggtctgcagcggattctggacaaggtgtcttctcctctcgagaatgagaagttgaaatccatgaccatcaacttttcttccctcaatagaaagaatacagagctgaacgaggaacaggaagtcattagtaacctggagactaagcaagtccaggggatcagctttagcagcaacaacgaagtgaaaagcaagatcgagatgttagagaataacgcaaatcatgacgagacaagcagcttactgcctcgcaaagaaagtaatatcgtagacgataacggtttgatccccccaacccctattccgaccagcgccagtaaactgactttcccagggatcctggagacgcccgtcaacccatggaaaacaaataacgtgctgcagcctggagagagctatctgtttggcagcccgtctgacatcaagaatcacgatctttcacccggcagccggaacgggtttaaagacaacagtcctataagtgacacctctttcagcttgcagttatctcaggatggcctccagctcactcccgcaagtagctcttccgaatccctctccattattgatgtcgccagcgaccagaacctgtttcagacattcatcaaggagtggaggtgcaagaagcggttttccatatctttagcatgcgagaaaattcgctctctcacatcatcaaagacagccacaatcggctcgcgtttcaagcaggccagcagcccacaggaaatccctatcagggatgacggctttccaataaagggatgcgacgacacactcgtggtgggtctggcagtatgctggggtgggcgggacgcctactatttctcgctgcagaaagagcagaaacacagtgaaatcagcgcttccttagttcctccctctctggacccttcactcactctgaaggatcgaatgtggtatctgcagagctgcctacggaaagagtccgacaaagagtgctccgtggttatttacgactttatccagagctacaaaatcctgctgcttagttgcgggatttcactggaacagtcctatgaggatcccaaagttgcttgctggctcctggacccggatagtcaggagccaaccctgcactccatcgtaacttcgttcctgcctcacgaactgccactgctcgagggtatggagactagtcagggaatacagtcactggggcttaatgcggggagcgagcacagcggccgatacagggcttcagtggagtctattctcattttcaacagcatgaaccagcttaacagtctgctgcagaaagagaatctacaggatgtgtttagaaaggtggaaatgccttcgcagtattgcttagcattgttagagctcaatggtatcggtttcagcactgcagagtgcgagagccagaagcatattatgcaggctaagttagacgctatcgaaacacaggcttaccagctggctggacactcctttagctttacgtcgtccgacgatatcgccgaagtcctgttcctggagctcaagctcccacccaatagggagatgaagaatcagggctccaagaaaactctcggttccacccgcagagggattgataacggccgaaaattacggttaggtcgtcagttcagcacttctaaggatgtcctcaataaactgaaggccctccaccccctccccgggcttatcctcgaatggcgcaggattactaatgcaatcacaaaagtggtgttccccttgcagagagagaagtgcctgaatccgttcctgggaatggagagaatctaccccgtcagccaaagccatactgccaccggaaggatcacctttaccgagcccaacatacaaaatgtgccgcgcgacttcgagataaaaatgcctaccctcgttggcgaatctcctccaagccaggccgttggcaagggactgcttcctatgggccgcggtaaatacaagaaggggttttcagtgaaccctcggtgtcaggcacaaatggaagaacgggctgccgacagagggatgccgtttagcatctctatgaggcacgcttttgtgccattcccgggtggtagcattctggccgcggactacagccaactcgagttgcggatactggctcacctctctcacgacaggcggcttattcaggtgctcaacaccggggctgatgtgttcagatcgatcgcagcagagtggaaaatgattgagcctgaatctgtgggcgatgacctgcgccaacaggccaagcagatctgctatggcatcatttatggcatgggcgccaagtcccttggggaacagatgggaattaaggaaaatgacgccgcttgttacattgacagttttaagagtcgatacacaggaattaaccagttcatgactgagaccgtgaagaattgcaaacgagatggtttcgttcagaccatcttgggaagaaggaggtacctgcctggcattaaggacaacaatccataccggaaggctcatgctgaacgacaggccattaatactattgtgcaggggtccgcagcagatatcgtcaagatcgcaaccgtgaacatccaaaagcagctggagacctttcacagcacattcaaaagccatggacatcgggaaggcatgctacagtctgatcagacaggactcagtaggaagagaaaactgcaagggatgttctgtccaattcgtggcggcttctttattctgcagctgcatgacgagctgttgtacgaggtggccgaagaagacgtcgtgcaggtagcccaaatcgtgaagaatgaaatggagagcgcagtgaaactctctgtgaagctcaaggtcaaagtgaaaatcggagcctcgtggggtgaactgaaggattttgacgtgtag

SEQ ID NO: 200059 - DNA, 240 bp, synthetic construct
  misc_feature 1..240: note = Description of Artificial Sequence: Synthetic coding sequence
  source 1..240: mol_type = other DNA
atgggccggaagcggctgatcaccgacagctaccccgtggtgaagcggcgagaaggcccagccgggcactctaaaggcgagttggcacccgagctgggtgaagagccccaacctcgcgacgaagaagaagccgagttggagctgttgaggcagttcgacttggcatggcagtatggaccctgcaccgtgtcaggtattagcatcccttatgaggctccacgaaaaacttcgtgtccatag

SEQ ID NO: 200060 - DNA, 324 bp, synthetic construct
  misc_feature 1..324: note = Description of Artificial Sequence: Synthetic coding sequence
  source 1..324: mol_type = other DNA
atgggccggaagcggctgatcaccgacagctaccccgtggtgaagcgacgggaggggcccgctggacatagtaagggtgagctcgcccccgagctaggggaggagcctcagccacgcgacgaggaggaggctgagctagagctcctcaggcagttcgatctcgcttggcagtacgggccatgcactggcataaccagactacaaagatggtgtcgagcaaaacagatgggccttgaaccacctcccgaagtttggcaggtactgaagacccatccaggcgacccgcgctttcagtgctcattgtggcatctgtatccgctgtag

SEQ ID NO: 200061 - DNA, 105 bp, synthetic construct
  misc_feature 1..105: note = Description of Artificial Sequence: Synthetic coding sequence
  source 1..105: mol_type = other DNA
atgggccggaagcggctgatcaccgacagctaccccgtggtgaagagacgtgaaggcccagccggccactcaaaaggtgagttggccccggagcttgggctgtag

SEQ ID NO: 200062 - DNA, 1266 bp, synthetic construct
  misc_feature 1..1266: note = Description of Artificial Sequence: Synthetic coding sequence
  source 1..1266: mol_type = other DNA
atggccgacatcagcctggacgagctgatccggaagcggggcgccgccgccaagggcagactgaacgccagacccggagtgggtggagtgagatctagagtcgggatccagcaaggactgcttagccagtctacacgcactgcaacgttccagcagcgcttcgatgctaggcaaaagatcgggctttctgacgccagactcaagttgggggttaaagacgccagggagaagttactacagaaagatgcccgttttcggatcaagggcaaagttcaggacgccagggaaatgttaaatagcagaaaacagcaaacgaccgtgccccaaaaaccccgccaagtggccgacgcgcgcgaaaaaattagcctgaagagaagctcgcccgcggcttttataaacccccctatagggaccgtgactccagctctgaaacttacaaaaactattcaggtgcctcagcagaaggccatggcgcccctgcacccccaccctgcgggaatgagaattaacgtagtgaataatcatcaggctaagcagaacctctacgatctggacgaagacgatgacggaatagccagcgtccccactaagcagatgaagttcgccgcatctggcggctttctacatcatatggctggacttagtagctctaagctgagtatgtccaaggctctgccactgaccaaagtcgtgcagaacgatgcttataccgctccggcacttccaagcagtatcaggacgaaagcacttacaaacatgagcaggaccctggtgaacaaagaggagcccccaaaagaactgcccgccgcagaacccgtgctctcccctctagaggggactaagatgacggtcaacaaccttcacccccgggtaacagaggaggacatcgtcgagctgttctgtgtgtgcggagccctcaagagggcaagactggtgcatcccggcgtggccgaagtggtgttcgttaagaaggatgacgcaattaccgcgtacaaaaagtataacaatcgctgcttagacgggcagcccatgaagtgtaacttacatatgaacggcaacgtgatcaccagcgaccaacccatcttactccggttgagcgacagtccatcaatgaagaaggagtcagagctgccaaggcgtgttaactctgcttcctcctctaaccccccagcagaggtggaccccgacactatacttaaagcccttttcaagagctctggtgctagcgtgacaactcagcccaccgagtttaaaattaaactctag

SEQ ID NO: 200063 - DNA, 558 bp, synthetic construct
  misc_feature 1..558: note = Description of Artificial Sequence: Synthetic coding sequence
  source 1..558: mol_type = other DNA
atggccgacatcagcctggacgagctgatccggaagcggggcgccgcagcaaaggggagattgaacgctcgaccgggtgtcgggggtgtccgttcccgggtgggaattcagcagggcttactgtcccagtctaccaggaccgcgacgttccaacagcgcttcgatgctagacagaagatcggtttgtctgacgcgcgtctcaaactgggtgtgaaagatgctcgagaaaagttgcttcagaaagatgcgcgctttcgtatcaagggcaaagtccaggatgctagggaaatgttgaactcccgaaagcagcagaccaccgtgccccagaaacctaggcaggttgctgacgctagggagaagattagcctaaagcgtagctcaccagcagcgttcatcaacccccccatcggcactgttactcctgcgctgaagctcaccaaaaccatccaagttgggcttcgagccgtgccgttgctgtgccttgtgagcggcggggcgtgggtcgggtccaggagccaagcctcttgtcctcttccgagtggctcccggccgcactag

SEQ ID NO: 200064 - DNA, 1179 bp, synthetic construct
  misc_feature 1..1179: note = Description of Artificial Sequence: Synthetic coding sequence
  source 1..1179: mol_type = other DNA
atggccgacatcagcctggacgagctgatccggaagcggggcgccgccgccaaagggcgcctgaacgcccggcctggagtgggcggagtgaggagccgggtcgggatccagcagggactcctgtcgcaaagcacccgtacagcaacttttcagcagcgattcgatgcacggcaaaagattggactgtcagatgccagactcaaacttggcgtgaaggacgccagggagaaattattacagaaagacgcccgatttaggataaaaggtaaggtgcaggatgcccgcgagatgctgaactctcgtaaacagcaaaccaccgttccgcagaaacctaggcaggtcgccgacgcaagagagaagatatctctgaagaggtccagcccagctgctttcattaaccctcctatcgggacagtgactccagccctcaagctgaccaagaccatccagaacctgtatgatctcgacgaagatgatgatggtattgctagcgtgccaactaaacagatgaagttcgccgctagcggtgggttcctgcatcatatggccggtctgtcctccagtaaactgtctatgtccaaggcgctcccgctaacgaaggtggtacaaaacgacgcctataccgcacctgccctgcccagttccatccgcaccaaggctcttaccaatatgagtaggactctggtgaataaggaggagccccccaaagagctccccgctgctgagcccgtactctccccgctcgaaggaacaaagatgaccgtcaataatctgcaccctagagtgactgaagaggatattgtcgaacttttttgcgtatgcggggccctcaaaagggcgcggctcgtccacccaggtgtcgccgaggttgtgtttgtgaaaaaagacgatgccattacggcatacaagaagtacaacaataggtgcctggatggacagcccatgaagtgcaatctgcacatgaatggcaatgttattactagcgatcagcctatcctactacgcttatctgacagcccatcaatgaaaaaagagagtgagctgccccggcgtgtgaacagcgccagcagctccaaccctcctgctgaggtggaccccgacacaatcctcaaggcactgtttaagagttctggggcttcagtgactacccagccgaccgaattcaaaataaagttgtag

SEQ ID NO: 200065 - DNA, 690 bp, synthetic construct
  misc_feature 1..690: note = Description of Artificial Sequence: Synthetic coding sequence
  source 1..690: mol_type = other DNA
atggccgacatcagcctggacgagctgatccggaagcggggcgccgcggcgaaaggccgacttaacgcccgcccaggtgtcgggggggttcgctcccgcgtggggatccaacaaggcctgctttcacaaagcacgagaacagccacgttccagcagcgctttgacgcaagacagaagatcggcttgtctgacgctagacttaaactcggggtcaaagacgcaagagagaagctgcttcaaaaagatgcccgatttcgcattaaaggcaaggtacaggatgctcgggaaatgctgaacagccggaagcaacaaacaaccgtgccccagaagcccagacaggtcgctgacgcccgcgagaaaatcagtctaaaaaggtcatcccctgcggcctttattaatccgcccatcggaaccgttacacccgctctgaagctgaccaagacgattcagaacctgtacgaccttgatgaggatgacgacggaatcgcgtccgtgcccaccaaacagatgaaattcgcagcctcaggcggatttcttcatcacatggcaggtctgagttcttccaaactgtccatgagcaaggccctgcccttaacaaaagtagtccagaatgacgcatataccgccccagccctgccctctagcatcagaacaaaagcccttcctgttctgacctcaccaggcacctag

SEQ ID NO: 200066 - DNA, 561 bp, synthetic construct
  misc_feature 1..561: note = Description of Artificial Sequence: Synthetic coding sequence
  source 1..561: mol_type = other DNA
atggcccccctgcacccccaccccgccggcatgcggatcaacgtggttaacaatcaccaggcgaagcaaaacttatacgatctcgatgaagatgatgatggcattgcttcagttccaactaaacagatgaaatttgccgcaagcggtgggttccttcaccacatggccgggctgtcaagctccaaattgagtatgtcaaaggccctgcccctaaccaaagtagttcagaacgacgcgtataccgcgcccgctttgccaagctctatacgcacaaaggccctgacaaacatgtcgcggacactagttaataaggaggaacctcccaaagagctgccagccgcagagcctgtgctctcccctctagagggaacaaaaatgactgtcaacaacttgcacccccgggtcaccgaagaagatattgttgaactcttctgcgtgtgcggtgcactaaaacgcgcaagactggtccatcctggtgtggccgaggtcgtcttcgttaaaaaggacgatgctatcaccgcttataaaaagtacaataaccgatgtctagatggaggatag

SEQ ID NO: 200067 - DNA, 555 bp, synthetic construct
  misc_feature 1..555: note = Description of Artificial Sequence: Synthetic coding sequence
  source 1..555: mol_type = other DNA
atggccgacatcagcctggacgagctgatccggaagcggggcgccgctgcgaagggcaggttgaatgcaaggccaggagttggaggcgttagatccagggtggggattcagcaggggctgctttcacagagtacaagaacagctacttttcagcagcggtttgatgccaggcaaaaaattgggctctccgacgctcgcctaaagttgggagttaaagatgctagagaaaagcttctgcagaaagatgccagattcagaattaaaggcaaggtgcaggacgcccgggaaatgcttaattctagaaaacagcagacaacggtgccccagaagccccggcaggtggcagatgcaagagaaaagatttctctcaaaagatccagtcctgccgcctttattaacccccccatcggtacagtcaccccggccttgaagctaactaaaacaatccaggtgccttccttcccgtgtccacgacccagcctcagcccaaaatggtttcggatgatgcacactcaactactgctaagcctacctctgttcgagcagaaaccgtag

SEQ ID NO: 200068 - DNA, 354 bp, synthetic construct
  misc_feature 1..354: note = Description of Artificial Sequence: Synthetic coding sequence
  source 1..354: mol_type = other DNA
atggccgccgccgccgccgccggcagcggcaccccccgggaggaggaggggcccgccggggaagccgcggcatctcagccacaggccccgacgtctgttcccggcgccaggctctcgcggttgccactcgcccgggtcaaggccctggtaaaggccgaccctgatgtcactcttgccggtcaggaggccattttcatcctggcaagggccgccgaactcttcgtcgaaaccatcgccaaggatgcctattgctgtgcccagcagggaaagagaaagaccttacagagaagagatttggataatgctatcgaggccgtggatgaatttgcgttcctggaagggaccctcgattag

SEQ ID NO: 200069 - DNA, 1029 bp, synthetic construct
  misc_feature 1..1029: note = Description of Artificial Sequence: Synthetic coding sequence
  source 1..1029: mol_type = other DNA
atggccgccagccaggccgtggaggagatgcggagccgggtggtgctgggagagttcggagtgcgtaacgtgcacacaacggacttcccagggaactactcgggttacgacgacgcttgggaccaagaccgattcgaaaaaaatttcagagtcgacgtggtccatatggacgagaatagcctggagttcgatatggtgggaatcgatgcagctatcgcgaatgcatttaggcgtattctgctggccgaggtgccgacaatggcggtggagaaggtcctggtgtacaacaacacctcgatagtacaggatgagatcttggctcatcggctcggactaatccccatccatgctgacccacgcctgttcgagtacagaaaccagggcgacgaggaagggacagaaatcgacacactccagttccgcctgcaagttaggtgtacccggaatcctcatgccgcaaaggattccagcgacccgaatgagctgtacgttaaccacaaggtttacacccgacatatgacatggatcccactggggaaccaagccgatttgttccccgaggggaccattagacctgtgcacgacgacatccttatagcacagctgcgccctggacaggaaatcgacctgctgatgcactgcgtgaaagggatcgggaaggatcacgccaagttcagtcctgtggcaacagccagttatcggctgttgccagatatcactctgctcgagcctgtggaaggagaggccgcagaggagctgagtaggtgcttctcccccggagtcatcgaggtgcaggaagtgcaaggcaagaaggttgcccgggtggccaaccctcggcttgacacctttagtagggaaatttttaggaacgagaagttaaagaaagtcgtcagactcgcgagggtacgggaccactatatatgtaagaaagacttgctcgccgccgtcgcacatacatgtaatcccagcaccctcggcggtcagggcgaatggattactggatctcgtgagcgtgaccacccaggctag

SEQ ID NO: 200070 - DNA, 633 bp, synthetic construct
  misc_feature 1..633: note = Description of Artificial Sequence: Synthetic coding sequence
  source 1..633: mol_type = other DNA
atggccgtggagaaggtgctggtgtacaacaacaccagcatcgtgcaggatgaaattttggcccaccgcctcggacttatcccaatacacgctgatcccagactgtttgaatatcggaaccaaggtgacgaagaggggaccgagatagacaccctccagttcaggctgcaggtacgatgcacccgcaacccccacgccgcaaaggattctagtgatcctaatgagctctacgtgaaccacaaggtgtacactagacacatgacctggatcccactgggaaatcaggcagatttatttccagagggcacaatacgaccagtccacgatgatatcctgatcgcacagctacgcccaggacaagagattgatcttttaatgcactgtgttaaagggattggtaaaaaggttgccagggtggccaatccccggttggatacattctccagagagatatttcgcaacgaaaaactgaaaaaggtcgttcgtctagcacgggtgcgcgaccattatatcttctctgttgagtccacaggagttctgccccccgatgttctggtgtcggaggcaattaaagtcttaatgggcaaatgccggagatttcttgatgagttggacgctgtccaaatggactag

SEQ ID NO: 200071 - DNA, 1041 bp, synthetic construct
  misc_feature 1..1041: note = Description of Artificial Sequence: Synthetic coding sequence
  source 1..1041: mol_type = other DNA
atggccgccagccaggccgtggaggagatgcggagccgggtggtgctaggcgagtttggagttcgcaatgtgcatacaactgactttccaggtaactactccggctacgacgacgcgtgggaccaggaccgtttcgagaagaactttcgggtcgatgtcgtacatatggacgagaattctctggaatttgatatggtgggcattgacgccgccatcgcgaacgcattcaggcgcatcttattggccgaggtaccaaccatggccgttgagaaagttttggtatacaacaatacatctatcgtgcaggacgagatcctagcacaccgacttggactcattcctattcatgccgatccgcgactgtttgagtacaggaatcagggcgatgaagaaggcaccgagattgataccttacagttccggttgcaggtccgctgtacccgtaatcctcatgctgctaaagattcaagcgatccgaacgagctctacgtgaaccacaaggtttacacccgccatatgacttggattcctctcgggaatcaggccgatcttttcccagagggcaccattagaccagtgcacgatgatattctgattgcccagctgagaccaggtcaggaaattgacctgttaatgcactgcgtgaaagggatcggaaaggaccatgcaaagtttagccctgtagcgacggcaagttaccgattgctccctgatattaccctacttgagcctgtggaaggtgaggcggcagaggagctgagccgttgcttttctcctggcgttattgaagttcaagaagtgcaaggaaagaaggtggcaagagtcgcaaacccacgcctagacaccttttcacgcgaaatctttcgcaacgaaaagctcaagaaggtggtgcgactggctagagttcgggatcattatatctttagcgtcgagtctactggcgtcttacctcctgatgtacttgtgtccgaagctatcaaggtgctgatggggaaatgtaggcgtttcctggacgagctggatgctgtccaaatggactag

SEQ ID NO: 200072 - DNA, 369 bp, synthetic construct
  misc_feature 1..369: note = Description of Artificial Sequence: Synthetic coding sequence
  source 1..369: mol_type = other DNA
atggaggaggaccaggagctggagcggaaggccatcgaggagctgctgaaggaggccaagagagggaaaactcgtgcagaaaccatggggccaatgggttggatgaaatgccccctggctagcacaaataaaaggttcctgatcaacactataaagaataccctccccagccacaaagagcaagaccatgagcagaaagagggcgataaggagccggccaagtcccaagcccagaaggaggagaacccaaagaagcacaggtcgcatccatataaacattctttccgggcccgcggatccgcgtcctattctccgcctagaaagagatcgagccaagacaaatatgaaaagcgctccaacaggcgctag

SEQ ID NO: 200073 - DNA, 402 bp, synthetic construct
  misc_feature 1..402: note = Description of Artificial Sequence: Synthetic coding sequence
  source 1..402: mol_type = other DNA
atggaggaggaccaggagctggagcggaagatcagcggcctgaagacaagcatggcagagggtgagcggaagaccgctctggagatggtacaggctgctggaaccgaccgccattgcgtgacattcgtgttgcatgaagaggaccacacgctgggcaattctctgcgctacatgatcatgaaaaacccagaggtggaattctgcggctataccacaacccatccgtccgaaagcaagatcaaccttcgaattcagactaggggtaccctgccagcggttgaaccttttcagcgcggactgaacgagctcatgaatgtctgccaacacgtgctcgacaaattcgaagcatcgattaaagactacaaagatcaaaaggctagtcggaatgagtctactttctag

SEQ ID NO: 200074 - DNA, 402 bp, synthetic construct
  misc_feature 1..402: note = Description of Artificial Sequence: Synthetic coding sequence
  source 1..402: mol_type = other DNA
atggaggaggaccaggagctggagcggaagatcagcggcctgaagactagcatggcagaaggggaacgcaagaccgcattggaaatggtgcaggcagcaggcaccgataggcactgcgtcacatttgttctgcacgaggaagatcacacactggggaactcattgagatacatgatcatgaagaatcccgaggtcgaattctgtggctacaccacaacccaccccagtgagtccaagatcaacctgaggattcagaccagggggaccctccccgccgtagagcccttccagagaggactaaatgagctcatgaatgtgtgccagcatgtgctcgacaagttcgaagcatccattaaagattataaagatcagaaagcttcccgcaatgagtcaacgttctag

SEQ ID NO: 200075 - DNA, 5913 bp, synthetic construct
  misc_feature 1..5913: note = Description of Artificial Sequence: Synthetic coding sequence
  source 1..5913: mol_type = other DNA
atgcacggcggcggcccccccagcggcgacagcgcctgccccctgcgaacaatcaagcgggtgcagttcggtgtactgtctcccgatgagctaaagaggatgagcgtcacagagggcggcattaagtaccccgaaactaccgagggcgggcggcccaaactcggcggcctcatggacccccggcagggcgtgatcgagaggaccggtagatgccagacctgcgcggggaacatgaccgagtgtcctgggcatttcgggcatatagagttggccaagcctgtgttccatgtcgggttcttagttaaaactatgaaggtcctaagatgtgtgtgctttttttgcagcaaactgctcgtcgacagcaataatcctaaaatcaaagatattctggcgaagtctaagggccaacctaagaaacgcttgacgcatgtgtacgacctttgcaaagggaaaaacatatgcgaaggaggcgaggagatggacaacaagttcggcgtggagcaaccagaaggagatgaagatttgactaaggaaaagggccatggcggctgcgggagataccagccaagaatcagaagatctggacttgaactgtacgcggaatggaaacacgtcaacgaggattctcaagagaagaagatcctcctctcacctgaaagggtgcatgagattttcaaacgcatatccgacgaagagtgctttgtactggggatggaacccagatacgcacgccccgagtggatgattgtgaccgtgctgcctgtaccgcccctgagcgtccggcccgcagtcgtgatgcaaggctctgcccgcaaccaggatgacctgacccacaaattagccgacattgtgaagatcaataaccagctgagacgcaacgagcagaatggagccgccgcacacgtgatcgcagaggatgtgaagctgctgcagttccatgtagccaccatggttgacaacgagttgccaggactgcctagggctatgcagaagtcagggagaccgctcaaaagcctcaagcaaagactgaaagggaaggagggacgggtgagaggaaacctgatgggaaagcgggtcgatttcagcgcaagaactgtgatcaccccagacccaaatctaagcatcgaccaagtgggagtccccagaagcatagcagccaatatgaccttcgccgagatagtaacaccattcaatatcgaccgcctgcaagagctggtgaggaggggaaatagccaatatcccggcgccaagtatatcatacgcgacaacggggataggatagatttacgcttccaccctaaaccctctgacctgcacctgcagacaggatacaaagtggaaaggcatatgtgcgacggcgacatcgtgatttttaacaggcagcctactctgcacaaaatgtctatgatgggacatcgggtgaggattctgccgtggagtacattccgcctgaatctttctgttactactccctataatgccgactttgacggggacgaaatgaatttacacctgccccaatctctggaaactcgtgccgagatccaggaattggccatggtcccccggatgatagttacaccccaaagcaaccggccggtcatgggcattgtgcaggacacattgacagctgtgaggaagttcactaagcgggatgttttcctcgagcgtggcgaggtgatgaaccttttgatgttccttagcacatgggacggaaaagttccacagccagccatcctaaagcccaggccactctggaccggcaaacagatcttcagcttgatcatcccaggacacattaactgcatccgaacacatagcactcatccagacgatgaggactcaggaccctataaacacatatcgcccggggacactaaggtggtggtggagaatggggaactgatcatgggcattctttgtaagaagtcattgggcacttcagccgggtccctagtacacatcagctacttagaaatgggtcacgacattacacgattgttctattcaaatattcagaccgtgatcaacaattggctcctgatcgaaggacacactatcgggattggagactcgatcgctgatagcaagacataccaggacatccaaaatacgattaagaaagcaaagcaggatgtgatcgaggtcattgagaaggcgcataataacgaactggagcccacgcctggaaacaccctgaggcagacatttgagaatcaggtgaaccgcatactgaacgatgcaagggataaaaccgggtcttccgcacaaaagtccctgtcggagtataacaattttaagtccatggttgtgtctggcgctaagggatctaagattaatatctcccaggtgattgctgtggtcgggcagcagaatgtggaaggaaagcgtataccctttggcttcaaacatcgtaccctaccccactttattaaggatgactacggacctgaatcccggggattcgtggaaaactcatatctcgctggactgacccccaccgagtttttctttcacgctatgggtggccgggaaggtttaattgatacagccgttaaaacagccgagactggctacatccagcggaggctgatcaagtcaatggaatctgtcatggtaaaatatgacgcaaccgttaggaattctattaatcaggtggtgcaactgcggtatggagaggacgggctggcgggtgaatcggttgaatttcaaaacctggcaacccttaagccaagcaacaaggcctttgaaaagaaatttcgtttcgactacaccaatgagagggctctgcgacggacgcttcaagaggatttggtaaaagatgtgctgagcaatgcccacatccaaaacgaactggagcgcgagttcgagcgtatgcgcgaagaccgtgaagttctccgcgtcatctttccaacaggcgactctaaggtggtcctgccttgtaatttattgagaatgatctggaatgcccagaagattttccacatcaatccaaggctaccaagtgatctgcatccaattaaagtcgtggagggcgtgaaggagctctccaagaaactcgttatagtgaacggagacgaccccttgagccggcaggcccaggagaatgctaccctgttattcaacattcacctgcgctctactctatgcagtcgcagaatggctgaagaatttaggctatctggcgaagcctttgattggctcctgggcgaaattgaatctaagttcaaccaggcaatcgcacatccaggcgaaatggtgggagctctggccgcacaaagtcttggggagccagcaacccaaatgacgttgaacacattccattacgccggagtctctgccaaaaacgtcaccctgggggtgccccggctgaaagagcttatcaatatcagcaaaaaacctaagacgccatctctcactgttttcctcctggggcagtcagccagagacgccgaaagagctaaggatatactatgtagactggagcacaccactctacgaaaggtgacagcgaatacagctatttactatgatcctaatccacagtccaccgtcgttgccgaagatcaggagtgggtgaatgtttactacgagatgccagattttgatgtcgctaggatctccccttggctcctcagagtggagctggaccggaaacatatgacagatcgcaagttaaccatggaacaaatagccgagaagattaacgccggattcggggatgatctgaattgtatctttaatgatgacaacgctgagaagcttgtactgagaataagaattatgaattccgacgaaaacaaaatgcaggaagaggaggaagtggttgataaaatggatgatgatgtgtttctgcgctgtatcgagtctaacatgctgaccgatatgacgctgcagggtatcgagcaaatttcaaaggtgtatatgcatctcccacagaccgacaacaagaaaaagattatcattacagaggacggcgaattcaaagcactgcaggaatggattctggaaaccgacggcgtcagtctgatgagggtgctctctgagaaggatgtggaccccgtgcgcaccaccagcaacgatatcgtggaaatctttacggttctgggaatcgaggcagtgcgcaaagccttggaaagagagctataccacgtgataagctttgatggctcatacgtaaattaccggcacctagcccttctgtgcgacaccatgacatgtcgaggccacttgatggcaattacccgtcacggcgttaaccggcaggatactgggccccttatgaaatgctcattcgaggagacagtcgacgtcctgatggaggcagctgcccacggcgaatctgatcccatgaagggagttagtgaaaacataatgcttggacagctcgctccagcaggcacgggttgcttcgaccttctgctggatgccgagaaatgcaaatatggaatggagattcctacaaatattcccggtctgggggccgccgggccaactgggatgtttttcgggtctgccccctcacctatgggaggcatctcacccgcgatgactccatggaatcagggggcaacaccggcctacggcgcatggagtccttcagtaggctccgggatgacaccaggcgcagccggcttcagcccatccgctgcctctgacgccagcggattctctcccggttattcgcccgcatggagccctaccccgggctctccgggaagccctgggcctagttctccctatattcccagcccaggaggagcaatgtcaccgtcatactctcccacctcaccagcttacgagccccgcagtccaggcggctacaccccacagagtccgagctattcgcccacatctccaagctattcacctacgtctccatcatactcccccacatcccctaattactctcctacgtccccgagctatagtcccacaagcccttcatatagtccgacctctccatcttactcacccacaagtccatcatactcacctactagcccctcctacagtccaaccagcccctcttatagccctacgagcccctcatacagccccacttctccatcttatagccccacgtccccatcatactcccccacatctccgtcatattcccccacttcaccgtcatatagccctaccagccccagctattccccaaccagccctagctactcgcctacttccccttcttattctccaacttccccatcttactctccaacctcccccaactatagcccaacctctccaaattacacacccacgtcgccctcctactccccaactagcccaagctattcccccaccagtcccaattacaccccaacatcgcctaactacagcccaaccagtcccagctattctccaacctccccgtcctattcacctacctccccaagctattccccatcttctccccgatatactccccagtctcccacctacacacctagctccccttcatactcaccttccagcccgtcatactctccagccagcccaaaatatacacccactagcccaagctatagtcctagcagccctgagtatacccctacaagccccaagtactcacccacgagccccaaatacagccctacctctcccaagtactctccaacatcaccaacatattcacccaccacaccaaagtatagtccaacctccccgacctacagcccgactagtccggtctacacccctacaagccctaagtacagccctactagtccaacttatagccctacttcccctaagtattctccaacgtcgcccacttacagtccgactagtcccaagggatccacatactctccgacctctccagggtactctcctacatcccccacctattctctgacctcccccgccatcagccccgatgactctgacgaggagaactag

SEQ ID NO: 200076 - DNA, 1626 bp, synthetic construct
  misc_feature 1..1626: note = Description of Artificial Sequence: Synthetic coding sequence
  source 1..1626: mol_type = other DNA
atgcccggccggtgccagagcgacgccgccatgcgggtgaacggcccagcgagccgggcgcccgcaggctggacgtccggctcccttcacacaggccccagggccggaagaccaagagcccaggcaagaggggtgcgcggaagaggtctccttctcaggcctagacctgcaaaggaactcccactccctagaaaggggggtgcttgggcccccgccggtaaccctgggcctctgcaccccctcggagtggcagtgggcatggcaggatcggggcgcctggtactgcgaccctggatccgcgagctgattcttggttcagaaaccccaagctccccccgggctggtcagttgctcgaggacgccgaagccgcagtggctgggccctcacatgcacccgacaccagcgatgtgggcgccacacttcttgtatccgatggcacgcacagcgtgagatgtctggtcacccgtgaggccctggacaccagcgattgggaagagaaagagttcggcttccgtggaactgaggggcggctccttctcctgcaggactgtggcgtccacgtacaagtggccgaaggcggagcacccgcagagttctacttgcaggtcgatcgtttcagcctgctacccacagaacaaccaagactgagggttcccgggtgcaaccaggacctggacgtgcagaaaaagctttatgactgcctggaggagcacttaagtgaatctacatcctccaacgcaggcttgagccttagtcaactgctggatgagatgagggaggaccaggagcaccaaggcgctttggtgtgcctggcggagagctgtttgacgcttgaagggccctgcaccgctccaccagtgacacactgggccgctagtcggtgtaaagccactggggaggctgtatacacagttcctagtagtatgttgtgtatctctgaaaacgaccagctgattctcagttccctgggaccttgccagcgaacgcaagggcctgagctccccccccctgacccagcgctgcaggatttaagcctcactctgatcgcatccccaccatcatccccatcttcttctggaactcccgcacttcctggccacatgtcgtcagaagagagtggcacaagcatatccctgcttcccgctctcagtttggctgcgccagaccccggtcagagaagcagctctcagccttcacctgccatatgttctgcccccgccaccctgacacctcgctctcctcatgcctctagaacccccagctcccctctgcagtcctgtactcctagcctgtcacctcgtagccacgtgcccagccctcaccaggccttagtcactaggccccaaaaaccttccctcgaatttaaggagttcgttggcctgccgtgcaaaaaccgcccgcctttcccacggacaggtgccacaagaggggctcaggagccgtgttctgtttgggagcctccaaagcgccaccgagacggttccgctttccagtatgagtacgagcccccttgcacttcgctgtgcgcccgagtgcaggccgtgaggctccctcctcaacttatggcttgggcactccacttcctgatggacgctcaacctggaagtgagcccacacccatgtag

SEQ ID NO: 200077 - DNA, 2040 bp, synthetic construct
  misc_feature 1..2040: note = Description of Artificial Sequence: Synthetic coding sequence
  source 1..2040: mol_type = other DNA
atggaccgggtgacccggtaccccatcctgggcatcccccaggcccacaggggtactggactggtccttgatggggataccagctacacctaccacttggtgtgcatgggcccggaggccagcgggtgggggcaggatgagccgcagacctggcctactgaccacagggcgcaacagggggttcagagacaaggggtcagttatagcgtgcatgcgtacaccggccagcctagccctagaggtctgcacagcgagaatagagaggacgaaggatggcaggtgtataggctaggcgctagagacgcccaccaaggacgacctacatgggccctgcgcccagaggatggtgaggataaggagatgaagacatatcgccttgacgccggtgatgccgacccccgacgactctgtgaccttgaaagggagcgctgggccgttattcagggtcaggcggtgcggaaatccagcaccgtggccacgcttcaggggacaccggaccatggggacccccgtaccccgggaccacctagatcaacacccctggaagagaacgtcgtggatcgcgaacagattgactttcttgcagcgcgacagcagttcctgtccttggaacaggccaataaaggcgcacctcacagctcacctgcacgcggaacgccagcaggtactacacccggtgcatcccaggcccccaaggcctttaataagcctcaccttgccaatggacatgtggtgcctattaagccacaggtgaagggtgtagtgcgggaggaaaacaaggtaagggctgtaccaacttgggccagtgtgcaggttgttgacgacccaggatctttggcctcagtagagtctcctgggacgccaaaggagaccccaatcgaacgggagattcgactggcccaggaaagggaggcagatctgcgggagcagaggggcctgcgccaggccaccgaccaccaggaattggtcgagattccaacaaggcctttgctgaccaaactaagtctgatcacagccccaagacgggagcgcggcaggccatcactttatgtgcagagagatattgtgcaggagacgcagcgcgaagaagaccatcggcgtgaaggactacatgtggggcgggccagcacccccgactgggtttccgagggtccacagccaggcctcagacgagcactctcatcggatagtatactttcccccgcaccagatgcccgtgctgccgaccctgctcctgaagtccgaaaagtgaacaggatccctcctgacgcctaccagccatacctgagcccgggtacgccacaactggaattcagcgcttttggtgctttcggtaaaccaagctcgctcagtactgcagaagcaaaggccgctacatctcccaaggccactatgtcccccaggcatcttagcgaatctagcggaaaaccactctcaacaaaacaggaagcaagcaagcccccccgaggatgcccacaagcaaataggggcgttgtcaggtgggaatattttagactgaggccacttcgtttccgagctcccgacgagccacagcaagctcaggtgccacacgtgtggggatgggaagtggctggtgcccccgccctgcgtttgcaaaaatctcagagctcagacctgctggaaagggaacgggagagcgtgttacgtcgagagcaggaagtggcggaagagagacgaaacgccttgttcccggaggtgttcagccctactcccgacgaaaattccgatcaaaattcacgatcttcatctcaggcaagtggtattaccggaagttattctgtcagtgagtcgccgttctttagcccgatccacctgcactcaaatgtcgcttggaccgtggaggaccccgttgatagcgccccaccagggcagcggaagaaggagcagtggtacgccggaatcaacccttccgacggtattaacagcgaagttctggaggcaattagggtgaccaggcacaaaaacgccatggcggagagatgggagagccgcatatatgccagcgaagaggacgactag

SEQ ID NO: 200078 - DNA, 381 bp, synthetic construct
  misc_feature 1..381: note = Description of Artificial Sequence: Synthetic coding sequence
  source 1..381: mol_type = other DNA
atgagcgacaacgaggacaacttcgacggcgacgacttcgacgacgtggaagaggacgaagggctggatgatttggagaacgcagaagaggaaggccaggaaaatgtggaaattcttccttcaggcgagaggcctcaagccaaccaaaagcgcattacgacgccatatatgactaaatacgagcgagccagagtgctgggcaccagagccctgcagattgcgatgtgcgcacctgtgatggtcgagctcgagggagaaacggacccgctgctgattgccatgaaagaactgaaactcttgtgggggctcgagtatacagttctccggccttcctatgctcttgctcattcgctcggctccttctccatctccagccgctag

SEQ ID NO: 200079 - DNA, 477 bp, synthetic construct
  misc_feature 1..477: note = Description of Artificial Sequence: Synthetic coding sequence
  source 1..477: mol_type = other DNA
atgagcgacaacgaggacaacttcgacggcgacgacttcgacgacgttgaggaagatgagggcctggatgatttagagaatgcagaagaagaaggacaggagaacgtggaaatcttgcctagtggagaacgacctcaggctaatcaaaagcgtatcactacaccctatatgacgaagtatgagagagctagagtgcttggcacacgcgccctccaaatagccatgtgcgcacctgtcatggtcgagttagagggcgagacggacccgctgcttattgccatgaaggagctgaacgcacgctctgcctccgaaccccctggcgaagagccgccatggatggacagaggtacacgagatgagcacctgcccagctgtcccggttgtcctgccgtggcttccaacacccgatgttgtcccccagccgcctgtcttccgggtatctcgctgtccaggcgccgccgcctacgagaagagtag

SEQ ID NO: 200080 - DNA, 384 bp, synthetic construct
  misc_feature 1..384: note = Description of Artificial Sequence: Synthetic coding sequence
  source 1..384: mol_type = other DNA
atgagcgacaacgaggacaacttcgacggcgacgacttcgacgacgtcgaagaggatgaaggcctggatgatcttgagaacgctgaggaagagggacaagagaacgtcgagattttaccctctggggagcgccctcaggccaatcagaagagaatcaccaccccttacatgacaaagtatgagcgcgctcgcgtgttaggtacccgggctctacagatcgcaatgtgtgcccctgtgatggtcgagcttgaaggggaaacagatccactgttaattgcaatgaaagaattgaaggcgcggaagatacccatcattattcgccggtacctgcccgacggatcctacgaggactggggtgttgatgagttgatcattacagattag

SEQ ID NO: 200081 - DNA, 519 bp, synthetic construct
  misc_feature 1..519: note = Description of Artificial Sequence: Synthetic coding sequence
  source 1..519: mol_type = other DNA
atgttctaccacatcagcctggagcacgagatcctgctgcacccccggtacttcggacctaatctgttaaatacggttaagcaaaaactcttcaccgaagtcgaaggaacttgcactggaaaatacggtttcgtcattgccgtcacaaccattgacaatataggcgccggggtgatccagccaggacggggcttcgtgctgtatcccgttaagtacaaggccatcgtttttcggccctttaaaggtgaagtggttgatgctgtggtgactcaggttaataaagtggggctcttcaccgaaattggtcctatgagctgcttcatctcgcggcactctataccaagcgagatggagttcgacccaaattctaacccgccctgttacaagaccatggatgaggacattgtgatccaacaggacgatgaaattcggttgaaaatcgttggaacacgtgtggataagaacgatatcttcgccatcggctcgcttatggacgactacctaggtcttgtgtcctag

SEQ ID NO: 200082 - DNA, 453 bp, synthetic construct
  misc_feature 1..453: note = Description of Artificial Sequence: Synthetic coding sequence
  source 1..453: mol_type = other DNA
atggccggcatcctgttcgaggacatcttcgacgtgaaggacatcgaccctgagggaaaaaagttcgaccgggtgtcccgcctacactgcgagtctgagagtttcaagatggatctcatactcgacgtcaacatacagatctaccccgtcgatctgggcgataagtttaggctggtgattgcctccacactttacgaagacgggaccttggatgatggggagtataatccaacagatgatagaccatctcgagccgaccagtttgaatacgtgatgtacggcaaggtgtacaggatcgagggggacgaaacatctaccgaggccgcaacaaggttatctgcctacgtttcttatggcggcttgttaatgcggctccagggagacgccaacaatctgcatgggttcgaggtggacagccgagtttacctgttgatgaagaagctcgctttctag

SEQ ID NO: 200083 - DNA, 39 bp, synthetic construct; identical to SEQ ID NO: 93889
  misc_feature 1..39: note = Description of Artificial Sequence: Synthetic coding sequence
  source 1..39: mol_type = other DNA

SEQ ID NO: 200084 - DNA, 450 bp, synthetic construct
  misc_feature 1..450: note = Description of Artificial Sequence: Synthetic coding sequence
  source 1..450: mol_type = other DNA
atggccggcatcctgttcgaggacatcttcgacgtgaaggacatcgaccccgaagggaagaagtttgaccgggtcagccgtctgcattgtgaatctgagagtttcaagatggaccttattcttgacgtgaatatacagatctatcccgtcgatttaggcgataaattcagacttgtgatcgccagtactctgtacgaggacggcaccctggatgatggagaatataatccaaccgatgaccggccaagtagggccgaccagtttgagtatgtgatgtatggcaaggtttaccggatcgagggcgacgagacctccaccgaggcagctacccgactgagtgcatacgtgagctatggcggcctgctaatgaggctgcagggcgatgcgaacaaccttcacgggtttgaggtcgacagtagggtttatcttctgatgaagaaactggcgtag

SEQ ID NO: 200085 - DNA, 453 bp, synthetic construct
  misc_feature 1..453: note = Description of Artificial Sequence: Synthetic coding sequence
  source 1..453: mol_type = other DNA
atggccggcatcctgttcgaggacatcttcgacgtgaaggacatcgatcccgaaggtaagaagtttgaccgtgtctccaggctgcattgtgagagcgagtccttcaagatggacctgattctggatgtgaacatacaaatctacccagtagaccttggtgacaagtttaggcttgtcatcgcgagtaccctctacgaggatggcacattggatgatggcgaatataatcccaccgacgacaggccaagcagagccgatcaatttgagtacgtcatgtacgggaaagtctaccgcattgaaggggatgagacatctactgaagccgcaactcggttgtccgcctatgtctcttacggcggactgctgatgaggttacagggtgacgcaaacaatcttcatggtttcgaagtcgattcaagagtgtatttgcttatgaagaagctggcattctag

SEQ ID NO: 200086 - DNA, 1491 bp, synthetic construct
  misc_feature 1..1491: note = Description of Artificial Sequence: Synthetic coding sequence
  source 1..1491: mol_type = other DNA
atggaggagcagcgggaggccctgcggaagatcatcaagaccctggcagtcaagaacgaagagatccagtcctttatctacagtctaaagcagatgctgttaaacgtcgaggcaaattcggcaaaggtgcaagaagacctggaggctgaatttcaaagcttattctcgcttctggaagaattgaaagaaggtatgctgatgaagatcaaacaggatagggcctccaggacctatgagctgcaaaaccagcttgctgcttgtacccgagccctcgagagctctgaggaactgctggagacggctaatcaaaccctgcaagcaatggatagtgaggacttcccccaggccgccaagcagatcaaggatggggtgactatggcccctgccttcagacttagcctgaaggctaaagtctccgataacatgtcgcacctcatggtggattttgcacaggaacgccagatgctccaagcactgaagttcctgccagtgccctctgcacccgtgatcgacttagcagaatcactcgtggccgataactgcgtgacgcttgtctggcgaatgcctgacgaggactccaagatcgaccattatgttctggagtaccggcggacaaatttcgagggacctcctcgcctcaaggaggaccagccttggatggtgatcgagggcattcggcagaccgaatacaccctgactgggctcaagttcgacatgaaatacatgaacttcagagtgaaggcctgtaataaagccgtggcaggggaattttcagagcctgttactcttgagacaccagccttcatgttcagactggacgccagcactagccaccagaatttaagagtggacgatcttagcgtggaatgggacgcaatgggcggaaaagtccaggatatcaaggcaagggagaaagatggaaagggtcgcaccgctagcccgattaacagcccggcccgaggcacacccagccccaaacgcatgccgtctgggcgcggaggccgcgatagattcacagcagaaagctataccgtcctgggagatacacttatcgatggaggtgaacactactgggaagtccggtacgagcccgatagtaaagctttcggggtgggcgtagcataccgaagccttggaaggttcgagcaactcgggaagaccgctgccagctggtgcttacacgtgaataactggctacaggtgagtttcaccgctaaacatgccaacaaggtcaaggtgctcgatgcacctgtgcccgattgcctcggagtccattgtgatttccatcagggcttgttgtccttctataatgccagaacaaagcaagtgttacatacattcaaaacacgcttcacccagccgctcttaccagcattcacagtgtggtgcggatcattccaagtcacaacaggcctgcaagtgccatctgccgttagatgtctccaaaagcgtgggtcggccacctcaagctccaatacttctctgacatag

SEQ ID NO: 200087 - DNA, 354 bp, synthetic construct
  misc_feature 1..354: note = Description of Artificial Sequence: Synthetic coding sequence
  source 1..354: mol_type = other DNA
atgaacgccccccccgccttcgagagcttcctgctgttcgagggcgaaaagaagatcactattaataaggatactaaggtcccaaacgcctgcctgtttaccattaacaaggaagaccacacactgggaaacataattaagtcccagctgctgaaggacccacaggtcctgttcgccggatacaaggtaccccatccgctggagcataagattatcatcagggtgcagacaactcccgactacagccctcaggaggcttttacaaatgccatcaccgatctgatttcggagctgtcattactggaggaacggttccgcgtagcgattaaggataaacaggagggcatagaatag

SEQ ID NO: 200088 - DNA, 384 bp, synthetic construct
  misc_feature 1..384: note = Description of Artificial Sequence: Synthetic coding sequence
  source 1..384: mol_type = other DNA
atgaacgccccccccgccttcgagagcttcctgctgttcgagggcgaaaaaaaaatcaccattaacaaggatacaaaggtgccaaatgcatgtctcttcacaattaacaaagaggatcataccttgggcaacatcatcaagtcgcagcttctgaaagatcctcaagtgctttttgccggctacaaggtgccacatcccttggagcacaagattatcatcagagttcagactacccccgactattcaccacaggaggccttcaccaacgccatcaccgacctgatctctgaactgtcgctcctagaggagaggttcagggttcgcgccggccctgggggcgccgacggagtggcgatcaaagacaaacaggagggcatcgagtag

SEQ ID NO: 200089 - DNA, 351 bp, synthetic construct
  misc_feature 1..351: note = Description of Artificial Sequence: Synthetic coding sequence
  source 1..351: mol_type = other DNA
atgaacgccccccccgccttcgagagcttcctgctgttcgagggcgagaagattacaatcaacaaggacacaaaggtccccaaagcatgcctctttactatcaacaaggaggaccacacactcggaaatataattaagagccgagcttgctttccgtttgcattctgtagggactgtcagttcccagaagcaagtccggctaccctacccgtgcagccagccgagctttgcccaagagctcaccagttatgcgcccccgctcttaagaggcatctcggcggggaagcccaccccgtgcatcttcacgccggggccgcctcacggccagtgcaacagccacaacatctgtag

SEQ ID NO: 200090 - DNA, 348 bp, synthetic construct
  misc_feature 1..348: note = Description of Artificial Sequence: Synthetic coding sequence
  source 1..348: mol_type = other DNA
atgaacgccccccccgccttcgagagcttcctgctgttcgagggcgagaagatcacaattaataaagacactaaagtgccgaaagcctgcctttttaccatcaacaaggaggaccacacactgggcaacatcatcaaatctcagttactaaaggaccctcaagttctgttcgctgggtataaggtcccccatcccttagagcacaaaattattatacgtgtccaaacaaccccagattatagccctcaggaggcttttacaaacgccatcacagacttgatctcggagcttagcctcttggaagaacggttccgcacatgtctgctccctctgagactactgccgtag

SEQ ID NO: 200091 - DNA, 177 bp, synthetic construct
  misc_feature 1..177: note = Description of Artificial Sequence: Synthetic coding sequence
  source 1..177: mol_type = other DNA
atggacacccagaaggacgtgcagccccccaagcagcagcccatgatctatatctgtggagagtgccataccgaaaacgagataaagagtcgggatcccatccgctgccgagagtgtgggtacagaattatgtataaaaaacgaactaaacggctggtggtgttcgacgctaggtag

SEQ ID NO: 200092 - DNA, 204 bp, synthetic construct
  misc_feature 1..204: note = Description of Artificial Sequence: Synthetic coding sequence
  source 1..204: mol_type = other DNA
atgatcatccccgtgcggtgcttcacctgcggcaagatcgtgggcaataaatgggaggcatacctgggtctgctccaggctgagtataccgaaggggatgctctcgatgcgctcggccttaagcgctattgttgtaggcgcatgctgttggcacacgttgaccttatcgagaagttattgaactacgcaccgctagagaaatag

SEQ ID NO: 200093 - DNA, 204 bp, synthetic construct
  misc_feature 1..204: note = Description of Artificial Sequence: Synthetic coding sequence
  source 1..204: mol_type = other DNA
atgatcatccccgtgcggtgcttcacctgcggcaagatcgtgggcaataaatgggaagcctatctgggactgctacaagccgagtacactgagggcgacgctttggacgcgctcggtctcaagcggtactgctgtcgtcggatgttattggcccacgtggatctgatagaaaagctgctgaactacgcccccctcgaaaaatag

SEQ ID NO: 200094 - DNA, 4173 bp, synthetic construct
  misc_feature 1..4173: note = Description of Artificial Sequence: Synthetic coding sequence
  source 1..4173: mol_type = other DNA
atggtgaaggagcagttccgggagaccgacgtggccaagaagatcagccacatatgcttcgggatgaagagtcccgaggagatgaggcagcaggcccatattcaggtggtatccaaaaacttgtacagccaagataaccagcacgctcctctcctttacggggtcctggatcacaggatggggacaagtgagaaagaccgaccttgtgaaacatgtggcaaaaacctcgcggactgtctggggcactatggttacattgacctggagctgccatgttttcatgtcggctatttccgcgcagtgattggaatactccagatgatctgtaaaacatgttgccacattatgctgagtcaggaagagaagaagcaattcctagactatctgaagcgacctggactgacctacctgcagaagcgggggctgaagaagaagatctctgataaatgccgcaaaaagaacatctgtcatcactgcggggcctttaacggcacagtgaaaaagtgcggtctgctgaagattatccacgaaaagtataagacaaataagaaggtggtggaccccattgttagcaacttcttacagtcattcgaaaccgccatcgaacataataaggaggtggagcccctgctcggaagggctcaggaaaatctgaacccgttagtagtactgaatctttttaagcggatccctgccgaggacgttccactgctgttgatgaatcccgaagccggtaaaccgtctgatctgatcctcacacgactgctggttccacccctgtgtattcggcctagtgttgtctctgatcttaaatctggtaccaatgaagatgacctcacgatgaagttgaccgaaatcatttttctgaatgatgtcattaaaaaacacaggatttccggggcgaagacccagatgattatggaggattgggactttctgcagctccaatgtgcgttgtacattaacagtgaactgtccggtattcccttaaacatggccccaaagaagtggactcgaggctttgttcagagattgaagggaaagcagggacgcttcagggggaatctgtcaggcaaaagagttgactttagcggcaggactgtcatatccccagacccaaacctccgcatcgacgaagttgccgtgcctgtacatgtggctaaaatcttaacatttcccgagaaagtaaataaagcaaacatcaatttcctgagaaaactggtccagaatggccccgaggtccacccaggggctaatttcatccaacagcggcatacccagatgaagcgttttttgaagtacggaaatagggagaagatggctcaagagctgaagtatggtgatattgtggaacgacatctgatcgatggagatgtcgttttgtttaatcgacagcctagtctgcacaaattgagtattatggcacaccttgcgcgggtgaaacctcacaggacatttagattcaatgaatgtgtgtgcactccctacaatgcggacttcgacggagatgaaatgaatttgcacctgccccagacagaggaggcgaaagccgaggctctggtattaatgggaacaaaggctaacttagtcactccccggaacggagagcccctgatcgccgccatccaggattttctcacgggagcttatctgctgacgttgaaagatactttcttcgacagagccaaggcttgtcagatcatcgcttctatcctcgtgggtaaggacgagaagattaaggtacgcctccccccacctaccatactgaagcctgtgactttgtggactggtaagcaaattttttctgtgatccttcggccatcagacgataaccctgttcgagctaatctgcgcactaaagggaagcaatattgcggtaaaggggaagatctctgcgctaatgacagctatgttacaatacagaactcagagctgatgagtggatcgatggacaaggggactcttggcagcggctctaagaacaacattttctatatcctactccgggactggggccaaaatgaggctgcggatgcaatgtcccggttggctaggctcgcacccgtctatttaagcaatcgggggttttcaatcggaatcggggacgtcacccctggacagggccttctgaaagccaaatatgagctcctcaatgctggctacaagaagtgcgacgagtacatagaagcattgaacacaggcaaactgcagcagcagccaggatgcaccgcagaagaaacgcttgaagctctcattctgaaggagctcagcgtgattcgagaccacgctggcagcgcctgcctgcgggagctcgataagagcaatagcccactgaccatggccctctgtggttcaaagggtagcttcattaacatcagtcagatgatagcgtgcgtggggcagcaagctataagcggcagtagagtgcccgacggttttgagaaccgctccctgccgcacttcgaaaagcactctaagctgcctgctgcaaagggatttgtggccaacagcttctactcgggcctgacccccaccgagtttttctttcacactatggccggaagggagggtctggtggacactgcagttaagactgctgaaactggttacatgcagagaaggctggtgaagagcctggaagacctgtgcagtcagtatgatctcaccgtgaggagcagcacaggagatatcatccagtttatttacggaggggacgggttggatcccgcagctatggagggcaaggatgaaccccttgagtttaaacgcgtcctggataacatcaaagctgtgttcccatgtccttccgagcccgcgctcagcaaaaacgagctcattctcaccactgaaagcattatgaagaagtctgaatttctgtgttgccaggattcattcctgcaagaaatcaagaagtttataaaaggcgtctccgagaagatcaagaaaactagagataagtacggcataaatgacaatggtactacagaaccccgagtcctgtaccagctcgatcgcattacacctacacaggttgagaagtttttggaaacctgtcgagataaatatatgcgtgcacaaatggagcctggctcagccgtaggagcactgtgcgcccagagtatcggggagccaggcactcagatgactctgaagactttccacttcgccggtgttgcctctatgaatattacattaggggttccccgtatcaaggagattatcaatgctagcaaggcgatttctacaccgattatcactgcccagcttgacaaagacgatgacgctgactatgcccgcttggttaagggcagaatagagaagaccttgctgggagaaatcagcgagtatatcgaggaagtattcctgcccgatgactgctttatccttgtgaagctgtctctcgagcggattagactgctgcgcctcgaagtgaatgccgagacagtgcgctattcaatttgtaccagcaagcttcgcgtcaaacctggcgatgtcgcggtgcacggtgaggccgttgtgtgtgtgacacccagggagaactctaagtcctcaatgtattacgttctgcagtttctgaaagaagacctgccaaaagtcgtcgtacagggaattcccgaagtgagtcgcgctgtcattcatatcgacgaacagagtggaaaggaaaaatacaaactgctggttgagggcgacaacctgagagctgtgatggccactcacggggtgaagggtacgcgtaccacttccaataatacatacgaagttgagaaaacattggggatagaggccgccaggactactattataaacgaaattcagtacacaatggtgaatcacgggatgagtattgatcggcgccatgtcatgctgctttccgacctgatgacttacaagggcgaggtcctaggcattacccgttttggattagccaagatgaaagagagcgtcctaatgctggcgtccttcgaaaaaactgcagaccacctgtttgacgctgcctattttggccaaaaggactctgtgtgtggcgtgagcgagtgcatcattatgggcattccaatgaacatcggaactggtttgtttaagttgcttcacaaagcggacagggatcctaaccctcctaaacgcccactgattttcgacaccaacgaatttcatatccctctggtcacatag

SEQ ID NO: 200095 - DNA, 489 bp, synthetic construct
  misc_feature 1..489: note = Description of Artificial Sequence: Synthetic coding sequence
  source 1..489: mol_type = other DNA
atgtactacgtgctgcagttcctgaaggaggacctgcccaaggtggtggtccaaggcatccctgaggtcagcagggctgttatccacatcgacgagcagagtggaaaggagaagtacaagcttctagtggagggcgacaatctgagggccgtgatggcaacacatggcgtaaaggggaccagaactacgtcaaacaatacctatgaagtagaaaaaacactgggaattgaggcagctaggaccacaatcatcaatgagatacaatacacaatggtcaatcatggcatgtcaatcgaccggcggcatgttatgctgctgtcggaccttatgacgtataaaggtgaggtgctggggatcacccgattcggactggccaaaatgaaggagagcgtactgatgctggcttcttttgagaagactgcagatcatctgtttgatgccgcctatttcggacagaaagactccgtgtgtgcatggccgcagccctag

SEQ ID NO: 200096 - DNA, 4110 bp, synthetic construct
  misc_feature 1..4110: note = Description of Artificial Sequence: Synthetic coding sequence
  source 1..4110: mol_type = other DNA
atggtgaaggagcagttccgggagaccgacgtggccaagaagatcagtcacatttgtttcggcatgaaatcaccagaggaaatgcggcagcaagcacacatccaggtggtgtcgaagaatctttattcacaggacaatcagcatgctcccctgctctatggcgttctggaccaccgtatgggcacttctgagaaagacagaccctgcgaaacctgtggcaaaaatcttgctgattgcctgggacattatggatatatagatcttgagttaccctgtttccacgtcggttactttcgcgccgttatcggcatactccaaatgatatgtaagacttgctgccacatcatgctcagccaagaagaaaaaaagcagttcctggattacctcaagaggccgggactcacataccttcagaagcggggcctcaaaaagaagatttccgataaatgtcggaagaaaaatatctgtcaccactgcggggcttttaatggtaccgtaaagaagtgcggtctcctgaagattatacatgagaaatataagacaaacaagaaggtcgtagaccctatcgtgagcaactttctccaatcctttgaaaccgctatcgaacacaacaaggaggtggagccactactagggagggcccaagagaatctgaatcctttagtggtgctcaacctcttcaagagaatccccgcagaggatgtccccttgctgttgatgaatcccgaggcgggcaaacctagcgaccttatccttaccaggctgcttgttccccccctttgtataagaccgtctgtcgtatctgacctgaagtccggaactaatgaagacgatctaaccatgaagctgacagaaattattttcctgaacgatgtcatcaaaaagcatagaataagcggtgctaagacacagatgattatggaagattgggatttccttcaacttcagtgtgccctgtacatcaacagcgagctttctggaatcccgctgaatatggcaccaaaaaagtggaccagagggtttgttcagcgactgaagggtaaacagggtaggtttagagggaacctatccggtaagcgcgtggactttagcgggcggactgtgatctcacccgatcccaacctgcgcattgacgaggtagctgtgcccgtgcacgtggccaaaatccttacttttcctgaaaaagtcaataaagcaaacatcaacttcctccgcaaactggtgcagaacggccctgaggttcaccctggggcaaatttcatccagcagaggcatacgcaaatgaaacggttcctcaagtacggaaatagggagaaaatggcccaagaacttaagtacggggatatcgtggagcgccatttgattgacggtgacgtcgttctgttcaatcggcaaccctctctgcataaattgtccattatggcacacctcgctagggtcaaaccccacaggacatttcgttttaatgaatgcgtttgcaccccctacaatgcagactttgatggggatgagatgaatctccatctgccccagacggaggaggccaaagccgaggcactcgtgctaatgggcacaaaggccaacctcgtgacccctcggaatggagagccactaatcgctgcgattcaggattttctgacaggggcatacctgcttacactgaaggacacttttttcgacagagccaaggcatgtcagatcatcgccagtatacttgtggggaaggatgagaagattaaagtgcgcttgccccctcccacaattctcaaaccagtgaccctttggacagggaagcagatcttcagcgtgattctgcggccgagtgacgacaaccctgtccgagcaaatttgcgtacaaaaggtaagcaatattgtggcaaaggagaagatctctgtgctaacgacagctatgttactatccagaattccgagctgatgagcggcagtatggacaagggtaccttggggagcgggtccaagaataacatcttctatattctgcttcgggattggggacaaaacgaggccgctgacgctatgtccagactggctcgcctagctcccgtctacctcagcaacaggggcttctctattggtattggagacgtgacaccggggcaaggacttctgaaggccaagtatgaactgctgaacgcagggtacaaaaagtgcgatgagtacattgaggcccttaatactggtaaactacagcagcagcccgggtgcaccgccgaagagactttagaggcactcatactgaaagagctttccgtgattcgtgatcatgccggcagcgcctgcctccgagagttggacaagagcaattctcccctcaccatggcactctgtgggagcaaggggtcttttatcaacatctcccagatgatagcctgcgtcggacaacaggcaattagtggtagcagagtgccagacgggttcgagaaccgctctctgcctcatttcgagaagcactccaaattaccagccgccaagggtttcgtcgcaaattccttttacagcggcctcacgcccaccgaattcttctttcatacgatggcggggcgtgagggacttgtcgacacagctgtgaaaactgctgagaccgggtatatgcagcgcaggctggtgaagtctctggaagacctctgttctcaatacgacctgacggtgaggtcttcaacgggcgatatcattcagttcatttatggcggtgatggactagaccccgcagctatggaagggaaagacgaacccctggagtttaaacgtgtgctggacaatatcaaggccgtgtttccatgcccctcagaacctgctctctcaaagaacgagctgatcttgacaacagagagcattatgaagaaatctgaattcctgtgttgccaggactccttcctgcaggagattaaaaaatttatcaaaggcgtgtccgaaaaaattaaaaagacaagagacaaatatggcatcaacgataatggcacaacagagcctagggtattatatcaactagaccgcatcacccctacacaggtagagaaattccttgagacttgccgcgataaatatatgcgcgctcagatggaacccggctctgcggtcggcgctctatgcgcccagaggaacatcaccttgggcgtcccacgaatcaaggagataatcaacgcttcaaaagctatctcaacaccaatcatcaccgcacagttggacaaagatgatgacgcagattacgcacgcctggtcaaaggccgaatagaaaagaccctcctgggagaaatctccgagtacatcgaggaggtattcctgcccgacgattgctttatccttgtgaagctaagcttagagcgaattagactcttgaggctggaagtgaacgccgagacagtccggtacagtatatgcacatccaaacttcgcgtcaagccgggagacgtggccgtgcacggggaagctgtggtctgtgtgacacccagggagaacagcaagtcttctatgtactatgtgcttcagttcttgaaggaggatttgcctaaggtcgtagtccaagggattcccgaagtctcacgcgccgtcatacatattgacgaacagagcggtaaggaaaagtataaactgctcgtggagggagataatctccgggcagttatggccacacacggagtgaagggaacgagaaccactagcaataacacatacgaggtcgagaagacgctgggcatagaagcagctcggaccactataattaatgagattcagtatacaatggtgaaccatggcatgagcattgatagaagacatgtgatgttactatccgatctgatgacctacaagggggaagtcctcggaattaccaggttcggcctcgcaaagatgaaagaatccgtgttgatgctggcatccttcgagaagacagcggaccacctttttgacgctgcctacttcggacagaaagacagcgtttgcggggtgtccgagtgcatcatcatgggaatcccaatgaatattgggaccggattattcaagctgctgcataaagcggacagggacccaaaccctcccaagcggccgctcatcttcgacaccaacgagtttcacatcccactggtaacctag

SEQ ID NO: 200097 - DNA, 753 bp, synthetic construct
  misc_feature 1..753: note = Description of Artificial Sequence: Synthetic coding sequence
  source 1..753: mol_type = other DNA
atgaaggccaccatcatcctgctgctgctggcccaggtgagctgggcaggtccttttcagcagcgcggtctgtttgattttatgctggaggatgaggcctccgggattggccctgaagttcctgacgaccgcgatttcgagcctagcttagggcctgtgtgtccattcagatgccagtgtcatcttcgagtggtgcagtgtagtgacttagaactgggaactaatcccctgaagagcagtggcattgagaatggggcattccaaggcatgaaaaagctgagttacatccgcattgccgatactaatataaccagtatcccgcagggtctgcccccgtccctaacagagctgcatctcgatggcaataagatcagtcgcgtggacgcagcttcactgaaaggccttaacaatctggcaaagcttggactaagcttcaattctatctctgcagtcgacaatggatcccttgcaaacactcctcaccttagggaacttcacctggataataacaagctgacccgggttcccggtggcttagcggaacacaagtatattcaggttgtttatttgcacaacaataatatctcagttgtaggaagcagcgatttctgtcccccaggtcacaacactaagaaagcctcatattctggtgtttccctgttctccaaccctgtgcagtactgggaaatccagccctctaccttcaggtgtgtgtacgtgaggtccgcaatccagctggggaattataagtag

SEQ ID NO: 200098 - DNA, 3228 bp, synthetic construct
  misc_feature 1..3228: note = Description of Artificial Sequence: Synthetic coding sequence
  source 1..3228: mol_type = other DNA
atgaaggccaacgagaaggtgaccagcgacgccgaccccatgtggtacctcaagtacttaaacatctacgtaggcctccctgacgtcgaagaatccttcaacgtgacacggccggtctcaccacatgaatgtcgacttagagatatgacctatagcgcccccattactgtggacattgagtataccagaggttcccaaaggattatccggaatgccctgcctataggacgcatgcctataatgctgcgctccagcaactgcgtcctgactggaaagactcccgccgaattcgccaagctgaacgaatgtccactggaccccggaggctactttattgtcaaaggagttgagaaagtgatcctcattcaagagcaactgtcaaagaatcggatcatagttgaagccgatagaaaaggagccgtgggggcctccgtgacaagcagcactcatgagaagaagtcaaggaccaatatggccgtgaagcagggcagattttacttacgccacaatactcttagtgaggatattccgattgttattatcttcaaggccatgggcgtggaaagtgatcaggagattgtgcagatgattggcactgaggagcatgtgatggctgccttcggccctagcctggaagagtgtcagaaggctcagatattcacacaaatgcaggcactgaaatatattggtaataaggtgcgcagacagagaatgtggggggggggccccaagaagaccaaaatagaagaggctagggagctcctggcatccacaattctgacccatgtgccagtgaaagagttcaactttcgcgcaaagtgcatttatacagccgtgatggtcagacgtgtgattctggcccagggcgacaacaaggtggacgatagggattattacggcaacaagcggctcgaactggcaggacagctgctcagcctgcttttcgaggacctctttaaaaagttcaactcggaaatgaagaaaattgcagaccaagtgattcccaagcaacgcgcagcccagttcgacgtggtcaagcatatgaggcaagatcagataacaaacggcatggtgaatgcaatatctacaggcaactggagcttgaagcggtttaaaatggacaggcagggtgtgacccaagttctctcaagactttcttacatcagcgctctggggatgatgaccagaatctcaagccagttcgagaagactagaaaagtttcaggccctcgtagtctgcagccatcgcagtggggcatgctatgtccctccgacactccggagggcgaagcctgtggtctggtgaaaaacctggccctcatgacacacataacaacagatatggaggacggcccgattgttaaactcgcttcgaatttgggcgtcgaggatgttaatcttctgtgtggggaggagttgagttatcctaacgtctttctcgtgttcctaaacgggaatattttaggcgtcattcgggaccataagaagcttgttaacactttccgcctcatgcgtcgtgcgggatatattaacgagtttgttagcatcagcacaaacttgacagatcgatgcgtttacatctcatccgatggaggacggctttgtcgcccctacattattgtcaagaaacagaagccggcggttacaaacaaacacatggaagagctggcacaggggtacagaaacttcgaggatttcctgcatgagagcctagtggagtacctggatgtgaatgaggagaatgactgcaatatcgcactttacgaacatacaattaacaaagacacgactcatctggagattgagccatttacactgctcggagtatgcgccggcttaatcccgtacccacaccacaatcagtcgccaagaaacacgtatcagtgtgctatgggtaagcaagccatgggcacgattggctataatcagcgcaatcgcatcgacacactgatgtacctgctggcatatccccagaaacctatggttaagactaagactatcgaactaattgaatttgagaaattgcccgccggtcagaacgcaacggtggcagtgatgtcttactctggctacgacattgaggacgcattagtgctgaacaaggcatctcttgacagagggtttggcagatgtttggtatacaagaatgcaaagtgtaccctgaaaaggtatactaaccagacgttcgacaaggtcatgggacctatgctagatgcagctacacgcaagcccatctggcgtcatgagatacttgatgccgatggaatatgttccccaggcgagaaagtcgaaaataagcaggtccttgtgaacaaatccatgccgacagtgactcagatacctctggaggggagtaacgtgcctcagcagccacagtacaaggatgttccaatcacctataagggcgctaccgattcttatattgagaaggtcatgatcagcagcaacgctgaggatgctttcttgataaaaatgctcctgaggcagactagacggccagaaattggcgacaagttttcaagcagacacgggcagaagggcgtttgcggactgatcgtccctcaagaggacatgcctttttgcgacagcggcatttgcccagatataataatgaatccccatgggtttccgagccggatgacagtgggaaagttgatcgaacttttagcaggcaaggccggcgtcctggatgggaggttccattacggcacggcttttgggggatccaaggttaaagacgtatgcgaggacttggtgaggcatggctacaactatcttggaaaagactacgtaaccagtggtatcaccggagagccactggaagcctacatctacttcggccccgtgtattaccaaaagctcaagcatatggttctagacaagatgcacgcacgggctaggggtcccagagccgtcctaactcgacagccaaccgaagggcgctccagggatggcggcctgcgcctgggagagatggagcgggattgtttaattggatacggagctagtatgctgcttttggaacggctgatgatctcctccgatgcatttgaagtggacgtgtgcggacagtgcggtctgttagggtattcaggatggtgtcattactgcaagagctcctgtcacgtatcttcactcaggattccttacgcctgcaagctgctgttccaggaactgcagagtatgaatattattcctcgcctaaaactcagcaagtataacgagtag

SEQ ID NO: 200099 - DNA, 633 bp, synthetic construct
  misc_feature 1..633: note = Description of Artificial Sequence: Synthetic coding sequence
  source 1..633: mol_type = other DNA
atggacgacgaggaggagacctaccggctgtggaagatccggaagactattatgcaactctgtcatgaccgcggctacctggtgacgcaagatgagctggaccagaccctggaggaatttaaagctcagtcgggagacaaacctagcgaggggcgcccaagaaggaccgacctgacggtgctggtcgcacacaacgatgatcccaccgatcagatgtttgtgtttttccccgaggagcctaaggtgggcatcaagactattaaagtgtactgtcaacgcatgcaggaggagaacattacgcgagctcttatcgtagtgcagcagggaatgaccccatccgcgaagcagtccctcgtcgacatggcaccaaagtatattctcgagcagtttctgcagcaagagttgcttatcaacatcaccgaacacgaacttgttccagaacacgtcgtgatgacgaaagaggaggtgacagagttgctggcaaggtataagctgcgtgagaatcagttgccgagaattcaggccggggatcccgtggcccgatacttcggcataaagcgcggacaagtcgtgaaaattattcgcccttctgaaaccgcgggacgctatataacgtataggctcgtgcagtag

SEQ ID NO: 200100 - DNA, 1173 bp, synthetic construct
  misc_feature 1..1173: note = Description of Artificial Sequence: Synthetic coding sequence
  source 1..1173: mol_type = other DNA
atggaggaccccaccctgtacatcgtggagcggcccctgcccggctatccagatgccgaggccccagaaccatcctctgccggggcacaggccgcggaggaacccagtggcgctgggtctgaagagttgataaaaagcgaccaggtaaatggcgtgctggtcctgtctctcctcgacaagatcatcggagcagtggaccaaatccaactgacacaggctcaactggaagaaaggcaggcagagatggaaggagcagttcagtccatacaaggcgagctgagcaagttaggaaaggcacacgcaacgactagcaacactgtgagcaaattgctggagaaggttcgcaaggtaagcgtgaacgtgaagactgtacgtgggagcttagagcggcaagcgggacaaatcaaaaaattggaagtcaatgaagcagaattgctacggcgacggaactttaaggtgatgatataccaggatgaagttaagctgcctgcgaaattatctattagtaagagtctgaaagagtcggaagcgcttcctgaaaaagaaggtgaagaactcggcgagggggagcgtccagaggaggatgccgcagctttggaactctcatcagacgaagcggtagaagtagaggaggtgattgaggagtctagggctgaaaggataaagcgaagcggactgcgacgcgtcgatgatttcaagaaggcttttagcaaagaaaagatggaaaagacaaaagtgcgcaccagggagaatctggagaagacacgactcaagacaaaggagaacctggaaaagactcggcataccctggaaaagagaatgaacaagttgggcacgagactggtacccgccgagaggagggagaagctaaaaaccagtagagataagcttaggaagagtttcacacctgaccatgtggtgtacgcccgttccaagactgctgtgtataaagtgcctcccttcactttccatgtcaaaaagattagagaaggccaagtcgaggtcctcaaagccaccgagatggtggaagtgggcgccgacgacgatgagggtggcgctgaacggggagaagcaggcgacctgagacgggggagctctcccgatgtacatgctctgctggaaatcactgaggagagcgatgcagtattagtcgacaaaagtgactccgactag

SEQ ID NO: 200101 - DNA, 1038 bp, synthetic construct
  misc_feature 1..1038: note = Description of Artificial Sequence: Synthetic coding sequence
  source 1..1038: mol_type = other DNA
atggaggaccccaccctgtacatcgtggagcggcccctgcccggctaccccgatgctgtggatcagatacaactgacacaagcccaactagaggaacgacaggctgaaatggaaggagctgtgcagtccattcagggcgagctctccaagctgggaaaggcgcacgccacaacctctaacactgtgagcaagctcctggagaaagtgaggaaagtcagcgtgaacgtgaaaacagttcggggcagcctggagagacaggccggccaaataaagaagctagaagttaatgaggccgaactgctccggcgtcgaaattttaaagttatgatttatcaggatgaggtaaaactccccgccaagttgtccatcagcaagtccctcaaggaaagcgaagccttacccgagaaggagggggaggaactaggagaaggggaacggccagaggaggatgcagctgccctggagctctccagtgatgaagcagtcgaggtggaggaggtcatcgaagagtcacgtgccgagcggatcaagcgcagtggcctgcgtcgtgtcgatgacttcaagaaggctttttctaaagagaagatggaaaagactaaggtgaggaccagggagaatctcgaaaaaactaggctcaagactaaagagaacttagaaaagaccagacatacactagaaaagaggatgaataagctgggaacccgactggtgcccgccgaaagacgggagaaacttaagacctccagagataagctgagaaaaagtttcactccggaccatgtggtgtacgcgaggagcaaaactgccgtttacaaagttccaccatttactttccacgttaaaaagattagagagggccaggtcgaagtgctgaaggccactgagatggtggaggtgggagcagacgacgacgaggggggggctgaacggggggaagccggcgatctgcggaggggctcaagccccgacgtccacgccttgttggagatcactgaagaaagcgacgctgtgctagtggataaatctgacagtgactag

SEQ ID NO: 200102 - DNA, 2295 bp, synthetic construct
  misc_feature 1..2295: note = Description of Artificial Sequence: Synthetic coding sequence
  source 1..2295: mol_type = other DNA
atgctgctgttcgtgctgacctgcctgctggccgtgttccccgccatttctaccaaaagccctatatttggtcccgaagaagtcaatagcgtggagggcaactcagtgtccattacatgctattacccccctacctctgttaaccgccacacacgcaagtattggtgtagacagggtgctaggggagggtgtatcaccctgatctcatcagagggctacgtgagtagtaagtatgcaggtagagctaatctcaccaatttccccgagaatggtacttttgtggttaacatagctcaactgtcacaggacgactcaggtcgatacaaatgcgggttgggcattaactcacgcggactctcctttgacgttagcctggaggtgtcccagggcccagggctcctgaacgataccaaggtgtacactgtggacctcggaaggactgtgactatcaattgcccttttaagactgaaaatgcacagaagcgcaagtcactatataagcagattggtttataccccgtgctggtgatcgattcttccggatacgtcaatcctaactataccgggaggattaggctggatatccagggcaccggacagcttttatttagcgtcgtgattaaccaactgagactctctgacgccgggcagtatctctgtcaggctggggatgatagcaacagtaacaaaaagaatgcggacctccaggtgttaaagccggagccagagctggtatacgaggatctgagagggtcagtcacctttcactgcgccctgggcccagaggtggccaatgtggcaaaattcttatgtcggcagagttctggagaaaactgcgatgtcgttgttaacaccctgggaaagagagctcctgcctttgagggccggattctactcaacccccaagacaaagatggttccttttctgttgtcattaccggtctgagaaaggaagacgccgggcggtacctatgtggcgcgcatagcgacgggcagctgcaggagggctcacccattcaggcatggcagctctttgtgaatgaagaaagtaccatccctcgctctcccacagtcgtgaagggagttgctggcggtagcgtggccgtcctgtgcccttacaaccgtaaggaaagtaagagtataaagtactggtgtctttgggagggagcccagaacggcaggtgcccactgctagttgactctgaaggctgggttaaagcccagtatgagggccgccttagtctgttggaggaacccggaaatggaacatttacggtgatattgaaccagcttacgtcccgcgacgcgggcttttactggtgcctcaccaatggcgatactctgtggagaactaccgtggaaatcaagattatcgagggggagcctaacctgaaagtgccaggtaatgtcacggctgttctgggtgagacactaaaagtgccctgtcattttccctgcaaattcagtagttacgagaagtattggtgtaagtggaacaatactgggtgtcaagctctcccgtcccaggacgaaggcccaagcaaggccttcgtgaattgcgacgaaaacagccgtctggtaagcctcacactaaacctggtgacccgagccgacgaaggatggtattggtgtggagtgaaacagggccatttttatggagaaacggccgctgtctacgtcgcagtggaagagagaaaggctgcgggttcccgagatgtgagccttgccaaggccgacgccgcaccagacgagaaggtacttgatagtgggttccgcgaaatcgagaacaaggccattcaagaccctcgtttgtttgccgaggagaaagccgtcgctgatacccgcgatcaggcagatgggagcagggcatctgtggactccggaagtagcgaagaacagggcggttcgtctagggccttggtatctaccctggttccactcgggctcgtcttggcggtcggagccgtggctgtgggagttgctcgggccagacaccgcaagaacgttgatcgagtgtctattagaagttatcgcacagatatatccatgtccgactttgagaacagcagagagtttggagcaaatgataatatgggcgcgtcatctataacccaggagacctcactgggaggcaaagaagaatttgtggccacaactgagtcaacaaccgagacaaaggagccgaaaaaagctaagagatctagtaaagaggaggcggagatggcttataaggacttcctgctgcagtctagcactgtcgctgccgaagctcaagacggcccacaagaagcctag

SEQ ID NO: 200103 - DNA, 1596 bp, synthetic construct
  misc_feature 1..1596: note = Description of Artificial Sequence: Synthetic coding sequence
  source 1..1596: mol_type = other DNA
atggacggcatcgtgcccgacatcgccgtgggcaccaagcggggctccgatgaactcttctcgacttgcgtgacaaatggtccctttatcatgtcaagcaattctgcttccgccgccaacggaaacgactctaaaaagttcaaaggagacagccgatctgccggtgttccgtctagagtgattcacataagaaagctccccatcgatgtgaccgagggagaggtgatatctctcggactccccttcggcaaggtaactaaccttctgatgctgaaaggaaaaaaccaggcattcatagaaatgaataccgaggaagccgcaaataccatggtaaactattatacttctgtgacccctgtcctgcggggccagccaatctacatccaattttcaaaccataaggagctcaaaactgactcatcgcctaaccaggcgcgcgcacaagcagctttgcaggcagttaacagcgtccaatcaggaaatctggcactggcagcttcagcggcagctgttgatgcggggatggccatggccggtcagtcgcctgtgctgaggattattgtggagaacctattctacccagtcactctggatgtgcttcaccagattttttccaagtttggaaccgtgctgaaaatcattaccttcaccaagaataatcagttccaggcgctcctgcaatacgctgatccagtgtcagcccaacatgcaaagctgtctctcgacggccaaaacatctacaacgcctgctgcaccctgaggatcgatttcagcaagctgacatccctcaatgtgaagtacaacaatgacaagtcaagagactacaccagacctgatcttcctagtggagattcgcagcctagcctcgatcagactatggccgccgccttcggattgtccgtgcctaatgtgcatggtgccctagctccactagctattccatcagcagccgctgctgcagctgctgcgggccgcatcgccatcccaggactcgcaggcgctggaaactctgtgttgttggtgtctaaccttaatccagaacgggtgaccccacagagtctgttcattcttttcggcgtctatggggacgttcaaagagtcaaaattctcttcaacaaaaaagagaacgcgttagttcagatggccgatgggaaccaggcccagctggctatgtctcacttaaacggccacaaacttcatggtaagcccatcagaataactttgagtaaacatcagaacgtgcaactacctcgagagggccaggaggaccaaggactgaccaaggactatggcaattcaccactgcatagatttaagaaacctgggtctaagaacttccagaatatcttccccccgagtgctacccttcacttgagcaatatcccaccctcagtgagcgaagaggacctgaaggtcttatttagtagtaacggaggcgtcgtcaagggtttcaagttcttccagaaggaccggaagatggcattgattcagatgggatccgtcgaggaggcagtacaggccctgattgacctgcacaaccacgacttaggtgaaaaccaccatctgcgtgtctcattcagtaagtccacaatctag

SEQ ID NO: 200104 - DNA, 594 bp, synthetic construct
  misc_feature 1..594: note = Description of Artificial Sequence: Synthetic coding sequence
  source 1..594: mol_type = other DNA
atggacggcatcgtgcccgacatcgccgtgggcaccaagcgggtgaccccacagagtctgttcatcttgttcggggtgtatggggacgtccaacgggttaagattctgttcaacaagaaagagaacgccttggtgcagatggccgatgggaatcaggctcagctggccatgagtcacttgaatgggcataagttgcacgggaaacctatccgcataactctttccaaacatcaaaacgtacagctgccccgagaaggacaagaggaccagggccttacaaaggattatggcaatagtcccttgcaccgatttaagaaaccgggttcaaagaacttccagaacatctttcccccgtcggccactctccacctgtcaaatatacctcctagcgtctcagaggaagacctgaaggtgctgtttagttctaacggcggcgtggtcaaaggttttaagttcttccagaaggatagaaagatggccttaattcaaatgggctctgtggaggaagccgtccaggcgttaatcgacttgcacaaccatgacctgggtgagaatcaccatctgcgtgttagcttcagcaagtctacgatttag

SEQ ID NO: 200105 - DNA, 1674 bp, synthetic construct
  misc_feature 1..1674: note = Description of Artificial Sequence: Synthetic coding sequence
  source 1..1674: mol_type = other DNA
atggacggcatcgtgcccgacatcgccgtgggcaccaagcggggctccgacgaactgttctcgacctgtgtgacaaacggccctttcatcatgtcatccaattctgcaagcgcagcaaatggcaatgactcaaagaagtttaaaggtgactccagaagcgcaggtgttccctcccgcgtgattcatattagaaagctccccatcgatgtaacagagggagaggttatctctctgggactgccatttggcaaggtgactaacctgcttatgcttaagggaaaaaaccaggcgtttatcgaaatgaataccgaggaagctgcgaatactatggttaactattacactagcgtcacccccgttctgaggggtcagccaatttatattcagttcagcaaccataaggagttaaagacagactcatcccctaatcaggctcgagctcaggcagctctgcaagccgtgaattctgttcagtccgggaatcttgccttagcggcaagtgcagccgccgtcgatgctggcatggcgatggccggccagtcaccagtccttcgaattattgtggagaacctcttttacccagtgacgttggatgtgctccaccagatctttagtaagtttgggactgtgctgaaaattataactttcaccaaaaacaaccagtttcaagctctgttacagtacgccgacccagtttctgcccagcacgctaagctgagtctggatgggcagaacatatacaacgcatgttgtacccttaggatcgacttctccaagcttacatcactcaatgtgaaatacaataacgataagagtcgcgattatactcggccagaccttcccagcggtgattctcagcctagtcttgaccagaccatggcggccgcctttggcgctccgggaatcatcagcgcctcgccttatgctggcgctggctttcccccaacttttgccatcccacaagcggccggcctttccgttccaaatgtgcatggggcactcgcaccactggctatcccttctgccgcggcagccgccgcagccgctggtcgtatcgcgatccctggactagcgggagcaggaaacagcgtactcctggtgtcgaatcttaatcccgagcgcgtgacaccacaatccctgttcattctatttggtgtttatggagacgtgcagcgagttaagattctgtttaataaaaaggaaaacgctctggtgcaaatggcagacggcaatcaggctcagctggctatgagccacctgaatggccacaagctacacggtaagcccatacgcattaccctgtctaaacatcaaaacgttcagctgccacgcgaaggacaagaggaccagggactgacaaaagattatggtaattccccactgcatcggtttaagaaaccaggaagcaagaactttcaaaacatctttccaccctcagcaaccctgcacctgtccaacattcctccaagcgtgtcagaggaggacctcaaagttctgttctcttcaaacggcggggtcgtgaaaggattcaaatttttccagaaggaccggaagatggcgctgatccagatgggttcagtagaggaagccgttcaagccctgatcgacctacataaccacgacttgggtgaaaaccaccacctacgtgtctcattctccaagtcaacgatttag

SEQ ID NO: 200106 - DNA, 1653 bp, synthetic construct
  misc_feature 1..1653: note = Description of Artificial Sequence: Synthetic coding sequence
  source 1..1653: mol_type = other DNA
atggacggcatcgtgcccgacatcgccgtgggcaccaagcggggcagcgatgagctgttttcaacgtgcgtgacaaatggcccttttatcatgagttctaactctgcctctgccgcgaatggaaatgattctaaaaagttcaaaggggactccaggtccgctggagttccaagtagagtgatccacattcgcaaactgccaattgatgttactgagggcgaggtgatttccctgggcctccccttcggaaaggtcaccaatctcctcatgctcaaggggaagaaccaggcatttatcgaaatgaatactgaagaggctgccaacacaatggtcaattactacacatcagttactcccgtgctccgcggccagcctatctacatccagttcagtaaccacaaggaattaaaaactgattcttctcctaatcaagctcgagcacaggcagcccttcaagcagtgaatagtgttcaaagcggtaaccttgcattggcggcctccgctgcggcagttgatgcgggtatggcaatggccgggcagtctcctgtgttgcgcatcatcgtggagaatctgttctaccccgttaccttagatgttttacatcaaatttttagcaagttcggcaccgttttgaagataattacattcactaagaacaatcagtttcaagccctactacagtacgccgatccagtgtctgcccagcatgccaaactgagcttagatggtcaaaacatctacaacgcctgctgtacactccgtattgactttagcaagctgacctcgctgaacgtgaaatacaataatgataagtcccgggattatacgcggcctgatttgccatctggtgacagtcaaccaagcctcgaccagactatggccgcggcgtttgcatccccgtacgctggggctggattcccacctacctttgccattcctcaagctgccggcttgagcgttcccaacgtccacggagcactagctccgctggctattccaagcgctgctgccgccgccgccgccgctggtcggattgcgattcccgggctggcaggagcggggaacagtgtgcttctggtttcaaatttgaatccagagagggttacccctcagtccctattcatcctctttggagtgtacggtgacgtgcaacgcgttaagatcctgttcaacaaaaaggagaatgccctcgttcagatggctgacggcaatcaggctcagttggccatgtcacaccttaatggccataaactccacggcaaacccataagaataactctgagcaaacatcaaaatgtgcagcttccccgcgaaggccaggaggaccagggcctgaccaaagattacggaaactcccccttacatagattcaaaaagccgggtagcaagaatttccagaatatattccctcccagtgctactctccacctgagcaatataccgcccagcgtttcggaagaggatctgaaggttctgttttccagtaacggcggggtggtgaagggttttaaatttttccagaaggaccggaagatggctctgatccaaatggggtctgtggaggaggcagtccaggcccttatcgatctgcacaaccatgacctgggcgaaaaccaccatctgcgagtgagctttagcaagagtacaatctag

SEQ ID NO: 200107 - DNA, 1599 bp, synthetic construct
  misc_feature 1..1599: note = Description of Artificial Sequence: Synthetic coding sequence
  source 1..1599: mol_type = other DNA
atggacggcatcgtgaccgaggtggccgtgggcgtgaagcggggctcagacgagctgctatcagggagcgttctctccagtccaaattccaacatgtcatcaatggtggtgacagccaacggcaatgattcaaaaaagttcaaaggggaggacaagatggatggagctccatctcgagtgctgcacataagaaagcttccaggtgaggtaaccgagactgaagtgatcgctctgggcctgccatttggcaaggtgaccaacattcttatgctgaagggtaagaaccaggcgttccttgaattggcaactgaggaagcggccatcaccatggtgaactattactctgctgtaaccccccatcttagaaatcagcctatctacatccagtactccaatcacaaggagctcaagacagataacaccttaaaccaacgagcccaggctgtcctccaagcagtcacagctgtccagacagccaacacgcccctgagcgggacaaccgtgagcgaaagtgccgtcaccccagcccagtcaccagtattacggatcatcatcgacaacatgtactacccggtgacactagatgtgcttcatcagatatttagcaaattcggtgcagtgctgaaaattattacattcacaaaaaacaatcagtttcaagccctgctccagtacggtgatcccgtcaatgctcaacaggccaaactggccctggatggacagaacatctacaacgcatgctgtacgcttcgcatcgatttttcaaagcttgttaatctcaacgtgaaatataataacgacaagagtcgcgattatacgcgaccagacttgcctagtggggacgggcagccggcattggaccctgctatcgcggcggcattcgccaaagagacaagcctgctcgctgtgccaggggctctgtcacctttagctattcctaacgccgcggcagctgctgctgcggccgcggctggacgtgtgggtatgcccggggtgagcgccgggggtaacacggtgttgcttgtgtctaaccttaatgaggaaatggtgacaccacagtcgctcttcacgttgtttggcgtgtacggagacgtgcagagggtcaaaatactctataacaagaaggactcggccctgattcagatggcggatgggaaccaatcacagctggcaatgaatcacttgaacggccaaaagatgtacggcaagattattcgggtaactctaagtaagcaccagaccgtgcaactccccagagagggtctggacgaccagggtctaacaaaggacttcgggaatagtcctctgcacaggttcaaaaaaccggggtccaagaatttccagaacattttcccaccttcagctactcttcatctgtcaaatataccacccagcgtagcagaagaggatctaagaacactgttcgcaaacaccggaggaacagtgaaggcctttaaattttttcagcgggaccataaaatggcccttctccagatggccaccgttgaggaggcgatccaggcccttatcgatctgcacaattacaacctcggcgagaaccaccacttgcgtgtcagtttttctaagtccaccatctag

SEQ ID NO: 200108 - DNA, 1614 bp, synthetic construct
  misc_feature 1..1614: note = Description of Artificial Sequence: Synthetic coding sequence
  source 1..1614: mol_type = other DNA
atggacggcatcgtgaccgaggtggccgtgggcgtgaagcggggctccgacgaactcctgagcggttccgtcctaagtagtcccaatagtaacatgtccagcatggtggtgactgccaacggtaatgactccaaaaaattcaaaggtgaggataaaatggatggagctccatctagagtactccacatacgaaagctgcccggcgaagtgactgagactgaagtcatagctctgggcttacctttcggaaaagtgacgaatattctgatgttgaaaggtaagaatcaggccttcctggaacttgctaccgaagaggccgccatcactatggtgaattattatagtgcagtcaccccacacctcaggaatcagccaatctatatccagtactctaaccataaggaacttaagaccgacaacacactgaatcaaagggcccaggcagtccttcaagccgtgaccgccgtgcagacagccaacacccctcttagcggcaccaccgtgtcagaatctgccgtcactccagcacagtcccccgtgctgcgcattattattgataacatgtattatcccgtgaccttggacgttctgcatcaaattttctcaaaatttggagctgttttgaaaattataacctttactaagaacaaccagttccaggcccttctgcagtacggggatccagtgaacgcccagcaagctaagctcgcgctcgacggtcaaaacatatacaatgcgtgctgcaccctacgcatcgattttagcaagctggtgaaccttaacgttaaatataacaacgacaagtctagagactatactagaccggatctgccatccggagacggtcaacccgcactcgatccggctatagcggccgcctttgctaaggagacttccttgctcggattacccgtggctgccgtgccaggcgctctgtctcccctggcaattcccaacgctgccgctgctgccgctgcggccgccgccggccgcgtcggcatgcctggggtctccgcaggcggaaacaccgtgctgcttgtgtctaatttaaatgaggagatggtgacaccccagtcactcttcaccttatttggggtttatggcgacgtgcaacgtgtgaaaattctgtacaacaagaaggacagtgcactcattcagatggccgatggcaaccagtctcagctggccatgaatcatctcaatggacagaaaatgtatggcaagattatacgcgttaccctaagtaaacaccagacagtccagttgcctagggaagggcttgatgatcagggattaacaaaggactttggaaactcaccactccatcggtttaaaaaaccaggctccaagaacttccagaacatatttcctccatccgctaccctgcatctgagtaatatacctcctagtgtggccgaagaggacctgcgcacgttatttgcaaacaccggcggtactgttaaggcctttaaattttttcagcgagaccacaagatggctctgctgcagatggctaccgttgaggaggccatccaagcgctgattgatctgcataattataacctcggtgagaaccaccatttgcgagtgagcttttcaaagtccacgatttag

SEQ ID NO: 200109 - DNA, 1611 bp, synthetic construct
  misc_feature 1..1611: note = Description of Artificial Sequence: Synthetic coding sequence
  source 1..1611: mol_type = other DNA
atggacggcatcgtgaccgaggtggccgtgggcgtgaagcggggctcagacgagctgctttccggctcagttctgagcagccctaactcgaacatgtcatccatggttgttacggctaacggtaatgatagtaaaaaatttaaaggcgaggacaaaatggatggtgccccaagtcgggtcctgcatatccgcaaactaccaggcgaggtcaccgagaccgaggttatagcccttggccttccttttggaaaggtcaccaatatcttaatgcttaaaggcaagaatcaagcatttctggaacttgctacagaagaggccgctatcaccatggtgaattattactcggcggttaccccccacctacggaatcagcctatctacatccaatattctaaccataaggaactgaaaacagacaatacactgaatcaacgcgcgcaggcagtgctgcaagccgtcacggccgtccagaccgccaatacacccctgtctgggacaaccgtctcagagagtgccgtgactcccgcccagtcacctgtgctgcggatcatcatagacaacatgtactatccggtgacccttgacgtgcttcaccagatcttctcaaagttcggggcagttttgaagatcatcacgtttacaaagaataatcaattccaagccctgctccaatatggggatcccgtgaatgcccagcaggccaagctcgcactcgatggccagaatatctataatgcctgttgtacactcagaattgactttagcaagcttgttaacctcaacgtgaaatacaataatgacaagtccagagattacacacgcccagatctcccatcaggcgatgggcagcccgctctggaccctgctatcgcagcagcttttgccaaggagacaagcttactgggtctgcccgttgctgcggtgcccggcgctttgtcccccctggccataccgaatgctgcagccgcggctgcagctgcagccgctggaagggtggggatgcctggggtaagcgccggtggaaacacagttttgctggtgagcaatctgaacgaagagatggtgacccctcagtccctatttacgctgtttggcgtctatggcgacgtccaaagggttaagatactctacaataagaaagattctgcgttgatccagatggccgatgggaaccagtcacagctggccatgaaccatctcaatggccagaagatgtacggaaaaatcatccgcgttactctgagcaaacaccagaccgtgcagctgcccagagagggcctagatgaccaggggctgacaaaagacttcggcaactcgccccttcatcgctttaagaaaccggggagtaagaacttccagaacatctttcctccttcggccactctgcatctttctaatattcccccatccgtcgccgaggaggacttgaggaccctcttcgctaacacagggggaacggtgaaagcctttaagttcttccaagaccacaaaatggccctgctgcaaatggctaccgttgaagaggccattcaggctctgatagacctccataactacaatctgggagaaaaccaccatcttcgggtgtctttcagcaaatctaccatctag

SEQ ID NO: 200110 - DNA, 1056 bp, synthetic construct
  misc_feature 1..1056: note = Description of Artificial Sequence: Synthetic coding sequence
  source 1..1056: mol_type = other DNA
ggcatgaagcggggcagcgacgagctgctgagcggcagcgtgctgagctccccaaattctaacatgtcctctatggttgtgacggctaatgggaatgatagcaagaagtttaagggggaggacaagatggacggcgctcccagtcgagttttgcacatccgcaaactgcccggagaggtgactgagaccgaagtgatagctctcgggctgccgtttggaaaagtaacaaatatcctgatgctgaaaggcaagaaccaagcctttctggaattggccacggaagaagctgctatcacaatggttaattattactccgcagtgacccctcatctgcggaaccagcctatatacattcagtatagtaatcacaaagagttgaagacagacaatacgctgaaccagagagcccaagctgtgctccaggccgttactgctgtgcagactgcaaacacgccactatcggggaccacagtgtcggaatccgctgtcactcctgcgcagtcccctgtgcttcggattatcattgataatatgtactatccggtaactctagatgtgttacatcagatattttccaagtttggagcggtgctcaaaatcatcaccttcacgaagaacaaccagtttcaggccctacttcagtatggtgatcctgtgaatgctcagcaggccaaactcgcactcgatggacaaaacatttataacgcatgctgcaccctgcgaatcgatttcagcaagctggtaaatcttaacgtgaagtacaacaatgacaagagccgggactatactcggccagacctgcccagtggggatgggcagccagccctggaccccgccatcgccgcagcgtttgcgaaggagaccagccttctgggcctaccagttgcagctgttcccggtgcccttagcccactcgccatccccaacgcagccgccgccgccgccgccgcagcagctggcagagtgggaatgccaggtgtctctgcgggcggaaacactgtactgctagtatctaatttaaatgaagaggtgtttatggagatgtgttccgtgtag

SEQ ID NO: 200111 - DNA, 1647 bp, synthetic construct
  misc_feature 1..1647: note = Description of Artificial Sequence: Synthetic coding sequence
  source 1..1647: mol_type = other DNA
atgtggagcaacctgaccttcagcttcttcggcctgcggaccaaggccaaaaaatatgtcacagtcaataataggggttccgacgaactgctcagcgggtccgtgctcagttccccaaacagcaacatgtcttcgatggttgtgacagctaacggaaacgatagtaaaaagttcaaaggtgaggataagatggacggcgccccaagccgggtcttacacattaggaagctaccgggagaggttacggagacagaggtcattgctctagggcttccgtttgggaaagtgacaaatatcctcatgctcaaaggaaagaaccaggcctttctcgaattggctactgaagaagctgcaatcacgatggtgaactactattccgctgtgaccccacacctgcggaaccagcctatctatatacagtatagcaatcataaagagctgaaaactgacaatactcttaaccagagagcccaggccgtgctccaggccgtaactgctgtgcagacagcaaacactccacttagcgggacgaccgttagcgagtcagcggtgacacccgcacagagtcccgtccttaggataatcatcgacaatatgtattaccctgttactctggacgtgcttcaccagattttctcgaaattcggcgcagtgctaaagataatcacattcactaaaaataatcaattccaggccctgctccagtacggagacccagttaatgcccaacaggctaagctcgctctggacgggcagaatatctacaatgcatgctgtactctgagaatcgatttctccaagctcgtgaacctgaatgtcaagtacaacaacgacaagtccagggattatacgagaccagacctgccttctggcgacggacagccggcccttgaccccgctatagctgctgcttttgcgaaagagacctctcttctgggattgcccgtggcggctgttccaggcgcactgagcccccttgccatccctaacgccgccgccgcagcggccgctgcggctgctggacgagtggggatgcctggggtttctgcaggggggaatacagtgctgctcgtgtcaaatttgaatgaagagatggtcaccccgcagtccctgtttactcttttcggagtgtatggtgatgttcagagagtgaaaattttatacaataaaaaggatagcgcgttgatccagatggcagacggaaaccagagccagctcgccatgaaccatctcaatggccagaagatgtacggcaaaatcatccgcgtcaccctgtccaagcatcagaccgtgcagctcccaagagaaggtctggacgatcagggattaactaaggatttcgggaattcccccctgcaccggttcaaaaaacccggaagcaagaactttcagaatatattccctccttccgccacactgcacctgagcaacatcccaccttccgtggcagaagaggacttacgcacactgttcgccaatactggcggtaccgtgaaggcgttcaaatttttccaacgcgaccacaagatggcgttgctccaaatggctaccgtggaagaagccatacaggcgctcatagatctgcataactacaaccttggtgagaatcaccacctgcgggtcagcttctccaagtcgaccatttag

SEQ ID NO: 200112 - DNA, 1596 bp, synthetic construct
  misc_feature 1..1596: note = Description of Artificial Sequence: Synthetic coding sequence
  source 1..1596: mol_type = other DNA
atggacggcatcgtgaccgaggtggccgtgggcgtgaagcggggcagtgacgaattactgagcggtagcgtcctttcgtctcccaacagcaatatgtcaagtatggtggtgaccgccaacggcaatgattccaaaaaatttaaaggcgaagacaagatggatggagctccctctagggtgttacacatacggaaacttcccggggaggttacggagactgaggtgatcgccttgggcctgccttttgggaaagtgacaaacatccttatgttaaaaggcaaaaaccaggctttcctcgagttggccactgaggaggctgccataacaatggtgaattactattcagctgtgacgccacacttgcgcaaccaaccgatctatatacagtatagcaaccataaggaactgaaaaccgataatacactaaaccaaagagcacaggcggtgttgcaggcggtgacagccgtgcagaccgcaaacactcctctgtccggcactactgtgtccgagtcagcggtgactcctgctcagagcccggtcttacgcattatcatagataatatgtactatcctgtgacattggatgtcctgcatcaaatatttagcaaatttggagccgtcctgaagatcattactttcactaaaaacaatcagttccaggctctgctgcagtatggcgacccagtgaacgcacagcaggctaagctcgctttagacggacaaaacatctataatgcgtgttgcactttgaggatcgacttttctaagctcgtcaatcttaatgtcaaatacaacaacgataaatcccgcgactacactcgtcctgacctgccctccggcgatggacagccggccctggaccctgccatagccgcagcatttgctaaggaaacctcgctgttggctgttcccggagcactcagccccctcgcgatcccgaatgctgctgccgccgctgccgcagccgccgcaggcagagtcggtatgccaggcgttagcgccgggggcaatacagtcctcctggtcagtaacctgaacgaagaaatggtaactccacagtccctttttacactgtttggagtctatggagacgtacagcgggtcaagatcctgtacaacaagaaagacagcgccctcatccaaatggcagatggtaaccagtctcaactggccatgaaccacctcaatggccagaagatgtacgggaaaataataagagtaactctctcaaagcaccagacggtgcagctgccacgggaagggctcgacgatcagggacttactaaagactttggaaacagccccctgcaccgtttcaagaagcccggaagtaaaaactttcagaacattttccctccctccgcgacactgcatctgtccaacatcccaccatctgtggccgaggaggatctgcggaccttgttcgctaacacaggcggaaccgtcaaggccttcaaattttttcaggatcataagatggcactgctgcaaatggcaactgttgaagaagccatacaagctctcatcgatctccataactacaacttaggggagaatcatcacctaagggtttcatttagtaagtcaacaatctag

SEQ ID NO: 200113 - DNA, 978 bp, synthetic construct
  misc_feature 1..978: note = Description of Artificial Sequence: Synthetic coding sequence
  source 1..978: mol_type = other DNA
atgagcagcatggtggtgaccgccaacggcaacgacagcaagaagtttaagggcgaagacaagatggatggcgctccttctcgggtacttcatattaggaagctgccaggtgaggtgacagaaaccgaagttattgctctcggtctaccattcggcaaggttacgaacatcctgatgctgaagggaaaaaaccaagcttttttagagttggctacggaggaagcagctattaccatggttaactactacagtgctgtgactcctcatctgcgtaaccagcccatttatattcagtatagcaaccacaaagagctcaagacagataatactttgaaccagagggcccaggcagtcctgcaggccgtaacggccgtgcagaccgctaacacacccctgtccggtaccaccgtcagtgaatctgccgtgacacctgctcagtctcccgtccttagaatcatcattgacaatatgtattaccccgtgacattggatgtgctgcatcaaatctttagcaaatttggggccgtgcttaaaatcataacgtttaccaagaataaccaattccaggccctgttgcaatatggggatcccgtgaatgctcagcaagctaagctggcactggatggacaaaacatttataacgcatgctgtaccctgaggatcgacttttccaagctggttaacctgaacgtcaagtataataatgacaaatcaagagactacactcgcccagacttgcctagcggcgacggccagcccgctctcgatcccgccatcgctgccgcttttgctaaggagactagtttgctagccgtccctggggccctctccccactcgccattcctaacgccgctgccgccgctgctgcagcagcagccgggcgggtaggcatgcctggggtttcagcaggcgggaatactgtcctgctcgtatctaacctgaatgaagaggtctttatggagatgtgttctgtctag

SEQ ID NO: 200114 - DNA, 615 bp, synthetic construct
  misc_feature 1..615: note = Description of Artificial Sequence: Synthetic coding sequence
  source 1..615: mol_type = other DNA
atgcccggcgtgagcgccggcggcaacaccgtgctgctggtgagcaacctaaatgaggaaatggtgacgccacagtctctgtttactttgtttggggtgtacggagatgtgcagcgggtgaagatcttgtacaataaaaaggactcggctcttatccagatggccgatggcaatcaatcccaattggctatgaatcatctgaacggccagaaaatgtatggaaagataattagggtgactctgagcaagcatcagacggtgcagctgccccgcgagggtctggacgatcaaggactcactaaagactttggcaatagtcccctgcacagattcaagaagcctggatccaaaaactttcagaacatcttcccaccatctgctacgctacatttatccaatatcccacctagtgtggcagaggaggatctgcgcactctttttgccaacacaggcggaacagtcaaggcgttcaaattttttcagagagaccataaaatggcattgcttcaaatggcgacagtggaggaagccatccaggcactgatagatctacacaattataatctaggagagaaccatcacctgagggtctctttcagcaagagcacaatatag

SEQ ID NO: 200115 - DNA, 348 bp, synthetic construct
  misc_feature 1..348: note = Description of Artificial Sequence: Synthetic coding sequence
  source 1..348: mol_type = other DNA
atggtgtgcagccccgtgaccctgcggatcgccccccccgaccggcgcttcagtagaagtgcgatcccggagcaaataatctccagcacactgtcctccccctcctctaacgccccagatccttgtgcgaaggagacagtcctcagtgcgttgaaagagaaaaagaagaagaggactgtggaggaagaggaccagatttttttggacggccaagagaacaagcgcagctgtttggttgacggtcttactgatgcctcaagcgccttcaaggtgcctagacctgggcctgatactctacagttcactgtcgacgttttccattttgctaacgactcacgaaacatgtag

SEQ ID NO: 200116 - DNA, 564 bp, synthetic construct
  misc_feature 1..564: note = Description of Artificial Sequence: Synthetic coding sequence
  source 1..564: mol_type = other DNA
atggtgtgcagccccgtgaccctgcggatcgccccccccgaccggaggtttagtagaagtgccattcccgaacagattatctcatctacactctcctccccctccagcaatgctcctgacccttgcgcgaaagagacagtgctgtccgctcttaaagagaaaaagaagaagagaactgtagaggaggaagaccagatttttctggatgggcaagagaataaacgaagctgcttagtcgacggcctgacggacgcctcctcagcttttaaagttcctcgtcccggtcccgataccttgcagttcacagtggatgtgttccatttcgccaacgacagtcgcaacatgatctacatcacttgccatctgaaggtcaccctcgcggaacaggatcctgacgaactgaacaaagcttgctcgtttagtaaaccctctaattcttggtttcctgtcgagggactggctgacatctgccagtgttgtaacaagggcgactgcgggacacccagccacagtcgccgccagcccagggtcgttagccagtggtctactagtgcgagcctatag

SEQ ID NO: 200117 - DNA, 1095 bp, synthetic construct
  misc_feature 1..1095: note = Description of Artificial Sequence: Synthetic coding sequence
  source 1..1095: mol_type = other DNA
atgagcgccaacagcagccgggtgggccagctgctgctgcagggcagcgcctgcatccgatggaaacaagatgtggaaggggctgtgtaccacctggccaactgtctgctactcctgggcttcatgggcgggtcaggcgtctacgggtgtttctatttgttcgggtttttgagtgcaggatacctgtgctgtgtgttgtggggatggttttcagcctgtggcctggacatcgtactctggtcatttctccttgccgtcgtatgccttcttcagctggcccatctcgtgtaccggttgcgggaggatacactcccagaggaattcgacttattatacaagactctgtgcctgcccctgcaggtacccctccagacgtataaagagatagtgcactgttgcgaagagcaggtgctgactctagctaccgagcagacatacgccgtggagggcgagactcctatcaatcgcctgtccctactgctctctggcagggtccgggtcagccaggatggccagtttctccattacatttttccataccagtttatggactccccagaatgggagagcctgcagccctctgaagaaggagtgttccaggttacactgaccgctgagaccagctgcagttatatcagttggccgaggaaaagtctgcacctcctcctcactaaggagcgctacatctcctgcctgttcagcgccttgctcggctacgatatctccgagaagttgtatacactaaacgacaagctttttgctaagttcgggctgcgctttgatatacggcttccctcgctctaccacgtcctgggaccaacggcagcagacgccgggccagaaagtgagaaaggagatgaggaggtttgtgaaccagcagtgagtcctcctcaagcaaccccaacctcactgcaacagacacccccctgctccaccccccctgctacaacaaacttccccgcaccccccaccagggctcggctgagcagacctgacagcggcatactcgctagccgaatccccctgcaatcctatagtcaggttattagcagggggcaggctcccctggccccaacccacacccccgaactttag

SEQ ID NO: 200118 - DNA, 1083 bp, synthetic construct
  misc_feature 1..1083: note = Description of Artificial Sequence: Synthetic coding sequence
  source 1..1083: mol_type = other DNA
atgagcgccaacagcagccgggtgggccagctgctgctgcagggcagcgcatgtattaggtggaagcaggacgtcgaaggagccgtgtaccaccttgcgaactgtctgttgctcctaggctttatgggtgggtcgggcgtttacggctgcttttacctgttcggatttctctccgctggatatttgtgctgcgtactttggggatggttctcagcatgtggactcgatattgtgctgtggtctttcctgctggctgtcgtgtgtctgctgcaacttgcacatctcgtctaccggctcagggaggataccttgcccgaggaattcgatttgttgtataaaactctttgcttgcccctccaggtgccattgcagacttacaaggagatagtacactgctgcgaagaacaggtcctcacgttggccacggagcaaacctatgctgtggagggtgaaactcccatcaaccgactaagtcttctgctgtcggggagggtacgtgtgtctcaggatggccagttcttgcactacatcttcccctaccaattcatggacagcccggaatgggaaagtttgcagccctccgaagagggcgtattccaggtgaccctgacagctgagacttcgtgcagttatatctcttggccacgcaagagtctgcatctgctgttaacaaaggaacgctacatttcctgcttgtttagtgccctgctcggatacgatatcagcgaaaagttatatactttaaatgataagctgtttgcaaaatttgggttgaggttcgatattcggctaccctccctctatcacgttctgggacctactgccgctgacgcagggccagaatccgaaaaaggggatgaggaggtgtgcgagcctgctgtgagcccaccgcaggctacaccgacaagtctgcagcagacgcccccctgcagcacccctcctgctacaacaaactttcccgcaccaccaacgcgagcccgtctgagccgacccgattccgggattttagaaatagacgatttccccagttatttccatcagttcggcttcagcggcaaagtggcagcggggaggattccttag

SEQ ID NO: 200119 - DNA, 1083 bp, synthetic construct
  misc_feature 1..1083: note = Description of Artificial Sequence: Synthetic coding sequence
  source 1..1083: mol_type = other DNA
atgagcgccaacagcagccgggtgggccagctgctgctgcagggctccgcctgcataaggtggaagcaggacgtcgagggcgctgtgtaccacctggccaattgtctgctccttctgggattcatgggcggctccggtgtatatggatgtttctacctgttcggcttccttagtgctggatacctttgctgtgtcctgtggggctggttttctgcctgcgggctggatattgtgctatggagttttttgctggcagtcgtgtgtctgctgcaactggctcaccttgtctacagattgagagaggacactcttccagaggaattcgacctcctgtacaagacactgtgtctccctcttcaagttccactccaaacctataaggagattgtacattgttgcgaggagcaggttctgacgctggccactgaacaaacctatgccgtcgaaggagagacccccattaatcgcctctccctgcttctgagtggccgcgttagggtgtcacaggatggacagtttctccactacatattcccctaccagttcatggactctcccgagtgggagagcctacagccgagtgaggagggggttttccaggtcaccctgaccgctgagaccagctgttcgtacatatcttggccacgtaagtcacttcacctgctgctgacaaaggagcggtatatatcgtgtctgtttagtgccctgctcggatatgacatcagcgagaaactctataccttgaatgacaagctgttcgccaagtttgggctgaggttcgatatccgcctccctagcctgtatcacgtgttggggccaacagccgcagacgcaggtcccgaaagtgaaaaaggcgacgaagaagtatgcgagcccgccgttagcccaccacaggccacccctacttcactacagcaaacgccaccctgtagtacccctccagccacaacaaactttcctgcccctcccaccagggctaggctctcaaggcctgattccggaatcctggagatcgatgacttcccatcctactttcatcagttcggcttctcaggtaaagtggccgcaggtcgcattccatag

SEQ ID NO: 200120 - DNA, 876 bp, synthetic construct
  misc_feature 1..876: note = Description of Artificial Sequence: Synthetic coding sequence
  source 1..876: mol_type = other DNA
atggagcggaacagcagcctgtggaagaacctgatcgacgagcaccccgtttgcacaacttggaagcaggaggcagagggagcgatttatcatctagcctcaatcctctttgtagtgggctttatggggggatccgggtttttcggcctgttatacgtgttctcgttactgggcttgggctttctctgcagtgccgtgtgggcgtgggtcgatgtgtgtgctgctgacatattcagttggaattttgtacttttcgtaatttgtttcatgcaatttgttcatatcgcctatcaggtgagatcaattaccttcgcacgagagttccaagtgctgtattccagcttgttccagccgctgggcatctcccttcccgtgttccgcactatagcactgagcagcgaagtagtcacactggagaaagaacattgctacgctatgcaggggaagacctccatcgacaagctcagcttgctggtttctgggcgcataagagttaccgtagacggagaattcctccactacatctttcccctgcaattcctggacagtcctgaatgggactccctgcgccccaccgaagaagggatttttcaggttacgctaacagctgagacagactgtcggtatgtatcctggagaagaaagaagctataccttttgttcgcccagcatcggtatatatcccggctgtttagcgtgcttatcggtagcgatatcgcggacaaactatacgccttgaatgatcgagtctacatcggaaaacgctatcactacgatatccgccttcccaacttctaccagatgtccacaccggagattcgtagaagtcctctaactcaacatttccaaaatagtcgccggtattgcgataagtag

SEQ ID NO: 200121 - DNA, 306 bp, synthetic construct
  misc_feature 1..306: note = Description of Artificial Sequence: Synthetic coding sequence
  source 1..306: mol_type = other DNA
atgctgttcctgtgcttcgaccggatccgggtgaccgtggacggcgagtttttgcactatatctttcctttgcagtttctagactctcccgaatgggacagtctgcgtcctactgaagaggggatattccaggtgacactgaccgctgagaccgactgcaggtatgtgtcctggagaaggaaaaagctatatctgttgtttgctcaacatcgatacatctcccggctttttagcgtgctgatcggatcagacatcgccgataagctgtacgccttaaatgatagagtgtacattggcaaaaggtag

SEQ ID NO: 200122 - DNA, 1386 bp, synthetic construct
  misc_feature 1..1386: note = Description of Artificial Sequence: Synthetic coding sequence
  source 1..1386: mol_type = other DNA
atggccaccttcagccggcaggagttcttccagcagctgctgcagggatgtctgctgccgaccgcccaacaaggcctggatcagatctggttgctgctggcgatttgcctggcatgccgtctgctgtggcggttgggactgccttcctatctcaagcacgcctctacagtggccggtggcttcttctcgctttatcatttctttcagctgcatatggtctgggtggtcttgttatccttactgtgctatctggtattatttctatgccggcactcctctcatcgcggggtatttctgtccgtgaccattctcatctacctgctcatgggggaaatgcacatggtcgacacagtgacctggcataagatgagaggcgcccagatgatcgtcgcaatgaaggccgtttctttgggatttgacttagacaggggtgaagtaggtacagtgccttctcccgtcgagttcatgggctacttgtacttcgtcggtacgatcgttttcggcccctggatatcattccattcttacctgcaggctgtccagggcaggccactgagctgcaggtggctgcaaaaggtggccaggagcctggccctggctctgttatgtctggtgctgagtacctgcgtggggccttatctgtttccctactttattccacttaacggcgaccggcttttacgaaataagaagcggaaagcccgcggtaccatggtgaggtggttgagggcttacgaatccgctgtatcctttcatttcagcaactatttcgttggtttcctctcggaagcaactgcgactctggcgggagctgggtttaccgaggagaaagatcacttggaatgggatctcactgtcagtaagccactcaacgtggaactcccgaggtcaatggtagaagtagttacatcatggaacctgcccatgagttactggctcaataactacgtcttcaaaaacgcactgcgactcgggacgttttcagccgtgctggtgacttacgcggcaagtgcactgcttcatggattctcattccatctagctgccgtcctattatccctcgccttcatcacctacgtcgaacacgtcttgcggaagcgcctagctcggattctcagtgcatgcgtcttaagcaagcgctgtccacctgactgctcccaccagcatcggctcggcctgggggttagagctcttaatctcttgttcggcgcgttggctatttttcatctggcatacctgggctccttgttcgatgtggacgtggacgataccacagaagagcaggggtacggcatggcctacaccgtgcataaatggtctgaactctcctgggcctcacactgggtcaccttcggatgttggatattctatcgactcatcggatag

SEQ ID NO: 200123 - DNA, 1368 bp, synthetic construct
  misc_feature 1..1368: note = Description of Artificial Sequence: Synthetic coding sequence
  source 1..1368: mol_type = other DNA
atggccaccttcagccggcaggagttcttccagcagctgctgcaggggtgtctcctccctaccgcacagcagggattggaccagatttggctcctccttgctatctgtctggcatgccggctgctctggcggcttggactccctagttacctaaagcacgcctccaccgttgcaggcggattctttagtctgtatcatttcttccagctgcatatggtctgggtggtgttactgtctctcctctgttatctggttctatttctgtgccgacattcaagccacagaggtgtttttctaagcgtcaccatcctcatttacctgctgatgggcgagatgcacatggtggatacagtgacatggcataaaatgaggggggcccaaatgatcgtcgcaatgaaagcagtctcactaggtttcgacctcgacaggggagaggtcggcaccgtcccctcccctgtggaatttatgggatacctatactttgtgggcaccatcgtatttggaccttggatctcttttcactcatatctgcaagccgtacagggaagacccctttcttgccggtggctgcagaaagtggcacgaagcctggccctggctttactgtgccttgtgctgtcaacatgcgtcgggccctacctgttcccatactttatacctctgaatggagacagactgcttagaaaaggcaccatggttcggtggctccgggcctatgagtctgcagtttcgttccacttctcaaattattttgtggggttcctcagcgaggctacagcaaccctggcaggcgcagggttcaccgaagaaaaagatcacctagagtgggacctcaccgtttctaagcccctgaatgtcgagctgcctcgctccatggtggaagtggtaacatcctggaatctgccgatgtcttactggctgaacaactatgtatttaagaatgccctgcggctgggtactttctcagctgtgttagtgacttatgccgcgtctgcactcctgcacggatttagctttcaccttgccgcagtgttgctgagcctggcctttatcacatacgtggaacacgtgcttagaaaaagactggcacggatactgagcgcctgtgtccttagcaagcgatgtcccccggactgttctcatcagcataggctggggctcggcgtgcgcgctctgaacttgttgtttggcgccctcgcaatttttcacctcgcctatctgggcagcctgttcgacgtggacgtcgacgacactacagaggagcagggctatgggatggcatacaccgtgcacaagtggtcagagctgtcttgggcatcccattgggtgacctttggctgttggatcttctaccggctgatcgggtag

SEQ ID NO: 200124 - DNA, 1371 bp, synthetic construct
  misc_feature 1..1371: note = Description of Artificial Sequence: Synthetic coding sequence
  source 1..1371: mol_type = other DNA
atggccaccttcagccggcaggagttcttccagcagctgctgcagggctgcctgcttcccactgcccagcagggcctagatcagatctggctactcctcgcaatttgtctggcctgtcgtctcctttggaggctcggactgccgtcctatctcaagcacgcctctacagtggcgggcggatttttttccttatatcatttttttcaactccacatggtctgggtcgtactactgagtctcctatgctatctggtgttgttcctgtgcagacacagctcacaccgcggcgttttcttatcagtaaccatcctgatctacttgttgatgggggagatgcatatggttgatacagtgacttggcacaaaatgagaggggcacagatgatagtggccatgaaagcggtgagcctgggcttcgacttggacagaggggaggtgggaacagtgccctcacccgtggagttcatgggttacctgtatttcgtcggtaccatcgttttcggtccttggatatctttccactcttatctgcaggccgtgcagggtagacccttgagttgccgatggctacagaaggttgccagatcactggccctagccctcctgtgcctggtgctcagcacctgcgtagggccatatcttttcccgtatttcattcctctcaatggcgacaggcttctgcgcaataagaagagaaaagccaggtggcttagagcatacgagagtgcggtgtcatttcacttctccaactacttcgtcggcttcctctcagaagccaccgcgaccctggcaggggccggctttactgaggaaaaggaccatcttgagtgggacctgaccgtcagcaagccactgaacgtggagctccccagaagtatggtagaggtcgtcactagttggaacctgcctatgtcctattggcttaataattatgtgtttaagaatgcgcttcgactcgggactttctcagcagtgttagttacttatgctgcatcagccctgctgcacggcttctctttccatttggccgcagtgctgctctcccttgcttttattacctacgtagagcacgttctccgcaagcgcctggctaggatcctgagtgcttgtgtgcttagtaaacgctgccccccagattgttctcaccagcaccgcctcggattgggggtgagggcccttaatttgttattcggagccttggccatctttcacctggcctatctgggtagcctgttcgacgtggatgttgacgacaccaccgaagagcaaggttatggcatggcctatacagtgcacaaatggtcggaattgtcttgggcctcccactgggtcacttttggatgctggattttctataggctcatcggctag

SEQ ID NO: 200125 - DNA, 1368 bp, synthetic construct
  misc_feature 1..1368: note = Description of Artificial Sequence: Synthetic coding sequence
  source 1..1368: mol_type = other DNA
atggccaccttcagccggcaggagttcttccagcagctgctgcagggctgcctgttacccacggcgcagcagggactggatcagatctggctactcctggccatatgcttagcctgccggctcttatggcgactgggtttgccttcttatcttaagcatgccagtaccgtggcagggggcttctttagcctgtatcattttttccagctccatatggtgtgggtggtgcttctttctttactctgctaccttgtcctttttctatgccggcactcatctcaccgaggggtgtttctgagcgttacaatcttaatctatcttttgatgggcgaaatgcatatggtggatactgtcacctggcacaaaatgagaggcgcccagatgattgttgccatgaaagccgtatcactgggcttcgacctggataggggggaagttggaacagtgcccagccctgtggaattcatgggttacttatatttcgtggggaccatcgtgtttgggccatggatttcattccattcttacctgcaagccgttcagggccgcccccttagctgccgctggctgcaaaaggttgcccggtccctagcccttgctttattgtgcctagttttgagtacttgtgttggaccctacctgttcccctacttcatccctctgaatggcgatcgcttgctgcggaaaggaaccatggttcgctggctcagggcctacgaatcagcagtctcgtttcacttctctaattattttgtcggctttctgtccgaggctacagccaccctagcgggcgcgggcttcactgaggaaaaagaccacttggaatgggatctgacggtgtccaaacccctcaacgtggaattacctcgctcgatggtggaggttgtaacaagttggaacctcccaatgtcctattggctcaataattacgtatttaaaaacgccctccgccttggcacattctccgctgtcctagtcacctatgcagcttctgcgctcctccatggtttttcattccacctggccgccgtgctcctgagcctggcttttattacgtatgtagaacatgtactccggaaaagactcgcacgaatccttagcgcttgcgtgctgtcgaaaagatgtcccccagactgcagtcatcaacaccgactcggtctgggcgttcgcgctttgaacctgctgttcggagctctggccattttccatctagcttatctcgggagcctgtttgatgtggacgtggatgatactacagaggaacagggctacggcatggcttatacggttcacaagtggagcgaactctcctgggcctctcactgggtgactttcggctgctggatcttttacaggctgatcgggtag

SEQ ID NO: 200126 - DNA, 1353 bp, synthetic construct
  misc_feature 1..1353: note = Description of Artificial Sequence: Synthetic coding sequence
  source 1..1353: mol_type = other DNA
atggccaccttcagccggcaggagttcttccagcagctgctgcagggttgcctactccctacagcacagcaggggctagaccagatctggctattgctagctatatgtctagcctgtaggctcctttggcgcctaggacttccatcttacctgaagcacgcgtccacggtggctggtggctttttcagcctttaccatttcttccaactgcatatggtctgggtagtcttgctgtccttgctgtgttatctcgtcctctttctctgccgccatagctcgcacagaggagtcttcttgagtgttacaatacttatctacctcctcatgggtgagatgcacatggtggacaccgtgacctggcataaaatgcgcggagcacagatgatcgtcgctatgaaagccgtgtcactgggattcgatttagaccgcggcgaagtggggactgtaccgtcgccagtggaattcatgggctacttgtacttcgtgggcactattgtcttcggtccctggatctccttccacagctatctgcaggccgtgcaaggccgacctctgtcgtgcagatggcttcaaaaggtcgcacgcagcctcgccctggctctgctttgtcttgtgctgagcacgtgtgtaggaccctacctctttccctacttcattccccttaatggggaccgactgctacgcaaatggcttcgcgcgtatgaaagcgcagtaagctttcacttcagtaattatttcgtgggatttctgagtgaagctaccgctacactggccggcgctgggtttacggaggaaaaggaccatctggagtgggaccttacggtcagcaaacccctcaacgttgaacttccccgatccatggtcgaggtggtgacaagttggaacctcccaatgagctactggctgaacaactacgtctttaagaacgcgcttaggctcggaaccttctcagccgtccttgttacctacgctgcatctgcactactgcacggtttctcatttcacttagccgccgttctcttaagcctcgcttttatcacatatgtcgaacatgtgttgcggaaacggttggcacgcatcttgagcgcctgcgtcctgtctaaacggtgcccaccagattgcagccaccaacaccgcttgggcctgggggtgagagcattaaacttactcttcggggccctcgcaatcttccacttggcataccttggctctcttttcgacgtggacgttgacgataccaccgaagaacaagggtatggtatggcttacacggtgcacaagtggtccgagctgagctgggcgtcacattgggttacatttggctgctggattttttacaggttaatagggtag

SEQ ID NO: 200127 - DNA, 1140 bp, synthetic construct
  misc_feature 1..1140: note = Description of Artificial Sequence: Synthetic coding sequence
  source 1..1140: mol_type = other DNA
atggtgtgggtggtgctgctgagcctgctgtgctacctggtgctgttcctctgtcgtcattcgagtcacagaggtgtcttcttgtcagtgacaattctgatttatctactcatgggtgaaatgcatatggtggataccgtgacttggcataaaatgcggggtgctcagatgatcgtcgcaatgaaggccgtgagtctgggctttgatctcgataggggggaagtagggacagtcccatctccagtggagttcatgggttacctgtatttcgtgggcactatcgtgtttggtccgtggattagctttcatagttatctccaggcggtgcagggccggcctctctcctgccgctggctccaaaaagtggcccgcagcctcgctctggccttgctctgcctcgtgctgtccacctgcgtgggtccttacctctttccttattttattcccctgaacggggaccggttactgcgtaaatggctgcgtgcttatgaatccgccgtctcttttcacttttcaaattatttcgtagggttcctttctgaagccaccgccactctagcaggcgctggctttaccgaggagaaggatcacctcgagtgggatcttacagtgagcaagccactgaacgtggaattacctcggagtatggtggaggttgtcaccagttggaaccttcctatgtcctactggctgaacaactatgtgttcaaaaatgcgctgagattaggcactttttctgcggtcctggtcacgtatgctgcttcggcattgctgcacggtttcagtttccacttggctgctgtattgctgagccttgcattcatcacatacgtggagcatgtcctgcggaaaaggttggccagaatcctgtccgcgtgtgtgctgtcaaagcgctgtccccccgattgttcacaccaacaccgattgggcttgggagtgcgtgcgctgaatctgctctttggcgccttagctatttttcacctggcatacctcggttccttattcgacgtcgatgtggacgataccacagaagaacagggttatggcatggcttacactgtgcacaagtggagtgaactgagctgggcctctcactgggtcaccttcggttgctggatcttctatcggttgatcggttag

SEQ ID NO: 200128 - DNA, 294 bp, synthetic construct
  misc_feature 1..294: note = Description of Artificial Sequence: Synthetic coding sequence
  source 1..294: mol_type = other DNA
atggccaccttcagccggcaggagttcttccagcagctgctgcagggctgccttttacccacagcccagcagggactagaccaaatatggcttttattagcgatttgtttagcgtgtaggctcctctggaggctggggttgcctagttatctgaaacatgccagtacagtggccgggggttttttcagcctctatcacttctttcagttacacatggtctgggttgtgttgctgagcttgctgtgctatctggtcctcttcttgtgccggcacagtagtcaccgcggcgtgtag

SEQ ID NO: 200129 - DNA, 1386 bp, synthetic construct
  misc_feature 1..1386: note = Description of Artificial Sequence: Synthetic coding sequence
  source 1..1386: mol_type = other DNA
atggccaccttcagccggcaggagttcttccagcagctgctgcaggggtgtctcctgcccaccgcgcagcagggccttgatcaaatttggctactccttgccatttgcctggcatgccgacttctgtggaggctgggcctgcccagttacttaaagcacgcctctacggtcgccggaggattcttcagtctgtaccatttttttcagctgcacatggtttgggttgttctcctatcgttgctgtgttatctggtcttatttctttgtcggcattcctctcacagaggcgtgtttctgtctgtgacgatactgatctaccttttaatgggagaaatgcatatggtagacaccgtgacttggcacaagatgcgcggagcccaaatgatcgtcgctatgaaagcagtctctctgggttttgacctagaccgcggtgaggttggcacagttcctagccccgtggaatttatgggatacctgtatttcgtgggaaccattgtgtttggaccctggatttcttttcattcatacctgcaggcagtccagggaagaccgctcagttgtcgatggctacagaaggtggcgcgaagtttggccctggcactcctgtgtctggtgctgtccacttgtgtaggcccttacctgtttccatattttatccccctgaacggcgataggttactgcgtaacaaaaaaagaaaggccagaggcaccatggtgcgctggctgcgcgcctatgagagtgccgtgagcttccacttcagcaattatttcgtcggattcctttctgaagcaacagccaccttagccggcgctggctttacagaagagaaggatcacctggagtgggatttaacagttagcaaaccactcaacgtggagctgcccaggagtatggtggaagtggtgaccagttggaacctgcccatgtcttattggctgaacaattatgtttttaagaatgctctgcggctgggcaccttttctgcagtgctggtaacatacgccgctagcgctctgctccacgggttttcatttcacctggccgcagtgctgctcagcctggcctttatcacgtacgtggaacatgtgctccggaagcggcttgccagaattttgagcgcttgcgtgttaagtaaaaggtgcccacctgattgttcacaccagcaccgcttaggcttgggcgtgagagccttgaaccttctcttcggtgcactggcgatcttccatctggcctaccttgggtctttgtttgacgtggacgtggacgacacaacagaggagcaggggtacggtatggcatataccgtccacaagtggtccgaactctcatgggcaagtcactgggtgacatttggttgctggatcttttacaggcttattggatag

SEQ ID NO: 200130 - DNA, 2769 bp, synthetic construct
  misc_feature 1..2769: note = Description of Artificial Sequence: Synthetic coding sequence
  source 1..2769: mol_type = other DNA
atgttcctgcacagcgtgaacctgtggaacctggccttctacgtgttcatggtcttccttgctaccctcggtctttgggatgtgttttttggttttgaagaaaacaagtgcagtatgagctatatgtttgaatatcccgaataccagaaaatcgagctgcccaagaagctcgcaaagcggtatccggcctatgaactctacctctatggggaagggtcatacgccgaagagcacaagatcctccctctcaccgggattcctgtattgtttctaccaggaaacgccgggagttataagcaggtgagaagcatcggtagtattgctttgaggaaggctgaagacatcgatttcaaataccacttcgacttctttagcgtcaatttcaatgaggagctggtagcgttatacggtggtagcctgcagaaacagacgaagttcgtgcacgaatgcatcaagaccatccttaagttgtacaaaggacaggagtttgcacccaaaagtgtggcgataatcgggcattctatgggcggacttgtggcgcgggccttgctcactttgaagaacttcaaacacgacttgatcaatcttctgatcactcaagctaccccccatgtcgccccagtgatgcccctcgatcggttcattacagatttctacaccaccgtaaataactactggatcctcaatgctcgacatattaacctgaccacactctctgtcgcgggcggcttcagggattaccaggttcgttccggacttacgtttttaccaaaactgtcccatcacacatcagccctgtccgtagtttcgtctgccgtacctaagacttgggtatcaactgaccatctgtccatcgtgtggtgtaaacagctccaactgactacagtgcgcgccttcttcgacctaatcgacgccgacaccaagcagattacgcaaaactccaaaaagaagctttcggtgctttatcatcatttcattaggcacccaagcaagcactttgaagagaaccctgcgataatctctgacctcacgggaacttctatgtgggtgctggtgaaagtgtctaaatggacctacgtggcttacaacgagtctgagaagatctattttacatttcccctggagaaccatcggaaaatttacacacacgtctactgtcagagcacaatgctcgacacgaactcatggattttcgcctgcataaattcaacatcgatgtgtttgcagggcgttgacttaagctggaaagccgaactgctgcccaccattaagtatttaacactgcgactgcaagattatccctccttgagtcacctggttgtctacgtgccatcggtgcgagggagtaaatttgtcgttgactgtgagttttttaagaaggagaaaaggtacattcaactccccgtcactcacctgttctcattcggtttaagtagccgtaaagtagtgcttaatactaatgggctgtattataacctggagttacttaattttggccaaatatatcaggcattcaagatcaacgtggtctctaaatgcagcgccgttaaggaagagataacatctatttaccgactgcatatcccatggtcctatgaggattctctgacgattgcccaggcaccctcgtctacagagatctccctgaagttgcacattgcacagcctgaaaataatacgcacgtcgccctgttcaaaatgtacacgagctcggactgcagatacgaggttacagtcaaaacttcctttagccagatcctggggcaagtggtacggttccacggtggagcactgcccgcctacgtggtcagtaatatactcttggcataccgagggcagctctattctttattcagcaccggatgctgtctggagtatgctactatgttagacaaggaagctaaaccatataaggtggatccttttgtgatcatcattaagtttctgctcggatataagtggttcaaggagctgtgggatgtgctgttattgcctgagctggatgcagtgatcctgacttgtcaaagtatgtgttttccactgatcagcctgatactcttccttttcggcacctgcaccgcctactggtcgggattgctgagctctgcttccgtgagactgttgtccagcctctggctggcgttgaagcgtccgtccgaacttccaaaggacatcaaaatgataagcccagacttgccctttctgacgatcgtgctcattattgtctcttggacaacctgtggagctttggctatactgttgtcttatttatattacgtattcaaggtagtccatcttcaggcctctctaactacattcaagaattcacagcccgtgaatccaaaacattctcgacggtcggagaaaaagagtaaccaccacaaagactcgtcgatacaccacctgcgcctgtctgcaaacgacgcggaagactcgctgagaatgcactctaccgttataaatctgctcacctggatcgtcctgctatccatgccttccctcatatactggctcaagaatcttagatattattttaaacttaatccagatccatgtaaaccgctagctttcatcctgatacctaccatggcaatattgggcaacacatacactgtgtcaattaaatcatccaaactgctcaagaccacatctcagtttccgctgcctctcgccgtgggggtcattgcctttggttccgcgcacctttacagacttccatgctttgtatttataccccttctcctgcatgctctgtgcaacttcatgtag

SEQ ID NO: 200131 - DNA, 915 bp, synthetic construct
  misc_feature 1..915: note = Description of Artificial Sequence: Synthetic coding sequence
  source 1..915: mol_type = other DNA
atggaggtgctggagagcaagaagatcgagctgcccaagaagctggcaaaacggtatccagcttacgagctgtatctttacggcgaaggctcctatgctgaagaacacaaaatcttgcccctcaccgggatccccgtactgttcttgccaggaaatgcaggaagctataagcaagtcaggtcaattgggagcattgcccttagaaaggctgaagacatcgactttaaataccatttcgattttttctctgtcaacttcaatgaggaactcgtcgcactatatgggggttctctgcagaaacagacaaaattcgtccacgagtgtataaagacaatactgaagttatataagggccaggaattcgctcctaagtccgtggccattatcgggcattcgatggggggtctggtggcacgcgcgttgctcacactaaagaactttaagcacgacctgatcaatttgcttatcacacaggcaacgccccacgtggctcctgttatgccactagacagatttatcactgatttttacaccacagttaacaattattggattctcaatgctagacacataaacctgactactctgtctgtggccggcggttttagggattatcaggtgaggtcggggctaacatttttgccgaagctcagtcaccatactagcgcactttcagtggtgagtagtgcggtgccaaaaacttgggtgtctactgaccatctaagcattgtttggtgcaagcagttacaactgacaacagtgcgcgcttttttcgacttgattgatgcggacactaaacagatcactcagaacagcaagaagaagctctcagtattgtatcatcattttattagacatccatccaagcactttgaagagaaccctgccattattagtgatctgactgggatctag

SEQ ID NO: 200132 - DNA, 1779 bp, synthetic construct
  misc_feature 1..1779: note = Description of Artificial Sequence: Synthetic coding sequence
  source 1..1779: mol_type = other DNA
atgttcctgcacagcgtgaacctgtggaacctggccttctacgtgttcatggtgtttctcgccacattggggctttgggacgtgttctttggctttgaagaaaataaatgcagcatgtcttatatgttcgaatatccggagtatcaaaaaatcgagctccctaagaagcttgcgaagcggtaccctgcgtacgagttgtacctctacggcgagggatcttatgctgaggagcataagattctccccctgacggggatccctgtgctatttctcccaggtaatgccgggagttacaagcaggtaaggagcattggttcaattgccctaagaaaggcggaggatatcgactttaaatatcattttgacttcttctcagtcaatttcaacgaggaactggttgcgctatatggtggctcattgcagaaacaaaccaagtttgtgcacgagtgcataaagacaatactgaaactctacaagggccaggagttcgcccctaaatccgttgcaataattgggcattctatgggcggattggtagcccgagctcttttaactttaaaaaacttcaagcacgacctgattaacctcctcataactcaagccacccctcatgttgcccctgtaatgccgctggacagattcatcaccgatttctacacgacggtgaataattattggatcctgaatgcccggcacataaacctgactacgctgtctgtcgcaggcggatttagagattatcaggtgcggagcggcctgacattccttcctaagttgagtcatcacacctcggcattgtcggtggtttccagcgcagtccctaagacatgggtatctacggaccacctgtccatagtgtggtgtaaacaactgcagctgacaactgtccgggccttctttgatcttattgacgccgataccaaacagatcactcagaactctaagaagaaactttcggtgctctatcaccactttataagacatccaagcaagcactttgaagaaaatcctgccatcatctctgacctcacgggaacctctatgtgggtccttgtcaaggtttcaaaatggacatatgtagcttacaatgaatcggagaagatctacttcacatttcctctggagaatcatcgaaagatctacacacacgtatactgccagagcactatgttggataccaactcatggatctttgcctgtattaattccacatcgatgtgccttcagggagttgacctgagctggaaagccgagttgctaccaaccataaagtaccttacactccgcttacaggactacccatccctctctcacctcgttgtctacgtgccctcggtccgtgggagcaagtttgtggtggactgcgagttcttcaaaaaagagaaaaggtatattcagctgcccgttactcatctgttttcctttggcctgagcagccggaaggtagtattaaacaccaacggtttgtactacaatctggagctcctcaatttcggccaaatataccaggcattcaagattaatgtggtgagtaagtgctccgccgtaaaggaagagattacaagtatttaccgtctccacatcccatggagctatgaagatagtctgactattgcccaggcgccctccagtacagaaatttcacttaaattgcatatagctcaaccggagaacaatacacatgtggcgctcttcaagatgtataccagcagtgattgtcgttatgaggtcactgtgaagacctcctttagtcaaatccttggtcaggtggtcgcatag

SEQ ID NO: 200133 - DNA, 1293 bp, synthetic construct
  misc_feature 1..1293: note = Description of Artificial Sequence: Synthetic coding sequence
  source 1..1293: mol_type = other DNA
atgttcctgcacagcgtgaacctgtggaacctggccttctacgtgttcatggttttcctggccacgttgggactgtgggacgtgttctttggcttcgaagaaaacaagtgttccatgtcttacatgttcgagtatccagagtaccaaagcagtgcggtacccaagacttgggtgagcactgatcatctgagtatcgtatggtgtaaacagttacagctgactacagtgcgagcattcttcgacttgatcgacgcggataccaagcagattacccagaactcaaaaaagaaactatccgtattgtaccaccactttattcgtcatcctagtaaacacttcgaggagaaccctgcaatcatatccgacctcaccggtacatctatgtgggtactggtcaaagtcagcaagtggacttatgtagcctataatgaatcagaaaagatctattttacattcccgctggagaatcataggaagatatatactcatgtgtactgccaatctaccatgcttgatacaaacagctggatcttcgcctgtattaactctactagcatgtgcttgcagggcgtggacctttcctggaaggccgagctgcttccaacgatcaagtaccttacccttcggctgcaggactatccctctctgtctcatcttgtcgtctatgtcccatcagtaaggggttctaaatttgtggtggactgtgagttctttaaaaaagagaaacgatatatacaactccctgtgacgcatttgttcagctttggactgagctcccggaaagtggtcctgaatacaaacgggctgtattacaatttagagttgctgaacttcggtcaaatttaccaggctttcaagataaatgttgtcagtaaatgttcagccgttaaggaggagataacctccatatatcgcttgcacattccttggagctatgaagatagtctcacaatcgctcaggctccttccagcaccgagataagtctaaaactacatattgcccaacccgagaacaacactcatgttgcgctgtttaaaatgtacacttcctcagactgcagatacgaagtcaccgtgaaaacttctttctcacagattctgggtcaggtagtcagattccatggcggagctctgcccgcttatgtggtctcaaatatcctgcttgcatatagaggtcagctatatagcttgttcagcacagggtgctgcctcgagtacgccacgatgttggacaaggaagccaagccctacaaggtcgaccccttcgttatcattatcaaattcctactgtag

SEQ ID NO: 200134 - DNA, 774 bp, synthetic construct
  misc_feature 1..774: note = Description of Artificial Sequence: Synthetic coding sequence
  source 1..774: mol_type = other DNA
atgagccggcccctgatcacccggagccccgccagccccctgaacaatcagggcatcccaactcccgcccaactgactaagtcaaacgctccggttcacattgacgtcggtggacacatgtacacgagttctctcgcgacgctcacaaaataccctgagtcgaggatcgggagactttttgacggcaccgaacctattgtcctcgattctcttaaacagcattatttcatcgacagagatggtcaaatgttcaggtatattctaaactttctaaggacctcaaaactactcatcccagatgatttcaaggactatacactcctctatgaagaggcgaagtactttcaactgcagcctatgctgttggagatggaaagatggaaacaagatagagagacaggacgattttcccggccgtgtgagtgtctcgtcgtgcgagttgcccccgacctcggagagcgtattactttgtccggtgataagagtctgatcgaggaagtgttcccagagatcggtgatgttatgtgcaatagcgtgaatgctggctggaatcacgacagtacgcatgttattcgattccccctgaatggttactgtcatttgaacagcgtgcaggtcctcgagcgcctgcagcagcggggttttgagatcgtggggagttgcggcggcggcgtagactcttcacaatttagcgaatatgtactacgccgggaattgaggaggacgccacgtgtcccgagtgtgatccgtatcaaacaagagcctcttgattag

SEQ ID NO: 200135 - DNA, 774 bp, synthetic construct
  misc_feature 1..774: note = Description of Artificial Sequence: Synthetic coding sequence
  source 1..774: mol_type = other DNA
atgagccggcccctgatcacccggagccccgccagccccctgaacaaccagggcatccctacacctgcccaactgactaaatcaaacgcacctgtccacatcgacgtcggcggacatatgtacacaagctccctggccactctgaccaagtaccccgagagtcgaattgggagattattcgacggaaccgagcctattgtgctggattccttgaaacagcattacttcatagatagagacgggcagatgttccgctacattctcaattttctgcggacgtctaagctcctgatccctgacgattttaaggactatactctgctgtatgaagaagctaagtacttccaactccagcctatgttactggaaatggaacgctggaaacaagatcgggaaacaggccgtttctcacggccatgcgagtgcttagtcgtccgcgtcgctcctgatcttggcgagcggatcacgctgtcaggagacaaaagcctgattgaggaggtgttccctgagatcggcgatgtgatgtgtaactcagtgaacgcgggctggaatcatgattctacccacgtaatcagatttcctctaaacggctactgtcatctcaattctgttcaggtcctcgaaaggcttcagcagcgaggatttgagattgtcggcagttgcgggggtggcgtcgattcatcccagttctccgagtacgtgctacgtcgagaactgcggcggaccccaagggtgcctagcgtgatacgcattaagcaagagccgcttgattag

SEQ ID NO: 200136 - DNA, 2598 bp, synthetic construct
  misc_feature 1..2598: note = Description of Artificial Sequence: Synthetic coding sequence
  source 1..2598: mol_type = other DNA
atggcccggatgcccggcagcggcgactgcaacaccagcgccggcggatctgcatctgctgcagccgcagccgctgagaataatggagaaagaggtgagggggagaggggtgctggcggtaggggaaggaggcattcacggccccactactgctccgccggagaggaggaagaagaagaagaggaggaagatgaaatccaggaagtgcaaattaccggggatgaggaggaagaagaggatgggggcggtggcctcgaggaggacgaagaggaagaggaggaggaagaaatgggactcgactgggatgaacccctggagccggaggactccgcgggagaggaactggaacccgaaccagtacacatgatcaatatggatcagagcgctgcactcgagccagaagccccaccacgcttgctggcccctagggcccggggcggacctcccggggatggatccgagctagatccggatgtgttacagcgtccggagagagcccgtctgagcgagaacacaaggctggctacccgctacgccgtcagaatcttcagagagtacctcagcgaaaaagcacagtccccagacttcgagacaatggacaagggcgccttgtgtagggtgctgcgatccttttacgccgaggcgaggtctaagagcggtcagctgtattcaaaatccagtctcatttccatacgctcctcgcttaaccgttacctgaatgaacccccatattgccggacgctggatctcactaaggatcccgaactgagatctgccaatttaacacttgctgcagtgattaggaagcttgaggagcaaggcgctggacctgttgtccagaagcaagccataacaagggcggatctgcggaagctgtatacttcttccgtcttcagtacaaacactccatttggcttactcaacaaggtatggttcgaaacctgcatgtatttttgtactagaggaagagaaaatcagcgagaactcgaagaggacagcttcggcctggccatggacgaagacggaagaaaatttgtctattttaaaagccttggtccctaccacaaatcaaggagttctagctggagcaaaaagagggctgagagctcagacgaagagaacctccctcggatgtacgaaaccggcaccgagttctgtccctacgcaagttttgtgaagtacctgtctaagcggaacccactgtgcaaggccttctttcagaggccccgggaccactgttccgaaggagatgtgacgtggtatgagaacaaggccattggaaaaaatctcctgggcacgcgaatgcagatgctatccaaggcagccaaacttagcaagacttacactaaccactgtattggtgctgtcagcatagcaactcttaactccatagcaggaatcggaaccaagcttggcagccctgcgccacagggctgctatgccgaagcattaaatggggcggcccgccaccactcacaccatccacctacccacccctcccaccatcaccgtcctcagcctccttccctgggtaatacatacattctgcctaaagattcacaggtaggacctgacgtcaagtcggaggcggccccaaaaagggcgctatatgaatcggtatttggcagcggggaaatttgcgggcccacctctccaaaacgactgtgcatacgcccatcggaaccggttgacgccgttgtagtggtctccgtgaaacacgatcctttgcccctattaccagaagccaatggacaccgctcaaccaactcacctacaatagtcagccctgctatcgtgagtcccacgcaggactcccgacccaatatgtctcgccccttgattaccagatcccctgcttcccccctcaacaaccagggcataccaaccccagcccagctgaccaagtctaacgctcctgtccacatagacgtaggaggccacatgtatactagctctctcgccaccctaaccaagtaccccgagtcaagaatcggtcgcttatttgacggcactgaacccatcgtgctcgactccttgaagcaacactacttcattgacagagacggtcagatgtttcgctacattctgaactttcttcggaccagcaagctgctgatacccgacgattttaaggattatacgctgctctatgaagaggccaagtatttccagctccagccaatgttgctcgaaatggagagatggaaacaggaccgagagactggacggttctcaagaccctgtgaatgcctggttgtgagggtggcaccagacctgggtgagaggattacacttagtggcgataaatcacttattgaggaggtgtttcctgaaatcggcgacgtcatgtgtaatagcgtaaacgccggctggaatcatgattcgacccacgttattcggttccctttaaacggctattgtcacctcaattcagtgcaggtgctggagcggttacaacagcgaggattcgagatcgtggggagttgcgggggcggtgtagattcttctcagttctccgagtacgtgctaagaagggagctgcgcagaaccccaagagtgccttctgttatcagaatcaaacaggaaccactggactag

SEQ ID NO: 200137 - DNA, 774 bp, synthetic construct
  misc_feature 1..774: note = Description of Artificial Sequence: Synthetic coding sequence
  source 1..774: mol_type = other DNA
atgagccggcccctgatcacccggagccccgccagccccctgaacaaccaggggattcccacgcctgcccagctgacaaaatctaacgcgcccgtgcatatcgacgtgggggggcatatgtacacgtcaagccttgctacgctcacaaagtatcccgagagcagaattggtcgcctctttgatggtaccgaacccatcgtactggactctctgaaacaacactactttattgatcgggacgggcagatgttcaggtatattctaaattttctccggaccagtaagctcctgattcctgatgactttaaggactataccttattgtatgaagaagctaaatatttccaattgcagcctatgctgttggagatggaacggtggaaacaggatcgcgaaaccggccgtttcagtaggccctgtgagtgtcttgtcgtgagggtggcacccgatctgggggagcgcataaccctgtccggagacaagagcctgatcgaagaggttttcccagagatcggtgacgttatgtgcaactccgtgaatgcgggctggaatcacgatagcacacacgtcataaggttccccctcaacggatattgccacttaaattccgttcaggttttagaaagactgcagcagcgcggttttgagattgtcggttcctgcgggggcggtgtggacagcagccagttttccgagtacgtgctgcgccgggagctgaggagaacaccaagagttcccagtgtaattagaatcaaacaggaacctttagattag

SEQ ID NO: 200138 - DNA, 1044 bp, synthetic construct
  misc_feature 1..1044: note = Description of Artificial Sequence: Synthetic coding sequence
  source 1..1044: mol_type = other DNA
atgcgggtggtggtgatcggcgccggcgtgatcggcctgagcaccgctttatgtatccacgaacggtatcactcagtgctccagcctctggacatcaaggtatacgcggaccgcttcacaccattaaccaccaccgacgttgccgctggcttgtggcagccttacctgagcgatcctaataatccacaggaggccgactggagccagcagacctttgattacctgttatcgcacgtacactcacccaacgcggagaatttgggtctctttctcatttcaggctacaacctctttcatgaggcaatcccagatccgtcatggaaggacaccgtgttaggcttcagaaaactcacgccccgggagctggacatgttcccagactacggctacggatggtttcacacctctctcatcttagaaggcaaaaattatcttcaatggctgacggagcgtctcaccgagcgtggcgtcaaattcttccagaggaaagtagagagcttcgaagaagtggcaagagaaggggccgacgttattgtgaactgcaccggagtgtgggccggcgcactccagagagacccccttctgcagcccggcagaggccagatcatgaaagtggatgccccctggatgaaacactttattctcactcatgatccggaaagaggcatctataactctccatacatcattcctgggactcagactgttactctcggtggcatctttcagcttggaaactggtctgaactgaacaacatccaagaccacaatacaatctgggaaggctgttgtcgcctggaaccaaccttaaaaaacgctagaattataggagaacgtaccggatttcggcccgtgcgcccccagattaggctggagcgggagcagttgcgaacaggtccttctaataccgaggtgatccacaactacggccatggaggctacgggctgactatccattggggatgcgctctggaggccgctaaacttttcggccggattttggaggagaaaaaactctctaggatgccgccctcccatctctag

SEQ ID NO: 200139 - DNA, 399 bp, synthetic construct
  misc_feature 1..399: note = Description of Artificial Sequence: Synthetic coding sequence
  source 1..399: mol_type = other DNA
atgctgaagaacatcgagctgttcgacaagctgagcctgcggttcaacgggagagtccttttcatcaaggacgttattggggacgagatctgttgctggtctttttacggtcagggtcggaaaatcgctgaggtatgctgtacttctatcgtctacgccacagagaaaaagcagactaaggtcgaattccctgaagctcgtatttacgaggagactctcaacatcctcttgtatgaagcacaggacggccggggacccgacaacgccctgctggaggcgactggcggagccgctggtcgctcgcaccaccttgatgaggacgaggagcgagaacgcatcgagcgcgtaaggcgcattcatatcaagcgaccagatgacagggctcatctgcatcagtag

SEQ ID NO: 200140 - DNA, 840 bp, synthetic construct
  misc_feature 1..840: note = Description of Artificial Sequence: Synthetic coding sequence
  source 1..840: mol_type = other DNA
tgacggtactgccggagccccttctggagcggctacggcaacttctattctctgcagaaatcagggttccttccgacactgggcaccgttcaaccctttaactattgtaaatcaggctggatcctgattgacagatgtggcaaacatttcgggacaatactaaattacttacgtgacggcgcagtgcccctcccagaatcccggagagaaatagaggaattgttagctgaagccaaatactatctcgtgcagggactcgtggaggagtgccaagccgctttgcagaataaagatacctatgagcccttctgtaaggtgcctgtgatcacctcctctaaagaagaacagaaactcattgccaccagcaacaaacccgccgtgaaactgttgtataacaggtcaaataacaaatatagctacacaagtaactctgacgacaatatgctgaaaaatattgagctgttcgacaaactgtccttgcggttcaatggccgtgtgctgtttatcaaagacgtgattggcgacgaaatctgttgttggtcattttatggacagggtcgcaagatcgccgaggtatgttgtacaagcatcgtgtacgccacggagaaaaagcagactaaagtcgagtttccagaagccaggatctacgaagagactctcaatatcctgctctacgaggcccaagatggccgtggcccagacaacgctttgctagaagcaacggggggtgctgctgggcggagccatcatctggatgaggatgaagagcgagaacggatcgagagggtccgaagaattcacatcaagcgtcccgatgaccgagcacatttgcaccagtag

SEQ ID NO: 200141 - DNA, 864 bp, synthetic construct
  misc_feature 1..864: note = Description of Artificial Sequence: Synthetic coding sequence
  source 1..864: mol_type = other DNA
atgagcggcgagagcgtggtgagcagcgccgtgcccgccgccgccactcggaccacttccttcaaaggcacttcaccatcttctaagtatgttaaactcaacgtggggggagcactgtactacaccaccatgcaaaccctgaccaagcaagacacaatgctcaaggcaatgttttctggacggatggaggtgcttactgacagtgaaggctggattctcattgaccgctgtgggaagcacttcgggacaatcctgaactatctgagggacggcgcagttccactaccagagagcaggcgggagattgaagagctgcttgccgaggccaagtactatctggtccagggccttgtggaggagtgtcaggctgccctgcagaataaggacacatacgaacctttttgtaaggtgcctgtgatcacaagcagcaaggaggaacagaagctcattgccaccagcaacaaacccgctgtcaaactgctgtacaacaggtccaacaacaagtactcctatactcgcgtgctgttcattaaggacgtgattggggacgagatttgctgctggtccttttacgggcaaggcagaaagattgctgaggtttgttgtacttccattgtgtatgcaactgagaagaaacagaccaaggtggaattcccagaagcccgcatctacgaggaaaccctgaacatcctcctttatgaggcgcaggacgggagaggtcccgacaatgctttactggaagccaccggcggagcagcggggaggtcccaccacctcgacgaggacgaagagagagagcgtatcgaacgcgtacgtaggatccatatcaagagacctgatgatagggcacatctacaccagtag

SEQ ID NO: 200142 - DNA, 468 bp, synthetic construct
  misc_feature 1..468: note = Description of Artificial Sequence: Synthetic coding sequence
  source 1..468: mol_type = other DNA
atgatggccgtgttcaccagcctgtggagcccctaccagatgctgttttgttccaattccgatgataatatgctgaaaaacatcgagttatttgataaactgtccctcaggttcaacgggcgagtccttttcattaaggacgtgatcggagacgaaatctgctgctggtcattttatggccagggaagaaaaatcgccgaggtgtgttgcacaagcatcgtgtacgccacagagaaaaagcagaccaaggtagagttccctgaggccaggatctacgaggagaccctgaacatcctcctgtatgaggcccaggacggccgcgggcccgacaacgctttactggaagccacaggcggcgcagctgggcggagccaccacctagacgaagacgaagagcgtgagcgcatcgaacgcgtccggagaattcacattaagcgccccgatgacagggcacacctgcatcaatag

SEQ ID NO: 200143 - DNA, 990 bp, synthetic construct
  misc_feature 1..990: note = Description of Artificial Sequence: Synthetic coding sequence
  source 1..990: mol_type = other DNA
atgagcgccgaggccagcggccccgccgccgccgccgcccccagcttggaggcccccaaaccatcaggcctggaacctgggcctgctgcttatggtcttaaacctctcacaccaaattctaagtatgtgaaactgaatgtaggggggtctctgcattacaccacgttgagaacactgactggacaggacaccatgctgaaggccatgttttccggacgagtggaagtattgacagacgctggcggttgggtgcttattgaccgctctgggcggcatttcgggaccatcctcaactacctccgagatggttcagtacctctgcccgaaagcaccagggaactaggggagttgctcggagaagctagatattatttggtccagggccttattgaagactgccaactggccctacagcaaaagagagaaaccctatctcccctgtgccttatccctatggtcaccagccctagagaagagcaacagctgttggcctccaccagcaaacccgttgtgaagctgctccataataggtcaaacaataagtattcatatacatcaacatctgacgacaacttactgaaaaatatcgagctcttcgacaaactcgctctccggttccacggaagactcttgttcctgaaggacgtgttaggagacgaaatttgctgttggagtttctatggccaggggaggaagatcgccgaggtgtgctgcacatccatcgtgtacgccacggagaagaaacagacaaaggtcgaatttccagaggctcgaatctttgaagagacgctcaacatcttaatttatgaaacccccagagggccggaccccgctctgctcgaggccactgggggagcagccggagctggaggcgctggacggggtgaagacgaagaaaaccgcgagcatagggtccgccggatacacgtaaggcgccacattacccacgatgaaagaccccatggccagcagatagtgtttaaagattag

SEQ ID NO: 200144 - DNA, 990 bp, synthetic construct
  misc_feature 1..990: note = Description of Artificial Sequence: Synthetic coding sequence
  source 1..990: mol_type = other DNA
atgagcgccgaggccagcggccccgccgccgccgccgcccccagcctcgaagctcccaaaccctccggcctcgagccaggccccgcagcatatggcttaaaacctctgaccccaaactctaagtatgttaagctaaacgttggtggaagcctgcattacactaccttacggaccttgacaggacaggatactatgcttaaagccatgttttctggtagagtggaggttcttactgatgccggtggctgggtgctcattgacaggagcgggcgacacttcggtacaatccttaactacctccgtgatggtagcgtgcccctacccgagtccacccgggaactgggtgagctccttggcgaagcgcggtattatctggtgcagggtttgatcgaggattgccagctggctctgcagcaaaaaagagagacgctcagtccactatgcttaatccccatggtgacctctcctcgtgaggaacagcaactactggcctctacttccaagcctgtggtaaaactgctgcacaaccgctctaataacaagtactcatacaccagcacaagtgacgacaatctcctcaagaacatcgagttgtttgacaagctagcactgcgcttccatggcagactgctgttcctgaaagacgtactgggagacgaaatctgttgctggtccttctacggccaggggcgtaagatcgccgaagtgtgttgcacaagcattgtgtacgcgaccgagaagaaacagaccaaagtggagttccccgaggcgagaatttttgaagagactctgaacattctcatctacgaaactccccggggtcccgatccggcactgctggaagctactggcggggccgccggcgccggaggtgccggtcggggagaggatgaagaaaatcgtgaacaccgcgttaggcgaatccatgttcggcgccacattactcacgatgagcgaccccatggccaacagatcgtgtttaaggactag

SEQ ID NO: 200145 - DNA, 1287 bp, synthetic construct
  misc_feature 1..1287: note = Description of Artificial Sequence: Synthetic coding sequence
  source 1..1287: mol_type = other DNA
atggccctgagcggcaactgcagccggtactacccccgggagcagggatctgcggtgcccaatagcttccctgaggtagtggaactcaatgtgggtgggcaggtttacttcactcgccattctaccctgatctctattcctcactccctcctgtggaaaatgttctctcccaagagggacactgcgaatgatctggcaaaggacagcaaaggcagattctttatagacagggacggctttttatttcgttacattctggattatctgcgggataggcaggttgtcctccctgaccactttcctgaaaaaggacgtctaaaacgcgaggcggagtatttccagctcccagaccttgtgaagttgctcacccccgacgagatcaagcaatccccagacgaattttgtcactccgactttgaggatgcctctcaggggagtgacacccgcatctgccctccgtccagtctgcttccagctgaccgtaaatggggatttattacggtggggtatagaggctcttgcacactcggccgggagggacaagcggacgcaaaatttaggcgtgtgcctcgcatactcgtctgtgggcggatttcactggcaaaggaggtgttcggagagaccctgaatgaaagtcgcgatccagacagggcacccgaacgatacacgagtaggttttatctcaaatttaagcatcttgagagagcattcgacatgttgagcgaatgtggctttcatatggtcgcatgcaactcctcagtgacagccagctttatcaaccaatacactgatgacaagatctggagttcatacaccgagtacgtcttttacagagagcctagcagatggtctcctagccattgtgactgctgttgcaaaaacggcaagggggataaggagggcgagagtggcacgagctgtaacgacttgtccaccagttcttgcgatagtcagagcgaggctagctcgcctcaggagacagtgatttgtggaccggtgacaagacagaccaacatccaaaccctggatcggcccatcaaaaaaggtcccgtccaactgatacagcagtctgagatgagaaggaagagcgacttgttgcggaccctgacgtccggaagccgagagtctaatatgtcatcaaagaaaaaggccgtgaaagaaaagctgtcaattgaggaggagttagagaaatgcattcaagactttttgaaaatcaagatcccagataggttcccggaaaggaagcacccttggcagagcgaactgctacggaagtaccacctgtag

SEQ ID NO: 200146 - DNA, 1287 bp, synthetic construct
  misc_feature 1..1287: note = Description of Artificial Sequence: Synthetic coding sequence
  source 1..1287: mol_type = other DNA
atggccctgagcggcaactgcagccggtactacccccgggagcagggatcggctgttcctaactcattccccgaggtcgttgaactgaacgtgggaggccaggtgtattttacaaggcatagcacactgatttccatccctcattctctactgtggaagatgtttagccccaaacgggacactgccaacgatctggccaaagactcaaagggccgcttctttattgatcgcgacggatttctgtttaggtacatcctggattacctcagggaccgacaggtagtgctgcccgatcactttccggaaaaaggcaggctgaaacgcgaggcagaatattttcagttgccggacctggtcaagttattgacccctgacgaaattaagcagtcccctgacgagttttgtcactcagatttcgaggacgcgagccaggggagcgatacaaggatttgtccaccaagtagcctgctccccgccgatcgaaagtgggggttcatcaccgtaggatatagaggtagttgcaccctgggtcgagagggtcaggcagacgccaaattccgcagagttcccagaattcttgtatgtggtcggatctccttggccaaggaggtctttggggagacgttaaacgagtcacgggacccagaccgggcccctgaacgctacactagtcggttctatctgaagtttaaacacctggagagggcctttgacatgctctcagaatgtggatttcatatggtagcctgtaattcttctgtgactgcatcattcattaatcagtatactgacgataaaatttggagcagttacactgagtacgtgttttacagggagccctccaggtggtcaccttcccactgcgactgctgctgcaagaacggaaagggggacaaggagggcgagagcggaacctcttgtaacgatctgtctaccagctcttgtgatagtcagtctgaggcttcaagtccgcaggagaccgttatatgcggcccggtgacaaggcagaccaacatacagacgttggaccgccccatcaagaaggggccggttcagctgattcagcagagcgagatgcgtaggaaatccgatttactgagaactctgaccagcgggtcccgcgaaagtaacatgtcatctaagaagaaagccgtgaaagaaaagctgtctatcgaggaggagctggaaaagtgcatccaagattttttgaagattaagatacccgatcggttccccgaacggaaacacccatggcaatccgaactgctgaggaaataccatctgtag

SEQ ID NO: 200147 - DNA, 792 bp, synthetic construct
  misc_feature 1..792: note = Description of Artificial Sequence: Synthetic coding sequence
  source 1..792: mol_type = other DNA
atggccgagctgcagctggaccccgccatggccggcctgggcggcggcgggggctccggtgtgggggacgggggcggcccagtacggggcccaccttccccacgtcctgcggggcccaccccgagaggtcatggccgacctgcagccgcagttgcacaaccgctggaacccggaccaggaccacccgaacgtgctggcggcggcggggctgcccggtgggtcagactgaacgtggggggcacatactttgtgaccactcggcagaccctagggcgggagcctaagagcttcttatgtaggttgtgttgtcaggaagaccctgagctggacagtgataaggatgaaacgggggcctacctgattgatcgagatcccacttacttcggtcctatcctgaattacttgagacacggaaagctgatcattaccaaggagctggcagaggagggggtgctcgaggaagcagagttttataatattgcttcccttgtgcggttagtcaaagaacggatccgcgataacgagaaccgaacctcacagggccctgtaaaacacgtgtatcgggtcctgcagtgccaggaagaggagcttacgcaaatggtctcaaccatgagcgatgggtggaaattcgagcagttaatttccattggcagtagctacaactatggcaatgaagaccaggcggaattcttgtgcgtggtgagtcgcgaactcaacaactcgactaatggtatcgttattgagccgtctgaaaaagcaaagattctccaggaacgcggcagcagaatgtag

SEQ ID NO: 200148 - DNA, 738 bp, synthetic construct
  misc_feature 1..738: note = Description of Artificial Sequence: Synthetic coding sequence
  source 1..738: mol_type = other DNA
agcctgccccggaacggccccgcccggctgcgggccggcagcagcggaggcggcggagggccaaggtggaggaactgctcatggacccggagatggaggggatgggaaggcgctccaggtccgggtcccccagagcgcgccgggggcggtggcgccgctcgttgggttaggctcaacgtgggtggcacatacttcgtgacaactcggcagaccctgggtcgtgaacctaagtcttttctttgtaggctgtgttgccaggaggatccagagctggattctgataaggatgagactggggcttacctgattgaccgggaccctacctacttcggccctatcttgaattatctgcgtcacggaaagcttatcatcacaaaggagcttgctgaagaaggcgtgcttgaggaggcagaattctataacattgcatctctggtacggctggtcaaagagagaatccgcgataatgagaacaggactagccaggggccagttaagcatgtgtaccgtgtcctgcagtgtcaggaggaagagctgactcaaatggtatccaccatgagtgacggatggaagtttgagcagctgatctcaatcggcagtagctacaactacggcaacgaagatcaggctgaatttctttgtgtggtctcccgggagcttaacaattctactaatggaatcgtcatcgagccttccgagaaagccaagatcctgcaagagcgtggatcccgtatgtag

SEQ ID NO: 200149 - DNA, 2448 bp, synthetic construct
  misc_feature 1..2448: note = Description of Artificial Sequence: Synthetic coding sequence
  source 1..2448: mol_type = other DNA
atggccggcggccactgcggcagcttccccgccgccgccgccggctcaggagagatagttcaactgaacgtgggaggaacacgcttttccacgtcccgccagacactcatgtggattcctgactcattcttctcctcactgctgtctggccgcatatccactttaagagacgagacaggtgccattttcattgaccgggaccccgctgcatttgctccaattttaaactttcttagaactaaagagctggacctcaggggggtatccatcaacgtactccggcacgaagcggaattttacggcatcacgcccctggtgagacggctgctgctttgtgaggaactggagcgttcttcatgtggctctgtcctttttcacggctacttaccaccaccaggcatccctagtcgcaaaataaataatacagtccgttctgcagattccagaaatggcttgaattccaccgaaggagaggcacgcggaaacggcactcaacccgtcctctccggcaccggcgaggaaactgtcaggttgggcttcccagtggatccgaggaaagtactcatcgtcgccggccatcacaactggattgttgccgcttatgctcacttcgctgtgtgttatcggatcaaggaatcttcaggctggcaacaggtttttacctccccttatctggactggacaatagaacgagtagctctaaatgctaaggtggtgggggggccccatggagataaggataagatggtggccgtggcgagtgagtctagtattattctatggtctgtgcaagacggcggctctggcagcgaaataggggtcttctctcttggagtccccgttgacgccctcttttttatcggcaatcagctggttgccacgagtcacacagggaaggtgggagtgtggaacgctgtgacgcagcattggcaggtccaggacgtggtccccatcacaagttatgacacggccggctctttccttctacttggctgcaacaacggctccatttactacatcgacatgcagaaatttcccctgcgcatgaaagataacgacctccttgtgaccgagctctatcacgacccctcgaatgatgccataacggccctgtctgtttacctaactcctaagacctcagtttctggaaactggattgagatcgcttatggtacctcatcaggcgcagtgagggttatagtccaacacccagaaaccgtgggcagcgggccccaactgttccagacattcaccgtccaccgtagcccggtgactaagattatgctaagcgagaaacatttagtttccgtctgtgcagacaacaaccacgtgcgaacctggaccgtcactcggtttcgcgggatgatctcaacacagccaggcagcacaccgctggcctctttcaaaatcctgagcctcgaggagaccgaatcccacggcagctattcaagcggtaatgacattggaccattcggggaacgagatgatcagcaggtattcatccagaaagtcgtgccaatcaccaacaagctcttcgtgaggctgtcatccacaggcaagcgcatatgcgagattcaggctgtggactgtacaaccattagtagtttcaccgttcgggagtgcgaggggagttctcgcatgggtagccgcccgcgaaggtatctctttactggccatacgaacggctcaatacagatgtgggacttgaccaccgccatggatatggtaaacaagtcagaggacaaggacgtcggcggacctaccgaagaggagctactgaaactgctggatcagtgcgatttaagcacgagcagatgcgccaccccaaatatctccccggctacctcggtggtgcagcactctcatttgcgcgaaagcaactcgagtctccagctgcagcaccacgatactacacacgaggctgccacatatggctcaatgagaccttatagagagagccccttattggctcgcgcccgacggactgaaagctttcacagttatcgtgacttccagacaattaatctgaatcggaatgttgagagagcagtgccggagaatggcaacctgggtccaatccaggctgaagttaaaggtgctacaggggaatgcaacatttctgaaaggaagagcccgggggtggaaattaagtctctccgtgaattagactcgggactcgaggtccataaaattgccgagggcttttcagagagcaaaaagagatcatcagaggacgaaaatgagaataaaatagaattccggaagaaggggggtttcgagggtggggggtttctgggccggaagaaagtcccatacttggctagctccccctccacttcagatggtggcacagactcgcccgggacagctagtccatcgccgacaaagaccacaccttccccgcgtcacaagaagagtgacagttccggccaggaatactctctgtag

SEQ ID NO: 200150 - DNA, 723 bp, synthetic construct
  misc_feature 1..723: note = Description of Artificial Sequence: Synthetic coding sequence
  source 1..723: mol_type = other DNA
atggccggcggccactgcggcagcttccccgccgccgccgccggcagtggggagatagtccaactcaatgtgggaggcacgagattttcaactagtagacagactctaatgtggatcccagactccttctttagtagcctcctgtcaggcagaattagtacactccgcgacgaaactggcgctatattcatagacagagatccagccgctttcgccccaatactgaattttctgaggactaaagaactcgacttaaggggggtgagcatcaatgtgctccgtcacgaggctgagttttatggcattacgccccttgtgcggcggctgctcctatgcgaggaactggaacgaagctcttgcggtagtgtcctcttccatgggtatcttccaccacccgggatcccctctaggaaaattaacaacaccgtgcgttccgcagatagtcggaatgggctcaatagcacagagggcgaagccagggggaatgggacgcagcctgttctttcagggaccggcgaagaaaccgtgcggttggggttccccgtggacccaaggaaagtgctcatcgttgccggtcatcataactggattgtcgccgcctatgcacactttgcagtctgttatcgcgtgttctggttagggaccgtgggtcacgcatgtaacccctctaccctggggggtcgagacggctggtcatcaagatcagctcgacccacatggtag

SEQ ID NO: 200151 - DNA, 567 bp, synthetic construct
  misc_feature 1..567: note = Description of Artificial Sequence: Synthetic coding sequence
  source 1..567: mol_type = other DNA
atgaaggacaacgacctgctggtgaccgagctgtaccacgacccctccaatgatgccatcaccgccctgtcggtgtacctgacccctaaaacttctgtatcaggaaactggattgagatcgcatatggcacatcctccggtgccgtgcgcgtcatagtgcagcatcccgagacagtcgggtccggaccacagcttttccaaaccttcacagttcatcggagccccgttacaaaaattatgctgtccgagaaacatctggtctcggtgtgcgccgataacaatcatgtcaggacctggacagtaacccgattcaggggaatgatcagcacccagccagggtccacaccactggcctcctttaagatactcagtctggaggagactgaaagtcatggctcctattcttctggcaacgacataggaccatttggcgaaagagacgaccagcaagtgtttattcagaaggttgtgccaattacgaataaactgttcgtacgactaagctccacaggcaagtcactgtgcggcgtttcgctggttagtagatcatcccaggaacccacatag

SEQ ID NO: 200152 - DNA, 642 bp, synthetic construct
  misc_feature 1..642: note = Description of Artificial Sequence: Synthetic coding sequence
  source 1..642: mol_type = other DNA
tgattcagcaccagccggcagaccctgatgtggatccccgacagcttcttctcttccctcctgtcaggccgcatttctactctgcgggacgagacaggcgcgatcttcattgatagagaccctgccgctttcgctcctatactaaatttcctgcgcacaaaagaattggacctaagaggtgtatcaatcaatgtgctgcgacacgaagctgagttctacggaatcactcctttggtgagacggctcctgctatgtgaagagcttgaacggtcctcatgcggaagcgtcttgttccacggatatcttccccctcctggcattccgagcagaaagatcaacaacacagtgaggagcgccgatagtcgtaatggcctgaactccactgagggtgaggctagagggaacggtacgcagccagttttgagtggcacaggagaagaaactgtgaggttaggtttcccagtggatcccagaaaggtgctgatagtggctggccaccataactggatagtggccgcgtatgcccacttcgctgtgtgctatagagtgttctggctgggcaccgtcggtcacgcttgcaatccaagtaccctggggggacgggatggttggtcatcaaggtctgctagaccaacttggtag

SEQ ID NO: 200153 - DNA, 507 bp, synthetic construct
  misc_feature 1..507: note = Description of Artificial Sequence: Synthetic coding sequence
  source 1..507: mol_type = other DNA
tgagccctgagcgtgtacctgacccccaagaccagcgtgagcggcaattggatcgagatagcctatggaacctcgagtggcgccgtacgcgtaatcgtgcagcaccctgaaaccgtcggaagtgggccgcagttatttcagacgtttactgtgcaccgctctcccgtcactaagattatgttaagtgaaaagcacttagtatcggtttgtgctgacaacaatcacgtccgcacctggacggtcacgagatttaggggcatgatcagcacacaaccaggcagcacccccttagcgagtttcaaaatcctcagtcttgaggagacagaatcgcacgggagctatagcagcggaaatgacatcggaccttttggcgagagggacgaccaacaggtcttcattcaaaaggttgtaccaattactaataaactattcgtgcgactctcttcaaccgggaagtccctatgtggcgtttcattggtgtcaagatccagtcaggagcccacctag

SEQ ID NO: 200154 - DNA, 870 bp, synthetic construct
  misc_feature 1..870: note = Description of Artificial Sequence: Synthetic coding sequence
  source 1..870: mol_type = other DNA
atggtggtggtgaccggccgggagcccgacagccggcggcaggacggggcgatgtcttcttccgacgctgaggacgatttcctggagcctgccaccccaactgccactcaggccggccacgcattgcccctattgcctcaggaattccccgaggtagtccccctgaacattggcggagctcactttactacccggttatccacccttcgttgttacgaagataccatgttagcagccatgttcagtggtcggcattacatccctactgacagtgaaggcagatatttcattgatcgggacggtactcatttcggggatgtgctgaatttcctcaggtccggggatctccctccccgggaaagggtacgcgccgtatataaggaggctcagtattacgccataggacctttactggagcaactggaaaacatgcagcccctgaagggggaaaaagttagacaagctttcctaggtctgatgccatattacaaggaccacctcgagagaattgtggagatcgcccgcctcagagcagtccagcggaaagctcgattcgcaaagctgaaggtctgtgtcttcaaagaagagatgccaatcactccatatgaatgtccactattgaatagtttgcgcttcgaaagaagtgagtcggatgggcagctatttgagcaccactgcgaagtggacgtctcctttggaccatgggaggctgtggcagatgtttatgatttgctgcattgcctggttactgatctgtccgctcaaggccttactgtggaccaccagtgtattggagtgtgtgacaaacatcttgtcaatcactactattgtaaacggccaatatatgaatttaaaatcacctggtggtag

SEQ ID NO: 200155 - DNA, 1728 bp, synthetic construct
  misc_feature 1..1728: note = Description of Artificial Sequence: Synthetic coding sequence
  source 1..1728: mol_type = other DNA
gtgagccggaagaagatgagcctgaagagcgagcggcggggcatccacgtagaccaatccgacctgctctgcaaaaagggatgtggttactatggcaatcctgcttggcaagggttctgttccaagtgctggcgggaagaatatcacaaggcaaggcagaagcagattcaagaggactgggaacttgccgaacgcgttctgctctgttatccgggttggtctgccatggtgcagttccagcttaccgccacttcggcttcgtgggcgcaggttattctgctgctccagcctccaaatgttctagggctgcaggccttgcagagggaagaagaggaggcctttgcatctagtcaatcatctcaaggagctcaaagcctcacgtttagcaagtttgaagagaagaagacaaatgagaagacaaggaaggtgacaactgtgaaaaagttcttctcagcttccagtcgggtcggaagcaaaaaagaaatccaggaggccaaagctccatctccatccatcaacaggcaaacatccatcgagaccgacagggtatctaaagagtttatcgaattcctgaagacattccacaaaactgggcaggagatctataagcagaccaaattgtttctggagggcatgcattataaaagagatctgtcaatcgaggagcagtccgaatgcgcccaggacttttaccacaacgtagccgagcggatgcaaacgagaggcaaagaaagacgctttcaccatgttggccaggctggcctcgaacttctcacctcaggcgatccacccgcctccgcctcccagagcgctgggaataccggagtcgagcctccacacccggctgtcccgcccgaacgggttgaaaagattatggaccaaattgaaaaatacatcatgactagactttacaaatacgtgttctgccccgaaaccaccgatgatgagaagaaagatcttgccattcaaaaaagaatccgcgccctgaggtgggtgacaccgcaaatgctctgcgtccctgtgaacgaggacattccagaggtgagcgatatggtcgtcaaggctataaccgatatcattgaaatggacagcaagagggtgccgcgagataagctggcatgcattaccaaatgctctaaacacatatttaacgccatcaaaattacaaagaacgaacccgcatccgcagatgactttctgccaacactcatctatatcgttcttaagggcaaccctcctcggctgcagtctaatatccagtatatcacccgtttttgcaacccaagtcggcttatgaccggcgaggacgggtactatttcacaaatctgtgttgtgcagtcgcgttcatcgagaagctcgatgcacagtcacttaatttaagtcaggaggatttcgatagatacatgtctggtcagacatcccctagaaagcaagaggcagagtcttggagcccagatgcctgcttgggagtgaaacagatgtacaagaacctagacctgctgtcgcagctcaacgaacgccaggaacggatcatgaacgaggcaaagaaactcgagaaggacctcatcgactggactgatgggatagcacgggaggtacaagacatcgtcgaaaaatatcccctggaaatcaaaccaccaaaccagcccctcgccgcaatcgactccgagaacgtcgaaaacgacaaactcccacccccactgcagcctcaggtgtacgcggggtag

SEQ ID NO: 200156 - DNA, 1596 bp, synthetic construct
  misc_feature 1..1596: note = Description of Artificial Sequence: Synthetic coding sequence
  source 1..1596: mol_type = other DNA
atgagcctgaagagcgagcggcggggcatccacgtggaccagagcgacctactgtgcaagaaaggttgcggctactatggaaaccccgcttggcaggggttttgcagcaagtgctggcgagaagagtaccataaagccagacaaaaacagatacaagaagactgggagctcgcagaaagagttttgctttgttatccaggttggtctgctatggtccaattccagctgactgccacatctgcaagctgggcacaggtgatcctgttgctgcaaccgcctaacgtccttggactacaggcgcttcagagggaagaagaagaggcttttgcctcctcccagtcatcccaaggcgcccagtcactgacgttttctaaatttgaggaaaagaagaccaatgaaaagacaaggaaagtgaccactgtgaagaagtttttctctgcttcttcccgggtcggatccaaaaaggaaattcaggaggcaaaggccccatctccttctattaatcgccagacctccatcgagacagatagagtgtcaaaggagtttatcgagtttctgaagacattccacaagacaggtcaggagatatataagcaaacaaagctgttcctggagggcatgcattacaaacgggatctcagcattgaggaacaatctgagtgcgcacaggacttctaccacaatgtggctgagagaatgcagacccgaggcaaagttcctcctgagcgggtggaaaagatcatggatcagatcgaaaagtatatcatgaccagactatacaagtacgtcttctgtcctgagactacagacgacgagaaaaaggacctcgccattcagaaacggattcgcgccctaagatgggtaacccctcagatgctgtgtgtaccggtcaacgaagatatcccggaggtttccgatatggtcgtgaaagcgattaccgatattattgagatggattcaaagcgcgtcccacgcgacaaactggcttgcatcactaagtgctcaaagcacattttcaacgctatcaagattaccaaaaacgagccggcgtcagccgacgacttcctccctaccctgatctatatcgtcctgaagggcaaccccccacgcctacagtcgaacatacagtatattactcggttttgtaaccccagccggctcatgaccggggaagatgggtactatttcacaaacctctgttgtgcagttgcgtttattgaaaaactcgatgcccagtcactgaatctgtctcaggaggattttgatcgctacatgtctggacaaacttcgcccagaaagcaggaggccgaaagctggtctcctgatgcttgtttgggtgttaaacagatgtataaaaatctcgatcttctatcccagctgaatgaacgacaagagaggatcatgaatgaggcgaaaaaactggagaaggacttaatagattggaccgatggtatcgcaagagaggtgcaagatatcgtcgaaaagtaccctttagagatcaagccaccaaaccaaccactggcggcgatcgattccgagaacgtggaaaatgataaattacccccacctctccagccgcaggtatacgcaggctag

SEQ ID NO: 200157 - DNA, 1476 bp, synthetic construct
  misc_feature 1..1476: note = Description of Artificial Sequence: Synthetic coding sequence
  source 1..1476: mol_type = other DNA
atgagcctgaagagcgagcggcggggcatccacgtggaccagagcgacctcctgtgcaagaaaggctgcggatactatggcaatcccgcctggcaaggcttctgcagcaagtgctggcgtgaagagtatcacaaagcacgccagaagcagatccaagaagattgggaactcgcagagcgactgcaaagggaggaagaggaggccttcgccagcagtcaaagcagtcagggcgcccagtcacttactttcagcaaattcgaggaaaaaaaaaccaacgagaagactcggaaagtcaccactgtgaagaaattcttctctgccagcagtagggtcggctccaagaaggaaatccaggaagcgaaagcgcctagcccgagtattaacagacaaacttccatcgagaccgatcgtgtttcaaaggaattcatagagtttcttaaaacatttcacaaaacaggacaagagatctacaaacagaccaagttgtttcttgaaggcatgcactacaagcgggatctgagcattgaagagcagagtgagtgcgcccaggatttttaccacaatgtggcggaaaggatgcaaactcggggcaaagtcccacctgagcgcgtggaaaagattatggaccaaattgagaagtacataatgacgcgactctataagtacgttttttgccctgagaccaccgacgatgaaaaaaaggatctggccatccagaagagaataagagccctccgctgggtgactccccaaatgctgtgcgtacccgtcaacgaggatatacccgaagttagtgatatggttgtgaaggccattacagatattatcgagatggactccaaacgcgttcctagggataaactggcctgtataacaaagtgttcaaagcacatattcaatgccatcaaaattacgaagaacgagcccgcatctgcagatgatttcctacccaccctcatttacatagttctgaaaggaaaccccccacgtctccagtcgaacattcagtacattacccgattctgtaatccgtctcgtctgatgacgggggaggacggatattatttcactaatctgtgttgtgcagtggcctttattgaaaaacttgacgctcagtctctcaatctttcccaggaggacttcgacagatacatgagcggacagacatcaccacggaagcaggaagcggaaagctggagccccgatgcatgccttggggtcaaacagatgtacaaaaacctggacctgctatctcagcttaatgaacggcaggaacggatcatgaacgaggccaagaaactggaaaaggatctgatagactggacggatggcattgcccgggaggtgcaggatatagtggagaagtaccctctcgagataaagcccccaaatcaaccattagccgctatcgactctgaaaacgtagagaacgacaagctccccccaccgctacagcctcaggtgtacgccggatag

SEQ ID NO: 200158 - DNA, 1476 bp, synthetic construct
  misc_feature 1..1476: note = Description of Artificial Sequence: Synthetic coding sequence
  source 1..1476: mol_type = other DNA
atgagcctgaagagcgagcggcggggcatccacgtggaccagagcgacctactctgcaaaaagggctgcggatactacgggaacccagcctggcagggcttttgctctaagtgctggcgcgaagaatatcataaggcccggcagaagcagatacaggaagactgggagctggccgagcggctgcagagagaggaggaggaggcattcgcttccagtcagagcagccagggcgctcagagccttacattcagcaagttcgaagaaaaaaaaaccaatgaaaagaccaggaaagtgacgaccgttaagaagttcttcagtgcatcaagcagggtgggaagtaaaaaggaaatccaggaggctaaggctccttcccctagcatcaatcggcaaacttcaatcgaaacagaccgagtgtcgaaggagtttatagagtttcttaagaccttccacaagactggccaggaaatttataagcagacaaagttattcttggagggaatgcactacaaacgggacctctctattgaagagcagtccgagtgcgctcaggatttttatcacaatgtggcagaaaggatgcagacacgcggaaaggtcccgcccgaacgagtggagaaaattatggaccagatcgagaagtacataatgacaagactgtataaatatgtgttttgtccagagaccaccgatgatgagaaaaaggatctggctattcaaaaacgtattcgggccctacggtgggtgactcctcagatgctgtgtgttccggtaaacgaagacattcccgaggtgtcagacatggtggtgaaagccatcacagacattatcgagatggactcaaagagagtcccgcgcgataaactagcttgcattactaaatgttccaagcatattttcaacgccatcaaaatcacaaagaacgaaccggccagtgccgatgactttctgccaacactgatttatatagtgctgaaaggcaatcccccaaggctccagtctaatatacagtacatcaccaggttttgcaatccctcgcgcctaatgacaggcgaggatggctactattttactaacctctgctgcgcagtggcattcatagagaaattggacgctcagtccctcaatcttagccaggaggacttcgacaggtatatgtcaggccagacctctcccagaaagcaggaggccgagtcatggtcacctgatgcatgtctcggcgtgaagcagatgtacaaaaacttagatttgctgtcgcaacttaacgagcgacaggaacgtattatgaatgaggccaaaaagcttgagaaggatctcattgactggacagacggcattgcacgcgaagtgcaggacatagtggagaaatacccactggaaattaaaccgccaaaccagcctctggctgccatcgacagcgaaaacgtagagaatgacaaattgccgcctccattacagccgcaggtgtatgctgggtag

SEQ ID NO: 200159 - DNA, 1224 bp, synthetic construct
  misc_feature 1..1224: note = Description of Artificial Sequence: Synthetic coding sequence
  source 1..1224: mol_type = other DNA
atgagcctgaagagcgagcggcggggcatccacgtggaccagagcgacctcctgtgcaagaagggatgcgggtactatggtaaccccgcctggcaggggttctgttccaagtgttggagagaggagtaccacaaggcccgacagaagcaaattcaggaggactgggagctcgctgagaggctgcagcgagaagaagaggaagcttttgcatctagtcagtccagccagggcgcgcagtccctcaccttttccaaatttgaagagaagaagaccaacgaaaagacgagaaaggtgacaaccgtcaaaaaatttttctcagcttcctccagggtcgggtccaaaaaacctcccgaacgtgtagaaaagatcatggatcagatagagaagtatattatgaccaggctttataagtatgtgttctgtcctgagaccacggacgatgagaaaaaggacctagctattcagaagaggattagagccctacggtgggttactccacagatgctttgtgtccctgtcaatgaagacatacctgaagtctccgacatggtggtcaaagccattacagatatcattgaaatggatagcaaacgtgtgcctcgcgataagctggcatgcatcactaagtgttccaaacacattttcaacgccatcaagattacaaagaacgagccagcgagcgccgatgactttttgcccacattgatatacattgtgctgaaggggaatcctccaaggctgcagagcaacattcagtatattaccaggttttgcaaccccagccggctgatgacaggggaggatggctattacttcaccaacctttgttgcgctgtggcatttattgagaagttagacgctcagtccttgaacctatcacaagaggactttgaccggtacatgagtggccagacatccccaagaaagcaggaggccgagtcctggtcccccgacgcttgtcttggggttaagcaaatgtataagaatttggaccttctttctcaattaaatgaaaggcaggaacgcataatgaacgaggcaaagaaactggaaaaggatctcatcgactggacagacggcatcgcgcgggaggtgcaagatatagtggagaaataccctctggaaattaagcctccaaaccagccgctcgctgccattgatagcgaaaatgttgagaacgacaaactccctccaccgttacagccccaggtatatgctggctag

SEQ ID NO: 200160 - DNA, 867 bp, synthetic construct
  misc_feature 1..867: note = Description of Artificial Sequence: Synthetic coding sequence
  source 1..867: mol_type = other DNA
atggtggtggtgaccggccgggagcccgacagccggcggcaggacggcgcaatgtccagtagtgacgccgaagacgactttctggagccagctactccaactgccactcaggcaggacatgccttgcccctactccctcaggaatttccagaggtggtcccactgaacattggaggagcccatttcacaacccggctgagtacactccggtgctatgaggatactatgttggccgctatgttcagcggcaggcattacattcctactgattcagaggggaggtacttcattgatagggacgggacacactttggtgacgtgctgaactttctgcgaagtggtgacctgcccccgagggaaagggtgcgggccgtatacaaagaggctcaatattacgctatcggcccgctcctcgagcagctcgagaacatgcagccactgaaaggcgagaaggtgcgccaggccttccttgggctaatgccatattacaaggatcatctggaacgcatcgtcgagattgccaggctgcgtgccgtgcagagaaaggccaggtttgccaaactgaaagtctgtgtattcaaagaagaaatgccgattaccccatacgagtgccccctactgaatagcctccggtttgaacgctctgagagtgacgggcagttgtttgaacaccactgcgaggtcgatgtgagttttggaccttgggaagccgtcgcggatgtttatgatctcctacattgtctggtgacggatctctccgcccaggggctcaccgtggaccatcagtgtatcggcgtctgtgacaaacatctggtgaatcactactactgtaaacggcccatatacgagttcaagataacctggtag

SEQ ID NO: 200161 - DNA, 663 bp, synthetic construct
  misc_feature 1..663: note = Description of Artificial Sequence: Synthetic coding sequence
  source 1..663: mol_type = other DNA
atgaagggctacggccacaccgtgcccctgagcgacggcggcaaggctttttgcatcatttactccgtcataggcatcccgtttacattgctcttcttgacagccgtggtgcagcgtatcactgtgcacgtcacccgccgtcctgttctttatttccacatacgatggggcttttctaagcaggtggtggccattgtccatgccgtacttctgggcttcgtaaccgtgtcttgtttctttttcattcctgccgccgtgtttagtgtgttagaagacgattggaattttctggaaagtttttatttctgcttcatttctttatctaccattggtttaggcgactatgtacctggggaggggtacaaccagaaattcagagagctttacaaaatcggcatcacatgttatctcctgctaggactgattgctatgctggtagttctggaaactttctgtgagctgcatgaactcaagaagttcagaaaaatgttctatgttaagaaggataaagacgaggatcaggtccacatcatcgagcacgaccagttgtccttcagcagcatcactgatcaggctgcaggaatgaaggaggaccagaagcaaaatgagccttttgtggccacacagagttccgcatgtgtcgacgggcctgcaaatcattag

SEQ ID NO: 200162 - DNA, 1011 bp, synthetic construct
  misc_feature 1..1011: note = Description of Artificial Sequence: Synthetic coding sequence
  source 1..1011: mol_type = other DNA
atgctgcagagcctggccggcagcagctgcgtgcggctggtggagcggcacaggagtgcatggtgttttggcttcctggttctgggctacttactgtatctagtttttggcgcagtggtatttagctcagtggaactcccctacgaagacctgttacgacaagaactgagaaagctgaagaggagatttctggaggagcacgaatgcctcagcgaacagcagctcgaacaatttcttggccgcgtgttggaagccagcaactatggcgtatccgttctgtcaaatgcgtctgggaattggaattgggatttcaccagtgcactgttcttcgcatcaacagtactgagtacaacaggctacggccacaccgttcctctgtctgacggcggaaaggctttctgtatcatttattccgttattggtattccctttaccctgctatttctcaccgccgtcgtgcagcgcattactgtgcatgtcacccgccgtccagtgctctatttccatatcaggtgggggttcagtaagcaagtggtcgccatcgtccatgcagtgctgctggggtttgtcaccgtgtcctgttttttctttatacccgccgcagtcttttcagtgctggaagacgattggaattttttggagagtttttatttttgtttcatctcacttagcactataggcttaggcgactacgtaccgggtgagggctataaccaaaagttccgcgaactgtataaaatagggatcacttgctatttgttgctcggactgattgctatgctcgtggtgctggaaaccttttgtgagctgcacgaactgaaaaagttccggaagatgttctacgtgaaaaaggacaaggatgaggatcaagtgcacattattgagcatgaccaactgagcttttcctccatcactgaccaggctgccggcatgaaagaggatcaaaagcagaacgaacccttcgtcgctacacagagtagcgcctgtgtagacggcccggcaaaccattag

SEQ ID NO: 200163 - DNA, 729 bp, synthetic construct
  misc_feature 1..729: note = Description of Artificial Sequence: Synthetic coding sequence
  source 1..729: mol_type = other DNA
gtgctgcgggtgctgagccccgacctggtgcggcggctgctgaaccttgcagtcagggcctttcaggttcccaagggggagagcttgaattttcccgaaagtactcccggctatggacacaccgtgcccctgagcgacggagggaaggccttttgcattatatattccgtaattgggatccctttcacacttttgttccttaccgcagtcgtccagcggatcacagtccatgtgaccaggaggccggtgctctactttcacatcagatggggcttcagtaaacaagtggtggccatcgtgcatgccgtgctgttgggtttcgtcaccgtgagctgctttttctttattcctgcagcagtgtttagtgtgcttgaagacgattggaactttctggagtctttctacttttgctttattagtctttccaccattggtctcggtgattacgtccccggagagggatataatcagaagtttcgagaactttacaagatcgggataacttgttaccttttactcggactaatcgcaatgctggttgtgctcgagactttctgtgaactgcacgaattaaaaaaatttaggaaaatgttctacgtgaagaaagataaggacgaagaccaggtgcacattatcgagcacgatcaactgtccttttctagcattaccgaccaggctgcgggcatgaaagaagaccagaagcagaacgagccattcgtcgccacctag

SEQ ID NO: 200164 - DNA, 1632 bp, synthetic construct
  misc_feature 1..1632: note = Description of Artificial Sequence: Synthetic coding sequence
  source 1..1632: mol_type = other DNA
atggaggacggcttcaagggcgaccggaccgagggctgccggagcgattccgtcgccgtaccggcagctgccccagtctgccagccaaaatcagcaacaaatggccaaccacccgcccctgcccccactcctactccccgcctctcgatcagttccagggccacagttgtggcccgcatggaagggacctcacagggagggctccagaccgtgatgaaatggaaaaccgtagtggccattttcgtcgtagtggtcgtgtacctagttacaggagggcttgtgtttagagctctggaacaacctttcgagagttcccagaaaaataccatcgcgctggagaaagccgagtttcttcgcgaccacgtatgtgtttctcctcaggagctggagactctcattcaacatgccctggacgctgacaatgctggcgtgtctccgattggcaattcctcaaacaacagtagtcactgggacctgggctctgccttcttctttgcaggcacggtaattactacaatagggtatgggaacatcgcaccaagtaccgaagggggtaagatcttctgcattctttacgccatcttcggtattccgttgttcgggtttctcctggccggcattggcgatcagcttggcaccatcttcggcaagtctatcgcccgcgtcgagaaagtctttagaaaaaaacaagtctctcagaccaagatccgggttatctccacaatacttttcattctcgcagggtgcatcgtgttcgtgactatccccgccgttatttttaagtatatcgaagggtggacagctctggaatctatctacttcgtggtggtgacgttgactaccgtgggcttcggcgactttgtggccggcggcaacgctggtattaattaccgggagtggtacaaacccctagtatggttttggatactcgtcggacttgcatatttcgcagcggtcctgagtatgattggcgattggctgagggtgcttagtaagaagactaaagaggaggttggggaaatcaaagcacacgcagctgagtggaaagccaatgtgaccgctgagttccgtgagaccaggcggaggctaagtgttgaaatccacgataaactgcagcgcgctgcgacaatcagatcaatggaacgccgccgtctggggctggatcagcgcgcacacagccttgacatgctatctcccgaaaaacgcagcgtattcgcagcgctggacaccggtaggttcaaagcttcttcacaggagtcaattaacaataggcctaacaatttgcgcttgaagggcccagaacagttgaataagcatggccaaggcgcttctgaggacaatataattaacaaattcggatctacatcgaggctcacgaagcgcaaaaacaaagacctaaaaaaaacattgcccgaggacgtgcagaaaatttacaaaactttcaggaactactccttggatgaagagaagaaggaggaagagactgaaaagatgtgcaactctgataactcatcaacagcaatgttaaccgattgtatccaacaacacgcagaacttgagaacggaatgattcccaccgataccaaagatcgggagcccgagaacaactctcttcttgaggacagaaactag

SEQ ID NO: 200165 - DNA, 1632 bp, synthetic construct
  misc_feature 1..1632: note = Description of Artificial Sequence: Synthetic coding sequence
  source 1..1632: mol_type = other DNA
atgaagttccccatcgagaccccccggaagcaggtgaactgggacccaaaggtcgcagtccctgccgccgcacctgtgtgtcagcccaagtcagctacaaacggtcagcccccggcgcccgctccaactcccacccccagactgtcaatttcctctagggcaaccgtggtagcgagaatggagggtactagccagggcggactacagacggtgatgaagtggaaaaccgtagtggccattttcgtagtggttgtcgtgtacttggtgacaggcggcctcgttttcagggctcttgagcagccttttgagtcctcacagaaaaacaccatcgctctcgaaaaagccgagttccttcgggatcatgtgtgcgttagccctcaagagctggagacactaattcaacacgctctagatgccgataacgccggtgtttctcctattggcaacagctcaaacaactcatcgcactgggacctgggctccgcctttttcttcgccggtaccgtgatcacaacaattggatatggaaacattgcaccttccactgagggaggaaagatattctgtatactgtacgcaatcttcgggatcccattgttcggatttctactggccggaatcggagaccagctaggcaccatatttgggaaatcaattgcgcgggtggagaaagtcttcaggaagaaacaggtctcccagactaagatcagagtcatttccaccattttattcatcctggccgggtgtatcgtgttcgtcactatccccgcagttattttcaagtacatagaagggtggactgctctcgaatctatatacttcgttgttgtcacgctcaccacagtcgggttcggcgatttcgttgcgggtgggaatgctggcattaattacagagaatggtacaagccactggtttggttttggatcttggtgggactggcatactttgcggcggtcctctccatgattggcgattggcttcgcgtgcttagcaaaaaaactaaggaggaggtaggcgagattaaagctcatgccgccgaatggaaagctaatgtgactgcagagtttagggaaactcgccggcgcctgagcgtagaaatccatgataaacttcagcgagccgctaccatcagaagtatggagagacggcgtctggggcttgaccagcgtgcccattccttggacatgctatcaccagagaaacgtagcgtattcgccgcactggataccggacggtttaaagcgtcttctcaggagtccatcaacaaccggccaaataatcttcggctgaaggggcccgagcagttgaacaagcatggccagggggcaagcgaagacaatatcatcaataagtttggttcaacaagccgcttaaccaaacggaaaaataaggacttgaagaagactctccctgaggacgtgcagaagatttataagacatttaggaattattccctcgatgaagaaaaaaaagaggaagagaccgaaaaaatgtgtaatagtgataactctagcacagccatgcttaccgattgtatccagcagcatgccgagctggaaaatgggatgattccaacggacacaaaggatagagagcccgagaacaactccctccttgaggataggaattag

SEQ ID NO: 200166 - DNA, 1617 bp, synthetic construct
  misc_feature 1..1617: note = Description of Artificial Sequence: Synthetic coding sequence
  source 1..1617: mol_type = other DNA
atgttcttcctgtacaccgacttcttcctgagcctggtggccgtgccagccgccgcccccgtgtgccaaccgaagagtgccactaacggacaaccacccgcacctgcacctacccctacaccacgcctgtccattagttccagggctacggtagtagctaggatggagggcacctcccagggaggcctgcagaccgttatgaagtggaaaaccgttgtggcaattttcgtggtggttgtggtctatctcgtgaccgggggcctagtttttcgggctctcgagcagccctttgaaagctctcagaagaacacaatagcgctcgaaaaggccgaattcctgcgggaccatgtgtgcgtgtcccctcaagagctggaaactttgattcaacacgcacttgatgctgataatgcaggggttagtccaatcggcaacagctccaataactctagccattgggacctggggtccgcattcttttttgctggaacagtgataaccacaattggatacggcaatattgctccttcaacagagggggggaagatcttctgtattctttacgccattttcggcatcccattatttgggtttttactcgcagggatcggagaccagctcgggaccatctttggaaagagcatcgccagggttgaaaaggtgttccgcaagaaacaagtgtctcagacgaagatccgggtgatcagtacaatcctttttatcctcgctggttgcatcgtgtttgtcacaattcctgccgtaatcttcaaatacatcgaaggatggacggcattagaaagcatttattttgtcgtggtcactctgacgaccgtggggtttggggacttcgtggccggaggcaacgccggcattaactaccgtgaatggtataagcccctagtctggttctggattctcgtcggacttgcctactttgctgctgtgctgagcatgattggggactggttgcgtgtgctgtccaagaagacaaaggaagaagtaggtgaaatcaaggcgcatgccgcagaatggaaggcaaatgttacagcggagtttcgcgagacccggcgacggctgtctgtagaaattcatgacaaactgcaacgcgcggcaaccattcgaagcatggagagacggagactcggacttgaccagagggcccacagcctggacatgctgagccctgaaaaaaggagcgtgtttgccgcactcgacaccggacggttcaaggcctcctctcaggagagtataaataataggcccaataatctgaggcttaagggccctgagcagctgaacaagcatggccaaggagcaagtgaagacaacattattaataagttcggatccacctcaaggttaactaaaaggaagaacaaggatttgaaaaaaacactacccgaagatgtgcagaaaatctataagacattcagaaactatagcttggacgaggaaaaaaaagaggaagagacagagaaaatgtgcaattcagacaatagctccacagctatgcttaccgactgcatccagcagcatgccgaactggagaacggaatgatacccacagacaccaaggatagggaacctgagaataacagtctgcttgaagaccgcaactag

SEQ ID NO: 200167 - DNA, 1293 bp, synthetic construct
  misc_feature 1..1293: note = Description of Artificial Sequence: Synthetic coding sequence
  source 1..1293: mol_type = other DNA
atgagcagccggagcccccggccccccccccggcggagccggcggaggctaccaaggccttcttgctgttgctgttgctgtcgaaggtctcacctcaacgaggacacaggaagattcgtcctactggcggcgttgatcggactttacctggtggccggagcgactgttttttctgctttagaatcgcccggcgaggccgaagcgcgggccaggtggggcgcgaccctgagaaatttctcagccgcacatggggtcgcagagcccgaactgagggccttcttgcggcattacgaggcagctctggcagccggcgtacgggcagatgctctccggcctcgatgggacttccctggagcattctattttgtgggcacagtcgtctccacgatcggcttcgggatgaccacccctgcgaccgtgggggggaaagcatttttgatcgcttatggcctattcggatgcgcaggaacgatattgtttttcaacctgttccttgaaaggataatcagcctcctggcctttatcatgagggcttgtcgcgaaaggcagttaagacggagcgggttgctgcctgcaacttttaggcgcggttccgccttgagtgaagcagatagcctcgccggctggaaaccgagcgtgtaccatgtcctcctgattttgggtctgtttgccgtgctgctttcttgttgtgcttccgcaatgtacacctccgttgagggctgggattatgtggatagcctctatttctgtttcgtaacttttagtaccatcggtttcggtgatctggtgagctctcagcacgccgcttaccgaaatcaggggctgtacaggcttggcaatttcttatttattctcctcggcgtctgctgcatttacagcctgttcaacgtgataagcatcctaatcaaacaggtactgaactggatgcttaggaagctctcctgccgctgttgtgcccgctgttgtcctgctcctggcgctcccctggctagacgaaatgcaatcacgccaggatctcgcctccggagacggctcgccgctttaggcgctgatcccgccgcccgggacagtgatgcggagggaaggcgtctaagtggagagcttatttcaatgcgggacctcaccgcctccaacaaggtgtctcttgcactactccaaaaacagttatccgagaccgcaaacggctatccccgttctgtctgcgtgaacacccgccagaacggtttttccgggggtgtcggagctctggggattatgaataaccggctggccgaaaccagtgcctcccgctag

SEQ ID NO: 200168 - DNA, 1227 bp, synthetic construct
  misc_feature 1..1227: note = Description of Artificial Sequence: Synthetic coding sequence
  source 1..1227: mol_type = other DNA
atggccggccggggcttcagctggggccccggccacctgaacgaggataatgcacggttcctgctcctcgccgccctgatcgttctgtatctgttgggcggcgccgcagtctttagcgccctggaactggcccacgagcgtcaggccaagcaaaggtgggaggagcgcttggcaaatttctctcgcgggcataacctgtcccgtgatgagctgagaggcttcttgagacactacgaggaggctacacgggcaggtatccgggttgataatgtgaggcccaggtgggactttacaggcgccttctacttcgttggcacagtagtcagcacaatcggtttcggaatgaccacacccgctactgtagggggcaagatctttctgatattctacggtctagtaggatgctcttctactatcctgtttttcaatctttttctggagcgcttgataaccatcatcgcctacatcatgaaaagctgtcaccagcgccagctgcgacggcggggagctctgccgcaagaatctcttaaggatgcgggacagtgcgaggtggacagcttggctggatggaaaccaagcgtatactacgttatgctcatcctctgcacagcatctatcctcatctcttgttgtgccagtgctatgtacacaccaatcgaggggtggtcgtattttgacagcttatacttctgcttcgtcgccttctctactatcgggtttggggatctggtaagttcccagaacgcccactacgagagtcaggggttataccgcttcgcaaatttcgtgtttatccttatgggggtgtgctgtatctattcattatttaatgtgatctcgattctgattaagcaatcgctgaattggatccttaggaaaatggatagcggttgttgcccccaatgccagcgcgggctcctacgaagccgtcgaaacgtagtgatgcccgggagcgttaggaatcgctgcaatatttccatagagaccgacggagtggccgagagcgatacagatgggcgtcgtttgagcggcgagatgatcagcatgaaagatttactcgccgcgaacaaggctagtcttgccattcttcagaaacaattgtcagaaatggctaacggatgtccccaccagacttcaaccctagccagagacaatgagttcagtgggggagtaggcgctttcgctattatgaataacaggctggctgaaaccagcggagaccggtag

SEQ ID NO: 200169 - DNA, 993 bp, synthetic construct
  misc_feature 1..993: note = Description of Artificial Sequence: Synthetic coding sequence
  source 1..993: mol_type = other DNA
atgcggcggcccagcgtgcgggccgccggcctggtgctgtgcaccctttgctacctgctggtgggagctgctgtcttcgatgctctggagtctgaggccgagtccggacggcaacggctgttggtccagaaacggggcgccctgcggaggaagttcgggttctctgcggaagactaccgagaattggaaagattggctctccaggcagagccacatcgggcaggacggcagtggaagtttcccggatccttctatttcgccatcacagtcatcacaaccatcgaatatggccacgcagccccagggacagatagtggaaaagtcttttgcatgttttacgccctccttggcattcccctcacacttgtgacattccagagcctgggggagcgtctcaacgcagttgtgagacgactactcctggccgcaaaatgctgtctgggattgcgatggacgtgtgtgagtactgagaatctggtcgtggccgggcttttagcatgtgcggccacactcgccttgggcgctgtcgcattttctcatttcgagggatggacctttttccatgcctattattattgctttatcaccctcaccaccataggttttggcgactttgtggcactgcagtccggagaagccttgcagagaaaactgccttatgtagctttctcctttctgtacatcttattggggctaactgtaatcggagcattcctgaatctcgttgtactcagattccttgtcgcttctgccgactggccagaacgcgcagcgcggacgcccagcccgcggccaccaggtgcccctgagtcccgagggctctggctgcctcgacggcctgcacggtcagtaggctcagcatctgtcttctgccacgtgcacaaactggagaggtgtgcccgggataacctggggttcagccccccctcatccccaggtgttgtccggggaggtcaagcccctcggctaggagcacggtggaagtcaatttag

SEQ ID NO: 200170 - DNA, 789 bp, synthetic construct
  misc_feature 1..789: note = Description of Artificial Sequence: Synthetic coding sequence
  source 1..789: mol_type = other DNA
atgcccagcgccggcctgtgcagctgctggggcggccgggtgctgccactactgctcgcctatgtgtgttatctactgctgggcgctaccattttccagctgttggaaaggcaggctgaagcgcagtcaagggaccagtttcaactggagaagctgcggtttctggaaaactacacctgcctggaccaatgggcaatggagcaatttgtgcaagtgatcatggaggcctgggtaaaaggcgtcaatcctaaggggaactcaaccaaccccagcaactgggactttggctcaagctttttttttgccggcacagtggtgaccaccatcgggtatggcaacctggcaccaagcacagaagctgggcaagtcttctgcgtattttacgcactgcttgggatcccattgaacgtcattttcctcaatcacctgggaaccgggctccgcgcacacctggctgccatcgagcggtgggaagataggcccagaagatctcaagttctccaggttctgggccttgctttgttcctgacactggggaccctcgttatcctgatatttcctcctatggtgttctcccacgtggaaggctggagctttagtgagggcttttatttcgctttcatcacactcagtacaatcggattcggagactatgtcgtcgggctgcgccaaggatgtggagcgaaggccgcgcctgggcgcaggccacgtcgaggctctaccgccgcacgcggagtgcaggtgactccacaggactttccgatcagcaagaaaggactgggttcctag

SEQ ID NO: 200171 - DNA, 930 bp, synthetic construct
  misc_feature 1..930: note = Description of Artificial Sequence: Synthetic coding sequence
  source 1..930: mol_type = other DNA
atgcccagcgccggcctgtgcagctgctggggcggccgggtgctgccactacttcttgcctacgtatgttatctgctgctcggggctactatattccaattgctagagcggcaggccgaggcacagtcgcgggaccagtttcagttagagaagctgcggtttctggaaaactacacttgcctggaccagtgggccatggaacaattcgttcaggtaatcatggaggcctgggtgaagggcgtgaatccaaaaggtaacagcacaaatccaagcaactgggatttcgggtccagcttcttttttgctgggacagtcgtgacgaccattggttacggtaacctggcgccatccacagaagctgggcaggtcttctgtgtgttctatgcgctgttaggtatacccctcaatgtcatctttttgaatcatctcggtacaggccttcgagctcatctcgccgcaattgagaggtgggaggaccgccccagacgaagtcaggtactacaagttctcggtctggcattattcctcacgcttggaactttagtcatactgatctttcctcccatggtcttttcccatgtggaggggtggtcgttctccgaaggcttctacttcgccttcatcacgttatccactattggtttcggggactacgtcgtgggcaccgatccaagcaagcactatatttctgtataccgctccctcgctgcaatctggattctgctgggtctcgcttggctggcactgatccttcctctgggtccactcttattgcatcggtgctgccagttgtggctgctgtccctgcgccaaggctgtggcgctaaagccgcgccaggaagacggcctcgtcggggcagcacagctgctaggggagtgcaggtaacacctcaggactttcccatttcaaaaaagggcctaggctcctag

SEQ ID NO: 200172 - DNA, 969 bp, synthetic construct
  misc_feature 1..969: note = Description of Artificial Sequence: Synthetic coding sequence
  source 1..969: mol_type = other DNA
atgcccagcgccggcctgtgcagctgctggggcggccgggtgctgcccttgctgctggcgtacgtctgctatctgctgctcggagccacaattttccagctgttggagagacaggccgaagcccagagccgagaccagtttcaattggagaagctgcggtttctcgaaaattatacctgcctagatcagtgggcaatggaacaatttgttcaggtgatcatggaagcctgggtcaaaggtgtcaaccccaaaggaaacagcaccaacccgagcaattgggactttggatctagctttttctttgcgggcaccgtggtgaccactatcggttacggaaacctggccccgtctaccgaagccggacaggtgttctgcgtgttctacgccctactgggcatcccactgaacgtgatcttcttgaaccatttagggacagggctgcgcgctcatctggcggcaatagaacgttgggaggatcgccctcggagaagtcaggtgctgcaggtgctgggcctcgccctattcctcaccttgggcacccttgtgattctcatttttcccccaatggtgtttagccacgtggaggggtggtcctttagtgaaggcttctattttgcctttattaccctttccactattggtttcggtgattacgtggtcgggcatcctctcaatttcataaccccttccggcctgctcccctcccaagagcctttccagacgccacacggaaaaccggagtcacaacaaattcccggctcatttcaaaaggtgtcatcaatgaatgtgtggccccttagcggaatgcactctcccgggttagcgttccctctaccagattgtaatatacctgaccaggaacggtttaggccattgcaccccggagcttggaagttttggcccctgccacttccaagctctaactccaagtgggcgcccatgtggctggggagctctgcgcaggtttag

SEQ ID NO: 200173 - DNA, 885 bp, synthetic construct
  misc_feature 1..885: note = Description of Artificial Sequence: Synthetic coding sequence
  source 1..885: mol_type = other DNA
atgcccagcgccggcctgtgcagctgctggggcggccgggtgctgccccttttgttagcctatgtgtgctacctcctcctgggagctacaatctttcagctactggagcggcaagctgaggctcaaagccgggaccagtttcagctcgagaaactcaggtttctggagaattacacctgtctggaccagtgggccatggagcaattcgttcaggtgattatggaagcctgggttaaaggcgtgaatcctaaaggtaatagcacaaacccgtctaactgggatttcggcagctcctttttttttgcggggactgtagtgaccactattggctacggcaacctggcaccttccacagaggctgggcaagtattctgcgtcttttacgccctgttgggcatccctctgaatgttatctttctcaatcatcttgggaccggtttaagggcgcaccttgcggcgatagagcgctgggaagaccggccacgaagatcccaggtccttcaggttctgggactggccttattcctcacccttggaacgctggtgatcctgatcttccctcctatggttttttcacatgtggaaggatggtctttctccgagggattctacttcgccttcattactctgagcactattgggttcggcgactacgtagttggtacagatcctagtaaacattatatcagcgtgtacagatcccttgcagcgatatggatcctgctaggcctggcgtggttagctctgatattgcctctcgggcccctgttgctgcacagatgttgccagctatggctcctgagtcggggcctaggtgtgaaagatggcgccgcttctgacccaagcggactgcctcgcccacaaaagatccccatctccgcatag

SEQ ID NO: 200174 - DNA, 594 bp, synthetic construct
  misc_feature 1..594: note = Description of Artificial Sequence: Synthetic coding sequence
  source 1..594: mol_type = other DNA
atggagcagttcgtgcaggtgatcatggaggcctgggtgaagggcgttaatcccaagggcaattccactaacccaagcaattgggactttggttcatcgttcttttttgcggggaccgtggtgacaaccatcgggtatggcaatctcgctccctcaacagaggctggccaagtgttctgcgtgttctatgcgctgctcggaattccgttaaacgttatattcttaaaccatcttgggaccgggttgcgagcccacctggccgcgattgaaagatgggaagatagacccagacggtcccaggtactgcaagttctggggctggccttgttcctgactctgggtactctcgttattctgatcttccctcccatggtcttcagccacgtcgagggttggagtttttccgaaggattttatttcgcctttattactctgtcaaccatcggctttggagattatgtcgtgggcctgcggcagggatgcggggccaaggccgcgcctggaagacgacctcgcaggggaagcacggccgcccgtggggtacaggttactcctcaggactttcccatatcaaaaaaaggcttgggtagttag

SEQ ID NO: 200175 - DNA, 999 bp, synthetic construct
  misc_feature 1..999: note = Description of Artificial Sequence: Synthetic coding sequence
  source 1..999: mol_type = other DNA
atgtaccggccccgggcccgggccgcccccgagggccgggtgcggggttgcgccgtgccttcaaccgtcctgctcctgctcgcgtacctcgcatacctagccctgggtaccggagtgttctggactctggagggtagagctgcacaggatagctctcgatcgttccagcgagacaaatgggaattgctacagaactttacatgccttgacagacctgctctcgactctttgatcagagacgtggttcaagcctataaaaatggagccagcctgctgtctaacactaccagcatgggaagatgggagttagtaggatccttcttctttagcgtaagcacaatcacaacaatcgggtacgggaaccttagccccaacaccatggcggcccgccttttctgcatcttcttcgccttagtggggatccccttgaatctggtggtgctgaaccgcctgggacacttaatgcaacagggagtgaatcactgggccagcaggctgggaggtacatggcaggaccccgacaaagccagatggctcgcagggagtggtgctttgttgtccggattgctgctttttctgctcctgcctcctctgctgttttcacatatggaggggtggtcttacacggaaggtttctacttcgcattcatcacgctgtcaacggtagggttcggggattatgtgattgggatgaaccccagccaacgctaccccctctggtacaaaaatatggtgagcttatggatcctctttgggatggcttggctggctctgattatcaagttaattctgagccagctggaaacccccggacgcgtatgcagttgctgtcaccattcttctaaggaggatttcaaaagccaatcatggcgacagggacccgatagagaacccgaaagccattctcctcagcagggatgctatccagagggcccgatggggatcatacagcatttagagcctagcgcccatgcagccggctgcggaaaggattcatag

SEQ ID NO: 200176 - DNA, 816 bp, synthetic construct
  misc_feature 1..816: note = Description of Artificial Sequence: Synthetic coding sequence
  source 1..816: mol_type = other DNA
atgtaccggccccgggcccgggccgcccccgagggccgggtgcggggctgtgctgttccaagcactgtgctcctgttgttggcttacttggcttatttagcccttggaaccggagtcttttggactttggaaggtcgcgcagctcaggactcttctcgttcctttcagcgagataaatgggagcttctgcagaatttcacttgtctggaccgccccgccctagattctttgattcgcgatgtcgtccaggcgtacaagaatggagcctctctcctctccaacactacatctatgggaaggtgggagctggtgggatcatttttcttcagcgtgtccactatcactacaatcgggtacggaaacctgtctcccaacactatggcggctcgcctcttttgcattttcttcgctctcgttggaattccgctgaacttagtggtgctaaatcgcctggggcatctgatgcagcagggagttaaccactgggcgtcccggctgggtggcacatggcaagacccagataaggctcggtggttagccggcagtggcgcccttctaagtgggctgctgctgtttttactgttgccaccccttctgttctctcacatggaaggttggtcctataccgaaggtttttattttgcattcatcaccctgtccactgtggggttcggcgattacgtgatcgcctcttgcctcatcagtgatactagaaaacctaaccgggactggcagaccctcgagaggacctccaaatcctcggggggcctgttgaagtaccggtttctggctggccacggggggtctcatctgtag

SEQ ID NO: 200177 - DNA, 1155 bp, synthetic construct
  misc_feature 1..1155: note = Description of Artificial Sequence: Synthetic coding sequence
  source 1..1155: mol_type = other DNA
atggaggtgagcggccacccccaggcccggcggtgctgccccgaggctcttgggaaactcttccctggtctgtgcttcttatgtttcttggtcacctatgctttggtaggcgcggtcgttttcagcgccatcgaggatggtcaagtgctggttgctgcagatgatggcgaattcgagaagtttttagaggaactttgtaggattttaaactgcagtgaaactgtagtggaagaccggaaacaggacctgcagggacacctgcagaaggttaaaccccagtggttcaacagaactacgcattggtccttcttgtctagtctgttcttctgctgtacagtcttttccaccgtgggatacgggtatatttaccctgtcactaggctgggcaaatacctctgcatgctttatgctctctttgggatccctctcatgtttctcgtactcactgacaccggggatatattggccaccatcctaagcacttcttataaccgcttcagaaagtttcctttcttcaccaggcccctcctaagtaaatggtgtcccaaatcattgtttaagaaaaagcctgacccaaaaccagccgatgaagccgtccctcagatcatcatctccgccgaggaactcccgggcccaaagctaggcacctgtccttcaaggccctcatgctcaatggagctctttgagagaagccacgctctcgagaaacagaatactctgcagcttccacctcaggccatggaacgcagcaattcatgccccgaactcgtgcttggtcgactctcgtattcaatcatttctaatttggacgaggtgggccaacaggtcgagcgccttgacatccccctgcctattattgccctgatcgtttttgcctacatctcatgtgccgccgctatattacccttctgggagacccagttggatttcgaaaatgccttctatttctgctttgttacgttaaccacgatcggatttggagacacagtgctcgagcatcctaatttctttctgtttttctcaatttacataatagtgggcatggagattgtctttatcgcttttaaactcgtgcagaacagattgatcgatatatacaaaaatgtgatgctcttcttcgcaaagggcaagttctatcatctagtaaagaaatag

SEQ ID NO: 200178 - DNA, 459 bp, synthetic construct
  misc_feature 1..459: note = Description of Artificial Sequence: Synthetic coding sequence
  source 1..459: mol_type = other DNA
atgatgaacccccgggccaagcgggacttctacctggccgcccccgacttgctggatccaaagtctgccgcacagaattccaaacctaggctttcattcagtaccaagcccacagttctggcctcaagggtcgagtctgataccacaatcaacgttatgaaatggaagactgtctctactattttcctcgtcgttgtcctgtatctcattattggtgccaccgtctttaaggccctggaacaacctcacgagatttcccagcggactaccatagtgatccagaagcagaccttcatcagtcagcactcatgtgtaaatagcactgagcttgatgaattgattcaggaccttgaaactagtcatcacgcccaaaaagccgcgaaatacagcgtcagctctatgccctactgggagttccccagcctcgtgttctcttggttggaattggaaatctcttag

SEQ ID NO: 200179 - DNA, 1236 bp, synthetic construct
  misc_feature 1..1236: note = Description of Artificial Sequence: Synthetic coding sequence
  source 1..1236: mol_type = other DNA
atggccgcccccgacctgctggaccccaagagcgccgcccagaactcgaagccccgactgtcattttcaaccaagcctaccgtattagcatctagagtggaaagcgatacaacgataaatgtgatgaagtggaaaactgtttcaactatttttttagtggtggtattgtacctcattataggggcaacagtttttaaggccttagaacagccacacgaaatctctcagagaacaacaatagtgatccaaaaacaaacctttataagccagcacagctgcgtgaactctacagaacttgatgagctgatccaacagatcgtggcggctataaacgccggaataataccattaggtaatacttcgaaccagatcagccactgggacctgggctccagctttttttttgctggcaccgttatcaccacaattggttttggcaatattagcccacgaaccgaggggggcaaaatcttctgcataatttatgctcttctgggcatacctctcttcggattcctgctcgccggcgtgggggaccagctagggacgattttcggcaaggggatagccaaagtcgaggacacattcattaagtggaatgtctcccagaccaagattcgaattatcagtactatcatcttcatcctgttcggatgcgtgcttttcgtggccctgccagctataattttcaagcacatcgagggatggtctgctttggacgctatctattttgtggttattacactgaccactatcggatttggagactacgttgccggaggcagtgacatcgagtatttggacttttataaacccgtggtgtggttttggattctggtcgggttggcttatttcgccgcagtattatctatgataggggattggctcagggtgataagcaaaaagacgaaagaggaagttggggagtttcgggcgcacgctgccgaatggacagcgaatgtgactgcagagttcaaagaaacccgcaggcggctgtccgttgaaatttacgacaagttccaaagagctaccagcatcaaaagaaagctgagcgccgagctggctgggaaccataaccaggaactgaccccatgccggaggacgctgtcagtcaaccatttgacaagtgagcgcgatgttctgcccccgcttctaaagactgaatctatttatctcaatgggctaacaccacattgcgccggcgaagaaattgctgtgatcgagaacatcaagtag

SEQ ID NO: 200180 - DNA, 1269 bp, synthetic construct
  misc_feature 1..1269: note = Description of Artificial Sequence: Synthetic coding sequence
  source 1..1269: mol_type = other DNA
atgatgaacccccgggccaagcgggacttctacctggccgcccccgacctcctggatccaaagtcggccgctcagaatagtaagccccgcctgagcttttccaccaagccaacagtgctggccagccgcgttgagagcgacaccaccattaatgtcatgaagtggaaaacggtgtccaccatcttcctggtggtggttctttatctcattatcggggctacggtcttcaaggctttagagcagccgcacgaaatttcccaacggactaccattgtgattcaaaagcagacgtttatttctcagcattcttgcgtgaactccacagaactcgacgaacttatacaacagatagttgctgctatcaacgctggcattatccccttggggaacacaagcaaccagatctcccactgggatttgggttcatcctttttcttcgccggcacagtcattactaccattgggtttgggaacatttctcctcggaccgagggtggaaaaatattctgcataatttacgctctcttgggaattcccttgttcggcttcctcctggccggtgtcggggatcagttagggaccatatttgggaaagggatcgcaaaagtggaagacaccttcattaaatggaacgtcagccagactaagattagaatcatctccactatcattttcatcctcttcggctgcgtactgttcgttgctctgcctgcaataatcttcaaacacattgagggttggagcgctctggatgcgatttactttgttgtgatcaccctgaccaccatcggattcggggattacgtggcaggagggtccgacatcgagtacttggacttctataagcctgtggtgtggttctggattctggtcggcctagcttacttcgccgcagttttatctatgatcggagattggcttcgagttattagcaagaagacaaaggaggaagtgggggaattcagagcccacgcagccgagtggacggcgaatgttaccgcggagtttaaagagaccaggaggagattgtccgtggaaatctacgataaattccaacgtgccacctccattaaacgaaagctgtcagccgagcttgccggtaatcataaccaggagctgacgccctgccgtagaacgctatccgtcaaccatttgacgtctgagcgggatgtgctcccccccctcctgaaaaccgaatccatttatttaaacggactgactccccactgcgctggagaggaaattgcggtgattgaaaacatcaagtag

SEQ ID NO: 200181 - DNA, 1281 bp, synthetic construct
  misc_feature 1..1281: note = Description of Artificial Sequence: Synthetic coding sequence
  source 1..1281: mol_type = other DNA
atgctgcccagcgccagccgggagcggcccggctaccgggccggcgtcgcagcccccgaccttttggaccccaagtcagccgcacagaatagcaaaccccggctctccttttcgacgaaaccgactgtcttagcctccagagtggaatccgacaccactataaatgttatgaaatggaagacggtgtctaccatattcttagtcgtggtgttgtatctaattattggcgcaaccgtcttcaaagccctggagcagcctcatgaaatctcacagaggactacgatcgtcattcagaaacaaacatttatctcgcagcattcttgtgtgaactcgactgagctggacgaactcatccagcagatcgtcgccgcaatcaacgcgggaatcattcctctgggaaatacaagcaatcaaatcagtcactgggatctgggatcatcattcttctttgccggtacggtgatcaccaccataggattcgggaatattagcccgagaaccgagggtggcaagattttttgcattatttacgcgctcctaggaatccccttgttcggcttcctgctcgctggcgtgggtgaccagcttggaactatcttcggaaaaggtatcgcgaaagtggaagatacgttcattaagtggaatgtgtcacaaactaagatcaggatcatctctacaatcatattcattctctttggatgtgtgctgttcgttgcattgccagcaatcattttcaaacacattgaaggttggtccgccctggacgcgatctacttcgtggtgatcacactcacaacgataggattcggagattacgtagccggagggtctgatatcgagtaccttgatttctacaaaccagtggtctggttttggatactcgtggggctggcatatttcgcagccgtgttatctatgattggggattggttaagggtgatttcaaagaaaaccaaggaagaagtcggggagttcagggctcatgctgcagagtggacggccaacgtgactgctgagttcaaggaaaccaggcggaggctgtctgttgaaatttacgataaattccagcgggccacgtccattaaaagaaaactgtccgctgagctggcaggaaatcacaaccaggaactaactccttgccgaaggacactgagtgtaaatcatttaacaagcgaacgtgacgttctgccaccattgcttaagacggaaagcatatacttaaatgggcttactccccattgtgccggagaagaaatcgcggtgattgaaaacatcaagtag

SEQ ID NO: 200182 - DNA, 687 bp, synthetic construct
  misc_feature 1..687: note = Description of Artificial Sequence: Synthetic coding sequence
  source 1..687: mol_type = other DNA
atgatgaacccccgggccaagcgggacttctacctggccgcccccgatctgctggaccctaagagcgcggctcaaaacagtaagccacgcctatcattcagtaccaagcctacggtcttggcaagtagagtcgagagcgataccaccatcaatgttatgaagtggaagactgtatcaaccattttcctggtcgtagttctgtatttgatcattggggccactgttttcaaagcgctggaacagccccacgaaattagccaacggacaaccattgtgatccagaaacagactttcatttcacagcacagctgtgttaattctaccgaactggacgagctgattcaacagatcgtcgccgcgatcaatgccgggatcatccccctgggaaacacatccaatcagattagccactgggacctcgggagcagcttcttttttgccggtacggtcatcactacaatagggtttgggaacatctcacccaggaccgaagggggaaagatcttttgtattatttatgctctgttaggcatccccctcttcggcttcctgctagccggggtgggggaccagctcgggaccatttttggaaaaggaatcgcaaaagtcgaggacacgtttatcgttgaccccatcctgaacatatggacaagtatcagtctttcttgcgggtcagggtccctgtag

SEQ ID NO: 200183 - DNA, 471 bp, synthetic construct
  misc_feature 1..471: note = Description of Artificial Sequence: Synthetic coding sequence
  source 1..471: mol_type = other DNA
atgctgcccagcgccagccgggagcggcccggctaccgggccggcgtggccgcccccgacctgctggaccctaagtcagcagcccaaaattcaaaaccgcggctctccttttccacaaagcctactgtcctagcaagtagagtggaatcagatactaccataaacgtgatgaagtggaagacagtgtctactatcttcctggttgttgtgttgtacttaattatcggcgctactgtcttcaaagcactggagcagccacatgagataagccagcggaccacaatcgtgattcagaagcagacatttatcagccagcactcttgcgttaactctactgagctcgacgagttgatccaggatttagaaactagtcatcacgcccaaaaagccgcaaagtacagcgtcagctctatgccctattgggagttcccatccttagtattcagctggctggagctggagatctcgtag

SEQ ID NO: 200184 - DNA, 459 bp, synthetic construct
  misc_feature 1..459: note = Description of Artificial Sequence: Synthetic coding sequence
  source 1..459: mol_type = other DNA
atgatgaacccccgggccaagcgggacttctacctggccgcccccgacctgctggaccccaaatccgcagcccagaactcaaaacccagactctccttctccacaaagcctacagtgttggcctcaagggtcgagtccgatacaacgatcaatgtgatgaagtggaaaaccgtgagcaccatctttcttgtcgtcgtcctttacctgataattggggccactgttttcaaggccttggagcaacctcacgaaatcagccagaggaccacaatcgtgatacagaagcagacattcatctcgcaacacagctgcgtgaacagtacggaactcgacgagcttatccaagaccttgaaacgtcccaccatgcccagaaagccgcaaaatatagcgtttcatctatgccgtactgggagttccctagcctcgtgttctcctggctggaacttgagatatcttag

SEQ ID NO: 200185 - DNA, 1185 bp, synthetic construct
  misc_feature 1..1185: note = Description of Artificial Sequence: Synthetic coding sequence
  source 1..1185: mol_type = other DNA
atgaagcggcagaacgtgcggaccctggccctgatcgtgtgcaccttcacctacctgctcgtcggtgccgccgtgtttgatgccctcgagtccgagccagagctgattgaaagacagcgactcgaactacgtcagcaggagctccgggcgcgatataacctgtctcagggcggctacgaagagctggagcgggttgttctgcggctcaaaccccacaaggccggagtacagtggaggttcgccgggagcttttactttgccatcacagtgattacaactataggctatggccatgcggccccctccaccgatggcggtaaggtcttttgtatgttctatgcgctactggggataccactgactttagtgatgttccagtctctcggcgaaagaattaacaccctagtgagatatctgttgcatcgtgccaagaagggcctcgggatgaggcgtgcagacgtgtctatggccaacatggtcctcatcggattctttagctgtattagcaccttatgcattggcgccgcagcgtttagccactacgaacattggacctttttccaagcatattactactgcttcattactttgactacaatcggattcggagattacgtggctctgcagaaggatcaggctcttcagacccagcctcagtatgtggcgttttcttttgtgtatattttaacgggccttacagtgattggtgcctttctcaatctggtcgtgctgaggttcatgactatgaatgcagaggatgagaagcgagacgccgaacatcgcgccttgctgacccgcaacggccaggcaggtggcggtggcggaggtggctcagctcacactacagatactgcttcttccacggccgctgctggcggcggcggtttcaggaatgtgtatgctgaggttctgcattttcagtctatgtgctcctgtttgtggtacaagtcccgcgaaaagttgcagtattccatccctatgattatcccacgcgatctatccacatctgacacatgtgtggaacagagccactcctcacctgggggaggcggtaggtattctgatacccccagtagacggtgcctatgctccggcgcacctagatccgccatcagtagtgtaagcacggggttgcattctttatccaccttccggggactgatgaagcgacgatcgtctgtgtag

SEQ ID NO: 200186 - DNA, 816 bp, synthetic construct
  misc_feature 1..816: note = Description of Artificial Sequence: Synthetic coding sequence
  source 1..816: mol_type = other DNA
atgttccagagcctgggcgagcggatcaacaccctggtgcggtacttgcttcaccgcgctaagaagggtttgggaatgcgtagagccgatgtgagcatggctaatatggtccttattggttttttttcatgtatctctactctctgtattggcgcagctgctttttcacattatgaacactggacatttttccaggcttactactattgttttatcactttaaccacaatcggttttggggactatgtggccctgcagaaagaccaagcgttacaaacccagccgcagtacgtagccttcagtttcgtgtacattcttactggcctgacagttattggcgccttccttaatcttgtggttttaagatttatgaccatgaatgctgaggacgaaaaacgggacgctgagcacagggccctactgacacggaatggccaagcgggagggggaggcggcggaggatccgcacatactaccgacacagcaagttctaccgctgctgcgggcggcggcgggtttcggaacgtctacgcggaggtcctgcacttccaaagcatgtgttcgtgcctgtggtacaagtctcgggagaagcttcagtattcaattcctatgataatcccgcgggacctgtccacttctgacacctgtgttgaacagtcacactccagtccaggcggcggcggacgatattcagatactccaagcaggcgctgcctctgttctggagctccgcgcagcgccatctcctccgtctcgaccggattacacagcttgtctacctttcgcgggctgatgaagagacgaagttcagtctag

SEQ ID NO: 200187 - DNA, 1182 bp, synthetic construct
  misc_feature 1..1182: note = Description of Artificial Sequence: Synthetic coding sequence
  source 1..1182: mol_type = other DNA
atgcggagcaccaccctgctggccctgctggccctggtgctgctgtacctcgtgtcaggtgctctggttttcagagctctggaacagcctcacgagcagcaggcccagagagagctaggtgaagtgcgggaaaagttcctgcgggctcatccttgtgtttccgatcaggaactgggccttttgataaaggaggtggccgatgctcttggagggggggccgatcctgaaactaactccacaagtaatagttcccattctgcatgggatctcggttcagcctttttcttcagtggaacaatcatcactaccattggttatgggaatgttgctcttcgcaccgacgccggacggctattttgtatattctatgccctggtcggtatcccactctttggcattctcctggccggagtcggtgaccgcctgggctcttcacttcggcacggcatcggccatattgaggcaatctttctgaagtggcacgtccctcccgagctggtgcgtgtcctttcagccatgctcttcctgcttatcggatgcctcttgttcgtgctgacgcccacttttgtgttctgctatatggaggattggagcaagttggaagccatttacttcgtcatcgtgactcttacgactgtaggcttcggtgattatgtggccggggccgatccacgacaggattccccagcataccagccgttggtgtggttctggatactcttgggcttggcctattttgcgtccgtcctgactactattggcaactggttgcgagtcgtgagcagaagaacgcgggctgagatgggggggctgactgcccaggcggcctcctggacgggcacagtgaccgccagagtcactcagcgggccggtccggccgcccctccacccgaaaaggagcagcccctcctgccacctcccccctgtcccgcccagcctttgggcagaccacgctcgccttcaccccctgagaaagctcaacctccaagtcctccgacagcctctgctctggattaccctagcgaaaacttggcttttatcgacgagtcatccgacacccagtcagagagaggatgtcccctccctagggctccccgaggacgccgccggcctaatccacctagaaagcctgtgcggcctcgcggtcccgggcggcccagagataaaggcgtccctgtgtag

SEQ ID NO: 200188 - DNA, 1182 bp, synthetic construct
  misc_feature 1..1182: note = Description of Artificial Sequence: Synthetic coding sequence
  source 1..1182: mol_type = other DNA
atgcggagcaccaccctgctggccctgctggccctggtgctgctgtatctggtatcgggagccctggttttccgcgcactggagcagccacatgagcaacaggcacagcgggagctgggagaggttagagaaaaatttttgcgggcgcatccatgcgttagtgatcaggagctcggcctcttaatcaaagaggtggcggacgccctcggaggtggtgcagatccagagacaaactcgacatccaattcttcccatagcgcttgggacctaggcagcgcattcttttttagtggcaccatcatcaccaccattggatatggaaacgtagctctgaggacagacgctgggcggctgttttgcattttttatgccctggtgggcatacctctgttcggcatcctgctcgcgggagtgggtgaccggctcggctcaagtctgcgccacgggataggccacatcgaggccatctttctgaagtggcacgttccccccgagctagtgagagttctgagtgctatgctttttctgcttattggttgcctcctgtttgtactgacacccacatttgtcttctgttacatggaggactggtcaaaactggaagctatctatttcgtaatcgtgacactgactactgtcggtttcggcgactacgtggccggagctgatcctcgacaggacagcccagcctatcaacccctggtttggttctggatcctactgggcctcgcctatttcgcatccgttcttacaacaataggcaactggctgagagtcgtaagccgaagaactcgtgccgagatgggagggttgacagctcaggccgcctcttggaccggcacagtgaccgcccgggtcacacaaagagcagggcctgccgccccacccccagaaaaggaacagcctctgttaccccccccgccttgccccgcccaaccactgggtcgcccaaggtctccgtcaccacccgaaaaagctcagcccccgtccccccccacagccagcgcgctggactacccctctgaaaatctggccttcatcgatgagtcaagcgacactcagtctgagaggggctgtcccctgcccagagccccacgggggcgccgtaggcctaacccccctagaaagcctgtgcgtcccagaggtcctggccgaccacgcgacaaaggagttcccgtgtag

SEQ ID NO: 200189 - DNA, 1182 bp, synthetic construct
  misc_feature 1..1182: note = Description of Artificial Sequence: Synthetic coding sequence
  source 1..1182: mol_type = other DNA
atgcggagcaccaccctgctggccctgctggccctggtgctgctgtatctggtgagtggtgctttggtatttagggcactcgagcaaccccacgagcaacaggcccagcgggaactgggcgaagtgcgcgagaaatttcttcgcgcccacccttgcgtgtccgaccaggaattaggcttgctcataaaggaagttgccgacgccctgggtggcggggctgaccccgaaacaaatagcacctccaatagctcccacagcgcttgggatctaggcagtgcctttttcttcagcggtacaatcatcacaacaattgggtacggcaatgtcgccctgcggactgatgccggcagactcttctgtatcttttacgcacttgttgggatcccactctttgggatccttttagcaggagtaggggatcggttggggagctctctccgccacggcattgggcacatcgaagctatttttctcaaatggcatgtcccgccagagctggtgagagtactaagtgcaatgctttttctgctgatcggctgtctgctcttcgtgctcactcctaccttcgtcttctgttacatggaagattggtctaagttggaggccatttattttgttatagtgacactaacaaccgtcggtttcggggactacgttgcaggagcagaccccagacaagactcccccgcctaccagcctctggtttggttctggatcttactgggactggcgtacttcgccagcgtcttgacgacaattggcaactggcttcgagtagtgtcaagacggactcgtgccgagatgggcggtcttaccgcacaggccgcgagttggaccgggacagtcactgctcgtgttacccagagggccggacccgcagctcctccaccggaaaaggaacaacccctcctacctccccccccttgcccagcccagccactgggccgcccacggtccccttctcccccagaaaaagcgcaacccccatcgccccctacggcgtctgcactggactaccccagcgaaaatctagcctttatcgatgaaagttccgacacgcagagcgagcgggggtgtcctctacccagagctccgagagggaggcgacgtcccaatcctccccgtaagcctgtcagaccccgggggccgggccgcccgagagacaagggcgtgccagtctag

SEQ ID NO: 200190 - DNA, 1257 bp, synthetic construct
  misc_feature 1..1257: note = Description of Artificial Sequence: Synthetic coding sequence
  source 1..1257: mol_type = other DNA
accaccgccccccaggagccccccgcccggcccctgcaggccggcagtggcgccgggcctgcccccggccgagccatgcgtagtaccaccctgctggccctgctggcccttgttctcctttatttagtgtccggagctctcgttttccgcgcattggaacagccccacgagcagcaagcccagcgggaacttggggaggtccgggagaagttcctaagagcacacccttgcgtcagtgatcaggaactcggattattaatcaaagaggtggcagacgctttgggaggcggggctgatcccgagacaaattccaccagtaatagcagccacagtgcttgggacctgggcagtgctttcttcttttctggcacgataatcacgaccattggatatggaaacgtagccctgagaacagacgccggccgcctcttctgtatcttctatgccctcgtcggaatacctctgttcggtattttgctggcgggtgtcggcgacaggctcgggagttcactgcgacacggcattggccatatcgaagccatcttcctaaaatggcatgtccctcccgagctggtccgtgtgttgtctgccatgttattcctcctaatcggttgtttgcttttcgtgctgacaccaacttttgtattctgttacatggaagattggagtaagttggaagccatatacttcgtgatcgtgacccttacgaccgttggcttcggcgattacgtcgccggagcggatcctcggcaggattcgccggcttaccagccgctggtgtggttttggattctgctgggcctcgcatatttcgcctcggtgctgactaccatcggcaactggctaagggtggtgtcccggcggaccagagcagaaatgggcggactgacagctcaggcagccagctggactggaaccgtcactgcacgggtgactcaacgggccggccctgctgccccgccaccagaaaaggaacagcctctcctccctcctcccccctgtcctgcccagcccctcggcaggccaagatcccccagcccaccggagaaggcccaacctccaagcccgccaacggcgagtgctctcgactacccatccgaaaatcttgcctttattgatgagagttctgatactcagagcgagcgcgggtgcccccttccccgggctcctcgagggcgccggaggcctaacccgccccgcaagcccgttaggccgcggggccccggaaggcctcgtgacaagggagttcctgtttag

SEQ ID NO: 200191 - DNA, 1368 bp, synthetic construct
  misc_feature 1..1368: note = Description of Artificial Sequence: Synthetic coding sequence
  source 1..1368: mol_type = other DNA
gtgcacgccagcgtgcacacccgggtgcggggcctgtgggtgccctggagagggcggcatgctcacgggggcagaggctgccgtggagtgtgcggcgagtgccggtgggttaccaccgccccgcaggaaccccctgcacgcccactccaggccggctccggcgccggtcccgccccaggccgggccatgcggagtactacattgttggcccttctggctcttgtgctgctatacctcgttagcggtgctcttgtcttccgcgcactcgaacaaccccatgagcaacaggcacagcgcgagctgggggaagttagggagaaattccttcgagcccacccctgcgtctccgatcaagagttggggctactgattaaggaggtggcagacgccctagggggcggtgccgaccccgaaaccaattcaacctccaactccagtcattctgcgtgggacctcggaagcgccttttttttcagtggcacaattattactactattggctatgggaatgtcgcactgaggactgatgctggccggctgttttgtatcttctatgctctggtgggtatacccttatttggaatcctcctagctggtgtgggcgatcggttgggatcctctctgaggcatgggattggacatatcgaagccatcttcctgaaatggcacgtacctcccgagcttgttcgggttttgtctgcaatgttgttcctgttaataggctgcctgctgttcgtgctgacccctacttttgtgttctgctatatggaagactggagcaaactggaggctatttacttcgtcattgtgacccttaccacagtgggcttcggcgactatgtagccggagcagaccctcgtcaggatagccccgcttatcagcccctggtttggttttggatcctactgggcctcgcttattttgcctccgttctcaccaccatcggcaactggctcagggttgtgagtcgacggactcgagcagaaatgggcggattaaccgcccaggccgcgtcctggacaggcacagtcaccgctcgggtgacccaaagagctgggcctgccgccccccctccagaaaaggaacaaccactgctcccccctcccccttgcccggcacagcccctcggccgtccgaggtctccctcgcccccagaaaaggcgcaaccaccgagtcctcctaccgcatcagctctggattacccaagcgaaaacctggcgtttattgacgagtcttctgacacgcagtccgagcgaggctgtcctctccctagagctcctcgtgggcgccggcggcctaaccccccaagaaaacccgtgaggcccagaggccctggcaggcctcgtgacaagggagttcccgtgtag

SEQ ID NO: 200192 - DNA, 1500 bp, synthetic construct
  misc_feature 1..1500: note = Description of Artificial Sequence: Synthetic coding sequence
  source 1..1500: mol_type = other DNA
atggtggaccggggccccctgctgaccagcgccatcatcttctacctagcaatcggggccgcaattttcgaggtgctggaggaaccccattggaaagaagccaaaaagaactactacacgcagaaattgcacctgctgaaggagttcccctgcttgggacaggaaggcttggacaagatcctggaagtcgtctctgacgcagcgggccaaggagtcgcaatcacgggcaatcaaactttcaataactggaattggcccaatgcaatgattttcgccgcaacagtgatcaccactattggctatggaaacgtcgcccctaagacacctgccggcaggctgttctgtgttttctacgggctcttcggcgtgcctctttgcctgacctggatctctgctctcgggaaattctttggaggccgtgccaaacgcctggggcagttcctgacgaaacggggtgtcagtctgcgtaaggcccaaataacatgtaccgtcatattcatcgtatggggcgtgttggtgcatcttgtgattccaccattcgtgttcatggtgaccgagggctggaattacatcgaggggctctactacagctttatcacaatatccaccatcggtttcggtgattttgtggcgggcgtgaacccttccgccaactaccacgccctgtaccgctactttgttgagttatggatatacttgggcctcgcttggctttccttatttgttaactggaaggtgtcaatgttcgtggaggtgcacaaggccattaagaaacgacggagacgccggaaggagagttttgagtcatcaccgcattcccgcaaagccttacaagtcaagggcagtaccgcctctaaagacgtaaatatatttagtttcctatctaaaaaggaagagacctataatgacctgataaaacagatcggaaagaaagccatgaaaacctctggtggcggcgaaacgggtcctggcccaggcctcgggcctcaaggcgggggtcttcctgcactgcctccatccctcgtgccccttgtagtgtactccaagaatagggtgcctacgctggaggaggtcagtcagaccctgcgctccaaagggcatgtctcccgcagcccagacgaggaggcagtggcacgggcacccgaggactcctccccagcgcccgaggtgttcatgaaccagcttgatcgaattagcgaagagtgcgagccatgggatgcccaagattatcatccacttatctttcaggatgcttcaattactttcgtcaatactgaagccgggctgagtgatgaggagacatcgaagagcagcttagaggacaatctggccggggaggagtcaccccagcagggggccgaagccaaagctcctcttaatatgggggagttcccatcatcttctgaatccaccttcactagtaccgagtccgagctctcagtgccctatgaacagctgatgaacgaatacaacaaggctaactctcccaagggtacctag

SEQ ID NO: 200193 - DNA, 942 bp, synthetic construct
  misc_feature 1..942: note = Description of Artificial Sequence: Synthetic coding sequence
  source 1..942: mol_type = other DNA
atgcggcggggcgccctgctggccggcgccctggccgcctacgccgcttaccttgtcttgggtgccctcctggttgccagactggagggaccacacgaagcccgactaagggccgaactcgagacccttagagctcagctcttacagcgaagcccatgcgtggcagccccggctttagatgccttcgtggaacgggtgctggctgccggccgcctgggaagggtcgtgttggccaatgcaagcgggagtgccaacgcgtccgaccccgcttgggacttcgctagtgctctattctttgcttcaacgctgattactacggttggctacgggtataccacaccactgaccgatgccgggaaagcattcagcatcgcctttgccctgctgggagtgcctactaccatgctgctcctcactgcttctgcacagcgtctatccctgttactcacacatgtgccattgtcttggctgagcatgagatggggttgggaccccaggcgggctgcttgttggcatcttgtggccttgctaggggtggtggtcaccgtttgcttcctggtccctgctgtgatattcgcccacctggaagaggcttggtcttttttggacgcgttttatttttgcttcatttccctgagtactattgggctcggggattatgttcccggagaggcacctggccagccataccgggcattatataaggtactggtcacagtttacctctttctcggccttgttgcaatggttttagtgcttcaaacttttcgccatgtttccgacctccacggcctgactgagctgatcttgttacctccaccttgcccagcttcgtttaatgcagacgaagatgatcgggtagacatattaggacctcaacctgaatctcaccagcaactgagcgcctcatcacacacagattatgcctccattcctaggtag

SEQ ID NO: 200194 - DNA, 924 bp, synthetic construct
  misc_feature 1..924: note = Description of Artificial Sequence: Synthetic coding sequence
  source 1..924: mol_type = other DNA
atgggcggcctgcggccctggagccggtacggcctgctggtggtggctcacctgctcgccctgggactcggggccgtggtgtttcaggccctggagggaccgcccgcctgtcgcctgcaggctgagctgagggccgaactcgcagcctttcaagctgaacaccgcgcgtgcctgccaccaggggccctggaggagcttttggggaccgcactcgctacccaggctcacggtgtaagcacacttggtaacagcagtgagggaaggacgtgggacctgccatctgctctcttgttcgcagcctcgatcctgacaacaactggttatgggcacatggctccactctcacctggtggcaaggccttttgcatggtgtatgcggcactcggcctgcctgccagcctcgccctggttgcaaccctgcgacactgcctgttgcccgtgcttagcaggccacgggcatgggtggccgtccactggcaattgtccccagcaagagcagccctcctccaggcagttgcgctggggctgctggtcgcctcctctttcgttctgctgcctgccctggtcctgtgggggcttcagggcgactgcagtttgcttggcgctgtctatttctgtttctccagtctgagcactatcggccttgaggatctcctcccaggcagagggcggtcattgcatccagttatataccacctcggccagctggccctcctgggatatttgttgcttggcctgctcgctatgctgcttgccgttgaaactttctccgagctgccacaggtgcgcgccatgggaaagtttttccgccctagcggtcctgtgaccgctgaagaccaaggaggcatcctcggtcaggatgagcttgccctgagcacattaccccccgcagcacctgcctctgggcaggcccccgcttgttag

SEQ ID NO: 200195 - DNA, 759 bp, synthetic construct
  misc_feature 1..759: note = Description of Artificial Sequence: Synthetic coding sequence
  source 1..759: mol_type = other DNA
atgggcggcctgcggccctggagccggtacggcctgctggtggtggcacatcttctggctctgggccttggagctgtggtttttcaagctttggagggaccaccggcatgtagactccaagccgaacttagggccgaactcgccgccttccaggcggagcatagagcctgtctgcctccaggcgccctggaggagctcctaggcacagctctcgctacgcaggcacacggcgtctctacgctgggaaatagctcggaggggcggacctgggacctgcctagtgcactcctctttgccgctagtatattgactaccaccggttacggacacatggctccgctgagccccggaggcaaagcgttctgcatggtatatgccgcgttgggactgcccgcgtctcttgcgctggtggccacgctgaggcattgtctgctgcctgttctatccagaccccgcgcgtgggtcgccgttcattggcagctgtcgccggcacgtgccgccctgctgcaagccgtggccctgggcctgctcgtggcaagctctttcgtgctgctgcccgctctggtcctgtgggggttacaaggcgactgtagtttgttgggagccgtttacttttgtttttcttccctctccacaatcggcctggaggacctgttacctggacgcggacgaagtctgcatccagttatctatcatctcgggcagttagccctactggggggagggacctctcttcaaggaacagcatgggaagggtag

SEQ ID NO: 200196 - DNA, 774 bp, synthetic construct
  misc_feature 1..774: note = Description of Artificial Sequence: Synthetic coding sequence
  source 1..774: mol_type = other DNA
atgggcggcctgcggccctggagccggtacggcctgctggtggtggcccatctgctagctcttggcctgggggccgtcgtgttccaggcccttgaggggccgcctgcttgcaggctacaggcagagctgcgggcggaactggccgcctttcaagccgaacatagggcgtgtctcccgccaggagctcttgaggagctactaggaacagccctcgcaactcaagcccacggagtttcaacattgggaaattcctccgagggcagaacttgggacctgcctagtgctctcctctttgctgcatcaatactgactacaaccggttacggccacatggccccgttgagcccgggcgggaaggctttttgtatggtgtatgctgccctcggactccccgcttctttggcactggtggccacactgcgccattgtctgctgcccgtcctcagccgcccgcgcgcttgggttgccgtgcactggcagctctcccccgcacgggccgctctgctccaggctgtggcgctgggactcctggttgcttccagtttcgtcctgttgcctgcccttgtgctctggggactgcagggtgactgtagcctgttaggggccgtgtacttctgtttcagcagtctctctactattggccttgaggaccttctgcccgggcgtggaaggtccctgcaccctgtgatctatcatctgggccagttggcccttttgggtaagtccagccacctaacagcttgtggaggccgcggtaaacggtctctggactag

SEQ ID NO: 200197 - DNA, 759 bp, synthetic construct
  misc_feature 1..759: note = Description of Artificial Sequence: Synthetic coding sequence
  source 1..759: mol_type = other DNA
atgggcggcctgcggccctggagccggtacggcctgctggtggtggctcacctattggccctgggactgggggcagtcgtgttccaggcgttagaaggccccccagcctgcaggctgcaggcagaattacgggcggagctggccgcctttcaagccgaacatcgggcatgtttgcccccgggtgccctcgaggaacttttggggacagcactggccacacaagcccacggggtgtctactctaggcaatagcagcgaggggcggacctgggacctcccgagtgccctactttttgctgctagcatacttacaacgacagggtatgggcacatggcccctctctcgccagggggaaaagccttttgtatggtgtatgcagctttagggctgccagcatcactggccctcgtggccactcttcgtcattgccttcttcctgtgttaagtaggcctagggcttgggtcgctgtacattggcagctctctcctgccagagctgccttgctgcaggccgtggcgctaggtttgctcgtggccagcagcttcgtgctcttgcccgctctggtcctgtgggggctgcagggcgactgtagcttgctcggcgcagtctacttttgcttctctagtttaagcaccatcggcttggaagacctgttgcctggccggggacgctcactgcatccagtcatttaccatttggggcagcttgcacttctgggcggcggcacgtccctgcagggtaccgcttgggagggatag

SEQ ID NO: 200198 - DNA, 87 bp, synthetic construct
  misc_feature 1..87: note = Description of Artificial Sequence: Synthetic coding sequence
  source 1..87: mol_type = other DNA
tgactgcaccccgtgatctaccacctgggccagctggccctgctgggtggcggaacatccctccagggaacggcctgggaaggttag

SEQ ID NO: 200199 - DNA, 1125 bp, synthetic construct
  misc_feature 1..1125: note = Description of Artificial Sequence: Synthetic coding sequence
  source 1..1125: mol_type = other DNA
atgaagcggcagaacgtgcggaccctgagcctgatcgtgtgcaccttcacatacctgctggtgggcgcggccgtgttcgacgctcttgaatcagaccatgaaatgagagaggaagaaaaattgaaagccgaggaaatcagaattaaaggaaaatataacatttcttctgaggactatcgccagcttgagttggtgatcctccagtccgagccgcaccgcgccggcgtccagtggaagttcgcgggcagcttctatttcgccatcaccgtaatcaccactatcggttatggccatgcagctcctggtaccgatgcaggtaaggcgttttgcatgttctatgcagtgctgggtatccccctgacattagtgatgttccagagtctgggagaacgcatgaacacgttcgtcagatacctgctaaagagaatcaaaaagtgttgtggcatgagaaatacagatgttagtatggagaatatggtgacagtggggtttttcagctgtatgggaacattatgcatcggcgccgcagcgttttcacaatgtgaggagtggagcttctttcacgcgtactattattgttttatcacactgactaccattggcttcggtgactatgtggcgctccagactaaaggagcactgcagaaaaagccactgtacgttgccttcagtttcatgtacatactggtcgggcttacagtaataggagcttttctgaatctcgtggttctgagattcctgacaatgaatagcgaagatgagcggcgagacgccgaggaacgggcatccctcgccgggaacagaaattccatggtcatacacatccctgaggagccacgcccaagcaggccacggtacaaagccgacgtgccagacctgcagagcgtttgttcatgtacctgctaccgcagtcaggattatggggggcgaagcgtggcgccacagaacagtttttcagcaaagcttgctccacactacttccattccatctcctacaagatagaagagatctccccatctacgttaaaaaactccctgttcccaagccccatctcaagcatttcccctggccttcatagcttcacggaccaccagaggctgatgaagagacggaaatctgtctag

SEQ ID NO: 200200 - DNA, 1125 bp, synthetic construct
  misc_feature 1..1125: note = Description of Artificial Sequence: Synthetic coding sequence
  source 1..1125: mol_type = other DNA
atgaagcggcagaacgtgcggaccctgagcctgatcgtgtgcacctttacttatctgttagtgggcgctgcagtctttgacgcactagaaagtgaccacgagatgcgcgaagaggaaaagctaaaggctgaggagattagaattaagggcaagtataatataagttctgaggactataggcagctggaactggttatcctacagtcagaaccacatagagcaggagtgcagtggaagttcgccgggtcattctactttgcaatcacagtgatcaccactatcggatatggacatgctgcccccgggaccgacgcaggtaaggccttttgtatgttctacgccgtactaggaatccctctcactttggtgatgttccagtctctgggtgagcgaatgaacaccttcgtgagataccttctgaagcgcatcaagaaatgctgtgggatgcgcaatactgacgtctcaatggagaacatggtgaccgttggatttttttcctgtatgggcaccctgtgcattggggctgctgcatttagccaatgcgaagagtggagcttctttcatgcctattattattgtttcatcactctgacgactatcggcttcggagactacgtcgctctacaaactaaaggcgccctgcagaagaagcctctgtacgtcgcgttcagctttatgtatatcctggtggggctcaccgtcatcggcgcatttctaaatctggtagttctgcggtttctcactatgaatagtgaagatgagcggcgcgatgccgaggaaagggcctcactggcaggaaaccggaattccatggtgatccacatcccagaggaaccccgcccgtcaagacctaggtataaggccgacgtgcctgacctgcaaagcgtttgcagttgcacgtgttatagaagccaagactatggtggccgatccgttgccccccagaattcctttagcgcaaagctggccccccactattttcattcgattagctataaaatagaagaaatctccccctcaacattaaaaaactcgctgttcccctcccccatttcttccatctctccgggcctacattcttttaccgaccaccagcgactgatgaagagacggaaatctgtgtag

SEQ ID NO: 200201 - DNA, 1125 bp, synthetic construct
  misc_feature 1..1125: note = Description of Artificial Sequence: Synthetic coding sequence
  source 1..1125: mol_type = other DNA
atgaagcggcagaacgtgcggaccctgagcctgatcgtgtgcaccttcacttacctcctcgtaggcgcagccgtattcgatgcactcgagagcgatcacgagatgagggaagaggagaagctgaaagccgaagaaattagaattaagggtaagtataatatctcctctgaggattatcggcagctggagctggttatactgcaaagcgaaccccatagagcaggagtgcagtggaagttcgccggatctttctactttgctatcaccgttatcacaaccattggatatgggcacgccgctcctggcacagacgccggcaaggccttttgtatgttctatgctgtcctcggaatccccttgactctggtgatgtttcagagtcttggggaaaggatgaatacgtttgtgagatatctgcttaagcgcattaaaaagtgttgcggtatgcgcaatacagacgttagcatggagaatatggttaccgtcggcttcttctcttgtatggggacactttgtattggcgctgcagcttttagccaatgcgaagagtggtccttctttcatgcctactactattgtttcattactctgacaacgattgggtttggagattacgtggcgttgcagactaagggcgctctgcagaagaaacctctgtacgtagcattctcttttatgtacatcttggtcgggctgaccgtgatcggagcattcctgaatctcgtggtgttgaggttcctgacaatgaactcagaggacgaacggagagacgccgaggagagggcctctctggcgggtaatagaaattcgatggttatccacatacccgaagagccccggccatccaggcctcgatacaaggcagacgtgccggatcttcagagcgtctgtagctgcacatgttacagatctcaagactacggtggtaggagcgtggcgccacaaaacagcttctcagctaagctagctccacactacttccactcaatcagctacaagattgaagagatcagcccttctacactgaagaactcactgttcccaagtcccatttctagtatctcccctgggctccacagtttcacagaccatcagaggcttatgaagaggcgcaagagcgtgtag

SEQ ID NO: 200202 - DNA, 3693 bp, synthetic construct
  misc_feature 1..3693: note = Description of Artificial Sequence: Synthetic coding sequence
  source 1..3693: mol_type = other DNA
atggcccgggccaagctgccccggagccccagcgagggcaaggccggccccggcggtgccccggcgggagccgccgcacctgaggagccacacgggctctcaccgctgctgcctgccagagggggcgggagcgtaggaagtgacgtcggtcagcggttgcctgtcgaagatttcagcctcgattcttcgttaagccaggtacaagtggagttttacgtgaacgagaacacattcaaggagcgcctgaagcttttttttatcaagaaccagagaagctcactgcgcattcggctttttaatttttctctgaagctattgacgtgtctcctctacatagtgagggtcctccttgacgaccctgccctaggtatcggatgctgggggtgtcccaaacagaattacagctttaacgactcaagttctgagatcaactgggcaccaatcctgtgggttgaaaggaaaatgaccctgtgggcgatccaagttatcgtcgctatcatctctttcctcgaaaccatgctcctcatttatctgagctacaagggaaatatctgggagcaaatctttcgggtcagctttgtgcttgaaatgatcaacaccctgccattcattattactatattttggccccccctgcgcaacctatttattccagtttttttgaattgttggcttgcaaaacatgcgctggagaatatgatcaatgacttccaccgagccatcttacgtacacaatctgctatgtttaatcaggtacttattttgttttgcaccctgctttgtctggtgtttacgggaacatgcggaatacaacacttggagcgggccggggaaaatctgtctctgttgacgtcattttacttctgcatcgtaaccttcagcacagtaggctatggtgacgtgaccccaaagatctggccttcgcagctgcttgtggtgataatgatatgcgtggcacttgtcgtgctccctctgcagttcgaagagctggtgtatctgtggatggagaggcagaagtcaggtggaaactactcccgccatcgggctcagacagaaaagcacgtggtgttgtgcgtcagcagcttgaaaatagatctattgatggacttcctcaacgaattctatgcccatcctagattgcaagattattacgtagtcattctctgcccaaccgagatggacgtacaggtgcgaagagttttacagattccactgtggtcccaaagagtgatataccttcagggaagcgctttgaaagatcaggatttgatgagggcgaaaatggacaacggcgaggcctgctttatccttagctcccgcaatgaggtagaccggacagcagctgatcaccaaacaatcctacgtgcctgggcggtgaaggacttcgcacctaattgcccgctgtatgtgcagattttgaaaccagaaaacaaattccatgtaaaattcgctgaccatgtggtttgcgaagaggagtgcaagtacgccatgctggcgctgaattgcatttgcccggccactagcactttaatcacactgttggtccatactagtcgaggccaagagggccaagaatcgcccgagcagtggcagcgaatgtacggcagatgctcgggcaatgaggtgtaccacattaggatgggcgattcgaaattttttcgggagtacgagggcaagagctttacctatgcggcgttccacgcccataagaagtatggcgtgtgcctgatcggcctaaagagggaagataacaagagcatccttctcaaccctggtccacgacatattcttgccgccagcgatacctgtttttacatcaacattaccaaggaggagaactctgcttttatcttcaagcaagaggagaaacggaagaaaagagccttcagtgggcaggggttgcacgaaggtccagcccggctgcccgtgcactctataattgcttcaatgggcaccgtggcaatggatctgcaaggtaccgaacatagacccacacagtcgggcggaggaggcggcgggagcaagctagctctgccaacagaaaacggatctggatctcggcggccatcaattgctccagtcctcgaactcgccgatagttctgcactcttaccttgcgatcttctgtcagatcagagtgaggacgaagtgacaccaagcgacgatgaagggctgagtgtggtggagtacgtgaaagggtatccacccaactcgccttacatcgggagttctcctacgctgtgccacttgctgcctgttaaagctcctttttgctgtctcaggcttgacaagggctgcaagcacaactcttatgaagacgccaaggcctacggctttaaaaataaactaatcatcgtgtctgccgaaaccgcgggcaatggcttatacaattttattgttcctctgagagcatattaccgaagtagaaaagagctcaaccctattgtcctcctgctcgataataaacccgatcatcacttcctggaagctatctgttgcttcccgatggtctattacatggagggaagcgtagataatctggatagtttgctgcagtgtggaattatttacgctgacaacctcgttgttgtggataaagaatctaccatgagcgctgaagaggattatatggccgacgccaaaaccatcgtaaacgtccagacaatgtttaggttgttcccgtctctctccatcaccaccgagctgacccatcctagcaacatgagattcatgcagttcagagccaaggacagttacagcctggccctctcaaaacttgaaaaaagagaaagagagaatggcagtaacctggccttcatgttccgcctcccgttcgcagccggaagggtgttcagtatctccatgctggataccctactttatcaatcttttgttaaagactacatgatcactatcacgcgccttctcctaggactcgatactacacccggcagcggatatctctgtgccatgaaaatcacggagggagatctctggatcagaacctacgggagacttttccagaaactatgctcaagttcagcagagataccaattggaatttatcgcacggagagccacgtgtttagcacatccgagtctcagatcagcgtgaatgtggaagactgtgaagacacaagggaggtgaaggggccttggggcagcagggccggcactggaggaagctctcaaggcaggcacaccggaggtggtgaccctgctgagcatccactccttcggcgcaagagtctgcagtgggcacgtcggctttctcggaaagcccctaagcaggccggcagagccgccgcagccgaatggataagccagcagagactgtctctgtaccggaggagtgaacgccaagagcttagtgaactcgttaagaacaggatgaagcatctggggctccccaccaccggttatgaagatgtggccaatctcacggcatccgacgttatgaatcgtgtgaatcttggttacttacaagacgagatgaatgatcatcagaacacactatcctatgtgctgatcaaccctccgcccgatactaggcttgagccaagtgatatcgtttacctgataagatccgatcccctcgcgcatgtggcaagctcgtctcaaagtcggaaatcaagctgttcgcacaagctcagtagctgtaatcccgaaacccgggatgagacacagctgtag

SEQ ID NO: 200203 - DNA, 3771 bp, synthetic construct
  misc_feature 1..3771: note = Description of Artificial Sequence: Synthetic coding sequence
  source 1..3771: mol_type = other DNA
atgcccctgcccgacggcgcccggacccccggcggcgtgtgccgggaagcacggggaggcggatacaccaatcggacctttgagttcgacgacggccaatgcgcccctagacgcccatgcgctggagatggcgcgctgttggacactgcaggctttaagatgtccgacctcgatagtgaagtgctgcccctccccccccggtacagattcagggatcttctcttgggagacccctcattccaaaacgacgaccgagttcaagtcgagttctacgtcaatgaaaacaccttcaaggaacggctgaagcttttttttattaaaaatcaaagatcaagtctgagaatcagactgtttaactttagcctcaagcttctgacatgtcttctgtatatagttcgagtcctgctggacgatccagctttgggaattgggtgctggggatgtcccaagcaaaattactcattcaatgatagtagtagcgagatcaattgggctcctattctctgggtggaaaggaagatgactctctgggccatacaggtgatagtggccatcatctctttccttgaaactatgctactcatctacttaagttacaaaggcaacatatgggaacagatattccgggtgtcttttgtgttggagatgattaacactttacctttcatcatcacaattttctggcccccgctccgaaacttatttattcccgtatttttgaactgttggctggctaagcacgcccttgaaaatatgattaatgacttccaccgcgcaatccttaggacccaatccgccatgttcaatcaggtgctgattttgttttgtactctcttgtgcctcgtgttcacagggacctgtggcattcagcacctggagagggccggagagaacttgagcctgctcaccagtttctatttttgcattgtgaccttctctaccgtgggatatggagacgtgaccccaaaaatctggcctagtcagctcctggtagtgatcatgatctgcgtggccctggtagtgctacccctgcaatttgaggaactcgtttatctctggatggagagacagaagtctggtggcaattatagccgacaccgggcgcagacggaaaagcacgttgtgctgtgcgtctctagtctgaaaatagacctgctaatggattttctgaacgagttttacgcccaccctcggctgcaggactactacgttgttattttatgccctacggaaatggacgttcaagtaaggcgggtcttgcagatacccctgtggagccagcgagtaatttacctgcaggggtccgctctcaaagaccaagacctaatgagggctaaaatggacaatggcgaagcttgtttcatcctgagtagtcggaacgaggtggatcggactgccgctgatcaccaaaccattctgcgagcctgggccgtcaaagattttgcgcccaactgtcccctttacgtgcagattctgaagccggaaaataagtttcatgtcaagtttgccgatcatgtggtctgcgaggaggaatgtaagtacgccatgttggccctgaactgtatctgccccgcgaccagcaccttaattaccctgttggtccacaccagtaggggacaagaaggccaggagtctccagagcagtggcagcgaatgtacgggcgttgttccggcaacgaagtctaccacattagaatgggagattctaagttctttcgcgaatatgaaggtaaatcgttcacgtacgctgcgtttcacgcgcacaagaagtatggagtgtgccttatcggtctgaagcgtgaagataacaagtctattctcctgaatccaggccccaggcatatactcgcagcttcagacacttgtttttatatcaacataactaaggaggaaaactctgccttcatcttcaaacaggaggaaaaacgcaaaaagagagcattttctggtcaaggactccacgaggggcccgcgcgactgcccgtccattccatcatcgcgagcatgggtacggtggccatggatcttcagggcaccgagcatcggccaactcagtctggggggggaggaggtggaagtaagctggctctgcccacagagaacgggtcgggaagcagacgcccttctattgctccagtgctggaactggctgactcttccgccctgttgccttgcgatttattgagcgatcaaagcgaagacgaggtgacgcctagcgacgacgagggcctgtccgtggttgagtatgtgaaagggtaccctccaaactctccatatattggctcatcacctaccctttgccacttgttacccgtcaaggctcccttttgctgccttcggctggataaaggttgcaaacataacagctacgaagatgccaaggcctatgggttcaaaaacaaactaattatagtttctgcagaaaccgcaggaaatggattgtacaatttcatcgtgccgctccgagcttactataggtctcgaaaagagttaaatccaattgtgctgctgctggataacaaacccgaccatcacttcctagaagcgatctgttgtttcccgatggtctattatatggaaggttccgtagacaacctagactccctcctgcaatgcggcataatatatgcagacaatttggtcgtggtcgacaaggaaagcactatgtccgccgaagaagactatatggctgatgctaagacaattgtcaacgtgcagactatgttccggctgttccccagcttgtccattacaaccgaactaactcaccctagcaacatgagattcatgcaattccgcgccaaagatagctattcactcgccttatccaagctcgaaaaacgcgagagggagaacggttctaatctggctttcatgtttcggctgccctttgctgccggcagagtttttagtattagtatgcttgataccctcctgtatcaatcctttgtgaaggactacatgatcaccataacaaggctgctcctggggctggacaccactccaggttcggggtacctgtgcgccatgaagataaccgagggcgacctgtggattagaacctacgggcgcctgtttcagaagctgtgctccagctcggcggagatccccattggtatatacaggacagagagccacgtcttctcaacaagcgagccgcacgacctgagggctcagagccagatctccgtgaatgttgaggactgtgaggatacccgtgaggtcaaaggtccatggggtagcagggccgggaccggaggctcatcacagggacgccacacaggggggggcgatccggccgagcatcctctgttgagacggaagtcgctgcagtgggcgcgaaggcttagccgaaaagcccccaaacaggccggccgagccgccgctgctgagtggatttcccagcagaggctatcactttataggcgcagcgaacgacaagagctctctgagctggttaaaaaccggatgaagcacctgggtctgcccacaaccggatatgaggatgttgctaatctgacagccagcgacgtgatgaatcgagtcaacctgggatacttgcaggatgagatgaatgaccaccagaacaccctttcctacgtcctgatcaacccacctccagacactcgcctggaaccctcagacattgtgtacctgattcgcagcgatcctctcgcacatgtggcatcaagctctcaatcacggaaaagcagctgttcccacaagctctctagttgcaatcccgagactagagacgagacccagttatag

SEQ ID NO: 200204 - DNA, 3708 bp, synthetic construct
  misc_feature 1..3708: note = Description of Artificial Sequence: Synthetic coding sequence
  source 1..3708: mol_type = other DNA
atgcccctgcccgacggcgcccggacccccggcggcgtgtgccgggaggctcgggggggtggctacactaacaggactttcgaattcgatgacggccagtgcgcacccaggcgaccctgtgcgggggatggggctttgcttgatacagctggcttcaagatgtctgacctggattccgaagtgttgcccctgccaccaaggtacaggttccgcgatcttttgttaggagatccttcattccagaatgacgatcgcgtacaggtagaattttatgtcaatgagaacacatttaaagagcggttgaagttattctttatcaaaaaccagagatcttccctgcgtatccgcctcttcaatttttctctgaagctattgacatgcctgctgtatatcgtgcgcgtcctgctcgatgatccggctctggggatcgggtgttggggatgtccaaagcagaattattccttcaatgacagctcgagcgaaattaattgggctcctattctgtgggtggagaggaagatgacactatgggcaatccaggtcatagtggctattataagttttctcgagacgatgctgttaatttatctgagctataaggggaacatctgggaacagattttccgcgtctctttcgtgctagagatgatcaatacactcccttttattatcaccatcttctggccccctctgagaaatttgtttatccccgtctttttgaactgctggctggccaagcatgcccttgagaacatgatcaacgattttcatagagcgatattaagaacacaatctgcgatgttcaatcaggtccttattctgttctgtaccctattgtgtctggtgttcacgggtacctgtggcatacagcacctggagcgcgccggtgagaacctcagtctattgacaagcttctacttctgtatcgtgacattcagcactgtgggctacggcgacgtcacaccgaagatctggccgtcacagctcctcgtggtgattatgatctgcgtggcactggttgtcctgcctctccagttcgaagagctggtgtatctttggatggaaagacagaaaagcggaggaaattactccaggcaccgtgctcaaacagagaaacacgtggtactttgtgtgtcgagcttgaagatcgaccttctaatggatttcctcaacgagttctatgcacaccctagattgcaggactattatgtggtaatcttgtgtcccaccgagatggacgtgcaagtacgacgggtcctgcagattcccttgtggtcacagagggttatctatctgcagggctcagccctcaaggaccaagatctgatgcgagctaaaatggacaacggagaggcatgttttatcttgtcaagccggaatgaggttgacagaactgctgccgaccaccaaacaattcttcgagcgtgggcagtgaaagatttcgccccaaattgccccctatacgtacaaatcctcaagcccgaaaataagtttcatgtaaagtttgcagatcatgtagtttgcgaggaggaatgtaaatacgctatgctcgcactcaattgtatttgtcccgccactagcactttgataacgctgctagtgcatacgtcacgaggtcaagaaggccaggaatctcccgagcaatggcagagaatgtatggccggtgttctggtaacgaagtgtatcacatacgcatgggcgattccaagttttttcgtgagtacgaaggaaaaagctttacgtacgccgcattccacgcccacaaaaagtacggggtgtgtctgattggcttgaaacgcgaggataacaaaagcatcttgctcaacccaggcccccgacacattctggcagcaagcgacacatgcttctatataaatatcactaaagaagagaatagcgcatttatttttaagcaggaggagaagcgcaaaaagcgcgccttttcagggcaaggactacatgaaggaccagcccggctgccagtgcatagtattatcgcatccatgggaactgtggccatggacctccagggcacggagcaccgtccgacccaatctgggggtggtgggggcggctctaaactggccctacctactgagaatggctccggctctagaagaccatccatcgcacctgtccttgaactggcagactcgtccgccttgttgccttgtgacttgttgtcggatcagtcggaggatgaggtgactcctagtgacgatgagggcttatcagtggtggagtacgtcaaggggtaccctcccaattctccctacattggttcaagtcctacactatgtcatttgctccctgtgaaggcacccttttgttgccttcgactggataagggctgcaagcacaattcgtacgaagatgctaaagcatacgggtttaaaaacaagctcattatagtgagcgccgagaccgcgggtaacggcctttataatttcattgtcccccttagggcctactaccggtctcggaaggaattgaaccccatcgtgcttctgctagacaacaagcccgatcatcattttctcgaagcgatatgttgcttccctatggtgtactatatggaagggagtgttgacaatctcgatagcttgcttcagtgtgggattatttacgcggataacctggtagttgtggataaagaatctacaatgagcgccgaggaagattacatggcagacgccaagactatcgtaaatgtccagaccatgtttcgactgtttccctcattgagcatcacgacagagttaactcatccaagtaatatgcgttttatgcaattccgggccaaggattcatacagtctcgctttgtctaagttagagaaaagagagcgtgagaatgggagtaacctcgccttcatgtttagactgcctttcgcagccggcagagtcttcagtatttccatgctggacaccctgctgtaccagtcctttgtgaaggattacatgatcaccattaccagacttcttcttggccttgacacgactcccggcagtggatacctttgtgccatgaagattacagaaggagacttgtggattcggacctacggccgactctttcaaaaactgtgttcctcttccgccgaaattcctattggcatctataggactgagagccatgtattcagcaccagcgagccacacgacttgcgagctcagtcccagatctcggttaacgtggaagattgcgaagacacccgggaggtcaagggaccatggggtagccgcgcaggaacggggggaagcagtcaaggcagacataccggaggtggggatccggccgagcaccccttgctgcgacggaagtcactgcagtgggcccgacgtttaagcaggaaggcccccaaacaagctgggagagcggccgcagccgaatggattagccagcagcgtctgtcactttatcgccggagtgaaagacaggaactgagcgaacttgtcaaaaatcggatgaagcacctcggactccccacaaccggctatgacgaaatgaacgaccaccagaacaccctctcctatgtgctcattaatcctcctcccgatactaggttagagccctccgatattgtgtatcttattcgcagtgaccctttagctcatgtcgccagttcgagccagagcaggaagtcttcctgctctcataagctctcttcctgcaatccagagacccgggacgagacccagctctag

SEQ ID NO: 200205 - DNA, 3408 bp, synthetic construct
  misc_feature 1..3408: note = Description of Artificial Sequence: Synthetic coding sequence
  source 1..3408: mol_type = other DNA
atggtggacctggagagcgaggtgccccccctgcccccccggtaccgcttccgggatctcttgctgggggatcagggttggcagaacgacgatcgggtgcaggtggaattttacatgaacgagaataccttcaaagagcggctcaagctgttctttattaagaaccagcgttcctccctgcgcattaggctatttaacttctcccttaagctgctttcatgccttttatacataatcagggtcctcttagaaaatcctagccaaggtaacgagtggtctcacatcttttgggttaaccgcagcctgcccttgtggggcctacaggtgagtgttgcgctgattagcctgttcgagaccattctcctggggtaccttagctacaaaggaaatatctgggaacagattctccgcatcccattcattctggagataatcaatgccgtccccttcatcataagtattttttggccctctctgagaaatctattcgtcccagtattcttgaactgttggctcgctaagcatgcactggagaacatgattaacgatcttcatcgcgccattcagcgaactcagagtgcgatgtttaaccaggttctcatcctaattagtactttgttgtgcctgatcttcacatgcatctgtggcatccaacacctggagcgcatcggaaagaaactcaacctctttgacagcctgtacttttgcatcgtgactttctctacagtcggttttggcgacgtcactcccgagacctggtctagcaagttgttcgtcgtcgctatgatctgcgtcgccctggtcgtgctgccaatacaatttgaacagttggcctacctctggatggagcgccagaagtctggtggaaattatagccgccaccgggcccagacagagaaacatgtggtactatgcgtaagctctcttaaaatagacctactgatggactttcttaacgaattttatgcgcacccacgcctccaggattactacgtggtgatactgtgcccgaccgagatggatgttcaggtgcgtcgagtgctccagataccgatgtggagtcagagggtgatctatttacagggttccgcattgaaagaccaggatcttctgcgcgccaaaatggacgatgcagaagcctgcttcatactgagttctcgctgtgaagtggacaggacctcttccgaccaccaaaccattctgagggcttgggcggtgaaggacttcgctcctaactgccctctgtacgtacagatcctaaagcccgagaataaattccacatcaaattcgcagatcacgtcgtgtgtgaggaggagtttaagtatgctatgctagcactcaattgcatctgccccgcaacctcgaccctaatcacactcttggtccatacaagtcgggggcaggaaggtcagcagagtcccgagcagtggcagaaaatgtacgggagatgcagcggaaacgaagtttatcatatcgtcctggaagagagtaccttcttcgctgaatacgaaggaaagagcttcacatacgcctcctttcacgcccacaagaagtttggagtctgcctgatcggcgtaaggcgggaagataataaaaacatcctcttgaatcccggaccccggtatataatgaactccacagacatatgtttttacatcaacatcacgaaagaagaaaattcagccttcaagaatcaggaccagcagcgaaagagcaacgtttctagatccttttatcatgggcccagtagactccctgtgcatagcatcattgcaagtatgggaacagtcgcaattgacctgcaggatacatcctgtaggtctgcctccggccccacactgtccctccccaccgaaggatctaaggaaatccgccgcccctcaatcgcacctgtgcttgaagttgccgataccagctctatccagacttgcgacctgttgagtgaccaatccgaagacgagactacacccgacgaagagatgagctctaatctcgagtatgccaagggctaccccccttatagcccatacattgggtcatccccaactttctgccatttacttcatgaaaaggtgccattctgttgcttgcggttagacaagtcttgccagcataactattacgaagatgccaaggcatatgggttcaaaaataagttaatcattgtggccgccgagaccgctggcaatggcctgtacaactttatcgtacccctgagagcttactatcgacctaagaaggaactgaacccaatagtgctgttattagataaccctccagatatgcatttcctggacgctatttgttggttcccaatggtatattatatggttggctcaatcgacaatctggatgacctcctccgatgtggtgttacctttgctgcaaatatggtggtcgtagataaggaatcgactatgagcgcggaagaggattatatggccgacgccaagacaatcgttaatgtacagaccttatttcggttgtttagtagtctcagtatcatcaccgagctgacgcatcccgccaatatgagattcatgcagtttagagctaaagattgctacagtttggccctgagtaaactggagaagaaggaacgagagcgcggtagtaaccttgcttttatgttcagacttccattcgccgccgggcgagtgtttagtatatctatgctggacacattgttgtaccaaagctttgtgaaggattacatgatttctattacacgactgctgcttggcctggacacaaccccgggttctggcttcctttgcagtatgaaaatcaccgcagatgacctgtggattagaacttacgctagactgtatcagaaactgtgttcaagcacaggtgacgtccctatcggcatctaccgtactgagtcacaaaaacttacaacctctgaaagtcagattagtatctctgtcgaagagtgggaggatactaaagattcaaaggagcaaggccatcaccgatctaaccaccggaactcaacttcctctgaccagtccgaccatcctctgctgcgacgcaaatctatgcagtgggctaggcgcctgtctcggaagggtccaaaacatagcggcaaaaccgcagaaaaaatcactcaacagagactaaatctttatagaagatctgagcggcaagaactggcagagctggttaaaaaccgcatgaaacatcttgggctgtcaacggttgggtacgatgaaatgaacgaccaccagagcactctgagctacatcctgattaaccccagtcccgatactaggattgaactcaatgatgtcgtctacctgatacgtcctgaccctctggcatacctgcccaatagcgagcctagcaggcgtaattcaatctgcaatgtcaccgggcaggactctagagaggagacccaactgtag

SEQ ID NO: 200206 - DNA, 3210 bp, synthetic construct
  misc_feature 1..3210: note = Description of Artificial Sequence: Synthetic coding sequence
  source 1..3210: mol_type = other DNA
atggtggacctggagagcgaggtgccccccctgcccccccggtacagatttcgggacctgctcctaggggatcagggctggcagaatgacgatcgcgtgcaggttgaattttacatgaacgagaatacgttcaaggagcgtctgaagcttttttttatcaagaaccaaaggtcaagcctaaggatacggctcttcaattttagcctgaaactactgagctgcctcctctatattatccgcgtcctgcttgagaacccctcacagggtaatgagtggagtcacatattttgggtcaaccgctcgcttcctctttgggggttacaggtctccgtggcactcatttctctgtttgagacaattctcctgggctacttgtcttacaaaggaaacatctgggaacagatcctgcggatcccatttatcttagaaatcatcaatgccgtgcctttcatcatttctatcttctggccgtctttgcgcaatcttttcgtgccagtattcctgaactgttggctggcgaaacatgcattggagaacatgattaacgatctgcatcgggcaattcaacggacacagtccgctatgtttaatcaggttttaatcctgatctccacccttctgtgcctcattttcacatgtatctgtgggattcagcacctggagagaattggcaagaagctcaatctatttgattcgttatacttctgtattgtgacattctcaacagtggggtttggcgacgtgacacccgaaacgtggtcctctaagcttttcgtggttgctatgatctgtgtggccttggtcgttctccccatacagttcgagcaacttgcatatctttggatggagagacagaagagcgggggcaattattctaggcacagagctcaaaccgagaagcatgttgtgctctgcgtaagctcactaaaaatcgacctcctgatggatttcctgaatgagttttacgcgcacccccgtttgcaggattattacgtcgtgattctgtgccctaccgagatggacgtgcaggttagacgcgttctccagattcccatgtggagtcaacgtgttatttacttgcagggatccgcactgaaggaccaagaccttctgcgtgccaagatggacgacgctgaagcctgcttcattctctcctcacgctgtgaagtggatcgaacttccagcgaccaccagacaattctgagagcttgggctgtgaaagacttcgcccccaattgtcctctctatgtacaaattctgaaacccgagaacaagttccatattaaatttgctgatcacgttgtgtgtgaagaggagttcaagtatgccatgctcgcactcaattgcatttgcccagcgacttctacacttatcaccctgctggttcacacatctaggggtcagtttggcgtgtgtttaataggcgtgcggcgcgaagataacaaaaacattctgctgaatcccggccccagatatattatgaactcaacggatatttgtttctacatcaatattaccaaagaagagaacagtgcctttaagaaccaggaccagcaaaggaagtcgaatgtaagccggtctttctaccacggcccctcccgtctgccagtccatagcattatcgcctcaatgggaactgtggcaatagacctgcaagataccagctgtaggtccgctagcgggcctactctgtccctgcctacagagggatccaaggagatacggcgacccagcattgcaccagtcctagaggtggctgatacaagttccatccagacctgtgatctcctctcggatcagagcgaagatgagactacacccgacgaggaaatgagcagcaatctcgagtatgccaagggttatccaccctacagcccgtatataggttcgagtcctacgttctgtcacctgctgcacgagaaggtacccttctgctgtctgcggctagacaagtcatgccagcacaactactacgaagacgcaaaggcctatggttttaaaaacaagttaataatcgtggctgccgagaccgctgggaatggactgtacaactttattgttcccctccgagcctattatcgaccgaaaaaagaactgaaccccattgttttgcttctggataatcccctggacgacctcctgaggtgtggcgtgaccttcgccgctaacatggtggttgtcgacaaagagtctaccatgtctgcagaagaagattatatggccgatgccaagacgatcgttaacgtccagacactattccggttattcagtagcttaagcatcattacggagctgactcaccccgccaacatgcggttcatgcagttccgagctaaagattgctattctcttgctcttagcaagttggagaaaaaggaacgagaacgtggaagcaatctggcttttatgtttagactgccctttgccgcgggccgcgtgttctcaatttccatgttggatacactgctgtaccagagcttcgtgaaggattatatgatttccatcacaagactgctactgggactggatacaactccaggcagtggattcctgtgttctatgaaaataacggctgacgacttatggattcgcacctatgcccggttataccagaagctttgctcatctacaggagacgtacctatcgggatctacagaaccgaaagccagaagcttaccactagtgaggagacctatatattaatcttcttgagtcagatttccatcagtgtcgaggaatgggaagataccaaggatagtaaagagcagggccaccataggagcaatcacaggaactctacaagctctgaccagtcagaccatccgcttttgagaaggaaaagcatgcagtgggcccgcagattatcccgcaaaggcccaaagcatagcggcaagaccgcagagaagatcacccaacaacggctgaacctttaccgccgctcagagagacaagagctggctgagcttgtgaagaatagaatgaagcatttgggtttgtcaacagtggggtacgatgagatgaacgaccaccagagcaccctgtcttatatcttgattaatccgagcccagatactagaattgaactcaacgatgtggtgtatctaattcggcctgacccgttggcttaccttccgaatagtgagccttctaggagaaattccatctgtaatgtcacaggtcaggactctcgagaggagactcagttgtag

SEQ ID NO: 200207 - DNA, 3336 bp, synthetic construct
  misc_feature 1..3336: note = Description of Artificial Sequence: Synthetic coding sequence
  source 1..3336: mol_type = other DNA
atggtggacctggagagcgaggtgccccccctgcccccccggtacaggttcagagatctgctgcttggcgatcagggatggcaaaatgacgacagggtccaggtcgagttttatatgaatgagaacacttttaaggagcgcctaaagctgtttttcatcaaaaatcagagatccagtcttaggattcgcctttttaacttctcactgaagcttctgagctgtcttctgtatattattagggtgcttttagagaacccttctcagggcaatgagtggagccacattttttgggttaatagatctttgccactgtggggactgcaagtcagcgtagccctgatttcactgttcgaaactatcctgctgggatacttgagctacaaaggcaatatctgggagcaaatccttagaatcccttttatcctggaaattatcaatgcggtgccgttcattattagcatcttctggccatctctcagaaatctgttcgtcccagttttccttaactgctggctagccaagcatgctttggaaaatatgatcaacgatctgcatagagctatccagagaacccagtccgctatgtttaatcaagtcctaatcttgattagtaccctcctgtgtctgattttcacatgcatctgtggcattcaacacctcgagcgtatcggcaaaaagttgaacctgtttgattcgctgtatttctgcattgttacattttccactgtcggttttggcgacgtcacccccgaaacatggtcctccaagttgttcgtggttgctatgatctgtgtggcgctggtagttcttccaattcagttcgagcagctggcatatttgtggatggagcgacaaaagtcaggcggaaactactcccgacaccgcgctcagaccgaaaagcatgtcgtgctgtgtgtgtccagcttgaagatagacctgttgatggatttcctcaatgaattctatgctcacccccgactacaggactattacgttgtcatcctatgcccaacagaaatggacgtgcaggtgcgtcgagtcctgcagatccccatgtggtcgcagagggtgatttacctacagggaagtgccctgaaagaccaggacctgctgcgagccaagatggacgacgccgaggcatgcttcatcttaagcagccggtgcgaggtagatagaacatctagtgatcatcagacgatattacgagcatgggctgtgaaagactttgctccgaattgcccactttacgtgcagattctgaagcccgagaacaagtttcacatcaaatttgctgaccacgtagtgtgcgaagaagaattcaagtatgccatgctggccttaaattgcatctgccccgctactagcactctaatcacccttttagtgcacacctcacgaggacaggagggccagcagagtcctgagcagtggcagaagatgtacggtagatgctcgggcaatgaggtctatcacatcgttttggaggaatccactttttttgcagaatacgagggtaagtctttcacatacgccagtttccatgcccataagaagtttggggtttgcctgatcggcgtgcgcagagaagacaacaagaacatcctgttgaatcccggcccacgatacatcatgaacagcaccgatatctgcttttacatcaacatcaccaaggaagagaatagcgccttcaaaaatcaggatcagcagagaaagtctaatgttagtcggtccttttatcacgggccatcccggctgcccgtgcactccattattgcctccatgggcaccgtcgctatcgacctgcaagacacaagttgtcgttcagcgtctggcccaacattgtcgcttcctaccgaaggctcaaaagagatccggaggcctagcatcgcacctgttctcgaagtcgccgatacttcctcaatacagacatgcgatttgttgagtgatcagtctgaggatgaaacgacccctgacgaggagatgagctcaaacctcgaatatgccaaaggatatcccccttactcaccctacattggaagctcccctaccttttgtcatttgctgcacgaaaaggtacccttctgctgtctacgtctggataaatcctgtcaacacaattattatgaggacgcgaaagcgtacggatttaaaaataagctcataattgttgctgctgaaaccgccggtaacggcctgtataacttcatcgtcccactgagggcctattatcggccgaagaaagaactaaacccaatcgtgctgctactggacaatcctttggacgaccttttgagatgcggagtaacctttgctgcaaacatggttgtggtcgataaggaaagcactatgtcagctgaggaagactacatggcagacgcaaagaccattgtaaacgtgcagacgctgttcaggctattctcttcactgtctattattactgagcttacacacccagccaacatgagattcatgcagttcagagccaaagactgttatagcctggcccttagtaaattggagaagaaggaacgggagcggggcagtaacttagcctttatgtttaggctacctttcgcggcgggtagagtcttctctatttcaatgctggacacgctgctctatcagagcttcgtgaaggattacatgatctctatcacaagactgctactcggcctggacaccaccccaggctccggattcctgtgctcgatgaaaatcacagctgacgacctgtggatcaggacatatgctaggctttaccaaaaactctgctcatccactggagacgtccctattggtatatacaggactgagtcacagaagctgacaacgtctgagtctcaaatttccatatccgtggaggagtgggaagatactaaagacagtaaggagcagggacaccaccggagcaaccacagaaatagcacttcgtcggatcagtccgatcatccactgcttaggaggaagagtatgcaatgggcccggcggcttagcaggaagggtccaaaacactctggaaaaactgccgagaagatcacccagcagagactaaatttgtataggcgttccgagaggcaggagttagcagagttagttaagaacagaatgaaacatctgggcctgagcacagtgggatacgacgagatgaatgatcatcagtctacgctgtcctatatccttattaatccaagcccagacactcgaatagagctcaatgatgttgtctatctgatccgacccgatcctttagcttacctgcctaattccgaacccagccggaggaattctatttgtaatgtgaccggccaagactctcgggaggaaactcaactttag

SEQ ID NO: 200208 - DNA, 1113 bp, synthetic construct
  misc_feature 1..1113: note = Description of Artificial Sequence: Synthetic coding sequence
  source 1..1113: mol_type = other DNA
atgccctacctgcacctggaccaccagaccatcctgcgggcctgggcagtcaaggactttgccccgaactgcccattatacgtgcaaatactgaagcccgagaataagttccacataaaattcgctgaccatgtagtgtgtgaagaagagttcaagtacgctatgctcgccctcaactgcatctgtccagcaacttcaactttaatcacgctcctcgtccacacctccagagggcaggaagggcagcagtcgccagagcagtggcagaaaatgtacggccgatgctccggcaatgaagtttaccatatagtgctggaggagtcaacgttctttgcggagtatgagggtaaatcgtttacttacgcgagttttcacgctcataagaaatttggcgtgtgtctcataggcgtcagacgtgaggacaataagaacattcttctcaacccaggtccgcgttatataatgaattctaccgacatatgtttttatataaatattacgaaagaagaaaactcagcttttaaaaaccaagatcaacaaagaaagtcaaacgtgtctcgatcattctatcacggcccttcacgcctgcctgtgcattcgatcattgcgtcgatggggacggtggcaatcgatcttcaggatacttcatgtagaagcgccagcggcccaaccctatccttgcccacagagggaagcaaggagatacgtcggccctctatcgcaccagtactggaggtagcagacacctcttcaattcaaacatgcgacctactgtctgaccagtccgaagacgaaactacaccagacgaggagatgagtagtaatctggaatacgctaaaggctaccctccctacagtccctacattggtagtagtcccactttctgtcacttgctacatgagaaggtccctttttgttgcctgagactggataaatcctgtcagcataattactacgaagacgccaaagcctacggattcaagaacaagctgatcattgtggccgccgaaactgccggcaatggactgtacaactttatagtgcctctgcgtgcttactatcggccgaagaaggaattgaatcctatcgtccttttgctggataacccttag

SEQ ID NO: 200209 - DNA, 1572 bp, synthetic construct
  misc_feature 1..1572: note = Description of Artificial Sequence: Synthetic coding sequence
  source 1..1572: mol_type = other DNA
atcatcaacgacctgcaccgggccatccagcggacccagagcgccatgttcaaccaggttctgatactcatctccacgctactgtgcctcatcttcacatgtatttgtgggattcagcatttggagagaatcggtaagaagctgaacttatttgattctttatacttttgtatcgtgacattctctaccgtgggattcggagatgtgacgcccgaaacctggagttcgaaactgttcgtcgttgccatgatatgcgtggctctggtcgttctgcccattcagttcgagcagcttgcttacctttggatggagcgacagaagagcgggggaaattactcccgccaccgggcccagactgagaagcacgtggttctgtgtgtctcctcattgaagatagacctgctaatggatttcttgaacgagttttacgcccacccaagacttcaggactattatgtcgtgattctgtgtccgacagagatggacgtccaggtcaggcgagtattgcagattcctatgtggagccagagagtaatatacttacagggcagtgccctgaaggatcaggatctcctgcgtgccaagatggacgatgcagaggcctgcttcattctcagcagccgttgtgaggtggaccgtacgtcaagcgaccaccagactattcttcgcgcgtgggctgtcaaggattttgctccaaactgcccactctacgttcagattctgaagccggaaaacaaatttcatatcaaatttgctgatcacgttgtttgcgaagaggagttcaagtatgccatgctggcgctaaattgcatttgcccagcaacgtccaccctgattacccttctggtccacacttcaaggggccaggaaggccagcagtcccctgagcagtggcaaaagatgtacgggcgatgtagtgggaatgaagtgtaccacattgtcctggaggaaagcacattttttgccgaatacgaaggcaagtccttcacatatgcgtctttccatgcacacaaaaaattcggtgtatgtctcatcggtgtccgcagggaggataacaaaaatatcttactcaaccccggacctcgatacatcatgaacagcacagacatctgcttctatattaacattactaaagaagaaaactccgccttcaaaaatcaggatcagcaaaggaagagcaatgtttctcgatcattttaccacggaccctctaggctgcctgttcattccatcattgcctcgatggggaccgtcgcaattgatttacaggataccagttgtagaagcgcatctggcccaaccctgtccctcccgaccgagggcagtaaggaaattaggcggccatcgatcgcccccgtcctagaggttgcagacaccagcagcattcaaacctgcgacctgctttccgaccaaagcgaggacgagaccactccggacgaggaaatgagctccaacctcgaatacgcgaaaggataccctccctactccccatacataggatcgtctcctaccttctgccatctgttacatgaaaaggtgcctttctgctgcctgcgattagataagttttag

SEQ ID NO: 200210 - DNA, 1503 bp, synthetic construct
  misc_feature 1..1503: note = Description of Artificial Sequence: Synthetic coding sequence
  source 1..1503: mol_type = other DNA
atgcccagcagcggccgggccctgctggacagccccctggacagcggttcgctgacttccctggacagctcggtcttttgttctgaaggcgagggcgaaccactggctctgggagattgcttcaccgtgaatgttggtggctcccggttcgtgttgtcacagcaagcactttcttgctttccccacacaagactgggaaagttggctgtggttgtcgcctcgtatcgtcgtccaggcgccctagccgccgtgccctccccactggagctgtgcgatgatgcaaaccctgtggataacgagtatttctttgatcggtcaagtcaggcatttaggtacgtacttcactactataggaccgggcgcctccacgtaatggaacaattatgcgccctgtctttcctacaggaaattcaatactggggaatagatgaacttagcattgattcgtgctgccgtgatcgatattttcgacggaaggagctgagtgagaccctcgacttcaagaaggatacagaagaccaggagtcgcagcacgagtcggaacaggatttctcacaaggtccgtgtccaaccgtgcggcagaaactgtggaacatcctggagaagccgggctcatcaaccgccgcgagaatattcggggtgatatctatcatctttgtcgtagttagcatcattaacatggcgctgatgtctgctgaattatcttggctggatctccaacttttagaaattcttgagtacgtttgtatctcttggttcacaggggaatttgtactccgatttctgtgtgtaagggaccgatgtcgctttctcagaaaggtccccaacatcatagacctccttgccattttaccattttacatcaccttgctggtcgaatcactgagtggcagccagactacgcaagaactggagaacgtggggcgaatagtgcaggtcctcagacttttgcgagctttgagaatgctgaaactggggcgccactctactgggctccggtctcttggcatgaccatcacgcagtgctacgaagaggtgggtctgttgctgctcttcctgtccgttggcattagcatctttagtacagttgaatatttcgcggagcagagcattcctgacacaactttcacctctgtcccctgtgcatggtggtgggctaccaccagcatgactaccgttggttacggcgacatccggcctgataccaccacggggaaaatagtagcttttatgtgcattcttagcgggatcttggttcttgcacttcccattgcaatcattaatgatcgcttctcagcctgctacttcaccctcaaactgaaagaagccgccgtacggcagagggaagccctaaaaaagctaaccaagaatattgccaccgacagttacatttccgtaaaccttagagacgtctatgcacgatctattatggagatgcttaggttgaaggggcgtgagagggcttccaccagatcttccggaggggacgacttttggttttag

SEQ ID NO: 200211 - DNA, 1503 bp, synthetic construct
  misc_feature 1..1503: note = Description of Artificial Sequence: Synthetic coding sequence
  source 1..1503: mol_type = other DNA
atgcccagcagcggccgggccctgctggacagccccctggacagcggttccctgacgtcactggactcctcagtcttctgctcagagggagagggagagcctctcgctctgggagattgcttcacagtcaatgtgggcggatcacgctttgtgctgtctcagcaggcccttagttgttttccccatacccgactcggtaagctcgcggtggtcgtggcatcttaccgacgtccaggcgctctcgcggccgtgccaagcccactggagctatgcgacgatgccaaccccgtggacaatgagtatttcttcgatcgctctagccaggcatttcgctatgttttgcattactatcgcacaggccgcctccacgttatggaacagctgtgcgccctgtcattcttacaagagatccagtactggggtattgacgagttatccatcgatagctgttgccgggatcgatatttcagacggaaggagctgtctgaaaccctggactttaagaaagataccgaggatcaggagtcacagcacgagtcagagcaagacttctcacagggtccttgccctaccgtgcggcagaaactgtggaatatcctcgagaagccaggttctagtaccgctgctagaatcttcggagtgatatctatcatattcgtggtggtgtcgattatcaacatggcgttgatgtctgcagagctgagttggctggatctgcagttgctggagatcctggagtatgtgtgcatcagctggttcaccggcgagttcgtgctgcgatttttgtgcgttcgcgatcgttgtcggttcctgagaaaagtgcctaacattattgatctgttagcaatcctccccttttacattacgctcctggttgagagcctcagtggtagccagacaacccaagaactggagaacgtgggccgaatcgttcaggttttgaggctgcttcgcgcactgaggatgctgaaactgggccggcattccaccggcctgcgaagtctggggatgaccattacacaatgctacgaggaagtcggcctgttgcttcttttcctttcagtgggaatctctatcttctccaccgtcgaatatttcgcggagcagagcattcccgacacgaccttcacctctgtgccatgtgcgtggtggtgggccacaaccagcatgacaacagtggggtatggcgacatccggcccgacaccaccacgggaaaaattgtggcctttatgtgtattttatcaggcatcctggtcctcgctctccccatcgctatcatcaacgatagattctccgcctgttattttaccttgaaattaaaagaggcagccgtgaggcagcgagaagctcttaagaaactcacaaagaacatcgcaacagatagttatataagtgtaaatcttcgcgacgtgtatgcacggtctatcatggaaatgttgcgtctcaaaggcagagaaagggcaagcactcgcagcagcggcggcgacgacttttggttttag

SEQ ID NO: 200212 - DNA, 1131 bp, synthetic construct
  misc_feature 1..1131: note = Description of Artificial Sequence: Synthetic coding sequence
  source 1..1131: mol_type = other DNA
atggagcagctgtgcgccctgagcttcctgcaggagatccagtactggggcattgacgagctctctattgactcctgctgccgggataggtatttccgtcgaaaagagctgtccgagaccctggatttcaaaaaagacacagaggaccaggagtctcagcacgagtcagaacaagacttttcccagggcccttgtccaacggtgcgccaaaagttgtggaacatacttgagaagcccgggagctcaacagccgcgcggatcttcggcgtgatcagcatcatctttgtggtggtgtccatcattaatatggctctgatgagcgccgaacttagctggcttgatctgcagctgctggagattttggaatacgtgtgtattagctggtttacaggggaatttgtgcttcgtttcttgtgtgtgcgcgaccgctgtcgctttctgcggaaggtccctaacataatcgatctgctggctatcttacccttctatataacgctgctggtcgaatcactgtccggtagccaaaccacccaagagcttgaaaatgtgggaaggatagttcaggtcctacgcctgttgagagctctgcggatgcttaagctggggagacacagcaccggcctgagaagtctgggcatgacaatcacccagtgttatgaagaggtcgggctgcttctacttttcctcagtgtgggaatctctatctttagcacggtggaatactttgctgaacagagtatccccgacacaacatttacctccgtgccatgtgcgtggtggtgggctactaccagcatgactacagtcggatatggcgacattcgaccagatactaccacaggtaaaattgtcgctttcatgtgcattctgtcaggaattttggtgcttgctttgccaatcgcaatcattaatgatcgctttagcgcctgttattttaccctcaagcttaaagaagccgctgtgcggcagagagaggcattaaagaagctgaccaagaatatcgctaccgattcgtacatatccgtgaatttgcgcgatgtgtatgccaggagcataatggagatgctccgattgaagggtagggagcgtgcctctactcggtcgtcaggaggcgacgatttctggttctag

SEQ ID NO: 200213 - DNA, 1638 bp, synthetic construct
  misc_feature 1..1638: note = Description of Artificial Sequence: Synthetic coding sequence
  source 1..1638: mol_type = other DNA
atgctgaagcagagcgagcggcggcggagctggagctaccggccctggaatactactgaaaatgaagggagccaacatcggcggtccatttgttccctgggtgctcgatcagggtcccaagcaagcattcacgggtggacagaggggaactacaactactatatcgaggaagacgaagacggagaggaagaagaccagtggaaggacgatctggctgaggaggatcaacaggctggagaggtcacgaccgcgaaacctgaggggcccagtgacccccccgccttactgtctaccctgaatgtgaatgtcggtggacactcataccagctggattattgtgaactcgcaggtttcccaaagacaagactaggtcgactggcaacatccacctcacgctcaagacaactgtccctgtgtgacgactacgaggaacagactgatgagtatttttttgacagagatccagccgtgttccagctcgtgtataatttctatctatcgggcgtactcttggtgctggatggcctgtgtcctcggcgatttctggaagagctcgggtactggggtgtgcgtctgaaatacaccccacgctgctgccgcatttgcttcgaagagaggagagacgagctgagtgaaagactcaagattcagcatgaattacgagctcaagcccaggtggaagaggcagaggaactgtttcgagacatgcggttttacgggccccagcgcaggaggttgtggaacttgatggagaagcctttctcctctgtcgcagcaaaggcaatcggcgtggcttctagcacgttcgtactggtctccgtggtcgccttggctctcaatactgtcgaggaaatgcagcaacatagcggacaaggtgagggcggtccagacttgcgacccatcctggagcacgttgagatgttgtgtatgggcttcttcacactcgagtatctcctgagactcgcttcgacaccagacttacggcgcttcgccagaagcgccttaaacctcgtggacctggtggcgatactccctctgtatttacaattactcctggaatgctttaccggggaagggcaccaacgaggtcaaactgtcgggtccgtgggtaaggtggggcaagtgttacgcgtcatgagacttatgcgcatttttagaatcctgaagctggctaggcactcaaccggcctgagagcttttgggttcacacttcggcagtgctatcaacaggtgggatgtttactgctgttcattgccatggggatcttcacctttagcgccgcagtctatagcgtagagcacgatgtgccctcaaccaattttacgaccattcctcactcatggtggtgggctgccgtgtccatcagcacggtcggttatggagatatgtaccctgaaacccacctaggtcgttttttcgcatttctatgcattgcttttggcataatcttaaatggaatgcccattagtattctctacaacaaattctccgactactactctaagttgaaagcttacgagtacaccaccatccgcagggagcggggagaggttaactttatgcagagagcaagaaaaaagatcgctgaatgtctgctgggctctaatccccagctcacaccgcgtcaggaaaattag

SEQ ID NO: 200214 - DNA, 963 bp, synthetic construct
  misc_feature 1..963: note = Description of Artificial Sequence: Synthetic coding sequence
  source 1..963: mol_type = other DNA
atgctgaagcagagcgagcggcggcggagctggagctaccggccctggaacactactgaaaatgaaggcagccaacacaggaggtcgatctgcagccttggggcaagaagcggcagtcaggcctctatccacggatggaccgagggaaactataactattatatcgaagaggacgaggacggggaagaggaagatcagtggaaggatgacttggcagaggaagaccagcaggccggggaggtgacgacggcaaagccagaaggacccagcgacccccccgccctcctgagtacgctgaatgtcaatgtcggcggccattcgtaccaactcgattactgtgaactagcaggattcccaaaaacacgtcttggacggctggctacttctacgtctcgcagccggcagttgtccctgtgtgacgactacgaggagcagactgatgagtattttttcgatagggacccggcagtttttcaactggtttataacttctacctgtcaggggtgctgctggttctggatggcttatgccccaggcggttcttagaagagcttggctactggggcgttagactgaagtacaccccacgctgttgtagaatctgcttcgaggagagaagggatgagctgtccgagagactcaagatacaacacctcagagcgcgactgagaggcggggccggagcccaacacagagggggtgacgctgccgctctcggtgcaggcagagggcgcccccgtcctgccgcacatcctggtgctcgcggcgatgcggtccacggtctgctgcatgcacgggttcctgccgctccttcgctgcatgcccgaccagaagctctgcgtgcccagaggccgcagcccggcggtcccgggggtcaccccgccgctctgccaagtgccgctgcccgagtgctgcacggaaggggccctcctaccaggccagacggcggacagagaggctag

SEQ ID NO: 200215 - DNA, 1740 bp, synthetic construct
  misc_feature 1..1740: note = Description of Artificial Sequence: Synthetic coding sequence
  source 1..1740: mol_type = other DNA
atgagcagctgccggtacaacggcggcgtgatgcggcccctgagcaatctgagcgcgagcagaaggaacttgcatgaaatggactccgaagcccagcccctccagcccccagcctctgtaggcgggggcggaggtgccagctccccgagcgctgcggcggcagccgctgccgccgtgtcttccagcgcccctgagatcgttgtttcaaagccagaacacaacaattcaaacaatctcgccctatacgggacgggggggggaggatctaccggcgggggaggaggcggcggtgggtccggccacggctctagtagcggtactaaaagttccaaaaagaagaatcagaacattgggtacaaactcgggcacaggagggccctgttcgaaaaaagaaagcgtctttcagattatgctttgattttcggaatgttcggcattgtggtaatggttattgagaccgaactgtcttggggtgcttatgacaaggcctccttgtatagcctggccctgaagtgtctgatttccttatctactataatcctgcttggcctgattattgtataccatgcgcgcgagatacaactatttatggtggacaacggcgctgatgactggcgtattgctatgacctatgagcgtattttcttcatctgtttggagatactggtatgtgcaattcaccccatccccgggaattatacattcacttggacagctcgtctggcgttctcctacgccccttcaaccaccaccgctgatgtggatattatcctgagtattccgatgttcctgaggctttatctgattgcaagagtcatgcttctgcattcaaagctcttcacggatgcttctagcagaagcattggcgcccttaataaaatcaactttaacacgcgattcgtaatgaaaacgcttatgaccatctgcccgggtactgttctgcttgtgttttctatctccctgtggataatagctgcatggaccgttagggcttgtgagcgatatcacgatcagcaagacgtgacctcaaatttcctgggagccatgtggttaattagcattacatttcttagtataggatacggggatatggtgccaaacacctactgtggaaaaggggtgtgcctgttgacagggataatgggagctgggtgcactgctctcgtagtcgcagtagtcgcacgcaagctggaactgaccaaagctgagaagcacgttcacaacttcatgatggacactcaacttacgaagcgcgtgaagaacgctgctgcaaacgtgctgagagagacctggttgatttataagaacaccaagctcgtaaaaaagatcgaccacgccaaggtgagaaaacaccagaggaaatttttacaggccattcatcaactgaggtcagttaaaatggaacaacgaaaattaaacgatcaggccaatacactggtggatttggcgaagacccagaacattatgtatgacatgataagcgacttgaacgagcgcagcgaggatttcgaaaagagaattgtgactctggagaccaaacttgagaccttgatcgggtctatccatgccctgcccggccttatttctcaaacaattagacagcagcagcgagatttcatcgaggcccagatggagagttatgacaaacacgtgacttacaacgcagagcggtctaggagttctagtcggcggcgaagatcttcctcaactgcccctccgacaagcagcgagtcaagttag

SEQ ID NO: 200216 - DNA, 696 bp, synthetic construct
  misc_feature 1..696: note = Description of Artificial Sequence: Synthetic coding sequence
  source 1..696: mol_type = other DNA
atgtggctgatcagcatcaccttcctgagcatcggctacggcgacatggtccctaacacctactgcggaaagggagtttgtctcttaacagggattatgggagcgggctgtaccgcactggtggtggctgtcgtagcaaggaagctggagttgacaaaagccgaaaagcatgttcacaatttcatgatggatacccaactgaccaaaagagtgaagaacgctgcagccaatgtgcttcgggagacctggctaatttacaaaaatacaaaactggtgaaaaagatcgaccacgccaaagtgcggaaacaccagagaaaattcctgcaggcgattcatcaactgcgcagcgtgaagatggaacaacgcaaactcaatgatcaggccaatacattggtcgatctggccaagacacagaacatcatgtacgacatgatttctgatctgaatgagaggtccgaggatttcgaaaagcgaatcgtgactctggagacaaaactggaaacgctcattggatcaattcatgccctacccggccttatcagtcaaactattagacagcagcagagggactttatcgaggcccagatggagagctacgacaagcatgtcacctacaatgctgagagaagcagatcctccagcagaagaagacgttccagctctacggccccccctactagtagcgaaagctcatag

SEQ ID NO: 200217 - DNA, 1326 bp, synthetic construct
  misc_feature 1..1326: note = Description of Artificial Sequence: Synthetic coding sequence
  source 1..1326: mol_type = other DNA
atgagcagctgccggtacaacggcggcgtgatgcggcccctgagcaacctgagcgcctcaaggagaaacctccacgagatggactccgaggcccaacctctgcaaccccccgcgtctgtgggcggcggcgggggagccagtagtcccagcgcagcggctgctgctgctgccgctgtatctagctccgctcctgaaatcgtcgtcagcaaaccagagcacaataattccaataacctggccctgtacggcactggtggaggagggtcgaccggaggcggtggaggtggcggcggtagtggtcacggaagtagttctggcactaagagcagcaagaaaaaaaatcagaatatcggctacaagttaggtcaccggcgcgccctgtttgagaaacgcaagcggctgtccgattacgctctaatcttcggcatgtttgggatcgtagtcatggtgattgagacggagctctcatggggagcctacgacaaggcctccctgtattcactcgccctcaagtgcctcatatcattgtctactatcatcctgttgggcttgattattgtgtatcatgcaagggagatccagttgttcatggttgacaacggggctgacgattggagaattgccatgacctacgagcggatttttttcatctgcctggagatcctcgtgtgcgccattcacccgatccccggaaattatactttcacctggacagcccggttagctttttcttatgcaccttccactaccaccgccgatgtcgacatcattctgtccatccccatgtttctgaggctctatctgattgcgcgggtgatgcttctacacagtaagctattcaccgacgcatcgagcaggtctattggagctctaaataagattaactttaacacccgctttgtaatgaagaccctgatgactatctgtccggggaccgtgctgctggttttctccatatctctttggatcattgccgcttggacagtccgagcctgcgaacgttaccacgaccaacaagatgtcaccagcaactttctgggtgcaatgtggctcatttccattaccttcctatccatcggctatggtgatatggtccctaatacgtattgtggcaaaggggtatgcctactcaccgggatcatgggtgctggatgtaccgcactcgttgtggcagttgtggcccgaaagctggagctcactaaagccgaaaagcatgtccacaattttatgatggacacacagctgactaaacgcgttagttactacccctacattttcaaagagaacatcatcgttattttctccgtactgggcaacatggcatag

SEQ ID NO: 200218 - DNA, 2196 bp, synthetic construct
  misc_feature 1..2196: note = Description of Artificial Sequence: Synthetic coding sequence
  source 1..2196: mol_type = other DNA
atggacaccagcggccacttccacgacagcggcgtgggcgacctggatgaagatcctaaatgtccatgtccttctagtggcgatgagcagcaacaacagcagcagcagcagcagcagcaacagcctccgccccccgccccccccgctgcccctcaacaacccttggggccctcgcttcagccacagccacctcagctgcaacagcaacagcaacagcagcagcagcagcaacaacaacagcctccccaccctctgtcacaactagcccaacttcagtctcagccagttcatccgggcttgcttcactcctctcccaccgcctttcgagcaccgccgtctagtaatagtacagccattctacacccgtcctccaggcagggaagccagctgaacctgaatgatcatttgttagggcactctcctagctctaccgccacctccggacctggtggtggaagtaggcataggcaagctagtcccctcgtccatcggagagactccaacccttttactgagattgccatgagcagctgtaagtatagtggcggggtgatgaaacccctctccagactctccgcttcgcgtagaaatctgatcgaggcggagacagagggccagccgctgcagctattctcgccttcgaacccgcctgaaattgttatttcttctcgcgaagacaatcacgcccaccagacactgttgcatcatcctaatgctacacacaaccatcagcacgctggcaccacagccagctctaccacctttccaaaagccaacaagcggaaaaatcagaacatcggctataaactcggccatcggcgcgctctgttcgagaagcgaaaacggctcagcgattacgctctcatttttgggatgttcggaatagttgtgatggttatagaaaccgaattgtcctggggactgtattccaaggattccatgttcagtctggccctgaagtgccttatttccttgtcgactattatcctcttagggctgatcattgcttatcacacccgcgaagtccagctgttcgttatcgacaatggcgccgacgattggagaatcgctatgacatacgaacggatattgtatatttccctggaaatgctggtgtgcgccattcacccaatcccaggagaatataaattcttttggactgcaaggctcgcgttctcatacacaccatcaagagctgaagctgacgtggacatcatcctatccataccaatgtttctgagactgtacctgatcgccagggttatgctgttgcactccaagctctttacggacgcttcatctagatcaattggcgccttgaataaaattaatttcaacactcgcttcgtcatgaagacacttatgaccatatgccccggtacagtcctgcttgttttttccatttccctgtggattatagcagcgtggaccgtaagagtatgtgaacgctaccatgaccagcaggatgtcactagcaattttctcggcgccatgtggcttatatctatcacatttttgagtatcggatatggagacatggttccacatacttactgcggtaagggggtgtgtctcctcacgggcataatgggggccggatgtacagcgcttgtggtagccgtggtggctcggaagctggagctaacaaaggctgaaaaacacgttcataacttcatgatggacacgcagctcacgaagcggattaagaacgccgccgccaacgtcctgagggaaacctggctgatttataaacataccaagctcctaaaaaaaatcgatcacgccaaggtccgtaaacatcagcgcaaattccttcaggccattcaccagctccgtagtgtgaagatggagcagcgcaaactgtctgaccaagcaaatacacttgtcgacttgtctaagatgcagaacgtcatgtatgacctaattacagaactcaacgacaggtctgaggacctggaaaaacaaatcggttcactcgaatccaagctcgaacatcttacagcgtccttcaacagcctgccactgctgatcgccgacacactacgccagcagcagcagcagctcttaagtgctattatagaggccaggggcgtcagtgtcgccgtggggacgactcacacgccgatatccgattcaccaatcggagtgtctagcacgagcttccctaccccctacactagtagctccagttgttag

SEQ ID NO: 200219 - DNA, 1257 bp, synthetic construct
  misc_feature 1..1257: note = Description of Artificial Sequence: Synthetic coding sequence
  source 1..1257: mol_type = other DNA
atgttcagcctggccctgaagtgcctgatcagcctgagcaccatcattcttctcggactcattatagcctaccatacccgagaagtacagctgtttgttatagataatggcgctgacgactggcgcatagccatgacctatgagagaatcctatatataagtctggaaatgctggtgtgtgcaattcaccctatccctggcgagtataaatttttctggactgctcggctcgcgtttagctacaccccctccagagctgaggcggacgtcgacatcattctcagtattccaatgttccttcggctatacctgattgcaagagtcatgctcctgcacagcaaactgttcacagatgcttcatctaggtcaatcggtgctctgaataaaatcaacttcaacacccgctttgttatgaaaacattgatgaccatatgtccaggaaccgttctgcttgtcttctcgatttctctctggattattgctgcgtggaccgtgagagtctgcgagagatatcacgatcagcaggacgtgacatctaactttttaggggctatgtggctgatttccattaccttcctctctatcggctatggtgacatggtgcctcacacctattgtggtaaaggcgtctgtctgctgaccggtattatgggagctggatgtacggccttggtggttgccgtcgttgctcgcaagttggagctcacaaaggcagagaaacatgtgcacaacttcatgatggatacccagctcacaaaacgcataaagaatgctgccgccaatgtgctccgcgagacctggttgatttataagcatacaaagctgctcaagaagatcgaccacgctaaggtgagaaagcatcagaggaagttcctccaggcaatccaccagctccgtagcgtgaagatggagcagaggaagctgtctgaccaggcaaacaccttggttgatctttccaagatgcagaacgtgatgtacgaccttatcaccgagttgaacgaccggtccgaggaccttgaaaaacagattggcagcctcgagtcgaagctggaacacctgacagctagctttaacagcctgccccttcttattgcagacacccttagacagcagcagcagcagctgttatctgccatcattgaagctcggggggtttctgtggctgtgggaactactcacacgccaatctccgattcccctatcggggttagctccacatcatttcccacaccttacaccagttcctctagttgttag

SEQ ID NO: 200220 - DNA, 1281 bp, synthetic construct
  misc_feature 1..1281: note = Description of Artificial Sequence: Synthetic coding sequence
  source 1..1281: mol_type = other DNA
atggagcggcccatcaaggacagcatgttcagcctggccctgaagtgtttgattagcctgagtacgataattctgctaggccttattatagcgtatcacacacgagaagtgcagctctttgtcatcgacaacggggcagacgattggagaatcgccatgacttacgagcggatattatacatcagcctagagatgctggtctgcgcaatacaccccatcccaggcgaatacaaattcttctggacggctcgcctggccttttcctacacccccagccgcgcagaggctgatgttgatattattttgtcaattcctatgttcttgaggctctacctgatcgctagagtgatgttactgcattcaaagctctttactgatgcctctagtcgctccatcggcgcattgaacaagatcaattttaacacccgtttcgtgatgaaaacactgatgaccatctgccctggtaccgtactattagttttctccatttctctgtggatcattgctgcctggacagtgagggtgtgcgaacggtaccatgaccagcaggatgttactagtaattttttgggggccatgtggttgataagtattaccttcttgtccatagggtacggggatatggtgcctcacacttattgcggcaagggagtgtgtctgctgactggaataatgggcgctggatgcaccgccctggtcgtggccgtggtggctcgaaaacttgaactcactaaggccgagaagcacgttcataatttcatgatggacacccagctcacaaaacgtattaaaaatgccgcggctaatgtcttaagggagacttggctcatctacaaacatactaaactcctgaagaaaattgatcacgctaaagtaagaaagcaccagcgcaaattcttgcaggctattcatcagttgaggagtgtgaagatggaacagcggaaactgagtgatcaagcgaacacactcgtggacctgtccaagatgcagaacgtaatgtatgatctaattacagaactaaacgacaggtcagaagatcttgaaaagcaaatcgggagcctggagtctaaactggaacatctgactgcctcttttaactcattgccacttctcatagctgatacactccggcagcaacagcagcagctgttgtctgccattatcgaggcacgaggtgtcagcgtggctgtcggaaccacacacactccaatatcagactcgcccataggagttagttcaacgtcttttccgacaccctatacatcgtcatcaagctgttag

SEQ ID NO: 200221 - DNA, 684 bp, synthetic construct
  misc_feature 1..684: note = Description of Artificial Sequence: Synthetic coding sequence
  source 1..684: mol_type = other DNA
ccccacaccctgctggaggaccacctgctgcgggagttcttccaccctctgtttttcctgcaggccccgctcctgttgagtctgccagcccaatacaacgcgttcctgtccggtagcgtctggaccccaggaagtcctcgggagcccaaacaggcgaaggaacgaaccggagccaagatcctcgtgggtgaaataggctgcctggccttcttcgaggacatcttcggcgcgcgcgtcgctctgggatggggcctggtacttcagggcatacagcctggccccaaaatggatacctctggtcattttcatgacagtggcgttggcgacctagatgaggatccaaaatgcccatgcccctcttccggtgatgaacagcagcaacagcagcagcagcagcagcaacagcaaccgccgccacctgctcccccggccgctccccagcagccgttgggcccatctctacagccacagcccccccagctgcaacagcaacagcagcagcagcagcaacagcagcagcaacagccccctcatcccctctcgcaactggctcaactacaatcccagccagttcaccctgggttgcttcactcaagccccaccgcattccggcccccttttgtccagctgcacaggcatcctccacctttccttcaggcacggcagcccgcgcagtctcagtag

SEQ ID NO: 200222 - DNA, 1284 bp, synthetic construct
  misc_feature 1..1284: note = Description of Artificial Sequence: Synthetic coding sequence
  source 1..1284: mol_type = other DNA
atgggcggcgacctggtgctgggcctgggcgccctgcggcggcggaagcgattattggagcaggagaagtctctcgccggctgggctctcgtgcttgcagggacgggtattgggcttatggtgctccacgctgagatgctgtggttcgggggctgctcctgggccctttacctgtttctggtaaagtgtaccatttctattagtacttttctgctcctgtgcttaatcgtggccttccatgcaaaggaagttcagctcttcatgactgacaacgggctgcgggactggcgggttgctctgacaggacgacaagccgcccagatcgttttggagctcgtcgtttgtggtctacaccccgccccggtgagagggccgccctgcgtccaagacctgggtgccccccttacctcccctcagccttggccgggatttctgggtcagggcgaagcacttctgagcctggctatgctcttgcggctatatctagtccctagggccgtactgctgagatcaggcgtattattgaacgcctcgtatagatccatcggcgcactcaatcaggtcaggttccggcactggtttgtcgccaaactttacatgaacactcatcctggcagattactactgggtctgacacttggactctggttgactactgcatgggtgctttccgttgccgagcggcaggccgtcaatgcgacaggtcatctgagtgatacattgtggctgattcccataaccttcctgactattgggtacggagatgtggttccaggtaccatgtggggaaaaattgtctgtctatgcacaggtgtgatgggcgtctgctgcacagccctgctggttgctgtagtggcgagaaaattagagtttaacaaggccgagaaacatgtgcacaatttcatgatggacatccagtacactaaagagatgaaggaatcggcagcgagggtgctgcaggaggcctggatgttttataaacacactaggcgcaaagaaagtcacgcagcccgccgtcaccaacgcaagttgctggcagcgatcaatgccttcagacaggtgcgcctcaagcaccgcaagctccgcgaacaggtcaatagtatggttgacattagtaagatgcacatgatcttgtacgacctgcagcagaacctgagttcctctcatcgagccctagagaaacagattgacactctggctggcaagctcgacgctctgaccgaactattatcaactgccctcggacctcgccaactgcctgaaccgagccagcagtcaaagtag

SEQ ID NO: 200223 - DNA, 888 bp, synthetic construct
  misc_feature 1..888: note = Description of Artificial Sequence: Synthetic coding sequence
  source 1..888: mol_type = other DNA
atgcacgaccagcacttccacctgctgacccccctgccccaccggggattatcctgtcagcgtggccccgctgtgcacgaccgccagagagctgccggtttagcccggggtgccgacagagccgcaggaaatgcgtcatataggagtataggcgcactgaaccaagtgcgcttcagacattggttcgtagcgaagctgtacatgaacacacacccagggaggctactgcttggacttacacttggtctgtggctgactactgcatgggtcctctctgtggcggaaagacaagctgtaaatgccacagggcacttgtccgacacattgtggttgatcccgattacattcctgaccataggctatggagacgtggttcctggcacaatgtggggaaaaatcgtgtgcttgtgtaccggagtgatgggtgtgtgttgtacagccttactggttgctgtcgtcgcaagaaaattagagttcaataaggctgagaaacatgtgcataactttatgatggacattcagtacacgaaagaaatgaaagaatctgccgcccgagtgttgcaggaagcatggatgttctataaacatacacgccggaaagagtcccacgccgccaggagacaccaacgcaagctgctggctgctataaacgcctttagacaggttcgccttaagcatcgcaaactccgcgagcaagtaaatagcatggtggatatttctaagatgcatatgatattgtatgacttacagcagaacctcagctcatcacatcgcgcactcgagaaacagattgatactttagctggcaagctggatgcactcaccgaacttctgagcactgctctcggcccacggcaactgccagagccttctcagcaaagtaagtag

SEQ ID NO: 200224 - DNA, 1119 bp, synthetic construct
  misc_feature 1..1119: note = Description of Artificial Sequence: Synthetic coding sequence
  source 1..1119: mol_type = other DNA
atgttcaagcacctgcggaagtgggtggtgacccggttcttcggccactcccgccagagagcccgcctggtctcaaaagatggtagatgcaatatcgaatttggtaacgtcgaagcacagtctcgcttcatattcttcgttgatatttggacaaccgtgctggacctgaagtggcggtataagatgacaattttcataaccgcctttctgggcagctggttcttctttggtctgctctggtacgctgtagcctacatacacaaggatttgcccgagtttcatccttccgctaaccatactccctgcgtggaaaacatcaacggcctcacctcagcgttcctgttcagcctagagacacaagtgaccattggatatggcttcaggtgcgtcacagagcagtgcgcaactgccattttcctactgatttttcaatctattctcggagtcatcatcaatagttttatgtgcggcgcaatcctggccaaaatttcccggcccaaaaagcgggccaagacaattacttttagcaaaaatgccgtgatctccaaacgaggcggtaaactctgcctgcttattagagtggcaaatttaagaaaatcgctgcttataggcagccacatctacggaaaacttctgaagactacggtgacaccggaaggcgagaccattattttggatcagattaacattaactttgtggtggatgcaggcaacgagaatctcttttttatctccccactgacaatttaccacgtgattgaccataactctccttttttccatatggccgcagaaaccctgctccagcaggacttcgaactggtcgtgttcctcgacggcaccgtggagtccacgtctgccacatgtcaagtccggaccagctacgtgcctgaggaagtgttgtggggataccggtttgctccaattgtttctaaaacaaaggaaggaaaatacagagtggactttcataattttagtaaaaccgtcgaagtggagactcctcactgtgccatgtgcttgtacaacgagaaggacgtgcgcgcccggatgaagaggggatacgacaatcccaattttatactgtctgaggtcaatgagaccgacgatacaaagatgtag

SEQ ID NO: 200225 - DNA, 1119 bp, synthetic construct
  misc_feature 1..1119: note = Description of Artificial Sequence: Synthetic coding sequence
  source 1..1119: mol_type = other DNA
atgttcaagcacctgcggaagtgggtggtgacccggttcttcggccactcccgtcagcgtgccagacttgtcagcaaagatggacgctgcaacatcgagtttggaaacgtagaagcccagagccgatttatcttttttgtggatatatggactacggtcctcgacttaaagtggcgatacaagatgactatcttcattactgccttcctcgggtcttggttcttctttggactgctctggtatgctgttgcatatatccacaaagatctgccggaatttcacccaagtgctaaccatacaccatgtgttgagaacattaatggcttgacgtcggctttcctgttcagtctggagacacaggtgaccataggctacggattccggtgcgtgacagaacagtgtgccaccgccatctttctgctcatcttccaatcaatcctcggcgtaatcatcaactcttttatgtgtggcgcgattctggccaagattagtaggcccaagaagcgcgccaaaaccataaccttttcaaagaacgccgtaatctccaaaagaggagggaagctgtgtctgctcatccgggtggccaatttgaggaaaagcttgctcatcggtagccacatctatggtaaattgctgaaaaccacagttacgccagagggcgagaccataatcctggatcagataaacattaacttcgtggtggacgccggaaatgagaatttatttttcatcagtcccctcaccatctatcatgtcatcgatcataattcccctttcttccacatggccgccgaaacactgttgcagcaggatttcgagcttgttgtctttctagatggcaccgtcgagtcaacgagtgcgacctgccaagtcaggacatcatatgttccagaggaggtgttgtggggctatagatttgctccaattgtgagcaagacaaaggagggtaagtaccgggtggattttcataacttttcaaagaccgtggaggtggaaaccccccactgtgccatgtgcctttataacgagaaagacgttcgggcccgcatgaagcgcggctacgacaaccccaatttcatccttagtgaagtcaacgaaacagacgacactaagatgtag

SEQ ID NO: 200226 - DNA, 912 bp, synthetic construct
  misc_feature 1..912: note = Description of Artificial Sequence: Synthetic coding sequence
  source 1..912: mol_type = other DNA
atggcctggtggctgatcgccttcgcccacggcgacctggccccctctgagggtacggccgagccttgcgtcacctcgatacacagtttcagcagtgcgtttttattctctatagaggtgcaggtgaccatcggattcggtggacggatggtgactgaggagtgcccgctggcaatcttgatcttgatcgtccagaatattgtcggcctcatgattaacgccattatgctggggtgtatcttcatgaagactgcccaggcgcataggagggctgagaccctgatcttcagcaaacatgcggtgatcgctctaagacacggccgtctttgttttatgttacgagtcggtgatctgagaaagagcatgatcatctcagcaactattcatatgcaggttgtgagaaaaactaccagtccagaaggcgaggtcgtaccgcttcatcaggtggatatacccatggaaaatggggtggggggaaattccatctttcttgtcgcgccgctcatcatctaccatgtaatcgatgccaacagcccgctctacgacctcgcaccaagtgatttgcaccatcatcaagatcttgagatcatcgtcatcctagaaggggtggtggagacaaccggcattactacccaggctcggacatcgtacttggcagatgaaattctttggggccagcgattcgttccaattgtcgcagaggaggacggtagatattctgttgactactccaaattcggcaacactgtgaaggtccccacccccttgtgtacggctcgccagctggacgaggatcacagcttactggaggccctgacccttgcttcggctaggggaccgctcagaaagaggagcgttcccatggccaaagcaaaacccaaattcagtatcagcccagacagcctgtcctag

SEQ ID NO: 200227 - DNA, 1302 bp, synthetic construct
  misc_feature 1..1302: note = Description of Artificial Sequence: Synthetic coding sequence
  source 1..1302: mol_type = other DNA
atgaccgccgccagccgggccaacccctacagcatcgtgagcagcgaagaggatggactgcacttggtaactatgagtggggccaatggcttcggaaacggaaaagtgcatactaggaggcggtgtcggaatcggttcgtgaaaaagaatgggcagtgtaacatcgaattcgcgaatatggatgaaaaaagtcaaagatatcttgccgatatgtttacaacttgtgtcgacataagatggcgatatatgttacttattttcagtctggccttcttggctagctggctgctcttcggtattattttttgggtgatcgcagtggcccacggcgacttagaacctgccgaggggcgcgggcgcaccccatgtgttatgcaggtgcatgggttcatggccgccttcctgttctctattgaaacccagacaacaatcgggtacggattacgatgtgtgaccgaggagtgtcccgttgccgtattcatggtggtggcccagtccattgttgggtgtatcatagactcgtttatgattggagccatcatggccaagatggccagacccaaaaagcgagcacaaacactgttattcagtcacaacgcagttgtggcattaagagatggaaaactctgccttatgtggagggtggggaatctgcgaaaaagccatattgtggaggcacacgtacgtgcccagctgatcaaacctcgagtgacggaggaaggcgaatatataccgctggaccaaatcgacatcgatgtaggattcgataaaggtttggatcggattttcctggtctctcccataaccatccttcatgagatagacgaggcttcacccttattcggcatcagcaggcaggatttagagacagacgatttcgaaatagtggttattctggaaggcatggtggaagccactgctatgactacccaggcccggtcatcctatctagcgaatgagattctctgggggcacaggttcgagccagttttgtttgaggagaaaaaccaatacaaaatagattacagccattttcacaaaacatatgaggtcccgtccactccccgatgctctgccaaggatcttgtggagaacaagttcttgctaccaagcgctaactccttctgctatgagaacgaattggcatttctgagtagagacgaagaagatgaggccgacggagaccaggacgggcggtccagagacggactgtccccacaggcgagacacgacttcgatcgactccaggccgggggtggggtgctggaacaacggccttaccgacgagagtctgagatctag

SEQ ID NO: 200228 - DNA, 1257 bp, synthetic construct
  misc_feature 1..1257: note = Description of Artificial Sequence: Synthetic coding sequence
  source 1..1257: mol_type = other DNA
atgagctactacggcagcagctaccacatcatcaacgccgacgccaagtatcctggataccccccagagcatattattgcggagaaaaggagggcccggcggagactactccataaggacggcagttgcaacgtgtattttaagcacatttttggggaatgggggtcatatgtcgtggatatttttaccacccttgtggataccaaatggcgccacatgtttgtcatctttagcttaagttacattctgtcctggctcatcttcggcagcgtattttggctcatagcctttcaccacggtgacttgctcaatgatcctgatataactccttgtgtggacaacgtacactcatttacaggtgcatttttgtttagccttgagacccagacaacaattgggtatggctaccgctgcgtgaccgaagaatgtagcgtagcagtccttatggttattttacaaagcatcttgagctgtattatcaatacctttattatcggcgctgcactggccaagatggcgaccgcacgcaagcgcgcccaaactattcggttcagctattttgccttaatcggcatgagagatggaaagctatgtttgatgtggcgaattggcgactttaggccaaatcacgtagttgagggcacagtcagagcccaactcctgcgctatactgaagacagcgaaggccgtatgaccatggcattcaaggacctcaaattggtgaacgaccaaatcatcctggtgactccggtgaccattgtgcacgaaatcgaccacgaaagtccactctacgccttagatcgcaaagctgtcgccaaggataacttcgaaatcctagtgacattcatctacaccggtgacagcacagggacatcgcatcagtcccgctcaagttatgtgcctagagagatactgtgggggcacaggttcaatgacgtgcttgaagtgaagaggaagtattacaaggtgaactgcctgcagttcgagggctctgtcgaagtctacgcgcctttctgctccgctaagcagctcgattggaaggaccagcagctacacatcgagaaagcaccccctgtgcgcgaaagttgtacatccgataccaaggctaggcggcgcagctttagcgctgtcgccattgttagcagttgtgaaaatcctgaagaaacaaccactagcgcaacccatgaatatagggaaaccccttaccagaaagcgctattgactctcaatcggatctctgtcgagtcacagatgtag

SEQ ID NO: 200229 - DNA, 1119 bp, synthetic construct
  misc_feature 1..1119: note = Description of Artificial Sequence: Synthetic coding sequence
  source 1..1119: mol_type = other DNA
atgttcaagcacctgcggaagtgggtggtgacccggttcttcggccattcccgccagcgagctaggttggtctcaaaagacggcaggtgtaacatagagttcggaaatgtcgaagctcagagccgattcatattctttgttgacatatggactacagtgctggacctgaagtggaggtataaaatgaccatattcattaccgcattcctcgggtcctggttctttttcgggttgctgtggtatgctgtggcgtatattcataaggatctaccggaatttcaccccagcgcaaaccatacaccttgtgtcgagaatataaatggcctcactagcgcgtttctcttctccctcgagacccaggtgacaattggctatgggttccgctgcgttaccgagcagtgcgcgactgctatttttctactgatttttcagtctatacttggtgtgataattaattctttcatgtgtggcgcaatactcgccaagatttcacgtcctaagaagcgggctaagacgatcacttttagcaagaacgcagtgatttccaagaggggggggaagctgtgcttgctcatccgcgttgctaatctgcgaaagtcccttctgattgggtcacatatttacggcaaattattgaaaacaaccgtcacacctgaaggggagaccattatcttggaccagattaacatcaactttgtggtggacgcaggcaatgaaaatctgttcttcatatccccacttactatttatcacgtcatcgatcacaactcgccgttcttccatatggccgcagaaacccttcttcagcaagacttcgagctggtagtctttctcgatggcacagttgagtccacttctgctacatgtcaggtcagaacttcctatgtgcccgaggaggtgctgtggggttatcgctttgcaccaattgtgtctaaaactaaggagggcaagtatagagttgatttccataatttttccaaaactgtggaggtagaaactcctcactgtgctatgtgcttatacaatgagaaggacgtgcgggcccgtatgaagcgtggttacgataatccaaacttcatcctgtctgaggttaacgagacagatgacacaaaaatgtag

SEQ ID NO: 200230 - DNA, 1176 bp, synthetic construct
  misc_feature 1..1176: note = Description of Artificial Sequence: Synthetic coding sequence
  source 1..1176: mol_type = other DNA
atgaacgccagcagccggaacgtgttcgacaccctgatccgggtgctgaccgagtccatgtttaagcaccttcgcaaatgggtggtcaccagattttttgggcattcacgacagagggcaaggctggtctcaaaggacggccgctgtaatatcgaatttggcaacgtcgaagctcagtctcgattcattttctttgtggacatctggacaacggtgctcgatcttaaatggcggtacaaaatgacaatcttcatcactgcattcttaggcagctggttctttttcggtctgctgtggtatgccgtagcttacatacataaggacctgcctgagttccatcctagtgccaaccatacgccctgtgtcgagaacatcaatggcctcacgtcagcatttttattcagtctggagacccaggtaacaatcggatacggctttcgctgtgtcaccgagcagtgcgccaccgcgatctttttgctaatcttccaatcgatcctgggagttattataaattcattcatgtgtggcgccatcctggccaaaatttcacgtcctaagaaacgcgcaaaaacaatcacttttagtaagaatgcggtaatcagtaagcgcggggggaaactatgcctgctcatccgtgtggctaatttacgcaagtccttgctcatagggtcccatatttatgggaagctgctcaaaaccacggtcacaccagaaggggagacaatcatattagaccaaatcaatattaacttcgtggtcgacgctggcaacgagaatcttttcttcatctcacccctgactatttatcacgtgatcgatcataactccccgttctttcatatggcggccgagacattgctgcagcaggatttcgagcttgtggtatttttggacgggacggtggaatctacaagcgcaacctgccaggtgcggacctcatatgtgcctgaggaagtgctctggggctataggtttgcgcctatcgtgtctaagacgaaggagggcaaataccgcgtggatttccacaatttctctaagacagttgaggtggagaccccgcattgtgctatgtgcctgtacaacgaaaaagacgtgcgggcccgcatgaagagaggatacgacaacccaaatttcattctgtccgaggttaacgaaaccgacgatacgaagatgtag

SEQ ID NO: 200231 - DNA, 1119 bp, synthetic construct
  misc_feature 1..1119: note = Description of Artificial Sequence: Synthetic coding sequence
  source 1..1119: mol_type = other DNA
atgttcaagcacctgcggaagtgggtggtgacccggttcttcggccattcacgccagcgggcacgactcgtgtccaaagacggccgatgtaacattgaatttgggaatgtggaggcccagtccaggttcatcttcttcgtggatatctggaccacagtgctggatcttaagtggcgctataagatgactatctttattacagcattccttggttcatggtttttctttgggctcctgtggtatgcagtggcatacatccataaagaccttcctgagttccaccctagcgcaaatcataccccatgtgtggaaaacattaacggcctcacctccgccttcctgttctcactggagacccaggtgaccataggctacggatttaggtgtgtgaccgagcagtgcgccacggctatcttcctactgatttttcagtccatcttgggagttattataaatagcttcatgtgcggagcgatcctggccaaaatctcaagaccaaaaaagcgcgcgaagaccatcacatttagtaaaaatgctgtgatttcaaagcggggcggaaaactgtgcctgttgatcagggttgctaacttaagaaagtcactgcttatcggaagccacatctacggtaaactgctgaagactaccgtgacaccagaaggagagacgatcatcctggatcaaattaatatcaactttgtggtagacgccggaaacgaaaaccttttttttatctccccgttgacaatatatcacgtcatcgatcacaactcaccgttcttccacatggccgccgagaccctgctgcagcaggacttcgagcttgtggtttttttggatgggacagttgagagcacaagcgctacctgtcaggtgcgcacaagctacgtacctgaagaggtgctttggggctaccgttttgcaccaatcgtcagcaaaacaaaagaaggtaaatacagagtggattttcataacttttcaaagactgtggaagtggaaacgccacactgtgccatgtgcctctacaatgagaaggatgtccgagctcgtatgaaacgggggtatgacaatccaaactttattctctccgaggttaacgaaactgacgatactaagatgtag

SEQ ID NO: 200232 - DNA, 1140 bp, synthetic construct
  misc_feature 1..1140: note = Description of Artificial Sequence: Synthetic coding sequence
  source 1..1140: mol_type = other DNA
atgaccagcgtggccaaggtgtactacagccagaccacccagaccgaaagtagacctttgatgggaccaggcatccggcgcagacgggtcttaaccaaagacgggaggtcaaacgttaggatggagcacatagcagacaagcgcttcctgtacctgaaagacctgtggactacttttatcgacatgcagtggcggtataaactgcttctgttcagcgctaccttcgccgggacatggtttctgttcggggtggtttggtacctcgtggcagttgcacacggcgatttactggagctggaccctccagccaaccacactccgtgcgtcgttcaagtgcatacactcaccggagcctttctattctcccttgagtctcaaaccaccatcggctacgggttcaggtatatcagcgaggagtgcccgctggctattgtcctcctaatcgcccagcttgtcctcacgactatcctggagatattcatcacagggacgttcctggctaagatcgctagacccaaaaagcgagccgagactatccgcttttcccaacacgccgtcgtggctagccacaatggaaagccatgcctcatgattagggtcgccaacatgagaaagagcctgctgattggctgccaggtgacgggtaagcttctgcaaacgcatcagactaaggagggcgagaacataagactcaaccaggtgaatgtcacttttcaagtagatactgccagcgactctccttttctcattctgcccctcactttctatcatgtagtggacgaaacatcccctctcaaggatctgccactgcgcagcggggagggcgatttcgagctggtcctcattttgagcggcaccgtagagagtacatcagctacgtgtcaggtgagaactagctacttgcccgaagaaatcctttgggggtatgaatttactccagcaatttccctgtcagcaagtgggaaatatattgccgatttctctctcttcgatcaagttgttaaagtagcctctccctccggtttaagagattcaacagtccgttacggggatcccgagaaacttaagctggaggagagtttgcgggagcaggccgagaaggaaggcagcgccctcagcgttaggatctctaacgtttag

SEQ ID NO: 200233 - DNA, 1173 bp, synthetic construct
  misc_feature 1..1173: note = Description of Artificial Sequence: Synthetic coding sequence
  source 1..1173: mol_type = other DNA
atgctgagccggaagggcatcatccccgaggagtacgtgctgacccgtttagccgaggatccagcaaagcccaggtatcgtgcgcggcagaggcgagcgagattcgtgtctaagaagggtaactgcaacgtagcgcacaagaacatccgcgagcagggtaggtttctgcaggacgtgttcacaacattggtggatctgaaatggccacacaccttgctgatcttcacaatgtcttttctgtgttcttggttgctgtttgcgatggcatggtggctgattgctttcgcacacggtgacttagcacctagcgagggcacggctgagccctgtgtcacaagtatccattccttttcgtccgccttccttttctccattgaagtgcaagttaccatcggcttcggcggccgcatggtgacagaggaatgccctcttgctatcctcatactgatcgtacaaaacatagttggcctcatgattaatgccattatgttgggctgcatttttatgaagactgcacaagcccaccgccgtgcagagaccctgattttcagtaagcatgccgttatcgcactacggcatgggcgcttgtgtttcatgctgagggtgggggaccttcgtaagtcgatgatcatcagcgccacaatccatatgcaggttgttagaaaaacgacatcccctgaaggggaagtggttcccctccaccaggtcgatatccctatggagaatggggtgggcggcaactcaatcttccttgtggccccacttattatctaccacgtgatagacgctaatagtcccctttacgacctcgcgccatcagacctgcaccaccatcaagatctggagataatagtgattcttgagggcgttgtggagacaaccggcattactacacaagcccggacgtcttatctggcggatgagatcttgtgggggcagaggttcgtgccaattgtggcagaggaggatggcaggtactccgtggactattcaaagttcggaaatactgtcaaggtccccacgcctctttgtaccgcccggcaactggacgaggatcacagcctgttggaagctctgaccctggcttccgctagaggacccctgcgtaagaggagcgtacctatggctaaggccaagcccaagtttagtatctcaccagactccctcagttag

SEQ ID NO: 200234 - DNA, 1302 bp, synthetic construct
  misc_feature 1..1302: note = Description of Artificial Sequence: Synthetic coding sequence
  source 1..1302: mol_type = other DNA
atgaccgccgccagccgggccaacccctacagcatcgtgagcagcgaagaagacggactgcacctggtcaccatgagcggcgccaacgggtttggcaacggcaaggtgcacacacgcagacggtgccgaaaccggttcgtgaagaagaacgggcagtgtaacatcgaatttgcaaacatggacgaaaagtcacagagatacctcgccgatatgtttaccacatgtgtggacatccgatggcgctatatgctcttgattttcagtctggcatttttagccagttggctactattcgggatcatcttctgggtgattgcagtcgcccacggagatctagaacctgcagagggacggggaagaaccccctgcgtgatgcaggtgcacggctttatggccgcgtttctgttctctatagaaacccagactacaatcggttatggcctgagatgtgtcaccgaggagtgccccgtggctgtgttcatggttgtggcccagagcattgtcggctgcatcatcgactctttcatgatcggggcaattatggcaaaaatggcacgcccaaagaaaagggcacaaaccctgctgttttcccacaatgccgtcgttgctctacgagacggaaagctctgtttgatgtggcgcgtaggcaacttgcgcaaaagccatattgtggaagcccatgtgcgggcccagttgattaaaccccgcgttacagaggaaggtgagtatattcccctggatcagattgacatcgatgttggatttgacaaaggcctcgacaggatctttctggtaagtcccataactatcctacacgagatagacgaagcgagcccgttattcggaatttcacggcaagaccttgagactgacgatttcgagattgttgtgatactggaagggatggtcgaagcaacagcaatgacaacacaagctcgttcctcatatctcgccaacgaaattctgtggggacatcgattcgagcctgtcctgtttgaggagaaaaatcagtataaaatcgactactcacattttcataagacttacgaagtcccctctaccccccggtgttccgctaaggacctggtcgaaaataaattcctactccccagcgccaatagcttctgttacgagaatgagctggcatttttatcgcgagacgaggaggacgaagctgatggagatcaagatggccgcagccgggacggcctcagtccacaggcccgccatgacttcgaccgcctgcaagccggcggtggggtgcttgagcaacgcccctaccggagggaatcagaaatctag

SEQ ID NO: 200235 - DNA, 819 bp, synthetic construct
  misc_feature 1..819: note = Description of Artificial Sequence: Synthetic coding sequence
  source 1..819: mol_type = other DNA
atggtgctgctgaccgccgtgctgctgctgctggccgcctacgccggtccagcccagtcgctcggtagcttcgtgcactgcgagccgtgcgacgaaaaagcactgagtatgtgtcctcccagccccctgggttgtgagctcgttaaagagccaggatgcgggtgctgcatgacgtgcgccctggccgagggccagagctgcggagtgtatacagaacgctgtgctcagggccttcgttgtctgcccaggcaggacgaagaaaagcctctgcacgcgctgttacatggcaggggggtttgtctgaacgaaaagagttaccgagagcaggtgaagattgaaagggactctcgggaacatgaagaacctacaacttctgagatggctgaggagacatatagcccaaagatctttagacccaaacatactcgtatcagtgaactcaaggcagaggccgtcaagaaggaccggcgcaagaagctcactcagtccaagttcgtgggtggcgctgaaaacactgcacacccaagaatcatatctgcccccgaaatgagacaggagagcgagcagggtccctgtcgtagacacatggaagccagccttcaagaactgaaagcatccccacgcatggtcccaagggccgtgtatttgcctaattgtgaccgaaaggggttttataagcgaaaacaatgtaaaccctcgaggggccggaagagagggatttgttggtgcgtcgacaagtatggtatgaaactgcctggaatggagtatgtggacggggactttcagtgtcacacctttgatagctctaacgttgagtag

SEQ ID NO: 200236 - DNA, 285 bp, synthetic construct
  misc_feature 1..285: note = Description of Artificial Sequence: Synthetic coding sequence
  source 1..285: mol_type = other DNA
atggacagcagcaactgcaaggtgatcgcccccctgctgagccagcggtacagacggatggtgactaaagatggtcacagcaccctgcagatggacggggcccagcgaggcttagcctacctccgggatgcctgggggattctcatggacatgagatggagatggatgatgctcgttttctccgctagttttgtagtacactggctcgtgtttgcagtcctctggtgcttttgcggtgaggattgcccagccaagaagagctcgttctttaattccttgtactag

SEQ ID NO: 200237 - DNA, 1083 bp, synthetic construct
  misc_feature 1..1083: note = Description of Artificial Sequence: Synthetic coding sequence
  source 1..1083: mol_type = other DNA
atggacagcagcaactgcaaggtgatcgcccccctgctgagccagcgctataggagaatggtgaccaaagatgggcattcaacactccagatggacggggctcaaaggggactggcctacctgcgggatgcctgggggatcctgatggatatgcggtggagatggatgatgctcgtgttcagcgccagctttgtcgtccactggctcgtcttcgcggtgttatggtacgtgttagccgagatgaacggcgacttagagctagaccacgacgcccctcccgaaaatcacaccatatgtgtcaagtacatcacatccttcacggccgcgttcagtttctccttggaaacccaattaacgatcggatatggcacaatgtttcctagcggagattgcccgagcgccatagccctgttagcaattcagatgctgctcggactgatgctggaagcatttattactggggctttcgtcgctaaaattgctcggcccaagaatagggccttcagcatcagattcacggataccgccgtcgtggctcacatggacggcaaacctaatctgatttttcaagtcgcaaatacacgcccaagccctctgacatccgttagagtttccgccgtgctataccaagagagagagaacgggaagttataccagacgtcagtcgactttcatctagatggaatttcatctgacgagtgtccctttttcatcttcccgcttacatactatcactccattacaccttccagccctctggctacgctcttacaacacgaaaatcctagccattttgaactggtggtgtttctaagcgccatgcaagaggggacaggcgagatctgtcagcggcggacctcatacctaccctccgagatcatgttacaccactgcttcgcatctctgcttacaagaggctccaaaggggaataccaaattaagatggagaatttcgacaagacagttcctgagttcccgactccacttgtgtccaagtcacccaatcgaaccgacttggatattcatatcaatggtcagtccatagacaatttccaaatttccgagacggggctgactgagtag

SEQ ID NO: 200238 - DNA, 1128 bp, synthetic construct
  misc_feature 1..1128: note = Description of Artificial Sequence: Synthetic coding sequence
  source 1..1128: mol_type = other DNA
atggacgccatccacatcggcatgagcagcacccccctggtgaagcataccgccggggctgggcttaaagcgaatcgcccgcgggtgatgtcaaagagtggccactcaaacgttcggattgacaaggtcgacggcatttacttactatatttacaagatctctggacgaccgtcatcgatatgaagtggcgttacaagctcacattatttgcggccacgttcgttatgacctggttcctattcggggtaatatactacgctatcgcttttattcatggcgatttggaaccgggggagccaatctccaaccacacaccctgcattatgaaggtggatagtctgaccggtgctttcctattctctttggaatcccagaccaccattggttacggggtacgcagtatcaccgaagagtgtcctcacgccatattcctccttgtcgctcagcttgtcattacgaccctaatcgagattttcatcacaggaacattcctggccaagatcgctagacctaagaagagggctgagacaataaagtttagtcactgcgccgtgataactaagcagaacgggaaattatgcctcgttatccaagtggcaaacatgcgcaagtccctccttattcagtgccagctctccggcaaactgcttcagacccacgtgaccaaggagggtgaacgcatcctcctgaaccaggccaccgtaaagttccatgtagacagcagcagcgagagccctttcctgatactcccaatgacgttctaccatgttctcgacgagaccagtcctcttagagatcttaccccccagaacctgaaggaaaaggaatttgagctggtggtcctgctcaacgccacggtggaatccaccagcgccgtgtgccagagtaggacaagctacatccccgaagagatctattggggattcgaattcgttccagtcgtgagtctgagcaagaacggaaagtatgttgccgacttctctcagtttgaacagatccggaagtcccctgactgcaccttttattgtgccgattccgaaaagcagcagctcgaggagaaatatagacaagaggaccagcgggagcgtgagctcagaacacttcttctacagcaaagcaatgtgtag

SEQ ID NO: 200239 - DNA, 186 bp, synthetic construct
  misc_feature 1..186: note = Description of Artificial Sequence: Synthetic coding sequence
  source 1..186: mol_type = other DNA
atggacgccatccacatcggcatgagcagcacccccctggtgaagcacacagctggggccggcctgaaagctaaccggccgagggtcatgtctaaatctggccattcaaatgtcaggatcgataaggtagatgggatctatctgctgtatttgcaggacttgtggaccaccgtcatagacatgtag

SEQ ID NO: 200240 - DNA, 471 bp, synthetic construct
  misc_feature 1..471: note = Description of Artificial Sequence: Synthetic coding sequence
  source 1..471: mol_type = other DNA
atggacgccatccacatcggcatgagcagcacccccctggtgaagcacacagcgggagctggcctgaaagcaaaccgcccacgagttatgagtaagagcggtcatagtaacgtgagaatagacaaagtggacgggatttatctgctctacttgcaggacctctggacaaccgtcatcgacatgaaatggcgctacaagctgactctgtttgcggccactttcgttatgacctggttcctctttggagttatttattacgcaatcgcttttatacatggcgacctagagcctggcgagcccatatcgaaccatactccttgcatcatgaaagtggatagtcttacaggggccttcctatttagcctagaaagccagaccacaataggctatggtgtacgttccatcaccgaggagtgcccacatgccatttttttactagtcgcacaacttgtaataaccactctcatttag

SEQ ID NO: 200241 - DNA, 471 bp, synthetic construct
  misc_feature 1..471: note = Description of Artificial Sequence: Synthetic coding sequence
  source 1..471: mol_type = other DNA
atggacgccatccacatcggcatgagcagcacccccctggtgaagcacaccgccggggctggcctgaaggcaaatcgcccaagggttatgtcaaagtcaggacactccaacgtcagaatcgacaaggtggacggaatatacttactgtaccttcaagacctgtggacaacagtaatagacatgaaatggcgctacaagctgactctgttcgctgctaccttcgtcatgacatggttcctgttcggcgtgatctactatgccatcgcttttatacatggggacctagagcccggtgaaccaatttcaaaccacaccccttgtatcatgaaagtagactccctgaccggcgcattcctgtttagcttagagtcccaaacaacaattggctatggtgtgcggtctatcacggaggagtgccctcacgccatctttttacttgtcgcacagctagtgattacgacattgatctag

SEQ ID NO: 200242 - DNA, 1128 bp, synthetic construct
  misc_feature 1..1128: note = Description of Artificial Sequence: Synthetic coding sequence
  source 1..1128: mol_type = other DNA
atggacgccatccacatcggcatgagcagcacccccctggtgaagcacaccgcaggggccgggctaaaagcaaatcgacctagggtgatgagcaaaagcggccactcaaatgtccgtatcgataaagtagacggaatctacctactgtacctgcaggatctgtggactactgtcatagatatgaagtggcgctataagctgacactgtttgccgccacttttgtgatgacttggttcttgttcggtgttatctattacgccatcgcctttattcatggcgatcttgagcctggcgagcccatcagtaaccatactccctgcataatgaaggtggattcactcacaggggccttcctttttagccttgagtcccagacaaccattggttacggagtgaggagcatcactgaggagtgtccgcatgccatcttcctcctcgttgcccaacttgttattacaacactgattgagatcttcattacagggacttttcttgcgaagatcgcacggccaaaaaaaagagctgagaccatcaaattttctcactgtgccgttatcacaaagcagaacgggaaactttgtctcgtaatccaggtggctaacatgcgcaaatcgctgctgatccagtgtcagttgagcggaaagttactccaaacacacgtgacaaaggagggggaacgtatcctgctcaaccaggcgactgtgaagtttcatgtagattcgtccagtgagtcaccgttcctgatactgccaatgactttctaccacgtgctggatgagacatcccccctgcgcgatcttacccctcagaacttaaaagagaaagagttcgaactcgtcgtgctacttaacgccactgtggagagcacatccgctgtctgccagagtagaacgtcttacatacctgaggaaatctactggggcttcgagtttgtgccagttgtgtccctgagtaaaaacggaaagtacgtggcagatttttcccaatttgagcagatccgcaagagccccgactgtactttttattgcgccgactctgagaagcagcagctggaggaaaagtaccgtcaagaggatcagagggagcgggagctgcgtaccctcctcctgcagcagtcaaatgtttag

SEQ ID NO: 200243 - DNA, 1128 bp, synthetic construct
  misc_feature 1..1128: note = Description of Artificial Sequence: Synthetic coding sequence
  source 1..1128: mol_type = other DNA
atggacgccatccacatcggcatgagcagcacccccctggtgaagcatacagccggagcgggcctgaaagctaatcggccccgcgtcatgtcgaagagtgggcactctaatgttcgcatagataaggtggatggcatttacttactttatctccaggatctgtggactacagtcatagacatgaaatggcgttataaattgaccttgtttgccgcgactttcgttatgacctggttcctgtttggggtgatctactacgctatcgcctttatccatggcgaccttgagcccggggaacctataagcaaccataccccgtgcataatgaaagtcgattctttaacgggcgctttcctgttctctttagaatcacagacgactattggatacggagtcaggagcattaccgaggaatgcccgcatgctatctttctcctagttgcccagcttgttataactacgcttattgagatctttatcaccggcacgtttcttgcaaaaatcgcacggccaaagaagagagccgagaccatcaagttcagccactgtgctgttataaccaagcagaacggtaagttatgcctggtcatccaggtcgccaacatgcgtaaaagtttattgattcagtgtcagctctccggtaagcttctccagacccacgtgaccaaggaaggggagcgaattctgttgaatcaggcgaccgttaaattccacgtcgattctagcagcgagtcgcctttcctgatcctgcctatgactttctaccatgtcctggatgagacaagcccgctgagagatttaacaccccagaacctgaaggaaaaggaatttgagctggttgtgctcctgaacgccactgtggagagtacctccgctgtatgccaatcccgaacttcttacatcccagaggagatatattggggattcgagttcgtgccagttgtgtccctgtccaagaacgggaagtatgtcgccgacttttcgcaatttgagcagattaggaagagccctgattgcaccttttactgtgccgactcagaaaagcagcagttagaagagaaatatagacaagaggatcagcgcgagcgagaattgcgcacactcctgctccagcagagcaacgtgtag

SEQ ID NO: 200244 - DNA, 1128 bp, synthetic construct
  misc_feature 1..1128: note = Description of Artificial Sequence: Synthetic coding sequence
  source 1..1128: mol_type = other DNA
atggacgccatccacatcggcatgagcagcacccccctggtgaagcacacagccggagccggtcttaaggctaaccggccacgtgtgatgagtaagtcgggtcacagcaacgtccgcatcgataaggtcgatggaatctatctgctgtatctgcaagatttgtggaccaccgtcattgatatgaaatggcgctataagttaacattgtttgcggcgacttttgttatgacatggttcctatttggggttatttactacgcgattgcatttattcacggagatcttgaacccggagagcccatcagcaaccatacaccctgtataatgaaggtggattctttgacaggggctttcctgttctccctggaatctcaaacaactattggctatggtgttcggagcatcaccgaagagtgcccccatgccatctttctgttggtcgcgcagctggtgattactacgctgatagagatttttatcactggaactttcctggcaaagattgcccgccctaagaaacgggcagagacaattaagttttcccactgcgccgtcattaccaaacagaatggcaaactctgtctggtgatccaggtggcaaacatgcggaaaagcttactcatccaatgccaattgtcaggcaaactgctccaaacccatgttactaaagaaggggagcgtatcctgttgaaccaagcaacagtgaaattccacgttgactccagtagcgagtccccctttctgatcctgccaatgactttttaccatgtgttggatgaaacgagccctctgcgggacctcacgccacagaatctgaaggagaaagagtttgaactcgtggtactgctgaatgccaccgttgagagcacaagcgctgtctgtcagagtcgtaccagttacatcccagaagaaatttactgggggtttgagttcgtgcctgtggtctccctgtcaaagaacggcaagtatgtggcagatttttctcaatttgaacagattaggaaatcacccgattgcaccttctactgcgccgactcggagaaacagcaactggaggagaagtatagacaggaagatcagagagagcgcgagttaagaaccctgcttctccaacagagcaatgtgtag

SEQ ID NO: 200245 - DNA, 1128 bp, synthetic construct
  misc_feature 1..1128: note = Description of Artificial Sequence: Synthetic coding sequence
  source 1..1128: mol_type = other DNA
atggacgccatccacatcggcatgagcagcacccccctggtgaagcatacagccggggccggactgaaagcaaacaggccacgggtgatgtcgaaatctggtcattcgaatgtgagaattgacaaggtcgacgggatctacctcctgtaccttcaggatctttggaccacagtaattgatatgaagtggcggtacaaactgacgctcttcgcagcaacgttcgtgatgacctggttcctgtttggtgtgatctactatgcgattgcattcattcatggtgatctcgaaccgggagaacccatttccaatcacaccccatgcatcatgaaggttgactccctgactggggcttttttatttagtctagagtcccagaccactattggctacggtgtgcgcagcatcactgaagagtgtcctcatgccatcttccttctagtggctcaactggtgattacaacccttatagagatattcatcaccggtacattccttgccaagattgccagacctaagaagagagcggagacaattaagtttagtcattgtgccgttattaccaagcagaacggcaagctttgtttggtgattcaggtggctaacatgcgtaaaagcctgttgatccagtgtcagctgagcggaaaattgctccagactcatgttacaaaggagggcgagcgaatcctgttgaatcaagctaccgtgaaattccacgtggattcaagctccgaatccccttttctaattctgccgatgacattttatcacgtgcttgacgagactagcccgttacgcgacctgacaccccagaacctgaaggaaaaggagtttgagctggttgtgctactgaatgctaccgtcgaaagtacgagtgcagtgtgtcaatcccggacttcttacattccagaagaaatatattgggggtttgagtttgtacccgtggtgtcactttctaaaaacggaaaatacgtggccgattttagtcagttcgaacagattcggaagtctcctgattgtaccttctattgcgctgattcagagaaacagcaactggaggagaaataccgacaagaggatcagcgcgaacgagagctgagaacgctgctcttgcagcaaagcaacgtatag

SEQ ID NO: 200246 - DNA, 60 bp, synthetic construct; identical to SEQ ID NO: 94052
  misc_feature 1..60: note = Description of Artificial Sequence: Synthetic coding sequence
  source 1..60: mol_type = other DNA

SEQ ID NO: 200247 - DNA, 420 bp, synthetic construct
  misc_feature 1..420: note = Description of Artificial Sequence: Synthetic coding sequence
  source 1..420: mol_type = other DNA
atggacgccatccacatcggcatgagcagcacccccctggtgaagcacacagccggagcaggtctcaaagcgaacagaccaagggtgatgagtaagtccgggcacagtaacgtaagaatagataaagtcgatggcatttatctgctgtatctgcaagacctatggactacagtcattgacatgaaatggaggtacaagctgacactgttcgccgctacctttgtgatgacgtggttcctcttcggcgtgatctattacgctatcgccttcatccatggggaccttgagccaggggaacctattagcaaccatactccctgcattatgaaggtcgattcactcacgggtgctttcttgttctctctcgagtcgcagaccactatcgggtacggcgtgcgctcaattacggaggaatgctag

SEQ ID NO: 200248 - DNA, 738 bp, synthetic construct
  misc_feature 1..738: note = Description of Artificial Sequence: Synthetic coding sequence
  source 1..738: mol_type = other DNA
atggacgccatccacatcggcatgagcagcacccccctggtgaagcacacggcgggtgctggcctgaaagcgaacaggccccgtgtgatgtccaaatcgggccattcaaatgttcggattgataaggtggatggcatttatctactttacctgcaggatctgtggaccacagtcattgacatgaagtggaggtacaagctgacccttttcgcggccacattcgtcatgacctggtttcttttcggagtgatttactatgccattgcattcatccacggggacctcgaacctggagagccaatctccaatcatacaccatgtataatgaaagttgattcgctcacgggtgcctttttattctccttagagtcacagaccacaatcggatacggcgtccgctccataactgaagaatgtcctcatgcgatctttctgctggtagcgcagctcgtgataacaactctcattgagattttcatcaccggtaccttccttgcaaaaattgccaggccaaagaaaagggccgagacaattaagttttcacactgtgccgtcatcacgaaacagaacgggaaattgtgtctcgtgatccaggtggctaacatgcgcaagtcccttcttattcagtgccaactcagcgggaaattgcttcagacccatgtgaccaaagaaggggagaggatcctgctgaatcaagctactgttaaattccacgttgacagctctagcgaaagttag

SEQ ID NO: 200249 - DNA, 120 bp, synthetic construct
  misc_feature 1..120: note = Description of Artificial Sequence: Synthetic coding sequence
  source 1..120: mol_type = other DNA
atggacgccatccacatcggcatgagcagcacccccctggtgaagcacacagcaggggcagggctaaaggcaaatagaccaagggtgatgagcaagagtggtcactccaatgtgcgttag

SEQ ID NO: 200250 - DNA, 147 bp, synthetic construct
  misc_feature 1..147: note = Description of Artificial Sequence: Synthetic coding sequence
  source 1..147: mol_type = other DNA
atggacgccatccacatcggcatgagcagcacccccctggtgaagcacacagccggagccgggctaaaggcgaaccggccccgggtcatgagcaagtccggacatagcaacgtgagaatagacaaagtagacggtatttatctttag

SEQ ID NO: 200251 - DNA, 147 bp, synthetic construct
  misc_feature 1..147: note = Description of Artificial Sequence: Synthetic coding sequence
  source 1..147: mol_type = other DNA
atggacgccatccacatcggcatgagcagcacccccctggtgaagcacaccgccggcgccggccttaaggccaatcgccctcgagtcatgtcaaaaagcggtcactccaacgttaggattgataaagtagatggcatttatctgtag

SEQ ID NO: 200252 - DNA, 147 bp, synthetic construct
  misc_feature 1..147: note = Description of Artificial Sequence: Synthetic coding sequence
  source 1..147: mol_type = other DNA
atggacgccatccacatcggcatgagcagcacccccctggtgaagcacacagcaggcgccgggctgaaggccaatcgacccagggtcatgtcaaagtccgggcattccaacgtgagaattgataaagtcgacggtatttatttgtag

SEQ ID NO: 200253 - DNA, 78 bp, synthetic construct
  misc_feature 1..78: note = Description of Artificial Sequence: Synthetic coding sequence
  source 1..78: mol_type = other DNA
atggacgccatccacatcggcatgagcagcacccccctggtgaagcacactgctggcgccggattgaaagccaattag

SEQ ID NO: 200254 - DNA, 147 bp, synthetic construct
  misc_feature 1..147: note = Description of Artificial Sequence: Synthetic coding sequence
  source 1..147: mol_type = other DNA
atggacgccatccacatcggcatgagcagcacccccctggtgaagcacacggccggcgccggactcaaggccaacaggccgagggtgatgagcaaaagcggtcactcaaatgtgcgcatcgataaggtggacggtatttatctttag

SEQ ID NO: 200255 - DNA, 147 bp, synthetic construct
  misc_feature 1..147: note = Description of Artificial Sequence: Synthetic coding sequence
  source 1..147: mol_type = other DNA
atggacgccatccacatcggcatgagcagcacccccctggtgaagcacaccgccggagctggccttaaggcaaatagacctcgcgtcatgtcgaagagtgggcatagtaacgtacggatcgataaggtggacgggatctatctgtag

SEQ ID NO: 200256 - DNA, 147 bp, synthetic construct
  misc_feature 1..147: note = Description of Artificial Sequence: Synthetic coding sequence
  source 1..147: mol_type = other DNA
atggacgccatccacatcggcatgagcagcacccccctggtgaagcatacagctggagcggggctaaaggccaataggccgagggtgatgtccaaaagtggccactctaatgtccggattgacaaggtggacgggatttacctgtag

SEQ ID NO: 200257 - DNA, 1257 bp, synthetic construct
  misc_feature 1..1257: note = Description of Artificial Sequence: Synthetic coding sequence
  source 1..1257: mol_type = other DNA
atgagctactacggcagcagctaccacatcatcaacgccgacgccaaataccctggttatccaccagaacatattatcgcggaaaagcgcagggcaagaagaaggttattgcataaggacgggtcctgtaacgtatacttcaaacacatatttggggagtggggcagctacgtcgtggacatttttacaaccttagtcgatactaaatggcggcacatgttcgtgatattcagtctgtcttatatcttgtcttggctgattttcggatctgttttctggctcattgcatttcaccatggggatcttctgaacgacccggatatcaccccttgcgtggataacgtgcattcgttcacaggagctttcctgtttagcctcgagacgcagaccaccataggctatgggtacagatgtgtgactgaagagtgctctgtggctgtgctcatggtgattttgcaatccatcttatcttgtattattaatacatttattattggggcagccctcgccaagatggcgaccgccagaaaacgcgcccagactattaggttcagctattttgccctgatcggtatgagagacggcaagctctgtctgatgtggagaataggcgattttagaccaaaccatgttgtcgaaggcactgtgcgtgcacagctgttgcggtatacggaggactctgaaggcaggatgaccatggcttttaaggacctcaagctcgtcaacgaccaaattatccttgtaacccccgtgactatcgtccacgagatcgatcatgaatccccactttatgccctggatcgcaaagcagtggcaaaggacaacttcgaaatcctggtgactttcatctacactggtgattctaccggtacatcccatcagtcaagatcgagttatgtacctagagagatcctgtggggccaccggttcaacgacgtgctggaggttaaaagaaagtattataaagtaaactgtttgcagtttgaaggatcagtggaagtgtacgcccctttctgttctgcgaaacagcttgactggaaggaccaacagctacatatcgaaaaagctccccccgtgcgcgagtcgtgcaccagtgatactaaggccaggcgcaggagcttttccgccgtcgctatcgtaagttcctgcgaaaatccagaagagaccaccaccagtgctacgcatgaatatcgggagaccccctatcaaaaggctctgctcaccctcaaccggattagcgtcgaaagccaaatgtag

SEQ ID NO: 200258 - DNA, 1257 bp, synthetic construct
  misc_feature 1..1257: note = Description of Artificial Sequence: Synthetic coding sequence
  source 1..1257: mol_type = other DNA
atgagctactacggcagcagctaccacatcatcaacgccgacgccaagtatcctgggtatcccccagaacatatcatcgccgagaaaagacgtgcaaggcggcggttactgcataaagacggatcttgcaacgtctactttaagcacatctttggcgagtggggtagctacgttgttgacatcttcacaaccttggtggacacgaagtggcggcatatgttcgtcatattttctctcagttacatcctgtcctggctcatttttggttccgtcttttggctgattgcattccaccacggggatctgcttaacgacccagatatcaccccatgcgtcgataacgtgcacagtttcactggcgctttcctgttttcccttgagacccagactactataggatatgggtatagatgtgtcaccgaagagtgttctgtcgctgttctgatggtgattcttcagtcaattctgtcttgcattatcaatactttcataattggtgcggcactcgctaagatggccacagccaggaaaagggcccagaccatccggtttagctacttcgccctgataggaatgagggatgggaaactctgtctgatgtggcgcattggtgacttcaggcctaaccacgtggttgagggcacggtgcgtgctcagctgctcagatataccgaggactcggaggggcggatgacaatggcatttaaggatttgaaactggtgaatgaccagatcattttggtgactccagttactattgtgcacgagattgatcatgagtcacccctgtacgccctggacaggaaggcagtcgccaaagacaatttcgagatcctcgttaccttcatctataccggggattccaccggcacctcccaccagtctcggagctcttatgttccccgcgaaatcctctggggacaccgattcaatgatgtgttggaagtcaagagaaagtactataaagtcaattgcctccagtttgagggcagtgtcgaagtatatgcccccttctgcagtgccaagcaactggattggaaggatcagcagctgcatatcgagaaagctccacccgttcgtgaatcttgcacaagcgatacaaaggccaggcggcgctcattttccgccgtcgccatcgtcagcagctgtgagaaccccgaggagactacaacctcggctacacatgagtaccgagagaccccgtaccagaaggctctccttactctcaaccgaatcagcgtagagtcgcagatgtag

SEQ ID NO: 200259 - DNA, 1257 bp, synthetic construct
  misc_feature 1..1257: note = Description of Artificial Sequence: Synthetic coding sequence
  source 1..1257: mol_type = other DNA
atgagctactacggcagcagctaccacatcatcaacgccgacgccaaatatccgggctacccgcccgaacacatcatcgcggagaaacggagggccagacgcagacttctacataaagacgggtcttgcaacgtttactttaaacatatcttcggagaatggggttcatatgtcgtggatatctttacaactctggtcgataccaagtggagacatatgttcgtaatcttttccttgtcctacatactgtcatggctgatcttcgggtcagtgttctggttgatcgctttccaccatggggacttgctaaatgaccccgatattacaccttgcgtggataacgttcatagcttcacaggggcattcctgttttccctggaaacgcaaacaacaataggttatggctaccgctgtgtgacagaggaatgttctgtagccgtacttatggtaattctccagagtatcttgagttgtatcatcaataccttcatcatcggggctgcgctggccaagatggcgacggcgcggaagagagctcagacaatccgattctcttacttcgcgctgattggtatgcgcgacggcaagctatgtttgatgtggaggatcggtgactttcgtccaaaccatgtggttgaggggaccgtgcgcgcccaattgctgaggtacaccgaagattcagagggccgaatgacaatggcttttaaggacttgaagctagtgaatgaccagattattctggtgactccggtgaccatagtgcacgaaattgaccacgagtcccccctctatgcgctggatagaaaggccgttgccaaggacaacttcgaaattcttgtgacatttatctataccggcgacagtaccggcacctctcatcagtcccggagctcttacgtgccccgtgaaattctgtggggccatcgctttaatgacgttttagaagtgaaacggaagtactacaaagttaattgcctgcagtttgagggttcagtggaggtatacgccccattttgcagcgctaaacagttagattggaaagaccagcagttgcatatagagaaggcacccccagtgcgggagtcatgtacctcagatacaaaggcgcgacggagatctttctccgccgtggccatcgtctcctcttgtgagaaccccgaggagaccacaacttccgccacccatgaatatagagagacaccataccagaaagcacttctcacgctcaacagaatttcagtggagagtcagatgtag

SEQ ID NO: 200260 - DNA, 1284 bp, synthetic construct
  misc_feature 1..1284: note = Description of Artificial Sequence: Synthetic coding sequence
  source 1..1284: mol_type = other DNA
atgggcagcgtgcggaccaaccggtacagcatcgtgagcagcgaggaagatgggatgaaactggccacaatggcagtggctaacggatttggtaatggcaagtctaaagtgcacactcgtcagcagtgcagaagtagattcgtgaagaaagacggtcattgtaacgtacagtttataaacgtgggagaaaaggggcagcgctacctcgcagatatcttcactacctgtgtcgacatacgctggaggtggatgctggtgattttctgtctagccttcgtacttagctggctgtttttcggatgcgtgttctggctgattgcattactgcatggagacctggatgcctcaaaggaaggtaaagcatgcgtttcggaggtgaatagcttcacagccgcttttctgtttagcatcgagacgcagaccacgattggctatggcttccgatgcgtaacagatgagtgtccgattgccgtgtttatggtagtatttcaatctatcgtgggctgcatcatcgacgcatttataatcggagccgtgatggcaaagatggcaaagcccaagaagcgtaacgaaactttggtttttagccacaatgctgtgattgccatgagagacggaaaactgtgcctgatgtggagggtaggaaacctccgaaagtcccacctagtcgaagctcacgttagggcccagttgctgaaaagtcggatcacatctgaaggcgagtacattccacttgaccaaatcgatattaatgtgggcttcgatagtggaatcgaccggattttcttagtgtcccccattactatcgttcacgaaatagatgaggattcacccctgtacgatctgagcaagcaagatatagacaacgcagatttcgagattgtggtaatactcgaggggatggtggaagccactgccatgaccacacagtgtagatcctcatatctggccaacgagattctttgggggcaccgctacgagcctgtcttattcgaggaaaagcattactataaggtggactacagccgtttccacaagacctatgaagtgcctaatacgcccttgtgttccgcacgggatctggccgagaagaagtacatcctaagtaatgctaatagcttttgttatgagaacgaggtcgccttgacttccaaggaagaggacgactctgagaatggtgtgcccgaatccacctcaaccgacactcctccggacattgacctgcataatcaagcaagtgtgcctttggagcctcgccccctgcgccgggagagcgaaatttag

SEQ ID NO: 200261 - DNA, 1284 bp, synthetic construct
  misc_feature 1..1284: note = Description of Artificial Sequence: Synthetic coding sequence
  source 1..1284: mol_type = other DNA
atgggcagcgtgcggaccaaccggtacagcatcgtgagcagcgaggaggacggaatgaagctcgccacaatggcagttgccaatgggttcggtaatggaaagtcgaaggtgcatactcgccaacagtgtcgttcaaggttcgtgaaaaaggatggtcactgtaacgtgcagttcataaacgtcggggagaaaggccagagatacttggctgacattttcacaacatgcgtcgatatacgctggcgatggatgttagtcatattttgtctcgcctttgtactgtcatggttgttcttcggctgtgtgttttggctgatagcactgctccatggcgacctcgacgcctcaaaagagggcaaggcttgtgtatctgaggtcaattcttttacagcggcgttcctcttctctatagagacacaaactaccatcgggtatgggttccggtgtgtaactgatgaatgcccaatagctgtcttcatggtcgtgtttcaatcaatcgtcggatgtatcatagacgcattcatcatcggcgcagtgatggcaaagatggccaagcctaagaagcggaatgagacccttgtgttctcccacaacgcagtgatagcaatgagagatggcaagctctgtttgatgtggagagtgggaaacttgcgtaaaagtcatctggtcgaggcgcatgtaagagctcagttgctaaaatcccgtatcacatctgagggggagtacattcccttggaccagattgacatcaacgtgggtttcgattccggcatagacaggatttttcttgtgtcccccatcacaatagtgcacgaaatcgacgaggactcgcctctctatgatctcagcaaacaggacatagataacgccgattttgaaatcgtcgttatcctcgaaggcatggtggaagcaactgctatgaccactcagtgccgctcctcttatctagccaacgaaattctctggggccacagatatgagccagtgctgttcgaagaaaaacattattacaaagtcgactatagccggttccataaaacctacgaggtgcccaatactcctctgtgtagtgcccgtgatctggcggagaagaagtacatattgagcaacgccaatagcttctgctatgagaacgaggttgcccttacttccaaggaggaagatgacagcgaaaatggggtgcccgagagtaccagtaccgatacaccccctgacatcgacctacataaccaagcaagcgtgccattggagcctcgaccattaagacgggaatccgagatttag

SEQ ID NO: 200262 - DNA, 1506 bp, synthetic construct
  misc_feature 1..1506: note = Description of Artificial Sequence: Synthetic coding sequence
  source 1..1506: mol_type = other DNA
atgagcgccctgcggcggaagttcggcgacgactaccaggtggtgacaacaagctcctcgggatccgggctgcaaccccagggtcccgggcaggatccacaacagcaactggtgcctaagaaaaagcgtcagcgattcgtggacaaaaatggcagatgtaatgttcaacatggtaaccttggaagtgagacctcaaggtatctgagcgatctattcactactctcgtcgacctgaaatggcggtggaacctgttcatctttatcctgacttataccgtagcatggctgtttatggcttccatgtggtgggtcatagcttacactcgcggcgatctgaataaggcccacgtaggcaattacacgccctgcgtggctaacgtgtacaattttccttctgcatttctgttctttattgagactgaagcaaccatcggctatgggtacagatatataacagacaagtgcccagaggggatcatactattcctctttcagagcatccttgggagtatagtcgatgccttcctcatcgggtgcatgtttataaaaatgtcccagcctaagaagcgcgcagaaaccctgatgtttagtgagcacgccgtaatttccatgcgtgacgggaagctgacactcatgttccgcgttgggaacctgcgtaacagtcacatggtgagcgctcagattcggtgtaaactgcttaaatctagacagacacccgaaggggaatttctgccactggatcagctggagctagacgtcggctttagcacaggtgcagatcaattgttcctcgtctctcccctcacgatctgtcacgttattgatgccaagagtcctttctatgatctctcgcagcggagcatgcaaacagaacaattcgagattgtggtgatacttgaaggtatcgttgagacaacaggcatgacctgtcaggctcggactagctatactgaagacgaggtgctgtggggccatcgcttctttccagtgatatctctggaggagggcttcttcaaagtggattattcacaattccacgccacctttgaggtcccaacccctccatattcagtaaaggagcaggaagaaatgctcctgatgagcagccccctcattgcccccgctatcaccaattcaaaagaacggcacaattctgtcgaatgcctggatggcctggatgacatcaccactaagctaccgtccaagctccaaaagattacaggacgtgaggactttccgaagaagctgttgagaatgagttccacaacttctgagaaggcctattctctcggtgaccttccgatgaagctgcagaggatctcttctgtccctggtaactcagaagaaaagctcgtgtccaagaccacaaaaatgctgagtgaccccatgtcacagagcgtggccgacctcccaccaaaactccaaaaaatggctggcggtgctgccagaatggaaggaaatctgcccgcaaaattgaggaaaatgaactctgatcgattcacgtag

SEQ ID NO: 200263 - DNA, 708 bp, synthetic construct
  misc_feature 1..708: note = Description of Artificial Sequence: Synthetic coding sequence
  source 1..708: mol_type = other DNA
atgagcgccctgcggcggaagttcggcgacgactaccaggtggtgacgacaagtagctccggctctggcctccaaccccaggggcccggccaggatccacagcagcagctcgtccccaagaagaaacggcaacgattcgtggataagaacgggcggtgcaatgtgcagcacggtaacctggggagcgagacttccaggtatctgagtgacctttttaccaccctggttgatctcaaatggcgctggaacttgttcatattcatccttacatacacggtagcatggttattcatggctagcatgtggtgggttattgcttatacaaggggtgatctgaacaaggcccacgttggcaactataccccatgcgtggccaatgtctataacttccctagcgcctttcttttttttattgagaccgaggccaccattgggtacggatatcgctacataaccgacaagtgccctgagggcattattttatttttgtttcagtcgatcttgggctcgatcgtggacgcttttctgataggttgcatgtttataaaaatgtctcaacccaaaaaacgagcagaaaccctcatgttctctgaacatgctgttattagtatgagggatgggaaactcaccctaatgtttcgagtcggcaatctgcgcaacagccacatggttagtgcccaaataaggtgcaagctactcaaaggatag

SEQ ID NO: 200264 - DNA, 1338 bp, synthetic construct
  misc_feature 1..1338: note = Description of Artificial Sequence: Synthetic coding sequence
  source 1..1338: mol_type = other DNA
atgcacggccacagccggaacggccaggcccacgtgccccggcggaaaaggagaaaccggtttgttaagaagaacgggcagtgtaacgtatactttgctaatttaagtaacaagtcccagcggtatatggcagacatcttcaccacatgtgttgatactcgatggcgttatatgcttatgatctttagtgcagcctttttggtttcctggctattcttcgggttactgttttggtgtatcgcattcttccatggagacctcgaggcttctcctggcgtgccggcggctggaggtccagcggctggtggaggaggggcagcgcctgtagccccaaaaccatgcatcatgcacgtgaatggattcttgggcgccttcttattctctgtagaaacccagacaactataggttacggcttccgttgtgtaaccgaggagtgcccactggccgtgatcgctgtcgtggtacagagtatcgtaggatgcgtgattgactcattcatgattgggacgatcatggccaaaatggccagacccaagaagagggcccagactttactgttcagccaccatgccgttatttctgtgcgcgatgggaaattgtgcttgatgtggcgggtggggaacctgcgcaagagtcacatcgtcgaggcccacgttagggcacagctgatcaagccctacatgacacaggagggtgagtatctccctcttgatcagagagatctaaatgtcggctacgatattggcctggacaggattttcctggtgtctcccattatcattgtgcatgagattgatgaggacagcccgctgtacggaatggggaaggaagaactggagtcagaagatttcgaaatcgtcgttatcctagagggtatggtggaggccacagccatgactacacaggctcgttcttcctacttagccagcgagattctatggggccacaggtttgagcccgtcgtcttcgaagagaaatcacactacaaggtagactactctagatttcataaaacctacgaggtggccggaactccgtgctgcagcgcccgggaattacaggaatcaaagattacagtactgccagctcccccccctcccccttctgccttctgctacgagaatgaactggcactgatgagccaagaggaagaggaaatggaggaggaggccgcagctgcagccgccgttgcagccggattggggctcgaagcaggatcgaaggaagaggccggaattattcgaatgctagaatttggctcacatctggacctcgaacggatgcaagcctctctgcccctcgacaacatttcctataggagggaatcagccatttag

SEQ ID NO: 200265 - DNA, 1260 bp, synthetic construct
  misc_feature 1..1260: note = Description of Artificial Sequence: Synthetic coding sequence
  source 1..1260: mol_type = other DNA
atggccggcgacagccggaacgccatgaaccaggacatggagatcggcgtcacgccttgggatcctaagaagatccctaaacaagcacgcgattatgttccaatcgcgaccgatcggaccagactcctggcagagggcaagaaaccccgccaacgctatatggagaagtccggtaaatgcaacgtgcatcatggaaatgtacaggaaacctaccgttacctgagcgacttgttcactacactggtcgatctcaaatggcggttcaacctgctggtattcacaatggtttacacagtcacgtggctgttctttggatttatttggtggctaatcgcgtatatacgcggcgatctggaccatgtcggagatcaggagtggatcccttgcgtggagaatctgagtggctttgtgagtgcattcttgttcagtatcgagaccgagaccaccattgggtatggattcagggtcatcactgagaagtgcccggaagggataatcctgctgctcgtgcaggctatcctgggctccattgtgaatgcctttatggtgggttgcatgtttgtgaagattagccaaccaaaaaagcgcgccgaaaccttgatgtttagcaacaatgccgtgatttccatgcgggatgaaaaactgtgccttatgttcagagtgggtgacttgaggaacagtcacattgtagaggcttccatcagggccaagctcatcaagagcagacaaacgaaagaaggagagtttattcctctcaatcagacagacattaacgtgggctttgataccggtgacgacagactgttcttggtgtctccgttaatcattagtcacgagatcaaccagaaaagtcccttttgggaaatgtctcaagctcagctgcatcaagaagagttcgaagtagtggttattctggaaggtatggtcgaagcgactggaatgacatgtcaggcaaggagctcttatatggatactgaggtgttgtgggggcatcgcttcactcctgtacttaccttagaaaaaggattctacgaggtggattacaataccttccacgacacttatgagaccaacacgccctcctgctgtgctaaggaactggctgaaatgaagcgagagggtcggctcctccagtacctaccatctccccctctgcttggggggtgtgcagaagcgggattggacgcagaagccgaacagaacgaggaggatgagcctaagggactgggcggaagccgggaggccagaggttctgtgtag

SEQ ID NO: 200266 - DNA, 1260 bp, synthetic construct
  misc_feature 1..1260: note = Description of Artificial Sequence: Synthetic coding sequence
  source 1..1260: mol_type = other DNA
atggccggcgacagccggaacgccatgaaccaggacatggagatcggtgtcacaccttgggacccaaagaagattcccaaacaggctagagattacgtgcccattgcgacggacagaaccaggctcctggcagaaggcaagaagccaagacagagatatatggagaaaagcggcaaatgtaacgttcaccacgggaacgtacaagagacttaccgctatctgagtgatctgtttaccactcttgtggatctgaagtggaggtttaacctgctcgtttttaccatggtttacacagtgacttggctgtttttcgggtttatctggtggttgatagcctacatccgcggggatctcgaccacgtcggggatcaggaatggattccctgcgtggaaaatctctccggattcgtttccgcatttctgttttcgatagaaacagagacaaccattggctacggtttccgggtgataaccgaaaaatgcccagaaggaatcatcctgctcctggtgcaagccattctgggatcaatcgttaatgcctttatggtgggctgtatgttcgtgaaaatatcacagccaaagaaacgggctgaaactttgatgttttctaacaatgcagttattagcatgagggatgagaaactgtgtcttatgttccgggtcggcgaccttcgcaacagccatatcgtggaagcttccatacgagccaaactgatcaagagtaggcaaaccaaagaaggcgagtttattcccctaaatcagaccgacataaacgtaggatttgacaccggagacgaccggctcttcctagtgtccccacttattatctcacatgagattaaccagaagagtccgttctgggaaatgtcacaggcacagctgcatcaggaggaattcgaggtggttgtgatactggagggcatggtggaggctactgggatgacctgtcaggcccggtcatcctatatggatacagaggttttgtgggggcaccgctttacgccggtattgactcttgagaaaggcttttatgaggttgactacaacaccttccacgacacctacgaaaccaacaccccttcatgttgcgctaaagagctggccgaaatgaagcgggaaggtcgattgctgcagtacttacctagcccgccgctgctgggagggtgcgccgaggcggggttggatgctgaagccgaacaaaatgaagaagacgaaccgaaggggctggggggcagtcgggaggctcgaggtagtgtgtag

SEQ ID NO: 200267 - DNA, 1260 bp, synthetic construct
  misc_feature 1..1260: note = Description of Artificial Sequence: Synthetic coding sequence
  source 1..1260: mol_type = other DNA
atggccggcgacagccggaacgccatgaaccaggacatggagatcggggtgacaccttgggaccctaaaaagattcctaaacaggcccgtgactacgtgcccattgcaaccgatcgcacccgcctgctggccgagggaaagaagccacggcagcgctacatggagaaatctggcaagtgcaacgtccaccatgggaacgtgcaggagacctatagatacctctcggacctatttaccactcttgtggacctgaagtggcggttcaatctcttggtttttaccatggtgtacacagtgacctggctgttcttcggtttcatttggtggctgatcgcatatattcgaggcgacttggaccatgtgggagaccaggagtggattccatgtgttgaaaacttatcaggttttgtgtctgcatttctattttcaatcgaaaccgagacaactatcggttacggttttcgcgtgatcaccgagaagtgtcccgagggaatcattcttctgctggtgcaagctattctggggagcatcgtgaatgcctttatggtcggttgcatgtttgttaagatctcccagccaaagaagagagccgagacgttgatgttttcaaataacgccgtgatctcaatgcgtgacgaaaagctgtgcctcatgttccgtgtaggtgatttgcgtaactcgcacatcgtcgaagcatctatccgagcaaagctgatcaaatcacggcagaccaaagaaggggagtttattcctctgaatcagaccgacatcaatgtgggattcgatactggcgacgacaggctcttcctggtttcaccgctgattatttcccatgaaatcaaccagaagtccccattttgggaaatgagtcaggcacagctgcatcaggaagagtttgaagtagttgtgatcctcgaaggtatggttgaagccaccggcatgacttgtcaagccaggtcctcttacatggatacagaagtattatgggggcatcggtttactcccgtgctaacgctcgaaaaaggcttctatgaagtcgactacaatacattccacgacacttatgaaacaaataccccgagctgttgtgctaaagagctagccgagatgaaaagagaaggtcggctgctccaatacctccccagtccccctctactgggggggtgcgccgaggcaggcctggacgccgaggccgaacaaaacgaggaggatgagccaaagggcctaggcggatcaagggaggctagggggtccgtgtag

SEQ ID NO: 200268 - DNA, 1272 bp, synthetic construct
  misc_feature 1..1272: note = Description of Artificial Sequence: Synthetic coding sequence
  source 1..1272: mol_type = other DNA
atggccaagctgaccgagagcatgaccaacgtgctggagggcgactctatggatcaggacgtagagagtccagtggccatccatcagccaaagttaccaaagcaagcacgcgatgatctcccgaggcatatttctagggaccggacaaagaggaagatccagcgctatgtgagaaaggatgggaaatgcaatgtgcaccacggaaacgtgagggaaacatacagatacctgaccgacatctttaccaccctggtcgatctgaagtggcggtttaatctgcttatttttgtgatggtttatacagtcacatggttgttcttcggaatgatctggtggttgattgcgtacattaggggggatatggaccacattgaggatccctcatggacaccctgcgtgacaaacttgaatggtttcgtctccgcatttcttttcagtattgagaccgagaccaccattggctatggctacagggtcataaccgataagtgtcccgaaggaatcatcttgttgttgatccaaagtgtcttgggatcgattgtgaacgcatttatggtcgggtgtatgttcgtgaagatttcccagccaaagaaaagggccgagacactggtgttttcaacccacgcagtgattagtatgagagatgggaagctctgcttgatgttccgggttggggacctgaggaatagccacatcgtggaagcttccattcgggcgaaactcattaagtccaagcagacatccgaaggtgaattcatacctctcaatcagactgacatcaacgtgggctactatactggcgacgaccgtctgttcctggttagtcccctaatcatctcgcacgagattaatcagcagtcccccttctgggagatatctaaggcccagttgcctaaagaagaactggaaattgttgtcattctagaaggaatggtggaggccacaggtatgacttgtcaagctaggtcatcgtatatcacaagcgagattttatggggctaccgcttcacgcccgttctgacgctggaggacggattctatgaggtggattataattcattccacgagacctatgagaccagcacgcctagcctttctgctaaggagctggccgagctggcctcccgggccgaattgccactcagctggagcgtctcttctaagctgaaccaacatgctgaattggagactgaagaagaagagaagaacttggaggaacagacagagagaaatggcgatgtggccaacctggagaacgaatccaaagtgtag

SEQ ID NO: 200269 - DNA, 1272 bp, synthetic construct
  misc_feature 1..1272: note = Description of Artificial Sequence: Synthetic coding sequence
  source 1..1272: mol_type = other DNA
atggccaagctgaccgagagcatgaccaacgtgctggagggcgacagcatggaccaggacgtcgagtctccagttgccatccaccaaccaaagctgcctaagcaggccagggacgacctcccacggcatatctctcgggatcgaactaaaaggaaaattcaaagatacgtgcgcaaagacggaaagtgcaatgttcaccacggcaacgtgagggagacctacaggtacctgaccgatatatttaccactttagtagacctgaaatggcggttcaatttgcttattttcgtgatggtctacacagtgacctggttgttcttcgggatgatctggtggttgattgcctacatcaggggagacatggatcacatagaggatccaagctggacgccttgtgtgactaatctgaatggtttcgtgtctgcgtttctattctccattgagaccgaaacaaccattgggtatggttatcgagttataacagataagtgccctgagggtataatcttgctgctgatacaatccgttttaggttctattgtgaacgccttcatggtcgggtgtatgttcgtcaaaatcagtcagcctaagaagcgggccgaaacactcgtgttcagcactcatgcagtcattagcatgagggacggcaaactctgcctcatgtttcgtgtgggcgacctgcggaattcacatattgtggaggcctccataagagccaagctgataaaatccaagcaaacatctgagggcgagtttattcctctgaaccaaacggacatcaacgtgggctattacacgggggacgacagactgttcctagtttccccacttattatttcccacgaaattaatcagcagtctccattctgggagatctccaaagcacaacttcctaaggaagagttggagattgtcgtcattttagaggggatggtggaagctacggggatgacttgccaagctcgcagcagttatatcacctcagaaatcctttggggctacaggtttactccggtgctcacccttgaagatggcttttatgaggtcgattataacagctttcacgaaacttatgagacatctactccttccctgtctgccaaggagctggcagagcttgcctcaagagctgagctccctctgtcttggagtgttagcagcaagttgaatcagcacgctgaactcgaaaccgaggaggaggaaaagaacctggaggaacaaactgagcgcaacggggatgttgccaatctggagaacgagagcaaggtttag

SEQ ID NO: 200270 - DNA, 1275 bp, synthetic construct
  misc_feature 1..1275: note = Description of Artificial Sequence: Synthetic coding sequence
  source 1..1275: mol_type = other DNA
atgctggcccggaagagcatcatccccgaggagtacgtgctggcccgaattgccgcagaaaatctaaggaaaccccgcatcagggacagattacctaaggcccgtttcatagccaagtccggtgcttgcaatctcgctcataagaacatccgggaacagggcagatttcttcaagatatattcacaacccttgtggacctgaagtggaggcatacactagtcatctttacgatgagttttctgtgttcatggctgctgttcgccattatgtggtggcttgtcgcgtttgcgcatggagatatctacgcatatatggaaaagagtggcatggagaagagcgggctggaatcgacagtctgcgtcactaatgtgaggagctttactagcgcctttctgttctccatcgaggtgcaggtgacgatcgggtttggcggcaggatgatgaccgaagagtgtccgctcgcgataaccgtcctgatcttgcagaacatagtcgggctcataatcaatgccgtgatgctcggttgcatctttatgaaaaccgcacaggcgcaccggcgcgctgagactttgatttttagtcgccacgccgtaatcgccgtccgcaacggcaaactttgctttatgtttcgggtgggggacctccggaaatctatgataatctcggccagcgtgcgcattcaagtagtcaagaagacaaccacccctgagggtgaagtggtcccaatacatcagctagatattcccgtagataatccaattgaatccaacaacatatttctggtggcacctttaatcatatgtcacgtcatcgacaagagatctcccctgtatgacatctcagcaacagacctcgccaaccaggatctagaagtgatagtgatcctggaaggcgtagtcgagacgaccggcataaccacgcaggcccgcacaagctatattgccgaggagattcagtggggacatagattcgtgagtattgtcacggaagaagaaggggtctacagcgtggattattcgaaattcgggaataccgtcaaagttgctgccccccgatgcagcgcccgcgagctagatgaaaagccgagcatcttgatccagaccctccagaaatcggagctcagccatcagaacagcctgcgcaagcgtaacagtatgaggagaaacaacagtatgaggaggaataactcgataaggaggaacaattcctcgctgatggtccctaaagtccagttcatgactcctgagggtaatcagaatacaagcgagtcttag

SEQ ID NO: 200271 - DNA, 345 bp, synthetic construct
  misc_feature 1..345: note = Description of Artificial Sequence: Synthetic coding sequence
  source 1..345: mol_type = other DNA
atgctggcccggaagagcatcatccccgaggagtacgtgctggccaggatcgccgccgagaatttgcggaaaccgcggatcagggacaggttgcctaaggcccgttttatagccaaaagcggagcctgtaacctggcccacaaaaatatccgagaacagggccgatttctgcaggatatttttacgactctggttgatcttaagtggaggcatactctggtcatattcacgatgtcttttctgtgcagttggctgctgttcgccatcatgtggtggctcgttgctttcgctcatggcgacatttatgcctatatggagaagtccggcatggagaagtctggctag

SEQ ID NO: 200272 - DNA, 1275 bp, synthetic construct
  misc_feature 1..1275: note = Description of Artificial Sequence: Synthetic coding sequence
  source 1..1275: mol_type = other DNA
atgctggcccggaagagcatcatccccgaggagtacgtgctggcccgaatcgccgctgaaaaccttaggaaaccccgtatcagagaccgcctccctaaagccagattcattgcaaagtctggagcctgcaacttggcccacaagaacattcgagaacaggggcggttccttcaggatatcttcaccaccctcgtcgatctaaaatggagacatacacttgttatcttcaccatgagcttcttgtgctcctggctgctgttcgccattatgtggtggctggtcgcattcgcccacggagacatttacgcgtacatggagaaaagtgggatggagaagtctgggcttgagtctacagtgtgcgtgacaaacgtcagatcattcaccagcgcgttcctatttagtatcgaagttcaggttactattggcttcggcggccgtatgatgacagaggagtgcccacttgcgataactgttctcatcctgcaaaacatcgtaggacttatcataaatgccgtgatgctggggtgcatatttatgaagacagcccaggctcacaggagagcggaaacacttattttctctcggcacgccgtcatcgccgtgcgaaacggcaaactgtgttttatgttcagagtaggcgacctgcggaagtctatgatcatttcagcttcggtcaggatccaggtagtgaagaaaactaccactccagagggcgaggtggtgcccattcaccagctcgacattcccgtcgataatccaatcgaatcaaacaacatatttctcgttgccccactgataatttgccatgtgatcgacaaaaggtctccactgtacgacattagcgcaaccgacctcgccaaccaagatttggaagtgattgtcatcctcgaaggtgtggtagagaccacaggcatcaccacccaggctagaacgagttacattgccgaggagatccagtgggggcatcgatttgtttcaatcgtgaccgaggaggagggcgtctactcagttgattacagtaagtttgggaatactgtcaaagtcgcggcaccgcgctgttcggcccgggaactggacgagaagccctcaatcctgatccaaacactccaaaagtccgagctctctcatcagaactccctgaggaaaaggaacagcatgcggagaaacaacagcatgcggcgtaataattccatccgcaggaacaactcaagcctgatggtgcccaaagtgcagtttatgaccccagagggtaaccaaaacacatctgagagctag

SEQ ID NO: 200273 - DNA, 774 bp, synthetic construct
  misc_feature 1..774: note = Description of Artificial Sequence: Synthetic coding sequence
  source 1..774: mol_type = other DNA
atgaccgccttccccgccagcggcaagaagcgggagaccgactactcggatggtgatcccctcgatgtgcacaagagattgccctcctctgccggagaggacagagcggttatgctgggatttgccatgatgggtttctctgtgttaatgtttttcctgctgggaactactatcctgaaaccctttatgctgtccattcagcgcgaagagagcacttgtacggccattcacaccgacataatggacgattggctggactgtgcatttacctgtggcgtgcattgccatgggcagggtaaatatccctgcttgcaggtgtttgttaatctaagccatccaggtcagaaagcattgctccattataatgaagaggccgtgcaaattaatcctaagtgcttttacacccccaagtgccaccaggataggaacgacctgcttaactctgcccttgatatcaaagagttttttgatcacaagaatggcacgccatttagctgtttctatagcccggccagccagagtgaggatgtaatactgataaaaaagtatgaccagatggctatcttccattgcctgttctggccctcgctgaccctgcttggcggcgcattgattgtggggatggttcgactgacccaacacttgtctttgctgtgcgagaaatacagcacggtggttcgggacgaggttggcgggaaggttccatatatcgaacagcatcagtttaaactctgcatcatgaggcgcagcaaaggacgagccgagaaaagctag

SEQ ID NO: 200274 - DNA, 522 bp, synthetic construct
  misc_feature 1..522: note = Description of Artificial Sequence: Synthetic coding sequence
  source 1..522: mol_type = other DNA
atgcagcccttcagcatccccgtgcagatcaccctgcagggcagccgaagacggcagggaagaacagcatttcctgcatcgggaaaaaagagagagacagactactcagacggagatccacttgacgtccataagagacttcctagttctgcaggcgaagacagggcagtcatgctgggctttgctatgatggggttcagcgttttgatgttctttctgctgggaacaaccatactgaagcccttcatgctgagcatccagcgtgaagaatccacatgtacagcaatacacacagacattatggatgactggctggactgcgccttcacatgcggagtccactgccatgggcagggcaagtatccgtgcttgcaagtcttcgtgaacttgagccatccagggcagaaggcactgttacactataacgaggaggcagtccagatcaatcccaagagggatgtgaccgattgccgggttaaggaaaaacaaactctaaccgttagcgatgaacacaaacagtag

SEQ ID NO: 200275 - DNA, 840 bp, synthetic construct
  misc_feature 1..840: note = Description of Artificial Sequence: Synthetic coding sequence
  source 1..840: mol_type = other DNA
atggacttcagccccagcagcgagctgggcttccacttcgtggccttcatcttgctgactcggcaccggacagccttccctgcctcagggaagaaacgcgaaacggattactcagatggtgaccccctggacgtgcacaaacgtttacctagttcagctggggaagacagagccgttatgctcggatttgctatgatgggattttcagttctcatgttctttctgcttggcaccactattcttaagcccttcatgctgtctattcagcgcgaggagagtacttgcacagcaatccacacagacatcatggacgattggctcgattgcgctttcacatgcggcgtccactgccatggccagggcaaatacccctgtctgcaggtattcgtcaatctatctcatcccggccaaaaggctttgttgcattataatgaagaagctgtgcagatcaatccaaagtgcttctatacaccaaagtgccaccaggatcggaacgacctgttaaactcagccctggatattaaggaattctttgaccacaaaaatggaacgccatttagctgcttctattcccctgcatctcagtctgaggacgtgatcttgattaaaaaatacgatcagatggcgatttttcattgtctgttttggccaagcctgaccctgttaggtggagctcttatcgtcggcatggtgcgtctcacacagcatctttcactcttatgtgaaaaatactccaccgtcgtgagagacgaagtggggggtaaggtgccttacatagagcaacaccagttcaagctctgtataatgaggcgtagcaaaggcagggctgaaaaaagttag

SEQ ID NO: 200276 - DNA, 834 bp, synthetic construct
  misc_feature 1..834: note = Description of Artificial Sequence: Synthetic coding sequence
  source 1..834: mol_type = other DNA
atgcagcccttcagcatccccgtgcagatcaccctgcagggcagcagacggagacaagggagaaccgcgtttccagccagtgggaaaaaacgggaaactgactatagtgatggcgacccactggacgtgcacaagagactcccctcctcagcaggagaggacagggccgtcatgctgggctttgcaatgatggggttctcagtcctgatgttttttttattagggaccactatattaaagccgtttatgttgagcatccagcgggaagagtcaacttgcaccgctatccacaccgacatcatggatgattggctggactgcgccttcacatgtggagtccattgtcatggccaggggaaatatccgtgcctgcaggtttttgtgaacctcagtcaccccggtcagaaagctctgctgcactataatgaagaggccgtccaaattaaccccaagtgtttctacactcccaagtgccaccaggacagaaatgatttgttgaattccgcgcttgatatcaaagagtttttcgaccacaagaacggcactcccttttcctgtttttacagccctgccagccaatccgaagatgtgatccttattaaaaagtatgaccaaatggcaattttccactgcttgttttggccatccctgactctccttgggggggccctaatcgttgggatggtgcgactcactcagcacctgtctctgctgtgcgagaagtattctacagttgtgcgcgatgaggtgggcgggaaggtgccttacattgaacaacatcagtttaaactgtgcatcatgaggagatccaaggggagagctgaaaagtcatag

SEQ ID NO: 200277 - DNA, 828 bp, synthetic construct
  misc_feature 1..828: note = Description of Artificial Sequence: Synthetic coding sequence
  source 1..828: mol_type = other DNA
atgttccccctgctgtacgagctgaccgccgtgagccccagccccttcccacagagaacggctttccccgccagcgggaagaagcgcgaaaccgattacagcgatggggaccctctcgatgtgcacaaaaggctgcctagcagtgcgggcgaggatagggcagttatgctgggctttgccatgatggggtttagtgttcttatgtttttcctcctggggactaccatactcaagccatttatgctgtcgatccaaagggaggaaagcacctgcactgcgatccacacagatattatggatgattggctggactgcgcttttacctgtggcgtacactgccatggacagggcaagtatccatgtctgcaagtttttgtgaacctgtcccaccccggacagaaagccctgttacactataacgaggaagctgtccagatcaatccaaaatgtttctacacccccaaatgtcatcaggatcgaaacgatctgttgaactccgccctggacattaaggagttctttgaccacaagaacgggacacctttctcatgtttttattcacccgcatcgcaatcagaagatgtgatcctcatcaaaaagtatgatcagatggctatttttcattgcctgttctggccatccctaactcttctcggaggcgcactgatcgtcggaatggtgcggcttacccagcatttgtctttgttgtgtgaaaaatactcgaccgtggtgcgcgacgaggtaggcggtaaggtgccatatattgaacaacatcagtttaagctatgcatcatgagaaggagcaagggcagggccgaaaaatcatag

SEQ ID NO: 200278 - DNA, 774 bp, synthetic construct
  misc_feature 1..774: note = Description of Artificial Sequence: Synthetic coding sequence
  source 1..774: mol_type = other DNA
atgaccgccttccccgccagcggcaagaagcgggagaccgactactccgatggggacccactggacgtccataaacgactgccctctagcgcaggggaggatcgtgcagtgatgctgggctttgctatgatgggcttctcagttctcatgttttttctgctgggtacgactatcctgaaaccattcatgctgtcgattcaaagggaagagtctacttgtaccgctatccacaccgacataatggatgactggctcgactgcgcctttacctgtggtgtccattgccacggccaaggaaaatatccgtgcctacaggtcttcgtgaatctctcacaccccggccaaaaagccctccttcactataacgaggaggctgtccagataaacccaaaatgcttctacaccccaaaatgccaccaggaccgaaatgatctattaaatagcgctttggacatcaaagagtttttcgaccataagaacggcactccatttagctgcttctattccccggcatcccagtcggaggacgtgatactcatcaaaaaatatgatcaaatggctatctttcattgcctgttttggccctctctgactctgctgggtggggctcttatcgtgggaatggtgcggctgacccagcacctctcactcttgtgcgaaaaatattccacagtggttcgcgatgaagtaggtgggaaggtgccttacattgagcagcaccagttcaagctgtgcataatgcgacgatctaagggacgggctgaaaagagctag

SEQ ID NO: 200279 - DNA, 3537 bp, synthetic construct
  misc_feature 1..3537: note = Description of Artificial Sequence: Synthetic coding sequence
  source 1..3537: mol_type = other DNA
atggccaacggcggcggcggcggcggcggcagcagcggcggcggcggaggtggtggagggtcctccctgcgcatgtcatctaatattcatgctaatcacctatctcttgatgctagtagttccagttcatcgtcatcttcttcctcaagcagcagttcgtcaagttcttcctcttcatcagtccacgaacctaaaatggatgccctgatcatccccgtcacaatggaggttccatgcgactctaggggtcagagaatgtggtgggcattcctcgcgagttccatggtcacattcttcggtggtctcttcatcattttgctttggagaaccttgaagtacctctggacagtatgctgtcattgtggaggtaaaaccaaagaagctcaaaagataaataatgggagctcgcaagctgatgggacacttaagcctgtggacgagaaagaggaagcagtggccgccgaggttggttggatgacgagcgtgaaggattgggccggcgtgatgatcagcgcccagacactcactgggagggtgttggttgtacttgtatttgccctgtctatcggagcactggtaatctacttcattgattcctccaatcctattgagagttgtcagaatttctacaaggacttcactctccagatcgacatggcttttaatgtctttttcttactgtactttggtctgaggttcatcgccgccaatgataagctatggttctggctggaagtgaattccgtggtcgacttcttcacagtgccaccagtgtttgtgtcagtctacctgaaccggtcgtggctcgggctgcgctttttgcgggctctgcgcttaatccaattttctgaaattctgcagttcctgaacatactgaagacctcaaattccataaagctggtgaacctcctgagcattttcatttcaacttggttgaccgcagccggcttcatccacctggttgaaaactccggggatccgtgggaaaattttcaaaacaatcaggcactgacatactgggaatgcgtgtatctgctcatggttacaatgagcactgtgggatacggcgacgtttatgccaagacgaccctgggacgtttgtttatggtgtttttcatactaggtggtctggcaatgtttgccagctatgtgcccgaaattatagagttaattgggaacagaaagaagtacggaggatcgtacagcgctgtctctggcagaaaacatatcgtcgtgtgtggtcatataaccctggaatccgtaagtaacttcttaaaagatttcctgcacaaggatcgggacgacgtgaacgtggaaatcgtattcctgcacaatatcagtccaaacctagagcttgaggcactcttcaagcgccatttcacccaggttgaattttatcaaggcagcgtgctcaatccccacgacctggcacgcgtgaagattgagtctgctgatgcgtgtcttatcctggcaaacaagtattgcgcagacccagacgccgaggatgccagtaacataatgcgggtgatttctatcaagaactatcatcccaaaattcgcattatcacgcagatgctgcagtatcataataaagcgcatctgctcaacatcccctcctggaactggaaggagggcgacgacgccatctgtttagctgagctgaaattggggtttattgctcagtcttgtctggcccagggcctatctacaatgctcgccaacctgttctcaatgagatctttcattaagattgaggaagatacatggcagaaatactaccttgagggagtttcaaatgagatgtatacggagtacctgtcctctgcatttgtggggttgtcttttcctacagtgtgtgagctctgcttcgtgaaactgaagctgctcatgatagccatagagtacaagtcggctaacagagagtctcggattctgattaaccctgggaatcacctgaaaatccaggagggcactctggggttcttcattgcgagcgacgcaaaagaagttaagcgcgccttcttttactgtaaggcgtgccatgacgatattactgaccccaaacggattaaaaagtgcggttgcaaaagattagaagatgaacagcctagcacccttagcccaaagaagaagcaaagaaatggcggcatgaggaacagccccaatacaagtcctaagctgatgcggcacgatcctttgctaattccaggcaatgatcaaattgataatatggactccaatgtcaagaagtatgacagcacgggaatgttccactggtgcgctccaaaagaaatcgaaaaggtcatactcactcgctccgaggccgccatgacggtcctttctggacatgttgtggtctgcattttcggggatgtgagttcagccctaattgggctccgtaacctagttatgccattgagggcaagcaacttccattaccatgaactgaagcacatcgtcttcgtggggagcatcgagtaccttaagagggaatgggagacactacacaacttccccaaggttagcatcctgccaggcacgcccctttccagggccgatcttcgggccgtcaacatcaacctgtgcgatatgtgtgtgatactgtcagccaatcagaataatatcgatgacacaagccttcaggataaggagtgcatcctagctagcctcaacatcaaatcgatgcagtttgacgactcgattggggtattgcaggccaactcacagggttttacacctccagggatggacaggtcaagtcccgataacagcccggttcatggcatgctgcgccagcccagcataacaactggggtgaacatacctattattaccgaattagtgaatgacactaatgttcagttcttggaccaggacgacgatgacgatccagatacagaactttatctcactcaaccatttgcctgcgggaccgctttcgcggtatccgtgctggactccctgatgtctgcgacgtatttcaacgataatatattaacactaatccgtacactcgtcacaggaggagcaacccccgaactggaggcgctgatcgctgaagaaaatgctctaagagggggatactctaccccccagactctggcgaatagggaccgctgtcgggtggcccaactggctctgcttgatggacccttcgcagatttgggggacggagggtgttacggcgatctcttctgtaaggccctcaaaacgtacaacatgctgtgctttggcatctatagactgagggatgctcatttgtcaacccctagccagtgtactaagcggtacgtcattacaaaccccccctatgagttcgagttggtgcctactgacctcatcttctgtctgatgcaatttgaccataatgccgggcagtcacgggcttcactgagccattcaagccacagttcccagtcatcgagcaagaagtcgagtagcgttcacagcatccctagcacagctaacagacaaaatcgacctaaatcaagggagtcaagggacaaacagaaatatgttcaggaggagcggctgtag

SEQ ID NO: 200280 - DNA, 3633 bp, synthetic construct
  misc_feature 1..3633: note = Description of Artificial Sequence: Synthetic coding sequence
  source 1..3633: mol_type = other DNA
agcaacatccacgccaaccacctgagcctggacgccagcagcagctcctccagttcttctagctcctcctcctcctcctcatcctcctcttcgagctcctctgtccacgaacccaaaatggatgcacttattattcctgttacaatggaagttccttgcgattcacgagggcagcgtatgtggtgggccttccttgccagctccatggtgaccttcttcggcggcctgttcatcatcctgctgtggcggactctaaaatacctctggacagtctgctgccattgcggggggaagactaaggaggcccaaaagattaataacggaagttcccaggcggatggaacactgaaaccagtggatgagaaagaagaggccgtggccgctgaggtgggttggatgaccagtgtcaaggattgggccggggttatgatttctgcacagaccctcacggggcgggtgctcgtggtcttagtatttgctctctcaattggagctttagtcatctacttcatagactccagtaaccctatcgagtcatgccagaacttttacaaggactttacgttgcaaatagatatggcctttaatgtctttttcctattgtattttggattacggttcatcgcagccaatgacaagttatggttctggcttgaggtcaatagtgtcgtagatttcttcaccgtgcctcccgtgttcgtttcagtatacctgaatcgatcctggttggggctgcgctttctaagggcgctccggctgattcagttctccgagatcctgcagtttctaaacatattgaaaacctctaactcaataaagctggtgaatctactgagcatcttcatttctacgtggctgacagccgccggattcatccacctggtggagaatagcggggacccttgggaaaacttccagaacaatcaggccttgacctattgggagtgtgtctacctgttgatggttacgatgtcgaccgtaggctatggggacgtgtacgcgaagactaccttaggcaggctctttatggtcttcttcattttgggtgggttagctatgttcgcatcctatgtgccagaaatcatagaattgatcggtaacagaaaaaaatatggaggatcctactccgccgtgtccggtagaaaacatatcgtggtgtgcgggcatatcaccctggagagcgtaagcaacttccttaaagatttcttgcacaaggatcgggacgacgtaaacgtcgagatcgtctttctccataatatcagccctaacctcgaacttgaagctctgttcaaaaggcacttcactcaagtcgaattctaccagggatctgttctgaacccgcatgatctagccagagtcaagattgagagtgccgatgcttgcctgatcttagcaaacaaatactgcgcggaccctgatgctgaagatgcatcaaatataatgagggtgataagcattaaaaactaccacccaaagatcaggattatcactcagatgttacagtatcacaataaagctcatctccttaatattccttcttggaactggaaagaaggggacgacgcaatttgtctggcggagctcaagttaggcttcatcgcccagtcctgcctggcccagggcctttctacaatgctcgcaaacttattcagtatgcgatccttcataaaaatcgaggaggatacctggcaaaaatattacttggagggcgtcagtaatgagatgtacaccgaatatctgtcttccgctttcgtggggttgtccttcccaaccgtttgcgagctgtgtttcgtcaagctcaaattactaatgattgccatagaatataagagtgccaatcgggagtctcggattctgatcaatcctggcaatcacctaaaaatacaagaaggaacactgggattcttcatcgctagcgacgcgaaggaggtcaagcgcgcttttttttactgcaaagcatgtcacgacgacattacagatcctaagagaatcaagaagtgtggttgcaaacgccccaagatgagcatttacaagaggatgcgcagggcctgttgctttgattgtggccgctccgagagagattgtagttgcatgtccggcagggtccgcgggaatgtggataccctggagagggcctttcctttgagctctgtttcggtgaacgactgctcaacctcctttcgggcattcgaagacgaacagccgtccaccctgagtcccaagaagaaacagcggaacggtggaatgcgaaatagcccaaacaccagcccaaagcttatgcggcacgacccattactgatccccggaaatgaccagattgataacatggacagtaatgtcaaaaagtacgacagcaccggaatgttccattggtgtgccccaaaggagatcgaaaaggttattctcaccagatccgaggctgccatgaccgtcttgagtggccacgtcgtggtgtgtatattcggagacgtttcaagtgcacttatcggcctgcgaaatcttgtaatgccactgcgggcctcaaacttccactaccatgagttgaagcatatcgtctttgtagggtccatagagtatttgaaaagagagtgggagacactccacaacttcccaaaggttagcatcttgccaggcaccccactgtctcgagccgatctgcgcgccgtgaacattaacctttgcgatatgtgtgttattctgtctgccaaccaaaacaatatagatgacacaagtctgcaagacaaagagtgtatccttgcctctttaaatatcaaatccatgcagttcgacgattcaatcggcgttctgcaggcaaatagtcaggggtttacaccacctgggatggaccgctcctctccagacaactcgcccgtccacggcatgctgagacagcctagcatcacaacaggcgttaatatcccaattatcaccgagctggtgaatgacactaacgtccagttccttgaccaggacgacgacgatgacccagacacagagctgtacctgacccagccatttgcctgtgggacggcttttgcggtgagcgtgttggactcattgatgagcgctacatattttaacgataatatccttacactcattagaacactcgtgactggcggcgcgaccccagagctggaggcgcttattgcggaggagaatgctctgagaggcggttactcgaccccccagaccctggcgaatagggaccggtgcagagtagcacagctggccctccttgatggtccttttgccgatctgggagatggcggctgctacggcgatttgttttgtaaggccctgaaaacatacaatatgctatgctttggtatttatagactgcgggatgctcatctttctacgccctctcagtgtaccaaacgctacgtgataaccaatcccccttatgagtttgagttagtaccaacggacctgattttctgccttatgcagtttgaccacaatgctggccagtcacgggcatcgctgtcacactccagtcattccagccaatcatcctctaagaagagcagttctgtgcacagcattccttcgactgccaaccggcagaaccgcccaaaatctagggagagcagagacaaacagaagtatgtgcaggaagagaggctatag

SEQ ID NO: 200281 - DNA, 3720 bp, synthetic construct
  misc_feature 1..3720: note = Description of Artificial Sequence: Synthetic coding sequence
  source 1..3720: mol_type = other DNA
atggccaacggcggcggcggcggcggcggcagcagcggcggcggcggaggtggtggaggttcctctctcaggatgtctagcaacatacacgccaatcatttgagcctggacgcgtcctcttcttctagctcatctagcagttctagtagcagctccagctcctccagctcttcctcctccgtccatgagccaaaaatggatgctttgatcattccagtaaccatggaggtcccctgtgacagtaggggacagcggatgtggtgggccttcctcgcctctagcatggtcaccttctttggaggtttatttattattttgttgtggcggacattgaagtacctgtggacagtttgctgccactgtggtggtaagaccaaggaggcccaaaaaataaacaatgggagctcacaggccgatggcaccctgaaacccgttgatgagaaagaggaggctgtggccgcggaggtgggttggatgaccagcgtgaaagactgggctggcgttatgatctccgcccagactctgaccggaagggttctggtcgtgcttgtttttgccctgagtatcggcgctctggtcatctatttcatagatagcagcaatcctatcgaatcttgtcaaaacttttacaaggatttcacactgcagatagacatggcctttaacgtgttttttcttctgtatttcggactgcgcttcatagccgccaacgataaattatggttctggctggaggttaacagcgtggtcgatttcttcaccgtcccgccagtatttgtttcagtgtatttgaacaggagctggctgggtctacgcttccttagggcactgagacttatccagtttagcgaaatcctgcaattcttgaatatcctaaagacttcgaacagcataaaactggttaatcttcttagtatctttatctccacctggctcactgcagctggtttcattcacttggtagagaactccggcgatccctgggaaaactttcaaaacaatcaggccttgacctactgggagtgtgtttacctcctcatggtgacaatgtctacggtgggttacggagacgtctatgccaaaaccactctggggagacttttcatggtcttcttcattctggggggcctggccatgtttgccagctatgtccctgaaatcatagagttgatcggaaacaggaaaaaatacggtgggtcatactctgcagtttctggaagaaagcatattgtcgtttgcgggcacattacgctggaatccgtcagcaattttctcaaagattttctgcacaaagacagggacgacgtgaacgttgaaatcgttttcctgcataacattagtccgaatctggagctcgaagcactctttaagaggcacttcacgcaggtagagttctaccagggaagcgtcttgaatccacacgacctcgccagggttaaaattgaaagcgctgatgcctgtctaatcctggcaaacaaatactgcgctgatcccgacgcagaggatgcgagtaacattatgcgcgtgatctcaatcaagaactatcatcccaagatcagaatcattactcaaatgttgcaatatcataataaagcgcacctgctcaacatcccgtcatggaactggaaggagggggacgacgccatctgtctggcggagttgaagctgggttttatcgctcagtcatgtcttgcccaggggttgagtacgatgttggccaatctcttttctatgcgttcatttatcaaaatcgaggaggacacctggcagaagtactacctggaaggggtgtccaatgaaatgtatacagaatatctgtcctccgcgtttgtgggcctgtccttcccaaccgtgtgcgagctctgctttgtcaagctaaaactgctgatgatcgccatcgagtacaagagtgccaaccgcgaaagtcggatcctgattaatcccgggaatcacctgaagatccaagagggcactctgggatttttcatcgcatcagacgcaaaggaggtgaagcgagcttttttttactgcaaagcatgccacgacgatattaccgaccccaagcgcataaagaagtgcgggtgcaaacgacgctgggaagaacattgcagcctgtggcgcctcgagtcaaaggggaacgtgagacggcttaactattgtagaggccaacagaccttctctgtaaaagtcaaggtagccgcccgatcaaggtactcaaaagatcccttcgagttcaaaaaggagacccccaacagtagactggtcacggaacccgtggaagatgagcaaccatccactctgtcccccaagaaaaagcagaggaacgggggtatgcgcaatagtcctaataccagcccaaaacttatgagacatgatccacttctgattcctggcaatgaccagattgacaacatggacagcaacgtcaagaaatatgattcgacgggaatgtttcactggtgcgcccctaaagaaattgagaaggtgattctgacccggagtgaggccgccatgactgtgctatcgggccacgttgtcgtgtgtatcttcggagacgtgtcgtctgcacttatcggtctcaggaacctcgtgatgccattgagagctagcaacttccattatcatgaactcaagcacattgtgtttgtgggcagcattgagtacttgaagagagaatgggagacgctgcataattttccaaaggtttccatcctgccagggacgcctcttagccgtgctgatttacgcgcagtcaatataaacctgtgcgatatgtgcgtgatcctcagtgctaatcaaaataacatagatgataccagcctccaggataaggaatgtattttggcttcactgaacatcaagtctatgcagttcgatgacagtattggagtactacaggctaactcacaaggcttcacgcctcctggaatggatcgctcgagccccgataacagccccgtgcacggaatgctgagacagccaagtattaccacaggcgtcaatattccaattatcacagagttggttaatgacaccaacgtgcagtttctggaccaggacgacgatgacgacccggacacagaactgtatctgacgcagcccttcgcttgtgggacggccttcgccgtcagtgtgcttgacagcttaatgtccgccacgtattttaatgataatatcttgactctcatcaggaccctggtcacaggaggagcaacaccagaactcgaggccctgatcgctgaggagaatgctttgagggggggctactccacccctcaaaccctcgctaatagggacaggtgcagggtcgcccagctcgccctattagacggaccattcgctgatctgggagatggaggctgctacggggatctgttctgcaaagccttaaaaacatataacatgttgtgtttcgggatctacaggctgcgggacgcccatctcagtactccatcacagtgcactaagcgctacgtcattacgaatccaccatacgagtttgagctggtgcctacagatttgatcttttgtctgatgcaatttgatcacaacgccggccagagcagagcctccctgagccactcctcccacagctcacagagctccagcaaaaagagcagctccgtgcactccattccctccaccgccaatcggcagaacaggccaaagagtagggagtcccgggacaagcagaagtatgtccaagaggagaggctctag

SEQ ID NO: 200282 - DNA, 3549 bp, synthetic construct
  misc_feature 1..3549: note = Description of Artificial Sequence: Synthetic coding sequence
  source 1..3549: mol_type = other DNA
tgaagcagcagcagcagcagcagcagcagcagcgtgcacgagcccaaaatggacgccttaatcattcctgtcactatggaagtgccctgcgattcgcgcggtcagcgcatgtggtgggctttcttggcttcctccatggtcactttttttgggggtctgtttatcattctcttgtggcgcaccctcaaatacctctggactgtatgttgccactgcggcggcaagaccaaagaagctcagaagatcaataatggatcaagccaagccgatgggaccctgaagcctgtggatgagaaagaggaagctgtggctgcagaggtgggatggatgactagtgtgaaagactgggcgggcgtaatgatatcagcacaaactctcactggaagagttctggtcgtgctggtgtttgccctgtccatcggcgccttggtgatttattttatcgactcaagtaacccaatcgagtcatgccaaaatttctataaagacttcacactgcagatcgacatggctttcaatgtgttctttctgctatacttcggcctgcggtttatcgcagctaacgataaactatggttctggcttgaagtgaattccgtggttgattttttcacagtgccgccagtattcgtgtctgtgtatctgaaccgctcctggctgggcctgcggttcttaagagccctccggctcattcagttttccgaaattctgcagttcctgaatatcctgaagaccagtaacagcattaaactcgttaacctgctgagcatctttatttcaacatggctcacagcagctgggttcattcatctggtggagaacagcggcgacccatgggagaactttcaaaacaaccaggcactgacctattgggaatgtgtatatctcctgatggtgactatgtctactgtagggtacggcgacgtctacgccaagaccactttgggccggttgttcatggtgttctttattctgggcggtctcgccatgtttgcttcctatgtgccagaaatcatcgagctgatcggcaacagaaagaaatacggaggcagctactcggccgtgtcgggtcgtaagcacatcgttgtgtgtggtcatataaccctcgaatcggtgtccaacttcctgaaagatttcctacataaagaccgggacgacgtcaatgtcgagatcgtgttcctgcacaacatcagtccgaatctggagctcgaggcactgttcaaacgccatttcacgcaggtggaattctatcaaggaagtgttcttaacccacacgacctggcgcgcgtgaagattgaatccgccgacgcctgcctgattctagctaataagtactgcgccgacccggatgctgaagacgcctctaatattatgcgtgtcatcagcatcaagaattatcatcccaaaatccggatcattacacaaatgctgcaatatcataataaggcccatttacttaacatcccttcttggaattggaaggaaggcgacgacgctatctgtctggccgagctcaagttgggtttcatcgctcagagttgcctcgcccaaggcttgagtaccatgcttgccaacctgttttcaatgaggtcctttatcaaaatagaggaggacacgtggcagaagtactatctcgagggagtcagtaatgagatgtacaccgagtacctctcttcagcatttgtaggcttgtcattccctacagtgtgcgaactgtgctttgtgaaactcaagctgctgatgattgctattgaatataagagcgctaacagggaatctcgcattctgatcaacccagggaaccacctcaagatacaggaaggaactctcggttttttcatagccagtgacgcgaaggaggtgaagcgcgcatttttctactgcaaagcctgccatgacgacatcacggatcccaagcgcatcaaaaagtgcgggtgcaagcggctcgaagatgaacagccatcgacactgagtcccaagaagaaacagcgcaatggggggatgaggaacagccctaacacttcacctaagcttatgaggcacgaccccctgttgatacccgggaacgatcagatagataatatggattccaacgtcaagaaatacgactccacaggaatgttccattggtgcgcccccaaagagatcgagaaagtgatcctgacacggtctgaagctgctatgacggttctgtcagggcatgtcgttgtttgcatcttcggagacgtctcctctgcacttatcggtctgaggaacttggtcatgcctctgagggccagcaatttccactatcacgagctgaaacacatcgtcttcgtgggtagtatcgagtatctcaagagggaatgggaaaccttacacaatttccctaaagtgtccatcttacctggaactccattaagcagagccgacctgagggccgtcaacatcaacctttgcgacatgtgtgtgatcctaagcgctaaccagaataatatcgacgacaccagtctccaggacaaggagtgcattctggcctctctgaacataaagtccatgcagttcgacgacagtatcggtgtactccaggccaactcccagggattcactccccctgggatggaccgctcatctccagacaatagcccagtgcatggcatgcttaggcagcctagcattaccacgggcgtgaacattccaattattacagaactggtcaatgatacaaatgtgcagttcctggaccaagacgatgatgacgaccctgacaccgagctgtacctgacccagcctttcgcctgcggaactgctttcgccgtaagcgtcctggatagtcttatgagcgccacctattttaacgataacatcttaactctcatcaggactttggttacaggaggcgctactcctgagctggaggctttgattgccgaagagaacgccttgcgcgggggttatagcactccgcaaactctggctaacagggaccgctgcagagtggcccaactggctttgcttgacgggccctttgccgatttaggagatggaggttgctatggcgatttgttttgtaaggccctgaagacctataacatgctgtgtttcggcatctacagacttagagatgctcatctgtcaacaccctctcaatgcactaaaagatacgtaatcacgaaccctccttacgagttcgagctggtgccgacagatctaattttctgcctgatgcaattcgaccacaacgcaggccagtcccgggcctccctgagccacagcagccactctagccagtcttcctctaagaagtcaagttcagtgcactcaatcccaagcacggccaatagacagaatcgaccgaagtcacgcgaatccagagacaagcagaacgccacccggatgaataggatggggcaggccgagaaaaaatggtttacggatgagccagataatgcttacccccgaaacatccagattaagcccatgtccacccacatggcaaaccagatcaatcagtacaagtctacttcgagcctgatcccccctattcgcgaagtggaagacgaatgttag

SEQ ID NO: 200283 - DNA, 3504 bp, synthetic construct
  misc_feature 1..3504: note = Description of Artificial Sequence: Synthetic coding sequence
  source 1..3504: mol_type = other DNA
cccaagatggacgccctgatcatccccgtgaccatggaggtgccctgtgactctagggggcagagaatgtggtgggcgttcctggcctcaagcatggtcactttctttggcggcttgtttatcatcctcctctggagaaccttaaagtacctgtggaccgtgtgctgccactgcggcggcaagaccaaagaggcccagaaaatcaataacgggagctctcaggctgatggcacgctgaagcctgtcgacgagaaagaggaggcagttgccgctgaggtggggtggatgaccagcgtcaaggactgggctggcgtgatgatcagcgcccagactctcactggcagggtgctggtggtgttagtgttcgcactcagcattggtgccttggtcatttattttatcgacagctctaatcccatagagtcatgtcaaaacttctataaggacttcacactccagattgatatggccttcaacgtgttttttctactctatttcggtttacggtttattgccgccaacgacaaactgtggttctggttagaagtcaattcagtagtggattttttcactgtaccaccagtgttcgtgtcagtttatctgaaccgcagctggctgggtctgaggtttctgagggccctacggctgattcagttcagcgagatcctccagttcctcaacattcttaagaccagcaactctattaagcttgttaacttactttccattttcatttctacctggctcactgccgctggatttatccatctagtggaaaatagtggggacccctgggagaatttccagaacaaccaagcattgacatattgggaatgcgtctatctgctcatggtgactatgtccaccgtcgggtatggtgacgtgtacgccaagacaacgctgggaaggttgttcatggtcttttttattctcggcggtttagccatgtttgcgagctatgtgcccgagattatcgagctgattgggaatcgcaaaaagtatggcggctcctactctgccgtgtccggtaggaaacatatcgtggtatgtggacacattaccttggaatcagtgagtaattttctgaaggactttcttcacaaggacagggatgacgtaaacgtcgaaatcgtcttcctgcataatatttctcccaacctggagctggaagcactgttcaaaagacatttcactcaagttgaattctatcaaggcagcgttctcaatccccatgatcttgctcgggtgaaaatagaatcagcggacgcctgtctaattctggccaacaaatactgtgcagatcctgatgccgaggacgcatctaatataatgagggtcatcagcattaaaaactatcacccgaagattaggattattacgcagatgcttcagtatcataataaagcccacctcctgaacattccatcatggaactggaaggaaggtgatgatgctatctgtctagcagagctcaagctcggtttcatcgctcagtcttgcctggcccagggactcagcaccatgttggcaaatctgttctctatgaggagttttataaaaattgaagaggacacctggcagaagtactacctggaaggggtttcgaacgagatgtataccgaatatctctcaagcgctttcgtagggctgagttttcccaccgtgtgtgagttgtgctttgtgaaattgaaactactgatgatagccatcgagtacaaatcagctaatagagagagtcgtatcctcattaatcccggcaaccacttaaaaattcaggagggcactctgggtttcttcatagcgagcgacgcgaaggaggttaagcgcgccttcttttactgcaaagcttgtcacgacgacattacagatcccaaaaggatcaagaagtgcggttgcaagcgccttgaggacgagcaaccctcaaccttatcacccaaaaagaagcagaggaacggcggcatgagaaacagccccaacacctcacccaaacttatgcgccatgaccctctgctgatccccggcaatgaccagattgacaacatggattctaatgtgaagaaatatgactcaaccggcatgtttcattggtgcgcgcctaaagagatagagaaagtgattctgaccagaagcgaggccgccatgaccgtgttatcaggccacgtggtcgtttgcatattcggcgacgtgtcctcggccctgattggtctcaggaacctggttatgccgctgagagcatccaactttcactaccatgagcttaagcatatcgtgttcgtgggctctatcgaatatctgaaacgagagtgggagacgctccacaacttcccgaaagtgagcattctgcccggaactccgttgtctagggccgaccttagagccgtgaacattaatctgtgcgatatgtgcgtcattctctccgcgaaccagaataacatagatgatacctccctacaagataaagagtgtatccttgccagcctgaatatcaaaagcatgcaatttgacgactcgataggagtgctgcaggccaatagtcagggcttcacccccccaggaatggaccggagttccccagacaactcccctgtgcatgggatgctcaggcaaccatcaatcactaccggggtgaacatcccaatcatcaccgagctagtgaatgataccaacgtgcaattcctggatcaggacgatgacgatgaccccgatactgagctgtatctcacacagcccttcgcgtgtggcacggcctttgctgtgtctgtgctggattccctgatgtccgcaacatattttaatgataacatcttgacgctcataaggacacttgtgaccggcggtgccacacctgaacttgaggcattaatagctgaagagaacgccttgaggggcggttactccaccccccagaccctggccaacagagaccgatgcagggtggcccagctggcactcctagatgggccttttgcagatttgggagacggaggctgttacggggatcttttttgtaaagccctcaagacttataacatgctgtgttttggtatctatcgcttaagagatgcgcatctgtccacacccagtcaatgtaccaaaaggtacgtcattaccaatcccccctacgaatttgagctggtgcctactgaccttatattctgtctgatgcagttcgaccataatgctggtcagtcccgagcaagcctcagccactcaagccattcatctcagtcctcaagtaaaaagtcaagtagcgtgcacagtatcccgtctaccgctaaccgccaaaaccgccccaaatcccgtgagtctagagataagcagaatgctacccggatgaaccggatgggtcaggaaaaaaaatggttcactgacgagcctgataacgcttacccacggaatattcaaataaaacccatgagtactcacatggcgaaccagattaaccaatataagtctacatcttcccttatcccccccattagagaagtcgaggatgagtgctag

SEQ ID NO: 200284 - DNA, 3504 bp, synthetic construct
  misc_feature 1..3504: note = Description of Artificial Sequence: Synthetic coding sequence
  source 1..3504: mol_type = other DNA
tgaggcggcggcggcggcggcggcggcagcagcctgcggatgagcagtaacatccatgctaaccatctttctctcgacgcatcttctagctccagttcaagctccagcagtagtagcagctctagctcttcgtctagctcttcgagcgtgcatgagcctaaaatggatgcactgatcatccctgtcaccatggaggtgccttgcgactcgagggggcagaggatgtggtgggcctttttggccagctccatggtaacattcttcggtggcttatttatcattttactgtggaggacacttaagtatttgtggaccgtgtgttgtcattgtggcgggaaaaccaaggaagcgcaaaaaatcaacaatggatccagccaggcagatggcaccctaaagcctgtcgatgaaaaggaggaagctgtagccgccgaggttggttggatgacctcagttaaggattgggccggggtgatgatcagcgcccagactttgaccggcagggttctggtggtcctggttttcgctctgagcattggcgccctcgtgatctacttcatcgattcttccaaccccatcgagagttgccaaaacttttacaaggatttcacactgcagattgatatggcttttaatgtgtttttcctgctgtatttcggcctgcgctttatcgctgccaatgataagctgtggttctggctcgaggtgaactccgtcgtggacttcttcacagttcctcccgtgttcgtgagtgtatacctgaaccggagctggctcggcctgcggtttctgagagccctgagactgatccagtttagtgagatcttacagtttctcaatatcttaaaaacaagcaactccatcaaactggtcaacctgctttctatatttattagcacttggctaacagctgctgggtttatccacttggttgagaattcaggtgacccatgggaaaattttcagaataatcaggccttaacctactgggagtgtgtttatctgctgatggtcacgatgtcaactgtgggctatggcgacgtctatgccaagactacgctggggagactgttcatggttttttttatcctgggcggattggctatgttcgcaagctatgttcctgaaattatcgagcttatcggaaaccggaaaaaatacggtggtagttattccgccgtgagtggacggaaacacatcgtggtctgtggccacattacccttgagtcagtgtctaattttcttaaggacttccttcacaaggatagggacgacgttaatgttgagatcgtgtttctacataatatttctccaaacctcgagttagaggctctgttcaagaggcacttcacacaggtagagttttaccaaggatccgtcttaaacccccatgacctcgccagagtcaagatagaatcggctgatgcctgcctcatcctggcaaataagtactgcgcagaccccgatgctgaggacgcttctaacattatgagagtgatcagcatcaagaactatcaccccaagatcagaattattacccagatgctccagtatcacaacaaagctcaccttctgaacatccccagttggaactggaaggaaggagacgatgctatctgtttggccgaactgaaactgggcttcattgcccaatcctgtctggcccaggggctgtctactatgttggccaacctgttcagcatgagatctttcatcaaaattgaagaagatacctggcagaaatattacttggaaggtgtctcgaacgaaatgtacaccgaatatctcagcagtgcctttgtgggtctgtctttcccaacagtgtgcgaactttgcttcgtgaaactcaagttgctgatgatcgccatagaatacaaaagtgcgaacagggagagcagaattctgattaaccctggaaatcacctgaaaattcaagaggggacactggggttctttatcgcttctgatgctaaggaagtgaaacgtgcctttttctattgcaaggcctgtcatgacgatattaccgatcccaaacggatcaagaagtgtggttgtaaaaggctggaggacgagcagccgagcaccttgagccccaagaagaaacaaagaaatggcggtatgagaaattcgcccaatacaagcccaaaacttatgcgccatgacccactcctgatacccggaaacgatcagatcgacaatatggattctaacgtgaaaaaatacgactccaccggaatgtttcattggtgtgcacccaaagagattgagaaagtgattctcacaaggtctgaggctgccatgaccgtgctgagtggccacgtggtggtgtgtatctttggcgacgtctcctcagctctgatcggcctcaggaacctagtcatgccgctgcgagcttccaacttccattaccatgagctgaaacacatcgtcttcgtcgggagtattgagtacctcaagcgagagtgggagactctgcacaattttcccaaagtgagcattctgcctgggacgccgcttagcagagccgatttgcgcgccgtcaacattaatctttgcgacatgtgcgtgattctgtcagctaatcagaataacatcgacgacacatccctacaggataaggaatgcatccttgcctctctgaatatcaagtccatgcagttcgatgattctattggcgtgttgcaggctaatagtcagggctttacgccccccggcatggacaggtcctcccctgacaattcaccagtgcacggtatgcttcgacaaccctccataactacgggcgttaatatccccattattaccgaactggtgaacgatacaaatgtacagtttttagaccaggatgacgacgacgaccccgacactgaactgtatcttacgcagccattcgcctgtggaaccgccttcgccgtcagcgttctagacagcctaatgtcagcaacgtatttcaacgataacatccttacactcattcgtacattggtcacaggtggagctactcccgaattggaggcgctgatcgctgaggagaacgcactgagaggcgggtattccactccacagacccttgcaaacagagaccgctgcagagtggctcagctggctctgttagacggacctttcgccgatctcggagatggcggatgctacggggacctcttctgtaaggccctcaaaacctacaatatgctgtgcttcggcatctaccgattacgtgatgcacacctctcaaccccaagccagtgtaccaaacggtacgtcatcaccaatcctccatacgagtttgagctggtgccaaccgatcttatattttgtctcatgcagttcgatcataatgctggccagtccagagcatccttgagtcatagctctcattcaagccagtcctccagcaaaaagagcagtagcgttcactcgatccccagcactgccaacagacagaatagacccaaatctcgggagtctagggacaagcagaaccggaaagagatggtttatcggtag

SEQ ID NO: 200285 - DNA, 3516 bp, synthetic construct
  misc_feature 1..3516: note = Description of Artificial Sequence: Synthetic coding sequence
  source 1..3516: mol_type = other DNA
atggacgccctgatcatccccgtgaccatggaggtgccctgcgactcccggggacagcggatgtggtgggccttcttggccagcagtatggtgaccttctttggaggactgtttataattctcctgtggcgtacactcaaatacctttggactgtctgctgtcactgcggaggcaagaccaaagaagcccagaagattaacaatgggagctcccaggctgatggcacgctcaagcccgtggatgagaaagaagaggcagtcgcagctgaagttggctggatgactagcgttaaggactgggctggggtgatgattagtgcgcagacactaaccggccgggtgctcgtagtccttgtcttcgcgctctccatcggtgcattggtgatctacttcatcgactcatccaaccctattgagagttgtcagaacttctataaggattttaccctccaaatcgatatggccttcaacgtctttttcctgctttattttggcttgagattcattgccgccaatgataaactttggttctggctagaagtcaattccgtggttgactttttcacggtacccccagtcttcgtgagcgtttatttaaaccgctcctggctaggacttaggttcctccgtgcacttaggctcatccagtttagcgagattctgcagttcctgaacatcttaaagacaagtaacagtatcaaacttgttaacctcctgagcatttttatctccacatggctgaccgcagccgggtttattcatctggtggagaacagcggcgatccatgggagaacttccagaataaccaagctcttacctactgggagtgcgtctacctgctgatggtgacaatgtccaccgtcggctacggtgacgtctatgcgaagacaacactaggaagactgttcatggttttcttcattctcggcggtctggcaatgttcgcctcctatgtcccagaaatcatcgaattaataggtaaccgcaagaaatacggaggaagttactccgcagtgagtggccgcaaacatattgtcgtgtgcggccacatcactcttgaatccgtgtcaaatttcttgaaggattttctccacaaagatcgggacgacgtgaacgtggagatcgtatttttgcacaacatttcacccaacttagaactggaggcgttgttcaagcgtcatttcacacaggtcgagttctatcaggggtctgtcctgaatccacatgatcttgcgagagtgaagattgaaagtgctgacgcctgtctgattctggcgaacaagtattgtgcagatcctgatgcagaagacgcttctaacatcatgagggtcatctctatcaaaaattatcacccaaaaattcgcatcatcacccagatgctccagtaccacaacaaggcccacctgctgaatatcccctcttggaattggaaagagggcgatgatgctatatgtctggcggagttgaagttagggttcattgcccagtcttgcctcgcccagggtctgagtacgatgttggccaatcttttctccatgcggtctttcattaaaatcgaagaagatacgtggcagaagtattatctggagggagtgagtaatgagatgtacacagaatacttgagctcggccttcgtgggactgagcttccctaccgtgtgcgaactgtgtttcgtgaagctcaaattgttgatgatcgccattgagtacaaaagcgccaacagagaaagcagaattcttattaaccctgggaaccatctgaagattcaggaaggaactctcgggttctttatcgccagcgatgctaaggaagtaaagcgtgccttcttctattgcaaggcctgtcacgacgatattacggatcccaagcgtatcaagaagtgtgggtgtaagagacctaagatgtcaatttataaaagaatgcggcgcgcatgttgcttcgactgcgggagatctgaaagagattgcagctgtatgtctggacgtgtgagaggaaatgtggacacacttgagcgcgcctttcctctcagttctgtttcagtgaacgattgtagcactagctttagggcattcgaggacgagcaacctagcaccctgagccccaagaagaaacagcggaacggtggcatgcgtaatagccccaatacctcacctaagttgatgcgccacgatcctttattaattcctggcaatgaccagatcgacaatatggattccaatgtgaagaaatacgactcaaccgggatgttccactggtgtgcaccgaaagaaattgagaaggtcattctaacacgaagtgaagctgctatgactgtgctatccggacacgtggtggtgtgtatttttggtgacgtgagtagcgctttaatcggactgcgtaatctcgtcatgcccctccgggcctcaaactttcactatcacgagctcaagcacatcgtcttcgtggggagcatagaatacctaaagcgcgagtgggagactttacataattttcccaaagtgagcatcttgcctgggaccccactaagtcgtgccgacttgcgagctgtgaatatcaacctttgtgacatgtgcgtcatcctgtcagcaaatcagaataacattgacgacacaagcctccaggataaggagtgcattctggcatcgctcaacatcaagtccatgcagttcgacgacagcattggggttcttcaagctaattcccagggcttcacaccccccggtatggaccgctcctcccctgacaacagcccggtgcatgggatgttaagacaaccgtccattactacaggtgtcaacatccctatcatcactgagcttgtgaacgacaccaacgtccagtttctggatcaagacgacgatgacgatcctgatacagaattgtatttaacacagccattcgcctgtggaactgcatttgcagtgtcagtgctggactctctgatgtccgccacttatttcaatgacaacatcctgacactgattcgaacgcttgtcacagggggcgctacgccagaactggaggcccttattgccgaagaaaacgccctgcgagggggctactccacccctcagacgctcgcaaatcgtgatcgatgcagggtcgcccagctagccctgcttgatgggccattcgcagaccttggcgacggggggtgctacggtgacctcttctgcaaggccctcaagacgtacaatatgctgtgtttcggcatctaccggctccgcgacgcccatctttcaacaccatctcagtgcactaaacgttacgtcatcaccaacccgccttacgaatttgagttggtgccaacagatcttatcttctgcctgatgcaatttgaccataacgcagggcagagcagagccagcttaagtcatagcagccattccagtcaatctagttccaagaaatcgagctctgtccacagcatcccaagcactgcaaatcgccagaatcggccgaagagccgtgagagtcgagataagcagaaccggaaggaaatggtttatagatag

SEQ ID NO: 200286 - DNA, 3534 bp, synthetic construct
  misc_feature 1..3534: note = Description of Artificial Sequence: Synthetic coding sequence
  source 1..3534: mol_type = other DNA
atggccaacggcggcggcggcggcggcggcagcagcggcggcggcggaggaggaggcggatctagcctaaggatgagctcgaacattcacgcaaaccacctctccctagatgcaagtagctcttctagtagctcttcttcttccagtagcagttcctcctctagcagttcatcatcttctgtgcatgaaccgaagatggatgctctgatcattcccgtgaccatggaagtgccttgtgactccagggggcagaggatgtggtgggcctttctagcaagcagtatggttactttcttcggcggactcttcatcatcctcctgtggcgtactctgaaatatttgtggacagtttgttgccactgtggtgggaagaccaaggaggctcagaagatcaacaacggcagtagtcaagccgatgggacactgaagccagtcgacgagaaggaggaagcggtggccgccgaggtgggatggatgacttcagtgaaggattgggcgggtgtgatgatcagcgctcagacactgaccggccgggtcctggttgttctcgtgttcgcactatctatcggcgccctggttatctactttatcgatagttccaatcctattgagagctgccagaatttctataaagactttacactgcaaatagacatggcttttaatgtcttcttcctcctttatttcgggctgcgctttatcgcagcaaacgacaaactttggttctggctggaggtgaactctgtggtagactttttcacagtgccgcccgtctttgtgtcggtttatctaaatcgcagttggctgggcctgaggttcctgagggcgctccgactgatccagttctccgaaattctgcaattcctgaacattttaaaaacgtctaattcaataaagctggtgaacctcctgtcaatctttatttcaacctggctaactgcagccggtttcatccacctggtagaaaattctggagacccatgggagaattttcagaataatcaggccctgacctattgggagtgtgtgtacctgctgatggtgactatgtctactgtgggctacggcgatgtgtacgccaagacaacactgggaaggctgttcatggtgtttttcatacttgggggcctggcgatgttcgcctcttatgtccctgaaatcatcgaactgattgggaacagaaagaaatacggtggctcctattctgcagtgtcagggcgcaaacacatcgtagtgtgcgggcacattaccctggaaagtgtcagcaactttctgaaagatttcctccacaaagaccgggacgatgtgaacgtggagatcgtgttccttcacaacatttctcctaacctggagttagaagcactgtttaagcggcacttcactcaggttgagttttaccaaggatctgtcctgaacccacacgatctcgcccgggttaagattgagtctgccgacgcttgtctgatcctggcgaacaagtactgcgccgatccagacgctgaagatgcgagcaatatcatgcgcgtaatcagtattaagaactaccacccaaagatcagaatcatcacccagatgctgcaataccacaacaaggcccacctactaaatattcctagttggaactggaaggagggagatgatgcaatatgcctggccgagctcaaactcggcttcatcgcgcagagctgcctggcccaaggcctgtccacaatgttggcaaacctgttttcaatgaggtcattcatcaaaatagaagaggacacctggcaaaagtactatttagagggtgtgtccaatgagatgtataccgagtatctgagttccgcctttgtcggtttaagctttcctaccgtctgcgagctgtgtttcgtgaagctgaagctcctgatgattgctatcgaatacaaatccgccaacagagaaagtagaatcctaatcaatcctggaaaccatctcaaaattcaagaaggtacactgggtttctttatagcttctgatgctaaagaagtgaaacgcgcctttttttattgcaaggcctgccatgacgacatcaccgatcctaagagaataaaaaaatgcggttgtaaacggctggaggatgaacagccttcaaccctatcaccaaaaaagaaacagcgaaacggcgggatgcggaattcgccgaacacttctccgaagctgatgagacatgacccgctgctgatccctggcaacgaccaaatcgataacatggatagtaacgttaagaaatacgactctacgggaatgttccactggtgcgcccctaaggaaatagaaaaggtcattttgaccaggtcagaagctgcaatgacagtgctgagtggccacgttgtcgtgtgtatcttcggcgatgttagtagcgcccttatcggattgcgcaacctcgtgatgccactccgggcaagcaacttccattatcatgaactaaaacatatcgtctttgtagggtcaatcgagtatttgaagcgggaatgggaaactcttcataattttcccaaggtgtctattcttcccggcacccccctaagcagggccgacctgcgggctgttaacatcaatctttgcgacatgtgcgtcatcctgagcgcgaaccaaaataatattgacgacacatctctgcaagacaaggagtgtattctagcttcgttaaacattaaaagtatgcagttcgatgacagcattggggttcttcaggctaacagtcagggatttaccccgccaggcatggaccggtcttcgcccgacaactcacccgttcatggcatgttgcgccaacctagcattacaactggcgttaatatccctattatcacagaactcgtcaacgacacaaacgtgcaatttcttgatcaggacgatgatgacgaccctgacactgaactctatctgacacagccctttgcctgcgggacagcattcgccgtgagcgttcttgactctctgatgtccgccacatacttcaacgataatatcctcacactgattaggaccctggtgacaggtggagccacaccagagctggaggctcttatagccgaggagaatgccttacggggtggctactcaaccccccagaccctcgccaaccgcgacagatgtcgggtggcccagttagcattactagacggccctttcgccgacctcggagatgggggatgctacggcgacttgttttgtaaggccctaaaaacatacaatatgctctgcttcggaatctataggctgcgcgacgcgcacttatccacccctagccagtgcaccaaaagatacgttattaccaatcctccatacgaatttgaacttgtgcctaccgacctgattttctgtctgatgcagttcgaccacaacgccggacagtcacgggcctctctttcccatagttcacattcttcccagtcttcctctaagaagtcctcttctgtccacagcatcccctccaccgcaaatagacaaaatagaccgaaatcccgggagagccgcgataagcagaagaaggagatggtctataggtag

SEQ ID NO: 200287 - DNA, 3618 bp, synthetic construct
  misc_feature 1..3618: note = Description of Artificial Sequence: Synthetic coding sequence
  source 1..3618: mol_type = other DNA
atggccaacggcggcggcggcggcggcggcagcagcggcggcggcggaggggggggcggttcgtcactgcggatgagcagcaatattcacgccaaccaccttagtttggatgcttcctcttcaagctctagctcttcctcaagctccagcagttctagtagttccagcagctcatcaagcgttcatgagccaaagatggatgccctcatcatacctgtcacaatggaagtcccctgtgactcacgtggtcagagaatgtggtgggcctttcttgctagtagcatggtgacattctttggcggcctgtttattattcttctatggcggactctgaaatatctttggaccgtgtgctgccactgcggaggtaaaacaaaagaggcgcagaaaatcaataacggcagcagtcaggccgatggcacattgaagcccgtagacgagaaagaggaagccgttgcagctgaagtgggatggatgactagcgtgaaggattgggccggtgtcatgatctccgcgcagaccttaacagggcgagtcttagtagttctggttttcgccctaagcattggtgcactggttatatattttattgacagtagcaatccgatagagtcctgccagaatttttataaggatttcacacttcagatcgatatggcttttaatgtgttctttctactgtatttcggactgcgtttcatcgcagctaatgacaagctttggttctggctggaggtgaactctgtggtcgatttcttcacagtgccccctgtgtttgtttcggtctacttgaacaggtcttggttaggccttagatttctgcgagctctacggcttatacagttctctgagatcctgcaatttctgaacatcctgaaaacctcgaacagcatcaagctggtgaatctactatctatcttcatcagcacttggctgactgccgctggttttatccacctcgtcgagaatagtggggacccttgggaaaattttcaaaacaaccaggcccttacctactgggagtgcgtatatctactgatggtgactatgtcaactgtcgggtacggtgacgtatacgccaagacaaccttgggaaggctttttatggtcttctttatccttgggggtctggccatgtttgcctcttacgtgccagagatcatcgagctcattggcaaccggaagaagtacggagggtcctattccgccgtatcaggaaggaaacacatagtggtctgtggtcacatcaccctggagtccgtctccaactttttaaaagattttctgcataaggatagagacgatgtaaatgtcgagatcgtctttctgcataacatatctccaaacctggagttagaggcgctgttcaaaaggcatttcacccaagtggaattctatcaaggctccgtgctgaaccctcatgatctcgccagggtgaagattgaaagtgcagacgcctgcttaatcctggccaacaagtactgcgcagacccagacgcagaagatgcatcaaacataatgcgagtgatcagcatcaagaactaccatcccaagattaggattatcactcagatgctgcagtaccacaataaagcacacctcctcaatattccttcatggaactggaaagaaggtgatgatgccatctgcctcgcggagctcaaactcgggtttattgcccagtcatgcctggctcaggggctgagtactatgctggccaacctcttcagtatgaggagcttcatcaagatcgaagaggatacttggcagaagtattatctggagggggtgtcaaacgagatgtacaccgagtatctgagttccgcatttgtgggactgtccttcccaactgtatgcgaactgtgttttgtcaagctcaaactcctcatgattgcaatagaatacaagagtgctaatagggagtcccgcatcttgattaatcccgggaaccatttaaagatccaggaaggtacattaggtttcttcatcgctagtgatgcgaaagaggtgaagcgagccttcttctattgtaaggcctgtcatgacgatattactgatcccaagcgtattaagaagtgtgggtgtaaacgcctggaggacgaacagcctagtacactgtcccccaagaaaaagcagaggaacggggggatgcgaaacagtccaaacacaagccccaagctgatgcgacatgatcctctgttgatccctgggaatgatcaaatagacaacatggactccaacgtaaaaaaatacgattcaaccggcatgtttcattggtgtgcaccaaaagaaatcgaaaaagtcattctgacaagatctgaagccgccatgaccgtgctatccggccatgtcgtggtgtgcatttttggcgacgtcagttccgccttgatcggtctccggaatctggtgatgcctctacgtgcatccaactttcactaccatgagctcaagcatattgtctttgttgggtccattgaatatctgaaacgcgaatgggagactctacataattttcccaaggtcagtattctgcctgggactcctcttagtcgcgccgatcttcgcgcagtcaacattaacctttgtgacatgtgtgttattctgtctgcaaaccaaaacaacattgatgacacatccctgcaggacaaagagtgcatcttagctagtcttaacattaagagcatgcagtttgacgacagtattggcgttctacaggccaactcgcagggctttaccccacccggcatggatagatcctcccccgacaactcgcccgtccacggcatgctgcggcagcccagcattaccacaggtgtgaacatccccatcattactgagttagcaaaacccgggaagctgcctctcgtctctgtcaaccaggaaaaaaattctggaacccacattttaatgattacagaactggtaaacgataccaatgtccagttcttggatcaggatgatgatgacgatcccgacaccgagctgtatttgacgcagccattcgcttgcgggacagcttttgctgtgagtgtgcttgactctctcatgtcagccacatatttcaatgacaacattcttactcttataagaaccttggtgaccggtggcgctacaccagagctggaggccctcatcgcggaggaaaacgcgctgcgggggggctactcaaccccccaaaccctagctaatcgagacagatgccgagttgcccaactagccctgctcgacgggccttttgcagatttgggagacggcggatgttatggcgatcttttctgtaaggcactgaaaacatataacatgttgtgtttcgggatctatcgcctccgcgacgcccacctcagcacaccctcacagtgtaccaaacggtacgtgattaccaatcctccctacgagtttgagcttgtacccactgatctgatcttctgcctcatgcagttcgatcataatgcaggccagtcccgggctagcctctctcattcttcacattcatcccaatcgtcctcaaagaagagtagttccgtccactccatcccaagcacagccaacagacagaatagaccaaagtccagagagagtagagacaagcaaaacaggaaagagatggtgtacaggtag

SEQ ID NO: 200288 - DNA, 3678 bp, synthetic construct
  misc_feature 1..3678: note = Description of Artificial Sequence: Synthetic coding sequence
  source 1..3678: mol_type = other DNA
cccaagatggacgccctgatcatccccgtgaccatggaggtgccctgtgatagccggggccagcggatgtggtgggcattcctcgcatcttcgatggtgacattcttcgggggcctgtttattattctgctgtggcgaactcttaaatatttatggaccgtctgctgtcactgtggcggtaagacaaaagaagctcagaaaatcaataatgggtcaagccaggctgatggtactctcaaacctgtggacgagaaggaggaagctgttgccgctgaagtgggctggatgacttctgtcaaagattgggcgggggttatgatatctgcccagacattgaccggcagggtgctggtcgttttggtctttgccttgtcaatcggtgcgctggtcatttactttattgacagttccaatccaatcgaaagctgtcagaatttctataaggactttactctccagatagacatggcatttaacgtgtttttcctgctgtactttggcctcagatttatcgccgccaatgacaagttgtggttctggctggaggtaaattctgtggtcgattttttcactgtgcctcccgtgttcgtatccgtctacctgaacaggtcgtggcttggactgagattcctgcgcgccttaagattgatacaattctccgaaatcctgcagttcctgaacattctgaaaacgtctaactcgataaagctcgtgaatctgctgagcatcttcattagtacctggttgactgccgccggatttatccacctcgtggaaaacagcggggacccgtgggagaacttccaaaataaccaggctcttacatattgggaatgcgtttaccttctgatggttaccatgtctactgttggatatggcgatgtgtacgccaagacaaccctgggcaggctctttatggtgtttttcatcttggggggactagcaatgtttgcctcatacgttcctgagatcatagagctaatcggcaacaggaagaagtacggcggatcatacagcgctgtatcaggacgcaagcatattgtagtgtgtggacacattaccttggagtccgtctcgaattttctcaaggacttcttgcacaaggatcgagacgacgtcaacgtcgagatcgtgtttctccacaacatatctcccaaccttgagcttgaagcattgtttaagaggcatttcacacaggtagagttctaccagggatccgtgctgaatccacatgatctggccagggtgaagatcgaaagcgctgatgcttgccttattctcgccaataaatattgtgcggaccctgacgccgaagatgcatcaaatatcatgcgcgtgatctccatcaaaaattaccatcctaaaatccgaattatcacccagatgctgcagtatcataacaaggcccatctactgaatatccctagttggaattggaaggaaggtgacgatgccatctgtttagccgaactgaaactggggtttatagcccagtcctgcctcgcccaggggctaagcactatgctcgctaatctctttagcatgcggagtttcatcaaaatagaagaagacacttggcaaaagtactacttagaaggtgtatcaaatgaaatgtatactgaatatctcagcagtgctttcgtaggcctctcattcccaaccgtttgcgaactgtgtttcgtcaaattgaagctcctgatgattgcaatagagtataagtctgctaatagggaatcccgtatactcatcaatcccggtaaccacctcaagatacaggagggtactttgggattctttattgcgagtgatgctaaagaagtgaaaagggcattcttctactgtaaggcttgccacgacgatattaccgaccccaagcggatcaaaaagtgtggatgcaaaaggcccaagatgagcatctataagcgtatgagacgagcctgttgttttgattgtggacgtagcgagagggattgctcttgtatgagcgggagggtgagaggaaatgtggatacccttgaacgagcttttcctttaagttccgtgtcagtcaacgactgtagcacttcctttcgcgcgttcgaggacgaacagcccagtactctgagccccaagaagaagcagcggaacgggggcatgcgtaatagtcccaataccagcccaaagcttatgcgtcatgacccccttctcattccaggaaatgatcagatcgacaatatggattcgaacgtgaagaaatacgactccacaggaatgttccactggtgtgccccaaaggaaatcgagaaagtaattctgactcgcagcgaggccgccatgacagtgctgagtggacatgtcgtggtttgtattttcggggatgtttcgtctgccctcattgggctgaggaacctggttatgcctctgcgtgcctccaacttccattatcatgagctcaagcacatagtgtttgttgggtctattgaatatctgaaacgggagtgggagaccctgcacaacttccctaaggtgtctatactccccggcacccctttgagccgggctgatctccgggcagtaaatatcaacctgtgcgacatgtgtgtgatcctttcagccaaccagaataatattgacgataccagcttgcaagacaaggagtgcattcttgcgtccctaaacatcaagagcatgcagtttgacgatagtattggggttctccaggcaaactcgcaggggttcacaccccccggcatggaccgatcctcacccgataactcccccgtccacgggatgctgagacagccctcgatcactactggtgtgaacataccgattattacagagttggtgaacgataccaatgtgcagttcctagaccaagacgatgacgacgatcctgatacagagctgtatctgacgcagccatttgcttgtggcactgccttcgctgtaagtgtgctagactccttgatgtccgcaacatacttcaacgacaacattttgaccctaatcagaacgctggttacgggtggggcaacgcccgagcttgaggccttgattgcggaggagaacgctcttaggggcggctactccacaccccagaccctcgctaatcgggatcgatgtcgggtggcccagctcgccctcctggacggtcccttcgcagacctcggcgacggaggatgttatggtgatttattctgtaaagcattgaagacttacaacatgctgtgctttggaatctaccgactgagggacgcgcacttgtctaccccaagccagtgcacgaagcgatacgtgattacgaaccccccctacgagttcgagctggtcccaaccgatctaatcttctgtctgatgcagtttgatcacaacgccggacaatcccgagcctcgctgagccattcatcccatagcagccagtcttcctctaagaaatcctctagcgttcactcgattccttctacagccaacaggcaaaacagaccgaagtcccgggagtccagagataaacagaatgctactcgcatgaaccgcatgggccaggagaaaaaatggttcacggacgagcctgacaacgcctatcccagaaatattcagataaagcctatgtccacacacatggcgaaccaaataaaccagtacaaatctacctctagtctaatccccccaattagagaagttgaggacgagtgctag

SEQ ID NO: 200289 - DNA, 3660 bp, synthetic construct
  misc_feature 1..3660: note = Description of Artificial Sequence: Synthetic coding sequence
  source 1..3660: mol_type = other DNA
atggccaacggcggcggcggcggcggcggcagcagcggcggcggcggtgggggggggggctcatctctgagaatgtcgtcgaacatacacgccaatcacttaagtctggacgcatcttcctccagctccagctccagctcctcaagttcgagttctagcagtagcagttcaagttcctctgttcacgaaccaaagatggatgccctgatcattccagtgaccatggaggtcccatgcgactccaggggccaacgaatgtggtgggccttcctcgccagttccatggtaacttttttcggcgggctgtttatcatcctgctctggaggaccctgaagtacctgtggaccgtttgctgccactgcggcggaaagacaaaggaggctcaaaagatcaataacgggtccagtcaagcagacgggaccctgaagcccgtggacgagaaagaggaggccgtcgccgcagaggtgggctggatgaccagcgtgaaagactgggctggcgttatgatcagcgctcaaactcttaccggcagggtgctggtggtactggtgtttgctcttagcatcggcgccctggtcatctacttcatagactctagcaatcccattgagtcctgtcagaacttctacaaagacttcactttgcagatcgatatggctttcaacgtcttttttttgctgtactttggattgagatttattgcagcaaacgacaaattatggttctggctggaagtgaactctgtggtcgactttttcaccgtgccccccgtgtttgtgtccgtttacctgaatcgtagctggcttggcttaaggtttctccgcgcactgaggctcatacaattttcagagattttgcagtttctgaacattctcaagacatccaatagcattaagctggttaacttgctgtcaatctttatctcaacctggctgaccgccgccggtttcatccacttggtggaaaactctggcgatccatgggagaacttccaaaataaccaggcacttacgtactgggaatgtgtgtacctgcttatggtcacgatgtccacagttggctacggagacgtctacgccaagaccactctcggccggctgttcatggtgttcttcatcctaggtggtctggctatgtttgcgtcctatgtacccgaaattatcgaacttatcggcaatagaaaaaagtatggcggttcttactccgctgtcagcggccgtaagcacatcgtggtgtgtggccacatcaccctggaatccgttagcaacttcctcaaggatttcctgcataaagaccgtgacgacgtgaacgttgagattgtatttctccacaatatttccccaaacctggagttagaagctctgttcaaacgtcatttcacccaggtggagttttaccaggggtctgtgctcaatcctcatgatctcgcgagagtgaagatagaaagcgcagacgcttgtctcattttggctaataagtactgtgcggaccccgatgctgaagatgcaagtaacattatgcgcgtgatcagtattaagaactaccacccaaagatccgcatcatcacacagatgcttcagtatcacaacaaggctcatctcctcaacatcccctcctggaactggaaagaaggcgacgacgcgatctgcctggcggaactgaagcttggcttcatagcgcaaagctgtctggctcaggggctgagcaccatgttagctaatttattctctatgcgttccttcatcaaaattgaggaagatacgtggcagaagtactacttagagggggtgtccaatgagatgtacaccgagtatctcagttcagcctttgtaggtctcagtttccctacagtgtgcgaactatgttttgtgaagctgaaactccttatgattgcaattgaatacaagtcagccaacagggagtctcgcattctgatcaacccagggaatcacttgaagatccaggagggcaccctgggtttttttattgcatctgatgcaaaagaagttaagagagctttcttctattgtaaagcctgtcatgatgatatcactgatccaaaaaggatcaagaaatgtgggtgcaagagactcgaagacgaacagccatcaactctctctcccaagaaaaaacagcggaatggggggatgcggaacagccctaataccagcccgaaactgatgcggcacgatccactcttgatacccggaaacgatcaaattgacaatatggattcaaacgtgaagaagtacgattcaactgggatgttccattggtgcgccccaaaagaaatcgagaaggtgatactggtgacaggctggatgccttaccttgggccgagggttctaatgacttgtctggatataggcgtggtgtgcatgcctaccgatatccagtccaccagccccgcttcgatcaaaaaattcaaggagacccggtctgaggctgctatgaccgtcctgagtggtcacgtggttgtctgtatctttggcgacgtgagctcagcactcataggactcaggaacctagtgatgccactgcgcgctagcaattttcactaccatgagctcaaacatatcgtgtttgtcggcagcatcgagtacctgaaaagggaatgggagaccctgcacaacttccctaaagtctcaatcctcccaggcacccctctttctagagcagatctgagggccgtgaatatcaatctctgcgacatgtgtgtgatactcagcgccaatcaaaacaacatcgatgacacatctttacaggacaaggaatgtatcctggcgtctctcaacatcaagagcatgcagttcgatgacagcattggcgttctgcaggccaattcccagggatttaccccacctggcatggaccggtctagtcccgataacagtccggtacatgggatgctgagacaaccgagcataacgactggagttaacatccccataatcaccgagctggtcaatgacaccaacgtacagtttctcgaccaggacgatgatgatgaccccgacacggagttgtacctgacgcaaccttttgcctgcggcaccgcctttgcggtttctgtgctggactctttgatgtctgctacttactttaacgataacattctcaccctcattaggacactggtgaccgggggcgctacgccagaactcgaggctttgatcgccgaggagaatgcactgcgcggaggatactccacaccccagacgttagccaatagagacagatgtcgggtggcacaattggcactcctggacgggccattcgctgatctcggagatgggggttgctacggcgacctgttttgcaaggcactgaagacgtataatatgctctgcttcggaatataccgactgagagatgcccatctaagcactccctctcagtgcactaaaagatacgtgatcactaacccaccatatgaattcgaattggtaccaaccgacctgatattctgcctgatgcagttcgaccataatgccggccagtctcgagcaagcctctcacatagttcacatagctcccagagcagttcaaagaaaagttcctcagtacactccattccctcaacagccaatagacagaatagacctaagtccagagaatcacgagacaagcagaaatatgttcaggaggagcgactctag

SEQ ID NO: 200290 - DNA, 3723 bp, synthetic construct
  misc_feature 1..3723: note = Description of Artificial Sequence: Synthetic coding sequence
  source 1..3723: mol_type = other DNA
atggccaacggcggcggcggcggcggcggcagcagcggcggcggcggggggggtggcggttcatctctcagaatgagttcaaatatacatgccaaccacctgtctttagacgcgtcttcctcatcctctagttcaagtagctcctcgagcagtagttcctcatcatcttcttcaagttccgtgcatgagccaaaaatggatgctttaattatcccagtcacaatggaagtgccctgtgactctaggggacaacggatgtggtgggcattcctggcttccagcatggtcaccttttttggcggtttgttcataatcttactgtggagaacactaaaatacctctggacggtttgttgtcactgcggaggaaaaacgaaggaagctcagaagattaacaatggcagtagccaggcagacgggacactcaaacccgtagatgaaaaggaggaagctgtcgccgcagaggtgggctggatgaccagtgtgaaagactgggctggcgtgatgatatccgcccagaccctgacagggcgcgtactagtggtgctcgtctttgcactttcaatcggggctcttgtgatctactttatcgacagcagcaatccaatagagtcatgccagaacttctataaagacttcaccttgcaaatcgatatggctttcaacgtcttttttctgctgtactttgggctgcggtttattgctgcaaacgacaaactgtggttctggctcgaggtgaactctgtggttgacttttttacagtgccacctgttttcgtctcagtgtacctgaaccggtcctggttagggcttaggttcctccgggcactgcggctcattcagttttcagagatccttcaatttctgaacattttgaaaaccagtaatagtattaagttggttaacctcctgtcaatcttcatcagtacctggctcacagcagccgggttcattcacctcgtggagaatagtggggacccttgggaaaacttccaaaacaaccaggccctgacttattgggaatgcgtgtatcttctaatggtcacaatgtccacagtgggttacggtgacgtttatgcaaagaccacgcttgggcgtctctttatggtgttttttatcctgggcgggctcgctatgtttgcctcttacgtgccggagattatcgagcttatcggcaatcgaaagaagtacggtggtagctattctgctgtttctggccgcaagcacatcgtcgtgtgcgggcatatcaccctggaaagcgtatccaacttcctgaaggacttcttgcacaaagacagagatgatgtgaacgtggaaatcgtttttctgcataacatatctcctaacctagaactggaggcactctttaaaagacatttcactcaggtggagttttaccaaggctcggtgttgaacccacatgacctggcccgcgtaaaaattgagtccgcagacgcctgcctcatcctggccaacaagtactgcgccgaccccgacgccgaggatgcaagtaatatcatgcgggtgatctcaatcaagaattaccatcctaagatccgcatcattacccagatgctacagtatcacaacaaagcgcacctgctgaatattccttcttggaactggaaagagggagacgacgccatttgcctggccgaactgaagcttggctttatagctcagagttgcctcgcacaaggcctgtcaaccatgctagcgaacctcttctcgatgaggtcatttataaagatcgaggaggacacatggcagaaatattacctggaaggcgtatctaatgaaatgtacaccgagtacctgtcgagcgctttcgttggtctgtcatttcctacagtatgcgagctctgcttcgtaaaacttaaactcctgatgattgctattgagtataagagcgccaatagagagtcccgggggaggctaagtatcctcatcaaccctggaaatcacctgaagattcaagagggtaccttaggattctttatcgcctccgacgccaaggaggtgaagagagcgtttttctattgtaaggcctgtcacgatgatatcacggacccgaaaagaattaagaaatgtggctgcaaaagacccaaaatgtctatctacaagcgtatgaggagggcctgttgctttgattgtggcaggtctgaacgagattgttcatgtatgtcagggagggttagaggaaacgtggatacattagagcgcgcctttcctctttcaagcgtgtcggttaacgactgttccaccagtttcagagccttcgaggatgaacagccatccacactatctcccaagaagaagcaacggaacggcggcatgagaaactcccccaacacttcccctaaactgatgagacacgatccgctgttaatccctgggaacgatcagattgacaacatggactctaacgttaagaaatacgatagcacagggatgttccattggtgcgctcccaaagagatagagaaggtgatactcacacggtcagaggcggcgatgactgttctcagtggacacgtcgtggtgtgcatcttcggtgatgtctctagcgcactgattggcctgaggaatctcgtgatgcccttgcgcgcatcgaatttccattatcacgagctcaagcacattgtttttgtgggctcaattgagtatctcaaacgcgagtgggaaactctgcataatttccccaaggttagtatcctgccaggaacccccctctcaagggccgatctgcgggcagttaatatcaacctctgtgacatgtgcgttatcttgtccgccaatcagaacaatatcgacgacactagcctgcaggataaagaatgcatcctcgcctctctgaatatcaaatccatgcagtttgatgatagcatcggcgtgttgcaggcgaattcccaagggttcacgccaccaggcatggatagatctagccccgacaactcacctgtacacggaatgctgcggcaaccgagcatcacaactggagtcaacatcccaattatcactgagctcgtgaatgatacaaacgtgcagttccttgaccaggacgatgatgacgaccccgacaccgaactgtatctgacccagcctttcgcttgcggcactgcatttgcagtgtccgtgctggactctctgatgtctgcaacatacttcaatgataatattctgaccctgattcgaactttagtgacagggggcgccacacccgaactggaagccttgatcgctgaggaaaatgctttacgcggcggctactctacgccccagactttggcaaacagggataggtgtagagtggcccagctcgctttattagacgggccctttgcggacctgggagatggaggctgttatggcgatctcttctgcaaggccctgaaaacatacaatatgctgtgcttcggaatatatagactgcgggatgcacatctctccactccaagccagtgcacaaaaaggtatgtgatcactaatcccccctacgaatttgagctagtgccaacagacctcattttttgtcttatgcagttcgaccacaacgcaggccaatccagagcctcactgtctcactcttctcattctagccagtcaagtagcaagaagtcctcttcggttcactcaatcccgtccaccgccaatagacagaaccgcccaaaatcccgcgaatcaagagacaagcagaagtatgtgcaagaggaacgattgtag

SEQ ID NO: 200291 - DNA, 2970 bp, synthetic construct
  misc_feature 1..2970: note = Description of Artificial Sequence: Synthetic coding sequence
  source 1..2970: mol_type = other DNA
atggccttcaacgtgttcttcctgctgtacttcggcctgcggttcatagcggcaaatgacaaactgtggttttggcttgaagtcaactccgttgtggatttctttaccgtcccgccagttttcgtttccgtctatctgaatcgcagttggctcggtttacgttttctccgggctctccggctgatccagttcagtgagattttacaattcctgaacatcctgaagacgtctaatagcatcaaattggtcaatcttctgagtatattcatcagcacatggctcaccgccgccggcttcatccacttagtggagaactcaggggacccgtgggaaaatttccaaaataaccaagctttaacttattgggaatgcgtctatttgttgatggtgactatgagtacggttggatatggtgacgtttacgcaaaaacgacgctgggtcggctctttatggtcttttttattcttggcggcttggccatgttcgcgagctatgtgcctgagatcattgaactaatcggcaatcggaaaaagtatgggggatcatattctgcggtgagcgggcgcaagcatatcgtcgtgtgtggccacatcacacttgaatccgtctccaattttctcaaagactttctccacaaggatagggacgatgttaatgtggagattgtctttcttcacaacattagcccaaatcttgaacttgaagccctgttcaagagacactttacccaggtcgagttttaccagggcagcgtgcttaatccgcatgatcttgccagggtgaagatcgaaagcgccgacgcttgcctgattctcgccaataaatactgtgcagaccctgacgccgaagacgccagtaatattatgagagtcatcagtattaagaattaccatccaaaaattcgaatcatcacacaaatgcttcaatatcataataaagcacacttactaaacatccctagttggaactggaaagaaggcgatgatgcaatttgtcttgccgaactgaagctagggttcatcgcacagtcctgcttagcccaaggcttaagtactatgctggcaaacctcttctccatgaggtcctttattaagatagaagaggatacctggcagaagtactacctggaaggcgtgtccaacgagatgtacactgagtatctgtcatctgcctttgtcggcctctccttcccgaccgtctgtgagctgtgcttcgttaagctcaagctgcttatgattgcaatcgaatataaatcagctaatagggaaagcagaattttgatcaatccagggaaccacttaaagattcaggaaggcacactgggattctttattgccagcgatgctaaggaggtgaaacgtgcctttttttattgtaaggcatgtcatgatgacataacggaccctaaaaggattaagaaatgcggatgtaaacgactgaaggtggccgcccggtccaggtatagcaaagacccattcgagttcaagaaagaaacacctaatagcagactggtgacagagcctgtcgaggatgagcagcccagtacgttatcaccaaaaaagaagcagagaaacggcggcatgcgtaactctcccaacacctctcctaaattgatgaggcatgacccattacttatccctggaaatgatcagatcgacaacatggactctaatgtaaagaagtacgattctacagggatgtttcattggtgcgctcccaaggaaatcgaaaaggtcattctgacgcggtccgaggctgctatgacagtgcttagcgggcacgtggtggtgtgcatcttcggggatgtttcttcagctttaatcgggctcaggaacctggttatgccactacgtgcctccaattttcattaccatgagctgaagcacatcgtatttgtgggctccattgagtatttgaaacgcgaatgggagactctacacaacttccctaaggtttccattcttcccggcacccccctgagtcgggctgatctacgcgccgtcaacatcaacctctgtgacatgtgtgttatcttgagcgcaaaccagaataatatcgatgacacgagtcttcaggacaaagaatgcatcctggcctctctcaacatcaaatcaatgcaattcgatgactcaattggcgtgctgcaagccaatagccagggctttaccccaccaggcatggaccgctccagccccgataacagtcccgttcacgggatgctccgtcagccctctataacaacgggtgtcaacattccaatcatcacggagctggtaaacgataccaatgttcaattcctcgatcaggacgatgacgatgatcctgataccgagctttatctcacgcaacccttcgcatgcggcacagcctttgctgttagcgtgctcgatagcttaatgagcgccacttactttaacgacaatattcttacccttattcgaaccctcgtaaccggaggcgctacgcccgaacttgaagctctcatcgccgaagaaaatgctctaaggggcggctattctacccctcagaccctcgcaaatcgcgaccgttgtcgagttgctcagctagccctgctcgacgggccctttgctgacttgggtgacggaggctgttatggcgacctcttctgtaaggctctcaaaacttacaacatgctgtgtttcggtatttacaggctgcgggacgcccacttgtcaaccccttcacagtgcacaaagagatatgtgattacgaacccaccatatgagttcgaactggtccctaccgacctgatcttctgtcttatgcaattcgaccataacgccggccagagccgagcgtccctaagtcactcatcccactcatctcaatcaagtagtaaaaagtcctcatccgtccacagcattccctcaacggctaacaggcagaaccgccctaagtcccgagagagtcgcgacaaacaaaagtatgtccaagaggaacggctttag

SEQ ID NO: 200292 - DNA, 543 bp, synthetic construct
  misc_feature 1..543: note = Description of Artificial Sequence: Synthetic coding sequence
  source 1..543: mol_type = other DNA
tgaaagatccggatcatcacccagatgctgcagtaccacaacaaggcgcacttactcaacattcctagctggaattggaaggagggtgacgatgctatatgcttagccgaattgaagctgggcttcatagcacagtcctgcttagcccagggcctgagcacgatgctcgcaaacctattttctatgcggagctttattaagatagaagaggatacatggcagaagtattatcttgaaggggtctcaaatgaaatgtacacggaatatttgagcagtgctttcgtgggactgtcctttcccacggtgtgcgaactgtgctttgttaaacttaaactgctgatgattgccattgagtacaagagcgccaacagagaatctcgtattctgataaacccaggaaaccatctcaagattcaggaaggaactttggggttctttattgcctctgacgctaaggaggtgaagcggcctcctcaactttgcctgccccttgccgcccagaaacggtgttttcaatccgataaactggacatctttatctag

SEQ ID NO: 200293 - DNA, 2661 bp, synthetic construct
  misc_feature 1..2661: note = Description of Artificial Sequence: Synthetic coding sequence
  source 1..2661: mol_type = other DNA
tgaaacagcggcgacccctgggagaacttccagaacaaccaggccctgacgtattgggagtgtgtgtatcttcttatggtcaccatgagcacggttgggtatggtgatgtgtacgctaagactaccctgggaaggctgtttatggtgttttttattctcggggggctggcgatgttcgcttcttacgtgcccgagattattgagcttatcggcaacagaaaaaagtatggcggcagttatagtgccgtatcaggtcgcaaacatattgttgtctgcggtcatattacactcgaatctgtttctaatttcctgaaagactttctgcacaaggatagggacgacgtgaatgtggagattgttttcctccacaatatcagccctaacctcgaactggaagcgctcttcaagaggcacttcacccaggtcgagttctatcaggggtctgtgctgaatcctcacgatctggctagggtgaagattgaatctgcagacgcctgtctcattctcgcaaacaagtactgtgctgatccagatgctgaggatgcctctaatatcatgcgggttatctctatcaaaaactatcatcctaagatcagaatcattactcagatgctgcagtatcacaataaggcccacttactcaacatcccaagctggaactggaaggagggagacgacgctatttgcctggcagaactcaaactgggatttatagctcagtcctgtttggcacagggattaagcactatgttagctaacctcttctctatgcgttctttcatcaaaatcgaggaagatacctggcagaagtactacttagagggggtgtccaatgagatgtacactgagtacctctcctctgcattcgtgggattaagctttcccacagtgtgcgaactctgctttgtcaaactgaaacttctaatgattgctatagagtataaaagtgctaatcgggagagtagaatattaatcaatccaggaaatcacctgaaaattcaggagggaacgctcggattctttatagcgtccgatgccaaggaggtgaagcgggccttcttttactgcaaagcctgccacgacgatatcacagatccaaagcgtatcaaaaagtgtggttgtaagcgactgaaagtcgccgcccgtagtcgatatagtaaagacccatttgagttcaagaaagagaccccaaactcccgtttggttactgaaccggttgaggacgagcagccaagcaccttgagtccaaagaaaaaacaacggaacgggggcatgagaaatagtccgaacacatctcccaagctaatgcggcacgatccgctgttgattccaggtaacgaccaaattgataatatggactctaatgtgaagaagtatgattcgacgggtatgttccactggtgtgccccaaaagagattgagaaggtgatcttaactcggtctgaggcagccatgacagtgctgtctggacatgtggtggtttgtatctttggtgatgtgtcatctgccttaatcggcctgcggaatttagtgatgcctctcagggcctccaacttccactatcacgagctgaagcacatcgtgttcgttggatcgatagagtacttgaagcgtgaatgggagacactccataatttcccaaaagtgtctattttacccggaacgcccctgagccgcgcggacttgcgtgccgtaaacataaatctgtgcgacatgtgtgtgatactgagcgccaatcagaacaacatcgatgatacatccttgcaagataaggaatgcatacttgcttccctgaacatcaaatctatgcagtttgatgatagtatcggggtgctgcaggccaattcacaagggttcactcctcccggtatggaccgctcttctccagacaatagcccagtccatggaatgctgcgtcagccgtcaattaccacaggcgtaaacattccgatcatcactgaattagtcaacgatacaaacgtccagtttctagatcaggacgatgatgacgatcctgacacagaactttacctgacgcagccttttgcctgtgggacagcatttgcggtctccgtactggactctcttatgtcggctacatacttcaacgataacattctcactctgatccgcaccttggtcactggcggagccacaccagaactggaggccttgattgcagaggaaaacgccttgcgaggagggtattcgacaccacagaccctggctaatcgggaccggtgcagggtggctcagctagctctgcttgacgggccttttgccgatctgggagatggtggatgctacggcgatctgttctgtaaagctctgaagacatacaacatgctgtgctttggaatttatcgccttagagacgcacatctctcgacaccatcccaatgcacaaaacgttatgtgataaccaacccaccctacgaatttgagctagtgcctacagatctcattttttgtcttatgcaatttgatcataacgcaggccagagcagagcttctctctcccactccagtcattcttcacagagctcctccaagaagagttcttctgtccatagtatccccagcactgccaatagacaaaatcggccgaaaagcagagagtccagggataagcagaaatatgttcaggaagaacggctctag

SEQ ID NO: 200294 - DNA, 795 bp, synthetic construct
  misc_feature 1..795: note = Description of Artificial Sequence: Synthetic coding sequence
  source 1..795: mol_type = other DNA
tgagtgatcagcatcaagaactaccaccccaagatccggatcatcactcagatgcttcagtaccacaataaggcccacctgctgaacataccaagttggaactggaaagaaggagatgacgcgatttgtctcgctgagctgaagctgggattcatcgcccagtcgtgtctggcccaaggactcagtaccatgctcgcaaacctgttctcaatgagaagctttattaaaattgaggaagatacctggcagaaatattaccttgagggagttagcaacgagatgtacacagagtatctgtcctctgccttcgtggggctgtcattccccacagtgtgcgaactttgctttgtcaaacttaagctgctgatgatagccattgaatacaaatctgccaatcgcgagtcacgcattctgatcaaccctggaaaccacctgaagatccaggaaggaacgctcggattcttcatcgcttcagacgccaaagaggtgaagagagcctttttctactgtaaggcatgccacgacgacatcaccgaccccaagaggatcaagaaatgtggttgtaagcggctcgctggatcccaggatacacaccccgacagcttctaccatcaagccgttaatgccagctcctacctgcacgggggcggccagatgtggccagttagctcgagtagcagcatccttctgcactacttacgacgacagatgcccggccccgcaagactgcccctcgagcttagttgtcaaggatcagcactgagcccaaatcccgacctgtactgcatgaagtag

SEQ ID NO: 200295 - DNA, 3630 bp, synthetic construct
  misc_feature 1..3630: note = Description of Artificial Sequence: Synthetic coding sequence
  source 1..3630: mol_type = other DNA
agcaacatccacgccaaccacctgagcctggacgccagcagcagcagttcttctagcagctcaagctctagctcatcctctagcagctcctcaagctcatccgtgcatgaacccaaaatggatgctctgatcatcccggtgacaatggaagtgccttgtgacagccgaggtcagaggatgtggtgggcctttcttgcctctagtatggtcacattctttggcgggctgtttatcatcctcctgtggaggacccttaagtatttgtggacagtctgctgccactgtggcggcaaaactaaagaggctcaaaagatcaataacggcagctcccaagcggatgggacactgaagccagtcgacgagaaggaggaagcagtggctgctgaagtggggtggatgacttctgtaaaggattgggccggcgttatgattagcgctcagactctgacaggtcgggtgctggtcgttttggtttttgcactctctatcggcgccctggtcatatatttcatcgatagttcaaaccccatcgaaagttgtcagaatttttacaaagacttcaccctccagattgacatggcttttaatgtgttcttcctactctatttcggcctccgctttatcgctgcaaacgacaagttatggttctggcttgaagtgaactcggtcgttgattttttcacagtgccacccgtctttgtctcagtgtacctcaacagatcctggctagggctgcgttttttacgcgccctgcggttaattcaattctctgagatcctgcagtttctcaacattttgaagacctctaactccattaagctggtaaatctcttgtccatcttcatctcaacctggctcacagccgcgggtttcattcacctggtcgagaactctggagacccgtgggaaaacttccagaacaatcaggcactgacatattgggagtgcgtctacctgctgatggtgacgatgagtaccgtgggctatggggatgtttatgccaaaactaccttgggacgtctctttatggtgttctttattttaggcgggcttgccatgttcgcctcttatgttcctgagatcatcgagctgatcggaaacaggaagaaatacgggggctcttattcagccgtgtccgggcggaaacacatcgtggtgtgcggccacataacgctcgagtctgtgagtaatttcctgaaggacttccttcataaggatcgcgacgatgtgaacgtggagatcgtgttcctccacaacattagtccgaaccttgaattagaggcgctgttcaagaggcattttacccaggtggagttctatcaggggtctgtgttgaatccccacgacttagctcgagtgaagatcgaatccgccgatgcatgtctaatactcgcaaacaagtattgtgcagatcccgacgccgaagatgcttctaatatcatgcgcgtcataagtatcaagaactaccacccgaaaatacgtattataacccaaatgctccagtaccacaataaggctcacctgctgaatataccctcatggaactggaaggagggcgacgacgcaatatgtctcgcggagctcaaactgggatttattgcccaatcgtgtctggcccaaggcctctctaccatgttagccaacttgttctctatgcgctccttcatcaagatcgaggaagacacctggcagaaatactaccttgagggcgtctccaacgagatgtacacagaatacctcagctccgccttcgtggggctgtccttccctactgtgtgcgagctgtgttttgtgaagctaaagttgctcatgatagcaatcgagtacaagagtgctaatcgcgagtcacgcattctcattaaccctggaaaccatctaaagatccaggagggcacattgggattttttatagcctctgatgccaaagaagtaaaaagagctttcttctactgtaaagcctgtcacgacgatatcaccgaccccaaaaggattaaaaagtgcggatgcaaaagaccaaagatgagtatatacaagaggatgcggagagcatgctgcttcgattgtgggagaagcgagagggactgcagttgtatgtcaggcagagttcgagggaatgtggacacccttgaacgggcctttccactaagctccgtctccgtgaacgactgttctacaagcttcagagcattcgaagacgaacaaccttccacactcagccccaagaaaaagcagcggaacggcggtatgcggaattctcccaacacaagccctaaactaatgcgacacgatcctctgttgatcccaggcaacgaccagatcgataatatggactccaatgttaagaaatatgacagtacaggcatgtttcactggtgtgcaccaaaagagatagagaaggtgattctgactcggtcagaggccgccatgacagtgctcagcggccatgtagtggtttgtatctttggagatgtgtcatcagctctgatcggtctaaggaacctagtgatgccgctgagggctagcaacttccactatcacgaactgaaacacattgtgtttgtcggaagtattgagtatttgaagcgcgagtgggagaccctgcacaactttcccaaggtcagtattctgcctggcactcctctcagcagagcagacctcagagcggtgaacatcaacctctgcgatatgtgcgtcatcctttctgccaaccaaaacaatattgatgacacctctctccaggataaagaatgcatactggcatctctaaacataaagtctatgcagttcgacgacagtattggggtcctccaggctaacagccagggcttcaccccccccggtatggacaggagttccccagataactctccagtgcatggaatgttacgtcaaccaagcattaccaccggggttaatattcctatcataacagagctcgtgaacgacaccaacgtccagtttttggatcaggacgacgacgatgatccagataccgagttgtacctaacccagcctttcgcgtgtggcactgccttcgctgtctcggttcttgacagcctcatgtctgccacctattttaatgacaacattctgacactcattagaactcttgtcactggaggcgcaacccccgagctggaggctctgatagcggaagagaacgctctccgaggaggatattccactccacagacattagctaatcgggataggtgccgcgtcgcccaactggcgctccttgatgggccctttgctgatcttggggatggaggatgttacggagatctgttttgtaaggcgctgaaaacctacaacatgttatgtttcggcatctacagacttcgtgacgcacatttgtctaccccctcacagtgcacaaaacgctacgtaataaccaatccaccctacgaatttgaactggtgcccactgacctgattttttgcctgatgcagttcgaccacaatgccggccaatctcgcgctagcctgagccatagcagccacagctctcagtcctcctctaagaaatcttctagtgtgcacagcatcccatctacggccaaccgccagaatagacctaaatctagggagagcagggacaaacagaagaaggaaatggtgtaccggtag

SEQ ID NO: 200296 - DNA, 576 bp, synthetic construct
  misc_feature 1..576: note = Description of Artificial Sequence: Synthetic coding sequence
  source 1..576: mol_type = other DNA
atggtgaagaagctggtgatggcccagaagcggggcgagacccgggcgttatgccttggggttactatggtggtgtgcgccgtgataacatactacatccttgtgaccaccgtgctgcccctttatcaaaagtcagtctggactcaggagtctaaatgtcacctgatcgaaacgaacattcgcgaccaggaagagttgaaagggaagaaggttccgcaatacccgtgtctctgggtgaatgtgagtgcggccggacgctgggcagtgttgtatcatacagaggacactcgtgatcaaaatcagcaatgctcctatatacccggcagtgtggacaactaccaaactgctcgggcagacgtggagaaggttcgcgccaagttccaggagcagcaggtcttttactgttttagtgctcctcgcggtaatgagacatccgtattgttccaaagactgtacggaccgcaagcactcctattttccctgttctggccaactttccttctcactggcggcttactcattattgctatggtgaaatctaaccagtacctgtctatcctcgccgcacaaaagtag

SEQ ID NO: 200297 - DNA, 393 bp, synthetic construct
  misc_feature 1..393: note = Description of Artificial Sequence: Synthetic coding sequence
  source 1..393: mol_type = other DNA
atggtgaagaagctggtgatggcccagaagcggggcgagacccgggctttgtgcctgggtgtgaccatggtggtatgtgcggtgatcacctattacattttagtgactacagtcctgcccctgtaccagaagagcgtttggactcaagaatccaagtgtcacctcatcgagacaaacattcgcgaccaggaggagctgaagggtaagaaggtgccacagtatccgtgcctctgggttaatgttagcgcagccgggcgatgggctgtcctctaccacacagaagatactagagaccaaaatcagcaggttttgaactggagggatggtgatacaagcttgtatccatgccaagtctgtgagccggtgcccaattgtccgtgtcctcgggggtag

SEQ ID NO: 200298 - DNA, 633 bp, synthetic construct
  misc_feature 1..633: note = Description of Artificial Sequence: Synthetic coding sequence
  source 1..633: mol_type = other DNA
atggccaagctgcgggtggcctacgagtacaccgaggccgaggacaaatctattaggctcgggctgtttttgatcatcagcggagttgttagcctgttcatctttggcttttgctggttgtcccctgccttacaggatctccaagccaccgaagcaaactgtaccgtgctctcggtccaacagataggagaggtattcgagtgcacgttcacttgcggcgctgactgtcgcggaacatcacagtacccatgcgtccaggtgtacgtgaacaattccgaaagcaattcccgggccctcttacatagcgatgagcaccaattgctgaccaacccaaaatgctcttatatacctccctgcaaacgggaaaaccagaaaaacctggagagcgttatgaactggcagcagtactggaaagatgagattggctcccagccattcacctgctacttcaaccagcaccagcgcccagacgacgtgctgcttcatcgtacccacgatgaaatagtcctgctacactgtttcctgtggcctctggtgacctttgtggtgggtgtcctgatcgtggtactgacaatttgtgctaaaagcctggccgtgaaggctgaggctatgaagaaaagaaaattctcatag

SEQ ID NO: 200299 - DNA, 2259 bp, synthetic construct
  misc_feature 1..2259: note = Description of Artificial Sequence: Synthetic coding sequence
  source 1..2259: mol_type = other DNA
atgaagcccgccgagcacgccaccatgttcctgatcgtgctgggctgtcttatcctcgctgtgttgactacattcaaggaatatgaaaccgtatccggagattggctgctccttctggagacctttgccatctttatctttggtgccgagtttgccctcaggatttgggctgctggctgttgttgccgctacaaggggtggcggggccgtctgaaatttgcaaggaaacctctgtgcatgctggacatcttcgttctgatcgcgtcagtcccagtggtggccgtgggcaatcagggtaacgtccttgccacttccctccgcagtcttcggttccttcagatattgcgcatgctcaggatggacaggcggggcgggacttggaagctgttgggaagcgccatctgtgcgcattccaaggagctaattactgcatggtacattgggttcttaaccctcatactttcgagctttttggtgtatttggtcgagaaagacgtccctgaggtcgacgcccagggcgaagagatgaaagaagagttcgaaacttacgccgacgctctgtggtggggcctgataactttagctacaatcgggtacggagataagacacccaaaacctgggaagggcgcttaatcgcggctaccttttcgctgattggagtctccttttttgcactgcccgccgggattctgggatccgggctcgcattaaaggtccaggagcagcaccggcaaaaacatttcgaaaaacgccgaaagcccgccgctgaactgatccaagcggcatggcgctattacgcaactaatccgaatcggatcgacctggtcgccacctggagattttacgaatccgtcgtgagcttccccttcttccgcaaagagcagcttgaagcagcgagcagccagaaactcgggctactggacagagtccggctaagtaaccctcggggatcaaataccaaggggaagctatttacacccttgaatgtagatgctatcgaagaaagcccatcaaaggagccgaagcccgtcgggttgaacaacaaggaacggtttagaaccgcattcagaatgaaggcgtacgccttctggcagagttctgaggacgccggcaccggcgatccgatggccgaggataggggatacggaaatgatttcccaatcgaggatatgattcccaccttgaaggccgcaataagagccgtcagaatactgcagttccgactctataagaagaaatttaaagaaactttgaggccatacgacgtgaaggatgtgatagaacagtacagcgccggccatctggatatgctgtcacgtatcaaatatctgcaaacacgcattgacatgatatttacacccggtcctccatcaacccctaagcataagaaatcccagaaaggttcggccttcacctttccctctcaacagagccctagaaacgaaccctacgtggcccgcccctctacctccgaaatcgaggaccagtctatgatgggcaagttcgtcaaagtggagaggcaggtgcaggatatggggaagaagcttgactttctggtcgacatgcatatgcaacacatggagaggctccaggtgcaggtgacagagtactaccccacaaaagggacctcgtctccagctgaggctgaaaaaaaagaggataaccggtatagcgacctgaaaactattatctgtaattattctgaaaccgggccacccgagccaccatacagcttccatcaggtgaccatcgataaggtttccccctacggattcttcgctcatgatccggtgaacttgcctcgtgggggaccatctagcgggaaagttcaagcaacccctccctctagcgcgacaacatacgtggagcgccctacggtcttacccatacttaccctgttagactcccgagtgtcatgtcacagtcaagccgacctgcaggggccatattccgaccgcattagcccacggcaacggagaagtatcaccagagactcagatacccccctgtccttaatgagcgtaaaccacgaggaactggaacggtcaccatctggattcagtattagtcaagatcgggacgactacgtattcggtcctaacggtggatctagttggatgcgggagaaaaggtacttggcggagggggaaacggatacagatactgaccccttcactccttccggaagcatgcctctctccagcactggcgatggaatcagcgatagcgtgtggactccaagtaacaaacccatttag

SEQ ID NO: 200300 - DNA, 1434 bp, synthetic construct
  misc_feature 1..1434: note = Description of Artificial Sequence: Synthetic coding sequence
  source 1..1434: mol_type = other DNA
atgaccggccagagcctgtgggacgtgagcgaggccaacgtggaggatggagaaatccgaattaatgtgggcggctttaaaagaagattacggtcccacacgctcctgaggtttcctgagacccggcttggcaggctcctcctctgccattctagagaggccatattagagctgtgtgatgactatgatgacgtccagcgtgaattttactttgatagaaatccggagttgttcccttatgtcctgcacttctaccatactggcaagcttcatgtgatggcggagctctgtgttttttctttttcccaggagatagaatactggggaataaatgagttctttattgattcttgctgctcgtacagctatcacgggcgcaaggtggaaccagagcaagaaaagtgggacgagcagtccgaccaggaatctaccacttccagcttcgacgaaatcctcgctttctataatgacgctagtaaatttgatggccagcccttgggaaacttccgtcggcaactgtggctcgctctagataatcccgggtactcagtcctgagtcgcgtgttttccatattgtccattctggttgtaatgggtagcattatcaccatgtgtcttaacagtctacctgattttcagattccagactctcagggcaaccctggagaggaccctcgttttgagatagtggagcattttgggatcgcatggtttacctttgagctggtagcccggttcgcggtcgcgcccgattttctcaagtttttcaagaatgccttgaacttgatcgatttgatgagcattgtccccttttatatcacactggtagtcaatttagttgtggaaagcactcctactctggctaacttgggacgggtggcacaagttcttcggctgatgaggatctttaggattctgaagctggctcggcacagcaccggactgcggagtctgggcgccaccctcaaatatagctacaaggaggttgggctgcttctgctgtacctgtcggtgggcataagcatattttccgtcgtggcctataccattgagaaggaggagaacgagggcctggcaactattcccgcctgttggtggtgggcgacagtgtcaatgaccaccgtgggctatggagacgtcgtcccagggacaactgcaggtaagctcacagcctccgcttgtatcttagcagggattttggttgtggtgcttcctattactcttatttttaataagttttctcatttttatcggaggcagaagcaattagaatccgccatgcggagttgtgacttcggggatggaatgaaagaagtgcctagcgttaacttgcgtgattattacgcccataaggtgaaaagcttgatggcttcgctgactaatatgagtcgaagttctccatctgagctgtcactcaatgacagcctcagatag

SEQ ID NO: 200301 - DNA, 1434 bp, synthetic construct
  misc_feature 1..1434: note = Description of Artificial Sequence: Synthetic coding sequence
  source 1..1434: mol_type = other DNA
atgaccggccagagcctgtgggacgtgagcgaggccaacgtggaggatggggagatccggattaatgttggaggcttcaagcgtagactcagatcacataccctgctgagatttcctgagaccaggctcggaaggctgctactatgccactcgcgcgaagctattctggaactgtgcgacgactacgacgacgtgcaaagagagttttattttgatcggaaccctgaactcttcccgtacgtgctgcacttctatcataccggaaaactccacgtcatggcggagctgtgtgtgttttcatttagtcaggaaatcgagtattggggcattaacgagttttttatcgactcctgttgtagctattcatatcacggccgcaaggtggaaccagaacaggaaaagtgggatgaacaatcagaccaagaatccacaacatccagcttcgatgagatcttggccttctacaatgatgctagcaagtttgacggccagccactcggcaacttcaggcgtcaactgtggctcgccctggacaatcctggttacagcgtgctaagccgggtgtttagcatcctatccatcttagttgtgatggggagcattattacaatgtgcctgaactcgctgccggacttccagattcctgactcccagggaaacccgggtgaggacccccgatttgagatcgtcgagcacttcgggatcgcatggtttacatttgagctggtggctcggttcgcagtcgccccggatttcttgaagttctttaaaaacgccctcaacctgatagatttgatgagcatcgtcccattctacattacactggtagtgaacctggtggtcgagagtacacccacacttgcaaatctgggtagagtggcgcaagtgcttcgtcttatgcggatcttcaggattttgaaattggcaaggcactcgactggccttcggagcctgggcgccactctcaagtatagctacaaggaggtgggtctgctccttctctacctgagcgtgggcatatctatattcagtgtcgtggcgtacacaattgagaaagaagagaatgaggggcttgctacaatccccgcgtgttggtggtgggctacagtgtcaatgaccaccgtcggctatggtgatgtggttcccggcaccactgccggaaaactgactgctagcgcatgtatactcgcaggtattctcgtcgtggtactgcctatcaccctgatcttcaacaagttctcccacttctatcgtcggcagaagcagctcgagagcgccatgcggagctgcgatttcggagatggaatgaaggaggtgccttccgtaaacttgcgcgactactacgcccacaaagtgaagagccttatggcttctctgacaaacatgagtagaagcagccccagtgagctctcattgaacgactccctgaggtag

SEQ ID NO: 200302 - DNA, 1476 bp, synthetic construct
  misc_feature 1..1476: note = Description of Artificial Sequence: Synthetic coding sequence
  source 1..1476: mol_type = other DNA
atggtgttcggcgagttcttccaccggcccggccaggacgaggagttggtgaacttaaatgtaggcgggtttaaacagtctgtcgatcagagtactctgctaaggtttccccatactcgtttgggcaagcttctgacatgccattccgaagaagccattttggagctctgcgacgactactctgtcgcagacaaagaatattatttcgaccgcaacccttccttgtttcgctatgttctaaatttctactacacgggcaagctgcacgtcatggaagaactatgcgtgttcagtttttgccaggaaattgaatattggggcatcaacgaactgttcatcgactcatgctgtagcaataggtaccaagaacgtaaggaggagaaccacgagaaggactgggatcagaaaagtcacgacgtctctaccgactcctctttcgaggagagttcccttttcgaaaaggagttggagaagttcgataccctccgatttggccaactgcggaagaaaatttggattaggatggaaaaccccgcctattgtttgagtgccaagctgatcgcaatatcaagcctgtctgtagttcttgcctcaatcgttgccatgtgcgttcactccatgtccgaattccagaatgaagatggggaggtggacgaccccgtgctggaaggggtggagatcgcctgcatcgcctggtttacaggagagctggccgttcggttagccgcagctccctgccaaaagaaattttggaaaaacccactgaacatcatcgacttcgtgtcaataattcccttttacgccacacttgccgtggatacaaaagaggaagagagcgaggacattgaaaatatggggaaagtcgtgcagatacttcggctgatgcgcatctttagaattcttaagcttgctcggcacagcgttggcttaaggtctttgggcgcaaccctgcgccatagctaccatgaggtcggactcctcttgttgttccttagcgtggggatttccatcttcagcgttctcatttactccgtagagaaggacgaccacacgtcttctcttacttccattcctatctgttggtggtgggccaccatttccatgactactgtggggtacggtgacacgcatcctgtgactctggccggtaaactaatcgcatccacttgcatcatttgcggtatactggtggtagcgctgcctatcactatcatctttaataagttttccaaatattaccaaaagcaaaaagatatcgacgtggatcagtgctctgaggatgctcctgagaagtgtcacgaactcccctactttaacattagggatatttatgcccagcggatgcacactttcatcacctctttgagcagtgtgggaattgtcgtgagcgatcccgactctactgacgcgagctccattgaagataacgaggatatctgcaataccacctcactggagaactgtacagccaagtag

SEQ ID NO: 200303 - DNA, 1476 bp, synthetic construct
  misc_feature 1..1476: note = Description of Artificial Sequence: Synthetic coding sequence
  source 1..1476: mol_type = other DNA
atggtgttcggcgagttcttccaccggcccggccaggacgaggagctggtaaacctcaacgtcggcggcttcaagcaatctgtggaccaaagcactctcctaaggttccctcacacccgactgggtaagctgctgacgtgtcatagtgaagaggccattcttgaactgtgtgacgattactccgtggcagataaggagtattatttcgatagaaacccgtctctgtttaggtatgtactaaatttctattacacagggaagctgcacgtcatggaggaactgtgtgtgttttcgttctgccaggagattgaatactggggtattaatgaattattcatcgattcatgctgcagtaacagataccaggaacgaaaagaagaaaaccatgaaaaggattgggaccagaagtcacacgacgtgtctactgactcttcattcgaggaatcttctctttttgagaaagagttggagaaattcgacacacttcgcttcggacaattacggaaaaagatttggataaggatggagaaccctgcctactgcctgagtgcgaagttgatcgctatctcatccctgtccgtggtgcttgcctccattgttgccatgtgtgtgcacagcatgagcgaattccagaacgaggacggagaggtggacgaccccgtcctggagggggttgagattgcctgtattgcgtggttcacaggagagcttgcagtacgcctcgctgccgcaccttgccagaagaaattttggaaaaatccgctaaatatcatcgactttgtttccattatccccttctatgcgacattggccgtagatacaaaagaagaagagtcggaggatattgagaatatgggaaaggtcgtacagatcttgcgcctcatgaggatctttcggatcttaaaactcgcacgccattccgtgggactccggtctctcggagcaaccctcaggcattcctaccacgaggtggggcttctcctgctgttcctgtcggtggggatctccatcttttcagtcctgatatatagcgtagagaaggacgaccacacctcttctttgactagtatcccaatctgttggtggtgggcaaccattagcatgacgaccgtgggctacggcgacactcatccagtgacacttgcagggaagcttatcgccagcacctgtatcatctgcggcatccttgtggtagccttgcctattaccattatatttaacaaattctcgaagtactatcagaagcaaaaggatattgatgtggatcagtgcagtgaggacgcgcccgagaagtgccacgaattaccctattttaacatcagagatatctacgctcagagaatgcatacatttatcacctccctgtcatcagttggaatcgttgtctctgaccccgatagcacagacgccagcagcattgaggataatgaggacatctgtaataccacatccttggaaaattgcactgccaaatag

SEQ ID NO: 200304 - DNA, 225 bp, synthetic construct
  misc_feature 1..225: note = Description of Artificial Sequence: Synthetic coding sequence
  source 1..225: mol_type = other DNA
atggtgttcggcgagttcttccaccggcccggccaggacgaggagcttgttaacctgaacgtgggcggattcaagcagtcagttgaccagagtactctcctccgcttcccacacaccaggctgggcaaactcttgacatgccattccgaggaggcaatactcgagttatgcgacgattactcagtggccgacaaggagtattatttcgatcgaaacccctcatag

SEQ ID NO: 200305 - DNA, 390 bp, synthetic construct
  misc_feature 1..390: note = Description of Artificial Sequence: Synthetic coding sequence
  source 1..390: mol_type = other DNA
atgatcctgagcaacaccaccgccgtgacccccttcctgaccaagctctggcaggaaaccgtgcagcaaggcggaaacatgagcggcctggcccgccgcagcccaaggagctctgacggaaaactggaagcactctacgtactgatggttttgggatttttcggatttttcaccctggggatcatgctgagctacatcagatccaaaaagctggagcactcaaatgatcctttcaatgtgtacattgagagcgacgcctggcaggaaaaagataaggcatacgtgcaggctcgggtcctggaatcctatcgctcatgttatgtggtagaaaaccacttggccattgaacagcccaatactcacttgcccgaaaccaagcccagcccctag

SEQ ID NO: 200306 - DNA, 390 bp, synthetic construct
  misc_feature 1..390: note = Description of Artificial Sequence: Synthetic coding sequence
  source 1..390: mol_type = other DNA
atgatcctgagcaacaccaccgccgtgacccccttcctgaccaagttgtggcaagagactgtacaacaagggggtaacatgagcggcctcgcccgtcgctctccaagatccagcgatgggaagctcgaggccctgtacgtactgatggtgcttggattctttggatttttcactctgggcataatgctgtcatacatcaggtctaagaagctggagcacagcaatgaccctttcaacgtttacattgagtccgacgcatggcaggagaaggacaaggcctatgtgcaggctcgggtgctggaatcttacaggtcttgttacgtggtcgagaatcacctggcaattgaacagccgaatacacacttacccgagacaaaaccctccccttag

SEQ ID NO: 200307 - DNA, 390 bp, synthetic construct
  misc_feature 1..390: note = Description of Artificial Sequence: Synthetic coding sequence
  source 1..390: mol_type = other DNA
atgatcctgagcaacaccaccgccgtgacccccttcctgaccaagctctggcaggaaactgttcagcagggagggaatatgtcgggacttgcgcgacggtcaccccggagctccgatgggaaactggaggcactgtacgtgctcatggtcctaggctttttcggcttctttactctgggaattatgctctcttacatccggtctaagaagttagagcactctaacgacccatttaatgtttatatcgagagcgacgcatggcaggagaaggataaggcttatgttcaagcccgcgtcctggagagttatagaagctgttacgtcgtagaaaatcacctcgcaatcgagcaacctaacacccacctgcctgagacgaaaccgagcccgtag

SEQ ID NO: 200308 - DNA, 390 bp, synthetic construct
  misc_feature 1..390: note = Description of Artificial Sequence: Synthetic coding sequence
  source 1..390: mol_type = other DNA
atgatcctgagcaacaccaccgccgtgacccccttcctgaccaagctatggcaggaaaccgtgcagcagggtgggaacatgtccgggcttgctcggcgcagtccccgctcctcggacggaaaattagaagccctgtacgtgctgatggtgctcgggttctttggatttttcacattgggtattatgctcagctatatcaggagtaagaagctcgagcactcaaatgatccattcaacgtgtacattgaatccgacgcttggcaggagaaggacaaagcctacgtgcaggcccgcgtccttgaaagctacaggagctgttatgtggtcgaaaaccatcttgcgattgaacaacctaatacacacttgcctgaaacgaaaccttctccatag

SEQ ID NO: 200309 - DNA, 390 bp, synthetic construct
  misc_feature 1..390: note = Description of Artificial Sequence: Synthetic coding sequence
  source 1..390: mol_type = other DNA
atgatcctgagcaacaccaccgccgtgacccccttcctgaccaagctgtggcaggagacagtgcagcagggcggtaacatgagtggcctggcgagacggtcccccaggtcctcagatggtaaattagaagcactttatgttttgatggtgctggggttctttggattttttactctcggtattatgttaagttacatcaggtcaaagaagttagagcactcaaatgacccattcaatgtgtatattgagtctgacgcatggcaagaaaaggacaaggcctacgtccaggcccgcgtgctcgagtcttacaggagttgctacgtggtggaaaatcacctggcaatcgagcaacccaacacccacctcccagaaacgaagccgagtccatag

SEQ ID NO: 200310 - DNA, 390 bp, synthetic construct
  misc_feature 1..390: note = Description of Artificial Sequence: Synthetic coding sequence
  source 1..390: mol_type = other DNA
atgatcctgagcaacaccaccgccgtgacccccttcctgaccaagctctggcaggagaccgtgcagcaaggagggaatatgtctggtctcgctagacgctccccaaggtcgagcgatggcaagctcgaggctctgtacgtgctgatggtgcttggcttcttcggttttttcaccctcggcatcatgctctcatatattcggtcgaagaagttagaacactctaacgacccatttaacgtctacattgaatccgatgcctggcaggagaaggataaggcttatgtgcaagcccgcgttctggagtcatatagatcatgttatgtagtggagaaccatttggcaattgaacaaccgaatactcaccttcccgagaccaagccatcgccttag

SEQ ID NO: 200311 - DNA, 372 bp, synthetic construct
  misc_feature 1..372: note = Description of Artificial Sequence: Synthetic coding sequence
  source 1..372: mol_type = other DNA
atgagcaccctgagcaacttcacccagaccctggaggacgtgttccgtaggatcttcatcacttacatggataactggcgacagaacactacagccgaacaggaggcactccaggccaaggtagacgctgagaacttttactatgtcatcttataccttatggttatgattgggatgttttcttttattatcgtggctattctggtgagcaccgtcaaaagcaagcgtcgagaacatagcaatgatccctatcaccagtacatcgtggaggactggcaggagaagtacaagagtcaaatcctgaacctggaggagtctaaggcaacgatccacgagaacataggcgccgccggctttaaaatgtctccttag

SEQ ID NO: 200312 - DNA, 312 bp, synthetic construct
  misc_feature 1..312: note = Description of Artificial Sequence: Synthetic coding sequence
  source 1..312: mol_type = other DNA
atggagaccaccaacggcaccgagacctggtacgagagcctgcacgcagttctgaaggctcttaacgctactctgcattctaatctgctgtgcaggcccggaccaggcctgggcccagacaaccagaccgaagagcggcgagccagcctacccggaagagacgacaatagctatatgtacatcttgtttgtcatgttcctcttcgcagtcacagtaggatcattaattctcggctacacccgctcacggaaggtggataaacggtccgatccttatcacgtgtatatcaagaacagagttagcatgatatag

SEQ ID NO: 200313 - DNA, 312 bp, synthetic construct
  misc_feature 1..312: note = Description of Artificial Sequence: Synthetic coding sequence
  source 1..312: mol_type = other DNA
atggagaccaccaacggcaccgagacctggtacgagagcctgcacgccgtgctgaaggctctcaacgccacgctccattcaaacctgctctgccggcccggcccaggcctgggacctgataatcaaacagaggaacgacgggcatcgctgcctggtagggatgataattcctatatgtatatcctgtttgtcatgttcctgtttgcggtcaccgtggggagcctgattttgggatatacccgtagccggaaagtggataagcgctctgatccttaccacgtatatataaaaaacagagtgagcatgatttag

SEQ ID NO: 200314 - DNA, 39 bp, synthetic construct; identical to SEQ ID NO: 94120
  misc_feature 1..39: note = Description of Artificial Sequence: Synthetic coding sequence
  source 1..39: mol_type = other DNA

SEQ ID NO: 200315 - DNA, 153 bp, synthetic construct
  misc_feature 1..153: note = Description of Artificial Sequence: Synthetic coding sequence
  source 1..153: mol_type = other DNA
atggagaccaccaacggcaccgagacctggtacgagagcctgcacgcggtcctgaaagcgctgaatgccactctccacagcaacctgctttgtcgccccgggcccggcctcgggcctgataatcagacggaagagcgcagggccagtctgtag

SEQ ID NO: 200316 - DNA, 162 bp, synthetic construct
  misc_feature 1..162: note = Description of Artificial Sequence: Synthetic coding sequence
  source 1..162: mol_type = other DNA
atggagaccaccaacggcaccgagacctggtacgagagcctgcacgccgtgttgaaggccctcaatgccacactgcactcaaacctcctctgtaggccaggaccagggctgggacctgataaccagactgaggaaaggcgagccagtttacccgggagatag

SEQ ID NO: 200317 - DNA, 300 bp, synthetic construct
  misc_feature 1..300: note = Description of Artificial Sequence: Synthetic coding sequence
  source 1..300: mol_type = other DNA
atggagaccaccaacggcaccgagacctggtacgagagcctgcacgcggtcctgaaggcgctcaatgcaaccctccacagcaatttattatgccggcccggccccggccttggccccgacaaccagacggaggaaagacgcgcaagcctgcctggcagagacgacaacagctatatgtatattcttttcgtcatgttcctcttcgcagtgaccgtgggtagtttgatcttagggtatactaggagcaggaaagttgataagaggagcgatccttaccacgtgtacattaagaatagatag

SEQ ID NO: 200318 - DNA, 513 bp, synthetic construct
  misc_feature 1..513: note = Description of Artificial Sequence: Synthetic coding sequence
  source 1..513: mol_type = other DNA
atgctgaagatggagcccctgaacagcacccaccccggcaccgccgccagtagttcccccctggagtcacgcgctgcgggcggtggatccggcaacgggaatgagtacttttacattctggtggtgatgtccttttacgggatcttcttgatcggaatcatgctcgggtatatgaagtcaaaacggagggagaagaaatcctcactgctgctcctgtacaaggatgaggaacgcttatggggggaagcaatgaagcctcttccggtcgtttcaggcctccgctcagtgcaagtacctctgatgttaaacatgctgcaggagtcagtcgcccccgctctttcttgcactctgtgtagtatggagggcgattccgttagctcagagagttcaagccccgatgtccacctgactatccaggaagagggggccgatgacgagctggaggagactagtgagacccctctcaacgagtctagcgaaggcagtagcgaaaacatacatcagaattcctag

SEQ ID NO: 200319 - DNA, 2031 bp, synthetic construct
  misc_feature 1..2031: note = Description of Artificial Sequence: Synthetic coding sequence
  source 1..2031: mol_type = other DNA
atggccgccgccagcagccccccccgggccgagcggaagcggtggggttggggtaggcttcccggtgcacgcaggggaagcgcagggttggcaaagaaatgccctttttcgttagaacttgctgagggtggacccgcagggggggcactatatgcgcccattgcccccggcgccccaggacctgctccccctgccagcccggctgcccctgctgcccccccagtagccagcgaccttggcccacgccctcccgtttcacttgatcctcgcgtgagcatttattctacaaggagacctgtgctggcaagaacacacgtccagggtcgcgtgtacaactttcttgagcgccccaccggatggaagtgtttcgtgtaccattttgccgtatttctcatagtgcttgtgtgcctgatctttagtgtgctctctaccattgaacagtatgctgctcttgccacgggcacgctgttctggatggagattgtgcttgttgtgttttttggaacagaatacgtggtccgcttatggtccgcaggctgtcggagtaagtatgtggggctctgggggagactacgctttgccagaaagcccatttcaataatcgacctgatcgtggtcgtggctagtatggtagttctatgcgtcggctcaaaagggcaagtatttgccacttctgcaattagaggcattcggttcctgcagattctccggatgctgcacgtcgatcgtcaagggggaacttggcgcctcctgggtagcgtggtctttatccaccgacaggaactgatcacaaccctctacatcggcttcctcgggctgatcttttcaagttacttcgtgtacttagccgaaaaggatgccgttaacgagagtggccgggtagagttcggatcatacgcagatgcactatggtggggagttgtaacggtcaccactatcggatatggtgataaggtcccccagacctgggtggggaagaccatcgcctcatgcttctccgtgttcgcaatttcgttctttgctctgcccgctgggatcttaggttccggttttgctctgaaggtccagcagaagcagcgtcagaaacacttcaataggcagattccagcagctgcatccttgatccagactgcttggcgctgctacgctgctgagaaccctgactcgagcacttggaaaatttatatacgcaaggctcccagatctcatacactgttgtcaccctcccccaaacctaagaagtctgtcgtggtgaaaaagaagaaattcaaactggacaaggacaacggcgtcacgccaggtgagaaaatgctgacagtgcctcatatcacatgcgacccccctgaggaacgtaggctagaccatttttctgtggatggttacgacagcagcgttcggaagtctcccaccctcctcgaagtatcaatgccacacttcatgcggacgaactcattcgcagaggatcttgacctggaaggagagaccctgctcacacctattactcatatctctcaactccgcgaacaccatagggctacaatcaaagtcattaggcgcatgcaatatttcgtggccaagaagaaattccagcaagctcgcaaaccctatgatgtgcgggatgtgattgagcagtactctcagggtcacttaaatctgatggttcgcatcaaggagttacagcgccgcttagatcaatcaatcggaaagccttcactgttcatctccgtctccgaaaagagcaaggatcggggctcaaatacaatcggagcccgactgaaccgggtggaagataaggtgacccaactcgaccagagactggctctcatcacagatatgctccatcagctcctctcactccatggcggttcgacgcccggctcgggtggccctcccagagaagggggagcccacatcactcaaccatgcggaagtggcgggagcgtggaccctgaactgttcctgcccagtaataccttaccaacgtatgaacagttgaccgtaccaagacggggccccgacgaagggagttag

SEQ ID NO: 200320 - DNA, 1650 bp, synthetic construct
  misc_feature 1..1650: note = Description of Artificial Sequence: Synthetic coding sequence
  source 1..1650: mol_type = other DNA
atggacttcctgatcgtgctggtgtgcctgatcttcagcgtgctgagcacgattgagcaatatgccgccctggcaacagggaccttgttttggatggaaattgtgctagtggtctttttcggcaccgagtacgtagttaggctctggagtgcgggatgcagatccaagtacgttggtttgtgggggagactcaggtttgccaggaagcctatctccatcatagatttaatcgtggttgtggcaagcatggtagtgctgtgtgtaggttctaaggggcaagtgtttgcaacttctgccatcagaggcatacggtttttacagatcctgcgtatgcttcacgtggatcgtcaggggggaacgtggcggctgctagggtcggttgtgttcatccatagacaggagctgattaccaccctttacatcggctttctcgggctgatcttttccagctattttgtctaccttgcagagaaggatgcagtaaatgaaagcggccgggttgagtttggtagctatgccgacgctctctggtggggggtcgttaccgttactactatcgggtatggggataaggtcccacagacatgggtaggcaagaccattgccagctgcttctctgtgttcgccatatcatttttcgcattacctgccggcattctggggtctggattcgccctgaaggtccagcagaagcagagacagaaacacttcaataggcaaatcccggccgccgcctcactgattcagactgcatggcgttgctatgccgcggaaaaccctgattccagcacttggaagatctacatccgcaaggccccacggtctcacacgctcctgtcaccaagccctaagcctaaaaagtccgtcgtggtgaagaaaaagaagttcaagttggataaggataatggtgttactccaggagaaaagatgctcaccgtgccacatattacatgtgatcctcccgaggagcgacggttagatcacttcagtgtggatggatacgatagctcagtgcgcaaaagcccgacattactcgaagtatccatgcctcacttcatgcggactaactccttcgcagaagacttggacctggagggagaaacactgctgaccccaattactcacatctctcagctgcgcgagcaccacagggcaactataaaagtgattcgccgcatgcagtactttgtggctaaaaagaagttccagcaggccagaaagccctatgatgttagggacgtcattgaacaatactcacagggacatctgaatctcatggttcgtatcaaagagctgcagcgtcgcttggaccagagcataggaaaaccgtctctctttatctccgtgtccgaaaagtctaaggatcgaggctccaacacaattggggcccggctaaacagagtcgaagataaagtgacccagctggatcagagactcgcccttatcacggatatgctgcaccagttgctatcactgcatggcgggtctacaccaggctccggcggccctcccagggagggaggcgcgcatatcactcagccctgcggatcaggggggtccgtggaccccgaactgtttctgccctccaacacattgcctacatacgagcagcttactgtgccacgcaggggaccggatgaaggcagttag

SEQ ID NO: 200321 - DNA, 1182 bp, synthetic construct
  misc_feature 1..1182: note = Description of Artificial Sequence: Synthetic coding sequence
  source 1..1182: mol_type = other DNA
atggtgcagaagagccggaacggcggcgtgtaccccggccccagcggggagaagaagctgaaggtgggattcgttgggttagaccctggagctcccgatagtacacgagatggcgctttgctcattgccgggtctgaggctccaaaaagaggcagtatcctgagcaaaccaagggccggcggtgccggggcgggcaagccacctaaacgtaatgcgttttacaggaagttacagaatttcctgtacaacgtgctggagaggccccgaggctgggcttttatttaccacgcctacgtttttctgctggttttctcgtgccttgtgctctcggtgttctctaccataaaagagtacgaaaagtcctctgagggggccctgtacatcctggaaatcgttacaattgttgtcttcggggtcgaatacttcgttcgcatttgggcagccggatgctgctgcaggtatcgaggctggaggggtcgcctgaaatttgcacgcaagcccttttgcgtgattgatattatggtgttaatagctagtattgccgtgctggcagctgggtcccagggcaatgtttttgctacatctgctcttcgcagcttgaggtttttgcagatcctgcggatgatccgcatggacagacgaggcggtacctggaagcttctcgggtccgtggtgtatgctcatagcaaggagctggtgaccgcatggtacattggcttcctctgcctaatcctcgcgagctttttagtttatcttgccgaaaagggggaaaacgatcattttgacacctatgcagacgcactctggtgggggctgatcacactcaccactatcggctatggcgacaagtacccacagacctggaatggtcgcctgctcgctgcaacgttcactctgattggcgtttcattcttcgccctgccagcagggatcctcggctcaggattcgcactaaaggttcaggagcagcacagacaaaagcacttcgagaaacgtcgcaaccctgccgctggccttatccagagtgcctggagattctacgctactaacctttccagaaccgatctccacagtacatggcagtactacgagcgcaccgtaacggtacccatgtacaggtaccggcgcagggctcctgccacaaagcaacttttccatttcctcttttccatctgtagttag

SEQ ID NO: 200322 - DNA, 2607 bp, synthetic construct
  misc_feature 1..2607: note = Description of Artificial Sequence: Synthetic coding sequence
  source 1..2607: mol_type = other DNA
atggtgcagaagagccggaacggcggcgtgtaccccggccccagcggtgaaaaaaagctaaaggttggattcgtgggcctggacccaggcgctccagattcaactagagacggcgccctgctgattgccgggtctgaagcccctaagaggggatcaatcctgagtaagccacgggccgggggcgcaggcgccgggaaacccccgaagcgtaatgcattttatcgcaaacttcagaatttcttatataacgtactggagcgccctaggggctgggccttcatctaccacgcttacgtcttcctcctggttttttcctgtctggtgctgtccgtcttttccactatcaaggagtacgagaaatcctctgaaggcgcactgtacatcctggagatagtgacgatcgtggtctttggcgtagagtactttgtgcgcatctgggccgcggggtgctgctgtagataccggggttggcgaggacgcctgaagtttgcccgtaagcctttctgtgtgatagacataatggttctcatcgccagcatcgctgtcctcgcagccggatctcaggggaatgtgttcgcgacctccgccttgcgcagtctccggttcctccagattctgcgaatgatccggatggaccggcggggtggtacatggaaactgcttgggagcgtagtttatgctcattcaaaggaacttgttacagcgtggtacatcgggtttctgtgcctgatcctggcttcttttctggtttatctggcagagaaaggggaaaatgaccattttgatacgtacgctgacgctctgtggtggggactgatcactctgaccactataggctacggggacaaataccctcaaacctggaacggccgtctgctggctgctacgtttaccctgattggcgtgtcattcttcgcactgcctgcagggatactgggctcggggttcgcactaaaagtacaggagcagcacagacaaaagcatttcgagaagcggcggaaccccgccgccggcctaattcaatctgcctggcgcttctacgcaaccaatctcagtcgaacagacctgcactcaacatggcaatactacgaacggactgtgacggttccgatgtaccgccttattcctcctctgaatcagctcgagctactgagaaacttgaaatctaaaagcggcctcgcattccggaaagaccccccccctgagccttctcctagcccacgaggcgttgctgcaaagggcaagggcagcccgcaagcccagacagtgaggaggtctccctctgcagatcagtccctggaggattccccctccaaagtgcctaagtcctggagctttggtgacagatcccgggccaggcaggctttccgcatcaagggagccgcgtccaggcaaaactccgaggaggccagcctccccggagaggatatagtcgatgataaatcctgcccatgtgaatttgtcaccgaggacctgactcccgggctgaaagtgagcataagggccgtgtgtgttatgcgctttctggtgtcaaagcggaagttcaaagagtccctcagaccgtacgatgtgatggacgtgatagagcaatactccgccgggcacctggatatgctctcaaggatcaaaagcctgcaatccaggatcgatatgatagtggggccgccccccccctctacgccacggcataaaaagtatcctaccaaaggacccactgctcccccacgggaatctccacagtattcccctcgagttgatcagattgtcggccggggcccagcgattacggataaggaccgaaccaagggccctgccgaagctgagttacccgaggacccctccatgatggggaggctcggcaaagtggagaaacaggtcctgagcatggagaagaagcttgattttctcgtgaacatttacatgcagcggatgggcattccaccaaccgagaccgaagcatacttcggcgcgaaggaacccgagcctgctcctccataccatagccctgaagacagcagagaacacgttgatcgccatggctgtatcgtgaaaattgtgagatcaagtagcagtaccgggcagaaaaattttagtgcccctcctgctgctccacctgtgcaatgtcctccttccacatcttggcagcctcagtctcaccctcgtcagggtcatggaaccagccccgtcggagaccacggtagcctcgtccgcatccctcccccacccgctcatgagaggagcctgtctgcctacggagggggcaacagagcttccatggagttccttagacaggaggataccccaggttgtcgtccaccagagggcaacttgcgcgattctgacacctccatctctattccaagtgtcgatcatgaggaacttgagagatccttttctggcttttccatttcgcagtctaaagagaatcttgacgcactgaattcttgttatgccgctgtggcgccatgtgctaaggtgcgcccttatatcgctgaaggggaaagtgacaccgactccgacctttgtacaccatgcggtcccccacctcggtcagcaaccggggaaggcccttttggcgatgtgggttgggccggacctcgaaaatag

SEQ ID NO: 200323 - DNA, 2643 bp, synthetic construct
  misc_feature 1..2643: note = Description of Artificial Sequence: Synthetic coding sequence
  source 1..2643: mol_type = other DNA
atggtgcagaagagccggaacggcggcgtgtaccccggccccagcggagaaaagaaattaaaggtcggtttcgtgggcctggaccctggagcacccgactcaactagggacggcgccctccttatcgctggatccgaggcacccaaacgaggctcaattcttagtaagcctcgagcggggggagccggcgcaggaaagcccccaaaacggaatgcattttatcgaaagctgcagaactttttatacaacgtcctggagcgtccccggggttgggcgttcatttatcacgcctacgtttttctgctagtgttttcatgcctggtgctgagtgtgttctctactattaaggagtacgaaaagtccagcgaaggcgccttatacatattggagattgtgacaatagtggttttcggcgttgagtacttcgtccgcatctgggcagctggttgttgttgtagataccggggttggcgcgggcgcttgaaatttgcacgaaaacctttctgtgtcattgacattatggtgctcatcgcttcaatcgctgtgctggccgccggcagccaaggaaatgtttttgccacgagtgctctgcgatcactccggtttctccagatccttaggatgattagaatggatcggaggggcggaacctggaagttgttgggctccgtagtctacgctcatagcaaggaacttgtcaccgcctggtatatcggcttcttgtgtttaatcctggcctcgttcttggtttacttagcggagaagggggaaaacgaccacttcgacacgtatgcagacgccctgtggtggggcctgatcactttgacaactatcgggtatggggacaaatatccccagacttggaatggccggctgttggccgctacgtttactctaatcggcgtgtcattcttcgcactgcccgcaggcatactaggatccggatttgccctaaaagttcaggagcagcaccgccagaaacatttcgaaaagaggcgtaatcctgccgcgggtttaattcaaagtgcctggcggttctatgctactaatctgtctagaacagacttacatagtacatggcagtactacgaacgcaccgtaacagtgccaatgtaccgattgataccaccattgaaccaactggagttgcttcggaacttgaagagcaaatcagggctcgccttccgcaaagacccccctcctgaaccctccccgtcccagaaggtgagcctgaaggatcgggttttctctagtccacggggcgttgccgctaaaggcaaagggagcccccaagcacaaaccgttaggcgctccccctcagccgatcagtctctcgaagatagcccgtccaaagtccctaagtcatggtcctttggggataggtcaagagcaaggcaggcgtttcgaattaagggggctgcctcccggcagaattctgaagaagcatcactgccaggtgaggatattgtggatgataaatcgtgtccttgtgagttcgtgacagaagatttaacaccgggacttaaagtgtctatcagagctgtatgcgtcatgagattccttgtgagcaagcggaagttcaaggagtccttgaggccatatgatgtgatggacgtgatcgaacagtactccgctgggcacctggatatgctgtctagaattaagtcacttcagactggcattgacatgattgtggggccccccccaccttcaaccccccgccataagaagtatccaacgaagggcccaactgccccacctagggagtccccacagtactctcctcgggttgatcagattgtgggacggggccccgccatcaccgacaaagatcgcaccaagggtccagcggaggccgagcttcccgaggatccatctatgatggggagactaggcaaggtcgagaagcaagttctctccatggaaaagaagctggacttcctggtaaatatatacatgcagcgcatgggtattccgcccacggagaccgaagcctatttcggcgcaaaggagcctgaaccagcccccccatatcattccccagaagacagtcgtgagcatgtggaccgccatggctgtatcgtgaaaattgtgaggagctctagctccaccggccagaaaaatttttccgctcctcctgcggccccacccgtccagtgcccgccctcaacttcatggcagccacagtcacatccccgacagggccacggtacctccccagtgggcgaccacgggtcactcgtgagaatcccccccccacctgcacacgagaggagcctctccgcatatgggggcggaaaccgagcttcaatggaatttcttcgacaggaggacacaccagggtgcaggcccccggagggaaatctgagagatagcgatacgagcataagcataccctcagttgatcatgaagaactggagaggtccttttccgggttctctattagccaaagcaaggaaaatttggacgctctgaactcttgttacgctgctgtggctccctgcgcaaaagtcaggccctacattgccgaaggggagtctgacactgactctgatttgtgcacaccttgcgggccgcccccacgatcggcgactggcgagggaccctttggcgacgtaggatgggcagggcctcggaagtag

SEQ ID NO: 200324 - DNA, 2565 bp, synthetic construct
  misc_feature 1..2565: note = Description of Artificial Sequence: Synthetic coding sequence
  source 1..2565: mol_type = other DNA
atggtgcagaagagccggaacggcggcgtgtaccccggccccagcggcgaaaagaagcttaaggtgggatttgtaggtctggacccaggcgcacccgattcaacacgcgatggcgcacttttgatcgcagggagtgaagcccccaagagaggatctatcctgtcaaagcccagggccggcggggcaggtgcagggaagcctccaaagcggaacgccttctaccgcaagctgcagaatttcctctataacgttctcgagcgaccaagggggtgggccttcatctatcacgcctatgtgtttttgctggtcttctcatgcttagtccttagcgtcttcagtaccatcaaagaatatgagaagtcatccgagggcgctctctatatcttggaaatcgtcactattgtcgtgttcggtgtagaatatttcgttaggatctgggcagcaggttgctgctgccgatacagaggctggcgggggcgcctgaagtttgcaaggaagccattctgcgtgatcgacatcatggtgctcatcgcctcaatcgccgtgcttgctgccggaagccaaggaaatgtcttcgccacctccgccttgcggagcttgaggttcttgcaaattctgcgcatgatccgcatggatagaagaggcgggacctggaagctgctgggaagcgtcgtgtacgcccattccaaggaattggtgaccgcctggtatatcggttttctatgtctgatcttagccagttttctggtgtatttagctgaaaagggcgagaacgatcattttgacacttacgccgatgccctgtggtggggcctgatcaccctaacaacaataggctatggcgataagtacccacagacgtggaacggacgcttgctagccgccacctttacacttataggagtgtcttttttcgccctgcccgccggcatactgggaagcggtttcgcactgaaggtgcaggaacagcataggcagaaacattttgagaagagaaggaaccctgcagccgggctgattcagtcagcttggcgtttttatgccaccaatctgtcccgtacagatctgcactccacttggcaatattacgaaaggactgtcacagtccccatgtacagttcccagacacagacatatggcgcgtcccggctgattcccccactgaatcagcttgaactcttgaggaacttgaagtccaaatctgggctcgccttcagaaaagacccaccccccgagcctagtccctctcaaaaggtgtctctgaaggacagagttttttcatctccaagaggggtggccgccaaaggtaagggatcaccgcaggcccagaccgtcagaaggagtcccagcgccgatcagtcgcttgaagattcccctagtaaggttcctaagagttggtctttcggcgatcgtagcagggctcggcaagccttccgcattaagggggccgctagccggcagaactctgaggaagcctcattacccggggaggacatcgtcgacgataagagttgcccatgcgaatttgtcacagaggatcttacccccgggttgaaggtctctatacgggccgtttgcgttatgcgattcctggtctctaaacgcaaattcaaggagtccctgcgcccatatgacgtgatggatgttatcgaacaatacagtgctgggcacctagacatgctaagcaggatcaagtcgctccagagcagggtagaccagattgtcgggagaggcccagcaatcactgataaagatagaactaagggccctgccgaggccgagctgcccgaggacccctctatgatgggacggctgggcaaggtggagaagcaggtgttgtccatggaaaagaagctggacttcctggtgaatatctacatgcagcgaatgggtatccctccgactgaaaccgaagcctactttggcgctaaagagcccgagccagctcctccataccactcccctgaggatagtagagagcatgtggaccgccacggatgcattgtgaagatagttagaagttccagtagcacaggccaaaagaacttttctgcaccacctgctgcccccccagtccagtgcccaccctctacctcgtggcagccgcagagccatcccagacaaggccacgggacttcaccggtgggagaccacggctctctggtacgtatcccgccccccccagcacacgagagatccctgtctgcctatggtggcggcaaccgagcctcgatggagtttctgaggcaggaggatacgcctggctgccgtcctcccgaagggaacctgcgagactctgatacgagtatcagcatccctagtgtggatcatgaggagcttgaacggagtttctctggattcagcatttcacaatcaaaggaaaatttggatgcccttaattcttgctacgccgctgttgcaccttgcgctaaggtgaggccatatatcgctgagggcgagtcagacacggattccgacctttgcaccccctgcggcccaccaccaaggagcgctacgggggaagggccctttggggacgtgggatgggctggaccccggaaatag

SEQ ID NO: 200325 - DNA, 2619 bp, synthetic construct
  misc_feature 1..2619: note = Description of Artificial Sequence: Synthetic coding sequence
  source 1..2619: mol_type = other DNA
atggtgcagaagagccggaacggcggcgtgtaccccggccccagcggggaaaagaagcttaaggtaggctttgtggggctggatccaggggcacctgattccacgagagatggcgcactgctgattgcaggaagcgaggctcccaaacgaggtagtatactaagcaagcctcgcgctggtggggccggcgcagggaaaccacccaaaaggaacgctttctaccgcaagctgcagaattttctctacaacgttttggagagacctaggggctgggcatttatataccacgcgtacgtgttcctcctggtgttttcctgtctggtattgagtgtgtttagcacgatcaaggagtatgaaaagagcagcgagggcgccctgtatatactggaaattgtgacaatagtggtgttcggagttgaatactttgtgcggatttgggcagccgggtgctgttgtaggtatcgggggtggcggggcagattaaagttcgccaggaagcctttttgtgtgatagacattatggtcctgatagcgtccattgccgtgctggctgctggtagtcagggcaacgtcttcgcaactagcgcgctgagaagcttaaggtttctccaaatcctcaggatgatcaggatggatagacggggtggaacttggaaactgctgggaagcgtagtgtatgcccattcgaaagaactggttaccgcttggtatatcgggttcctgtgtctgattctggccagttttctggtgtacctcgcagaaaagggtgagaacgatcacttcgatacgtacgctgacgctctttggtggggactgattactctgactacaatcggttatggcgacaaataccctcagacctggaacggtagactgctcgcagcaactttcaccctgattggggtctccttcttcgcacttcccgcaggcattctcggctcagggttcgcactcaaggtgcaggaacaacatagacagaagcacttcgaaaaaagaaggaatccagcagctgggcttatccagtcggcctggcggttctacgcaactaacctctctcggaccgatctccattctacatggcagtattacgaacggacggtaaccgtaccaatgtatagctcccagacccagacgtatggggcatccagattaatcccgcctctcaatcagttagaactcctccgaaaccttaagagcaagtcaggactggcgtttcgcaaagatccacccccagagcccagtccatcgaaagggtccccatgccgggggccattatgtggatgctgcccaggtcgtagttcacagaaggttagcttaaaggatagggttttttcatccccacggggagtagcggcaaagggaaagggaagcccacaggcccagactgttcggcggtccccgtcagccgatcaatccctggaggattcaccctccaaggtgcctaaatcctggagcttcggcgatagatccagggctaggcaggcctttcgcattaagggcgctgcctcgagacagaactctgaggaggcttccttaccaggggaagacatcgtcgacgataaatcgtgcccgtgcgaattcgtgaccgaggatctgacccccgggctgaaagtgagtatccgggccgtgtgcgtaatgcgcttcctggtgtctaagcggaagttcaaggagtctcttaggccatatgatgtgatggatgtcatcgaacagtatagcgctgggcatttagacatgctcagccgtataaagtctctgcagagtagggtcgaccagattgtggggaggggcccggcaatcacagacaaggatagaacaaaggggccggctgaggctgaacttcccgaagaccccagcatgatggggagattaggcaaggttgagaagcaggtcctttcgatggaaaagaagttggattttctggtgaatatatacatgcagcggatgggaattccccctacggaaactgaggcatacttcggagctaaggagccggagccagctccaccataccatagtccagaggattctcgcgaacacgtcgacagacacggatgcattgtcaagatcgtgcgcagcagcagtagcacgggtcagaagaatttcagcgcaccgccggccgctcccccggtgcagtgtcctccgtccacttcatggcagccccagagccaccctcgccagggacacggaacatccccagtcggggaccacggctccctggttcgaattcctcctccaccggcgcatgagagatccctcagtgcatacggcggtggcaaccgcgccagcatggagttcctgcggcaggaggacacgcctggctgtagaccacctgagggcaacctcagagatagcgacacttccatctctattcctagcgtggaccacgaagagttggagcgatctttcagtggattcagcatttctcagtcaaaggaaaatctggatgcattgaacagctgttacgccgctgtagctccatgcgctaaggtgcgaccatacatcgctgaaggagagtccgataccgattctgacttatgcacgccatgcgggcctcctcctcgctctgctacgggggagggaccctttggagacgtgggttgggctggaccccgtaaatag

SEQ ID NO: 200326 - DNA, 2619 bp, synthetic construct
  misc_feature 1..2619: note = Description of Artificial Sequence: Synthetic coding sequence
  source 1..2619: mol_type = other DNA
atggtgcagaagagccggaacggcggcgtgtaccccggccccagcggtgaaaagaagctgaaggtgggatttgtaggcctcgatcccggggctcccgattccactagggacggagccttgctcatcgcaggtagcgaagctccaaagcgaggaagtattctcagtaaacctcgcgcgggaggtgcgggagccggaaaacctcctaagcgtaacgcattctacaggaaactgcaaaacttcctgtacaacgtgttagaaagaccacgcggctgggcattcatctaccacgcgtacgtgttccttttggtgttctcctgcctagttctctccgtgttctccactatcaaagagtacgagaagagcagtgagggagccctctacatcctagagatcgtgactatcgtggtgttcggcgtggagtactttgtgcggatatgggccgccggttgctgctgtcgctaccggggctggcgggggaggctgaagttcgcgagaaagcccttctgcgtaattgacattatggtgcttatagctagcatcgccgtactggccgccggctcacaggggaacgtgtttgccacttcagcccttagatccctgagattcctgcagattctccgcatgattaggatggataggcgaggagggacgtggaaactccttggctctgtcgtatatgcgcactcaaaggagctagtcacagcctggtatattggatttttatgccttatcctagccagcttcctggtctacctggctgagaagggcgagaacgatcactttgacacatacgccgacgccctgtggtggggtctgattacgctgacaactattggctacggagataaataccctcagacctggaatggccggcttttggcagcaaccttcactcttattggggtctccttcttcgcgctgccagcaggtatcctgggcagtggcttcgctctcaaggtgcaggagcagcataggcaaaaacactttgagaagagaagaaaccccgccgccggcctgatccagtcagcgtggcgtttttacgccactaacctgtcaagaaccgatttgcattctacctggcagtactatgagaggaccgtgacagttcctatgtactctagccagacacaaacatacggcgccagtagactgattcccccactgaatcaactcgagctgcttagaaacctgaaatcaaagtctggacttgctttccggaaagatcctcctcccgaaccctccccctcaaaagggtcgccttgtcggggccccctttgtggatgttgtcccggacgcagttcacagaaggtcagcttgaaggacagggtgttttcttcgccacggggagtggctgctaaaggcaaaggcagtccccaggcgcaaactgttagacgatccccatccgcagatcagtctttggaagactcccctagtaaggtaccaaagtcttggtcgtttggagacagatcacgggctagacaggcttttcgcatcaaaggcgcagccagcagacagaactctgaggaagcgtctctgcccggagaggatattgtggatgataaatcttgcccttgcgagtttgtgacggaagatctgaccccgggcctaaaagtctcaatccgcgcagtttgcgtgatgagatttctggtgagcaagcgaaagtttaaggaatccctgcgcccatatgacgtgatggacgtcatagaacaatactcggccgggcacctcgacatgctctcacggattaagtctctgcagtcacaagttgatcagatcgttggacgaggaccagcgatcacagataaagaccgcactaaggggccagccgaagcagagctgcctgaagatcctagcatgatggggagactgggcaaggtggaaaaacaggtgctgagtatggaaaaaaagttggattttctggtaaacatctatatgcagcggatgggaatccctcccacagagacggaggcttactttggcgccaaggaacccgaacccgcacctccatatcacagcccggaagattcccgcgagcacgtggatcgccacgggtgcattgtgaagatagtgcggtcctcctctagtaccggccagaagaattttagcgcccctcccgctgcgccgcccgtgcaatgtcctccctccacgagttggcagccccagagccacccgagacagggacatggcacatctccagtaggagaccacggttccttggtgcgcatcccgccgcctcccgcccacgagcgcagcttgagcgcatatgggggagggaacagggcaagcatggagtttctgaggcaagaggacacccccgggtgccgcccgccggaaggaaacctgcgagacagtgacactagcatatctattccctcggtggaccatgaagagcttgagcggtctttttctgggttctccatttctcaatcaaaggaaaatttagatgcccttaacagctgttacgcagcagtggctccctgcgcaaaagttcgcccctacatcgccgaaggtgagagtgacactgattcagacttgtgcactccttgtggtcccccacctcgaagcgctaccggtgagggtcccttcggcgatgtgggctgggccggaccacgtaaatag

SEQ ID NO: 200327 - DNA, 2535 bp, synthetic construct
  misc_feature 1..2535: note = Description of Artificial Sequence: Synthetic coding sequence
  source 1..2535: mol_type = other DNA
atggtgcagaagagccggaacggcggcgtgtaccccggccccagcggagaaaaaaagttaaaggtgggttttgttggcctggaccccggagctccagacagtactagagacggtgctcttctgattgccgggtcggaggctccaaagagaggctccatactttccaagcccagagccggaggggccggcgccggcaaaccccccaagaggaatgccttctacagaaagcttcagaatttcctctacaacgtgctagagcgaccccgggggtgggctttcatttatcatgcctacgtgtttctcctggtcttcagttgcttggtgctgtccgtcttcagtacaataaaagagtatgagaaatcctcagagggagccctgtacattttggagattgtgactatcgtcgtcttcggggtggaatacttcgtcagaatctgggctgcaggttgttgctgcagatatagaggctggaggggcaggctgaagttcgcccgaaagcccttttgtgtcatcgacattatggtactcatcgcatccatcgcagtgctggcggccgggagccaaggaaacgtgtttgcgacatcagctctacgatccctaagattcctgcagatattgagaatgatccgcatggaccggcggggtgggacatggaaattactaggctccgtggtgtacgcccattcaaaggaattagtcactgcatggtacataggatttctttgtctcattcttgcttcctttctcgtatacctggctgagaagggggaaaatgaccatttcgatacatacgcagatgccctgtggtggggcctaattaccttgacaacaatcggttatggcgacaaataccctcagacctggaatggccggctgctcgcagcgacctttacactcatcggggtgtctttttttgcgttgcctgccggtattctaggctccggcttcgctctgaaggtgcaggagcagcataggcagaagcatttcgaaaaaaggcggaatcctgctgcgggcctgattcaatccgcatggcgcttctacgccaccaacctgtctcgcactgacctacactccacttggcagtactacgaacgcaccgtaaccgtgcctatgtataggctgattcctcccctaaaccagctagaactgctccggaacctgaaatcaaagtcgggcttggcatttcggaaagaccctccccccgagccctcccctagccaaaaggtgagcctgaaggatagagttttcagttccccccgtggggtagccgccaaggggaagggctctccccaagcacaaactgttagaaggtcgccctcggctgaccagtccctcgaagatagcccttcaaaggtaccaaagagctggtcttttggtgaccggtctagagctcgccaagcattccgtattaagggggccgcttcccgacaaaactccgaggaagcttctctccccggtgaggatatcgtcgacgacaagtcatgtccctgcgagttcgttaccgaggacttaacccctgggctgaaagtgagtattcgcgcagtgtgtgttatgcgatttctggtctcaaagcggaagtttaaggagagcttaagaccttatgatgtgatggacgtgatagagcagtatagcgcaggccacctcgacatgctgtcccggattaagagccttcagtcccgggtggatcaaatcgtgggtagaggtcctgctattaccgataaggacagaaccaaaggaccagccgaggccgagctacctgaagaccccagcatgatgggtcgattgggcaaggtagagaagcaggttctcagcatggaaaagaagctggatttcctggtcaatatatacatgcaacgcatgggcatccctccgaccgagacggaagcttattttggggcaaaggagcctgagcctgcaccaccctaccattcacccgaggactctcgggagcacgtggatagacatggctgcatcgtcaagattgtgcgtagtagctcatcaactggccaaaaaaacttcagcgcccctcctgccgcacccccagtccagtgccccccaagtacctcttggcagccccagtctcaccccaggcaaggccatggcacgtcacccgtaggggatcacgggtccctggttcgaataccaccccctcctgcccatgaacggtccctaagcgcctacgggggtggcaatagagcttcgatggagtttctgaggcaggaggacaccccaggctgccggccacctgagggcaacctgagggactctgatactagtatatccatcccaagcgtggatcacgaagaattagaacgaagttttagcgggttttccatttctcagtctaaagagaatttggacgccctgaattcttgctacgcagcagtcgccccttgtgccaaagtgagaccatatattgcagagggggagagcgatacagacagcgatctttgcaccccttgtgggcctccccctcggagtgcaacaggggaagggccatttggagatgtcgggtgggccggtccccgcaagtag

SEQ ID NO: 200328 - DNA, 1311 bp, synthetic construct
  misc_feature 1..1311: note = Description of Artificial Sequence: Synthetic coding sequence
  source 1..1311: mol_type = other DNA
atggtgcagaagagccggaacggcggcgtgtaccccggccccagcggcgagaagaaattgaaagtcgggttcgtcggtctcgaccctggagctccagactctacccgggacggggcactgctgatcgcgggcagtgaggcccctaaacgcggctctatcctgtccaagccgcgagctggtggcgccggagcaggcaagccgccgaagcgcaatgcgttctataggaagctgcagaatttcttgtataatgtcctcgagcggccgaggggttgggccttcatctaccatgcctacgtgtttttgcttgtgttcagttgcttggtactgagcgtgttttcaaccatcaaggagtacgagaagtcttccgaaggggctttgtacatcctggaaatagtgactattgtggtttttggtgtggagtatttcgttagaatttgggccgcaggctgctgttgcaggtaccgggggtggcgcggtcgtctcaagtttgcacggaagccattctgtgtaatcgacatcatggtccttatagccagtatcgctgtactggctgccgggagccaggggaacgtcttcgccacctccgcactcaggtcactgaggttcctgcagatcctccgtatgatccgaatggacagacggggcgggacctggaagctccttggatctgttgtctatgcccactccaaagagcttgtgaccgcctggtacataggattcctttgtctgattctcgcttccttcctagtgtaccttgcagaaaagggagaaaatgatcacttcgatacatatgcagacgcattatggtggggtctgattacactaaccaccatcggttacggagacaagtacccgcagacttggaatgggcgacttctcgctgccaccttcaccctgataggcgtgtcattctttgcccttcctgccggcattctcgggtcaggttttgcccttaaagtgcaggagcagcatcggcaaaaacactttgaaaaaagacgcaacccggcagctggtcttattcagtcagcgtggcgattttacgcaacaaacctctcccggaccgacctgcactcaacctggcaatactatgagcgtactgttactgtgccgatgtacaggctgatccctccccttaaccaacttgaactcttgcgtaacttaaaatccaaaagcggattagcgttccgcaaagaccctccacccgaaccctcccccagaagcgtccctcctgctgccaccttggtgtccgccgtgtgtacggccgtatggagtctgtcccatacatgcgcacagccagtaatggagatgtag

SEQ ID NO: 200329 - DNA, 1848 bp, synthetic construct
  misc_feature 1..1848: note = Description of Artificial Sequence: Synthetic coding sequence
  source 1..1848: mol_type = other DNA
atggtgcagaagagccggaacggcggcgtgtaccccggccccagcggcgagaaaaagcttaaggtcggttttgtcggattggatccgggagcaccggactcaacaagggacggcgccctcctgattgccggcagcgaagccccaaagagggggagcattctaagcaagccgcgtgcgggcggtgcgggtgcaggcaaacctccaaagaggaacgcgttctacaggaagctgcagaacttcctgtataatgtgctggagagacccagaggatgggcatttatttatcacgcctacgttttcttgctggtcttctcctgcctcgtcctcagcgtcttctccactatcaaagaatacgaaaaatcatcagaaggtgcgctctacattttggagattgtcacaatcgtggtcttcggggtcgagtactttgtgaggatttgggccgcaggatgttgctgccggtacaggggttggaggggacgattaaaatttgcacgcaaaccgttttgcgtaattgacatcatggtgctgattgcatctatagccgtgctggccgcaggctcacagggcaatgtgtttgcaacttcagctcttaggtcactgaggtttctccagatcttgcgcatgattagaatggaccgccgaggcgggacctggaaacttctaggcagcgtggtgtacgcccacagcaaggaactcgtgacagcctggtacatcggttttctgtgtttgattttagccagctttctggtctacttggctgagaagggtgagaacgaccatttcgacacttacgcagatgccttatggtggggacttattaccctaacaactatcgggtatggcgacaagtatccccagacctggaacgggaggctgctggccgccaccttcaccctgatcggcgtttcgttctttgccttacccgctgggatccttggctcaggattcgcgctgaaggtacaggaacagcatagacagaaacattttgagaagagaagaaatccagccgctggcctgatacagtcagcttggcgcttttatgcgacaaaccttagtcgaactgacctgcacagcacctggcagtactatgagcggactgtgactgtaccgatgtatcgtctgattccccccctgaatcaattagaactgttgcgcaatcttaagtcaaaaagcggactggcctttcggaaggacccccctccggaaccaagcccttctcagaaagttagcctgaaagatagggtatttagtagcccgagaggcgttgccgccaaaggcaagggcagtccacaggcccagacagtaagaagaagtccctcagcagatcagtctctggaagacagtccatcgaaagtcccaaaatcctggtcctttggtgatcggtctagggctcggcaagcctttcggataaaaggagcagccagccgccagaactctgaggaggcctccctccccggggaagatatcgtggatgacaagagctgcccatgcgagttcgtgaccgaggatctgaccccagggctgaaggtctcaatcagagctgtctgtgtcatgaggtttctcgtatcaaagaggaagtttaaggaatctctaaggccatatgacgtcatggacgtgatcgagcaatattcagcaggccacctcgatatgctcagcagaattaagagccttcagagtcggcaggaaccacgcctgccagtacaacagggaactcggacaggctgggcttcaggtacaaaacctactgtggcccacggtggctctgctggaggtgtttgggctggcccacctccccaccccagacgcccactcagcgcatctgtggtctcctcccagtccttgttctag

SEQ ID NO: 200330 - DNA, 2643 bp, synthetic construct
  misc_feature 1..2643: note = Description of Artificial Sequence: Synthetic coding sequence
  source 1..2643: mol_type = other DNA
atggtgcagaagagccggaacggcggcgtgtaccccggccccagcggggaaaaaaaactgaaagtaggctttgtgggtctggatccaggggctcctgactctacccgcgatggcgcccttctgatagccggtagtgaggccccaaagcgggggagcatcctttcaaaacccagggccggcggcgctggtgcaggcaagcctcccaaacgtaacgccttctatcggaagctgcaaaatttcctctacaatgtcttggagcgcccccgcggttgggcgttcatataccacgcgtacgtcttcctcctcgtctttagctgcctcgtgctctctgtcttctcaaccatcaaggagtacgaaaagagttcagagggcgccttatacatcttagagattgtgaccatagtcgtattcggggtggagtactttgtacggatctgggctgcagggtgctgctgcagatatcgaggttggagaggccgccttaaattcgcgaggaagccattttgcgtcattgatataatggtcttgatcgctagtatcgccgtgctggccgcaggaagccaaggaaacgtatttgcaacttccgcgctcaggtcgctcaggtttttacagattctaaggatgattaggatggaccgcaggggtgggacctggaagcttcttggctcagtggtgtatgcgcattccaaagagctggtgaccgcctggtatattggatttttgtgcttgatcttagcttctttcctggtgtaccttgccgaaaagggggaaaacgaccacttcgacacatacgccgacgctctgtggtgggggttgattacgctgactacaattgggtatggggataagtacccccagacgtggaatggcagactgctggctgctacattcacactgattggagttagcttcttcgcgctgccagctggcatcctcggttcgggcttcgctctcaaggtccaggaacagcatcggcagaagcatttcgaaaagcggagaaatcccgctgccggccttatccaatccgcctggcggttttatgctaccaacctgtctagaactgacctgcactctacttggcagtactacgagaggacagtgaccgtgcctatgtacagactcattccaccccttaaccaattggagcttctgcgcaatctgaagagcaaatccgggctggcatttcggaaagacccccccccagagcctagcccttctcagaaggtgtctctcaaagaccgtgttttttcatctcctcggggggtcgcagccaaggggaaaggaagtccgcaagctcagactgttcgtagaagtccctcggctgaccagagcctagaggactccccttccaaggtgcccaaatcctggtcctttggcgacagaagtagggcacgccaggccttccgcattaagggagctgcctcacggcagaactcagaagaagcttctctccccggagaagacattgtcgacgacaagtcctgtccttgcgagtttgtcactgaagatctaactcctggtctcaaggtcagcatccgagcagtttgcgtgatgcgatttcttgttagcaaacgcaagttcaaggaaagtttgcgaccttatgacgttatggacgtgatcgaacagtattcagctggccaccttgacatgctgtcccgcatcaagtcattgcagtccaggatcgatatgattgtaggccccccaccccccagcaccccaagacacaagaagtacccaaccaaaggtcccaccgccccacccagggagagtccccaatacagtcctcgcgtcgatcagatcgtcgggcgcggcccagcaatcacagacaaggatcgtactaagggcccagcagaagcggagttgcccgaagacccaagcatgatggggcgcctcggaaaggtggaaaaacaggtgctatctatggagaaaaaacttgacttcctggtgaacatttacatgcaacgcatgggaataccccccacagaaaccgaggcctacttcggagccaaagaacccgaaccagctcccccataccacagtccagaagactcccgcgagcacgtggatcgccacggctgtatcgtgaagatcgtaagaagctcctcatcaaccggtcagaaaaatttttctgcgccacctgcagctccaccggttcagtgtcccccatcaacatcctggcagccgcagagtcatccccgccagggccatggaaccagccctgtgggagaccatgggagtctggttaggattccccccccccccgcccacgagcgctcactgtctgcctacggtggaggtaacagagcatctatggagtttctgcgccaagaggacacccccggatgtcgccccccagagggaaatctgagggattccgacactagcatatcgatcccaagtgtggatcatgaagagttggagcgaagttttagtgggtttagtattagtcaaagtaaggagaacctggacgcactgaacagctgctatgccgcagtggctccctgcgccaaggtgaggccctacattgccgaaggcgagtctgatactgactctgatctttgcacgccatgtgggccccccccacgtagcgcaacgggcgaggggccattcggggatgtgggatgggctgggcctagaaaatag

SEQ ID NO: 200331 - DNA, 2529 bp, synthetic construct
  misc_feature 1..2529: note = Description of Artificial Sequence: Synthetic coding sequence
  source 1..2529: mol_type = other DNA
atggtgcagaagagccggaacggcggcgtgtaccccggccccagcggtgaaaaaaagcttaaggtaggattcgtggggctagaccctggcgcgcccgactctacacgggatggcgctcttctcatagccgggtctgaggccccaaagagaggaagcatcctgagcaaacccagagccggaggcgcgggcgccggtaaaccacctaagaggaatgccttctaccgcaagctccagaacttcctatacaatgtcttagagcggcctagaggctgggccttcatttatcacgcctatgtgtttctgcttgtgttctcctgcctggtgctgagcgtgttcagcacaatcaaagaatacgagaaaagcagtgaaggagccctttacattctggaaattgtgactatcgtggtcttcggagtggaatattttgtcaggatttgggctgccggatgttgctgtcggtaccgtggatggcgcggacgtctcaaatttgcgagaaagcccttttgcgtaattgatataatggtcttaattgcatcaatcgcagttttggcggccggttcacagggcaacgtgtttgctaccagtgcactcaggtctttaagattcctgcagatcctgcgaatgattaggatggaccgaagaggggggacttggaagttacttggctctgtggtgtacgcacacagcaaggagctcgtgactgcgtggtacattgggttcctctgcctaattctagccagttttctggtttacctagccgaaaagggtgagaacgaccatttcgacacgtacgctgacgcactatggtgggggctgatcacacttactactatcggatatggtgacaaatatccacagacatggaacggaagactgcttgccgccaccttcaccttaatcggagtgtccttttttgctctgccagcgggtattttgggatcaggctttgctttaaaggtgcaggaacaacaccggcaaaaacatttcgagaagaggcgcaatcctgctgctggccttatccagtcagcctggcgattctacgcaactaatctcagtagaaccgacctgcacagcacttggcagtattacgagcgcacggtcacagttcccatgtacagctcccagacacagacctacggtgcatccagactcatcccacctttgaatcagctagaattgcttcgcaacctcaaaagcaaatctgggttagctttccgtaaagatccccctcctgagccgtcaccgagtcctaggggggtggcagccaaaggcaaagggagccctcaggctcagaccgttcgaagaagcccttccgccgaccagtctcttgaggactcaccaagtaaggtgcccaaaagttggtcatttggagatcgatcgcgggctaggcaggctttcaggataaaaggcgcagcgtctcggcagaatagtgaggaggcgtcattaccaggcgaggatatagttgacgataagagttgtccctgcgaattcgtgactgaagacttaacccctggcctgaaggtgtccatccgggccgtgtgcgttatgcgcttcctcgtctccaagcgaaaatttaaggagagtctgcggccatacgacgtaatggacgtgatcgagcaatattccgctggtcaccttgatatgctctcaagaataaaatcactccagtccagagtggaccagatcgtaggtagggggcctgcaattactgataaagacagaaccaaagggcccgccgaggctgagctgcctgaagatcccagcatgatgggaagactgggcaaagtcgaaaagcaggtcctctccatggagaagaagctggacttcctcgttaacatatacatgcaaaggatgggaattccacccacagagacggaggcttattttggcgcgaaagagcccgaacccgctccaccttatcactccccagaggattcacgcgaacacgtcgatagacatggatgcattgtgaagattgttcgtagttcgagtagcaccggacagaaaaacttttctgccccacccgctgccccgccggtgcagtgccctccctccactagctggcagccccagagccatccccgccagggtcatggaacaagccccgtcggtgatcacgggagcctggtgcggattccaccaccccccgcccacgagagaagcctctctgcatacggcggaggcaacagggctagtatggaattcctgcggcaggaggacacacctggatgcaggcctccagagggcaatctgcgcgattccgatacttctattagcataccaagcgtggatcacgaagaacttgaacgctcatttagtgggttttcaatctctcagtcgaaggagaacctggacgcactcaatagctgctacgctgccgtcgccccatgtgctaaggtcagaccatacattgcggaaggcgaatctgacacggactccgacctttgcactccatgcgggccccccccccggtctgccactggagagggacccttcggcgacgttggctgggccggcccgaggaaatag

SEQ ID NO: 200332 - DNA, 2526 bp, synthetic construct
  misc_feature 1..2526: note = Description of Artificial Sequence: Synthetic coding sequence
  source 1..2526: mol_type = other DNA
atggtgcagaagagccggaacggcggcgtgtaccccggccccagcggcgagaagaagttaaaggtaggtttcgtaggcctggaccctggagcccctgatagcacaagagatggcgctctgctgatagcaggtagcgaagctccaaaaagaggatctatcctgtcgaagccgagagctggaggcgctggggctgggaaaccccccaaacgaaatgccttctataggaagctccagaactttttatacaacgttcttgaaagaccaaggggatgggccttcatctaccacgcatacgttttcctcctcgtttttagctgcctagtcctctccgttttctccacaattaaggaatacgagaagagttcggagggagccctgtatattctcgaaattgttacgattgtagtgttcggtgtcgagtactttgtgaggatatgggccgccggctgttgctgtagataccgtggttggaggggccggctgaagtttgcccgcaagcctttctgcgtgattgatatcatggtactcattgccagtatcgccgtattagctgccggaagccaaggtaacgtgttcgcgacttctgctctgaggagcctgaggttcctgcagatcttaagaatgatccgaatggaccgtcggggtggcacatggaaattgctcggctctgtggtgtatgcccactcgaaagagctggtgacagcctggtatattggatttctgtgtctgatcctggcctctttcctggtgtacctggctgaaaagggcgaaaatgatcacttcgacacgtatgcagatgctctgtggtgggggcttattacacttactacaatcgggtatggcgataagtacccccaaacttggaacggccggcttctcgccgcaacctttacattaattggggtgagcttcttcgcactgcccgcaggcatccttggcagtggtttcgcactgaaggtccaggagcagcacaggcagaaacatttcgagaaacgtaggaatcctgccgcgggactgattcagtcagcatggcgtttttatgcgacgaacctgagtaggaccgacctgcattctacctggcagtattacgagaggactgtgactgtgcctatgtattcctcacaaacccagacttatggggcgtcccgattaattcctccgctgaaccagctcgaattgcttcggaatttaaaaagtaaaagtggcctggccttccggaaagatcccccacccgaaccgagtccctcaccgaggggagtcgccgctaagggcaaaggatctccccaagcccagacggtcagacggagcccaagcgcggatcagagtctggaagatagtccatccaaagtgccaaaatcttggtcctttggcgaccggagtcgcgccagacaggcttttaggatcaagggggcagccagtaggcagaactccgaagcctccctccccggcgaagacattgtggatgacaagtcttgcccatgtgaattcgtgacggaagacctgacccccggcctcaaggtgtccataagggctgtttgcgtgatgcgtttcttagtatccaaaaggaaattcaaagagtcgctaaggccctatgacgttatggacgtcatcgagcaatatagcgccggacatttggatatgctgagccgcatcaaaagtcttcagagcagagtcgaccagatagtagggcgtggcccggctattaccgacaaggatcggacaaaaggcccagccgaggcagaactgcctgaagatcccagcatgatgggacgcctgggtaaagttgagaagcaggtgttgtccatggaaaaaaaactagattttctggtcaacatatacatgcagcgaatgggaatcccgcccaccgagactgaggcgtacttcggcgccaaggagccagaacccgccccgccctaccattcgcccgaagacagtcgggagcacgtagacagacatggctgcattgttaagatcgtcaggtcatccagcagcactggccagaagaatttctctgctccccccgccgccccccccgtccagtgcccgccatcaacgagctggcagcctcagtctcaccctcgccaaggtcacggcactagccccgtcggggaccacggctctttggtgcgcatccctcccccaccagctcacgagagaagtctgagcgcctacggggggggcaaccgcgcatctatggagttcctgcggcaggaagatactcccgggtgccgccctccagagggaaatctcagagactccgacacctcaatctcaatcccatcagttgatcatgaggagcttgagcggtccttctcaggcttctccatttcacagtctaaagagaacctggacgcgctcaattcgtgctatgccgccgtcgccccttgcgccaaggtgcgaccatatatcgctgaaggggagtccgacacagacagcgacctctgcaccccatgcggacctccacccaggagcgccacaggagagggccctttcggcgatgtggggtgggccggtccccggaagtag

SEQ ID NO: 200333 - DNA, 2619 bp, synthetic construct
  misc_feature 1..2619: note = Description of Artificial Sequence: Synthetic coding sequence
  source 1..2619: mol_type = other DNA
atgggcctgaaggcccggcgggccgccggcgccgccggcggcggcggtgacggcggaggcggaggagggggcgcggctaatcccgccgggggagatgctgctgccgcaggagatgaagaaaggaaggtggggctggcacctggcgatgtcgaacaggtaacactcgccctgggggcaggcgcagacaaggatggcactcttttactggaaggtgggggccgggacgaaggacaacgcagaacaccccaggggatcgggctgctcgctaaaactcctctgtctagacccgtcaaacgcaacaacgctaaatataggcggattcagacgctgatttatgatgcgctcgaaagaccccgggggtgggctctcctttatcacgcacttgtgttcctaattgtgctgggatgtctaatcctggcagtgctgacaacttttaaggagtacgagaccgtctccggcgactggctgctcctcctggagacatttgctatatttatttttggagccgaattcgccctgcggatctgggcggccggatgctgctgcaggtacaagggttggagaggcaggcttaagttcgccagaaaacccctgtgcatgcttgacatcttcgtcctcatcgccagcgtcccagttgtagccgtaggaaaccagggtaacgttttagcaactagcctacgaagcctgcggttcctacagatcctgcggatgctacgaatggatagacggggaggaacctggaaactgctggggtcggcaatctgcgcgcattccaaggagctcattactgcctggtacattggcttcttaaccctgatcctgtcctcattccttgtttacctggtggaaaaggatgtgccagaagttgacgcgcaaggtgaggaaatgaaagaagaatttgaaacgtatgcagacgccctctggtggggcctcattactctggccactataggatatggcgacaaaacccccaaaacttgggagggaaggctcatagctgctactttttctctgattggagtgtcttttttcgctctgcccgctggcattttggggtcaggactggccctgaaagtccaagagcaacaccgacagaagcatttcgaaaaaagacgaaaaccagccgcagagctgattcaggccgcgtggaggtactatgccacgaatcctaaccgtattgacctggttgctacgtggcgcttttacgaatcagtcgtttccttcccgttctttcgaaaagagcaactggaggccgcatcctcacagaagctcggcttgctcgatcgcgtgcgattgtccaacccccgcggcagcaataccaaaggtaagctcttcaccccccttaatgtggatgcgatcgaggagagtccatccaaggaacccaaacccgtgggactcaataacaaggagcgattccggacagcctttcggatgaaagcctacgcattctggcaatcttcagaagacgccggcaccggagaccccatggcagaggaccggggttacggcaacgatttccctattgaagatatgatccctaccctgaaagccgctatacgcgcggtgcggattttacagttccgcctgtataagaagaagttcaaagagacacttagaccatacgacgtgaaggatgtgatagagcaatatagtgcgggtcatctggatatgctcagtaggatcaagtatctccagaccagaatcgatatgatcttcacaccagggccgccgagcactccgaaacataagaaatcacaaaagggttccgcatttactttcccttcccagcagtccccaaggaatgagccctatgtagctcgcccttcaacctcagagatcgaggaccagagcatgatgggcaagttcgtcaaagtggagagacaggtgcaagatatgggcaagaagttggacttcctcgtggacatgcacatgcagcatatggagcgcttgcaggtccaggtgaccgaatattaccctacgaaggggacctcctcacccgccgaagcagaaaaaaaggaggacaatagatactccgacttaaagaccataatctgtaactattctgaaaccgggcccccagagcctccatactctttccatcaggttacaattgataaggtaagcccctatggttttttcgctcatgatcctgtgaacttacccagaggaggaccttccagtgggaaagtgcaggccacccctccttcgagcgccacaacgtacgtggagcggcctaccgtacttccaatccttactttgctcgatagtcgcgtcagttgtcacagtcaggccgacctacaaggcccgtactctgacaggatctccccccggcagcggagatccataacccgggactctgataccccactaagcctgatgagcgtgaatcacgaggagcttgagaggtctcccagcggtttctcaatatcacaagacagggacgattacgtgttcgggcccaacggcggctcctcttggatgagggaaaagaggtatctcgcggaaggggaaacagataccgatactgatccatttaccccctcggggagcatgcctctgtcaagtaccggcgatgggatatccgacagcgtttggactccaagtaataaacctatttag

SEQ ID NO: 200334 - DNA, 2256 bp, synthetic construct
  misc_feature 1..2256: note = Description of Artificial Sequence: Synthetic coding sequence
  source 1..2256: mol_type = other DNA
aagcccaagaagcacggccccatgttcctgatcgtgctgggctgcctgatcctggcggtactgactacgtttaaagagtatgaaacagtcagcggtgactggcttctcctgctcgaaacatttgcaatctttatattcggagccgagttcgctctccggatctgggctgcaggctgctgctgtcggtacaaaggctggcgtggaagacttaaattcgcaaggaagcccttatgcatgctcgatattttcgtccttattgcatctgtgcccgtggtagctgtcgggaaccagggaaatgtacttgccactagcctgcgctccctccgctttctccagatccttcgcatgctgcggatggaccgcagaggcggtacctggaaattactggggagtgccatctgcgcccattccaaggagctaatcacagcctggtatatagggtttctgacccttatccttagctctttcttggtgtacctggtggagaaagacgttccagaggttgacgcccaaggtgaggaaatgaaggaggagttcgaaacttatgctgacgccctgtggtggggcctcatcacattagccaccattggatatggcgataagaccccaaaaacttgggaaggaaggctcattgctgccactttttcgttaataggcgtctcattttttgccctgccggcaggaatattaggatcaggccttgcactgaaagtgcaggagcagcatagacaaaaacacttcgaaaaaaggcggaaacctgctgcagagctgatacaggcggcctggcgatattatgccacgaaccccaataggatcgacctggtggccacctggagattctatgagagtgtggtgtcattcccattcttccgtaaagagcaactggaagccgcctcaagtcagaaactcggcctcctggatagagtccgtctgtcgaacccgagaggctccaacactaaaggcaaactgtttactccccttaacgttgatgcaatcgaggagagccccagtaaggagcctaaaccagtgggccttaacaacaaagaacgctttagaacggcctttagaatgaaagcttatgccttctggcagtctagtgaagatgccgggacaggggatccgatggccgaagacagaggctatggaaacgactttccaattgaagatatgattcctacccttaaagctgcaatacgagcagtgagaattttacagttccggttgtacaagaagaagtttaaggagactctcaggccgtacgacgttaaagatgtgattgaacagtattctgcgggtcatctggacatgctctctcgaattaagtacttacagactcgtatagatatgatttttaccccggggcccccttccactcccaagcacaaaaaatctcagaagggctcagccttcacattccccagccaacagtctcctcggaacgaaccctacgtcgcaaggcccagcacatcagagattgaggatcagagtatgatggggaagttcgtaaaggtggaaagacaagtgcaggacatgggtaagaagctcgattttttagtagatatgcatatgcaacacatggaaagactgcaggtccaagtgacagaatactaccctacaaagggtacaagctcacccgcggaagctgagaaaaaggaggataaccggtattccgatcttaagaccatcatctgtaactacagcgagacaggacccccagaaccaccctatagctttcatcaggtgacaatcgataaggtgagcccttacgggttcttcgcccatgaccccgttaatctcccacggggggggccaagttctggaaaggttcaggctacgcctccttcaagcgctacaacctacgtagaaagaccaacggtcctcccaatcctaaccctcttggactcccgcgtaagctgtcactcacaagctgacttgcaagggccgtatagcgacagaatttctccacggcagcgcaggtccatcacaagggacagcgatacgcccctgagcctgatgtccgttaatcacgaagaactggaacgaagcccctccgggtttagcatctcacaggaccgcgatgactacgtgtttgggccaaacgggggatcttcctggatgcgtgagaaacgatacctggcagagggagagacggacaccgacacagatcccttcacaccctcaggttccatgcctttgtcttctacgggagacggcattagtgatagtgtgtggacaccctccaacaagccaatatag

SEQ ID NO: 200335 - DNA, 2550 bp, synthetic construct
  misc_feature 1..2550: note = Description of Artificial Sequence: Synthetic coding sequence
  source 1..2550: mol_type = other DNA
cgggccgccgccgagaaggccaagcggcccgccggcgcccggcagatgggactgaaggcacggcgggccgccgcaggtgacgaagaacggaaggtcggtcttgcccccggagatgtcgaacaagttaccctcgcactgggggccggggccgacaaggacggcactctgttgcttgagggggggggtagggacgagggacagcgtcggactcctcagggcatcggactgttggctaagactcccttaagtaggcccgtgaaacgtaacaatgccaaataccggagaattcagactctcatttacgatgctctcgagaggccgcgcggctgggctctgctttaccacgctttagtgttcctgatagtgctcgggtgtctaattctggctgtgctcaccacgtttaaagaatacgaaacagtgagcggagactggctgctcttgctggaaacgtttgccatctttatctttggggcagagttcgccctgaggatctgggccgctgggtgctgctgcaggtacaaaggctggcgaggcaggctgaagtttgcccggaaacctctttgcatgctggacatattcgtcctgattgccagtgtgcccgttgtggctgtgggcaatcagggaaatgtccttgccacctcactgagaagcctgaggtttttacagatccttcgcatgctgcgcatggatcggcgggggggaacctggaaattacttgggtcagcaatctgtgcacacagtaaagagttgatcaccgcctggtacatcggttttctgaccctgatactgtcctccttcctagtttatctagtggagaaagacgtgccagaagtagacgcccaaggcgaggaaatgaaagaagagttcgaaacatacgccgacgccctctggtggggcctgattacgctggcaaccataggatacggagataagactcccaaaacatgggaaggccgccttattgctgcaactttctcactgatcggcgtgtctttctttgccctgcctgccggtatcctgggaagcggccttgcacttaaggtgcaggagcaacaccgacagaagcattttgaaaaacgcagaaaacctgcagccgagttgattcaagccgcctggcggtactatgccactaacccgaaccggattgatcttgttgccacctggcggttctatgagagtgtggtctcatttccatttttccgtaaggagcagttggaggcggcatcatcccagaaactgggccttctggatcgcgtgcggctgtctaatcctcgcggaagtaataccaagggaaagctctttactccactaaatgtagatgctatcgaagagtcccccagcaaggagcctaaacctgtcggactgaataataaggaaagattcaggacagcatttagaatgaaggcctatgccttctggcagagctccgaggatgccgggactggtgacccgatggctgaagacagaggttacggcaacgacttccctatcgaagatatgatccccacgctgaaggccgccattagggcggtcaggatcctgcagtttcgcctgtacaagaagaagttcaaggagacgttgcgcccctacgatgtgaaggatgtaattgagcaatacagtgccggacacctggatatgctgagccgaattaaatacttacagaccagaatagatatgatcttcactccaggacccccttctacgcctaaacacaaaaagtcccagaaaggaaacgaaccatacgtcgcgcgtccctcaacatctgagatcgaagatcaaagcatgatgggaaaatttgtgaaggtggagcgccaagtgcaggatatgggcaaaaaactggacttcctggtggatatgcatatgcagcatatggagcgtttgcaggtgcaggttactgagtattatcctacgaagggcacctcatccccagcagaagcagaaaaaaaagaggacaatcgctacagcgacctgaagacgattatttgcaattactcagagactggtcctccagagccaccatacagttttcatcaggtgacaatcgataaggttagtccttacggtttttttgcccacgaccctgttaatttgcccagaggaggcccgtcctccggcaaggttcaggccacaccgccatcgagcgcgaccacgtacgtcgagcgacccaccgtgctgcctatccttacattgctcgactcacgagtgtcttgtcactctcaggccgacttacaggggccatattctgataggatcagcccccggcagcggagaagcattacccgcgactctgatacaccactgtccctcatgtcagtcaatcatgaggagttggagcggagtccaagcgggtttagcatttcccaggatagggatgattacgtctttggacccaatgggggttcatcatggatgcgggagaaaaggtacctggctgaaggggagacagatacagatacagacccttttacaccctccggttcaatgcctctgtccagcacaggggatggcattagcgattctgtgtggacacccagtaacaaacccatatag

SEQ ID NO: 200336 - DNA, 2088 bp, synthetic construct
  misc_feature 1..2088: note = Description of Artificial Sequence: Synthetic coding sequence
  source 1..2088: mol_type = other DNA
atggccgaggcccccccccggcggctgggcctgggccccccccccggcgacgcccccagggctgaactggtcgccctaacagcggtgcagtcagagcagggggaggccggcgggggcggaagcccacgcagactagggttgctgggttctcctttgccgcccggggccccactgcctggccccggcagcggctcaggaagtgcttgcgggcagagatcatccgccgcacacaagcgctataggcgcttacaaaactgggtttacaacgttctggagcggccaaggggctgggcattcgtctaccacgttttcatttttctgctggtatttagctgtctagtgctttctgtcttgtccacaattcaggaacatcaggagctcgcgaatgagtgcctgctgatcctggagtttgtaatgattgtggtatttggacttgaatatattgtgagagtctggtcagcgggctgctgctgccgctatagagggtggcaaggacgctttcggtttgcgcgaaaacccttttgcgttatcgactttattgtattcgtggctagtgttgctgtaatcgctgccggcacgcaaggcaacattttcgctacgagcgcccttaggagcatgcggttcctgcagatcctgaggatggtgaggatggacagacggggcggcacgtggaaactcctgggatccgttgtatatgcccactctaaagaactgattacggcctggtacatcggttttttggtgttgatttttgcctcattcctggtatacttggccgagaaagacgccaattccgacttctcctcctatgcagattctctgtggtggggcacaataacactgactacgattggttatggggacaaaactccccatacttggctcgggcgggttctcgctgccggcttcgccctactcggcatctcattctttgccttacctgcaggtatcttgggctctggctttgccctgaaggttcaggagcagcatcggcaaaagcattttgagaagcgtcgaatgcccgctgcaaacctaatacaggccgcctggagactgtattccacagacatgagccgcgcatacttgacagcaacatggtactattatgattctatcctccctagttttagggagctggcgttgttattcgagcatgtacagcgagctagaaatgggggtttacgtcctctcgaggtgaggcgggcccctgtgcctgacggggcgccgtcccggtacccacccgtggctacctgccacaggcccggcagcactagcttttgccccggagagagttcccgtatgggaattaaggatcggatcagaatgggctcttctcagcggcggacagggccttcaaaacaacatctggcgccgccaaccatgcctacatctccttcctcagagcaagtgggtgaggctacctcgccaacgaaagtgcaaaagagctggagctttaatgatcggaccagatttcgcgcatcacttaggttaaagcccagaactagcgccgaggacgctcccagcgaggaagtggctgaggagaagtcttaccagtgcgagctgaccgtggacgacatcatgcctgccgtcaaaacagtgattagatcaatcagaatattgaaatttttagtcgccaaacgcaagttcaaagaaacattgcggccatacgatgtcaaggacgttatagagcaatattctgccgggcatttggacatgctgggccgcatcaaaagcctgcagacccgagtggatcagattgtcggacgtggcccgggagatagaaaagcgagagagaagggagacaagggcccctctgatgctgaggtggttgacgagattagtatgatgggaagggtcgtaaaagtggaaaagcaggttcagtccattgagcacaaacttgacctgttattaggcttctattcccggtgcttgcgaagcggaacttctgcatcccttggggcagtccaggttcccctgttcgatccagacattacatccgactaccattcaccggtggatcatgaggacatcagcgtgtctgctcagaccctgtccatctctcgcagcgtgtctacaaacatggactag

SEQ ID NO: 200337 - DNA, 2856 bp, synthetic construct
  misc_feature 1..2856: note = Description of Artificial Sequence: Synthetic coding sequence
  source 1..2856: mol_type = other DNA
atgccccggcaccacgccggcggcgaggagggcggcgccgccggcctatgggttaaatccggtgcagccgctgcagcggccggtggtggacgccttggctccgggatgaaggacgtggaaagtggacgcggccgcgtcctcctgaatagcgctgccgcgcgtggagacggtctgctgctgctgggcacccgcgccgcaaccttgggtggcgggggaggcggattgcgggagtcgcgcagaggaaagcagggcgctcgcatgagcctgttaggtaagcctctgtcttacacaagtagtcagtcctgcaggcggaacgtcaaatatcgaagggtccagaactacctgtacaatgtactcgagagaccccgggggtgggcatttatctaccacgcttttgtcttcctcctcgtattcggctgtctcattttgagtgtgttcagcactatccccgaacacactaagctggccagctcctgtttgttaatcttagagttcgttatgatagttgtcttcggcctggaatttattatcagaatttggagtgccggatgctgctgtaggtatcgaggctggcagggaagactaaggttcgctagaaaacctttttgcgtcatcgatactattgtgctgatagcttctatagcggtagtcagcgccaagacccagggcaatatttttgccacttccgcccttcgctcactgagattcctacagatcctcagaatggtaaggatggataggagaggcggcacatggaaactgcttggcagcgtggtgtacgctcactccaaggaactgataaccgcgtggtacatcgggttcttagtgcttatattcagctctttcctggtatatctggttgagaaagatgctaacaaagaattttctacctatgctgacgccctgtggtggggtacgatcacacttactactattggctacggtgataaaaccccactgacatggctcggcaggctgctgtcggccgggtttgccctcctcggcatctctttctttgctctgcctgccggcattctcggcagcgggtttgccctgaaagttcaggaacaacaccgccaaaagcactttgaaaagcggagaaatcccgccgccaacctgattcagtgtgtgtggcgctcctatgccgccgatgagaagtcagtgagtattgcaacgtggaagccccatcttaaagccttgcatacgtgctcccctacaaagaaggaacagggggaagcctctagcagtaagttctgtagcaacaagcaaaaactctttcgcatgtatactagcagaaagcaaagccaaaagctcagtttcaaagaaagagttcgaatggcatctcctcggggacagagcattaaatcacgacaggcctcagttggcgatcgccgaagccccagcacagatataacagcggaagggtcacccacaaaagtgcagaagtcttggtcatttaacgatagaacccgattcagaccatcactccggctcaagtcctcgcaacccaagccggttattgatgctgataccgcactggggacggacgacgtttatgatgaaaagggctgccaatgtgatgtgtctgtcgaggatctcactcctcccctcaaaacagtaatccgcgccatacgaattatgaagttccatgtagccaaaagaaagtttaaggaaaccctccgaccatacgatgtcaaggacgtcattgagcagtatagcgcgggacatcttgacatgctgtgcaggattaagtcccttcagacccgggtcgaccagattcttggcaaaggacagattacaagcgacaaaaagtcccgtgagaagatcacggccgagcacgagacaaccgacgatctgtcaatgctcgggcgggtggtgaaagtggaaaagcaggtgcagtctattgagagcaagttggactgcttgttagacatctatcaacaagtgcttagaaaggggagcgcctctgccttagcactggcctccttccagatccctcccttcgagtgcgagcagacctcggattaccagagccctgtcgatagtaaggacttgtccggatctgcacagaacagcggctgtctaagtcggagtaccagcgctaatatctccagggggctccagttcattcttacacctaacgagttttccgcacagaccttctatgctttgagccccaccatgcatagccaagccacccaagttccgatctctcagagtgatggatcggccgtggccgcaacaaatactattgctaatcagataaacactgcccccaagcctgccgcccccacgactctgcagattccaccccccctccctgcgatcaagcacttaccccgtcctgaaacgctccaccccaatcccgccgggctgcaagagagtatcagtgatgtcaccacatgcttggtggcatcaaaggagaatgttcaagttgctcagtccaacctaaccaaagaccgatcaatgcgtaaatcctttgacatggggggggagaccctcctgtccgtgtgtccgatggtccctaaagatctgggcaaatctctctcagtgcagaatttgattaggtccacagaagaactgaatattcaactttctggctcagaatcaagcggtagccgaggcagccaggatttctaccccaaatggcgggaatccaagctgttcatcacagacgaagaagtgggcccagaagagaccgaaaccgacactttcgatgcagctccacaaccagcaagagaggcagcttttgccagcgattcccttcgcacaggccggtcgcggagctcccaaagtatctgcaaagccggcgagagtaccgacgcactgtccttgccccatgtgaaactcaagtag

SEQ ID NO: 200338 - DNA, 2799 bp, synthetic construct
  misc_feature 1..2799: note = Description of Artificial Sequence: Synthetic coding sequence
  source 1..2799: mol_type = other DNA
atgccccggcaccacgccggcggcgaggagggcggcgccgccggcctttgggttaaatctggggccgcggctgcagccgccggcggcggtcggctgggatctgggatgaaggatgtcgaatccggaagaggacgggttctcttgaactcagccgcagcaagaggcgatggcctcttgctgctgggcactagggctgcaaccttgggcggtggcggagggggcctccgggaaagccggaggggaaaacagggggcccggatgtctctgctgggaaaacccctttcctatacatctagccaaagttgccggaggaatgtcaagtatagacgcgtgcagaattatctctacaatgtattggagagaccccgcggctgggccttcatataccacgcctttgtgttcctcccggtgttcggttgcctaatactctcggtgttttcaaccatacccgagcacactaaactcgcctcatcatgccttctcatcttggaattcgttatgatagtggtgtttggactcgaatttatcattcggatctggtcggcaggatgctgctgccgatacagaggctggcaaggaaggctgaggtttgcccggaagcctttttgcgtcatagatacaatcgtgctaattgcgagcattgcagtggtctctgctaagacacagggcaacattttcgcaaccagtgctctgcgtagtctccggttcctgcaaatcctccgtatggtgaggatggatcggcgcggaggaacttggaaactcctgggctccgtggtgtatgcccacagcaaagagctaattaccgcctggtacatcggctttttggtcctgatttttagtagcttcctggtgtacctcgtcgagaaggacgccaataaagagttctccacctatgcagacgcactgtggtggggcactatcacactgaccacaattggttacggggataagacccctctgacatggctcggccgcctgctgtcagctggcttcgcccttctcgggattagtttttttgccctcccagccggtattcttgggagcggctttgcactgaaagtacaggaacagcatcggcagaagcattttgaaaaacgtaggaacccggctgccaacctcattcagtgcgtgtggaggtcttacgctgcagacgagaagagcgtcagcatcgctacttggaagccacatctcaaggctctacacacctgctcccctacgaagaaagagcaaggcgaagccagctcgtcccagaagttgtctttcaaggaacgcgtgcgtatggcctcaccacgcggccagtcaatcaagagccgacaggcgtctgtgggcgatagacgcagcccttcgaccgatattacagcggaggggtcccctaccaaggttcagaaaagttggtctttcaacgatcggacacgcttccgaccctcactgagattgaaatccagtcagcccaaaccagtgattgatgccgataccgccctgggaactgacgatgtctacgatgagaaaggttgccagtgcgatgtctccgtagaggatcttactccccccttgaagacggtcattcgcgccatccggatcatgaagtttcacgtggcaaaaaggaaatttaaggaaacattgcgcccttacgatgtgaaagatgtgatcgaacagtactccgctggccacctcgacatgctttgtcggatcaagagtctgcagactcgagtggatcagatcttaggcaaaggtcagattacttctgacaaaaaatccagagagaaaatcactgccgagcacgagactacagacgacctctcaatgctgggtcgagttgtgaaagttgagaagcaggtccagagcatagagtccaaactggactgccttctggacatctaccaacaagtcctcaggaaagggtccgccagtgccttggccctggcctcttttcaaatcccaccgtttgaatgtgaacagaccagcgactaccagtccccagtggacagcaaggatctgtctggctccgctcagaattcggggtgtctgtctcgttctacctctgcaaatatcagtcgagggctgcagttcatccttacacccaatgaattttccgcacaaaccttctacgcgctatctccaactatgcactcacaggcgacccaagttccgattagccagtccgatggaagtgctgtggccgccacaaacactattgctaaccagattaataccgctccaaaaccagctgctcctactactctgcaaattccccccccactgcctgccatcaagcatctgccacgtcccgagacattgcatcctaatcccgccgggctgcaagaatccatctctgacgtgaccacatgcctggtggcaagcaaagaaaatgtgcaggtcgcccaaagcaacctgacgaaagaccgatccatgaggaaatctttcgatatgggaggtgaaactctgttgtcggtatgcccaatggtaccaaaagacctcggaaagtctttgtcagttcagaacttaataagatcgactgaggagctgaacattcaactcagcggatcggaaagtagtggctcccgcggatcacaggatttttaccccaaatggagagaaagtaagctctttatcaccgacgaggaagttgggccagaggaaacagagactgatacctttgacgctgcgcctcagcctgcacgcgaagcagcgtttgccagtgactcactcagaaccggtcgttcccggagctcgcaatctatttgcaaagcaggggagagcacagacgccctgagccttccacatgtgaagctgaaatag

SEQ ID NO: 200339 - DNA, 2802 bp, synthetic construct
  misc_feature 1..2802: note = Description of Artificial Sequence: Synthetic coding sequence
  source 1..2802: mol_type = other DNA
atgccccggcaccacgccggcggcgaggagggcggcgccgccggcctctgggtgaagagtggtgcggcggcagccgctgccgggggagggaggctgggaagcgggatgaaagatgtagaatctggacgcggcagagtgttgctgaattccgccgcggcaaggggagacggtctcttactattggggactcgagccgccacactggggggtggtggcgggggactccgggaaagccgcaggggaaagcagggagcacggatgagcctgttgggcaagccactcagctacacaagcagtcagagttgtcgccgaaacgttaaataccgccgggttcagaattacctgtataacgtgctcgaacgtcctcgagggtgggccttcatttatcatgcattcgtgttccttctggtattcgggtgccttatcttaagcgtgttcagcacgatcccagagcatacaaaactggcatcgtcctgcctgttgatcctggagttcgtcatgatcgtggtttttgggctcgagtttatcatacggatatggagcgcaggatgctgctgtcggtaccgaggttggcaggggcggctccgcttcgcccgcaaaccattttgtgtcatagacaccatagtgctgattgcgtcaattgcggtggttagcgcaaagacccaaggtaatatcttcgctacctctgctttaaggtcattaaggttcttgcagatcttgcgtatggtgaggatggatcgccggggagggacatggaagttgttgggcagcgtggtgtatgcacattccaaagaattaattaccgcatggtatatcggcttcctcgttctgattttttcaagcttccttgtatacctggtggagaaggacgctaacaaggagttttccacttatgccgatgccttatggtggggcacaatcactctgaccacaattggatatggagacaaaacaccactgacctggctgggccgattactctctgccggatttgcactgctcggaatctcatttttcgcactgcccgccggcattttgggcagtggttttgccctcaaagttcaggagcagcatagacaaaagcactttgagaaacggcgaaaccctgccgctaacctgatacagtgcgtctggcgctcttacgctgcggacgaaaaatccgtttctatcgcaacatggaaaccccacctgaaggcactgcacacctgttcccctactaaacagaaccaacagggcgagagccagagttgccagaagttatcattcaaggagagagtacgaatggcatcacccaggggtcagagcatcaagtcgaggcaggcgagtgttggagatagacggtctccaagcactgacataaccgcagagggtagtccaaccaaggtccagaagtcctggtcattcaacgaccggactcgttttcgaccgtccctgaggctgaagagttcccaacccaagccagtgattgatgccgatacagccctgggcaccgacgatgtgtacgatgagaagggatgtcagtgtgatgtttcggtcgaagatttgaccccgccgttgaagactgtgattcgcgcgatcagaataatgaagttccatgtcgctaagcgaaagttcaaggagactttgcgtccttatgacgtgaaggatgtgatcgagcagtactcggccggccatctggacatgctttgtcgaatcaagagcctgcagacaagagtagaccaaatattgggcaaggggcagattacgtcagacaaaaaatcacgcgaaaagataaccgccgaacatgaaacgaccgacgatctctcaatgttgggtcgcgtcgtcaaggtcgagaaacaggtgcaatcgatcgaatccaagctggattgtctgctggacatttaccaacaggtcctgcgcaagggatccgcgtccgctctggccctcgcctcctttcaaatacctccttttgagtgtgagcagactagtgactatcagagcccagttgactccaaggacctctctggatccgcacaaaactcaggttgccttagtagaagcacttccgccaatatctccagaggcctccaattcatccttacccccaatgaattctccgcccagacattttacgccttgagccctaccatgcattctcaggctacccaggtgcccatcagtcagagtgacggctcggcagtggcagcaaccaatacaatagcaaaccagataaacactgctcctaagcctgccgccccgacaaccttgcagattccaccccctttaccagcaatcaagcatttgccgagaccagagacgcttcacccgaacccagcaggtctgcaggagtctatttccgacgtcacgacctgcctcgtagcgagtaaggaaaacgttcaggttgctcaatcgaatctcaccaaggaccggagcatgcgcaagtcattcgatatggggggggagaccttgctttccgtgtgtccaatggtgcccaaggacctaggtaagtctctgagcgtgcagaatttaattaggagcacagaggagctcaatatccaactcagtggaagtgaatcctccgggtcaaggggctcgcaggacttctatcccaaatggcgcgaatctaagctcttcatcactgatgaggaagtgggcccggaagagaccgaaactgacacgttcgacgccgccccacagcccgccagggaagccgctttcgcgagcgactcccttcgcacgggccgctcacgcagttcgcagtccatatgtaaggctggcgagtcgacagatgctctgtccctaccgcatgtcaaattgaaatag

SEQ ID NO: 200340 - DNA, 1284 bp, synthetic construct
  misc_feature 1..1284: note = Description of Artificial Sequence: Synthetic coding sequence
  source 1..1284: mol_type = other DNA
atgccccggcaccacgccggcggcgaggagggcggcgccgccggcctgtgggtgaaaagtggcgccgcagccgccgccgcaggcggggggagactcggcagcggtatgaaggatgttgagagcggaagaggaagggtactgctgaacagtgccgcagcgagaggcgacggcctgttactgctggggactagagccgccacgttgggcggcggcgggggaggtctgagggaaagtaggaggggcaaacaaggagctcgaatgtcgcttcttggcaagccattatcttatacttccagccaaagctgtcgaaggaacgtgaaatacaggagagttcagaattacctgtacaacgtgctggaaagaccgagagggtgggcttttatctaccacgccttcgtgttcctgcttgtgtttggctgcctgattctctccgtgttttccacgatacctgaacatactaaactagccagtagctgccttctgattcttgagttcgtcatgatcgtggttttcggtttggaattcattattcggatttggagcgccgggtgctgttgtcgctacaggggatggcaagggagactgcggtttgctcgcaagcctttctgtgtaattgatactatcgtgctaattgcatccatagcggtcgtctcagccaagacacagggaaatatattcgcaacttccgcattacgttccttaaggttcctacagattttaaggatggttagaatggatcggcgtggaggaacatggaagctcttaggttcggtggtgtacgcccactccaaagaactcatcactgcctggtacataggcttcctagtgcttatttttagtagttttctggtgtatttggtcgaaaaagatgccaacaaggaattctctacgtatgccgatgctctttggtggggaactatcactttgaccacgatcggttacggagataaaacacctttgacatggctagggcgtctcctctctgcaggtttcgctcttctgggtatttctttctttgcattgccagccggcattttgggctccggcttcgccctgaaagtccaagaacagcatagacagaagcatttcgaaaagcggcgcaatcccgcggccaatctaatccagtgcgtgtggagaagctatgcggctgatgaaaaaagcgtctccattgcaacttggaaacctcatctcaaggccctccatacttgcagccctacgaagaaagaacagggcgaggcttctagtagatttgtcatcagcttgctcctgcacgtgtgtctatag

SEQ ID NO: 200341 - DNA, 2799 bp, synthetic construct
  misc_feature 1..2799: note = Description of Artificial Sequence: Synthetic coding sequence
  source 1..2799: mol_type = other DNA
atgccccggcaccacgccggcggcgaggagggcggcgccgccggcctgtgggtaaagtccggagctgcggccgccgctgcaggcggcggcagactggggagcggaatgaaagatgtcgagagtgggcggggcagggtgctgctgaattccgcagctgcccggggtgatgggctgcttcttctggggacgagggctgctaccttaggtggtgggggtggcggactgagagaatcgcgccggggaaaacagggggctcggatgtctctgctggggaagccgctgtcttatacctcttcccagagttgccgccgcaatgtaaagtacagaagagtgcaaaattatctgtataacgttcttgagaggccacgagggtgggcctttatttatcatgcatttgtgttcttattggtgtttggctgtctgatcctttcagtcttttcaactattcccgagcacactaagttagctagctcttgtttgctgatcctcgagtttgtgatgattgtggttttcggcttggagtttatcataaggatctggagcgctgggtgttgttgtaggtacaggggttggcagggtcggcttcgcttcgcccggaaaccattttgcgtcattgacactattgtgctgatcgcctctatcgcagtagtgtccgctaaaacccaaggcaatatcttcgcaacttctgccctgcgctccctccggtttctgcagatcctcagaatggtgcgcatggaccggcgggggggtacctggaaattgttgggcagcgttgtttatgcccacagtaaagaattgattaccgcctggtatatcggcttcctcgttttgattttctccagcttcttggtgtacctggtggagaaagacgctaataaagaattctctacgtacgcagacgccctctggtggggtacaattacccttactaccatcggatatggcgataaaaccccactcacatggctcggccgattgctttccgccggctttgcattactgggaataagtttcttcgcgctgcccgctggaatacttggaagtggatttgctctgaaggtgcaggagcagcatcggcagaagcacttcgaaaagcgaaggaacccggccgccaatcttatccagtgcgtgtggcgctcatatgctgccgatgaaaaaagcgtgagcattgcaacatggaagcctcatctgaaagcactgcatacgtgtagccctacaaagaaggaacagggagaggcttctagcagccagaaactatctttcaaggagagggtccgcatggcaagtccacggggacagtctattaaatcaaggcaagctagtgtcggggaccgcaggtccccatctacagatatcacagccgaaggctctccaaccaaggtacagaagtcatggagttttaatgatcgaacccgttttagaccctccctgcgcctgaaaagcagtcagccgaaaccagtgatcgacgcggacacagccctggggacggatgacgtctacgacgagaaagggtgccagtgtgacgtcagtgtagaggatttgactccccccctgaagaccgtgatcagggccattcgcataatgaaattccatgtcgccaaacggaaattcaaggaaacactcagaccctatgatgtcaaggacgtaatagagcaatattccgccggacacctggatatgctatgccgaatcaaaagcctacagacccgcgttgaccagattctagggaagggtcaaatcacatccgataagaaatctcgggagaaaataaccgcagagcatgagaccactgatgacctgtccatgctgggcagagtcgttaaggtcgaaaagcaggtgcagtccatcgagagtaagctggattgtctactggacatctatcaacaagtgctgcgtaaagggtctgcttcagctctggcgctcgcgtccttccagattcctcctttcgagtgcgagcagacaagcgattatcagtctcctgtggatagtaaagatttaagcggctctgcccagaacagcggctgcctctcacgatctacatccgccaacatcagcagggggctccagtttatactaactcctaacgaattcagcgctcagaccttttacgctttgagccccactatgcactcccaggctactcaggttccaatttcccagagcgatgggtccgctgtggccgccaccaacaccatcgccaatcagattaacaccgcccctaagccagctgcgcctaccactctgcagatcccccccccgctcccagccatcaaacatctcccccgcccggaaaccctccaccccaatcccgcagggcttcaggagtctatctcagatgttactacgtgcctcgtcgcctcgaaggagaacgtgcaagtcgcccagtcaaacctgacaaaagacagatccatgagaaaatcttttgatatgggcggcgagactctgctatctgtgtgtcctatggtccccaaagaccttggaaagagcctatcggtacagaaccttatacggtctacggaggaattgaacatccagctgtcgggatccgagagtagtggaagcaggggatcccaggatttttacccaaagtggcgggaatccaagctgttcattacagatgaagaggtgggtcctgaggagacagagaccgatacatttgacgccgccccgcagcctgcccgtgaggctgccttcgcaagcgactcactcaggactggacggtctagatcctcccagtctatctgcaaagcaggagagtcaactgacgcactctccctgcctcatgttaagctgaaatag

SEQ ID NO: 200342 - DNA, 2829 bp, synthetic construct
  misc_feature 1..2829: note = Description of Artificial Sequence: Synthetic coding sequence
  source 1..2829: mol_type = other DNA
atgccccggcaccacgccggcggcgaggagggcggcgccgccggcctgtgggttaagagcggtgcagctgccgcagccgcgggtggagggagacttggatccggcatgaaagacgttgagagcggacggggccgcgtcctattgaactctgctgccgcccggggagacggactgcttctgttaggtactagggctgctacactgggtggggggggagggggactccgcgagagccggcgcggtaagcagggggcgagaatgagtctcctggggaaaccactttcatatactagttctcaatcttgcagacgcaatgtgaaatatcggcgcgtacagaattacctctacaatgtgttggaaagacccagagggtgggcgttcatttatcacgcctttgtatttctcctggtctttggctgcctaatcctgagtgtgttcagtactattcccgaacacacaaaattggcgagcagttgtcttctgattttagagttcgtcatgatagtagttttcggactggagtttatcattaggatttggtccgcgggctgttgttgtcgttaccgcggttggcaggggaggttgaggttcgcccgcaagccattttgcgtcatcgatactattgtgttaattgcaagtattgcagtcgtcagcgctaaaacacagggaaacatctttgccacctccgctctgagatctctgcgctttttgcagatattacgaatggtcagaatggaccggagggggggaacctggaaactgctgggatccgttgtttacgcccacagcaaagagttaatcactgcctggtatatagggtttcttgtattgatcttcagtagcttccttgtgtacctggtcgaaaaggatgccaataaggaatttagtacatatgccgatgccctctggtggggcacgatcacacttaccaccattggttatggggacaagacccccctcacctggttaggccgcctgcttagcgcagggttcgccctgctgggcatctcctttttcgcccttccagcagggatcctgggctcgggctttgccctgaaggtacaggagcagcataggcaaaagcacttcgaaaagcggaggaaccccgccgcaaacctaatccagtgcgtttggcgctcttatgcggccgacgagaagagcgtgtccatcgcgacctggaagccccatctcaaggcgctgcatacatgcagccccaccaacaagttctgttccaataagcaaaagttgttccgcatgtatacaagccgcaagcagtcacagaagttaagttttaaggagcgggttaggatggcgtcgccccgtggccagtcaattaagtctcgacaggccagtgtgggagacagacgttcaccatcaactgacattactgctgaaggatccccaaccaaagtacagaagtcttggtcatttaatgatcgtaccaggtttcgtccctctctgcgtctgaagtcctcccaaccaaaaccagttattgatgccgatactgccctcggaaccgatgacgtttatgatgagaaagggtgtcagtgtgatgtctcagtggaagatctgacacctcccctcaagactgtgataagggctattcggattatgaagtttcatgtggccaaaagaaagtttaaggagactctgagaccctacgatgtgaaggacgttatcgaacagtacagcgccgggcacctcgacatgctgtgcagaataaaatcactgcagacacgcgtggatcagatcctcggaaagggccagatcacaagcgataagaagagtagagagaaaatcaccgccgagcacgagaccacagatgacctcagcatgttaggccgagtggtgaaagtggagaagcaggttcaatccattgagtcaaaactggactgtcttctcgacatataccagcaggtgttacggaaaggctctgcgagcgccttggcattggcctcgtttcagatcccccctttcgaatgcgagcagacaagcgattaccagagcccggtggacagcaaggatttgtccggttcagctcagaatagcggctgcctatcccggtcaacgagcgctaatatatcccgcggattgcagttcatactgacaccaaacgagttctcggcccagacgttttatgctctgtcacccacgatgcactcccaggcaacacaggtgcctatctctcagtccgatggatccgccgtagcagccacaaatacaattgcaaaccagatcaataccgcccccaagcctgccgcaccgacaacactgcagatacctccaccattgcccgccatcaagcacctgcctaggcccgagacccttcatcctaatcccgcggggctgcaggaaagtatctcagatgtaacaacatgcctggtcgcttcaaaagagaatgtgcaggttgcgcagtccaacctgacaaaggacaggtcaatgcgtaagtctttcgacatggggggtgaaaccctactctccgtttgtccaatggtgcccaaggacctgggtaagagcctgtccgttcagaacctcatacggtccacagaggagctgaacattcagcttagcgggtctgaatcgagtggcagccgcggatcccaagatttctatcctaaatggcgagaatcaaagctatttatcacggacgaggaagtgggtccagaggagaccgagaccgataccttcgacgccgctccacagcccgcacgagaagcagcgtttgctagcgactctctgcggacggggcggtcacgtagctcacagtccatatgtaaagcaggggagtcaaccgatgccttgagcttaccacacgttaagctgaaatag

SEQ ID NO: 200343 - DNA, 2772 bp, synthetic construct
  misc_feature 1..2772: note = Description of Artificial Sequence: Synthetic coding sequence
  source 1..2772: mol_type = other DNA
atgccccggcaccacgccggcggcgaggagggcggcgccgccggcctatgggtcaaatccggggctgcagcggccgctgctggaggaggacgcctggggtctgggatgaaagatgtggaaagcggaagaggccgggtcctcctgaattctgccgccgccaggggggatggacttttactcctgggtaccagggctgccacactcggtggaggtggtgggggcctgagagagtctagacgaggaaaacagggagccaggatgagtcttttagggaaacctttatcctacaccagttcccagagctgtcgcagaaacgtcaaatacagacgggtgcagaattacctgtacaatgtgctggagagacctagaggatgggcgtttatctatcatgccttcgtcttccttctggtgttcggatgcttaattctttctgttttcagcactatccctgagcacactaaactggcttcctcctgcctgctgatccttgagttcgtgatgatcgtggtattcggcctcgaattcatcattcggatatggtccgccggctgctgctgtcgctaccgaggatggcagggcaggcttcgtttcgcacgcaagcccttttgcgtaattgacactattgtgttgattgcctccatcgccgtggtttccgccaagacccagggcaatattttcgccacatctgctctgcgcagcttgcggttcctgcagatacttaggatggtgcggatggatagaagggggggcacatggaaattgctgggcagtgtcgtgtatgctcacagcaaagagctcatcactgcgtggtacattggattcctggtcctcatcttttctagctttttggtctatctggtggagaaagatgccaacaaggaatttagcacctatgctgacgctctgtggtggggcactattacgctcacaaccattggctacggggacaaaaccccactgacctggctaggcagactcctgtctgccgggttcgctctgctcggcatatcatttttcgcactgccagccggaatcttaggcagcggctttgcacttaaagttcaggaacagcacaggcaaaaacactttgagaagagacgcaacccggccgctaaccttatccagtgcgtttggagatcatatgcggcagacgagaagagcgtgtctatcgctacctggaagccgcatctgaaggccttgcacacctgttctcccacgaatcagaaactatcttttaaagagagggtgagaatggccagtcccagaggtcagagtatcaagagtcggcaggcaagcgtcggagacaggaggagtccttctaccgacattacggctgagggaagcccgactaaggttcagaagtcttggagctttaacgatagaactcgatttagacccagtctccggctcaagagctcccagcccaagcccgtgatagatgcagatactgcgctgggcacagacgatgtctatgatgaaaaagggtgccagtgcgatgtgagcgtggaagatttgaccccccccctcaagaccgtaataagagccatacggattatgaaattccacgtcgccaaacgaaaatttaaggagaccctgagaccctatgatgtcaaggatgtcattgaacagtactctgctggacacctggacatgctgtgcaggatcaagtcacttcagacccgtgtcgatcaaatactcggcaaagggcaaattacttcggataaaaaatctagagagaagatcacagcggagcatgagactaccgacgatctgtccatgttgggccgcgtagtcaaggtcgagaaacaggtccagtctatagagagcaagctggactgtctccttgacatctatcaacaggtgctgcgtaagggatctgcctctgcgttggctttagcttcgtttcaaattccacctttcgagtgtgaacagacgagtgactaccagtcacctgtggactccaaggacttaagcgggagtgctcaaaacagcggttgtttaagtcgctccacctccgctaacatctccagggggctgcagtttatccttacgccaaacgaatttagtgcccagacattctatgctctgtcacccaccatgcactcacaggcaacccaggtccccatcagtcagtctgatggaagtgctgtggcagccacgaacacgattgccaatcagattaatacggctcctaagccggctgctcccacaactctgcagatccctccgcctcttcccgccatcaaacatttgccacgaccagaaacactgcatccaaaccccgccggtctgcaggaatctatcagcgatgtcactacttgcctggtcgcttcaaaggagaatgtgcaggtggcccagagtaacctcacaaaggaccggagtatgcgaaagagcttcgacatgggcggtgagacacttctaagtgtttgtccaatggttcctaaagaccttggtaaaagcttgtctgtccagaaccttattagatcaacggaggagttgaacatccaactcagcggttccgaatccagtggctctagaggaagccaggacttttatcccaagtggcgagagtctaaactgttcatcaccgatgaagaggtcggtcctgaggaaaccgagaccgataccttcgacgccgctccacagccagcccgcgaggcagctttcgcaagtgattctctgcggaccggacgctcccgcagctctcagtcaatctgcaaagccggcgagtccaccgacgccctgtccctacctcacgtaaagctcaaatag

SEQ ID NO: 200344 - DNA, 2469 bp, synthetic construct
  misc_feature 1..2469: note = Description of Artificial Sequence: Synthetic coding sequence
  source 1..2469: mol_type = other DNA
atgccccggcaccacgccggcggcgaggagggcggcgccgccggcctctgggtcaaatcaggagcagctgctgcagccgccggtggaggacgattagggtctggcatgaaagatgttgaaagcggtcgcggaagggtgctgcttaatagtgccgcagcccgcggcgacggtctcttgctgctcggaactagagctgcaacgctgggggggggcggcggcgggcttcgggagtctaggagaggcaagcagggtgcccgcatgtcccttctgggcaagcctctgagttatacgtcttcccagtcttgccgcagaaacgtgaaataccgtcgtgttcagaactacctatataacgtcctagagaggccacgcggatgggcgttcatttaccatgctttcgtattcctgctcgtgttcgggtgcttaatcctttccgtgttctcaacaatccccgaacacactaaattggcatcctcctgtcttttgattttggagttcgttatgatcgttgtgttcggactggagttcatcatccgcatttggtctgccgggtgttgttgtagatatcgggggtggcaggggaggctgagatttgctagaaaacccttctgcgtcattgatacgatagtgttgatcgcttcaattgccgtcgtgtcagcaaagacccagggcaatatattcgccacaagtgccttgaggagtttgaggttcctacagatcctgcgaatggtccgcatggatcgcagaggtgggacctggaaacttctggggagcgtggtatatgcccacagcaaagaactgatcacggcttggtatatcggattcctggtgctgatctttagctcctttttagtctacctggtggagaaagatgccaataaagagttctccacatatgccgatgcactttggtgggggacaatcaccctgactacgatcggttacggcgacaaaacgccactgacctggctcggaagactgctcagcgctggctttgcgctgctggggatctcctttttcgcattgcctgcgggaatcctgggatctgggttcgcgttaaaggtacaggagcagcaccgccagaaacactttgaaaaacggcgcaatcctgcggcaaatctgatccagtgcgtatggcggagttacgcagcggacgagaagtccgtgagcattgcaacttggaaaccacaccttaaggctctgcacacgtgtagcccgacaaagaaggagcaaggagaagcctcctcccggatcatgaaattccacgttgctaaacgcaagttcaaagaaacactgagaccatacgatgtcaaagacgtgattgaacagtactcagccgggcacctggacatgctttgtcggataaaatcacttcagacaagagttgaccaaattcttggcaagggtcaaattactagcgacaagaaatcacgggaaaagattaccgctgaacacgagactacagacgatttgagtatgttggggcgtgtcgtgaaggtggagaaacaagttcaatccatcgaatctaagctcgactgcctgctagacatctaccaacaggtgttgaggaaggggagcgccagtgctctggctctggcctcattccagattccgcctttcgaatgcgagcagacatcagactatcagtcaccagtagattccaaagacctttccggaagcgctcaaaactcagggtgtttgtcacgctctacatctgctaatatttctcgtgggctacagtttatcttgacgcccaacgagttctctgcgcaaacattctatgcgctcagccctacaatgcattctcaggcaactcaggttcctatctcccagagcgacggctcggccgtggcggcaacgaacacgatcgctaaccagatcaacaccgctcccaagccggcagctccaacaacactgcagattcctcctcctttgcctgccatcaaacacctgccacgccctgagaccctgcaccctaatcctgctggtctccaagagtccatctcggacgtgacaacctgtctcgttgcctcaaaggagaatgttcaggtcgcccagagcaacttgactaaagacagatcaatgaggaagagctttgatatgggcggggagacgctgcttagtgtatgtccaatggtcccaaaggatctgggcaaaagccttagcgtgcagaatctaattcgatccacagaggagctgaatattcagttgtctggtagtgagtcctctggaagtaggggctcccaagatttctaccccaagtggcgagaaagcaagttgtttattacagatgaagaggtggggccggaagagaccgagacagatacctttgacgcagccccgcaaccggcccgcgaagccgctttcgcttctgacagtctgcgtaccggccgtagtcgcagtagccagagcatttgcaaggctggtgaatctacagatgccttgtcattaccacacgtgaagctaaagtag

SEQ ID NO: 200345 - DNA, 2856 bp, synthetic construct
  misc_feature 1..2856: note = Description of Artificial Sequence: Synthetic coding sequence
  source 1..2856: mol_type = other DNA
atgccccggcaccacgccggcggcgaggagggcggcgccgccggcctgtgggttaaatccggagccgccgccgccgctgcagggggagggcggcttgggagcggcatgaaagacgtggagtcaggtcgcgggcgtgtacttctgaactccgctgccgctcggggtgatgggttgctcttgcttggcactcgtgccgccacactgggaggtggcggaggcggactgagggagagccggcgcggaaagcagggagccaggatgtctctgcttggaaagccactttcttacacaagttcgcagtcatgtcggaggaacgtgaagtataggcgggtgcagaattatttgtacaatgtgttagagcgccccagaggatgggcattcatctaccatgctttcgtgtttctcccagtgttcggatgtctcatcttgtccgtcttcagcacaataccggagcatactaagctggcttcttcctgccttctgatcctggaattcgtcatgatcgtcgtgttcgggctagaatttatcattcggatatggagtgctggatgctgttgtcgctacaggggttggcaaggacgtttgcgtttcgcacggaaacctttttgcgtcattgacacaattgtgttgatcgcctcaattgccgtggtctctgcaaagacccagggcaatatcttcgctacctcagccctcagatccctaaggttccttcagatcctgcgcatggtgcgcatggaccgtaggggaggcacatggaagttgctaggaagcgtcgtttacgcccattcaaaggaactgataactgcatggtacattggcttcctcgtcctgatcttttcatccttcctggtttacctcgtcgagaaagatgccaacaaggagttctctacatacgccgatgccctttggtggggtacgattactctgaccaccatcggatacggggataagacacctctgacctggctgggaagattgcttagtgccgggttcgcactcttagggattagcttctttgccctccctgccggtattctgggatcaggttttgcccttaaagtccaggaacagcatcggcagaagcattttgagaaaagacggaacccagcagccaacctgatccagtgcgtgtggcggagctatgctgccgacgaaaaaagtgtctccatagccacatggaagccgcacctgaaggccctccatacttgttctcccaccaaaaaggaacaaggagaggcctccagttctaagttctgtagtaacaagcagaaactcttcaggatgtacacctcccgaaaacagagtcagaaattaagctttaaggagcgggtccgcatggcctctcctcgaggacagagcataaagtctcgacaggcctcggttggtgatcgcaggtctcccagcactgacattacagccgaggggtcccccaccaaggtccagaaatcatggagctttaatgacagaactcgctttcgcccttccctgaggctgaagtccagtcagcctaaacccgtgatcgatgcagacaccgccttaggcactgacgacgtatacgatgaaaaggggtgccagtgcgatgtatctgtagaggacctgactcctccactcaaaaccgtgatcagggctataaggatcatgaaatttcacgtcgcaaaacgcaaatttaaggaaacactgaggccctacgatgtgaaggacgtgattgagcaatattctgcggggcatttggacatgctgtgccgaataaaaagccttcaaacgcgcgttgaccagatcttaggcaagggccagataactagcgacaagaagtctcgcgagaagatcaccgcagagcacgaaacaaccgatgatcttagtatgcttggccgagttgtgaaggtagagaagcaggtccagtccatcgagtcaaagctggactgcctgctcgacatttaccaacaggttctgaggaagggtagtgcaagcgccttggccctcgcctcttttcaaattcccccttttgagtgcgaacaaacatctgattatcagtctcctgtggactcaaaagacctgtctggaagtgcccagaactccggttgtctatcgagatcaacctcagccaacatcagccgaggactacagtttatcctcactcccaacgaattttccgcccagacattctatgccctgagccccaccatgcactctcaggccacacaggtccctatatctcagtcggacggctctgcagtagccgccaccaataccattgctaatcagataaacaccgccccaaagccggccgcccctaccacgttgcaaatccctcctcctcttcccgcgataaagcatctccctcggcccgagacccttcatcccaaccccgccgggctgcaggaatccatctctgatgtgactacatgtttagtggcgagcaaagaaaacgtgcaggttgctcagtccaatttgacaaaagataggtcgatgcgcaaaagctttgatatgggcggtgagacactgttaagcgtctgtccaatggtcccgaaggatctcgggaagagcctgtcagtgcagaacctgatacgctcaacagaggagctgaatattcagctgagtggcagtgaaagttcaggctcccggggcagccaggacttctacccaaagtggagggagtctaaactgttcataaccgacgaggaagtcggtccagaggagacggagactgacacctttgatgctgcaccacagcctgcacgcgaggcagcctttgcctcagacagcctgagaactggcaggtcccgctcgagccagtctatatgtaaggccggagagtcgaccgatgcactgagcctgccccatgtcaaacttaaatag

SEQ ID NO: 200346 - DNA, 2577 bp, synthetic construct
  misc_feature 1..2577: note = Description of Artificial Sequence: Synthetic coding sequence
  source 1..2577: mol_type = other DNA
atgcccgccggcatgaccaagcacggcagccggagcaccagcagcttgcctcccgagcccatggagatagtccgaagtaaggcctgctcgaggagagtgcgcttgaatgtcggtgggctggcccacgaagtgctgtggcgaactctggatcgtctgccccggactcgcctgggcaaactgagagattgcaatacccatgactccttgctagaggtgtgcgatgattatagcctcgatgacaacgagtacttctttgaccgccatccaggggccttcacttcgatattgaacttttacaggaccggtcgcctacacatgatggaggagatgtgtgctttgagcttttctcaggaactggattactggggcattgacgagatctacctggaatcgtgctgccaagccagataccaccagaagaaagaacagatgaacgaggagcttaagcgcgaagcagagactcttagggagcgcgaaggcgaagagtttgataacacttgctgcgcagaaaaacggaagaagctgtgggacctgctggagaagcccaattccagtgtcgccgcaaaaatactggcaatcatcagcattatgtttatcgtcctgagcacaatcgctctgagtctgaacaccttaccggagctccagagtttggatgagtttggacagagcactgacaatccacagttggcccacgtagaagctgtttgcatcgcgtggtttaccatggagtaccttctgcgctttctctccagcccaaaaaagtggaagtttttcaaggggccgttaaatgccattgacctcctggccatacttccctattacgttaccattttccttactgaaagtaacaagtctgtgcttcagtttcagaacgtacgcagggtggttcagatctttcgcatcatgaggatccttaggatcctaaaacttgcacggcattcgacagggctccagagcctgggattcaccttaaggcgaagctataacgagttaggtctccttatcctcttcctcgctatgggtattatgatcttttccagtctggtgttttttgccgaaaaagatgaagacgacaccaagtttaagtctattcccgctagcttctggtgggctacaattaccatgactactgtcggctatggggatatctatcccaagactttgctggggaagatcgtaggaggactttgttgcattgcaggggttctcgtgatcgctcttcccatccccattattgtaaataatttctccgagttctataaggagcaaaaacggcaggagaaagcaatcaaacgtcgtgaggccctagaaagggccaaaaggaacggcagcatcgtgtccatgaacatgaaagacgcctttgccaggagcatcgaaatgatggatatcgtggtggagaagaacggcgagaacatgggtaagaaagataaggtgcaggataaccatctgagccccaataaatggaagtggactaaacggactctgtccgagacaagttcctctaaatccttcgaaaccaaggagcaaggctcgcccgaaaaggctcggtcctcctcatccccacagcacttaaatgtgcaacagctcgaagacatgtataacaagatggccaagactcagtcccagcccatcttgaacacgaaagaatctgccgctcagtcaaagcctaaagaagaactggagatggagagcatcccctcccctgtggcccccctccccacgcggactgaaggcgtgatcgatatgaggtctatgtccagcatcgattccttcattagctgtgctactgacttcccagaagccaccaggttttctcactcgcccctgacatccttgccttcaaagacgggtggctcgacagcacccgaggttggctggcgtggtgccctgggcgcctcaggggggcgattcgtcgaggctaacccatcacccgacgcaagccagcacagttccttcttcatcgaatcccccaaatcttcaatgaagacaaataacccactaaagcttcgggcactgaaggtgaattttatggagggggacccttccccccttctgccagtcttggggatgtatcatgaccccctgaggaacagagggtctgcggcggccgctgtggccggcctggagtgtgcgactctgttggacaaggccgtcctgtcccccgagtcctcaatttacacaaccgcttccgctaagacgccgccaagatcgcccgaaaagcatacggccatcgctttcaattttgaagcgggagtacatcagtacatagacgcggacacagacgacgaagggcaactgctgtacagcgtcgattcttccccgcctaaatccctccccggatcgaccagcccaaaattctccactggaacccgaagtgaaaagaatcacttcgaatcgtcgccgctcccaactagcccaaagttcttgaggcagaattgcatctactcaacggaggccttgacagggaaggggccgagtgggcaagaaaagtgtaagcttgagaatcatatctctccagatgtgagagtcctgccagggggaggcgctcatgggagcacacgggatcaaagcatctag

SEQ ID NO: 200347 - DNA, 2442 bp, synthetic construct
  misc_feature 1..2442: note = Description of Artificial Sequence: Synthetic coding sequence
  source 1..2442: mol_type = other DNA
cgggacggcggcgagaagaccgccgtgacccggctgggcaagctgagggattgcaacacacacgacagtctgttggaggtctgtgacgattatagcctggacgataacgaatatttcttcgatcgacaccctggggcatttaccagcattttaaacttctaccggaccggccggctccatatgatggaagaaatgtgtgcgctcagttttagtcaggagttggactattggggcatcgacgagatctatctggaaagctgttgtcaagccagataccaccagaaaaaagagcaaatgaacgaggaattaaagagggaagccgagacattgagggaaagggagggggaggagtttgacaacacgtgctgcgccgagaagaggaagaagctatgggacctcctggaaaaacctaatagttcagtggctgctaaaatccttgccattatatccatcatgttcattgtcctgtctacaatcgcactatctctgaatactctccccgagttgcagtctctagacgagtttgggcagtccacagataaccctcagctggctcacgtggaagcagtgtgcattgcatggttcacgatggagtatctgctcaggtttctctcctcacctaaaaaatggaaattctttaagggacccctgaatgcaatcgacctgttggccatcctcccatactacgtgacaatatttctgaccgagagcaacaagagcgtacttcagttccagaacgtgcgaagagttgtgcagattttccgtatcatgagaatcctacggatcctgaaactggccagacattctaccgggctccagtccttaggctttactttgagacggtcttacaatgaattgggactcctgattttattcctggccatggggataatgatcttttcatcattagtcttctttgcagagaaggatgaagatgacacaaaattcaaatcgattcccgcctcattttggtgggccactataaccatgacaacagttgggtacggcgatatatatcctaagacacttctaggtaaaattgtaggtggtttgtgctgcattgccggagtactagtgattgccctgcccatccctatcatcgttaataacttctccgagttttataaagaacagaagcgtcaggaaaaagctattaaaagacgtgaggctctagagagggccaaacgcaacgggtctatcgtatccatgaatatgaaagatgcctttgctagatccatcgaaatgatggatattgtggtggagaaaaatggcgaaaacatgggcaagaaggacaaggtgcaggacaaccacctcagccctaataaatggaaatggaccaaaagaactctgtccgagacaagcagtagcaaaagcttcgaaaccaaagaacagggcagtccggagaaggctagatcatcaagtagcccgcagcacctaaatgtgcagcagctggaagatatgtacaataaaatggccaagactcagagccagcccattcttaataccaaagaaagcgctgcacagtccaagccgaaggaagaactggagatggagtccatcccttcccctgtggcgccgcttccaacccgcacagaaggcgtgatcgacatgagatctatgagctctattgactctttcatctcttgtgccaccgatttcccagaggctacacgattcagccactctcccttgacctcacttcctagcaagaccggcggctccaccgctccagaggtgggttggcgcggagcattgggggcttctggtggccgattcgtggaggcgaatccatcccccgacgctagtcagcacagtagcttcttcattgagtccccaaaatcgtccatgaagacaaacaaccccctcaagctgcgggccttgaaagtgaacttcatggagggcgaccctagccccctgctgccggtgctggggatgtaccacgacccactccggaacagagggtcagccgctgcagcggtggccggccttgagtgtgcaaccctccttgataaggcagtgcttagccctgagtcctcaatttacactactgcatctgctaaaacacccccgcggtcaccagagaaacacacggcgatcgcttttaacttcgaagccggggtacatcagtacatcgacgccgatacagacgacgaagggcaactgttgtatagtgtggacagctcgcctcctaagagccttcctggctcaacaagtcctaagttttcaaccgggacgaggagcgagaaaaatcacttcgagtcttcccctctccccactagtcccaagttcctgcgacagaactgcatctatagcacagaagcgctcactgggaagggtccctcggggcaagagaagtgcaaactggaaaatcatatttccccagatgtccgtgtgctccctggcggtggcgcacatgggtccacacgtgatcaatctatctag

SEQ ID NO: 200348 - DNA, 2736 bp, synthetic construct
  misc_feature 1..2736: note = Description of Artificial Sequence: Synthetic coding sequence
  source 1..2736: mol_type = other DNA
atggccgagaaggccccccccggcctgaaccggaagaccagccggagcaccctttcattgcctccagagcccgtcgacatcatccggtctaaaacatgctcacgtcgagtcaagataaatgtgggggggctgaaccatgaagtgctctggaggacgttagataggctgccccgcacacgtttgggaaaattgagagactgtaacacgcatgaatctttactggaagtttgcgatgattataatctgaatgagaatgagtatttctttgatagacaccccggggctttcacatcaatcttgaacttttacagaactgggaaactgcacatgatggaagaaatgtgtgcactgagtttcgggcaggaactcgactattggggtatcgatgagatttacctggagtcttgctgtcaggcccgctaccaccaaaagaaagagcagatgaacgaggaactccgtagggaagccgaaactatgagggaacgggagggcgaggaattcgataacacttgttgtcctgacaagcgcaaaaagctgtgggacctgctggagaagccaaattcaagcgtagctgcaaagattctggccatcgtatccattttgttcatcgtgcttagtaccatcgctttgagtttgaacaccctgccagagctgcaggaaaccgacgagtttggccagctcaacgacaataggcagctagcccacgtagaggccgtatgtattgcatggtttacaatggaatacctccttagatttctgtctagccctaacaaatggaagttttttaaaggccccctgaacgtcatcgatctcttagcaattctcccctattatgtcactatattcctgaccgagagcaataagagcgtgctgcagttccagaatgtccggcgggtggtccagatattcagaatcatgaggattctaagaatccttaagctagcccgacactctaccggcctgcagtctctcggatttactctcaggagaagttataacgaactgggtctgctgatcctctttcttgcaatgggtatcatgatttttagcagcctagtgttcttcgccgaaaaagacgaagacgccacaaagttcacgtctatacctgccagtttctggtgggcaaccataaccatgactaccgtggggtatggtgatatctacccaaagaccctactcggcaagatagtgggcgggctctgctgcatcgcaggtgtgttggttatagcactgccgattccaatcatcgtcaacaacttcagcgagttttacaaagagcagaaaagacaggaaaaggccatcaagagaagagaggctctggagcgcgcaaagcgcaacggttcaattgtcagcatgaaccttaaggatgcttttgcacggagtatggagcttatcgacgtcgcagtagagaaagccggtgaatctgcaaacaccaaggacagcgcagacgacaatcacctttcaccatctcgctggaaatgggctcgcaaggcactcagtgagactagcagcaacaagagtttcgaaaacaagtaccaggaggtctcccaaaaagatagtcatgaacaactgaataacaccagttcttcaagtccccagcacctctccgcccagaaactggaaatgttgtacaatgaaattactaaaacgcagccacatagccacccgaatcctgattgtcaggaaaagcctgaacggccatctgcttatgaagaggagatcgaaatggaagaggtagtgtgcccccaggagcagctcgcagtggctcaaaccgaggttattgttgatatgaagagcacctcttccattgatagtttcacctcatgcgccaccgactttacagagacagagcggtcgccactccctccaccttcagcctcccatctgcagatgaagttcccaactgacctgccagggacggaagagcaccaacgcgcaaggggacccccttttctcacccttagcagagagaaaggccccgccgcgagagacggtaccctggaatacgcccccgtcgatatcacagtgaatcttgatgccagcggctcccaatgcggacttcattctccgcttcaaagcgacaacgctaccgacagcccgaaatcttctctcaagggcagcaatcccctcaagtcaaggagtctgaaagttaattttaaagagaaccgagggagcgccccccagacaccaccctcaacagcccggcccctgcccgtaaccaccgcagactttagtttgaccaccccacagcacatatcaaccatcctgcttgaagagacaccctcccagggagataggcccctcctaggaacagaggtatctgctccttgtcaagggccctcaaaaggactttcgccaagatttcctaaacagaagttgttcccttttagttctagggaacgcagatccttcaccgagatcgatacaggggacgacgaagatttcctggagttacctggggcccgtgaggaaaagcaggtagattcttctcccaattgtttcgctgataagccttcagacggccgcgacccactgagggaagaggggagcgtgggtagcagttcacctcaagacacaggccacaactgcagacaggatatctatcatgcagtaagcgaagttaaaaaggacagctcacaagaagggtgtaaaatggagaaccatttatttgcccccgaaattcactccaatcccggtgacaccgggtactgccccacacgggagacaagcatgtag

SEQ ID NO: 200349 - DNA, 1206 bp, synthetic construct
  misc_feature 1..1206: note = Description of Artificial Sequence: Synthetic coding sequence
  source 1..1206: mol_type = other DNA
atgcaggtgagcatcgcctgcaccgagcacaacctgaagagccggaatggagaggaccgcctgctcagtaaacagtcctccacagcaccaaatgtggtaaatgcagcccgcgccaaattcagaaccgtcgcaataattgccagatccttaggtacattcactccacagcaccacatttctttgaaggagtccacagccaagcaaactgggatgaaatacagaaatctaggtaaaagcggcctgagagtaagctgtctagggttaggcacttgggtgacttttgggggccagatcagcgatgaagtagcagagcgattaatgaccattgcctacgaatccggagttaacctgtttgacactgccgaggtgtatgcggcgggtaaggccgaagtgatcctgggttcaattattaagaaaaaaggttggcgccgtagctccctggttatcacaacaaaactgtattggggcggcaaggccgaaacagagaggggattatcccgtaaacacataattgaaggactcaaggggagcctccagagacttcagcttgagtacgtggatgtcgtgtttgccaacaggcccgatagcaatacccccatggaagaaattgtgagagcaatgactcatgtcatcaaccagggcatggcaatgtactggggaacatctcgatggtcggcaatggaaattatggaggcatactccgtggcaagacagtttaacatgatcccccccgtctgcgagcaagccgagtatcacttattccagagggaaaaggtcgaagtacagctgccagaattgtaccataagattggcgtgggtgcaatgacctggtcccctcttgcctgtgggatcatttctgggaaatatggaaatggagtccccgaaagcagcagagcgtccctgaaatgctaccaatggttgaaagagcgtattgtctcagaggaaggtcggaagcagcagaacaagcttaaagacctctctccaatcgcagaacgcctgggttgcacactgcctcagctggccgtggcgtggtgtctgaggaacgagggggtatcaagcgttctcctgggtagttcaactcccgaacaactaatcgagaatctcggagccatccaggtgctgcccaagatgacgtcccacgtggtcaacgaaatcgacaacatcctcaggaacaagccatacagtaaaaaagattataggtcgtag

SEQ ID NO: 200350 - DNA, 1173 bp, synthetic construct
  misc_feature 1..1173: note = Description of Artificial Sequence: Synthetic coding sequence
  source 1..1173: mol_type = other DNA
atgctggccgcccggaccggcgccgccggcagccagatcagcgaggagaacaccaaactgcgcaggcagtccggcttttccgtagccggaaaggacaaatcacctaagaaagcttctgagaatgctaaggacagtagtctttcgccaagtggtgaaagccagttacgtgctcgacaactagccttgttgcgggaagtggaaatgaattggtatctcaagctgtgcgatttgtcttccgaacacacaacagtgtgcaccactgggatgcctcacagaaacctcgggaagtcaggcctgcgcgtcagttgtctgggtctgggcacatgggtgaccttcggtggccagatcagtgacgaagtggctgagaggttgatgactatagcatacgaatctggagtgaacctctttgatacggccgaggtctacgctgcaggcaaggccgaagttatactcgggagtatcataaaaaagaagggctggcggagaagcagccttgtcatcaccaccaagttgtattggggcggaaaggccgaaaccgaaagaggcctctccaggaaacacatcattgaagagatagtgcgagccatgacacacgttattaaccagggaatggcgatgtactggggaacttctcgttggtctgccatggagatcatggaggcctacagcgttgcacgtcagttcaatatgatcccacccgtttgtgaacaggccgagtatcatttatttcagcgtgaaaaagtcgaagttcaactccctgaactgtaccacaagatcggagtgggcgccatgacctggtctccgctagcctgtggaatcataagcgggaagtatggcaatggcgtcccagaaagctccagggcgtcgctcaagtgttaccagtggttgaaggaaagaattgtatcagaggaaggaaggaagcagcagaacaagctaaaggacctctctccaatcgccgagaggctgggctgcacactccctcagctggccgtcgcttggtgcctgcgcaatgagggagtttcaagcgttctgctaggctcctcaacccctgagcagttgattgagaatctcggcgccattcaggttctgcctaagatgaccagtcacgttgtgaacgagatagacaatattctaagaaataaaccttacagcaagaaagactaccggtcctag

SEQ ID NO: 200351 - DNA, 1227 bp, synthetic construct
  misc_feature 1..1227: note = Description of Artificial Sequence: Synthetic coding sequence
  source 1..1227: mol_type = other DNA
atgcacctgtacaagcccgcctgcgccgacatccccagccccaagctgggactcccgaagtcctctgaaagcgcattaaagtgtagatggcatctcgcagtgaccaaaacacaaccacaggccgcctgcaagcccgtgaggccctccggagccgccgagcagaaatatgtggaaaagtttctccgcgtgcatggtatatctctgcaggagacgacaagagccgaaacaggcatggcctatagaaaccttggaaaatcgggtttgagggtctcctgcctgggtttaggcacatgggtcactttcggaggccagatttcggatgaggtggcagaacggttgatgactattgcctacgagtccggggttaatctctttgacacggcggaggtatatgcagcaggaaaggccgaagtgattttgggatctataattaagaaaaagggctggcggcgctcttccctcgtcatcaccacaaaactgtactgggggggcaaggcggagaccgagcggggcctgtcccggaagcatatcatcgaggggctgaaagggtcattacagagactgcagctagagtacgttgatgtcgtgtttgcaaaccgtcctgattcgaatacaccaatggaggaaatagtgcgcgccatgacacacgtaatcaaccagggaatggcgatgtactggggcacatcccggtggtcagccatggagatcatggaggcttattctgtcgcacgccagtttaacatgataccacccgtatgcgagcaggcggaataccacctattccagagagaaaaggttgaggttcagcttcctgagctttatcacaagataggtgttggggcgatgacatggagtcccctagcttgcggcatcatctctgggaaatacggcaacggggtgcccgagagctctcgcgcaagccttaagtgttaccaatggctgaaggagcgcattgtgtcagaagagggcagaaagcagcaaaacaaactgaaggacctaagccccatagcagaacgcctgggctgcaccctcccccaactcgcagttgcttggtgcttacgcaatgagggcgtatctagcgtactgctggggtccagcacaccagagcagctgatagaaaatctgggcgccatacaggtcttgccaaagatgacatcgcacgtggtgaacgaaatcgataacatcctgcgcaacaagccctattccaagaaagactatcgcagctag

SEQ ID NO: 200352 - DNA, 1260 bp, synthetic construct
  misc_feature 1..1260: note = Description of Artificial Sequence: Synthetic coding sequence
  source 1..1260: mol_type = other DNA
atgctggccgcccggaccggcgccgccggcagccagatcagcgaggagaatacaaagctgcgcagacaaagcggcttctctgtggctggcaaagacaagtcccccaaaaaagcttcggaaaatgccaaagatagtagtttgagcccatcgggtgagagccagttgagagcacgacaactggctttactgcgggaggtcgaaatgaactggtacctcaaactgtgtgatctgagctcggaacacaccaccgtgtgtaccaccggtatgccccatcggaatctcggcaaatcagggctgcgcgtttcctgcttgggcctagggacctgggtcacattcggcggccagatcagtgatgaggtggccgaacggctcatgactattgcctatgaatcaggagttaacctcttcgatactgcagaagtctacgccgccggcaaggccgaagtaatcctggggagtatcataaaaaagaaagggtggcgcaggtcaagcctggtgattactacaaagctgtattggggggggaaggcagagaccgagcgtggtctgtcccggaaacatatcattgaaggcctgaaggggtctctccagaggcttcagctcgaatacgttgacgtggtttttgcgaaccggcccgatagcaatacccccatggaggagatcgtcagagccatgacccatgtgatcaaccagggcatggccatgtactggggcacatcgcgctggtctgcaatggaaattatggaggcttacagcgtcgcaagacagttcaacatgattccacccgtgtgcgaacaggcagaatatcacctgtttcagagggaaaaagtggaggtgcaattgccagagttatatcataaaattggcgttggggcaatgacttggtctcccctggcctgcgggattatttccggtaaatacggcaatggagtaccggagtccagtagggcatcactcaagtgttatcaatggctgaaggagagaatcgtttcggaggagggacggaagcagcagaacaagctgaaggatcttagtcctattgcagagagactggggtgcacgctccctcaactggctgtggcatggtgtctacgaaacgagggagttagctcagtactcttgggttccagcactcctgagcagttgatagagaatctaggcgccattcaagttctgccaaagatgacttcccacgtcgtaaatgagattgataatattctgaggaacaaaccgtactcgaagaaagattaccgttcttag

SEQ ID NO: 200353 - DNA, 1104 bp, synthetic construct
  misc_feature 1..1104: note = Description of Artificial Sequence: Synthetic coding sequence
  source 1..1104: mol_type = other DNA
atgtaccccgagagcaccaccggcagccccgcccggctgagcctgcggcagaccggcagccccggtatgatatatagtacgcgctatgggtcgcccaagagacagctgcagttctatcggaacttaggaaagtctgggctgcgggttagctgtttgggactcgggacgtgggttactttcggcggacaaataaccgacgagatggccgagcagctcatgacattagcttatgacaacggcattaatctgttcgacactgcagaggtatacgcagcagggaaagcggaagtggtcctaggcaatattatcaaaaagaagggctggcgccgctcgtcactagtgattactactaagatcttctgggggggcaaagctgagaccgaacgcgggctgtcccgcaagcacattatcgaagggctcaaggcttccctggagcggttgcagctggaatacgtggatgttgtgtttgcaaatcgacccgatccaaacactcccatggaggagaccgtgagggcaatgacacacgtcatcaaccagggcatggctatgtactgggggacaagtaggtggtcatcaatggaaatcatggaggcctattcggttgcacgccagttcaatctcacgcctccgatctgcgagcaggccgagtaccacatgttccaaagagaaaaagttgaggtgcagctgccagagctgttccataaaattggagttggagccatgacatggagcccgctggcatgcggcatcgtaagtggtaaatacgacagtggaatccctccgtactcacgagcctctctcaaaggctaccagtggttgaaagataaaatcctgagcgaggaggggaggcgtcagcaggcaaagttgaaagaactgcaggccattgctgaacgactgggctgtacactgcctcagttggccattgcatggtgcctcagaaatgaaggtgtgagctcagtcctccttggagcctctaatgccgaccagctgatggagaacataggagcaatacaggtgttacccaaactcagctccagtatcatccacgaaatcgacagcatcctgggaaacaagccctatagtaaaaaggactatcgtagttag

SEQ ID NO: 200354 - DNA, 1104 bp, synthetic construct
  misc_feature 1..1104: note = Description of Artificial Sequence: Synthetic coding sequence
  source 1..1104: mol_type = other DNA
atgtaccccgagagcaccaccggcagccccgcccggctgagcctgaggcagaccggttcccccggcatgatctactccaccaggtacgggagcccgaaacgtcagttgcaattctatcggaatctcggaaaatcagggctgcgggttagctgcctcggattgggaacctgggtaactttcggcggccagattaccgacgaaatggccgagcagttgatgaccttggcctacgataatggcattaacctgttcgatactgccgaggtgtacgccgcaggaaaggcagaagtggtgctgggcaacatcataaaaaagaaggggtggaggcgctcttctctggtaatcacaaccaaaatcttctgggggggtaaagccgagaccgaacgcggactcagtcggaaacatattattgaagggctcaaagccagtctggaacggctccaattggaatatgtcgacgtggtgttcgccaataggccagaccctaatacacctatggaggaaaccgtgagggctatgacccacgttatcaatcaaggtatggcaatgtattggggaacttcccgatggagctctatggaaattatggaagcatattccgttgcacgacagtttaacctgactccccccatttgtgagcaagctgaataccacatgtttcagcgggagaaagtggaagtacagctgcctgagttgttccacaagattggcgtgggagccatgacctggtctcccctggcctgtggcatcgtgtctggtaaatacgacagcggaataccgccctatagcagggccagcctgaaagggtaccagtggctgaaagacaagatactaagcgaggaaggccgcaggcagcaggccaagctcaaggagcttcaggccatcgcagagcggctcggctgcacactgcctcagcttgcaattgcctggtgtcttcgcaacgaaggagtgagttccgtcctcctgggtgctagcaacgctgaccaactgatggagaacattggcgcaatccaggtgcttccaaagttgagctcaagcattatccacgaaatcgactctatcctcgggaataagccttatagtaagaaagattaccggagctag

SEQ ID NO: 200355 - DNA, 1062 bp, synthetic construct
  misc_feature 1..1062: note = Description of Artificial Sequence: Synthetic coding sequence
  source 1..1062: mol_type = other DNA
atgtaccccgagagcaccaccggcagccccgcccggctgagcctgcgtcagaccggaagcccgggaatgatttatcggaacctgggcaagagtgggctgagagtgagctgcctcggcctcgggacctgggtcacgtttggggggcagatcaccgatgaaatggccgagcagctcatgacccttgcatatgataatggtatcaacctgtttgacactgccgaggtttacgccgctgggaaagccgaggtcgtgctgggcaatatcattaagaaaaagggctggagacggtcatccttggtcatcacaacaaagatcttctggggcggcaaagccgagaccgaaaggggactgtccaggaaacatattatcgaaggtttaaaggcctctctggaacgtctccagttagaatacgtggatgtggtgtttgcaaatcggcccgaccccaacacccccatggaggaaacagtgagagcaatgacccacgtcatcaatcagggtatggcaatgtattgggggacatcccgctggagctccatggagattatggaagcatatagtgtggcccgccagttcaatcttacaccaccaatttgtgaacaagcggaataccatatgtttcaacgcgaaaaagtggaggtgcagctgcccgagttattccataagattggggtgggtgcaatgacctggagcccattagcgtgtggcattgtatcagggaagtacgacagcggaattcctccttactccagggcttccctcaaaggctaccaatggctgaaggataagatcctctccgaggaggggcgaagacagcaggccaaactgaaggagcttcaggcgatcgctgagcgcctggggtgtactctgccacagttggccattgcctggtgtctccggaatgagggagtctcctcagtgctcctaggcgcgagcaacgccgaccagctgatggaaaacatcggcgccatccaggtgctgccaaaattgtcatcttctattattcatgagatcgattcgattctaggaaataaaccgtactccaagaaagattacagatcatag

SEQ ID NO: 200356 - DNA, 1248 bp, synthetic construct
  misc_feature 1..1248: note = Description of Artificial Sequence: Synthetic coding sequence
  source 1..1248: mol_type = other DNA
atgctgagcatgacctacagcgagagcctgcggagcgtgagcagccgatgccatagcgagtgggccctgcacccagtaagacagactgacaccctagagctgcaacgacttagggaggtccgcgccgccgcccaggctaggaacatggagagcttcctcaggatgcacggtctgtccctagatggatgcaccgcccaacgaaccggaatgaagtacaggaacctgggcaagtctggtctgcgggtgagctgcttaggcctgggcacgtgggtaacatttgggggccagatcactgacgagatggccgagcagctgatgaccctagcctatgataatggtatcaatctctttgatactgccgaggtttatgcagccgggaaagctgaagttgtgctcggaaacatcatcaagaagaaaggctggcggcgcagctccctcgtcatcacaaccaagatcttttgggggggcaaagccgagacggaaagaggactgtcacggaaacacatcatcgaggggcttaaggcctccttggaaaggctgcagctggaatacgtggacgtcgtattcgccaatagaccggaccctaacacacctatggagggcgatcctttcagctcatctaagagccgcacatttatcatcgaggagacagtcagggcgatgacgcatgtgatcaatcaaggcatggctatgtactggggtacctcgcgctggtcaagcatggaaattatggaagcgtactccgtagctcgccaatttaatttgacaccacccatctgcgaacaggccgaatatcatatgttccagcgggaaaaggtagaggttcaactcccagagctgttccataaaataggagtcggcgcaatgacctggtcaccgcttgcttgcgggattgtatctggtaaatatgattccggaatacctccctactccagggccagcttgaaaggttaccagtggctaaaagacaagatcttatcagaagaggggcgcaggcagcaagccaaacttaaggagctccaagcaatcgctgagcgtctcgggtgtactctgcctcaattggcgatcgcttggtgtctgagaaacgaaggggtgtcctccgtgctgctaggggccagtaacgcagatcagctaatggagaacatcggagccattcaggttttgccgaaactgagttcgagcattatccacgagattgacagtattctcggcaacaagccatattccaagaaggattatcgatcttag

SEQ ID NO: 200357 - DNA, 522 bp, synthetic construct
  misc_feature 1..522: note = Description of Artificial Sequence: Synthetic coding sequence
  source 1..522: mol_type = other DNA
atgtaccccgagagcaccaccggcagccccgcccggctgagcctgcgccaaaccggtagccctgggatgatctactcaacgcgttacgggtctccaaaacggcagttacagttctacagaaacctcggtaaatctggactcagagtcagctgtctgggcctgggtacatgggtcaccttcggagggcagattaccgacgagatggctgaacagctgatgactctcgcatacgacaacgggataaatctcttcgatactgccgaagtctacgcagctgggaaggccgaggtcgtgctggggaacattattaagaagaaaggctggtctcagcagggcgaaagagccggacaggcgagggtgaccccaccatgttcactgggacgtcgcgcacgggatgcgtcaaaatctgccggtgcgggctgccacctacaggctcaggcttgcgtgcccagctccacacaggcgctccagacaacgcggggaagggcccccctgaaaccacctcctccacttgcatcatag

SEQ ID NO: 200358 - DNA, 1062 bp, synthetic construct
  misc_feature 1..1062: note = Description of Artificial Sequence: Synthetic coding sequence
  source 1..1062: mol_type = other DNA
atgtaccccgagagcaccaccggcagccccgcccggctgagcctgaggcagacggggtcaccgggaatgatttacaggaatctcggcaaatcaggactgagagtgtcgtgcttagggctggggacgtgggtaaccttcggtggtcagattacggacgagatggctgaacagcttatgaccctggcctatgacaatggcatcaacctgttcgacaccgccgaggtctacgcagccggaaaggccgaggtggtcttgggcaatattattaaaaagaaaggctggcgccgttctagcttggtgatcactactaaaatcttctggggcgggaaggccgagacggagcggggtttaagccggaagcacattattgaagggctaaaagcgagtttggaaaggctacaactagaatatgtcgacgtagtgtttgcaaataggcctgaccctaacacccccatggaggagacagtgcgggctatgacccatgtcattaatcagggcatggctatgtactggggtacctcccgctggtcgtcaatggagattatggaagcatattctgtggcaaggcagttcaacttgactccacctatctgtgagcaggcagagtaccacatgttccagcgcgagaaggtggaagtgcaactgcccgagctcttccacaagattggggttggcgctatgacttggtcccctctggcctgcgggattgtgagcgggaagtacgactccggaatcccaccatactcacgcgcatctctgaaaggatatcagtggctgaaggataaaattctgtccgaggaaggcaggcgccaacaggccaaactgaaggaactgcaagctattgccgaaaggttaggatgtaccctgccgcagctcgcaatcgcatggtgcctgcggaacgagggggtgtcatctgttttgttgggcgcctccaacgcagaccaacttatggaaaacatcggggctatccaggttctcccaaagctgagttcctccatcatccatgaaatagacagcatacttggaaacaaaccctactctaagaaggactatagaagctag

SEQ ID NO: 200359 - DNA, 1104 bp, synthetic construct
  misc_feature 1..1104: note = Description of Artificial Sequence: Synthetic coding sequence
  source 1..1104: mol_type = other DNA
atgtaccccgagagcaccaccggcagccccgcccggctgagcctgaggcagacgggctcaccagggatgatttactctacccggtatgggtctccaaaacggcagctgcagttctatcgcaacctggggaaatctggcctgagggtgagctgcctcggattgggcacatgggtgacattcggaggtcagattacggatgagatggcagagcagctgatgaccctggcgtacgacaacggcatcaacctctttgacacagccgaggtgtatgctgcagggaaagctgaggtcgtcctcggtaatataatcaaaaagaagggatggaggcggtcttccctggtaatcactactaaaatcttctggggaggaaaagcggagaccgagaggggactctcccgcaaacacatcatagaaggcctgaaggcaagccttgaacggctgcagctcgaatatgtggacgtcgtgtttgccaaccggccggatcccaacacccccatggaggagacagtgagggctatgacacatgtgattaatcagggaatggctatgtactgggggacgtcccgatggtcaagcatggaaatcatggaagcatacagcgtcgcccgtcaatttaacctgacaccacccatctgtgagcaagctgagtaccatatgttccagagggagaaagtagaagtgcagcttcctgaattgtttcataagattggagttggcgcaatgacttggagcccccttgcctgcgggatcgtcagcgggaagtatgatagcgggattcccccgtactcccgggctagtcttaaggggtaccagtggctcaaggacaagattctgagtgaagaggggcggcggcagcaggctaagctgaaggagctccaagctatagcagagagacttggatgcaccctgccacagctcgccatcgcttggtgtctacgcaacgagggcgtttcatctgttctcctgggtgcctctaacgccgatcaactgatggaaaacataggagctattcaggtcctgcccaaactttcaagcagtattattcacgaaatcgattctatcctcggtaacaaaccctactctaaaaaggactatcgcagctag

SEQ ID NO: 200360 - DNA, 522 bp, synthetic construct
  misc_feature 1..522: note = Description of Artificial Sequence: Synthetic coding sequence
  source 1..522: mol_type = other DNA
atgtaccccgagagcaccaccggcagccccgcccggctgagcctgcgccagacaggctctcctggaatgatctatagcactcgttatgggtcacccaaacgacagctgcagttctatagaaacttggggaaatcaggactcagggtatcctgcttaggcctcgggacctgggtgactttcggaggacagatcactgacgaaatggccgaacagctaatgacactggcgtacgacaatgggatcaacctgttcgataccgcagaagtctatgcagcaggcaaagctgaagtagttcttgggaatattatcaaaaaaaagggctggcggcagaggggggagcgagctgggcaggcaagagttactccaccctgcagcctgggccgcagagccagagacgcaagtaagtccgctggagccggatgccacctccaggcccaggcctgcgttcctagcagtacccaggccctgcagacaacccgagggcgcgctcctctgaaacctccaccccctttggcgtcctag

SEQ ID NO: 200361 - DNA, 762 bp, synthetic construct
  misc_feature 1..762: note = Description of Artificial Sequence: Synthetic coding sequence
  source 1..762: mol_type = other DNA
atgtaccccgagagcaccaccggcagccccgcccggctgagcctgaggcagactggatctcctggcatgatttactccacacggtatggcagtcctaagagacaattgcagttttatcgaaatttaggaaagtctggtctcagggtgtcgtgcctgggactgggtacctgggtaaccttcggcggccagatcaccgatgaaatggcagaacaactgatgactctggcctatgataacgggatcaacctgtttgacactgccgaagtgtatgccgctggaaaagccgaggttgtgctggggaacatcatcaagaaaaagggctggcgacggagtagcttggtcatcacgacaaagattttctggggtggcaaagcggagacagagcgaggattatcacgcaagcacattattgagggactgaaggcaagtctcgaacgactgcagttggaatacgttgatgtggttttcgccaacaggcctgaccccaacacaccaatggaagaaacggtgcgtgcgatgacccatgtgatcaaccaggggatggccatgtactggggcaccagccggtggagcagcatggagattatggaggcgtatagtgtggcaagacagttcaacctgacaccccccatttgtgagcaggcggagtaccacatgttccagcgtgagaaggttgaggttcagctgccagaactgtttcacaaaatcggcgttggcgctatgacctggtcccccttagcctgtggcatcgtctctggatag

SEQ ID NO: 200362 - DNA, 765 bp, synthetic construct
  misc_feature 1..765: note = Description of Artificial Sequence: Synthetic coding sequence
  source 1..765: mol_type = other DNA
atgtaccccgagagcaccaccggcagccccgcccggctgagcctgcgacagacaggatctccaggcatgatctacagaaatctggggaagtccggtctgagggtctcatgccttggcctcggtacatgggtcacattcggagggcaaatcacggacgagatggcagagcaactcatgacacttgcttatgataatggcattaatctcttcgacactgccgaagtctatgcggccggtaaggcagaagtggtactcggaaatatcatcaagaaaaaggggtggagacgtagttcattggtgatcacaactaaaatcttctggggtgggaaggcggagaccgagcgaggacttagtaggaagcacattatcgaaggactcaaggcatcgctggagcgattgcagctggagtacgttgacgtggtctttgctaacagacccgatcccaacacccccatggaagagactgtgagggcaatgacacatgtcatcaaccagggcatggccatgtactgggggacctccaggtggagctccatggagatcatggaggcatactctgtggccaggcagtttaatctgacccctccaatttgtgaacaggcagagtatcacatgttccagagggaaaaggtggaggtccaactgcctgagctcttccataagatcggcgttggtgcaatgacatggtcgccgcttgcatgcgggatagtgtccggaaaatatgacagtggcatcccaccctacagcagagcctctcttaagtag

SEQ ID NO: 200363 - DNA, 288 bp, synthetic construct
  misc_feature 1..288: note = Description of Artificial Sequence: Synthetic coding sequence
  source 1..288: mol_type = other DNA
atgtaccccgagagcaccaccggcagccccgcccggctgagcctgcggcagacagggagcccagggatgatttacagaaatttgggtaagagcggacttcgtgtatcatgcctggggctcggcacgtgggttacattcggaggacagattaccgatgagatggccgagcaattaatgactctggcatacgataacggtatcaatctgtttgatacagcggaggtgtatgccgccggcaaggccgaggtagtcctggggaatatcattaagaagaaagggtggaggtag

SEQ ID NO: 200364 - DNA, 159 bp, synthetic construct
  misc_feature 1..159: note = Description of Artificial Sequence: Synthetic coding sequence
  source 1..159: mol_type = other DNA
atgtaccccgagagcaccaccggcagccccgcccggctgagcctgcgtcagacagggtcaccaggcatgatttactcaaccagatacggatcccccaaacggcagttgcaattttacagaaacttgggcaagagtggcctcagagttagctgtttatag

SEQ ID NO: 200365 - DNA, 903 bp, synthetic construct
  misc_feature 1..903: note = Description of Artificial Sequence: Synthetic coding sequence
  source 1..903: mol_type = other DNA
atggccgagcagctgatgaccctggcctacgacaacggcatcaacctctttgacactgcagaggtgtatgcagcgggcaaggctgaggtggtgctgggaaacattattaagaagaaaggctggcgtagaagcagtctggtgatcactactaagattttttggggaggcaaggccgaaacagaaagagggctgtctagaaaacatatcattgaaggtctgaaagcatctctggaacggttgcaactggagtacgtagacgtcgtcttcgctaataggcccgatccaaatacgcctatggaagaaaccgttcgcgcaatgacacatgtgattaaccaaggaatggcgatgtattggggaacttcccggtggtcctcgatggagatcatggaagcctattccgtggctaggcaatttaatctgaccccccctatctgtgagcaggccgagtaccacatgttccagagggagaaggtggaggtgcagcttccggagttgtttcacaagatcggcgtgggggccatgacatggtcccctcttgcatgcgggatcgttagtgggaaatatgactctggcattcctccctacagtcgcgctagcttaaagggatatcagtggctgaaggacaagatcttaagtgaagaaggccgcaggcaacaggcaaagctcaaggagcttcaggctattgccgaacgcctcggctgtactctgccccaactggccatcgcatggtgcctcagaaatgagggagtgagcagcgtgctcctgggtgcctctaacgcagaccagctcatggagaacatcggcgctattcaagtgctgccaaagctttctagctcgattattcatgagatagactccattctcggtaacaaaccttacagcaaaaaggactaccgaagctag

SEQ ID NO: 200366 - DNA, 1215 bp, synthetic construct
  misc_feature 1..1215: note = Description of Artificial Sequence: Synthetic coding sequence
  source 1..1215: mol_type = other DNA
atgcaggtgagcatcgcctgcaccgagcagaacctgcggagccggagcagcgaggacagactgtgcggaccaaggccaggtccaggaggaggaaatgggggtccagccggaggtggtcatgggaaccctcccggtggaggcggaagcggacccaaggccagggccgcattggtcccaaggccgccagcgccagccggcgctctgcgggaatctactggacgtggtacaggaatgaagtaccggaacctgggcaaaagcgggctgcgtgtgtcctgtctgggccttggtacctgggtgacctttggaagtcagatctcggatgaaacagccgaggacgtgctgacagtagcttatgagcacggagtcaatttatttgatacagctgaagtctacgccgcaggcaaggctgagaggacattagggaacattctaaagtccaagggatggaggcgtagctcctacgtgataacaacaaaaatcttctggggaggtcaagccgaaactgaaagaggcctgagtcgaaaacatatcattgagggtctacggggttcactagagcggttgcagctgggctacgtggacattgtattcgctaacaggagcgatccaaactgcccgatggaagagatcgtaagggccatgacatatgtcattaatcagggactggctttatactggggaacatctaggtggggagctgctgaaattatggaggcgtacagcatggcaaggcagtttaatctcatccccccggtgtgtgaacaggctgaacatcacctgtttcagcgcgagaaagtagaaatgcagttgccagagctgtatcacaaaatcggggttgggtcagttacatggtatccgcttgcttgcgggcttatcactagtaagtacgacggtcgcgtcccagacacctgtcgcgcaagtatcaaggggtaccagtggttgaaggataaggtccagagtgaggatggtaaaaagcagcaggcaaaggtaatggacctgctgccggtcgctcaccagctgggctgcactgtagcacagctggctatagcatggtgcttgcggtcagagggcgtgtcttccgttctgctgggcgtgagctccgcagagcaattgatagagcatctgggagccctgcaggtgctcagtcagctgacccctcagacagtcatggagatcgatgggttgctggggaataaacctcacagcaaaaaatag

SEQ ID NO: 200367 - DNA, 2562 bp, synthetic construct
  misc_feature 1..2562: note = Description of Artificial Sequence: Synthetic coding sequence
  source 1..2562: mol_type = other DNA
atgagcgagaaggtggactggctgcagagccagaacggcgtgtgcaaagtcgatgtgtactcgcccggggacaaccaggctcaggactggaaaatggacacaagtacagatcctgtgcgcgtcctgagctggttaaggagagatttagagaagtctacggctgagtttcaggacgtaaggttcaagccgggagaatctttcgggggcgagacctccaactccggcgatccccacaagggcttctctgtcgattattataacacaacgaccaaaggaacgcccgaacgcttgcatttcgagatgacacataaggagatcccttgtcaaggaccccgggctcaacttggtaacgggtccagcgtcgacgaggtctccttctatgcaaaccggctcaccaatctggtgattgccatggcacggaaggaaatcaacgagaaaattgacgggagcgagaataagtgtgtctaccagagtctgtacatggggaacgagccaacgcccaccaagtctcttagcaaaattgcttcagagctcgtgaatgaaaccgttagtgcctgctctcgaaacgccgcacccgataaagcccccggaagtggcgatcgcgtgagcggttcaagtcagtcaccccctaacttgaagtacaagtcgacccttaaaatcaaggagagcacgaaagagcgccaagggcctgatgataaacctcctagcaagaagtcctttttctacaaggaggtgtttgagagcagaaatggtgattacgccagggaaggcggacgattttttccccgcgagaggaaaagatttagagggcaagaaaggccagacgactttacagctagcgtgtccgagggaatcatgacttatgccaactcagtcgtcagtgatatgatggttagtattatgaagacgctcaaaattcaggttaaggacacaacaatcgcaactatcctcctcaagaaagtgctactcaagcatgcgaaagaggttgtttccgacctaatcgattccttcctcaggaatctgcatagtgtgaccggcaccctgatgacagatacacagtttgtgagcgctgtcaagcgaacagtcttcagccatggctctcaaaaggccactgatatcatggacgccatgctgaggaagctgtataacgtcatgttcgccaagaaggtgcctgaacacgttaggaaggcccaagacaaggcagaatcttactctctgatctccatgaaaggcatgggggatcctaagaaccgtaacgtgaacttcgcgatgaaaagcgaaacaaaactgcgcgagaagatgtattcggagcctaaaagtgaagaggaaacatgcgccaagacccttggcgagcacattatcaaggagggtctcacactgtggcacaagacacagcagaaggagtgcaagtccctgggcttccagcatgctgccttcgaggctccaaacacccagaggaagcccgcctctgatataagctttgaatatccagaggacataggaaatctgagcctgcccccttaccctcctgagaaaccagaaaatttcatgtacgattcagattcctgggctgaagacctgatagtctctgccctcctgttgatccagtatcaccttgcgcaaggcgggcgccgtgacgctaggtcttttgtagaagctgcagggaccactaatttccccgctaacgagcctccggttgcgccagacgaaagctgcttaaaatcagctccaattgtcggcgatcaggagcaggctgagaaaaaggatctgcggtctgttttctttaattttattaggaatctgttaagcgagacgatatttaaacgagatcagagtcccgagccaaaagtgcctgaacagcctgtgaaggaagaccgaaagctatgcgagaggccactggcaagtagtccacctcggctgtatgaggatgacgagacgcctggcgctttatcagggctcactaaaatggccgtctcccagattgacgggcacatgagcgggcaaatggttgaacacctgatgaatagcgttatgaagctgtgcgtaataatcgcaaaaagttgcgatgcttcgttggccgaattgggtgatgacaaaagtggggatgcgtccagactcacgtcagcctttcctgattccttatacgagtgcttaccagcaaaggggacagggtccgcagaagctgttcttcaaaacgcgtatcaggcgatccacaacgagatgcgagggacaagcgggcaacctcccgaaggctgcgctgcccccaccgtgatagtctcgaaccacaacctcacggataccgtacagaataaacagctccaagcggtgctccagtgggtggcagctagcgaattaaacgtacccatcctctacttcgccggggacgacgagggcatacaggagaagttgctccagctgtctgccgcagccgtggataaaggttgttctgtgggggaagtcctccagagcgtcctccggtatgagaaagagcgacagctgaacgaggctgtgggaaatgtgactccgctgcagttgcttgactggctcatggtaaacctgtag

SEQ ID NO: 200368 - DNA, 1488 bp, synthetic construct
  misc_feature 1..1488: note = Description of Artificial Sequence: Synthetic coding sequence
  source 1..1488: mol_type = other DNA
atgaccgtgatgagcggcgagaacgtggacgaggccagcgccgcccccggacaccctcaagacggctcttacccacgtcaggcggaccacgatgaccacgagtgctgtgaacgggtagtgataaacatctccggcctacgatttgaaacgcagcttaagaccctcgcccaattccccaatacactgctggggaaccctaagaagagaatgcgctatttcgacccacttaggaacgaatatttctttgacaggaatcgaccctcttttgacgcaatcctctattactaccagtccggcggacgcctgaggagacccgttaatgtcccactcgatatgttttcggaagagattaagttctacgagcttggcgaggaggctatggagaaattccgggaagacgagggctttattaaggaagaggagcgtccactacccgagaaagaataccagagacaggtgtggctcctctttgagtaccccgagtcaagcgggcctgctcgggtgatagctatcgtcagcgtgatggtgatactgatcagcattgttatcttttgtctcgagacactgcccgagctcaaggatgataaagatttcaccggaactgtgcacagaatcgataacacaaccgtgatctacaattccaacattttcaccgaccccttcttcattgttgaaactctgtgcattatatggttcagctttgagctcgttgtacgctttttcgcctgtccgagtaagaccgacttttttaagaatatcatgaacttcattgatattgtggccatcatcccatattttatcacgcttgggacagagattgctgagcaggaaggcaaccagaaaggagagcaggccacctctctcgcaattcttcgtgtgatcagattggtccgcgtattcagaattttcaaactgtcccgacatagcaagggtctccagatcctcgggcaaacactaaaagcatcgatgagagaactaggacttctcatcttcttcctctttataggtgtcatactgtttagttctgccgtgtacttcgcagaggccgaagaggcggagtcacacttttcatccatccctgatgccttctggtgggccgtggtcagtatgaccacagtcgggtacggtgatatgtaccccgtgactattggcgggaaaattgtgggctccctgtgtgcgattgctggcgtgctcactatcgctttacccgtgccagtgatcgtctcaaacttcaattatttttatcacagagaaaccgaaggtgaggaacaggcccagctgcttcatgtatcctcacctaatctggcctcagactccgatctgagcaggcgatcatcttctacaatgagtaaaagtgaatacatggagatagaagaggatatgaacaatagtatcgctcattacagacaagtcaatatcaggacagccaattgcactacggctaaccagaattgcgttaacaaatccaagttactgaccgatgtgtag

SEQ ID NO: 200369 - DNA, 1536 bp, synthetic construct
  misc_feature 1..1536: note = Description of Artificial Sequence: Synthetic coding sequence
  source 1..1536: mol_type = other DNA
atggacgtgtgcggctggaaggagatggaggtggccctggtgaacttcgataatagcgatgaaatccaggaagagcctggatatgccacagattttgactcaaccagccccaaggggagacccgggggcagtagtttcagtaatggtaagatactcatctcagagagtaccaatcacgaaaccgcgttctctaagctacctggtgactacgcagatcccccaggtcctgagccagttgttctgaatgaaggtaaccagcgtgtgattatcaatatcgccggcttacgcttcgaaacccagcttcgtaccctgtcgcagtttcctgagacactcctaggagaccgggaaaaacgaatgcagtttttcgatagtatgcgtaacgagtatttctttgatcgcaacaggcccagcttcgatggcatcctttattattaccagtccgggggcaagatcaggaggccagccaacgtgccaatagatatttttgccgatgagatttcattctatgagctcgggtccgaagccatggatcagtttcgagaggatgaaggattcattaaggatccggagacactcctcccaacaaatgatatacaccggcagttctggttactctttgagtatcccgagtcttcctctgcagcaagggctgtggctgtcgtatctgtgctagttgtggtgatatcgattacgatattttgtttggagacgctccctgagttccgtgaggatcgcgaattgaaggtcgtcagagatccgaacctcaacatgagcaaaactgtactttctcagaccatgtttactgacccattcttcatggtagagtccacttgcattgtatggttcacttttgaactcgtgctgaggttcgtagtctgtccatctaagactgacttctttagaaatattatgaatattattgatattatctccatcattccctattttgccactctgattactgagctcgttcaggaaacggaaccatccgcccagcagaatatgtccctagccatcctccggatcattcgtctggtgagggtgtttagaattttcaaactctcacgccattcgaagggcctccaaattctcgggcaaacacttaaagcctcaatgagggaattaggtcttttgattttttttctcttcataggcgtcattctgtttagcagtgctgtttattttgcggaggtggatgagcccgaaagtcatttctctagcattccagacggcttttggtgggcggttgtgactatgaccacagtcggatatggtgatatgtgtcccaccacccctgggggaaaaatcgtggggacactctgcgccatcgccggagtgctgacgatagctctccccgttcccgttattgtcagcaacttcaactacttctaccatcgagagaccgaaaatgaagagaaacagaatatccctggcgaaatagagcggatcctcaatagcgttggaagtcgcatgggaagcacagactctctcaacaaaaccaacggcggttgctctaccgagaagtcccgcaaatag

SEQ ID NO: 200370 - DNA, 1728 bp, synthetic construct
  misc_feature 1..1728: note = Description of Artificial Sequence: Synthetic coding sequence
  source 1..1728: mol_type = other DNA
atggacgagcggctgagcctgctgcggagcccccccccccccagcgctagacatcgggctcacccgccacaacggccagcgagttcgggaggtgcacataccctcgtcaatcatggatacgctgagcccgccgcgggacgggaactgccaccggatatgactgtcgtgcctggagaccacctgctagagccagaagttgcagatggcgggggcgcaccccctcaggggggatgtggaggcggtggatgcgacagatacgagcctttaccaccgagtctgcccgctgcgggcgaacaggattgctgcggcgagcgcgtggtgataaacataagcggtctgcggttcgagacgcagctgaaaacgctgtgccagtttcccgagaccctgctcggggatccaaagagacgcatgcggtatttcgaccccctgcggaatgaatacttttttgataggaacagaccttctttcgatgcgatcttgtattactatcaaagtggggggaggattcggcgccctgtaaatgttccgatcgatattttcagcgaggagataaggttttaccagctcggcgaggaagccatggaaaaattccgtgaggacgagggattcctgagagaagaggagagacctctgccccgcagagacttccagagacaggtgtggcttttgtttgagtaccccgagtcatctggtcccgctcgaggcatagcaattgtgtctgtgttggttatccttatctctatcgtgattttttgcctggagacactcccggaatttagggacgagaaagattatcccgcctctacttcccaagacagtttcgaagcagctggcaacagcacttcagggtcccgtgccggggccagttcatttagcgatccctttttcgtagtggagacactgtgtatcatttggtttagtttcgaattattggtgagattcttcgcctgtccttcaaaggctacattttccagaaatattatgaacctgatcgacatcgtggcgattatcccctactttatcacactgggtaccgaattagctgagaggcaggggaatgggcagcaggccatgagcctggccattctacgtgttattagactcgtgcgagtattcaggatctttaagctgagccggcacagcaagggccttcaaattctcggccagaccctgaaggcttctatgcgagagctggggctgctgattttttttctcttcatcggagtgatcctattcagttccgctgtgtacttcgcagaggcagatgatcccacgagtgggttcagcagtatcccagatgcgttttggtgggcagtcgtgactatgacgactgtcgggtacggtgacatgcaccctgtgaccattggggggaaaattgtaggcagcttgtgtgcaatagccggcgtcctaactattgctttaccggtccccgtcattgtcagcaactttaactacttctatcatagagagacagagggagaagaacaatcacagtacatgcacgtcggctcctgccagcacctgtccagttccgcagaggagctccggaaggcccgctccaattcaactctcagtaagagtgagtatatggtgatagaggaaggcggtatgaatcatagcgccttcccccaaactcctttcaaaaccggcaactccacggccacgtgtaccactaacaataatcccaactcctgcgttaacattaagaaaatctttaccgacgtgtag

SEQ ID NO: 200371 - DNA, 1962 bp, synthetic construct
  misc_feature 1..1962: note = Description of Artificial Sequence: Synthetic coding sequence
  source 1..1962: mol_type = other DNA
atggaggtggccatggtgagcgccgagagcagcggctgcaacagccacatgccgtatgggtatgctgcgcaagcacgcgcacgcgagcgtgagcgattagctcatagcagggcggcagctgcggctgccgtcgcagcagcgacagccgctgtggagggctctggggggagcggcggtggcagccaccaccatcaccagagtcggggggcctgcacaagccacgacccccaatcttcaaggggctcaagacgcagacgtagacaacgctccgagaagaagaaggcccattatcgccaaagcagcttcccccattgttctgaccttatgccgagcgggtctgaggagaaaatcctgcgcgagttaagcgaggaagaagaagatgaagaggaggaggaggaggaagaggaggagggacggttctattactccgaggacgatcatggagacgaatgtagttacaccgacctgctcccacaggatgaaggcggcggaggatactccagcgtccggtattctgactgctgcgagagggtggtcatcaacgtgagtggccttagattcgaaacccagatgaaaacgcttgcacagttccccgagaccctgctgggcgatcccgagaaacgaacacagtacttcgacccactccggaatgaatactttttcgaccgaaatagaccaagtttcgatgccattttgtattattaccagtcgggtggtaggctgaagcggccagtaaacgtgcccttcgatatctttactgaggaggttaaattctaccagctaggagaagaggcactcctgaagttccgcgaggacgagggctttgtgagagaggaggaggatcgtgccctcccggagaacgagtttaagaagcagatttggctcctgttcgaataccctgaaagcagttccccggcacgcggaatcgccatcgtgtcggtgctcgtgatactgatttctatagtgatcttctgcctagagacacttcccgagtttcgcgatgaccgggacctagtgatggccctcagcgccggtggtcatggcgggcttcttaatgataccagtgctccgcatctggaaaactcaggccacactatctttaacgacccattctttattgttgagacagtgtgtatcgtctggttctccttcgagttcgttgtcagatgcttcgcatgcccctcccaagcgctgttctttaaaaatatcatgaacattatcgacattgtctcaatcctgccatatttcataacattggggacagatcttgcgcagcaacagggcggcggaaatggtcagcagcaacaggccatgtcttttgccatcctgcggataattcgtttggtccgggttttccgaatattcaaattgtccagacattccaaaggactgcagattctgggacatacactgagggcgagcatgcgggagttggggcttcttatttttttcctgtttatcggagtgattctgtttagtagcgcggtctacttcgcagaagcggatgagcctactactcacttccaatccattccagatgccttctggtgggctgtggtcactatgaccacagttgggtacggagatatgaagcccattactgtgggcggtaagatcgtaggttccttgtgtgccatcgctggggtgcttacaattgcattgcctgtccccgtaatcgtatccaatttcaattatttttaccaccgcgaaacagaaaatgaggagcagactcagctcacccagaatgcagtgagctgtccctatctgccttctaacctcctcaagaaattcaggtcttcaacaagcagcagtctgggagataagagcgaatatttagagatggaggaaggtgtgaaagaatccttatgtgcaaaagaggaaaaatgtcaggggaagggggatgacagtgaaacagacaagaataattgtagtaatgctaaagccgtggagactgacgtatag

SEQ ID NO: 200372 - DNA, 1842 bp, synthetic construct
  misc_feature 1..1842: note = Description of Artificial Sequence: Synthetic coding sequence
  source 1..1842: mol_type = other DNA
atggagatcgccctggtgcccctggagaacggcggcgccatgaccgttagaggtggcgacgaggcgcgtgcgggctgcgggcaggctaccggaggagagctccagtgtccgcccaccgccggcttatcagatggtccgaaagaacctgcccctaaaggaaggggggctcagcgggacgcagacagcggcgtgcgcccactgcccccgttgcctgatcctggagttcgcccccttcccccactcccagaagagcttcctaggcccaggaggcctccacctgaggacgaggaagaagagggcgaccccgggctcggtaccgtcgaggatcaggccctgggaactgcctccctccaccatcagcgggtacatatcaacatctccggattacgctttgaaacacaactggggacactggcacagtttcctaacacgttacttggagaccccgccaagagactccgctacttcgatcctctgcgaaacgagtatttctttgacagaaataggcctagtttcgatgggatcttgtactactaccagagtggaggcaggttgagacggcccgtgaatgtcagcctcgatgtgttcgcagacgagatcaggttctaccagttgggagatgaggccatggaacgtttcagggaggatgaaggctttataaaggaggaggagaagcccctgccccgtaacgagtttcagcgacaggtgtggctcatcttcgaataccccgagtcaagcgggtctgctcgcgccatcgcgatagtgtctgtcctcgtcatactcatcagcatcataactttctgtcttgagacgcttccagaattcagggatgagcgcgagctccttcggcacccacccgctccccaccaacctccagccccagcgccgggtgctaatggcagcggggttatggcacctccttctggacctacagtcgcccctcttctgcccagaacgctggccgatccttttttcatcgtggaaaccacttgcgtgatttggttcacattcgagctccttgtgaggtttttcgcctgtcccagcaaagctgggtttagcaggaatatcatgaatatcatcgacgtagttgcaatattcccttactttatcaccctggggactgaactggccgagcagcagcctggcgggggcgggggaggccagaacggtcagcaggcgatgtctctcgctatactcagagttattaggctggtgcgcgtgttccggatcttcaaattaagccgacacagcaagggcctccagattctgggtaaaacactgcaggcttccatgcgcgagctgggcctactgatattcttcttgttcatcggcgtgatcttgttcagctctgccgtgtatttcgccgaagcggacaaccaaggtactcatttctcgagcatccctgatgcgttctggtgggctgtggtgacaatgacaactgttggatacggtgacatgcgccccattacagtgggagggaagattgtcgggtccttgtgcgctatcgcaggcgtgctaactatagccctgccagtaccggtcatcgtaagcaacttcaattatttttaccaccgcgaaaccgaccacgaagaacctgcagtgctgaaggaggagcaaggcactcaaagtcagggaccagggttagacaggggcgtgcagcgtaaagtgtccggtagccgaggctccttctgtaaggctggggggactttggaaaatgccgatagcgccaggcggggatcctgtccattggagaaatgtaatgtcaaagccaagtctaatgtggatctgcgccgctctctgtacgccttgtgtctcgatacctcacgggagaccgatctgtag

SEQ ID NO: 200373 - DNA, 1557 bp, synthetic construct
  misc_feature 1..1557: note = Description of Artificial Sequence: Synthetic coding sequence
  source 1..1557: mol_type = other DNA
atggccgccagcatggcccggcggctgtggcccctgctgacccggagaggcttcagacctaggggcggctgcatcagtaatgatagtccccgccgctcctttacaacagaaaaaagaaataggaatctattgtacgaatatgcccgagagggctattcagcacttccccaactggatatcgaacgcttctgcgcatgccctgaagaggccgctcacgccctagaactgagaaagggggagctccgatctgctgacctgcctgcgatcatctccacctggcaggaattgaggcaactacaggaacagattaggtctctggaggaggagaaagctgcagttacagaggccgtgcgcgcactgctcgcgaaccaggattctggcgaggtgcagcaggaccccaaatatcagggcctccgcgcccgcggtcgggaaatccgcaaggaattggtgcatctttatccacgtgaagcacagcttgaggagcaattctatctgcaagcattaaagctaccgaaccagacgcaccctgacgtgcctgtcggagatgagtcccaggctcgggttctgcatatggtgggtgataagccagtcttcagttttcagccacgtgggcacctggaaataggcgaaaagcttgatatcatccggcaaaaaaggctgagtcatgtgagcgggcatcgatcatactacttgagaggcgcaggagcactgctgcagcatgggctcgtcaacttcaccttcaataagttgctgcgtcgcggcttcacaccaatgactgtgcccgacctcttacggggggcggttttcgaggggtgtgggatgacacccaacgccaacccttctcagatctacaatattgacccagccagatttaaggacttgaacctagcgggcacagctgaggtcggtctcgcaggctattttatggaccataccgttgcttttagagaccttccagtgaggatggtgtgcagctcaacttgttacagggccgaaacgaatacagggcaggaaccccgcggcctgtacagagtccaccatttcaccaaggtggaaatgttcggcgtcactggaccaggcctcgagcagtcttcacagctcctcgaggaattcctgtctcttcagatggagattctgaccgagttaggactgcacttccgagtgctcgacatgcccacccaggagctcgggctgccagcatatcggaagtttgatattgaagcctggatgccaggcagggggcggttcggcgaggttacatccgcatcaaactgtactgacttccagagcagacgcctgcacatcatgtttcagacagaagctggggaacttcagtttgcccacactgtgaacgctaccgcttgcgcagttccacgactgctcatcgccttactggaaagtaaccagcagaaagacggcagcgtgctcgtccctcctgccttgcagtcctacctcgggactgacagaattactgcaccaacccatgtgccactacaatatataggcccaaatcagccacgcaagccagggctgccaggccagccagcagtttcttag

SEQ ID NO: 200374 - DNA, 1893 bp, synthetic construct
  misc_feature 1..1893: note = Description of Artificial Sequence: Synthetic coding sequence
  source 1..1893: mol_type = other DNA
atggccgccggcgtggccgcctggctgcccttcgcccgggccgccgcgattggctggatgcccgtcgcctcggggccaatgcctgccccacctcgacaggaacgcaaacggacccaagatgctctgatagttttaaatgtcagcggaacaagatttcagacatggcaggacaccttggaacggtaccccgacactttactgggctcatctgagcgtgactttttttaccaccctgagacccaacagtacttcttcgacagggatccagacattttcaggcatattctcaatttttatcggacaggcaagctacactaccctagacacgaatgtatcagtgcctatgatgaggagctggcattttttggcctcattcctgagatcatcggggactgctgctatgaggagtacaaagaccgcagacgggaaaatgcagaacgactgcaggatgacgccgacacagacactgcaggggagagtgccctgcccacaatgactgcccgtcagagagtctggcgggcctttgagaacccccatacctcaactatggccctggttttttactacgttaccggcttttttatcgcggtctcagttatcgcaaatgttgttgagactgttccatgtggcagcagtcccggacacatcaaagaactgccttgtggggaaaggtacgcagttgcgttcttttgcttagatacggcctgcgtgatgatattcaccgtagagtacttattgcgcttggcagcagcgccatcccgctacagatttgtccggagcgtaatgagcatcattgacgtcgtcgctatccttccttattacatcggactcgtgatgacggacaatgaagacgtctctggcgcttttgtcacactcagggtttttcgcgtctttaggatttttaagtttagccgtcattcacagggactgagaattttgggatacacgctgaaatcttgtgctagtgaactgggcttcttgctcttctctctgacaatggccattatcattttcgccaccgtcatgttttatgccgagaaaggttcctccgcctcaaaattcacatccattcctgcagccttttggtataccatcgtcactatgacaaccctgggctacggagatatggtgcccaagaccatcgctggaaaaatctttggctcaatttgcagtctaagtggagtgctggtcatcgccctgccagttcctgtcattgtttccaatttctccaggatctatcaccaaaatcagcgcgctgacaagaggcgcgcacagaagaaggctcggctggcacgcataagagcagctaagagtggaagtgcgaacgcctatatgcagagcaaaaggaatggcctactgtccaatcagcttcagagctccgaggatgagcaggcttttgtcagtaagagcgggagcagcttcgagacgcagcaccaccatttactgcattgcctggaaaagactaccaaccatgagtttgtcgacgagcaggtcttcgaggagagctgcatggaggtcgccacagtgaatcgacctagttcccattccccctctttgtcctctcagcagggagtcacttctacctgttgttccagacgccacaagaaaacgtttagaatccccaacgccaacgtatctggctctcatcaggggtcgattcaggagttgtctacaattcaaataagatgcgtagagcgtacacctcttagcaatagccggagttccctcaacgcgaaaatggaagagtgtgtcaaactgaactgtgagcagccatatgtgactacagctattattagtatccccacacctccagtcacgacccccgaaggtgatgacagaccagaatcccctgagtatagtggggggaacattgtgcgggtctccgccctttag

SEQ ID NO: 200375 - DNA, 1911 bp, synthetic construct
  misc_feature 1..1911: note = Description of Artificial Sequence: Synthetic coding sequence
  source 1..1911: mol_type = other DNA
atggccgccggcgtggccgcctggctgcccttcgcccgggccgccgccattgggtggatgcctgtcgccaattgtccgatgccccttgcccctgcagacaaaaataagaggcaggacgaactgattgtgctgaacgttagcgggagacggtttcagacttggcgtactactctcgagaggtatcctgacacactgctcggtagtactgagaaggagttcttttttaacgaggataccaaggagtatttttttgaccgagaccccgaagtcttccgatgtgtgcttaatttctataggaccggaaagctacactacccccgctacgaatgcatttccgcctacgacgacgaactggcattctacggtatcctgcccgaaatcatcggagattgttgttacgaggagtataaggaccgcaaacgggaaaacgctgagaggttgatggacgacaacgactcggagaataaccaggagagtatgccttccctgagttttcggcagactatgtggagggctttcgagaatcctcacaccagtacgctggccctcgtattctactacgttaccggcttttttattgctgtgagtgtgatcactaacgtcgtggaaactgtgccgtgcgggactgtcccaggatctaaggaattgccctgcggtgagaggtattcagtagcgtttttttgccttgataccgcatgcgtgatgattttcactgtggaatacttgttgaggttgtttgccgctccatctagataccgcttcattcgatctgttatgtccatcattgacgtcgtcgccataatgccttactacatcgggctggtgatgacaaataacgaagatgtatccggtgcctttgtgacactacgcgtcttccgggtgtttagaatctttaaattttcccgccattcccaggggcttagaattctggggtacacgctgaagagttgcgcgagcgaactgggtttcttgctcttctcactcacaatggcgatcatcatctttgccactgtgatgttttatgcagaaaagggaagctctgctagcaagttcacttctattcccgctagtttttggtacactatagttactatgacaacactgggctatggcgatatggtgcccaagactatcgcgggtaagattttcggcagtatttgctcgctctcaggcgtcttagtgatcgcattgcctgtgcccgtgatagtttcaaactttagtcggatctaccaccaaaatcagagggctgataaaagacgagcacagaagaaggcccgcttagcaaggatccgtgtcgctaagactgggtccagcaacgcttatttacattccaagaggaatgggttattaaacgaagccctggagctgactggcaccccagaggaggaacatatgggcaaaacgactagccttatcgaatcacaacaccaccacctgcttcattgtctggagaaaacaaccaaccacgaattcattgacgaacagatgttcgagcagaattgcatggagtcctccatgcaaaattatccaagcacccggtcaccttcactgtcctcccatcctggactgaccacaacatgctgcagtcgcaggtcaaaaaagaccacccacctgcccaactccaatctgcccgcgactagactgcgatccatgcaggaacttagcaccatacacattcagggatccgaacagccgagtctaacgacatcccgcagctccctgaacctgaaggcagacgacggcctgagaccaaactgcaagaccagccagataacgacagctattatttctatccccaccccacccgccctaacccccgagggagaaagccggccccccccggctagtcctgggcccaacaccaatatacctagcatagcgtccaacgttgtcaaggtcagtgccctctag

SEQ ID NO: 200376 - DNA, 1968 bp, synthetic construct
  misc_feature 1..1968: note = Description of Artificial Sequence: Synthetic coding sequence
  source 1..1968: mol_type = other DNA
atggccgccggcgtggccgcctggctgcccttcgcccgggccgccgcaatcggctggatgccggtggcaaattgccccatgcccctggcccctgcagacaaaaacaagaggcaagacgaactgatcgtgctgaacgtgagcggccgccgcttccagacttggcggactaccctggagcgctaccctgacacgctgctcggcagcaccgagaaggaattcttctttaatgaggatactaaagagtacttttttgatagggacccagaggtgttccgttgtgtgttgaatttttacaggactgggaaactgcactatccccggtacgaatgcattagcgcatacgatgatgaactggcgttctatggaattctgcccgagattatcggtgattgttgctatgaggagtataaggatagaaagagggaaaatgccgagcgccttatggacgataacgactccgagaacaaccaggagtcaatgccttcactgtcctttcgtcagacgatgtggagggcctttgaaaatccccatacatctaccttggcactggtcttctattacgttacaggcttttttattgctgtctccgtgatcactaatgtggtcgagaccgtcccttgcggaaccgttcctgggtctaaagaactgccctgcggcgagcgctacagcgtggcctttttctgcctggacactgcatgcgtgatgatcttcacagtggagtacttgctgaggctctttgcagccccatcccgctacaggttcataagaagcgtgatgtccatcattgacgttgtagccatcatgccatactacattggtctggtcatgacaaataatgaggatgtaagcggagctttcgttaccctacgagtatttagagtttttagaatctttaagttcagtcggcacagtcaggggctgagaatacttggatataccctaaaatcctgcgctagcgaactcggatttctgctgttttcgctgacaatggcaatcattatctttgccacagtcatgttttacgcagagaagggcagcagcgcatctaagtttaccagcatccccgctagtttctggtacaccattgttaccatgaccaccctagggtacggcgacatggtgccgaagacaattgccggcaaaatctttggctccatctgctctttatccggagttcttgtcatagcattgcccgtgcctgtgattgttagcaacttctccaggatttatcaccagaaccagcgggccgacaaaaggcgtgctcagaagaaggctagactagcccgcattagggtggctaagacagggtcttctaacgcctacctccactccaagagaaacgggctgcttaatgaggccctggaacttaccggaacacccgaagaggaacacatgggaaaaactacttctctaatagaatcccagcaccaccacctcctgcattgcttggaaaagacaacaggattgtcatatcttgttgatgaccccctcttgtctgtgagaacgagtaccataaaaaaccatgagtttatcgatgagcagatgttcgagcagaactgcatggaaagcagcatgcagaactaccctagcacgcggagcccgagcctgtcatctcacccaggcctgactaccacgtgttgcagccggagaagcaagaagacaactcatttgcctaactcaaatctccccgccacaagactgagatcaatgcaagaactttctactatacatatccaaggcagcgaacagcctagtctgacaaccagtaggagctccttgaacctcaaggctgatgacgggctgagacccaattgcaaaacgagccagatcacgactgctatcattagcatcccaaccccacccgctctaacacctgaaggcgagtctcggccaccgccagctagtcctgggccaaacaccaacatccccagcattgcttccaacgtcgtaaaagtatctgctctctag

SEQ ID NO: 200377 - DNA, 1911 bp, synthetic construct
  misc_feature 1..1911: note = Description of Artificial Sequence: Synthetic coding sequence
  source 1..1911: mol_type = other DNA
atggccgccggcgtggccgcctggctgcccttcgcccgggccgccgcaatcgggtggatgcctgttgccaactgtccaatgccattggcgccagccgacaaaaacaaacgacaggatgaactcatcgtgctaaacgtctcaggaagacggttccagacctggcggacaactctggaaaggtatcccgatacactcctggggagtacagagaaggagtttttctttaacgaagatacaaaggaatacttcttcgatcgtgatcctgaggtgtttcggtgcgtgctcaatttctataggactggtaaactccactaccctaggtatgagtgcatttccgcctacgacgacgagctagcattctacggcatacttccagagatcataggggattgttgttatgaagagtataaagatagaaaacgcgaaaacgctgagcgactgatggacgacaatgatagcgaaaataatcaggaaagcatgcccagcctgagctttcggcagacaatgtggcgggcctttgagaatccacacacttctacattggccctggtgttttactatgtgactggattcttcattgcagtgtcagtgattaccaacgttgtcgagactgttccctgcggaacagtccccggctcaaaagagctcccatgcggtgagcgttatagcgtggcctttttttgcttggacactgcatgtgtgatgatcttcacggtggagtatctgctcaggctgttcgccgctccaagtcgctaccgttttatcaggtcagtcatgtccattattgatgtggtggccattatgccctattacattggtctggtcatgacaaataatgaagatgtgtcaggcgcttttgtgactctccgcgtgttcagagttttcaggatcttcaagttctcacgacactctcaggggctgaggattctaggttacacactcaagtcgtgcgcctctgaattagggtttctccttttctctctcaccatggcaattatcatctttgctactgtgatgttctacgcagaaaaagggagttcagctagtaaattcacctccataccagcaagcttctggtatacaattgttaccatgacgaccctgggttatggcgatatggtgccaaaaacaattgctggaaaaattttcggatccatatgcagtctgagcggggtccttgtcattgcactgcccgttcccgtaatcgtctcaaacttttctcgcatctatcaccagaaccagcgagccgataaaagacgggctcagaagaaggcgagactggctcggattagagtggcaaagacaggatcctcgaatgcgtacctgcactctaaaaggaatggcttactgaacgaagctttggagctcactggtacaccagaggaagaacatatgggtaagaccacctctctcatcgagtctcagcaccatcatttgctacattgcctggaaaagacgactaatcacgaattcatcgatgaacaaatgttcgagcagaactgtatggaatcaagcatgcagaactacccttccacacgttcacccagcctctcctcccaccctgggctgaccaccacttgctgctctaggcgcagtaagaaaaccacacatctgcccaacagcaaccttccagctactcgtctccggtccatgcaggaactcagtaccatccacattcaagggtctgaacagccctctttgacaacaagccgaagctctctcaacttaaaggcggatgatgggttgagacccaattgtaagacatcccagatcaccaccgccataatctccattccaacccctcccgccttgactccagagggagagagtcgcccgcccccggcctccccaggtccaaacaccaacattccatccatagccagcaacgtcgtcaaagtgtcagctctctag

SEQ ID NO: 200378 - DNA, 1758 bp, synthetic construct
  misc_feature 1..1758: note = Description of Artificial Sequence: Synthetic coding sequence
  source 1..1758: mol_type = other DNA
atgggccagggcgacgagagcgagcggatcgtgatcaacgtgggcggtacaagacaccagacctatcgctccaccctgcggaccctgccaggcactaggctcgcttggttggctgagcctgacgcccactcccactttgactatgatccaagagccgatgaattcttttttgatcggcaccccggcgtctttgcacatatccttaattactatcgaaccggtaagctgcactgtccagccgatgtgtgtggtccactgtacgaagaagagcttgcgttttggggtatcgatgagacagacgtggaaccttgttgctggatgacatataggcagcacagagacgcagaggaagccctcgattcctttggcggggcaccgctggacaattccgcagatgatgccgacgccgatggccccggtgactctggagacggagaggacgaacttgaaatgactaagcgcctcgccctatccgactccccggatgggaggcccggcggattttggcggaggtggcaaccaaggatctgggccctcttcgaagatccatactcttccagatacgccaggtatgtggcctttgcaagtttgtttttcatcctggtttcaattaccacgttctgcctcgagacacatgagcgtttcaatcctatcgtcaacaaaacagagatcgagaatgtgaggaacggaacccaagtaaggtactatcgcgaggcagaaacagaagcctttctcacgtacatcgaaggcgtctgtgtggtatggtttaccttcgagttcctcatgcgggttattttctgcccaaacaaggttgagttcatcaaaaatagcctgaacatcatagattttgttgctattctgcccttctaccttgaggtgggactgagtggactgtcctctaaggctgccaaggacgttctcggtttcctgcgggtcgtccgattcgtacggatccttcgtatcttcaagttgaccaggcattttgtaggattgcgcgtcttgggtcacaccctgcgcgccagcacaaacgaatttctgctgctcattatttttctcgcactcggggttctgatttttgccacaatgatctactatgccgaacggatcggggcccagccaaatgaccctagtgccagtgagcatacccacttcaagaacattcccattggcttttggtgggccgtggtgactatgaccacactggggtacggagatatgtacccacagacatggtctggaatgctggtcggagcattatgtgcattagccggggtgctgactatcgcaatgcctgtgcccgtgatcgtgaataacttcgggatgtattactctctggccatggcaaagcagaaacttccaaaaaagaaaaagaagcacattccaaggcctcctcagcttgggtcccctaattactgcaagtctgtagttaattcccctcaccacagtacccagtctgatacatgtcctttggcccaggaagagatcctggagatcaatagagctgacagtaagttgaatggtgaagtggctaaagcggctctcgctaacgaggattgcccccatattgatcaagcacttacacctgatgagggcctgcccttcaccagatctggaacgagggagcgatacgggccctgcttcctgctgtctacaggtgagtatgcttgtccaccaggcggggggatgagaaaggatctgtgtaaagagtctcccgtgatcgccaagtacatgcccactgaggctgtgagggtgacttag

SEQ ID NO: 200379 - DNA, 1536 bp, synthetic construct
  misc_feature 1..1536: note = Description of Artificial Sequence: Synthetic coding sequence
  source 1..1536: mol_type = other DNA
atgggccagggcgacgagagcgagcggatcgtgatcaacgtgggcgggaccagacaccagacctatcgctccaccctcaggacactcccaggtactcgcctcgcctggttagcagagcctgacgcccatagccacttcgattatgacccaagggccgatgaattcttctttgaccgccatcctggggttttcgctcacatattgaactattatcgaacgggaaagctgcattgcccagcagacgtgtgcggcccactgtatgaggaggagttggcgttctggggtattgacgagaccgacgtggagccttgttgctggatgacatatagacagcaccgggatgcggaggaggccttggatagtttcggcggagctcctttagacaatagcgctgatgatgccgacgcagatgggcccggcgatagtggagacggagaggacgagctagagatgacaaagaggctggcgctgtcagattccccggatggaagacccgggggattttggcgcaggtggcagcctaggatctgggcactgttcgaagacccgtattcatcacgctacgcgagatatgtcgcctttgcatctctatttttcatcctggtttcaattacaaccttttgcctcgaaactcacgagaggtttaacccaatcgtcaacaaaacagagattgagaacgtgcgcaacggcacccaggttcggtattatagggaagctgagaccgaagccttcctaacctatatcgaaggagtgtgtgtggtgtggttcaccttcgagtttctcatgcgagtcattttctgccccaataaagtagagttcataaagaacagtctgaacatcattgatttcgtggctattcttcccttttacctggaagtgggtctgagcggtttaagcagtaaggccgcaaaagatgtgcttgggtttctgcgagtggttaggtttgtgaggatcctccgaattttcaaactcacacgccactttgtcggactacgggtgcttggccacactcttagggcttctacaaacgaattcctgttactgattatttttttagcccttggtgttctcatcttcgccactatgatctactacgctgagcgcataggcgcacagccaaacgacccttccgcttcggagcatacgcacttcaagaacatccccattggtttttggtgggcagtggtgacaatgaccacgctcggatatggcgacatgtatccccagacctggagcggtatgttggtgggagccctctgtgccttagccggggtcttaactattgcaatgcctgtccccgtgattgtcaataattttgggatgtactactcccttgctatggcgaagcagaagctcccaaagaaaaagaaaaagcacattccaagacccccacagttagggtctccaaactattgcaaatctgtggtgaattccccccatcattctacacaatccgacacatgccccctggcccaggaggagattcttgagattaacagggcaggtcgcaagcctctgcggggcatgtccatttag

SEQ ID NO: 200380 - DNA, 1842 bp, synthetic construct
  misc_feature 1..1842: note = Description of Artificial Sequence: Synthetic coding sequence
  source 1..1842: mol_type = other DNA
atgggcaagatcgagaacaacgagcgggtgatcctgaacgtgggcggcacccgccatgagacctataggagcactctgaaaaccctacctgggacgaggctcgccctgctcgccagcagcgagccaccaggggattgtttgacaaccgccggcgacaagctgcaaccaagcccacccccactcagtccacccccaagagctcctcccctgtctccaggccccggagggtgtttcgagggtggcgccggaaattgctctagcagaggtggtcgtgcgtctgatcatccaggtggcggtagggaattcttttttgaccgacatcccggggtcttcgcttatgtcctgaattactatagaacaggaaagcttcactgcccggccgatgtttgcggtcctctattcgaggaagagttggctttttgggggattgacgagacagacgttgagccttgctgttggatgacataccgacaacatcgtgatgctgaggaggccttggatatattcgaaacaccagacctgatcgggggcgatccaggcgacgacgaagacctcgcagccaagcgccttggcatagaggacgccgcaggtcttgggggccccgatggaaagtccgggcgttggcgtaggctccagccgcggatgtgggctctgttcgaagacccctactcttccagggcagctcgattcatagcatttgcatcactgttttttatactcgtgagcattacaaccttttgcttggaaacgcacgaggcctttaacatagtgaagaacaagacagaacccgtcatcaatggcacgagtgtggtactgcagtatgagatagaaaccgaccctgccctgacatacgtggaaggggtttgcgtcgtgtggttcactttcgaatttctcgtgcgtatcgtgtttagtccaaataaacttgaattcatcaagaacctactgaacattattgattttgtggccatcctccccttctatctcgaagttggtctaagtggtctcagttccaaagccgctaaggacgtgctggggttccttcgagtggtgcgctttgtgcgtattctgcggatcttcaaactaactaggcacttcgtgggcctgagagtgctcggccatacgctgcgcgccagtaccaacgaatttctgctcctgatcatatttctggccctcggcgtcctcattttcgccactatgatctattatgctgaacgggtcggggcacaacctaacgacccgagcgcttccgaacacactcagtttaagaatattcccatcgggttctggtgggccgtcgtaacaatgacaacactaggttatggggatatgtatccccagacatggtctggcatgttggtgggcgctctgtgtgctctggccggagtcttgactattgccatgcccgtgcccgtgatcgtgaataacttcggtatgtactactctctggcaatggccaaacagaaactgccgaggaagcggaagaagcatattccccctgcaccccaagcctcctcgccaacgttttgtaagacagaactgaacatggcttgcaattcaacacagtcagatacctgcctgggaaaagataacaggctgctggagcataatagatctgtactatccggggacgattccaccggaagcgaaccgcctctttctcctcctgagaggctccccattcggaggagctctactcgggataagaatcgccggggcgaaacttgctttctcctaaccacaggagactacacttgtgcaagcgacggaggaatccgaaaggataactgcaaggaggttgtcattactggatacacgcaggcagaagctaggtccctgacctag

SEQ ID NO: 200381 - DNA, 1890 bp, synthetic construct
  misc_feature 1..1890: note = Description of Artificial Sequence: Synthetic coding sequence
  source 1..1890: mol_type = other DNA
atgggcaagatcgagaacaacgagcgggtgatcctgaacgtgggcggaacgcggcacgaaacatatcgttcaaccctgaagacactccccggcacaagattggctcttctggcttccagcgaaccaccaggtgactgtttaacaactgctggcgataagctgcagccaagccctcctcctcttagcccccctccgcgcgcaccgcctctcagtcctggcccgggaggctgttttgagggcggggcggggaactgctcttcacgcgggggcagagcctcagaccacccaggcgggggcagggaattcttcttcgatcgtcatccaggggtttttgcttacgttctcaattactaccgcaccggtaagctccactgtccagcagacgtttgtgggcccctctttgaggaggaactggccttctggggcatcgacgaaactgacgtggagccttgctgttggatgacctacagacagcaccgggatgcagaggaggctcttgacatcttcgagactccagatctgattggaggcgatcccggcgacgacgaagaccttgctgcaaagcgcctagggatcgaggacgcagccgggctaggcggacccgatggcaagtccggtcggtggagaaggctgcagcctcgtatgtgggctctgtttgaagacccttatagctctcgagccgcgcggtttatcgcatttgcatctctctttttcattctcgtaagtatcacaacgttttgtttggagacccatgaggctttcaatatcgtcaaaaacaagaccgaaccagtgatcaacggaacctccgtagtcctccagtatgaaatcgaaacagaccctgccctgacttatgtcgaaggcgtctgcgtggtttggtttacatttgagttcttggtacgtatcgtgttttcacccaacaagctggagttcattaagaacctgctcaacatcatagatttcgttgccatactgcctttttacctggaggtggggttatccggactcagctcaaaggccgcaaaagacgtgctgggattcctgcgtgtagtgagatttgtgagaattctgcgcatctttaagctgactcgacacttcgtgggactccgggtgttaggacacactttgcgcgcttccaccaacgaattcctgttgcttattatctttttagctctgggagtactgatctttgctacaatgatttattacgccgagcgagtcggcgcccaacctaatgaccccagcgcatcggagcatacgcaattcaaaaatatcccgatcggattctggtgggcagtggtgacaatgactactctgggctacggtgatatgtacccgcaaacctggagcggcatgctcgtcggtgcactttgtgctttggccggagtcctgacaatagccatgcctgtccccgtaattgttaataacttcggtatgtactatagccttgctatggccaagcagaagctgccaaggaagaggaagaagcatattcccccagctccgcaggctagctctccaacattttgcaagactgaacttaatatggcgtgtaactcaactcagtctgatacctgcctaggcaaagacaacaggttactcgaacataaccgatccgtcctgagcggagacgacagcactggcagcgaaccaccactgtccccacccgaacgcttgccgataaggcggtcctctaccagagataagaaccggcggggtgaaacctgtttcttgcttaccacaggggactacacatgcgcttccgacggaggaataaggaaggtactataccggatttaccatggtcttctgactgcagagaaaggcaccgtggagttttcacacaccaaagactacacaggcaatcggctgcttcttttaaatgtgccttag

SEQ ID NO: 200382 - DNA, 1677 bp, synthetic construct
  misc_feature 1..1677: note = Description of Artificial Sequence: Synthetic coding sequence
  source 1..1677: mol_type = other DNA
atgggcaagatcgagaacaacgagcgggtgatcctgaacgtgggcgggacaaggcatgagacttacaggtccactctgaagacgctgcccggcacccgtctcgccctgctggccagtagcgagccacctggcgactgcttgacaacagctggggacaagcttcagccctccccacccccgcttagccctcctccgcgggctccgcctctgtcacccgggccaggtggctgctttgagggcggtgctggaaattgtagtagtcgggggggaagggcgtctgatcaccctggaggcggcagagagtttttctttgaccgtcacccaggggtctttgcatacgttcttaattattaccggacagggaagctgcactgccctgcagatgtctgcggaccgctctttgaagaagagctggccttctggggaatagacgaaacagacgtggaaccttgctgctggatgacctaccgccaacatcgtgatgcagaagaagccctggacatcttcgagacccctgacttaatcggcggagatcctggcgatgacgaagatctagcggcaaagcggttggggatagaggatgccgctggcttgggcggccctgacgggaagtccggtcgatggagaaggttgcagcctcggatgtgggccttattcgaagatccatattcgtcgcgggcagcacgcttcatcgcatttgccagcttgtttttcatcttagtcagcatcactacattttgtctggaaacgcacgaggctttcaatattgtaaaaaacaagacggagcctgttatcaatggaacctcggtggtgctgcagtacgaaattgagaccgaccccgccctgacctacgttgaaggggtctgtgttgtttggtttaccttcgagttcctagttaggatagttttcagtccaaataagctggaattcataaagaacctgctcaacatcatcgatttcgtcgctattctgcccttctacctcgaagtcgggttgagtggccttagttcaaaggccgccaaagatgttctgggattcctgcgggttgttcgttttgtcagaatcttgagaatctttaagctgacacgacacttcgtgggcctacgggttctcggccacaccttaagagcctcgacgaacgagttcctattactgataatttttctcgccctgggagttctgatctttgctactatgatctactacgcggaaagagttggagctcaacccaacgacccaagcgcctctgagcacacacagtttaagaacataccgataggcttctggtgggcagttgtgactatgacaaccctgggatatggtgacatgtatccacagacctggagcggcatgttggtaggagcactgtgcgcgttagcaggcgtgctcaccatcgccatgcctgtcccagtcattgtaaacaattttggtatgtactactcgctcgctatggccaaacaaaagttaccgaggaagagaaagaagcacattcctcccgctccccaggcctctagtccaactttctgcaaaacagagctgaatatggcttgcaatagcacccagagcgacacatgccttggaaaggataatcgacttctcgaacataatcgaagcgacaattgcaaggaggtcgtcatcaccggatatacccaagcggaagctcggtcactgacttag

SEQ ID NO: 200383 - DNA, 1842 bp, synthetic construct
  misc_feature 1..1842: note = Description of Artificial Sequence: Synthetic coding sequence
  source 1..1842: mol_type = other DNA
atgggcaagatcgagaacaacgagcgggtgatcctgaacgtgggcgggactcggcatgaaacttatcggtctaccttgaaaactcttcctggcactcggttagccctgctggcttcttccgaacctcctggagactgcctgaccaccgctggggacaaactccagcctagcccaccccccttgtcgcccccccctagggcaccacctctgtctccaggcccagggggttgctttgaaggcggggcaggtaattgttccagcagaggtggaagggcctctgaccaccccggcgggggacgtgagtttttttttgaccgccacccgggcgtgttcgcctatgtccttaattattatagaacaggaaagctgcactgtccagccgacgtttgtggacccctctttgaggaggagttggccttctggggcatcgatgagacggatgtcgagccttgctgttggatgacctaccggcagcatcgcgatgcagaagaagccctagatatttttgagactccggatctgatcgggggggaccccggagacgatgaggacttagccgcaaagcgattaggaattgaggatgcagccggcttgggaggtcccgacggaaaatctggccggtggcgacggctccagccccggatgtgggccctctttgaagacccctactcaagccgtgcagctcgctttatagcattcgcatcccttttcttcatcttggtaagtatcaccaccttctgcttggaaacgcacgaggctttcaacatcgtgaaaaacaagactgagccagtcatcaacgggactagtgttgtgctgcagtacgagatagagacagatccagccctgacatatgtggaaggtgtctgtgtcgtctggtttacattcgaatttttagtgcgaattgtgttttcacccaataaacttgagtttatcaagaatctcttaaatatcattgattttgtagccattcttcccttttacttggaagttggtttaagtggactgtcctccaaggcagccaaggacgtgctgggtttcctgcgcgtggttcgttttgtaaggattctgcgcattttcaagctgaccagacatttcgtgggtctgagggtgctcggtcacacattgcgagcttccactaatgagtttttactgctcataatcttcttagccctcggcgttctgatctttgccaccatgatatattatgcagagcgcgtgggggcccaacctaacgatccatcggcgagcgagcacacccaattcaagaacatcccaattggattttggtgggcagtggtgactatgactacactcggatacggcgatatgtatcctcaaacatggtctgggatgctggtcggtgctctgtgcgcactggcaggggtccttacgatcgccatgccagtgcccgtgatcgtgaataacttcgggatgtattattcactggccatggcgaagcagaagttgcccaggaaaagaaagaaacatatcccacccgcgccccaggcaagcagcccaacattctgtaagacagagctgaacatggcgtgtaacagcacccagtctgatacgtgtctagggaaggacaacagactgcttgaacacaatcgctcagtgttgtctggagatgattctaccgggagcgagccacctctgtccccaccggagaggcttccaatcaggcggtctagtacacgtgacaagaacagacgaggcgagacgtgcttcttgctgacaactggagactatacctgtgcgtccgatggaggaatccggaaggacaactgtaaagaagttgttatcactggttacactcaggcggaggcccgttctttgacgtag

SEQ ID NO: 200384 - DNA, 1917 bp, synthetic construct
  misc_feature 1..1917: note = Description of Artificial Sequence: Synthetic coding sequence
  source 1..1917: mol_type = other DNA
atgggcaagatcgagaacaacgagcgggtgatcctgaacgtgggcggcacaaggcacgagacctaccggtccactctcaaaaccctgccaggaacgcggctggcactgcttgcctcaagcgagccccccggcgattgcctcacgacagccggtgataaactgcaaccgtcgccaccccccctgagccctcctccgcgggctcccccacttagtccaggccccggtggttgctttgaaggtggggcaggcaactgcagcagccgcggcggacgcgcctccgaccatcccgggggcggccgggaattcttttttgaccggcaccccggagttttcgcctacgtactgaattattaccgcactgggaagctgcactgtcctgctgacgtgtgtgggccgctcttcgaggaggaactggccttctggggaatcgacgagacagacgtggagccctgttgctggatgacttaccgacagcaccgcgacgccgaagaggctctggatatcttcgagactccagatttaattggtggggatcccggcgatgacgaagacctcgcagccaagcgtttggggatcgaagacgcagccggactgggagggcctgacggtaagagcggacggtggcgaagactgcagcctcggatgtgggctctctttgaagacccatacagttctcgggctgcccgcttcattgcttttgctagtctgttttttatcctggtaagcatcacaaccttctgcttggaaacacacgaggcgtttaacatcgtgaagaacaagactgaacctgtcatcaatggcacgtccgtggtgttgcagtatgaaatcgaaactgacccagcccttacatatgtcgaaggggtgtgcgtggtgtggttcacttttgagttcttagtacgaatagtgttcagccctaataaactggaattcatcaagaatttgctcaacatcattgactttgtcgccattcttccattttatctggaggtgggcctaagtgggttgtcatcaaaggccgctaaagatgttctcggattcttaagggtggtgcgctttgtcagaattcttcgtatatttaagctcacccgtcacttcgtcggcttgcgtgtgttgggccacacactgcgagccagtacgaatgagtttttgttgctcattatctttttggctcttggtgtgcttatcttcgccacgatgatttactatgcagagagagtgggggcccagcccaacgaccccagcgcatcagagcatacccagtttaaaaatatccccatcggtttttggtgggcagtagtcacgatgactaccctgggctacggcgacatgtaccctcagacatggtccgggatgctggttggagctctgtgtgcgttggcaggggtgctcacgatcgcaatgccagtgcctgttattgtgaataatttcggcatgtattactccctggccatggcaaagcaaaagctgcctcgaaaacgaaaaaaacacatcccccctgctccccaggccagctcccccactttttgtaaaacagagttaaacatggcttgtaacagtacacagtccgatacgtgtttgggcaaagacaataggctactggaacacaatagatcagtgcttagcggagatgactccacaggatccgaaccgcctctgagcccccccgagcggctacctatacggagatctagcactcgggataagaacagacggggggaaacttgtttcttactgactaccggtgactacacatgtgcttcagatggggggatccgtaagggctacgaaaaaagccggtctttgaacaacatcgcagggctagctggaaacgccctcaggctaagcccagtgacgtctccttacaattcaccttgtcctttaaggcggtctcgtagtccaatccctagcattttgtag

SEQ ID NO: 200385 - DNA, 1890 bp, synthetic construct
  misc_feature 1..1890: note = Description of Artificial Sequence: Synthetic coding sequence
  source 1..1890: mol_type = other DNA
atgggcaagatcgagaacaacgagcgggtgatcctgaacgtgggcgggaccagacacgaaacttacaggagtacactcaaaactctccccggcactaggttggcactcctggctagctcagagcctccgggagactgtctcacaaccgctggcgataaactacagcctagcccccccccactcagccctccaccccgcgcccctcccctgagccctgggccaggcgggtgcttcgagggaggggctggaaactgctcaagccggggtgggcgcgcctccgatcaccctggcggcggtcgggaatttttcttcgatcggcacccgggcgtgtttgcctatgttctgaactactaccgaacgggcaaactccactgcccagccgacgtctgtgggccgctcttcgaagaggagctggcattttggggcatcgacgaaactgacgtggagccatgctgctggatgacttaccggcagcaccgggacgccgaagaagctctggacatcttcgagacaccagacctgattgggggagaccctggagatgacgaagatctggctgcaaagagacttgggatagaggacgctgccgggctcggtggaccagacggcaaatctggacgatggaggcgactccagccccggatgtgggctcttttcgaggatccctacagttcccgggctgccagatttattgccttcgcatccctcttcttcattctggtctccataacaacattctgtctcgagactcacgaggcttttaatatcgtgaagaataagaccgaaccagtgatcaatgggacctctgtggttctgcaatacgagatagagactgatccggcactgacatacgttgagggagtctgtgtggtgtggttcaccttcgagtttctcgtgagaatcgtcttttcccctaataagctggagttcattaaaaaccttttaaacataattgatttcgtggctatccttcctttctacctggaggtcggcctgtcggggctctcctccaaagcagccaaggacgtgttaggttttctgcgagtcgtaaggttcgtacgaattcttcgaatcttcaaattgactcgccatttcgtagggctgcgagttctgggtcatacactgagagctagcacaaatgagttcctgctactgattatattcttggccttgggcgtcctgatattcgccaccatgatctactacgccgagagggtaggggcccagcccaacgatccgagtgccagtgagcacacccagtttaagaacatccccatcggattttggtgggccgtcgtcacgatgactacgctgggctatggcgacatgtatcctcaaacctggtctggaatgcttgtgggggccctgtgtgcactggcgggcgtgttgacgattgccatgcctgtacctgtcattgtgaacaatttcggaatgtattactccctcgctatggccaagcagaaattgccacggaagcggaaaaaacacattcccccagcgccacaggcttcctcccccactttttgcaaaacagagttgaatatggcttgcaatagcacgcaatcagatacttgcttgggaaaagacaaccggcttttggaacacaatcgatcagtgttgagcggcgacgattctactggctccgaaccgcccttatctcctcctgagcgcttacccatccggaggtcatctactagggataagaaccggagaggcgagacctgctttttgctgactactggtgattacacttgcgcttcagacgggggtattcggaaggtgctgtaccgcatttatcatggactactgacagccgaaaagggcacggtggagttcagtcacaccaaggactatacagggaacaggctgctgctgcttaatgtgccctag

SEQ ID NO: 200386 - DNA, 2187 bp, synthetic construct
  misc_feature 1..2187: note = Description of Artificial Sequence: Synthetic coding sequence
  source 1..2187: mol_type = other DNA
atgctgagcagcgtgtgcgtgagcagcttccggggccggcagggcgccagcaaacagcagcctgcacctcccccccaaccccctgagagtcccccccctcccccactgccccctcagcagcagcagcccgcgcagcccggtccagcagcctccccggcaggcccacccgcccctcgcggacctggggatcggagagccgagccttgtccaggtcttcctgccgctgccatgggacggcacggagggggaggcggcgattcaggtaagattgtcattaacgtaggtggggtcaggcacgaaacttaccgatccacgctgaggactctgccaggcactagactcgccggactcactgaaccggaggcagcagctcggttcgactacgatcctggtgcggatgagtttttctttgacaggcatccaggcgttttcgcctatgtgctgaactactatcgtaccggcaagctgcattgccctgcggatgtgtgcggccccttatttgaggaggagctggggttctggggaatcgatgagacagatgtggaggcctgttgttggatgacctatcgtcagcacagagacgccgaggaagctctggatagctttgaagcaccagacccagccggtgccgcaaacgctgctaacgccgcaggggctcatgatggcgggttggacgacgaggcaggggcagggggtgggggtctggacggcgctgggggggagctcaagaggctttgctttcaggatgcgggagggggcgcaggcggacccccgggaggagctggaggcgcaggggggacatggtggcgccggtggcagccacgagtgtgggccctgttcgaagatccttacagttctcgcgccgctcgttatgtagccttcgcatctttattttttattctgatcagcataactacattctgccttgagacacacgaggggttcatccatatttcgaacaaaacagtgacacaagccagtcccattccaggggcacctccggagaatatcacaaacgtggaggtggagacggagcccttcctgacatacgtcgagggcgtttgcgtggtctggttcacatttgagttcctgatgagaatcacattctgtcccgacaaagtggaattcctaaagtcaagcctaaacatcatagactgtgttgctattctccccttctatttggaggtagggttgtccgggctaagctcaaaagctgctaaggacgtccttggcttcctgcgagttgtcaggttcgtgcggatcttaagaattttcaagctgactaggcatttcgttgggctgcgagtactgggacatacactgagggcgtcgacaaatgagttcctgttgctgattattttcttagcactaggcgttctaatctttgccaccatgatctattatgccgagaggatcggcgctgatcccgacgatattctgggctcgaaccatacatatttcaagaatattcccatagggttttggtgggcggttgtaaccatgactacactcggctatggcgacatgtatcctaagacttggtcaggtatgctggttggcgcactgtgtgcgctggctggtgtgctcaccattgctatgccagtacccgtgatcgtgaataactttggcatgtactattctcttgctatggccaagcagaagcttcccaaaaagaaaaataagcatattccccggccgccccagccaggaagcccaaactactgcaagcctgatcctcccccccctcctcctccccatccccaccatgggagtgggggcatctccccccctcccccgataacaccaccatcaatgggcgttacggtagcaggtgcctatccagcaggcccgcatacccacccagggttgttaagagggggagcgggaggtctaggcatcatggggctgccccctctgcctgccccaggcgagccatgcccactggcacaggaggaggtcattgaaatcaacagagctgacccacgacctaatggtgatccggccgcagcggcgttagcacatgaggattgtccagcgatcgatcagcccgctatgagccccgaagacaagagtccaatcacccccgggagtagaggcagatatagccgtgaccgcgcctgctttctgctgaccgattacgcccccagccctgacggctccattaggaaagcattggttacagcctag

SEQ ID NO: 200387 - DNA, 468 bp, synthetic construct
  misc_feature 1..468: note = Description of Artificial Sequence: Synthetic coding sequence
  source 1..468: mol_type = other DNA
atgggcatccggcagcagctgcggctgcccacccggaccgcccagccattaacgagtctcccgtgtcccagaaagacaagagcgccgagtcgcttagaggctgtcgctgccatcgccggtaccgagccagctagttcatcacccaccatgccactcccgcttatggctccgagcgagaaactgctaagtccacccgagactagcagggactttcgaagtccaccacctcttcccccccggctaagggagattccccagcctcagcagcaccgcggccctgagagaggagtgccagcccctcgggccccatgccatcctccatggctgtctcccgggcgacctcctcgttccccagaccccgcgctgcatcccctggccctccccagccctctttggggagactcgggggtaactggcaaaaaagttaagggcgcaggcggcggaggctgggggaaggggttcttctag

SEQ ID NO: 200388 - DNA, 1629 bp, synthetic construct
  misc_feature 1..1629: note = Description of Artificial Sequence: Synthetic coding sequence
  source 1..1629: mol_type = other DNA
atgacctaccggcagcaccgggacgccgaggaggccctggacagcttcgaggctccagatcccgccggagccgctaacgccgcaaacgctgccggagcacatgacggtgggctggacgacgaagccggagctgggggaggcggtctggacggggcaggcggggagctcaaaagactttgctttcaggacgctgggggaggagcaggaggcccccccgggggcgccggaggtgcgggaggtacctggtggaggaggtggcagccacgcgtttgggccctgtttgaggatccgtatagctcccgcgccgcaaggtatgttgcttttgccagtcttttcttcatccttatcagcataaccacgttctgtttggaaacgcatgaaggatttatacacattagtaataagacagtaactcaggcttcccctatccccggggcccccccagaaaacataaccaatgtggaggtagagactgagccatttctcacctacgtcgaaggagtgtgtgttgtgtggtttaccttcgaattcttgatgaggattacgttttgcccagacaaggttgaattcctgaagagttccctgaacatcatcgactgtgtcgcaatcctgcctttctacctggaagtcggactgtccggactgtcttctaaggccgctaaggacgtgctgggttttcttagagtggtacggtttgtccgaatcctgaggattttcaagctcacacgccacttcgtaggcctacgggtgctgggtcacaccctgcgcgcatcaacgaacgagtttctgcttctgattattttcctggcacttggagtcctgatatttgcaactatgatttactatgcggaacgcattggtgccgatcctgacgatatcctgggatctaatcatacctacttcaaaaatatccctatcggcttttggtgggcggtggtgacaatgaccacactgggatacggggacatgtatcctaagacgtggtctggcatgctcgtaggcgccctctgtgcccttgccggtgtgctgaccatcgcaatgcctgtcccagtgattgtgaacaactttgggatgtattattctctcgctatggcaaagcaaaagctgcctaagaaaaaaaacaagcacatccctcgaccaccccagccaggaagccccaactattgcaaaccagaccccccaccaccgccgccgcctcatccccatcacggaagcggagggatttccccgccaccgccaattacacctcctagcatgggtgtaactgttgccggggcataccccgcaggcccacacactcaccctgggttgctgagaggaggggccggggggctggggattatggggctccccccactgcctgcacccggcgaaccttgccctttggcccaggaagaggttatagagattaaccgggctgacccgaggccgaatggcgatcctgctgccgctgcactggcacacgaagactgcccagccatcgatcaacccgcgatgagcccggaagacaagtcccctatcactccgggctcaaggggccgctactctcgagatagagcctgctttttgcttacagactatgcaccctcaccagacgggtcaatacggaaggcgctggttactgcctag

SEQ ID NO: 200389 - DNA, 2274 bp, synthetic construct
  misc_feature 1..2274: note = Description of Artificial Sequence: Synthetic coding sequence
  source 1..2274: mol_type = other DNA
atgctgagcagcgtgtgcgtgagcagcttccggggccggcagggcgcctctaaacaacagccagcccccccaccacagcccccagagagtcctcctcctccacctctgcccccccagcagcagcagcccgctcagcccgggccagcagcctcccccgccggaccgcccgcaccgagaggaccaggcgatcggcgggcagaaccttgtcccggattacctgcagccgcaatgggaagacacggtggagggggaggagatagtggaaagatcgtcattaacgttgggggcgtgcgccatgagacctaccgctcaactctccggactttaccgggcactagactggccggactgacggaacccgaggccgcagctcggttcgattatgaccctggcgcagacgagttttttttcgacaggcacccaggtgttttcgcgtatgtgttaaactattacaggacaggcaaattgcactgtccagctgacgtctgtggtcccctgttcgaggaggagttgggattctgggggattgacgaaaccgatgtggaagcatgctgctggatgacataccggcagcaccgagatgcggaggaggccctggacagcttcgaagcaccagaccccgccggggccgcaaatgccgccaacgctgctggagcacacgatggggggctggatgatgaggctggagccggcggcggaggtcttgatggcgcgggcggcgaattgaaacggctctgttttcaggacgcaggtgggggcgccggcggcccaccaggaggagccggtggcgccggcggaacttggtggcgtaggtggcagcccagggtgtgggcactttttgaagacccgtactctagtagggccgccaggtatgtggccttcgcctcactgttcttcatcctgatatccatcacaactttctgcctcgaaacacacgaggggttcattcacatatctaacaaaactgttacacaagccagcccaattcccggagctcctccagaaaacatcacaaacgtcgaagttgagacagaacccttcttaacatatgtcgagggggtctgtgtagtttggtttacttttgagtttctgatgcgtataacattctgccccgacaaagttgagtttttaaaaagtagtttaaacatcattgactgtgtggccatattgccattttatcttgaagtcggtttgagtggcctgtcttccaaagcagccaaggatgttctgggattcctgagagtcgttcggttcgtgcggatcttgcggatcttcaaactgaccagacatttcgttggattacgggtcctgggccacacacttagggcatccacgaacgaattcctgctgttaataatatttctagctctcggggtcttaatctttgccactatgatctactacgcggaaaggattggggccgacccagatgatatcctggggagcaatcatacatattttaagaacatccctattggattttggtgggctgtagtcactatgacaaccttaggttacggggatatgtatccaaagacctggtcaggaatgttggttggtgctttgtgtgcactggcaggagttcttaccatcgctatgccggtacctgtgattgtgaataattttgggatgtactattccctcgcaatggccaaacaaaaattacctaagaagaaaaacaaacacatcccaaggccacctcagcccggatcaccgaattactgcaagcccgatcctccaccacctcccccgcctcacccccaccacggctctggaggcattagcccacctccaccgatcactccgccttcaatgggagtgacagtcgctggcgcttatccagcaggacctcacacccaccctggacttctgcgggggggtgctgggggcttaggaatcatgggcctgccaccactcccagctccaggggagccctgcccacttgcacaggaggaggtcattgagatcaatcgtgccgaccctcgacccaatggcgaccctgctgccgccgcactcgctcacgaggactgccctgcaatagatcagcccgccatgtcccccgaggacaagtcaccaatcactcccgggagcagaggcaggtactctagggacagagcctgcttccttctaacagattacgcgcctagcccagacggcagcattagaaaggctacaggagccccccctctgccccctcaagactggaggaagccggggccgccctccttcctgcctgacttgaatgcgaatgcagctgcgtggatcagtccttag

SEQ ID NO: 200390 - DNA, 1908 bp, synthetic construct
  misc_feature 1..1908: note = Description of Artificial Sequence: Synthetic coding sequence
  source 1..1908: mol_type = other DNA
atgatcagcagcgtgtgcgtgagcagctaccggggccggaagagcggcaacaagccaccgtcaaagacatgtttaaaggaagagatggccaagggcgaggcaagcgagaaaataatcatcaacgttggagggactcggcacgaaacttacaggtccacattacgtaccctcccaggtactaggctcgcctggttggcagatcctgatgggggtgggcggcccgagaccgatggcgggggcgtgggatcaagtgggtcttcaggaggtggcggttgtgagtttttcttcgataggcatccgggcgttttcgcctatgtgctaaattactacagaaccggcaagctgcattgtcccgccgacgtgtgcggacccctgttcgaagaggagctcacgttctggggaatagacgaaactgatgtagagccatgctgctggatgacttatagacaacaccgagacgccgaagaagcactggacatattcgaaagccccgatggaggcgggtccggagcagggccaagcgatgaggcaggcgatgacgagcgagaactcgctctccagagattgggaccccatgaagggggggcggggcatggcgctggtagtggaggttgccggggttggcaaccccgcatgtgggcactgttcgaagatccttactcttcgcgcgctgcccgcgtagttgcgttcgcaagtcttttttttatcctcgtgtccatcactactttctgtctcgagacacatgaagcttttaatattgatcgcaacgtgactgagattctccgggtgggtaacatcactagcgtccatttccggagagaagttgaaaccgaacccattctgacctacatcgaaggcgtttgcgtgctgtggtttacgcttgagttcctcgtcaggatcgtgtgttgcccggacactctggacttcgtgaaaaatctgctgaatatcatagacttcgtcgcgatcctgccattttacctcgaagtcggtctgtctggcctgtcctccaaggctgcccgcgacgttcttggttttctccgggttgttcgcttcgtgcgtattttacgaatattcaagctcactcgacatttcgtcggcttgagggtgttaggtcataccttgagggcttcgaccaatgagtttcttttgcttataatttttctggcgctgggtgtgcttatattcgctaccatgatttactatgcagagaggattggcgcccgaccaagcgacccacgcggtaacgatcacaccgactttaaaaacatacctataggcttctggtgggctgtagtgaccatgacaaccttgggttacggggacatgtatccgaagacatggagcggcatgcttgttggagccttgtgtgctctggccggggtgctgacaatcgcaatgccagtccccgttatcgttaataattttggcatgtactactctcttgccatggctaagcaaaagctcccgaagaagagaaaaaaacacgtccccaggcctgcccagctggaatctcccatgtattgtaagagtgaagagacaagcccccgtgactccacttgttccgacacctcccccccagcacgtgaggaaggaatgatagaaaggaagagagcagacagtaagcagaacggcgacgccaacgccgtgctgagtgatgaggaaggtgccggtcttactcagcctctggctagcagcccaaccccagaggaacgtagagcactccgcagatccacaactcgtgatcggaataagaaggccgccgcctgtttcttgctttccaccggagactatgcatgtgcggatggctcagtcaggaaagggacattcgtgctgcgggatctcccgttacagcacagccctgaagcagcctgccctcctacagcaggaaccctgtttttaccacactag

SEQ ID NO: 200391 - DNA, 1881 bp, synthetic construct
  misc_feature 1..1881: note = Description of Artificial Sequence: Synthetic coding sequence
  source 1..1881: mol_type = other DNA
atgatcagcagcgtgtgcgtgagcagctaccggggccggaagagcggcaataaacctccctccaaaacttgcttgaaagaagaaatggcgaaaggagaggctagcgaaaagatcatcatcaacgtgggaggaacacgtcacgagacttataggtctactctgcgaacacttcccggcaccagactggcttggctggcagatccagatggaggcggcagacccgaaaccgatggcggcggggtggggagcagcggtagctctgggggcggcggctgtgaattctttttcgataggcacccaggcgtgttcgcatacgtgcttaattactatcgcaccgggaagcttcactgccccgccgacgtgtgcgggccgctcttcgaggaagaactcaccttctgggggattgatgagacggacgtagagccgtgctgttggatgacttataggcagcatcgtgatgcagaagaagcactggatatctttgagagtcccgacggtggcggatccggcgccgggccttctgatgaggccggcgacgacgagcgcgaactggctctgcagcgcctcggcccccatgaaggcggggcgggacatggggctggatctggcggctgtagaggctggcagccccgcatgtgggctctgtttgaagatccctactccagccgcgcagctagggtggtggcctttgcctcattgtttttcattttggtctctattacgactttttgtctcgagacccacgaggcttttaacatcgaccggaatgtaacggagatacttagggtgggaaatattacttctgtccacttccggcgcgaggtggagaccgaaccaattttaacttatattgagggcgtatgtgttctgtggtttactttagaattcctcgtgaggattgtttgctgccccgacaccctcgattttgtgaaaaacctgctgaatattatagatttcgtggccatcctaccattctatttggaagtaggcctgagtggcttatcatctaaagccgcccgcgacgtcctgggctttctgagggttgtgcggtttgttaggatactccggatctttaaacttacaaggcactttgttggcctgagggtgctaggacatacccttcgcgcgagcactaatgaatttctgctgctgataatcttcctagccctcggtgtgcttattttcgctactatgatatactacgctgagagaatcggagctcgaccttccgacccaaggggcaatgaccacaccgacttcaagaatattcccatcgggttctggtgggccgtggtgacaatgactaccctcggatatggggatatgtaccccaaaacctggagcggtatgttagtgggtgccctatgcgcccttgctggcgttctgactattgccatgccagtcccagtcatcgttaacaatttcggtatgtactattcccttgcaatggcaaaacagaagctgcctaagaagaggaagaaacatgtgccaaggccagcccagctggaatcccccatgtactgcaagtccgaagaaacatcaccaagggactctacctgctccgataccagcccaccagctagagaagaaggcatgattgagagaaagcgtgccgactccaaacagaatggtgacgccaatgccgtccttagcgatgaagagggggcaggcctcactcagcctctggcatcctctccaacgccagaagaaagaagagctttacgaagatctaccacccgggatcgcaacaaaaaggcggctgcttgtttcctattaagtactggggactatgcctgcgccgatggcagcgtccggaaggagacgtgccaagatgcattgtcttccaattatgcacaggctgaagtcctcacactgtcctag

SEQ ID NO: 200392 - DNA, 1908 bp, synthetic construct
  misc_feature 1..1908: note = Description of Artificial Sequence: Synthetic coding sequence
  source 1..1908: mol_type = other DNA
atgatcagcagcgtgtgcgtgagcagctaccggggccggaagagcggcaacaaacctccatccaagacatgtcttaaggaagaaatggcaaaaggagaagcgtcggaaaagatcataattaacgttggcggtactaggcatgagacttatcgaagcaccctcaggactcttccggggacccgactggcctggctggctgatcctgacggcggggggcgccctgagaccgacggtggaggggttggatcctctggttcaagcggcggtggcggatgcgaattcttctttgatcgccaccccggcgtcttcgcctacgtgttgaactattatcggaccggcaaactacactgccccgctgatgtatgcggtcctttgtttgaggaagaattgactttctggggaatcgatgaaacagacgtggagccttgctgctggatgacatatcgacaacatcgcgacgccgaagaagcccttgacatctttgagagtccggatggaggcggatccggagccgggccaagcgatgaggccggagacgacgagagagaactcgctttgcagcgcctggggccccatgagggaggggccggccacggggcgggctcagggggctgccgaggctggcagccaaggatgtgggccctgttcgaagatccctattcctccagagctgcccgggtggttgcttttgccagcttgttcttcatccttgtctccatcacaacattctgtctggagacgcatgaagcattcaacatcgaccgcaacgttaccgagatcctgagagttggcaatattaccagtgttcatttccggcgggaggtggaaacagaacccatcctgacctatattgagggggtctgcgtcttgtggttcaccttggaattcttagtcagaatcgtttgctgccccgacaccctagactttgttaaaaacctgttaaacatcattgatttcgtggctattcttcctttttatctggaggttggattgagcggtctcagctcaaaggctgcccgagatgtcctcgggttcttacgagttgtgcggtttgtacggatccttagaatcttcaagctgacaaggcattttgtcggcttgcgtgttctgggacacaccctgagggcgtcaactaatgaattcctactcctcattatcttcttggctttgggggtgcttatatttgccacgatgatctactacgcagagcgaatcggcgcccgacccagtgatcccagaggcaatgatcatactgactttaagaacatcccaatcggattttggtgggccgtggttacaatgactaccctcggatacggagacatgtatcccaaaacttggtcgggtatgctagtgggcgccttatgtgcgctggcgggcgtccttacaatcgctatgcccgtgcccgttatagtaaacaattttgggatgtactactctttggctatggccaaacagaaactgcccaaaaagcgcaaaaaacacgtgccccggcccgctcagttggagtcaccaatgtactgcaaaagtgaggagacatccccccgggactccacctgctccgacaccagtcccccggctagggaggagggcatgatcgagcgcaaacgggcagactccaagcagaacggcgacgccaatgctgtcctttccgatgaagagggagctggcctcacacagcccctagcttcctcccctactccagaggaacggagagccctgagaagaagcacaacacgggacaggaataaaaaagccgcagcttgcttcctgctttctacaggagactacgcgtgcgccgatgggtcagtgaggaagggaacattcgtccttagggacctgcccctacaacactcaccagaagctgcctgccccccaaccgcaggtactcttttcttgccacattag

SEQ ID NO: 200393 - DNA, 1485 bp, synthetic construct
  misc_feature 1..1485: note = Description of Artificial Sequence: Synthetic coding sequence
  source 1..1485: mol_type = other DNA
atggacggcagcggcgagcggagcctgcccgagcccggcagccagtcaagcgccgcgtcagacgatatcgaaatcgtagtcaacgtaggcggtgtacgacaggtcctgtacggtgatctcctgagccaataccctgagactcggctcgcggaattaatcaactgtttagcgggaggctacgatacgatcttttccctttgcgacgactacgaccccgggaagcgggaattctacttcgaccgtgaccccgatgcttttaagtgcgtgattgaggtgtactattttggcgaggtgcacatgaagaaaggcatttgtcccatctgtttcaaaaacgagatggatttttggaaggtagatttaaaattcttagacgattgttgtaagagccacttgtctgagaagagggaagagctcgaggagatcgcacgtagagtgcagctgatactggacgatctgggcgtggatgctgcagaaggaagatggcgacgttgccagaagtgtgtatggaaatttctggagaagcctgaatcttcttgcccagctagagtcgttgcggtcttgtcgtttctcctgatattggtgtccagcgtcgtaatgtgtatgggcactattccggagctacaggtcttagatgccgaggggaaccgggtggagcaccccacgctggagaacgtggaaactgcgtgcattggctggtttaccctggaatacctgttacgcctgttctcatcacccaataagctccactttgccctgtcctttatgaatattgttgatgtgctggctatactgcctttctacgttagtctcacacttactcatctgggagctcgtatgatggaattaaccaacgttcaacaagccgtgcaggcccttaggatcatgagaatcgccaggattttcaaactagcccggcattcatcgggcttacagacattaacttacgctctgaaaaggagctttaaggagctgggcctgctgctaatgtatcttgccgtgggcatctttgtattttctgcattaggctatacaatggaacaaagccacccagagaccctgttcaaaagtattcctcagtctttctggtgggccatcattacgatgaccacagttggctatggggacatctaccccaaaacaaccctcgggaagctgaatgcagccatctcttttctgtgcggcgttatagcaatcgcattacctatccatccaataattaacaacttcgtgcgatactacaataagcagagagttctggaaaccgcagcaaagcacgaactcgagttgatggagctcaattctagttccgggggagaaggaaaaacaggtggcagccggtcggacctggataacctgcccccagaaccagctggcaaagaggccccttcctgttcttcccgcctgaagctgagccatagcgataccttcatccctctgctgacagaggaaaagcaccatagaactagactgcagagctgtaaatag

SEQ ID NO: 200394 - DNA, 1542 bp, synthetic construct
  misc_feature 1..1542: note = Description of Artificial Sequence: Synthetic coding sequence
  source 1..1542: mol_type = other DNA
atgaccctgctgcccggcgacaacagcgactacgactacagcgccctgtcctgcacgtcagatgcctcctttcatccagcatttttgccccagcgacaagctattaaaggagcattttatagacgggctcagagactgagaccccaagacgagccacggcagggatgtcagcctgaagaccggcgcaggagaatcatcataaacgtcgggggcataaagtactctctgccatggactacattggatgaattccccctcacccggttgggtcaattaaaggcttgcactaatttcgatgatatcctgaatgtctgcgacgattatgatgttacctgcaacgaatttttcttcgaccgcaacccaggggcttttgggacaattctgactttcctgcgggccggaaagctcaggctgcttcgggagatgtgcgcactaagcttccaggaagagctgttgtattggggaatcgccgaggaccatttggatggctgttgtaaacggcgatacttacagaagatcgaggagttcgccgagatggtggaaagggaggaggaggatgacgcactcgatagtgaaggaagggattccgaaggccctgccgagggggaaggcaggttgggaaggtgtatgcgcagactccgggacatggttgagcgacctcacagtggcctccccgggaaagtgttcgcttgcctgtcagtgttatttgtgaccgtgaccgccgtgaatctgagcgtgtccactctccctagcttgcgggaagaagaagagcaaggccattgctcccagatgtgtcacaacgtgtttatcgtggaaagtgtgtgcgtgggttggttcagcttggaattcctgcttaggctgatccaggccccaagtaagtttgcttttttgaggtctccccttactttgatcgatctcgttgcaattctgccatattatatcaccttgctggttgacggagccgctgcggggcgccgcaaaccaggtgcgggcaactcttatcttgataaagtgggtctcgtgttgcgcgtacttcgggcactgagaatcctgtacgtgatgaggttagctcgacactcccttggattacagactctcggattaacagccagacggtgcacaagagaattcggattgctactgctcttcctttgcgttgcaatcgccctctttgctccactgctgtatgtaattgagaacgagatggcagactctcccgagtttacatctataccggcgtgttactggtgggctgtaatcaccatgactacagtcggctacggggacatggtccctcgctccacacctggacaagtcgttgccctttctagtattctgagtggcatcttgcttatggcttttccagtgaccagcatctttcatactttttctcgttcctacctcgaattaaagcaggagcaagagcgggtcatgttcaggagagcccagttcttgataaaaaccaaaagccaactgagcgtgtcccaggattccgatatactgttcggctccgccagttcagatacccgggataataactag

SEQ ID NO: 200395 - DNA, 828 bp, synthetic construct
  misc_feature 1..828: note = Description of Artificial Sequence: Synthetic coding sequence
  source 1..828: mol_type = other DNA
atgaccctgctgcccggcgacaacagcgactacgactacagcgccctttcatgcacaagcgacgccagtttccatcctgcgtttctgccacagcgccaagcaatcaaaggggccttttaccggagagctcagcggctgcggccccaggatgaaccaaggcaaggttgtcagcctgaagaccgcagaaggcgcattataattaacgtgggaggcatcaagtacagtttaccatggaccacactcgatgagtttccactaacaaggcttggccagttgaaggcgtgcacaaatttcgatgacatacttaacgtgtgcgatgactacgacgttacttgtaacgagttctttttcgatcggaatcccggagccttcggtacgatactaacgttcttacgcgccggtaaactacgcttactccgcgagatgtgtgccctctcttttcaggaagaactgctgtattggggtattgccgaggatcatctggatggttgttgcaaacggcgctatttgcaaaaaatcgaagaattcgctgagatggtggagcgggaagaggaggacgacgcactggattcagagggtcgcgattcagaaggccctgcagagggcgaaggtcgtctcggcaggtgcatgcgccggcttcgcgacatggtagaaaggccacactccggcttgccaggcaaggtgttcgcttgtttatccgtactgttcgtgacagtaactgcagtgaacctttctgtgtctactcttcccagcttgagagaggaggaagagcaagtccgtgcacatgcccctagggggaacgctcctccgaggggaaaaggcttgtag

SEQ ID NO: 200396 - DNA, 543 bp, synthetic construct
  misc_feature 1..543: note = Description of Artificial Sequence: Synthetic coding sequence
  source 1..543: mol_type = other DNA
atgaccctgctgcccggcgacaacagcgactacgactacagcgccctgagttgtacgtctgacgcatccttccacccagccttcctaccccagagacaggcgatcaagggagccttctaccgccgggctcagcgtcttagaccccaggacgaacccaggcagggatgtcagccggaggaccggaggcggcgtatcataatcaacgtcggggggattaaatacagcctcccatggacaaccctggacgagtttccacttacacgccttggccagctgaaggcctgcaccaacttcgacgacatcctcaacgtctgcgacgactacgacgtgacatgcaacgaatttttctttgatcgaaatccgggagcttttggcaccatcctgacattcctgagggccggcaaattgagacttcttcgtgagatgtgcgctttgagctttcaagaggaactgctgtattggggcatcgcagaggaccatctcgacggctgctgcaagcgccggtatctgcagaagattgaagaatttgcagagatggtatag

SEQ ID NO: 200397 - DNA, 291 bp, synthetic construct
  misc_feature 1..291: note = Description of Artificial Sequence: Synthetic coding sequence
  source 1..291: mol_type = other DNA
atgaccctgctgcccggcgacaacagcgactacgactacagcgccttgtcctgcaccagtgatgcctcctttcatcctgcttttttgcctcagaggcaggccattaagggcgccttctaccgcagagctcaaagactgaggccccaggatgagcctcgacagggatgccagccagaggaccggcgaagaagaattatcattaacgtaggcggaatcaaatacagcctcccatggacaaccctcgatgaatttcctctgacgcgactggggcagctaaaagcctgtacttag

SEQ ID NO: 200398 - DNA, 777 bp, synthetic construct
  misc_feature 1..777: note = Description of Artificial Sequence: Synthetic coding sequence
  source 1..777: mol_type = other DNA
atgaccctgctgcccggcgacaacagcgactacgactacagcgccctgtcatgcacctcagatgcctcctttcatcccgctttcctgccacagagacaggcaattaaaggtgctttttatcggagggcccagaggcttcgccctcaggacgaacccagacaggggtgtcagcccgaggacagacgcaggagaattatcattaatgtcggcggtattaagtatagcctcccatggacaactctcgacgaattcccactgactcgccttggacagctcaaggcatgtacgaacttcgatgacattctaaacgtttgcgacgactatgatgttacctgcaatgagttcttttttgatcgcaacccaggggccttcgggaccatcctgacattcctgcgggcgggaaaactgcgcctgctgcgcgagatgtgcgccttgagcttccaagaggagctcctttactggggaattgccgaggaccacctagatggttgttgtaagcgccgctatctccaaaaaatcgaggagtttgcggaaatggttgaacgagaagaggaagacgatgcactcgattccgagggccgggattccgaaggcccagcagagggtgaagggcgactcggtcgttgcatgcgtaggctcagagacatggtggaacggccgcacagcggcttgcctggtaaggtgtttgcctgcctgagcgtcttgtttgtaaccgtgaccgcagtgaacctcagtgtttcgacgctgcctagcctccgggaggaggaagagcagtag

SEQ ID NO: 200399 - DNA, 147 bp, synthetic construct
  misc_feature 1..147: note = Description of Artificial Sequence: Synthetic coding sequence
  source 1..147: mol_type = other DNA
atgaccctgctgcccggcgacaacagcgactacgactacagcgccctctcctgcacatccgacgcctcatttcatcccgccttccttccgcaacgccaagccatcaaaggagccttttacaggagggcccagcgcctacgaccctag

SEQ ID NO: 200400 - DNA, 1311 bp, synthetic construct
  misc_feature 1..1311: note = Description of Artificial Sequence: Synthetic coding sequence
  source 1..1311: mol_type = other DNA
atgaccttcggccggagcggcgccgccagcgtggtgctgaacgtgggcggagcgagatacagcctctctcgagaactcctcaaggacttccccctcagacgggtgtccagactgcacggatgtaggtcagaacgcgacgtgctggaagtctgcgacgattatgatcgagagagaaacgagtattttttcgatcgccactccgaggcctttgggttcatactgttatatgtccgtggtcacggcaaattaaggttcgccccccgaatgtgcgagctgtctttctacaatgagatgatctattggggactcgagggcgctcatcttgagtattgctgtcagcggcggctggatgacaggatgtctgacacatacactttttactcagccgacgaaccgggggtcttagggcgtgatgaagctcggccgggcggggccgaggcagctcctagtcggaggtggctagagaggatgcgccgcacctttgaagagcctacttcttccctcgctgcccaaatcctggcatctgttagtgtagtgtttgtaattgtgtctatggtggtcctctgtgctagcacgttaccagactggcgaaatgccgcagccgacaaccgctctctggacgaccgctcaaggtactccgcgggcccgggcagagagcctagcgggattatcgaggctatctgtattggatggtttactgctgaatgtattgtgcgcttcatagtatcaaagaataagtgtgaatttgtcaagcgtcccctgaatattatagaccttttggccatcacgccatattacatcagcgtcctgatgacagtattcaccggtgaaaattcccagctgcaaagagcaggcgtgacgctccgcgttctgagaatgatgagaattttttgggtcataaagttggcacggcacttcatcgggctgcaaactctcggcctgacgctgaagagatgctacagggaaatggtgatgctgctggttttcatctgcgtcgccatggctattttctctgcattgtctcaactgctagagcacgggctggatctggaaacaagtaacaaagactttacaagcatcccggccgcctgctggtgggtgattattagtatgaccacagtgggctacggcgacatgtacccaatcaccgttccagggcgcatcctggggggagtatgtgttgtatcaggaattgtgctgcttgccctgcccattacctttatttatcattcttttgttcagtgctaccacgaacttaaattcaggtcagctcggtactccagatccctgtccacggaattcttaaactag

SEQ ID NO: 200401 - DNA, 1278 bp, synthetic construct
  misc_feature 1..1278: note = Description of Artificial Sequence: Synthetic coding sequence
  source 1..1278: mol_type = other DNA
atgaccttcggccggagcggcgccgccagcgtggtgctgaacgtgggaggggcccgttattctctgtcccgcgagttgctcaaggactttcccctgcgaagagtgtctaggctgcacggctgtaggagcgagcgtgacgtgctcgaggtgtgtgatgattatgatagagagcggaatgagtacttcttcgaccgccacagtgaggcatttggctttatcctcctgtatgtgcgcggccacggaaaactgcgttttgccccacggatgtgcgaactctctttttacaatgaaatgatatactggggtcttgaaggagcccacctggagtattgctgtcagaggagactcgacgacagaatgtcagatacttatacgttctattccgccgacgaacccggcgttttagggcgtgacgaggcgaggccaggcggcgccgaagctgctccttccaggcggtggcttgagcgcatgagaaggaccttcgaagaaccaacttcatccttggcagcccaaattttggcctcagtttcagtggtatttgtcattgtgtccatggtcgtgctgtgcgcaagcactctgcccgattggagaaatgcagccgctgacaatcgctcgttagatgaccggagtcgaatcatcgaggccatttgcattgggtggttcactgctgagtgtatcgtgcgcttcattgtttctaagaataagtgcgagtttgtgaagagaccattaaatatcatcgacctgctggctattactccatactatattagcgtgctgatgaccgtttttacaggcgagaattcgcagctgcaacgcgcaggagttaccctcagggtgctacgaatgatgcgcatcttctgggtgataaagctagcaagacattttatcggcctgcagacacttgggttgactttgaaaaggtgttatcgagaaatggtgatgctactggtctttatttgtgtggctatggccatcttttctgccctcagtcagctgcttgaacacggactcgacctggaaacctccaataaagattttacctctatccctgccgcttgctggtgggtgattatcagcatgactactgttggctatggagacatgtaccctattaccgtgcctgggcgcattctggggggtgtatgcgtggtgtccggtatcgtacttctggcgttacccatcacttttatctaccacagcttcgttcagtgttaccatgaattgaagtttaggtctgccaggtacagtagatccctgtccacggagttcctaaactag

SEQ ID NO: 200402 - DNA, 1560 bp, synthetic construct
  misc_feature 1..1560: note = Description of Artificial Sequence: Synthetic coding sequence
  source 1..1560: mol_type = other DNA
atgcccatgcccagccgggacggcggcctgcacccccggcaccaccactatggttcccatagcccatggtcccaacttctgagttcccccatggaaaccccttccatcaaaggcttgtattaccgaagggtgcgcaaggtgggtgcacttgacgcctcccctgtggatctaaagaaagaaatattaattaacgtgggcgggcggaggtatctgctcccgtggtctaccctggatcgctttcctcttagcaggctgtccaaattacggctctgcaggtcttacgaagagatcgttcagctgtgcgacgattacgatgaggatagtcaggaatttttctttgatcggagcccatccgcgttcggcgtgatcgtaagcttcctggccgcagggaagctcgtactgttacaggagatgtgtgctctcagtttccaagaagagcttgcctattggggcattgaagaggctcatctcgaacgctgttgcctccggaaactgctccgaaagctggaagagctcgaggaactggctaagcttcaccgcgaagatgtcctcaggcagcagcgggaaacccgccggcccgcatcccattcaagccgatggggtctgtgtatgaaccggttgagggagatggtcgaaaacccccagagtggactgcccggcaaggtgtttgcatgtctgagcatcttgttcgtagcaacaacagccgttagtctatgtgtttccacaatgcccgatttgagggctgaagaggaccaaggagaatgctcccgcaaatgttactacatctttatagtagagacaatctgtgtcgcgtggttctctctggagttttgtcttcgctttgtgcaggctcaagacaaatgccaatttttccagggacctcttaatattatagatattctcgcaataagtccctactacgtcagcctggccgtctctgaggaaccccccgaagacggagagagaccttcaggttcaagttacctcgaaaaggtgggattggtgcttagggtgctacgcgctcttcgcatattgtacgtaatgaggctcgctagacattctctcgggctgcagactcttggtttgactgtgaggagatgtaccagagagttcggcctattactcttatttctcgcagtggcaatcaccctgtttagtcctctggtgtacgtggccgagaaggaatccggtcgagtgctcgagttcacctcaatccccgcttcctattggtgggccatcatcagtatgactacagtcggctacggcgacatggtacctagatctgtgcccggacagatggtcgctctgtccagcatcctgtccggcattctcattatggcatttccagccacttcaattttccacacttttagtcattcttatctcgaactgaagaaagagcaggaacagctgcaggcgaggctgcgccacttacagaatacaggacccgcatcagagtgtgaacttttggatcctcacgtggcctcagagcacgaacttatgaacgacgttaacgacttaatcttggaggggccagcacttcctattatgcatatgtag

SEQ ID NO: 200403 - DNA, 2970 bp, synthetic construct
  misc_feature 1..2970: note = Description of Artificial Sequence: Synthetic coding sequence
  source 1..2970: mol_type = other DNA
atgaccatggccggcggccggcggggcctggtggccccccagaacacattcctggagaacatagtacgccgcagcaacgataccaattttgttctcgggaacgctcagatcgtggattggcctatcgtctacagcaacgatggcttctgcaaattgagcggttaccaccgagccgaagtgatgcaaaagtcctcgacttgctctttcatgtacggcgagttaactgacaaggataccatcgagaaggtgcgccagacgttcgagaactacgagatgaattcctttgaaatcctgatgtacaagaagaatcggaccccagtttggttttttgtgaaaatagcgcccatccggaatgagcaggataaagtcgtgctgtttctctgcactttcagtgacattaccgctttcaaacagcctattgaagatgactcatgcaaaggctggggaaaattcgctagactgacaagagcactgacgagctcccggggcgtacttcagcagttggccccatctgttcagaaaggggagaacgtgcacaaacactcaaggctggccgaggtgcttcaattgggttccgacatcctccctcagtacaagcaggaagcccctaagacgccacctcacataatattgcattattgtgtattcaaaacaacctgggactggatcattctcatcctgaccttctacaccgccatcctggtaccttacaacgtgtcttttaaaacccggcagaataatgtggcttggctcgtggtcgacagcatagtcgatgtgatcttccttgttgatatcgtgctgaacttccatactacctttgtgggaccggccggggaggtcatctcagatccaaagttaatccgcatgaattacctcaagacctggtttgtgatcgatcttctctcctgcttgccatatgatgttatcaacgcctttgaaaatgtggatgaggtgtccgcctttatgggcgacccaggaaagataggatttgcagaccagattccacctcctctggaaggtcgggagtcacaggggatttctagccttttttcctccctaaaagttgtccgcctgcttagactcggccgcgtcgccaggaagttggatcattacattgaatatggcgccgctgtgctggttcttctcgtttgtgtttttggactggcagctcactggatggcatgcatttggtatagcatcggtgactacgaaattttcgatgaagataccaagacaatacggaataattcatggctgtaccagcttgctatggacataggtaccccttatcagttcaatggctccggctcagggaaatgggagggagggccctctaaaaacagtgtatacatttcttcgctgtacttcacaatgacatcactgacaagcgttggatttggaaacatcgctccaagtactgacattgaaaagatctttgccgtggccattatgatgatagggtcgctcctgtatgctaccatctttgggaatgtgactaccatttttcagcaaatgtacgctaatacaaatagataccatgaaatgttaaacagcgtgagggatttcttgaagctgtatcaggtgcctaaaggccttagcgaaagggttatggattacatcgtgagtacttggagcatgagtcgcggtatagatacggagaaggtcttgcagatttgccccaaggacatgagagccgatatatgcgttcacctgaatagaaaggtgtttaaggaacacccagcgtttcggctcgccagcgacggctgccttcgtgctttggccatggagtttcagacagtccactgcgccccaggagacttaatttatcatgccggagaatctgtcgatagtctgtgttttgttgtatctgggtccctcgaggtgatacaggatgatgaggtcgtagccattctgggaaaaggcgatgtatttggcgacgtgttttggaaagaagcaacactagctcagtcttgtgccaacgttcgagccctgacttattgcgacctccatgtcattaaaagagacgccctacagaaagtcttggagttttataccgccttttcccactccttttctagaaacctgatcttaacatacaatttgcggaagcgtatcgttttcaggaagatctccgacgtgaagagagaagaggaggagcgcatgaaacgcaaaaacgaggcccctctgattctcccaccagatcatccagtgaggcggttatttcagcgctttcgccagcagaaagaggccaggctggctgctgagcgcggagggagagaccttgatgacttagatgtggaaaaggggaatgtcctgactgagcatgcaagcgcaaaccactctctggtcaaggcaagcgtggtcaccgtcagagaaagtccggctacccccgtgagctttcaggccgctagtacctctggcgtccctgatcacgctaagctgcaagctcctggaagtgagtgtcttggacccaaaggcgggggaggtgactgcgccaagcgcaagagttgggcccgctttaaagatgcttgcgggaaatcagaagactggaacaaagtctctaaggccgaaagcatggagactctgccagagcgtaccaaagccagcggcgaggcgactctcaaaaaaacagactcttgcgactcaggcatcacaaagagcgacttgagactggataatgttggcgaggcccggagccctcaggacagatcccctattttggccgaggttaagcacagcttttaccccattccggaacaaaccctgcaggcgaccgttctggaagtgagacacgaactgaaagaggacatcaaagctctgaacgccaagatgaccaacatcgagaaacagctcagcgagatactacggattctgacgagtagaaggagctctcagagtccccaggagctcttcgaaatatcacggcctcagtcgccagagtctgaaagagacatcttcggggcctcgtag

SEQ ID NO: 200404 - DNA, 2889 bp, synthetic construct
  misc_feature 1..2889: note = Description of Artificial Sequence: Synthetic coding sequence
  source 1..2889: mol_type = other DNA
atgaccatggccggcggccggcggggcctggtggccccccagaacacattccttgagaatattgtgagaagaagtaatgatacgaatttcgtccttgggaacgcccagattgttgactggccgattgtgtattccaatgacggcttttgtaaactgagcggatatcatagggcggaagtgatgcagaagtcaagcacctgttcctttatgtacggggagctcacagataaagatacgatcgaaaaagtgcgccagacgtttgaaaactacgagatgaattcttttgaaatcctgatgtataagaaaaataggaccccagtgtggttctttgttaagatcgccccaatccgcaatgagcaggataaagtcgtcctgttcttatgcactttcagcgatatcacagcatttaagcagcccattgaagacgacagctgcaagggctggggaaagtttgcgaggctgacgcgcgccctgacctcttcaagaggcgtgttgcaacaactggcaccgagcgtccagaaaggcgaaaatgtgcataaacactcaagactggcagaagtactccagctgggatctgacatcctgccacagtacaagcaggaagcacctaagactcccccccacataattcttcactattgtgtgtttaagacaacctgggactggataatcttgatcttgaccttttatacggctatcctggtgccttataacgtctctttcaaaaccaggcaaaataacgtggcttggttagtggtggatagcattgtagacgtcatctttcttgtcgacatcgtgctgaattttcacaccacttttgttggacctgccggggaggtaatctccgatcccaaactgatccgcatgaactacctgaaaacctggtttgttattgatctgttgtcctgcctgccctatgacgtgattaacgcattcgagaatgtggacgagggcatcagttctcttttctctagcttgaaggtggttagacttttgcggctgggccgcgtcgccagaaaacttgaccattacattgagtatggcgcagccgtccttgttctgctggtctgtgtgttcgggctggcagcacattggatggcatgcatatggtacagcataggagattacgagattttcgatgaagacaccaaaacgatccgaaataacagctggctgtaccagctggctatggatatagggaccccttatcagtttaacggtagcggaagcggcaaatgggaaggcgggccctcaaagaatagcgtgtacatttctagtttgtactttaccatgacttcattaacatctgttggatttggaaatatagctccgtcaaccgacattgaaaagatcttcgcagtggcaatcatgatgatcgggagcttgctctacgcaaccattttcggcaacgtgaccactatctttcagcaaatgtatgccaacacgaatcgatatcatgaaatgctgaattctgtgcgcgacttcctcaaactctaccaagtgcctaaaggcctttcagaacgggtgatggattacattgtcagtacctggtccatgtcccgcggcatcgatacggaaaaggttttacagatatgtccaaaagacatgagggctgatatttgcgtgcacctgaataggaaggtgtttaaagaacatccagctttccggctggctagcgacgggtgccttcgtgctcttgccatggaatttcagacagtccactgcgcgccaggggatcttatctaccacgctggagagtccgttgattctctgtgcttcgttgtgtcggggagcttagaagtcatccaggatgacgaagtggtggcaatccttggtaagggggacgtgttcggggacgtattctggaaggaggctacgctggctcaaagctgtgccaacgtaagggcactgacctactgcgatttacacgtgatcaagcgtgatgccctgcagaaggtcctagaattctatacagctttctctcacagcttctctcggaatctgatcctgacctataacctgcgcaagaggatcgtttttaggaagatttccgacgtgaagcgcgaggaggaagaacggatgaagcgaaagaatgaagctcctcttatcctgccccccgaccatcctgtgcgtaggctgtttcaacgctttcgccaacagaaggaagcacggctggcagctgaacgtggtggcagagatttagacgacctagacgtagagaaaggcaacgttctgactgaacacgcctcagcaaatcactctttggttaaggcctctgtagtgacggtgagagagtcacctgccacaccggttagcttccaggctgcatccacaagcggcgtgccagatcacgcaaaattgcaggctccgggttccgagtgcttagggcctaaaggcggaggtggtgattgcgccaaacggaagagttgggcccggttcaaagacgcctgcgggaagtcagaggactggaataaagtgtcaaaggcggagagcatggagaccctgcctgaaaggaccaaagcgtccggcgaggcaaccctaaagaagacagattcttgtgattctggcatcaccaagagcgacttgagactcgacaacgtcggggaggcaaggagtcctcaggatagatctccaatactggcagaagttaagcacagcttttatcctatcccagagcagacgcttcaggcaactgtgctggaggtgcgacatgagctgaaagaagacatcaaggcccttaacgccaagatgacaaatatcgagaagcaactgagcgaaatcctgaggattcttacctctcggcggtccagccagagtccgcaggagctattcgaaatttccaggccccagtctcctgaaagtgagcgtgacatttttggggcgtcctag

SEQ ID NO: 200405 - DNA, 3480 bp, synthetic construct
  misc_feature 1..3480: note = Description of Artificial Sequence: Synthetic coding sequence
  source 1..3480: mol_type = other DNA
atgcccgtgcggcggggccacgtggccccccagaacaccttcctggacacgattattcgaaaattcgaaggccagtccaggaagtttattattgccaacgccagagttgagaattgtgctgtcatctactgtaatgatggtttctgcgaactttgcgggtatagtagagccgaggtgatgcagcgaccatgcacgtgcgacttcctccacggaccccgcactcagcgccgagctgccgcacaaatcgctcaggcactcctgggggccgaggagagaaaggtggaaattgccttttataggaaagacggatcatgctttctctgtcttgtcgacgtggtgccagtgaaaaacgaggacggggctgtgatcatgtttattcttaactttgaagtggtcatggagaaggatatggtgggttcccctgcccacgacaccaaccatagaggtcctccgaccagttggctggcccctggccgcgcaaagactttcaggctgaagctgcccgcactgttagcactaaccgcacgagagtcatctgtgcggtccggaggagccggcggtgcaggagccccaggggcagtggtggtagacgtcgacctgacccctgcagcaccttcaagcgagtctctggctttggatgaggtcactgcaatggataatcacgtcgctggtttgggacctgcagaagaacggagggctctcgtgggccctggctctcccccccggtccgcccccggccagctcccttctcccagggcacactcactgaatccagatgcctctggatcatcctgttcgctggcgcgaacacgaagccgcgagtcttgcgcgtcagtgagaagggcctcatccgctgacgatatcgaagctatgcgggccggtgtgctccctcctcctcccaggcacgcatccacaggggctatgcatcctttgagatccggcttactcaattcaacatctgacagcgatttggttagataccggaccatttcaaagattccccaaatcaccctgaactttgtggatctgaaaggcgacccatttctggcatccccgacatctgatagggaaattatagcccccaaaatcaaggagcggacacacaatgtaacagagaaggttacgcaggtcctgagcctcggggccgatgtgctgcccgaatacaaactacaggcccctaggatccatcgatggactatcttgcattacagcccttttaaagccgtctgggactggctcatcctcctgcttgttatctacactgctgttttcacgccctattcagccgccttcttgctgaaagaaacagaggagggaccaccagcgaccgagtgtggttacgcatgtcagcctctcgccgtagttgaccttattgtagacatcatgtttattgttgatatactgataaacttccgtaccacctacgtgaacgccaacgaagaggtcgtgtcacaccccgggcgtatagcagttcactactttaagggttggtttttgattgacatggtggcggccattcccttcgatctattgatcttcggttcaggttctgaagagctcattgggctgcttaagacagcgcgactcctaaggctggttcgggttgctcgcaagctagaccgctactctgagtatggggcagccgtgctttttctgcttatgtgtacatttgcccttattgcccactggctggcatgtatctggtatgctattggtaatatggaacagccgcacatggattctagaataggctggctgcacaaccttggcgaccagattgggaaaccttataactcttctggcctcgggggaccgtctatcaaggacaaatacgtgaccgcactatacttcacattctcatcactgacctcagtgggcttcgggaatgtgtcccccaataccaacagcgagaaaatattctcgatctgtgtcatgttgataggctctcttatgtacgctagcatcttcggaaatgtgagtgcaataatccagaggctctatagtggcacagctagatatcacacacagatgctgagggtgcgagagttcatccgattccaccaaataccaaatcctttgcggcagagattggaggagtatttccaacatgcctggtcctacactaacggcattgacatgaatgcagtgctgaaaggattccccgaatgtttgcaggccgatatctgcctccatttgaatagatcattactccagcactgcaaaccttttcgtggggccacaaaaggatgcctgcgcgccctagctatgaagtttaagacgacacatgccccacctggggacaccctggtccacgctggggacctgctgacagcgctgtattttattagccggggcagcatagagattctcagaggggatgtagtggtggccatcctaggcaagaatgatatctttggggaaccgctgaacttgtatgctaggcctggcaagtccaacggagatgtaagggcattgacatactgtgatttgcacaaaatccatcgggatgatttactggaggttctggacatgtaccctgagttttccgaccatttctggagttcactagagattacatttaacttacgagatacgaacatgatccccggatcccccgggagtactgagctggaggggggattttctcgccagcgcaagaggaagctgtctttccgccgacgcaccgacaaggacacggagcagccaggagaggtgagcgccctaggccccgggcgcgctggagcagggccttctagccgaggtcggcccggaggcccttggggagagtcccctagctccggaccttcaagtcctgagtcaagcgaggatgaaggacccgggcgttccagctccccactgagactggtcccttttagctcaccacgcccccctggtgaaccaccaggcggggagcctctgatggaggattgcgaaaagtcctctgacacctgcaacccactttccggagccttttctggggtctctaacatcttcagtttctggggagactccaggggcaggcagtaccaggaactgccccgatgtcctgcccccaccccaagtctgctaaacatcccgctctccagcccagggagacggcccagaggggacgtagagtctagactggatgcccttcagagacaattgaaccgtctggagacccgcttgagcgctgatatggccacggtgctgcagctactgcagcgccagatgactctcgtgccaccagcatattctgccgtcaccactccggggcctggaccaacgagtacttccccactgcttccagtttctcctctgcctacgttgacattagactctctgtcccaggtgagccagttcatggcgtgcgaagagctaccccccggagcgccagaacttccacaggaagggcccacccgaagactgtcactccccggtcagctgggcgcactcacatcccagcccctgcaccgacacggcagtgatcctggtagctag

SEQ ID NO: 200406 - DNA, 2460 bp, synthetic construct
  misc_feature 1..2460: note = Description of Artificial Sequence: Synthetic coding sequence
  source 1..2460: mol_type = other DNA
atggccgcccccgccggcaaggccagccggaccggcgccctgcggccccgcgcgcaaaagggccgggtgagaagagccgtgcggataagcagcctggtggcccaggaagtgttgtcattaggggctgacgttctaccagagtacaaattgcaggccccccgcattcacagatggacaatcttgcattactccccttttaaggccgtgtgggattggctcatccttctactcgttatatacaccgcagtttttacaccctattctgctgcattccttctgaaagagaccgaggagggcccccctgcgaccgagtgtgggtatgcctgtcaacccctggcggttgtcgatctcattgtcgatatcatgttcatcgttgatatccttatcaactttagaaccacttatgtcaacgccaacgaggaggtggtgtcccaccccggccggattgcagtgcactattttaaggggtggtttttgattgatatggttgccgcaattccctttgacctccttattttcggctctggctcagaagaattaataggactcctgaaaactgctaggcttcttcggttggtgagagttgccaggaagctggacagatactccgaatacggtgccgctgtactgttcctgcttatgtgtacattcgcacttattgcacattggctcgcatgtatatggtacgctatcggcaatatggaacagccacacatggatagtcgcatcggatggctacataacttgggagaccaaataggcaagccttataacagtagtggattgggcggccccagtatcaaggataagtacgttaccgccttatactttacatttagttcgcttacctcagtcgggttcgggaatgtctctccgaacacaaattctgagaagattttttctatttgcgtgatgctgattgggagcttaatgtatgcaagcatatttgggaacgtaagcgcaataatccagcgactgtacagtgggaccgccaggtaccacacccaaatgctgcgggtacgggagttcatcaggtttcatcagattccaaatccacttaggcagagattggaagagtatttccaacatgcttggagttatactaacggcatcgatatgaacgctgtgctgaagggctttccggaatgcctccaagccgacatatgccttcacctgaaccgctctctcctgcagcactgcaagccgttcagaggagcgacgaaagggtgtctccgtgccctggcgatgaagttcaaaacaacccacgccccccctggagacactttggtgcacgccggcgacctgctgactgcactgtatttcatcagcagagggagtatcgagatccttagaggagacgtggtcgtggccattcttgggaagaatgacatttttggtgaacccctcaacctttatgcccgaccggggaagagcaatggggacgtgagagccttaacatattgtgacctgcacaaaatacacagggacgatctgttagaggtcttggacatgtaccctgaattttccgaccatttctggtcttctttagagataacttttaatctgcgagataccaacatgatccctgggagccctggaagcaccgaacttgagggcggattcagccgtcagagaaagcgaaaactgtcctttcggaggcgcaccgataaggacaccgagcaaccaggagaagtttccgccctgggcccgggccgcgcaggtgcagggccttcaagccgcggacgacccggcgggccatggggggagtcacccagtagcggaccttccagtccagaaagctcggaggatgagggtcctggaaggagctctagcccactgaggctggtccctttctcctccccccggccccccggagaacccccgggaggagaaccactgatggaagactgcgaaaaaagtagcgatacatgtaatcctctgtctggggcctttagtggggtttccaatatcttcagtttctggggtgactctcgaggccggcaatatcaggagcttccgcgatgccccgcgcctaccccgtccctgttgaacatccctcttagcagtcctggaaggagacccaggggcgacgtggagtcacggctggatgcgcttcagcggcagctgaataggctggagacgaggctgtccgccgacatggctactgtgttacagttattacagcgccagatgacactggtcccacccgcttactcggccgtgacaacccccgggcctggccccacgtctacgtcccccctgttgcccgtgtcccctctgccaactctaaccctggattcgctcagccaagtgtcccagttcatggcctgtgaagaactaccccccggcgcccccgagctccctcaggaaggccctactaggagactgagcctgcctggtcagctcggcgcgctgacgagtcagccattgcatcggcacgggtcggatccagggtcatag

SEQ ID NO: 200407 - DNA, 1182 bp, synthetic construct
  misc_feature 1..1182: note = Description of Artificial Sequence: Synthetic coding sequence
  source 1..1182: mol_type = other DNA
atggccgcccccgccggcaaggccagccggaccggcgccctgcggcctcgagcgcaaaagggtagggtccgccgtgctgtgcgcataagctcgctcgtggcccaggaagttctgagtctgggagctgatgtgttacctgaatataaactacaagcaccaagaatccacagatggaccatcttgcattatagtccatttaaggctgtctgggactggctgatacttctgctggtgatatatacagcggtgtttactccttacagcgcagcgtttctgctgaaggagactgaggagggaccgcccgccacagaatgtggttacgcctgccagcccctcgctgtcgtggacctgattgtagatatcatgtttattgtggatatcctgatcaattttagaacaacttacgtcaacgctaatgaagaagtggtgagtcacccaggcagaatcgctgtgcattactttaaaggctggtttctcattgacatggtggccgctatcccattcgatctgctcatttttggctcaggatccgaggagctcattggccttttgaagactgcacgccttctgcgtttagtgcgcgtggcccggaagttagaccgctatagtgagtatggcgccgccgtcctctttttactgatgtgtaccttcgccctgatcgcgcattggctggcatgtatttggtacgctataggcaatatggagcaaccacatatggattcaagaataggctggctccataacctgggcgatcagataggcaagccttacaacagctctggcttgggagggccctctattaaggataaatatgttaccgctctgtattttacattctcgtccttaacatccgtgggcttcggtaacgtttctcctaacaccaacagcgaaaagatttttagcatctgcgttatgctcattggctctctgatgtatgcctctattttcgggaacgtgtcagctataatccagcggttatacagtggtactgcccgctatcacacccagatgctaagggtcagagagttcatcaggttccaccaaatcccaaatcctctgagacagtgttgtgatcatcccggagcgtggcctcactttcatatccccgctgtcgctaggcagcctcctcctcacccccatctgggcctagcctttagcgggttccccgtccacggcgtctag

SEQ ID NO: 200408 - DNA, 3192 bp, synthetic construct
  misc_feature 1..3192: note = Description of Artificial Sequence: Synthetic coding sequence
  source 1..3192: mol_type = other DNA
atgagcagccacagcgccggcagctgcttcctgtgcctggtggacgtcgtaccggttaagaacgaggacggtgcagtgatcatgttcatcctgaattttgaggtggttatggagaaagacatggtggggtccccggcacatgacactaaccaccggggacctcctacctcgtggctcgccccaggacgcgcaaagacttttagactgaaactgccagccctgttggccctgaccgctcgagagtcttccgtgcgatcaggcggggccggcggcgccggggctcctggtgctgtcgtggtggatgttgacttgacccccgccgcgccttcctcagagtccctcgctctagacgaagtgaccgctatggacaaccacgttgctggcctaggacccgctgaggaaagaagggccctcgtgggtccaggatctcctccaagaagcgcacccggacagctccctagcccccgagcacactcactcaacccagatgcaagtggctctagttgtagtctggctcggactcgctcaagggaatcgtgtgcctctgtaaggagggcgagcagcgccgacgatatagaggcgatgcgcgctggcgtgctcccccccccacctcgtcacgccagcacgggcgcgatgcaccccctacgtagcgggctgctcaattctacctccgacagcgacctagttaggtatagaaccatctccaagattccccagataacccttaactttgtggacctgaagggcgaccctttcctggcctcaccaacatcggacagagagattattgcccctaagattaaggaaaggacacacaatgtcactgaaaaggtcacccaagttctctctctgggtgccgacgtgctcccagagtacaagctccaggcgccccgaattcataggtggaccatcttacactacagtccctttaaggcagtctgggattggctgattctgttactggtgatatacacagcggtgttcaccccgtactctgcagcgttcctgctgaaggagacggaggagggtcctcccgcgactgagtgtggatacgcgtgtcagccactggcagttgttgacttgatagttgacatcatgttcatcgtggacattttgatcaattttaggactacatacgtgaacgccaatgaggaagtcgtgtctcatcccgggcgcattgcagtgcactactttaagggctggttcctcattgatatggtggctgcgatccccttcgacctcctgatttttggctccggttccgaggaattgataggactactaaagaccgcaagactgttgcgactggttcgagtggcaaggaagttggacagatactccgagtacggagccgccgtcttgttcttgctgatgtgcaccttcgccctgatcgcccattggcttgcttgtatatggtatgccattggtaacatggagcaaccccacatggactcccggattgggtggctgcataacctcggtgaccaaattggtaagccctacaacagctcgggtttgggaggaccgtctatcaaggacaaatatgtcaccgctctgtatttcacttttagctctttgacatctgtcggcttcgggaacgtgtctccaaataccaattctgaaaaaatcttctcaatttgtgtgatgctgataggctccctcatgtacgcctcaattttcggaaacgtgtctgccattatacagcgcctctactctggaacagcccgttaccatacacagatgcttagagtgagagagtttatccggtttcatcaaatcccgaatccgctcaggcagaggttggaggagtactttcagcacgcctggagttatacgaacggaatcgatatgaatgctgtgctaaagggcttcccggaatgcctgcaggccgacatctgcctacacctgaatcgttctctgttgcagcactgcaaaccatttcgcggcgcaacgaaggggtgccttagagccttggccatgaaattcaagacaacacacgcccctcccggggacaccctcgttcatgcaggagatcttcttactgcgttgtacttcatatctcgggggagcatagaaatcttacgcggcgacgttgtggtcgcaattttaggaaaaaacgacatcttcggcgagcctctgaatttgtacgcaagacccggaaagtccaatggcgacgtgagagctctgacctactgtgacctgcacaaaatccaccgagatgaccttttggaggtattggacatgtaccccgaattctccgatcatttttggagttctctagagattacctttaacctccgcgacaccaacatgataccgggctctccaggctcaaccgaactggaaggtggctttagccgacagcgcaagcgcaaattatcatttcgaaggcgaacagacaaggatactgaacaacccggcgaggtctctgctctcggtcccggaagggctggggctggaccctcaagccgcggacggcctggcgggccttggggggagagcccaagctctggtccatcctcacctgagtcttctgaggatgagggacctggtcgctcttccagccctctccgtctggtcccgtttagttctcccagaccaccaggagaaccacctggaggagaaccgttgatggaggattgtgagaagtccagcgacacatgtaatccgctcagtggcgcctttagcggcgtctccaatattttcagcttttggggagatagtcgtggcaggcagtatcaggagctaccgagatgtcccgctcccacgccctctttgctaaacattccactgtcgtctcctggcaggagaccgagaggcgacgtggagagtaggctcgacgccttgcagcggcagttaaatcgcctcgagaccaggcttagtgcggatatggccactgtgctccagctgttgcagcgacaaatgactttggtgcctcccgcatatagcgcggtgaccacccccggacccggaccgactagcacctcaccccttctgcctgtctcgccgcttccaacactcactctggactctcttagtcaggttagtcagttcatggcgtgtgaggagctgcctcctggggctcccgaactaccacaagaaggtcccaccagacgactctccctgccaggtcagttgggggccttgacttcccagccattgcatcggcacgggtctgatccagggagctag

SEQ ID NO: 200409 - DNA, 2667 bp, synthetic construct
  misc_feature 1..2667: note = Description of Artificial Sequence: Synthetic coding sequence
  source 1..2667: mol_type = other DNA
atgcccgtgcggcggggccacgtggccccccagaacaccttcctggacacgatcattcgcaaattcgaaggacagtcacgaaagttcattatcgcgaacgccagggttgaaaactgcgcggtcatctactgtaacgacggattttgtgagttatgcgggtattcaagagccgaagtcatgcagcggccttgcacttgtgactttctccacggacctcgcacccaacgaagagccgccgcccagatcgcccaggcactccttggcgcggaagagaggaaggttgagattgctttctaccggaaggatggttcctgctttctgtgtctggttgacgtggtacccgtgaaaaacgaagatggtgcagttatcatgttcatcctgaatttcgaagtggtcatggaaaaggacatggtgggcagtcccgcacacgataccaatcatagagggcccccaacatcttggctcgccccagggcgggccaagacattccggttaaagttacccgccctgttagctctgaccgcgcgcgaatcgtcagttaggtctggcggtgccgggggggcgggggcccccggagctgtcgtcgtggacgttgacctgacgccagccgccccgagcagtgagtccctggccctggacgaagtgactgctatggacaatcacgttgctggcctcgggcctgccgaagaacgacgggcactggtcggcccaggcagtccgccccggtccgcacctggacagctgccttcccccagggctcattcactcaacccggacgcctctggatcaagctgttcattggctcgcacaaggagtagggagagttgcgcttccgttaggcgagcatcttccgccgatgacatagaggcaatgcgggcaggagtgctccctcctccaccacggcacgcgagcacgggtgccatgcaccccctgagatcgggactcttgaactcgacctcagacagcgacctggtgcggtaccgaacaatatcaaaaatacctcaaatcacattgaattttgtggacttgaagggagaccccttcctcgcttcccccacctccgacagagagatcatcgccccaaagataaaggagcggacacataacgtcaccgaaaaggtgacacaggtcctaagcttaggggccgatgtgctgcctgaatataagctgcaggcacccagaatacatcgctggacaatcttacactactctcctttcaaagccgtctgggattggcttatcttattactggttatctacacagcagtgttcacaccctacagtgccgccttcctgcttaaagagacagaggagggaccgcctgcaactgaatgtgggtatgcatgtcagccccttgcagtcgtggacctgatcgtggacatcatgttcattgtcgacattcttatcaatttccgcacgacttacgtcaatgccaatgaggaggtggtttcccatcccgggcggattgctgttcactacttcaagggctggttccttattgatatggttgccgccatcccgttcgacctactgatcttcggcagtggctcagaggagctgataggcctgctcaagacagcgcggctcctccgcctggtacgcgttgctcgaaagctggataggtacagcgaatacggcgcagcagttttgttcctcctgatgtgtacatttgcactcattgctcactggctggcttgtatctggtatgctattggtaacatggagcagcctcatatggattctaggatcgggtggcttcacaacttgggcgatcagattggcaagccctataactcatcaggcctgggaggacctagcatcaaggataaatacgtgactgccctgtactttaccttcagctcactgacctcagtgggatttggcaacgttagccccaataccaatagcgaaaagattttttccatctgcgttatgctgatcggctcattgatgtacgcatcaatcttcggcaacgtttctgccattatccagcgactgtacagcggtacggctaggtaccacacccagatgctacgggtccgggaattcatacgctttcatcagattcccaatccgctgcgtcaaagacttgaggagtacttccagcacgcatggtcctacactaacggaatagatatgaatgctgttctgaaggggttccccgaatgcctacaggctgatatttgcctccacctgaaccgcagcttgctgcagcattgtaagccattccgcggagctacaaaaggatgtttgcgggctctggccatgaaattcaagacaactcatgcaccgcctggggatacactggtacacgccggagacttgcttaccgccctatatttcatttcgcgcgggtctatagaaattcttcgcggggatgtagtggttgctattctcggcatgggctggggcgctggcaccggtttggaaatgccctctgcggcctctcggggagcctccctgctgaatatgcagtctctgggcctatggacttgggattgtcttcagggccactgggcacctctgatccacctgaactccgggcctccatctggcgccatggagaggagtccaacctggggcgaggccgcagagctttgggggagccacattctgctaccatttcgtatcaggcataaacagaccctcttcgccagtctgaagtag

SEQ ID NO: 200410 - DNA, 3252 bp, synthetic construct
  misc_feature 1..3252: note = Description of Artificial Sequence: Synthetic coding sequence
  source 1..3252: mol_type = other DNA
atgcccgccatgcggggcctgctggccccccagaacaccttcctggataccatagcaactagattcgacggaacccactccaattttgtgttaggcaatgcacaggtggccgggcttttccccgtggtctattgcagcgatggcttctgtgacctcactggcttctcccgggccgaggtgatgcaacgtggctgcgcatgctcatttctctacggccccgacacctctgagctggtgaggcaacagataaggaaagccttagacgagcataaggaatttaaggccgaactgatcctatataggaagtccggcttaccattctggtgcctgctggacgtgattcctataaagaacgaaaagggggaggttgctctcttcctcgtgtctcataaggacatctccgaaacgaaaaatcgcggtggtcctgatcgctggaaggagacaggtggaggtcggcggcgctatggacgagctcgatccaagggatttaacgctaatcgtagacgctcacgcgccgtgttgtaccatctgtcagggcatctgcaaaaacagcctaaggggaagcacaaacttaataaaggggtttttggagaaaaacccaaccttcctgagtacaaagtcgcggcaatacggaagagtccatttatccttctgcattgcggcgccctccgtgcaacctgggacggctttattctactggcaacactttacgttgcagtcactgttccttacagtgtgtgcgtcagcacggctcgggaaccatcagctgcccgaggacctcctagtgtgtgtgacctggcagtggaggtactgttcatcctcgatatcgtcctgaacttcaggacaaccttcgtgagcaaaagtggtcaggttgtctttgcccccaagtccatctgcctgcactacgtcaccacctggtttttgctggacgtgattgcggcgctgccctttgaccttttgcacgcatttaaggtcaacgtctactttggtgcccaccttctcaagactgtgaggctcctgcgactgctgcgacttctgccaaggctggatagatattcccagtacagcgctgttgtacttacgttgctcatggccgtattcgccttgctggcccactgggtggcctgtgtgtggttttacatcggtcagcgggagatcgaaagttcagagtcagagttgccggaaatcggctggctgcaagagcttgcgcgccgcttggagaccccatactacctcgtcggtagacggcccgccggggggaactcctctgggcaaagcgataattgttctagctccagcgaggctaacggcaccgggctggagctcctgggtggcccaagtttgcgctctgcatatattacaagcttgtatttcgcactgtctagcctcacctcagtcggctttggtaacgtgtctgctaataccgacactgagaaaattttcagcatctgtaccatgctaatcggggccctgatgcacgctgtcgtgttcggcaatgttaccgccatcattcagcgcatgtacgcacgaagattcctgtaccactcccggacacgtgacctgcgcgattatatccgcatacataggatcccgaagccgctgaagcagcgcatgcttgaatactttcaggccacatgggctgtcaacaatgggattgataccacagagctgctgcaaagcctacctgacgaactgcgggccgacattgccatgcatctacataaggaagtgctgcagctgccactcttcgaagccgcctcaagagggtgccttcgcgcactttctctggccctgaggccagccttttgtactccgggcgagtaccttatccatcaaggcgacgcccttcaggctctgtactttgtgtgttcaggcagtatggaggttctgaaaggcggcacggtgctggctatccttggcaaaggagatcttatcggatgtgaactgccacgccgtgaacaggtagttaaagccaacgcagacgtcaagggactcacatactgcgttctgcagtgtctgcagttagctggcctccatgacagccttgccctctatcctgaatttgctcccaggtttagtaggggcctgaggggggagttgtcatataatctgggggcaggcgggggcagtgccgaggtggacacttccagcttgtccggagacaatacactgatgtccaccttagaggaaaaagaaactgacggcgagcaaggccccacagttagccctgctccagctgatgaaccatcttcgcccctcctgtcgccaggatgtacgtcaagttctagcgccgcgaagctgctttccccacggcgcacagccccacggcctcggctgggcggtcgtggcagacccggacgtgcaggtgcactcaaggcggaggcaggaccctctgctccaccaagggcactcgaagggctgagattgccccccatgccttggaatgtgcctcctgacctgtcccctagagtggtggacggtatagaggatgggtgtggaagcgatcagccaaaattctcttttagggtaggccaatccggccctgagtgctcttcctcgccctccccaggaccggagtcgggactgttaacagtacctcacggcccatccgaggccaggaatacggatacactggataagctccgccaggcagttaccgaactgtctgaacaagtactccagatgagagaggggctgcagtccctaaggcaggcggtacagctggttctggcaccccatcgggagggcccgtgcccacgtgcctcaggtgaaggaccctgtcccgcttctaccagcggcttattgcagcctctgtgcgtggacacaggggcgagttcttattgtcttcaacccccggcagggtccgtcctgagcggaacctggccccacccaaggcccggccccccacccctaatggctccctggccatggggtccaccagcctctcagagcagtccctggccgcgagctaccgctttctggacctccacaagtgactcagagcccccagcttccggggacttatgtagcgaaccgtcaacaccagcttcccctcccccttccgaagagggggctcggacggggccggctgagccggtgtctcaggcggaggctacttcgacaggggagccaccccccggctctggcggtctggccttaccttgggatcctcattctctcgaaatggtacttattgggtgccatggatccgggacagtgcagtggactcaggaggaaggcacaggcgtgtag

SEQ ID NO: 200411 - DNA, 2967 bp, synthetic construct
  misc_feature 1..2967: note = Description of Artificial Sequence: Synthetic coding sequence
  source 1..2967: mol_type = other DNA
atgcccggcggcaagcggggcctggtggccccccagaacaccttcctcgagaacattgtgcgtcgttccagcgaaagtagttttctactcgggaatgcacagatcgtagactggccagtcgtgtactcaaacgacggattttgcaagctttctggttatcatcgggctgatgtcatgcagaagtcaagtacatgctcattcatgtacggcgaactgactgataaaaagactatagagaaggtgagacagaccttcgacaactatgagtctaactgcttcgaggtacttctgtataagaagaatagaacccccgtgtggttttacatgcagatcgctcccatccggaacgagcacgaaaaagttgttctcttcctgtgcacatttaaggatatcacgcttttcaaacagcccatcgaagacgactcaacgaagggctggactaagtttgctaggctgacaagggccctcactaattctcgctctgtcctgcagcagttaactcccatgaataagaccgaagtagttcataaacacagccgcctggccgaggtgttacaattagggtcagatattctgccacagtataagcaagaggcccccaagactccgcctcacattatcttgcactactgtgccttcaagacaacttgggactgggtaattcttattttaactttctataccgccattatggtaccatataacgtctcgtttaagaccaaacaaaataacatcgcctggctggtgctggacagtgttgtcgatgtgattttccttgtggatatcgtactgaatttccatactacttttgtcggcccaggcggagaggtgatcagcgaccctaaactgattaggatgaactacctgaaaacctggttcgtcatagatttattgtcctgccttccttacgacatcattaatgcctttgagaatgtcgacgagggaatctcctcattgttcagctcactgaaagtcgtgcgactgttgcggctaggcagagtcgctcggaagttggatcattatctggaatatggggccgccgttttggttctgttagtgtgcgtctttggcctcgttgcccactggttggcttgcatctggtattccatcggcgattatgaggtgatcgacgaagtaaccaataccattcagatcgacagctggctgtatcagctggccctgtcaatcgggaccccttaccgctacaatactagcgccggcatatgggagggcggaccaagcaaagatagcctctacgtctcaagtctctatttcacaatgacctcattgactactattggattcgggaacattgcacctaccacggatgtggagaagatgtttagcgtggctatgatgatggtgggaagcctgctctacgccaccatcttcggtaacgtgacgacaatctttcagcagatgtacgcgaacacaaaccgataccatgagatgcttaacaatgttagagattttctgaagctgtatcaagtgcccaaggggcttagtgagcgagttatggactacatcgtatccacctggtccatgtcaaagggcattgatacagaaaaggtcctgagcatttgtccaaaagatatgagagccgatatctgcgttcatctgaacaggaaagttttcaatgagcatcccgcgtttaggctggcctccgatggctgcctgcgcgctctcgctgtcgagtttcagaccattcactgtgccccgggcgatctgatctatcacgccggggaatctgtcgacgccctttgctttgtggtcagtggatccctagaggtcattcaagacgatgaggtggtcgcaatccttggaaaaggtgacgtgttcggggacatcttttggaaggaaactacactggctcatgcctgcgctaacgtgagggctcttacctattgtgacctgcacattataaagagagaggcactgctgaaagtgctggacttctataccgcctttgccaacagtttcagccgcaacctgacgctgacctgcaatcttcgaaagaggatcatcttcagaaagatttctgacgtaaagaaagaggaggaagaaagactgaggcagaagaatgaagtgaccctgtccataccggtggatcacccagtccgaaagctattccaaaaattcaaacagcagaaggaattgcgtaaccaagggagcacccagggtgacccagaacggaaccagctccaagtggaatcgcgctctctccagaacggcgctagtataaccggtaccagtgtcgtgacagtgtcacagattacgcccatacagaccagcttggcatatgtgaaaacatcggaaagcctgaagcaaaacaacagggatgccatggagttgaagcctaatggcggtgccgaccaaaagtgtctgaaggtaaattcaccaattcgaatgaagaatggtaacggcaaagggtggctgcggctaaagaataatatgggcgcccacgaggagaagaaagaggactggaataatgtgaccaaagccgagagcatgggactgctgagcgaagacccgaagtcctcagactcagagaatagtgtgacaaaaaatccgttgcgcaaaaccgacagctgtgattctgggattacaaaatccgacttgcggctcgataaagcaggagaggcgaggtccccacttgaacattccccgattcaggctgatgcgaagcacccgttttatcccatacccgaacaagctttgcaaacaacattgcaggaggtcaagcatgagttgaaagaggatatccagctgctttcctgccggatgacagcattagagaagcaggtagccgaaatcctaaaaatactcagtgaaaagagtgtgcctcaagcctccagccctaaatctcagatgcctctgcaagttcccccccagatcccttgtcaggacattttttcagtgtcccggcccgaatctcccgaaagcgataaagacgagatccacttctag

SEQ ID NO: 200412 - DNA, 1269 bp, synthetic construct
  misc_feature 1..1269: note = Description of Artificial Sequence: Synthetic coding sequence
  source 1..1269: mol_type = other DNA
atgcagaagagcagcacctgcagcttcatgtacggcgagctgaccgataaaaagacaattgagaaggttagacagacctttgataactacgaatccaactgctttgaggttctgctatacaagaagaataggacaccagtctggttttatatgcagattgcgcccatccgaaacgaacacgagaaggttgtcctctttctctgcacttttaaggacatcactctctttaaacagccaatcgaagatgactctaccaagggttggacaaaattcgcccggctcactcgagcgctgacaaactcccggtctgtgctgcagcagctgaccccaatgaataaaacagaggtcgtgcacaagcacagtcgactcgcagaggtccttcaattgggctcagatattctgcctcagtacaagcaggaagccccaaagacccctccacacattatacttcattactgtgctttcaaaacgacatgggattgggtcatactcatcctaaccttctacaccgccatcatggttccttataacgtctcttttaaaacgaagcagaataacatcgcttggctggtcttggacagcgtggtcgacgtgattttcctggtggacattgtgctcaattttcataccaccttcgtgggaccaggcggcgaagtcatcagcgatcccaagctaattagaatgaactacctgaaaacctggtttgtcatcgacctgctttcctgcttgccttatgatatcattaatgcattcgaaaatgtggatgaggggatctcttctttgttcagctcacttaaagtcgtgcggctgctcaggctgggccgtgtggcaaggaaactcgaccactatctggagtatggagccgcagttctcgtgctcctggtctgtgtgttcggccttgtggcccattggttagcctgcatttggtattcaatcggggactacgaggtgattgacgaagttacaaatactatccagatcgactcctggctctaccagttggccctgtcaataggaactccataccgctataataccagcgcagggatctgggagggcgggccctcgaaggatagtctgtacgtcagctccttgtatttcaccatgacttctttaacaactatcgggtttggaaacatcgcacctaccaccgatgtggagaagatgtttagcgtagccatgatgatggtcggctgcaagtatttcaacttttttatagaaaactattgctactggcagttttcctggctgcagagtcagatagggtag

SEQ ID NO: 200413 - DNA, 2199 bp, synthetic construct
  misc_feature 1..2199: note = Description of Artificial Sequence: Synthetic coding sequence
  source 1..2199: mol_type = other DNA
atgcccgtgcggcggggccacgtggccccccagaacaccttcctgggtactatcattagaaagtttgaggggcagaataaaaagttcatcatcgcaaacgcccgggttcagaactgtgcgatcatttactgcaatgacggattttgcgaaatgacggggttttcacgtccagatgttatgcagaagccctgcacatgcgactttcttcacgggcccgagacaaaacggcacgacatcgcacagatcgcacaggccctgttgggctccgaggagcgtaaagtggaggtgacctactatcataagaatggttcgacgttcatatgcaatacacatatcatcccggtcaaaaatcaagagggggtggcaatgatgtttatcattaattttgagtacgtgaccgataatgaaaacgccgctacccccgagcgagtaaaccccattttgcctataaagacagttaacagaaaattttttgggttcaagttccccgggttgagagtcctgacataccgcaagcagtcgctaccacaagaagatccagatgtagttgtcattgacagcagcaagcactccgacgacagtgtggcaatgaagcactttaaatctcccactaaggagtcttgcagtccgtctgaggctgacgacactaaggccctgatccagccttcaaaatgtagccccctggtgaacatctctggaccactcgaccactcttcgcccaaaagacagtgggataggctttaccctgatatgctccagagttcctcccaactgtctcatagtaggtctagagaaagtttatgtagcattcgacgcgcctcttccgtgcacgacattgaaggctttggggtgcacccgaaaaatatcttcagagacaggcacgccagcgagggtcccttcaatcacatcaagtcctcactcctcggctcaactagtgacagcaatttaaataagtattctactatcaataaaattccacagcttactcttaatttttcagaggtaaagaccgagaagaagaactcgagtcccccaagttccgataagactatcatcgctcctaaagtgaaggatcgcacccacaatgttaccgagaaagttacgcaagtgcttagtctgggtgctgacgtgctgcctgagtacaagctgcagacccctcgtattaacaagttcacaatccttcactacagtcccttcaaggcagtatgggattggttgatcctgctcctggtcatatataccgccatatttactccgtatagcgccgcgtttctgctgaatgaccgcgaagaacaaaagcgccgtgagtgcggatattcttgtagtccactgaacgtcgtcgacttgattgtggatatcatgtttatcatagatatcctaataaacttcaggacaacctacgtcaaccaaaatgaagaggtggtaagtgaccctgcaaaaatcgcaatccattatttcaaaggctggtttctgatcgacatggtagctgccattccattcgaccttctaatctttggatcgggaagcgacgaaaccaccacccttatcgggcttctcaagactgccaggctcctccgcctggtcagagtggcccgcaagttagaccgatacagcgagtacggtgcagcagtactgatgcttctgatgtgtatctttgccctcatagcccactggttggcttgtatttggtatgccatcgggaatgtcgaaaggccctacctgaccgataagatcggatggctcgattctttaggacagcagattggtaagcggtataacgatagcgactcgtcttcagggccgtccatcaaggacaaatacgtgaccgccctgtattttaccttcagttctctaacgtcagtggggttcggcaacgtgagccctaacacaaactcagagaagatcttctccatctgcgtgatgctgatcggcagcctgatgtacgcatccatcttcggaaatgtgtcggccatcatacagcgcctgtactcaggcactgcgcgctaccacatgcagatgttgcgcgtaaaggagttcatcaggttccaccagatacccaatcctctgcgtcagagactggaagaatacttccagcacgcttggacctacacaaacgggattgatatgaatatggtatgcatgtctgtctttcagaacgaatcagccgccgggataattgtcatcgctaaaatggaatag

SEQ ID NO: 200414 - DNA, 3591 bp, synthetic construct
  misc_feature 1..3591: note = Description of Artificial Sequence: Synthetic coding sequence
  source 1..3591: mol_type = other DNA
atgcccgtgcggcggggccacgtggccccccagaacaccttcctgggcacaatcatccgcaaattcgaaggccagaacaagaagttcatcatcgcaaatgctagggtgcagaactgcgcaatcatctattgcaacgatggcttttgtgaaatgactggattcagcagacctgacgttatgcaaaagccttgcacctgcgattttctccacggccccgaaactaaacgtcacgacatcgcccaaattgcccaggctcttttaggtagtgaggagcgcaaggtggaagtgacctactatcacaagaatggcagcacatttatttgtaacactcacataatccccgtgaaaaatcaagaaggggtggctatgatgtttatcattaacttcgagtacgtcacggataacgaaaatgccgctaccccagaacgtgtaaaccctatactgccaattaaaacagtaaaccgcaaattctttgggttcaagtttcctggcctccgggtgcttacataccgcaaacagagtcttccacaggaggacccagatgtagtggttatcgactcgtccaagcattcagatgattctgttgcaatgaaacacttcaagtctcctacaaaggaatcatgctcgccctctgaggcagacgacactaaagctctgatacagccctccaagtgtagcccactcgtcaatatttctgggcctctggaccatagttctcccaagaggcagtgggatcggctgtacccagacatgctgcagtctagtagccaattgagccactccaggtccagagagtctctgtgcagtatcagaagagcctctagtgtacatgacatagagggcttcggggtccaccctaagaatatcttcagagacagacatgcttctgaagacaatggtcggaacgtcaaaggaccttttaaccatataaaatcttccctcctcggctccacctccgatagcaatctgaacaaatacagcaccattaacaagatcccacaactcacgctcaacttttccgaagtcaagacagaaaagaagaattcatcccctccaagctctgataaaacaatcatcgcacccaaggtcaaagacaggacccataacgtcaccgagaaagttacacaggtgctctccctcggcgcagacgtgcttcccgaatacaagctgcagactccgaggataaataagtttacaatcctccattatagtcccttcaaggccgtctgggattggctgattttgttactggtgatatataccgctatctttaccccttattccgccgcttttctattgaacgatcgagaggaacagaagcggagggaatgtggctactcatgtagccctcttaacgtggtcgatctgatcgtggacataatgttcattatagacatacttattaacttcagaaccacctacgtgaatcagaacgaggaagttgtcagcgatcctgctaagattgccattcactattttaagggttggtttctcattgacatggtcgcagcaattccatttgatctcctgatttttggctccggatcagacgagacgaccactttaatagggttgctcaagacggcccggttactgagactggtgagggtggcaaggaaactagataggtacagtgagtacggtgccgctgtgctcatgttgcttatgtgtatttttgcgctcattgcacactggttagcctgtatatggtatgcaataggaaacgtggagagaccctaccttactgataagataggatggctggactcactggggcagcagatagggaagcgttataatgatagtgactcatcgagtggcccaagtataaaggacaaatacgtgacagctttatatttcaccttttctagcttgacatcagtaggatttggaaacgtttcacccaacacaaacagcgagaagatcttttctatttgtgtaatgttaatagggtctctgatgtacgcgagcatctttgggaacgtctcggccattatccagcggctgtattctggaactgctagatatcatatgcagatgcttcgggttaaggagttcatcagattccatcagatccctaacccgctgcggcagagactggaggaatacttccagcacgcctggacatatacaaacggaatcgatatgaatatggtgctgaagggattccccgagtgcttgcaggcggacatttgcctgcacctcaatcagacactgctgcagaattgcaaagccttccgaggcgcctcaaaggggtgtctgcgcgcccttgccatgaagtttaagaccacacatgcaccccccggggacacactcgtacattgtggtgatgtgctcacagcattgtacttcttatctcgaggcagtatcgagatcctgaaagatgacatcgtggtggctatcctgggcaagaacgacatattcggcgagatggtacatttatacgccaaaccagggaagtccaacgccgacgtgagggctctcacgtactgcgatctccataaaatccagagagaggacctgctggaggtcctagacatgtatccagagttttccgaccactttcttacaaacttggagctgacctttaacctgcgacacgagtcagccaaggccgaccttttgcggagtcagagcatgaatgacagcgagggggataattgcaagcttaggcggcgcaagctgagcttcgaatccgagggggaaaaagaaaactccacaaacgatcctgaagatagcgctgataccatccgccattaccagtccagtaaacggcactttgaggagaagaagtccagatctagtagttttatcagttcaatcgatgatgagcaaaagccactctttagtggcatcgtggatagctctcctgggataggcaaagcatccgggctcgatttcgaggaaacagtccccaccagcggccgcatgcacatcgacaaaagatctcattcctgcaaagatattaccgatatgagaagctgggagcgggaaaatgcccatccacagcctgaagacagctcgccatcagcactccagagagctgcttggggaatatcggagacagagtcagacctaacctacggggaagtggaacagcgtctggacctgctgcaggagcagctgaatcgccttgaaagccagatgaccactgatattcagaccattcttcagctgttgcaaaaacaaaccaccgtggtgcccccggcctacagtatggtgaccgcagggtctgagtatcagcgcccgataattcagctgatgagaacctcacaacctgaggcttcaataaagacagatcgatccttttccccttcaagtcaatgtccagagttcctcgatctcgaaaagtccaagttaaagtctaaagagagcctcagctcaggtgtgcatctgaacactgcgtccgaggacaatctgacctctctcctcaaacaggatagcgacctctcactggagctccaccttcgacagcgtaaaacatatgttcatcccataaggcatccaagcttaccagactcaagtctctcaactgtgggcattgttgggcttcaccgccacgttagcgatccagggctgcctggcaagtag

SEQ ID NO: 200415 - DNA, 1755 bp, synthetic construct
  misc_feature 1..1755: note = Description of Artificial Sequence: Synthetic coding sequence
  source 1..1755: mol_type = other DNA
atggtggccgaggtgtgcagcatgcccaccgccagcaccgtgaagaagccattcgatctgaggtcaaaaatgggaaagtggtgccaccaccgcttcccatgctgtagaggaagcggaaagagtaacatgggcacttctggcgatcatgatgatagctttatgaagatgttgcgctctaaaatgggcaaatgctgccggcactgcttcccatgctgtcgcggcagcggtacatcgaatgttggtacatccggagatcacgagaattcgttcatgaagatgctgcgcagcaaaatgggtaaatggtgctgtcattgctttccttgctgccgcgggagcgggaagtctaatgtgggtgcgtggggcgactacgatcactcggcttttatggagccacggtaccacatcagacgggaagacctggataaactgcacagagctgcgtggtgggggaaagtccctaggaaggacttaatagtaatgctccgtgacaccgatatgaacaagcgcgacaaggagaagagaactgcccttcacctggcctccgccaacggaaactccgaagtggttcagctgcttctggatagacgttgccagctcaacgttctcgataacaagaagcggaccgcgctgattaaagcgattcaatgccaagaagatgaatgtgtgttgatgcttctggagcacggagctgaccgcaatatccccgatgaatatgggaacacggctctgcattacgcgatttacaacgaggacaagctgatggcaaaggcattgcttctgtatggcgccgacatagaaagcaagaacaagtgcggtttaacgccacttttgctaggcgtgcacgagcagaaacagcaggtggtaaagtttctcatcaagaagaaggcaaatctgaatgtcctggataggtacggacgtacagcactgattctggccgtgtgctgcggcagtgcctccatcgtgaatctgttgttagagcagaatgtggacgtgtcctcccaggacctgagcgggcagactgcccgcgaatacgctgtttcctctcatcaccatgtgatctgtgagttgctttctgactataaagaaaaacagatgcttaagatctcatccgaaaatagcaatccagagcaggacctaaaattaacctcagaggaagagagccagcgccttaaagtgtccgaaaattctcaacctgaaaagatgagccaggaacccgagattaacaaagattgcgaccgagaagtcgaagaggaaatcaagaaacacggatcaaaccccgtggggctgcccgagaacctgacaaatggtgcttctgcagggaacggcgacgatggcttaatcccgcagcgccggtccagaaagcccgaaaaccaacagttcccagataccgagaacgaagagtaccattcagacgaacagaacgatacccgcaagcagctgtcagaggaacagaacacgggaatctcacaagacgagatcctcaccaacaagcagaaacagatcgaagtcgctgaacaaaagatgaattcagaactgtccctcagtcataagaaggaggaggacctcctaagagagaatagtgtgctccaggaggaaatagcaatgttaagattggagctggacgagacaaaacatcagaatcagttgagggagaacaaaattctcgaggagatagagtcagtgaaagaaaaaaccgacaaactgttgcgcgcaatgcagctcaacgaggaggcactgacaaagacgaatatttag

SEQ ID NO: 200416 - DNA, 1638 bp, synthetic construct
  misc_feature 1..1638: note = Description of Artificial Sequence: Synthetic coding sequence
  source 1..1638: mol_type = other DNA
atggtggccgaggccggcagcatgcccgccgccagcagcgtgaagaaaccatttggactccggagtaagatggggaaatggtgtagacattgtttcgcctggtgccgcggcagtggcaaatccaacgtcgggacgagcggagaccacgacgattctgccatgaaaaccttgcgctcaaaaatgggaaagtggtgctgtcactgcttcccatggtgccgcggcagcggaaagtccaacgtaggcacttcgggggaccacgatgattcagctatgaagacccttcgcagcaaaatggggaagtggtgctgtcattgcttcccatgctgccgcggttctggaaagagcaacgtgggaactagcggggaccatgatgactccgccatgaaaaccctgcgctctaagatgggtaaatggtgctgccattgctttccgtgttgccgtggatccggcaagaataaagtgggcccttggggagattacgacgacagtgcttttatggaaccacggtatcatgtccgtcgggaggatcttgacaagctgcatcgagcagcttggtggggcaaggtgccacggaaagatctgatcgtgatgctcaaagacacagacatgaacaaaaaggataagcaaaaaagaactgctcttcatctggcatccgccaatggtaacagcgaggtggttaaactcctgctcgataggaggtgccagctgaacatcctggataataaaaagagaacagccttaactaaggctgtccagtgtcaggaggatgagtgtgccctgatgctcctggagcacggaacagatccgaacattcctgacgagtatggcaatacagccctccattacgcaatctacaacgaggacaaactgatggcaaaagccctgcttctgtatggcgctgacattgaaagcaagaacaaacacggcttaacgcccctcctgcttggcgtacacgaacagaagcagcaggtagttaagtttcttatcaaaaagaaggcaaacctgaacgcgcttgataggtatggccgcaccgcccttatcctggctgtgtgttgtggctcggcctcaatcgtttccctgttgctcgaacagaatatcgacgtgtcttcacaggatctctccggccagacagccagagagtacgccgtttcttctcgtcataatgtgatctgccaattgctgtctgactacaaggaaaagcaaattctgaaggtgtccagcgagaacagcaatcccgaacaagatctaaagttgacatccgaagaggaatctcagcgattgaagggatctgagaacagccagcccgaggagatgagtcaagagccagaaattaacaagggcggcgacaggaaggtagaggaggagatgaagaaacacggaagtacccatatgggctttcccgaaaatctcactaacggggccactgccgacaatggtgatgacggtcttattcccccgcggaagtcaaggacaccagagagtcaacagtttcccgataccgaaaacgagcagtatcacagtgacgaacagaacgacacccagaaacagctgtctgaggagcaaaacaccgggatcttgcaggacgagatcctcatccatgaggaaaaacagatcgaggtggctgaaaacgagttttag

SEQ ID NO: 200417 - DNA, 867 bp, synthetic construct
  misc_feature 1..867: note = Description of Artificial Sequence: Synthetic coding sequence
  source 1..867: mol_type = other DNA
atggtggccgaggccggcagcatgcccgccgccagcagcgtgaagaaaccattcggcctaagaagcaaaatgggaaaatggtgtcgacattgcttcgcatggtgtcgcggcagtggcaagagcaatgtcggcacatcaggagaccacgacgacagtgctatgaagacattgagaagcaaaatgggaaagtggtgttgccattgtttcccatggtgcaggggttcagggaaatctaatgtggggacctcaggggaccacgacgacagcgctatgaagacactgcggtccaagatgggcaagtggtgctgccattgcttcccatgctgcaggggaagcggcaagtctaatgtgggaacctcaggtgatcacgatgattcggccatgaagacattacgctctaagatgggtaagtggtgctgccattgcttcccctgctgccggggcagcggcaaaaacaaggtgggtccctggggggactacgacgattctgcttttatggaaccaagatatcacgtgagacgagaagacctagataaactccaccgagctgcctggtggggcaaggtgcccaggaaagatttgattgtgatgctcaaggatacagatatgaacaaaaaggacaaacagaaaagaaccgcccttcatctggcgtcagccaatgggaattctgaggtagtgaagctgctgttagacaggcgatgtcagctcaatatccttgataataaaaaaaggacagctcttacaaaggctgttcagtgtcaggaagacgaatgcgccctgatgttactagagcatggcaccgatcctaacatccccgatgagtacggcaatacagccctgcactacgcaatttataatgaagattag

SEQ ID NO: 200418 - DNA, 1527 bp, synthetic construct
  misc_feature 1..1527: note = Description of Artificial Sequence: Synthetic coding sequence
  source 1..1527: mol_type = other DNA
atggtggccgaggccggcagcatgcccgccgccagcagcgtgaagaagcccttcggtttaaggtcaaaaatgggcaagtggtgtcgccactgcttcgcatggtgcagagggtcgggcaaatccaacgtgggcacttctggggaccacgacgatagcgctatgaagacattgaggagcaaaatgggcaaatggtgctgtcactgctttccttggtgcaggggaagtgggaaaagtaatgtgggtacgtccggagaccatgatgatagtgctatgaagacactccgctcaaagatgggcaaatggtgctgccactgcttcccctgctgtagaggctcaggtaaaaataaggttggcccttggggagattacgatgattcggccttcatggagccgcggtaccatgtgcgccgggaggacctagacaagctgcatcgagcagcttggtggggtaaggtgcctaggaaggaccttattgtgatgctgaaggataccgacatgaataagaaggataagcaaaaaagaacagccctacacttggcgtccgccaacggtaattcagaagtggtcaaactattgctggaccgacgctgccaactgaacatattggacaacaagaagagaaccgctctgaccaaagctgtgcagtgccaggaggatgaatgcgctctgatgctgctggagcatggtacagatccaaacattcccgatgagtacggcaataccgctctacactatgctatctacaacgaggataagctgatggccaaggctctgttgttgtacggcgcagacatcgagtcaaagaacaagcatggtttgacaccgttgctgttgggagtacacgagcagaagcagcaggtggtgaagtttctaatcaagaagaaggccaacttaaacgccttggacaggtatggccgaacagctctgatactggcagtgtgttgcgggtccgctagtatcgtgtccctcttgctggagcagaatattgatgtgagttcacaggacctctccggacaaactgcacgggagtatgctgtgagcagccgccacaatgtgatctgccagctgcttagcgactacaaggagaagcagattctaaaggtgtcaagcgaaaacagtaatcccgaacaggatctgaagctcacctccgaggaagagtctcagcgattaaaaggctccgaaaacagccagcccgaagagatgagccaagagcccgagattaacaagggtggcgacaggaaagttgaagaggagatgaaaaagcacggctctacccacatgggctttccggagaatctgacgaacggagccacagctgataatggtgatgatgggctgatcccccctaggaaaagtcgcacacctgaatcgcagcagttcccagacaccgaaaacgagcagtatcattccgacgagcaaaatgatacacaaaaacagctgagcgaggagcaaaataccggcattctgcaggatgaaatcctgattcacgaagagaaacaaatcgaagtggctgaaaacgaattctag

SEQ ID NO: 200419 - DNA, 954 bp, synthetic construct
  misc_feature 1..954: note = Description of Artificial Sequence: Synthetic coding sequence
  source 1..954: mol_type = other DNA
atgagctgccaggccttcaccagcgccgacaccttcatccccctgaacagcgatgcctccgcaaccctgccattaatcatgcaccactctgcggctgaatgtcttccggtctcaaaccacgccaccaatgtaatgtcaaccgtgccaagtatactttccctgattcagacaccaaagtgtctctgtacccacttttcagttacgaccctcggaaacacggctactggactgcactattctgtgccttcttgtcattatggcaatcagccatctacatacggggtgatggccggatcccttaccccctgcctctataagtttcctgaccacaccctgtctcacggtttcccccccatccaccagccgctgctggccgaggacccaacagcagccgatttcaaacaggagttgagaaggaaaagcaagctggttgaggaacctatcgacatggactctccagaaatccgggaacttgagaagttcgccaatgagttcaaggtacgcagaatcaagctgggatatactcagaccaacgttggcgaagccctggcagccgtgcacggatcggagttttcacagaccaccatttgtcggtttgagaacctgcaactgtcttttaaaaacgcgtgcaagctcaaagccattctctctaaatggctggaggaagccgagcaggtgggagctctgtacaacgaaaaagtcggggcaaatgaacggaaacgcaaacggaggaccaccatcagcatcgcagcaaaggacgccctagagagacatttcggagaacagaataagccatcttcacaggagataatgagaatggccgaggagctgaatctagagaaagaggtggtacgtgtctggttctgtaaccggaggcagcgggaaaagagggttaagacttctctgaatcaatctctcttttccatctccaaggagcatttggagtgccggtag

SEQ ID NO: 200420 - DNA, 876 bp, synthetic construct
  misc_feature 1..876: note = Description of Artificial Sequence: Synthetic coding sequence
  source 1..876: mol_type = other DNA
atgagctgccaggccttcaccagcgccgacaccttcatccccctgaactctgacgccagcgcgacgctccccctcattatgcaccatagtgctgccgagtgcctgcccgtatccaatcatgcaacaaacgtcatgtcaacagctactggacttcactatagtgttccatcttgccactacggtaatcaaccatcgacttatggggtcatggctggcagtctgactccttgcttgtataaatttccagatcatacattatctcatggattcccgccaatccatcagcccctgctggctgaagacccgacagcagccgacttcaagcaggagctccgccgcaagtccaagctggtagaggaacccatagacatggatagtccggagatcagggaactggaaaagttcgcaaatgagtttaaggttaggaggattaagttggggtatactcagactaatgtgggcgaagctctggcggccgttcacggatcggaattcagccagacaacgatctgtaggttcgagaatctccaactgagctttaaaaatgcgtgcaagctgaaagcaatcttgtcaaaatggcttgaggaagcggaacaggtgggggcactgtacaacgagaaggtaggcgctaacgaaagaaagaggaaacggcgcaccactatcagtatagcagccaaagacgccttggaacggcatttcggagaacaaaataaacctagttcacaggaaattatgagaatggcagaggagttgaacctcgagaaggaggtagtgagggtgtggttttgtaataggaggcagcgggagaaacgcgtaaagacatccctgaaccagtcccttttctctatttccaaggagcacctcgagtgcaggtag

SEQ ID NO: 200421 - DNA, 771 bp, synthetic construct
  misc_feature 1..771: note = Description of Artificial Sequence: Synthetic coding sequence
  source 1..771: mol_type = other DNA
atgctgtggcagaagcccaccgcccccgagcaggcccccgcccccgccaggccatatcagggcgtgagagtaaaagagccggtcaaggagctattaaggcgtaaacggggacatgcaagttctggggccgcccccgcgccaacggccgtggtgcttccccatcaacccttagctacctatacgacagtgggcccctcctgcctggacatggaaggctccgtttcagcagtaacagaagaggctgccttatgcgccggctggctctcgcaacccacacctgcaactctgcagccccttgccccttggacaccttacacggagtatgtgccacacgaggccgtcagctgtccttactccgctgacatgtacgttcagccagtctgtcctagctatactgtggtagggccctcgtccgtcctcacatacgcgtcgccacccctgattaccaacgtgacaactcgctcgtcagctacccctgctgtgggtcctccactggagggtcccgagcatcaggcaccattaacatacttcccctggcctcagccactttctaccctccccactagtaccttacaataccagccacctgccccggccttaccaggccctcagtttgtgcagttgccaatctcaattcccgagcccgtgctccaggacatggaagaccctcgcagggccgcttcttcccttaccatagacaagcttctgctggaggaggaggactcggatgcctacgccctgaatcacaccctatcggtggaagggttttag

SEQ ID NO: 200422 - DNA, 1440 bp, synthetic construct
  misc_feature 1..1440: note = Description of Artificial Sequence: Synthetic coding sequence
  source 1..1440: mol_type = other DNA
atggtgcacagcagcatgggcgcccccgagatccggatgagcaagcccctcgaagcagaaaaacagggacttgattccccatctgaacatactgacacagagcgaaacggccctgataccaatcaccaaaatcctcagaacaagacatcccccttcagcgtgagccctaccgggcccagtaccaaaattaaggctgaagacccgtcaggagactctgctcccgccgcccccctgcctccacagcccgcgcagccccacctgccccaagcgcagcttatgctcacagggtcacaactggccggagacatccagcagctcctgcagctgcagcagctcgtgctggtgcccggacaccaccttcagcctccggctcagtttctcctaccgcaggctcagcagagccaaccaggactgctccctactcctaatctgttccagctgccccagcagacacaaggggcccttctgacatcccaacctcgggccggcctgcccacacaggctgttaccaggcccaccctgccggatcctcacttgtcgcacccccagcccccaaaatgcttggaaccaccttctcacccagaggagccctctgacttggaggaactggagcagttcgctcggacgtttaaacagcgtagaatcaaattgggttttacgcagggggacgtgggtcttgctatgggaaagctgtatggaaacgacttctctcagacgaccatctctcggtttgaagcactcaatctgagttttaagaatatgtgcaagttgaagcctctcctagagaaatggcttaacgatgccgaaacgatgtctgtggatagcagcctgccgtccccaaaccagctgtcttccccctccttgggctttgacggccttcctggcaggcggaggaagaaacgaacaagcattgaaactaacgtgcgtttcgccctagagaagagttttctggccaaccagaagcctacctcggaggagattttacttatagctgaacagctgcacatggaaaaagaagtgatccgggtatggttttgtaatagacggcagaaggagaagcgaatcaacccgtgttccgccgcaccaatgctgccatctccagggaagccagcgagttacagcccccatatggtgactccacagggaggagccgggacactgccgttgagccaggcttcaagcagtctatctactacggtgactacactgtctagcgcggtggggaccctgcacccatcccgcactgccggcggcggagggggtggggggggtgcagctccaccgttaaactctatcccctctgtcactccccccccgcctgcgactaccaacagcactaaccctagtccccagggctctcatagcgccattggccttagcggcctcaatccatcaaccgggcccggactgtggtggaatcccgcaccataccagccttag

SEQ ID NO: 200423 - DNA, 1809 bp, synthetic construct
  misc_feature 1..1809: note = Description of Artificial Sequence: Synthetic coding sequence
  source 1..1809: mol_type = other DNA
atggtgcacagcagcatgggcgcccccgagatccggatgagcaagcctctggaagccgagaagcagggactggattctccgagcgaacacactgacactgaaagaaacggaccagacactaaccaccaaaatccccagaacaagacctctcctttttccgtctcaccaaccggcccgtcaacaaaaatcaaggcggaggatccttctggcgattctgcaccggctgctcctctgccacctcaaccagcccagccccacctgccacaagcccagctcatgctgacaggctcccagctggccggtgacatccaacagctgctgcaattacagcagcttgtgctggtgcccggccatcatctgcagccccctgcgcagttcctattgccacaagcccagcaatctcagccaggcctccttcctacaccaaatttattccagctcccgcagcagacacaaggtgccctcctgacaagccaaccacgcgcaggtctgcccacgcaggccgttacacgaccgaccctgccagacccccacctgtcccaccctcaaccccccaaatgcctggagccgccctcccatccagaagagccaagcgatctcgaagagctagagcaattcgcacgcacttttaagcaacggcggatcaaactgggcttcacacagggcgacgtcggcttagcaatgggaaaattgtatggaaacgacttctcccagactactatcagcagatttgaggccctgaatctcagtttcaaaaacatgtgtaagctgaaaccattgctagaaaagtggctcaacgatgctgaaacgatgtctgttgattcctcactgccctcccctaaccaactgagcagcccctcactgggattcgacggcctgccagggaggcgccgcaaaaagcgcacctccattgagaccaatgtgaggtttgccttggagaaatcattcctggctaaccagaagcctactagcgaagagatacttctcatcgctgaacagttgcacatggagaaagaagtcataagagtgtggttctgtaatcgaaggcaaaaggaaaagcgcataaatccctgttccgctgctcccatgttaccttcccccgggaaacccgcttcttattccccacatatggtgaccccccaagggggcgccggcaccctgcctctctcccaggcctcaagctccctatcgacaaccgttaccacactcagttctgctgtgggaaccctccacccttcaagaactgccggcggcgggggcggagggggaggggctgcgccccctcttaattccatccccagtgtgaccccaccgccacctgcgaccacaaactccaccaacccctcaccgcaagggagccattctgcaatcggcctcagcggtctcaatcctagcactgggtcgaccatggtcggactttcgagcggtctgagtcccgcgctgatgtctaacaatccgctggctacgattcaggctctggcctctggagggacattgccccttacgagtttagacggcagcggtaacctagtcctgggggccgccggtgcggctcccggctcaccgggactggtgacatcacctctgtttttgaatcacgccggacttccgctactgtctacgccccctggggtaggactggtgagcgccgcagccgcagccgtcgccgcatcaatctcttctaagagccctggtctgagcagcagcagctcaagtagtagctcttcctcatctagcacctgttcagaaacagccgcacagactccgggtggaccaggcggtcccgaagctggcagtaagcccgagtag

SEQ ID NO: 200424 - DNA, 1392 bp, synthetic construct
  misc_feature 1..1392: note = Description of Artificial Sequence: Synthetic coding sequence
  source 1..1392: mol_type = other DNA
atggtgcacagcagcatgggcgcccccgagatccggatgagcaagcctctagaagccgagaaacaggggctggattcaccttctgaacatacagacaccgagaggaatgggcctgacaccaaccaccagaacccacagaataagacctctccattctcagtatcgccaacaggcccctctaccaagatcaaggcggaggatccttcaggagacagcgcccccgccgcccctcttcctcctcagcccgctcagccgcacctccctcaggctcaattaatgctgactggaagtcaactggccggcgacatccagcaactgctgcagcttcaacaattggtcctggtgcctggtcaccacctccagccacctgcacagtttctcttgccccaggcgcagcagtctcagcccggtctcctccctacacccaacctgtttcagcttccacaacagactcagggcgctttacttactagtcaaccacgagcaggcctgccaacacagccgccaaagtgcttggagccccccagtcaccctgaggagccctccgacctcgaagagctggagcagttcgcccgcacgttcaagcagaggcgtatcaaactcggatttacgcagggcgacgtgggactcgcaatgggtaagctgtatggcaacgatttctcccagactactatttcgcggtttgaagcactaaatctgtccttcaagaatatgtgtaaacttaagccgttgctggaaaaatggctgaatgacgcagaaactatgtctgtggactctagcctgccaagccctaaccagctgagcagtcccagtctcgggttcgacggcctccctggccgacgaagaaaaaaaagaacatccattgagaccaatgtgaggttcgccctggaaaaaagtttcctcgccaaccagaagccaacatccgaggagatattgttaatcgcagagcaactgcatatggaaaaggaggtgattagggtctggttttgcaacagacggcaaaaagaaaaacgtattaacccctgcagcgccgcccccatgctgccgtctcccgggaaacctgcatcctattcaccccacatggttactccgcaaggtggcgccggcactttgcccctgagccaggcatcatcttcactgtcaacgacagtgacaactctgtcctctgctgtaggcacccttcacccatctagaaccgctgggggcggcggcggcggcggaggcgctgccccgcctctgaactctattccctccgtgactccccctcccccggcaactaccaatagcaccaacccttctcctcagggatctcactctgccataggactgagcggactcaatccttctactgggccaggcttgtggtggaatccggcaccgtaccagccctag

SEQ ID NO: 200425 - DNA, 1425 bp, synthetic construct
  misc_feature 1..1425: note = Description of Artificial Sequence: Synthetic coding sequence
  source 1..1425: mol_type = other DNA
atgggcgcccccgagatccggatgagcaagcccctggaggccgagaaacagggactggattcgcctagcgaacacactgatactgagcgcaatggccctgatacaaatcatcagaatccccagaataagacatctcccttctcggtgtctccaaccggaccttcaactaaaattaaagcggaggatccatctggtgactccgcacctgctgcccccctcccaccccagcctgcccaaccacacctgcctcaggcccaactaatgctgaccggttcacagctggctggagacatacaacaactcctccaactccagcagctcgtcctggttccagggcatcacttgcaaccacccgcacagtttcttcttccccaggcccagcagtcacaacccggactcctgcctactccaaatcttttccaattaccccaacaaacccaaggcgccttactcacatcccagccccgagcaggccttccaacacaagcggtaactcgacccaccctacccgatcctcacttatcgcaccctcagccgccaaaatgcctggagccacccagccaccccgaggagcctagcgatctcgaggaattagagcaatttgcccgaacctttaaacagcgcaggattaaactcggctttacgcagggcgatgtgggcctggctatggggaaactgtacgggaatgatttcagccagactactatctcccgtttcgaggcactgaacctcagctttaaaaacatgtgcaaattgaaacctctgctggagaagtggctgaacgacgcagagactatgtctgttgattcttcacttccctctccaaaccagttgagtagtccatctttaggcttcgacggcctgccaggccgccgcaggaaaaaacgtacatcaatcgaaaccaacgttcggtttgccctggagaagagctttctggctaatcagaagcccacttcagaggagattcttttaatcgcagaacaactgcacatggagaaagaggtgatccgtgtctggttttgtaaccgtagacagaaagagaaacgtattaacccttgcagcgcagccccgatgcttccaagtcccggtaaacccgcctcctactctccacacatggtcacccctcagggcggggcaggcactctaccactctcccaagcttcctcatcactcagcacgaccgtgacgaccctgagttccgccgtgggtacattacatcctagcagaaccgcaggcgggggaggcggcgggggcggcgccgcacccccattgaacagcatccccagcgtcacccccccacctccagccacgacgaactccactaacccctccccgcaaggcagtcactctgccattggcttgtctggcctaaatcctagcacaggacccgggctgtggtggaatccagccccataccagccttag

SEQ ID NO: 200426 - DNA, 1203 bp, synthetic construct
  misc_feature 1..1203: note = Description of Artificial Sequence: Synthetic coding sequence
  source 1..1203: mol_type = other DNA
atggtgcacagcagcatgggcgcccccgagatccggatgagcaagccacttgaagccgagaagcagggactggactcaccttccgaacacacagacaccgaaagaaacggaccggacaccaatcatcaaaacccccaaaacaagactagccctttttcagtaagccccactggcccatctactaagataaaggcagaggaccccagtggagatagcgcgcccgcagccccattgcctccacagcccgctcagccccatctcccacaggcacagttgatgttgacggggtcccaactagcaggggacatccagcagcttcttcagctacagcagctggtcctcgtgcccggacaccacctccaaccacccgcccaattcctattgcctcaagcacaacagagtcaacccggcctcctgcccacccccaacttgttccaacttccacagcagactcagggggcacttctcacgagccagccgagggcggggctccccacccagcccccaaaatgcttggagccaccttctcacccagaagagccaagtgatcttgaagaactggaacagtttgccagaacttttaaacaaagaagaatcaagctagggttcactcaaggcgacgttgggctggctatggggaagttgtacggcaacgatttctcacagacaacgatttcacggtttgaggcactaaatttgagctttaaaaatatgtgtaagctgaagcctctcctagaaaagtggctgaacgatgcagaaaccatgagcgttgacagcagcctcccctcccccaatcagttatcctccccatccctggggtttgatgggcttccaggccgtcggcgtaagaagcggacatccatcgaaaccaatgtcaggtttgcattagagaaaagcttcctagcaaaccagaaacctactagcgaggaaattctgctgatcgcagagcagctgcacatggaaaaagaggtgataagggtgtggttctgtaaccgtaggcagaaggaaaagcggatcaatccttgttccgccgcaccaatgcttccctcccctggcaagcccgcctcctactcccctcacatggtaaccccccagggaggggccggcacccttcctctctcacaggcgtcttcatccctatctaccaccgctcagacccctgcgttgaaggctgctacgcgcctctccgcttgtcaggcctag

SEQ ID NO: 200427 - DNA, 1404 bp, synthetic construct
  misc_feature 1..1404: note = Description of Artificial Sequence: Synthetic coding sequence
  source 1..1404: mol_type = other DNA
atggtgcacagcagcatgggcgcccccgagatccggatgagcaagcccctcgaagccgaaaagcaagggctagacagtcctagtgagcacaccgacacagaacgtaacgggcctgatactaaccatcagaacccccagaacaagacatctcccttcagcgtgtcacctaccgggccaagtacgaagataaaggctgaggacccatcaggcgattctgcaccggctgcgcctttgccaccccaacctgcccagcctcacctcccacaggcacagctgatgcttacaggatcccaactggccggagatatccagcaattattgcaacttcaacagctcgtgctggtcccaggccaccatctgcagccccccgcgcagttcctccttccccaagcccagcagtcccagcctgggttgctaccaaccccgaatctgttccagctcccccagcaaacacagggtgccctcctgacgagccaacctagggctggattacctacgcaggccgttacgagacccacattgccagatcctcatctctctcacccgcaacctcctaagtgcctcgagcctccatcgcaccccgaggaaccatcagacctggaggagttggagcaatttgcccgaacctttaagcaacgtaggataaagctcggttttactcagggtgacgttggcttggcaatgggcaagctgtacggaaatgacttcagccagactactatttcgcgattcgaggccctgaatctgtcttttaaaaatatgtgtaagcttaaacccctcctcgaaaagtggctgaacgatgccgagaccatgagcgtggattcttctcttccctccccaaaccaactgtcctccccctctcttgggtttgatggtctgcctggtcgcagacgtaaaaaacggaccagtattgagactaacgttcgattcgctttggaaaagagcttcctggcaaatcagaaacctaccagtgaggagatcctgctcatagctgaacaattgcacatggagaaggaagtaataagggtatggttctgtaaccggcggcagaaagagaagagaatcaacccatgcagtgcagcacccatgctgccaagtccagggaagcctgcttcttactctccacacatggtcaccccgcaaggcggcgccggaactttgcccctgtcacaggcctcgtcaagcttatccacgacagtgacaaccttatcaagcgccgtggggactctgcacccgagtcgcaccgctggtggggggggggggggcggaggcgctgcacctccactgaacagcattcccagtgtcacacctccaccacccgctacaacaaacagcactaacccatccccacagggctctcactccgcaatcggcctgtccggactgaacccaagtaccggctag

SEQ ID NO: 200428 - DNA, 1761 bp, synthetic construct
  misc_feature 1..1761: note = Description of Artificial Sequence: Synthetic coding sequence
  source 1..1761: mol_type = other DNA
atggtgcacagcagcatgggcgcccccgagatccggatgagcaagcctcttgaggccgaaaaacagggactcgactcacccagtgagcatactgacacggaaagaaatgggccggacaccaaccatcagaatccccagaataagacctccccgttctcggttagccccacaggtccatcaactaaaattaaggctgaagatccaagtggcgatagtgcccctgccgcgccactgcctccccagccagcccaaccacaccttcctcaagcacaactgatgctaactggttcacagttagctggggacattcagcaattgttgcagttacagcagttggtcctcgttcctgggcatcatctgcagcctcctgcccagtttctgctgccccaggctcagcagtcacagcctggtctcttgcccacccccaacttgttccagttacctcagcaaacccagggagctctgctgacctcgcaaccgcgcgccgggctccccacccaaccccccaaatgtttggagcctcctagtcatcccgaggagccgtccgacctggaggagctggaacaattcgccaggacatttaagcagagacgcattaaactgggcttcactcagggagatgtgggacttgccatgggaaaactgtatggaaacgacttcagccagactacaatctccaggttcgaggctctgaacctgtcattcaaaaatatgtgtaagttgaaacccttgctcgagaaatggcttaatgacgcagaaaccatgagtgttgactccagtctgccatcgcctaaccaactatctagcccaagcctgggatttgatggcctgccgggaagaagaaggaagaagcgaacctctattgagacaaacgtaaggtttgcgttggagaaatcttttctggccaaccagaagcctacctcagaagagattctactgatcgctgagcaattgcacatggaaaaagaggtgatcagggtgtggttctgtaaccgccgacagaaagaaaagaggattaacccttgttccgctgctcctatgctcccatctccaggcaaaccagcttcctactcaccccacatggtgacaccgcagggtggagccgggaccctgccactgtcccaagcaagctcctcgttgtccaccaccgttacaacactttcctctgcagttggcaccttgcaccctagtcggactgcaggcggcggaggggggggcggaggtgcagccccccccctgaatagtatcccatctgtgacacctcccccacccgccacgacaaactctaccaacccaagcccacagggatctcatagtgctatcggcctctctgggttgaatcccagcactggtagcactatggtggggttgtcgtcgggtttgtcacccgcactcatgtccaataatcccttggcaaccatccaggcacttgctagtggcggtactctgcctctcacatctttagacggctctggtaatctcgtattgggcgccgctggtgctgcaccgggttcacctggccttgtcacatctcccctctttttgaaccacgcgggtttgccactcctgagcacgccccctggtgtcggactagtgtcagctgcagcagcagctgtggctgcctcgatttcctccaaatcccccgggctaagctcttcttcctcttcgtcaagctcaagctcatcttccacatgtagcgagactgccgctcaaacacctggtgggcccggcgggcctgaagccggcagcaagcccgaatag

SEQ ID NO: 200429 - DNA, 1311 bp, synthetic construct
  misc_feature 1..1311: note = Description of Artificial Sequence: Synthetic coding sequence
  source 1..1311: mol_type = other DNA
atggtgaacctggagagcatgcacaccgacatcaagatgagcggcgacgttgctgacagtacagacgctcggagcacactctctcaagttgaacctggcaatgatcgcaacggccttgatttcaacaggcagataaagacagaagacctctctgatagtttacagcagaccctttcccaccgcccctgtcacctaagccaaggtccggccatgatgagtgggaatcagatgagtgggctcaatgcaagtccctgccaggatatggcaagccttcatcctctccagcagctggtgctcgttcccgggcacctccagagtgtgagccaattcctgctgtctcaaacacaaccgggccagcagggactgcagcccaacctactccccttcccacagcagcaatcaggcctgctgttaccccagacgggcccaggtctggcgtcccaggccttcggccaccccggccttcctggttccagcctggaaccccacctcgaagcaagccagcacctccctgttcccaagcatttgccttcctctgggggagctgatgagccttcagatcttgaggaactcgaaaagtttgccaaaacatttaaacagaggcgaatcaagctgggatttacccagggggacgtagggttggccatgggcaagctttacggcaacgacttcagtcagacaaccatcagtcggtttgaggccttaaacctgtcgttcaaaaacatgtgtaaattgaagcctctactcgagaaatggctgaacgatgccgaaagttcaccatcagatcccagcgtgagcaccccatcgtcctacccctccttgagcgaagtcttcgggaggaaacggaagaaaagaacaagcattgaaactaacattagactgaccttggaaaagaggtttcaggataatcccaagccaagctcagaggagattagtatgattgcggagcagctttcaatggagaaggaggttgttagggtttggttttgtaacagaaggcagaaagaaaagcgaattaactgtccggtggctacccctattaaaccccctgtctacaatagtagactcgtgtccccatccggatccctcggtcctctctctgtcccgcctgtgcattcaaccatgcccggaacagtgaccagctcatgcagccctggcaataacagtcggccatccagtcccgggtccggactgcacgcatcaagtcccaccgcgtcgcagaacaattcaaaagctgcggtcaatagcgcctcatccttcaatagttctggcagctggtatcgctggaaccacagtacatatctgcactag

SEQ ID NO: 200430 - DNA, 1317 bp, synthetic construct
  misc_feature 1..1317: note = Description of Artificial Sequence: Synthetic coding sequence
  source 1..1317: mol_type = other DNA
atggagagcccccggaccgccaagggcggccgggacatcaagatgagcggggatgtggcagattcaaccgatgcccggtccaccctgtctcaggtggagcctgggaacgaccggaacggcctggacttcaacagacagataaaaacggaggacctgtctgacagccttcaacaaaccctgagccatcggccttgccacttgagtcagggacccgctatgatgtccggcaaccagatgtctggtctcaatgcaagcccatgccaggatatggcaagcctccaccccctccagcagctcgttttggttcccgggcacctgcaaagcgtttcccagttcctgctatcccagacccagcccggacaacagggactgcaacccaatctgctgccctttccgcagcaacagtccggacttctgttaccgcagacaggccctggtctggcaagccaggcttttgggcaccctggtctgcctggcagctcacttgagcctcacttagaagcttcacaacatctgcccgttcccaaacacctcccatccagcggcggtgcagacgagccatcagacctggaggagctggaaaagttcgccaaaacctttaagcagcggcgaattaaactgggcttcacacaaggcgatgtagggctcgccatgggcaaactgtacgggaatgacttttctcagaccactatttcccggtttgaagctctgaatctgtcctttaagaacatgtgtaaactgaagcccttactagaaaaatggcttaatgacgccgaatcctccccaagtgacccctctgtgagtaccccctcaagctatccaagcctgtctgaggtgtttggacgcaagaggaagaaacggacgagtatcgaaaccaatattcgcctgactctggagaagcgttttcaggataatccgaaaccgtcatctgaggaaatctctatgatcgccgagcagctctcaatggagaaggaagtcgtaagagtgtggttctgtaacaggcggcagaaggaaaagagaattaactgccccgtggcaaccccgattaaacctccagtgtataattcaaggctggtgagtcctagcggttcattggggcctctatctgtgcctccagtacattcgacgatgcctgggacagtgacctcctcatgcagtccaggaaacaatagccgcccatcatcccccggcagcggtctgcacgccagctctcccactgcctctcagaacaattctaaggccgccgtgaattctgcgtcatctttcaatagctcaggttcctggtaccgttggaatcacagcacgtacctccactag

SEQ ID NO: 200431 - DNA, 1356 bp, synthetic construct
  misc_feature 1..1356: note = Description of Artificial Sequence: Synthetic coding sequence
  source 1..1356: mol_type = other DNA
atggccaccaccgcccagtacctgccccggggccccggcggcggcgctggaggaactggtcccctgatgcaccctgatgcagccgccgcagccgctgcagccgcagcagccgagcgcctgcacgctggcgcggcttacagggaagtgcagaaattaatgcaccatgaatggctaggcgctggcgcaggtcaccccgtgggactggctcacccccagtggcttcccacgggtggggggggaggtggcgattgggccggtggtccgcatctcgaacatggtaaggctggcggcggcggaacaggccgcgccgacgatggcggcggcgggggcggttttcatgctaggctcgtgcaccagggtgccgcccatgcgggagccgcctgggctcaggggtcaacagcccatcaccttggtccagcaatgagcccctccccaggagcatcgggcggccatcagccccagcctctcggattgtacgcccaagccgcttacccaggtgggggcgggggtggactggccggcatgctggctgccggcggaggcggagctgggcccggtctccatcacgcactccacgaggacggacacgaagctcagctggaaccatcaccgcctccccacttgggagcccatggccatgcccacggccacgctcatgcaggtgggctccacgcggctgctgcccatctgcatcccggtgcgggcggcggcgggtccagtgtgggagagcacagcgatgaggacgccccgagcagcgatgaccttgagcagtttgctaaacaatttaagcagcggagaatcaagctcggctttacccaggctgacgtgggcctcgcgttaggaactctgtatggcaacgtattcagtcagacaaccatctgtagatttgaagccctccagctttcatttaaaaatatgtgcaagcttaagccgctcctgaacaaatggctggaggaaactgattcgtcctctggtagcccaactaacttggataagatcgccgcccaaggtcgcaagaggaaaaagcgcaccagcatagaggtgggggtgaaaggcgccctagagtcccactttcttaaatgtcccaaaccctctgcacatgagatcacaggactggctgatagtcttcaactagaaaaagaggttgtgagagtctggttctgcaatcgacgacagaaggagaaacgcatgacacccgcagccggggccgggcacccgccaatggacgatgtctatgcacctggggagcttggtcccggcgggggaggggcgtcgcctcctagcgccccgccccctccgccgccagctgcgttgcaccaccatcaccaccatacacttcccgggtctgtccagtag

SEQ ID NO: 200432 - DNA, 1332 bp, synthetic construct
  misc_feature 1..1332: note = Description of Artificial Sequence: Synthetic coding sequence
  source 1..1332: mol_type = other DNA
atggccaccgccgccagcaaccactacagcctgctgaccagcagcgcatccattgtacacgctgaaccccctggtggaatgcagcaaggtgctggaggctatcgggaggcgcaatctctggtccagggcgattacggcgcacttcagagcaatggacacccactttctcatgcgcaccagtggataaccgcattaagccatggaggcggcggtggcggaggggggggaggaggtggaggtgggggcgggggtggtggggggggtgatggaagtccttggagtacctcaccattgggacagcctgatataaagcccagcgttgtcgtccagcagggggggcgaggtgatgaactgcacggacccggggccctgcagcagcaacaccagcagcagcagcagcagcagcagcagcagcaacagcagcagcagcagcagcagcagcaacaacggcccccgcatctcgtccaccatgccgctaaccaccaccccgggcctggtgcctggaggtccgcagccgccgctgcacacctccccccttccatgggcgctagcaatggtggtttattgtactcacagccgagctttactgtaaatgggatgctgggtgcaggaggtcaacctgctggactgcaccaccatggattacgggatgctcacgacgaaccacaccatgccgaccatcacccgcacccgcattctcatccccaccagcaacctcctccgccccctcctcctcagggaccaccaggtcaccccggagcccatcacgacccccatagcgacgaggacacaccaacctccgacgatttagagcagttcgctaagcagtttaaacaacgccggattaaactgggcttcacacaggccgacgtcggcctggccctgggcacgctttacggcaacgttttttcccagactacaatttgcagattcgaagccctgcagctgtccttcaagaatatgtgcaagttgaagcctctgttgaataaatggttggaggaggcagatagttcctcagggtccccgacttctatcgataagatagccgcccagggacgcaaacgaaagaagcgtacttccattgaagtttccgtaaagggggccctcgagtcacatttcctcaaatgtcccaagcccagtgcccaggaaattactagtttagcggatagcctccagttggagaaggaagttgtgagggtgtggttttgtaaccgacgccagaaagagaagaggatgacacctcccggtggcaccctgcccggggccgaggacgtgtacggaggatcaagagatactccaccacatcatggggttcagaccccagtgcagtag

SEQ ID NO: 200433 - DNA, 1131 bp, synthetic construct
  misc_feature 1..1131: note = Description of Artificial Sequence: Synthetic coding sequence
  source 1..1131: mol_type = other DNA
atggccaccgccgccagcaaccactacagcctgctgaccagcagcgccagcattgtgcacgcagagccccccgggggaatgcagcagggtgccggcggctatcgcgaagcacagagcctggtgcaaggggactacggcgctctgcagtccaacgggcatccattatcccacgcccatcaatggatcacagctttaagccacgggggggacggctcaccttggtctacctctccattggggcagccagacattaaaccgagcgtggttgttcagcagggcggtcggggggatgaactgcatgggccaggggcccttcagcagcagcaccagcagcaacagcaacaacagcaacaacagcagcagcagcaacagcagcaacagcagcaacaacgaccgccccacctggtgcaccacgctgccaatcaccatccaggtcccggtgcttggcgctccgcggcagcagctgcccacctgccgccttccatgggtgctagcaatggtggtttactctactcccaacccccaccaccccctcagggcccaccgggtcacccaggagctcaccatgaccctcactccgatgaggacactccaacctcagacgatttagagcagttcgcgaaacaattcaagcaacgccgcataaagctggggttcacccaggccgacgtgggactagcactgggaactctttatggaaacgtgttcagccagacgactatctgtcgtttcgaggcgttacagctgtcctttaaaaatatgtgcaagctcaaaccacttcttaataaatggcttgaagaagccgactctagctctggatcaccgacatcaatagacaagatcgccgcccagggccggaagcgtaagaaaagaaccagcattgaagtgagtgtcaagggggccctggagagccacttcttaaagtgtcctaagccaagcgcccaagaaatcacgagcctggcagactctttgcagctggagaaggaagtagttagggtctggttttgcaatcggcgccagaaggagaagagaatgacgccaccgggagggacccttccaggcgcagaagacgtgtacggagggagcagggacacacccccgcaccacggtgtgcagacccctgtgcaatag

SEQ ID NO: 200434 - DNA, 1503 bp, synthetic construct
  misc_feature 1..1503: note = Description of Artificial Sequence: Synthetic coding sequence
  source 1..1503: mol_type = other DNA
atggccaccgccgccagcaacccctacctgcccggcaacagcctgttagccgcaggtagcatcgtgcacagcgatgctgccggcgccggggggggtgggggcggtgggggaggaggaggcggtggtggtgctggaggcggcgggggcggtatgcagccaggctcggccgcagtgacttctggagcttaccgtggggacccttcctccgtgaaaatggtccaatcagactttatgcagggggccatggcagcgagtaacggaggacacatgctgtcccatgcccaccagtgggttacagccttaccacatgctgctgctgctgccgcagccgccgccgcagccgccgtcgaggcgtctagtccgtggtccgggagcgcagtgggcatggctggaagccctcaacaacccccacagccacctcctcctccacctcagggaccagatgtaaaagggggcgccggcagagatgacctgcatgcaggtactgccctccaccacagggggccgccgcacctgggccctcctccgccccctccccatcagggtcatccgggagggtggggagcggccgcggccgctgccgccgctgctgcagcagccgcagccgccgctcacctgccaagcatggccggcggtcagcaaccacctccccaatcacttctgtacagtcaacctgggggattcacagtgaatggaatgctcagcgcaccaccgggaccgggcgggggaggaggcggggcaggaggtggtgcccagtcactggtacacccaggtttagtaagaggtgatacccccgagctggctgaacatcatcatcaccaccatcaccatgctcacccacatccgccgcatcctcaccacgcccagggccctccacatcatggcggaggcggcggcggagcagggcccgggctaaattcgcacgatcctcactcagatgaagacacaccaacgtcggacgatttggaacaatttgccaaacagttcaagcagcgccgtatcaaactcgggtttacacaggctgatgtaggactggccttaggcaccctctacgggaatgtattttctcaaacaacaatttgtcgcttcgaagctttacagctgtcgttcaagaacatgtgtaagctcaagcctctgctgaacaaatggcttgaggaagcagacagcagtaccggaagtcctacaagcattgacaagatcgcggcccagggcaggaaacgcaaaaaaagaaccagcatcgaagtttccgttaagggcgctctggaatcccacttcctgaaatgtcccaaacccagtgctcaggagatcaccaatttggctgactctctccagctggagaaggaagtcgtgcgggtctggttttgcaatcgacggcaaaaagagaagcgcatgactcctccgggaatccagcagcagactccagatgatgtatactcccaggtgggcactgtgagcgccgacacgccacccccacaccacggacttcagacttctgttcagtag

SEQ ID NO: 200435 - DNA, 1086 bp, synthetic construct
  misc_feature 1..1086: note = Description of Artificial Sequence: Synthetic coding sequence
  source 1..1086: mol_type = other DNA
atggccaccgccgccagcaacccctacagcatcctgagcagcacctcactggtccacgccgattccgcaggaatgcaacagggctccccctttcgtaaccctcagaagctcctccagtccgattatctccaaggcgtgcccagtaatggccaccctctgggacaccactgggttacaagcctaagcgatggcggaccgtggtcttcaacccttgcaacctccccgcttgatcagcaggatgtaaagcccggccgcgaagacctgcagctgggagccatcattcaccatcgtagcccccatgtcgcccaccactctcctcatactaatcatccgaatgcatggggagcaagccctgcccccaatccatccattacctccagcggacagccccttaacgtgtacagtcagccaggttttacggtgtcgggcatgctggaacacggtggccttacgccccccccagccgcggcctccgcccaatccctgcaccctgtcctgcgcgagccacctgatcacggggaactggggtcccaccactgccaagatcactcagatgaagaaacaccaacatccgacgaattagagcagttcgccaagcagtttaaacagcgccgcattaagctgggcttcactcaggcagacgtaggcctagcactcgggaccctatacggcaatgtgttctcccagaccactatatgtcggttcgaggggcttcagctctcatttaagaacatgtgcaaactcaagcctcttctgaacaagtggctcgaggaggccgatagcagtaccggaagtccgacatctatagataaaattgctgcacagggaaggaaacgcaagaagagaacttcaatcgaagtgtcagtgaagggggtgctagagactcatttcttgaagtgtcccaagccagctgcccaggaaatctctagtcttgctgacagcctgcagctggagaaggaagtggtgcgcgtctggttctgcaatagacgccagaaggaaaaaaggatgacacccccaggcgaccagcagcctcacgaggtatacagtcacaccgtgaaaaccgacacatcttgtcatgacctgtag

SEQ ID NO: 200436 - DNA, 1260 bp, synthetic construct
  misc_feature 1..1260: note = Description of Artificial Sequence: Synthetic coding sequence
  source 1..1260: mol_type = other DNA
atgatgagcatgaacagcaagcagccccacttcgccatgcaccccacacttccagagcacaagtatccgagcctccatagtagcagtgaagcaatccggcgggcttgcctcccaaccccaccgcttcagtccaacttattcgcttcacttgacgagacactgctggcccgcgccgaagcgctagctgcagttgatatcgctgttagccagggtaagagtcacccctttaaacctgatgccacctaccacaccatgaattccgttccatgcacgtctacttcaacagtcccattggctcaccatcaccaccatcaccatcaccaccaggctctcgagcctggagatctgctggatcatatcagctcaccatccctcgcccttatggctggtgcagggggcgcaggggccgccgccggtgggggtggggctcatgacggaccaggaggcggcggcgggccaggcggaggaggcggcccaggtggtggccctggtggcgggggcggaggcggcccaggaggtggtggcggcggccccggaggcggactgctgggcggtagcgcccaccctcatccacacatgcactccctgggtcacctgtcccacccggccgccgccgctgctatgaatatgcctagcgggctcccacacccgggactggttgcagctgcagctcatcatggcgctgcggcagcagcagcggcagctgccgccggccaggtagctgctgccagcgcagcagctgcagtggtgggggctgccgggcttgcgagcatttgcgattctgacaccgatccgagggaactggaggcctttgctgaacgcttcaagcaaagacggataaaattgggggtaactcaagctgacgttggcagcgcgttagctaatcttaagatcccgggtgtgggaagtctatcccagagcactatatgtcggtttgagtccttaacattaagccacaacaacatgattgctttgaagcctattctgcaggcctggctggaagaagccgagggagcccagagagagaaaatgaataagcccgagctttttaatggcggtgagaaaaagaggaagagaacatcaatcgctgcccccgagaagcggagtctcgaggcctactttgccgtgcagcctcggccatctagtgagaagattgccgccatagctgaaaagttagatctgaaaaagaatgtcgtgcgagtgtggttttgtaaccagagacagaagcagaaacgcatgaagttcagtgcaacatattag

SEQ ID NO: 200437 - DNA, 1911 bp, synthetic construct
  misc_feature 1..1911: note = Description of Artificial Sequence: Synthetic coding sequence
  source 1..1911: mol_type = other DNA
atgaagaagctgcagggcgcccacctgcggaagcccgtgacccccgatctgctgatgacacccagcgaccagggggacgtcgacctagacgtagactttgcggcccaccgtgggaattggacaggaaagttagacttcctcctgtcctgcattggctactgtgttggtctcggtaatgtctggcgcttcccataccgggcctacactaacggaggtggcgctttcttggtcccctatttccttatgctggctatatgcgggatccccctcttttttcttgaactcagcctgggacaattctcttcattaggtcccctagcggtgtggaaaatctccccactgtttaagggagcaggggctgcgatgcttcttatcgtcggactcgtggccatctactacaacatgattatagcttacgtgctcttctacttgttcgcctctctcaccagtgacctgccatgggagcattgtggaaactggtggaatacagaactttgcctagaacacagggtatctaaagacggaaacggcgcattgcctttaaatctcacttgcacagtatcacctagcgaggagtattggtcaaggtatgtgcttcacattcaaggatctcagggcattggctcaccgggtgagattagatggaatctgtgtctctgccttttgctggcgtgggtaattgtttttttgtgtatactgaagggagtgaaaagctccggcaaggtggtgtatttcactgctacattcccatatctaattctgctcatgctccttgtccgtggtgtgacactccccggtgcttggaaggggatccagttttacctgacacctcagttccaccacctgctcagctctaaggtgtggatagaggctgcgcttcagatattttattccctgggcgtgggatttggcggattgcttacgttcgccagttacaacactttccaccagaacatctatagagacacattcatagttacgctcggtaacgctattacctcaatccttgctgggttcgcgatcttcagtgtcctgggttatatgtctcaggagctcggagtccccgttgatcaagttgccaaagcagggcctggtttagcattcgtggtgtatccccaggccatgactatgctccccttaagcccgttctggtccttcctctttttcttcatgctgttgaccctgggtttggattctcagtttgccttccttgaaaccattgtcaccgccgtgacagacgaattcccgtactacctgcgcccgaaaaaagcagtattctcagggttgatctgcgtagctatgtatctgatgggtctgatcctcaccacagacggcgggatgtattggttagtgctcctggatgactactccgccagtttcgggcttatggtggtcgtcatcacgacatgtctggctgttacccgggtatatgggattcagaggttttgtagggatattcacatgatgctggggttcaagcccggactctacttcagagcatgctggctgtttcttagtccagcaactcttctggccctcatggtttattcaatagttaagtaccagcctagcgagtatgggtcctaccgctttcccccatgggcggagctactcgggattctgatgggcctgctctcctgcttgatgattccagccggcatgttagtggctgtgttgagagaggaagggagcctctgggagcggttgcagcaggcaagtcgcccagctatggattggggtcccagtctggaagaaaaccgaacaggaatgtatgtggccacactcgcaggcagccagtcacccaagccgctaatggtccacatgaggaagtacggaggtataacttcttttgagaatacagcgatcgaggtggatcgcgagatagctgaagaagaggagtccatgatgtag

SEQ ID NO: 200438 - DNA, 798 bp, synthetic construct
  misc_feature 1..798: note = Description of Artificial Sequence: Synthetic coding sequence
  source 1..798: mol_type = other DNA
atgcacttctaccggctgttcctgggcgccacccggcggttcctgaatccagaatggaagggcgagatagacaattggtgcgtctacgtgcttactagcctcctgccttttaagatacagagtcaagacattaaggcattacaaaaagaactggagcagttcgcaaagttactgaagcaaaaacgtatcactctagggtacacccaagcagacgtgggactgaccctcggtgtcctgtttggtaaggtctttagtcagacaacaatctgccgttttgaggcacttcagctctccttcaagaacatgtgcaagctaagaccactgctgcagaagtgggtcgaggaagctgacaataacgagaatttacaggagatatgcaaagcggagaccctcgtccaggcccgtaagagaaaacggacctccatcgaaaaccgagtgcgaggtaatttggagaacctttttctgcagtgccccaagccgaccctccaacaaattagccacatcgctcagcagctcggcctggaaaaggatgtagtacgggtttggttctgtaaccgccggcagaaagggaaaagatcaagttccgattacgctcagcgtgaagactttgaagccgccggcagcccattctcaggaggccccgtctctttccccctggcccccggcccccatttcggaactcctggctatggcagcccccactttacagcactgtactcgagcgtacccttcccggagggagaggccttcccccctgtttcggtcacgaccttagggtctcctatgcattccaattag

SEQ ID NO: 200439 - DNA, 1083 bp, synthetic construct
  misc_feature 1..1083: note = Description of Artificial Sequence: Synthetic coding sequence
  source 1..1083: mol_type = other DNA
atggccggccacctggccagcgacttcgccttcagccccccccccgggggcggcggcgatggcccaggggggccggagccaggctgggtagaccctagaacatggctctcctttcaagggccccctgggggaccaggaattggacccggtgtgggccctggctctgaagtgtggggaatccccccctgcccccccccttatgagttttgtggcggaatggcgtattgtggtccgcaggtgggagtcggcctggtgcctcaggggggactggaaacttctcagccagaaggggaagccggggttggggttgaatcaaacagcgatggcgctagcccagaaccatgcacagtgacccccggagccgtcaaactagaaaaagaaaaacttgagcagaaccccgaggaatcgcaagatataaaggctctacaaaaggaactcgaacagtttgctaaactgttaaaacagaagaggatcaccctcggatatacccaggcggatgtgggcctcaccctgggagttctgtttggaaaggtctttagccagacaactatctgtcgtttcgaggccttgcaactaagcttcaaaaatatgtgtaagctgcgccctctgctgcagaagtgggtcgaggaagctgataacaatgaaaacctccaagaaatatgcaaagccgagacattagtgcaggcccggaagcgaaagcggacaagtattgaaaacagggtccgaggaaacctcgagaacctgtttctacaatgccctaaacctacacttcagcaaatttcccatattgcccagcagctcggattggagaaggatgtggtccgagtttggttctgtaatagaaggcaaaaaggcaaacgcagctcatctgattatgctcaaagagaggacttcgaggccgccgggtctccgttctctgggggaccagtttccttccccctggcacctggccctcatttcggcacccctggctacgggagccctcattttacagctctgtacagttccgtacctttccctgaaggcgaggcctttccaccagtgtccgtgacaacattagggtcaccaatgcattccaactag

SEQ ID NO: 200440 - DNA, 372 bp, synthetic construct
  misc_feature 1..372: note = Description of Artificial Sequence: Synthetic coding sequence
  source 1..372: mol_type = other DNA
atggccggccacctggccagcgacttcgccttcagccccccccccggcggggggggcgatggcccagggggacctgagccaggctgggtggatccaaggacttggctgtcctttcaggggccccccgggggtcccgggatcgggcctggagtgggtccgggtagtgaggtgtggggaattcctccctgcccacccccttatgagttctgcggcggcatggcgtattgcggaccacaagttggcgtcggactggtcccccagggtggcctggaaacctcccagcccgaaggggaagccggggtcggtgtagagacaccaatggggcctccacgatcaccagccccgcatccctttcctttcccattgctatag

SEQ ID NO: 200441 - DNA, 558 bp, synthetic construct
  misc_feature 1..558: note = Description of Artificial Sequence: Synthetic coding sequence
  source 1..558: mol_type = other DNA
atggccggccacctggccagcgacttcgccttcagccccccccccggggggggcggcgatggacccgggggccccgagcccggatgggttgatccaaggacctggctaagcttccagggccctccggggggccctggaatcggaccgggtgttggtccaggtagcgaggtgtggggcatacctccgtgcccccctccctacgagttttgtggcggaatggcatactgcggcccccaagtgggagtaggtctggtgccccagggcggtttagaaactagccagcccgagggtgaggctggagttggggtggagagcaattcagatggcgcttctcctgaaccttgcacagtcacacccggggcggtgaagttggaaaaagaaaaactcgaacagaaccctgaagagagtcaggatattaaagcacttcagaaagaactggaacagttcgctaaactcctcaagcagaaacggatcacacttgggtatacccaggcggacgttcatcccggcgggagcatctgggaaggcatacagcctaatgatcacctccccctctag

SEQ ID NO: 200442 - DNA, 558 bp, synthetic construct
  misc_feature 1..558: note = Description of Artificial Sequence: Synthetic coding sequence
  source 1..558: mol_type = other DNA
atggccggccacctggccagcgacttcgccttcagccccccccccgggggaggcggcgacggacctggcgggcccgagcccggttgggtggatccgcggacgtggctctcctttcagggtcctcctggtggcccgggaatcggacctggcgtgggccccggatctgaggtgtggggtattcccccttgtccgcctccttacgaattttgcggaggcatggcctattgtggaccccaggttggagttggactggtgccccaaggagggcttgagacatctcaacccgaaggtgaggccggagtgggagtcgagtctaactctgatggagcgtctcctgagccctgtactgtgacacctggggccgtaaagttggaaaaagaaaagctggagcaaaacccagaggaatctcaggacatcaaagccttgcagaaagagctggaacagtttgccaaactattaaaacaaaagcgcatcacactgggttatacacaggccgatgttcaccccggtggatctatttgggaaggtatccaaccaaatgaccacctcccactctag

SEQ ID NO: 200443 - DNA, 495 bp, synthetic construct
  misc_feature 1..495: note = Description of Artificial Sequence: Synthetic coding sequence
  source 1..495: mol_type = other DNA
atgtgcaagctgcggcccctgctgcagaagtgggtggaggaggccgataataatgagaatttgcaagaaatctgcaaagccgaaaccctggtgcaggcccggaaaagaaagcgcaccagtatcgagaaccgggtgaggggtaatttggaaaatctgttcctccaatgccccaagccaactttgcaacagatctcgcacatagcccaacagctgggtctggaaaaggatgtggttagggtgtggttctgtaacagacgccagaagggcaaacgctcaagtagcgattacgcccagagggaggattttgaagccgctggatctccattcagcggcggccctgtgagtttcccattggctccgggacctcactttggcaccccagggtatggaagccctcacttcacggctctgtacagctcagtgcctttcccggagggcgaggcctttccaccagtctccgtgaccaccctggggtcaccgatgcacagcaattag

SEQ ID NO: 200444 - DNA, 495 bp, synthetic construct
  misc_feature 1..495: note = Description of Artificial Sequence: Synthetic coding sequence
  source 1..495: mol_type = other DNA
atgtgcaagctgcggcccctgctgcagaagtgggtggaggaggccgacaataatgaaaatctgcaagagatttgcaaggcggaaacgctggtgcaagcacgcaagagaaaacggaccagcatcgagaaccgagtgcgagggaacctcgaaaacctctttttacagtgccccaaacctactctgcaacagatctctcacattgcccagcaattaggcctcgagaaagacgtagtaagagtgtggttctgcaatcggagacagaaaggcaaaaggtcctcctcagattacgcccagcgggaagacttcgaggcagctggcagccctttcagcgggggaccagtttcattccccctcgcgccaggaccacattttggcaccccagggtatggaagcccacactttaccgcgctctactcgtctgtgccttttccagagggggaggctttcccacctgtatccgttactaccctcggttccccaatgcactcaaattag

SEQ ID NO: 200445 - DNA, 2076 bp, synthetic construct
  misc_feature 1..2076: note = Description of Artificial Sequence: Synthetic coding sequence
  source 1..2076: mol_type = other DNA
atgagcgccctgctgcaggaccccatgatcgccggccaggtgagcaagcccctcctgtccgtgaggtccgagatgaatgccgagctgcgcggagaagataaggccgctacgtcagattcggagttgaatgagccactgctggcccccgtcgaatctaacgacagtgaagataccccttcaaagctgttcggcgctcgcggaaacccggcccttagcgaccccggtacgcctgatcaacatcaggcttcccagacacatccgccatttccggtgggcccacagcccctcttgacagctcaacagctcgcctccgccgtggccggcgtcatgccaggagggccaccagccttgaaccagcccatcttgatcccattcaatatggcagggcagttgggagggcagcagggcctggtattgacacttcccactgccaacctgactaacattcaggggttagtggccgcggctgctgcaggaggcattatgactctcccccttcaaaacctccaggctaccagcagtctgaattcccagctgcagcagctgcagctgcaactgcagcagcagcagcagcagcagcagcaacaacctccaccatcaaccaatcaacacccacaacccgccccccaggcacccagccagagccaacaacagcccctgcaacctactcctcctcagcagccaccaccagcatcacagcagccacctgcccccacctcccaactgcagcaggcacctcaaccccagcagcaccagcctcattctcattcccaaaaccagaaccaacccagtccaacacaacaatcatcttcacctcctcagaagccatcacagtctcctgggcacggcctgccatctcctctgacccctcctaacccactccagcttgtcaataatccccttgcgtcacaggccgctgccgccgccgccgccatgagcagcatcgcatcaagtcaggctttcggtaacgcgctgtcctcactacaaggagtgacaggccagctcgtgaccaatgctcagggacagataattgggactatccccctcatgcctaatccaggcccctcaagccaggcggcgtccgggacacagggcttgcaggtacagccaataaccccacagttactgacaaacgcccagggccagattatagccaccgtcattggcaatcagatccttcctgtcattaatacccaagggattactttaagccccataaaacctggccagcagctccaccagccatctcagacctccgtgggacaagcagcgagtcagggtaatctgctgcatcttgcacactctcaggcaagtatgagtcagtcccctgtgagacaagcttcatcaagttcgagctcttcttcaagttcctctgcattgagtgttggccagctcgtctctaatcctcaaacagctgcaggggaagtggacggggtcaacctggaagagatcagggagttcgccaaggccttcaagataagacgtctgtctctggggctcacacagacgcaggtgggtcaggcgctttccgcaaccgagggtccagcttatagtcaatctgccatctgccggcacacaatcctgcgcagtcatttcttcttgcctcaagaagctcaggaaaatacaattgcctcctcgctcactgctaagctgaaccctggattgctataccccgcgcgttttgaaaaactggacatcactccaaagtccgctcagaagattaaacccgtcctggagcggtggatggcagaggcagaggcccgccaccgagctggcatgcaaaatctcacagagttcattggatccgaacccagcaagaaaaggaaacgacggaccagcttcactccccaggccttagagatcctgaatgctcacttcgaaaagaatacacacccaagtggccaagaaatgaccgaaattgctgagaaactcaactacgatcgggaagtagtccgtgtttggttctgcaacaaaaggcaggccctcaaaaacaccatcaagagactgaaacagcatgagcctgctacagcagtcccgttggagcccctcactgatagcctcgaggaaaatagctag

SEQ ID NO: 200446 - DNA, 1968 bp, synthetic construct
  misc_feature 1..1968: note = Description of Artificial Sequence: Synthetic coding sequence
  source 1..1968: mol_type = other DNA
atgagcgccctgctgcaggaccccatgatcgccggccaggtgagcaagccactgctctcagtccgttctgagatgaatgcagaactccgcggcgaagacaaggcagctacaagcgacagtgagctcaatgaacctttactggctcctgtggaaagcaatgattctgaagacacaccatctaagctgtttggcgcccgcggaaaccctgccttgagcgatcccgggacgcccgaccagcaccaagcctcacagacacatccaccgtttcctgtgggccctcagccacttctcacagcccagcaattggcgtctgctgtcgccggggtgatgccaggcggtccacccgctctcaaccagccgatactcatccctttcaatatggctggacaactgggcggtcaacagggtttggtcttgaccctacccactgctaacctgacaaacattcagggcttggtggccgctgctgccgccggagggataatgactctgcccttgcagaacttacaggctacctcatccctgaactcccagctgcaacaactgcagttgcagctgcagcagcagcagcagcagcagcaacagcagccacctccatctacaaaccagcatccccaacctgcaccccaagcgccttctcaaagccagcagcagcccttgcaacctacgcctccccagcagcctcctcctgcttctcagcagcccccagcccctacgtcacaactgcagcaggctcctcagccccaacaacatcagccacacagccactcacagaaccaaaaccagccttctcccacacaacaatcctcgtcccccccccaaaaaccctctcagtcccccggacacggccttcccagcccactgactccacctaacccgctgcaattggtgaacaatcccctcgctagtcaagcagcagccgcagcagccgccatgtcttccatcgcttccagccaggcatttggcaatgcactgtcaagccttcagggcgtgactggtcagctcgtcactaacgcccagggtcaaatcatcgggactattccactgatgccgaacccaggccccagcagccaggcggcttccgggactcaaggcttacaggtacagccaatcaccccccaactactcaccaacgcccagggacaaattatcgcaaccgtgatcggtaaccaaattttgcctgtgattaacactcaggggatcaccctgagcccaattaaacctggccaacagctacatcagccatcacaaacgtcagtcggacaagctgcctcccagggaaacctgttgcatctcgcccatagccaagcctcaatgtctcagagcccagttcgccaggccagcagctcatccagttctagctctagttcatcggcccttagcgtgggtcagctcgtcagcaatccacagacggccgccggcgaggtagatggtgtgaatctggaggaaatccgagagtttgccaaagcattcaaaattcggcgcctgagcctaggactgacacagacacaagtcggacaggccttgagtgccacggaagggccagcctactcacagtcagccatttgcagatttgaaaagctggacattacacctaaatcagctcagaagataaagcccgtccttgagcgctggatggcggaagccgaggcccgccatcgggcaggaatgcagaatcttaccgagttcattggttcggagcccagcaagaagcgcaaaagacgcaccagcttcacacctcaggcgttagagatactgaatgcacattttgagaaaaacacacacccatcggggcaggagatgacggagattgccgagaagctgaactacgaccgtgaggtcgttagggtatggttctgcaataaaagacaagcgttaaagaatactattaagcgactcaagcaacatgagcccgccacagccgtgccgctggaaccactcacagactccctcgaagaaaattcatag

SEQ ID NO: 200447 - DNA, 2076 bp, synthetic construct
  misc_feature 1..2076: note = Description of Artificial Sequence: Synthetic coding sequence
  source 1..2076: mol_type = other DNA
atggagaagatctacagccggggcgagctgcaccacttcatcgacggtttcaacgaagagaagagtaactggatgcgttacgtaaaccccgcgcactcaccaagagagcagaacctcgcagcctgtcagaacggaatgaacatctacttttacactatcaagccaatacctgctaaccaggagctgctcgtctggtattgtcgcgattttgctgaacggctccactacccttaccccggggagctcacaatgatgaatctgacacaaactcagagctccctgaaacagccttctacagagaaaaacgaactgtgtcccaagaatgtgccaaagagggaatattctgtgaaagagattctcaagctcgatagtaatccatcaaaagggaaggacctttatagaagtaatataagtccactgacatccgagaaagatctcgatgatttcagaagacgcggcagtcccgagatgccattctacccgagagttgtctaccctattagggctcccttacccgaggacttcctgaaagcctcactcgcatatggcatcgaaaggcctacctacatcacccgaagccctattccatcgtccacgactccaagcccctcagcccgttcgtcccccgatcagtcactcaaatctagcagtccacatagcagccctggcaataccgtctcacctgtgggccccgggtctcaggagcatagggattcctacgcttacctcaacgcatcctacggaaccgagggactgggaagctaccctggctatgcacccctgccccacctgccccctgcgttcattccttcatacaacgctcactaccccaagttcctgctcccaccgtacgggatgaactgcaatggactgtcggccgtgagctccatgaacggcatcaacaacttcgggcttttcccccggctgtgcccagtttactctaacctattaggcggcggttcattgcctcatccgatgctgaatccgacctctcttccatccagtctccctagcgatggggcccggaggctcctgcagcccgagcatccccgggaggtgttggtgccagccccccattctgccttcagctttactggcgccgcagcgtccatgaaggataaagcatgcagtccaacatctgggtcaccaaccgctggtaccgccgctactgcagaacacgtggtgcaaccgaaggccacttctgctgcaatggcagcgccctcgagcgacgaagcgatgaatctgatcaagaacaagaggaacatgacagggtataagaccctgccatacccccttaagaagcagaacgggaagatcaagtacgaatgtaacgtttgtgctaagacattcggacaattatctaatctcaaggttcacctccgtgtgcattccggcgagcggccttttaagtgccagacctgcaacaagggattcacacagttggcacatctccagaaacattacctggtgcacaccggagagaaaccgcacgaatgccaggtgtgccacaagagattttcaagtactagtaatctgaagacccatctgcggctccacagcggcgagaagccatatcagtgcaaagtgtgtcccgctaaattcacccagttcgtccatctcaagcttcacaaaaggttgcatacacgcgaacgcccgcacaagtgtagccagtgccataagaactacattcacttgtgctccttgaaagtacacctgaagggcaactgtgcagctgctcctgccccaggtttaccgctggaagacctcactaggataaatgaggagattgaaaagttcgatataagcgataacgccgataggctggaggacgtcgaggacgacatctccgtgatttcggtggtggaaaaggagattttggcagttgtcaggaaggagaaagaagaaactggtctgaaggtgtctctgcagcggaatatgggcaacggtctcctgtcatccggatgtagtctgtacgagtcaagtgatctgcctctaatgaaactgcctccctccaacccactgcccctggtcccagtaaaagtgaagcaggaaaccgtcgaacctatggatccatag

SEQ ID NO: 200448 - DNA, 2370 bp, synthetic construct
  misc_feature 1..2370: note = Description of Artificial Sequence: Synthetic coding sequence
  source 1..2370: mol_type = other DNA
atgaagatggacatggaggacgccgacatgaccctgtggaccgaggccgaattcgaggagaagtgcacttacattgtcaatgatcacccctgggacagtggagccgacggaggtacttctgtgcaagccgaagcaagccttcctcgcaatctgctatttaaatacgcaactaacagcgaggaggtgatcggagtgatgagcaaagaatacattcctaagggtactcgtttcggccccctcattggcgagatatataccaacgacactgtgccgaagaatgcaaacagaaagtacttttggagaatctactcccgcggcgaactgcatcacttcatcgatggctttaatgaggaaaagtccaattggatgcgttacgtgaaccccgcccattcaccaagggagcaaaatctggctgcttgccagaatgggatgaacatctatttttacaccatcaagcctattcctgctaaccaggaactccttgtgtggtactgccgcgactttgccgagagactgcactacccttacccaggtgagctgacaatgatgaacctgacccaaactcagtcgtccttgaaacagccgtctaccgagaaaaacgaactctgccccaagaatgtgcccaaacgagagtactctgtcaaggaaattctcaagttggactctaatccttcaaagggcaaagatctctaccgcagcaatattagccccctcactagcgaaaaggaccttgacgactttagaagacgtggatccccagagatgccattctatccccgagtagtgtaccctatacgggcacccctgcctgaggattttctcaaggcctctctcgcatacggcatagagagaccaacatatatcactcggtctcccatacctagttctaccaccccttcaccatccgcgcgcagctctccggaccagtcgctaaagtctagctctccacacagctctcctggaaataccgtttcacctgttgggcctggttcacaggagcatagggactcctacgcctatctcaacgctagttacggaaccgagggtttaggttcttatcccggctacgccccgctgccgcatctgcctcccgcattcattcctagttataacgcccactatcctaaattcctgctgccaccttatggcatgaactgcaacggcctcagcgctgtgtcttctatgaacggcatcaacaatttcggattgttccctagactgtgccctgtatactccaatctgctgggtgggggcagtttgcctcaccctatgctcaatccgacgagtctcccatcttccttaccaagtgatggtgctagacggttgctgcagcctgagcatccccgcgaggtgcttgtgcccgcaccccactcggccttttcattcactggagctgctgcctcaatgaaggacaaagcttgcagccccactagcggatcccccaccgcaggaacagccgccacagcagagcatgtggtccagcctaaggctacatctgctgccatggccgctccgtcctctgatgaagccatgaaccttattaagaataagcggaatatgactggttataagactttaccataccccctgaaaaaacagaacggcaagatcaaatacgagtgtaatgtgtgtgctaagacattcggacagctgtccaatttgaaggtacacctaagagttcacagcggtgagcggccattcaagtgtcagacttgtaacaagggcttcactcagctggcccatttgcagaagcactacctggtgcacacgggtgaaaaaccccatgagtgtcaagtctgtcataagagattctcgagtacgtcaaacctcaagacacatcttcggctgcatagcggtgagaaaccctatcagtgcaaagtttgccccgccaaattcactcagtttgttcacctcaagttgcacaaaagactgcatacacgggagcggccacacaagtgctcgcagtgtcataagaactacattcacctgtgcagtcttaaggttcatctgaaaggaaactgtgccgccgcacccgcacccggtctgcctctggaggacctcacccgcatcaatgaagagatagagaagtttgatatctctgacaacgcagatcgcctcgaagacgtagaagacgacatctccgtgatttctgtggtggagaaagagatcctggccgttgttcgtaaggaaaaggaggaaacaggactgaaggtttctctccagcggaacatgggcaacggactgctcagcagcggttgtagtttgtatgaatcctccgacctccctttgatgaagttacccccaagcaacccactccctcttgtgcccgtgaaagtgaagcaggaaaccgtcgagcctatggatccgtag

SEQ ID NO: 200449 - DNA, 2478 bp, synthetic construct
  misc_feature 1..2478: note = Description of Artificial Sequence: Synthetic coding sequence
  source 1..2478: mol_type = other DNA
atgctggacatctgcctggagaagcgggtgggcaccaccctggccgcccccaagtgcaactcctcaacggtgagattccagggactcgccgaggggaccaagggaacaatgaagatggacatggaggatgccgacatgacactttggacagaggcagaattcgaagagaaatgcacttacattgtgaacgaccacccttgggacagcggagctgacggcggtaccagtgtgcaggctgaggcttcgctgccacgtaacctcttgtttaagtacgccacgaattcagaggaggtgataggcgtcatgagcaaggagtacatccccaaaggcacccgcttcgggccacttataggcgagatctataccaacgatactgttccaaaaaacgcaaaccgcaaatatttttggagaatctattcccgcggggagctgcatcactttattgacggctttaacgaggagaagagcaactggatgcggtacgtaaaccccgcccacagccctagggaacagaacctggctgcatgtcagaacggcatgaatatttacttctatactataaagccaattcccgcgaatcaggagctcctcgtgtggtactgcagagacttcgccgagcggctgcactacccttatcccggcgaactgacaatgatgaacctgactcagactcagagcagccttaagcagccttcaactgagaagaacgaactctgcccaaaaaatgtcccaaaaagagaatactctgtgaaggaaattctgaaattggactccaaccctagcaaagggaaagacctgtatcggagcaatatatccccattaactagtgaaaaagatctcgacgactttagaagacgtgggtccccagaaatgcccttttatcccagggtggtctaccctatccgcgccccccttccggaggacttcctgaaggccagccttgcatatggtatcgagagacccacatacatcacgcgctcccctattcccagcagcactactccttccccaagcgctcggtcctcccctgaccagtctctgaagtcctctagccctcactcaagtcccgggaatacagtatcacctgtcggccctggcagccaagagcaccgggactcgtatgcgtatcttaacgcaagctacggaactgaaggcctcggctcatatccagggtatgcgcctcttccacacttgccacccgcctttattccttcctacaatgctcactacccgaagtttcttttgcccccctacgggatgaactgtaacggtctgagtgctgtgtcctctatgaatgggatcaataatttcgggctgttcccgaggctctgtcccgtgtatagtaacttgcttggcggtgggagcctgccacaccctatgctaaacccgaccagtctgccaagttctctgccaagcgacggggcgcggcgactacttcagccagaacaccctagggaagtcctggtgcccgccccgcatagtgctttctctttcactggagccgcggcctctatgaaggacaaggcgtgtagtccgacctcaggaagccccacagctggaacagccgccactgccgagcatgtggtccagcctaaggccactagtgcggccatggccgccccaagcagtgatgaggctatgaaccttatcaaaaataagcggaatatgacaggctataaaacactgccttatccgctgaagaaacaaaacggaaaaatcaagtacgagtgcaatgtatgcgccaagacttttggacagctgtcaaacctgaaggttcatttgcgcgtgcactctggcgaacggcccttcaagtgccagacttgcaataaaggcttcacccaattagctcacctgcagaagcattacttagtacacacaggagagaagccccatgagtgccaggtgtgccataagagattctctagtacttccaatctgaagactcaccttcgcctgcacagcggggagaaaccctatcagtgtaaggtctgtcctgccaaattcacacagtttgtccatcttaaactccacaagcgtctgcacacccgggagcgacctcataagtgctctcaatgccacaagaactacatccatctgtgttccctcaaagtccacttaaagggtaactgtgctgccgcacctgcccccggtctgcctctagaggatctgacccggatcaacgaagagatcgaaaagtttgatatttccgataacgccgatagactggaggacgtggaagacgacattagcgtgattagcgttgtagaaaaagagatcctggctgtggtgcgaaaggagaaggaggagactggtctgaaagtttctctccaaagaaacatgggcaacggcttgctgtcaagtgggtgcagcttgtacgagtccagcgatctgccactcatgaagttgcctccttccaaccctttgccactggtgccagtcaaggtcaaacaggaaaccgtcgaaccaatggatccatag

SEQ ID NO: 200450 - DNA, 192 bp, synthetic construct
  misc_feature 1..192: note = Description of Artificial Sequence: Synthetic coding sequence
  source 1..192: mol_type = other DNA
atgaagatggacatggaggacgccgacatgaccctgtggaccgaggcggaattcgaagaaaagtgcacgtatattgtgaacgatcacccgtgggactccggtgccgacggtggcacaagcgttcaggctgaggctagtttgcccaggaaccttctctttaaatatgcaacaaattccgaggaggtaatttag

SEQ ID NO: 200451 - DNA, 2367 bp, synthetic construct
  misc_feature 1..2367: note = Description of Artificial Sequence: Synthetic coding sequence
  source 1..2367: mol_type = other DNA
atgaagatggacatggaggacgccgacatgaccctgtggaccgaggccgagtttgaagaaaaatgcacgtacatcgtcaacgaccacccgtgggactccggcgccgacggtggcacctccgtccaagcggaagcgtcgctccctcggaaccttctgttcaaatatgcaactaattccgaagaagtcatcggggttatgtccaaggaatatattcctaagggaacacgattcggacccttgataggcgagatatacaccaacgatactgtccctaaaaatgccaatcgaaaatacttttggagaatttactcgagaggtgaactgcatcactttatcgacgggttcaacgaagagaaatccaattggatgcgctacgttaatccagcccatagccctagggagcagaacctagctgcatgtcagaatgggatgaatatttatttctacaccataaaaccgatacccgctaaccaggagcttcttgtttggtactgccgggatttcgccgaaaggctccactatccctatccaggcgagctaactatgatgaatctgacacagacacagtccagcctgaagcagccaagcactgagaagaacgaactctgtcctaaaaacgtgccgaagcgtgagtatagcgtcaaggagattctgaagctggactccaacccttctaaggggaaggacctgtacagatctaacatctcgcccctcacgtccgagaaggatctggacgattttaggcgtcggggtagcccggaaatgccattctatcctcgtgtggtatatccaatccgggcaccgctgcccgaggacttcctgaaggcttccctggcctacggtatcgaacgacccacatatatcactagaagcccaataccatcatcaacaacaccttcaccctctgcgaggtcgagccctgatcagtccctgaagagttcatctccgcattcctcaccaggcaatacggttagtccggtaggtcctgggagtcaagagcatagagactcatatgcctatcttaatgccagctatggcaccgaaggactcgggagttatcctggatatgcaccactgccacatctgcctcctgcatttattccttcgtacaatgcccactatccgaaattccttctccccccatatgggatgaactgcaatggactgtccgcggtcagctccatgaatggcatcaacaattttggtctgtttccccggctctgccccgtgtactcgaacctgctgggtgggggctctctaccgaccccctgttccactccactgttgccgtcaagtctgcctagtgacggcgctagacggttgctgcagccagagcaccctagggaagtcttggttcctgcacctcactctgctttctcttttacaggagccgctgcttcaatgaaagataaggcgtgctcacccacatccggaagccccacagccggaaccgccgcgacggccgagcatgtggtgcagcccaaggcaacaagcgccgccatggccgctccctcttcggacgaggcgatgaacctgatcaagaataagagaaacatgactggttacaagacattaccctatccactcaagaagcaaaacggaaaaattaagtacgagtgcaatgtctgtgccaaaacatttggacagctcagtaacctgaaagtgcacttaagggtgcacagcggcgagagacctttcaagtgccagacgtgcaacaaagggttcacccagctggcacacctgcaaaagcattacttggtgcatacaggcgagaagccgcacgagtgccaggtgtgtcacaagagattcagctctacctctaatctgaaaactcatctgcgtctacacagcggagagaaaccatatcagtgcaaagtgtgcccagccaagttcactcaattcgtgcacctgaaactgcataagcgactccacacccgggaacgcccacacaaatgctcccagtgccataagaattatattcatttgtgttcgctgaaagtgcatctcaaaggaaattgcgccgccgcaccggcaccggggttaccactggaggacttaactcgcattaatgaagaaatagagaaatttgatatctctgacaacgcagaccgtctcgaggacgtggaagacgacattagcgtgatatccgttgtggaaaaggagattttggccgtcgttagaaaggagaaggaagagaccggactcaaggtatccctgcaaaggaacatgggcaacggcctgctaagcagtggatgttcactctatgagagtagcgacctccccctaatgaaattacctccatctaatccgctgcccctggtgccagtcaaggtaaaacaggagacagtggagcctatggatccttag

SEQ ID NO: 200452 - DNA, 1716 bp, synthetic construct
  misc_feature 1..1716: note = Description of Artificial Sequence: Synthetic coding sequence
  source 1..1716: mol_type = other DNA
atggccctgccccggcccagcgaggccgtgccccaggacaaggtgtgctatccccctgagtcttctccacaaaacctggctgcatattatacacccttcccatcctacggccattacagaaattccctggcaaccgtggaagaagattttcagccatttcgccagctagaagcagccgcaagtgcagcacctgccatgccccctttcccttttcggatggcgcctccattgctttccccgggactgggactgcagcgcgaaccactttatgacttgccctggtacagtaagcttcctccctggtaccccatccctcacgtcccacgagaggtacctccatttctgtctagttcacatgagtacgctggggcatcttccgaagacctgggacatcagatcattggcggagataacgagagcggcccatgttgcggccctgacacactgatccctcctcctccggccgacgcaagcctgcttccagaaggcctgagaacttcacagctgctcccttgtagtccttcaaagcaatccgaggacggcccgaagccttccaaccaggaaggcaaatcacccgcccgttttcagttcactgaagaagacctccattttgtgttgtacggtgttactccttcactggagcatccggcctccttgcaccacgcgatatcagggctcctcgtgcccccggattccagcggcagtgacagcctacctcagacgcttgacaaagattccttacaactgcccgagggtctgtgtcttatgcagacggtgtttggggaggtcccacatttcggagtcttttgctcttcatttattgccaaaggagtgaggttcgggccgtttcagggtaaggtggtgaatgcctcggaggtgaagacttacggcgataattcggttatgtgggagatcttcgaggatggtcatctgtcccattttatagacgggaagggcggcacaggcaactggatgtcttacgtgaattgtgctagattccccaaggaacagaacttggtggccgtccagtgtcagggccacattttttatgagtcctgtaaggagatccaccagaaccaagaattgctcgtatggtacggggattgctatgaaaagttcctggacatccccgtgtcattacaggttacagaaccaggaaaacagccttccggacccagcgaggagtccgctgagggatatcgctgtgaacgctgtggcaaggtcttcacctataaatattaccgcgacaaacacctgaaatacaccccctgcgtggataagggtgaccgaaaattcccttgcagcctttgcaagcgatccttcgagaaacgagacagactgagaatccacatccttcatgttcacgagaaacatcgaccccataagtgttcaacctgcggcaaatgtttttcccagtcgtcttccctcaacaagcatatgcgagtgcacagcggggacaggccctaccagtgcgtctattgcaccaagagatttacagcttcgtccattctgcgtacacatattagacagcacagtggcgagaaaccttttaagtgcaagtattgcggaaaaagtttcgctagccacgcagctcatgactcacacgtcagaagatctcacaaggaggatgatggctgctcttgctcaatttgcgggaagatattttcggaccaggaaaccttctactcccatatgaagttccacgaagattactag

SEQ ID NO: 200453 - DNA, 303 bp, synthetic construct
  misc_feature 1..303: note = Description of Artificial Sequence: Synthetic coding sequence
  source 1..303: mol_type = other DNA
atggccctgccccggcccagcgaggccgtgccccaggacaaggtgtgttatccccctgaatcctcccctcagaatctcgccgcctactacactcccttcccatcctacgggcattataggaattcattagctaccgttgaggaggatttccaaccttttcggcagctggaggccgcggccagtgctgctccagctatgcctccgtttcccttcaggatggcaccaccccttctctcccctggtctgggcctgcagagggaaccactttacgatttgccgtggtactccaaattacccccatag

SEQ ID NO: 200454 - DNA, 3831 bp, synthetic construct
  misc_feature 1..3831: note = Description of Artificial Sequence: Synthetic coding sequence
  source 1..3831: mol_type = other DNA
atgcggagcaaggcccgggcccggaagctggccaagagcgacggcgacgtggtgaataatatgtatgagccaaatagagacctgctggccagtcactccgccgaggatgaagcagaggattccgcgatgagccccattccagttggacctccctctccctttcccaccagtgaagatttcactccaaaggaggggtccccttatgaagctcccgtttacatccccgaggacatccctatccctgctgactttgaactccgcgaatccagtatccctggagcaggcctgggcgtctgggcaaagagaaagatggaggcaggagagagactaggtccgtgtgtggtcgtgccacgtgcagctgctaaagagacagattttggatgggagcagatcctgacggatgtggaggtgagtcctcaagaaggttgtatcacaaaaatctctgaggacctgggctcggaaaaattttgtgtggatgctaaccaagccggtgcgggcagctggctgaaatacattcgcgtggcctgcagttgcgatgaccaaaacctgacaatgtgccaaatcagcgagcagatctattacaaagtgatcaaggacatcgaaccgggtgaagagctgttggtccacgtgaaagaaggagtctatcccttggggactgtgccacccggtctggacgaggagcctacctttaggtgcgacgagtgtgatgagctattccagagtaaactggacctccggagacacaagaagtatacctgtggctcagtcggtgccgccctctacgagggcctggccgaggaactgaaacctgaagggctgggaggagggtccggccaggctcatgagtgtaaggactgcgaacgcatgtttccgaataaatattccctcgagcagcacatggtgatccacactgaggagcgggagtacaagtgcgaccagtgtccaaaagcattcaactggaagagcaatcttattcgtcaccagatgtcacatgactccggcaaaaggtttgaatgtgagaactgcgtcaaagtctttacggaccctagtaaccttcagcggcacattcgcagtcagcatgtcggggcccgagcacacgcttgtcccgactgcgggaaaacatttgctacctcttctggcctgaagcagcacaagcatatacacagcaccgttaagccttttatttgcgaagtctgtcataagagctacacgcagtttagcaatctgtgccgccataagcgcatgcatgccgattgccgaacccaaatcaagtgcaaggattgcgggcaaatgttcagcactacatccagcttgaataagcaccggagattctgcgagggtaaaaatcattacacaccaggcgggattttcgcgcctgggctgccactgaccccaagtcccatgatggacaaggccaagccttctccaagtttaaatcacgcttccctggggtttaatgagtacttcccttctcgaccccaccctggctccctgccgttttccacggcgcctcctaccttcccagctcttacccctggattccctggaatttttcctccctcactttatccaaggcctcctctactgccccccacttctctgctaaagtcaccccttaaccatacccaagacgcaaagctgccttcgcctctggggaatcctgcactaccactcgtctccgccgtgagcaattctagtcagggcaccacagctgcagcaggccctgaggagaagttcgagtcccgactggaggactcgtgtgttgaaaaactcaagacaagaagtagtgacatgtctgacggtagtgattttgaggacgtgaacaccaccaccggcacagatttggatacaacaacggggactggatccgatctggatagcgatgtcgacagcgaccctgacaaagacaaaggcaagggcaaaagtgccgaagggcagcccaaattcggcggtgggctggctccaccgggcgcacccaatagcgtggcagaagtacctgtgttttatagccagcacagcttttttccccctcccgatgaacaactgctgactgcaactggagcagccggagatagtataaaggcaatcgcctcaatagccgagaaatacttcggacccggatttatggggatgcaagaaaagaagctcggctcgctgccatatcatagtgccttcccattccagttcctccccaattttccccacagtctgtaccctttcacagatcgggcactggctcacaatttacttgtgaaggctgagccgaaatccccacgcgacgcgctgaaagtggggggtccttctgctgaatgtccatttgatttaactacgaagccaaaagacgtcaagcctatcctgccgatgccaaagggacccagcgcgcccgcaagtggggaagagcaacccctggacctgtccattggtagcagagcaagggcttctcagaacggggggggcagagagccacgtaaaaatcatgtgtatggcgagcggaaactgggcgcaggcgagggtctgccccaggtctgccctgccaggatgccacagcagccaccattacattatgcaaagcccagtccattctttatggaccccatctactcgagagtggagaagaggaaagtcactgaccctgtgggggcactaaaagagaagtacctccgcccatcaccgttactgttccacccacaaatgagtgcaattgagactatgaccgaaaaactcgagtctttcgctgctatgaaggctgatagtgggagttcattgcaacccttgccccatcacccttttaacttcaggtccccaccacccactctatctgatcctatccttcgaaagggtaaggaacggtatacatgtcggtattgtggcaagatctttccacgtagcgcgaatctgacacggcacttgcgaacgcacactggtgagcagccttatcgctgcaaatactgtgacaggagcttttccatatcttcgaatctgcaacgacatgtgaggaacatccataataaggagaaaccgttcaaatgccacctatgcaacaggtgcttcggacagcagactaatcttgaccgacatctgaagaagcacgaacatgagaacgctcctgttagccaacaccccggcgtgcttaccaaccatttgggaacaagtgcttcaagccctacctctgaaagtgataatcatgctttgctcgatgagaaggaggattcgtatttcagcgaaattaggaacttcattgccaactctgagatgaaccaagccagtacgcgcactgagaagcgagcagatatgcagattgtggatgggagcgctcagtgtcccggcctagcgtccgaaaagcaagaggatgtggaggaagaagacgatgacgacctggaggaggacgacgaagatagcctcgcaggtaaatcccaagatgatactgtgtcacccgcaccagagcctcaggccgcgtatgaggatgaggaagacgaggagccggcggcgagcttagcagttggcttcgaccataccaggagatgtgccgaggaccacgaagggggcttgctggcactggagcccatgccgactttcggcaagggactcgatctgcgacgagccgctgaggaggcttttgaggtcaaggacgttttaaactctactctggatagtgaggctctgaagcataccctgtgccgtcaagccaagaatcaggcctacgccatgatgctatccctgagtgaggatacccctcttcacaccccatcacagggctccttggacgcctggctcaaggtcactggggctacctccgaatccggcgccttccaccctataaatcatctatag

SEQ ID NO: 200455 - DNA, 3831 bp, synthetic construct
  misc_feature 1..3831: note = Description of Artificial Sequence: Synthetic coding sequence
  source 1..3831: mol_type = other DNA
atgcggagcaaggcccgggcccggaagctggccaagagcgacggcgatgtagtcaacaacatgtatgaaccaaatcgggatctccttgcaagccacagtgcagaggatgaagcggaggatagtgccatgtcacctattcccgtgggacccccctctccttttccaacaagtgaggacttcactcctaaggaagggtccccctatgaggcaccagtgtacatcccagaggacattcccatacccgccgatttcgagttgagggagtcttccattcctggcgctgggctgggcgtttgggctaagcgcaagatggaagctggtgagcgacttggtccctgcgtggtggtccccagagccgctgccaaggagactgacttcggttgggaacagatccttactgacgtagaagtgtcaccccaggaaggatgtatcactaagatcagcgaggatctcggaagcgagaagttctgtgtggacgccaatcaggcaggagctggctcctggttaaagtatatccgggttgcctgttcttgtgatgaccagaacctgacaatgtgtcagattagcgagcaggtgatctactacaaagtcatcaaagacatcgagcctggcgaagagcttctggtccatgtgaaggagggagtgtatccactaggaactgttccacctgggctggatgaggaaccgacttttcggtgtgatgagtgtgacgaactgtttcagtccaagctggacctccgcagacataagaaatacacttgcggatccgtgggagccgctttgtacgaggggctggctgaagagctgaaaccggaggggctggggggcgggagtggccaagcgcatgagtgtaaagactgcgaaagaatgtttcccaataaatacagcctcgagcagcatatggtgattcacactgaggagcgggaatataaatgtgatcagtgccccaaggccttcaactggaagtctaatttgatacggcaccaaatgagtcatgactctgggaaaaggttcgagtgtgagaattgtgtcaaagttttcaccgacccgtccaatctccagcgccatattcggtcgcagcatgttggcgcacgggctcacgcctgtcctgattgcggcaaaaccttcgccactagctccgggttgaaacagcataaacacatacactcaacagtaaaaccattcatctgcgaggtgtgtcataaatcttatactcaattttctaatctctgtagacacaagagaatgcatgccgattgcagaacacaaatcaaatgcaaagattgcggtcagatgttctccactactagttcactgaacaagcacaggaggttctgtgaaggaaagaaccactacacccccggtggtattttcgccccggggctgccactgacaccatcccccatgatggataaggcaaagccatctccgtcactgaaccacgcgtccctgggctttaacgaatacttcccctcacgtcctcatccaggttccctccccttctctacggcaccccccacatttcccgccctgactccagggttcccagggatattcccccccagtctttaccctagaccacccctgttgcccccgacgagtctcctgaaatctcctcttaaccacacccaggacgccaaactgccttccccgctcggaaatccagcccttcccttggtctctgcagtgtcaaactccagccaaggtacaactgccgccgcggggccagaggagaaatttgagagtcggcttgaagactcttgcgttgaaaaactcaaaactaggtccagtgacatgtctgatggatcggacttcgaggacgtcaacactacaactggcaccgatctagacactaccactgggactggatcagacctagactcagacgtcgatagtgatcctgacaaggacaagggtaagggcaagagcgcagaggggcagcccaaattcggaggcggcctcgcccccccaggagctccgaacagtgttgctgaggtccccgtgttctattcacaacactccttctttcctcctccagacgagcaacttctgacggccactggggcggctggcgattccatcaaggctattgcatcaatcgcagaaaagtatttcggcccaggctttatgggcatgcaggaaaaaaagctggggagcctgccatatcacagtgccttcccctttcagtttcttccaaacttcccacactctctgtaccccttcactgaccgcgccctggcgcataatctattggtgaaggctgaacccaagagcccaagggacgccctaaaggtagggggtccttccgcagagtgcccctttgaccttacgaccaaacccaaagacgtgaagcctatcctccccatgcctaaagggccctctgcgccggcctcaggcgaggagcagcctttagatttgagtatcggcagtcgcgcacgtgcatctcagaatggaggaggccgagaaccacgcaagaaccacgtctacggtgagcggaaactgggggccggcgaaggcctcccgcaggtgtgccctgcacgcatgcctcagcagcctccattacactacgccaagccgagccctttctttatggaccccatttaccgtgtggaaaaacggaaagtcacggacccagtgggagccctcaaagagaagtacctccggccttccccactcctgtttcatccgcaaatgtctgcaatagaaacgatgaccgaaaagctggaatccttcgccgccatgaaagctgacagcggatcctctctgcagccactcccccaccatccgtttaatttcaggtcccccccgccaactttatctgatcctatactgcggaagggtaaagaacggtatacttgcagatactgtggcaaaatcttccccagatctgcgaaccttacccgacatctgcgaacgcatactggggaacagccctacaggtgcaagtactgcgaccgttcatttagtatctcttccaatttacagcgacatgtgaggaatattcataacaaggaaaaaccttttaaatgccatctgtgcaataggtgtttcggccaacagacgaacttggaccggcatcttaagaaacatgagcatgagaatgcgccagtatcccaacatcccggcgttttgactaaccacctgggtaccagcgccagttcccccacctccgaatctgataaccatgcccttctggacgaaaaggaagattcctactttagcgaaattaggaattttatcgccaactcagagatgaatcaagcttctacaagaacagagaagagggcggacatgcaaatcgtagacggttccgcccagtgccccggcttggcaagcgagaagcaggaagacgtggaggaggaagacgacgatgatctagaggaggatgatgaggacagcttggcgggcaaatcccaagatgacactgtctcaccagcacctgagccacaggccgcttacgaggatgaggaagatgaggagccagccgcttctctcgccgtcgggtttgatcacacccgcaggtgtgcagaagaccacgagggcggtcttctggcactggagcccatgcctaccttcggaaagggcctggacctgcgccgcgcggctgaggaagcgtttgaggtgaaagatgtgctgaactccacactggacagcgaggctcttaaacatactttgtgcaggcaggctaagaaccaggcctacgccatgatgctgagcctgtcagaagacacccctctccacacccccagccaagggtcattagatgcctggctgaaggtaactggggcaactagtgagagcggtgcctttcacccaatcaatcatctgtag

SEQ ID NO: 200456 - DNA, 3279 bp, synthetic construct
  misc_feature 1..3279: note = Description of Artificial Sequence: Synthetic coding sequence
  source 1..3279: mol_type = other DNA
ttctgcgcctacagcgccaagatctactacaaggtgatcaaggacatagaacccggggaagaacttctggtccatgttaaggaaggcgtctatcctttggggacagtccccccaggacttgacgaggaacccacattcaggtgtgacgagtgcgacgagttgttccagtccaagcttgacctgcgccgccataagaagtacacatgtggatcagtgggtgcagctctttatgagggactggctgaagagttaaagcccgagggcctgggaggaggtagcggacaggctcacgagtgcaaagactgcgaaagaatgttccctaataagtacagccttgagcagcatatggtaattcacacagaggaaagagagtacaagtgcgaccaatgtccaaaagcttttaactggaagagcaatctgatcagacaccaaatgtcgcacgatagcgggaagagattcgagtgcgagaactgcgtgaaagtcttcactgacccgtcgaatctgcagcggcacatccgctctcagcatgtgggggcaagggcccacgcttgccccgattgcggcaaaaccttcgccaccagttcaggcctcaagcagcataagcatatccatagtactgttaagccgttcatctgcgaggtctgccataagtcatacacacagttttcgaacttgtgtaggcataagcggatgcacgccgattgtcgcacacagattaagtgtaaggactgtggtcagatgtttagcacaactagctctcttaacaagcacaggcgcttttgcgaggggaagaatcattacactcccggtggcattttcgctccaggactgccattaaccccaagtcctatgatggacaaagccaagcctagtccatctctcaaccatgcctctcttgggttcaatgaatacttccccagccggccacatccaggaagtcttccattttccaccgcaccacccaccttcccagctctgacaccagggttcccaggcattttcccacccagcctgtatccccgaccaccattgcttcctcctacgtccctcctaaaatcccctctcaaccatactcaagatgcaaagcttccctccccactgggaaatcctgccctcccattggtgagcgccgtgagcaactcatcccagggtactacagcggccgctgggcctgaggaaaagttcgagtccagattggaggattcttgcgtcgagaagctcaagacacgttccagtgacatgagcgatgggtccgattttgaagacgtgaacaccactactggaacagatttggacacaacaacaggcaccggctcagacttggactctgacgtggatagcgaccctgacaaggataaggggaaggggaaatcagcagagggccagccaaagtttggtgggggcctcgctcctccaggcgccccaaacagtgtggcagaagttccggtgttctatagccagcattcctttttccctcccccagatgagcagctgctgaccgccactggcgcggccggcgatagcataaaagccatagcctccattgccgaaaagtatttcggacccgggttcatggggatgcaagaaaaaaagctcgggagccttccgtaccattcagcatttccctttcaatttctgcctaatttcccacatagtctttatccctttaccgatagggcactcgcacacaatttgctcgtgaaagctgagcctaagagccctcgggacgctctgaaagtgggcggcccaagcgcagagtgcccctttgatctgacaacaaagcccaaggatgtgaaacccatcttaccgatgcccaaaggcccatcggcgccagcctccggggaagagcagccattggatttgtcaattggcagcagggctagagcttcccagaacggtggtgggcgtgagcctcgcaaaaaccatgtgtacggagagagaaagctaggagcgggggaaggcctgccccaagtctgccccgccaggatgccccagcagccccctcttcactatgcgaaaccttccccttttttcatggaccccatttactcccgagtggaaaaacgaaaagtcacggatcctgtgggagctttaaaggaaaagtatttacgtccgtctccactcttgttccatccccagatgagcgcaatagaaaccatgacagaaaaactggagtcattcgccgcaatgaaggccgacagcgggagttccttacagcccctcccccaccaccctttcaatttccgaagcccaccaccgactttatctgatccaatattaaggaagggaaaagagcggtatacttgtcgctactgtgggaaaattttccccaggtcagccaatttgacacggcacctgcgtactcataccggggagcagccataccggtgtaaatactgtgatcggagcttttcaattagttccaaccttcagagacatgtaaggaatatacacaataaggaaaagccttttaaatgccatctttgcaataggtgcttcggtcagcagacaaatctcgatcgccaccttaagaagcacgaacacgaaaacgctcctgtgtcacagcatccaggcgttctgactaatcatcttggtaccagcgctagcagtcccacttccgaaagcgataaccacgctctgctggatgagaaagaggacagttatttcagtgaaatcagaaactttattgccaattcagagatgaatcaggcctccacccgaacagagaaaagagcagacatgcagatcgttgatggatcggcccagtgcccagggctggcgtccgaaaagcaggaggacgtcgaggaagaagacgacgacgatctcgaggaagatgacgaggatagcttagctggcaagagccaagatgataccgtgtctcccgccccagaacctcaagccgcttacgaggacgaagaagatgaggaaccagctgcttcactcgcggttgggtttgaccacacccggcgttgtgcagaagaccacgaagggggccttctggccctggaaccaatgccaaccttcgggaaagggttggacctgcggcgggcagctgaagaagcctttgaggtgaaagacgtgcttaacagcacgctggattcagaagcccttaagcatactttgtgccgtcaggcgaaaaatcaagcatatgccatgatgttatccctgtcggaagacactcctcttcataccccctcccagggttcactagacgcctggctgaaagtgacaggggccacgtctgaatcaggggcattccatcctatcaaccatctatag

SEQ ID NO: 200457 - DNA, 3828 bp, synthetic construct
  misc_feature 1..3828: note = Description of Artificial Sequence: Synthetic coding sequence
  source 1..3828: mol_type = other DNA
atgcggagcaaggcccgggcccggaagctggccaagagcgacggcgacgtggtcaacaacatgtacgaacccaacagagatttgctggcatcccacagcgccgaagacgaggccgaggacagtgccatgagccccatccctgtgggcccgccatccccattcccaaccagcgaggatttcacgcccaaggaagggtctccctacgaggcaccagtgtacataccggaggacatccccatccccgctgacttcgagctgcgggaatcaagcatacccggggccggccttggtgtgtgggcgaaacgcaagatggaagctggagaaaggctcggaccatgtgtcgtggtaccgcgggcagccgccaaggagacagacttcggatgggaacagatccttactgatgttgaagtctcgcctcaggagggttgcataacgaaaattagcgaggatctgggttccgaaaaattttgcgtcgatgcaaatcaggccggggccgggagctggctgaagtacattcgggtggcatgttcttgtgacgaccagaacctcactatgtgccagataagcgagcaaatttactataaagttatcaaagacatagagcccggagaagagctgcttgtacatgtgaaagaaggtgtctatccactaggaaccgtcccacctggactggacgaagaaccgaccttcaggtgtgacgagtgcgacgaactcttccagtccaagctggatctgagacgccacaaaaagtatacctgtggctcagtgggcgctgcgctctatgaaggattggccgaggaactgaagcccgagggcctgggaggaggttccggccaggctcacgagtgcaaagactgcgaaagaatgttcccgaacaagtacagccttgaacagcatatggtgattcacaccgaggaacgcgagtacaaatgtgaccaatgtcccaaagcttttaactggaagtcaaatctgatacgccatcagatgtctcacgactccggtaagcgcttcgaatgtgaaaactgcgtcaaagttttcaccgatccatctaacctgcagcggcacataagaagtcagcatgtgggcgcccgcgcccacgcgtgtcccgactgcggcaagacttttgccacctctagtgggctgaaacagcacaagcacattcattctacagtgaaaccattcatctgcgaagtgtgccacaagagctacactcagttctccaacctctgtcggcataagagaatgcatgctgattgtagaactcagattaaatgtaaagactgcgggcagatgtttagcacaactagtagcttgaataagcaccgcaggttctgcgaaggaaaaaatcactatacccccggaggaatctttgccccagggctgcccttgacaccaagcccaatgatggataaagcaaaaccctcgccaagtcttaatcatgcttcgctggggttcaatgagtacttccctagtcggccccaccccggtagtctccccttttcaactgccccacccacattccccgcactgacacccgggttccccggtatctttccgccttcactgtatcctcggcctccactcttgccccccacctccctgttaaagagccctttaaatcacacccaggacgccaaactgccttctccactgggcaacccggcactgccccttgtgtcagctgtgtcaaattcatcccagggaacaacagctgccgccggtccagaggaaaaatttgagagtaggctcgaggatagctgtgtggagaagctgaaaacgcgtagcagcgatatgagcgatgggagtgactttgaggatgtcaatactactaccggaacagatctagataccactacagggacaggtagcgatctggactctgacgttgactccgaccccgataaagacaagggcaaggggaaatccgccgaaggacaaccaaaattcgggggaggactagcacctcccggagctcccaattcagtagccgaagttccagttttctactcccagcatagtttctttccgcctcctgacgagcagctgttgacggctacaggggctgctggcgattccatcaaggcaatagctagtatcgccgaaaagtattttgggcctgggtttatgggaatgcaagagaaaaaacttggatctctgccctaccacagtgcctttccttttcaattccttccaaactttccccacagcctctaccccttcaccgatcgtgctctggcccacaacctcttggtgaaagctgaacctaagtccccccgcgatgcccttaaagtcggaggccctagcgccgaatgtccattcgacctgacgacaaaaccaaaggatgttaaacccatacttcctatgcccaagggaccaagcgcacctgcctccggcgaagagcaacccttggacctctcgatcggttccagagcgagagcctcccagaatggcgggggccgcgagcccagaaagaatcatgtgtatggcgagcgaaaactgggggccggcgaaggccttccacaggtttgtcccgcccggatgcctcagcagcctccgttgcactacgcgaaaccatcgcccttcttcatggaccctatctaccgcgtggagaaacggaaggtaacagatcccgtcggggcactaaaggagaagtatctaaggccgagccccttgttgttccacccacaaatgtcggccatcgaaactatgactgagaaactggagtcttttgccgccatgaaggccgattccggttcctccctccagccactccctcaccacccttttaattttaggtcaccaccgcccactctttctgacccaatattacggaagggcaaggaacggtacacctgtaggtactgtggaaagatcttcccgagaagtgctaatctcactcgccatcttagaactcataccggggaacaaccatatcggtgcaaatactgcgaccggtcgttcagcatcagtagcaacttgcagcggcacgttcggaacattcataataaggagaaaccctttaagtgtcacctctgcaaccgctgtttcggtcaacagacaaatttggatcgtcatctcaaaaagcatgagcacgaaaacgcgcccgtgagccagcacccgggcgttctgactaaccatctgggaacttcagcttcaagtccaactagcgagtcagataaccatgcgctcttagacgaaaaggaggattcatacttcagcgagattcgaaattttatagccaattccgaaatgaatcaagcatccacccggaccgagaaaagagcggatatgcagatcgtcgacggaagtgcacagtgcccaggcctcgcatcggaaaaacaggaggacgtggaggaggaggatgacgatgacctggaggaggacgatgaggacagcttggctgggaagagtcaggatgacaccgtgagccccgcacccgagccccaggctgcttatgaagatgaagaagacgaggagcctgccgcctccctcgccgttggctttgaccataccaggagatgtgccgaggatcacgagggaggcctcctcgcattggaacctatgcccacattcggtaaaggactcgatctccggcgggctgcagaagaagctttcgaagttaaagacgttctcaattccactctggatagcgaagctctcaaacataccttgtgccgacaggctaaaaatcaggcctatgcaatgatgctgagcctctcagaagatacacctctacacaccccatctcagggatctctggatgcctggcttaaggtaaccggagcaacaagcgagtctggagcctttcatcccattaaccatctctag

SEQ ID NO: 200458 - DNA, 3771 bp, synthetic construct
  misc_feature 1..3771: note = Description of Artificial Sequence: Synthetic coding sequence
  source 1..3771: mol_type = other DNA
atgcggagcaaggcccgggcccggaagctggccaagagcgacggcgacgtggtcaacaacatgtacgagcccaaccgcgatctgctggcctcccacagtgctgaggatgaggccgaggattccgcaatgagtcctattccagtgggtccaccgagtccattcccgactagcgaggacttcacgcctaaagagggcagcccttacgaggcaccggtttacattccagaagacatccctatccctgcggactttgaactgcgggagtcatctatccccggcgccggcctgggcgtctgggctaaaaggaaaatggaagcaggggaaaggcttggaccctgtgtggtcgtccctagggcagccgctaaggagacagactttggctgggagcaaattttgactgacgtagaagtgagccctcaggaaggatgcataacaaaaattagtgaggatctggggtccgagaaattctgtgtggatgccaatcaggccggcgccgggtcatggctcaagtatattagggtagcctgtagttgcgacgaccagaacttgacaatgtgtcagatcagcgaacagatctactacaaagttatcaaagacatcgaacccggcgaggaattattggtccatgtaaaagaaggcgtgtatcctttgggaaccgtgcccccgggcctagatgaggaacccacttttcgctgcgatgagtgcgatgaactgttccagtctaagctagatttgcgtaggcataagaagtatacttgcggctccgtcggagcagcgctctacgaggggcttgccgaggaattgaagcccgaaggattgggcgggggatccgggcaggcccacgaatgcaaagactgcgaaaggatgtttccgaataaatatagcctggagcagcacatggttattcacacagaggagcgggagtacaagtgtgaccagtgtccaaaagcattcaactggaagtctaatctgatccggcaccaaatgtcccacgacagcggcaaacgctttgagtgtgagaactgtgtcaaagtcttcacggatccaagcaacctccagcgccacatccgctctcagcacgtgggtgcccgggctcacgcatgccccgattgcggcaagacattcgctaccagtagtggattaaagcagcacaagcatatacacagtactgtgaagccgttcatttgtgaggtttgtcataaatcttacacgcaattcagtaatctctgtcgccacaaacggatgcacgcagactgccggacccagatcaaatgtaaagattgcgggcagatgttctctaccacttctagcttaaataaacatcgccgcttttgcgaaggcaaaaaccattacactcctggcggaatatttgcgccggggctgccactgactccttcaccaatgatggacaaagcaaagccttctcctagtctgaatcacgcatctctcgggttcaatgagtacttcccttcacggcctcacccaggttcgctgccattttcgaccgcacccccaacctttcccgctctaaccccgggttttcctggcatcttccccccctctctgtatccccggcctccactgctgcctccgaccagcttacttaagagtcccctcaatcacactcaggatgctaaattgccctcacctctaggtaaccccgccctgccactcgtgtcagctgtgtctaacagtagtcagggcactactgccgccgcaggaccggaggagaagttcgaaagccgtttagaggatagttgcgttgagaagttaaagacacgcagttcagacatgtcagatgggtcggactttgaagacgtgaataccaccactggcacagacctggatacgacaacagggaccggctcggacctggatagcgatgtggattctgaccccgataaagataaaggtaagggcaagtccgcagaaggacagcccaagtttggcggcgggctggccccgcccggcgccccaaacagcgttgccgaggttcctgtcttttattcccagcatagtttctttcctccacccgatgagcagctcctgacagccaccggagctgcaggtgacagtattaaggctattgccagcatcgcagagaaatactttggccccggcttcatggggatgcaggagaaaaagttgggaagcctgccctaccatagcgctttccctttccaattcctgccaaactttccacattcactctatccttttactgaccgagcacttgcacataatttgctggtgaaggccgagcccaaaagtccccgagatgccctgaaggtcgggggcccttcggccgaatgtccgttcgacctgaccaccaagcccaaggatgtaaagccaattctccctatgcccaaggggccttccgcccccgccagtggcgaggagcaacctttggacctctctattgggtccagggctcgggcaagtcagaacggcggtggacgggagcccaggaaaaatcacgtgtatggagaaaggaaactaggagcaggggagggcctgccgcaggtatgccctgccagaatgcctcagcagcccccactgcactacgctaagcccagccccttcttcatggatccaatataccgagttgagaagcggaaagtgactgatcctgtgggggctttgaaggagaaatacctgcgcccttcgccgctgctctttcatcctcagatgagcgctatcgagacaatgactgagaagctggagtcctttgccgccatgaaagccgactcgggcagtagcttgcagcctctaccccaccacccgttcaactttcgctcccctccacctacactgagtgatcctattctgagaaagggaaaggagcggtatacctgtcggtattgtggaaaaatctttcccagatctgcgaacctgactcgtcacttgcgcacccacaccggcgaacaaccttatagatgtaagtattgtgataggtccttctcaatctcttccaatctgcaacgacacgtgcgcaacatccataacaaggagaagcccttcaaatgtcatctgtgcaatagatgcttcggacaacagaccaacctggatcgccacctgaaaaagcacgagcatgagaatgctcccgtctctcagcatccaggggtgttgaccaatcacctgggaacaagcgcttcctcccccacctcagaatcggacaaccacgccttgttggacgagaaggaagattcatatttcagcgaaatccggaatttcattgctaacagtgaaatgaatcaggcttcgaccaggactgagaagagagccgatatgcaaattgtcgatggctctgcccagtgccctgggcttgctagcgaaaaacaggaagatgtcgaagaggaagatgacgacgatctggaggaagacgacgaggattctctggctgggaagagtcaggatgacacagtcagccccgctccagaacctcaggccgcttatgaagacgaagaggatgaagaaccggctgcatccctggccgtagggttcgaccatacaagacggtgtgccgaagaccacgaggggggcctccttgcactggagcccatgcccacctttggcaaggggctcgatctgagaagagccgctgaggaagcctttgaagttaaagacgtccttaactctaccctagattcagaggcgcttaagcataccctgtgtcggcaagcgaaaaaccagggttctctagacgcctggcttaaggtgaccggagccacgtcagagagtggagccttccatcctatcaaccacctgtag

SEQ ID NO: 200459 - DNA, 3255 bp, synthetic construct
  misc_feature 1..3255: note = Description of Artificial Sequence: Synthetic coding sequence
  source 1..3255: mol_type = other DNA
atctactacaaggtgatcaaggacatcgagcccggcgaggagctgctcgtgcacgtgaaggagggggtgtatcccctgggtactgtgccccccggactggatgaggaaccaaccttccgctgtgatgagtgtgatgagctctttcagagcaaactggaccttcggagacacaagaaatatacctgcggttcagttggtgccgcactgtatgagggacttgccgaagagctcaaacccgagggccttgggggcggttccgggcaggcccacgaatgcaaggactgtgaacgaatgtttcctaataaatacagcctcgaacagcacatggtcatccatacagaggagagggagtataagtgcgaccaatgtcctaaagccttcaactggaaatctaatcttatcagacaccagatgtcacacgacagtggaaaacggttcgagtgtgagaactgcgttaaggtctttaccgacccctctaatctacaaagacacatcaggtcacaacacgtgggagcccgggcccacgcctgccccgactgcggcaaaacatttgctacttccagcggccttaagcaacacaaacacatccatagcaccgttaagccattcatatgcgaggtgtgccacaagtcgtacacacagttctccaatttgtgtcgccacaagcggatgcacgctgactgtcgcacccagatcaaatgcaaggactgtggacagatgttctcaacaacctcctctttaaataagcatcgccggttttgcgaggggaaaaatcattatacaccaggcgggatcttcgccccaggtctgcccttgacaccatcccctatgatggacaaggccaaaccatctccgtctctgaatcatgctagcctcggattcaatgagtacttcccatctagaccccacccaggatccctccctttttctaccgcccctcccacattccctgctttaacacccggttttcctggaatcttccccccttccctgtaccctcgtccaccacttctcccacccacttccctgctgaagtctcctctcaatcatacccaggatgctaagctaccatctccactcggaaatccagccctccccttggtgtccgcagtcagcaattctagccagggaacgaccgccgccgccggccctgaagaaaaattcgagtcaagattggaggacagttgtgtagagaaacttaagactaggtccagcgatatgagtgacggatctgattttgaagatgtgaatactactaccgggacagatctggacacgacaactgggaccggaagcgacttggatagcgacgttgacagtgaccccgataaggacaaggggaaaggcaagtccgccgagggacaaccgaagtttggcggggggctcgcaccacctggagcccctaattccgttgccgaagtccccgtcttttactcccaacactcatttttcccaccaccagacgagcagctgttaacggccactggggcagcaggcgattccattaaggctatagcctctatcgccgagaagtacttcggacccgggtttatgggcatgcaggagaagaaactgggatccctgccataccattccgcttttcccttccagtttctacccaattttcctcactccctgtacccgttcaccgatagagctctcgcacacaacttactggtaaaagcagaaccaaaatccccaagggatgcgctcaaggtcggcggaccatccgctgagtgtccattcgatctgaccactaagcccaaggacgtgaagcccattctccccatgccaaagggcccctccgcccctgcttcgggcgaagagcaaccactggatctgagtatcggcagccgggcccgagccagccagaacgggggaggtcgcgaacctcggaaaaaccatgtgtacggtgaacggaagctaggtgcaggagaagggctgcctcaagtgtgtcccgctcgtatgccacagcagccgcctttacattacgctaagccctctcctttcttcatggatcctatataccgggttgagaaaaggaaggtgacagatcctgtgggtgcccttaaggaaaaatatttgcgaccctcccctctgctgttccatccccagatgtcagcaatcgagactatgacagagaagcttgagtcttttgccgccatgaaagccgatagcggctcgtctctccagcctctccctcaccacccgttcaacttccgcagtccacctcctacactgtccgatcctatcctgcggaaagggaaagagaggtacacctgtaggtactgcggaaaaatctttccacgaagcgcgaacctcaccagacacctgaggacgcacaccggggagcagccttaccgctgtaaatattgtgatagaagcttcagcatatcgtcgaacctgcagcggcacgtccgcaatattcacaacaaagagaagccttttaagtgccatctgtgcaacaggtgtttcggccagcagaccaacttagatcggcacctgaaaaagcacgagcacgagaatgcccccgtctcacagcaccctggcgtcctgaccaatcatctgggaacctctgcgtcttcccctacaagcgaaagcgacaaccatgctctgctggatgagaaagaagactcctactttagtgagatcaggaactttatagcaaactcagaaatgaaccaggcctcaacacggaccgaaaagcgggccgatatgcaaattgtggatggttcagcgcaatgtcccgggttggctagtgaaaaacaggaggatgtggaggaagaggacgatgatgacctcgaagaagatgacgaggattcgttagccggtaagagccaggacgatacggtgtcacccgcaccagagccacaggcagcatacgaggacgaagaagacgaagagcccgctgcatccctggcagtaggcttcgatcacacgcgacgctgtgcggaggatcatgaaggagggctcctcgcactggagcccatgccaaccttcggtaagggtctcgatcttagacgcgccgctgaggaggcatttgaggtgaaagacgtgctgaattccacccttgattccgaggcgctcaagcacaccctctgcagacaggctaagaatcaggcatacgcgatgatgctgtctctgtctgaggacacacccttgcacactcctagccaaggcagcttagacgcttggctgaaggttactggcgcaacatcagagtctggggcttttcacccgattaaccacctgtag

SEQ ID NO: 200460 - DNA, 3774 bp, synthetic construct
  misc_feature 1..3774: note = Description of Artificial Sequence: Synthetic coding sequence
  source 1..3774: mol_type = other DNA
atgcggagcaaggcccgggcccggaagctggccaagagcgacggcgacgtcgtgaacaatatgtacgaaccaaacagagacctgctagcatctcactccgccgaggacgaggctgaggactcagcaatgtcaccaattcctgttggccccccgtcccccttccccacaagcgaggactttacgcctaaagaagggagtccatacgaagccccggtgtacattccagaggacatccccattcccgccgacttcgagctgagggaatcttctatcccaggcgccggcctcggagtgtgggccaagcggaaaatggaggctggagagcgtctgggcccctgcgtagtcgtcccccgggcagctgctaaggaaaccgacttcggttgggagcagattttgactgatgtggaggtgtctccacaggaaggatgtattacgaagatcagcgaagatttagggtccgaaaaattttgcgtcgacgcaaaccaagctggcgcaggcagttggctgaaatacatccgggtcgcctgcagttgtgacgatcagaatctgacaatgtgccaaattagtgaacagatttactataaggtaatcaaagacatcgaaccaggcgaagaactgttagttcatgtgaaggagggcgtttacccactgggtaccgtaccccctggccttgacgaggaaccaacatttagatgtgatgagtgcgacgaactgttccagtctaaactggacctaagacgccacaagaaatacacttgcggttctgtgggggctgcgctttacgagggcctagctgaggagttaaagcctgagggtctaggcgggggatcaggccaggctcacgagtgcaaggactgtgagagaatgttccctaacaagtatagcctggagcagcatatggtcattcacaccgaagagagagagtataagtgtgaccagtgtcctaaggctttcaattggaaatcgaacctgatccgccaccagatgagtcacgacagcggaaaacggtttgaatgtgaaaattgcgttaaggtgttcactgaccccagcaacctccagagacacattcgaagtcagcacgtgggagctcgcgcacacgcttgtcctgactgcggcaagaccttcgccacttcttctggacttaaacagcacaagcatatccactcaaccgtcaaaccctttatctgcgaggtgtgtcacaaaagctatacacagttcagcaacttgtgcaggcacaaacgcatgcatgctgactgtcggacgcaaatcaagtgtaaagactgcgggcagatgttctccacgaccagctctctgaacaaacatcgccggttctgcgaaggaaagaaccactatactccaggaggcatcttcgctcccggcctgccgctgaccccctcccctatgatggataaagccaaaccctcgccgtcccttaaccacgcttctttaggtttcaacgagtattttccctccaggccacacccagggagtctcccgttttcaaccgcacccccaacctttccagctctcactcccggctttccgggaatttttccaccaagcctttacccgcgcccccccctactgcctcccacctctctactgaaaagtcctcttaatcacacccaggatgcaaaattaccctcccccctcgggaacccagcccttccgttggtctccgctgtaagcaacagctcccagggaaccactgcagccgccggtcctgaagaaaagtttgagagcaggcttgaggattcctgcgttgagaaactgaagacaaggtccagcgatatgtctgacggtagcgattttgaggacgtgaacaccactaccggaaccgatctcgacaccaccactggaaccggctcagacttggactccgacgtggactccgaccctgataaggataagggcaagggtaaatctgccgagggtcagcctaaattcgggggcggacttgcgccacccggcgcccctaatagcgtcgcagaagtgccagtgttctatagccagcacagttttttccccccacccgatgaacagctgcttaccgccacaggcgccgctggcgacagtatcaaggctattgcttctattgctgagaaatatttcggacccggctttatgggcatgcaggaaaagaagcttgggtcactgccctaccactccgcatttccgttccagtttttgccgaattttcctcatagcctttacccgtttacagaccgggccctggcccacaacctgctggtcaaagctgagccaaagtcaccccgcgatgccctgaaagtgggaggcccctcggccgagtgtcccttcgacctgactaccaagccaaaggatgtgaagcctatactgccaatgccaaaaggtccttccgcaccagctagcggggaggaacaaccgctcgacctctctattggctctcgcgcaagggctagtcagaacgggggcggcagggagccgcggaaaaatcacgtgtatggagaaaggaaattgggggcaggggagggattgccccaggtgtgccccgcgcgtatgcctcagcagccccctctgcactacgcgaaacctagtcccttcttcatggatccaatttactctcgcgtggagaagcggaaggtgaccgatcctgtgggcgcactgaaggagaagtacctccggcccagtcctcttctctttcacccccagatgagcgcaatagaaacaatgacagagaaactggaatcatttgcagcaatgaaggcggattcaggctcatccctccaacctctgcctcaccacccttttaatttccgaagtcctccccctacactgtccgaccccatcctgcggaaaggaaaagaaagatacacttgtcgctactgtggcaaaatttttcctaggtccgcgaacctgaccaggcatctgaggacccatactggcgagcagccatatcggtgtaaatattgtgaccgttcttttagcatttcttccaatctacagcgccacgtgcgaaacatccataacaaggagaaaccattcaagtgtcacctctgcaacagatgcttcggccagcagacaaatctggatcgacacttaaaaaaacacgagcacgaaaacgctccagtgagccaacatccgggagtgctcacgaaccatctaggcacctctgcctccagccctacctcagagtccgataatcacgccctcttagatgaaaaggaagatagttacttcagtgagattcgcaatttcattgccaattccgaaatgaaccaagccagcacacgcacagagaagcgcgctgacatgcagatagtggatggaagtgcccaatgtccgggtcttgcgtcagagaagcaggaggacgtagaagaggaggacgacgatgacctggaagaagacgatgaggactctctggccgggaagagccaggatgatactgtctccccggcccccgagccccaagccgcgtacgaggacgaggaggacgaagaaccagctgcctcgttagcggttggattcgaccacacacggcgctgcgctgaagatcacgaaggaggcctgctggcccttgagccaatgccaacttttggcaagggcctggatctgcgccgcgcggctgaggaggctttcgaggtgaaggacgtcttgaattccaccctcgattcagaggcccttaaacatacattgtgtagacaagccaaaaatcaaggatccctggacgcatggctgaaggttacaggtgccacttcggaatctggcgcttttcacccaattaatcatttgtag

SEQ ID NO: 200461 - DNA, 600 bp, synthetic construct
  misc_feature 1..600: note = Description of Artificial Sequence: Synthetic coding sequence
  source 1..600: mol_type = other DNA
atgagcagcgagaactgcttcgtggccgagaacagcagcctgcaccctgaatctgggcaggagaacgatgcaaccagtccccacttctctacaaggcacgaaggctcatttcaagtgccggtgctttgcgccgtaatgaacgtagttttcatcaccatcctgattatagctctgattgccctctcagtggggcagtacaattgccccggccaatacactttcagtatgccttccgattctcacgtttcgtcttgtagcgaagactgggttggctaccagcgcaagtgttactttataagcacagtcaagagaagctggaccagcgcacagaacgcatgctccgagcacggcgcaactttagccgtcatcgactctgagaaggacatgaacttccttaagcgatacgccggccgggaagagcactgggtcggacttaaaaaagaaccagggcacccctggaagtggagcaacggtaaagagtttaataactggttcaatgtgaccggctctgacaagtgcgtttttctcaagaacacagaagtgtcctccatggagtgtgagaaaaacctctactggatctgcaacaagccctacaaatag

SEQ ID NO: 200462 - DNA, 228 bp, synthetic construct
  misc_feature 1..228: note = Description of Artificial Sequence: Synthetic coding sequence
  source 1..228: mol_type = other DNA
atgcaccaccggatgaacgagatgaacctgagccccgtgggcatggaacagctcacgtcttcctctgtcagcaacgcgctgcccgtgagtggatctcacttggggctggccgcttcgcccacccatagtgccatcccagctcccgggcttcccgtcgctattcccaacctgggcccttctctgagcagcttgccatctgccctgtcactcatgctcccaatgggttag

SEQ ID NO: 200463 - DNA, 1893 bp, synthetic construct
  misc_feature 1..1893: note = Description of Artificial Sequence: Synthetic coding sequence
  source 1..1893: mol_type = other DNA
atgctgggcatgtacgtgcccgaccggttcagcctgaagagcagcagagtacaggacggtatgggcctgtatactgctagacgcgtccgtaaaggagaaaagttcggccccttcgccggtgaaaagagaatgcctgaagacttagatgaaaacatggattaccgacttatgtgggaggtgcggggatccaaaggagaagtcctgtacatcctggacgctactaacccaagacattcaaactggctgcggtttgtgcacgaagctccttctcaggaacagaaaaacttggccgcaatccaggagggggaaaacatcttttatctagccgtggaggacatagagactgataccgagctactcattggatatctggactcagacatggaagcagaggaggaggagcaacagatcatgacagtcattaaagagggcgaggttgagaacagccggcgacagtctacagcaggccgaaaagacaggcttggatgcaaagaggattacgcttgtccacagtgcgagtcttctttcaccagcgaagacatcctggccgaacacctgcaaaccctccaccagaaacccacggaagagaaggagttcaagtgcaaaaactgtggcaaaaaattccctgttaagcaggccttacagcgccacgtgctgcaatgcaccgcaaaaagttcactgaaggaaagctcaagaagctttcagtgttccgtctgcaactcttccttctcctcggctagttctttcgagcagcatcaagaaacatgtaggggggatgcccgcttcgtatgtaaagctgattcctgcgggaaacgacttaagagcaaggacgccctcaagcgtcaccaagaaaatgtgcacacaggagaccccaaaaagaaattaatctgcagcgtgtgtaacaaaaagtgtagtagtgcgtcttccctccaagagcaccgaaagattcacgagatattcgattgtcaggagtgtatgaagaaatttatctcggccaatcaactgaaaaggcacatgattactcacagtgaaaaaaggccttacaattgcgaaatctgtaataagtccttcaaacgactcgaccaggtgggagctcataaggtgatccactcggaagacaagccatataagtgcaaactctgcggaaagggttttgcacaccgtaatgtctataagaatcacaaaaaaacacatagcgaagagcgtcccttccagtgtgaggaatgtaaggccctcttccgaacaccgttctccctgcaacgtcatctgctcatccacaactccgaaagaacatttaaatgtcaccattgcgacgcgacctttaaacgtaaggacacacttaatgtccacgtgcaggtagtgcacgaacgccacaaaaagtacagatgcgaactgtgtaacaaagcttttgtaacaccaagcgtgctgcgcagccacaaaaaaacccataccggcgagaaggagaagatttgtccatattgcggtcagaaattcgcgtcctcaggcaccctgcgcgtccacattcgaagccatacaggtgagcgcccctaccagtgcccgtactgcgaaaagggcttttccaagaatgacgggctcaaaatgcatataagaactcacacccgcgaaaagccgtacaagtgcagtgagtgcagcaaagctttcagtcagaagcgaggtttggacgaacacaagcggacccacacaggagagaagcccttccaatgtgatgtatgcgaccttgcattctctctgaagaaaatgctcattcgccacaagatgactcacaaccctaacaggccccttgccgagtgccagttctgtcacaagaagtttaccaggaatgactatctcaaggtgcacatggacaatattcacggagtcgccgattcttag

SEQ ID NO: 200464 - DNA, 336 bp, synthetic construct
  misc_feature 1..336: note = Description of Artificial Sequence: Synthetic coding sequence
  source 1..336: mol_type = other DNA
atgctgggcatgtacgtgcccgaccggttcagcctgaagagcagccgggtacaggacgggatgggcctatacacagctcgaagagtgcggaagggagagaaattcggtcccttcgctggcgaaaaaaggatgccagaggacctggacgagaacatggactatcgactgatgtgggaagtgaggggtagtaagggcgaagtcctgtacattcttgatgccactaatccgcgacatagcaattggctcagattcgtgcacgaagcgcctagccaggagcaaaagaatctggcagccattcaggacaaaaacctggggcctgctgaatggagagggtag

SEQ ID NO: 200465 - DNA, 1800 bp, synthetic construct
  misc_feature 1..1800: note = Description of Artificial Sequence: Synthetic coding sequence
  source 1..1800: mol_type = other DNA
atgctgggcatgtacgtgcccgaccggttcagcctgaagagcagccgggtccaggatggcatgggtttgtacactgcccgacgggtgaggaaaggggaaaagtttggcccgttcgccggagaaaaaagaatgccagaggacctggatgagaatatggactaccggctcatgtgggaggtaagggggtctaagggagaggtactctacatattggacgccaccaacccccgacattctaattggctgcggttcgtgcacgaggccccatcccaggagcagaagaatttggccgccattcaggagggtgagaatatattctatctcgcagttgaagacatcgagacagatacagaactcctcatcggctacctcgatagcgatatggaagcggaggaggaggagcagcagatcatgacagtcatcaaggagggggaggttgagaacagtcgtcgccaatcgaccgcaggtagaaaggataggctggggtgcaaagaagattacgcttgtccgcaatgcgaaagttcctttacttcagaagatatcctggccgaacacctgcagacattgcatcaaaagccgacagaagagaaggagttcaagtgcaagaactgcggaaagaagttcccagtgaaacaggctctgcaaagacacttcgaacagcaccaggagacctgcaggggagatgccagattcgtttgtaaagccgattcttgtggaaaacgcctgaagtccaaggacgctcttaaacggcatcaggagaacgtgcacaccggtgatcctaagaaaaagctgatctgtagcgtctgtaacaaaaagtgcagctccgcgagttcattgcaggaacaccgcaaaattcacgagatctttgattgtcaagagtgtatgaaaaagtttatttccgctaatcagttgaaaagacacatgattacacacagcgaaaagagaccgtataactgtgaaatctgcaataaatccttcaaacggctggaccaggtaggcgctcataaggtgatacacagcgaagacaagccttacaagtgcaagctctgcggcaagggcttcgcacatcggaatgtgtacaaaaaccataagaaaacacacagcgaggagcgccctttccaatgcgaagaatgcaaggccctcttccgtaccccattcagtcttcaacggcacctgctgattcataactctgaaaggacatttaaatgccatcactgcgatgccacatttaagcggaaggataccctcaatgtgcacgtgcaagttgtgcacgaaagacacaagaaatatcgatgcgagctgtgcaacaaagcgtttgtgactccatctgttctgagatcccacaaaaagacccacaccggcgaaaaggaaaaaatctgtccatactgcggacagaaattcgcttccagcgggactctgcgggttcacatacggtcccacacaggtgagaggccatatcagtgcccttattgcgagaagggtttctccaagaacgacgggctgaaaatgcacatacggactcacacacgggagaagccctacaagtgttccgaatgctctaaagccttctcccaaaagcgaggcttagatgagcataagcggacccacacaggagaaaaaccattccagtgtgatgtttgcgacctggccttctcactcaagaagatgcttattaggcataagatgacccataacccaaatcgaccattagcagaatgtcagttctgtcacaagaaattcacccggaatgattatctcaaagtgcatatggataatattcacggggtggcggatagttag

SEQ ID NO: 200466 - DNA, 1506 bp, synthetic construct
  misc_feature 1..1506: note = Description of Artificial Sequence: Synthetic coding sequence
  source 1..1506: mol_type = other DNA
atgctgggcatgtacgtgcccgaccggttcagcctgaagagcagcagagtgcaggatggtatgggtttgtataccgcacggcgcgtccgaaagggcgagaagtttggcccgtttgccggcgagaaaaggatgcctgaggacctagatgagaacatggactacaggttgatgtgggaggtccgggggagcaaaggagaggtgctgtacattctggacgccactaacccccgccacagtaactggcttcggttcgtgcatgaggctccttcccaggaacagaagaatctcgccgcaatccaggagggggaaaacatattttatctggccgttgaagatattgaaacagacaccgaactcttaatcggttacctggactccgatatggaggctgaagaggaagagcagcaaatcatgaccgttattaaggaaggcgaggttgagaatagtcgtcggcagtctactgcaggcagaaaggataggctgggctgcaaggaagactacgcttgcccccaatgtgaatcttcgttcactagtgaggatattctggctgaacacttgcagacgctgcaccagaagcccacggaggagaaggaatttaagtgcaaaaactgtggaaaaaagttccctgtgaagcaggcccttcagagacactttgagcagcatcaggagacttgccgaggagatgctaggtttgtctgcaaagcagactcttgtggcaagcggcttaagtctaaggatgctcttaaaaggcaccaggagaatgtccacactggtgacccaaagaaaaagcttatatgttccgtgtgtaataagaagtgttcatctgcttcttcattacaggagcaccggaagatccatgagatttttgactgccaggagtgtatgaagaagtttatatcagccaatcagctaaaacggcacatgataacgcacagtgaaaagaggccatacaattgcgagatctgtaacaaaagtttcaagcgtctggaccaagtcggcgcccacaaggttatccattctgaagataagccttacaaatgtaaattatgtggcaaggggtttgcacacaggaatgtgtataaaaatcataaaaagacgcatagcgaggagagaccatttcagtgtgaggagtgtaaagctctttttcgaacccccttctcacttcaaagacacctgctgattcacaattctgagcgcactttcaaatgccaccattgcgacgctacttttaaaaggaaggatacactcaacgtgcacgtgcaggtcgtccatgaaagacataaaaagtaccggtgtgaattatgtaataaggctttcgttacgcccagcgtgctgagatcccacaagaaaacccacacaggcgaaaaagagaagatctgtccttattgtggccagaagttcgcctcatccggcactctccgcgtccacatcagatctcacacaggggaggctgtgcaggttctacgggtccaacagggtctgcaacccgaggccaggccaggctag

SEQ ID NO: 200467 - DNA, 1227 bp, synthetic construct
  misc_feature 1..1227: note = Description of Artificial Sequence: Synthetic coding sequence
  source 1..1227: mol_type = other DNA
atgtgccagaacttcttcatcgacagctgcgccgcccacggcccccccacgtttgtgaaggacagcgcagtggataagggccacccaaataggagcgctttaagcctgccacctgggctaaggatcggaccaagcggaattccacaggcagggctcggcgtttggaacgaggcaagtgacctccctttagggctgcatttcgggccctatgagggccgcataacagaggatgaggaagccgcgaataatggctattcttggctaataacaaagggccggaactgctatgagtacgtcgacggcaaggacaaatcgtgggcaaactggatgaggtacgtcaattgcgctcgggatgatgaggagcaaaatctggtggcatttcaatatcaccgccagatcttttacagaacctgcagagtgattcgccccggatgcgagctcctggtgtggtacggcgatgagtatggacaggagctgggtataaaatggggttctaaatggaagaaggagttgatggcaggacgtgaacccaagccggaaatacacccctgtcccagctgctgtctggcattttctagccaaaagtttctgagccagcacgttgagcgcaatcatagcagccagaactttccaggaccttccgcgcgcaaacttctgcagccagaaaacccctgccccggcgatcagaaccaggagcaacagtacccggacccccactcccgcaatgataagaccaaagggcaggaaatcaaggagcggagtaagctactcaacaagcgaacatggcagcgggagatttctcgcgcattctcatcccctccgaaaggccaaatggggtcatgccgggtcggaaagcgtattatggaggaagaaagtagaacaggtcaaaaagttaaccctggaaacacggggaagttattcgttggggtgggcatcagtcgaatagccaaagttaaatatggtgaatgtggccaaggcttctccgtgaagagcgatgttatcacacatcagcgcactcacactggcgagaaaccctacgtctgtcgagaatgtgggaggggattttcctggcagtccgttttgctaacacaccaaaggacacatactggtgagaagccttacgtgtgcagggagtgtggacgaggcttttctaggcagtcagttctcctcacacatcagagaactcatacgggtgagaaaccgtacgtctgccgtgaggacgagtag

SEQ ID NO: 200468 - DNA, 2685 bp, synthetic construct
  misc_feature 1..2685: note = Description of Artificial Sequence: Synthetic coding sequence
  source 1..2685: mol_type = other DNA
atgagccccgagaagagccaggaggagagccccgaggaggacaccgagagaaccgagcgcaagcccatggtgaaagatgccttcaaagacataagcatttacttcacaaaggaagagtgggccgagatgggtgattgggaaaaaacacgatatcgcaacgtcaagagaaactacaacgctctgatcacaatcgggctgagggccacgcgacccgccttcatgtgccatcgccgccaagctattaaactccaggtggacgataccgaggattccgatgaggagtggacgcctcggcagcaggtcaagcccccctggatggccctccgggtggaacagcgcaaacaccagaaaggaatgcctaaagctagcttctccaacgaatcttcactaaaagagttgagcaggactgctaacttactgaacgcgagcggcagcgaacaggctcagaaacccgtgtcacccagcggcgaggcaagcacttcagggcagcacagccggttgaaactggagctgcggaaaaaggagacggagaggaagatgtattcccttcgggagagaaagggccatgcgtacaaagaggtctccgagccacaggacgatgactatctgtactgtgagatgtgtcaaaatttttttatcgactcctgcgctgctcatgggccacctacctttgtgaaggattccgctgttgataaaggacacccaaatcgctctgcgctatccctgccccctggtctgcgtatcggcccgagtggaattcctcaagctggactcggggtgtggaatgaggcatccgaccttcctctgggcctgcacttcggaccatacgaaggtagaataactgaggacgaggaggccgcaaataacggctactcatggctcatcaccaagggacggaattgttacgaatatgtagacggcaaggataaatcctgggctaattggatgcggtacgtaaactgcgcacgagacgacgaggagcagaacctggttgcgtttcaataccaccggcaaatcttttaccgcacgtgccgggtcatccgaccaggatgtgaactcctggtctggtacggcgacgaatacggccaggaattaggtatcaagtgggggagcaagtggaaaaaagaattgatggccggccgtgaacccaaacctgaaattcacccttgtccttcatgctgtctcgcattctcttcccagaagtttctgtcccaacatgtagagcggaaccattcctcacagaactttccagggccatcggcacggaagctgcttcagccagaaaatccgtgccctggtgatcaaaaccaagaacagcagtatcctgatccgcattctaggaatgataagaccaaggggcaggaaatcaaagagcgttcaaagctactgaacaagaggacctggcaacgtgaaatctccagagcattcagctcgccaccaaagggtcagatggggtcttgccgggtggggaaaagaatcatggaggaggagtcacgaacaggccagaaagtgaatcccgggaacacgggaaaactgtttgttggcgtcgggattagtcgcattgccaaagtcaaatatggggaatgtgggcaggggttcagcgtaaaatccgatgtgatcacccatcagcggactcacacaggagaaaagctgtatgtctgtcgcgagtgtgggagaggcttctcttggaagtctcacctgctcatacatcaaaggattcacaccggcgagaagccttatgtgtgtcgcgagtgcggtagaggattctcttggcagagcgtcctattgacccaccagaggactcacacaggggagaaaccatacgtgtgccgcgaatgtggcaggggattctcgcgacaatctgtgttgctcacccatcaacggcggcacactggcgagaaaccatacgtgtgcagagagtgcggacgcggtttttctcggcaatccgtgctgttgacacaccagcgcaggcacaccggagagaagccttacgtatgtagagagtgcggaagaggttttagctggcagagcgttctcctgactcaccagcggacccacactggtgaaaaaccatacgtgtgcagggagtgtggcagaggattcagctggcagtcagtgttactgacccatcagaggacgcacaccggcgagaagccttacgtgtgtagagaatgtggccgcggcttcagtaataagtcccatctgctgagacaccagaggacacatacaggagaaaaaccatatgtgtgtagggagtgcggtagagggttcagagacaaaagccatctgcttagacatcaaaggacccacaccggagagaaaccctatgtgtgccgcgaatgcggcaggggatttcgagacaagtctaacctcctgtcacatcaacgcacccacaccggcgaaaagccgtacgtgtgccgtgaatgcggaagaggcttcagtaataagtcacacctactgagacaccagaggacacatactggcgagaagccttatgtatgtcgcgaatgcgggcgagggttccgcaacaagagccaccttctgagacatcagcgtacacacaccggggagaaaccgtacgtatgtcgggagtgcggaaggggtttttctgatcggagctccctgtgttaccaccagagaacacacaccggagaaaaaccatacgtctgccgcgaagacgagtag

SEQ ID NO: 200469 - DNA, 303 bp, synthetic construct
  misc_feature 1..303: note = Description of Artificial Sequence: Synthetic coding sequence
  source 1..303: mol_type = other DNA
atgagccccgagaagagccaggaggagagccccgaggaggacaccgagcgcactgagcggaagccaatggttaaggacgctttcaaggatatctcgatttattttacaaaggaggagtgggccgaaatgggagactgggagaaaacccgctatcgcaacgtgaaaaggaactacaacgccctgattactatcggtctgagagctacacgcccggctttcatgtgccacagaaggcaggcgattaagctccaggttgatgatactgaagactccgacgaagaatggacaccccgccagcagtag

SEQ ID NO: 200470 - DNA, 537 bp, synthetic construct
  misc_feature 1..537: note = Description of Artificial Sequence: Synthetic coding sequence
  source 1..537: mol_type = other DNA
atgagcgaggtgcggctgccccccctgcgggccctggacgacttcgtcctgggatcagcccgccttgcagcccccgatccctgcgatccccagaggtggtgtcatcgagtgatcaataatctgctatattaccagaccaactaccttttgtgttttggtatcgggttagctctagcaggatatgtgaggcctctgcacactctcctgagtgcactggttgtcgcagtcgcgctgggggtgttggtctgggccgccgagactcgggcggctgtccgccgttgcaggcgttcccatcccgccgcctgtttggcggcagtactggctgtcgggctgctcgttctgtgggttgctggtggtgcctgtacattcctgtttagtatagctggacctgttttgctgattctggtacacgcgagccttcggcttcgcaatctgaagaacaaaattgaaaacaagatagagtccatcggtctgaaacgaacccctatggggctgctgcttgaggccttaggccaggaacaagaggcagggtcttag

SEQ ID NO: 200471 - DNA, 846 bp, synthetic construct
  misc_feature 1..846: note = Description of Artificial Sequence: Synthetic coding sequence
  source 1..846: mol_type = other DNA
atggccggcacctggctgctgctgctgctggccctgggctgccccgccctgcctactggggtgggcggcacccctttcccttccctggctccaccgattatgcttcttgttgacggaaagcagcagatggtggttgtgtgcctcgtcctggacgtcgctcctcccggcctggacagtcctatctggttcagtgccggcaatggtagcgccctggatgcctttacctatgggccctcaccggcaactgacgggacttggactaatctggctcatttatcattgcccagtgaggagctcgcgtcttgggagccactcgtgtgtcataccggaccgggcgccgaagggcacagtcgtagtacacagcctatgcacctttccggggaggcaagtaccgcacgcacgtgtcctcaggaaccactccgaggaaccccagggggcgcactttggctaggggtactgcgcctgctgctgtttaagctgcttctgttcgacctattgctgacttgctcctgtttgtgcgatcccgctggccccctgccctcccctgcaaccacgacccggctcagggcgctggggagccaccgcctgcatccagctactgagaccggcggcagagaagccacttcttccccacggccccagcctagggataggcggtggggcgatacgccaccaggccggaaaccaggcagcccggtttggggcgaagggtcatacctgagtagttaccccacatgtccagcacaggcctggtgctccaggtctgccctgcgggctccctccagcagcctgggggctttcttcgcaggcgacttacccccccctctgcaggctggcgcggcgtag

SEQ ID NO: 200472 - DNA, 384 bp, synthetic construct
  misc_feature 1..384: note = Description of Artificial Sequence: Synthetic coding sequence
  source 1..384: mol_type = other DNA
atggccgccaccagccccggcccctgggtgagcagccccacccacaggtcatgcttcttgccgttcctgactcggggttgtcacaaccgggtctgggctgcccatcctttcctcctgtggcctcaccaaagctgttgctggtggatggagtcttctaggtggtggtggtcagcgtggtctctgatgcttcaccctttggctcttactgcgcccggaaggaagccgggcagcccagtctggggcgaagggtcatacctgtctagctacccaacatgcccggctcaggcgtggtgttcaagatccgcactgagggcaccctcttcatctttgggggcgtttttcgccggcgacctgccacctccacttcaggcaggcgctgcatag

SEQ ID NO: 200473 - DNA, 771 bp, synthetic construct
  misc_feature 1..771: note = Description of Artificial Sequence: Synthetic coding sequence
  source 1..771: mol_type = other DNA
atggccggcacctggctgctgctgctgctggccctgggctgccccgcactccctacgggccccgtctccttcccaagctcccctgaggcagctactaccggtcctatctggttcagcgctggaaacgggagcgctctcgatgccttcacatacgggccatctcccgccaccgacgggacctggacaaacttggcgcatctgagtttaccctccgaagaactggcttcctgggagcccctggtctgccatacaggcccaggagcagaaggccactcccgaagcactcagcccatgcacctatccggtgaggctagcacggctagaacttgcccccaggagcccctaagaggcaccccaggaggagcactctggctgggcgttctgcggctgctgctatttaagctactgctttttgacctgctgctgacttgttcttgcctgtgcgacccagctggtccactgccaagccccgccaccacaaccagactgagagctctcggctctcaccggctccaccccgccaccgaaaccggcggtcgggaagccacttcctccccccgcccccagccgagggatcgcagatggggagataccccccccggccgcaagccagggtccccagtctggggtgaaggctcctatctaagttcttatcctacgtgcccggctcaggcatggtgtagccggtctgctctgcgagcacccagctcctctctgggggccttcttcgctggcgacctccctccaccccttcaagcaggagccgcttag

SEQ ID NO: 200474 - DNA, 525 bp, synthetic construct
  misc_feature 1..525: note = Description of Artificial Sequence: Synthetic coding sequence
  source 1..525: mol_type = other DNA
atggccggcacctggctgctgctgctgctggccctgggctgccccgctttgccaaccggcgaggccagcacagcacgcacgtgcccccaggagccattgcggggcacgccagggggagctctgtggctcggcgttcttaggctccttctgttcaaattgctgctctttgacctgttgcttacatgtagttgcctgtgtgatcctgccgggcccctcccatcaccagcaacaactacacgcctgcgcgctctaggttcacataggttgcacccagctactgagaccggtggacgggaggctacatcgagtccccgtccccaacccagggatcgtagatggggagacaccccaccaggccgcaagccgggaagccctgtgtggggtgaagggagttatctgagttcatatccaacatgtccagcacaggcttggtgctccagatccgcgctgcgagcaccatcctcaagcctgggagccttcttcgctggcgatttgcccccccccttacaagccggagctgcctag

SEQ ID NO: 200475 - DNA, 438 bp, synthetic construct
  misc_feature 1..438: note = Description of Artificial Sequence: Synthetic coding sequence
  source 1..438: mol_type = other DNA
atgagctgggcccccgtgctgctgatgctgttcgtgtactgcaccggatgtgggccacagccagtcctgcatcagcctcctgcaatgagttctgcactcggaacaacaatcaggctcacgtgtaccctgcgtaacgaccatgacattggtgtgtattccgtatactggtatcagcaaagacctggacacccaccccgatttctgcttcgctatttctcacagtccgacaaatctcaaggtccccaggtgccccctcggttttccggctcgaaagacgtggcacggaaccgtggctaccttagcatttcagagctgcagcctgaggacgaagcaatgtattattgcgcgatgggtgccagatcctcggaaaaggaggaacgcgaaagggagtgggaagaggagatggaacctaccgcggctagaacccgagtcccatag

SEQ ID NO: 200476 - DNA, 372 bp, synthetic construct
  misc_feature 1..372: note = Description of Artificial Sequence: Synthetic coding sequence
  source 1..372: mol_type = other DNA
atggcctgccggtgcctgagcttcctgctgatgggcaccttcctgagcgtgtcacaaacggtattagcccagctggacgcgctactggttttccccgggcaggtggcccagctgagttgtaccctgtccccccagcatgtgacgatacgggactatggggtgagctggtaccagcaacgggctggtagcgctccaagatatctcctttactaccgctccgaggaagaccaccaccggccagccgacatcccagatcgcttttcagctgctaaggacgaagcccacaacgcttgtgtgctgacaatctctccagtgcagccagaggacgatgccgactactattgctcagtcggttatggatttagtccttag

SEQ ID NO: 200477 - DNA, 513 bp, synthetic construct
  misc_feature 1..513: note = Description of Artificial Sequence: Synthetic coding sequence
  source 1..513: mol_type = other DNA
atggacgagcagccccggctgatgcacagccacgccggcgtgggcatggccggacaccctggcctcagccagcacctccaggacggcgccggaggtaccgagggcgagggtggccggaagcaggatataggcgacatactgcagcagattatgactataactgaccagagcctcgatgaggcccaggcacgcaagcatgccctgaattgtcatcggatgaagcccgctctcttcaacgtcttatgcgagatcaaggagaaaactgttttatctatcaggggtgcacaagaagaggagccaaccgatccacaactcatgcggctggataatatgctgctggcagaaggtgtagctggcccagagaaaggcgggggcagtgcagccgccgctgcggccgccgcagcctcagggggggcagggagtgataactccgtagagcattcggactatcgagctaagctctcccaaattcggcagatttaccatacggaattagaaaagtatgagcagtag

SEQ ID NO: 200478 - DNA, 1044 bp, synthetic construct
  misc_feature 1..1044: note = Description of Artificial Sequence: Synthetic coding sequence
  source 1..1044: mol_type = other DNA
atggacgagcagccccggctgatgcacagccacgccggcgtgggcatggctggtcatcctgggctgtctcagcacctgcaggatggcgccggaggaacagaaggcgaaggaggtcggaaacaggatatcggtgacattttgcagcagatcatgacaatcacggaccaaagtctggacgaagcccaggcacgcaaacatgcactcaattgccaccggatgaaaccagccctgttcaatgttctgtgtgaaatcaaagaaaagaccgtgctatctattcgtggggcccaggaggaagagcctaccgatcctcagctgatgagactggacaacatgttactggccgaaggagtcgccgggcccgagaaggggggagggtcagcagctgccgccgcagccgctgccgccagcggaggagcgggatcggataactcagtggagcattccgattacagggctaagctatctcaaattcggcagatctaccacacagagctggaaaaatacgagcaggcttgtaacgaatttaccacccacgttatgaacctgctcagggaacaatcacgtacccgacccatttctcctaaggaaatcgagagaatggtgagtatcatccaccggaagttcagctccatccagatgcagctaaaacaaagtacttgcgaagcggttatgatcctgcgatcccggtttcttgatgcacggcgcaaaagacggaatttcaataagcaggctaccgaaatactcaacgagtacttttattctcacctttcaaatccctatcctagtgaggaagccaaggaagagctagccaagaaatgtgggatcaccgtcagccaggttagcaactggttcggcaacaagaggataaggtacaagaagaatatcggaaaattccaagaggaagcaaatatatacgccgcaaagactgcagtgacagctacaaatgtctccgcccatggaagccaggccaacagtccttctaccccgaactccgcaggagggtatccatctccatgttaccagccggataggcgcattcaatag

SEQ ID NO: 200479 - DNA, 1044 bp, synthetic construct
  misc_feature 1..1044: note = Description of Artificial Sequence: Synthetic coding sequence
  source 1..1044: mol_type = other DNA
atggacgagcagccccggctgatgcacagccacgccggcgtgggcatggccggacaccctgggctctcccaacatcttcaggatggcgccggtggaacagagggggagggtggaaggaaacaggacattggtgatattctgcagcaaatcatgacaatcacggatcagtccctggacgaagcacaggccagaaaacacgcacttaactgtcaccggatgaaacctgcactgtttaacgtgctgtgtgaaataaaggaaaaaaccgtacttagcatccggggcgcgcaagaggaggaaccgacagacccacagttaatgaggctagacaacatgcttctggccgagggcgtggcaggacccgaaaaaggcgggggctccgccgccgccgctgcagccgcagccgcctctggaggcgcgggcagtgacaattcagtggaacactcagattaccgtgccaagttgtcccagatacgccagatctaccatactgaactggagaaatacgagcaggcgtgcaatgaattcacaacacacgttatgaatttgctacgggaacagtctcggacgagacctattagccccaaagaaatcgagcgaatggtgtccatcatacacagaaagttctccagtattcaaatgcagctgaagcagtccacctgtgaggccgtcatgatccttcgctcaaggtttttggacgcaagacgaaagcgcaggaacttcaataagcaagcgacagagatattgaatgagtatttctattcccacctgagcaacccctacccatctgaagaggccaaggaagagctggcaaaaaagtgtggcattaccgttagccaggtctctaactggtttggaaacaaaaggatccgctataagaagaacatagggaaatttcaggaggaagccaatatctacgctgctaagaccgccgtgaccgcaacaaacgtctctgcacacggctctcaggctaacagtccatccacccccaactcggctggtggatacccctctccctgttaccagccggatcgccggattcagtag

SEQ ID NO: 200480 - DNA, 1293 bp, synthetic construct
  misc_feature 1..1293: note = Description of Artificial Sequence: Synthetic coding sequence
  source 1..1293: mol_type = other DNA
atggacgagcagccccggctgatgcacagccacgccggcgtgggcatggcgggtcacccgggcctgtcccagcatctccaagacggagccggcggcaccgagggcgagggcggaaggaagcaggatatcggcgatatcctccagcagataatgactataaccgaccagagtctcgacgaggctcaggctcgaaagcatgcgttaaactgtcatcggatgaaacctgcattatttaatgtactgtgtgaaatcaaggagaaaaccgtgctttccattcggggggctcaagaggaggaaccaacagatccacagctgatgaggttagataacatgctgttggccgaaggcgtcgcgggaccggagaaaggaggaggatccgccgccgctgcggctgcagccgctgcaagcggtggcgcgggaagcgataactccgtcgaacacagtgattaccgagccaagctgtcacagatcaggcagatctatcataccgaactcgagaagtacgaacaagcctgtaatgaattcacaacgcacgttatgaatctcctccgtgagcagtcgcggacccgacccatatccccaaaggagatcgaaagaatggtttcaataattcatcgcaagttttcctcaattcagatgcagctgaagcagtccacctgtgaggccgtcatgattctacggtctaggtttttggatgcccgccgcaaaaggcggaacttcaacaagcaggccacagagatcctgaacgaatacttttactctcacctgtctaacccctatcctagtgaagaggcgaaggaagagcttgcaaagaaatgtggtatcacagtgagtcaggtcagtaactggttcggcaacaaaagaattcgatacaaaaaaaacatcggcaagttccaagaggaggccaatatttacgctgccaaaacagccgtcactgcaactaatgtgagcgcacacggttcgcaggccaactctccctctactcctaattcagcgggtagctcttcatcatttaatatgtccaattccggagacctgtttatgtcggtgcagtcccttaatggagacagctaccagggcgctcaggtgggagccaacgttcagtctcaagttgatactctgcggcacgtaatttctcagacgggcgggtattctgacggccttgccgccagccaaatgtattcgccccaggggatttccgcgaacggaggctggcaggatgctacgactccctcttccgtcactagcccaaccgaggggcccggatctgttcattctgacacatccaattag

SEQ ID NO: 200481 - DNA, 978 bp, synthetic construct
  misc_feature 1..978: note = Description of Artificial Sequence: Synthetic coding sequence
  source 1..978: mol_type = other DNA
atgcggctggacaacatgctgctggccgagggcgtggccggccccgagaaaggcggagggtctgccgccgccgctgcagcagcagccgccagtggaggagctggttcggacaatagcgtggagcattcggattacagggccaaactgtctcaaattcgacaaatttaccataccgaacttgaaaagtatgagcaggcatgtaatgaattcaccacacacgtgatgaacttgctacgcgagcagtcaaggaccagacctatatctcctaaagaaattgagcggatggtgtcaatcatacaccgtaagttctcaagcatccaaatgcagctcaagcagtcaacgtgcgaggctgttatgatcttgcgatcacggttcttggacgcccggcgcaaacgcaggaattttaataagcaagctactgagatcctgaacgagtacttctactcccacctgtctaatccatacccctccgaagaagctaaagaggaactggccaaaaagtgtggaattaccgtgtctcaggtgtctaattggtttggcaataagcggatccgctataagaagaatattggcaagttccaggaggaagccaacatatatgcggcaaaaactgcagtcactgccacaaacgtctcagctcacgggagccaggcaaactctcctagcacgcctaattctgccgggtcgtcatcttcttttaatatgtccaatagcggggatttgttcatgagcgtgcagtctctaaacggagacagttaccaaggggctcaggtgggcgccaatgtccagagccaagtagacacgcttagacatgttatctcccagactggcggatacagcgacgggctggcagctagccagatgtattcgcctcagggtatttctgcgaatggaggatggcaggatgctactacaccatcttcagtaactagccccaccgaaggtcctggctcggtgcacagcgacacttcaaattag

SEQ ID NO: 200482 - DNA, 1113 bp, synthetic construct
  misc_feature 1..1113: note = Description of Artificial Sequence: Synthetic coding sequence
  source 1..1113: mol_type = other DNA
atgctgctggtgttcttcgtgctgtggacctgcagcctggccctgctggccagcagccaaagccccccgccaccatgtgctagcgtgcttagtatacggggtgctcaggaagaggagcccaccgacccccaattaatgcgcttggacaacatgctgctggctgagggagtggccggaccagaaaagggtggggggtctgccgccgccgcggcagccgctgccgcgtcaggcggagccgggagcgataacagcgtggaacactcagactaccgggcaaagctctcacagattcgacagatttatcatacagagctggagaaatatgagcaagcttgcaacgagtttactactcacgttatgaacctgctgagggaacagagcaggaccaggccaatttcaccgaaggaaatcgagaggatggtgagtattattcatcgcaagttttcttccatacaaatgcagctgaagcagtcgacttgcgaagccgtaatgattcttcggtctcgatttttggacgcgaggaggaaacggcgcaatttcaacaagcaggctacagagattttgaacgagtacttttattcccacttatccaatccgtatccatctgaggaggcaaaagaggagttggcaaagaagtgcggcattacagtctcccaagtgagcaactggtttgggaacaagcgtattcgatataaaaagaatatagggaaattccaggaagaggccaacatctatgcggcgaagactgcagtcacagctaccaacgtttcggcacatggcagccaggctaacagcccttctacaccaaacagtgccgggagctccagttcgttcaacatgtccaactcgggggatctgtttatgtccgtacagtctctgaacggggactcctaccagggcgcccaggtcggagctaatgttcagagccaggtcgacacgctacgccacgtcatatcccaaactggaggctattctgatggactcgccgccagccagatgtactcgccccagggcataagtgcaaatgggggctggcaggacgcaactacacctagcagtgtgacatcacccaccgagggacccgggtctgtgcacagtgacacctctaactag

SEQ ID NO: 200483 - DNA, 1263 bp, synthetic construct
  misc_feature 1..1263: note = Description of Artificial Sequence: Synthetic coding sequence
  source 1..1263: mol_type = other DNA
atggacgagcagccccggctgatgcacagccacgccggcgtgggcatggcgggacacccgggcctgagtcagcatctgcaggatggggctggcgggaccgaaggggagggagggagaaagcaagatatcggggatattctccagcagataatgactattaccgatcagtccttggacgaagcccaagcaaggaaacacgcgctgaactgccaccgtatgaagcctgccctgttcaatgtcctctgcgaaatcaaagagaagaccgtcctgtccatcagaggcgcccaggaggaggagcccaccgacccgcagctgatgcggctggacaacatgcttcttgctgagggcgtcgccgggcctgagaagggcggggggtcagcagccgcggctgccgccgccgctgccagcggcggcgctggatctgacaactcagtcgagcattccgactacagggcgaagctctcacagattagacagatctaccatactgaactggaaaaatacgagcaggcttgtaacgagttcaccacacatgtcatgaacctactgagggagcagtcgcgaactcggcccattagtccaaaggagatcgaacgcatggtcagcatcattcacagaaagttcagctcgatccaaatgcagctaaaacaatccacttgcgaagccgtgatgattctgcgatctaggttcctcgacgccaggagaaaacgccgcaattttaacaagcaggcgactgaaatcctaaacgaatacttctactcacatctgagcaacccatacccttccgaagaggctaaagaggagctggcaaaaaagtgcggtattactgtcagtcaggtttcaaactggttcggaaataaacggattagatataagaagaatatcggcaagttccaggaggaggcaaacatctatgccgccaaaacggctgttacggcaaccaacgtgtctgctcacggaagccaggcaaacagcccttcaacccccaactctgctgggtcctccagcagttttaacatgagcaacagcggcgacctctttatgagcgtgcagtcactcaatggcgacagctaccagggcgcccaggttggcgccaatgtgcagtctcaggtggataccttacgacatgtgatttcacagacaggaggctacagcgatggcctggccgcttctcagatgtattctcctcaggggataagtcaccttccccgacatcctcgtcaggcccattaccattttagactccctacctggcacccatag

SEQ ID NO: 200484 - DNA, 906 bp, synthetic construct
  misc_feature 1..906: note = Description of Artificial Sequence: Synthetic coding sequence
  source 1..906: mol_type = other DNA
atgcggctggacaacatgctgctggccgagggcgtggccggccccgagaaggggggcggaagcgctgccgccgctgctgccgctgctgcgagtggcggggccggtagtgataattccgtggagcatagcgattacagagccaaattgtctcagatacgacagatctaccatacggagctggagaagtacgaacaggcctgcaacgaatttactacccatgtcatgaacctcctccgcgaacagtccagaacccggccgatcagccccaaagaaatcgagcggatggtatccatcatccacagaaagtttagctctattcagatgcagctgaagcaatcaacctgtgaggcggtgatgatactgcggagtcgattcctggatgctcggcggaagaggagaaatttcaataaacaagctacagagatcctgaacgagtacttctattcccatctctccaatccttatccgtccgaagaggccaaggaggagcttgccaagaaatgtggcatcaccgtcagccaagtctcaaactggtttggcaacaaacggattcgctataagaagaatataggtaagtttcaggaggaggcaaacatctatgccgcaaagactgcagtgactgctaccaacgttagtgctcatggaagccaagccaacagcccctccactcctaatagtgcaggaagcagcagcagcttcaatatgagcaatagtggtgatctgtttatgtcggtccagagtctgaatggtgactcctatcagggggcccaggtgggggctaacgtgcagtctcaggtggacacattgcgacatgttatcagtcagaccggggggtattccgacgggctggcagcatctcagatgtatagcccgcagggcatttccgaaatcgcaagaacgtactag

SEQ ID NO: 200485 - DNA, 1020 bp, synthetic construct
  misc_feature 1..1020: note = Description of Artificial Sequence: Synthetic coding sequence
  source 1..1020: mol_type = other DNA
atggacgagcagccccggctgatgcacagccacgccggcgtgggcatggcgggccatccagggctttcccagcatcttcaggatggagccggaggcaccgaaggcgaggggggccgcaagcaggatatcggagatattctccaacagatcatgaccatcactgatcagtccctggacgaagctcaggctagaaagcatgcactgaactgtcatcggatgaagcctgctttattcaatgtgctatgcgagattaaggagaagactgttctgtccattcgtggggctcaagaagaggagccaactgacccgcagcttatgcggctggacaatatgctcttagcagagggagtggcggggcccgaaaaaggtggaggaagtgctgcggccgctgccgctgcagctgccagtggcggtgcaggatcagacaactcagtagagcattcagactacagagccaaactgtctcaaatccggcaaatctatcacaccgaactagagaagtacgagcaagcctgtaacgagttcactacccacgtgatgaacttgctgcgggagcagtctagaaccaggccaattagtcctaaagagatcgagcgcatggttagcatcatccacagaaaatttagctctatccagatgcaattaaagcagtccacctgcgaagccgtcatgattcttagatcgaggttccttgacgccaggagaaagaggcgaaattttaataagcaagcaacagaaatcctgaacgaatatttttacagccacctgtccaacccgtacccaagcgaggaggctaaggaggagctcgctaaaaaatgcggcatcaccgtcagtcaagtcgatacactgcggcacgtcatatcccaaacaggcggatattcggacggcttggctgcgtcccagatgtattcacctcaagggatctcagccaatggtggctggcaggatgccactacaccctcctctgtgacttccccaacagagggtccagggtcagtccacagcgatacctctaactag

SEQ ID NO: 200486 - DNA, 978 bp, synthetic construct
  misc_feature 1..978: note = Description of Artificial Sequence: Synthetic coding sequence
  source 1..978: mol_type = other DNA
atgcggctggacaacatgctgctggccgagggcgtggccggccccgaaaagggtggcggaagtgccgcagccgcggcagctgccgccgcctcgggtggcgcgggcagcgacaactcggtggagcattctgactatcgggccaagttgtcacagatacgccaaatttatcataccgagttggaaaaatacgaacaggcctgcaacgagttcacaacacatgttatgaaccttttgagagaacagagccggacacggcccatttcgccaaaggagatcgaacgaatggtgtcaattatccaccgcaagttttcttctatccagatgcagctgaaacagagtacatgtgaggccgtaatgatacttaggtcaaggttcctggacgcccgcaggaagcgcagaaatttcaataagcaggctacggagatactcaatgaatatttctactctcatctctcaaatccgtatccttccgaagaggccaaggaggaattagcaaagaagtgcggaatcaccgtgagtcaggtcagcaattggttcggcaacaaacgcatcaggtacaaaaagaacatcggcaagttccaggaggaggccaatatatacgcagctaaaacagctgtaacagctactaatgtatctgcgcacgggtcccaggccaacagtccttccaccccaaactctgctggcagcagcagttcattcaacatgtctaattcaggggacctgtttatgtcggtccagagcctgaatggggatagttaccaaggggcccaggtgggagcaaacgtccagtcccaggtagacaccctgcggcacgtcatttcgcagacagggggctacagcgacggactcgctgcttcccaaatgtactccccacaaggcatctctgctaatggggggtggcaggacgccactacaccttcaagcgttacctcaccaactgaggggcccggttcagtacattcagacacttcaaactag

SEQ ID NO: 200487 - DNA, 978 bp, synthetic construct
  misc_feature 1..978: note = Description of Artificial Sequence: Synthetic coding sequence
  source 1..978: mol_type = other DNA
atgcggctggacaacatgctgctggccgagggcgtggccggccccgagaaggggggagggtctgcagctgccgccgcagccgccgccgcttccgggggcgctggctccgacaacagcgtagagcattccgattatagggctaagcttagtcagatcaggcagatctaccatacagagcttgaaaagtacgaacaggcctgtaatgaattcactacacacgtgatgaatttgctcagggaacaatcaaggacccggcctatttctcctaaggagatagaaaggatggtgagtattattcaccggaagttttctagtatccagatgcaactcaagcaatccacctgtgaagcggtcatgatactcagatcccgcttccttgatgcacggcggaaacgcagaaactttaacaaacaagccactgaaattttaaatgaatacttctatagtcacttgtcgaacccttatcctagtgaggaagccaaagaggagcttgcgaagaagtgcgggattactgtctcgcaggtctccaactggtttggcaataaaagaatccgttataagaaaaatatcgggaaattccaagaggaggcaaacatttatgccgcgaagacagcagtgaccgccaccaatgttagcgcccacggttcccaagccaactccccttctacacctaacagtgcagggagttcatccagcttcaacatgagcaactctggtgatctgttcatgtcagtgcagtcgcttaatggcgacagctaccagggggcccaggtgggcgccaatgtgcagagccaggttgacacattgagacatgttatttcacaaactgggggctactccgatggactggccgcctctcaaatgtattcacctcagggaattagcgccaatggagggtggcaggacgccaccactcccagctcagtgacttctcctacggagggacccggaagtgtccacagcgacactagcaattag

SEQ ID NO: 200488 - DNA, 1293 bp, synthetic construct
  misc_feature 1..1293: note = Description of Artificial Sequence: Synthetic coding sequence
  source 1..1293: mol_type = other DNA
atggacgagcggctgctgggcccccccccccccggcggcggccggggagggctcggcttggtctccggggaaccaggtggcccaggtgaaccccccggcgggggtgatccaggagggggtagtgggggtgtcccaggaggacggggcaagcaagacatcggcgatattctccagcagattatgactatcaccgatcaaagcctcgatgaagcccaagcaaaaaagcatgccctgaactgccacaggatgaaacccgccctgttttccgtgctctgcgagataaaggagaagacaggactcagtatccggagcagtcaggaggaggagccagtggatcctcagcttatgcggctggacaatatgctgctggcggagggggttgcagggccagaaaaaggggggggtagtgccgctgcagcagccgccgccgccgccagcgggggcggagtgtcacccgataactccatcgagcatagcgactatcggagcaagcttgcgcaaatccgtcatatctaccactcagaactagaaaagtacgaacaagcctgtaatgagttcaccacacacgtcatgaatcttctgagggaacagagcagaacccggccagtagccccaaaggaaatggagcggatggtcagtatcattcataggaagttctctgccattcagatgcagctgaagcaatccacgtgtgaagccgtcatgatccttcgcagtcgctttttagatgctcgtaggaagcgcaggaacttctcaaaacaggctactgaagtcttgaatgagtacttttattctcacctatcgaacccgtatccatccgaggaagcgaaggaggaactagctaagaagtgcgggatcacagtgtctcaagtttctaactggttcggcaataaacgcattagatataaaaagaacatcggtaagtttcaggaagaggccaacatctacgcagtgaaaacagctgtgagcgtgacacagggcggacacagcagaacttcaagtcctaccccaccatcgtccgcgggcagtggaggctcctttaacttgtcgggcagcggagacatgttccttggtatgcccggccttaacggcgattcctacagcgccagccaggtcgaaagcctgcgccactctatggggcccggaggttacggcgacaacctaggtgggggccaaatgtactctccaagggaaatgcgcgccaatggatcatggcaggaggcagtgaccccgtccagtgttacctctccaaccgaggggcccggctcggtgcacagcgacaccagtaactag

SEQ ID NO: 200489 - DNA, 1293 bp, synthetic construct
  misc_feature 1..1293: note = Description of Artificial Sequence: Synthetic coding sequence
  source 1..1293: mol_type = other DNA
atggacgagcggctgctgggcccccccccccccggcggcggccggggtggtctcgggttggtatccggggaacccgggggcccaggcgagcctccaggcgggggagatcctggtggcggttcaggaggagtccctggaggccggggaaaacaagatatcggggacatactccagcagataatgaccatcactgaccaaagcctcgacgaggcgcaggccaaaaaacacgcactcaattgccatcggatgaaacctgcgctattctctgtactttgtgaaataaaggagaaaactggcctctctatccggtcgagccaggaggaggagccagttgatccacagttgatgcggctggataatatgctgctcgccgaaggagtggccggcccagagaaaggcggcgggagcgcagccgcagccgccgctgcagccgctagtggaggaggcgtgagccctgataattccatcgagcacagcgactatagatccaagctggcccagatccggcatatttatcatagtgagctcgagaaatacgagcaagcctgcaacgaatttactacccatgtgatgaatcttctgcgtgaacaatctaggacacgacctgtagcaccgaaggagatggagaggatggtgagcataatacatcggaagttcagcgccattcagatgcagttgaaacagagcacctgtgaggccgtaatgatccttaggtcccgattcctggatgcacggagaaagcggaggaacttcagcaaacaggccactgaggtcctgaatgaatatttctatagccatctgagcaatccctacccgtctgaggaggcaaaggaagaacttgccaagaagtgtgggattaccgtgtcccaggtgtccaattggttcggcaacaaaagaattcgctacaaaaagaatattggcaagttccaggaggaagcaaatatctatgctgtcaagacggcagtcagcgtcacacaaggcggacatagcagaacatcatcacccactccaccatctagtgcaggctctggcggaagctttaatttatcaggctcaggcgatatgtttttaggcatgcctggattgaacggagactcgtacagcgctagccaggtcgagtcattgaggcattcaatgggcccaggcggttacggcgacaatctcggaggaggacaaatgtattctcctcgagaaatgagagccaacgggtcatggcaggaagcggtgacacctagcagcgtcacaagcccgactgaggggcctgggtctgtacattccgatacaagtaattag

SEQ ID NO: 200490 - DNA, 1293 bp, synthetic construct
  misc_feature 1..1293: note = Description of Artificial Sequence: Synthetic coding sequence
  source 1..1293: mol_type = other DNA
atggacgagcggctgctgggcccccccccccccggcggcggccggggcggtctcggtctggtttccggcgagcctggtggtcctggtgagcctccgggcggtggagatcccggtggcgggagcggaggagtccccgggggacgcggtaagcaggacatcggcgacatcctgcaacaaatcatgacaataactgatcagtcacttgacgaagcacaagccaagaagcacgcactgaactgtcatagaatgaaaccagccctgttttcagttctgtgcgagattaaggaaaaaacaggcctctcaatcaggtcaagccaggaggaggagcccgtggacccacagctgatgaggctggataacatgctgcttgccgagggggtggccgggccagaaaagggcggaggctctgccgccgccgctgctgctgctgcggcctccggcggcggggtgtcccccgacaacagtatagagcactccgactataggtcgaagttagcacagatccggcatatttatcactcagaactggaaaagtatgagcaggcctgcaatgagtttaccacccacgtgatgaatctgttgcgtgagcagtcccgtacccgcccggtggcaccaaaagaaatggaaaggatggtgtccataattcataggaagttctctgccatccagatgcagctgaagcagtcgacctgtgaggcagtgatgatcctgcgctcgcgcttcctggatgccaggcggaaacggagaaatttttctaagcaagctacggaggtgctgaacgagtacttttatagtcacctttctaacccctatccctccgaagaagcgaaggaagagttggccaaaaagtgcggtataactgtcagccaagtgagtaattggttcgggaacaagcgcatccgttacaagaaaaacatcggaaagttccaagaagaggctaatatttatgcagtgaagactgccgtgagtgtaacacagggcggtcactctaggacctcctctcccaccccaccaagcagcgccggctcgggtggctcctttaacttgtccggaagcggcgacatgtttctgggaatgccaggactgaacggagattcctattcggcctcccaggtggaaagtttgcgccactctatgggacccggaggctacggcgacaacctggggggtggccagatgtatagccctagagaaatgcgagcaaatggcagctggcaggaggccgttactccgtcatcagtgacctcacccacagaaggtccgggctcagtacacagcgatacaagcaattag

SEQ ID NO: 200491 - DNA, 1293 bp, synthetic construct
  misc_feature 1..1293: note = Description of Artificial Sequence: Synthetic coding sequence
  source 1..1293: mol_type = other DNA
atggacgagcggctgctgggcccccccccccccggcggcggccggggcggcctggggcttgttagcggcgagccagggggacctggcgagcctcctggcgggggtgaccccggcggcggttccggtggcgtacccggtggaaggggaaagcaggatatcggcgacatcctgcagcaaattatgaccataaccgatcagtccctcgatgaggcccaggctaaaaaacacgccctaaattgccacaggatgaaacccgccctgttctcggtgctctgcgagattaaagaaaagaccggactcagcatcagatcctcacaggaggaggaacccgtggaccctcaacttatgagactagataatatgcttcttgccgagggggtcgcagggcccgaaaaaggcggagggtctgccgcggcggccgctgcagctgccgcttccggcggaggcgtatccccagataactccatagaacactcagactatcggtcgaaactcgcccagattaggcatatctatcattcagagttggagaagtatgaacaagcatgtaatgagttcactacacatgtaatgaacctgctgagggaacagagtcggactagaccagtggcgcctaaagagatggagaggatggtgtccattatccacagaaaatttagcgctatccaaatgcagctcaagcagtctacctgtgaagctgttatgatactaagaagccggttcctggatgcacgccgcaaacggaggaatttcagcaaacaggccaccgaagttttgaacgagtacttctactcacacctttcaaatccctacccttcagaggaagcaaaagaagaactcgcgaagaagtgcgggattacagtcagccaagtgagtaattggttcggtaataagaggatcagatacaagaaaaacatcggtaaattccaggaagaggccaatatatatgcggtaaagactgcagtgagcgtcacccagggcggacatagccgcacgagttctcctaccccaccctctagtgccggtagtggaggatcttttaatttgtcgggcagcggcgacatgttcctcggcatgcccggcctgaacggtgactcatatagcgcttctcaggtagagtcactccgtcattcaatggggcccgggggatatggggacaatctgggtggcggccagatgtattcaccccgggagatgcgggcaaatgggagttggcaggaggccgtcactcccagcagcgtcaccagccctaccgagggccccggctccgtgcatagtgatacctccaactag

SEQ ID NO: 200492 - DNA, 1293 bp, synthetic construct
  misc_feature 1..1293: note = Description of Artificial Sequence: Synthetic coding sequence
  source 1..1293: mol_type = other DNA
atggacgagcggctgctgggcccccccccccccggcggcggccggggcggtctgggtctcgtcagcggggaacccgggggacctggcgagcctcctgggggtggcgaccccggtgggggctccggcggcgtgccaggcggtcggggaaagcaggatatcggggatatactgcagcaaattatgaccatcacggatcaatccttagatgaagctcaagccaaaaagcacgctctcaattgccatcggatgaagcctgctctgttctctgtgctgtgtgagattaaggagaagactgggctgagcattcgcagttcacaggaggaagagccagtcgatccgcagttgatgagactagacaacatgctgttggctgaaggcgtcgcaggacccgagaaggggggagggagcgccgcagctgccgcagcagctgcggcctccgggggaggcgtctccccggataacagcattgaacatagcgattatagatccaaactggctcagataaggcacatctaccattcagaattggaaaaatacgaacaggcctgcaacgagtttactacacatgtgatgaatctcctgcgggagcagtcgagaacaaggcctgtcgcacctaaggagatggaacggatggtctcaatcattcatcggaagtttagtgcgatccaaatgcaactgaagcagtccacctgtgaagccgtaatgattctccgatcccggtttctcgatgctagaaggaaaagaaggaactttagcaaacaggcgacggaggtcttaaatgaatacttctattctcacctttcgaatccttacccgtccgaggaggccaaagaagagctggcaaagaagtgtggcatcaccgtgagccaggtgtccaattggtttggcaacaagcggattaggtacaagaaaaacattggaaagtttcaggaggaggcgaacatttatgctgtaaagactgcggtgtccgtgacccagggaggccattcacgaacgtcaagcccgactcctcctagctctgccggtagcggcggctccttcaacctcagtgggtctggagacatgtttctgggtatgcctgggctgaacggggactcatactcagctagccaggttgagtcgcttcgccattccatggggccaggaggctatggagataacctaggggggggtcagatgtattctccccgcgagatgcgggctaatgggtcatggcaggaggcagtcacaccctctagcgttactagcccaactgaaggacccgggtctgtgcacagtgatacctccaattag

SEQ ID NO: 200493 - DNA, 1293 bp, synthetic construct
  misc_feature 1..1293: note = Description of Artificial Sequence: Synthetic coding sequence
  source 1..1293: mol_type = other DNA
atggacgagcggctgctgggcccccccccccccggcggcggccggggggggcttggtttggtctctggagagcccggtggacccggagagccgcctggagggggggacccaggaggcgggagtggcggcgttccgggcggcagggggaaacaggacatcggcgatatcctacagcaaataatgacaatcacagatcagagcctggatgaagcccaagccaagaagcatgcgctgaactgtcacagaatgaaaccagccttattctctgtactctgcgaaatcaaggaaaagacagggctaagcatcaggtcttcacaggaggaggagccagtggatccccagctcatgcgcctggataatatgctcctggcagagggggtggccggacccgagaaaggtggaggaagcgcggccgccgctgccgctgctgcagcctccggcgggggcgttagcccagataacagtattgagcacagtgattaccgctcaaaactggcccagattagacatatttaccactccgagctggaaaaatacgagcaggcctgtaacgagtttactacacatgtcatgaatctcttgagagaacagagccgtacccggcccgtcgcccctaaagagatggaacgaatggtctctatcattcatagaaaattcagtgcaatacagatgcagctcaaacaatccacctgtgaggcagtgatgatactgcgaagcaggttcctcgacgctaggcgtaaaaggcgaaacttcagcaagcaggcaacagaagtcctgaatgagtacttctactctcatttgtctaacccatacccttctgaggaggccaaggaagaactcgccaaaaagtgtgggataacagtatcgcaggtcagtaattggttcgggaataagcggatccgatacaaaaaaaacatcggcaagttccaggaagaagccaatatttacgccgtcaaaacggcagtttccgtgacgcagggcgggcatagcaggacgtcttcaccaacccctccaagctctgcgggcagcggagggagcttcaatctgagcggttctggagacatgttcctcggtatgccaggccttaatggcgacagctattctgcatcccaggtggagtccctaagacacagcatgggtcccggaggttatggggataatttggggggcggccagatgtactcaccgcgcgagatgcgggcaaacggaagctggcaggaggcagtcaccccctccagcgtcacatctccaaccgaagggccgggttctgtgcactctgatacgtccaattag

SEQ ID NO: 200494 - DNA, 1293 bp, synthetic construct
  misc_feature 1..1293: note = Description of Artificial Sequence: Synthetic coding sequence
  source 1..1293: mol_type = other DNA
atggacgagcggctgctgggcccccccccccccggcggcggccggggcgggttaggactcgttagtggagagcctggcggccctggggagccgcctggaggtggtgacccaggcggcggatcagggggggtccctggggggagggggaagcaggatataggcgacatcctacagcaaattatgaccattacagaccagagcttggacgaggcgcaggccaagaaacacgctctgaactgccatcggatgaaacctgcacttttttctgtcctgtgcgaaataaaagagaaaaccggcctctcgatccggtctagtcaggaagaggaaccagtcgatcctcagcttatgaggcttgataatatgttgttagcagagggcgtggcgggccctgagaaaggaggcggatctgcagcagccgccgctgctgcggccgcgagcggaggcggggttagccctgataactcaatcgaacattccgactatcgaagcaagctggctcagatcagacacatataccactccgagcttgagaagtacgaacaagcctgtaacgagtttacaactcacgtaatgaacttattgcgtgagcagtcccgcacacgacctgtggcacctaaggagatggaaaggatggtgtcgattatccaccgcaaattcagtgccatacagatgcagctaaaacagagcacctgtgaggcggtgatgattctacgaagtagattcctggacgctcggaggaagaggagaaacttctctaagcaagcaacagaggtcctgaatgagtatttctacagccatctgtcaaatccgtaccctagcgaggaagccaaggaggaattggccaagaaatgcggaattactgtgtcacaggtgtcaaactggttcggcaataagagaatacggtacaagaagaacatcgggaagtttcaggaagaggcaaacatctacgctgtgaagaccgctgttagcgtcacacaaggcggccactcacggacctcttctccaacccccccaagttccgctggatccgggggctcattcaatttaagcgggtcaggagacatgttcctgggcatgcctgggttgaatggcgactcctactccgcctcccaggtggagtcactacggcactccatgggacccgggggctatggggataatcttggtgggggccagatgtattcgccaagggagatgcgagctaatggatcatggcaagaggctgtgaccccaagctctgttacatcacctaccgaaggcccaggtagcgtccacagcgacacgtcgaattag

SEQ ID NO: 200495 - DNA, 1392 bp, synthetic construct
  misc_feature 1..1392: note = Description of Artificial Sequence: Synthetic coding sequence
  source 1..1392: mol_type = other DNA
atggacgagcggctgctgggcccccccccccccggcggcggccgggggggcctaggtttagtttccggtgaacccggcggaccaggagagccgcccggggggggcgatcctggcggcggaagtggaggtgtgccaggaggaagggggaagcaagacatcggagacatcctccagcaaataatgaccatcactgatcagtccctggatgaggcgcaggcaaagaagcacgccctgaactgtcatcgaatgaagcctgctttgttcagcgtgctctgcgaaattaaagaaaaaacagggctgtcgatccggtccagtcaggaagaagagccagttgatcctcagttgatgcgactggataacatgctacttgccgaaggggttgccggccccgagaagggcggaggctccgcagccgccgccgccgccgctgcagcgagtggtggtggcgtctccccagacaactcaattgaacacagcgattataggtctaagttagcccaaattagacatatctatcacagcgaattggaaaaatacgaacaagcatgcaacgagtttacaacccatgtgatgaatctgttgagggaacagtcccgcacgcgaccagtggcccccaaggaaatggagcgaatggtgtccattatacataggaagttctccgctattcagatgcagttgaagcagagtacatgtgaggccgtgatgattctcagatcccgctttctcgatgccaggcgcaaacggcgcaacttctccaagcaggccacagaagtgcttaatgagtacttttactcgcatttatcgaatccgtacccgtcagaggaggcgaaggaggaactcgctaagaaatgtggcattaccgtgagtcaggtcctctggagattaagggaagaactgagcggcaaggtccatgcatcccagctcggagccgtggtgagtaactggttcggcaataagcggatcaggtacaagaagaatatagggaagttccaagaagaggctaacatttacgcagtaaagaccgctgttatcatcgccgagagagggccttttggcgtgaggggcactgagttgagccttccatctctcccaccccagggatcaggaggttcattcaatctgtcagggtccggagatatgtttctgggcatgcccggactcaatggtgacagctatagtgcgtcccaggtaagatgcccaagtcccttgcaggtagagagtctcagacatagtatggggccaggcgggtacggggacaacctcggaggcggacagatgtacagtccaagagagatgcgagccaacggttcatggcaggaagcagtaactccatcgtcagtaactagccccacagaagggcctgggagtgtgcactctgatacctcaaactag

SEQ ID NO: 200496 - DNA, 1392 bp, synthetic construct
  misc_feature 1..1392: note = Description of Artificial Sequence: Synthetic coding sequence
  source 1..1392: mol_type = other DNA
atggacgagcggctgctgggcccccccccccccggcggcggccggggaggtctgggcctcgtctcaggcgaacccggcgggccgggggagccgcccggtggcggggaccccggtggaggctcaggcggtgtgcccggcggtcgcgggaagcaggatattggagacatcctgcagcagatcatgaccattaccgaccaaagtttggacgaggcacaggcgaagaagcatgccctgaactgtcaccgtatgaagccagcattgttctcggtgctgtgtgagatcaaggaaaagacgggattgagtatcagaagttctcaggaagaggagcccgtggatccccagctcatgcgcctggataatatgcttctcgccgaaggtgtcgccgggccagagaagggaggcgggagtgccgcagccgccgccgccgcagccgccagcggcggtggagtttccccagacaactctattgagcattccgactaccggtcaaagctagcccaaatccgacacatttaccacagcgagctggaaaaatacgagcaggcgtgtaacgagttcaccacacatgttatgaatctgctccgggagcagagtcgaactaggcccgtcgcgccaaaggagatggaaagaatggtgtccataatacaccgaaagtttagcgctatccagatgcagttgaaacaaagcacttgcgaggccgtcatgatcctgaggtctaggttcctggatgctcgaagaaagcgacggaatttcagtaaacaagccacagaggtcctcaatgagtatttctactctcatctgtcaaatccatatcccagtgaagaggctaaggaggagctagctaaaaagtgcgggattacagtctcccaagtcctctggcgactgcgagaggagttgtctgggaaagtccacgcttcacagctgggtgcggtcgtctccaactggttcgggaataagaggataaggtacaaaaaaaacataggtaagtttcaagaagaggccaatatttacgcagtaaagactgcagttataatcgccgagcgaggcccattcggcgtaagaggtacggaattgagcctgcctagtctgccccctcagggctccggagggtcctttaatctgtccgggtctggggacatgtttcttggaatgccaggcctcaatggtgatagctacagcgcttcacaggtgagatgcccatctccattacaggtggagagcctgcgccatagcatgggccctgggggctacggagataatcttggaggcggccagatgtatagtccccgtgaaatgagagccaatggaagttggcaggaggccgtgactccctcctccgtcactagcccaaccgaaggcccgggatctgtgcactctgacacttcgaactag

SEQ ID NO: 200497 - DNA, 1317 bp, synthetic construct
  misc_feature 1..1317: note = Description of Artificial Sequence: Synthetic coding sequence
  source 1..1317: mol_type = other DNA
atggacgagcggctgctgggcccccccccccccggcggcggccgggggggactggggctcgtgtccggagaacctggcggacctggggagcccccagggggcggcgatcccggggggggcagcgggggggtgcccggagggaggggcaaacaggatattggtgacattctgcagcagattatgacaatcaccgaccaatccttggatgaggctcaagccaagaaacacgcattaaattgtcatcgtatgaaaccggccctgttttccgttttgtgtgagattaaagagaagaccggcctctccattcggtcctcacaggaagaggagccagtggatccccagctgatgaggcttgataacatgctccttgctgagggagtggccggccctgaaaagggggggggtagcgcagcagcagcagctgccgcggctgcttccggaggcggtgtgtccccggacaattctatcgagcacagtgactaccggtctaaactggctcaaattagacatatctatcattccgaattggagaaatacgagcaagcatgtaacgaattcactacacacgtgatgaacctgctcagggagcaatccagaacccgtcctgtcgcccccaaagagatggaaagaatggtcagtataattcaccgaaagttttccgccatacaaatgcaactgaaacaatcaacctgcgaagcagtaatgattctcagatcacggttcctagacgcccgccggaagcgcagaaacttttccaagcaagcgaccgaagtactgaacgagtacttctattcccacctgagcaacccgtatcctagtgaagaggccaaggaggaactggccaaaaagtgcgggataacagtgtcacaagtgtccaattggttcggaaataagcgcatccggtacaagaaaaacatcggtaagttccaggaggaggctaacatttacgcggtgaaaaccgccgtgtccgtaactcaagggggtcattcccgcaccagtagcccaacacccccttcctccgccggttctgggggcagtttcaacctctcaggatcgggagacatgtttctggggatgccaggcttgaatggcgacagttatagcgcctcccaggtgcggtgcccaagtcctctgcaggtcgaatcactgcgtcatagcatgggccctggaggctacggagacaatttgggcgggggacagatgtactccccaagagaaatgagagcgaacggttcctggcaggaggctgtcaccccctcttccgtgacatcccccacagagggccccggctccgtgcactcggacactagcaattag

SEQ ID NO: 200498 - DNA, 1317 bp, synthetic construct
  misc_feature 1..1317: note = Description of Artificial Sequence: Synthetic coding sequence
  source 1..1317: mol_type = other DNA
atggacgagcggctgctgggcccccccccccccggcggcggccggggagggttgggcctagtcagtggcgagcccggcggtcccggagaaccgcccggtggtggggacccgggaggaggctctggaggggtccccgggggcagaggaaagcaggatatcggagatattctccagcagatcatgacaattactgatcagagtctcgatgaagcccaggccaagaaacatgccttgaattgccacagaatgaaacccgcgttattttccgtgctgtgcgaaatcaaagagaaaaccggactcagcattagatccagccaggaagaggagccagttgatcctcagctaatgcggctggacaacatgttactagcagagggcgtggctggcccagaaaaggggggtggctccgccgctgcggcagcagcagctgccgcaagtggcgggggcgtctccccagacaacagtatagagcacagcgactacagatcaaagttagcccagatccgccacatttaccactctgaactggagaaatacgagcaggcatgcaacgagtttacaacacacgtgatgaatctgctgcgcgaacaatcgagaactcggccagtggctccgaaggagatggagcggatggtctctatcatccacagaaagttctcggcaattcagatgcagctaaagcaaagcacctgcgaagctgttatgatcctcaggagccggtttctggatgcccgaaggaaaaggcgcaacttctccaaacaggctaccgaagtgctgaatgagtacttctattcccacctgagtaatccgtatccatcagaagaggctaaagaagaactagctaagaaatgtggcatcacggtgtcccaggtgagcaattggttcgggaataagcgcatcagatataagaaaaacattggaaagtttcaagaggaggcaaacatttacgccgtgaaaaccgccgtttctgtgactcaagggggacattcacggacctcctcaccaactccccccagctcagctgggagtgggggaagctttaacctgagcggcagcggcgacatgttcctggggatgcctggtcttaacggtgactcatactccgcaagtcaggtgcggtgcccatctcctttgcaagtcgaaagcttacgacactccatgggaccgggcgggtatggagacaacctgggcggcggacagatgtactcaccgcgtgagatgcgggccaatggcagctggcaagaggctgtcactcccagcagtgtcacgtcacctaccgaagggcctggatcagtccacagtgatacaagcaattag

SEQ ID NO: 200499 - DNA, 1392 bp, synthetic construct
  misc_feature 1..1392: note = Description of Artificial Sequence: Synthetic coding sequence
  source 1..1392: mol_type = other DNA
atggacgagcggctgctgggcccccccccccccggcggcggccgggggggcttaggactagtgtctggggagcctggtggtccaggcgaacccccggggggcggagatcctggtggaggcagtgggggggttccaggcggccgcggtaaacaggacataggcgacatcctgcagcaaataatgacaattaccgaccagagcctagatgaggctcaggctaagaaacacgcactgaattgccaccgtatgaaacccgctctgtttagcgtgctgtgcgaaataaaggaaaaaaccggcctctccattcggtctagccaggaagaggagccagttgacccgcaattaatgcggttagacaatatgctcctggcggaaggagtggcgggccccgaaaaaggtgggggctctgccgccgccgccgccgcagccgccgcaagcggcggcggcgtctctcccgataacagcatagagcatagcgactataggtcaaagctggcacagatccgccatatctaccattctgaattggaaaagtatgagcaggcctgtaatgaattcactacacacgttatgaacctgcttcgagaacagtctaggacccgtccggttgcccctaaggagatggaacgcatggtctctattatccaccggaagttcagcgctatacagatgcagcttaaacaatctacctgcgaagccgtcatgatcctcagatctcgctttctagacgcccgccgaaaacggcggaatttttcaaaacaagccacagaggtgctgaatgagtacttctactcccacctctctaacccttaccccagcgaagaagctaaggaggagttagcaaaaaagtgtgggattacagtctcccaggtcctttggcgattaagggaggagctctctggcaaagttcatgcatcccagctaggagccgtggtctctaactggtttggaaacaagaggatccggtacaagaaaaatattgggaaattccaggaggaggccaatatatacgccgtcaaaacagccgtcattatcgctgagcgtgggccattcggagtgcggggaaccgagctgagcctgccgagcttgcctccccagggatccggcggtagttttaacctaagtgggagcggtgacatgtttctcggaatgcctggactgaacggagattcttatagcgccagtcaggtgagatgcccttccccactccaggtcgaaagcctgcgccactccatgggtccgggaggctacggagacaaccttggcggagggcaaatgtatagccctcgcgaaatgcgagccaatggatcgtggcaggaagccgtgactccaagcagtgttacttcccctacagaggggcccggaagcgtacacagtgatacttctaactag

SEQ ID NO: 200500 - DNA, 1392 bp, synthetic construct
  misc_feature 1..1392: note = Description of Artificial Sequence: Synthetic coding sequence
  source 1..1392: mol_type = other DNA
atggacgagcggctgctgggcccccccccccccggcggcggccggggcgggttggggctggtttctggcgagccagggggcccaggggagccgcctgggggaggtgaccctggtggtggctctggtggcgtgccgggtgggcgcggcaagcaggatattggcgacattttgcagcaaattatgacaatcacggatcaatccttggatgaagcccaggccaaaaaacatgcacttaattgtcatagaatgaaacctgccctgttctcggtgctgtgcgagatcaaagaaaagactggactgtcgatcagaagctcccaagaggaagaacccgtcgacccccaactcatgaggttggacaatatgcttctcgcagaaggtgtggccgggcccgaaaagggcggggggtctgcggccgccgctgcggcggccgcggcttctgggggtggagtgagtcctgataattcgatcgagcactctgattatcggtctaagctggcccaaattagacatatctaccatagtgaattggagaagtatgaacaggcatgcaacgagttcaccacccacgtgatgaatctcctgcgcgagcagagccgaacgcggcctgtggcacccaaagaaatggaaaggatggtaagcattatccacagaaagttttccgctatccaaatgcagctgaagcagtctacctgtgaagccgtaatgattctgcggtcccgctttctcgacgctagacgcaagagacggaatttcagcaagcaggcgaccgaggtcctcaacgaatacttctactctcatctgtccaatccatacccaagcgaggaagccaaagaggaactagcaaagaagtgcggcattactgtgagtcaggtactgtggcgcctgcgagaggaactcagcggtaaggtgcatgcttcacaacttggcgctgttgtgagtaattggttcggaaataagagaatacggtacaagaaaaacatcggaaaatttcaagaggaggccaatatctacgcagtgaagaccgcagtcataatcgccgagcgaggtccgttcggggtgagagggaccgagctgtccctgcctagtcttcctccacagggttctgggggttcatttaatctctctggttcaggggacatgttcttgggtatgcctgggttgaatggagacagttacagtgccagccaggtacgatgcccctctccccttcaggtcgaatctctcaggcacagcatggggcctggcggctacggagacaatctgggaggcggacaaatgtattcccctcgtgaaatgagggcaaatgggagctggcaagaggctgttactccttcaagcgtgacatctccaactgaaggaccaggatctgtgcactcagacacctcaaattag

SEQ ID NO: 200501 - DNA, 1332 bp, synthetic construct
  misc_feature 1..1332: note = Description of Artificial Sequence: Synthetic coding sequence
  source 1..1332: mol_type = other DNA
ggcgccgagcagggcggcggcctgcgggcccccccccagctgtggactaacggatactggggcaggcctctccaggctggggccggaggactgggcttggtgtctggcgaacccggcggacccggggagccaccgggaggaggagaccccgggggcggctccggaggagtgccagggggacggggtaaacaagatattggggacatcctacagcagatcatgacaattacggaccaaagcctcgatgaagcacaagccaaaaaacatgctctgaactgccatagaatgaagcccgcgcttttcagtgtgctatgcgagatcaaggagaaaaccgggctctcaataagatcaagccaagaggaagaacctgtggacccccagttaatgcgcctcgacaatatgctgctagcggagggtgttgctggtcctgagaaaggcgggggctctgccgcggctgctgcagccgctgccgcgtccgggggcggtgtgagccctgataattcgattgaacatagcgattacaggtcaaagctagcccaaatccggcacatttaccactcagaattagagaagtacgagcaggcgtgcaacgagttcaccacccacgtgatgaacctgctgcgcgaacaatctcggacgcgtcctgtcgccccaaaagaaatggagagaatggtgtcaattattcaccggaaattctcggctatccagatgcagctgaagcagtcaacatgcgaggccgtgatgattctgcgctctaggttcctggatgcacgaaggaaacgacgaaacttttccaaacaagcaactgaggttctgaacgaatatttttattctcacctgagcaacccatatccgtccgaggaggccaaggaggagcttgcgaaaaaatgtggtatcaccgtgtctcaagtgtctaactggtttggcaataaaagaatcagatataagaaaaatatcggaaagtttcaagaagaagccaacatatatgccgtgaaaactgccgtgagcgtaacccagggggggcactccaggacgtctagcccgacgcctcccagcagtgctgggtcgggcggatctttcaacctgagcggctccggggatatgtttctggggatgcccggacttaatggcgacagctatagcgccagtcaagtagaatctctcaggcacagtatggggccgggagggtacggggataatctaggaggtggccagatgtacagcccaagagagatgagagccaatggatcttggcaggaagctgtaaccccgtcaagcgtcacatcaccgacagaaggccctggttcagttcatagtgacacctctaattag

SEQ ID NO: 200502 - DNA, 1332 bp, synthetic construct
  misc_feature 1..1332: note = Description of Artificial Sequence: Synthetic coding sequence
  source 1..1332: mol_type = other DNA
ggcgccgagcagggcggcggcctgcgggcccccccccagctgtggacaaacgggtactggggccgacccctccaggctggcgctggcgggctgggcttagtctctggagaaccaggggggcctggcgaacccccggggggcggtgaccccggtggtgggtcagggggagtgcccgggggcagaggcaagcaggacattggtgatattttacaacagatcatgaccattaccgaccaaagcctggatgaggcacaagctaaaaagcacgctctgaattgccaccggatgaagccggctttgttcagcgtcttgtgcgagatcaaagaaaagacgggactgagcattcggtcctctcaggaagaggagccagtcgaccctcagctgatgcggctggacaatatgctcctggccgagggtgtcgccggcccggagaagggtggcgggtccgcagcggccgcggcagcagccgcagcctcaggcggcggcgtatcccctgataatagcattgagcactcagactaccgctctaaacttgcacagatacgccacatttatcactccgaattggaaaagtacgagcaagcctgtaacgaattcacaactcatgtgatgaatttacttcgagaacaatctcgcacgcggccggttgctccaaaagagatggagcgaatggtgagcataattcaccggaagttcagcgccatccaaatgcaacttaagcagtccacttgcgaagccgttatgatcttacgaagccggtttctggacgccaggcggaaacggaggaatttcagtaagcaggcaacggaggtgctgaatgagtacttctacagccatctaagcaacccatatccgagcgaggaggcgaaagaagaactcgcaaagaagtgcgggataactgtctcccaagtgtccaactggttcggtaataagagaatcaggtacaaaaagaacattggtaaatttcaggaagaggccaacatctacgctgtgaagacagcagttagcgtcacacagggaggccacagccgtacttcatccccaacacctccctcctcagccggtagcggcggatctttcaacctatctggtagcggcgacatgttcctgggcatgcctggcctcaacggggattcatacagcgcctcccaggtggagtctcttcgccacagtatgggacctggcggatatggagacaatttggggggcggacagatgtactccccacgagaaatgcgagctaacggatcctggcaggaggccgtgaccccgtcaagtgtcacttcccccactgagggccccggctcagtacattctgatacatccaactag

SEQ ID NO: 200503 - DNA, 1317 bp, synthetic construct
  misc_feature 1..1317: note = Description of Artificial Sequence: Synthetic coding sequence
  source 1..1317: mol_type = other DNA
atggacgagcggctgctgggcccccccccccccggcggcggccggggcgggctgggtctggttagtggcgagcccggcgggccaggcgagccccccggaggtggcgaccccggcggcggctccggcggcgtgcccgggggacgggggaaacaggacattggagacatactccaacagatcatgaccattaccgatcaaagcctggatgaagcccaagccaagaagcacgcccttaattgtcacagaatgaaaccagcgctattctccgtcttatgcgaaatcaaggaaaaaacaggactcagcataagatcatcacaggaggaagagcctgttgatccccagctcatgaggctggataatatgctcctcgcagagggggtcgccggccccgaaaaagggggagggagtgccgccgctgcagccgccgcggcagctagcggtggtggcgtaagtcccgacaatagtatcgagcatagtgactacagaagtaaactggcccagattagacatatatatcacagcgaactggagaaatacgagcaagcctgtaatgaattcaccacccatgtcatgaacctgctcagggagcagagccggacacgcccagtagctcccaaggaaatggagagaatggtctcaattatccacaggaagttctctgccatccagatgcagctgaagcagtctacctgcgaggcagttatgatccttcgatctcgatttctggatgctcggcgtaagcggagaaatttttccaaacaggccaccgaggtgctgaatgaatacttttattcacatttgagtaacccctatccttctgaagaggcaaaggaagagctcgcaaaaaaatgtggaattacagtgtcccaggtatctaactggttcggaaacaaacgaatacgctacaagaagaatatcggcaaattccaggaagaggccaacatttacgcagtgaaaactgcggttagtgtgacccagggcggacactcacgcacatcctctcctacacctccgtcctctgctgggtcaggcggaagtttcaacctctcaggatcaggggacatgtttttgggtatgccagggctgaacggggattcttacagtgcctctcaggtcagatgtccatcgcctttgcaggttgaatctctccgccattcaatggggcccgggggatacggcgacaacctagggggcggccagatgtattcaccaagggagatgagggccaatggatcctggcaggaggccgtgacgccttcttccgtgacttcgcccactgaagggccaggatctgttcactcagatactagcaactag

SEQ ID NO: 200504 - DNA, 1380 bp, synthetic construct
  misc_feature 1..1380: note = Description of Artificial Sequence: Synthetic coding sequence
  source 1..1380: mol_type = other DNA
atggacgagcggctgctgggcccccccccccccggcggcggccggggtggcctaggtctggtttccggcgagcccggggggccgggggaaccccctggaggtggggacccaggcggagggagcggcggggtacctggtggccgaggcaagcaggacataggcgatattctgcagcagattatgacaattacagatcaatcactggatgaagcacaggccaaaaaacacgccctgaactgtcatcgcatgaagcctgcactgttcagtgtcctgtgtgagatcaaagaaaagactggcctgagtatccggagttctcaggaggaagagccggtggacccccagctgatgcgcctggacaatatgctgctggccgagggcgtggcaggcccagaaaagggcgggggaagcgctgctgccgcagcggccgccgccgcatccggaggaggtgtgagccccgacaattccatcgaacactctgattacaggtcaaagttagcccagatacgtcacatctaccactccgaactggaaaaatatgagcaagcctgcaacgagttcaccacgcacgtcatgaatcttctccgtgaacaaagccgtacccgccccgtggcgccaaaggagatggagagaatggtctcaattattcaccgtaagttctccgcaatccagatgcaattaaaacagtccacgtgtgaggccgtgatgattctccgctccaggttcctggatgccaggcggaagcggcgaaacttcagcaagcaggctaccgaagtgctgaacgaatacttttattcccacctatcaaacccttacccaagtgaagaggccaaggaggaactggcgaagaagtgtggaatcacggtgagccaggtgctgtggaggctcagggaggaactgtccggcaaggtacacgcatctcagctgggagctgtggtgagtaattggttcggaaataaacgtattcgctacaagaaaaacatcgggaagtttcaggaggaggccaacatttacgccgtgaaaacagcggtgtccgtgactcagggaggacactcgaggacctcaagcccaacccctccaagcagtgcgggctcaggcggcagcttcaatctcagcggttccggcgatatgttcctggggatgccagggctaaatggcgacagctactccgcatcacaggtgcgttgccccagcccccttcaggtcgagagcttgcgccactccatgggccctggcgggtatggtgacaatttaggtgggggccagatgtatagcccacgggagatgcgcgcaaacggatcttggcaggaggcagtaactccatccagtgtcacttcccctaccgaaggtcctggatctgtccattctgatacatcaaattag

SEQ ID NO: 200505 - DNA, 1332 bp, synthetic construct
  misc_feature 1..1332: note = Description of Artificial Sequence: Synthetic coding sequence
  source 1..1332: mol_type = other DNA
ggcgccgagcagggcggcggcctgcgggcccccccccagctgtggacaaacgggtactggggccgcccacttcaagccggagccgggggacttggcctggtgtcaggcgagcccggcggacccggcgaaccacccggcggtggcgatcccggcggtggctctgggggagtgcccggggggcgggggaagcaagatatcggagacatactgcagcagattatgaccatcacagaccagtctcttgacgaggcccaggccaaaaagcacgctctgaattgccacaggatgaaaccagcgcttttcagtgtgctctgtgaaatcaaagaaaagacggggctgtccattaggtccagccaggaagaggaacctgtcgaccctcagctcatgcgtttagataatatgcttttagcagaaggagtagcggggcctgagaagggaggcgggtctgctgctgccgccgccgccgctgctgcttccggcggcggggtgtctcctgacaattcgatagagcattcagattatagatccaaacttgctcagatccgtcacatctaccactccgaacttgagaaatacgagcaggcctgtaacgagttcacaacccacgtcatgaatctacttcgagagcaatcaaggacaagaccagtggcgccaaaagagatggagcggatggtctccattatccaccggaagttctcagccattcaaatgcaactgaaacaaagtacatgcgaggccgtcatgatccttcgatcccgattcctagacgcacgtagaaaaagacgaaacttttctaagcaagctactgaagtgctaaatgagtacttttatagtcatctctctaatccctatccttccgaagaggccaaggaggaactggccaagaaatgcggtattaccgtctctcaagtcagtaactggtttggaaataagagaattcggtacaaaaagaatataggtaagtttcaagaagaagctaacatatacgctgtaaagaccgcagtctccgtgactcagggcggccacagccgtacttcgtctcctactcccccctcttctgccggaagcggcggctctttcaatctctcaggaagcggtgacatgttcctcgggatgccaggccttaatggggactcctactcagcctctcaggttgagtctctccgacattctatggggcctggaggctacggggacaacctgggcggaggtcagatgtatagtccccgagaaatgagagctaacggatcttggcaggaagcagtgaccccatcttccgtcacttcgccaactgaggggcctggctcagtgcactctgacactagcaattag

SEQ ID NO: 200506 - DNA, 1317 bp, synthetic construct
  misc_feature 1..1317: note = Description of Artificial Sequence: Synthetic coding sequence
  source 1..1317: mol_type = other DNA
atggacgagcggctgctgggcccccccccccccggcggcggccggggcggacttggcttggtcagcggggagcctggaggacccggagagccaccgggcggcggagatcccggcggtggctccgggggcgttcccggagggcgcggcaaacaggatatcggggacattttacagcaaattatgaccatcactgaccagtctcttgatgaagctcaggccaaaaagcatgctctcaactgccaccggatgaagcccgctctcttctctgtcttgtgcgaaatcaaagagaaaaccgggctgtcaatcagaagtagtcaggaagaagaaccagttgacccccaactgatgagattggacaatatgctcttggctgagggggttgccggccccgagaagggaggtggaagtgcagcagcagcagccgctgctgctgctagcggaggtggagtgagtcctgataattccatcgagcattctgactaccgaagcaaattagcccagattcggcatatctaccatagcgagcttgaaaagtacgagcaggcatgcaacgaatttacaactcacgtcatgaacctcctgagggagcagtcacgcactagaccagtcgcccccaaggagatggaaaggatggtaagcatcatacaccgcaaattctctgccattcagatgcagctgaagcagtccacctgcgaggcagtcatgattctcaggtcccggtttctggacgcccggagaaagaggagaaacttcagcaagcaggctactgaagtgttaaatgagtacttttatagtcacctctctaatccttatccttctgaagaagcgaaagaggaattagcaaagaaatgtggcattacagtctcacaggtaagtaactggtttggcaacaagcggatcaggtacaagaagaatataggcaagttccaggaggaggctaacatctatgctgtgaagactgccgtgagtgtgacgcagggggggcattctcgaacttcatctccgacccccccctcctcagcagggagtggcggcagcttcaatctgtccgggtctggggacatgtttcttggcatgccaggtctaaacggggattcttattccgcttcccaggtgaggtgcccatcgcctctgcaagttgagtcactgcgacactccatgggacccggaggctatggggataacctgggggggggacagatgtattccccaagggaaatgcgcgcgaatgggtcttggcaggaagccgttacaccttcctcagtgacatcccctacagagggtccagggtcagtacattccgatacaagcaattag

SEQ ID NO: 200507 - DNA, 1317 bp, synthetic construct
  misc_feature 1..1317: note = Description of Artificial Sequence: Synthetic coding sequence
  source 1..1317: mol_type = other DNA
atggacgagcggctgctgggcccccccccccccggcggcggccggggcggcctcggactggtctctggagagcccggcggacccggcgagccacctgggggcggggaccctggtggaggaagtggcggcgtgcccggagggagagggaaacaggacattggagatattcttcagcaaattatgacaatcaccgatcaatcgttagacgaggcacaagctaaaaaacatgcactcaactgccatagaatgaagcccgcccttttctccgtcttgtgcgaaataaaggaaaagactggactctcgattcggtcaagccaggaggaggagcccgttgacccccagcttatgcggctggacaatatgttgctggccgagggcgtcgccggccccgaaaagggggggggctccgctgcagcagcggcagccgccgctgcctctgggggtggcgtctcccctgataactcgatcgagcactcagattaccggagcaaacttgcccagatcagacatatctaccatagtgagttggaaaaatacgagcaggcctgcaatgagttcacaactcacgtgatgaaccttcttagggagcagtcacgcacaagacctgtggcgcccaaggagatggagagaatggtcagcattatccatcgcaagttttccgccattcagatgcagttaaaacagagcacctgtgaagccgtaatgatactccgctcccggttcttagatgcgagacggaaaaggagaaatttttcaaaacaggccacagaagtgctgaatgagtacttctacagtcatctgagcaatccatacccaagtgaagaggcaaaggaggagcttgccaagaaatgcgggatcaccgtaagtcaagtttcaaactggttcggcaacaagaggatacgatacaaaaaaaatattggcaagttccaggaagaagccaatatttacgctgtgaagaccgcagttagcgtgacccagggcggacactctagaacttccagcccaacccccccctccagcgccgggtccggaggcagcttcaatttgagtggctccggtgacatgtttctcggcatgcccggcttaaacggggacagttacagcgcaagtcaagtacggtgtccctctcctttacaagtggagagcctcagacacagtatgggtccgggcgggtacggagataacctggggggcggtcagatgtactcaccccgcgaaatgcgggccaacggcagttggcaggaggctgttacgccctcctcagtgacttccccaaccgaaggtcccggctccgttcactccgatactagcaactag

SEQ ID NO: 200508 - DNA, 1332 bp, synthetic construct
  misc_feature 1..1332: note = Description of Artificial Sequence: Synthetic coding sequence
  source 1..1332: mol_type = other DNA
ggcgccgagcagggcggcggcctgcgggcccccccccagctgtggactaatggatactggggtagaccactgcaggcaggcgccggcggactaggcctggtgagcggtgagccaggcggacctggtgagcctccgggcggtggtgaccctgggggcgggtctggaggtgtgccaggaggcagaggcaaacaggacattggagatattttacagcagatcatgaccatcaccgatcagagccttgacgaggcacaggccaaaaaacacgcactgaactgccaccgtatgaaaccggccctcttctcagtgctgtgcgaaattaaagaaaagaccgggttgagtattaggtcttcccaggaggaagaaccggtagaccctcagctgatgagactggacaacatgctgctcgccgagggggtggccgggccggagaaaggagggggcagcgccgcagctgcggcagctgccgccgcttctggggggggggtgtccccagataactcaatcgaacacagcgattaccgaagtaaactcgcccaaatacgacatatttatcactctgagttggaaaagtacgaacaagcatgtaacgagttcaccactcatgtgatgaacctgctgcgggagcagtctagaactagaccggttgccccaaaagagatggagagaatggtttccataattcacagaaaattctcagccatccagatgcaacttaaacagtccacctgtgaagcggttatgattctgagatcgagatttctagatgcgcgtcggaagcggaggaacttcagcaaacaggctacggaagtgctgaatgagtacttttacagccatctttccaacccataccccagcgaagaagcaaaagaagagctggccaagaagtgtggcattacagtgtcccaagtaagcaactggtttggtaacaagcgcatccgctacaagaaaaacatcggtaagtttcaagaggaagccaacatttatgcagtgaaaacagcagtatcagtcacacagggtggacatagccggacttcatcacccacaccccccagctcggccggctccggtggatcattcaatttgtctgggtcaggcgacatgttcttagggatgcctggattgaatggcgattcttattctgcttctcaagtggagtctctgcgccacagcatggggcccggcggctatggcgataatcttgggggaggccaaatgtactcccctcgtgaaatgcgagcaaatggctcctggcaggaggctgtgacgcccagctcagttacgtctcctacagaaggacctggttccgttcactccgatacctccaactag

SEQ ID NO: 200509 - DNA, 1392 bp, synthetic construct
  misc_feature 1..1392: note = Description of Artificial Sequence: Synthetic coding sequence
  source 1..1392: mol_type = other DNA
atggacgagcggctgctgggcccccccccccccggcggcggccggggaggattaggccttgtgagcggcgagccagggggacccggggagccacccggtgggggggaccccggcggcggcagcggaggcgtgccaggaggccgtggaaaacaggacattggcgatatcttgcagcagattatgactattaccgaccagtccctagacgaagcccaagccaaaaagcacgccttgaattgtcacagaatgaagccagctttgttcagcgtcctgtgtgaaatcaaagagaagaccgggctgtcaattcggagttcccaggaagaagagcctgtcgatccacagctgatgagattggacaatatgttgctggctgagggcgtggctggcccagagaagggtggcggatcagccgcggccgccgccgccgcggccgcctctggtggcggcgtcagcccagacaactctattgagcattccgattatagatccaagttagcccaaatacggcacatttatcactccgaactggagaagtatgaacaagcatgcaatgaatttaccactcatgtcatgaatttactgagagaacagagccgcaccagacctgtggctccaaaagagatggaacggatggtaagcatcatacacagaaaattttcagcaatccagatgcaactaaaacagtcaacctgcgaggccgtcatgatcttgagaagcaggttcctagacgctagacggaagcggagaaacttttccaagcaagctaccgaagtgctgaacgaatacttttacagccaccttagcaatccctacccgagcgaggaggctaaggaagagctggccaagaaatgtggtataaccgtatctcaggtcctttggagactgagagaagaattgtccggcaaggtccacgcgtcacagctgggggccgttgtctctaactggttcggtaataagcggatccggtacaagaagaacatcggcaaatttcaagaggaggccaacatttacgctgtgaaaacagcagtcattattgctgaacgcgggcccttcggggttcggggcacggaactttctctacctagcctgccgccgcagggcagcggaggcagtttcaatctaagtggctccggcgacatgtttctcggtatgcctggcctgaatggtgatagctatagcgcctcgcaggttagatgcccaagtccacttcaggtggagtcactgaggcactctatgggccccggaggttatggcgacaatctcgggggcggtcagatgtactctcccagggagatgagggcaaatggcagctggcaggaggccgttaccccatctagtgtgacttccccaaccgagggccccggaagcgtccactctgataccagcaattag

SEQ ID NO: 200510 - DNA, 1332 bp, synthetic construct
  misc_feature 1..1332: note = Description of Artificial Sequence: Synthetic coding sequence
  source 1..1332: mol_type = other DNA
ggcgccgagcagggcggcggcctgcgggcccccccccagctgtggacgaacggctactgggggcgccccctccaggctggggccggagggctgggacttgtgtcaggagaaccaggagggcccggcgaacctcctggagggggcgaccccggcggcgggagtgggggtgttcccggtgggaggggcaaacaggacatcggtgatatcctgcaacagatcatgaccatcactgaccagtctctggacgaggcacaggctaagaagcatgccctcaattgccaccgcatgaagcctgccctcttttcagtgctttgtgagattaaggagaaaacgggcctatccatccggtcctctcaggaggaggagcccgttgacccgcagctgatgagattggataatatgctgctggctgaaggggtcgccggcccggagaaaggcggggggagcgcagcggccgctgcagcagctgctgctagcgggggcggggtgagtccagataatagcatcgagcactcagactacaggagcaaactggctcagattaggcacatttatcactccgagctcgaaaagtatgagcaggcttgcaacgagttcactacccatgtgatgaacctgctgagggagcagagtagaacacggccagtggccccaaaagagatggagaggatggtctcaatcatccatcgcaagttctcagctatccaaatgcagctcaagcaaagcacatgcgaagcagtgatgatactgcgcagtcgttttctcgatgcaagaagaaaacggaggaatttttcgaagcaggcaacggaggtacttaatgaatacttctattcacacttatccaatccttaccccagcgaggaggccaaagaggagctcgcgaagaaatgcggaataacagtgtcccaggtctcaaattggttcggcaataagagaatccgatacaagaagaatataggaaagttccaggaggaagcaaatatctacgccgtaaagaccgcagtatctgtcacccagggaggacactcacggacatcatccccaactccaccttcctctgccgggagcggcgggtctttcaatttgtccggatccggcgatatgttcctgggaatgcccggcttaaatggagattcctacagtgccagtcaggtggagtccctgagacattccatgggaccaggaggttatggggataaccttggcggcggccagatgtactccccaagagagatgagggctaatggttcctggcaagaggctgttactcccagcagcgtgacttctcctacagaaggacctggctccgtacattccgacacctctaactag

SEQ ID NO: 200511 - DNA, 1332 bp, synthetic construct
  misc_feature 1..1332: note = Description of Artificial Sequence: Synthetic coding sequence
  source 1..1332: mol_type = other DNA
ggcgccgagcagggcggcggcctgcgggcccccccccagctgtggacgaatgggtactggggaaggccactgcaagcaggagctggggggctaggacttgtctctggcgaacccggcgggccaggggagccacccgggggcggcgaccccgggggtgggagtgggggcgttcccgggggtcggggtaagcaggacatcggggacattctacagcagatcatgacaatcacagaccaaagcctggatgaggctcaagcaaagaagcacgcactaaactgtcatcgtatgaaaccagcacttttctcggtgttgtgcgaaataaaagagaaaacgggtctgtccatacgcagttcacaggaagaagagccggtggatcctcagctgatgcggctggataacatgctactcgccgagggagtggctggacccgagaaaggcggcggatcagcggctgcagctgccgctgccgctgctagcggcggtggagtctcacccgataacagtatcgagcactcggactaccgctctaaattggctcagatacggcacatttaccatagcgaactcgaaaagtatgaacaggcgtgcaacgagtttaccacccatgtgatgaacctgctaagagagcagagtagaactcggccagttgcacccaaggaaatggagaggatggtgagtatcatacatagaaagttctccgctatccagatgcagttgaaacaatccacatgtgaggcagtgatgatcctgagatcgaggtttcttgatgcaagacgcaagagacgcaatttttccaagcaggctaccgaagtgctgaatgagtacttttatagtcacctgagtaacccatacccaagcgaagaggctaaggaggagctggccaagaagtgcggaattacagtgtcacaggtgagcaattggttcggtaacaagcgcattagatacaagaaaaacatcgggaagtttcaagaggaggcaaacatctacgctgtgaaaactgccgtgtcagtgacacaaggagggcacagtcgcaccagttcccctacacctccctcctccgctggtagcggcggttcattcaacctctctggcagtggtgatatgtttcttggaatgcctggtctcaatggagattcttattctgctagccaagtagagtccctccgccacagcatggggcctggcggatacggcgacaatctgggtggtgggcaaatgtactcaccacgcgaaatgagagcaaatgggtcctggcaggaggccgtaacccccagctccgtgacatcccccactgagggcccgggtagtgtgcatagtgatacaagcaactag

SEQ ID NO: 200512 - DNA, 1056 bp, synthetic construct
  misc_feature 1..1056: note = Description of Artificial Sequence: Synthetic coding sequence
  source 1..1056: mol_type = other DNA
atggacgaccagagccggatgctgcagaccctggccggcgtgaacctagcgggccactccgttcagggagggatggccctccctcctcctccacacggccacgagggagctgatggggacgggcgaaaacaggacataggagacatccttcaccaaataatgacaattactgaccaaagcctggacgaagcgcaggccaaaaaacatgctctgaactgccaccggatgaaaccggccctattcagtgtgttatgtgaaattaaggaaaaaactggcctctccatccgtggagcacaagaagaggaccctcctgacccccagctaatgcgactcgataacatgttactcgctgagggcgtttccgggcccgagaaaggggggggatcagccgccgcagccgcagccgcggccgcttccggtggcagttccgataattccattgagcacagtgattaccgggctaaacttacacagattcggcaaatctaccacacagaactcgaaaagtatgaacaggcatgcaacgagttcacaacgcacgtcatgaatcttctcagagaacagtctcggactaggcctatcagcccaaaagaaatcgaacgcatggtggggattatccacagaaagttctccagtatccagatgcagttgaaacagtccacctgtgaggccgtgatgatcctcaggagtcgattcctggatgcaaggcgcaagagacgaaattttagcaagcaggccactgagatccttaatgagtacttctactcacacctttccaacccatatccctcggaagaggctaaagaagaactggccaagaagtgcagcatcacagtctcacaggtctccaactggttcggcaacaaacgcatccgatataaaaagaacatcggaaagtttcaggaggaagccaatctctacgctgccaagactgccgttaccgcagcacatgccgtagccgccgccgttcagaataatcagaccaacagcccaaccacaccaaactctggaggctatccgccctcttgttatcaaagtgacggtagactacagtag

SEQ ID NO: 200513 - DNA, 762 bp, synthetic construct
  misc_feature 1..762: note = Description of Artificial Sequence: Synthetic coding sequence
  source 1..762: mol_type = other DNA
atgaacctgctgcgggagcagagccggacccggcccatcagccccaaagagatagagagaatggttggcattatccacagaaaattctccagtatccagatgcagttgaaacaatccacttgtgaagcagtgatgattctcagaagccgattcttagatgcccggcgcaagaggcgcaatttctcgaaacaggccactgagattctcaacgagtacttctactcccacctcagtaatccataccctagcgaagaggccaaggaggaactcgcgaagaagtgttccatcacagtcagccaggtgtctaattggtttggtaacaagaggattcgttacaagaagaacatcggaaaatttcaggaggaggccaatctttacgctgctaagacggccgtgaccgctgctcatgccgtcgctgcagccgtgcagaacaaccagacaaactccccgaccacccccaacagcggttcatcagggagcttcaacctgcccaacagcggcgatatgtttatgaatatgcaaagcctgaatggagattcatatcagggctcccaagtcggagctaatgtgcaaagccaggtggacactctgcggcacgtcatcaatcagaccggtggttactctgacggactgggtggcaattctttatattccccacacaatctcaatgctaacggggggtggcaggacgctaccactcccagctctgttacttcgcccactgaggggcctggtagcgtgcactcggacacctcaaattag

SEQ ID NO: 200514 - DNA, 1368 bp, synthetic construct
  misc_feature 1..1368: note = Description of Artificial Sequence: Synthetic coding sequence
  source 1..1368: mol_type = other DNA
atggacgaccagagccggatgctgcagaccctggccggcgtgaacctcgccggacacagcgtccagggaggaatggcactccccccccccccccatggacacgagggggccgacggggatggtcggaagcaagacatcggggacatcctgcatcaaattatgactatcacggatcaaagtctcgacgaagcccaggccaaaaagcacgccctgaactgccataggatgaagccagcattattttctgttctgtgtgagattaaagaaaagacaggactctctataaggggagcccaggaggaagaccccccggatccacaattgatgcgcttagacaacatgctgctggcagagggggtcagtgggcccgagaagggtggcggctctgcagctgcagccgctgcagccgcggcttcggggggttccagtgataactcaattgagcactcagattaccgggcgaaactcacacagattaggcagatttaccacacagagctcgaaaagtacgagcaggcctgcaatgaattcactacacatgtcatgaacttgctacgcgaacagagcagaacaagacccatcagtcctaaagaaatcgaacggatggtcggtatcattcaccgcaaattcagtagcattcagatgcagctaaaacagtcaacatgtgaggctgttatgattctcaggtcccggtttctcgatgcccgaagaaagcgaagaaatttcagcaaacaagccacagagattttgaacgaatacttctatagtcacctttcgaacccgtaccctagcgaagaggcaaaggaggagttggctaaaaagtgcagtatcacggtgtcccagtccctcgtaaaggatccaaaagagcgaggcagcaaaggcagtgacatccagcccacatcagttgtgagcaattggtttggaaataaaaggattcgttataaaaaaaacattgggaagtttcaagaggaggcgaatttatatgcggccaaaacggctgttacagctgcgcacgcagtggccgcagccgtccaaaacaaccagactaactcacctactacccctaacagcggttcgagcggaagctttaacctccctaattccggggatatgttcatgaacatgcagtcactcaacggcgatagttaccaggggtcacaggtcggcgctaatgtgcagtctcaggtggatactctgagacatgtgattaatcagacaggcgggtactcagatggactgggtggtaattccctgtatagcccacacaatctcaacgccaacggtggttggcaagacgctactacgccatccagcgtcacatcgcctaccgagggaccaggaagtgtacatagcgacacgagtaactag

SEQ ID NO: 200515 - DNA, 1305 bp, synthetic construct
  misc_feature 1..1305: note = Description of Artificial Sequence: Synthetic coding sequence
  source 1..1305: mol_type = other DNA
atggacgaccagagccggatgctgcagaccctggccggcgtgaacctggccgggcactcagtgcagggcggcatggccttacccccccccccgcatggccacgaaggcgccgatggggatggccgaaagcaagacattggcgatattctacatcagatcatgactatcaccgatcagtctctagacgaggcgcaggctaaaaaacacgccctaaactgtcatcgtatgaaacctgccctgttcagcgttctctgcgagattaaggagaagactggcctgtcgatccgcggcgcccaggaagaagacccccccgatcctcaactgatgcggctggacaacatgctgttggccgagggagtgtcaggccctgagaaggggggcgggagtgccgctgcagccgcagcagcggcagccagtggaggatcttctgataacagtatagagcactccgactaccgggcaaaactgactcagattagacagatctaccacaccgaactcgaaaagtacgaacaagcctgcaatgagttcacaacacatgtcatgaacctgcttagagagcagtcgcgcacacgcccaatttctcccaaggaaatcgagagaatggttgggatcatccacagaaaattctccagcattcaaatgcagctgaaacagtctacctgtgaggcagtgatgattctcaggtccagattcctcgacgcccgccggaagcggcgcaacttctctaaacaagctacagagattctgaacgagtacttctattctcatctgtccaacccgtacccatcggaagaggccaaagaggagctagctaaaaaatgttcaatcacagtgtctcaggtgagcaactggtttggcaataagcgcattcgctataaaaagaatattgggaagttccaggaagaggcaaatctttatgctgcaaaaaccgctgtgacggctgcacacgccgtcgcagcagccgtgcagaataaccagaccaatagccctaccacccccaattccggatccagcgggagttttaatcttcccaactcaggtgatatgtttatgaatatgcagtcactgaatggcgactcctaccaggggtcccaggtgggcgctaatgttcagtcccaggtggatacactgcgtcacgtgattaaccaaacggggggatattctgatggactcggaggaaattcactgtactccccccataatcttaatgccaacggcggttggcaagacgcaactactccatcctcagtgactagcccgacggaagggcctggatccgtgcactcagacacaagcaactag

SEQ ID NO: 200516 - DNA, 789 bp, synthetic construct
  misc_feature 1..789: note = Description of Artificial Sequence: Synthetic coding sequence
  source 1..789: mol_type = other DNA
atgcggggcctgagcatccggggcgcccaggaggaggacccccccgatccacaactgatgcgcctagataacatgttgctggccgaaggcgtgtcgggtccggagaaggggggagggtccgctgccgcagctgccgcagccgctgcttccggcggaagctccgataattccatcgaacattctgactaccgggcgaaattgacacagattaggcaaatctaccacacagagttggaaaagtatgaacaggcgtgtaatgaatttacaacgcatgtgatgaatctgctgagggagcagagccgcactcgccccattagccccaaggagatcgaacgaatggtcgggattattcaccgcaagtttagctccatacagatgcagctgaaacagtcaacatgtgaagctgtcatgattttgagatctaggtttctagacgcgcgccggaagcgccggaatttttctaagcaagccacagagatcttgaacgagtatttttactcgcatctgagcaacccttatccctcagaagaagctaaggaggagctcgctaaaaagtgttctataactgtgtcccaggtcagcaactggtttggaaacaaaagaatccgctataagaagaatattggaaaattccaagaagaagccaatctgtacgcagccaaaacagccgtgacagccgcccacgccgtagcagccgccgtgcagaataaccagacaaattcccccaccaccccaaacagtgggggctatcctcctagttgctaccagtccgacgggaggttgcagtag

SEQ ID NO: 200517 - DNA, 1080 bp, synthetic construct
  misc_feature 1..1080: note = Description of Artificial Sequence: Synthetic coding sequence
  source 1..1080: mol_type = other DNA
atgaagcccgccctgttcagcgtgctgtgcgagatcaaggagaagaccgggctctccatacgcggagcgcaggaggaagatccccctgatcctcagctaatgcgactggataacatgcttcttgctgagggagtgtcagggcccgagaaggggggcggcagcgcggcagctgcagcggcggccgcagcatctggcggctcctctgataacagtatcgagcattccgactaccgcgccaagttgacccagatccggcagatttatcacactgaattagaaaagtacgagcaggcttgtaatgagttcaccacacacgtgatgaacttgctgagagagcaatctcggacgagacccatctctcccaaagagatagagaggatggtgggcataatccatcggaagttctcctctatccagatgcaactcaagcaatccacctgcgaggccgtgatgattctgaggtctcggttccttgatgctagacggaagcgccgtaacttcagtaagcaggccactgagatcttaaacgagtatttttatagccatctatctaatccttatccatccgaagaggccaaagaggagctggctaaaaaatgctctataaccgtgtcacaggtttcaaactggttcggcaataagcgcattcgctacaagaaaaatatcggaaaatttcaggaggaagccaatttatacgctgccaagactgctgttaccgcagcccatgctgttgcagccgctgtgcagaacaatcagaccaactcacctactaccccaaacagtggcagctccggatcattcaacctgccaaactccggagacatgttcatgaatatgcaaagcctaaacggggacagttatcaaggttctcaggtcggtgcaaacgtgcagagtcaggttgacacacttaggcatgtgattaatcagactggaggatattcggatggattagggggtaactccctgtactcaccacacaatctaaatgccaacggtggctggcaagacgcaaccactccaagctctgtcacatcccccacagagggtccagggtccgtgcactctgacacttccaactag

SEQ ID NO: 200518 - DNA, 1530 bp, synthetic construct
  misc_feature 1..1530: note = Description of Artificial Sequence: Synthetic coding sequence
  source 1..1530: mol_type = other DNA
atggagcggcggcggctgtggggcagcatccagagccggtacatctccatgtcagtatggacctccccccgaagactggtggaattggccggacagagcctattgaaggatgaggcactggccattgctgccctcgagctgctgccacgagagttgttcccaccgttgttcatggctgcttttgacggccgccattcccagaccctaaaggcaatggtgcaagcctggccattcacgtgcctcccgcttggggtattgatgaagggacaacaccttcacctggagaccttcaaagctgtgctggatggactggatgttctcctggcccaggaggttaggcctagacggtggaaactgcaggttctggatctgagaaaaaactcccaccaagatttttggaccgtttggtccggcaaccgtgcctccttatactccttccctgagccagaagctgcgcaacctatgaccaagaagcgcaaagtggacgggctgtctaccgaagccgagcagccctttattccagttgaggtacttgttgatctcttcttaaaggagggggcctgtgatgaactatttagctacctaattgagaaggtgaagagaaaaaaaaacgtgctgcgcctctgctgtaagaagctgaagatcttcgctatgccaatgcaagacattaaaatgattctgaagatggtgcagttagattccatcgaagacttagaggtcacatgcacgtggaagctacccaccctcgcgaaattttcgccttatttgggtcagatgatcaatctgaggcgcctgctgctcagccacatccacgccagctcttatatctctcctgagaaggaagagcaatacatagcccaattcacctcacaattccttagtttacagtgcttgcaggccctttatgtcgattctctgtttttccttagaggacggctggaccagttgctccgccatgtgatgaatcctctggaaactttgtctattaccaactgtcgcctgagtgagggagacgttatgcatctgtcacagtctccttccgtctcacaactttcagtgttgagtctctcaggggtgatgctgacagatgtgtccccagagccacttcaggccttgctcgagcgggcctccgctactcttcaggatcttgtgttcgatgagtgcgggatcaccgatgatcaactgctcgctctgttgcccagcctgtcccactgttcgcagttaacaacactctcattctacggcaattcaatctctatcagcgccctccagagcctactccaacatctcataggcctctcgaaccttacacacgtgttatacccagtgcccttagaaagttatgaagacatccacggaacattacacctggagagattagcatatctacatgcacgcctgagggagctgctctgtgagctggggagaccctctatggtatggttgtcagcaaatccgtgcccgcactgtggcgatagaactttctacgatcccgaacccatattgtgcccttgcttcatgcccaattag

SEQ ID NO: 200519 - DNA, 1530 bp, synthetic construct
  misc_feature 1..1530: note = Description of Artificial Sequence: Synthetic coding sequence
  source 1..1530: mol_type = other DNA
atggagcggcggcggctgtggggcagcatccagagccggtacatctctatgagtgtgtggacaagcccacgccggctagtggagctggcaggccagagtttgctgaaagacgaggctctagccatcgccgcgcttgagttgctgcccagagagctttttcctccactcttcatggctgcttttgacggtcgccatagccaaacactgaaggcaatggtccaggcctggccattcacctgcctccctctgggcgtgctgatgaaagggcaacatctgcacctcgaaacttttaaggccgtgctcgacggcctagatgtgcttctagcccaggaggtgcggccccgccgctggaaactgcaagtcctggatctgcgaaaaaacagtcaccaggatttttggaccgtgtggagcggcaacagagccagcctttattcatttccagagcccgaggccgctcaacctatgactaagaagcggaaagtcgatgggctaagcaccgaagccgaacagccatttattcctgtggaggtgctggtggatctgtttcttaaggagggggcatgtgatgaactgttctcatatttaattgaaaaggtgaagagaaaaaagaacgtgcttcggttatgctgcaagaagctgaagatctttgcaatgcctatgcaggatattaagatgatattaaaaatggtccagctggatagcattgaggatctcgaagtcacctgcacgtggaagctcccaacgctggcaaagttttccccctacttaggccagatgatcaacctacgtcggttgttgcttagtcacatacacgctagttcttacatcagtccagaaaaggaggaacagtacattgctcagtttacgtcacaatttctaagcctgcagtgcctgcaagccctgtatgtggactccctgttttttcttcggggtcggctggatcagctactgaggcatgtcatgaacccactggaaaccttgtccataacaaactgccgactgtctgagggagacgtgatgcatttaagtcagagcccctcagtttcacaattatctgtgttaagcctttcaggtgtaatgctgactgatgtctcgcccgagcccctccaagcacttctggaaagagccagcgcgaccctgcaggacctggtctttgacgaatgcggcatcacggatgaccagctgctggcactgctgcctagtcttagtcactgctctcagctcacaacactgtccttctacggaaattctattagcattagtgccctccaatctttgctgcaacacttgataggcctctcaaatttgactcatgtcctatatcccgtgccccttgagtcatacgaggacattcacggcactctgcatttggaacgcttagcctacctccacgcaaggttacgcgaactactgtgtgaactgggacggccaagtatggtttggctctcagcaaatccatgcccgcattgcggggatagaacattctacgatcctgaacccatactgtgcccatgttttatgccaaactag

SEQ ID NO: 200520 - DNA, 1530 bp, synthetic construct
  misc_feature 1..1530: note = Description of Artificial Sequence: Synthetic coding sequence
  source 1..1530: mol_type = other DNA
atggagcggcggcggctgtggggcagcatccagagccggtacatcagtatgtctgtgtggacctcaccacgtcggcttgtggagttagcggggcagagcctcctgaaggacgaggcactcgccattgctgcgttagagctcctgcccagggagctttttccacctctattcatggctgcatttgatggtagacacagccagacactcaaggccatggtccaggcttggccttttacctgccttcccctgggcgtgctcatgaaggggcagcacctgcacttggagacgtttaaagccgtgctcgacggcttggacgtcttactagcccaggaggtgcggccccgtcgctggaaactgcaagtcctcgatttgagaaaaaactctcaccaggacttctggactgtgtggtcaggaaacagagcttcgctgtatagttttcccgagcccgaggccgcacagccgatgaccaaaaaacgcaaagttgatggactgtctaccgaggccgagcaaccttttattcccgtcgaggtgttggtggacctgtttctgaaggaaggcgcgtgtgacgaactctttagctatcttatcgagaaggttaaacgcaagaagaacgtgttgaggttgtgctgtaaaaaactaaagatttttgctatgcccatgcaagatataaaaatgattctgaagatggtgcagcttgactccatcgaggacctggaggtgacgtgtacttggaaactgcccaccctcgctaagtttagtccatatctcgggcagatgattaacctgcgtcgcctactcctttcacatattcacgcctccagttacatttctcccgagaaagaggagcaatacatcgctcagtttacatcccaattcctgagtcttcagtgtttacaggccttatacgtggactctctgttctttctgcgcgggaggctagaccagttgctgagacatgtcatgaatccactggaaacattgagcatcacaaattgtcggttatctgagggagatgtgatgcacctgagtcagtcccccagtgtgagccagctctctgtgctctcgttgtccggggtgatgttaacagatgtcagcccggagccgctgcaagctctgctggagagggctagcgctacgctccaggacctggtttttgatgagtgtgggattacagatgaccagctgctggcattactcccctctctcagtcactgcagccagttaacaaccttgtctttttatggtaactcaataagcattagcgcactgcagtccctgctccagcatttaatcggccttagcaaccttacacacgttctgtacccggtgccgcttgagagttatgaggatattcacgggacactgcacctcgaacgcctggcttacctgcacgccagattgcgggagctgctttgcgagttaggacgaccatcaatggtgtggctgtcggcgaatccttgtcctcattgtggtgaccgaaccttctatgaccctgaacccatcctctgcccatgcttcatgcccaattag

SEQ ID NO: 200521 - DNA, 261 bp, synthetic construct
  misc_feature 1..261: note = Description of Artificial Sequence: Synthetic coding sequence
  source 1..261: mol_type = other DNA
atggagcggcggcggctgtggggcagcatccagagccggtacatcagcatgagcgtctggacatcgcctaggaggctagtagaattagctggacagagcctcctgaaggacgaagctctagcgattgccgctctggaactgcttccgcgcgaactctttcctccgctgtttatggccgcatttgatgggaggcacagccaaacgctgaaagctatggtgcaagcatggccattcacatgcctccccttgggcgtcctgtag

SEQ ID NO: 200522 - DNA, 1530 bp, synthetic construct
  misc_feature 1..1530: note = Description of Artificial Sequence: Synthetic coding sequence
  source 1..1530: mol_type = other DNA
atggagcggcggcggctgtggggcagcatccagagccggtacatctctatgtccgtttggacctccccccgcagactggtggagttagcaggacaaagtctgctgaaggatgaggctctagctatcgcagctctggaactccttccaagagaactgttcccacctctgttcatggccgcattcgacggacggcattcacagacactcaaagcaatggtgcaagcctggccttttacctgcctacctcttggcgtactgatgaaggggcagcatctccatctagaaacctttaaggccgtactcgatggtctagacgtgctgttggctcaggaggtacgccctcggagatggaaactgcaagtgctcgaccttagaaaaaatagccaccaagatttctggacagtgtggagcggcaatcgcgctagcttgtacagctttccggaaccagaggctgcacagccaatgaccaaaaagcgtaaagtggacggtctgagcacagaggctgagcagccatttatcccggttgaagtcctcgtggatttattcttaaaggaaggcgcctgcgacgaactgttctcctatctcatcgagaaggttaagagaaagaagaacgtcctacgcctatgttgcaaaaaactcaaaatttttgccatgccaatgcaggacataaaaatgattttgaaaatggttcagctggactctattgaagacctggaggtaacttgtacctggaagctcccaacattggccaagttctccccttatctggggcagatgataaacctgcgcaggcttctgctgtcccacatccacgctagttcttacatctctccagagaaagaggagcagtatatcgctcaatttaccagccagtttctttccctgcagtgcctccaggccttgtacgtggacagcttattcttcttgcgaggacgtttggatcagctcctccggcacgtgatgaacccactcgagaccctgtctattacaaattgcaggctttcagaaggagacgttatgcatctatctcagagcccctcagtaagtcagctatccgttctatccttatcaggagtgatgttgaccgacgtgagtccagagcctctgcaggccctactggagcgggctagtgccaccctacaggatctggtatttgacgagtgtgggatcactgacgatcagctgctggcactgctgcccagcctaagccactgttcgcagttgactactctcagcttctacggaaacagtatttcgatctcggcgctacagtccctgctgcagcacctcattggactgagtaatctgacacacgtcctctacccggtccccctggaaagttatgaggacatccacggaactcttcacctagaacggctggcatatctccatgcacgacttcgggaactcctttgcgaactcgggaggccaagtatggtctggttaagcgccaatccatgtccccactgtggagatcgcactttctacgaccccgagcctattctctgcccctgcttcatgccaaattag

SEQ ID NO: 200523 - DNA, 348 bp, synthetic construct
  misc_feature 1..348: note = Description of Artificial Sequence: Synthetic coding sequence
  source 1..348: mol_type = other DNA
atggagcggcggcggctgtggggcagcatccagagccggtacatcagcatgagcgtctggactagcccgcgcagactggtggagctcgctgggcagagtctcctgaaggacgaggctctggcaatagccgcactggagctgctgccccgcgagctgtttccccccttgttcatggctgcctttgacggacgccattctcagaccttgaaagctatggtccaggcctggccctttacatgcctcccgctcggagtgctgatgaaaggacagcaccttcacctggagacatttaaggcagtgctcgacggactagacgtgctactggcccaagaagtgcggccccggtag

SEQ ID NO: 200524 - DNA, 459 bp, synthetic construct
  misc_feature 1..459: note = Description of Artificial Sequence: Synthetic coding sequence
  source 1..459: mol_type = other DNA
atggagcggcggcggctgtggggcagcatccagagccggtacatctcaatgagcgtgtggacaagcccacgccgtttggtggaactcgctggccaatcgctgcttaaagatgaggccctggcaatcgcagcattggaactgctgcccagagagcttttccccccactgttcatggcggcattcgacgggaggcattcacaaacactgaaggccatggtacaagcatggccatttacatgtctgcccctgggtgtgttgatgaagggacagcatctacatctggaaacgtttaaagccgtgttggacggcctggatgtgttgctcgcccaggaagttcgccccaggaggtggaagctacaggtccttgacttaaggaagaacagccatcaagacttttggaccgtctggtccggaaatagggctagtctgtatagtttccccgagcccgaagctgcttag

SEQ ID NO: 200525 - DNA, 1482 bp, synthetic construct
  misc_feature 1..1482: note = Description of Artificial Sequence: Synthetic coding sequence
  source 1..1482: mol_type = other DNA
atgagcgtgtggaccagcccccggcggctggtggagctggccggccagtcactcctgaaagacgaagcattggcaattgcggctctggagctactgccgagggagctgttcccacccctgttcatggcggctttcgacggccgccactcccagactcttaaggccatggtccaggcttggccctttacctgcctgcccctgggggttctgatgaaggggcaacatctccacctcgaaacatttaaggctgtgctggacggattggacgtgctactggctcaggaagtcaggcctcggcgctggaaactacaggtcctggacttgagaaagaacagtcatcaggacttctggactgtgtggtctggtaaccgtgcttccctctacagcttccctgaaccagaagcagcacagcccatgaccaaaaaacgtaaggtggatggattgtccaccgaagccgagcagccctttatacctgtggaggtgttagtggacctgttcctcaaagagggcgcttgtgacgaactctttagctacttgatcgaaaaagtaaagcggaaaaaaaatgtgctgcgtctgtgctgtaaaaagctcaagatcttcgcaatgccgatgcaggacatcaagatgattctgaagatggtgcaactggacagcatagaggacctcgaagtaacttgtacatggaagcttccaaccctcgcaaagttctcaccctacctggggcagatgattaacctccgaaggctgctgttaagccatatccacgcctcttcgtatattagcccagaaaaggaagaacagtatattgcccagttcaccagtcagttcctctctctccaatgcctacaggcactgtacgtcgatagcttgtttttcctgaggggtcgactagaccaactactgagacacgtgatgaatcctctcgagactctttctatcactaattgtcggctctccgagggggacgtgatgcatctcagtcaaagtccaagtgtatcccagcttagcgtgctgtctctttcaggggtgatgctgacggacgtgtcccctgagcctctgcaggccctcctggagcgcgcgtctgccactcttcaggacctggtgtttgacgagtgtggcatcaccgacgatcagctcctggccctgttgccttccttgagtcattgctctcagctgactaccttgtctttctacggaaattcaataagcatcagtgctctgcaatctctgcttcagcacctgatcggtctgagcaacctgacacatgtgttgtaccccgtgcctcttgagtcctatgaggacatccacggtactctacatctggaaaggctcgcatatttgcacgcccgattacgggagctgctgtgtgaactggggaggccatccatggtgtggctgtcagctaatccatgtccccattgcggcgacaggactttttatgacccggagcctatactgtgtccctgctttatgcctaactag

SEQ ID NO: 200526 - DNA, 606 bp, synthetic construct
  misc_feature 1..606: note = Description of Artificial Sequence: Synthetic coding sequence
  source 1..606: mol_type = other DNA
atggagcggcggcggctgtggggcagcatccagagccggtacatctctatgtcagtgtggaccagtccccggagactggtcgagctggctgggcagtcactcctcaaagacgaggctctagctatcgccgccttagaacttctgcctagagagttatttcctcctctgtttatggccgccttcgacggacggcactcgcagacactgaaagctatggtgcaggcctggcctttcacctgtctgcctttgggagttttaatgaaggggcagcatctgcacctggaaacatttaaagctgtgttagatgggctggacgttcttttggcacaggaagtcagaccacgccggtggaaactccaggttcttgatttgcggaaaaattctcatcaagatttctggactgtatggtctgggaacagagcttctttgtacagcttccccgagcctgaggccgcccagcccatgaccaagaaacgaaaggtggatgggctttcaaccgaggccgagcagcctttcattccagtggaagttctcgtggacctctttctcaaagaaggggcctgtgatgagctgttcagctatctcatcgaaaaagtgaagagatag

SEQ ID NO: 200527 - DNA, 1482 bp, synthetic construct
  misc_feature 1..1482: note = Description of Artificial Sequence: Synthetic coding sequence
  source 1..1482: mol_type = other DNA
atgagcgtgtggaccagcccccggcggctggtggagctggccggccagagcctcctgaaagatgaggcactcgccattgctgccctcgaactcctgccccgcgagctgttccctcccttattcatggccgctttcgatggacgacatagccagacactgaaagcaatggtgcaggcatggcctttcacttgccttccgctcggggttctgatgaaaggccagcatctgcatctcgagacattcaaagcggttttggatggattggacgtcctcttagctcaggaggtcaggcccagacgctggaagttgcaagttctggatctgaggaaaaatagccaccaagacttctggacggtatggtctggcaaccgtgcgagcttatattctttccccgagccggaagcggctcagccaatgaccaagaagcgcaaagtcgatggcctttcaaccgaggctgagcagccattcatccctgtggaagtcctggttgatttgtttctgaaggagggggcatgcgatgaactattttcctacctcattgagaaggtgaaaagaaaaaaaaacgtcttgaggctctgttgcaaaaagctgaaaatctttgcaatgcctatgcaggatattaagatgatcctgaaaatggttcagctcgattctatagaagacctggaggtgacttgcacgtggaagttaccaactcttgctaaattctccccttacctcggacaaatgattaacctgcgccggctacttctgtctcacatccatgctagctcatacatctcaccagagaaggaggagcagtacattgcccaatttacaagtcaatttttaagccttcagtgcctgcaggcactttacgtcgacagtctgttcttcctcaggggacggttagatcagctcctgagacacgttatgaatcccctagagacgctgagcattacaaactgtcgcctatccgagggcgatgtgatgcacctaagccagtccccaagcgtctcccaacttagcgtgctgagcctgtccggagtcatgcttaccgatgtctcaccagaacctttgcaggccttattggaaagagcctctgccaccctgcaggacctggtatttgatgagtgtggaatcacggatgatcagttactggcgctcttgcccagcttgtcccactgctcacagctgacaaccctatcattttatggaaactctatctcaatctctgcgcttcagtccctgctgcaacatctgataggacttagcaatctcacacatgttttgtatccagtgcctctggaaagctatgaggatatccatggcacactgcatttggaaagattggcctacttgcacgccagactgcgagagcttctttgtgaattgggtcgtccctcgatggtgtggctttccgccaatccatgtcctcactgtggtgataggacattctacgaccccgaacccatcctgtgcccttgtttcatgcccaactag

SEQ ID NO: 200528 - DNA, 1530 bp, synthetic construct
  misc_feature 1..1530: note = Description of Artificial Sequence: Synthetic coding sequence
  source 1..1530: mol_type = other DNA
atggagcggcggcggctgtggggcagcatccagagccggtacatcagcatgagtgtgtggacttcgcctcgcagactggtggaactggccggacagtcactactgaaagatgaagctctggctatcgccgctctggaactgctgcctcgggaactttttcctccattgtttatggccgcgtttgatgggagacatagccagacattaaaggcaatggtacaagcgtggccttttacctgtctacctttgggagttctgatgaagggtcagcacctgcacctggaaaccttcaaagctgtattggacggactggatgttctactggcccaggaggtgagaccacgtcggtggaagctgcaagtgctcgatctcagaaaaaactctcatcaggacttttggactgtttggagtggcaacagggcaagcctgtactctttcccagagcctgaggcagcacagcccatgacaaagaaaaggaaagtcgacggcctcagcacagaggccgagcagccttttattcctgtggaggttctcgtagatcttttcctcaaggaaggagcttgcgatgaactgttctcttatctcattgaaaaggtgaagcgcaaaaagaacgttctccggctctgctgtaagaaactgaagatctttgcgatgcctatgcaagatataaagatgatcctgaaaatggtgcagctcgacagcatcgaggaccttgaggtcacttgcacctggaaactgcctacactagccaagttctcaccctatctcgggcaaatgatcaacctccgacgacttctactgagccatatacatgcctcaagctatatcagccctgagaaagaggagcaatatattgcccagttcacatcccagttcctttccctgcagtgcttgcaggcactatacgtcgatagtttgttcttcctgcggggcagattggaccaattgcttagacatgtgatgaatcccctggaaactttgtctataaccaactgccggttatccgagggggacgtcatgcatttgtcccagagcccatcagtgtcccaactgtccgttctgagcctgtctggcgttatgctgactgatgtgagccccgaacccctgcaagctctgctggagcgggcatctgcgacacttcaggatctcgtgtttgatgaatgtgggattactgacgatcagcttctcgccttgctgcctagcctctcccactgttcacagctgacgacgttgagtttctacggaaactcaatctcaatttctgcattgcaaagcttgctgcagcacctcattggcctctccaatctgacacacgtcctgtatcctgtacctctggagagctatgaagatatacacggtaccctccacctcgagcggctggcttaccttcatgctaggttacgggagttgctgtgtgagcttggacgtccgtcaatggtatggctcagcgccaatccctgcccacactgtggggatcggaccttctatgaccctgaaccaattctttgtccctgctttatgcccaattag

SEQ ID NO: 200529 - DNA, 369 bp, synthetic construct
  misc_feature 1..369: note = Description of Artificial Sequence: Synthetic coding sequence
  source 1..369: mol_type = other DNA
atggccgcccccgtggacctggagctgaagaaggccttcaccgagctgcaagccaaagttatcgacactcagcaaaaagtcaagctggccgacatacagatcgagcagttaaaccgaactaagaaacatgcccatctcactgacaccgagattatgactctagtcgacgaaacaaacatgtacgaaggagtgggaaggatgtttatcttgcagagcaaggaggctattcatagccaattgcttgagaagcagaagattgcagaggaaaaaatcaaggaattggagcagaagaaatcctacctggagagaagtgtgaaagaagctgaggacaacatcagggaaatgctaatggcccgtcgggcccagtag

SEQ ID NO: 200530 - DNA, 465 bp, synthetic construct
  misc_feature 1..465: note = Description of Artificial Sequence: Synthetic coding sequence
  source 1..465: mol_type = other DNA
atggccgagaacagcggccgggccggcaagagcagcggcagcggcgctggtaagggagcggtcagcgctgagcaggtgatcgccggattcaaccgacttcgtcaggaacagcgtggacttgcctcgaaagcagcggagctggaaatggaattaaatgagcattctctggtaatcgacactctgaaggaagtcgacgagacaaggaaatgctacagaatggttggtggcgtgctggtggagcgcacggtgaaagaagtcctgcctgccctggagaacaacaaggaacagatccagaagatcatcgaaacccttactcagcagctgcaggcgaaggggaaggagctgaatgaattccgtgagaagcataatatcaggctgatgggtgaagacgagaagccagccgccaaggagaattccgagggcgccggagccaaagccagctcagcaggggtcttggtgtcttag

SEQ ID NO: 200531 - DNA, 405 bp, synthetic construct
  misc_feature 1..405: note = Description of Artificial Sequence: Synthetic coding sequence
  source 1..405: mol_type = other DNA
atggccgccaccatgaagaaggccgccgccgaggacgtgaacgtgacattcgaggaccagcagaagattaacaagttcgctaggaacacatctcgaattaccgagctcaaggaggaaatcgaggttaagaagaaacagctacaaaacctggaagacgcctgcgacgatattatgctggccgatgatgactgtctcatgatcccatatcagatcggcgatgttttcatcagtcatagccaggaagaaacacaagaaatgctggaagaagctaagaaaaacttacaggaggagatcgacgctctcgagagcagagtggagtccatacagcgggtgctggccgatttgaaagtacaactgtatgcaaagtttggctcaaatattaacctcgaggcagacgagtcttag

SEQ ID NO: 200532 - DNA, 465 bp, synthetic construct
  misc_feature 1..465: note = Description of Artificial Sequence: Synthetic coding sequence
  source 1..465: mol_type = other DNA
atggcccagagcatcaacatcaccgagctgaacctgccccagctggaaatgcttaagaatcagttagatcaggaagtggagttcctttctacctccatagcccaactgaaggttgtgcaaactaaatatgttgaagctaaggactgtttgaatgtcctcaacaagtctaatgaaggaaaggagctgctggttcccctgacttccagtatgtatgtgcctgggaagctgcacgacgtggagcacgtgctcatagacgtgggtaccggttactacgtcgagaaaacagccgaagacgccaaagattttttcaagagaaagatcgactttctgacaaagcagatggaaaaaatccagcccgcgttacaagagaaacatgcaatgaaacaagctgtgatggaaatgatgtctcagaagatccaacaacttactgccctcggcgctgcgcaggcaacagctaaggcctag

SEQ ID NO: 200533 - DNA, 330 bp, synthetic construct
  misc_feature 1..330: note = Description of Artificial Sequence: Synthetic coding sequence
  source 1..330: mol_type = other DNA
atggcccagagcatcaacatcaccgagctgaacctgccccagctggaaatgctgaagaatcagctggaccagatgtacgtcccgggcaaattgcacgatgtggagcacgtgctgatagacgttggcacgggctactacgtggagaagaccgctgaggatgctaaagacttctttaaaaggaagattgatttcttgacgaaacagatggagaaaatccagccagcactccaggagaagcacgccatgaaacaggccgtaatggagatgatgtcccagaaaatacaacagctaacagcactgggtgcagctcaggcaacggccaaggcatag

SEQ ID NO: 200534 - DNA, 465 bp, synthetic construct
  misc_feature 1..465: note = Description of Artificial Sequence: Synthetic coding sequence
  source 1..465: mol_type = other DNA
atggcccagagcatcaacatcaccgagctgaacctgccccagctggagatgcttaaaaatcaattggaccaggaagtcgaattcctttccacctccatcgctcaactgaaggtggtgcaaacaaaatacgtcgaagctaaggactgcttgaacgtccttaataagtcaaatgagggtaaagagcttcttgtgcctttgacctcatccatgtacgtccctgggaagctccacgatgtcgagcatgtactgatcgacgtgggaactggttattacgtcgagaaaaccgcagaggacgcaaaggattttttcaaacgcaaaatcgactttctgaccaaacaaatggaaaagattcaacccgccctgcaggaaaagcacgcaatgaagcaagctgtaatggaaatgatgagtcagaaaattcagcagctgacagctcttggggccgcacaggccactgcaaaagcatag

SEQ ID NO: 200535 - DNA, 1281 bp, synthetic construct
  misc_feature 1..1281: note = Description of Artificial Sequence: Synthetic coding sequence
  source 1..1281: mol_type = other DNA
atgggcaccctgagcgcccccccctgcacccagcggatcaagtggaaggggctcctccttaccgcgtcactgctaaacttctggaacctcccaaccacggcccaggtaactatcgaagccgaacccaccaaggtatcagaaggcaaagacgtcttgcttctggtgcataatctcccccagaatctaacagggtacatctggtacaagggacagatgcgagacttgtatcactatattacgtcgtatgtcgttgacggtgaaatcatcatctacgggccggcttacagcggaagagagacagcttactccaacgcctcactgctcatccagaatgtgacccgcgaggatgccggcagttacacccttcatattatcaagggagacgacggtacccgtggcgtgaccgggaggtttaccttcaccctgcatcttgagactcccaaaccaagcatctcgtcttcaaacctgaacccacgagaaaccatggaagccgtgtcactcacctgcgaccctgagactccggacgcatcttacttgtggtggatgaatggccagagtctcccaatgacgcactccctcaagctatcagaaacaaatcggactctgtttctactgggcgtgaccaaatatactgcaggaccttacgaatgtgagatacgaaaccccgtgagcgccagtcgatcagatccagttacattaaatctgctcccgaagctgcccaagccatacatcaccatcaacaacctgaaccccagagaaaataaagatgtgctgaactttacctgtgaacccaagtccgagaattatacctacatctggtggctcaatgggcagtcactaccagtgtctccacgagtgaagagacctatcgaaaacagaatcctgattctgccatcagttacacgaaacgagaccggcccttaccagtgcgagatcagggatcggtatggaggaatccgaagtgaccctgtaaccctgaacgtgctttacggaccagacttgccccgaatatacccgtccttcacgtactaccgaagcggagaggtcttgtacctgtcctgttccgccgatagtaatccccctgcccagtactcctggacaatcaatgaaaagttccagcttccaggccaaaagcttttcatacgccacatcactactaagcactccggcttgtacgtttgttctgtcagaaactcagccaccggcaaagagagcagcaagagcatgacagtggaggtaagcggtaaatggatacctgcaagccttgccattggattttag

SEQ ID NO: 200536 - DNA, 432 bp, synthetic construct
  misc_feature 1..432: note = Description of Artificial Sequence: Synthetic coding sequence
  source 1..432: mol_type = other DNA
atgggcaccctgagcgcccccccctgcacccagcggatcaagtggaaaggcctcttgttaacggcgtctttattgaatttttggaatctgcccacaacggctcaggtcactattgaagcagagccgaccaaggtgtcagagggcaaagatgttttgctgctcgtgcacaatttgccccagaacctgaccggttacatctggtacaaaggccaaatgagagatctgtaccattacattacaagctacgtggtcgacggagagatcattatctatggacctgcctattccggacgcgagactgcttattccaatgcatctcttctcatacaaaatgtgacgcgagaggatgccggttcttatactctgcatatcattaaaggcgacgacggtacgcgcggggttacaggcagatttactttcacgctgcactag

SEQ ID NO: 200537 - DNA, 1287 bp, synthetic construct
  misc_feature 1..1287: note = Description of Artificial Sequence: Synthetic coding sequence
  source 1..1287: mol_type = other DNA
atgggcaccctgagcgcccccccctgcacccagcggatcaagtggaaaggcctgcttctgacagcctctttgttgaacttctggaatctgcccaccactgctcaagtgactattgaagccgaacctacgaaggttagtgaggggaaagacgtgctgttacttgtgcacaaccttccccagaatttgacaggttacatctggtacaaaggccagatgcgcgatctataccactatatcacatcttatgtggttgacggggaaattatcatttatggacctgcctactctgggagggagacagcatattcgaacgcttctctattgatacagaatgtcacaagagaagatgctggttcttatacgctccatattataaagggtgatgatggaaccagaggcgttaccggcagatttacttttactctgcacctggagactcctaaaccctcgatttccagttcaaatctgaatcctcgggagacaatggaagctgtgagcttgacgtgcgaccctgaaactccggatgccagttatctgtggtggatgaacgggcagagtctaccaatgacacactcacttaagctttctgaaacgaatagaacacttttcctgctgggcgtcacaaaatacacagccgggccctatgaatgcgagatcagaaacccagtttccgcttccagaagcgaccctgtcacccttaatctccttccaaagcttcccaagccttacatcaccatcaacaacctcaatccaagggagaacaaggacgttctcaactttacgtgtgaaccaaagtcagagaactacacatacatctggtggctgaacggacagtctctgcccgtgtccccacgcgtcaaaagacctatagagaatcggatcctaatcctgccgagtgttacaaggaacgagactggcccataccaatgcgagatcagagaccgttatggcggtatccgctctgaccccgtgactctgaatgttctctatggacccgatctaccaaggatctaccctagctttacctattataggagtggagaagtgctttacctctcgtgtagcgccgactcaaatcctcctgctcagtattcctggactataaacgagaagttccaactgccgggacagaagctcttcatccggcatattaccacgaaacatagcggattatacgtttgttcagtgagaaacagtgctacaggaaaggagagctctaaaagcatgaccgtggaagtgtcggcatactcctctagcataaattatacaagtgggaataggaattag

SEQ ID NO: 200538 - DNA, 1260 bp, synthetic construct
  misc_feature 1..1260: note = Description of Artificial Sequence: Synthetic coding sequence
  source 1..1260: mol_type = other DNA
atgggcaccctgagcgcccccccctgcacccagcggatcaagtggaagggtctgttgctgacagcaagtctcttgaacttctggaacctaccaacgacagcccaggttactatcgaggccgaacctactaaggtttctgagggtaaggatgtcttgctcctggtccacaacttgccccagaatctgactggatatatctggtataaagggcaaatgagggacctgtaccactacataacttcctatgtcgtggatggggagatcatcatctatggccctgcatattccggaagagagactgcgtactccaacgctagtctgctgattcagaacgtcactcgggaagatgctggctcgtacacactgcacattatcaagggagacgacggcacacgcggggttaccggtcgattcacattcacactacacctggagactccaaagccttccattagttcgagtaatctgaaccctagagagaccatggaggccgtcagtctcacctgtgatccggagacacccgatgctagctatctgtggtggatgaacgggcagtcgctcccaatgactcattccctgaaattgagcgaaaccaacagaactctgttcctgctaggtgtcactaagtataccgcaggaccctatgagtgcgagattcgcaaccccgtctcagcctcccgatctgatccagtaactttaaacttgctgccgaagctgccaaaaccttacatcacaattaacaatcttaatccaagagagaataaggacgttctgaatttcacttgtgagccaaagtcagaaaactatacctacatctggtggttaaatggacagtcactgccagtcagtccgcgcgtcaagcgccccatcgagaatcgcatcttgatcctgccaagcgtcaccagaaatgagaccggcccctatcagtgcgagatccgtgaccgctatggcgggatccgaagtgaccccgtgacactgaatgtgctgtacggccctgatctgccacgaatttatccatcttttacttactatcgcagtggagaagtcttgtatttatcttgtagcgcagattcgaatccaccagctcagtactcttggactattaatgaaaaattccaattgcctggtcagaaattgttcattaggcatatcactaccaaacactcgggtttatacgtgtgtagcgtgcgtaatagtgccaccggcaaggaatcgtctaagagcatgaccgtcgaggtttcagattggacggtcccttag

SEQ ID NO: 200539 - DNA, 1254 bp, synthetic construct
  misc_feature 1..1254: note = Description of Artificial Sequence: Synthetic coding sequence
  source 1..1254: mol_type = other DNA
atgggcaccctgagcgcccccccctgcacccagcggatcaagtggaagggactcttgctcaccgctagcctgctcaatttctggaacctgcctacgacggctcaggtgactatcgaggctgagcccaccaaagtgagcgagggcaaggacgtgcttctcctggtccataacctgccccagaacctgaccggatatatctggtataagggacaaatgagggacttgtatcactacatcacatcctacgtcgttgacggggaaatcataatctatggcccagcttactccgggagagagaccgcctactccaatgcttccctgctgatacagaacgtgactcgggaagacgccggatcctatactcttcacattatcaagggggatgatggcacacggggagtcaccgggaggtttaccttcacactgcatctggagacccccaaaccctcaatatcatcatcaaacttgaaccccagggagaccatggaggcagtgagtctcacttgcgatccggagacacctgatgcttcatacctgtggtggatgaatggccagtcattgccaatgacccacagcctaaaactttcagagacaaacaggactcttttcctcctcggggtgacaaagtacaccgccggcccatacgagtgtgagattagaaatcccgtcagcgcatcccggtctgacccagtgactttaaacctccttcccaagcttccaaagccctatatcacaattaataaccttaatcccagggaaaacaaggatgtcttgaatttcacctgcgagcctaagagtgagaactacacctatatctggtggctcaatggccagtcactgcctgtctcccctcgggtgaaaagacccatcgaaaatcgcatccttatcctacccagcgtcaccaggaacgagactggaccctaccaatgcgagatcagggatcggtatggcggcatacgctccgaccccgttactctgaacgtcctgtacggaccagatctgccacggatttatccttcattcacatactacagaagcggtgaggtcctgtacttatcatgctctgcagattccaatccacccgcgcaatatagttggaccatcaacgaaaagttccaactgcccggccagaaattatttattcggcacattacgaccaaacactccggactgtatgtatgctcagtcaggaactccgcaactgggaaggagtcctcaaaatccatgacggtggaagtgagcgaagccctttag

SEQ ID NO: 200540 - DNA, 642 bp, synthetic construct
  misc_feature 1..642: note = Description of Artificial Sequence: Synthetic coding sequence
  source 1..642: mol_type = other DNA
atgggccccctgagcgcccccccctgcaccgagcacatcaagtggaaaggcctgctgctgactgtggagaccccgaaaccgagtatttctagctccaatctgaatcctcgtgaagccatggagacagtcatcctgacctgcaacccggaaacccctgacgcttcctacctgtggtggatgaatggacagagtctgccaatgactcaccggatgcaactctcagagaccaatcgcacactgttcctgtttggcgttacaaagtacactgcggggccttatgagtgcgaaatctggaactcaggctctgcaagtcgtagcgaccctgtaaccctgaacctgctgcacggccccgatctgcctaggatcttcccgtccgtgacatcctactattcaggagagaacctagatctgagctgctttgcaaactcgaatcctcctgcccagtacagttggacgatcaacggcaagtttcagctcagcgggcagaaattgttcatcccacagatcacgcccaagcacaacggcctatacgcctgtagtgccagaaatagcgctacaggcgaggagtcatccactagtctgaccattagagtgatcgcccccccaggcctgggcacctttgccttcaataacccaacctag

SEQ ID NO: 200541 - DNA, 1008 bp, synthetic construct
  misc_feature 1..1008: note = Description of Artificial Sequence: Synthetic coding sequence
  source 1..1008: mol_type = other DNA
atgggccccctgagcgcccccccctgcaccgagcacatcaagtggaaggggctgctgctgactgccctacttttgaatttctggaacctgcccacaacagcccaggtgatgattgaggctcagcctccaaaggtgtccgagggcaaagacgtgcttctgctggttcacaacctaccccagaatctgactggatatatctggtataaaggtcagatcagggatttataccactacatcacttcctatgttgttgacggccagataatcatctacggacccgcttattcaggaagggaaactgtgtactcaaacgccagcctgctcattcaaaatgtgaccagggaggacgccggctcctacacactgcatatcataaagaggggagatgggactcgcggagtgacaggttactttacgttcaccctctacctggagacaccaaagccatccataagctcatctaatttgaatccccgcgaagcgatggagacagtgatcttaacatgtaatccagaaacacccgatgccagctatctttggtggatgaacgggcagtctttacccatgacgcaccgcatgcaactgtcagaaacaaacagaaccctctttctgttcggcgtgacaaaatacaccgccggcccgtatgagtgcgagatctggaatagtgggtccgcctcccggagcgacccggtcacactgaatttactgcacgggccggacctgcccaggatttttccttccgtgacatcttactactctggcgagaacttagacctgtcctgctttgctaactcaaacccaccggcacagtactcatggaccatcaatgggaagttccagctgtccgggcagaagcttttcattccacagattacccctaagcacaatggcctctacgcttgtagcgcacgaaacagcgcgacaggcgaggaatcttctacgtcactgacgatcagggtgatagctccacctggcctaggtacgtttgcgtttaataaccctacgtag

SEQ ID NO: 200542 - DNA, 1008 bp, synthetic construct
  misc_feature 1..1008: note = Description of Artificial Sequence: Synthetic coding sequence
  source 1..1008: mol_type = other DNA
atgggccccctgagcgcccccccctgcaccgagcacatcaagtggaagggcctgctgcttaccgcacttctgctgaacttttggaatctccccacaacagcgcaggtaatgatcgaagcgcagcccccaaaggtttccgaaggcaaggatgtgctgctgcttgtgcacaacctgccccagaatcttactggttacatctggtataagggccagatccgggatctctaccattacatcaccagttatgtggtcgacggtcagatcatcatttacgggcccgcttattctggacgggagacagtctattcgaacgcatccctcctgatccaaaacgtgacgagggaggatgcaggatcatacaccctgcacatcatcaaacggggtgacggaactagaggagttactggctatttcacattcacactttatctggagacaccaaagcctagtatttctagctctaatttgaatcctcgggaggcgatggaaacagtcatactgacctgcaaccccgaaacgccagatgcctcctacttgtggtggatgaacggtcaatcgctgccaatgacacatcgtatgcagttgagcgaaacaaataggacactgttcttgttcggcgtgactaagtacacagccggaccgtatgagtgcgagatctggaattccggatctgcgtccaggtcggacccagtgactctcaatcttttacatgggcccgacctgcctcggatctttccatcggtgacaagctactattccggtgaaaatctggatctcagctgcttcgcaaacagcaacccacctgcgcagtatagctggactatcaacgggaagttccagctgtctggccaaaaactcttcatcccacagattacacccaagcacaatggtctatatgcatgcagcgccagaaatagcgcaacaggcgaagaatccagtaccagtctgaccatccgggtgatagcaccgcccggtctaggaacttttgctttcaataatcctacctag

SEQ ID NO: 200543 - DNA, 642 bp, synthetic construct
  misc_feature 1..642: note = Description of Artificial Sequence: Synthetic coding sequence
  source 1..642: mol_type = other DNA
atgggccccctgagcgcccccccctgcaccgagcacatcaagtggaaggggctgctgctcaccgtcgagacgccaaagccctcaattagcagtagtaacttgaatccacgggaggctatggaaactgtcatcttgacgtgcaaccctgaaacgcctgatgcctcctacttatggtggatgaacggccagtcccttccaatgactcatcgcatgcagctatccgagacaaacagaacgctgttcctgttcggggttacaaaatatactgccggcccatacgaatgtgaaatctggaactctgggtcggcatctcgaagtgatcccgtgacactgaatctccttcacggacccgatttaccacgtatttttccttctgtgaccagttactactcgggtgaaaacctagacttaagctgttttgctaatagcaacccacccgcccagtacagctggacaattaacgggaagtttcagctctccgggcagaagctgtttatcccccagataaccccaaaacataacggcttgtatgcatgtagcgcacggaattccgccactggagaggagagcagtacaagtcttaccattcgggtcatagcccctcctggacttgggaccttcgccttcaataatccaacctag

SEQ ID NO: 200544 - DNA, 1008 bp, synthetic construct
  misc_feature 1..1008: note = Description of Artificial Sequence: Synthetic coding sequence
  source 1..1008: mol_type = other DNA
atgggccccctgagcgcccccccctgcaccgagcacatcaagtggaagggactgctggtaactgctagtctgctcaatttctggaacctcccgaccaccgcccaggtgacaattgaagcgcagccgcccaaagtgtccgaagggaaggacgttctgttacttgtgcacaatcttccccagaacctgacaggctatatttggtataaagggcaaatccgcgatttgtatcactacataaccagttacgtcgtggatggtcagataatcatctacggtccagcctactcgggcagagaaacagcatactcaaatgccagtctcctgatccagaatgtcacacgtgaggacgccggttcgtacacactgcacattatcaagcgaggggatggaacgagaggggtaacagggtactttaccttcacactctacctcgaaacaccgaaacctagcatcagcagctccaatctgaatccgagggaggccatggagaccgtcatacttacatgtgaccctgagacaccagatacatcctaccagtggtggatgaacgggcagtctttaccgatgactcataggttccagctgagtgaaaccaatcggaccttattccttttcggtgtgaccaagtacacagccggaccttacgagtgcgaaattagaaattccgggtctgcctctcggagcgatcctgtcacattaaacctgttgcacggacctgatttgccaaggatccatccctcctataccaactaccgtagcggtgacaatttgtacttgtcttgcttcgcaaattccaatcctcccgcccagtactcctggacgatcaatggcaaattccagcagtctggccagaatctgtttataccccagattaccactaaacactcagggctgtatgtgtgttcggtgagaaattccgccaccggtgaagaaagctcaacgtctctgactgttaaggtgtccgcttcgacacggattggcctgctgcccctacttaatcccacatag

SEQ ID NO: 200545 - DNA, 1008 bp, synthetic construct
  misc_feature 1..1008: note = Description of Artificial Sequence: Synthetic coding sequence
  source 1..1008: mol_type = other DNA
atgggccccctgagcgcccccccctgcaccgagcacatcaagtggaaaggcctgttggtcactgccagcctgctgaacttttggaacctccccacaactgcacaggtgaccatcgaggcacagccgccaaaggttagtgagggcaaggatgtgttactgctcgtgcacaatcttcctcagaatcttaccggctacatttggtataagggccaaattcgcgacttatatcattacataacctcatatgtcgtcgacggccaaattatcatctacgggcctgcctattctggacgagaaaccgcttacagcaatgcaagtcttctcatccagaacgtgacgcgagaggacgcaggatcttacactctccacatcatcaaaagaggtgacggcaccaggggcgttactggctattttaccttcactctgtatctcgagacccctaagccatcaatttcttccagcaatctgaacccaagggaggcaatggagacagtaatacttacctgtgatcccgagacacccgacactagttaccagtggtggatgaacggacaatccctgcctatgacacatcgcttccagttatcagagactaacaggacgctctttttgtttggcgtgacgaagtacaccgcaggaccatatgaatgcgaaattcgcaacagcggctctgcatctaggtctgacccagtcacactgaacctgctccatggtcctgatctaccaaggatccatccaagctataccaactaccggtccggtgacaatctttatctcagctgttttgctaatagcaaccctcctgcacaatacagctggaccatcaatggcaaattccaacagtcgggacagaatctgttcatcccccaaatcacaaccaaacattccgggctgtatgtatgcagtgtgcgcaatagcgcgaccggggaagaaagtagcactagtctaactgtcaaagtatccgcatcgacccgcattgggttgctcccactcctgaatccaacgtag

SEQ ID NO: 200546 - DNA, 1008 bp, synthetic construct
  misc_feature 1..1008: note = Description of Artificial Sequence: Synthetic coding sequence
  source 1..1008: mol_type = other DNA
atgggccccctgagcgcccccccctgcaccgagcacatcaagtggaaggggctgctggtgaccgctagtttgctgaacttttggaacttacccaccactgcccaggtgactatcgaggcgcaaccacctaaggtgtcagagggaaaggacgtgctgctactggtacataacttgccacaaaacctgaccgggtacatctggtacaagggtcaaattagagacctgtatcactatattacctcttacgtcgtggacgggcagattattatctacggccccgcttactcaggccgggagacggcctactctaatgcctctcttctgattcagaatgttactcgggaggacgccggaagttacactctgcatataattaaaaggggggatggcacaaggggcgtaacaggctatttcacgtttactctgtatctcgaaactccaaaaccatcgattagtagcagcaatctgaaccctagggaagccatggaaacagtcatcctgacctgtgaccctgaaactccggacacctcatatcagtggtggatgaacggacagagcttgccgatgacccatcgtttccagttgagcgagaccaaccgaactctctttttatttggtgtgaccaaatacaccgccgggccatacgagtgtgaaattcggaattcaggtagcgccagtagatcagaccctgtgacactgaatctgctgcacgggcccgaccttccacgtattcacccttcgtacaccaattacagatcgggcgataacctgtatttgagttgtttcgcgaacagtaatcctccggcacagtacagctggactattaatgggaagtttcagcaatcaggtcagaacctctttattccacagattaccacaaagcactccggcctgtatgtctgtagcgttcggaactccgccaccggagaagagagcagcacttcccttacagtcaaggttagcgcatctaccagaatcggactgctgcctcttctcaaccccacatag

SEQ ID NO: 200547 - DNA, 1287 bp, synthetic construct
  misc_feature 1..1287: note = Description of Artificial Sequence: Synthetic coding sequence
  source 1..1287: mol_type = other DNA
atgggccccctgagcgcccccccctgcacccagcggatcacctggaaaggattacttctgacggctctgcttcttaacttctggaatctgcccaccaccgctcaggttactattgaagcggaaccgaccaaggtctccaagggtaaggacgtgttgctgctggtgcacaaccttcctcagaatttggcagggtacatttggtacaaaggccagatgaaggacctttatcattacatcaccagctatgtcgtcgacggccagatcattatctatgggcccgcttactccggcagagagactgtttactctaatgcctctctgttaatacagaacgtaactcgtgaggacgccggatcttataccctccacatcgtaaaacgcggcgacggtaccagaggtgagacaggacacttcacatttacattgtacctcgagactcccaagcctagtatttcatctagcaacttatatccccgcgaagacatggaagctgttagcttgacctgcgatccggaaacacctgatgccagttatctgtggtggatgaacggccagagtctgccgatgacacacagtcttcagttaagcaaaaacaagaggacactgtttttattcggtgtcactaaatacacagccgggccctacgagtgcgaaatcagaaatcctgtttccgcctcccgaagcgatcccgtaaccctgaacctgctgcctaaactgccaaagccttacattacaatcaataacctgaatccaagagaaaacaaggatgttcttgctttcacctgcgagcctaagagcgaaaactacacctatatctggtggctgaacgggcagtctcttcccgtgagtccacgggtgaaacgacccatagaaaacagaatccttatcctgcctagcgtgactagaaacgaaacaggaccgtaccaatgtgagatccaggatcgatatggtggaattcgcagctatcccgtgacactgaatgtgctctatggaccagatctgcctcggatatatccttcctttacctactaccacagcggagagaacctgtatctgtcttgtttcgcagattccaacccacccgctgaatactcatggaccatcaacgggaagtttcagctgtccggacaaaagctctttattccccagattactaccaagcatagcggtttgtatgcatgtagcgtacgtaattctgcaactggtatggaaagctcaaagtctatgactgtgaaggtttccgcaccaagcggtaccgggcatctgcccggactgaacccactttag

SEQ ID NO: 200548 - DNA, 981 bp, synthetic construct
  misc_feature 1..981: note = Description of Artificial Sequence: Synthetic coding sequence
  source 1..981: mol_type = other DNA
atgggccccctgagcgcccccccctgcacccagcggatcacctggaaaggcgttctcctcaccgccagtttgctcaatttctggaatcctccaactacagcgcaagtgaccattgaggcacagccgcccaaggtttcagagggaaaagatgtcctgctgctcgttcataacctgcctcagaatcttgctggatatatctggtacaaaggtcagatgacctatctctatcactatattacaagttatgtagtagatggccagaggatcatatatggcccggcgtacagtggccgggagcgggtctacagcaacgcatctctcctcatccagaacgtgacacaggaagacgcaggctcttacaccctgcatatcatcaaaagacgtgacggaactggaggcgtgacggggcatttcaccttcacattgcacctcgaaacccctaaaccttctattagctccagtaacttaaatccgagggaagccatggaagctgtgatcctgacgtgcgaccctgccacccccgctgccagttaccagtggtggatgaacggacagtccctgcctatgactcaccgattacaattgtccaaaacaaacagaaccctgttcatcttcggagtcacaaaatacatcgcaggtccctacgagtgcgagataagaaaccccgtctccgctagtaggagtgatcctgtgacgttgaatcttctacacggtcctgatctccccagcatatacccttcgtttacgtactaccgtagcggcgagaacctgtatttgagctgtttcgctgagagcaatccccgcgcccaatacagctggacaattaacggtaagttccagctgagtgggcagaagctgtccattccacagattaccaccaaacatagcggcttatacgcgtgttctgttcgtaacagtgcgacaggaaaagaaagttctaagagcattaccgtgaaagtgtccgattggattctaccatag

SEQ ID NO: 200549 - DNA, 1260 bp, synthetic construct
  misc_feature 1..1260: note = Description of Artificial Sequence: Synthetic coding sequence
  source 1..1260: mol_type = other DNA
atgggccccctgagcgcccccccctgcacccagcggatcacctggaagggagttctgctgaccgcatctctcttgaacttttggaatccccctactactgctcaggtgactatagaggcccagccccccaaggtgtccgaagggaaagatgtgctattacttgttcacaatttacctcagaatctggctggttacatctggtacaaggggcagatgacatatctctaccactacattacatcttatgtggtggacgggcaaagaataatttacgggcctgcatactccggacgtgagagagtctattcaaatgcaagcctccttatacaaaatgtaacacaggaggatgcgggttcttatacactccatataatcaaaaggagggatgggactggaggggtgaccggccactttacttttaccctccacctggagaccccaaaacccagtatcagctcttctaacctgaacccccgagaggcgatggaggctgtaatcctaacgtgcgaccctgccactccagccgcctcctaccaatggtggatgaacgggcaaagtctaccaatgacacatcgattgcaattgagtaagactaaccgaacattgtttatattcggggtaaccaagtatatcgccggcccttatgaatgtgaaatccgaaatcccgtctctgcatcacggtctgatcctgtgaccctcaatttgttgcccaagttatctaaaccctatattaccatcaataatctgaaccctagggagaataaagacgtcctgactttcacctgcgagcccaaatctaagaactacacctacatatggtggttaaacggccaatcattgcctgtgagtccgcgtgtcaaaagacccatcgagaacaggatcctcatcctgccaaatgtgacaagaaatgagaccggcccttaccaatgcgagatcagggaccgctatgggggcatacggagcgaccctgtcacactgaatgtcctgtatggacccgatctgccaagcatttacccttcgtttacatactacagaagtggagagaacctgtacctgagctgctttgccgagagcaatccccgtgctcaatactcctggacaattaatggaaaattccaactttccgggcaaaaactgtcgatcccacagataacaaccaaacactctggcctctacgcgtgttctgtgagaaactctgccaccgggaaagagtccagcaaatccatcacagtaaaggtctctgactggattctgccctag

SEQ ID NO: 200550 - DNA, 981 bp, synthetic construct
  misc_feature 1..981: note = Description of Artificial Sequence: Synthetic coding sequence
  source 1..981: mol_type = other DNA
atgggccccctgagcgcccccccctgcacccagcggatcacctggaagggcgtactcctgaccgcctcccttctgaatttttggaatccccctaccactgctcaggtgacaatcgaggcacagccaccaaaggtttccgagggcaaggatgtgctcctacttgttcacaatttgccacaaaatctggccggatacatatggtacaaaggccagatgacgtacctctatcattatattaccagctatgtcgtcgatggccaaagaataatctacgggcccgcttattctggacgggaaagagtgtactcaaacgccagtttgctcatccaaaacgttacacaggaagacgccggtagctacacactgcacatcatcaaaagaagggacggcacaggcggggttactggtcattttacattcacactgcaccctaagctgtccaagccctatatcactatcaataatcttaaccctagagaaaataaagatgtcctgacgtttacttgcgaaccgaaatccaagaattatacctatatttggtggttgaacggtcagtcactgccagtgtctcctcgggtgaagagaccaatagagaacagaatcttgatcctcccaaacgtgacacgcaacgagactgggccttaccagtgcgaaatcagggaccgttatgggggtattagaagtgacccagtcactttgaacgtcctctatggtccggatctccccagcatctatcctagtttcacttactaccgaagcggtgaaaacttgtacttgtcatgcttcgctgagtctaatcccagagctcagtactcctggaccatcaacgggaagtttcaactgagtggacaaaaattatcgatcccgcagatcactactaaacattccggactttatgcctgctcagtcaggaattccgccactggaaaggaaagctcaaagagtattaccgtaaaggtgtccgattggattctgccttag

SEQ ID NO: 200551 - DNA, 1008 bp, synthetic construct
  misc_feature 1..1008: note = Description of Artificial Sequence: Synthetic coding sequence
  source 1..1008: mol_type = other DNA
atgggccccctgagcgcccccccctgcacccagcacatcacctggaaaggcttgttgctcacagcctcactccttaacttctggaacctgcccataacggctcaagtgacaatcgaagccctgccaccaaaggtgagtgagggcaaggatgtgctgctgctagtccataacctacctcaaaacctcgccggctacatctggtataaaggacagctgatggacctatatcattatattaccagctatgtggtggacggtcagattaacatctatggtccagcttacaccggcagagaaaccgtgtacagtaacgccagcttgctcattcagaacgtgacgcgagaggatgcaggaagctatacccttcatatcataaagagaggtgatcgcactcgtggcgtcactgggtactttacatttaatctgtatctgaagcttccgaagccatacattactattaataactccaagccacgcgaaaataaagatgttttggccttcacgtgcgagcctaaatcggaaaactacacttatatctggtggctcaacggacagagcctgcctgtgtctcctcgggtcaaacgaccaattgagaaccggattctcatactgccgtcagtcacccgaaacgagacaggcccctatgagtgcgagatccgggatagagatggcggtatgagatcagaccccgtcacactgaatgtcctgtacggccccgatctcccctcaatctacccctcattcacgtattataggagtggagaaaatctctacctgtcctgcttcgccgagagcaaccctccagcggagtacttctggactatcaacggtaagttccagcagtccggccagaagctgagcatcccccagataacaacgaaacaccgaggtctgtatacatgcagtgtccgcaattccgcaacaggaaaggaatcatcaaagtcaatgacagtggaggtgagcgccccttctgggatcggccggctgccactgcttaaccctatctag

SEQ ID NO: 200552 - DNA, 1008 bp, synthetic construct
  misc_feature 1..1008: note = Description of Artificial Sequence: Synthetic coding sequence
  source 1..1008: mol_type = other DNA
atgggccccctgagcgcccccccctgcacccagcacatcacctggaagggtttacttcttactgcttccctgctgaacttctggaacctgcctataaccgcccaggtcacgatagaggccttaccgccgaaggtatccgagggcaaggatgtgcttctactggtgcacaacttaccccagaatctagcaggatatatctggtataagggacagctaatggatctctaccactacatcactagttatgtggtggatggacaaataaatatttatggaccggcctatactggccgcgaaaccgtgtatagtaatgctagccttctgattcagaacgtgactcgcgaagacgccgggtcctatactcttcacatcatcaagagaggtgatcgaacgaggggggtgactggttactttacatttaacctctacttgaaactgcccaaaccatacatcactatcaataattccaagccccgtgagaacaaggacgtcctcgcgtttacctgcgaaccgaaatctgagaattacacatacatttggtggttaaacggacagtctctgccagtgagtccacgcgttaaaaggcccattgagaataggatcctgatcctccccagcgtgacccgcaacgagacggggccttacgaatgcgagatccgagatagggacggggggatgcggagtgaccctgtcaccctcaatgtcctctacggaccagacctgcccagcatctatccctctttcacctattatagaagtggggagaacctgtatctctcatgttttgccgagtcaaatccgcctgccgagtacttctggactattaacggaaaatttcagcagagcggccagaagcttagcatccctcagattaccacaaaacatcgaggcttatatacatgtagtgtgcggaactctgccactgggaaagagtcctcaaagtcaatgacagtagaggtgtctgcgccaagcggaatcggccgcctgcccctgctcaaccccatttag

SEQ ID NO: 200553 - DNA, 1008 bp, synthetic construct
  misc_feature 1..1008: note = Description of Artificial Sequence: Synthetic coding sequence
  source 1..1008: mol_type = other DNA
atgggccccctgagcgcccccccctgcacccagcacatcacctggaagggcctgcttctgacagcttcgctcctcaatttctggaatttaccaattaccgcacaggtcactattgaggcactccctccgaaggtctccgaaggcaaagatgtccttctactcgtacataatctccctcagaaccttgccgggtacatatggtataaaggccaactcatggacttgtatcactatatcacaagctatgtcgtcgatgggcagattaacatttacgggcccgcatacacaggtcgagagacggtctacagcaatgcatctcttctgatccagaatgttacacgcgaggacgccgggtcttacacgctgcacattataaagcggggcgaccgaactagaggggtgacaggttattttacgtttaacttgtatctcaagctgcctaagccttacatcacaatcaataattccaaaccaagggaaaataaggacgtgcttgcattcacctgcgaaccaaaatcagaaaactacacgtacatctggtggctgaatggacagtcactgcccgtgagccctcgggttaaacgccccatcgaaaaccggatcctaatactcccgagtgtgacacgaaacgaaacaggtccatacgaatgcgagattagagacagagacgggggaatgaggtccgatccagtaacactcaacgtgctctatgggcctgatctaccctcaatctacccttcatttacctactatagatcaggcgaaaacttgtacctatcttgtttcgccgaatcgaaccctcctgcagagtatttctggacgataaatggtaaattccagcaatctggtcagaagttatctataccccagattacaactaaacaccgtggattgtatacttgttctgttcgcaactcagcaactggcaaagaaagctccaagtcgatgaccgtggaggtctccgcccccagcgggattggtcgtcttcctctcctcaaccccatttag

SEQ ID NO: 200554 - DNA, 1275 bp, synthetic construct
  misc_feature 1..1275: note = Description of Artificial Sequence: Synthetic coding sequence
  source 1..1275: mol_type = other DNA
atgggccccctgagcgcccccccctgcacccagcacatcacctggaaaggtctgctgcttaccgcaagccttctgaacttttggaacttgcctacaacggcccaggttatcattgaagccaaaccacctaaggtgtcagagggcaaggatgtgctgctgctggttcataaccttccacagaacctgactggatacatatggtataagggccagatgaccgacttgtaccattatataaccagttacgtggtgcatggccagatcatctatgggccagcatactcaggtagagaaaccgtatatagcaatgcctctctgttaatccaaaatgttactcaggaagacgcgggcagctatacgctgcacattattaaacgaggcgatggcactggaggggtgacaggatacttcacggtaaccctgtattctgagacacccaagccttcaataagtagttctaatttgaatcctagagaagtcatggaggcggtcagactaatctgtgaccctgagacacccgatgcatcatatctgtggctgttgaatggtcagaatctcccgatgactcatcggttgcaactctccaagacaaataggacattgtacctcttcggagtgactaagtatatcgccggaccttacgagtgtgagattaggaacccagtctcggcctcaaggtccgaccctgtaaccttgaacctgcttcccaagcttccaatgccctatatcaccattaataatctgaatcccagagagaagaaggacgtgctcgcttttacctgtgagcctaagtcacggaactacacgtatatctggtggctgaacggccagagtctgcccgtgtcaccacgggtgaaaagacccatagagaaccgtatcctcatcctcccaagcgtgactcggaacgagacagggccctatcaatgcgagattagagaccggtatggcggtatacgtagtaatcctgtgactcttaatgtgctgtacggacctgatctcccgcggatctatccttcttttacatattatcgctctggcgaaaatttggacctctcctgcttcgccgattctaatccccctgccgagtacagttggaccatcaacggcaagttccagctgtcgggacaaaagctgtttatcccacagatcaccacaaatcactctgggctttacgcatgctcggtgaggaatagcgctactggcaaagaaatcagcaagtccatgatcgtgaaagtcagcggaccctgccatgggaaccaaacagagagtcactag

SEQ ID NO: 200555 - DNA, 1308 bp, synthetic construct
  misc_feature 1..1308: note = Description of Artificial Sequence: Synthetic coding sequence
  source 1..1308: mol_type = other DNA
atgggccccctgagcgcccccccctgcacccagcacatcacctggaagggcctactcttgactgcaagtttgctgaatttctggaacctgcctacaacagcgcaggtcatcatcgaagccaagcctcccaaagtctccgaaggaaaagacgtcttgctgctcgtccataacctgccacagaatctcaccggctacatctggtataagggccagatgacagacttgtaccactatatcacatcatatgtggtgcacggtcaaatcatttacggccccgcgtatagcgggcgggaaactgtgtactccaacgccagtcttttgattcagaacgtgacccaggaggacgctggctcctacacacttcatattattaagagaggggatggtacaggaggtgtcaccgggtactttacagtcacactgtactctgagacgcccaaaccgtccatttcctcatctaatctgaaccccagggaggtgatggaggccgtgcggctcatctgcgacccagaaactccggacgcaagctacctatggcttctcaatggccaaaacctaccgatgacccataggcttcagctatctaagaccaatcgaacactctatctgttcggagtgacaaagtatattgctggaccatatgagtgcgagatccggaaccccgtgagcgcttcacggagtgatccggtgaccttaaacctcctgcctaaactgccaatgccttacattacgattaataatttgaacccaagagaaaagaaggacgtgctggcttttacttgcgaacctaaatctagaaactatacctacatctggtggctgaatgggcagtctttacccgtttcgccacgggtgaagaggcctatagagaacagaatcttaatcctgccatccgtgacacggaacgagactggaccctaccagtgcgagattcgggatcgttatggaggcatccgatcaaacccagtgaccttgaacgtcctctatggacccgaccttcctcgtatttacccaagttttacatattaccgaagcggtgaaaatttggacctgagctgcttcgctgactcgaatccaccagcagagtattcttggacgattaacggcaagtttcagctctctgggcagaagctgttcatcccacaaataaccaccaatcatagcggtctgtatgcgtgtagtgttaggaacagtgctactgggaaggagatttctaaaagtatgattgtgaaagtgtccgagacggcgtctcctcaggtgacatatgccggcccgaacacttggtttcaagagattctgctcctgtag

SEQ ID NO: 200556 - DNA, 606 bp, synthetic construct
  misc_feature 1..606: note = Description of Artificial Sequence: Synthetic coding sequence
  source 1..606: mol_type = other DNA
atgggcggcgacgagaaccggggcgtgaccggccacttcaccttcacattatacctcgagactcccaagccaagcatatcctccagtaagctgaatcctcgggaggccatggaggctgtgtcactcacttgcgatcccgaaacccccgacgcgagttatctgtggtggatgaacgggcagagcctgccgatgtctcaccggctgcagctgagcgagaccaatcggacactgttcctgttaggagtgactaagtataccgctggcccttacgaatgcgaaatacgcaatcctgtgtcagcctctcggtccgacccctttacacttaatctgctgcatggtcccgacctaccaagaatttacccctcatttacatactaccggagcggcgaggtgctgtacctaagttgctcagcagacagtaaccccccagcccaatattcttggacgattaacggtaaatttcaactgtcaggccagaagctcttcatccctcagatcactacaaagcattcaggcctatacgcatgttctgtccgaaactctgcaacagggaaggagagcagcaagtcaatgactgtgaaggtctctgactggactctcccttag

SEQ ID NO: 200557 - DNA, 1281 bp, synthetic construct
  misc_feature 1..1281: note = Description of Artificial Sequence: Synthetic coding sequence
  source 1..1281: mol_type = other DNA
atgggcctgctgagcgcccccccctgcacccagcggatcacctggaagggcctgcttctcaccgcaagtcttctgaatttctggaacccacctaccacggcacaggtcacaattgaagcgcaacccacgaaggtaagcgagggcaaggacgtgttactgttggttcacaatctgccacagaacctgaccggttatatctggtacaaagggcagatcagggacctgtatcactacattacctcttacgtggttgatggccaaatcattatttatggacctgcctatagtggccgcgagaccatctacagcaatgcctcattgctcatccagaacgtgacacaggaagacgccggatcctacacacttcatattattatggggggcgacgaaaaccggggcgtgacgggccacttcacttttaccctttacttggagacacccaagccgtcaattagtagctcaaagctgaacccaagagaggccatggaggcggtctcattgacttgcgaccctgagacccctgatgcgagctatctgtggtggatgaacggacagtctctgccaatgagccacaggctacagttgagtgagacaaacagaaccctcttccttctcggggtaacaaaatatactgcaggtccctacgaatgtgagattcgaaaccctgtcagcgcaagccgatccgatcctttcacactgaatcttctccctaaactccccaaaccctacatcactatcaataacctcaagccgcgggagaacaaagacgtgttgaattttacctgcgaaccaaagagtgagaactacacatatatctggtggttgaatgggcaatccttaccggtttccccgagggtgaaacgtcccattgagaatcgcattctaatactgccttccgtcactagaaacgagactggaccctatcaatgcgaaattcgtgaccaatatgggggcatccggagttatccggttacactgaatgtgctatatgggcccgatctgcccagaatctacccatcattcacatactaccggagcggggaggtcctctacctgtcgtgttctgcagatagcaatcctccagcccagtactcttggaccatcaatggcaagttccagcttagcgggcagaagctcttcatcccccagattactacgaaacattctggactgtacgcctgcagtgtacgcaactctgccaccggcaaagagtctagcaaatctatgactgtcaaagtttccggaaagcgcataccggtcagtctggcgatcggcatttag

SEQ ID NO: 200558 - DNA, 717 bp, synthetic construct
  misc_feature 1..717: note = Description of Artificial Sequence: Synthetic coding sequence
  source 1..717: mol_type = other DNA
atgagccaccggctgcagctgagcgagaccaaccggaccctgttcctgttaggagtcaccaagtacacagcgggcccctacgaatgtgagatccggaaccctgtgtccgcctccaggtccgatccatttactctgaatctgcttcctaagctccccaagccttacatcactatcaataaccttaagccgagagaaaataaagatgtgctcaattttacctgtgagcctaaaagcgaaaactatacctacatatggtggctgaacggccagagcttacccgtttccccacgagtgaaacggcccatcgagaacaggattctgatcctgccatcagtcaccaggaacgaaacaggtccctatcaatgtgagatcagagatcagtacggcgggattcgaagctatcccgtcacactgaatgtgttgtacgggcctgatctacccagaatttatccgtcattcacctactacaggagcggggaagtcctatatctttcttgctcagccgactctaatccgcccgcacagtactcgtggaccatcaacggcaagttccagttgagtgggcaaaaactctttattccccagattaccacaaaacatagcggcctgtacgcatgctcagtcagaaatagcgcgacaggcaaagagagcagtaaatccatgacagtgaaagtaagtgcctactcttcatccattaactacaccgctgtatactag

SEQ ID NO: 200559 - DNA, 1260 bp, synthetic construct
  misc_feature 1..1260: note = Description of Artificial Sequence: Synthetic coding sequence
  source 1..1260: mol_type = other DNA
atgggcctgctgagcgcccccccctgcacccagcggatcacctggaagggactgcttcttacagcttcgctgctaaacttctggaatcctccaaccactgcccaggtgacaatcgaagcgcaaccgacaaaggttagtgaaggaaaggacgtgctgctcctggtccataacctgccccaaaatctcacaggatacatctggtataagggccagatccgcgacttgtatcattacatcacctcgtacgtggtcgacggccaaattattatctatggccccgcctattcagggagggagaccatctatagcaatgcatccctgttaatccaaaacgtcacacaagaagatgccggttcttataccttgcacataatcatggggggagacgagaacaggggggtgacgggccacttcacattcaccctgtatctcgaaacgcccaaaccgagcatctcttcaagcaagctgaatccccgagaggctatggaggctgtgtccctcacctgtgacccagagacccctgacgcttcctacctgtggtggatgaacggacagagccttcctatgagtcacaggttgcagttgtccgagacaaatagaactctcttcttgctaggcgtcactaaatacacagcaggcccctatgaatgcgaaatccgcaatcccgtaagtgcttcccgctccgaccctttcacactaaacctgctccccaagcttcctaaaccctatattaccattaataacctgaagccacgcgagaacaaagacgtgctcaactttacatgcgagccaaagagcgaaaattatacctacatttggtggctcaacggccagtccctacctgttagccccagagttaagaggcccatcgaaaatagaatcctcatcctgccaagcgtgaccagaaatgaaactgggccctaccagtgtgaaatccgggaccagtacggcggcattagatcctatccggtaacactcaacgtcctttacggcccagacctgcctagaatttaccctagcttcacctattatagatctggagaggtgctatatctgagctgcagcgccgatagtaatccccctgcccaatactcatggaccatcaatggcaagtttcagctgagtggccagaagctcttcatcccccagatcaccacaaaacactcggggctgtatgcatgtagtgtgcgaaactctgctacaggcaaggagagttcgaagagcatgacagtgaaagtctcagattggacactgccctag

SEQ ID NO: 200560 - DNA, 894 bp, synthetic construct
  misc_feature 1..894: note = Description of Artificial Sequence: Synthetic coding sequence
  source 1..894: mol_type = other DNA
atgggcctgctgagcgcccccccctgcacccagcggatcacctggaagggcctgctactgaccgttgagacacccaagccatccatcagctctagcaagctgaatcctcgggaggccatggaggcagtttctctgacctgcgacccggaaacccccgacgcaagctatctgtggtggatgaacggccagtcgctgcccatgtctcacaggctgcagctgtcagaaaccaaccggacactcttcctacttggtgtcaccaaatacactgcgggaccttacgagtgtgaaatacgaaaccccgtgagcgcatcacggagcgacccgtttacgctgaacctcctgccaaagctcccgaagccttatattacgatcaacaaccttaagcctagggagaataaagacgtgctcaattttacctgtgaaccgaagagtgagaattatacgtacatctggtggttaaatgggcagtccctgcccgtaagccctagggttaagcgtccaatcgagaaccgaattctcatcttaccctctgtgacccgcaatgaaacaggtccttaccagtgcgaaataagagaccagtatgggggaattcgtagctaccccgtgacactgaatgtcctgtacggtccggatttgccccgcatctacccatcattcacctactatcgatctggagaggtcctttacttgtcctgctctgccgactccaacccccctgctcaatattcctggacaatcaacggcaagttccaattgtccgggcagaaactgttcataccacagattaccacaaagcacagcgggctttacgcctgcagcgtccgaaactctgccacaggaaaggagagcagtaagtctatgactgtgaaggtgagtgactggacattgccatag

SEQ ID NO: 200561 - DNA, 1209 bp, synthetic construct
  misc_feature 1..1209: note = Description of Artificial Sequence: Synthetic coding sequence
  source 1..1209: mol_type = other DNA
atgggccccctgcccgcccccagctgcacccagcggatcacctggaaagggttgctgctcactgccagtcttctcaacttttggaacccgcccactacagccgaggtgaccatcgaggcccaacctcctaaggtgtccgaaggcaaggacgtgcttcttctcgtgcataacctcccccagaacttgcccgggtacttttggtacaagggcgagatgacagatctgtatcactatattattagttacatcgtcgacggaaaaatcataatttatggaccagcctatagcggcagggagacagtatatagcaacgcttcactgctcatccagaacgtgaccaggaaagatgctgggacgtacacactccatattataaagcggggggacgagacaagggaggagattcgtcattttacatttacactgtatctggagactcccaaaccctatatttccagctccaatttgaatcccagagaagccatggaagccgtccgcctgatctgtgatcccgagacattagacgctagctatctctggtggatgaatggacagtctcttccggtaacacaccgacttcagttgtccaaaaccaatcggacattatatctgtttggggtcactaaatacatcgcaggtccttatgagtgtgaaatacgtaatccagtatcagcctctaggtccgatccggtcacccttaacctcctgcacggacccgatctccccaggatatacccatcctttacttactataggtctggagaaaatctcgacctttcttgcttcaccgagtctaatcctccggcagagtacttttggactataaatgggaagttccagcagtcgggccagaagctattcataccccaaatcacccgtaatcacagcggcctctacgcgtgctcagttcacaatagtgccacagggaaagagataagcaagtctatgactgtcaaggttagcgggaaatggattcctgcgagcctggccgtggggttctatgttgagagtatttggttgagcgagaagtcccaggaaaatattttcatcccctctctgtgcccaatgggcacatctaagtctcagatcctgttacttaaccctcctaacctgtctctccagacgcttttcagtctgttcttctgcttccttatggccgacttagtttctgggctcaaaaaagtgggtcgggggctttaccagccctag

SEQ ID NO: 200562 - DNA, 1281 bp, synthetic construct
  misc_feature 1..1281: note = Description of Artificial Sequence: Synthetic coding sequence
  source 1..1281: mol_type = other DNA
atgggccccctgcccgcccccagctgcacccagcggatcacctggaaaggactgcttctcacggcgtcactgcttaacttttggaaccccccaacaacagcagaggtgactattgaggcgcaacctccaaaagtgagcgaagggaaggacgtgttgctccttgttcacaatctaccacagaatttgcctgggtacttctggtacaaaggcgaaatgaccgatctgtaccattatattatttcgtatatcgttgacggtaagatcatcatctatggcccggcctactccggccgtgagacagtttacagtaacgcctcgctcctgatccagaatgtgacacggaaagatgctggtacttacacactccatattattaaacgcggtgatgaaacccgagaagagattagacactttacgtttacattgtacctagagaccccaaaaccgtacattagctcaagtaacctcaatcctcgggaggccatggaggctgtacgcctcatttgcgatccagaaaccctggacgcatcatatctctggtggatgaacgggcagagtttacctgtgacacatcgactgcagctatctaagacaaatcgtaccctatacctgttcggagtgacaaagtacatcgcaggtccgtacgagtgtgaaatccggaaccccgtttcggcttcaaggtcagacccggtgacacttaacctcctgcccaaactgcccattccctacattaccatcaataatctgaatcccagggaaaacaaagacgtgctcgcattcacctgcgagcccaaatccgagaattatacttacatttggtggctcaatggacagtcgctcccagtgtcaccaggcgtgaagcgtccaatcgagaatcgcatcctaatcctcccttccgtgacgagaaacgaaactgggccctatcaatgcgaaatccgtgatagatacggtggtctgcggagcaaccctgtgatccttaatgtactgtatgggcccgacctccctcgtatctacccatcttttacatactacagaagtggggagaatctcgacctgagctgcttcacagagtccaatcctccagccgagtacttttggacaatcaatggaaagttccaacaatccgggcaaaaactgttcatcccccagattactagaaatcattccggcctctatgcttgctccgtgcacaacagcgcgactggaaaagagatctctaagtctatgactgtaaaggtttccggaccatgccacggagatctgactgagtctcagtcttag

SEQ ID NO: 200563 - DNA, 723 bp, synthetic construct
  misc_feature 1..723: note = Description of Artificial Sequence: Synthetic coding sequence
  source 1..723: mol_type = other DNA
atgggccccctgcccgcccccagctgcacccagcggatcacctggaagggcctattactgaccgctagccttctgaacttctggaatccaccaacaacagctgaggtgaccattgaagctcaaccacccaaagtgagcgagggaaaagacgtcctcctcctggtacacaatctgccacagaatctgcctggttatttttggtataaaggtgagatgaccgacctttatcattatatcataagttacatcgttgatggcaaaattattatctacggccccgcctattccggaagggagactgtgtactcgaacgcatcactacttatccagaatgttacgagaaaagacgctggcacgtacacactacatatcatcaagaggggggatgagacgcgagaagaaatccggcatttcacattcactctgtattatgggccagacctgcccaggatttatccctccttcacctactaccgttcaggggagaatttggacctcagctgttttacagaatcaaatcccccagctgagtatttttggacgatcaacggcaaattccagcagtctgggcagaagttattcatacctcagatcacaaggaaccactccggcctgtacgcttgcagcgtacacaattccgccaccgggaaagagatatcaaagagcatgacggtcaaagtctcaggtccatgccacggggatctaactgagtcacagtcgtag

SEQ ID NO: 200564 - DNA, 1164 bp, synthetic construct
  misc_feature 1..1164: note = Description of Artificial Sequence: Synthetic coding sequence
  source 1..1164: mol_type = other DNA
atgggccccctgcccgcccccagctgcacccagcggatcacctggaagggcctcctgctcactgccagtttgctgaatttctggtataaaggggaaatgaccgatctctaccattacatcatttcctacatcgtggacgggaagatcatcatctacggacctgcatactccgggcgagaaactgtgtactccaacgcgtcactgctcatacaaaatgtgactaggaaggacgccggaacttataccttacacatcattaaacggggagatgagactagagaagaaattcggcactttacatttacgctgtacctggaaaccccgaagccttacatctcaagctcgaaccttaacccccgtgaagccatggaggccgtgcgcctcatctgtgaccctgagactctcgatgccagctacttgtggtggatgaatgggcaatccttgcctgttacccaccgtcttcagttatcaaaaaccaatcgtactctatacctcttcggagtgactaagtacattgcaggaccgtacgaatgcgaaataaggaacccggtgtcagctagtaggtctgaccctgtcacactaaatctgctgcccaagctgccaatcccctatattaccatcaataacttaaacccgagggagaacaaagacgtcctggcgttcacctgtgagccgaagtcggagaattatacctatatttggtggctgaatggacaaagtctccccgtgtccccaggggtcaagagaccaatagagaacagaattcttatactaccttccgtgacacgcaacgagactggaccctaccagtgcgaaattagggataggtatggcggcctccggtctaacccggtgattctcaacgtcctgtacgggccggatttgcctcggatatacccgtcattcacatactaccgcagtggggagaatctggatttgtcctgcttcacggaatccaatcctccagctgagtatttttggactattaatggcaagtttcagcaatctggacagaaacttttcatcccccagatcacaagaaatcacagtggtttgtacgcctgctccgtgcacaattcagccacaggcaaagaaatcagcaagagcatgaccgttaaagtcagcggaccctgccacggggacctgactgagtctcagtcctag

SEQ ID NO: 200565 - DNA, 1002 bp, synthetic construct
  misc_feature 1..1002: note = Description of Artificial Sequence: Synthetic coding sequence
  source 1..1002: mol_type = other DNA
atgggccccctgcccgcccccagctgcacccagcggatcacctggaaggggctcctactgaccgcatctttgcttaacttttggaacccacctacgactgctgaagtcaccatcgaagcccagccccccaaagtgagcgaaggaaaagatgtactgttgctagttcacaaccttccccaaaacctgcccggatatttctggtacaagggtgagatgaccgatctgtaccactatatcatctcatacattgttgatggcaaaattatcatttacgggccggcatattccgggcgggagaccgtctactccaacgcctctttgctgattcagaacgtgacacggaaggatgctggtacgtatacgctgcacattatcaagcgaggcgacgagacccgcgaggagatccgccactttacctttactctgtactcaaagcttccaatcccgtatataaccataaacaacctgaaccccagggagaataaggatgtgttagctttcacgtgcgaacccaagagcgaaaattacacatacatttggtggcttaatggccagtcgttacctgtgagcccgggtgtcaagaggcctatcgaaaaccgtatcttgatacttccgagcgtgaccagaaacgagaccggaccttaccagtgcgagattcgggatcggtacggcggactgagatccaatccagtgatcctgaacgttttatatggacccgatctgccccggatttacccatccttcacgtattacaggtccggagagaatcttgatttgtcatgtttcacggagtctaatcctcctgccgaatatttctggacaatcaacggaaaattccagcaatctggccagaagctgttcataccacagatcacccgaaaccattcaggcctttatgcctgctccgtacacaattccgcgacagggaaggagatcagcaaaagtatgacggttaaagtgagtgggccttgccacggcgacttgacagaatcacagtcgtag

SEQ ID NO: 200566 - DNA, 1032 bp, synthetic construct
  misc_feature 1..1032: note = Description of Artificial Sequence: Synthetic coding sequence
  source 1..1032: mol_type = other DNA
atgctgctgctgaagaagcacaccgaggacatcagcagcgtgtacgagatccgggaacggctgggctctggggctttctctgaggtggtacttgcccaggagcggggctctgcacatctggtggctttaaagtgtatccccaagaaagcactgagaggcaaagaggctcttgtcgagaacgaaatcgccgtcctcaggcgcatctctcatcccaatatcgtggccctagaggacgtgcacgaaagtcccagccacttatacttggccatggaactagtgactgggggcgagctctttgatcggataatggagagaggtagttatacagagaaggacgcgtctcatctcgtgggacaggtcttgggggctgtcagctacctgcacagtttggggatcgttcacagagacctgaagccagaaaatctcctgtacgcaacaccatttgaagattccaagataatggtgagtgacttcggattgtcgaagatccaagccggcaatatgttggggacagcctgcggcacacccggatatgtggcacccgagcttctggaacagaaaccttatggcaaggcagttgacgtgtgggcattaggcgtgataagttatattctgctatgcggatacccccccttttatgacgaaagcgatcctgaactcttttcacaaatcctacgcgccagctatgaatttgattcccccttttgggacgacattagcgagtctgcgaaagacttcatccgtcaccttttggagagagacccccaaaagaggtttacttgtcagcaggcgcttaggcacctttggattagtggagacaccgccttcgaccgcgatatcctcggctctgtgagtgaacagatcaggaagaactttgcgaggacccactggaagcgtgccttcaacgctacaagtttcctccgccatatcaggaagttgggccagatccccgaaggggaaggcgccagcgagcagggcatggcacgtcacagccacagcggtttgagagcaggacagcctccaaagtggtag

SEQ ID NO: 200567 - DNA, 1101 bp, synthetic construct
  misc_feature 1..1101: note = Description of Artificial Sequence: Synthetic coding sequence
  source 1..1101: mol_type = other DNA
atgctgctgctgaagaagcacaccgaggacatcagcagcgtgtacgaaatcagagaacgattaggatctggagcattctcggaggtggtactcgctcaggagcgcgggtctgcacatctggtcgccctgaagtgcattcctaagaaggctctcagagggaaggaagcgctggtcgaaaatgagatcgccgtcttgagaagaattagtcatcccaatatagtggccctggaggatgtgcatgaatcccccagtcatctgtatctggccatggagttagtgactggcggagagctgtttgacaggattatggaacgggggagttacacagaaaaagatgctagtcatctggtgggccaggttctcggagctgttagctatcttcatagtttgggcatcgtgcaccgagacctgaagcccgagaatctgctgtatgcaacccccttcgaggattccaaaatcatggtaagcgactttggtttgagcaaaattcaggccggcaatatgctgggtactgcttgtgggacgcctggttatgccgaacccgtcaccctctccggaatggccgcatgcgtacctgtgcgcgcttcagtgtgtctctggcctccagcaccagagctgcttgaacagaagccatacgggaaggccgtcgacgtgtgggccctcggcgttattagctatatcctcctgtgcggctaccctccgttttatgacgagagtgatcccgagctctttagccagatactgagagcctcttatgagtttgattcccctttctgggatgacataagcgagtcagccaaggattttatccgacatctactggagcgcgacccccagaaacggttcacttgccaacaggccctccgccatctgtggattagcggagacactgcgtttgaccgtgacattttaggtagcgtctcggagcagatcaggaaaaacttcgcgaggacccactggaagagagcattcaatgctacttcctttctgaggcatattcggaagctgggtcagataccagagggcgaaggcgcaagcgagcaggggatggcaaggcactcccactctggcttgcgggccgggcagcctccaaagtggtag

SEQ ID NO: 200568 - DNA, 1083 bp, synthetic construct
  misc_feature 1..1083: note = Description of Artificial Sequence: Synthetic coding sequence
  source 1..1083: mol_type = other DNA
atgtggcggcgggtgtgcggcggcctggccggccggcggcccagcggcgatatgctgctcctcaagaagcataccgaagatataagcagtgtgtacgaaatccgcgagaggctgggcagtggcgctttcagcgaggtggtgctggcacaggagcgtgggagcgctcatttagttgcactcaagtgcatccccaagaaagctctgcgcggcaaggaagcgctggtggagaacgagattgccgtacttcgccgcatttcccatcctaacatcgtcgctctagaggacgtgcacgagtcacctagtcatctttacttggctatggagctggttaccggtggagaacttttcgataggatcatggaacgcggctcttataccgaaaaggacgccagtcacctggtgggccaagtgttgggagccgtgtcctatctacattcacttggaattgtgcatcgcgacttaaagccagagaatcttttatacgccaccccttttgaagactccaaaataatggtgagtgatttcggactttctaaaatacaggcgggtaatatgctgggtaccgcgtgtggaactcccggctatgtcgcacccgaactactggaacagaagccatatgggaaggctgtggacgtttgggcactgggggtcatcagctacatcctgctctgtgggtatcccccattttatgacgaatcggacccagagcttttctcccaaattctccgcgcctcgtacgagtttgatagccctttctgggacgacatcagcgaatccgcgaaagactttattagacatcttctcgagcgagacccgcagaagcgatttacatgccaacaggcactgcgccatctgtggatctccggtgacacagcattcgatagggacatccttgggtcagtctctgagcagattcgtaagaactttgcccgtacccattggaagcgcgcatttaacgccacctccttcctaaggcatatcagaaaactgggccagattcctgagggggagggggcatccgaacagggcatggctagacacagtcattctggactgcgcgccggccagccaccaaagtggtag

SEQ ID NO: 200569 - DNA, 1032 bp, synthetic construct
  misc_feature 1..1032: note = Description of Artificial Sequence: Synthetic coding sequence
  source 1..1032: mol_type = other DNA
atgctgctgctgaagaagcacaccgaggacatcagcagcgtgtacgaaatcagagagagactgggcagtggggccttttcagaagttgtgctcgcccaggaacgtggctctgcccatctggtggcgcttaagtgcatcccaaagaaggcccttaggggcaaagaggccctggttgaaaacgagattgcagtccttaggcgcatttctcatcctaacatagtggctcttgaggacgtgcacgaatccccaagccacctctacctagctatggagctggttaccggtggtgaactgttcgataggattatggaaagggggtcctatacggagaaggacgcttcccacctggttggccaggtcttgggggctgtatcataccttcactctctgggcatcgttcaccgagacttgaagcccgagaacctgctgtatgcaactcccttcgaagacagcaagatcatggtgagcgactttgggctatcaaaaattcaggccggaaacatgttgggaactgcctgcggaacccctggctacgtggcccccgagctgttggagcagaagccctacggtaaggctgtcgatgtgtgggccctgggcgtgatctcctatatactgctgtgcggctacccccccttctatgatgagtccgacccagaactcttctctcaaatactgcgggcaagttacgaattcgattctcccttctgggacgacatttccgagtctgctaaagacttcattcggcatttactggagagggatcctcagaagcggttcacctgtcagcaagccctgcggcacctttggatctcaggggatactgctttcgacagggacattctggggtctgtatccgagcagattcgcaagaacttcgcacggacccactggaagcgggccttcaacgcaaccagcttcttgcgacacatccggaagctgggccagataccggaaggggagggagcaagcgagcagggaatggctcgacattcccacagtggcctccgggctggtcagcctcctaagtggtag

SEQ ID NO: 200570 - DNA, 1101 bp, synthetic construct
  misc_feature 1..1101: note = Description of Artificial Sequence: Synthetic coding sequence
  source 1..1101: mol_type = other DNA
atgctgctgctgaagaagcacaccgaggacatcagcagcgtgtacgaaattcgggagagactgggatcgggcgcatttagcgaggtggttctggcacaagagcgcggaagtgcacacctggtggcacttaagtgcattcctaaaaaggcactaagggggaaggaggcactggtcgagaatgagattgccgtgctgcgaagaatatcgcacccaaacatcgtcgccttggaagacgttcatgagtctccatcccatctgtacctcgctatggagttagttacgggcggcgaactgttcgaccggatcatggagagagggagttacaccgagaaagatgcctcccacctggttggccaggtgcttggcgcagtgtcctatcttcacagcctggggatcgtgcacagggacctgaaacccgagaatcttctgtatgcgacgccatttgaagactctaaaatcatggttagcgactttggcctatcgaagattcaggcgggtaatatgctcggcactgcctgtggcactcccgggtacgctgagcctgtgacattatccgggatggccgcctgcgtgcccgtgcgggccagcgtctgcctatggccacctgcccctgagctgctggaacaaaaaccctacggtaaggctgtagacgtgtgggcgctcggcgttataagttatattctgctttgtggataccctcctttctatgacgaaagcgatcctgagctgttttctcaaatcttgcgagcgagttatgagtttgacagccccttttgggacgatatctccgagtccgctaaagatttcatcaggcacctgcttgagcgagatccacagaagcgattcacgtgccagcaagctcttcggcacctgtggattagcggagataccgcttttgaccgtgatatattggggtctgtgtctgaacaaattcgaaaaaacttcgcccgcacacactggaagcgggccttcaacgccacaagctttttacgtcatattcgtaaactgggacagattccagagggcgaaggagcctcagaacagggcatggcacgacactcccactccggcctcagggcaggccagccacccaagtggtag

SEQ ID NO: 200571 - DNA, 132 bp, synthetic construct
  misc_feature 1..132: note = Description of Artificial Sequence: Synthetic coding sequence
  source 1..132: mol_type = other DNA
atgctgctgctgaagaagcacaccgaggacatcagcagcgtgtacgagattcgcgaaaggttgggctcaggggccttcagcgaggtcgtgctcgcgcaggaaagaggttctgcccacctggtggcgctctag

SEQ ID NO: 200572 - DNA, 675 bp, synthetic construct
  misc_feature 1..675: note = Description of Artificial Sequence: Synthetic coding sequence
  source 1..675: mol_type = other DNA
atgctgctgctgaagaagcacaccgaggacatcagcagcgtgtacgagattcgcgaacggctgggcagcggagcctttagtgaggtggtactggcgcaggagagggggtccgcgcatctggtggcgctcaaatgtattccaaagaaggctctccgggggaaggaagctctggtagagaatgagattgcagtgttgcggcggatctctcatccgaacattgtggcattggaagacgtgcacgagagtccgagccatttatacctcgcgatggaactggtaactggcggtgaactgttcgatcgtattatggaaaggggaagctacacagaaaaggatgcctcacacctcgttggccaggtacttggtgccgtctcataccttcactcacttggtatcgttcatcgagacctcaagcctgagaatctgttatatgccacccccttcgaagatagcaagattatggtgagtgattttggactgtctaagatacaggcaggtaatatgctaggaactgcttgtggtaccccaggatacgtggcacctgagctcctcgaacaaaaaccctacggcaaagccgtcgacgtttgggccctgggagttatcagctacattctgctgtgtggctacccgcctttctatgacgaatctgaccctgagctgttttcccaaatttag

SEQ ID NO: 200573 - DNA, 132 bp, synthetic construct
  misc_feature 1..132: note = Description of Artificial Sequence: Synthetic coding sequence
  source 1..132: mol_type = other DNA
atgctgctgctgaagaagcacaccgaggacatcagcagcgtgtacgaaatacgagagcggctcggaagcggtgccttttccgaggtggtgctcgcacaagagcgtggaagtgcgcatctggttgccctatag

SEQ ID NO: 200574 - DNA, 132 bp, synthetic construct
  misc_feature 1..132: note = Description of Artificial Sequence: Synthetic coding sequence
  source 1..132: mol_type = other DNA
atgctgctgctgaagaagcacaccgaggacatcagcagcgtgtacgaaattcgggaacgcctcggctctggggcattcagtgaagtggtgctggcccaggagagagggtctgcacacctggtcgccctgtag

SEQ ID NO: 200575 - DNA, 261 bp, synthetic construct
  misc_feature 1..261: note = Description of Artificial Sequence: Synthetic coding sequence
  source 1..261: mol_type = other DNA
atgctgctgctgaagaagcacaccgaggacatcagcagcgtgtacgagatcagggagaggctaggaagcggagctttctccgaagtagtgctggcccaagagagaggttcagctcatctggtggccttaaaatgtatccccaagaaggcacttaggggcaaagaagccctggtcgaaaatgagatcgcagtcttgagacgaatatcacatccaaatattgtggctctggaagacgtgcacgaatctccctctcatctctag

SEQ ID NO: 200576 - DNA, 246 bp, synthetic construct
  misc_feature 1..246: note = Description of Artificial Sequence: Synthetic coding sequence
  source 1..246: mol_type = other DNA
tgaatcagcggcgacaccgccttcgaccgggacatcctgggcagcgttagtgaacagatcagaaaaaacttcgccagaactcactggaaaagggccttcaatgcaacctctttcctgcggcacatccgcaagttaggccagattccagagggcgagggcgcttctgagcaaggtatggcaagacactcacattctggcggcccacaaggtctgtcctttctgcatggttgttgcgttctgcgctag

SEQ ID NO: 200577 - DNA, 681 bp, synthetic construct
  misc_feature 1..681: note = Description of Artificial Sequence: Synthetic coding sequence
  source 1..681: mol_type = other DNA
atgctgctgctgaagaagcacaccgaggacatcagcagcgtgtacgagatccgcgagcgactaggatcgggtgctttttctgaggtcgtgttggcccaggagcgcggctcagctcatctcgtcgccctcaaatgtattcccaagaaagccctacgcggaaaagaggccctagtcgagaacgagattgccgtactgcgcaggatcagccaccccaacattgtggcattagaggacgtccacgaaagcccctcccacctgtatctggctatggagctggttactggcggcgaactcttcgatcggataatggaacgcggctcctataccgagaaagatgcctctcacctcgttggccaggtcctgggcgccgtgagttaccttcatagcctgggaatcgtccaccgggatctcaaacctgaaaacctgctgtacgcgactcccttcgaggactctaagatcatggtgagcgattttggcctgagcaagatccaggcgggaaatatgcttggcaccgcctgtggcacaccaggctatgttgcccctgaactgcttgagcaaaaaccatacggaaaggctgtagacgtttgggccctgggggtaatcagttatatactactttgtggctaccctcccttctacgatgaaagcgaccctgaattgttttcccagatcctgcggtag

SEQ ID NO: 200578 - DNA, 1281 bp, synthetic construct
  misc_feature 1..1281: note = Description of Artificial Sequence: Synthetic coding sequence
  source 1..1281: mol_type = other DNA
atggaggccgccttcggccaggtggccggcagcgcctgcccccggcgtggtggtgaaggtcgcgactggaaggccgaatccctggctgatctgtggccaaaatcctcaccaggcgactctcacaggtggtgcaaaggacctggtgccgggccagcaggtcctcagctgagagaggccgcacgtgcgtcttctggccttggtgggggaggaaggcacccaagccgcatcccagcgattgccctgcaggacatgctccttctcaagaagcacacggaagatatcagcagcgtttatgagatccgggagcggctcggttctggagcattttcagaagtggtgctggctcaggaaaggggaagtgctcaccttgtggcgctcaagtgtatacctaaaaaggccctccgggggaaggaagccctcgtcgagaacgaaatagcagttctgagaagaattagccaccctaacattgtggccttggaagatgttcacgaaagtccgtctcacctttacctcgccatggagcttgtgacggggggtgagctcttcgataggattatggaaagaggctcctatacggaaaaggacgcaagccatctcgtcggtcaggtcctgggcgcagtatcgtacctacattctcttggaatagtccatcgtgatctgaagcccgaaaatctcctgtatgcaacgccttttgaggatagtaaaataatggtgtccgactttggcttgagcaaaatccaggctgggaatatgctcggcacggcctgtggcacccccgggtatgtggcccccgagctactggagcagaagccatacggaaaggcagtcgatgtgtgggcattgggggtaatttcttacattcttctctgtggatacccacccttctacgacgagagcgatccagaactgttttctcagatactgcgcgcctcgtatgagtttgacagtcccttctgggatgatatcagcgagtccgccaaggatttcatcaggcatttactcgaaagggaccctcaaaagcggtttacttgtcagcaggccttgagacatctatggatctctggcgacaccgcatttgatcgcgacatactgggatccgtttcggaacagattcgaaaaaactttgccaggacacattggaaacgcgctttcaacgccacctccttcctcagacacatccgtaagctcggccagatccccgagggggagggggcttccgagcaggggatggctcggcattcacactcaggcctgcgggccggacaacccccaaagtggtag

SEQ ID NO: 200579 - DNA, 132 bp, synthetic construct
  misc_feature 1..132: note = Description of Artificial Sequence: Synthetic coding sequence
  source 1..132: mol_type = other DNA
atgctgctgctgaagaagcacaccgaggacatcagcagcgtgtacgagatacgcgaaaggttgggcagcggcgcctttagcgaggttgtcctcgcgcaagagagaggaagcgctcacctagttgccttgtag

SEQ ID NO: 200580 - DNA, 4884 bp, synthetic construct
  misc_feature 1..4884: note = Description of Artificial Sequence: Synthetic coding sequence
  source 1..4884: mol_type = other DNA
atgcggctgtggagctgggtgctgcacctgggcctgctgagcgccgccctgggttgcgggttggcagagaggccccggcgagcacggcgcgatcctagggccgggagacccccaagaccggctgccggaccagcgacctgtgccaccagggctgcacggggaagacgcgcttcgcctcccccccccccccctccaggcggggcctgggaagcagtccgagtcccaaggagaagacaacagcgggaggccaggggagcaaccgaagagccttccccgccttcccgcgccttgtactttagtggcagaggtgaacagctgaggctgcgggccgatctggagctacctcgcgatgccttcacactacaggtgtggctgcgggcggaggggggacaaagatcaccggctgtgataacaggattgtacgacaagtgctcttatatctcaagagatcgtggctgggtggtggggattcatacgattagcgatcaagacaacaaggatcccaggtatttttttagccttaaaactgaccgtgcacgtcaggttacgacgatcaacgctcatagatcctacctgccaggccaatgggtgtatctcgctgccacctatgacggccagtttatgaaactgtacgtgaatggagcccaggtagctacgtccggggagcaagttggcggaattttctcccctctaacccagaaatgtaaggtgctgatgttaggaggttccgcactcaatcacaactacaggggttatattgagcatttcagtctatggaaggtggctcgtacccagcgcgagattctctccgacatggaaacccatggcgctcacacggctctcccccaactgctcctgcaggagaattgggacaacgtgaagcatgcatggtcccctatgaaggacggatcatctcctaaggtggagttttccaatgcccatggtttcctgttggacacttcactggagcctccactttgtggccagacgctctgtgacaataccgaagttatcgccagttacaatcagctgagctcttttagacaacctaaagtggtgcgctatagagtcgtgaacctctatgaagatgaccacaagaacccgaccgtcacgagggagcaagtggattttcaacatcaccagttagcagaagcattcaaacagtataatatctcatgggaattggacgtgcttgaggtctctaactcttccctgcggcgacggttgatcctggccaactgtgacatttcaaagataggagatgagaactgcgacccggaatgtaaccacactctcaccggccacgatggaggggattgccgacacctgcggcaccctgctttcgtcaagaaacagcataacggagtgtgtgacatggattgtaattacgagcgtttcaatttcgacggcggcgaatgctgcgacccagagattacaaacgtcacccagacatgcttcgatccggactcaccacatagggcttatcttgacgtgaacgagctcaagaacatcttgaagctcgatggctccacccacttgaacatcttcttcgccaagtcttccgaagaagagctcgctggtgtggcgacctggccatgggacaaggaggcactcatgcacctgggcggaatcgtgctgaacccctccttttacggcatgccgggacacacccataccatgattcatgaaataggccattcactggggctctaccatgtttttagagggatcagcgaaattcaatcctgcagcgatccgtgtatggaaaccgagcctagttttgagaccggtgatctttgcaatgatactaatcctgctccgaaacacaagtcttgcggagatcccggccccgggaatgatacctgtggctttcactcatttttcaataccccttataacaatttcatgtcttatgcggatgatgactgtaccgattcctttacccccaatcaggtcgcccggatgcactgttatcttgacctagtctaccaggggtggcagccgtctcgcaagccggcccccgtggctctggccccacaggtcctgggccacacaacagactcagtcactctcgaatggttcccaccgatcgacggacacttttttgaacgggaattggggtcagcctgtcatctgtgtttggaaggccggattctggtccagtatgcctctaatgcttcatcccccatgccttgcagcccttccgggcactggtctccgcgcgaggccgaaggacaccctgacgtggagcaaccatgcaaatcctccgttcggacctggagccccaacagcgctgtcaacccccacacggtcccccccgcttgccccgagccacaggggtgctatctggaactcgagttcctgtatccactggttcccgaaagcctcacgatttgggtgacttttgtgagtacagattgggatagctctggggcagtgaatgatatcaagctgctagcagtaagcggtaagaacatctccttaggtccccagaacgtgttttgcgacgtgccattaaccattaggctctgggacgtgggggaggaggtctatggcatccagatctacactctcgacgaacatctggagattgacgcagccatgctgacatccaccgccgatacccctctatgcttgcagtgtaagccccttaagtacaaggtggtcagggaccctcctttacagatggacgtcgcttccattttacacttgaatcgcaagttcgtggacatggacctgaatttgggctctgtctatcagtattgggtgattaccatcagcggaactgaggaatctgagccaagccccgccgtcacatatatccacgggagcggctactgtggagatggtattattcagaaggatcaaggagaacagtgtgacgacatgaacaaaatcaatggcgacggctgcagtctcttctgtcgccaagaggtcagttttaactgtatcgatgaaccatctcgctgttacttccacgatggcgacggcgtatgcgaagagttcgaacagaagacaagtataaaagactgtggggtctacacaccccagggatttctggatcagtgggcatcaaatgcgagcgtaagtcaccaagatcagcagtgtccaggatgggtaattatcgggcaacccgccgcatcccaggtttgccgcacaaaagtgattgatctgtctgagggcatttcccagcacgcatggtatccctgcacgatttcttacccctactctcagctggctcagactacgttttggctgagggcctattttagtcagcccatggtggcagcagcggttatcgttcatctggtgaccgacgggacatactacggcgaccaaaaacaggaaaccataagtgtgcagttgcttgacaccaaagaccaatcccatgatctgggtctgcacgtattgtcctgtagaaacaaccctttgatcatccctgtggtgcacgacctgtctcagcccttctatcattcccaagccgtgagagttagcttcagctcgcctcttgtggcaatctcaggcgtcgccctgcggagtttcgataatttcgatcctgtgacacttagcagttgccagcggggcgagacgtattcacctgctgagcagagttgtgtccatttcgcatgcgaaaaaacagattgtcccgaactggcagtggagaacgcctcgcttaattgcagcagctcggacaggtaccacggagctcagtgtactgtcagctgcagaactgggtacgttctgcaaatacgtagggacgacgaacttattaaatcacagaccggcccctccgtaaccgtcacatgcacggaagggaagtggaataaacaggtggcctgcgagcctgttgattgcagcatccccgaccaccaccaggtgtatgctgctagtttctcctgtccagaagggaccacatttggttctcaatgctcctttcagtgccggcatcccgctcagctgaagggtaacaacagcctgctgacttgcatggaggatgggctgtggagttttcctgaagctctttgcgagctcatgtgtctggcacctcccccagtgcccaacgcagaccttcagacagcccggtgccgcgagaacaaacataaagtgggcagtttttgcaagtataaatgcaagccagggtaccatgtacctggctcctcgaggaagagtaaaaaacgagcctttaaaacccagtgcactcaggacgggtcatggcaggaaggcgcctgtgtacccgtcacctgcgaccctccgcccccaaaatttcacggcctgtatcagtgcacaaacggattccaatttaattccgagtgccgaatcaaatgtgaagacagcgatgcctctcagggcctcggatccaatgtgattcattgcagaaaagatgggacctggaacggatccttccatgtatgccaggagatgcaaggccaatgttctgtgccaaacgaactcaactcaaacctgaagcttcagtgtcctgacggatatgccatcgggtctgagtgtgcaacgagttgcctggaccacaactctgagtctatcatcttgccaatgaacgtaacggtgagagacattcctcactggttgaatccaacaagagtcgaaagagtggtgtgtacagctggactgaaatggtatccacatccagcactgatccattgtgtgaaaggatgtgaaccattcatgggtgataactactgcgatgctatcaataatcgggccttttgtaactatgacggcggtgattgttgtacttctaccgtaaaaacgaagaaagtcacacctttccctatgagctgcgacttgcaaggtgactgtgcctgccgggatccccaggcccaggaacattctcgcaaggacctgcgaggctacagtcacggatag

SEQ ID NO: 200581 - DNA, 1701 bp, synthetic construct
  misc_feature 1..1701: note = Description of Artificial Sequence: Synthetic coding sequence
  source 1..1701: mol_type = other DNA
atggactgcaactacgagcggttcaacttcgacggcggcgagtgctgcgaccctgaaataactaatgtgacccagacttgcttcgatcctgactcaccgcaccgggcttacctcgatgtaaatgagctgaagaacatccttaaattggacgggtcgacccacctgaacattttctttgccaaatcctccgaggaggagctcgccggggtggccacttggccatgggataaggaggctctgatgcatctcgatgatgattgcacagattcgttcacccccaaccaggtagcccggatgcattgttacttggatctagtgtatcagggctggcagccctctcgcaagcccgcccctgtggccctcgccccacaggtgctgggacacacaaccgactctgtaaccctggagtggtttccgcctatagatggacactttttcgagagagagctcggctcagcatgtcatctgtgcttggagggtcgaattcttgtccagtacgccagcaacgcttcatccccaatgccctgctctcctagcggccattggagcccacgcgaggctgaaggacatcccgacgtagagcaaccttgtaagtccagtgtgcgaacatggagccccaatagcgccgtgaacccccacactgtcccccctgcctgccccgaaccacaagggtgctacctggaattagaattcttataccccctggtgcctgaatccctgactatttgggtaactttcgtgtccacagactgggactcaagcggggccgtgaacgatatcaagttactggccgttagcggcaaaaacatcagcctgggaccacagaacgttttttgtgacgtgcctctgaccatccgcctatgggacgttggagaggaggtctatgggatccagatttatactctggacgagcacttagaaatcgatgctgctatgctgacgtccactgctgacactcccctatgcctgcaatgcaagcctcttaagtataaggtagtacgcgacccccctctgcaaatggacgtggcttcaattctgcacctcaacaggaaatttgtggacatggacctcaatctagggagcgtgtatcagtactgggtcattacaatcagtggcacggaggagtccgagccctctccggccgttacctacattcatggctctggttattgtggcgacgggataatacaaaaggaccagggagagcagtgcgatgacatgaacaagatcaacggcgatggttgttcactcttttgcagacaggaggtgagctttaattgcatcgatgagccctcacgatgttacttccacgatggggatggcgtgtgcgaggagtttgagcagaaaacttcaatcaaggattgcggtgtttataccccacagggctttctcgatcaatgggcttccaatgcctcggtctctcaccaggaccaacaatgccccggctgggtcatcataggccagcccgcggcttcccaggtttgcaggacaaaggtcatcgacctgagtgaagggatcagtgcctgtctggtgcccctgcaccatcagctgcctatcttccccgccggatctgaccacttcctggctcccggcgtgtttttcagcactaacgggtgcaggtcctgccactgtccccctggcgacggctgggacatactctggggtcccaaagccggagatcaccagcgcgcagccgcttag

SEQ ID NO: 200582 - DNA, 1998 bp, synthetic construct
  misc_feature 1..1998: note = Description of Artificial Sequence: Synthetic coding sequence
  source 1..1998: mol_type = other DNA
atgaacaagatcaacggcgacggctgcagcctgttctgccggcaggaggtgtcctttaactgtattgacgaaccatctcgttgttattttcacgacggggatggcgtgtgcgaagaattcgagcagaaaacttcgattaaagactgcggagtctacactccccaaggtttcctggatcagtgggcctccaatgcatccgtatcacaccaagatcaacagtgcccgggctgggtgatcatcggacagcctgctgccagtcaggtatgcaggacaaaggtgatcgatctgtcggaaggaatttcacagcatgcttggtatccttgtacaattagctacccatacagccagctggcgcaaaccaccttttggcttagggcttacttttctcaacctatggtggcagcagccgtgatcgtgcacctcgtgacagatggtacctattacggcgatcagaagcaagagaccatcagcgtgcaactcttggataccaaagaccagtcgcacgaccttggcctccatgttttgtcatgtcgcaacaatcccttgattattcctgttgttcacgatctctcccagcctttttatcattctcaggctgttcgggttagcttcagctcccccctggtcgcgatttctggcgtcgccctccgctcttttgataactttgaccctgtgaccttgtcatcctgccagcgcggagagacttattcacctgctgaacagagctgtgtgcactttgcttgtgaaaagaccgactgccctgagctcgccgttgaaaatgcttcattgaactgttcgagcagcgaccgttaccatggggctcagtgtaccgtatcatgtcggacaggatatgtcctccagatcaggagggatgacgagctgattaaatctcagaccggcccctcagtcactgtgacatgcactgaagggaaatggaataagcaagttgcctgcgaacccgtagattgctccataccagaccaccatcaggtatacgccgcatcttttagttgtccagaaggcaccacgtttgggtcccaatgcagcttccagtgtcgacaccccgcccagctcaagggaaacaacagcctcctgacgtgcatggaagatggcttatggtctttccccgaagcactgtgcgaacttatgtgtctggcccctccgcctgtgcccaacgccgatctgcaaacagccagatgccgagagaacaagcacaaagtcggctcgttttgcaagtacaaatgcaagccaggataccatgttcccggatcttcccgaaaatctaagaagcgggctttcaaaacccagtgtacgcaggatgggtcatggcaggagggtgcctgtgtccctgttacatgcgatccacctcccccgaaattccatgggctttaccagtgtacgaacgggttccagttcaatagtgaatgtcggatcaagtgtgaggattctgatgcttctcagggcctcgggtctaacgtcatccattgtcgcaaggacgggacctggaacggatcctttcacgtttgccaagaaatgcaggggcagtgtagcgtgccaaacgaactgaactccaacctgaagctgcaatgtcccgacggctatgcaattgggagcgaatgtgccacgagctgcctggatcataactccgaatccattattctgccaatgaacgtgactgtgcgtgacataccccactggctgaatcctactcgtgtggagagagtcgtgtgcaccgctgggctaaaatggtatccacaccccgccctgattcattgtgtgaagggctgcgaacccttcatgggcgacaactactgcgatgccattaataaccgtgccttctgcaattatgacggcggggattgctgcacaagcacagtgaaaactaagaaagttactcctttcccaatgagctgcgaccttcagggggactgcgcatgccgggatccccaggcccaggaacattctagaaaagatttaagagggtactcccacggctag

SEQ ID NO: 200583 - DNA, 4449 bp, synthetic construct
  misc_feature 1..4449: note = Description of Artificial Sequence: Synthetic coding sequence
  source 1..4449: mol_type = other DNA
atgcggaaggaccggctgctgcacctgtgcctggtgctgctgctgatcttgctgtccgctagcgatagtaattcaacagaaccccagtacatggtgctggttcctagcctgctgcacaccgaagcgccaaagaaaggctgtgtactactatctcatctgaacgaaacagtcactgtttctgcatcactcgagtccgggagggagaataggtccctgttcaccgaccttgtcgctgagaaagacttatttcactgcgtgtcgttcacactgccaagaatttctgcatcctctgaggtggcctttctttctattcagatcaaaggcccaacacaggacttcagaaagagaaacaccgtgctggtgctgaatactcaaagcctcgtcttcgtgcagactgataaacccatgtacaagccagggcagactgtacgatttcgtgtggtaagtgtcgacgagaacttccggcccaggaacgaactgattcccctaatctatctggaaaaccctcgcagaaaccgcattgctcagtggcaaagcctcaaactggaggcgggcataaatcaactgagtttccccctcagcagcgaaccaatccagggctcataccgcgtggtggtgcagactgagagtgggggcaggatccaacacccatttactgtggaggaattcgtcctgccaaaatttgaggtcaaggttcaggttcccaagataatctccattatggatgaaaaggtcaatatcaccgtgtgtggtgaatatacatacggaaagcctgtgcccggactggctacagtatctctgtgcaggaaactgtccagagtcctgaactgtgacaaacaggaggtgtgtgaggaattctctcaacagttgaactccaacggttgtatcacacagcaggttcataccaagatgctgcaaattacaaataccgggtttgagatgaagcttcgagtcgaagccaggatcagggaagaaggcacggatctggaggtgactgctaaccgcatttccgagattaccaatatcgtctctaagctgaagtttgtgaaagtggattctcacttccggcagggcatccccttcttcgctcaggtgctgcttgtggacggaaaaggcgtccctatccctaacaagctgttcttcatttccgtgaacgatgcaaattactatagtaacgcaaccactaacgagcagggattggcccagttcagcatcaatacaacttcaatcagtgtgaataagctctttgtgcgcgtatttaccgtacaccctaacctatgttttcactactcttgggtcgcggaagatcaccagggagctcagcacaccgccaaccgagtcttttccttgtctggaagttatatccacctggaaccagtggcaggaactctgccctgcggtcatacagagacaataactgcacattatacactcaatagacaggccatgggagagctgagcgagctgtcatttcactacctgatcatggctaaaggcgtgatcgtacgcagcggcacccataccttgcctgttgaatcaggagatatgaagggtagttttgcactctccttcccagtggagagcgacgtcgctccgattgcaagaatgtttatcttcgcaattctcccagacggagaggttgtgggggactctgagaaatttgaaatagagaattgtctggccaacaaggtggacctctctttctcacccgcccagtcaccgcctgcaagccatgcccacctgcaggtggccgctgcgccacagagtctgtgcgcattgcgcgccgtcgatcagagcgtactgcttatgaagcccgaagctgaactgtctgtaagctccgtttataacctcctgacagtgaaagatcttacaaacttcccagacaatgttgaccagcaggaagaggagcagggtcactgccccagacccttctttatccacaacggagccatatatgtgccactgtcaagcaacgaggcagatatttatagctttctgaaggggatgggcctaaaagtgttcacaaattcaaaaatccgtaaacctaaatcttgtagcgtcatccccagcgtgtcagcaggcgccgttggtcaggggtactatggcgctggcctcggtgtggtagagaggccttacgtacctcagctcggtacgtacaatgtgattcctctcaacaatgaacagtcatctggtccagtccccgagaccgttcgatcctattttcccgagacatggatatgggagctcgttgccgtgaactcctctggcgttgccgaagttggggttaccgttccagacacaattactgaatggaaggccggagctttctgtcttagtgaagacgcagggctgggcataagcagtaccgccagtctgcgggccttccagccttttttcgtagagctgaccatgccttacagtgtcatacggggcgaggtctttactcttaaggctacagtgctcaattacctgccaaagtgcataagagtcagtgtgcagctgaaggccagccccgcctttctcgcctcccagaacacgaagggtgaggaatcttactgcatttgcggcaacgagcggcagaccctttcatggacggtcacccctaaaacactcggaaacgttaacttttccgtttccgccgaggctatgcagtccctggagctgtgtggcaacgaagtggttgaggtaccagaaattaagcgtaaggataccgtcattaagaccctgctggtcgaagccgaggggattgaacaagaaaagaccttcagttctatgacctgcgccagcggagccaatgtgagcgaacaactgagtctgaagctgccatctaacgtggtcaaggaaagtgccagagcctccttctccgtgctcggcgatatcctggggagtgctatgcaaaatattcagaacctgctgcaaatgccttatggttgtggggagcagaacatggttctgtttgcgccaaacatttatgtgctgaactacctgaacgagacccagcagctgacgcaggagatcaaggcaaaggcagtgggatacctcatcaccgggtaccaacggcagcttaattataaacaccaggatgggtcctacagcacattcggagagcgctacggcaggaatcaaggtaacacctggctaacagcttttgtactcaaaacctttgcccaggcgcggtcatacatttttatagacgaggctcacattacacagtccctgacctggctctcacagatgcagaaagataacggatgctttaggagcagcggaagtctcctcaacaacgcgatcaaaggcggcgtggaggatgaagctactctttctgcttacgtcacgatcgcactactggagatccccctcccagtcacaaatcctatcgtccgcaatgcccttttttgtctggagagcgcttggaatgtggctaaggaagggactcacggcagtcatgtctataccaaggcgttgctggcttatgcctttagtctgctgggcaagcagaaccagaaccgcgagattctcaactctcttgataaggaagcggtgaaagaggacaacttggtgcactgggaacgaccccagagacctaaagcacctgtgggtcatctttaccagactcaagcaccgtccgctgaggtggagatgacttcttacgtacttctggcttatctcactgcccaaccagctccaacctctggcgaccttacctcagccaccaacattgtaaagtggatcatgaagcaacagaatgcccagggcgggttctctagcacacaggacacagtcgtcgccttgcatgctttatcacgctacggggcagcaaccttcacacgcacagaaaagaccgcccaggttaccgtgcaagacagccagacattcagtacaaatttccaggtcgataataacaatcttttgctgctacagcagattagcctgcctgagctgccaggagaatacgtaatcacggtcaccggtgagagatgtgtctacctccagacgagtatgaagtacaacatcttacctgaaaaggaggacagtcccttcgcgctaaaggtccagacagtacctcagacctgcgatggacacaaagcacacacgagtttccagattagcttaacaatctcctataccggtaaccgccccgcatcaaatatggtcatcgtcgatgtgaagatggtcagcgggttcattcccctgaagcctaccgtgaagatgctggagagaagtagctctgtaagcagaacggaggtaagtaataatcatgtgttaatctacgtagaacaggttacaaaccagacactgagcttctcttttatggtgctacaggatatccctgtcggagacctcaaacctgccatagtgaaggtgtatgattactacgagaccgatgagtcagtggtggcagagtacatagccccttgttccaccgacactgagcacgggaatgtgtag

SEQ ID NO: 200584 - DNA, 3807 bp, synthetic construct
  misc_feature 1..3807: note = Description of Artificial Sequence: Synthetic coding sequence
  source 1..3807: mol_type = other DNA
atgagcgagagctaccggcggaccaccttccccgtgcggttccgggtcgtgtctgtggacgaaaacttccggcccaggaacgagctgattcctctaatctacttggaaaaccccaggcgaaaccggattgcacaatggcagagcttaaagctggaagctggaattaatcagttatcattcccgttgtcatcggagcccatacagggaagttaccgggtagtggtccagaccgaaagtgggggccgcatccagcacccattcacggttgaagagtttgtcctgcctaaattcgaggtgaaagtccaggtccctaagatcatttctattatggacgagaaagtcaacattaccgtttgtggagaatacacctatggcaagcccgttccagggctggcaacagtaagcctttgccgaaagttgtcccgggtgctcaactgcgacaaacaggaagtttgcgaggagtttagccagcagctcaactctaacgggtgcataacacagcaagtgcatacaaagatgctgcagattacaaacaccgggtttgaaatgaagctgagggtggaagcccgcattagggaggagggcactgatctggaggtgaccgctaatagaattagtgaaatcaccaatatcgtgagtaaattgaagtttgtgaaagtggactcacacttccgacagggtatcccgttctttgcacaggtcctgctagtcgacggaaagggtgttcccatccctaataaactcttcttcatttcggtcaacgatgctaactattacagcaacgctaccactaatgaacagggtctggcacagttcagtatcaatactacctccataagcgttaataagttattcgtcagagttttcacagtgcaccccaacctatgctttcactactcctgggtggctgaagatcaccagggagcgcagcacacagccaaccgcgtgtttagcctctctggatcctacattcaccttgagcctgttgccgggacactgccttgcggacacactgaaaccatcaccgctcactacaccctgaatcgccaggccatgggcgaactgtccgagctcagtttccactacctgataatggccaagggagtcatcgttagatctggaacacacactctccccgtcgaaagcggcgacatgaagggctctttcgccctgtccttcccagtggaaagtgatgtcgcccctatagcaaggatgtttatttttgcaatcttgcctgatggggaggttgtcggggactccgaaaagttcgagatcgaaaactgcctcgcgaacaaagtggatttatcatttagccctgctcagtctcccccagcatcccacgcccacctccaagtagctgctgctccccagtcactctgcgccctccgtgctgtggaccagagcgtgctgttgatgaagcctgaggcagagttgtctgtcagctccgtctacaatctcctgaccgtgaaggatctgacgaatttccctgacaacgtcgatcaacaggaggaggaacagggacattgccccagacccttcttcatccataatggtgcaatttatgtccccctctcttcaaacgaggcggatatatacagctttctcaaagggatgggcctcaaggtctttaccaattcaaaaatacggaaaccaaaaagctgttcagtgatcccatccgtgtccgccggcgcagtcggtcagggctactacggtgctgggctgggcgttgtggagagaccttatgtcccgcagctcggaacgtataatgtcattccgctcaacaacgaacaatctagcggcccagtgcccgagacagtcagaagctattttccagaaacctggatctgggaacttgtagctgtcaacagctctggcgttgcggaagttggcgtcactgtgccagacacaatcacagaatggaaggccggcgctttttgtttgtctgaggatgccggactgggaatcagtagcacggctagtctaagagcctttcaacccttttttgtcgaattaaccatgccgtacagcgtgatacgaggcgaagtgtttacccttaaagcaacagttctgaattatctaccgaagtgtatcagggctgagggcatcgagcaggaaaaaacattctctagtatgacctgtgcatcaggggcaaacgtgagcgagcagcttagccttaaactcccttccaacgtggtaaaggaaagcgctcgtgcgagcttcagcgtgctgggggacattctagggtcagccatgcagaatatccaaaatctgctccagatgccttatggctgcggggaacagaatatggttctctttgcacctaatatctatgtgctgaattatttaaacgagactcagcagcttacccaggagataaaggcaaaggcggtgggataccttattaccgggtatcaacgacagctcaattacaaacaccaggacggtagttattcaaccttcggagagcggtatggccgtaaccaagggaatacatggctgacagcctttgtgcttaagactttcgctcaggctaggtcttacatttttattgacgaagcccatataacgcagtccctgacttggttgtcccagatgcaaaaggataatgggtgcttcagatcctctggatctttgctaaacaatgctattaagggaggcgttgaggacgaggccacactctctgcatatgtgacaattgccctgttggagatcccgctgccagtcaccaatcccattgtccggaacgcgctcttttgccttgagtcagcctggaacgtagcaaaggagggaacacatggttctcacgtgtatacaaaggcattgttggcgtatgcgttctcattgctcggcaagcagaatcaaaacagagagatcctgaatagcttggataaagaagccgtcaaggaggacaatcttgtccactgggagagaccacaacgcccgaaagctccggtggggcatctctaccagactcaagcgcctagcgccgaggtcgagatgaccagctacgtgctgctcgcctatctgaccgcgcaacccgcccccaccagtggtgatctgacatcagccacaaacatagtgaagtggatcatgaaacagcagaacgctcagggcggattcagctcaacacaagataccgtggtagccctgcatgcgctgtcccggtatggggcggcgacattcaccagaaccgaaaaaaccgcccaggttacagtgcaagattctcaaacgttcagtacgaacttccaggtcgataataataatctcctgcttctccagcagatctcgctcccagaactgccaggggagtatgtcataacggtcaccggcgagcgatgcgtgtatctgcagacgagtatgaagtacaacattctgcctgaaaaggaagacagcccttttgctttaaaagtccagaccgtgcctcagacatgtgatggccataaggctcatacatccttccaaatttcactaaccatcagttacacaggaaatagaccggcatcaaatatggtcattgtggatgttaaaatggtgagtgggtttattcctctcaagccaacagttaaaatgctcgagcgctcttcttcagtgtcgcggactgaagtcagtaataaccatgtgcttatttatgtggagcaagttacgaaccagaccctgagctttagctttatggttctccaggatatcccagtgggtgacttgaaaccggcaatcgtgaaggtgtacgactactatgaaaccgatgaaagcgtggtcgccgagtacattgccccgtgttcaaccgacaccgagcacggcaatgtgtag

SEQ ID NO: 200585 - DNA, 660 bp, synthetic construct
  misc_feature 1..660: note = Description of Artificial Sequence: Synthetic coding sequence
  source 1..660: mol_type = other DNA
atggtgaagtacttcctgggccagagcgtgctgcggagcagctgggatcaggtttttgccgccttctggcagcgctacccaaacccatattccaagcatgtactgaccgaggatatcgtgcacagagaagtcacccctgatcagaaacttctctcccgacgcctcctgactaaaaccaataggatgccacggtgggccgagcggctgtttcctgcaaatgttgctcattccgtctatgtgctggaggatagtattgttgaccctcagaatcaaacaatgaccactttcacttggaacataaaccacgcccgtctgatggtggtcgaggagcggtgtgtctactgcgtgaattccgataactcaggctggactgaaattcgtcgcgaggcatgggtatccagctcactttttggcgtgtctagggccgtccaagagtttggcctagcaagatttaaatctaatgtaacaaagacaatgaaagggttcgagtatatattggcaaagctccagggcgaggcacctagtaagaccctcgtcgagaccgccaaagaagcaaaggagaaagccaaagaaactgccctcgccgctacagaaaaggcgaaagacctggcatctaaagcggccaccaagaagcagcagcagcaacagcagtttgtttag

SEQ ID NO: 200586 - DNA, 1770 bp, synthetic construct
  misc_feature 1..1770: note = Description of Artificial Sequence: Synthetic coding sequence
  source 1..1770: mol_type = other DNA
atgagcagcagctactggagcgagaccagcagcagcagctgcggcacccagcagcttcccgaggtgctgcagtgccagccccagcactaccattgttatcatcagtcctcacaggcccagcagccaccagagaagaatgttgtgtacgaacgcgttcggacttactcaggccccatgaataaggtggtgcaggccttggatcccttcaatagtagggaagtgttgtccccactcaagacaaccagcagctatcagaatcttgtgtggagtgaccactcacaagaactgcattctcccaccttaaaaatttctacctgcgcaccgagtacgttgcacatcacacagaacaccgaacaggagctgcactctcccaccgttaagttgacgacttaccctcagactactatcagaaagtatgtggtgcagaaccccgagcaagagcctcttagtcagttcttgcgaggttcccatttcttccccggaaacaacgttatttatgagaagaccattaggaaagtcgagaaactcaatactgaccaggggtgccatcctcaggcgcagtgccatcaccatattatccagcagccacaggtcatccattccgctcactggcagcagcccgacagctcgcagcagattcaggccatcactggaaacaatccaatttctactcacatcgggaacgaactgtgtcattccggatccagccaaatatgtgagcaagtcatcatccaggacgacggacccgagaaactagatccgaggtattttggcgagctgctggcagatctttcgaggaagaatacagatctctaccattgcttactagagcatctgcaaaggatcggcggttctaagcaggattttgaaagtacagacgagtctgaggacatcgaaagtctgattccaaaggggttgtccgagttcactaaacagcagattcgctatattctgcagatgcgtgggatgtctgacaagtcgttgcgtttagtgctttcaactttttctaatattcgagaagagctaggccatttacagaacgacatgacatccttagagaacgacaagatgcgacttgaaaaagatctgtcattcaaagacacgcagttgaaagagtatgaggagctgctggccagtgttagagccaataatcaccaacaacagcaaggcctccaggacagctcctcaaagtgtcaggctttggaggagaacaacttatccctccgccacaccctgtccgacatggagtaccgactcaaagagctcgaatattgcaaaaggaacctggagcaagaaaaccagaacctgagaatgcaggtcagtgaaacctgtaccggcccgatgttacaggcgaagatggacgagatcgggaatcattatactgagatggtgaagaaccttaggatggaaaaggatcgcgaaatctgtcgcctgagatcccaactgaaccagtaccacaaggacgttagcaaaagagaaggatcttgtagtgacttccaatttaagctccacgaacttacttcactcttggaagaaaaagatagtttaatcaaacggcagagcgaagagctgagtaagctgaggcaggagatctactcttcccataatcagcccagcacgggcggacgaacgaccatcacaacaaagaagtatcgcacacagtacccaatcctggggctgctctacgacgactatgagtacatccccccgggatcggagacacagacaattgtcatcgagaagactgaggacaaatacacgtgtccttag

SEQ ID NO: 200587 - DNA, 921 bp, synthetic construct
  misc_feature 1..921: note = Description of Artificial Sequence: Synthetic coding sequence
  source 1..921: mol_type = other DNA
atgagcagcagctactggagcgagaccagcagcagcagctgcggcactcagcagttgccggaggtcttgcagtgccagccccaacactaccattgctaccaccaatcatcccaagcacagcaaccacccgagaaaaatgttgtgtatgagcgtgtcagaacctattcgggacccatgaataaagtcgtgcaggcattagatcccttcaattcaagggaagtactgtctccgctaaagacaacgtcatcctaccaaaatctggtctggagcgatcattcccaggagttgcattcccctacactaaaaattagtacttgtgcaccctctaccctgcacatcactcagaataccgaacaagagcttcacagcccgaccgttaagctgacgacctacccacagaccaccattagaaagtacgtggtgcagaatccagagcaagagccgctgagccagtttctccgcggcagccacttttttccaggcaacaatgtcatatatgaaaagacaatcaggaaagtggagaagctgaacacagaccagggctgtcatccccaggctcaatgccaccatcatatcatccagcaacctcaggtcatccactcagcgcattggcagcagccagatagtagtcagcagattcaagctatcacagggaacaacccaatttctacccatatcggtaacgagttgtgccattctggaagcagccagatttgtgagcaggtgatcattcaagacgatggccccgaaaaactcgacccaagatatttcggcgagctcttagccgatctctctcggaaaaacaccgatttgtaccactgcctcctggagcacctgcagaggattggacgcaagcaatcactctcttctacatacacaattcgacatggtattcagactaaacgtaccggtattctgtag

SEQ ID NO: 200588 - DNA, 1788 bp, synthetic construct
  misc_feature 1..1788: note = Description of Artificial Sequence: Synthetic coding sequence
  source 1..1788: mol_type = other DNA
atgagcagcagctactggagcgagaccagcagcagcagctgcggcacgcagcagttgccagaagtcctgcaatgtcagccccaacactaccactgctaccaccagagcagtcaggcccagcagcctccagaaaagaacgtggtctatgaacgagttagaacttattctggtccaatgaacaaggtcgtacaagcactggatcctttcaacagccgcgaggtgctgtctcctttaaaaacaacttcgtcttaccaaaatctagtttggtccgatcactcccaggagctgcattcccctaccctgaagattagcacatgcgcgccctctactctccacattacccagaacacggagcaggagctgcattccccgacggttaaactgaccacttacccgcagaccaccatcaggaaatatgttgttcagaaccctgagcaggagccactctcacaattccttaggggtagccacttttttcccggtaacaacgtaatatacgaaaagacaattcgcaaggtggagaagctcaacacagatcagggatgtcacccacaggcccagtgtcatcatcacataattcagcagccacaggtcatccattccgcccattggcagcaaccagactcaagccaacagattcaggcaattactggaaataacccaatctccacccacatagggaatgaactctgtcatagcggatcaagccagatttgtgaacaggtcatcatccaggatgatggcccagaaaaattagatccacgctattttggggaactactggctgacctgagccgcaagaacacagacctgtatcattgtctgttggagcacctacagcggattggcgggagcaaacaggacttcgagtcaactgatgaatctgaagacatcgagagcttgatacccaagggcctgagtgagtttacaaagcagcagataagatatatcctgcaaatgagagggatgtccgacaaatccctgcggctggtcctgtccacgttctccaacatcagggaggaactcggccacttgcagaatgatatgacctcactggagaacgacaagatgcggcttgagaaagatctgagcttcaaggacacacaacttaaagagtatgaagaactactggccagcgttagagcaaataatcatcagcagcaacaggggctccaagacagtagcagcaaatgccaggctctggaggaaaacaacctgtcactgcgacacaccctgagtgacatggagtacaggctcaaagaactggagtactgtaagcgaaatcttgagcaggaaaatcaaaatcttagaatgcaggtgagcgagacatgcacgggtccaatgctccaggcaaagatggatgaaatcggaaatcactacaccgaaatggtaaaaaatttacgcatggagaaagatagggagatttgcagattgaggagccaactgaaccagtaccataaagacgtgagtaaacgggaaggttcatgttctgattttcagtttaaactgcacgaactgacctccctcctggaagagaaagactccctcatcaaacgccaatctgaggagttgtccaaactgagacaagaaatctattcatcacacaaccagccaagtactgggggcaggactacaatcactacaaagaagtatcgaacacagtacccaattcttgggctactgtatgacgattatgagtacatcccccctgggtccgaaacccagaccattgtgattgagaagactgaagacaagtacacctgtgtctctagcttgggacatttttag

SEQ ID NO: 200589 - DNA, 921 bp, synthetic construct
  misc_feature 1..921: note = Description of Artificial Sequence: Synthetic coding sequence
  source 1..921: mol_type = other DNA
atggccagccggtggtggcggtggcggcggggctgcagctggaagcccgcggcgagaagtcccggccccggatccccgggcagagctggccctttagggccatcagctgcggcggaagtacgggcccaggtgcatagacggaagggtctcgacttgagtcagataccttatattaatctggtgaaacatctcacgtctgcgtgccctaacgtgtgtagaatcagtcgattccaccacacaacccccgactccaagacacactccggcgaaaagtatactgaccccttcaaactggggtggcgggacctgaagggtctatacgaagacataagaaaggaactgcttattagtacttctgaactgaaggagatgagcgaatactacttcgatgggaaaggaaaggcatttcgccctatcatcgtagcgttaatggcgcgtgcatgtaatatacaccacaacaattcacggcatgtccaggccagtcaacgcgccattgccttgatcgctgagatgatacatacagcaagcttagtgcacgatgatgtgatcgatgatgcttcgagcagacgaggcaagcacacggtgaacaagatttggggcgagaagaaggccgttctagctggagatctgatcctgtctgccgctagtattgccttagctcggattggtaacacgacagtgatttcaatcttgacacaagttattgaagacctagtgaggggagagttcttgcagcttggaagtaaggagaacgagaatgagagattcgcccactatctcgaaaagaccttcaagaaaaccgcaagtctcattgcaaactcgtgcaaggctgtttttcctcgtaacgaatgttatgaccacgccaccgtgcagttcgcctggcgctgtcgacagagtagtaccgtgtgtaccacagaatag

SEQ ID NO: 200590 - DNA, 1248 bp, synthetic construct
  misc_feature 1..1248: note = Description of Artificial Sequence: Synthetic coding sequence
  source 1..1248: mol_type = other DNA
atggccagccggtggtggcggtggcggcggggctgcagctggaagcccgctgctcggagcccaggacctggaagcccaggacgcgccggccccctgggtccatccgctgccgcagaagtgcgggcgcaggtccaccgccggaaaggattagacctatcccagataccttacatcaatctagtgaagcacctgacgtccgcgtgccccaacgtgtgcagaatctctcggttccaccacaccacacctgattctaagactcattccggcgaaaagtatacagaccctttcaaactggggtggcgtgatctgaaaggcttgtacgaggacatcagaaaagaactgctgatctcaacgagcgaactgaaggagatgtctgagtactactttgatggtaaaggcaaggccttcaggccaattatcgtggccttgatggccagggcgtgtaatatccatcacaacaacagtcgtcacgtccaggcatcccagcgggctatagccctgattgccgagatgattcacactgcgagcctggtgcacgatgacgtgatcgacgacgcttctagcaggcgaggtaagcacaccgtcaacaagatctggggggaaaaaaaggccgtgctggcgggagacctgatcctaagcgccgcctctatagcgctggcccgcattggcaatacaaccgtcatcagcatccttactcaggtgattgaggatctggttcggggcgagttcctccaactaggcagcaaggagaacgagaacgaacggttcgcccattacctcgagaaaacttttaaaaagactgcatcattgatagcaaatagctgtaaggcagtgagtgtgctaggctgccctgatcccgtagtgcacgagatagcctaccaatacgggaaaaacgtgggaattgctttccaactgatcgacgatgtgctggattttacctcctgttccgaccaaatgggcaaacctacatcagccgacttaaaattaggtctcgccactggcccggtgctgttcgcatgccaacagttcccggagatgaatgcaatgattatgcgtagattcagcctgccgggggatgtggatagggcaagacaatacgtgctccagtctgatggggtccagcagactacgtatctagcccagcagtactgtcacgaggctattcgagagatttcaaaacttcggcctagtccagagagggacgcgctgatccaattgtctgagatcgtgctcacccgagacaaatag

SEQ ID NO: 200591 - DNA, 1131 bp, synthetic construct
  misc_feature 1..1131: note = Description of Artificial Sequence: Synthetic coding sequence
  source 1..1131: mol_type = other DNA
atgcccgcccacgtgcaccggcggaagggcctggacctgagccagatcccctatataaacctggtgaagcatctcactagtgcctgcccaaatgtctgcagaatttccaggtttcaccacaccactcccgactccaagacacacagcggcgagaagtacactgacccgttcaagctgggttggcgcgatttgaagggcctttacgaagatatccgaaaggaactgttaatcagtacatcagaactcaaggagatgtccgaatactacttcgacggtaagggaaaagcgttccggcctatcattgtggctcttatggcacgggcatgcaatatccaccacaacaactcccgccacgtgcaggcttcccagcgagctatagctttgatcgcagaaatgattcatactgcgagcctcgtgcacgatgacgtcattgacgatgcctccagcaggaggggaaagcatactgtgaacaaaatctggggcgagaagaaagctgtgctggccggcgacctgatactgtccgcggcttctattgccctggccaggattggcaataccaccgtgatcagtattctcacacaggtaatagaagatctcgtgcggggggaattcctacagctcgggtctaaagaaaatgaaaacgagcgattcgcccattatttggaaaagacctttaagaagaccgcttcgctgatcgctaattcttgcaaggccgtttccgtactgggatgccctgaccctgtggtgcacgagatcgcataccaatatgggaaaaacgtgggaattgcctttcagttgattgacgacgtgctcgactttacatcctgtagcgaccagatgggaaagcctacctctgctgatctcaagttaggcttggcaactggtccggtcctgttcgcctgccagcagtttccagagatgaatgccatgatcatgcgcaggttttctctgccaggcgacgttgaccgtgcccgccagtatgtgctgcagagtgatggcgttcagcagaccacttacctggcccagcagtactgtcacgaggccattagagagattagcaagcttcgacctagccctgagcgggatgcccttatccagttgtccgagattgtcctgacgcgggataagtag

SEQ ID NO: 200592 - DNA, 723 bp, synthetic construct
  misc_feature 1..723: note = Description of Artificial Sequence: Synthetic coding sequence
  source 1..723: mol_type = other DNA
atgaacttccggcagctgctgctgcacctgccccggtacctgggcgcctcaggctccccccgaagactgtggtggagcccttccctcgatactatatcctccgtaggctcctggagaggcaggtcttccaagtcccctgctcattggaatcaagttgtgtctgaagccgaaaagatcgttgggtaccccacgtccttcatgagtctgcggtgccttctgagcgacgaactgtctaacatcgccatgcaagtccggaaactggtgggaacccagcatccattgctcacaacagcccgaggcctggtacacgactcttggaattccctccaattgcgtggactggttgtgctgctgatttccaaagcggcgggtccttccagcgtgaacacctcttgtcaaaactatgatatggtgagcggcatctacagctgccagagaagcttggccgagattaccgaactgattcacatcgcactgctcgtgcaccgaggtatagtgaatctgaacgagttacagagctctgacggcccgctgaaagatatgcagttcgggaataagattgctatcctttctggagattttctgcttgctaacgcctgcaacgggttggcacttctccagaacactaaatcattttcattcaatggccctatagcaatttatcagatgggggactgtgagtcagcctggattctcagcaaacatccccgagccctgtcatag

SEQ ID NO: 200593 - DNA, 270 bp, synthetic construct
  misc_feature 1..270: note = Description of Artificial Sequence: Synthetic coding sequence
  source 1..270: mol_type = other DNA
atggagctggccaagcacgacgccgaggtgcagaacatggccttccagtacggtaagcacatggctatgtcacacaaaatcaactccgacgtgcagcccttcatcaaggaaaaaaccagtgactctatgaccttcaacttgaacagcgcacccgtggtcctccaccaggagttcctggggagagacctctggattaagcagataggcgagtcaagcagtacagaagtccaactgagtaatttccagcagatgctgcttagtaccctgtag

SEQ ID NO: 200594 - DNA, 1200 bp, synthetic construct
  misc_feature 1..1200: note = Description of Artificial Sequence: Synthetic coding sequence
  source 1..1200: mol_type = other DNA
atgaacttccggcagctgctgctgcacctgccccggtacctgggcgcctctgggagtcccaggcgattatggtggtcaccatccttggacacaatctcatcagtcggaagctggaggggtaggtcgtccaagtcgccagctcactggaatcaagtggtgtctgaagctgaaaagatcgtcggctaccctacatctttcatgagcctcaggtgtctgctctcagacgaactcagcaatatcgcgatgcaggtgagaaaactcgtgggcacacagcaccccttactaaccacagcccgaggtctcgtgcatgattcttggaattcacttcaactgcggggcctcgtggtgctgctgattagcaaagcagctggcccttcatccgtcaatacatcatgccagaattatgacatggtgagcggcatttactcttgccagcgttcattggccgagattacagagctcattcatatcgcactgttggtgcacagaggcatagtgaacttaaatgaactccagagcagcgacggccctctgaaggatatgcagtttggcaataagattgccattctatccggagattttctcctggccaatgcatgtaacggccttgctctgctgcagaataccaaggtggttgagttactcgcttccgccttaatggatctcgtccagggcgtctatcacgagaacagtacttcaaaggagtcttatataaccgacgatatcggtatttctacttggaaggagcagaccttcctttcacacggggcactactcgcgaagtcctgccaagctgccatggagcttgcgaagcatgatgctgaggtgcagaatatggcttttcagtatggaaagcatatggcaatgtcccacaaaatcaacagtgatgtgcaacctttcatcaaggaaaagacatcagacagcatgacctttaatctgaatagtgctcctgtcgttctgcaccaggagttccttggtagggatctgtggataaagcagattggcgaggcacaagaaaagggcaggcttgattacgccaagctgcgcgagaggataaaagcgggaaagggcgtgacatccgccattgatctttgccgctaccacggcaataaagctctggaagccctggagagctttccaccttcagaagccaggtccgctctggagaatatagtttttgccgtgacacgattcagctag

SEQ ID NO: 200595 - DNA, 243 bp, synthetic construct
  misc_feature 1..243: note = Description of Artificial Sequence: Synthetic coding sequence
  source 1..243: mol_type = other DNA
gtgcagaacatggccttccagtacggcaagcacatggccatgagccataaaattaattcggacgtgcagcctttcataaaggaaaagacgtctgacagcatgacattcaacctaaactccgcccctgtcgttctgcaccaggagtttctggggagggacctgtggatcaagcaaattggtgagtcctctagtacagaggttcagctgtccaatttccaacagatgcttctgtctacactgtag

SEQ ID NO: 200596 - DNA, 894 bp, synthetic construct
  misc_feature 1..894: note = Description of Artificial Sequence: Synthetic coding sequence
  source 1..894: mol_type = other DNA
atgaacttccggcagctgctgctgcacctgccccggtacctgggcgcttccggttcaccacggcgcctgtggtggtcaccctccctcgacacaatcagttctgtggggagttggcggggaagatcttccaagtcccctgcccattggaaccaggttgtgtctgaggccgagaagattgttggttatccaactagctttatgtcactgcgctgcttgctctccgatgaactgtctaatatagcaatgcaggtgagaaagttggtgggaacacagcaccctcttttaaccaccgcacgtggcttggtccacgacagctggaactcactgcagctgcgcggactcgtggtcttactgatttccaaagctgccggacctagcagcgtgaacacttcttgccagaactacgatatggtgagtggaatttacagctgtcagagatcactggctgaaatcacagagctgattcacatagccttgctggtgcacagaggaatcgtaaacttgaatgagctccaaagctctgatgggccactcaaagacatgcaatttggcaacaagattgccattctgtctggtgacttcttgcttgccaatgcctgcaacggcctcgcacttctgcagaacaccaaagttgtcgagctcctggcctctgctcttatggatttggtgcagggcgtatatcatgagaacagcaccagcaaggcccaagagaaaggccgactggactacgccaaacttcgtgaacggataaaagctgggaagggtgtcacaagcgcaattgatctgtgtcggtaccacggcaataaagccctcgaggcactggagagctttccccccagcgaagctagaagcgcccttgagaacattgtgttcgccgttactcgattttcctag

SEQ ID NO: 200597 - DNA, 882 bp, synthetic construct
  misc_feature 1..882: note = Description of Artificial Sequence: Synthetic coding sequence
  source 1..882: mol_type = other DNA
atgggccgggtggtggccgagctggtgagcagcctgctgggcctgtggttgttactgtgttcctgcggatgtccagagggggctgaactgagagccccccccgataagatagccataattggcgctggaattggtgggacatccgccgcctactaccttcgccagaaatttggaaaggacgtgaaaatagaccttttcgagagggaagaagttggtggccggctggcaaccatgatggttcagggccaggagtatgaagccgggggcagtgtgatccaccccctgaatctgcatatgaagcgcttcgtcaaagacctaggcctctctgcagttcaggccagcggtggactgctggggatttacaatggggaaaccctggtctttgaggagtctaattggtttattatcaatgtgatcaagttagtgtggcggtacgggtttcaaagtctgcgtatgcacatgtgggtggaagacgttctagacaaatttatgcggatttacaggtaccagtctcacgattatgcatttagcagcgtcgaaaaacttcttcatgcactaggaggagacgacttccttggaatgcttaacaggacccttctagaaacactccaaaaggccggcttttccgaaaagttcctgaatgagatgatcgctcctgtaatgagagtgaactatggccaaagtactgacatcaacgctttcgtcggggccgtgtccctgtcctgcagcgattcggggttgtgggccgtggagggcgggaacaagctggtatgctccggattgctccaggcctccaagtccaatctcatctcgggtagcgttatgtacattgaagaaaagactaagacaaagtacaccgtactgggcctgtgcccactgtag

SEQ ID NO: 200598 - DNA, 1518 bp, synthetic construct
  misc_feature 1..1518: note = Description of Artificial Sequence: Synthetic coding sequence
  source 1..1518: mol_type = other DNA
atgggccgggtggtggccgagctggtgagcagcctgctgggcctgtggcttttgctttgttcatgtggatgccccgaaggagcggaactcagggcccctccagacaagatcgcgatcatcggcgccggcatcggtggcacctcggcagcatattacctgcgtcagaagtttggcaaggacgtgaagatagacctgtttgagcgagaggaagtaggtggcaggctggcaactatgatggtgcagggtcaggagtacgaggccggggggagtgtcatccacccccttaacctgcatatgaaacgatttgtgaaggacctcggtctgtccgccgtccaggcgagcggaggtttattaggcatctacaacggcgaaactctcgttttcgaggaaagtaactggtttattattaatgtcatcaaacttgtttggaggtacggattccagtcactccgaatgcacatgtgggtcgaggacgtcttagacaaattcatgagaatctatcgttaccagtcacacgactacgcgttctcaagtgtggagaagcttctgcacgctctcggtggagacgacttccttggtatgctcaatcgcaccctactggagacccttcagaaagccggtttctcggagaaatttctgaacgaaatgatcgctcccgtaatgagggtgaattacgggcagtccacagatatcaatgccttcgtcggcgccgtgtcgctgagctgctccgactcgggtctgtgggctgtggagggcggtaataaactggtgtgctccgggctcctccaggctagcaagagtaacctgataagtggctctgtcatgtacattgaggaaaagactaagacaaaatacactggcaaccctacaaagatgtacgaggtggtgtatcagatcgggactgagacgaggagcgatttttacgacatcgtcttagtcgccacaccgctcaatcgcaagatgagcaatatcaccttcctgaacttcgatcctcctattgaggagttccaccaatactatcaacacatagtaaccaccctggttaagggtgagctgaacacaagtatatttagcagtcgaccgatcgataaattcggcctcaacacagtactaaccaccgataattccgacctgtttattaattccataggcatagtcccatctgtgcgggaaaaagaggaccccgagcctagcacggacggcacttacgtgtggaaaatctttagccaggaaaccctgaccaaagcccagatcctgaagctgtttctaagctacgactacgctgtgaaaaagccctggctggcctatccccactataagccgcctgaaaagtgcccgtccatcattctgcacgatagactgtactaccttaatggcattgagtgcgctgcgtctgcaatggaaatgagtgcaattgcagcacacaacgccgccctgctcgcgtaccaccgctggaacggacatacggacatgattgatcaagatggtctgtacgagaaattgaagaccgagctgtag

SEQ ID NO: 200599 - DNA, 1287 bp, synthetic construct
  misc_feature 1..1287: note = Description of Artificial Sequence: Synthetic coding sequence
  source 1..1287: mol_type = other DNA
atgatggtgcagggccaggagtacgaggccggcggcagcgtgatccacccacttaacctacacatgaaacgcttcgtgaaagatctcggattgtccgcagtccaagccagcgggggcctcctaggaatatataacggagagactctggtgtttgaagagagcaattggttcattattaacgtgatcaagctggtttggaggtacggatttcagtctttgcgcatgcacatgtgggtggaggatgtgctggacaagttcatgcgtatctataggtaccagtcccatgactatgccttcagctccgttgaaaagcttcttcacgctttgggtggggatgacttcctgggcatgctcaacagaacactgctcgaaacgctgcagaaggcaggcttttccgaaaagttcctgaatgagatgatcgcacctgtcatgagggtgaattacggacagtctactgacataaatgcgtttgttggcgccgtttctctgtcgtgctcggactctggtctgtgggctgtggagggcggaaacaagctggtgtgcagcgggctcctacaggcatctaagtccaacctcatcagcggcagtgtgatgtacattgaagagaaaacaaagaccaaatacaccggtaacccaaccaaaatgtacgaagtagtctaccagatcggaacagagacgagatccgatttctacgacattgtgttagtcgcaacgcccctcaaccgcaagatgtcaaacataacatttctgaacttcgaccccccgattgaggagtttcaccagtactatcaacacatcgtcactaccctcgtgaaaggtgagctgaatacttctattttcagttctcgcccaatcgataagtttggcctaaacacagtgctcactaccgacaatagcgatctgtttatcaattcaattgggatcgtcccttcagtgcgagagaaggaagatccagaaccgtctacggatggtacttatgtgtggaagattttctctcaggagacacttacgaaggcccagatcctgaaactcttccttagctatgactatgccgtgaagaagccctggctggcttatcctcattacaagcctcctgaaaagtgcccctccataatcctccacgaccggctgtattatctgaacggcatcgagtgcgctgcgtccgccatggaaatgtctgccattgctgcccacaacgccgccctgctcgcctaccacaggtggaacgggcacactgatatgatagatcaagatgggctgtacgaaaagttgaagacagaactctag

SEQ ID NO: 200600 - DNA, 1284 bp, synthetic construct
  misc_feature 1..1284: note = Description of Artificial Sequence: Synthetic coding sequence
  source 1..1284: mol_type = other DNA
atggtgcagggccaggagtacgaggccggcggcagcgtgatccaccctctgaatcttcatatgaaaaggtttgtgaaggacctcgggcttagtgccgtgcaagcaagcggaggattgcttgggatttataacggcgaaactctcgtattcgaggagtcaaactggtttatcatcaacgttataaaactggtttggcgatatggtttccaatccctccggatgcacatgtgggtcgaggacgtactggacaaattcatgcggatctatcgataccagtctcacgattacgcgttttccagtgtagagaaactgctgcatgccctaggaggcgatgatttcctcggaatgctaaataggactctcctagagacccttcagaaagctggcttcagcgaaaagtttctaaatgagatgattgcacctgtaatgagggtgaactacggacaatccaccgatatcaatgcattcgttggagccgttagcctgtcatgctcggactccgggctatgggctgtggaaggcggcaacaagctggtgtgcagtgggctgttgcaggcctccaaatctaacctgatttccggcagcgtgatgtacatcgaggaaaagaccaaaactaaatacacgggaaacccaacgaagatgtatgaagtggtgtaccagatcggcactgagacccgctcagacttctacgatattgttctggtggcaacccctcttaaccgcaaaatgagcaacataacctttctaaactttgatccgccgatcgaagaattccaccaatattatcagcacattgttaccacattagtcaaaggcgaactcaacacttcaattttcagttctcgtccgatcgataagttcggattgaacaccgtgctgacgacagataactcagatctctttatcaattccatcggcatcgtcccaagcgtgagggaaaaagaggatccagaacctagtacagacggcacttacgtgtggaaaatcttctcgcaagagacattgacaaaagcccagatactcaagctctttctgagttacgactatgcagtgaagaagccctggctggcctatccccactataagccccctgagaagtgtccttccattattttgcatgatcgcctgtactacctaaatggaattgaatgtgctgctagcgcgatggaaatgtcagccattgccgcacacaatgctgcactcctagcttatcatcggtggaatggtcatactgacatgattgaccaggacggattatatgaaaagctgaaaacagagctatag

SEQ ID NO: 200601 - DNA, 1485 bp, synthetic construct
  misc_feature 1..1485: note = Description of Artificial Sequence: Synthetic coding sequence
  source 1..1485: mol_type = other DNA
atggcccgggccgcccccctgctggccgccctgaccgccctgctggccgccgcagcggctggcggagatgctcctccgggaaaaatcgcagtggtgggggcaggcatcgggggcagcgccgtcgctcactttctgcagcaacattttggtcctagggtccagattgatgtctacgagaaaggcactgtgggtggccgcttggcgacaattagcgtaaacaagcagcactatgaatctggggctgcgtcattccactccttgtctttgcatatgcaagactttgtgaagctgcttggacttcggcaccgccgggaggttgtcgggcgcagcgcgatatttggaggcgaacacttcatgctggaagaaaccgattggtacctgctgaatctcttcagattgtggtggcattacggcatctccttcctgagattgcagatgtgggttgaagaggtgatggagaaattcatgcgcatatataaatatcaagcccatggctacgcttttagtggcgttgaggagcttctgtactcattaggcgagagcaccttcgtgaatatgactcagcatagcgttgcagaatcactgctgcaggtgggagtgacgcagcgcttcatcgatgacgtcgtgtcagctgttttgagagcctcttatggccaatctgcggctatgcctgctttcgctggtgctatgtcccttgccggcgcgcaaggctccctctggtctgtggagggtggcaacaaactggtgtgctccggcctcctcaagcttaccaaagccaacgtgatccacgcgacagttacctccgtgaccctgcacagcacagaagggaaggctctgtaccaggtggcttatgagaacgaagttggcaattcctctgacttttatgatatcgtcgtgatcgccaccccattgcatctggacaattccagcagcaatctgaccttcgccggctttcaccccccaatagacgatgttcaggggtccttccagcccacagttgtgtccctggtgcacgggtatctgaactccagttatttcggctttccggacccgaaactgtttccatttgctaacattttaaccactgacttcccctccttcttttgcacccttgacaacatctgcccggtgaacatctccgccagctttagacggaaacagccccaagaagcagccgtctggagagtgcagtctcctaaaccgttattcaggacccagctgaaaaccttgttccggtcctattactcagttcagaccgccgaatggcaagcccatcctctttatggcagtagacccacattgcctagattcgccctccacgaccaactgttttatctgaacgcgctcgaatgggcagcctcttctgttgaggtgatggccgtagccgctaaaaacgtggctctgctggcatataataggtggtaccaggatctggacaagatcgaccagaaggacctgatgcacaaagtaaaaactgaactgtag

SEQ ID NO: 200602 - DNA, 531 bp, synthetic construct
  misc_feature 1..531: note = Description of Artificial Sequence: Synthetic coding sequence
  source 1..531: mol_type = other DNA
atgaaggtgctgctgtgcgacctgctgctgctgagcctgttcagcagcgtgttctcctcttgccagagagattgcctcacctgccaagagaagcttcatcccgctctcgactctttcgacctggaggtgtgcattctcgaatgcgaagaaaaggtgtttccctctcccctttggactccttgcacgaaagtcatggctcgctcatcatggcaactctcccccgctgcgccggagcatgtggcggccgccctgtaccagccgcgtgcctccgagatgcagcacttgcggagaatgcctcgagtcaggagtctctttcaggagcaggaggagccagagcctggtatggaagaagcaggggaaatggagcagaagcaactgcagaaacggttcggggggttcacaggggcgaggaaatcggccagaaagctggcaaaccagaagcgattttcagagttcatgaggcagtacctcgttctttccatgcaatcctctcaacggaggagaactctacatcagaatggcaacgtctag

SEQ ID NO: 200603 - DNA, 465 bp, synthetic construct
  misc_feature 1..465: note = Description of Artificial Sequence: Synthetic coding sequence
  source 1..465: mol_type = other DNA
atgaaggtgctgctgtgcgacctgctgctgctgagcctgttcagctccgtcttttcctcctgtcaacgtgactgcttaacctgccaggaaaaactgcatccagccctcgatagttttgatctagaggtctgcatactggagtgcgaagaaaaggtgttcccatctcccctgtggacaccctgcacaaaagtaatggctagatcctcttggcagctttctcctgcggcccccgaacacgtagccgctgcactttaccagccccgggctagcgaaatgcaacatctccggcgcatgccacgggtccgcagtctgttccaagagcaggaggagcctgaacctggtatggaggaagccggggagatggagcagaagcagctgcagaagagattcggcgggttcactggtgctagaaaaagcgctagaaagctcgccaaccagaagaggttcagtgaatttatgagatag

SEQ ID NO: 200604 - DNA, 1230 bp, synthetic construct
  misc_feature 1..1230: note = Description of Artificial Sequence: Synthetic coding sequence
  source 1..1230: mol_type = other DNA
atgaccgagctgcccgcccccctgagctacttccagaacgcccagatgagcgaggacaatcatttgtccaatactgtgaggagtcagaacgataaccgcgaacgccaagaacacaatgacaggcgcagcctcggtcacccagagccactgagcaatggcaggccccaggggaactctcggcaggtggtggaacaagacgaagaggaggatgaagagctgaccctcaaatacggggccaagcacgtcataatgctcttcgtgcctgtgacgttatgcatggtggtggtggtcgctaccatcaaaagcgtgtccttctatacacggaaggatggccaattaatctacacccccttcactgaagatacagagaccgtgggccaacgggcacttcattccatcctcaacgctgccattatgatcagcgtgatcgtggtgatgacgatactgctggttgtgttatataagtaccggtgttataaggtgattcacgcatggctgatcatttcctctctccttttgcttttctttttcagctttatttatcttggcgaggtgttcaaaacatacaacgtagctgttgattatatcaccgtggcgctacttatttggaattttggagtggtgggaatgatcagcatacattggaagggtcccctgagactccagcaagcctacctcattatgatctcagccctgatggcccttgtgtttattaaatacctgcccgagtggaccgcatggctgattctagctgtgatttctgtctacgatctggtcgccgtcttgtgccccaagggccctctgcgcatgcttgtggagacagcacaggaacggaacgaaacactttttccagctctaatatactcctctacaatggtctggctggtaaatatggctgaaggcgaccccgaagcccaacggcgagtgtctaagaactctaaatacaacgcagaaaggggagtgaaactgggactgggtgatttcatcttctacagtgtgctggtgggaaaagccagcgcgacggctagtggcgattggaacaccactattgcctgctttgtggccatactcatcggattgtgtctgactcttcttcttctggccatttttaagaaggctctccccgcgctgcccattagcatcacgtttggcctggtcttttattttgcaaccgattatctcgtgcagccatttatggaccagctggccttccaccaattttacatctag

SEQ ID NO: 200605 - DNA, 1404 bp, synthetic construct
  misc_feature 1..1404: note = Description of Artificial Sequence: Synthetic coding sequence
  source 1..1404: mol_type = other DNA
atgaccgagctgcccgcccccctgagctacttccagaacgcccagatgtctgaagataatcaccttagcaacacggtacgcagccagaatgataaccgggagcggcaggaacataatgacagacgaagcctgggacaccccgagcctctgagcaatggccgtcctcaaggtaattctagacaagtggtggaacaggatgaggaagaagatgaagagctaaccttaaagtacggcgccaaacacgttattatgctctttgtgccggtgaccctgtgtatggtagtggtggttgccactataaaaagcgtatccttttacactcgcaaggacggtcaactgatttacaccccatttaccgaggatactgagaccgttgggcagcgcgccctgcactcaatcctgaacgccgctatcatgatctcggtgatcgtagtcatgacaatactgcttgtggtgctctataagtacagatgctacaaagtgatccatgcgtggttgattattagctccttattactgctgttctttttttcctttatttacttgggcgaggtttttaagacgtacaacgtcgccgttgattacataaccgttgccttgctgatctggaattttggcgttgttggcatgatctcaatccattggaagggacctttgagacttcagcaggcatacctgatcatgatatcagctttaatggcactggtctttatcaaatacctgccagagtggacagcctggctgatcctcgccgtgatctcagtgtacgatctcgtcgcagtcttatgtcctaagggtcctctgaggatgctggtggaaacagctcaggaacggaatgagaccctcttccccgccctgatttattcatccacgatggtttggctggtgaacatggcagaaggagatccagaggcgcagcgccgcgtgtcaaagaactcaaaatacaatgccgagagcactgagagagagagtcaggatacagtcgcagaaaacgatgacggcgggttcagtgaagagtgggaagctcagcgcgacagccatctgggtcctcacaggagcacacctgaatctagggcagcagtccaggaactgtcttccagcatacttgccggcgaagatcccgaggagcggggagtgaagctgggtctgggcgactttatattctattcagtcctggtgggcaaggcgagtgccaccgctagcggagactggaacacaacgatcgcatgtttcgtagctattctgattggactgtgcttgactcttctcctgttagcaatctttaagaaagccctcccagccctgccgatcagtatcacattcggcctcgtgttttacttcgcgacagattatctcgtgcagccctttatggaccaacttgcatttcaccaattttacatttag

SEQ ID NO: 200606 - DNA, 1137 bp, synthetic construct
  misc_feature 1..1137: note = Description of Artificial Sequence: Synthetic coding sequence
  source 1..1137: mol_type = other DNA
atgaccgagctgcccgcccccctgagctacttccagaacgcccagatgagcgaggataaccatttgagcaacacggtccgttcccagaacgataatagggagcgtcaggaacataacgatagaagatctttgggacatccagagccactgagtaatgggaggccacagggcaactctcgacaggtcgtggaacaagacgaggaagaagatgaggagctaacgctgaagtacggagccaagcacgtgatcatgctttttgtgccagtcacgctctgtatggtcgttgtggttgcaacgatcaagagcgtgagtttctacacacggaaagacggccagttaatctacacacctttcacggaagacaccgagaccgtggggcagagagctttacactccatcctgaacgctgcgatcatgatctctgtgatcgttgttatgactatactcctggtggtcttgtacaaatatcgctgttataaagtcatccacgcttggctaatcatttcaagcttactactccttttctttttctctttcatatacctgggagaggtgttcaaaacttacaacgtagccgtggactatatcacggtggctctgctaatatggaatttcggtgtagtgggcatgatctctattcattggaaggggcctcttcggctgcagcaagcttacctaattatgatctcggcactgatggccctggtttttatcaagtacctcccagagtggaccgcttggcttattctggcagtgattagcgtatatgacctggtggcagtcctgtgtccaaagggcccgctcagaatgctggtggagacagctcaagagagaaatgagactttattcccagccctaatctacagcagcacgatggtatggctggtgaatatggcagaaggagaccccgaggcacaaaggagagtttcaaagaactcgaaatacaacgcagagcgcgcctgcttgcccccagccgccatcaatctgctcagtattgcccctatggcacctagactgttcatgcctaagggcgcctgcagacccacagcccagaagggcagccataagacgctgttgcaaaggatgatgatggccgggagcgtaagaaatgggaagccaagaggtacggttatctag

SEQ ID NO: 200607 - DNA, 1392 bp, synthetic construct
  misc_feature 1..1392: note = Description of Artificial Sequence: Synthetic coding sequence
  source 1..1392: mol_type = other DNA
atgaccgagctgcccgcccccctgagctacttccagaacgcccagatgagcgaagataatcatctgagcaacacaaacgacaatcgagagcggcaggaacacaacgacaggaggtcccttggtcatcccgagcctctcagcaacggtcggcctcagggcaacagtcgtcaggttgtagagcaggacgaggaagaggatgaggagctcactctgaagtatggcgcgaaacacgtaataatgctgttcgttccggtaacactttgcatggtagtagtagttgcgacaatcaagagtgttagcttctatacgagaaaagacggccagctgatatacaccccttttactgaagacaccgaaactgtgggccaacgggctctgcacagtattctgaacgcagctatcatgatatcagttatcgtagtgatgacaatactgctcgttgttttatacaaataccgatgctataaggtcatccacgcttggctgataatatctagcctattgctgctgtttttcttctcgttcatttacctgggcgaggtgttcaagacttacaacgtcgctgtggactacattacagtggcccttctgatctggaattttggtgtggtgggtatgatctccatccactggaagggacctctcagacttcaacaagcctatctaataatgatctcagccttgatggccttggtattcattaaatacttgcctgagtggaccgcgtggttaattcttgctgtgatttcggtctatgacctcgtcgctgttctgtgccccaaaggacctctacgtatgctggttgagaccgcccaggagcgtaacgaaactttattccccgctttgatatattcaagcacaatggtctggctcgtgaacatggctgagggtgaccctgaggcacagaggagagtctcaaagaactctaagtataacgccgagagcaccgaaagggaaagccaagatactgttgccgagaatgacgatgggggcttttcagaggaatgggaggcccagcgcgacagccacctgggaccacacagaagcacacccgagtccagggcagcagtccaagaactgagctccagtatactggcaggggaagatcctgaggaacggggcgtaaaactcggcttgggcgactttatcttttattcggtgcttgtggggaaggcctctgccactgcatccggcgactggaataccacaattgcatgcttcgtagctatcctcattggcctctgtctaaccttgcttctgcttgccattttcaagaaggcccttcctgctttacccatctctatcacctttggactcgttttttacttcgccaccgattatctggtgcagcccttcatggaccagctggcctttcatcagttttacatctag

SEQ ID NO: 200608 - DNA, 555 bp, synthetic construct
  misc_feature 1..555: note = Description of Artificial Sequence: Synthetic coding sequence
  source 1..555: mol_type = other DNA
atgaccgagctgcccgcccccctgagctacttccagaacgcccagatgagcgaagataaccacctgtctaataccgtgcgctcacagaacgataatcgcgagcgccaagaacacaacgatcgtcggagtcttggacacccagaacctctctcgaacggtagaccacaaggaaactctcgccaagtggtggaacaggatgaggaagaggacgaggagctgacgcttaaatacggcgcgaaacacgttatcatgctgtttgtgcctgtgactctgtgtatggttgtcgttgttgctacaataaagtccgtcagcttttataccagaaaggatggccagctgatctacactcccttcactgaggacaccgagactgtaggccaaagggctctgcatagcattctcaacgctgctattatgatatccgtgatagtggtgatgacaattcttttggtggtgctgtacaagtacagatgttacaaagtttccatgcggcacaggagtctactgtccactctcttcttcttgtggctcggcatcctcgttaccgtaacctag

SEQ ID NO: 200609 - DNA, 1392 bp, synthetic construct
  misc_feature 1..1392: note = Description of Artificial Sequence: Synthetic coding sequence
  source 1..1392: mol_type = other DNA
atgaccgagctgcccgcccccctgagctacttccagaacgcccagatgtcagaggataatcaccttagcaataccaatgataatagagaaaggcaagaacacaatgaccgtcgctcactgggtcatccagaaccactgtccaacggccgaccccagggcaacagccgccaggtcgtggagcaagacgaggaggaggatgaggaattgactctcaaatacggggcaaagcacgtcatcatgttgtttgtcccagtcacgttgtgtatggtggttgtcgtcgcaactattaagtctgtaagcttttacaccaggaaggatggccagcttatttacacacccttcaccgaggatactgagacagtcggacaacgggctttacactccatcctcaacgcagctattatgatttctgttatcgtggtaatgaccattctcctggtggtgctctacaagtaccggtgttacaaagtgatccatgcctggctgatcatctccagcttgctgctgctgtttttcttcagtttcatctatctgggcgaagtatttaagacctacaacgtcgcggtggattatatcaccgtggccctgcttatttggaacttcggcgtggtaggaatgatctcaatacattggaagggcccgctgagactgcagcaagcctatcttattatgattagcgcactgatggcgttagtttttattaaatacctgcccgagtggaccgcctggttgatccttgctgtaatcagcgtttatgacctggtggcggttctgtgtcccaaagggcccctccgaatgttggtcgagaccgcccaggagaggaacgagacactctttcctgcgctcatctactcaagtacgatggtctggcttgtcaatatggccgagggagaccccgaggctcagaggcgcgtgagtaagaatagcaaatataacgcagagtcaaccgagcgagagtcccaagacactgtcgcagagaacgatgacggcggcttttcggaagaatgggaggcgcaaagagactctcatctgggaccccatagatcaacacccgagtcacgcgccgcagtccaagagctcagctcaagcatcctggctggagaggaccctgaggagcgtggggtcaagctgggcctgggagacttcatcttctacagcgtgttggtggggaaggcttcggccaccgctagcggagactggaatacaactattgcgtgctttgttgcaatcctcatcgggctctgtctgaccttgcttttactcgcaatatttaaaaaggcccttcctgccctgcccatcagcatcacttttggcttggtgttctactttgctacggactacctggttcaacccttcatggaccagttagcctttcaccagttttacatctag

SEQ ID NO: 200610 - DNA, 279 bp, synthetic construct
  misc_feature 1..279: note = Description of Artificial Sequence: Synthetic coding sequence
  source 1..279: mol_type = other DNA
atgaccgagctgcccgcccccctgagctacttccagaacgcccagatgtccgaggataatcatctgagcaacactaacgataatagggaacgccaagaacataatgatcgacgtagcctcgggcaccccgagccgctcagcaacggacggccacagggcaattcaagacaggtagttgagcaggacgaagaagaagatgaagaactgacattgaaatatggcgctaagcacgtcatcatgctatttgtccctgtgactctctgcatggttgtggtgtag

SEQ ID NO: 200611 - DNA, 444 bp, synthetic construct
  misc_feature 1..444: note = Description of Artificial Sequence: Synthetic coding sequence
  source 1..444: mol_type = other DNA
atgaccgagctgcccgcccccctgagctacttccagaacgcccagatgtctgaagacaaccacctatccaatacaaatgacaacagagagaggcaggagcacaacgacaggcgcagcctgggccacccagagcccctttctaacgggaggccacagggcaattctagacaggtcgtcgagcaggacgaggaggaagatgaagaattaactctcaaatatggcgccaaacacgtgataatgctgttcgtaccagtgaccttatgcatggtggtggtggtcgcaaccatcaagtccgtctctttttatacgcgcaaggacggtcagttgatttatacacccttcacggaggacacggagaccgtcgggcagcgtgccctgcacagtattctaaacgctgcaataatgataagcgtgatcgtcgtgatgactattcttttggtctag

SEQ ID NO: 200612 - DNA, 330 bp, synthetic construct
  misc_feature 1..330: note = Description of Artificial Sequence: Synthetic coding sequence
  source 1..330: mol_type = other DNA
atgaccgagctgcccgcccccctgagctacttccagaacgcccagatgtccgaagacaatcacctttccaacactgtcaggtcacagaatgataatcgggagcgccaagaacacaacgaccgaaggtctttggggcatcccgaacccctgtctaacggtcgaccgcagggcaacagcaggcaagttgtggaacaagacgaagaagaagacgaagaacttacccttaaatatggggccaagcacgttatcatgctgtttgtccctgtcacactttgtatggtggtagtagtcgccacaatcaagtccgttagtttttacacccgcaagtag

SEQ ID NO: 200613 - DNA, 468 bp, synthetic construct
  misc_feature 1..468: note = Description of Artificial Sequence: Synthetic coding sequence
  source 1..468: mol_type = other DNA
atgaccgagctgcccgcccccctgagctacttccagaacgcccagatgagtgaagacaatcacctgtcgaacacagtgcggtctcaaaacgacaaccgtgagcgccaagaacacaatgaccgccgctcgttaggccatccagagccgctgtccaacggccgaccccaggggaattctcggcaagtagtggagcaggacgaagaggaagacgaagagctcaccctcaaatatggtgctaagcacgtcataatgctgttcgtccctgtgacactttgtatggtggttgtggtggctacaattaaaagcgtatccttttatacacgtaaggatggtcaattgatctacactccattcacagaggacaccgaaacagtgggacagagagctttacactctatcctgaacgctgctatcatgatctctgttatcgttgtgatgacaatactcctggtggttctgtataagtag

SEQ ID NO: 200614 - DNA, 177 bp, synthetic construct
  misc_feature 1..177: note = Description of Artificial Sequence: Synthetic coding sequence
  source 1..177: mol_type = other DNA
atgaccgagctgcccgcccccctgagctacttccagaacgcccagatgtccgaagataaccacctgtcgaacacaaacgataacagggagcgccaggaacacaacgaccggaggtctctcggccacccagaaccattgagcaatggacggccacagggtaacagtcgacaagtttag

SEQ ID NO: 200615 - DNA, 279 bp, synthetic construct
  misc_feature 1..279: note = Description of Artificial Sequence: Synthetic coding sequence
  source 1..279: mol_type = other DNA
atgaccgagctgcccgcccccctgagctacttccagaacgcccagatgagtgaggacaaccacctctcaaacaccaatgacaaccgggaacggcaggagcacaatgaccggagatcccttgggcaccccgagccactgtctaatgggagaccccagggtaatagtcgccaggttgttgagcaagacgaagaggaggatgaagagctgacattgaaatatggcgcaaagcacgtcatcatgctgtttgttccagtaacattatgcatggtggtggtgtag

SEQ ID NO: 200616 - DNA, 192 bp, synthetic construct
  misc_feature 1..192: note = Description of Artificial Sequence: Synthetic coding sequence
  source 1..192: mol_type = other DNA
atgaccgagctgcccgcccccctgagctacttccagaacgcccagatgtcagaagacaaccatctgtctaatacaaacgataaccgggagcgacaggagcacaatgacaggcgcagcctaggacatcccgaacccctgagtaacggtcggccacaaggcaatagcagacaggtcgtggagcaggacgaatag

SEQ ID NO: 200617 - DNA, 276 bp, synthetic construct
  misc_feature 1..276: note = Description of Artificial Sequence: Synthetic coding sequence
  source 1..276: mol_type = other DNA
atgaccgagctgcccgcccccctgagctacttccagaacgcccagatgagtgaagataatcatctgtcaaacacgaacgacaatcgggagcgccaggagcacaatgacagaaggagcttggggcaccctgagccattatcaaatggcagaccgcaagggaactctaggcaagttgtggagcaggatgaagaggaggacgaagaactaaccctgaagtatggtgcaaagcacgttattatgcttttcgtcccagttacgctctgcatggtcgtgtag

SEQ ID NO: 200618 - DNA, 189 bp, synthetic construct
  misc_feature 1..189: note = Description of Artificial Sequence: Synthetic coding sequence
  source 1..189: mol_type = other DNA
atgaccgagctgcccgcccccctgagctacttccagaacgcccagatgagcgaggacaatcatttgtccaacaccaacgataatagagagaggcaggagcacaacgacagacgcagtttaggccatccggagccactctcaaatggacgtcctcagggcaacagtcgccaagtggtggaacaggactag

SEQ ID NO: 200619 - DNA, 300 bp, synthetic construct
  misc_feature 1..300: note = Description of Artificial Sequence: Synthetic coding sequence
  source 1..300: mol_type = other DNA
atgaccgagctgcccgcccccctgagctacttccagaacgcccagatgtctgaggataaccatctatcaaacactgtgcggtcgcagaacgacaatcgggagcgtcaagaacataacgacagacgttctctcggacaccctgagcctctctccaacgggcggccccagggaaactctaggcaggtggttgagcaggatgaagaagaggacgaggaattaaccctgaagtacggcgcaaaacatgtaataatgttgttcgttccggtgactttatgcatggtggtagttgtggccacgtag

SEQ ID NO: 200620 - DNA, 408 bp, synthetic construct
  misc_feature 1..408: note = Description of Artificial Sequence: Synthetic coding sequence
  source 1..408: mol_type = other DNA
atgaccgagctgcccgcccccctgagctacttccagaacgcccagatgagcgaagacaatcacctaagtaacaccaacgacaatagggaacgtcaggagcataatgacagacgatcccttggccacccagagccattgagcaacgggcggccccagggcaattcaagacaggtcgtggaacaggatgaagaggaagacgaggagttaactctgaagtacggagcgaagcatgtcatcatgcttttcgtacctgtcactctgtgtatggtggttgtggtagctacaatcaaaagtgtgtctttctatactcggaaggacggccaacttatctacacaccatttaccgaggacacagagacagtgggccagcgcgctctccattctattttgaatgccgcaatcatgtag

SEQ ID NO: 200621 - DNA, 330 bp, synthetic construct
  misc_feature 1..330: note = Description of Artificial Sequence: Synthetic coding sequence
  source 1..330: mol_type = other DNA
atgaccgagctgcccgcccccctgagctacttccagaacgcccagatgagtgaagacaaccacttgagcaacaccaacgacaaccgtgagaggcaggaacataatgatagacgatctttgggccatcctgagcctctctccaacggacggccacaggggaattcccgacaggtggtggagcaggacgaggaggaagacgaggagctgaccctgaaatacggggccaaacacgttataatgctatttgtcccagtgacgctgtgcatggttgttgttgtggcaaccataaaatctgtttcattttacacacgcaaagacggccaattatag

SEQ ID NO: 200622 - DNA, 1248 bp, synthetic construct
  misc_feature 1..1248: note = Description of Artificial Sequence: Synthetic coding sequence
  source 1..1248: mol_type = other DNA
atgctgaccttcatggccagcgacagcgaggaggaggtgtgcgacgagcggacttctttgatgtctgccgagtcccctacaccacggtcttgccaggagggccgccaaggccccgaagacggcgaaaataccgcccagtggagaagccaggagaacgaagaagatggcgaggaggacccggatcggtacgtgtgtagtggagtcccggggaggccccctggactggaggaagagctgacactgaagtacggagccaagcatgttataatgctctttgtccccgtaaccctttgtatgattgttgttgttgcaactatcaaatccgtccgattttacacagaaaagaacggccagctcatttacaccccttttactgaggacacccccagcgttggacagaggctgctgaattcggtgctgaacacgctgatcatgatttctgtcattgtagttatgaccatcttcctcgtggtgctttacaaatatagatgctacaaattcattcacggctggctcattatgtctagcctcatgctgctattcctcttcacatatatttatctaggtgaggttctaaaaacttataacgtagcaatggattaccctactctgttgctcaccgtatggaattttggcgcggtagggatggtttgcatccactggaaggggcctttggtgctgcagcaggcctacctgattatgatatcagcgctaatggcactcgtttttataaagtacctgcccgagtggagcgcatgggtgatactcggtgccatcagtgtgtatgctgcaatggtgtggaccgtgggaatggccaaactggacccatcatctcagggagcacttcagctgccctatgatcctgagatggaagaagacagctacgactcctttggtgaacccagttatccggaggtctttgaacccccgctgacaggatatcctggtgaggagcttgaggaggaggaggaaagaggtgtaaagttgggtctaggggactttatcttttacagtgtgttggtcgggaaagctgcagccactggaagcggggattggaacaccacactagcttgtttcgtggctatcctcatcggactgtgtctcacacttctcctgctggccgtctttaagaaagctcttcctgccctgcctatcagtatcactttcggtctcatcttttacttctcaaccgataacctagtgagacctttcatggacaccctggcttcccaccaactgtacatctag

SEQ ID NO: 200623 - DNA, 1446 bp, synthetic construct
  misc_feature 1..1446: note = Description of Artificial Sequence: Synthetic coding sequence
  source 1..1446: mol_type = other DNA
atgctggccggcaccgtgcggttcgcccggcactgcctgaagttcttcccagctcagaaaccagcctgtgtcgacttcggcgcaagtaggggcagggccatgctaacctttatggcatccgactctgaagaggaggtgtgcgacgaaagaacgtcgttaatgtctgccgaatccccgacgccacggagctgtcaagagggacggcagggacctgaagacggggaaaatacggcacagtggaggagtcaagaaaacgaagaggacggagaagaagatccggaccgctatgtatgttccggtgtcccaggccgtccgcctgggcttgaggaagaactcacgctgaaatacggggccaagcatgtcataatgctcttcgttcctgtcacactgtgcatgatcgttgttgttgctactattaagtcagttaggttttacacggagaagaacgggcaactgatctacaccccatttacggaggatactcctagcgtgggtcagagactactaaactctgtcctgaatacacttatcatgatcagtgtgattgtggtcatgaccatctttttggtcgtcctctataagtatcgatgctacaaatttatccatggatggctgattatgagttccctgatgctactgttcctatttacatacatctatctgggagaggtcctcaaaacttacaacgttgccatggattaccctaccctgctgctgactgtgtggaatttcggtgcagtcgggatggtctgcattcactggaaaggaccgctagttttacagcaggcttatctaattatgattagcgctttgatggccctagtctttattaagtacttacccgaatggtcagcttgggttattctgggcgcaatttccgtttatgatttggtagccgtgctttgccccaaggggcctttgcgcatgctggtcgaaacagcccaggaaaggaatgagcctatctttccggccctgatttatagtagcgcaatggtctggacagttggcatggcgaagcttgatccttcatcccaaggagcactacagctaccctacgatccggaaatggaagaagactcctatgattccttcggcgagcccagctatcctgaggtctttgaaccacccctgactggctaccctggtgaagagctagaagaggaagaagaaagaggtgtgaaacttggcctcggagacttcattttctacagtgtcctcgtgggcaaggcggccgcgactgggtcaggcgattggaatacaactctggcctgctttgtcgcgatccttatcggtctctgtctgacgctgctgttgttagcagtgtttaaaaaggccctccccgcactgcctatctcaattacatttggtctgattttctactttagcaccgacaacctggtgagaccttttatggacacccttgcatcacaccagctctacatatag

SEQ ID NO: 200624 - DNA, 1347 bp, synthetic construct
  misc_feature 1..1347: note = Description of Artificial Sequence: Synthetic coding sequence
  source 1..1347: mol_type = other DNA
atgctgaccttcatggccagcgacagcgaggaggaggtgtgcgacgaacgcacctccctgatgtcagcggaaagtccaaccccacggagctgtcaggagggtcggcagggtccagaagatggagagaacaccgcacagtggcggtctcaggagaacgaggaagatggcgaggaggaccctgaccgttacgtttgcagcggagtgccaggtcggccgccagggctggaagaagagctcactctgaagtatggcgctaaacatgtgatcatgctgtttgtgcccgtgactttatgtatgattgtagtggtcgccacaatcaagtcagtccggttctacaccgaaaagaatggacagctaatctatacccctttcactgaagataccccgagtgttggacagaggcttctgaattctgttctaaatacccttatcatgatcagcgtaattgttgttatgacgatcttcctggtggtcctctataaatatagatgttacaagttcattcacgggtggttgataatgagctctcttatgctgctgtttcttttcacatacatctacttgggggaggtcttgaagacatataatgtcgccatggattatccaaccctgttactcaccgtgtggaatttcggcgctgtaggaatggtctgcattcactggaaaggcccgctcgtactgcagcaagcgtacttgataatgatctctgcactgatggcgctggtatttatcaaatacctgcctgagtggagcgcttgggtgatactgggtgctatcagcgtgtacgacctcgtggctgtgctttgtccaaaaggaccattgagaatgctcgttgagacagctcaggagcgcaacgaaccgattttcccagccctgatttactcgtctgccatggtgtggactgttggcatggccaagctggacccttcctcacagggagccctgcagcttccatatgaccctgaaatggaagaggactcatacgatagctttggggagccttcctaccctgaggtattcgagccaccactaactgggtacccgggcgaggagctcgaggaagaggaggagcggggtgttaagttgggtctgggggacttcatcttttatagtgtactcgtcggcaaagcggccgccaccggcagtggcgattggaatactaccttggcgtgtttcgttgcaatcctgattggcctgtgtcttaccctcctgcttctcgcagtctttaaaaaggctcttcctgctcttcctattagcatcacgtttggtctgatcttctatttcagtaccgataacctcgtacggccttttatggacactctagcgagtcaccagctttacatttag

SEQ ID NO: 200625 - DNA, 1446 bp, synthetic construct
  misc_feature 1..1446: note = Description of Artificial Sequence: Synthetic coding sequence
  source 1..1446: mol_type = other DNA
atgctggccggcaccgtgcggttcgcccggcactgcctgaagttctttcctgcacagaagccggcctgtgtcgattttggagctagcagaggccgagctatgttgacgtttatggcctccgattctgaggaagaagtgtgcgacgagcggacgtcactcatgagcgctgaaagccctacgcctcgcagttgccaggaggggcgccaggggccagaagatggggagaacaccgcgcaatggagaagccaggaaaacgaggaagatggggaggaggatccagaccgttacgtctgtagtggagtgcctggaagaccacctggtctggaggaagagctaaccctgaaatacggggctaaacacgtcatcatgctgtttgtgcccgtaactctctgcatgattgtggtggtggcaacaataaagagtgtgaggttttataccgagaagaatggccaattaatttatacgcctttcacagaggacaccccttcagtgggacaaagactccttaattccgtcctgaatactctcataatgatatcggtgatcgttgtcatgaccatctttctcgtggtcctgtacaaataccggtgttacaagtttatccatggatggctgatcatgtcttcactgatgctgctgttcctctttacttacatttacttaggggaagtcttgaaaacctataatgtggcgatggattatcccacactgctgctgaccgtgtggaatttcggggctgtgggaatggtctgcattcactggaaaggacccctggttctgcagcaggcctatctcatcatgatatcagctctcatggctctggttttcatcaaatatctgccggagtggagtgcctgggttattctgggtgcgataagtgtgtatgatctggtcgctgtgctgtgccctaaggggcccctcaggatgcttgtcgaaaccgctcaggagagaaacgaacctatttttcctgccctgatttactcgtccgctatggtgtggaccgtagggatggccaagttggatcccagcagccaaggtgctctgcagcttccatatgacccggaaatggaggaggattcgtatgactcattcggcgagccttcgtacccggaggtgtttgagccacctctgacgggatatcccggcgaggagctggaggaagaggaggagaggggcgttaagctgggactgggagatttcatattctacagtgtattggtgggaaaggctgccgccaccggcagcggagactggaacaccaccttagcgtgtttcgtggccattctgattggtctttgcttgacccttttgttgctagccgtgtttaagaaggcactgcctgccctaccaatctctattaccttcggcctgattttctacttctcaaccgataatttagtgcggcctttcatggataccctcgcgagccaccagctatatatttag

SEQ ID NO: 200626 - DNA, 1344 bp, synthetic construct
  misc_feature 1..1344: note = Description of Artificial Sequence: Synthetic coding sequence
  source 1..1344: mol_type = other DNA
atgctgaccttcatggccagcgacagcgaggaggaggtgtgcgacgaacgcacttccctcatgagcgcggaaagcccaacccccaggtcctgccaggagggccggcagggccccgaggatggagagaatacggcccaatggagatctcaggagaacgaagaagacggcgaagaggatcccgaccgatatgtgtgctctggggtgccgggcaggccaccaggactggaagaagaactcactttgaagtacggagctaaacatgtgatcatgctgtttgtgccagtcaccctgtgcatgatcgtggtggttgcaactattaaatccgtgcggttttatacggaaaagaatggacaattaatctacacacccttcacagaagatacgccaagcgtggggcagaggctgttgaactcagtgctcaatactctcatcatgatatccgtaatcgttgtgatgaccatctttctggtagtgctctataagtatcggtgctataagttcattcatggctggctgataatgagtagtctgatgctgctgttcctctttacctacatttacctgggcgaagttttgaaaacttacaacgtcgcaatggattaccctactctcttgcttaccgtctggaacttcggagccgtgggcatggtctgcattcattggaaaggccccctggtgcttcagcaggcatatctgatcatgatttcggccctgatggctctggttttcattaaatacctgccggagtggagtgcctgggtgattcttggggctatctccgtctatgatctcgtggccgttttatgtccaaaagggccacttagaatgttagtcgagactgcgcaagagcgaaatgaacccatttttcctgccttgatctactcctccgcaatggtgtggacagtaggaatggccaaactggacccctctagccagggcgccctgcagttgccttatgaccctgagatggaggattcatacgattccttcggcgaaccttcatacccggaagtattcgaaccacctctgacaggatatcccggcgaggaactggaagaagaagaggaacgaggagtgaaactgggtctaggggacttcattttctacagcgtgcttgttgggaaggctgcagccacgggttcgggcgactggaacacgaccctggcctgtttcgttgccattctgatcggtctttgcctaaccctcctcctcctggccgtttttaagaaggccctcccagcactccccataagtattaccttcggactgattttctacttcagtactgataatctggtgagaccctttatggatacactggcgtcacaccaactctatatctag

SEQ ID NO: 200627 - DNA, 390 bp, synthetic construct
  misc_feature 1..390: note = Description of Artificial Sequence: Synthetic coding sequence
  source 1..390: mol_type = other DNA
atgctgaccttcatggccagcgacagcgaggaggaggtgtgcgacgagcgcacgagtcttatgtcagccgagagcccaacccctcggtcctgccaagaggggcgccaaggcccagaagacggcgaaaacaccgcacaatggcgcagccaggagaatgaggaggacggagaggaagatcctgacaggtacgtgtgtagcggagtgccaggtaggccacccgggctggaagaggagctcaccttgaaatacggcgcaaagcacgttatcatgctgtttgtgccagtcactctttgcatgattgtggtagtagccaccatcaaatccgttcgattctacactgaaaagaacggacagttaatatataccccttttacagaagacacaccatag

SEQ ID NO: 200628 - DNA, 66 bp, synthetic construct
  misc_feature 1..66: note = Description of Artificial Sequence: Synthetic coding sequence
  source 1..66: mol_type = other DNA
atgctgaccttcatggccagcgacagcgaggaggaggtgtgcgacgagagaactagccttatgtag

SEQ ID NO: 200629 - DNA, 990 bp, synthetic construct
  misc_feature 1..990: note = Description of Artificial Sequence: Synthetic coding sequence
  source 1..990: mol_type = other DNA
atggcctggcggggctgggcccagcggggctggggctgcggccaggcttggggcgccagcgtgggtggacgtagctgcgaagaactcactgcagtactgaccccccctcaactcctcggacgccgttttaacttttttatccagcagaagtgcggattcagaaaggccccgcggaaagtcgagccccgtcggtcagaccccgggacaagcggcgaggcatacaaaaggagcgcgttaattccccctgtagaagagacagtcttctatccgagcccttatcctataaggtccctcatcaagccccttttctttactgtggggttcaccggctgcgcgttcggctccgctgccatctggcaatacgagtctctcaagagtcgcgttcaaagctatttcgatggcatcaaggccgattggctggactctattcgtccacagaaagagggcgactttcgcaaggaaataaacaagtggtggaacaacttgtcggacgggcagaggacagtgactggaattattgccgcaaacgtgctggtcttttgcctgtggcgcgtgccttcactccagcggaccatgattcgttactttacctcaaatccggcgtcttctgtgatctccaacttcgtaagttacgtaggaaaggtggccaccggccgatatggccccagcctaggggctagcggggcaattatgactgtattagccgcggtttgtacaaaaatcccagaagggcggttggctatcatatttttaccgatgtttaccttcacagccggaaatgccttgaaagccattatcgctatggatacggctggtatgatactggggtggaaatttttcgaccatgctgcccacttgggaggagcactgttcggtatttggtatgtaacttatgggcacgaactcatatggaagaatcgggaaccccttgttaagatctggcacgaaattagaacgaacgggcccaaaaaaggcggaggatcaaaatag

SEQ ID NO: 200630 - DNA, 1140 bp, synthetic construct
  misc_feature 1..1140: note = Description of Artificial Sequence: Synthetic coding sequence
  source 1..1140: mol_type = other DNA
atggcctggcggggctgggcccagcggggctggggctgcggccaggcttggggcgcaagtgtgggggggagaagttgcgaagaactgacagccgtacttaccccacctcaactgctcggcaggaggttcaacttcttcattcagcagaagtgtggatttcgaaaagcgccccgcaaggtggagcctaggcgctccgatccaggcacttcaggggaggcttacaagagaagcgccctaataccacctgtggaggagacggtgttttacccctcaccctaccccattagatcgcttattaagcccctgttcttcacagtcggctttactgggtgtgcatttggctccgctgcaatttggcagtatgaaagtctgaaaagccgtgtacaatcctactttgatgggatcaaagcagattggctagattcaattagacctcagaaggaaggcgattttcgcaaagaaatcaacaagtggtggaacaacctctccgatggccagcggacggtgacagggattatcgcggccaacgtgcttgtgttttgtttgtggagagtaccatcactccagagaactatgatccggtacttcacaagcaaccccgcttctaaagtgctgtgttcccccatgctgctgtctacattcagccatttctcgctctttcacatggcagctaacatgtacgttctgtggtctttctcgagctcaatcgtgaacattctgggacaagagcaattcatggctgtctaccttagcgctggtgtcattagtaactttgttagctacgtcggaaaggtggctactgggcgctacgggcccagtttgggggcttcaggcgcaatcatgactgtgctggctgccgtgtgtacaaagatccccgaagggcgactcgccatcatctttctgccaatgtttacgttcaccgccggcaacgcattaaaggccattatcgccatggacacagctggcatgatactcgggtggaagttctttgatcatgccgctcacctgggcggcgcactcttcggtatttggtatgtgacgtacgggcatgagctgatttggaaaaatagggaaccacttgtcaagatatggcacgaaattagaaccaatggtcctaagaagggcggtggatccaaatag

SEQ ID NO: 200631 - DNA, 663 bp, synthetic construct
  misc_feature 1..663: note = Description of Artificial Sequence: Synthetic coding sequence
  source 1..663: mol_type = other DNA
atggccagcgccaccgacagccggtacggccagaaggagagcagcgatcaaaattttgactatatgtttaaaatcctgatcattggcaatagtagtgtgggtaaaaccagtttcctgtttcggtatgcggatgatagcttcactccggcttttgtgtcaactgttggcattgatttcaaggtcaaaaccatttacagaaacgacaagcggattaagctccagatctgggacacggctggacaggagcggtacagaacaatcactacagcatactacaggggcgcaatggggttcatcttgatgtatgatattaccaatgaagagtcctttaacgcggtgcaggattggtctacacaaatcaagacatacagctgggacaacgcacaagtgttactagtgggaaacaaatgcgacatggaagacgagcgagtggtcagctccgagcgggggagacagttggcagaccatctcggttttgaattctttgaagccagcgccaaggataacataaatgtaaagcagacgttcgagaggctcgtggacgttatctgcgaaaaaatgtcagaatctctcgataccgccgatcccgcggtgaccggagctaaacagggcccacagctgagtgaccaacaagttcctccccatcaagattgtgcgtgttag

SEQ ID NO: 200632 - DNA, 306 bp, synthetic construct
  misc_feature 1..306: note = Description of Artificial Sequence: Synthetic coding sequence
  source 1..306: mol_type = other DNA
atgaacctggagcgggtgagcaacgaggagaagctgaacctgtgcagaaaatattatcttggcggctttgcattcttaccttttttatggctcgttaatattttttggtttttcagagaggcgtttctggtccctgcttacacagaacagagccagattaaaggttacgtctggcgatctgcagttggattcctgttctgggtcattgtactgacttcctggataacgatcttccagatttatcgtccacggtggggtgcattgggtgattatctttcattcacaatccccctaggaactccctag

SEQ ID NO: 200633 - DNA, 378 bp, synthetic construct
  misc_feature 1..378: note = Description of Artificial Sequence: Synthetic coding sequence
  source 1..378: mol_type = other DNA
atggccaagtacctggcccagatcatcgtgatgggcgtgcaggtggtgggacgtgctttcgccagggccttacgtcaggagtttgctgcgtccagggctgccgccgatgcacgcggacgcgccggccacaggtctgcagccgccagtaacctatcagggctgtcccttcaagaagcccagcagatcctgaatgtgtcaaaactcagtcccgaagaagtgcagaaaaattacgagcacctatttaaggtgaatgataagtcagttggtggctccttctacctgcagagtaaggttgtgcgggcaaaggaacgcctcgatgaagaactgaaaatccaggctcaggaggatcgagagaaagggcagatgccccacacgtag

SEQ ID NO: 200634 - DNA, 2496 bp, synthetic construct
  misc_feature 1..2496: note = Description of Artificial Sequence: Synthetic coding sequence
  source 1..2496: mol_type = other DNA
atgcccctggagatggagcccaagatgagcaagctggccttcggctgccagaggagcagcaccagtgatgatgattccggttgtgcattggaggagtacgcgtgggtccccccagggttaaggcccgaacagatccagctgtacttcgcttgcctgcctgaggagaaggtcccttacgtgaatagccccggcgagaaacacagaataaaacagctgctataccagctcccaccgcacgacaatgaagtgagatattgccagtcgctgtccgaagaagagaaaaaggaactccaggttttctctgcacagcgcaagaaagaggctttggggcgcggtactatcaagctattgagcagagccgtgatgcacgccgtctgtgaacagtgtggattaaaaatcaatgggggtgaggtcgccgtgtttgcgtcacgggcgggccccggggtctgttggcacccttcttgcttcgtttgctttacgtgcaacgaactgctggtggatctgatctatttctatcaggatgggaaaatccactgcggtcgccaccatgccgagttgctgaagcctcggtgttctgcctgtgatgaaatcattttcgctgacgagtgcacagaggccgaaggcaggcactggcacatgaaacatttctgctgcttggaatgtgaaaccgtgctgggcggtcagagatatattatgaaagacgggaggccattttgctgtgggtgctttgagtccctctatgccgagtattgtgagacatgtggcgaacacatcggagtagaccacgcacagatgacttacgacgggcagcattggcatgcgaccgaggcttgcttctcgtgtgctcagtgcaaggcctccctcctaggttgccctttcctacctaaacagggtcagatttattgctccaagacctgctcactgggggaggatgtccatgccagtgactccagcgattcagcctttcagagtgcacgcagtcgtgattccagaagaagtgtgaggatgggtaagtcctcgcggtctgcagaccagtgccggcagtccttgctcctctcccctgctctaaactacaaatttcccgggctgagcggtaatgcagatgatacgctgagccgcaaactagacgatctcagtctctctcggcaggggactagcttcgcctcagaggaattctggaaggggcgggtcgagcaggaaacgccagaggacccagaagaatgggccgaccatgaagactacatgacacagttattgctcaaatttggagacaagtccctcttccagccccagccaaacgaaatggatataagggcctctgaacattggatcagcgacaacatggttaagagcaagaccgagcttaagcagaacaaccaatcattggccagcaaaaaataccaaagcgatatgtattgggctcagagccaggacggtctgggagactctgcctacggatctcaccctggaccagcgtccagcaggcgactgcaggaactggaactggatcacggcgctagtggctacaatcacgatgaaacacagtggtatgaggacagtcttgagtgcttgagcgatctgaaacccgaacagagtgtgagagacagcatggactcattggctctcagtaatattaccggcgcctccgtcgatggggaaaacaagccgcggcctagcctgtattccctacagaatttcgaagagatggagaccgaggactgtgaaaaaatgtcgaatatgggcactctcaacagctccatgctccacagaagcgcagagagcctgaagtctctgtcaagtgaactgtgccctgagaaaatccttcccgaggaaaaaccagtccaccttccagtactcaggcggtccaaaagccagtcacgtccacagcaagtgaaattttcagatgacgtcattgataatggcaactacgacatagaaattaggcagcctccgatgagtgaaaggacgagacggcgcgtttacaattttgaggaacgggggagtcgatcgcaccaccacaggcgacgacgcagtagaaagtcaaggtccgataatgcactcaacctcgttacagagaggaagtactcacctaaggaccggctccgactgtatacaccggataactacgaaaagtttattcagaacaagtcagctagagagatccaggcttacattcagaacgctgacctttacggacagtatgcccacgccacctccgactacggactccagaaccctggaatgaatcgcttcttgggcctgtacggggaagatgatgatagttggtgtagtagtagcagcagttccagcgatagtgaagaagaggggtatttcctcgggcagccaattccccagccgcggccacaaaggttcgcgtactatactgatgacctgagctctcccccatccgccctccctactcctcagttcggccagagaacaacaaaaagcaagaagaagaagggacacaaaggaaaaaattgcatcatatcctag

SEQ ID NO: 200635 - DNA, 2496 bp, synthetic construct
  misc_feature 1..2496: note = Description of Artificial Sequence: Synthetic coding sequence
  source 1..2496: mol_type = other DNA
atgcccctggagatggagcccaagatgagcaagctggccttcggctgccaacggtcaagtacaagtgacgatgacagcggctgcgcgctcgaggaatatgcttgggtgccgccagggctcagaccagaacagatccagctgtattttgcatgcctgcccgaggagaaagtcccttacgtgaatagccctggtgaaaagcacaggattaaacaactgctgtaccagctcccccctcatgacaacgaggttcgatattgccaatccctgagtgaggaggaaaaaaaagagctgcaggtgttctctgcacagaggaagaaggaagccctggggagaggaactatcaagctgctgtcaagagcggtcatgcacgctgtgtgtgagcagtgcgggttaaagattaatggtggcgaggtggccgtcttcgcaagtagagcaggccctggcgtgtgttggcacccgagctgttttgtttgcttcacttgcaacgagctcctggtcgatttgatctacttttaccaggatggcaagattcattgtggtcggcatcacgccgagttgctgaagcctcggtgtagcgcctgcgacgagatcatattcgccgacgagtgcactgaggctgaaggtcgccattggcatatgaaacacttctgctgcctggagtgtgagaccgtattgggcggacaacgatacattatgaaagacggccgccccttctgctgcggctgctttgagagtctatatgcggaatactgcgagacgtgcggagagcacattggggtggatcacgcacagatgacctatgatggccagcattggcatgccacggaggcctgcttctcatgtgctcagtgcaaggcgtccctcctgggatgtccctttctacccaagcaggggcagatttactgtagtaagacttgctccctaggagaggacgttcatgcatcagacagttccgactccgcctttcagagcgctagaagccgggactccagaaggagcgttaggatgggaaaaagtagtagatcagcagaccagtgcaggcagagtctgctgctgtctccagctttgaattataagttccccggactgtcgggtaatgcagatgatacactgtcaaggaagctagacgatctgagcctgtccaggcaggggaccagctttgcgtctgaggaattctggaagggccgagtcgaacaggaaaccccagaggatccagaggagtgggctgatcatgaggactatatgacacaactattgttgaaatttggcgacaagagcctctttcagccacaacccaacgaaatggatattcgagcttcggagcattggatcagcgacaacatggtaaagtctaagacagagttaaagcagaataatcagagtctggccagtaagaaatatcagtctgatatgtattgggctcaatcccaggacggtctaggggattcagcatatggttcccaccccgggcctgcgagctcccgccggctgcaagagttagaacttgaccatggtgcatccggttataatcacgatgagactcagtggtacgaggattcgctcgaatgtctttcggatctgaaacctgaacaatcggtgagagactctatggattccctggctctatctaacatcactggagcatccgtcgatggggaaaataaaccgcggccctcattgtatagcctgcagaactttgaggagatggagaccgaggactgcgagaagatgtcaaatatgggcaccctcaatagcagcatgcttcatcgatctgcagaatccctgaagtcactcagtagcgagttgtgtcccgagaaaattcttcctgaggagaaacccgtgcatttgcctgtgctgaggagaagcaaaagccagtcgcggccacaacaggttaaatttagtgatgatgttattgacaatggaaactacgatatagagatcaggcagccacccatgtccgagaggacaaggcggcgcgtgtataatttcgaggagagaggatctcgttctcaccatcatagacggaggcgaagcaggaagagccgctctgacaatgccttaaacctggtgactgagagaaaatatagtcctaaagacagacttcggctgtacacaccagataactatgagaaattcattcagaataagtccgcgcgcgagatacaggcatatatacagaatgctgatctttacggccagtacgcccacgccacctccgattatgggctgcagaaccccggtatgaaccgatttttgggattatacggggaagacgatgattcctggtgctccagtagttcttcctctagcgattctgaggaggagggctatttccttggccagccaattcctcaaccaagacctcaaaggtttgcctattacaccgacgacttgtccagtcccccgtccgccctccccacaccccagtttggccagcgtacaaccaaatctaagaagaaaaaggggcataaagggaaaaactgcatcatcagttag

SEQ ID NO: 200636 - DNA, 2496 bp, synthetic construct
  misc_feature 1..2496: note = Description of Artificial Sequence: Synthetic coding sequence
  source 1..2496: mol_type = other DNA
atgcccctggagatggagcccaagatgagcaagctggccttcggctgtcaaaggtcatctacatcagacgatgactctggatgcgctctggaagagtatgcgtgggtacctcctggtttacggcccgagcagatccaactatacttcgcctgccttccggaagagaaggtgccctacgtcaactcccctggcgaaaagcatagaatcaaacaactgctatatcagttgccccctcatgataatgaagtaagatactgtcagtcgctctcagaagaagagaaaaaagaactgcaagttttttccgcacagagaaaaaaagaggctttggggcggggcaccatcaaactgctgtcccgggccgtgatgcatgccgtttgcgaacagtgtggcctcaaaatcaatggcggagaggtggccgtgtttgcttcaagagctggccctggtgtctgttggcatcccagctgttttgtgtgttttacatgtaacgaactgcttgtggacctcatttacttctatcaggacggaaagattcactgcggcaggcatcacgctgagctgttgaaacctcggtgcagtgcctgtgacgagatcatcttcgctgatgagtgtactgaggctgagggccgacactggcatatgaagcacttctgctgtcttgagtgtgaaacagtgttaggtggtcaacgttacatcatgaaagacggcagacctttctgctgcgggtgcttcgagtctctttacgccgaatattgtgagacatgcggcgagcatattggggttgaccacgcccagatgacctacgatggccagcattggcacgctacggaagcttgcttctcttgtgcgcagtgtaaagccagcttgctgggatgtcccttcctgccgaagcagggccagatttattgctccaaaacctgctcactgggcgaagatgtgcatgcatccgatagctctgactcagcctttcagtccgcacggagccgcgattccaggcgctcggtgcgcatgggaaagagctcccgctcagctgatcagtgccgtcagtctttgctactgtccccagccctcaactacaagttccccggactgagcggcaacgcagacgatacgttaagtagaaagttagatgacttatccctgtctaggcagggcacatcctttgcaagcgaggaattctggaaggggagagtggagcaggaaacccccgaggatccagaggaatgggctgatcacgaggactacatgacgcaattgctgctgaaatttggggacaagagtctgttccaaccacaacctaatgagatggacatacgggcatccgaacattggatcagcgacaacatggtgaagtcgaagacggaactcaaacagaataatcagtctttagcctccaagaaatatcagtctgatatgtattgggcgcagtcacaggatggacttggcgactccgcctatgggtcccatcccggcccggcgagttcccgtcgtctgcaggagctcgaacttgaccacggagcatccggctataatcatgatgaaacccagtggtacgaggatagtctggaatgtttgtctgacttgaaacctgagcagtccgtgcgcgattctatggactctctggcactctcaaatattaccggggcctctgtggatggcgagaataagcccaggcctagtctgtactctttgcagaacttcgaggaaatggagaccgaggactgcgaaaagatgagcaatatggggacccttaatagttccatgctgcaccgatccgccgagagcctgaagagcctgtcatccgagctgtgtccagagaaaatcctccccgaagagaaacctgtgcaccttcccgtgctcagacgttccaaatcacagagcagacctcaacaggtgaaattctcagatgacgtcattgacaacgggaactatgatatcgaaatacgtcagccacctatgtctgagcggaccaggcgtagagtatacaactttgaagagagggggtctcgctctcatcaccacaggcgacgccggtccaggaagtcccgctcagataacgccctgaatttggtcaccgagagaaagtacagtcccaaagatcgactcagactatatacaccagataattatgaaaagtttatccagaacaagtccgcgagagagattcaagcttatattcagaatgctgatctgtacgggcagtatgcgcatgctacctcggattacggcttgcagaacccaggaatgaacaggttcctggggctttatggcgaggacgatgatagttggtgctcttcttcctctagcagtagcgattccgaggaagagggttactttctcggacagcctatcccccaaccacggccccaaagattcgcatattacacagatgatttgtcgagccctccgtcagcattgcccacaccacagtttggccagcggaccactaagagtaaaaagaaaaagggacacaagggcaaaaactgtatcatttcatag

SEQ ID NO: 200637 - DNA, 333 bp, synthetic construct
  misc_feature 1..333: note = Description of Artificial Sequence: Synthetic coding sequence
  source 1..333: mol_type = other DNA
atgcccctggagatggagcccaagatgagcaagctggccttcggctgtcagcggagcagtacaagcgacgacgatagtgggtgtgccttagaggagtatgcctgggttccacccggcctgcggcccgagcagatccaactgtattttgcttgcttgcctgaagagaaagtgccgtacgttaacagccccggagagaaacatcgaattaaacagctattatatcagctcccaccacatgataacgaagtgcgctactgtcaatctctgtcagaagaggagaaaaaagagttgcaagtttttagcgctcagcggaaaaaagaagcgctcggctag

SEQ ID NO: 200638 - DNA, 2496 bp, synthetic construct
  misc_feature 1..2496: note = Description of Artificial Sequence: Synthetic coding sequence
  source 1..2496: mol_type = other DNA
atgcccctggagatggagcccaagatgagcaagctggccttcggctgtcagcgtagcagcacatcagacgacgactctggctgcgcactggaagagtatgcttgggtgccacctggtcttcggcctgagcagatccaactctatttcgcctgtttgccggaggaaaaggtgccctacgtgaattcaccgggagagaagcacaggatcaagcagctgctctaccaactgcctccccacgacaacgaagtcaggtactgccagtctttgtcggaggaagaaaagaaggagttgcaggtgttcagcgcccagagaaaaaaggaggctctgggacgcggtaccattaagctgctttcccgcgccgtgatgcacgccgtctgtgagcaatgtggactgaaaatcaacggtggagaggtagccgtgttcgcatctcgcgccggcccgggggtgtgttggcacccctcgtgcttcgtgtgttttacctgcaatgaactcctcgtcgatctgatctacttttaccaggatgggaagatccactgtggcaggcatcacgctgaactgttgaagcctaggtgttctgcctgtgacgaaatcatcttcgccgacgaatgcaccgaggccgaaggaagacattggcatatgaagcatttttgttgcctcgaatgtgaaaccgtgctgggggggcagcggtatattatgaaggacgggcgacctttttgttgtgggtgttttgaatccctttacgccgaatattgcgagacgtgtggtgaacacattggtgtggaccacgcccagatgacctacgatggacagcactggcacgctaccgaagcatgcttcagttgtgcccagtgtaaggcttccttactcgggtgcccctttttgcccaagcagggtcagatctattgctccaagacatgctccctcggcgaggacgtccacgcctcagacagtagtgactcagcatttcagtcagcccggtctagggacagccgtcgaagcgtgaggatgggcaaatcgagtcgaagtgccgatcagtgcaggcagtcgcttctcctctctccagcgttgaattacaaatttccagggctgagcgggaacgccgacgatacattgagtcggaagctcgacgacctgtccctcagtcgccagggcacttcatttgccagcgaggaattttggaagggccgggtcgaacaggaaactcccgaggatccagaggagtgggctgatcacgaagattacatgacccaattgctgcttaaatttggcgacaagtccctgtttcagccacagcctaatgagatggacatccgagcctccgagcattggatttctgataacatggttaaaagtaaaacggagctgaaacagaataaccagtcactggcatcaaagaaataccaatcagacatgtattgggcacagtcgcaggacggtctgggggacagcgcctatggttcccatccaggccctgcatcctcgaggcggctgcaggagttggaactggaccatggcgcttccggctataatcacgacgagacccaatggtatgaggactccctggagtgtcttagtgatttaaaacccgagcagagcgtgagagacagcatggatagcttagcgctgtctaacatcaccggcgcctcagtggatggagaaaacaagccccgtccctctctgtactccctgcagaacttcgaagaaatggagaccgaggattgcgagaaaatgagcaacatgggaacccttaattcttcaatgctccacaggtccgctgaatcactgaaatctctttcttccgagctctgtcctgaaaaaattctccctgaagagaagcccgtgcaccttcctgtcctgagacggtccaagtctcagagtagacctcagcaggttaagttctccgatgatgtgatcgacaacggaaactacgacattgaaatccggcaaccccctatgagtgagcgtacacggaggcgcgtgtacaactttgaagagcgcggaagccggtcacaccaccatcggagacgtaggtctcggaaatccaggagcgataacgctctcaacctggtgaccgagagaaaatactcccccaaagaccggttgcggctatacactcccgataactatgaaaagtttatacagaataaatctgcgagggaaattcaggcctacatccaaaacgcagacctgtacggccagtatgcacatgccacaagtgattacggcctgcagaacccaggcatgaataggttcctggggttatatggtgaagatgatgactcctggtgctcatcgtcctcctcttcatcagacagcgaggaggaaggttattttctggggcaaccaatcccgcagccccgtccacagcggttcgcatactacacagatgatctatcgtcccccccctctgccttgcccactcctcagtttggacaaagaaccaccaaatcgaaaaagaagaaaggccacaagggcaagaactgcatcattagctag

SEQ ID NO: 200639 - DNA, 360 bp, synthetic construct
  misc_feature 1..360: note = Description of Artificial Sequence: Synthetic coding sequence
  source 1..360: mol_type = other DNA
atgcccctggagatggagcccaagatgagcaagctggccttcggctgccagcgctcctccacaagtgacgacgactccggctgtgctctagaggagtatgcctgggtccctccgggactgaggcccgagcagattcagctatactttgcttgtctccccgaggaaaaagtcccctacgtgaatagccccggagaaaaacatcgcatcaaacagttgctgtatcagctgcccccacacgacaatgaagtccgttattgccagtccttaagtgaagaggaaaaaaaagaactgcaggtcttctctgcacagcgaaagaaggaggccctgggccggggcaccattaagctgctgagcaggtag

SEQ ID NO: 200640 - DNA, 480 bp, synthetic construct
  misc_feature 1..480: note = Description of Artificial Sequence: Synthetic coding sequence
  source 1..480: mol_type = other DNA
atgcccctggagatggagcccaagatgagcaagctggccttcggctgtcaacgaagttccacgagcgacgatgattccggttgtgctctggaggagtacgcctgggtaccccccgggctgcgtcccgaacaaattcagctctatttcgcctgtctccctgaagagaaggtaccttacgtcaactcgcctggcgagaagcaccgcatcaagcagctgctataccagctcccaccacacgacaacgaagtacgttactgccagagccttagcgaggaggagaaaaaggaactgcaagtattctccgcccaaagaaagaaggaagccctggggagaggaactatcaaacttctgagccgagctgttatgcatgcagtgtgtgagcagtgtgggctgaaaattaacggaggggaggtggccgtgttcgcctcccgagctggaccgggagtatgctggcatccttcttgttttgtgtgcttttag

SEQ ID NO: 200641 - DNA, 2496 bp, synthetic construct
  misc_feature 1..2496: note = Description of Artificial Sequence: Synthetic coding sequence
  source 1..2496: mol_type = other DNA
atgcccctggagatggagcccaagatgagcaagctggccttcggctgccaacgttccagcacctctgacgatgactcagggtgcgcacttgaggagtacgcctgggtgcctcctggcctacggcccgagcagatccaattgtactttgcatgtctgcctgaggagaaggtgccctatgtcaattcccccggtgagaaacatcggatcaagcagctcctgtaccagctgcctccacacgacaacgaggtgagatactgccagagcctgtcagaggaggagaaaaaagagctgcaagtcttcagcgcccagcggaagaaagaagccttaggccgagggactataaaattactttctcgcgcagtcatgcatgccgtgtgtgagcagtgtggcctcaaaatcaatgggggcgaagttgccgtattcgcaagcagggctggacctggggtgtgctggcatccgtcttgttttgtgtgttttacttgtaatgaacttctggtggacctcatctacttctatcaggatggaaagatccactgcggaagacatcatgccgagctgctgaagcctcggtgctcagcctgtgatgagatcatttttgctgatgagtgcacagaggctgaagggcgtcactggcacatgaagcatttctgctgtctggaatgcgagaccgttcttggaggccaaaggtacataatgaaggacgggaggcccttttgttgtgggtgttttgagtcgctgtacgcggaatactgtgaaacttgtggcgaacacataggcgtcgatcacgcgcagatgacctatgatggccagcattggcatgccacagaggcctgtttttcatgcgcccagtgtaaagcatccctgctcggctgtccttttctccccaaacagggccagatatattgttccaagacctgttccctgggcgaagacgtccacgcatccgactcatccgactccgctttccagtcagccaggtctagagactcccggcggagcgtgcgcatgggaaagtcctcaagaagcgcggatcaatgtcggcagagtctcctgctgtctccggctctcaattataagttcccgggactgtctggaaacgcagacgacaccttaagtcgcaaactggatgatttgtctctgagtcgccagggtacttcctttgcttccgaggaattctggaaggggcgggtggaacaagagacgcctgaggacccggaagagtgggcagaccacgaggattacatgacccagctgctgctcaagttcggcgacaagtcacttttccaaccacaaccgaacgaaatggacatcagggcatctgaacattggatcagtgataatatggtgaagagcaaaaccgagctcaaacagaataatcagagtctggcctccaagaaatatcaaagtgacatgtattgggctcagtcgcaggacggactgggcgacagcgcctacgggtctcaccctggaccggctagctctcgaaggctgcaggagctcgagttggaccatggagctagtggatacaaccatgacgaaactcaatggtacgaggacagcctcgaatgcctgagcgacttgaagcccgaacagtccgtgcgcgattctatggactcactcgctctgtccaatatcactggggctagtgtggatggcgagaacaaacctagaccttctctttactctctgcagaactttgaagaaatggaaaccgaggattgcgagaagatgagcaatatggggacactcaacagcagcatgctgcacagatctgccgagagtctgaagtccctcagctctgagctctgtccggaaaaaatactgcccgaggagaaacccgtccatttacctgtgttgagaaggtctaagagtcagtctagaccacagcaggttaagttcagtgacgatgtgattgataacggcaattacgatatagaaatccgccagccacccatgagcgagcgcacgagaagacgtgtttataactttgaggaaagggggagccgttcccatcatcaccgtagacggcgatcccgtaaatctcggagcgataacgccctaaacctcgtcacagagcgaaaatattcccccaaagatcggctgcgtttgtacacccctgataattatgagaagtttattcaaaacaagagcgcccgggagatacaagcttatattcagaacgcggatctgtacggccaatacgcacacgccacttccgactacggcctgcaaaatcctgggatgaacagatttctcggcctctatggggaggatgacgactcctggtgttcctcgagctccagcagtagcgatagcgaagaagaaggctactttctaggacagccaatcccccagcctcggcctcagaggtttgcctactatactgacgacctgtcctccccgcccagtgcgcttccaacaccgcagtttggacaacgcactactaagtccaaaaagaagaaaggacataaaggcaagaattgtattattagctag

SEQ ID NO: 200642 - DNA, 2535 bp, synthetic construct
  misc_feature 1..2535: note = Description of Artificial Sequence: Synthetic coding sequence
  source 1..2535: mol_type = other DNA
atggtgaccgtgatgcccctggagatggagaagaccatcagcaagttgatgttcgactttcaacgcaactctaccagcgacgatgactctggatgcgctctggaagagtatgcctgggtgccgcctggactgaagccagagcaggttcaccagtattacagctgcctgcccgaggagaaagttccctatgtcaacagcccgggcgagaaactgcgaatcaagcagctgctgcatcagctgcctccccatgacaatgaggtcagatattgcaatagcctggatgaagaggagaagagagaactcaaattgttctctagccagaggaagcgagagaatttggggagagggaacgtaagaccgttccccgtgacaatgacgggtgccatctgtgagcagtgtggtggtcagatcaacggcggcgacatagctgtttttgcctcccgcgctggccacggcgtatgctggcatccaccttgttttgtatgtacagtgtgcaacgagctgctcgttgacctgatttacttctaccaggacggtaagatttattgcggacggcaccacgcagaatgcctaaagcctcggtgtgctgcctgtgacgagattatattcgctgatgaatgtaccgaggcagaaggcaggcactggcacatgaaacacttttgctgcttcgaatgtgagactgtactgggcggtcagaggtatatcatgaaagaagggaggccatattgttgccactgtttcgaatccctgtacgctgagtattgcgatacctgcgcccagcacatcgggatcgaccagggccagatgacctatgacggtcagcattggcacgcgaccgaaacttgcttctgttgtgcgcattgcaagaagtcactgctggggaggccgttcctgcccaagcaggggcagatcttttgctcccgcgcgtgcagcgctggcgaagatcccaacgggtctgatagttccgacagtgcttttcagaacgcccgagcaaaagagagtcgcagatctgccaaaattggaaagaacaagggcaagaccgaggagcctatgttaaaccagcacagtcagctacaggtgagctctaatcggctgtcagccgacgtggaccctctttcgctgcagatggatatgctgtcattgtcatcccagactccatctctcaatcgagaccccatctggcggagtcgcgaagagccataccattacggtaataaaatggagcagaaccagacacagtctcctctgcagctactttcacagtgcaacatccgcacaagttattctcctggtggacaaggtgcgggggctcagcccgaaatgtgggggaagcacttctccaaccctaagcggagcagctcccttgcgatgaccgggcatgcaggcagtttcattaaagagtgtagggaggactactatccgggccgccttcgcagtcaagagagctattcagacatgagttcccagtctttttcagaaacccggggtagcattcaagttcccaagtatgaagaagaggaagaagaagagggaggcctctcaactcaacaatgcagaactcgacaccctatctcctccctgaagtacactgaggatatgacacccacggaacagactccacgtggcagtatggaatcgttagccttgagcaatgcgaccggactctcagctgacgggggggctaaacgccaggagcatctttctaggttttccatgccagacttgtcaaaggattccgggatgaatgtgtctgaaaagctgtcaaacatgggcactctgaattcgtcaatgcagtttcggtctgctgaatccgtcaggtctctgttatcggcacagcaatatcaggagatggagggaaaccttcatcaactgtccaacccaataggatacagagacctgcagtctcatggccgcatgcaccagtcctttgattttgacggcggcatggcagggtcaaaactccctggtcaggagggcgtgcgcatccaacccatgagtgagcggacacggcgccgagcaacaagtagagatgataatagacgcttccgccctcaccggtcaagacgctcccgccggagtcggagcgacaatgcactccatttggccagcgaacgggaggccatatcacgcctgaaggatagaccgccgctgcgggctagggaggactacgaccagtttatgagacaacgctccttccaggaatcaatgggccacgggtcacgcagagatctgtacgggcagtgtcctagaacagtgtccgatctggcgctgcagaacgctttcggtgatcgatggggaccatacttcgctgagtatgattggtgtagcacctgttcttcctcaagcgagtcagacaacgagggttatttccttggtgaaccgatcccccagcccgcacgtctgagatacgtgacatcagacgagttactgcacaaatactcttcatacggcttacctaagtccagtactctgggtggcaggggacagttacacagccgcaagaggcagaaaagtaaaaactgtataatttcttag

SEQ ID NO: 200643 - DNA, 453 bp, synthetic construct
  misc_feature 1..453: note = Description of Artificial Sequence: Synthetic coding sequence
  source 1..453: mol_type = other DNA
atggtgaccgtgatgcccctggagatggagaagaccatcagcaagttgatgtttgacttccaaaggaattcaacatcagatgacgatagtggatgtgcactcgaagagtatgcctgggtgccaccagggctgaagcctgaacaggttcaccagtactacagctgcttgcctgaagagaaagtcccctatgtgaacagtcctggagagaagctgcggattaagcagcttctacatcagctgcctccacatgacaatgaggtgcgctactgcaattccttggatgaggaagagaagcgagagctcaaactgttcagctctcagcgcaaaagggagaacctgggccgtggtaatgttcggccgttccccgtgaccatgaccggcgccatctgtgagcagtgtggcggtcaaatcaacggtggcgacattgcggtctttgcgtccagggcaggatag

SEQ ID NO: 200644 - DNA, 1263 bp, synthetic construct
  misc_feature 1..1263: note = Description of Artificial Sequence: Synthetic coding sequence
  source 1..1263: mol_type = other DNA
atggagaccttcgaccccaccgagctgcccgagctgctgaagctgtactaccggcggctgttcccttactcacagtattacagatggctgaattacggaggcgtaatcaaaaactacttccaacatagggaattctcctttacactcaaggatgacatttacatacggtaccagtcctttaataaccagagcgacctggagaaggaaatgcagaaaatgaacccctacaaaatcgacataggggctgtgtattctcacagacccaaccagcacaataccgtaaaattgggcgcctttcaggcacaggaaaaggaactggttttcgatattgacatgacagactatgacgacgtaaggaggtgttgctcgagcgctgacatatgcccaaagtgctggacgttaatgacgatggcaatccgcatcattgaccgggccttgaaggaggatttcgggtttaagcatcggctgtgggtctacagcgggaggagaggagtacattgctgggtctgcgacgagtccgttagaaaactgagcagtgctgtcaggtccggaatagttgagtacttgtctttggtgaagggcggacaggatgtgaagaagaaggtgcacctgtcggagaagatccacccatttatcagaaagtcaataaacataataaagaagtactttgaggaatacgccttggtgaaccaggatattttggaaaacaaggaatcctgggataagattctggcgctggtcccagagactatccacgatgagctccagcagagttttcagaaaagccacaactcgttgcagcggtgggaacatcttaaaaaggtcgcatcccggtaccaaaacaacatcaagaacgacaagtatgggccctggctggagtgggaaattatgctgcagtactgtttccctaggctcgatatcaatgtctcgaaaggcattaaccatctgctgaagagccccttttctgtgcaccccaaaactggacgcatctcagtgcccatcgatttgcagaaagtggatcaattcgacccatttacagttccaaccatcagcttcatatgtcgggaactcgacgcaatttctacaaatgaggaggagaaagaggagaatgaagcggagtccgacgtgaagcatcgcaccagagactataagaagaccagccttgcaccttatgtgaaagttttcgaacactttttggagaatctggataaaagtaggaagggcgagcttttgaagaaatcagacttgcagaaggacttctag

SEQ ID NO: 200645 - DNA, 1284 bp, synthetic construct
  misc_feature 1..1284: note = Description of Artificial Sequence: Synthetic coding sequence
  source 1..1284: mol_type = other DNA
atggagaccttcgaccccaccgagctgcccgagctgctgaagctgtactaccgtcgtctgtttccttactcccaatactatagatggctgaactatggtggggtgattaaaaactattttcaacaccgcgaatttagcttcacgttaaaggacgacatctatattaggtatcagtctttcaataatcaatctgacttagagaaggagatgcaaaagatgaacccctataagattgatattggcgcagtgtatagtcaccgacccaaccagcataatactgttaaactcggcgcttttcaggcgcaggagaaggagctcgtgtttgatatcgatatgactgattacgacgacgtcagaagatgctgtagcagcgctgatatttgtcctaagtgctggaccttgatgaccatggctataaggataatcgatcgtgctttgaaaggcaaagattttggcttcaaacatcgcttgtgggtctattcaggtagacgcggagtccactgctgggtatgtgacgagagtgtccggaagcttagcagtgcagttagaagcgggattgtggaatacttgtctctcgttaaaggaggacaggacgtgaaaaagaaagtgcacctgtcagagaaaatccacccctttattaggaagagcattaacatcattaaaaagtatttcgaggaatatgccttagtcaaccaggacattctcgagaataaagagtcatgggacaaaatcttagcactgatggggctgttcctaaacgacccatctcctatccatgacgagctccagcagagtttccagaaatctcataacagtctgcagcggtgggagcacctgaagaaggtggcatctaggtatcagaacaatatcaaaaacgataaatatgggccatggttggagtgggaaatcatgcttcaatattgttttccgagactcgatatcaatgtgtcaaaggggatcaatcacctgctgaagagccctttttcagtgcaccctaagacaggacgaatctccgtgccaatcgacctccagaaggtagatcaattcgacccttttaccgtgcccacaatatcatttatttgcagagagttggatgctataagtacgaacgaggaagagaaggaggaaaatgaggctgaatctgatgtgaagcacagaacccgggactacaagaagacttcgctggctccgtacgtgaaggtctttgaacatttcctggagaatttagataagagtcggaaaggggaactgctaaagaagagcgacctccagaaggatttctag

SEQ ID NO: 200646 - DNA, 762 bp, synthetic construct
  misc_feature 1..762: note = Description of Artificial Sequence: Synthetic coding sequence
  source 1..762: mol_type = other DNA
atggccaacctgggctgctggatgctggtgctgttcgtggccacctggtctgatttaggcttgtgcaaaaaacggcccaaaccaggcggctggaacacaggcggaagccgctaccctggacagggatcccccggggggaataggtatcctcctcaagggggaggaggctggggccagccacatggcggcgggtgggggcaaccccacggtggcggctggggccagccgcacgggggaggatggggccagccccatggcgggggctggggtcaggggggaggaactcactcacaatggaataaaccatctaagcccaaaaccaatatgaagcacatggctggagccgctgccgccggagctgttgtgggagggctcggtggatacatgctggggagcgccatgtcccgacccattatccacttcggaagtgactatgaggacagatactatcgggagaacatgcatagatacccaaaccaggtgtactatcggccaatggacgaatactccaaccagaacaactttgtgcacgattgtgtgaacattactatcaagcaacacaccgtgactactacgacaaaaggggaaaacttcactgagaccgacgttaaaatgatggaacgcgtggtcgagcagatgtgtatcactcaatatgagagggagagccaggcatactatcagagagggagctcaatggtgctttttagctctcctcctgtgatcctcctgatatcatttctgattttcctgatagtcggctag

SEQ ID NO: 200647 - DNA, 750 bp, synthetic construct
  misc_feature 1..750: note = Description of Artificial Sequence: Synthetic coding sequence
  source 1..750: mol_type = other DNA
atggccaacctgggctgctggatgctggtgctgttcgtggccacctggagtgatctgggtctgtgtaaaaagcggccaaaacctggcggatggaatactggagggtccagataccccggacagggatcaccgggtggcaacaggtaccctccacaggggggcggtggatggggacagccacacggtggaggatggggccagccccacggggggggatggggccagccacacggaggggggtggggacagcctcacgggggcggctgggggcagggcggggggacccacagccagtggaacaagccttcaaaacccaaaactaacatgaaacacatggctggcgccgccgccgctggcgctgtggttggcggactggggggttatatgctggggtctgcgatgtctcgccccatcattcacttcgggagtgattacgaggaccgatattaccgtgaaaacatgcatcggtaccctaatcaggtttattaccgccccatggatgagtattctaaccaaaacaacttcgtccacgactgtgtgaatattactattaaacaacacacagtgactacaactaccaagggggagaatttcacggaaaccgacgtgaaaatgatggagcgtgtggtagaacaaatgtgtatcactcagtatgagcgtgagtcacaggcgtactatcaacgaggctcaagcatggttctgttttcaagtccgccagtcatcctgctgatctcatttttgattttttag

SEQ ID NO: 200648 - DNA, 762 bp, synthetic construct
  misc_feature 1..762: note = Description of Artificial Sequence: Synthetic coding sequence
  source 1..762: mol_type = other DNA
atggccaacctgggctgctggatgctggtgctgttcgtggccacctggagcgacctcggattgtgcaagaaaaggcccaaaccaggcggatggaacaccggaggaagccggtatcctggccagggaagcccaggcgggaacagataccccccccaggggggaggaggatgggggcagccccacggagggggttggggacagccacacgggggtggatggggacagcctcacggcggcgggtgggggcagccccatggcggaggctggggacagggtggagggacacatagtcaatggaacaagcctagcaagcccaagacgaatatgaagcacatggccggggcagccgccgccggcgcggtggtggggggtttgggtggctatatgttagggagtgccatgtcacgaccaatcatccacttcggtagtgactatgaggacaggtactaccgggaaaatatgcataggtatcccaaccaggtgtattaccggcccatggatgaatactccaatcagaacaacttcgtgcacgattgtgtcaatatcactatcaagcaacataccgtaaccaccacgaccaaaggggagaattttacggagacggatgttaagatgatggagcgtgtcgtcgagcagatgtgcataacacagtacgaacgggagtctcaggcgtattatcagcgcggatccagcatggtgctcttcagctcccctcccgtgattctgctcatcagcttcctcatctttctgattgtgggatag

SEQ ID NO: 200649 - DNA, 579 bp, synthetic construct
  misc_feature 1..579: note = Description of Artificial Sequence: Synthetic coding sequence
  source 1..579: mol_type = other DNA
atggagcactggggccagccccacggcggcggctggggccagccccacggcggaggctgggggcaaccacatgggggtggatgggggcagggtggtgggacacatagccagtggaataagcctagtaaacctaaaacaaatatgaaacacatggctggggctgcggcagccggggccgtggtggggggccttgggggatatatgcttgggtccgcgatgtcacgacctatcattcactttggtagcgactatgaagacaggtactaccgggagaacatgcatcggtatccgaatcaagtgtattaccggcccatggacgagtatagcaaccagaataatttcgtacacgactgcgtgaatatcacaatcaaacaacacaccgtaactactacaaccaaaggggagaacttcactgagacagatgtgaagatgatggaaagggtggtggaacaaatgtgcattacccaatacgagcgtgagagccaggcctactaccaaaggggatccagtatggtgctgttcagctcaccgcctgttatcttactaatttctttcctgatctttctgatcgtgggctag

SEQ ID NO: 200650 - DNA, 654 bp, synthetic construct
  misc_feature 1..654: note = Description of Artificial Sequence: Synthetic coding sequence
  source 1..654: mol_type = other DNA
atggccaacctgggctgctggatgctggtgctgttcgtggccacctggagcgacctgggcctttgcaagaagcgccctaagccaggcggatggaacacaggaggtagccgctaccccgggcagggatcacctggcggtaacaggtatcctccacaaggtggtgggggatgggggcaaccacatggtggcgggtggggacagcctcatggaggcggttggggtcagccacacggtgggggatggggacagccgcatgggggcggatgggggcagggcggcgggactcacagccaatggaataagccatccaagcctaaaacaaacatgaagcacatggctggagctgccgcagccggcgctgtggtcggcgggctcggaggatacatgctgggtagcgccatgtcccggccgattattcattttggaagcgattatgaggaccggtactatcgcgagaatatgcacagatacccaaaccaggtatactacaggcctatggacgaatactctaatcagaacaattttgttcacgattgcgtgaacatcacaatcaagcaacataccgttaccacaaccactaaaggcgagaacttcacggagacagacgtgaagatgatggagagggtggtggagcagatgtgtattacgcagtag

SEQ ID NO: 200651 - DNA, 531 bp, synthetic construct
  misc_feature 1..531: note = Description of Artificial Sequence: Synthetic coding sequence
  source 1..531: mol_type = other DNA
atgcggaagcacctgagctggtggtggctggccaccgtgtgcatgctgctatttagtcacctgtctgctgtgcagaccagaggaattaagcataggattaaatggaatagaaaggccctgccttcaacggcgcagattacagaggcacaagtcgccgagaacaggccgggcgcttttatcaagcaaggtcggaaactggacattgatttcggcgccgaagggaaccgctactacgaagctaattactggcagttccctgacgggatccactataatggttgcagtgaagcaaacgtgacaaaagaagccttcgtcacaggatgcattaacgctactcaggcagccaaccagggagagttccagaaacctgacaacaaactgcatcaacaggtgctatggcgtctggtacaggagctgtgctccctgaaacattgcgaattctggctggaaagaggggcggggctgagagtgacaatgcaccagccagtcttgctgtgcctgctggcattgatatggctcacagtcaaatag

SEQ ID NO: 200652 - DNA, 1023 bp, synthetic construct
  misc_feature 1..1023: note = Description of Artificial Sequence: Synthetic coding sequence
  source 1..1023: mol_type = other DNA
atggccaccggcggctaccggaccagcagcggcctgggcggcagcaccacagacttcctggaggagtggaaagcgaagcgtgaaaaaatgcgggctaaacagaatcctccagggcccgccccacctggaggaggttcctcagacgccgcagggaagcctcccgctggagccctgggaacaccagcagctgctgctgctaatgagctcaacaataatctgcccgggggtgcccccgctgcacctgctgtgccaggccccggcggcgtgaactgcgcggtcggcagtgccatgttaacacgcgcagctccaggccctcggaggtccgaagacgaacccccggccgcttccgctagtgcagccccccctccccagcgggatgaggaagaaccggatggagttccagagaaaggcaaaagcagtggcccttctgcccgcaagggtaaaggccagatcgaaaaacgaaaactgagagaaaaacgacgcagtactggagtagttaacatccccgctgcggaatgtcttgatgaatacgaagacgatgaagccggccagaaagagcggaaaagagaagacgctatcacacagcagaatactatccaaaatgaagctgtaaatcttcttgaccccgggtctagctacctgctgcaggagcccccacgcaccgtgagcggacggtataaatccacaacttcagtgagcgaggaggatgttagtagtcggtattctcgtaccgaccggtcaggatttccccggtacaatcgcgacgccaacgttagtgggaccctagtgtcctcctctactctggagaagaagatagaggatctagagaaagaggtagttagagagaggcaggaaaatttgcgccttgttcgactgatgcaggataaggaggagatgatcggcaagctgaaagaggaaatcgatctccttaatagggatttagacgacattgaggatgagaatgagcagctgaagcaggaaaacaaaaccttgttgaaagtggtcggtcagctaacccgttag

SEQ ID NO: 200653 - DNA, 231 bp, synthetic construct
  misc_feature 1..231: note = Description of Artificial Sequence: Synthetic coding sequence
  source 1..231: mol_type = other DNA
atggccaccggcggctaccggaccagcagcggcctgggcggcagcaccaccgactttctggaggaatggaaagctaagcgagagaagatgagagccaaacaaaacccaccaggacctgccccacctggcggaggatcatctgacgccgccggcaaacctcccgccggggccctgggaacacctgcagcagcggcggcaaacgagttgaacaacaacctgcccggagggtag

SEQ ID NO: 200654 - DNA, 195 bp, synthetic construct
  misc_feature 1..195: note = Description of Artificial Sequence: Synthetic coding sequence
  source 1..195: mol_type = other DNA
atggccaccggcggctaccggaccagcagcggcctgggcggcagcaccactgacttcctcgaagaatggaaggccaaaagagagaaaatgcgagcaaagcagaatcccccaggacctgccccacccggaggcggatcatctgacgccgcaggaaagcccccagccggggcgctaggaacgcctgccgctgcctag

SEQ ID NO: 200655 - DNA, 663 bp, synthetic construct
  misc_feature 1..663: note = Description of Artificial Sequence: Synthetic coding sequence
  source 1..663: mol_type = other DNA
atgaagagcgtgatctaccacgccctgagccagaaggaggccaacgatagtgacgtgcagccatcaggggcccaacgagcagaggctttcgtacgcgcttttttgaaacgatcaaccccccgtatgagccctcaggccagggaggaccagctgcagaggaaggcagttgtgctggaatattttactaggcacaagaggaaagagaaaaaaaagaaggctaaaggcctgagcgctaggcagcgacgggaactccgcctatttgacattaagcctgagcagcagcgctactcactctttctgccgttacacgagctctggaagcaatacatacgcgacctctgctccggcctcaagcctgacacccagccacagatgatccaagccaagcttctcaaggccgatctacacggcgccattatatccgttactaaatctaaatgcccaagttacgtgggcattaccggtattctgctgcaggaaactaaacatatctttaagattataactaaggaagatcgcctcaaggtaatccccaaattaaactgtgtcttcacagtcgagacagatggattcataagctatatttatggaagcaagttccaattacggagcagtgagcgttccgctaagaaattcaaagccaaaggtactatcgatctgtag

SEQ ID NO: 200656 - DNA, 1695 bp, synthetic construct
  misc_feature 1..1695: note = Description of Artificial Sequence: Synthetic coding sequence
  source 1..1695: mol_type = other DNA
atgagcagccacggcaacagcctgttcctgcgggagagcggccagcgcctaggcagagtaggatggctgcaacgtcttcaagaaagtctccagcaaagagcgctgcgtacacggctgcgtctccaaactatgaccctcgagcatgttctccgcttcttgcgaagaaatgcgtttattctgctgacggttagtgctgtggtgattggtgttagtcttgcattcgccttgcgaccctaccaactgacttatcgacagattaagtacttttcctttcctggggaattactaatgcgcatgctccaaatgctggtccttccacttattgtttccagcctggtcactgggatggcaagtctcgataataaagctacaggtaggatgggcatgagagccgcagtttactacatggtcacgaccattatcgcagttttcatcggcatcctgatggttaccattattcaccctggcaaaggatcgaaagagggattgcaccgcgaaggtaggatagagacaatcccaacggctgacgctttcatggacctcatccggaacatgttccctccgaacctggtggaggcatgcttcaaacaatttaagacacagtactccactagagttgtgacgcgaacaatggttagaacagagaacgggtcagaacccggtgcgagcatgcctccccccttcagcgtcgagaatggtacctcattcctggaaaacgtgacccgcgcactgggaacactgcaggagatgttaagtttcgaggaaactgtgcctgtccctggttctgcaaacggcattaatgccctggggctcgtagtttttagcgtcgcgttcggtctggtaatcggcggcatgaaacataaaggaagagtgttgcgggacttttttgactctctgaacgaagccatcatgaggctggtgggtattatcatttggtacgccccagtcggtattctgtttctgatcgcaggcaaaatcttggagatggaggatatggcagtcctaggcggacagctcggcatgtacactctgactgtgattgtcggactatttctgcacgcaggaattgtactccccttgatctacttcctcgtgacccaccggaatccatttcccttcattggaggcatgctgcaagctctcattacagcaatgggcacatccagttcctccgcgacattacctataacatttcggtgtctcgaggaggggttgggcgtagaccgccggatcacgagatttgttttgcccgtgggagcgaccgtgaacatggatggcaccgccctatacgaagctctggccgcaatattcattgctcaggtcaacaactatgaactcaacctgggtcagattaccaccatttccattaccgccacagcagcatctgttggcgcagccggcatacctcaggcagggctcgtgaccatggtgattgtgctcactagcgtcggattgccaactgaagacatcactctcataattgctgtcgactggtttcttgatagacttcgcaccatgacgaatgtcctgggcgactccatcggtgcagccgtgatcgaacacctgtcccagagagagctggagctgcaggaggctgagctgactctgccctcattgggtaagccttataagagcctgatggcgcaggagaagggcgcctctcggggtaggggcggaaatgagtccgctatgtag

SEQ ID NO: 200657 - DNA, 420 bp, synthetic construct
  misc_feature 1..420: note = Description of Artificial Sequence: Synthetic coding sequence
  source 1..420: mol_type = other DNA
atgcactgcctgcggaagcggcggatgacccccatgagccggtactccctgttcctaccactgcacgaactctggaagcaatacatccgtgacctctgtagcggccttaaacctgacactcagccgcagatgatacaagcgaagttactgaaagccgatctgcatggagccataatttctgttacaaaatcaaaatgtccctcctacgtggggatcacaggcatcctgctccaagaaacaaaacatatctttaagatcatcacaaaagaagaccggctcaaagtcatccccaaactaaattgtgtgttcacggtggaaaccgatgggttcatttcatacatttacggatccaagtttcagctcaggagctcggaacggtcagccaaaaagtttaaggccaaaggcactatcgacctgtag

SEQ ID NO: 200658 - DNA, 342 bp, synthetic construct
  misc_feature 1..342: note = Description of Artificial Sequence: Synthetic coding sequence
  source 1..342: mol_type = other DNA
atggtgcggttcaagcaccggtacctgctgtgcgagctggtgagcgatgatccaaggtgccgcttgagcctggacgatagagtgctgtccagcctggtgagggacactatcgctcgggtacacggcacgtttggggccgctgcctgctcaatcggattcgcgggaaccatcaggacctgccaaaagttcctgattcagtataatcgacgacaactgttgatccttctccagaactgtacagatgagggggagagagaagctatacagaagagcgtgacaaggtcctgcctgctggaggaggaagaggaaagcggggaggaagccgctgaggctatggaatag

SEQ ID NO: 200659 - DNA, 492 bp, synthetic construct
  misc_feature 1..492: note = Description of Artificial Sequence: Synthetic coding sequence
  source 1..492: mol_type = other DNA
atggtgcggttcaagcaccggtacctgctgtgcgagctggtgagcgatgacccgcgatgccgcctgtccttggatgaccgcgtgctgtcctcgctggtgcgagacaccatcgcccgcgtgcatggaacctttggggccgccgcctgctccattggctttgccgtgagatatcttaacgcctatactgggatcgtgctgctgagatgcaggaaagaattttaccaacttgtgtggtctgccctgccctttattacttatctcgaaaataaaggccaccgctatccatgcttttttaatactttacacgtcggaggaacgatcaggacctgtcagaaatttttaatccagtataatagaagacagctgctgatcctgctccaaaactgtacagacgaaggtgagagagaggctatccagaaatcggtcacaagaagctgtctcttagaagaagaggaggagagcggcgaggaagctgcagaagccatggagtag

SEQ ID NO: 200660 - DNA, 423 bp, synthetic construct
  misc_feature 1..423: note = Description of Artificial Sequence: Synthetic coding sequence
  source 1..423: mol_type = other DNA
atggccgagaaccgggagccccggggcgccgtggaggccgagctggacccggtggaatatactctgcgaaaacgcttgccatcaagactgcctcgcaggccaaacgacatttatgtcaacatgaaaaccgacttcaaggcccagctggctcgctgccagaaactgctcgacggaggcgctaggggacagaatgcatgttcagaaatctacatccatggtctgggattggctattaacagagcgatcaatatagccttgcaactacaggctggaagcttcgggtcactgcaggtggccgcaaatacatcaacagtggagctggtggacgaactggagcctgaaacagatacaagagaaccgctcacccgcatcagaaataactcagccatccatatccgtgtgtttagagtgacccctaaatag

SEQ ID NO: 200661 - DNA, 414 bp, synthetic construct
  misc_feature 1..414: note = Description of Artificial Sequence: Synthetic coding sequence
  source 1..414: mol_type = other DNA
atggccgagaaccgggagccccggggcgccgtggaggccgagctggatccagtggaatataccctgaggaaacgattaccttccagacttcctagacggcccaacgatatctatgtgaatatgaagaccgatttcaaggcccagctggctaggtgccagaagcttctggacggaggagctcgcggacagaatgcttgctctgagatatatattcatggcctcggcctcgctataaaccgggccattaatatcgcccttcagcttcaggcaggctctttcggatcattgcaggtcgccgcaaacacaagcaccgtagagctggtggacgaactggaaccagagacagacacgagagaacctttaactaggatccggaacaactctgcaatccacatccgggtatttagagtgtag

SEQ ID NO: 200662 - DNA, 708 bp, synthetic construct
  misc_feature 1..708: note = Description of Artificial Sequence: Synthetic coding sequence
  source 1..708: mol_type = other DNA
atgcggcggggcgccccccaggaccaggagctggtgggccccggccctccagggcgcgggagccgcggcgcgcccccacctctgggacccgtagtgcccgtgttagtgttccctcctgacctcgtgttcagagctgaccaaagatccggcccaaggcagcttctgacactgtataacccaacaggaaccgccctgagattccgtgtgctgtgtactgctcctgccaagtatactgtcttcgacgccgaaggctacgttaagcctcaatcatgtatagacatagttattaggcatgtcgcgcccattccttcacactacgacgtgcaggataggttccggatcgaacttagcgaagagggtgccgaaggccgtgttgtgggccgcaaggatattactagcatcctccgggctccagcctatcctctggagctccaaggccaacccgatcccgctccacgccccggacccccggctggcactcccccacctactgcccgccacttccaggagcacccgcggcagcagctggccaccagttcgtttctcctgttccttcttactggaattgtttccgttgcgttcctgctgttgcccttgcccgatgagctcggcagtcagttgccacaagtcttgcatgtttccttgggccagaagcttgttgctgcctatgtgctagggctccttacgatggtgttcctgcgtacctag

SEQ ID NO: 200663 - DNA, 1248 bp, synthetic construct
  misc_feature 1..1248: note = Description of Artificial Sequence: Synthetic coding sequence
  source 1..1248: mol_type = other DNA
atgcggggcgccaacgcctgggcccccctgtgcctgctgctggccgcagccactcagttatcccggcagcagagtcctgagaggccagtattcacatgtgggggcattctgacaggggagagcggtttcatcgggtctgaggggttccctggcgtgtaccctccaaattccaagtgcacttggaagattaccgtgcctgaaggcaaggtagtggtgctgaatttcaggtttattgatttggagtcagacaacctttgccggtacgacttcgttgacgtgtataacggccatgccaacgggcagcgtatcggtagattctgcgggacgttccgccccggggctctggtgtcttccggcaacaagatgatggtccagatgatctccgacgcaaatactgcagggaatgggtttatggctatgttttccgcagcagaacccaatgagaggggcgaccaatattgcgggggcctgcttgaccgcccctctggaagcttcaaaacacccaactggcccgacagggactatcccgctggcgtgacttgcgtctggcatattgtcgcccctaagaatcaacttattgagctgaaattcgagaaattcgatgtggaacgcgataactattgtcgctacgactacgtggcagtattcaatggaggtgaggtcaacgatgcccggcgtatcggtaagtactgtggcgactcaccgccggcccctattgtgtccgaaagaaacgaattattgattcagttcctgtccgacctgagcttgaccgcagatggattcatcggacattacatcttccgtcccaagaagcttcccacaacaacagaacaaccagtgacaacaacgttcccagtgacaacaggattgaaacccaccgttgctctctgtcaacagaaatgtcggcgcactggcacgctggagggaaactactgtagttccgatttcgtgctcgcaggcaccgtgattactacgatcactcgcgacggaagtctccacgctaccgtctctatcattaacatctataaggagggtaacttggctatccagcaggcggggaaaaatatgagtgctcgccttacagttgtttgcaaacaatgtcccctcctgcgccggggcttgaactacatcattatggggcaagtgggggaggatgggcggggaaagatcatgcccaattctttcattatgatgtttaagactaaaaaccaaaagttgctggacgctctgaaaaacaagcagtgttag

SEQ ID NO: 200664 - DNA, 2184 bp, synthetic construct
  misc_feature 1..2184: note = Description of Artificial Sequence: Synthetic coding sequence
  source 1..2184: mol_type = other DNA
atgcggcccctgctgctgctggccctgctgggctggctgctgctggcagaggccaagggcgacgcgaagcccgaagacaatctgctggtgctgactgtcgctactaaggaaactgaagggttccgcagattcaagcgcagcgcacagttcttcaattacaagatccaggctctgggcctcggcgaggactggaatgtagagaaaggcacttctgctggagggggccagaaggtaagactcctaaaaaaggcgcttgaaaagcacgccgacaaagaagatcttgtcattttgttcgccgactcttacgacgttctgtttgcatccggccccagagagttgttgaaaaaattcaggcaggcaagaagccaggttgtcttcagcgccgaggagctcatctaccccgatcgtcgtctggagacgaaataccccgtggtatccgacggaaaaagatttcttggctccggggggtttattggatacgctccgaacttgagtaaactggttgccgaatgggagggtcaggattccgatagcgaccagctgttttacaccaaaatcttcctggatcctgagaagcgcgagcagataaacatcaccctcgaccatcgctgtcggatattccagaacctcgatggcgctctagacgaagtcgtactgaagtttgagatggggcatgtacgagctcggaatctcgcctacgatacccttccggtactaattcatgggaatggcccaaccaaactacagctgaattaccttggcaactatattcctcgattctggacatttgagactggatgtactgtgtgtgacgaggggcttcgtagcctcaaaggtattggcgatgaagctttaccaaccgtcctcgtgggggtgttcatcgagcagccaaccccatttgtttctttgttctttcagaggctgctgcggctgcactatccccagaaacatatgcggctgtttattcacaaccatgaacagcatcacaaggcgcaagtggaagaattcctcgcccagcatggaagcgaataccagagtgtgaagctggtagggcccgaggtgaggatggccaatgctgatgcgcgaaatatgggcgcggacctatgtcggcaggatagatcatgtacctactactttagcgtggacgccgatgtggcactgactgaaccgaatagtcttcggttgcttattcagcagaacaaaaatgttatagcgccactcatgacacggcacggccggctgtggtctaatttctggggggccctgtccgctgacggatattacgcacgctccgaggactacgttgatattgttcaagggcggcgggttggggtgtggaacgtcccctacatttccaacatctatctgattaaagggagtgccctgcgcggcgaactgcagagttctgacttattccatcacagtaagttggatcccgacatggctttttgcgcgaatataaggcaacaggacgtgttcatgttcctcaccaacaggcataccctgggacacctgttaagcttggactcctaccggaccactcacctacacaatgacttgtgggaggtgttctcaaaccccgaggactggaaggagaaatacatacatcaaaactataccaaggcgcttgctggaaaattggttgagacaccctgtccagatgtgtattggttcccaatcttcactgaggtcgcatgtgacgaactcgtggaggagatggagcattttggccaatggagcttaggtaacaacaaggataaccgaatccagggaggttacgaaaatgtgcccactattgacattcacatgaatcaaatcggtttcgaaagagagtggcataaattcttgctggagtacatagccccgatgacagagaaactctaccccggctactatactagagctcagttcgatctcgcctttgtggtcagatacaaaccagacgaacagccttcacttatgccgcatcacgacgccagcactttcacaatcaatatcgccctgaatcgggtgggagtggattatgaaggagggggatgtaggttcttgaggtacaattgtagcattcgggcaccacggaaaggctggactctcatgcatccggggcgactgactcattatcacgagggcctcccaacgacaagaggcacgcgctacattgcagtgtcattcgtagacccttag

SEQ ID NO: 200665 - DNA, 600 bp, synthetic construct
  misc_feature 1..600: note = Description of Artificial Sequence: Synthetic coding sequence
  source 1..600: mol_type = other DNA
atgcggcccctgctgctgctggccctgctgggctggctgctgctggcagaggctaagggggatgccaagcccgaggataatctgctagttctcacggtggcaaccaaggaaacagaaggatttaggcgctttaagcgctctgcccaattcttcaactataagatccaggcgctgggactgggagaggactggaatgtggagaaaggcacctccgccgggggaggtcaaaaagtcaggctgcttaaaaaagcacttgaaaaacatgccgataaagaagatttggttattctgttcgccgatagctacgatgtgttgttcgcatcaggtccccgggagctgctgaagaagttcaggcaagctaggagccaggtggtgttttctgcagaagagcttatttatcccgataggcgcctggaaactaagtacccggtggtctccgacggaaaaaggttcctggggtctgggggtttcatcggttatgcccctaacttatccaagcttgttgcagaatgggaaggacaagacagtgatagcgatcagcttttctatacaaaaatttttcttgaccctgagaaaagagtctctagactacactcatag

SEQ ID NO: 200666 - DNA, 2325 bp, synthetic construct
  misc_feature 1..2325: note = Description of Artificial Sequence: Synthetic coding sequence
  source 1..2325: mol_type = other DNA
atgcggcccctgctgctgctggccctgctgggctggctgctgctggccgaagccaagggtgacgccaaacccgaggcaccctgttgccaggagggcctgagggctggaggctctggatctctccatctgggaagagacttcacggtattggcaggcgcccgcggctcgccatcaccctcagtcagcagtatacctcgcttttggatacctggatcagacaacttgttggtcttaaccgtggctaccaaagagacggagggtttccggcggttcaagcgcagtgcacaattcttcaactacaagatccaggcactaggcctgggagaagactggaatgtcgaaaagggaacgtctgctggtggcggccagaaagtcaggctcctcaagaaagcgctggagaagcacgccgacaaggaagacctcgtgattctattcgcggacagttacgacgtgctgtttgcttccggccctcgggagctcctcaagaaattcaggcaggcaaggagccaggtagtgttctccgcggaagaactgatctatcccgacagacggttagaaaccaaataccccgtcgtctctgacggaaagcgctttctgggttcagggggtttcataggctatgcacccaacctgtccaagctagttgctgagtgggaggggcaagacagtgacagtgatcaactgttttacacgaagatctttctggaccccgaaaaacgggagcagattaacatcaccctggaccatcggtgccggattttccagaatttagacggtgctcttgacgaggttgtgctcaaattcgaaatggggcatgtgcgagcaagaaatcttgcctacgatactctgcctgtgctgattcatggcaatgggcccaccaaactccaactcaactatctgggaaactacatcccccgattctggacatttgagactgggtgcaccgtgtgcgacgagggactgaggtctctcaagggaatcggtgatgaggcccttcctaccgtgcttgtgggagtgtttatagagcagccgactcccttcgtatctctgttttttcagcgattgctgcggctgcactaccctcagaaacacatgaggctgtttatccacaatcacgaacagcaccacaaggcccaggtggaagaatttctggcccagcacgggtctgagtatcagtctgtcaagctggtcggcccagaagtgagaatggcgaatgctgacgcgcgcaatatgggcgccgacctgtgtcgccaggaccgctcttgcacttattacttcagtgttgacgctgatgtcgcgttgactgaacctaattcgctgagactgttaattcagcagaacaaaaacgtgatagcccccctgatgacgcggcatggtaggctttggtccaatttttggggtgcgctctccgcagatgggtattatgcacggtccgaagattatgtggacatcgtgcagggcaggcgcgtcggagtttggaacgtaccatacatcagcaacatataccttatcaaggggtccgccctacgcggggagctgcaatcatctgatcttttccaccactccaagctagaccctgacatggcattctgtgccaacattcgacagcaagacgtttttatgtttcttacgaatcgccacacgcttggccacctcctgtcgttggactcctatcgcacaactcacctccacaacgacctctgggaagtgttcagtaatcctgaagattggaaagaaaagtatatacatcagaattacacaaaggctctggctgggaaactggtagaaaccccgtgtcctgatgtgtattggttccctattttcacagaggtcgcctgcgatgagctcgtggaagaaatggagcactttggccagtggtcactcggaaataataaggacaaccggatccagggcggctacgagaacgtgcctacgatcgatatccacatgaaccagattggctttgagagagaatggcacaagtttttactggagtatatcgctccgatgactgagaaactctatcctggctattatactcgggcccagttcgatcttgccttcgtggtgcggtataagcccgacgaacagccttccctgatgccccaccacgatgcctcaactttcacgatcaacatcgccctgaacagagtgggggtggactatgaaggaggaggttgtagatttctgcgctacaattgtagtattcgcgcccctcgtaaaggctggacacttatgcatcctgggcggcttacccactatcacgagggtctgcccactactcggggaacacgctacatcgctgtatcctttgttgatccttag

SEQ ID NO: 200667 - DNA, 1176 bp, synthetic construct
  misc_feature 1..1176: note = Description of Artificial Sequence: Synthetic coding sequence
  source 1..1176: mol_type = other DNA
atgcggcccctgctgctgctggccctgctgggctggctgctgctggccgaagccaagggtgacgctaagccagaggataaccttctcgtactgacagtcgccaccaaggaaactgaaggctttaggcggttcaaacggtccgcacagttcttcaattacaagatccaggcactggggctgggagaggattggaacgttgaaaaagggaccagcgccggcgggggccagaaagtccgtctcctaaaaaaggctcttgaaaaacatgccgacaaggaggacctggttattctgttcgccgattcctatgacgtcttatttgcctctggcccccgagagctgctgaaaaaatttagacaggccaggtcacaggtcgtattttcagctgaggagctgatctaccccgatcgcagactggaaacaaaatatcctgttgttagtgatggcaaaagatttctgctggaagacgtctttatgtttctgacgaacagacataccttggggcacttgctgagcctcgatagttacagaaccacacacttgcacaatgacctttgggaggtgttctctaacccagaggattggaaagagaaatatatccaccaaaactacacgaaggccctcgcaggcaaactggtggagacaccctgcccagatgtgtattggttcccaattttcacagaggttgcttgtgacgaactggtggaggaaatggaacactttggacagtggagcttaggcaataacaaggacaacagaattcagggcgggtacgagaatgtcccaacaatagacatccacatgaatcagatcggctttgaaagggagtggcataaattcctgcttgagtatattgctccaatgaccgagaaactgtatcctgggtattacacccgggctcagttcgatctggcattcgtggtgagatacaagcctgacgagcaaccatctcttatgcctcaccatgacgcctctacatttactataaatatagccttgaatagagtgggcgtcgactatgaaggaggaggttgcaggtttctccgttataactgttccattcgcgcccctcggaaggggtggacgctcatgcatcctggcaggctgacacattatcacgaaggattgcccactactcgcggcactaggtacattgccgtatccttcgtcgatccatag

SEQ ID NO: 200668 - DNA, 852 bp, synthetic construct
  misc_feature 1..852: note = Description of Artificial Sequence: Synthetic coding sequence
  source 1..852: mol_type = other DNA
atgcggcccctgctgctgctggccctgctgggctggctgctgctggcggaagcaaagggagacgccaagccagaggataatctgctggtcctgaccgttgcaacgaaggaaactgaggggttcagacggttcaagcgatccgcgcaattctttaattacaagatccaggcgctgggcctgggcgaggattggaacgtggagaagggaacatccgccgggggaggccagaaggtgagactcctgaagaaagctctcgagaagcacgccgacaaagaggacttagtcattttgttcgccgactcctacgatgtcctctttgcctcagggcctcgggagctccttaagaagttccgacaggccagaagtcaggtcgtgttcagtgctgaggagctgatttatcccgaccgcagattggaaaccaagtaccctgtggtctccgacggaaaacgctttctgggatctggcggattcattggatatgctcccaatctaagtaagctggtggcagagtgggagggccaggactccgactcagatcagcttttctacacaaaaattttccttgatcctgaaaaacgggaacagattaatatcacactcgaccacaggtgtaggatcttccagaatttggatggggccctcgtgtccccttgggggcagggacacttgcccggcgcctgctatgagctcacagcaagcgttctgactagtgagttgagtgtgatgccgtccttcccggctgtcgtcctgcaactcaactacttaggcaattacattcctcggttctggaccttcgaaaccggctgtacagtgtgcgatgaaggcctgagatcactgaagggtatcgggtag

SEQ ID NO: 200669 - DNA, 678 bp, synthetic construct
  misc_feature 1..678: note = Description of Artificial Sequence: Synthetic coding sequence
  source 1..678: mol_type = other DNA
atgcggcccctgctgctgctggccctgctgggctggctgctgctggccgaagccaagggggatgcaaagcctgaagcaccgtgttgccaagaaggactgagagctggggggtccggctctttgcacctgggtcgtgattttacagtgctggctggggcgaggggctctccatcacccagtgtgagtagtattccccgattctggattcctggctctgataatttgctggtgctcaccgtagctaccaaggagactgaggggttcagacggtttaagcggtccgcccagttctttaactataaaatacaagccctgggccttggtgaggattggaacgtcgaaaaagggacctcggccggtggcggtcaaaaggtccgcttgctgaagaaggctttggagaaacacgccgacaaggaggatctggttatcctcttcgcagactcatacgatgtgctgtttgcctctggacccagagaactgctgaagaaattcagacaggccaggtctcaggtcgtgttttcagctgaggagttaatctatccagaccgacgattggagacaaaatatcccgtggtgagcgacggcaaacgctttttgggctccgggggattcattggatacgcaccaaacctgagcaagctggtcgccgaatgggaagggcaagacagtgacagctag

SEQ ID NO: 200670 - DNA, 2277 bp, synthetic construct
  misc_feature 1..2277: note = Description of Artificial Sequence: Synthetic coding sequence
  source 1..2277: mol_type = other DNA
atgggcggctgcaccgtgaagccccagctgctgctgctggccctggttctgcacccgtggaacccatgcctgggcgccgacagtgagaagcccagtagcatcccgacagataagctgctggtcatcactgttgccacaaaggaatcagatgggtttcaccggtttatgcagtctgccaagtactttaattatacagtcaaggttctggggcaaggtgaggagtggaggggcggcgacggcatcaacagcatcggcggcgggcagaaggtgcgcctaatgaaggaggtcatggagcactacgcggaccaggacgacctggtggttatgttcactgagtgtttcgacgtgattttcgccgggggacctgaggaagtgctcaaaaagtttcagaaggcaaatcacaaggtcgtgttcgccgccgatggcatcctctggcctgacaaacggctggccgacaagtatcccgtggtgcacatagggaaacgatacctgaactctggggggtttatcggttacgcaccatatgtaaaccggatcgtccaacaatggaatctgcaagacaatgatgatgatcaattattctacaccaaagtttacattgaccccctgaaaagagaggcgattaacatcaccctcgatcacaaatgcaagatatttcagacacttaacggtgcagtggatgaggtggtgctgaaatttgagaacggcaaagccagggccaaaaacacattctacgagactttaccagtggctatcaatggtaatggcccaacgaagatccttctaaactactttggcaactatgtgcctaattcatggacacaggacaacggctgcaccctttgcgagtttgatacagttgacttgagcgcagtggacgtccaccctaatgtgagcatcggagtgtttattgagcaacctaccccctttctgccaagattcctagatattctgctcacactggactaccctaaggaagccctgaagttgttcattcacaataaagaggtgtatcacgagaaggacatcaaagtcttctttgataaagcaaaacacgagatcaaaacgatcaaaattgttggcccagaggaaaacctctcccaagccgaagcaagaaacatgggaatggacttctgccgacaagatgaaaaatgcgactactatttctccgtggatgctgacgtagttctaacaaatccaaggacactgaaaatacttattgaacagaatcgtaagattatcgctcccctggttacgagacacggaaagttatggtcaaacttctggggagcactgtcccctgatggctactacgcgagatccgaggattatgtcgatatcgttcagggcaatagagttggcgtttggaacgtgccttacatggcaaacgtctatctcatcaaggggaagactctacgcagcgaaatgaacgagagaaattacttcgtgagggacaagctggaccccgatatggccttatgtcggaacgccagagagatgacacttcagcgggagaaggattcgcccacacccgagacttttcaaatgctgagccccccgaagggggtgttcatgtatatttcaaaccgccatgaattcggacggctcctatccacggccaattacaacacctctcactacaacaatgatctgtggcagatcttcgagaaccctgtggactggaaggagaaatatattaatagggactactcgaagatttttaccgagaacatagtcgaacagccctgcccagacgttttctggtttcccatcttttcagagaaggcatgtgacgagctcgtggaggagatggaacattacgggaaatggagtgggggcaagcaccatgattcccgcatttcgggcggctacgagaacgttccaaccgacgacattcacatgaagcaggtggatctagagaacgtatggctacattttatccgggaattcatcgcacccgtgacgctgaaagtgtttgcaggatattacaccaagggttttgccttattaaacttcgttgttaaatactcccctgaacggcagcgttctctgaggccccatcacgacgcatctacatttaccataaatatagccctgaacaatgtgggggaagacttccaggggggtggatgcaaattcctgcgctacaactgtagcattgagtctccacgaaagggctggtcattcatgcatcccgggagactgacgcacctgcacgaggggctgcccgtaaaaaatggcacaagatatattgcggtgtcctttatcgacccctag

SEQ ID NO: 200671 - DNA, 2214 bp, synthetic construct
  misc_feature 1..2214: note = Description of Artificial Sequence: Synthetic coding sequence
  source 1..2214: mol_type = other DNA
atgggcggctgcaccgtgaagccccagctgctgctgctggccctggtactgcatccatggaatccttgtctgggcgccgattctgaaaagccctcttcaattcctacagacaagctgctcgtgatcacggtggcaacaaaagaaagcgatggcttccaccggttcatgcagtccgctaagtattttaactacaccgtgaaggtcctgggacaaggcgaagagtggcgcggaggcgacggcattaactccattggcggaggacagaaggttcgcctgatgaaagaggttatggagcactacgccgaccaggatgacttggttgtaatgttcacagaatgttttgacgtaatttttgccggcggacccgaggaagtattaaagaagtttcagaaagccaatcacaaagtggtcttcgcagctgacggcatactctggcctgataagaggctcgccgacaaatatcccgtggtgcacattgggaagcggtacttaaatagcggtggctttatcgggtacgctccttatgtgaatcgaatcgtccagcagtggaaccttcaagataacgatgacgatcagctattctatacaaaggtgtatattgatccgctcaagagggaggccatcaacattacactggatcacaaatgcaaaatcttccagactttgaacggtgctgtagatgaggttgtgttgaaattcgagaacggaaaagcccgcgctaaaaataccttctacgaaaccctccccgtggctattaatggaaatggacccacgaagatcctgctgaactatttcggaaattatgtcccgaactcctggacccaggacaacggttgcacattgtgcgaattcgacacagtggatctgtcagccgtggacgtccaccctaacgtgtcaattggggtgtttattgagcagcccaccccctttctcccccgctttctggacattctgctgacgttggattaccctaaagaggctttaaagctgttcattcacaacaaggaagtctaccacgagaaggacattaaggttttctttgataaagctaaacacgagattaagaccatcaaaatcgtagggcccgaggagaatctctcacaagctgaagctcgcaatatgggcatggatttttgccgacaggacgaaaagtgcgactactacttttctgtggacgctgacgttgtgcttactaacccaagaaccctcaagattttgatagaacagaacagaaagatcatcgcccctctggtgacaaggcatggcaagctgtggtctaatttctggggggccctctcacccgacgggtactacgcccgatcagaggattatgtcgatattgtccaggggaaccgcgtcggcgtgtggaatgtaccgtatatggccaatgtttatttaatcaaaggtaagacgctccgttccgagatgaatgagcggaactacttcgtcagagacaaactcgatcccgacatggcactgtgcagaaatgctagggaaatgggcgtgttcatgtatatcagcaaccgccacgaattcggaagacttttgagtacagccaactataatacgtctcactacaacaacgacctctggcagattttcgagaatcccgtggattggaaagagaagtacataaaccgtgattattcgaaaatttttacagaaaacatcgtcgaacagccatgccctgacgtcttctggttcccaattttttctgaaaaggcctgtgatgaactggtggaagagatggagcattacggaaagtggtccggaggtaaacaccatgattctaggataagcggagggtacgagaatgtgcccacagacgatatccacatgaagcaggtggacttggaaaacgtttggttacacttcataagagaatttattgcccctgtgaccctgaaggtgttcgcagggtattatacaaagggctttgctctcctgaatttcgtggtcaagtactcccctgaaagacaacggtccctgcggcctcatcatgatgcaagtacgttcaccattaatatcgctctcaacaatgtcggagaagacttccaagggggagggtgtaaattcctgcgatacaattgtagcatcgaaagcccacgaaaagggtggtctttcatgcaccctgggaggctaactcacctccacgagggactgcccgtcaagaacggcacccgctacatcgctgtcagcttcatcgacccctag

SEQ ID NO: 200672 - DNA, 1257 bp, synthetic construct
  misc_feature 1..1257: note = Description of Artificial Sequence: Synthetic coding sequence
  source 1..1257: mol_type = other DNA
atgctggagaaccacatcctgcacaagcggatctacatcctgaccttcttcagccagcaaatattcattctgtgccacgcacatttcatcttcttcttcacagtgagggacttctgtcggcaggatgaaaagtgcgactactatttctcagttgacgcagacgtggtgctgacgaatccaagaactttgaaaattctcattgagcaaaacagaaaaatcatcgcacccctcgtgacccggcatggcaagctgtggagtaatttctggggggcccttagccccgacggctattacgcccgcagcgaggactacgttgatattgttcaagggaaccgggtgggcgtgtggaacgttccctacatggctaacgtgtatctcatcaaggggaaaaccttgcgcagcgaaatgaatgagcgcaattattttgtgagggacaagttggaccctgacatggctttatgccgcaacgcccgcgaaatgaccctccagagagagaaggactccccgacaccagagaccttccagatgcttagcccccctaagggtgtgtttatgtacatctccaatcgccacgaattcgggcggctgttgagcactgcgaactataatacctcccactataataacgatttgtggcaaatcttcgagaaccctgtggattggaaggaaaaatacattaatagagattactccaagattttcacagagaacatcgtggaacagccgtgccccgatgtcttctggtttcctatatttagtgagaaggcttgcgatgaactggtggaagagatggaacattatggaaaatggagcgggggaaaacaccacgactcgcggatctctggcgggtacgagaacgttcccactgacgacatccatatgaaacaagttgatttggagaatgtctggcttcatttcattcgcgagttcatagctcccgttacactgaaggtattcgccggctactacacaaaggggttcgcgctgcttaacttcgtggtgaagtatagcccggaaaggcagcggtccttgaggccccatcacgacgccagtacgttcaccatcaacatcgccttaaacaacgtaggcgaggatttccagggcgggggctgtaaatttctgcgctataactgcagcattgagagccccaggaaaggctggagttttatgcatccaggccgtctaacccatctgcatgagggcctacccgtgaagaacggtacccgctacatcgccgtatcattcatcgacccctag

SEQ ID NO: 200673 - DNA, 2112 bp, synthetic construct
  misc_feature 1..2112: note = Description of Artificial Sequence: Synthetic coding sequence
  source 1..2112: mol_type = other DNA
atgcagagcgccaagtacttcaactacaccgtgaaggtgctgggccagggcgaagagtggaggggtggagacggtattaattcaataggcggtgggcagaaggttcgattgatgaaggaagtgatggagcactatgccgaccaggacgatctcgtagttatgttcactgagtgctttgacgtgatcttcgccggaggcccggaagaggtgctcaaaaagttccagaaggcgaaccacaaggtggtcttcgctgccgatggaatcttgtggccagacaagcgcttagcagacaaatacccagtggtgcacatagggaagaggtatctcaattcaggtgggtttatcggctacgctccctatgtcaataggatcgtgcagcagtggaatctgcaggataacgacgacgatcaactattttacaccaaagtttacatcgatcccctgaagagagaagccattaatataaccctggatcacaaatgtaagatattccagaccctgaatggcgccgtcgacgaggtagtgctgaagtttgaaaacggcaaagcacgtgcaaagaataccttttatgagaccctcccagtggccatcaatggcaacggtcccaccaaaattttgctgaactattttggcaattatgtgccaaattcttggacccaggacaatggatgtaccctttgcgagttcgacaccgtggatctgagcgccgttgatgtgcatcccaatgtgagtattggtgtgttcatcgaacaaccaacacccttcctgccccgcttcctggacattctattgactcttgactaccccaaagaagccttgaaactattcattcacaataaagaggtgtaccatgaaaaggatattaaagtgttttttgataaggccaaacacgagattaaaactatcaaaatagtgggccctgaagaaaatctgagtcaggccgaagcccggaacatgggtatggatttttgtcggcaagacgagaaatgtgactactatttctctgtggacgcagatgtggtccttaccaatcctagaaccctcaagattcttatagaacagaataggaaaattatagctcccctggtaacacgacacggtaagctctggtcaaacttttggggggcactctctccggatgggtattacgctcgttctgaagactatgtagacattgtccagggcaacagggtgggagtctggaacgtgccatacatggcgaacgtctacctcattaaaggcaagaccctgcggagcgaaatgaacgagcggaattactttgtgagggataagctggacccggacatggcactttgcagaaatgccagggagatgacactacaacgcgagaaagactctcctactcccgagacatttcagatgctgagtccaccgaagggagtctttatgtatataagtaatcgccacgagtttggcagattactcagcaccgccaattataacacttcccattataataatgatctctggcagatcttcgagaatccagtcgattggaaagaaaaatatattaatcgggactactcaaaaatatttacagagaatatagtggaacagccatgtcccgacgtgttctggttccccattttcagcgaaaaggcctgcgatgagttggtggaggagatggagcattacgggaagtggtccggagggaaacaccacgattcccggattagcggcggatatgagaacgtaccaactgacgatatccatatgaagcaagtcgacctggaaaacgtctggttacacttcatccgcgagttcatcgcgcccgtgaccctgaaggtgttcgccggctactacacaaaaggatttgctctgttgaattttgtcgtgaagtacagcccagagaggcagcgatcactgagaccacaccatgatgccagtactttcactataaacatagccctgaacaacgtgggagaggacttccaaggcggtgggtgtaaattcctccgctacaactgctcaatcgagtcaccccggaaaggctggtcattcatgcacccaggcagattaacccacctgcacgagggcctgccagttaagaacggcactcggtacatcgctgtgagctttatagatccctag

SEQ ID NO: 200674 - DNA, 1092 bp, synthetic construct
  misc_feature 1..1092: note = Description of Artificial Sequence: Synthetic coding sequence
  source 1..1092: mol_type = other DNA
atggccagcaagagctggctgaacttcctgaccttcctgtgcggctcagctatcggatttctattgtgcagtcagctgttctcaattctgctgggtgaaaaggtggacacccagccaaacgtgctccacaacgaccctcatgcacgacatagtgacgacaacggtcagaaccatctggaaggacagatgaactttaatgccgactcctctcagcataaagatgaaaacactgacattgctgaaaatctgtaccaaaaagtgcgcattctatgttgggtgatgaccggtccccaaaatttagagaagaaagccaagcacgtgaaggccacttgggcacagaggtgcaataaggtcttgttcatgtcaagcgaggaaaataaggatttccccgcggttggcctcaagaccaaagagggacgcgatcagctgtattggaagaccataaaggccttccagtacgtgcacgaacactatctggaagatgcagattggtttctgaaggctgacgacgatacatatgtgatcctggacaatctgcgttggctgctctctaaatatgaccccgaggagcccatttatttcgggcgcagattcaaaccttacgtaaaacagggatacatgtcaggcggagctggatatgttctctcaaaagaagcgctgaaacggttcgttgacgcctttaagaccgacaagtgtactcattctagttccattgaagacttagctcttggccgctgcatggaaataatgaacgttgaggcaggtgattcaagggatactatcgggaaggagaccttccacccttttgttccagagcaccatctcatcaagggatacttgccgcggaccttttggtactggaactataattattaccctcccgttgagggaccaggctgttgcagcgatctcgccgtctccttccactatgtagacagcacgactatgtacgagctggagtaccttgtgtaccatttgagaccctacggctatttgtatcgttatcagccaaccctacccgagagaatcctgaaggagatcagccaggcaaataaaaacgaagatacaaaggtaaaactaggcaacccgtag

SEQ ID NO: 200675 - DNA, 231 bp, synthetic construct
  misc_feature 1..231: note = Description of Artificial Sequence: Synthetic coding sequence
  source 1..231: mol_type = other DNA
atgaccagcagcggccccggcccccggttcctgctgctgctgcccctgctgttgccgcctgctgccagtgccagcgaccggccaagaggtagagatcccgtgaacccagaaaagttgctggtgattacggtggccactgccgagacggaaggatacctgcggttcctgaggagtgctgagttttttaattataccgtccgaacattgggcctgggtgaggaatggaggtag

SEQ ID NO: 200676 - DNA, 732 bp, synthetic construct
  misc_feature 1..732: note = Description of Artificial Sequence: Synthetic coding sequence
  source 1..732: mol_type = other DNA
atggagaagtacgccgaccgggaggacatgatcatcatgttcgtggacagttatgatgtgattctggccgggtcgcctacagaattactgaagaagtttgtgcagtctggatcgagactgctgttttctgcagagtcattttgttggcccgagtggggtctggctgagcaatacccggaggtgggtaccggcaagcgatttctgaattctggtggttttatcggattcgccacaactattcatcagatagttcgacagtggaaatacaaggatgacgacgacgaccagctgttctacacgcgcctttacctcgacccaggcctgcgagagaagctttctttaaatctggaccacaagtcacgaatcttccagaatcttaatggggctctcgacgaggtggtgcttaaatttgacaggaatagagtgaggatcagaaacgtggcctacgacacactcccaatagtagttcatgggaacggcccaactaaattgcaacttaattatctggggaattatgtacccaacggttggactccagaggggggatgtgggttttgcaatcaggaccggcgcacactcccaggcggtccagccagccctcctggcgtgtccgggagagtatgtgggactgcttatagcgtgtccgctccgttacctgccgctgccgccaccccagggctttctcctcggcaggggcatccgtttcctgcccagcagcgtggcctaccctag

SEQ ID NO: 200677 - DNA, 1740 bp, synthetic construct
  misc_feature 1..1740: note = Description of Artificial Sequence: Synthetic coding sequence
  source 1..1740: mol_type = other DNA
atggccgccaagagcgacggcgccgccgccagcgccagccccgacccggaaggcgccgctggtggcgctcgcggctccgctggaggacggggggaagcagcagcggcagccggcccaccaggggtggttggtgcaggggggcctggaccacggtacgaactgcgggactgttgctgggtgctgtgtgccttgcttgtgttcttctccgacggcgccacagacctctggctggccgcctcctattacctccagaaccaacacacatatttctcattaacgctactgttcgtgttgcttccaagtcttgttgtgcagctactcagcttccgttggtttgtatacgattattctgagccagctggaagccctggccctgccgtgtctaccaaggacagcgtggccggaggagccgctatctcaacaaaggactcagccggcgcctttcggactaaagagggctctcccgaacctgggcctcaaccggctccttcttcagcctcggcctataggcggcgatgctgcagactgtgtatctggttactgcagacactagtccatctgctgcagcttgggcaggtatggcggtatctgagagcgctctacttaggtttgcagagccgctggagaggtgaaaggctccgcagacacttttactggcagatgctgttcgagtcagctgatgtctctatgctccgtctgctcgagacgttccttaggtcagccccgcagcttgtgctccagctgagcctcctggtccacagagggggtgcccccgatcttcttcccgctttgagcactagtgcgtctctggtgtccttggcatggaccctggcctcgtaccagaaagttcttcgtgattccagagatgacaaacggcctctttcctacaaaggcgcagtcgctcaggtcttgtggcacttattttcaattgcagcccggggccttgccttcgcccttttcgcatctgtgtacaaactgtacttcgggattttcattgtggcccactggtgcgtgatgacgttctgggtgattcagggcgagaccgatttctgcatgagtaagtgggaggagattatctacaacatggtcgttggaatcatctatattttttgctggtttaacgtcaaggagggcagaagcaggcgtagaatgacactgtaccattgcatagtactactagaaaatgcagctttgaccgggttctggtactcctctcggaacttcagcacggatttctattcactgatcatggtttgcgtggttgcctcatcattcgcactgggtattttcttcatgtgcgtttactactgtctccttcacccaaacggtcccatgctcggaccgcaagccccaggctgtatctttaggaaggcttccgagccttgcgggccacctgctgatgctataacttcgcccccaagaagccttccgcgcaccactggtgccgagcgggacggagccagtgccggcgagcgggcagggacaccaactccccctgtcttccaggttcggcccggtttaccgcctaccccggtggccaggactctgaggacagagggaccagtgatcaggatcgacctgcctcggaagaagtacccagcttgggacgctcatttcatagacaggagactcagaaaaactatcttggccctggaatactctagccccgctacgcccagactgcagtaccgtagcgtgggcacctcacaagagcttctggaatatgagacgacggtatag

SEQ ID NO: 200678 - DNA, 765 bp, synthetic construct
  misc_feature 1..765: note = Description of Artificial Sequence: Synthetic coding sequence
  source 1..765: mol_type = other DNA
atggcctggcagggcctggtgctggccgcctgcctgctgatgttcccatctaccactgccgattgcctctctcgttgcagcttatgcgccgttaaaacacaggacggacccaagcctataaatcctctgatctgtagcttacagtgccaggcggcattactgccatctgaggagtgggaacggtgccagagctttctctcttttttcaccccttctactttgggtctgaacgacaaggaggaccttgggagtaagagcgtgggtgaaggaccttacagtgaattggcaaaactgagcggctcatttctgaaggagctcgagaagagcaagttcctgccaagcatctcaacgaaagaaaacaccctgtccaaatccctggaagagaagctccgagggctgagtgacggctttcgcgagggggctgagtcagagctaatgcgagacgcacagctgaacgacggagcaatggaaactggcacattgtacctcgcggaggaagaccccaaggagcaggttaaaagatacgggggcttcctgagaaagtaccccaagcgctcttcagaagtggctggagagggagacggtgacagtatgggtcacgaagatctgtacaaaaggtacggcggattcctccgccgcattcggccgaagctcaaatgggacaatcaaaagcgctatggtgggtttcttagacgccaatttaaggtggtcaccaggtctcaggaggatcccaatgcatattctggcgaactgttcgatgcctag

SEQ ID NO: 200679 - DNA, 765 bp, synthetic construct
  misc_feature 1..765: note = Description of Artificial Sequence: Synthetic coding sequence
  source 1..765: mol_type = other DNA
atggcctggcagggcctggtgctggccgcctgcctgctgatgttccctagcaccaccgctgattgtttaagcaggtgctcgctctgtgccgttaagactcaggatggaccaaagcctatcaaccccctaatctgctctcttcagtgccaggccgctttgttgccttccgaggaatgggagcgctgccagagcttcttgtcttttttcaccccctccaccttgggcctaaatgacaaagaggatctcggctcgaagagtgtgggggaggggccgtatagtgaattagctaagcttagcggtagtttccttaaggagctggagaagagcaagttcttacccagcatctctacgaaagagaatactctttcaaagtcgctcgaagagaaacttcgaggactgagtgacggctttagggagggcgctgagtccgaacttatgagagatgcccagcttaacgatggggccatggagactggaactctatacctcgccgaggaggaccccaaagagcaggtcaagcgttatgggggtttcctgagaaagtacccaaaacggtcttccgaagtggctggcgaaggcgatggtgatagcatgggtcacgaggatctctacaagcggtatggtgggtttctcaggagaatacgcccgaagctcaagtgggataaccaaaagcgctatggtggctttttgagaagacagttcaaggttgtaacaaggtcacaggaagaccctaacgcatattcaggcgagctcttcgacgcctag

SEQ ID NO: 200680 - DNA, 804 bp, synthetic construct
  misc_feature 1..804: note = Description of Artificial Sequence: Synthetic coding sequence
  source 1..804: mol_type = other DNA
atggcccggttcctgaccctgtgcacctggctgctgctgctgggccctggattacttgccacagtgagggctgagtgctcccaggactgcgctacttgctcgtacagactcgtaaggcctgccgacatcaactttttggcgtgtgtgatggagtgcgagggcaagctgccttctctcaaaatttgggaaacttgcaaggaattgttgcagctcagtaaacctgagttgccgcaggatggaacctccaccctcagggagaatagcaaacccgaagagtcacacctcctagccaaacggtacggcggtttcatgaaaagatacggtgggtttatgaagaagatggacgaactgtaccccatggagcccgaagaagaagcaaacggtagcgagattcttgccaaacgttatggtggtttcatgaaaaaagacgccgaggaggatgattccctggcaaactcttctgacctgctcaaggagctgctcgaaacaggtgacaatagagagagaagccaccaccaggacggttctgataatgaggaagaggtatctaagcgatacggcgggttcatgcgcggcctgaagcgaagcccacagttggaggatgaggccaaagagctgcagaagcgctacggagggtttatgcgccgggtcggtcgccccgaatggtggatggactaccagaagcggtatggaggcttcctgaagcggttcgcagaggcccttccttctgacgaggaaggcgagagttatagcaaggaggtaccggagatggagaagagatacggtggtttcatgcgcttttag

SEQ ID NO: 200681 - DNA, 804 bp, synthetic construct
  misc_feature 1..804: note = Description of Artificial Sequence: Synthetic coding sequence
  source 1..804: mol_type = other DNA
atggcccggttcctgaccctgtgcacctggctgctgctgctgggccctggactccttgcaaccgttcgcgccgagtgcagccaagattgcgcaacctgctcgtacaggctggtgagacctgccgacatcaacttcctagcttgcgtcatggagtgcgaaggaaagctgccctccctgaagatctgggagacgtgtaaggagctcttgcagctttccaagcctgagctgccacaggatggaacctctacactcagagagaacagtaaaccagaggagagccacctgctggcgaaaaggtatgggggttttatgaagcggtacggagggtttatgaaaaagatggatgaactgtaccctatggaacccgaagaggaagcaaacgggagtgagatactggctaagcgctatggtggatttatgaaaaaagacgccgaggaagatgattcattggcaaacagctcagacctgctcaaggaactacttgagactggggacaatcgagaacggtcgcatcaccaggacgggtcagataatgaagaagaagtgtcaaagcgatacggaggttttatgcgtggccttaaaaggtccccacagctggaggatgaagctaaggaactacaaaaacgatacgggggttttatgagaagagtgggcagacccgaatggtggatggattatcagaagcgatacggaggcttcctcaaacggttcgctgaggcactcccttcagacgaggagggggaaagttacagtaaggaggtgcctgagatggagaagcgctacgggggcttcatgcggttttag

SEQ ID NO: 200682 - DNA, 318 bp, synthetic construct
  misc_feature 1..318: note = Description of Artificial Sequence: Synthetic coding sequence
  source 1..318: mol_type = other DNA
atggcccggttcctgaccctgtgcacctggctgctgctgctgggccctggtctacttgccacagtccgggcagagtgcagccaggactgtgcaacctgtagttatcgtctggttaggccagcagacatcaactttctcgcatgtgtgatggagtgcgaaggaaaacttccctcactcaaaatatgggaaacctgtaaggaactcttacagttatccaaaccagagctgccgcaagacggcacatcgacgctgagagagaacagcaaacctgaagaatcccatttgcttgcgaaacgctacggggggttcatgaaatag

SEQ ID NO: 200683 - DNA, 570 bp, synthetic construct
  misc_feature 1..570: note = Description of Artificial Sequence: Synthetic coding sequence
  source 1..570: mol_type = other DNA
atggcccggttcctgaccctgtgcacctggctgctgctgctgggccctgggctactcgcaacagtgagagctgagtgtagccaagactgcgccacctgtagttacagactggtccgacctgccgatataaattttttagcttgcgtgatggagtgtgaggggaaactgcctagtctgaagatctgggaaacatgtaaggagctgctgcagctgtctaagcctgaactcccccaggatggaactagtaccttgcgggagaactcaaagccggaggaatctcacctactcgctaaaaggtacggcggtttcatgaaacgatatggcgggtttatgaagaagatggatgaactttaccctatggagcctgaggaagaggccaatggatccgagattctagcaaaacgctatggtggcttcatgaaaaaagacgctgaagaggacgacagcctggctaatagtagtgacctgctcaaggagctcctcgagactggggataaccgggagcgatcccaccaccaggatggctccgataatgaagaggagaagaagaaaaaaaagagaaaagagtag

SEQ ID NO: 200684 - DNA, 423 bp, synthetic construct
  misc_feature 1..423: note = Description of Artificial Sequence: Synthetic coding sequence
  source 1..423: mol_type = other DNA
atggccggctggcagagctacgtggacaacctgatgtgcgacggctgctgtcaggaagcagccatagtgggatactgcgatgcaaaatacgtttgggccgccacagccggtggggttttccagtctattactccgatcgaaatcgatatgattgtcggcaaggatagggaggggttttttaccaacgggctgactctaggtgctaagaagtgttcagttatccgggattccctctacgtggatggcgactgcactatggacatcagaaccaaaagccagggcggagagcccacatataatgtggctgtaggacgcgccggcagagtcctagtgtttgttatgggcaaggagggcgtccacgggggcggtttgaacaagaaggcctactccatggcgaaatatctcagagacagtggattctag

SEQ ID NO: 200685 - DNA, 423 bp, synthetic construct
  misc_feature 1..423: note = Description of Artificial Sequence: Synthetic coding sequence
  source 1..423: mol_type = other DNA
atggccggctggcagagctacgtggacaacctgatgtgcgacggctgctgtcaagaggccgctatcgtaggttattgtgatgctaagtatgtgtgggctgccacagccggcggagtgttccagagcatcacgcccatcgaaattgacatgattgttggaaaggatagagaaggcttcttcaccaacgggctgactctcggggccaaaaagtgcagcgtgataagagactccctttatgtagacggcgactgtaccatggatatcagaaccaagagtcaggggggggaacctacttataatgtggcggttggtcgggccggacgtgcacttgtgattgtcatgggtaaagagggggtacatggcgggacactaaataaaaaggcttatgagctggctctttatctccggcgcagcgacgtgtag

SEQ ID NO: 200686 - DNA, 414 bp, synthetic construct
  misc_feature 1..414: note = Description of Artificial Sequence: Synthetic coding sequence
  source 1..414: mol_type = other DNA
atgggcgactggaaggtgtacatcagcgccgtgctgcgggaccagcgtattgacgacgtcgctatcgtgggccacgccgataattcatgtgtttgggcatcaagacctggtggcctgctcgcggcgattagcccccaggaagtaggcgtcctgacaggcccagacagacacaccttcttgcaagccggtctgagtgtggggggtaggagatgctgtgtgatcagggaccacctgctggccgagggcgacggtgttctagatgcacggacaaaaggactcgatgccagagcagtgtgcgtggggagagcgccacgagccttactggtgcttatgggacgtaggggagtgcatggcggaatcctcaacaagacagttcacgagctgatccggggcctccgcatgcaaggggcctag

SEQ ID NO: 200687 - DNA, 1167 bp, synthetic construct
  misc_feature 1..1167: note = Description of Artificial Sequence: Synthetic coding sequence
  source 1..1167: mol_type = other DNA
atgaagtggatggtggtggtgctggtgtgcctgcagctgctggaggctgccgttgtgaaggtccccctcaaaaagttcaagtccatacgtgagaccatgaaagagaaaggactcctgggggagtttctccgtacccacaagtatgatccagcgtggaagtatagatttggcgacctgtcagtcacatatgagcccatggcttacatggatgccgcctatttcggagagatcagcatcgggactcccccccagaattttctagtgctgttcgataccggaagttcgaatctctgggtcccatctgtatactgtcaatcccaggcctgcacgagtcacagcagatttaacccttctgagtcctctacttatagcactaatggacaaaccttcagcctgcagtacggatcaggatccctcactggcttcttcgggtacgacacacttaccgtgcagtccatccaggtccctaaccaggagttcgggctgtccgaaaacgagcctggaacaaatttcgtatacgcacagtttgatggaatcatgggcctggcctatcccgccctcagtgttgacgaggcgactacagcaatgcaaggcatggtacaggagggcgctctgacatcccctgtgttcagcgtgtatcttagcaaccagcagggcagtagcggaggtgctgtagtgttcggaggggtggatagcagtctctacacagggcagatctactgggctccagtgactcaggaactttactggcagattggcattgaagagtttttgatcggtggtcaggctagcggctggtgctctgaaggctgtcaggctatcgtcgacaccggcacctctcttcttactgtaccccagcagtatatgagcgctctccttcaggccactggagcccaagaagacgaatatgggcaattccttgtcaactgcaactctatccagaatctaccaagcctgaccttcataataaacggagttgagtttcctctccccccatccagctatattctgagcaacaatggatattgcaccgtgggagtagaaccaacatacctctcaagtcagaatggtcagcccctttggattttgggggatgtgttcctgagaagttattattccgtgtacgacctcggcaataacagggtggggtttgcaacggcagcatag

SEQ ID NO: 200688 - DNA, 315 bp, synthetic construct
  misc_feature 1..315: note = Description of Artificial Sequence: Synthetic coding sequence
  source 1..315: mol_type = other DNA
atgaagtggatggtggtggtgctggtgtgcctgcagctgctggaggcagccgtcgtgaaggtcccactgaaaaaatttaagagtattcgcgaaaccatgaaggagaaaggcctgctgggggagtttcttcggacccacaagtacgacccagcctggaagtataggtttggagatttgagcgtcacatatgagccaatggcctatatggatgcagcttactttggtgagattagcattggaacacctcctcaaaacttcctcgtactgttcgatacaggctctagccctctgcccctggaccccgcgccctcctag

SEQ ID NO: 200689 - DNA, 411 bp, synthetic construct
  misc_feature 1..411: note = Description of Artificial Sequence: Synthetic coding sequence
  source 1..411: mol_type = other DNA
atgaagtggatggtggtggtgctggtgtgcctgcagctgctggaggcggcagtggtgaaggtgccactgaaaaagttcaaaagtatccgcgaaacaatgaaagaaaagggcctgctgggagaattcctcagaacgcataagtacgacccggcatggaagtaccgctttggggacctctcagttacctacgagcccatggcctacatggatgtccaaagcattcaagttcctaatcaggaatttggtctgtccgagaatgagccaggaacaaatttcgtgtatgcccagtttgacggtatcatgggcctggcctatcccgccctctccgtcgacgaagctaccacagcaatgcagggcatggtccaggagggcgctctaaccagcccagtgttcagtgtatacctcagttag

SEQ ID NO: 200690 - DNA, 948 bp, synthetic construct
  misc_feature 1..948: note = Description of Artificial Sequence: Synthetic coding sequence
  source 1..948: mol_type = other DNA
atgaagtggatggtggtggtgctggtgtgcctgcagctgctggaggccgccgtggtgaaagtgcccctgaaaaagttcaagtccatcagagagaccatgaaagaaaaagggcttctcggagagtttctcagaacccacaagtatgatcctgcctggaaatatcggttcggtgacctttcggtgacctacgagcccatggcttatatggacgccgcatatttcggtgagatctcaatcgggacgcccccccagaattttttagttctgtttgatacaggaagctcaaacctttgggttcccagcgtgtactgtcagtcccaggcctgtactagccacagtcgattcaaccctagcgaatctagcacatactccactaatggtcagactttctctctccagtacggctctggctctctaaccgggttctttggatatgacaccctgaccgtgcaaagcatccaggtgcctaatcaggagttcggtctgagcgagaacgaacccggaaccaactttgtttatgctcaatttgatggaatcatgggcctggcctaccctgcactgtccgtcgacgaggccaccacagcaatgcagggcatggtgcaggaaggggcactcacctctccggtgttcagcgtgtatctgagtaatctggttcttgaaagttccggtctgggtcctctgctcactccctcccgggctgcacccccctcttcaacgctgcagttacctgagaagccgctcgagcagacttggaacatcctgaccccttttacaaagacgctgccagtttccaatcttagtcgtaaagtcacatcttgggcgggcgtgggtattccagtgacgtgcctgcctgaagccggttctggtggtgaacgacgcgccgagtgcgggctgggggtaccaacaacacgaggacctccccgttctcagcatcactccggcgcttag

SEQ ID NO: 200691 - DNA, 543 bp, synthetic construct
  misc_feature 1..543: note = Description of Artificial Sequence: Synthetic coding sequence
  source 1..543: mol_type = other DNA
atgctgtgcctgctgctgaccctgggcgtggccctggtgtgcggcgtccccgctatggacatcccccagactaagcaggatttagagctgccgaaacttgctggcacatggcatagcatggccatggccaccaataatatttcactgatggccactttgaaagcccccttacgggtgcatattacatcactcctcccgaccccggaggataatctcgagattgtcttgcataggtgggaaaataattcatgtgtggagaagaaggtgcttggagagaaaactgaaaaccccaagaaatttaagatcaattacaccgtagccaatgaagcaaccctgctcgacacggactacgataatttcctgtttctttgtctgcaggatacgacaactcctatccagagcatgatgtgccagtatctcgcacgcgtcttggtcgaagatgacgagattatgcagggatttatccgggcgttccggcccctaccacgacatctgtggtacctgcttgatttaaaacaaatggaagagccttgtcggttttag

SEQ ID NO: 200692 - DNA, 261 bp, synthetic construct
  misc_feature 1..261: note = Description of Artificial Sequence: Synthetic coding sequence
  source 1..261: mol_type = other DNA
atgctgtgcctgctgctgaccctgggcgtggccctggtgtgcggcgtccctgctatggacatccctcagacaaagcaggacctcgagttaccaaaggacactaccacccccatccaaagtatgatgtgccagtatttggcacgcgtcttggtggaggacgatgagatcatgcaaggtttcatccgggcctttcgccccctgccaaggcacctgtggtacctcttggacctgaagcagatggaagccccgtgttggctttag

SEQ ID NO: 200693 - DNA, 543 bp, synthetic construct
  misc_feature 1..543: note = Description of Artificial Sequence: Synthetic coding sequence
  source 1..543: mol_type = other DNA
atgctgtgcctgctgctgaccctgggcgtggccctggtgtgcggcgtcccggctatggatatcccccagactaagcaggatcttgagctgcctaagctggcgggcacatggcactctatggctatggcaactaacaacatcagcctgatggctactcttaaagctccgctgcgcgtgcatataacatccctgctccctacaccagaagataacctggagattgtgctccatcgctgggaaaacaacagttgcgtggagaaaaaagtgttgggagagaaaaccgagaacccaaagaaattcaagataaactacaccgtcgcaaatgaggcaacgctgttggacacggattatgataattttctttttctgtgcctgcaggacacaactacccctatccagagtatgatgtgccagtacttggcaagagtcctggttgaggacgatgagatcatgcaagggttcatcagagccttccggccactgccccgccacctttggtatctccttgatctgaaacagatggaggaaccttgtcggttctag

SEQ ID NO: 200694 - DNA, 438 bp, synthetic construct
  misc_feature 1..438: note = Description of Artificial Sequence: Synthetic coding sequence
  source 1..438: mol_type = other DNA
atgctgtgcctgctgctgaccctgggcgtggccctggtgtgcggcgttccagcgatggatatacctcagacgaagcaggacctggaactgccaaaggcccccctgcgggtgcacattacctctctgctgcccacccctgaagataacctagaaatcgttctccatagatgggagaacaactcatgcgtggagaagaaagtgctcggagagaaaaccgagaatcctaaaaagttcaagatcaactgcaaggcctcgggggctcctcagctgtcatggaaaccgcaggggccgaggacggaccccgccagctccaccgcccgagttctggttgaagacgacgaaatcatgcagggctttatcagggcttttcgtcccctgcctagacacctctggtacttattggacctgaagcagatggaggaaccttgccgcttttag

SEQ ID NO: 200695 - DNA, 399 bp, synthetic construct
  misc_feature 1..399: note = Description of Artificial Sequence: Synthetic coding sequence
  source 1..399: mol_type = other DNA
ctgatggccaccctgaaggcccccctgcgggtgcacatcaccagcttgctgccaaccccagaggacaacttagaaatcgttctgcataggtgggagaacaacagctgtgtggagaaaaaggtgctcggagagaagaccgagaacccaaagaaattcaaaataaactatacagtggccaacgaggccacacttctggacaccgactacgataacttcctctttctctgtctccaggacacgaccaccccaattcaaagcatgatgtgccagtaccttgccagggtgctagtagaggatgacgagattatgcaagggtttatccgcgcattccgccccctcccccggcacctatggtacctgttagacctgaagcagatggaagaaccatgcaggttctag

SEQ ID NO: 200696 - DNA, 396 bp, synthetic construct
  misc_feature 1..396: note = Description of Artificial Sequence: Synthetic coding sequence
  source 1..396: mol_type = other DNA
tgagtgcccgccatggacatcccccagaccaagcaggacctggagctgccaaaggcccctcttcgcgtgcacatcacctcactattgcctactccagaggacaatctggaaatcgtcctgcaccgatgggagaataactcctgtgtagagaaaaaggtcctgggcgaaaaaacagaaaacccgaagaagtttaaaatcaattgcaaagcttcaggtgcaccacaactgagctggaagccccagggccctcggactgatcccgcctcctctacggcaagggttctggtggaggacgacgagattatgcaggggtttattcgagctttccgcccactgccccgtcatctgtggtaccttctggatctgaagcagatggaagaaccttgcagattctag

SEQ ID NO: 200697 - DNA, 381 bp, synthetic construct
  misc_feature 1..381: note = Description of Artificial Sequence: Synthetic coding sequence
  source 1..381: mol_type = other DNA
tgacccctgcgggtgcacatcaccagcctgctgcccacccccgaggataatctggagatcgtcctgcacaggtgggaaaataatagctgtgtcgagaagaaggtgctgggcgaaaaaaccgaaaacccaaaaaaatttaaaatcaactacaccgtagccaacgaggcaacgctccttgatacagactatgacaacttcctgtttctctgtctgcaagatactaccacacctattcagtccatgatgtgtcagtatctggcccgcgtattggtcgaggatgacgaaattatgcagggttttatcagagcattccggccactgcctagacacctatggtacttactagatctgaagcagatggaggagccctgtagattttag

SEQ ID NO: 200698 - DNA, 102 bp, synthetic construct
  misc_feature 1..102: note = Description of Artificial Sequence: Synthetic coding sequence
  source 1..102: mol_type = other DNA
tgagagatcatgcagggcttcatccgggccttccggcccctgcccagacacctctggtatctcctggacctgaagcagatggaggaaccatgcaggttttag

SEQ ID NO: 200699 - DNA, 543 bp, synthetic construct
  misc_feature 1..543: note = Description of Artificial Sequence: Synthetic coding sequence
  source 1..543: mol_type = other DNA
atgctgtgcctgctgctgaccctgggcgtggccctggtgtgcggcgtgcctgctatggacattccccaaacgaagcaggatctggagctccccaaactcgcgggaacatggcacagcatggccatggccactaacaatatttctttaatggccactcttaaggcacctttgcgggtacatataacctctctcctcccaacgcctgaagataacctcgaaatcgttctccaccgttgggagaataacagttgcgttgaaaagaaagtgttgggtgaaaagactgaaaacccaaagaaattcaaaattaattacaccgtggctaacgaagcgacactgcttgatactgattacgacaacttcttgtttctgtgtcttcaggatacaacaacacccattcagtcaatgatgtgccagtacttggcacgcgtgttggttgaagacgatgagattatgcagggattcatcagggcgtttcgtcctctcccgcggcatttatggtacctcctggatttgaagcaaatggaagaaccgtgtcggttctag

SEQ ID NO: 200700 - DNA, 510 bp, synthetic construct
  misc_feature 1..510: note = Description of Artificial Sequence: Synthetic coding sequence
  source 1..510: mol_type = other DNA
atgctgtgcctgctgctgaccctgggcgtggccctggtgtgcggcgtgccagctatggatattccacaaacaaagcaggatctggaactcccaaagttggcaggaacctggcattcaatggccatggctacgaataacattagtctcatggcaaccctcaaggccccactcagggtgcatattaccagcctcctgcctactcctgaggataacctcgagatcgtgctgcaccggtgggaaaataacagctgcgtcgagaaaaaggtgctcggtgagaaaaccgagaacccaaagaaatttaagataaactatactgtcgctaatgaggccaccctgctcgacaccgattatgataacttcctgttcctgtgcttgcaggacactacaacaccaattcagagtatgatgtgtcaatacctcgaatcctggtggcggacaatgagatcttgtcgtgactcctcggggctgagcggtccatgccccggtacttacggcacctgttggacctag

SEQ ID NO: 200701 - DNA, 2274 bp, synthetic construct
  misc_feature 1..2274: note = Description of Artificial Sequence: Synthetic coding sequence
  source 1..2274: mol_type = other DNA
atgagccggaagatcagcaaggagagcaagaaggtgaacatcagctccagtcttgaatcagaggatatcagcttggaaactacagtgcctaccgacgatatcagctccagcgaggaacgtgaggggaaagtgcgtattactcggcagctcatagagaggaaggagctattgcacaatatacagctgctgaaaattgaactgagccagaaaaccatgatgatagataacctgaaggttgactacctgaccaagatcgaggaactggaggagaaattgaatgatgctctgcatcagaagcagctcctgactctgcgtctggataatcagcttgccttccagcagaaggacgcaagtaagtaccaagaactgatgaagcaggagatggaaacgattctcctacgccagaaacagctcgaggagaccaacctacagctgagggaaaaagcgggcgacgttcggagaaatctccgggatttcgagctgaccgaggagcagtacatcaaactcaaagcgttcccagaggatcaattatccattccagagtacgtatctgttagattttatgagctcgttaaccccctgagaaaggaaatctgcgaattacaggtgaaaaaaaacatccttgccgaagagctctccaccaataagaatcagctgaagcaactgactgagacctatgaggaggatagaaagaactactccgaggtgcagatccggtgccagcggcttgctctcgaactggcagacactaagcagctgattcaacagggggactatagacaggagaattacgacaaagtgaagagcgagcgcgatgccctcgaacaggaagtgatagagctccggcgtaaacatgaaatcctggaggcatcacatatgatccaaacaaaggagcgaagcgaactgagcaaggaggttgtcactcttgaacagaccgtcacactgctccagaaagacaaagaatacctcaacaggcagaatatggaattgtctgtgcgctgcgcccacgaggaggaccgactcgagcgactgcaggcgcagctggaggagagcaagaaagctcgcgaggagatgtacgaaaaatacgtcgcctctcgcgaccactataaaacagaatacgaaaataagttgcacgacgaactggaacagatcaggctgaagacaaatcaggaaatcgatcagctgagaaacgctagccgtgagatgtacgagagggagaatcgcaatctccgggaggctagagacaatgccgtggcagagaaggagcgcgccgtgatggccgagaaagacgctctggagaaacatgatcagctcttggaccgttaccgcgagttgcagttatcaaccgagagtaaagtcaccgagttccttcatcagagtaagctaaagagtttcgagagtgagcgagtccagctgctgcaggaggaaacagcaagaaatctgactcagtgtcagctcgaatgtgagaagtaccaaaagaagttggaggtactgaccaaagaattctactcccttcaggcatcctcagaaaagcgtattacagagcttcaagcgcagaactccgagcatcaggcccgcctagatatctacgaaaaactagagaaggagctagatgagatcattatgcagacagccgaaatcgagaacgaggacgaggccgagagggtactattttcctacgggtacggcgccaatgtgcccaccactgccaagaggcgcctgaaacagagcgtgcacctagcccgccgcgtcctccaactcgagaaacagaacagtctcatactaaaagatctggagcacaggaaagatcaagtaacccagctaagtcaggagctagaccgagcaaattcgttgttgaaccagacccagcaaccatacagatacctgattgagagcgttaggcagcgggatagcaaaatcgactccctgacagagtccattgcccagctcgagaaggacgtttccaacttgaataaggagaagtcagctcttctccaaactaagaaccagatggcactggatttagaacagcttctcaaccacagggaggagctcgctgcaatgaagcagattctcgttaagatgcactcaaaacacagcgaaaatagcttacttctcactaagacggagcctaagcatgttacggagaatcagaaatcaaagaccttaaacgtcccgaaagagcatgaagacaacatcttcaccccaaaaccgaccctattcactaagaaagaagccccagaatggagcaagaagcagaagatgaagacatag

SEQ ID NO: 200702 - DNA, 651 bp, synthetic construct
  misc_feature 1..651: note = Description of Artificial Sequence: Synthetic coding sequence
  source 1..651: mol_type = other DNA
ttccggaccgccaaggtggagaacgaggacgaggccgagcgggtgctattctcttatgggtatggagcaaatgtgcctacaactgccaagaggcgcctcaagcagtcagtacacctcgccaggcgcgtgctccagctcgagaagcaaaacagcctcatcctgaaagatctcgagcatagaaaggaccaagtgacgcagctgagtcaggagttagaccgggcgaactctctgttaaatcagactcagcagccatatcgctatctgattgaatccgttagacagcgcgatagcaaaatagactctctcactgagagtatcgctcagctcgaaaaggacgtttcgaatctcaataaggagaagagtgcgttactgcagaccaagaatcagatggcactggacctggagcagttgctaaaccatcgggaggagctggctgcaatgaaacagatacttgtcaagatgcacagtaagcatagcgaaaacagtctgctgctaacgaaaactgagcctaaacacgtgaccgagaaccaaaaaagcaagactctgaacgtgcccaaggagcacgaagataatattttcactccaaagcctacccttttcaccaagaaagaggctccagagtggagcaaaaaacagaagatgaagacctag

SEQ ID NO: 200703 - DNA, 1245 bp, synthetic construct
  misc_feature 1..1245: note = Description of Artificial Sequence: Synthetic coding sequence
  source 1..1245: mol_type = other DNA
atgagccggaagatcagcaaggagagcaagaaggtgaacatcagctcatctctggagagtgaggacatttccttggagacaaccgtgccaacagatgacatctccagctccgaggaacgcgagggaaaggttcgtattacaagacagttgatagagcgcaaggagctcttgcacaacatccagctcctgaaaatcgaactttcccagaaaaccatgatgatcgacaatctgaaggtcgactatcttacgaaaatcgaagagctagaggagaaacttaacgacgccctgcatcaaaagcagctgctcacattgaggctggataatcagttagcctttcaacagaaggatgccagcaagtaccaggagcttatgaagcaggagatggagacaattctgctcagacagaagcagctggaggagactaaccttcagttacgggaaaaagcgggagacgtgcgcagaaacctccgagactttgagctgacagaagagcaatatatcaagctgaaggctttccctgaagatcaacttagcatccctgagtacgtttcagtacgattttacgagcttgtgaatccactgcgcaaggaaatctgtgaactgcaggttaagaagaacattttggcagaggagttgtcgacgaataagaatcaactgaaacagctgaccgagacgtacgaggaggacaggaaaaactattccgaagtgcaaatacgctgtcagcgacttgcattggagctagcagatacgaaacaattgatccagcaaggggactatcgtcaggaaaattatgacaaggtaaagtctgagagggatgctttagaacaggaggtgatcgagctgcgcaggaagcacgagatactggaggcgtcacatatgatccagacaaaagaaaggtccgaactgagtaaagaggtggttacgctggagcagactgtcaccttgctacaaaaggataaagagtacctaaatcggcagaacatggaactcagcgtccggtgcgcgcacgaggaagatagactcgagagattgcaagcccagctggaggagagcaagaaggctcgcgaggagatgtacgagaagtatgtggcttccagagatcattataaaactgagtatgagaataaactccacgatgagttggagcagatccggctgaaaacaaatcaggagatcgatcagttgcgcaacgcttcccgagaaatgtacgaaagggaaaatcgtaagaagcggaaaaagaaatag

SEQ ID NO: 200704 - DNA, 1734 bp, synthetic construct
  misc_feature 1..1734: note = Description of Artificial Sequence: Synthetic coding sequence
  source 1..1734: mol_type = other DNA
atgaccgagctggccggcgccagcagcagctgctgccaccggcccgctggccgcggcgccatgcagtcggtccttcatcattttcaacgcctcagagggcgtgagggtgggagtcacttcattaatactagttccccacgcggagaggccaagatgtcaataacctccgatgaggttaacttcttggtgtacagatatcttcaggaatctgggttctcccactccgcttttacattcggaattgaaagtcatatttctcagtcgaacatcaacggtacgctggtccctccagccgccttaatctctatccttcagaagggcttgcagtacgtggaagctgaaatctccatcaatgaggacggtacagtgttcgacggtagaccaatagaaagcttgtccctcatcgatgccgttatgccagacgtcgtccagactcgtcaacaagcattcagggaaaaactggcccaacaacaagcatctgccgcggcggcagctgccgctgcaaccgccgcggccaccgcagctaccacgacctctgcaggagtaagtcatcagaatccatcaaaaaatcgggaggccacagtcaatggcgaagaaaacagggcccacagcgtcaataatcacgccaaacccatggaaatcgatggtgaagtagaaattccatcaagtaaagccaccgtgctgagaggacatgagtccgaagtttttatctgcgcgtggaatcctgtctccgacctcctagcttcaggttccggggacagcaccgcccggatctggaacctgaatgagaactccaacggcggatcaacccagctagtcctacgccactgtatcagggagggagggcacgatgtgccgtccaataaggacgtcacaagtctcgattggaacactaatggcaccttgctggcaactggctcctacgatggatttgccaggatctggactgaggatggtaaccttgcgtctactctgggtcagcacaagggcccaattttcgcactgaaatggaacagaaagggcaactacatactgtctgccggcgttgataagacgaccatcatttgggatgcccacactggcgaggctaagcaacagtttcctttccacagcgcccccgcgttagacgtggattggcagaataacacaaccttcgcttcctgtagcaccgacatgtgcatccacgtttgccgcctagggtgcgataggcccgttaaaaccttccagggacatacaaatgaggtgaacgccatcaaatgggatccatccggcatgctgttagcctcttgctctgatgacatgacactgaagatttggagtatgaagcaggaggtgtgtattcacgacctccaagcacataataaggagatctatacaatcaaatggtctccgactggacccgccacgtccaacccaaattcaaacataatgctggcctccgcttctttcgattcaacagtcagactctgggatatcgagaggggcgtgtgtactcataccttgacgaaacatcaggagcccgtgtacagcgttgcgttcagcccggatggaaaatatctggccagtggaagcttcgataaatgcgttcatatctggaacacccagtccggcaatctcgtgcattcctatcggggaaccgggggaattttcgaggtgtgttggaacgcacgcggcgataaagtaggggcctcggcttccgacggaagcgtgtgcgtcctggatttacgaaaatag

SEQ ID NO: 200705 - DNA, 432 bp, synthetic construct
  misc_feature 1..432: note = Description of Artificial Sequence: Synthetic coding sequence
  source 1..432: mol_type = other DNA
atggccgccgaggacgtggtggccaccggcgccgaccccagcgacctggagtctggcggcctcctccatgaaatttttacaagtcccctgaacttacttttgttaggattgtgcatcttcttattgtataagatcgtcaggggagaccagccagctgccagcggtgattctgatgatgatgagccccccccgctcccccgcctcaaacgaagggattttactcctgctgagctgaggcgctttgatggcgtgcaggaccctcgtattctcatggccatcaacggtaaggtattcgatgtcactaaaggcagaaagttttacggacccgtgaagtaccatcacgtcggaaaacttctgaaggagggtgaagaacctaccgtctacagtgatgaggaggagccaaaggacgagagtgcccgtaagaatgactag

SEQ ID NO: 200706 - DNA, 672 bp, synthetic construct
  misc_feature 1..672: note = Description of Artificial Sequence: Synthetic coding sequence
  source 1..672: mol_type = other DNA
atggccgccggcgacggcgacgtgaagctgggcaccctgggcagcgggtctgagagctcaaatgacgggggctccgagtctcccggcgacgccggcgcagctgcagaggggggcggatgggcagctgccgcgttggccttgctgaccggtggaggagaaatgctgcttaacgtggccttggttgcgctggtgttgcttggggcttacaggttgtgggtccgctggggcaggaggggcttgggtgctggcgccggcgccggggaagagagccccgctacctccctgcctagaatgaaaaagcgcgatttttcacttgaacagctgcggcaatacgacggcagtaggaacccacggattctgctggcggttaacggaaaggtgtttgacgtaacgaaagggtccaaattctacggccccgcaggaccctacgggatctttgcaggtcgggatgcatcgcgtggtctggccaccttttgtctagataaggacgccctccgggatgaatatgacgatctgagcgatcttaacgccgtgcagatggagagcgtcagagaatgggagatgcaattcaaggagaagtacgactatgtcggccgactcttgaagccgggtgaggagcccagtgagtacacagatgaggaggacacaaaggatcacaataaacaggactag

SEQ ID NO: 200707 - DNA, 402 bp, synthetic construct
  misc_feature 1..402: note = Description of Artificial Sequence: Synthetic coding sequence
  source 1..402: mol_type = other DNA
atggccgccggcgacggcgacgtgaagctgggcaccctgggcagcggctctgagagcagcaacgacgggggatcggaatctccaggagacgctggtgccgcggctgagggagggggttgggcagccgcggcactcgccttgctaacagggggaggggaaatgctactgaatgtggccttggtggccttagtactccttggagcataccggctctgggtgaggtggggacgtagaggattgggagctggagccggggcaggccttcagctgggcgcagccgcccctgtgcgacgcctgcctcagcctgctcatcctgctcggggtcagtgggaatccctccggcgggaccaacggcagcaggttcttcggcccggcggctctatttggaacatttgttggtag

SEQ ID NO: 200708 - DNA, 744 bp, synthetic construct
  misc_feature 1..744: note = Description of Artificial Sequence: Synthetic coding sequence
  source 1..744: mol_type = other DNA
atgggcggcgccggccggggcgtgggcgagggccggggccggggcgggggcggcaggcgatggcgagctgttatggccgctggtgatggagatgtgaagctgggtacactcggttcaggcagcgagagctccaatgatggtgggtctgagtcgccaggggatgccggggcggccgccgaagggggcggctgggctgcagccgctctcgccttgttgaccggtggtggggagatgctgcttaatgtcgctttggtggctctggtcctgctcggggcttacaggctgtgggtgaggtggggaaggcgtgggcttggggccggcgccggtgctggcgaagagtcgccagctaccagtctgccacggatgaagaaacgcgatttctccctggagcagctgcggcagtacgatggctctaggaacccccgcatactgttggcagtaaacggcaaagtatttgacgtaacaaaaggctcaaaattctacggccccgctggaccctacggtatcttcgcaggacgagatgcctctagggggttagccacattttgcttagataaggatgcattgagagatgaatatgatgatctgtctgacctgaatgcagtccagatggagagtgtgcgggagtgggaaatgcagtttaaagaaaaatacgattacgtgggtcgcttgttgaagcccggagaagagcccagcgaatatacagacgaagaggacactaaggatcacaataaacaggattag

SEQ ID NO: 200709 - DNA, 1041 bp, synthetic construct
  misc_feature 1..1041: note = Description of Artificial Sequence: Synthetic coding sequence
  source 1..1041: mol_type = other DNA
atggccatggcccagaagctgagccacctgctgcccagcctgcggcaggtgattcaggagccacagctgagccttcaacctgaacccgtgttcacggtggatagggccgaggtgccccctttgttctggaagccctacatttacgcgggataccggccattacaccagacatggcgattttacttccggaccctctttcagcaacacaacgaagcagtcaacgtttggactcatttactggctgcgctggtgctactgctccgtctagccctgttcgtcgagaccgtcgacttctggggggatccacacgcattgccactattcataatagtgctcgcttctttcacctacctgagtttttctgcacttgcgcacctgcttcaggccaaatcagagttctggcactattctttcttcttcttagattacgtgggtgtagccgtgtatcaattcggatctgcccttgcccacttttattatgcgattgagccagcctggcatgcccaggtccaagctgtttttctcccaatggcagcattcctggcctggttatcatgtatcgggagttgctacaacaaatatattcagaaacctggactgcttgggcggacctgccaggaggtccctagcgtgctggcctacgctctggacatcagccctgttgtgcaccgcatcttcgtttcaagcgaccctaccacagacgatcccgcgctgctttaccacaagtgtcaggtggtgttttttctactggcagccgcctttttctcgaccttcatgcctgaacgctggttccccggctcctgtcacgttttcggtcaaggccatcaactctttcatatcttcctggtgttgtgtacactggcccaactggaggcagtggctttagactatgaagcccgacgaccgatttacgagcctctgcacactcactggcctcataattttagtggactgtttctcctgaccgttggctcctctattctcaccgctttcctcctcagccagctggtacagcgcaaattagatcaaaaaaccaaatag

SEQ ID NO: 200710 - DNA, 867 bp, synthetic construct
  misc_feature 1..867: note = Description of Artificial Sequence: Synthetic coding sequence
  source 1..867: mol_type = other DNA
atgcagatcccccaggccccctggcccgtggtgtgggccgtgctgcaactaggttggcgaccagggtggttcttggactctcccgacagaccttggaacccccccaccttctcccctgcactcctggttgtcacagagggagacaacgccacatttacctgtagtttcagcaacacttcagaatcgtttgttctgaattggtatcgtatgtcaccgtcaaatcagactgataaattggccgcattccctgaagataggagtcagcctgggcaagactgtcgctttcgtgtcacacagctcccaaacggtcgagacttccatatgagtgtggtcagggcccggcgtaatgacagtggaacatacttatgtggcgctattagccttgccccaaaggcacagattaaggagtccctccgggcagagctgcgagtgactgaacgcagggccgaggtcccgactgcccatccctcccccagtcctagacccgctggccaattccagacactggtagttggcgtagtgggagggctccttggcagcttggtattgctggtgtgggtgttagccgtaatatgtagtagggccgcccgaggcactatcggggcccgacgcacagggcagccactcaaggaagatccgtcggcagtccccgtgttcagcgtggactatggagagttagatttccagtggcgggagaagactcccgaaccgcccgtgccatgtgtgcccgaacagaccgaatacgctacgatcgtatttccctccggcatgggaacttcaagtccagcacgccgcgggagcgccgatgggccgaggagcgcgcagcctctccggcctgaggatggtcattgctcttggcctctctag

SEQ ID NO: 200711 - DNA, 540 bp, synthetic construct
  misc_feature 1..540: note = Description of Artificial Sequence: Synthetic coding sequence
  source 1..540: mol_type = other DNA
atgcagatcccccaggccccctggcccgtggtgtgggccgtgctgcaattaggctggcggccaggatggtttctggactcacccgaccgcccttggaaccctccgactttctctccagccctgctcgtggttaccgaaggcgacaatgctacgttcacttgtagcttcagcaacacctcggagtcttttgtgctgaattggtaccgcatgtcgcctagcaatcagactgacaagctcgctgccttcccagaagacagatcccagcctgggcaagattgcagattccgcgtgactcagctgccaaatgggagggattttcacatgagcgtggtgagagcaagacggaacgactctgggacttatttatgcggggcaattagtctggctcccaaagcacaaattaaggagtcccttcgcgccgagcttagggtaacaggaaccattggggcacgcaggaccggtcagccattaaaagaggatccaagcgccgtaccagtgtttagtgttgactacggcgagttggacttccagtggcgctag

SEQ ID NO: 200712 - DNA, 639 bp, synthetic construct
  misc_feature 1..639: note = Description of Artificial Sequence: Synthetic coding sequence
  source 1..639: mol_type = other DNA
atgcggatgaccatggaggagatgaagaacgaggccgagaccacctctatggtttcaatgcctctgtatgccgtgatgtacccggtgtttaacgagctcgagagagtgaacctgtctgctgctcagaccctccgagctgccttcatcaaggccgaaaaagagaaccctggactcactcaggatatcatcatgaaaatcctcgaaaagaaaagcgttgaggtaaactttactgaaagcttgcttaggatggccgctgatgatgtcgaagagtatatgatcgaaagacccgaacctgagtttcaagacttgaacgagaaggcccgagccttaaagcaaatactgtcaaaaatacccgatgagatcaacgaccgcgtccggttcctccagaccattaaagacatcgcgtctgccataaaggagttactggacaccgtgaacaacgtcttcaagaaatatcagtaccagaaccgacgggcacttgagcaccagaagaaagagtttgtcaagtacagtaagtcattttcagacacattaaaaacctacttcaaagacggtaaggctatcaacgtctttgtttctgcgaaccggttgattcaccagaccaatctcatactccagactttcaaaacggtggcttag

SEQ ID NO: 200713 - DNA, 639 bp, synthetic construct
  misc_feature 1..639: note = Description of Artificial Sequence: Synthetic coding sequence
  source 1..639: mol_type = other DNA
atgcggatgaccatggaggagatgaagaacgaggccgagaccacctccatggtgtccatgcccctgtatgcggtcatgtatcccgtttttaacgaactggagcgggtgaatctctccgcagcccagaccctcagagctgcttttattaaggcagaaaaagaaaatccagggttgacccaggatatcattatgaaaatcctcgaaaagaagtctgtggaagtcaacttcacggagagccttctgagaatggctgcagacgatgtggaggagtacatgatagagcggcctgagcctgagtttcaagacctgaatgaaaaagctagggcactgaaacagattctcagcaaaattcctgatgagattaacgacagggtgcgattcctgcagaccattaaggacattgctagcgcaatcaaggagcttctggatacagtgaataacgtcttcaagaagtaccagtaccaaaaccgcagagctctggaacatcagaagaaggaattcgtcaagtactccaagagcttctcagatacattgaagacatactttaaggacggaaaggcaataaacgtctttgtgagcgccaaccgcctgatccatcaaacaaatctaatactgcagacattcaagactgtcgcttag

SEQ ID NO: 200714 - DNA, 441 bp, synthetic construct
  misc_feature 1..441: note = Description of Artificial Sequence: Synthetic coding sequence
  source 1..441: mol_type = other DNA
atgcggatgaccatggaggagatgaagaacgaggccgagaccacctctatggtctcaatgccactgtatgccgtcatgtatcctgtctttaatgagctagagcgggtgaacctctcagctgcccagaccctgagggccgctttcatcaaggctgaaaaagagaaccctgggctgacccaggacattatcatgaaaatcctagagaagaagtccgtggaagtcaattttactgagtctctcttacggatggcagcggacgacgtcgaggagtacatgatcgagcgacctgagccagagtttcaagacttgaatgagaaggctagggccttgaaacagattcttagtaagattccagatgagatcaacgaccgggtccggttcttgcaaaccatcaaagatattgcttcggccataaaagagctgctggacactgtgaactag

SEQ ID NO: 200715 - DNA, 240 bp, synthetic construct
  misc_feature 1..240: note = Description of Artificial Sequence: Synthetic coding sequence
  source 1..240: mol_type = other DNA
atgcggatgaccatggaggagatgaagaacgaggccgagaccacctcaatggtgtcaatgcccctctatgccgttatgtatccagtctttaacgagttggaacgagtgaatctgtccgctgctcagacacttagggccgctttcattaaggcagagaaggagaatccaggccttactcaagacattatcatgaaaattctggagaagaaatcagtggaagttaactttactgagagctag

SEQ ID NO: 200716 - DNA, 639 bp, synthetic construct
  misc_feature 1..639: note = Description of Artificial Sequence: Synthetic coding sequence
  source 1..639: mol_type = other DNA
atgcggatgaccatggaggagatgaagaacgaggccgagaccaccagcatggtgagcatgccgctctatgccgttatgtaccctgtattcaacgagcttgaacgggtgaacctaagcgcagctcagacactgagagcggcatttatcaaagccgagaaagaaaaccccggattgacacaggacatcatcatgaaaatcctcgagaaaaaatccgtggaagtgaattttaccgaatctctgttgcggatggccgccgatgacgtggaggagtacatgatcgagcggccagaacccgagttccaggatctgaacgagaaggcaagagcactaaagcaaatactgagtaaaattccagacgagatcaatgacagggtgcggttccttcagaccattaaggatattgccagcgccatcaaggagctgctggatacggtgaataatgtttttaagaagtatcagtaccagaatagaagagcgctggaacatcagaaaaaggaatttgttaagtatagtaagtctttctccgacacactaaagacttactttaaggacggtaaagcaatcaacgtctttgtgagcgcaaaccgcttaatacaccagaccaaccttatcctccagacctttaaaacagtggcttag

SEQ ID NO: 200717 - DNA, 639 bp, synthetic construct
  misc_feature 1..639: note = Description of Artificial Sequence: Synthetic coding sequence
  source 1..639: mol_type = other DNA
atgcggatgaccatggaggagatgaagaacgaggccgagaccaccagcatggttagcatgccactgtacgctgtcatgtatccggtctttaatgaattggaacgggttaacttatcagcggcacaaactttaagggccgccttcataaaggcagaaaaagagaatcctggcctgacccaggacatcattatgaaaatactggaaaagaaatctgtcgaagttaattttaccgaaagtctgctacgtatggctgcagacgacgttgaggagtacatgatcgagaggcccgagcccgaatttcaggaccttaacgagaaagctcgagctcttaagcagattctttcaaaaatacccgatgaaataaacgaccgcgtccgttttctccaaactatcaaagacatagcaagtgcaatcaaagagctgttagacaccgtcaataacgttttcaaaaagtatcaataccaaaacagacgcgctctggagcaccagaaaaaggagtttgtcaagtacagcaagtcattttccgacactctaaagacctattttaaggacggaaaggcgatcaatgtgtttgtcagcgctaatagactcatccaccagactaacctgatcctccaaactttcaaaacagtcgcttag

SEQ ID NO: 200718 - DNA, 609 bp, synthetic construct
  misc_feature 1..609: note = Description of Artificial Sequence: Synthetic coding sequence
  source 1..609: mol_type = other DNA
atgcggatgaccatggaggagatgaagaacgaggccgagaccacctcaatggtgagcatgccattatacgccgttatgtacccggtcttcaatgaactggaacgggtgaatctctctgctgcgcagactctccgcgctgcttttattaaggctgagaaggagaacccaggccttacacaggacattatcatgaaaatcctggagaaaaagagcgttgaagtaaactttaccgaatccctgttgcgtatggccgccgacgatgtggaggaatatatgatcgagcggccagagccggaatttcaggatttaaatgagaaggcgagagcgttgaaacagatcctctctaaaatccccgatgaaatcaacgatcgagtgagatttctgcaaacgattaaagatatcgcttcagcaatcaaggagcttctagacaccgtgaacaacgtgtttaaaaagtaccagtatcagaacagaagggctctcgagcatcagaagaaggagtttgtgaagtactctaagtcattcagcgacacactgaagacatattttaaggacggcaaagctatcaatgtgttcgtttcagccaatagattaatccaccagaccaactag

SEQ ID NO: 200719 - DNA, 561 bp, synthetic construct
  misc_feature 1..561: note = Description of Artificial Sequence: Synthetic coding sequence
  source 1..561: mol_type = other DNA
atgcggatgaccatggaggagatgaagaacgaggccgagaccacctccatggtgtcaatgcctctctatgcagtgatgtacccagtatttaacgagctggagcgagtgaacctttctgcagcacaaactctgagagcggcctttatcaaggctgaaaaggagaatcctggtttaacccaagatatcatcatgaagatactggaaaaaaagagcgtggaggtcaactttaccgagtccctgctgcgtatggccgccgatgacgttgaagaatacatgattgagcgtccagagcctgaattccaagacctgaacgagaaggctagggctctgaagcaaatcctgtccaagattcctgatgagattaacgatagggttagattcctccagacaatcaaggatattgcatccgctattaaagagttgctcgataccgtgaacaatgtgttcaagaaataccagtaccagaatagacgagccctggaacaccagaagaaagaatttgtgaaatacagtaagagcttcagtgacacgctcaaaacatactttaaagatggcaagtag

SEQ ID NO: 200720 - DNA, 405 bp, synthetic construct
  misc_feature 1..405: note = Description of Artificial Sequence: Synthetic coding sequence
  source 1..405: mol_type = other DNA
atgcggatgaccatggaggagatgaagaacgaggccgagaccaccagcatggtgagcatgcctctgtatgccgttatgtatccagtgttcaatgagctggagcgggttaatctgagtgccgcacagacactccgcgccgctttcattaaggctgagaaagagaacccaggtctgactcaggacatcatcatgaaaatccttgagaagaaatccgtagaggtgaatttcaccgaaagcctccttaggatggctgctgacgacgtggaagaatacatgatcgaacgacctgaacccgagttccaggatctcaacgaaaaggcaagggcactgaagcagatactctcaaaaatcccagacgagattaacgacagagtccggtttctgcagaccatcaaggatatctag

SEQ ID NO: 200721 - DNA, 639 bp, synthetic construct
  misc_feature 1..639: note = Description of Artificial Sequence: Synthetic coding sequence
  source 1..639: mol_type = other DNA
atgcggatgaccatggaggagatgaagaacgaggccgagaccacctcgatggtgagcatgccgctatatgctgttatgtatccagtctttaacgaactagaaagagtaaacctcagcgccgcacagaccttaagagcggcttttattaaggctgaaaaggagaaccctggcttgacacaggacatcatcatgaagattctggagaagaaatcggtagaagtcaactttaccgaatctctgctgcgcatggctgccgacgacgtcgaggaatacatgatcgagagacctgaacctgagttccaagatctcaacgagaaggccagggctttaaagcagatcctgtcaaaaatccctgacgagatcaatgatcgagtcagatttttacaaacgatcaaagatattgcgagcgccattaaggaactactcgatacagtgaacaacgtgttcaaaaagtatcagtatcaaaataggcgcgcgctggagcaccagaaaaaagagtttgtgaagtattcgaaatcttttagtgacactctaaaaacttacttcaaggacgggaaggctatcaacgtctttgtaagtgctaacagactcatacatcaaacgaatctgattctgcagacctttaaaaccgtggcttag

SEQ ID NO: 200722 - DNA, 5616 bp, synthetic construct
  misc_feature 1..5616: note = Description of Artificial Sequence: Synthetic coding sequence
  source 1..5616: mol_type = other DNA
atggccaacctggaggagagcttcccccggggcggcacccggaagattcacaagcccgaaaaggccttccagcagtctgtcgaacaggacaacctgttcgacattagcacggaggagggctctaccaaacgcaaaaaaagtcagaagggccccgctaagacaaagaaactaaagatcgaaaaacgagagagctctaaaagtgcccgcgagaaattcgaaattttgtcagtcgagtctttatgcgagggtatgagaattttaggctgtgtaaaggaggtcaacgagcttgaattggtcataagcctgcccaacggcctgcagggatttgtacaagtaacagagatctgtgatgcctatactaaaaagctcaatgagcaggtcacacaggagcaaccactgaaagacctgctacaccttccagagctgttttccccgggcatgctagtccgttgcgtggtctcttccttgggaatcaccgacaggggcaaaaaatcggtgaaactgtccctaaatccaaagaatgtgaatagggttttgtccgctgaggcgctcaaacctgggatgctgttgactggcacggtcagcagcctggaagaccacggctatctggtggacataggggttgatggcactcgagcctttctgcccctgctgaaagcccaggaatacattcggcaaaagaacaaaggcgctaaactcaaggtgggacagtatttaaactgtattgtggagaaggtgaagggcaatgggggcgtcgttagcctctcagtgggccatagtgaagtgtctaccgcgattgctaccgagcagcagtcctggaacttgaataacttattacctggactggtggtcaaagcccaggtccagaaagttactcccttcggcctgacgctgaacttcttgaccttcttcactggggtggtggatttcatgcacttggatcccaagaaggctggaacatacttttccaatcaggctgtacgagcatgcattctttgtgtgcacccaagaactcgggtcgtgcatctgtccttacgtcccatcttcttgcagcctggtcgaccactgaccagactgtcctgccaaaacctgggcgctgtattagatgacgtgccggtgcaaggattcttcaaaaaggctggcgcaaccttccggttaaaggacggggtcctggcctatgcccgactttcccacctgagcgatagtaaaaatgtgttcaaccccgaagcctttaaacccggaaatacacataagtgtcggattattgattacagtcaaatggacgagttggctctgctgtcactgcgaacttctattatcgaggcccaataccttcgttaccatgacattgagccaggggccgtagttaaagggacagtgctgactataaagtcctacggcatgctcgttaaggtgggggaacagatgagagggttggtccccccaatgcacctggctgatatactgatgaagaaccctgagaagaaatatcatatcggcgatgaagtgaaatgccgtgtgttgttgtgcgatcccgaggctaagaagctgatgatgaccctaaaaaaaactctcatagagtccaagttacctgtgattacatgttatgccgacgcaaagccaggactgcaaactcacggattcattatccgtgtaaaagattacggttgtattgttaagttttacaataatgtgcaagggctggttcctaaacacgagctgtcaaccgagtacattcccgacccagaaagagtgttctatactggacaggtggtcaaggtggtggtacttaattgcgagccttctaaggagagaatgctgttatcgttcaaattatcctcagaccccgagcctaaaaaggagcccgcaggacattcccaaaaaaagggtaaggctatcaacattgggcagctggtagacgtaaaggtcctggagaaaacaaaagatgggctggaggtagcagttctgccccataatatcagggcatttctcccaacaagccacctgagcgaccacgtggctaacggccctctcctgcatcactggctgcaagccggcgacatcctccatcgggtcttgtgtctgtctcagtccgagggcagggtgctgctctgtcggaagcccgccctcgtatccaccgtagaaggtggccaggatcccaagaactttagcgaaatccacccaggaatgctcctgattggcttcgtcaagtcaatcaaggattacggggtgtttatacagttcccctcaggcttgagcggcttagctcccaaggccatcatgtccgataaatttgtgacctctacaagcgaccacttcgtggaaggccagaccgtggctgcaaaggttacgaatgtggacgaagaaaagcagaggatgttgttgagcctgaggttgagtgactgcggccttggggacctggccataacatcacttttactgctgaaccagtgtcttgaagagctgcagggtgtgagaagtctcatgtcaaatagagattcagtgctaattcagactctggccgaaatgactccgggcatgtttctggacctggtagttcaagaggtcctggaagatggctctgtagtgttcagcggtggtccagtgcccgacttggtactgaaggcgtctcgctaccatagagccggccaggaagtggaatccggccaaaaaaaaaaagtcgtgatcctgaacgtggatcttctgaagctcgaggtgcatgtatctcttcaccaggacctggtcaacaggaaggcccgcaaactgagaaaaggatccgaacaccaggctatcgtccagcacttagagaagtcctttgctatcgcctcccttgtggagacggggcatcttgctgccttttctctgacctcccatctgaacgataccttcagattcgacagtgagaagttacaggtggggcagggagttagtcttacgctgaagacaacagaacctggcgttacaggcttgctccttgcggtcgaagggccagctgccaaacggaccatgagacctactcaaaaggacagcgagacagtagatgaggatgaggaggtcgatcctgcgctgacggtgggcaccattaaaaagcatacattatctataggagatatggtgaccgggactgttaaatctatcaaacccactcatgttgttgtaactctcgaagacggcataataggctgcattcatgcctcccatatcctagatgacgtccctgagggcaccagccccacaaccaaactcaaggtcggaaaaaccgttacggctcgggttattggggggcgcgatatgaaaacctttaaatatctgccaatatcccaccctaggttcgtacggaccatccctgaactcagtgtccgtccgagcgagctggaagacgggcacacggcactcaatacacacagcgtgtctcctatggagaagataaagcagtaccaggctggccagacagtgacctgctttctgaagaagtacaatgtggttaaaaagtggctggaagtggagatcgctcccgatatccggggcagaatccccctcttattgacttcacttagcttcaaggttctgaagcatccagacaaaaagtttcgggtagggcaggctttacgcgccactgtggtgggtcccgattccagcaagactttactctgtctctcattaaccggtccccacaagttggaagagggcgaagtggctatgggccgggttgttaaggtgaccccaaatgaaggcttgaccgtgtcttttccttttggcaagattgggaccgtcagcatctttcacatgtctgacagctactcggagactcctcttgaggatttcgtgccacagaaggtggtacggtgctacattctgtcaactgctgataatgtgctgacattatccctcaggagtagcaggaccaaccctgagacgaaaagcaaggtggaagaccctgagattaactctatacaagatataaaggagggtcaactcttgaggggctacgtgggctctatccaaccacatggcgttttctttcgcctgggcccctccgtagtaggtctggcaaggtactctcacgtgagtcaacattcaccaagcaagaaggcactgtacaacaaacatctccctgaaggaaagctccttacagcccgcgtgctgcgcctgaaccatcagaagaacctggtggagttgtccttcttgccgggggacaccggtaagcctgacgtgttgtctgctagcctcgagggacagctgactaaacaggaggagaggaaaaccgaggctgaggagcgtgatcagaagggagaaaagaagaatcagaagcgaaacgagaagaaaaaccagaagggacaagaggaggtggaaatgccatcaaaagaaaagcaacagccccagaaaccccaggcacagaaacgcggcggacgagagtgccgagagtctgggagtgagcaggagcgtgtgtctaagaaacccaagaaggccggcctgtccgaggaagacgattccctcgtcgacgtctactatagggaaggcaaagaggaggctgaggaaaccaacgttttgccaaaagaaaagcagaccaagccagcagaagccccgcgtcttcagctttcctccggctttgcctggaatgtgggacttgactcattaacccccgccttgccaccactggccgaaagttccgactcagaagaagacgaaaaaccccaccaggcaactataaagaagtcaaagaaggagcgggaactggagaaacagaaagccgaaaaggagctttcgagaatcgaagaggcactcatggatccaggccgccagcctgagagcgccgacgacttcgacagactggtcttatcctcccccaatagctctattttgtggctgcagtatatggccttccacctgcaggcgaccgagatcgagaaagcccgtgctgttgcagagagggctcttaaaacaatttctttccgggaggagcaggagaaactgaacgtgtgggtagcactgctgaaccttgagaatatgtatggctcccaggagtccctgactaaggtgttcgaaagagcggtgcagtacaatgaaccactcaaagtcttcctccacctggccgatatctatgctaagagtgaaaagttccaggaggccggcgagctgtacaatagaatgttgaaacggtttcgacaggaaaaggcagtctggattaaatacggggcgtttctgcttcgcaggagtcaggccgctgcatcgcacagagtgctgcagcgggctctggaatgcctgcctagtaaggaacacgtggacgtgattgccaaatttgcacaactggaatttcagttgggggatgccgagcgggcgaaagccattttcgaaaatactctgagcacatatccaaagcgcacggacgtttggagtgtctatattgacatgactatcaagcatggatctcagaaggacgtcagggacatatttgagcgagtgatacatttgagcttagcccccaagagaatgaagtttttctttaagagatacttagactatgagaagcagcacggaacagagaaggatgtccaggccgtaaaagccaaggctttggaatacgtagaagctaagagctcagtcctcgaggattag

SEQ ID NO: 200723 - DNA, 3705 bp, synthetic construct
  misc_feature 1..3705: note = Description of Artificial Sequence: Synthetic coding sequence
  source 1..3705: mol_type = other DNA
atggccaacctggaggagagcttcccccggggcggcacccggaagatccacaagccagaaaaggccttccagcaaagcgtagagcaggataatcttttcgacatctctacggaggagggctcaaccaaaagaaagaagtcccagaagggccctgctaagacaaaaaagctcaaaatcgagaagcgagagtcatctaaatcagcacgagagaagttcgaaattctgtccgttgagtctctgtgcgaaggaatgaggatcctgggctgcgttaaggaagtgaacgagctggagttagttattagcctgccgaacggcctgcaggggtttgtgcaggtgacagaaatttgtgatgcttataccaaaaaactcaatgaacaggttacccaggaacagcccctgaaggatttgctgcacctgcctgagttattcagccccgggatgctcgtaaggtgcgtggtctccagccttggcattacggataggggcaaaaagtcagttaagctgtccttaaaccctaagaatgttaatcgagtcctgagtgcggaagccctgaaaccggggatgttgttgactggcactgtgagcagcttagaagatcatggatatctggtggacatcggcgtggatgggactagagcattcctgccattgctcaaggcccaagagtacatcaggcagaagaacaaaggcgccaaactcaaagttgggcagtacttgaattgcattgtggagaaggttaaaggaaatggaggagtggtctctctaagtgttggtcacagcgaggtttccacggcaatcgctaccgaacaacagagctggaacctcaacaatttgctgccagggttggtggtaaaagcgcaagtgcagaaggtgacaccgtttgggctgactctgaacttcttgacctttttcaccggcgtggtcgacttcatgcatctagaccccaaaaaagccggtacttatttcagtaaccaggccgtgcgggcctgcatcctctgcgtgcaccccagaactcgggttgttcatctctccctgcggcccatcttcctgcagccaggacgtcccctgactcggctgtcatgtcaaaacctgggagctgtgctggatgacgtgccggtgcagggatttttcaagaaagcaggtgccacattccgcctaaaggatggagttcttgcctatgctcggctgtcccacctgagtgactctaaaaacgtgtttaacccagaggctttcaaaccaggcaacacccacaagtgccggatcattgactactctcagatggatgagcttgcccttctctccctgcgcacctccataatcgaggcccaatacctgaggtatcatgacatcgagcccggggctgtcgtgaagggtacagtgcttactattaagtcctatggtatgttagttaaggtgggtgaacaaatgcgaggtctggttccgccaatgcatctggctgatattttgatgaaaaatcctgagaaaaagtaccatatcggagatgaggtgaaatgcagagtgcttctttgtgatcccgaagccaaaaaactaatgatgacactgaagaaaacactgatcgaatctaagttaccagttattacatgctatgccgacgcgaaaccaggtctccaaactcatggcttcatcatccgagttaaagattacgggtgtatagtgaaattttacaacaatgtgcaggggctcgttcccaagcatgaactctctactgagtatattcccgacccagagagggtgttttacacaggtcaagtggtgaaggtggtcgttctgaactgcgaaccctctaaggaacgcatgcttcttagtttcaagttgagttccgatcccgagcctaagaaagagccagccgggcatagccaaaaaaagggtaaagccatcaatattgggcagcttgtggatgtgaaggtactggagaagactaaggatggcctggaagttgcagtgttgcctcacaatattagggcctttcttcctacatcgcacttgtcagaccacgtggcaaatggaccgctcctgcatcactggcttcaggcaggcgacattcttcatcgtgtgctctgcctaagccagagcgaggggcgcgttcttctgtgtaggaagcctgctctggtttccactgtcgaagggggtcaggatccaaaaaacttcagcgagatccatcctgggatgctcctgatcggcttcgtaaagagtataaaagactacggtgttttcattcagtttcccagcggattaagcggactcgctccgaaggcgattatgtcggacaaatttgttaccagtactagcgatcatttcgtggagggacagacggtagccgcaaaggtaaccaacgtagatgaggaaaaacagagaatgctgctttcacttcggctctcggattgcggcctgggggatttggctattacttctctgctattgctcaaccaatgtcttgaggagctgcagggagtccgctcactaatgtccaatagagactcagttttgattcagacattagccgagatgacgcccggcatgttcctcgatctagtcgttcaggaggtgctggaggacggaagcgtggtgttttccggaggccctgtgcctgacttggtactcaaagcatctcgatatcaccgggccggccaagaagtagagtccggccagaagaaaaaagttgttattttaaacgttgacttgctgaaactggaggtgcatgtctccctacaccaagacttagtgaaccgcaaggctagaaaacttaggaagggaagtgagcatcaggctatagtccagcaccttgagaaatcgtttgcaattgcgtcactggtggaaaccggacaccttgcggcattcagcctgacctcccacttgaatgatacctttcggttcgatagcgagaaattgcaggtcgggcagggcgttagtcttactttgaaaacaactgaacccggtgttaccgggctgctcctagcagtagagggaccagccgcaaagagaacaatgcggccgacgcaaaaggattctgagacagtagatgaggacgaggaagtggacccagcactcacagttggcacgataaagaaacataccctatctatcggggatatggtgacaggaacagtgaaatcaatcaagcccacccacgttgtagtaaccctagaggacggcattatcggctgcattcacgctagccacattttggacgacgtccctgagggcacctcaccaactacaaagcttaaggtcggcaaaaccgtgacagccagggtgatagggggaagagacatgaaaacatttaaatacctgccaataagccatccacgatttgtgaggacaatcccagaactatctgtaagacccagcgagctcgaagacggacatactgccctcaacacccactccgtatctcccatggagaagatcaagcaataccaagccggtctttcggaagaggatgacagcctcgtggacgtttattatagggaggggaaggaagaagccgaagaaactaatgtacttccaaaggaaaagcagactaaacctgctgaggcgccgcgtcttcagctgtcctctggctttgcatggaacgtgggcctcgactccctaactcccgctctgccacccctggccgagagttccgactccgaggaggacgagaaacctcatcaagccactcagatcaaaaagagtaagaagtag

SEQ ID NO: 200724 - DNA, 936 bp, synthetic construct
  misc_feature 1..936: note = Description of Artificial Sequence: Synthetic coding sequence
  source 1..936: mol_type = other DNA
atggccgccgccggcgcccggcccgtggagctgggcttcgccgagagcgcccctgcctggcgcctgcgatccgaacagtttccgagtaaggtctacgcacctctgcctgggcggcctgatgcatttcacagatgtatctttctcttctgctgtagggaacagccttgttgtgctgggttgcgagttttccgcaatcagcttcctaggaaaaacgacttttatagctacgaaccccctagtgaaaaccccccccctgagactggagaatcggtttgcctgcaactgaagtctggtgctcacctgtgccgcgtctgtggctgcctcggccccaagacgtgcagccgatgtcacaaggcttactactgtagcaaggagcaccagactctcgactggcgactaggacacaaacaggcttgcgctcagccggatcatctggaccacatcatccccgaccacaatttcctgttccctgaattcgaaatagttatcgaaactgaggacgagatcatgcctgaagttgtcgaaaaagaagactattctgagattatcggctctatgggcgaggccttggaggaggaactagattccatggctaaacatgagtcaagggaagacaagatattccagaagttcaagactcaaatcgcattagaacccgagcagattctcagatacggacgcggaatcgcacccatttggataagcggcgaaaatattccccaggagaaggatataccagactgcccgtgcggcgctaagaggatcctggagtttcaagtgatgccacagctgctgaactatctgaaggctgatcgcctgggcaagagtatcgactggggaatcctggcagtgttcacctgtgcagaatcttgcagcctgggcactggttatacagaagaatttgtctggaagcaggacgttactgacaccccctag

SEQ ID NO: 200725 - DNA, 687 bp, synthetic construct
  misc_feature 1..687: note = Description of Artificial Sequence: Synthetic coding sequence
  source 1..687: mol_type = other DNA
atggccgccgccggcgcccggcccgtggagctgggcttcgccgagtccgctcccgcttggaggctgagaagcgagcagtttcccagtaaggtggggggtcgacctgcatggcttggtgccgcagggctgcctggaccacaagcattagcatgcgaactgtgcggacgccccctctctttcctgttgcaggtgtacgcaccacttccgggcaggccggatgccttccatcggtgtattttcctattctgttgcagggagcaaccttgctgtgctggcctgcgagtattccgcaatcagctgccgagaaaaaatgacttttactcctacgagccaccaagcgaaaatccccctccagagaccggggaatcagtctgcttacaacttaaaagtggcgcccacctgtgtagggtctgtgggtgcctgggacctaaaacgtgttctaggtgtcacaaggcctactattgctctaaagaacatcaaacgcttgattggcgacttggccataaacaggcatgcgcgcagcctgaccacctcgaccacatcattccagaccacaacttcctcttccccgaattcgaaattgtaatcgaaaccgaggacgaaataatgcctgaagtggtcgagaaggaggactattccgagatcatcggttccatgggtaagcagttccaagacttcatccactag

SEQ ID NO: 200726 - DNA, 1035 bp, synthetic construct
  misc_feature 1..1035: note = Description of Artificial Sequence: Synthetic coding sequence
  source 1..1035: mol_type = other DNA
atggccgccgccggcgcccggcccgtggagctgggcttcgccgagagtgcaccagcctggagactgcgcagcgagcaattcccttccaaggtgggaggacggcccgcatggctcggagcagccggactgcccggacctcaggctttggcctgtgaactgtgcggtagaccactgtcattcttactccaggtttacgcccctctccccggccgacccgacgctttccatcgttgcatcttcctcttttgttgcagagagcaaccgtgctgtgctggcttgagagtatttcgcaaccagttacctcgaaagaacgatttttatagctacgagccaccgtccgagaaccctcccccagaaactggtgaaagtgtgtgtttgcaactgaagtccggagcccacctctgcagagtgtgtggatgtctgggccctaaaacctgctccaggtgccataaggcctattactgcagtaaggagcaccagactttagactggaggcttggccacaagcaggcatgtgcacagcccgatcatcttgatcatatcattccagaccacaattttctatttccggagttcgaaattgtcatcgaaacagaagatgaaatcatgcctgaggttgtagaaaaagaagattacagcgaaattatcggtagtatgggagaggctttagaagaagagcttgacagcatggcgaaacacgagagccgcgaggataagatcttccaaaagtttaagacccaaatcgcactggagccagaacaaatacttcgatacggccgggggatcgcccccatctggattagcggagagaacattcctcaggagaaggacattccagattgtccctgcggggccaagaggattcttgagtttcaagtcatgccccaactcctgaactacctcaaggcggacagattgggtaagagcatcgattggggcatcctggctgtgttcacatgcgctgaaagctgcagtctgggtaccgggtacaccgaggaattcgtatggaagcaggatgtaaccgacacaccatag

SEQ ID NO: 200727 - DNA, 588 bp, synthetic construct
  misc_feature 1..588: note = Description of Artificial Sequence: Synthetic coding sequence
  source 1..588: mol_type = other DNA
atggccgccgccggcgcccggcccgtggagctgggcttcgccgagtccgcgccagcttggcgactccggtcagaacagtttcccagcaaagtctacgcccctttgcctggacgtcctgatgctttccaccgctgtatcttcctgttctgttgtcgggagcagccttgctgcgctgggcttcgggtgtttagaaaccaactgcctcgcaaaaacgacttctactcttacgagccaccttcggagaaccccccgcccgaaacaggcgagtccgtgtgcttacaactaaagtccggcgcccatctttgtcgtgtgtgcgggtgcctcgggcctaagacttgttcccggtgtcacaaagcttattactgcagcaaggaacaccagacacttgattggagactcgggcataaacaagcctgtgcccagcctgaccacctggaccacataatccccgaccacaatttcttgtttcccgagttcgagattgtgatagagactgaggacgagatcatgccggaagtagtggagaaggaggattactccgaaataatcgggagtatgggaaaacagtttcaggactttatccactag

SEQ ID NO: 200728 - DNA, 567 bp, synthetic construct
  misc_feature 1..567: note = Description of Artificial Sequence: Synthetic coding sequence
  source 1..567: mol_type = other DNA
atggccgccgccggcgcccggcccgtggagctgggcttcgccgagtctgctccggcatggaggctgaggtccgaacaatttccgagtaaggtgtatgccccactcccagggaggcccgacgccttccataggtgcatattcctcttttgctgccgagagcagccatgttgtgccggcctgcgcgtgttcaggaaccaactgcctcgcaaaaatgacttctacagctacgagcctcccagtgagaacccgcctcccgagacaggcgagagcgtgtgcctgcagctgaaatctggggcccatctctgcagagtgtgtggatgtttgggacctaaaacatgttcgcgctgtcataaggcttactattgcagcaaggagcaccagacacttgactggaggctgggacacaaacaggcctgcgctcagccagatcaccttgaccacatcattcctgatcacaactttctgttccccgagtttgaaatcgtaatcgagacagaggacgagatcatgcctgaagtggtcgagaaggaggattatagtgaaattattggaagcatgggcatctag

SEQ ID NO: 200729 - DNA, 2607 bp, synthetic construct
  misc_feature 1..2607: note = Description of Artificial Sequence: Synthetic coding sequence
  source 1..2607: mol_type = other DNA
atggccaccttcatcagcgtgcagctgaagaagaccagcgaggtggatctcgctaaaccactggtcaagttcattcagcaaacctatccaagtgggggcgaggaacaagcgcagtattgtcgcgccgctgaggaactgtccaagctcaggcgggctgccgtggggcgacccctggataagcacgagggagccctggagacactgctgaggtattacgaccagatctgctctattgagcctaaattccctttcagtgaaaatcaaatctgcctgactttcacctggaaagacgcattcgacaagggaagcctatttggcggaagcgtaaagttggccctggctagtcttggatacgaaaaaagttgtgtcctctttaattgcgctgcactcgcctcacagatcgcagctgagcagaatctggataacgatgagggattaaaaattgctgccaaacactatcagttcgcctctggtgctttcctgcacattaaggagaccgtgttgtccgccctgagccgggagcccaccgtggacattagcccggatactgttgggaccctgtctctcattatgctggctcaggcccaggaagtcttcttcctcaaagccacaagggacaaaatgaaggatgcgatcatcgccaagttagccaatcaggcagccgattacttcggcgacgcgttcaaacagtgtcagtataaggacaccctccccaaggaagttttcccagttcttgccgcgaagcactgtatcatgcaagctaatgccgagtaccaccagtccatactggcaaaacagcaaaaaaagttcggtgaagagatcgctagactgcaacatgccgctgagcttatcaagaccgttgcatctcgatacgatgagtacgttaacgtgaaagacttcagcgataagatcaatagggccttggccgcggccaagaaagacaatgattttatctatcacgatagagtgcctgacctgaaggatctggaccccattggcaaagcaacactggtgaagagtacgcccgtcaacgtaccaatttcccaaaagttcacagatttgtttgaaaagatggtgcctgtaagcgtacagcagtcactggcagcctataaccaaagaaaggcagacctagtcaatcgctcaattgcacaaatgcgcgaagcaacaaccctagctaatggcgtactggcatcactaaaccttccagcggccatcgaagatgtcagcggcgatacagttcctcaatccattctgaccaagtctcgctcggtcatagaacagggcgggatccagacagttgatcagctgatcaaagagctccctgaactgttgcagagaaaccgagagatcctcgatgagtcgctccgactgctcgacgaggaggaagccaccgataacgatctgcgcgccaagtttaaggagcgctggcagcgaactccatcgaatgaactgtataagcccttgagagccgaaggaacaaactttcgcacagtgctcgataaggccgtacaggctgacgggcaggtcaaagaatgctatcaaagtcaccgcgacaccatagtgctcctgtgtaaacccgaacccgaactcaacgccgccattccatcggccaatcctgcaaagaccatgcaaggttcggaagtggtgaatgtgctcaagagtctgctgtcaaacctcgatgaggtgaagaaagaacgtgaaggccttgaaaatgatttgaagtccgtgaattttgacatgacttcaaagtttttgactgctctggctcaagatggcgtcatcaatgaggaagctctgagcgtaactgaactggatcgggtctacggtggactgactacgaaagtgcaggaaagcttaaagaaacaggagggcttgctgaagaacatacaggtgagccatcaagagtttagcaaaatgaagcagtctaataacgaggcaaacctgcgggaggaggttctcaagaacttggctactgcatacgataatttcgtggaactggtggcaaacttgaaggaaggtacaaagttctacaatgaactgacagagattcttgtcagattccaaaacaaatgttccgacatagtctttgcacgcaagactgagcgggatgaactgcttaaggacctgcagcagagcatagcaagagagccctccgctccaagtatcccaactcccgcctatcagtcgagcccagccggcggtcacgcgccaacaccacccacaccagcacctcggaccatgcctccgaccaagcctcagccgccagctcggccccccccaccagtgttaccagctaatcgggccccctctgcgacagctccctctccagtgggggctggaacagctgccccagctcctagccagactcccgggtcagccccccctccacaagcgcagggaccaccttacccaacatatcccgggtacccggggtattgccagatgcctatgcccatgggctataacccctacgcctatgggcagtacaatatgccgtaccccccggtctaccatcagagccctggtcaagccccttatcccggcccacagcaaccctcatatccctttcctcaaccgcctcagcagtcttactacccccagcagtag

SEQ ID NO: 200730 - DNA, 2622 bp, synthetic construct
  misc_feature 1..2622: note = Description of Artificial Sequence: Synthetic coding sequence
  source 1..2622: mol_type = other DNA
atggccaccttcatcagcgtgcagctgaagaagaccagcgaggtggacctcgctaaacccttagtgaagttcatccagcagacttacccctccggtggagaggagcaagcccaatattgcagagctgccgaagagctgagtaagctccggcgggcggctgtcgggagaccccttgataagcatgaaggggctctggagactttactgagatattatgatcagatctgctcaatagagccaaagtttccatttagcgaaaatcagatttgtctcaccttcacttggaaagacgctttcgacaaaggctcgctttttgggggttccgtcaaactcgccctcgcatctttgggatatgaaaaatcctgcgtgttgttcaactgcgcggccctggcatctcagattgcagctgaacagaatttagataacgacgaggggctgaaaatagctgcaaaacattatcagtttgcttctggtgcattcctgcatattaaggaaacagtactctccgctctgagtcgggagccaacagtggatatctccccggacactgtgggtactcttagtctgattatgcttgcccaggcccaggaagtgtttttcttgaaagcaacaagagataagatgaaggacgccatcatcgccaagttggctaaccaagccgctgactattttggcgacgccttcaaacagtgccagtacaaagatactcttcctaagtacttttactttcaggaggtgttcccagttttagcagcaaaacactgtattatgcaggccaacgctgaatatcaccaaagcatcctcgcgaaacagcagaagaagtttggggaagagatcgccagacttcaacatgcagccgaactgatcaagacagtggcttcccggtatgacgagtacgtgaacgtaaaggacttcagcgacaagatcaaccgcgccttggctgccgctaagaaggacaatgacttcatataccatgaccgggtacctgacctcaaggatttagatccaattggaaaagctaccctagtaaagagtacccctgtgaacgtgccgatatcccagaaatttaccgatctgttcgagaagatggtacctgttagcgtgcagcagtctttggccgcatataaccaaagaaaagccgacctggtgaacagaagtatcgcacagatgcgcgaagctactacactcgccaacggcgtcctagctagtttgaacctgcctgccgctatagaagacgtgtcgggagacaccgtcccacagtctatactgacaaaatctcggtcggtcattgagcaaggggggatacagaccgtggatcagcttataaaagagctaccagagctgttgcagcgcaatcgtgagatactggatgaaagcttgcggttgctagacgaggaggaggcgactgataatgatttgagagccaaattcaaggagcgctggcagaggacgccaagcaacgaactgtataaacctctccgtgctgaaggcactaacttccggactgtgctggataaggccgtacaggctgacggccaggtaaaagagtgctatcagtcacacagagatacgatcgttcttctctgcaagcctgaacccgagttgaacgccgcaatcccgagtgcaaatcccgctaagaccatgcaggggagcgaagttgtgaacgtgttgaaatcacttctgtctaacctggatgaggtgaagaaggagagagagggacttgaaaatgacctgaaatctgtcaatttcgatatgacgagcaagttcttaaccgcccttgcccaggacggagtaatcaacgaagaggccctgagcgttaccgagctggacagggtgtatggtggtctcaccacaaaagttcaggagagccttaagaagcaggagggactactcaaaaatattcaagtatctcaccaggagtttagtaagatgaaacagagcaacaatgaggccaatctgcgtgaagaggtattaaagaacttggccactgcatatgacaacttcgtggaactcgtggcaaaccttaaggaggggacaaaattttataacgagctgaccgaaatacttgtacggttccagaataaatgcagcgacatcgtgttcgctaggaagaccgaacgggacgagctcctcaaagatctccagcagagtattgcccgggagcctagcgctccctctattccaacgcccgcatatcagagcagccccgcaggcggacatgctcccactccacccacacctgcacccagaactatgccgccaaccaagccgcaacccccggccaggcctcctcctcccgtgctgcctgcaaatcgcgcaccgtcagccaccgccccatcaccagttggagctggcactgcagccccggcgccgtcacaaaccccaggctctgctcccccaccccaggcacaggggcctccttatcccacatatccaggctatccgggctactgtcagatgccaatgccaatggggtacaatccgtacgcttacggacagtataacatgccttatccacctgtttatcaccagagcccaggccaagcaccctatcctggacctcagcagccatcatacccttttccccagcctcctcagcagagctactacccacaacaatag

SEQ ID NO: 200731 - DNA, 1458 bp, synthetic construct
  misc_feature 1..1458: note = Description of Artificial Sequence: Synthetic coding sequence
  source 1..1458: mol_type = other DNA
atggccctgccccccttcttcggccagggccggcccggccccccccctccccagccccctccacccgcaccttttggatgcccaccgccccccctcccttctccagcttttccaccaccattgcctcagcggcctggccccttccccggcgccagcgcgccctttctgcagcccccactggcgctccagccacgcgccagtgcagaagcctcccggggcggcggcggggcaggggcattttacccggttcccccaccacccctccccccgccacctccccagtgtcgcccctttccgggaaccgacgcaggtgagcggcctcggccccctccacccggtccaggcccaccatggagcccacggtggcccgaagctccacctccaccagctgacgtgctaggtgacgctgccctgcagagattacgcgacagacagtggctggaggcggtgttcggaaccccgcgtagggccggatgtcctgtgccacaacgaacccacgcaggacccagtctgggcgaggtgcgcgcgcgattactcagggcactgcgcctcgtacgccgtttgagagggttgtcccaggctttgcgcgaggccgaagccgatggagccgcctgggtcctgctgtacagccagactgctcctctgcgggctgagctcgcggaaagattgcaacccctgactcaggcagcatacgtgggcgaggctcgccgacgtctggagagggtgaggagacgtcgcctgagactcagggaaagagctcgagagagagaagctgaacgggaggccgaggccgccagagctgtggagcgcgaacaagaaatcgataggtggcgggtgaaatgtgtgcaggaagtggaggagaagaagagggagcaggagctcaaagccgccgctgacggagtgttgtccgaggtgagaaagaagcaagccgacacaaagcggatggtagatattctgcgcgcccttgagaagctgaggaaactccgaaaggaagcggcagcccgaaagggagtttgcccacccgctagtgcagatgaaactttcacacaccacctgcaaagactgagaaaactaataaagaagcgttcagagctatatgaggcagaggaacgagcattgcgggtgatgctggaaggcgagcaagaagaggaaagaaagagagagctggagaaaaagcagcggaaagagaaggagaaaatcctgttgcagaaacgagagatcgagtctaaattattcggtgaccccgacgagtttcctttggcacatcttctcgagccattcagacaatactatctccaggctgagcattcactccccgcccttatacagatccggcatgactgggatcagtatctggtgccatcagaccatcccaagggcaacttcgtgccccagggttgggtgctgcctcccctcccttctaatgacatctgggccaccgccgtgaagctgcactag

SEQ ID NO: 200732 - DNA, 840 bp, synthetic construct
  misc_feature 1..840: note = Description of Artificial Sequence: Synthetic coding sequence
  source 1..840: mol_type = other DNA
ctgatgcggagccacagcgacagctgccacttcagcaagcacctgaggcgggagcacggcccagcgactatcctgcgtccaggctcaccacgtcccccgccaccccctagtttcagtttgagacggttgagggagagggcaagagaaagggaggctgaacgagaggccgaagcagcaagggccgtggagagggagcaggaaatcgacagatggcgtgtgaaatgcgtgcaagaggtggaagaaaaaaagcgagagcaggagctgaaggccgctgctgacggtgtactgagcgaagtgcgcaagaaacaggcagacactaagaggatggtagacatcctgcgcgccttagaaaagctacgtaagctgcgaaaggaagcggccgcccgcaagggggtatgcccacctgctagcgccgacgaaacatttactcatcatctacagcggctgaggaagcttattaagaagaggagtgagctgtatgaagcagaagaaagggcacttcgcgttatgctagaaggcgagcaggaagaggaacgtaaacgcgagttagaaaagaagcagaggaaagagaaagaaaaaattctactacagaaacgcgagattgaatctaaactgtttggcgacccagacgaatttccgctggcacacttgctcgaaccattcagacagtattacctccaagctgagcactccttgccggccctgatccagataaggcacgattgggaccagtatctggtgccctcagatcaccctaagggcaactttgtgccccagggttgggtactgcccccacttccttccaatgatatatgggcaaccgcagtgaagctgcactag

SEQ ID NO: 200733 - DNA, 813 bp, synthetic construct
  misc_feature 1..813: note = Description of Artificial Sequence: Synthetic coding sequence
  source 1..813: mol_type = other DNA
agccacagcgacagctgccacttcagcaagcacctgcggcgggagcatggacctgctaccatcctacggcccggctctcctcggagacgtcgcctcaggctgagagaacgcgcccgtgagagagaggcagaacgcgaagcagaagcggcacgcgctgttgaaagagagcaagagatcgacaggtggcgggtgaagtgcgtccaggaagtggaggagaagaaacgggagcaggaattgaaagccgccgccgatggtgtactgtccgaggttcgaaagaagcaggctgatactaagcgaatggtggacatccttagagccctcgagaaactacgaaaactgagaaaggaggccgctgccaggaagggcgtatgcccacctgctagcgccgatgagacgttcacccatcatctgcaacggctgcgcaagctgataaagaaaagaagtgaactatacgaggctgaggagagggcactacgggtgatgttggagggggaacaggaggaagagaggaaacgtgagctggaaaaaaagcagcggaaggagaaagaaaaaatcctgcttcagaagagagagatcgagtccaagcttttcggcgatcctgatgagtttcctctggctcatctgctcgagccttttaggcagtattatctccaggccgagcactctctccccgcattgatacagatccgccacgattgggatcagtacctcgtgcctagcgaccacccaaaagggaacttcgtgccacagggttgggttctcccaccactgcccagcaatgacatctgggctacagccgttaaactacactag

SEQ ID NO: 200734 - DNA, 165 bp, synthetic construct
  misc_feature 1..165: note = Description of Artificial Sequence: Synthetic coding sequence
  source 1..165: mol_type = other DNA
atgtgcaccaccctgttcctgctgagcaccctggccatgctgtggcgtcgcaggtttgcaaatagggtccagcctgagccatccgatgtggatggggccgctaggggcagttcccttgacgctgatcctcagagcagcggccgcgaaaaagaacccctcaaatag

SEQ ID NO: 200735 - DNA, 246 bp, synthetic construct
  misc_feature 1..246: note = Description of Artificial Sequence: Synthetic coding sequence
  source 1..246: mol_type = other DNA
atgacccggaccgagagccccgccacctggatgggccagctgggcgccgctgcgtggatgcgtactctctccccacaggccgcacaggtcttagtgcggccactagcacaggaggacgccgtgggcgccgccgcagcagctcggggccggatgggaggatctagcacccgggaagtgccaagagcccaccccgtgaccggctgttccgctgagattatcaataagaagtgtcagctggatctgtag

SEQ ID NO: 200736 - DNA, 819 bp, synthetic construct
  misc_feature 1..819: note = Description of Artificial Sequence: Synthetic coding sequence
  source 1..819: mol_type = other DNA
atggccgccaaggtgttcgagagcatcggcaagttcggcctggccctcgcagtcgccggcggcgtcgtgaatagcgcgctgtataacgtcgacgccgggcatagagccgtgattttcgaccgctttagaggcgtgcaggatattgtggttggcgagggaacacattttttgataccctgggtccagaaacccataatattcgattgtaggtcaagaccacgaaacgtccccgtgatcaccgggtctaaagaccttcagaatgttaatatcacattacgaattctgttccgcccagtggctagccagttgccacgcattttcactagtattggcgaagattatgatgagcgtgtgctgccatccattactactgagatcttgaagagtgtggtagctagattcgatgctggcgaactaatcacacaacgcgagttggtatcaaggcaagtaagtgacgatctgactgagagggcagcaactttcggtcttatcctggacgatgtgtctctcactcatttgaccttcgggaaggaatttacggaagccgtggaggccaaacaggtagctcaacaggaagctgaacgagcccgattcgtcgtggagaaagctgagcaacagaaaaaagctgctattatatcagccgaaggtgattccaaggccgcagaacttattgcaaactctttggcaactgccggtgacgggcttatcgaactgaggaaactggaggctgctgaggacatcgcctatcaactatcaaggagtcggaacattacttacctgcccgctggacagtctgttctgttgcagcttccacagtag

SEQ ID NO: 200737 - DNA, 741 bp, synthetic construct
  misc_feature 1..741: note = Description of Artificial Sequence: Synthetic coding sequence
  source 1..741: mol_type = other DNA
atggccgccaaggtgttcgagagcatcggcaagttcggcctggccctggcagtggctggaggtgtagtcaactctgctctgtacaatgtggacgcaggtcatagggctgtgatctttgaccgattccgcggagtgcaggatatcgttgtaggcgagggtactcacttcctgattccgtgggttcagaagccaatcatctttgattgccgatcaagaccgcgtaacgttcctgtgattacaggcagcaaggatctgcaaaatgtgaatattaccctccgaatcctgtttcgtcctgtcgcctcacaactgcctagaatttttacctcaattggagaagattacgatgagcgcgtcttgccttctatcacgacagagattcttaagagcgtcgtagctcgctttgacgccggggaactaatcacccaacgtgagttggtgagtaggcaagtgagcgacgacctgacagagcgggccgccacatttgggctcatcttggacgatgtgtcacttacacacctgacgtttggcaaggagtttaccgaagccgtggaagcgaaacaggttgctcagcaggaagccgaacgcgcgcgatttgtggtggaaaaggctgaacagcaaaagaaggcggcaattatttccgccgaaggagattccaaagcagctgaactgatcgccaacagtttggccacggccggagacggacttatcgagctccgaaagctcgaggcggcagaagattag

SEQ ID NO: 200738 - DNA, 375 bp, synthetic construct
  misc_feature 1..375: note = Description of Artificial Sequence: Synthetic coding sequence
  source 1..375: mol_type = other DNA
atggccgccaaggtgttcgagagcatcggcaagttcggcctggccctggccgtggccggaggggtcgtgaactccgccctttataacgtggacgcggggcatcgggcagtgattttcgaccgtttccgaggtgtccaggacatagttgtgggcgagggaacacatttcctgatcccgtgggtgcagaaacccatcatcttcgattgcagatcacggcccagaaacgtaccagtcattactggtagtaaggacctgcaaaatgttaatataaccctgaggattctttttcggccagtagcatcacagctcccccgaatcttcactagtatcggggaggactacgatgaaagagtgctaccatctattaccacttag

SEQ ID NO: 200739 - DNA, 606 bp, synthetic construct
  misc_feature 1..606: note = Description of Artificial Sequence: Synthetic coding sequence
  source 1..606: mol_type = other DNA
atggccgccaaggtgttcgagagcatcggcaagttcggcctggccctagccgtggcaggaggcgttgtgaattctgccttatataatgtggacgctggacatcgggccgtcatttttgataggtttagaggggtgcaggatatagtggtaggagagggcacacactttctcattccatgggtccagaagccgattatctttgactgtagaagcaggccccggaacgtgccagtgatcacaggatcaaaagacctgcagaacgtaaatataactctccggatcctctttagacctgttgcgtcacagttgccccggatattcacctccattggagaggactatgacgagagagtgttgccatcaattactaccgagatcctcaagtccgtcgttgcccgattcgacgcgggcgagctcatcacgcaacgggagctcgtgagtcgccaggtgtccgatgatctgactgagcgagctgccaccttcggcctgatactggacgacgtgagtctgacccacctgacattcggaaaggaattcactgaggccgtcgaagcaaaacaggtcgcccagcaagaggccgagcgggcacgctttgtggtggaatag

SEQ ID NO: 200740 - DNA, 645 bp, synthetic construct
  misc_feature 1..645: note = Description of Artificial Sequence: Synthetic coding sequence
  source 1..645: mol_type = other DNA
atggccgccaaggtgttcgagagcatcggcaagttcggcctggccctcgccgtagcaggaggggtcgttaattccgctctctataacgttgacgcggggcatagagcagttatcttcgaccggttccgaggtgtgcaggatattgtggtcggcgaggggacgcatttcttaattccatgggtacaaaaacccattattttcgactgccgttcccgaccccggaacgttcccgtgattaccggctccaaagatttgcagaacgtcaacattactctgcgcattcttttccgaccagtggcatcccaactgccacggatttttacatcaatcggcgaagactatgacgaaagggtgctgccttctataaccacagaaatactcaagtcagtggtggcccgattcgacgctggggaactgataacccaacgtgaactggtgagtcgccaggtgtccgacgatctcactgagagggccgctactttcggccttattcttgacgatgtgtccctaacacacctgacatttggcaaggaattcaccgaagccgtcgaagcgaaacaagtggcgcagcaggaggcggaaagggcaagattcgtggtggaaaaagcggaacaacaaaaaaaggccgcaatcatctctgcatag

SEQ ID NO: 200741 - DNA, 468 bp, synthetic construct
  misc_feature 1..468: note = Description of Artificial Sequence: Synthetic coding sequence
  source 1..468: mol_type = other DNA
atggccgccaaggtgttcgagagcatcggcaagttcggcctggccctcgccgtcgccggcggggtggtcaacagcgctttgtataatgtggatgccgggcaccgtgctgtgatcttcgacagatttcggggggtacaggatatagtagtgggggaagggacccattttttaataccatgggttcagaagcccatcatcttcgattgtagaagtagaccccgcaatgtaccagtaattacaggttctaaggatctgcagaatgtgaacatcacgttacgcattctctttagacccgttgcaagccagttgcctagaatttttacttctatcggggaggattacgatgagcgagtgctcccatcaattacaaccgagattctaaagagtgtggtggctcgtttcgatgcaggcgagctgatcacctacttacccgctggacagtcagtgctacttcaactgcctcagtag

SEQ ID NO: 200742 - DNA, 615 bp, synthetic construct
  misc_feature 1..615: note = Description of Artificial Sequence: Synthetic coding sequence
  source 1..615: mol_type = other DNA
atggccgccaaggtgttcgagagcatcggcaagttcggcctggccctagctgtggctggcggagttgtcaatagtgccctatataacgtggatgctggccatagggcagtgatctttgatcgtttccgcggcgttcaggatatcgtggtgggcgaaggtacccactttctaatcccttgggttcagaagcctattatttttgattgcagatcacgtccccgcaatgttccagtgatcaccgggagtaaagatctccagaatgtcaatatcacactgcgtatcttgttccgtcccgtcgctagccaacttcccagaatctttacttccattggggaggactatgatgaaagagtcctgcccagcattacaacagaaatcctgaagagcgtggtggccagatttgatgctggagaactgatcacacagcgcgaactcgtcagccggcaggtcagtgacgatctaactgagcgggcggccactttcgggcttatcctggacgacgtctcactgactcacctgacattcggcaaagagttcacagaggcagtagaagctaaacaagtggctcagcaagaggcggagcgggcgcgttttgtcgtagagaaggtaagctag

SEQ ID NO: 200743 - DNA, 900 bp, synthetic construct
  misc_feature 1..900: note = Description of Artificial Sequence: Synthetic coding sequence
  source 1..900: mol_type = other DNA
atggcccagaacctgaaggacctggccggccggctgcccgccggcccgcgtgggatgggcaccgccttaaagctgcttttaggagcgggtgctgtcgcatatggtgtaagagagagtgttttcaccgtcgagggaggtcaccgggccatcttctttaatagaatcgggggggtccagcaggacacgatcttggccgaggggctccattttcggattccatggtttcaatatccaataatctatgacatccgtgctagacctcgaaagatttcctctcctactgggagcaaggaccttcaaatggtcaatatcagcttgcgagtgctctcacgccccaacgctcaagaacttccttctatgtaccagcgccttggactcgactacgaagagcgtgtgctgccttctatcgtgaacgaagttctgaagtctgtggtggctaaattcaacgcttcacaacttatcacccagagggcacaagtatcactgctcataagacgggagctcaccgaacgagccaaagatttttccctgatccttgacgatgtggctatcaccgagctgtccttttctcgcgagtacactgccgccgtcgaggctaaacaggtcgcccagcaggaggcgcagcgagcgcagtttctcgtggagaaagctaaacaggagcagaggcaaaagatcgtgcaagccgagggcgaggccgaggcggctaagatgctgggtgaagctctttccaagaatcctgggtacatcaaacttcgtaagatacgagccgcacagaatatcagcaagactattgccacatcacagaaccggatttaccttaccgcagacaatttggtattgaatctccaggacgagagttttacccgctactcagattccttgataaagggcaagaaatag

SEQ ID NO: 200744 - DNA, 786 bp, synthetic construct
  misc_feature 1..786: note = Description of Artificial Sequence: Synthetic coding sequence
  source 1..786: mol_type = other DNA
atggcccagaacctgaaggacctggccggccggctgcccgccggccctaggggaatgggtactgctcttaagctgctcctaggagctggcgccgtcgcctacggcgtcagggaaagcgtctttactgtggagggcggccaccgggccattttcttcaatcggatcggtggagttcagcaggatactatcctggccgaaggactccactttcgcattccatggtttcaatatcccataatttacgatatccgcgcccgaccacgcaagatttcttcccccactggttccaaagatcttcagatggtgaatatctcactaagggtactttctcggccgaacgctcaggagcttccctcaatgtaccagaggctgggtttggactatgaggaaagagtcctgccatcgatagtcaatgaggtgttaaaatccgtggtggctaagtttaacgcctcacagcttattactcagagggctcaagtttcccttcttatccggcgtgagctcacagagcgagccaaggattttagtcttattctcgacgatgtggcaatcacggagctctctttttctagggagtatacagccgcggtggaagcaaaacaggtggccctttctaaaaatccgggttacattaagctgaggaagatccgcgctgctcagaacatttccaagaccattgccactagccagaaccgcatatacttgacagccgacaatctggtcctgaacctgcaagatgagtcctttacacgagggtccgacagtcttattaagggtaaaaagtag

SEQ ID NO: 200745 - DNA, 900 bp, synthetic construct
  misc_feature 1..900: note = Description of Artificial Sequence: Synthetic coding sequence
  source 1..900: mol_type = other DNA
atggcccagaacctgaaggacctggccggccggctgcccgccggcccacgggggatgggaacagccctcaaacttttgcttggtgctggcgcagttgcctatggagtccgggaatcggtgtttactgtagagggcggacatagggccatatttttcaataggatcggtggtgtgcagcaggacacaattctggccgagggactccactttagaatcccatggtttcagtatcccattatatacgacattcgggctagacccagaaaaatatccagccccactgggagcaaggatttacaaatggtgaacattagtctacgggttctctcccgccctaacgctcaggagttgccttctatgtaccaacggctcggtctcgattatgaggagcgggtcctgccatctatcgttaacgaggtgctcaagtcagtggtggctaaatttaacgctagccagctcattacacaaagagcacaggtctcgctgctgattagacgtgaactcacagaaagggccaaggattttagcctaatcctcgacgacgtagccatcaccgaactaagcttttcccgcgaatacaccgcagcggtcgaggcgaaacaagtggcccagcaggaagctcagagagcgcagtttctggtggaaaaggctaaacaggaacagcgccagaaaattgttcaggccgaaggcgaggctgaggccgcaaagatgctgggagaggccctctcgaaaaatcctgggtacatcaagctccgcaagattagggccgcgcagaacatctcaaagactatcgctacttctcagaatcgcatctacttaaccgcagataacctcgtgctgaacctgcaggatgagtctttcacacgcggaagtgattccctgatcaagggtaagaagtag

SEQ ID NO: 200746 - DNA, 642 bp, synthetic construct
  misc_feature 1..642: note = Description of Artificial Sequence: Synthetic coding sequence
  source 1..642: mol_type = other DNA
atggcccagaacctgaaggacctggccggccggctgcccgccggcccgagggggatgggtaccgccttgaagctgctactgggcgctggggctgtcgcttatggcgttcgcgagagtgttttcacggtggaaggtgggcacagggccatcttctttaacaggatcggtggcgtacagcaggataccattttagccgaagggttgcactttcgcattccatggttccagtacccgattatctatgacattcgggcccgccctaggaagatcagctccccaacgggttcaaaagacttgcagatggtcaacatctcactaagggtcctctctagaccaaatgcgcaggaactgccttccatgtatcagcggcttggcttggactatgaggagcgagtcttgccctctatagtgaacgaggtcctcaagagtgtggtggctaagttcaacgccagtcagctgatcacgcaaagggctcaagtcagtttactgatcagaagggaactcacggaacgcgcaaaagattttagccttatactggatgatgtggctatcacagagctgagcttcagtcgggaatatactgctgccgtggaggcaaagcaggttggtgagtcccaggagccatggggtgagggtttctag

SEQ ID NO: 200747 - DNA, 318 bp, synthetic construct
  misc_feature 1..318: note = Description of Artificial Sequence: Synthetic coding sequence
  source 1..318: mol_type = other DNA
atgcggggcgccacccgggtgagcatcatgctgctgctggtgaccgtgtcagattgcgcagtaatcaccggcgcctgtgagcgggatgtccagtgcggcgctggtacatgctgtgccattagcctgtggttacggggactgcgcatgtgcactccccttggtagagagggagaggaatgtcatcccggcagtcataaggttcccttcttcaggaagagaaagcaccatacctgcccctgtcttccaaacttactgtgtagcagattcccggacggacgatacaggtgctccatggacctgaagaatatcaacttctag

SEQ ID NO: 200748 - DNA, 390 bp, synthetic construct
  misc_feature 1..390: note = Description of Artificial Sequence: Synthetic coding sequence
  source 1..390: mol_type = other DNA
atgcggagcctgtgctgcgcccccctgctgctgctgctgctgctgccccccttactgttgactcccagggctggcgatgccgccgtcattacaggggcatgtgacaaggactcccagtgtggcggcggcatgtgctgcgccgtcagcatctgggtgaagtccatcaggatctgtactccgatggggaagctaggggattcctgtcatcctctcacacgcaaaaataattttgggaacgggcgccaggaacgtcgcaagagaaaaagatcaaagaggaaaaaagaagtacccttttttggtagacgaatgcaccacacctgcccctgcctcccagggctggcatgtttgcgcacctcctttaaccgcttcatttgtctggcacagaagtag

SEQ ID NO: 200749 - DNA, 327 bp, synthetic construct
  misc_feature 1..327: note = Description of Artificial Sequence: Synthetic coding sequence
  source 1..327: mol_type = other DNA
atgcggagcctgtgctgcgcccccctgctgctgctgctgctgctgcccccactcttattgacgccaagagctggagatgctgcagtgattacaggcgcatgcgacaaagatagccaatgtggcggaggcatgtgttgcgcagtcagcatttgggtgaagtctatcagaatttgtacaccaatgggcaagcttggtgactcctgccaccccctcactagaaaggttcccttttttgggagaagaatgcatcatacgtgtccatgtcttccaggactcgcttgtctgagaacaagcttcaacagatttatttgcctcgcccaaaagtag

SEQ ID NO: 200750 - DNA, 705 bp, synthetic construct
  misc_feature 1..705: note = Description of Artificial Sequence: Synthetic coding sequence
  source 1..705: mol_type = other DNA
atgcgggcccccctgtgcctgctgctgctggtggcccacgccgtggatatgcttgcactgaataggcgaaagaaacaggtgggcaccggcctggggggaaactgcaccggatgcatcatttgttcagaggagaatggctgctctacctgccagcaaaggcttttcctctttattcgccgggaaggaatccgccagtacggcaaatgcctgcacgactgcccaccagggtattttgggattcggggccaggaggtgaacagatgcaagaaatgtggtgcgacatgtgagtcctgcttctcgcaggacttctgtatccgttgcaaacggcaattttatctctacaaaggaaaatgcctacccacgtgcccccctggaaccctggcacatcagaatactcgggagtgtcagggcgagtgcgagcttggcccgtggggggggtggtcgccgtgcactcataacggcaaaacctgcggcagcgcctggggcttagagagcagagttagagaagccggcagagcagggcacgaggaggccgctacctgccaggtgctaagtgagtcaaggaaatgcccaattcagagaccatgtcctggggagcgatcccccggtcaaaagaagggccggaaggacaggcgccctcgaaaagaccgtaagctggaccgcaggctggatgtgcggccaaggcaaccaggcctgcagccatag

SEQ ID NO: 200751 - DNA, 1155 bp, synthetic construct
  misc_feature 1..1155: note = Description of Artificial Sequence: Synthetic coding sequence
  source 1..1155: mol_type = other DNA
atggccgcccagaacggcaacaccagcttcacccccaacttcaaccctccacaggaccacgcatcgagcctgtctttcaatttttcttatggggattatgatctgcccatggatgaagacgaagacatgaccaagactcggactttctttgctgccaaaattgtgattgggattgctctcgccggcatcatgctcgtctgtggaattgggaatttcgttttcattgccgccttgacgagatataagaaacttcgcaacctgactaatctcctgatcgctaacctggctattagcgattttctcgtggcaattatctgctgccccttcgagatggattactatgttgttcggcagctgtcctgggaacatggacacgtgttatgcgctagcgttaactacctgcgcacagtcagcctgtatgtgagtaccaatgcactgctcgcaatcgccattgaccgctatctggcaatcgtacacccacttaagcctcgtatgaattaccagactgcgagcttcttaatcgcgctagtatggatggtctcaatcctgattgccatcccctccgcgtacttcgctaccgaaacagtgttattcatcgtaaagagccaagagaaaatcttctgcggccaaatttggcccgtggaccagcaactgtactacaagagttacttcctctttatcttcggcgtggaattcgtcgggcccgttgtaactatgacgctgtgttatgccagaattagccgagaattatggtttaaggcagtgcctggctttcaaaccgaacagatccgaaaaaggctgcggtgtaggaggaaaacagttctggtgcttatgtgcatcctgacagcatatgtgctgtgttgggctccattctacggcttcactattgtccgggattttttcccaaccgtgtttgtgaaagagaaacattatctcactgcattttacgtcgtcgaatgcattgccatgagcaactcaatgattaacaccgtatgctttgtgacggtcaaaaataacactatgaaatattttaaaaagatgatgctgctgcactggcgaccgagtcagcgcggatccaaaagcagcgccgacctcgacttaagaactaacggcgtgcccacaaccgaggaagtcgactgtatccgcctgaaatag

SEQ ID NO: 200752 - DNA, 684 bp, synthetic construct
  misc_feature 1..684: note = Description of Artificial Sequence: Synthetic coding sequence
  source 1..684: mol_type = other DNA
atgaacatcaagggcagcccctggaagggcagcctgctgctgctgttagtgtcaaaccttttgctatgtcagtccgttgcccccctgcccatatgtccgggaggcgccgcccggtgtcaggttactctgagagacctcttcgatagagccgtggtgttaagtcactatatccacaacctgtcctcggagatgttttctgaattcgataagagatatacccatggtcgcggattcatcactaaggccatcaattcgtgtcacacttcttcactagcgactccggaagacaaggagcaagctcagcagatgaatcaaaaagacttcttgagcctcatcgtgagcattctgagatcatggaacgagccactataccatctggtaacggaggtacgcgggatgcaggaagcccccgaggccattctgagtaaagcagtggaaatagaggaacagaccaaacgcttgttggagggcatggagttaatcgtatcccaggtccaccccgaaactaaggagaatgaaatctatcctgtgtggagcggactaccttcacttcagatggcagatgaggaatcacgcctgagtgcgtactataatttgctgcattgtctgcgacgggattcccataaaatcgacaactacctcaaactgctgaaatgccggattattcataacaacaactgctag

SEQ ID NO: 200753 - DNA, 591 bp, synthetic construct
  misc_feature 1..591: note = Description of Artificial Sequence: Synthetic coding sequence
  source 1..591: mol_type = other DNA
atgaacatcaagggcagcccctggaagggcagcctgctgctgctgctggtgagcaaccttctcttaagccattatattcataatttgagcagcgagatgttctctgaattcgataaaaggtatacacatgggagggggtttattacgaaggcaatcaactcttgccacacatcaagccttgctacacccgaagataaggaacaggcccagcagatgaatcaaaaggattttctctcacttatcgtcagtatccttcgcagctggaatgagcctctctaccacctcgtgactgaggttagagggatgcaggaggcacccgaagccattttatctaaggctgtagaaatagaagaacagaccaagcggctcctcgagggtatggagctcatcgtgagccaggtgcaccctgagacaaaagagaacgagatctatccagtctggtccggcctgcccagcctgcagatggccgatgaggagtctcggttgagcgcatactataacctcctgcattgtttgagaagggacagtcataaaattgacaattaccttaagctcctaaagtgccgtatcattcataacaataactgttag

SEQ ID NO: 200754 - DNA, 1545 bp, synthetic construct
  misc_feature 1..1545: note = Description of Artificial Sequence: Synthetic coding sequence
  source 1..1545: mol_type = other DNA
atgaccctgatctggcggcacctgctgcggcccctgtgcctggtgacatccgccccgcgcatcttggagatgcaccctttcctgagtctgggtacatctaggaccagcgttaccaagctgtctcttcacactaagccccgcatgcctccttgtgacttcatgcccgagcgctatcagtcgctgggatacaatcgggtgttagaaattcataaggagcatctcagcccagttgtaaccgcttatttccagaagcctttgctgttacatcaagggcatatggagtggctttttgatgccgagggcagcagatatctggatttttttagtggcattgtgaccgtcagtgtcggccattgccatcccaaggttaacgcagtggcacaaaaacaactgggacggctctggcacacatcaactgtgttctttcaccctccaatgcatgagtacgccgagaaactagcagctctgttgcctgagccactgaaggtaattttcttggtgaatagcggcagcgaagcgaacgagctggccatgctgatggcaagggctcacagcaacaacatcgacattatcagctttagaggagcttatcatggatgcagcccctacacattggggctcactaacgtaggtacatacaaaatggagcttcctggcggtacaggttgccagcccacaatgtgtcctgacgtgttccgggggccctgggggggctcacattgtcgcgacagtcctgtgcaaacaatacgcaagtgctcttgcgcgccagattgttgtcaggctaaggatcagtatatcgagcagtttaaggatactctgtctacaagcgtggcgaagtccatagccgggttctttgcagaaccgattcaaggggtgaacggcgtagtgcagtacccgaaaggcttccttaaggaagcttttgagcttgtcagggcgcgcggcggcgtgtgtatcgccgatgaagtgcagacaggattcggtcgattgggctcccatttttggggctttcaaactcatgacgtgttacccgatatcgtgacaatggcaaaggggattgggaatggctttcctatggcggccgtcattacaacaccagagattgctaaatctctagcaaaatgtctacaacatttcaacacgttcggcggcaatccaatggcttgtgccatcggctcggcagtgctggaagtgatcaaagaggagaatctccaagagaacagtcaagaggtgggtacttacatgttgctgaaattcgccaaattaagggacgaatttgagatcgttggtgatgtgagaggcaagggtcttatgatcgggatagagatggtccaggacaagatctcatgccgaccactaccacgggaggaggtgaaccagatccacgaggactgcaagcacatgggcctgctcgtgggacgcggcagtatcttttcgcagacatttagaatcgctcctagcatgtgcatcacaaaacccgaggttgattttgccgtggaagtatttcggtcagctcttactcagcatatggagcgcagagctaagtag

SEQ ID NO: 200755 - DNA, 1050 bp, synthetic construct
  misc_feature 1..1050: note = Description of Artificial Sequence: Synthetic coding sequence
  source 1..1050: mol_type = other DNA
atgaaggagaacgtggccagcgccaccgtgttcaccctgctgctgttcctgaacacatgcttactgaatggtcagctccctccaggaaaacccgagatctttaagtgccgcagcccaaataaggaaacttttacctgttggtggcggcctggaactgacggaggcttgcctaccaactatagcttaacataccacagagaaggcgaaactctaatgcatgaatgtccagattacatcacaggaggccctaattcgtgtcattttggcaaacaatacacgtccatgtggcgcacatatatcatgatggtgaatgccacaaatcaaatggggagtagtttttctgatgaactgtacgtggatgtaacgtacattgtgcagccagatccacccctggaattggctgtggaggtgaagcagccggaggaccgcaagccatacttgtggatcaagtggtctccacccaccctcattgacctaaaaaccggttggtttacactgctttatgaaattcgcctaaagcctgagaaagctgctgagtgggaaatccacttcgctgggcagcagaccgagtttaagatcctctctctgcacccaggacagaaatacctcgtgcaggtgagatgcaaaccggaccacggctattggagcgcttggagtcccgcaacattcattcagatcccatccgattttaccatgaatgatactacagtctggatctccgtggccgtactgagtgcagttatttgcctgattattgtctgggctgtcgccctcaagggttacagtatggtgacatgtatattccccccggtaccaggccccaaaattaagggcttcgatgcacacctcttagaaaaaggaaaatccgaggagctcctgtcagctctcggctgccaagacttccccccaacttccgactatgaagacttgctagtggagtacttagaagtcgatgactccgaggaccagcacctgatgtctgttcactccaaagagcacccttctcaggaacgcgagcaacgacaggcacaggaggcgcgagattcatag

SEQ ID NO: 200756 - DNA, 1566 bp, synthetic construct
  misc_feature 1..1566: note = Description of Artificial Sequence: Synthetic coding sequence
  source 1..1566: mol_type = other DNA
atgaaggagaacgtggccagcgccaccgtgttcaccctgctgctgttcctgaacacctgcctgctgaatgtgcagccggatcctccactcgagctcgcagtggaggtgaaacagcctgaggaccgcaaaccttatctctggatcaaatggagcccaccgacactgatcgacctcaagaccggatggttcaccctattgtatgagataagactcaagcccgagaaagccgccgaatgggagattcatttcgccggccagcagacagaattcaaaatcctgtcgttgcatccaggtcagaaatacctcgttcaggtcagatgcaaacccgatcacggctactggagcgcatggagccccgcaacattcatccagatccccagcgactttacaatgaacgataccaccgtatggataagcgtagccgtccttagcgcagttatatgtctgattatcgtgtgggctgtggccttaaaagggtacagtatggtgacttgtatttttccccctgttcccggaccaaaaatcaagggttttgacgcacacctgctagagaaggggaaaagtgaagagctgctgtcagcactcggatgtcaggactttccgcctacaagtgactacgaggatctcttggttgagtatctagaagtggatgactcagaggaccagcacctgatgagtgttcatagtaaagagcacccatcgcagggcatgaagccgacctacttagaccctgataccgactccggcaggggcagctgcgactcacccagcctgctgagtgaaaagtgtgaggagccgcaggctaatccctctaccttctatgaccctgaggtcattgagaaacccgaaaacccagagaccacacacacgtgggatcctcagtgtatcagtatggaaggcaaaataccatactttcacgccggaggtagcaagtgcagcacatggcccctaccccagccatcccaacacaatccacggtcctcatatcacaatatcacagacgtgtgtgagctggcagtgggacccgccggggccccggccacactactgaatgaggccgggaaggacgcactgaagagcagccagactatcaaatcaagggaggagggtaaagccacccagcagcgagaagtcgaatctttccatagtgagaccgaccaagacactccatggcttctgccccaagagaagactccattcggcagtgccaagcctttagattatgttgagatacacaaagtcaacaaggatggcgctctctctctcctccccaaacagcgggaaaactccgggaagccaaaaaaaccgggtacccctgaaaataataaggagtacgctaaggtgtctggcgtgatggataacaatattctggtgctggtgccggacccccacgcaaagaacgtggcctgctttgaggagagcgctaaggaagctccacccagcctggagcagaaccaagccgaaaaagcactggcgaattttactgccacttcatctaaatgtcggctccagctgggcggtctcgactatttggaccctgcctgcttcacccacagtttccactag

SEQ ID NO: 200757 - DNA, 807 bp, synthetic construct
  misc_feature 1..807: note = Description of Artificial Sequence: Synthetic coding sequence
  source 1..807: mol_type = other DNA
atgaaggagaacgtggccagcgccaccgtgttcaccctgctgctgttcctaaacacctgcctgctcaacggtcagttgcctccaggcaagccagagatctttaagtgtagatcgcccaacaaagaaactttcacatgttggtggcgcccaggcacagatggcggtctgcccacaaattattctcttacctaccatcgcgagggtgagaccctgatgcacgaatgtccagactacatcaccggtggtccaaacagttgccactttgggaaacagtacaccagcatgtggagaacgtatattatgatggtgaacgccactaaccagatgggctctagcttctcagacgaactttacgttgacgtgacctacatcgtacaaccagacccaccgctcgagctggctgtggaggtgaagcagcccgaagataggaaaccatacctctggattaaatggtcgcccccaacgcttattgacctcaagaccgggtggttcacactgctttacgagatcaggctgaagcctgagaaagccgcggagtgggaaatccacttcgctggtcaacagacagagttcaagatcctcagcctccaccccggacaaaagtacctggttcaggtgagatgtaaacccgaccacggttattggagcgcgtggagtcccgccacattcatacagataccgagcggggaccccctgatgctcggagcgtcacactataaaaatctgaagagttataggccaaggaaaatttcttcccagggaagactggccgtgttcaccaaagctactctgactaccgtgcagtag

SEQ ID NO: 200758 - DNA, 1869 bp, synthetic construct
  misc_feature 1..1869: note = Description of Artificial Sequence: Synthetic coding sequence
  source 1..1869: mol_type = other DNA
atgaaggagaacgtggccagcgccaccgtgttcaccctgctgctgtttctcaatacctgccttcttaatggacaactaccccctggcaaacctgagatctttaaatgcagatcacccaacaaggaaacatttacctgttggtggcggccagggacagatggagggctgccaaccaactattccctgacatatcatcgcgaaggagagacactgatgcacgaatgtcctgactacatcacaggcggcccaaactcatgtcactttggcaagcagtatacctcgatgtggcggacatacattatgatggtgaatgccacaaaccagatggggagttccttctccgatgagctttacgtcgacgtgacttacatcgtccagcccgaccctcccctggaactcgcggttgaagtgaagcaacctgaggatcgcaagccatacttatggatcaagtggtcaccaccaactctgatcgacttaaagacagggtggttcactctattgtacgaaattcgactgaagccagagaaagctgccgagtgggagattcactttgcgggccagcagacggagtttaagattctgagtcttcatcctgggcaaaagtatctcgtgcaggtgcgctgcaaacctgatcatggctactggtccgcctggtccccagccaccttcatccaaatcccctcagattttactatgaatgacactacagtgtggatcagtgtggccgtgctaagcgcagtgatatgtttaataattgtgtgggcagtcgcactgaagggctattcgatggtgacctgtattttccctcctgtaccgggtcctaaaattaagggattcgatgcccatctgttggagaaaggcaaaagcgaagagctcctaagcgccctagggtgtcaagacttcccacccacatccgactacgaagatctcctggttgaataccttgaagtagacgatagcgaagaccagcatctgatgagtgtgcactctaaagaacatccttctcaaggaatgaaaccaacctatctcgaccccgatacagactctggacgtggtagttgcgacagccccagtctgttatctgagaagtgcgaggagccacaggcaaatcccagcactttctacgaccctgaagtcatcgagaaacccgagaatccggagactacgcatacctgggacccccagtgtattagtatggaggggaagataccctactttcacgcgggagggtccaagtgctctacttggcccttgcctcagccctcacagcacaatcctcgatccagctaccataacattacagatgtctgtgagctggctgtgggcccggccggcgcacctgcgactctccttaatgaggcaggcaaggatgctctcaaatcttctcagactatcaagagcagagaggaaggtaaagccacacaacagagggaagtggagagttttcatagcgaaaccgatcaagatactccctggctcttaccccaggagaagacacctttcggctccgctaaacccctggattacgtggagatacacaaggtgaataaggatggggccttgtctctgctcccaaaacagcgagagaattcagggaagcctaaaaaacctgggacaccagaaaataataaggagtacgccaaggtttcgggagttatggataacaatatccttgtcctggtgcccgacccccatgctaagaacgtggcttgtttcgaggagtcagccaaggaggcacccccctccttggaacagaaccaagctgagaaggctctcgctaattttacagcaacttcttccaagtgcaggctccagctcggtggtctcgattacctggatccagcctgtttcacacactcatttcactag

SEQ ID NO: 200759 - DNA, 594 bp, synthetic construct
  misc_feature 1..594: note = Description of Artificial Sequence: Synthetic coding sequence
  source 1..594: mol_type = other DNA
atgcacgagtgccccgactacatcaccggcggccccaacagctgccatttcgggaaacagtacaccagcatgtggcgtacttacattatgatggtgaacgccaccaatcagatgggctccagcttcagcgatgagctatatgttgatgtgacatacatcgtccaacccgacccacctctggaactcgcagtggaagttaagcagcccgaagaccggaaaccttacctctggatcaagtggagtcccccgactcttatcgatttaaaaaccggatggttcaccctactctatgaaatacgtctcaagcctgaaaaagccgctgagtgggagatccatttcgccgggcagcaaactgaattcaagatcctgagtctgcatcccggacagaaatacctggtacaggtcagatgtaaaccagaccatggatattggtccgcctggagtcctgcaacattcatccaaattccatcaggcgatcccttgatgctaggagcctcccattataagaacctgaaaagctaccgtccacgcaaaatctcatcccaggggagactggctgtcttcacgaaagcaactcttacaactgtacagtag

SEQ ID NO: 200760 - DNA, 312 bp, synthetic construct
  misc_feature 1..312: note = Description of Artificial Sequence: Synthetic coding sequence
  source 1..312: mol_type = other DNA
atgaaggagaacgtggccagcgccaccgtgttcaccctgctgctgtttctcaatacctgtctgctcaacggacagctgccaccaggcaagcccgaaatcttcaaatgtaggagtcccaacaaggaaacctttacttgctggtggcgccccggcaccgatggcggcctgcctacaaattattcccttacataccaccgggagggtgagactctcatgcacgagtgccctgattatatcacaggcggaccaaactcctgtcactttggaaagcagtacaccagcatgtggagaacatacataatgatggtatag

SEQ ID NO: 200761 - DNA, 189 bp, synthetic construct
  misc_feature 1..189: note = Description of Artificial Sequence: Synthetic coding sequence
  source 1..189: mol_type = other DNA
atgaaggagaacgtggccagcgccaccgtgttcaccctgctgctgtttctgaatacttgcttactcaacggccagttaccaccaggaaaacctgaaattttcaaatgcaggagcccaaataaggaaaccttcacttgttggtggcgcccagggaccgatggaggcctcccaactaattactccctctag

SEQ ID NO: 200762 - DNA, 336 bp, synthetic construct
  misc_feature 1..336: note = Description of Artificial Sequence: Synthetic coding sequence
  source 1..336: mol_type = other DNA
atgaaggagaacgtggccagcgccaccgtgttcaccctgctgctgttcctcaatacatgcctgctgaatgggcagctccctccagggaaacccgagatctttaaatgtcgctcacctaacaaggaaacctttacatgttggtggcgtcccggcactgacggcgggctgcctacaaactatagccttacctatcatcgggagggggaaactctgatgcacgagtgtcccgactatatcacaggggggcctaactcgtgccactttgggaagcagtatactagcatgtggcgcacctacatcatgatggtcaacgctaccaatcagatggggagctag

SEQ ID NO: 200763 - DNA, 1566 bp, synthetic construct
  misc_feature 1..1566: note = Description of Artificial Sequence: Synthetic coding sequence
  source 1..1566: mol_type = other DNA
atgaaggagaacgtggccagcgccaccgtgttcaccctgctgctgttcctcaatacttgtctacttaacgtgcagcccgatcccccacttgaattggcggtagaagttaagcaacccgaagatagaaagccttacctctggatcaaatggtcgccacctactcttatcgatctgaaaactggatggttcaccctgttgtatgagattagactgaagccagaaaaagctgcagagtgggaaatccatttcgcagggcagcaaacagagtttaaaatcctgtccttgcatccaggtcagaagtacctggtgcaggtccgctgcaagcccgaccacggctattggagcgcctggagtcccgcgacgttcatccagattccctctgactttacaatgaatgacacaacagtgtggatctcagtcgcagtcctcagcgcggtcatttgtctgattatcgtttgggctgtggctctgaaaggatattccatggtcacatgcatcttcccacccgtgccgggccctaagattaaaggcttcgacgcccacttgctggaaaagggtaaatcggaggaactcctgagtgctctgggctgccaggactttccacccactagtgattatgaagatcttctggtggagtacctggaggtagatgatagcgaagaccagcatctcatgtcagttcattcaaaagaacacccaagccagggcatgaaacccacctatttagacccagataccgatagcggacggggaagttgtgatagccctagcctgctgtccgagaaatgtgaagaacctcaagcgaatccaagtactttctacgatccagaggtgattgaaaagccagagaatcctgagaccacacatacctgggatccgcaatgtatctcaatggagggaaagatcccatactttcacgcaggagggtctaagtgttctacttggccactgccccagccatctcagcataatccgcggtcatcatatcacaatatcaccgacgtctgtgaactcgctgtggggcctgctggcgcacccgcaaccttgctcaacgaggctggaaaggacgcacttaagtccagtcagacaataaagtcccgagaagaggggaaggctacccagcagcgggaggtggaaagcttccactcagagacggatcaagacaccccttggctgttgccacaggaaaaaactccattcggtagcgccaagcctctagactatgtggaaatacacaaagttaataaagacggggctctctccctgctgcccaaacagcgggagaactctggaaagcccaaaaagcccggaaccccagagaacaataaggagtatgctaaggtctcaggcgtgatggacaataacatattagtgctggttccggacccacacgctaaaaatgtggcgtgctttgaggagagtgcgaaggaagcacctccttcgttagagcaaaatcaagccgaaaaggcgctcgcaaattttactgcgacgtccagcaagtgtaggctgcaacttggcggtttggattaccttgaccctgcgtgtttcactcactcgttccactag

SEQ ID NO: 200764 - DNA, 867 bp, synthetic construct
  misc_feature 1..867: note = Description of Artificial Sequence: Synthetic coding sequence
  source 1..867: mol_type = other DNA
atgaaggagaacgtggccagcgccaccgtgttcaccctgctgctgttcctgaacacatgtctgctgaatggccagctcccacctggaaagcctgaaatctttaaatgccgatccccaaacaaggaaaccttcacatgctggtggagacctgggaccgatggcgggctgcccaccaattactccctcacctaccacagagaaggagagacactgatgcacgagtgccctgattatattaccgggggcccaaacagctgccatttcgggaaacagtataccagtatgtggcgcacctacataatgatggttaatgcgaccaatcagatggggagctctttttcagatgaactgtatgtagatgtaacttatattgtgcagcctgatcctcccttagaattggcagtcgaagtgaagcagccagaagataggaaaccttatctatggattaagtggtcccccccaacacttatcgacctgaaaacaggctggtttacactattatatgagataagactgaagccagaaaaggctgcagagtgggaaatccatttcgcgggccagcagaccgagtttaaaattctctccttgcatccgggccagaagtatctagtgcaggtgcgttgcaaacccgatcatggttactggtccgcatggtcacctgcaacttttatacaaattccctctgacttcaccatgaatgacacaacagtttggatatccgtcgccgtactgtctgccgtgatttgtctgattatcgtttgggctgtggccttaaaaggctactctatggttacttgcatcttccctcccgttcccggccctaagattaagggcttcgatgcccacctattggaggttaccccgtag

SEQ ID NO: 200765 - DNA, 363 bp, synthetic construct
  misc_feature 1..363: note = Description of Artificial Sequence: Synthetic coding sequence
  source 1..363: mol_type = other DNA
atgaaggagaacgtggccagcgccaccgtgttcaccctgctgctgtttcttaacacatgcctcctgaatggccagctgcctcctggcaaacccgagatcttcaaatgtagatcgccaaataaagagactttcacctgctggtggagaccaggaactgacggagggttgccaactaattatagcctgacataccatagagaaggggagaccctgatgcatgaatgccccgactacatcactggcgggccaaactcctgtcactttgggaaacaatatacatcaatgtggagaacttatattatgatggtgaacgccaccaaccagatgggttcctctttttcggacgaactgtatgtggactag

SEQ ID NO: 200766 - DNA, 105 bp, synthetic construct
  misc_feature 1..105: note = Description of Artificial Sequence: Synthetic coding sequence
  source 1..105: mol_type = other DNA
atgaaggagaacgtggccagcgccaccgtgttcaccctgctgctgttcctgaatacatgtctcctgaatggacaactgcctcccgggaagccagagattttctag

SEQ ID NO: 200767 - DNA, 930 bp, synthetic construct
  misc_feature 1..930: note = Description of Artificial Sequence: Synthetic coding sequence
  source 1..930: mol_type = other DNA
atgaaggagaacgtggccagcgccaccgtgttcaccctgctgctgtttctgaacacctgtttgttgaacggtcagctgccgcctgggaagcccgagatttttaagtgtcggtctccaaacaaggagaccttcacttgctggtggcggcctgggactgatggaggactgccaactaactattccctcacctaccatcgggaaggcgagaccctgatgcacgaatgtcccgattatatcaccggagggcctaatagctgtcatttcgggaaacagtatacatccatgtggaggacctacatcatgatggtgaacgccacaaaccagatgggctcatcttttagtgacgaactctatgtcgacgtgacttatattgtgcagcccgatcctcccctggaactcgcagtagaggtgaagcagccggaagaccggaagccttatctttggatcaaatggagcccccctacattgatcgatctcaagacagggtggtttactttgctgtatgagattcggcttaagcccgaaaaggctgctgagtgggaaatccatttcgcaggccagcagaccgagtttaagatcctcagccttcatcccgggcagaagtacctggtgcaggtgagatgtaagcctgatcatggatactggagtgcttggtcgcctgcaaccttcattcagatcccctcggatttcacaatgaatgacactaccgtttggatttctgtggctgtcttgtctgctgtaatctgcctgattattgtatgggccgtggccttgaaagggtatagcatggtgacctgcatcttccctccggttcccggtcctaaaatcaagggttttgacgcccatcttttggaagatcggctatgtacccctgggcggtgttgtgtgtcgaccggactcactgacctggattatagttgcagcacgtag

SEQ ID NO: 200768 - DNA, 1254 bp, synthetic construct
  misc_feature 1..1254: note = Description of Artificial Sequence: Synthetic coding sequence
  source 1..1254: mol_type = other DNA
atgggccggcggcgggcccccgagctgtaccgggcccccttccccctgtacgcactgcaagtcgacccaagcacaggtttgctgatagcagccggcgggggcggagcagcgaagaccggaatcaagaacggcgtgcattttcttcagctggagctaataaatgggcggctctcagcttcattgctgcactctcatgatacagagacgagggccactatgaaccttgccttggcaggggacattctcgccgccggccaagacgctcactgccaacttctgcgttttcaggcccatcagcagcagggcaataaagccgaaaaagctggcagtaaggaacagggccctcgtcagcgcaagggggcggccccagcagaaaagaagtgtggcgccgaaacacagcacgagggactggagctcagggtggagaatctgcaagccgtgcaaaccgacttttcctccgacccgcttcagaaggttgtctgctttaaccacgataacactttactggccaccggaggcacggacggctatgttcgcgtgtggaaagtgcctagcctcgagaaagtgttagaattcaaggcccacgagggtgaaatcgaagatttagccctgggcccagacggcaagctggtgacagtaggtcgggatctgaaggccagcgtgtggcagaaggaccagctcgtcacacaactgcactggcaggaaaacggtcctacctttagctctacaccataccggtatcaggcttgcagatttggacaggtgcccgatcaacctgccgggctgagactctttaccgtgcagattccacacaaaagacttcggcagcctcccccatgttatcttacagcttgggacggttccaatttcctgccacttcgcacaaagtcatgcggccatgaagtggtgtcttgcctggatgtctctgaaagcgggaccttcctgggactgggcacagttaccgggtctgtggccatatacatcgcgtttagcctccaatgcctgtactatgttcgcgaagcccatggcatcgttgtcactgacgtggccttccttcccgaaaagggccggggaccagaactgctcgggagtcatgagaccgctctcttctctgtggcggtggactcacgctgtcagctccaccttttaccctcccgccgaagcgttcccgtgtggctgcttctccttctgtgcgtaggcttgataatcgtgaccatcctgctattgcagtccgcctttcccggattcctgtag

SEQ ID NO: 200769 - DNA, 1254 bp, synthetic construct
  misc_feature 1..1254: note = Description of Artificial Sequence: Synthetic coding sequence
  source 1..1254: mol_type = other DNA
atgggccggcggcgggcccccgagctgtaccgggcccccttccccttatacgcccttcaggtggatccttccaccggtttgttgattgccgccggaggcggcggggcagccaagactggaattaagaacggcgttcacttcctgcagttggagcttatcaatggtcggcttagtgcctcccttctgcactcgcatgacactgaaacaagagctacaatgaacctggccctggctggggacattctggctgctggacaagacgcccactgccagcttttgcgctttcaagcacaccaacagcaggggaataaggcagagaaggccggtagcaaggagcagggtccacggcagcgcaagggcgctgcccccgcagaaaaaaagtgcggggcagagacgcagcatgagggcctcgagctacgagtggaaaacttacaggccgttcagaccgacttctctagcgaccccctccagaaggtggtctgtttcaaccacgacaacaccttactggccaccgggggcactgacggatacgtccgtgtctggaaagtgccctcgctcgagaaggtcttggagttcaaagcgcacgagggcgagattgaagatcttgcgctggggcccgatggaaagctcgtgaccgtcggaagggatctcaaggcatctgtttggcaaaaagatcagctcgtgactcagcttcattggcaggagaacggaccaaccttttcttccacgccttaccgatatcaggcctgtagattcggacaggttccagatcagccagccggattacgcctattcacggtgcagatcccccataagagactgcgacagccccctccctgctacctcaccgcctgggacgggagcaacttcctgccccttcgtaccaaatcatgcgggcacgaagtggtgtcgtgtctggatgtgagcgaatcagggactttcctgggcctcggcacagtgactgggtcagtggcaatctacatcgctttctcattgcaatgtctgtattacgtcagagaggcacacggcatcgtggtgaccgacgtcgcgttcttacccgaaaagggacgcgggcccgagctcctgggtagccatgaaaccgctctttttagtgtggcagtcgacagtcggtgccagttacacctattgccatcaagacggagcgtcccagtgtggctgcttttactcctttgtgtgggattgatcatcgtcaccattttactgcttcagagcgcctttcccggcttcctttag

SEQ ID NO: 200770 - DNA, 441 bp, synthetic construct
  misc_feature 1..441: note = Description of Artificial Sequence: Synthetic coding sequence
  source 1..441: mol_type = other DNA
atgcggctgctgcagctgctgttccgggccagccccgccaccctgctgctcgtgctctgtctgcagctgggggccaataaggcacaggacaacacacgaaaaataattatcaaaaattttgacatccctaagtctgtgcgtcccaacgatgaagtgactgccgtcctggccgtgcagaccgaactcaaagagtgtatggtagtaaagacttacctgatttccagtatacctctccagggtgcctttaactacaagtacacggcctgtctctgcgacgataatccgaaaaccttctactgggacttctacaccaaccgcactgtgcagattgctgccgtagtcgacgtgattcgggagcttggcatctgccctgacgatgctgcggtaatccctattaagaataatcgcttttacaccatcgagatactcaaggtcgagtag

SEQ ID NO: 200771 - DNA, 1185 bp, synthetic construct
  misc_feature 1..1185: note = Description of Artificial Sequence: Synthetic coding sequence
  source 1..1185: mol_type = other DNA
atgagcggcgaggacgagcagcaggagcagaccatcgccgaggacctcgtcgttactaagtacaagatggggggagatattgccaatagagtgttgaggagcttagttgaagccagttcctctggtgtatccgtgctttccctgtgtgaaaagggagacgccatgattatggaggagaccgggaagattttcaaaaaagagaaggagatgaaaaagggaattgcatttccgacttctatctcagtcaataattgcgtctgccacttttcaccgctcaaatcagaccaggattatatccttaaagagggcgatttagtcaagatcgacctcggggtccacgtggacggatttatcgctaacgtggcccacacattcgttgtggatgtagctcaggggacacaggtgacaggacgtaaagccgacgtgatcaaggcggcacacttgtgcgctgaagctgctttgaggttagtgaagcccggaaatcagaacacacaggtaactgaggcatggaacaaggtggcccattcctttaattgtacccccatcgaaggtatgctgagccatcagctcaaacagcacgttatcgatggggagaaaacaatcatccagaaccccacagatcagcagaagaaagaccatgagaaagcggagtttgaggtgcatgaggtctacgccgtggatgtgttggtgtcaagtggtgagggcaaagccaaggatgctggccagcgcacaaccatttacaagcgggatccctctaagcaatacgggctcaagatgaaaacatctcgtgcatttttttcggaagtagagaggaggttcgatgcgatgccctttacactcagagcatttgaagacgagaagaaggctcggatgggggtggtggagtgtgcaaaacatgagttactgcagccgtttaacgttctctacgagaaggaaggcgaattcgtggctcaattcaagttcacagtcttgctcatgccaaatgggcccatgcggattacctccggtcctttcgagccggacctgtataagtctgagatggaggtgcaagacgccgaactcaaagcccttctgcagtcttcagcttcccgcaagacacagaaaaagaaaaagaagaaggcgagcaaaacagccgagaacgctacctccggggagacactagaagagaacgaagccggcgattag

SEQ ID NO: 200772 - DNA, 1218 bp, synthetic construct
  misc_feature 1..1218: note = Description of Artificial Sequence: Synthetic coding sequence
  source 1..1218: mol_type = other DNA
gcctgccccgccccccagcccgcccggagccagctgctggccctggcctgtcttccagcaccactgctagctcgcgcctttgcccggcccctgctcgaagatagaggcgatagcgaccacagtcctgaagatctagtggtcactaaatacaaaatgggaggcgatattgcgaaccgggtgctgaggagcttggtcgaggcttcctcttcgggagttagcgtgctgtctctgtgtgaaaagggtgacgcaatgatcatggaggaaactggaaagatcttcaaaaaagagaaagaaatgaaaaaaggaattgcctttcccacaagtatcagcgtgaataactgcgtttgtcacttctccccactgaagtcagaccaggactacatcctgaaagagggagatttggtgaaaattgacctcggtgtgcatgtagacggattcatagcgaacgtggcccacactttcgtggtggacgtcgctcaagggacacaggtgacaggaaggaaggcggatgtgattaaggcggcgcatctgtgcgcagaggccgccctgcggctggtcaaacctggtaatcagaacactcaggttacagaggcatggaataaagtggcccatagttttaattgtactccaatcgaggggatgctttcccatcagcttaagcagcatgtaatcgatggcgagaagaccatcatccagaaccccacagaccagcagaaaaaagaccacgagaaagctgagttcgaagtccatgaagtatacgccgtagacgtgctcgtctccagcggtgaggggaaggccaaggacgccggtcagcgcactactatttacaagagggacccctcaaagcagtacggactgaaaatgaaaacgtcccgggcttttttcagcgaggttgaacggagatttgatgccatgcctttcacactaagagccttcgaggatgagaagaaagctagaatgggggtggtggagtgtgcaaaacatgagcttctacagccttttaatgtgctttacgaaaaggaaggcgagttcgtggcccagttcaagttcactgtgctcctcatgcctaacgggcccatgagaatcacaagtggaccatttgagcctgacctttacaaaagcgagatggaggtgcaggatgctgaattgaaagcgctgctacagagcagcgccagccgaaagacccaaaagaagaagaagaaaaaaaagaaaaaatag

SEQ ID NO: 200773 - DNA, 738 bp, synthetic construct
  misc_feature 1..738: note = Description of Artificial Sequence: Synthetic coding sequence
  source 1..738: mol_type = other DNA
atgacccggatgctgcagcggatggacgtgctggccaagaaggccacagagatgggagttaggttaatggtcgacgctgagcagacttattttcagccagctataagccgcctgacgctagagatgcagcgtaagtttaatgtggaaaaaccactgatctttaatacttatcagtgctatctcaaggacgcgtatgacaatgtgacccttgacgtggagcttgcccgcagggaaggctggtgcttcggagccaaactcgtccgaggcgcatatctagctcaagagagagcccgtgctgccgaaatcggctatgaggatcccatcaacccgacatatgaagcaaccaacgccatgtatcacagatgtctggactacgtgttggaagagctcaaacacaatgcgaaggccaaagtcatggtcgccagccacaatgaagacacagtgcgctttgccctcagaagaatggaggagctgggtttgcacccagctgaccaccgcgtctatttcgggcaactgctgggtatgtgcgaccaaatcagcttcccactgggacaggctggatatccggtgtacaaatacgtgccttacggaccagttatggaggttcttccatacttatcgaggagggccttggaaaatagcagtttaatgaagggaacccatagagagagacagttgctgtggctcgagctgctgcgcagactgcgtacaggaaatcttttccacaggcccgcgtag

SEQ ID NO: 200774 - DNA, 1803 bp, synthetic construct
  misc_feature 1..1803: note = Description of Artificial Sequence: Synthetic coding sequence
  source 1..1803: mol_type = other DNA
atggccctgcggcgggccctgcccgccctgcggccctgcatcccccggtttgtgcctctgagcaccgccccagcaagcagagaacagcctgcagctggcccagctgcagtccccggtggcgggtccgctaccgcagtgaggccccctgttcctgccgtcgatttcggcaatgctcaagaagcgtaccggtccaggcgcacctgggaactcgcaagatctctcctggtgttacggctgtgcgcctggcccgccttgttagctcggcacgaacaactgctgtatgtaagtcgcaaacttctggggcagcgactttttaacaaactcatgaagatgaccttctatggccacttcgtggctggggaagatcaagaatcaattcagccgttactgcgtcactatcgcgccttcggagtttcagccattttggattacggcgtagaggaggatctatctcccgaggaagccgaacacaaagaaatggaatcctgcacatctgctgcagaaagggatgggtctggaaccaataaacgtgacaaacagtaccaagcccactgggctttcggcgatcggagaaatggggtgatttccgcccggacttacttctacgccaatgaagccaaatgcgatagtcacatggagactttcctcaggtgcattgaagcaagcggccgagtgtcagacgacggcttcatagctattaaactgaccgccttgggcagacctcagttcctcctgcagttctccgaagtgctggcaaagtggcgctgtttcttccaccagatggccgttgagcaggggcaagccggtctggcggctatggatacaaagctcgaagttgccgtgttacaagaatcggttgcgaaactgggtatcgcttccagagctgaaatcgaggattggtttacagcagagaccctcggggtgagtgggactatggatctcctggattggtctagtctgatcgattctagaaccaagctttcaaaacatctcgttgtgccgaatgcacagactggtcagttggaaccactgctttctcgcttcacagaagaggaagaattacagatgacccgcatgctgcaacgtatggatgtcttggcgaaaaaagctactgagatgggcgttcgccttatggtagatgccgagcagacctatttccaacccgccatctcacggctgaccctggagatgcagagaaagtttaacgtcgaaaagccgctcatctttaatacctatcagtgttacctgaaagatgcttatgataacgtaacactggacgtggaactagcccgtagggaggggtggtgtttcggagccaagctggtgcgaggagcttacctggcccaagagcgtgcgagggccgccgagatcgggtacgaggatccaatcaaccctacatacgaggcaaccaacgccatgtatcaccgctgtctggattacgtgctcgaggagctcaaacacaacgccaaagccaaggtcatggtggcaagtcataacgaggacaccgttaggtttgcccttaggcgaatggaggagctgggcctgcatcctgcagatcacagagtgtacttcggccagctgctcgggatgtgcgaccagatctcctttcctctgggacaggcagggtaccctgtttacaaatatgtgccatacggccccgtgatggaggtgctcccgtacctgtcaagaagggccctcgaaaattccagcctgatgaagggcactcaccgcgaacgccaactgttgtggctggaattgcttaggcggctacgtacagggaacctgtttcaccgacctgcttag

SEQ ID NO: 200775 - DNA, 1479 bp, synthetic construct
  misc_feature 1..1479: note = Description of Artificial Sequence: Synthetic coding sequence
  source 1..1479: mol_type = other DNA
atgaagatgaccttctacggccacttcgtggccggcgaggaccaggagtcaatccagcctctgctcaggcactatagagcttttggggtgtccgctatactcgattatggggtcgaagaggacctctcccctgaagaagcggagcacaaggagatggagagttgtacatctgccgccgaaagggacggctccggaactaacaagcgggacaagcaatatcaagctcattgggctttcggcgataggaggaatggagtgattagtgcaagaacctacttctacgcaaatgaggccaagtgcgactcgcacatggagaccttcctccgttgcatcgaagcgagcgggagggtatcggacgacgggttcattgctattaagctgaccgccctgggtcggcctcagtttctgctgcagtttagtgaggtcctcgctaaatggcggtgcttttttcatcagatggctgtagagcagggccaggctggcctggcagccatggacaccaagttggaagtcgctgtgctccaggaaagtgtcgccaaactggggatcgctagtagggctgaaatcgaggactggttcactgcagagaccctgggtgtgtctgggaccatggacctgctggactggagctccctcattgattcgaggaccaagctgagtaaacatctggtggtgcccaacgctcagaccggccagctcgagcccctgctctcccgcttcaccgaggaggaggaattgcaaatgactcggatgctacagagaatggatgtactggccaaaaaggccaccgagatgggcgtacggctcatggtggacgccgaacagacctattttcagccggccatcagccgattgacgctcgaaatgcagagaaagttcaacgttgaaaaaccattaatcttcaacacctatcagtgttacctgaaggacgcctatgacaatgtgacactggatgtggagctggcccggcgagagggctggtgttttggcgcaaagctggttcggggagcttacttagctcaggagcgtgcccgggcagccgaaattggctatgaggatcccattaatccgacttatgaggctacaaatgcaatgtatcatcgatgtctggactacgtattggaggagctgaagcataatgctaaagcaaaagtaatggtggcctcacacaacgaagatacagtgagattcgccctgcgacgaatggaagagctgggactccatccagcagatcaccgggtttattttggccagctcttaggtatgtgcgatcagatttcattcccgcttgggcaggccggctatcccgtgtacaagtacgtgccttacggccccgttatggaggtcttgccttacctcagtcgacgcgccttagagaactcttccctaatgaagggtactcaccgggagcgccagctgttgtggctggagctgcttcgtagactacgaaccggaaacctgtttcataggcccgcctag

SEQ ID NO: 200776 - DNA, 1611 bp, synthetic construct
  misc_feature 1..1611: note = Description of Artificial Sequence: Synthetic coding sequence
  source 1..1611: mol_type = other DNA
atgagcccccgggtggtgagcaacagcagcgtgctggccagccagagtgttggaatcactaatgtaagaacggttttctccaatgtctttaacaacaccacagcatttccaatcttaagaggcagtaattgtcataaaatcacagcacccggcctcgggaagggccagctggtgaacctgcttccaccagagaatctcccctggtgtggcggtagccagggacctcgaatgttacgcacctgctacgtcctgtgctcccaggctggacccccatcgcgaggctggcagtcccttagcttcgatggaggtgcatttcacctgaagggtaccggggagctgactagagctcttctagtgcttagactctgtgcctggccccctctggttacccacggcctgctgctgcaagcctggagcaggcgtctcctgggcagcagactctccggagccttcctgagagcgagtgtgtatggccagtttgttgcgggcgagactgcagaggaggtgaagggctgtgtccaacaactccgaacactgagcttacgccccctgctcgctgttccaactgaggaagaacctgactctgcagccaagtcaggcgaggcttggtacgaggggaatctcggagccatgcttcgatgtgtggacctgtcacgcggactccttgagcctccaagtctcgcggaggccagtctgatgcagctaaaagttaccgccctgacgtctacacgcctgtgcaaagagttggcatcctgggttcgccgtcctggtgccagcttagaactatcacccgagcggctggccgaggccatggatagcggtcagaacctccaggtgagctgcctgaacgcagaacagaatcaacaccttcgggcgagcctgagtaggctgcaccgagtcgcacaatatgctcgggcccagcatgttagattattggtcgatgccgagtatacctctttaaatcctgcactgagcctcctagtggccgccctagcagtcaggtggaactcccctggcgaaggaggtccttgggtgtggaatacttaccaagcttgcttaaaagacacatttgaacgcctcggaagggacgcagaggccgctcacagagcagggttagcttttggcgtgaagctggtgcgcggagcctacttggataaagagcgggcagtcgctcaattgcacgggatggaagatcctactcagccagactacgaggcaacctcacagtcgtacagccgttgcttagaactcatgttgacccatgtggccagacacggcccaatgtgccatctcatggtggcttcacataacgaagagagtgtacgacaggcgaccaagagaatgtgggaactgggcatacccctggacgggacagtttgttttggacagttactgggaatgtgtgatcatgtcagcctcgcactggggcaagccgggtatgtagtgtataaaagtattccatatggcagtttggaggaggtgattccttatctgatacggcgggcacaggagaaccgctcggtcctgcagggcgcacgacgggaacaagagctgctctctcaggagctatggcggcgcctgctgcccggatgccggagaattcctcactag

SEQ ID NO: 200777 - DNA, 762 bp, synthetic construct
  misc_feature 1..762: note = Description of Artificial Sequence: Synthetic coding sequence
  source 1..762: mol_type = other DNA
atgcccggccggaccgagggcggcagctggctgcggaacgccgccgccgctgacgtcctgcgtaatctgccggaggttgaatggagggagcctcagcactgctgccccccgactccccgcaagagaaagcaaaaccccagggtgcctttaccccattatccgccaaaccctgccgctgccatcgccgctgacactatgccaaagagaaaaaaacagaaccaccatcagccaccgacacagcagcagcccccactcccagagcgagaggaaaccggagatgaggaggacggcagccctattggccctccctcactgttgggtccacccccgatggccaatggtaagcctggggatccgaaatcagccctgcatagaggtccacctggatcaagagggccgctgattcccccattgctgagtttgccccccccaccctggggtaggggacctattaggcgcgggctggggccgaggtctagcccttatggcaggggatggtggggcgtgaatgctgagcccccgttccctggaccgggccacggaggacccacacggggatcattccacaaggaacagagaaacccccgcagactcaaaagctggagccttattaagaatacctgccccccaaaagacgacccccaggtcatggaggacaaatccgacagacctgtgtgtcgtcactttgccaagaagggccactgtcgctatgaggatctctgcgccttttatcatccgggagtgaacggccctccactttag

SEQ ID NO: 200778 - DNA, 504 bp, synthetic construct
  misc_feature 1..504: note = Description of Artificial Sequence: Synthetic coding sequence
  source 1..504: mol_type = other DNA
atgcccaagcggaagaagcagaaccaccaccagccccccacccagcagcagccccctctgccggagcgcgaagagacaggcgacgaagaggatgggtcccctatcgctctgcaccgaggccccccaggatcaagaggtcctctgatcccaccgctcctctccctgccaccccccccatgggggaggggacccatccgccgcggcctcgggcccagaagcagcccctatggacgaggctggtggggcgtgaatgctgaaccacctttccccggccccggccacgggggaccaacaaggggcagcttccataaggagcaaagaaatccacgacggttaaagtcctggagcttgatcaagaatacctgtcctcctaaggatgacccacaagtgatggaagataagtcagatcgaccagtgtgtcgacattttgcaaaaaagggtcattgccgctatgaggatctctgcgctttctaccaccccggcgtcaacggacctccactatag

SEQ ID NO: 200779 - DNA, 567 bp, synthetic construct
  misc_feature 1..567: note = Description of Artificial Sequence: Synthetic coding sequence
  source 1..567: mol_type = other DNA
atgcccaagcggaagaagcagaaccaccaccagccccccacccagcagcagccacctttacctgagagagaggaaacaggcgatgaagaagatggcagcccaattgggcctcctagtctgctgggccctccgccaatggccaacgggaaacctggcgatcctaaatctgccctccatcgcggccctcctggcagcaggggacctctcataccccctctactgtccctccccccacctccttgggggagggggccaatacggagaggcctcggaccgaggtcttccccgtatggtcgcggctggtggggggtgaatgccgaaccgccgttccccgggcctgggcacggcggcccaacacgaggatcatttcacaaagaacagcgaaatcctagaaggctgaaatcatggagtctgatcaaaaacacatgtcctcctaaagatgacccccaagtcatggaagataaaagtgaccgccccgtgtgtaggcacttcgccaaaaaaggacattgtcgctatgaagacctttgtgctttttaccatccaggtgtcaatggacccccactgtag

SEQ ID NO: 200780 - DNA, 567 bp, synthetic construct
  misc_feature 1..567: note = Description of Artificial Sequence: Synthetic coding sequence
  source 1..567: mol_type = other DNA
atgcccaagcggaagaagcagaaccaccaccagccccccacccagcagcagccaccccttcctgaaagggaagaaacgggcgacgaagaagacggcagcccgattggacccccatccctgcttgggccccctcccatggccaacggtaagccaggcgacccgaaaagcgctctacatcgtggtccccctggcagcaggggccctctgatcccccccctgctcagccttccccccccaccttggggccgcggtcccatccgccggggacttggccctcggtcctcgccttacggaaggggctggtggggggtgaacgccgaacctccatttccaggacccggacatggaggacctactcgtggttctttccacaaggaacagcgcaatccgcgaagactgaaatcttggagcctcattaaaaacacgtgtcccccaaaggatgatccccaggtgatggaagataaatcagataggcccgtttgcaggcatttcgctaagaagggacattgcaggtatgaggatctgtgtgctttctaccatcctggcgttaatggacctcccctgtag

SEQ ID NO: 200781 - DNA, 504 bp, synthetic construct
  misc_feature 1..504: note = Description of Artificial Sequence: Synthetic coding sequence
  source 1..504: mol_type = other DNA
atgcccaagcggaagaagcagaaccaccaccagccccccacccagcagcagccgcccctgcctgaacgtgaagagaccggcgacgaggaggatgggagtccaatcgctcttcaccgcgggcctccaggttcacggggcccgcttatccctcccctgctcagtctcccgccacccccttggggcaggggccctatacgcaggggcctgggaccccggtcttccccatatggccggggatggtggggggtgaacgcggaaccacccttcccaggacctgggcatgggggacccacccgcggatcatttcacaaagagcagagaaatccccggagactgaagtcctggagcctcatcaaaaacacttgtccgccaaaagacgacccccaggtgatggaagataaatctgaccggcccgtgtgtcgccacttcgctaagaagggacactgccgttacgaagacttgtgcgccttttatcacccaggagtgaacggcccccccctgtag

SEQ ID NO: 200782 - DNA, 504 bp, synthetic construct
  misc_feature 1..504: note = Description of Artificial Sequence: Synthetic coding sequence
  source 1..504: mol_type = other DNA
atgcccaagcggaagaagcagaaccaccaccagccccccacccagcagcagcctcccctgcctgagcgcgaagagacaggggatgaggaggacggttccccgatagcgctgcatcggggacctcccggttcacgcgggccactgataccacctctgctgagcttacctcctcccccttggggccgaggccccattagaagaggcttaggtccgcgctcttccccatatggaaggggatggtggggagtgaacgctgaaccgccctttccgggacccggccacggcggacccacccgaggatccttccacaaagagcagcggaatccccgtcggctgaagagctggtcgttaattaagaatacttgcccacccaaagacgacccacaagtgatggaggataagtccgacaggccagtctgcagacatttcgccaaaaaaggacattgtaggtatgaggacctctgcgcgttctaccaccctggcgtgaacgggcctccactctag

SEQ ID NO: 200783 - DNA, 504 bp, synthetic construct
  misc_feature 1..504: note = Description of Artificial Sequence: Synthetic coding sequence
  source 1..504: mol_type = other DNA
atgcccaagcggaagaagcagaaccaccaccagccccccacccagcagcagccaccactcccagagcgcgaggaaactggcgatgaggaagatggaagtcccattgcccttcacaggggacctccgggaagcagagggcccctcatccccccccttctgagcttgcccccaccaccgtggggtcggggaccaattcgtcggggactgggacccaggtcttccccctatgggcgcggctggtggggggttaatgcagagccgccatttccaggtccgggacacggcgggcccacacggggtagcttccataaggagcagcgcaacccacgaaggctgaagagctggagtctcattaaaaatacgtgcccccctaaggacgatcctcaagtgatggaagacaagagcgatcggcctgtttgcaggcacttcgcgaagaaaggacattgtaggtatgaggacctctgcgcgttttaccatcctggtgtgaacggcccccccttatag

SEQ ID NO: 200784 - DNA, 567 bp, synthetic construct
  misc_feature 1..567: note = Description of Artificial Sequence: Synthetic coding sequence
  source 1..567: mol_type = other DNA
atgcccaagcggaagaagcagaaccaccaccagccccccacccagcaacaaccccctcttcccgagcgcgaggagactggggatgaggaagacggatctccgatcggaccaccgtctcttctcgggcccccacccatggcaaacggcaagcccggcgacccgaaaagcgctcttcacagaggtccaccggggtcacgcggtccactcataccccctttgcttagcctgcctcccccaccctggggacgcggaccgatcaggcgcggattaggaccgaggtcctccccatacggccgggggtggtggggggtaaatgcagaacccccctttccaggaccaggtcatggtggaccgacaaggggatcgtttcacaaggaacagaggaacccccgaaggttgaaatcctggagcttgatcaagaatacatgcccgcccaaggatgatccccaagtcatggaggacaaatctgatagacctgtgtgtcgtcatttcgctaaaaagggccactgtcggtacgaggatctgtgcgctttttaccatccaggcgtcaatgggcctcccctgtag

SEQ ID NO: 200785 - DNA, 567 bp, synthetic construct
  misc_feature 1..567: note = Description of Artificial Sequence: Synthetic coding sequence
  source 1..567: mol_type = other DNA
atgcccaagcggaagaagcagaaccaccaccagccccccacccagcagcagccacccctgccagaacgagaggaaactggggatgaagaggacggttctcctatcgggcccccctccctgttaggcccccccccaatggcgaatggcaaacccggcgacccaaaatccgccttgcataggggtcctcctgggtctagggggcccttgattccacccctgcttagtctgccacctcccccctggggcaggggtcctatccggcgcggcttaggaccacgcagctcaccctatggaagagggtggtggggcgtgaacgccgagccaccttttcccggacccgggcatggcggacctacccgcgggagcttccataaggagcaacggaaccctaggcggctgaagagttggagtctcatcaagaatacttgcccccctaaagacgatcctcaggtcatggaggataagtcagatcggcccgtatgtcgccacttcgctaagaaggggcactgtcgctatgaggatctctgtgcattctaccatccaggcgttaacgggccaccactctag

SEQ ID NO: 200786 - DNA, 504 bp, synthetic construct
  misc_feature 1..504: note = Description of Artificial Sequence: Synthetic coding sequence
  source 1..504: mol_type = other DNA
atgcccaagcggaagaagcagaaccaccaccagccccccacccagcaacagccaccgctcccagagcgtgaagaaacaggtgacgaggaggatggctctcccatcgccctacatcggggacctcccggttccaggggcccactgatcccccccttactcagccttccgcccccaccgtggggtcgaggcccaattaggcgggggctcggacctaggtcatctccgtatggaaggggatggtggggcgtaaatgccgaaccaccatttcctggcccaggacatggcgggccaactagagggagcttccataaggagcaacggaaccccaggcggctgaagtcctggtctctaatcaagaacacctgccctccaaaggacgacccccaggtaatggaggacaaaagcgatcgcccagtgtgccggcatttcgctaagaagggccattgccgctatgaggacttatgtgccttttatcaccccggtgtgaacgggccgcccctctag

SEQ ID NO: 200787 - DNA, 504 bp, synthetic construct
  misc_feature 1..504: note = Description of Artificial Sequence: Synthetic coding sequence
  source 1..504: mol_type = other DNA
atgcccaagcggaagaagcagaaccaccaccagccccccacccagcagcaaccccctctccctgagcgcgaggaaacaggcgatgaggaggatgggtctcccatagcattgcaccgtggacccccagggagtcggggcccactgatcccacctctattgtctctgccgcctccgccttggggcaggggccctatccgccggggtttaggaccgagatctagcccttatggcagagggtggtggggggtcaacgccgaaccaccattccccggtccaggacatggcggccctacccgcggcagtttccacaaggagcagaggaacccaagacgactaaaatcctggtcgctaattaaaaatacttgtccgcccaaggacgaccctcaggtgatggaggataagtctgaccgccccgtctgcaggcactttgccaagaaagggcactgccgttacgaggacctgtgtgcattctatcacccaggcgtaaatggacccccactctag

SEQ ID NO: 200788 - DNA, 504 bp, synthetic construct
  misc_feature 1..504: note = Description of Artificial Sequence: Synthetic coding sequence
  source 1..504: mol_type = other DNA
atgcccaagcggaagaagcagaaccaccaccagccccccacccagcagcagcccccattaccggaacgcgaggaaaccggcgatgaagaagacggttcaccaatcgcactgcatagaggcccccccgggtctcggggccccttgatcccccctctgctgagcctgcctccaccgccctggggaagaggcccgatcagacggggcctgggacccagaagctccccctatggccgcgggtggtggggcgtcaacgcggaaccacctttcccaggtcccggccacggcggacctaccagggggtcttttcacaaagaacagagaaacccccgccgactgaaaagctggtccctgatcaaaaacacttgtcctccaaaagacgatccccaggtcatggaggacaagagcgacagacctgtgtgtagacactttgccaagaagggacactgccggtatgaagatctgtgtgctttttatcatcccggggtgaacggcccacctctatag

SEQ ID NO: 200789 - DNA, 567 bp, synthetic construct
  misc_feature 1..567: note = Description of Artificial Sequence: Synthetic coding sequence
  source 1..567: mol_type = other DNA
atgcccaagcggaagaagcagaaccaccaccagccccccacccagcagcagccccctcttcccgaacgcgaagagacaggggatgaagaggatggatccccaattggaccaccatcgctgctgggaccccctcccatggcaaatggaaagccaggtgatccgaaaagtgcccttcacaggggcccccccggatccagaggcccactgattccgccgcttctctcgctcccacctccgccctggggtagaggtccgataagacggggactgggccccagatcttctccttatgggcgaggctggtggggggttaatgccgagcccccctttcccggccccggccacggaggccctacaaggggctctttccataaggagcagagaaatccccgccgattaaagtcttggtcactgatcaaaaatacttgcccccctaaagacgacccccaggtgatggaagacaaaagtgacagacctgtttgtaggcacttcgccaaaaaaggacactgcaggtatgaggatctttgcgcattttaccaccccggcgttaatgggccaccactgtag

SEQ ID NO: 200790 - DNA, 567 bp, synthetic construct
  misc_feature 1..567: note = Description of Artificial Sequence: Synthetic coding sequence
  source 1..567: mol_type = other DNA
atgcccaagcggaagaagcagaaccaccaccagccccccacccagcagcagcctcccttacctgagagagaagaaaccggcgacgaggaggatggcagtcccataggccctccttcactgctaggtccccctcccatggcgaatggaaagcccggtgaccccaaaagcgctttgcacagaggtcccccaggtagtaggggcccactgatacctcctctgctcagtctgcccccaccaccttggggccgcggacctattcgcagaggcctcggtcccagaagttctccctacggaagaggttggtggggcgttaacgccgaaccccctttccctggccctggtcacggtggacccactcgagggtcattccataaagagcagcggaacccccgacgcttgaaaagctggagtctgataaaaaacacttgtccgccaaaggacgacccacaagtgatggaggataagtccgaccgccctgtatgtagacatttcgcaaagaaaggccattgtcgttacgaagatctgtgtgccttctaccacccaggagttaatggacctccactgtag

SEQ ID NO: 200791 - DNA, 567 bp, synthetic construct
  misc_feature 1..567: note = Description of Artificial Sequence: Synthetic coding sequence
  source 1..567: mol_type = other DNA
atgcccaagcggaagaagcagaaccaccaccagccccccacccagcagcagccacccttgccggaaagggaggagacgggggatgaggaagacggatctcccataggtcccccgagtcttcttggccctcctcccatggccaacgggaaacccggagatcccaaatccgctctccacagagggcctccaggatctagaggccccctaattccccctcttttatcactaccacccccaccatggggtcggggccccatcaggcgaggattagggcctcgttccagcccctatgggagaggatggtggggggtgaacgctgaaccacctttccctggccccggtcatggcggccccactaggggcagcttccataaagagcagaggaacccacgcagacttaaaagttggtctctgatcaagaacacgtgcccacccaaggacgatccacaggttatggaagacaagtcggatagacctgtttgccggcattttgctaaaaaggggcactgtcgctatgaggacctgtgtgcattctaccacccgggagtcaatggccctcctctgtag

SEQ ID NO: 200792 - DNA, 762 bp, synthetic construct
  misc_feature 1..762: note = Description of Artificial Sequence: Synthetic coding sequence
  source 1..762: mol_type = other DNA
atgcccggccggaccgagggcggcagctggctgcggaacgccgccgctgcagacgtactgcggaacctacccgaggtggaatggagagagccccagcactgctgcccacccactccccgaaagaggaaacaaaatcccagggtgcccctgcctcactaccccccaaaccccgcagcagccattgctgccgatacaatgcctaagcgcaagaagcaaaaccaccaccagccccccacccagcagcagcccccacttccagagcgcgaggagactggcgacgaggaggacgggtctcccataggccccccgtcgctccttggaccgccacctatggcaaacgggaagccaggagaccccaaatcggccctccacaggggccctccagggagcagggggcccctgatccccccattgctgtcattgcccccccccccatggggacgcgggcccatccggcgtggactgggcccacgttcctccccttacggcagaggctggtggggcgtgaacgctgagccccctttccccggtccaggtcacggagggccgacacgtgggtccttccacaaggaacagcgcaatcccaggcgtctgaagtcttggagccttattaaaaacacctgtccacccaaggacgacccgcaggtcatggaggacaagagcgaccgccctgtgtgccgacacttcgcaaagaaaggtcactgccgctatgaggatctgtgcgctttctatcacccgggcgtcaacggtcccccactctag

SEQ ID NO: 200793 - DNA, 762 bp, synthetic construct
  misc_feature 1..762: note = Description of Artificial Sequence: Synthetic coding sequence
  source 1..762: mol_type = other DNA
atgcccggccggaccgagggcggcagctggctgcggaacgccgccgctgccgatgtgcttcgaaaccttcccgaggtcgagtggagagaacctcaacattgctgccctccaacgccccgcaaacgaaaacaaaatcccagggttcctctgcctcactacccaccaaaccctgccgcagccatcgcggcagataccatgcctaagaggaaaaagcaaaaccaccaccagccccctacccaacagcagccaccactgcccgagcgcgaggaaaccggtgacgaggaggacggatcccccattggccctccatctctcctgggtcctcctcccatggcgaatggcaagcctggggatcccaagtctgccctgcataggggcccccctgggagccgaggacccctgatcccccctttactctctttgccaccccccccttggggtcgcggtcctatcagacggggtctgggtcctagaagcagcccctatggcaggggctggtggggggtgaacgcagaacccccattcccgggccctggtcacggagggccgacaaggggatctttccacaaagaacagcgtaacccccgcaggctgaaaagctggtctctgataaagaacacctgccctcccaaggatgatccacaggtgatggaggataaatcggatcggccagtttgcagacactttgcaaaaaagggacattgccggtatgaggatttgtgcgcattctaccacccaggtgttaacggcccacccctatag

SEQ ID NO: 200794 - DNA, 762 bp, synthetic construct
  misc_feature 1..762: note = Description of Artificial Sequence: Synthetic coding sequence
  source 1..762: mol_type = other DNA
atgcccggccggaccgagggcggcagctggctgcggaacgccgccgcagcggatgttctcaggaatctgcctgaggtggagtggcgcgagccacaacattgttgtccacccacaccacgcaagaggaaacagaatccgcgggtgcccttgcctcattatcctccaaatccagccgcagccatcgctgccgatacgatgcctaagcggaaaaagcagaaccaccaccagccacccacacagcagcagccaccattacccgaacgggaggaaactggggacgaggaagatgggtcccctataggacccccatcccttctgggtcctccacctatggccaatggcaaaccaggcgacccaaagtcggccctgcacagggggcctccggggtctagggggccgctgattccaccactgttgtccttgccccctcccccatggggtaggggtccaatccggcgcggattggggcctcgaagctccccgtacggcaggggctggtggggggtcaacgccgagcctccttttccgggacctggtcatggcggccccactcgcggctcatttcacaaggagcagaggaacccaagacgactgaaatcctggtcactaatcaagaacacatgccctcctaaagatgatccacaagtcatggaggacaaatctgatagacccgtttgccgtcatttcgccaagaaaggtcactgccgctacgaagacttgtgcgccttctatcatcccggtgtgaacggtccacccctgtag

SEQ ID NO: 200795 - DNA, 762 bp, synthetic construct
  misc_feature 1..762: note = Description of Artificial Sequence: Synthetic coding sequence
  source 1..762: mol_type = other DNA
atgcccggccggaccgagggcggcagctggctgcggaacgccgccgccgcagatgtgctcagaaacctgcctgaagtggaatggcgcgagccacagcactgctgtcctccaacccctagaaaaagaaagcaaaaccctagggtgcccctgcctcactatccgcctaaccccgcagctgccatcgctgccgacacgatgccgaagcgcaagaaacagaatcaccaccagccgcccactcagcaacagccaccccttcctgagcgagaagagaccggcgacgaagaggacggctcgcctattgggcccccttctctcctcggcccgcccccaatggccaatggcaagccgggggaccctaaaagcgccctccaccggggccctcctgggagtcgggggccactgattcctccactcctgtcactcccaccgccaccatggggaagagggccaatccgccgcggactgggacctcgttcatcgccttatggtaggggatggtggggggtgaacgcggaacccccctttcctggcccgggccacggcggaccaacacggggctcctttcataaagagcagcgaaacccccgcaggctcaagagctggagcctcataaagaatacttgtccccctaaggacgatccacaggttatggaagacaagtcagatcggcccgtttgccggcattttgcaaaaaaaggacattgcagatacgaggacctttgcgccttttaccatcctggagtgaacgggccgcctctgtag

SEQ ID NO: 200796 - DNA, 762 bp, synthetic construct
  misc_feature 1..762: note = Description of Artificial Sequence: Synthetic coding sequence
  source 1..762: mol_type = other DNA
atgcccggccggaccgagggcggcagctggctgcggaacgccgccgccgccgacgtgctccgtaacctgcccgaggtggagtggcgggaaccccaacactgttgcccccctacacctcgtaagcgcaagcagaatccgcgagtaccgctgcctcattatcctccaaatcctgcggcggcgatcgcggccgacacaatgcccaagcgaaaaaagcagaaccaccatcagccacctacacagcagcaacctccactgcctgagagagaagaaactggcgacgaggaggacggtagtcctataggtccgccctctcttctgggcccccctccaatggcgaatggcaaacccggcgacccaaagtccgcactccataggggacccccaggaagccggggtccattaattccaccactgctaagcctgccaccaccaccttgggggcgtggcccaattcggcgggggctggggccacggtcctctccttatggacggggatggtggggagtaaacgctgagccccctttccctgggccgggccatggtgggcctacgcggggcagctttcataaggagcagcgtaatccccgacgtcttaaatcctggtccctcattaagaacacttgtccaccaaaggacgatcctcaggttatggaagataaaagtgataggccagtctgtaggcacttcgctaagaaggggcattgtaggtatgaagacctgtgtgctttctatcatccaggggtgaatggaccacctctttag

SEQ ID NO: 200797 - DNA, 762 bp, synthetic construct
  misc_feature 1..762: note = Description of Artificial Sequence: Synthetic coding sequence
  source 1..762: mol_type = other DNA
atgcccggccggaccgagggcggcagctggctgcggaacgccgccgctgctgacgtcctgcgtaacctccctgaagttgagtggcgagaacctcagcactgttgtcctcccaccccacgcaagcgaaagcaaaatccaagggtgcccctgccgcactaccctcccaaccccgccgctgctatagccgcagacacaatgcctaaacggaagaagcaaaatcaccaccaacccccaacccagcagcagcctcccttaccggaacgggaggaaacaggggacgaagaagacgggtcacctattggcccaccatcgctcctggggcctcccccaatggctaatggaaaaccgggggaccctaagtctgcccttcatcgggggcctcccgggagccgaggaccactaatcccccctttactgagcctcccgcccccaccctggggaagagggccaatcaggcggggattggggcccaggagctccccatatgggcggggatggtggggagtcaacgcagaaccgccgttcccgggtcctggacatgggggccctactcgtggctcgtttcataaagagcagcggaacccccggcggctgaagagctggagtttaataaaaaacacatgtccaccaaaggacgatcctcaggtgatggaggacaagtccgatcgccctgtgtgcaggcactttgcaaagaagggccactgcagatatgaggatctgtgcgcattttatcaccctggggtgaacggaccacctttgtag

SEQ ID NO: 200798 - DNA, 1344 bp, synthetic construct
  misc_feature 1..1344: note = Description of Artificial Sequence: Synthetic coding sequence
  source 1..1344: mol_type = other DNA
atgcggagcgtgagctacgtgcagcgggtggccctggagttcagcggaagcctgttccctcacgccatttgtctcggcgatgttgacaatgataccctaaatgaactcgtcgtcggcgatacatccggcaaggtgtcggtgtataaaaacgacgacagtcgtccatggttgacgtgctcgtgccagggcatgctgacttgcgtgggcgtgggcgatgtgtgtaacaaggggaaaaatttactggtggcggtgtcagctgaagggtggttccatttgtttgacctaaccccagcaaaggtgttggatgcttcaggccatcacgagacgcttatcggggaggaacagcgaccagtgtttaaacagcatatcccggctaacacaaaggtcatgctgatttcagatattgatggcgacggttgtcgagagttagtcgtcgggtatacagatagggtagtgcgggccttccgctgggaagaactgggcgaagggccagagcatttgaccgggcagcttgttagcctgaaaaaatggatgctcgaaggccaagtcgactccctctccgttacactgggtccgctcgggttgcctgagctgatggtgtctcagcccggatgcgcctatgcaatcctcctgtgcacatggaaaaaggacactgggagtccccccgcctcagagggcccgactgatggctctcgcgagactccagctgcaagagacgtggttctgcatcagacaagcggaagaatccataataagaatgtatctacacatttaataggaaatattaagcagggccacggaacagaaagtagcggcagtggactctttgccctgtgcacacttgacggaaccctcaagctaatggaggaaatggaggaagcggataagctcctgtggtcagttcaagttgaccatcagctgttcgcgctagaaaagttggatgttacgggaaacggacacgaagaagttgtcgcctgtgcatgggatgggcagacatatatcattgatcacaaccgcactgttgttcggtttcaggtggatgagaacatccgggctttctgtgccgggctgtatgcgtgcaaggagggcagaaattccccttgtctggtatatgtgacgtttaatcagaagatctacgtgtactgggaagtccagctggaacggatggaaagtacaaacttggtgaaattactggagaccaagcctgagtatcactccctattgcaggaactgggcgtcgatcccgacgatctgccagtcacccgcgccctgcttcaccagacattgtaccaccctgatcaacccccacagtgtgcccccagtagcttgcaggaccccacttag

SEQ ID NO: 200799 - DNA, 381 bp, synthetic construct
  misc_feature 1..381: note = Description of Artificial Sequence: Synthetic coding sequence
  source 1..381: mol_type = other DNA
atgctgctggtgctgctgagcgtggtgctgctggccctgagcagcgcacagagtaccgacaatgacgttaactatgaagacttcactttcactattccagacgtggaggacagttaccttgatcctctggtgatcgtggtgacaaaaatgatggtgctttctagggaccaccagaaccaggaggcaataaccgcaatccttccacatctcctgttcaaaatttctaacgaccatcccgatgaggacaccgtgaactcattgtacccagactttctgctgagtgcttgtcgcaagcaccaccattctagcaggggcaccgatcaacaggacattccgcgctccaatcacagtggaaatctggaattctctgggcggaagtag

SEQ ID NO: 200800 - DNA, 198 bp, synthetic construct
  misc_feature 1..198: note = Description of Artificial Sequence: Synthetic coding sequence
  source 1..198: mol_type = other DNA
atgctgctggtgctgctgagcgtggtgctgctggccctgagcagcgctcagagtacagacaacgacgtgaattatgaggacttcacttttaccatccctgcttgccgcaaacatcatcattcgagtagaggtactgatcagcaagatatacctcgttccaatcactcggggaacctggaattctcaggccggaaatag

SEQ ID NO: 200801 - DNA, 696 bp, synthetic construct
  misc_feature 1..696: note = Description of Artificial Sequence: Synthetic coding sequence
  source 1..696: mol_type = other DNA
atggccgtgttcctggaggccaaggacgcccacagcgtgctgaagagatttcctagagccaatgagtttctcgaggagctgagacaggggactatcgagcgagaatgtatggaggagatttgcagttatgaggaggtcaaggaggtatttgagaacaaggagaagacgatggaattctggaaaggctaccctaacgccgtgtacagcgtccgcgatccgagtcaatccagtgacgcgatgtacgttgttgtccctcttctcggtgtagccctgctcatcgtcatcgctctttttatcatttggagatgccaactccagaaggccacccggcaccatccgtcatacgcccaaaataggtacctggcctccagagccgggcatacattgccaagagtgatggtctatcgcgggaccgtccattctcaaggggaaccgagcggtcatcgcgaagctgctaacagcccccaggtcgtactgggaccctcccgcggaggccggaccaccgtgcgcttagagtctactctgtaccttcctgagttgtcgctatcaagacttagctcaaccaccccaccccccagctatgaagaggtgaccgctccacaggaaagctcatctgaggaagcctcagtaagctactctgatcctcctcccaaatacgaggagatcgtggctgccaatcccggagccgacaagtag

SEQ ID NO: 200802 - DNA, 309 bp, synthetic construct
  misc_feature 1..309: note = Description of Artificial Sequence: Synthetic coding sequence
  source 1..309: mol_type = other DNA
atggccggcctgagccgggccctgagcagcgtgttcctggaggccaaggacgctcattcagtgctgaaacgctttccaagagctaacgagttcctcgaagagcttcgccaagggaccattgagagggagtgtatggaggagatttgcagctacgaagaagtgaaagaggtatttgaaaataaggagaagaccgcctgtaccacccttggcctcgttctcggggtgggggtagcttcaggcatcgcgcgtacaggccctggcaatgccgaccagtcagaagcccggaaagatacccagcctaaggcttag

SEQ ID NO: 200803 - DNA, 276 bp, synthetic construct
  misc_feature 1..276: note = Description of Artificial Sequence: Synthetic coding sequence
  source 1..276: mol_type = other DNA
gaccccagccagagcagcgacgccatgtacgtggtggtgcccctgttgggcgttgcgctgctgatagtgatcgctctcttcattatctggcgttgtcagctccaaaaggctacacggcaccaccctagctatgcccaaaacaggagatgctttgctgtgcgccttgccgcacctagtttcgcctcaaagtattctaacgtcggtgcttttccttttcggctctgggccgcatcactgtcgctagcccggatctatttgacaaatatccccaagtag

SEQ ID NO: 200804 - DNA, 159 bp, synthetic construct
  misc_feature 1..159: note = Description of Artificial Sequence: Synthetic coding sequence
  source 1..159: mol_type = other DNA
atggccgtgttcctggaggccaaggacgcccacagcgtgctgaagaggttcccccgtgcaaacgagttcctcgaggagcttcggcaggggaccatagagcgggaatgcatggaagagatttgctcatacgaagaggtgaaggaagtctttgagaactag

SEQ ID NO: 200805 - DNA, 696 bp, synthetic construct
  misc_feature 1..696: note = Description of Artificial Sequence: Synthetic coding sequence
  source 1..696: mol_type = other DNA
atggccgtgttcctggaggccaaggacgcccacagcgtgctgaagagatttccgcgggctaacgaatttctcgaggaattacgtcagggcacaatagaacgtgaatgcatggaagaaatttgtagctatgaagaagtaaaagaggtctttgagaacaaggagaagacaatggagttctggaaaggttacccgaacgccgtgtactctgtcagggatccgtctcagtcctcagatgcgatgtacgtggtggtaccgctgttgggagtggccctgctgatcgtaattgccctgttcataatctggaggtgtcagctgcagaaagcaacgcggcaccaccccagttatgcccagaatcgctatttagcatcaagagcaggtcatactttgccacgggtgatggtgtacagaggcacagtgcactcacagggggaaccctccggccatcgtgaggcagccaattcccctcaggtagtgcttggtccatcacgaggaggtagaaccaccgtgcggctggagagcaccttgtacctgccggagctgtcactgagccgcctttcctccacaactcctcccccttcatacgaggaggtgacagccccccaggagtcgtccagtgaagaagcctccgttagttacagtgatcccccaccaaagtacgaggagatcgtagccgcgaaccctggggccgataagtag

SEQ ID NO: 200806 - DNA, 681 bp, synthetic construct
  misc_feature 1..681: note = Description of Artificial Sequence: Synthetic coding sequence
  source 1..681: mol_type = other DNA
atgttcaccctgctggtgctgctgagccagctgcccaccgtgaccctggggttcccccattgcgcgaggggtccaaaagctagcaagcacgcgggtgaggaagtgtttacaagcaaagaagaagcaaacttcttcatccaccggagactgctttacaataggtttgatttggaactgttcaccccaggcaatctggagcgcgaatgcaacgaggagctctgcaactacgaggaagccagggaaatctttgtagacgaggataaaacaatagctttttggcaggaatattctgcaaagggtcctaccacaaagtcagatgggaatcgagagaaaatcgacgtgatgggactgcttacaggtctgattgccgcaggtgttttcctggtcattttcggtctcctcggttattacctctgtattaccaagtgtaatcgtctccagcatccttgctcctccgcggtttacgagcgtggtcgacatacacccagcatcatctttcggcggcccgaggaggccgccctcagcccactaccaccctctgttgaggatgcaggcctgccctcttatgaacaggcagtggcgctaacccgcaaacactccgtgtccccacccccgccttatccaggccataccaaagggtttcgagtgttcaagaagtccatgagcctgcctagccattag

SEQ ID NO: 200807 - DNA, 375 bp, synthetic construct
  misc_feature 1..375: note = Description of Artificial Sequence: Synthetic coding sequence
  source 1..375: mol_type = other DNA
atgctgctgcgggacctggtgctgcggcggggctgctgctggagctcactgctcctgcactgcgcactccaccccctttggggatttgtgcaggtcacccacggagaaccacaaaagtcgtgctccaaggtcaccgatagttgtaggcacgtctgtcagtgcagacctcccccaccactgcctcctccccctcctcctccaccacctcctaggcttctgtctgcccccgcgccaaacagtaccagttgtccaaccgaggaaagctggtggtcaggactcgtgataatcattgcagtgtgttgtgcctctctcgtcttcctaacggttctggtgattatttgttataaggccatcaaaagaaatcacgccatatag

SEQ ID NO: 200808 - DNA, 462 bp, synthetic construct
  misc_feature 1..462: note = Description of Artificial Sequence: Synthetic coding sequence
  source 1..462: mol_type = other DNA
atgctgctgcgggacctggtgctgcggcggggctgctgctggagctcacttctactgcactgtgctcttcaccccctttgggggttcgtgcaggtgacacacggagaacctcagaaatcttgctcgaaggtcaccgatagctgtaggcacgtgtgtcagtgtaggccgccaccacctttacctcctcctccacccccacccccaccccctcgcctgctgtccgccccagctccgaattctacttcgtgtccgaccgaagagtcctggtggtcaggcctggttatcattatcgctgtctgctgtgcctctctggtgtttctgacagtgctggtgatcatttgttacaaggcaattaaacggaaacctctgcggaaagatgagaatgggacttccgtcgcggagtatccaatgtccgcctcccagagcaacaagggagtggatgtgaataacgccgtcgtttag

SEQ ID NO: 200809 - DNA, 462 bp, synthetic construct
  misc_feature 1..462: note = Description of Artificial Sequence: Synthetic coding sequence
  source 1..462: mol_type = other DNA
atgctgctgcgggacctggtgctgcggcggggctgctgctggagcagcctgctactgcactgtgcgctgcatcctctgtggggctttgtgcaagtcacccacggcgagccacaaaagtcttgttccaaggtcaccgattcttgccgacacgtgtgtcaatgtcggcctccccccccattgcctcctccaccgccccctccaccgccacccaggctcctttccgctcctgcccctaattctacaagctgccctacagaagagtcctggtggagcggcctagtaattatcatcgcagtctgttgcgcctctctggtgtttctgacagtgctggtgatcatttgctacaaggccattaaacggaaaccccttcgcaaagacgaaaatggtacctccgtggccgagtaccctatgtccgcatctcagtccaacaagggcgtggatgttaataacgccgtagtgtag

SEQ ID NO: 200810 - DNA, 828 bp, synthetic construct
  misc_feature 1..828: note = Description of Artificial Sequence: Synthetic coding sequence
  source 1..828: mol_type = other DNA
atgtggcgggccggcagcatgagcgccgagctgggcgtgggctgcgcattgcgagccgtaaatgagcgggtacagcaggcggtggcccgccggcctagggacttacccgccatccaaccaagactggtagctgtcagcaagaccaaaccggcagacatggttatcgaggcctatggacatggtcagcgaacctttggcgaaaattatgttcaggagcttctcgagaaggcgagtaatcctaagatactttcactctgtccggaaattaagtggcattttatcggtcacctgcagaaacaaaacgtaaacaaactgatggccgttccgaacttattcatgctggagacagttgattccgttaagcttgccgacaaagtgaatagctcctggcagaggaagggcagccccgagcggctcaaagtcatggtacagataaacacctctggagaggaatcaaagcacggtctgccacccagcgaaacaatcgcaatagtggaacatattaatgccaagtgccccaacttggaatttgtggggctgatgacgattggctcatttggccacgacctctcacaaggcccaaatccagacttccagcttcttctgtctctgcgcgaggagctgtgtaagaaactgaatattcctgccgaccaggtcgaactctctatgggcatgtctgccgactttcaacacgcagtcgaagtcggaagtaccaacgttcggatcgggagcacaattttcggagaaagagattactctaaaaagccaaccccggacaaatgtgccgctgatgtaaaagcaccactggaggtggcccaggagcactag

SEQ ID NO: 200811 - DNA, 1149 bp, synthetic construct
  misc_feature 1..1149: note = Description of Artificial Sequence: Synthetic coding sequence
  source 1..1149: mol_type = other DNA
atgcggagccccctgtgctggctgctgcccctgctgatcctggcctcagtggcgcagggtcagcccactaggcgtcctcgccccggcacaggtcccggccgacgaccacggccccgacccagaccaacaccctccttcccacagcctgatgaacctgcggagccgacagatcttcctccaccactgccgcccggccccccctcaatctttcctgattgtcctcgcgaatgctattgccctcctgattttccgtctgctttatattgcgactccagaaaccttagaaaggtgcctgtgatccccccgcgcattcactacctttacctgcagaataacttcattacagaactcccagtggagtcctttcagaacgcgactggcctgcggtggataaatctcgataataaccggataagaaaaatagaccagagagtcttggaaaagctgcccggactggtgtttctgtacatggaaaaaaatcagctggaagaagtcccatccgccctgccacgcaatcttgagcaactgcgcctcagccaaaatcatatctcccggatcccgccgggcgtcttttccaaattggaaaacctcttgctgctcgatctccagcataatagactgtcggatggagtctttaagcccgacacattccacggattaaagaacttaatgcaactgaacctggcacataacattttgaggaagatgcccccaagggtccccacggcaatacaccagctctatctggacagtaacaagatcgaaactattccaaatgggtactttaagtcatttcctaatcttgcctttatcagactcaattacaataagctgaccgatcgtgggttgcccaagaattcatttaatatcagtaatcttcttgtgctccatctctcccacaaccgtattagctcagtgcctgccattaacaatagattagaacacctgtatctgaataacaacagcatcgaaaaaatcaatggaacccagatctgcccaaacgatctcgtggcgttccacgacttcagctcagatctggagaatgttccacatttacggtatttgcgactggatggtaactatcttaagccacccataccactcgaccttatgatgtgcttccgcttgttgcaatctgtggtgatctag

SEQ ID NO: 200812 - DNA, 1002 bp, synthetic construct
  misc_feature 1..1002: note = Description of Artificial Sequence: Synthetic coding sequence
  source 1..1002: mol_type = other DNA
atggaggacctggaggaggacgtgcggttcatcgtggacgagacccttgacttcggcggccttagcccgtccgattctcgcgaagaggaggatatcactgtactagtcaccccggagaaacccctgagacgcggcctgagccacagaagtgaccctaatgccgttgcccctgcgccccaaggtgttaggctatccctcggacctttgagccctgagaaactcgaagagatcttagacgaagctaataggctggcagcccagcttgagcagtgtgccctgcaggacagagagagcgccggcgaaggactggggccccggcgagtgaagccctccccacgccgagagacatttgtgctgaaagatagccccgtgcgagacctcctccccaccgtgaacagccttactagaagcacccccagtcccagttccctgaccccccggctccgctcaaacgacaggaaggggtcggtccgcgcactccgcgctacctctggcaaacgccctagtaacatgaagcgcgaaagtcccacttgcaatttattccccgcatccaaaagcccagcctcatcacctctaacaagatcaacgcctccagtgaggggccgtgcaggccccagtggcagggccgccgcgtcaccacccacgccaattaggagcgtcctggcgccccaaccaagtaccagcaacagtcagcggctccctagaccacagggggccgctgctaagtcaagcagccagttgccaatcccgtcagcgatcccccggccggcatctagaatgcctcttactagccgctcagtgcctccaggcagaggagctctcccaccagattcactgtccaccagaaaaggccttccccgtcctagcacagcagggcaccgtgtgcgggagtccgggcataaggtccctgtttcccaacggctaaatctgcccgtcatgggagccactagaagcaacctgcagccccctcggaaggtcgctgtcccggggccaacacggtag

SEQ ID NO: 200813 - DNA, 933 bp, synthetic construct
  misc_feature 1..933: note = Description of Artificial Sequence: Synthetic coding sequence
  source 1..933: mol_type = other DNA
atggaggacctggaggaggacgtgcggttcatcgtggacgagaccttggacttcggcggtctgtctccgtccgattcacgcgaagaggaggacataacagtcttagtcaccccagagaaacctctgaggcgcgggctcagtcatcggtctgacccaaatgctgtagcccccgctcctcaaggtgttcgtctgagcctgggacccctgtcccccgagaaactcgaagaaattctggatgaggctaataggctcgccgcacagctagagcagtgcgcccttcaggatagagagtctgccggtgaaggactcggtccccggagggtgaagccctcaccacggcgggagacattcgttctgaaagactctcctgtgcgagaccttttacctactgtgaattccctgacgagatccacacccagcccttcatcactgacccctagacttaggtccaatgatagaaagggtagtgtccgcgccctcagagccacatctggaaagagaccaagcaatatgaaaagagagtcgcccacctgcaacttgttccccgccagtaagtcacccgccagcagtcctttaactaggtctacacctcccgtccgcggacgggcgggcccatctggtcgtgccgctgcttccgaggagacgcgggctgcaaagctgcgcgcctgccagcccaacgcaacccaccaacccgagtgtgcaacctggcagagatgccctacgtccggttttagtgtgaactcaaagagagccagcaaaacaaagcactgtcgaacccaatcagccggcaaatggacccaaggcagctgttttccggccactaaatcaagctgccacggttgccacagccagcagtctgccgctccccaggaatctggcagtccacgcacatatcaggtgaagcgctcaggccagcaggccaggctccagtag

SEQ ID NO: 200814 - DNA, 1002 bp, synthetic construct
  misc_feature 1..1002: note = Description of Artificial Sequence: Synthetic coding sequence
  source 1..1002: mol_type = other DNA
atggaggacctggaggaggacgtgcggttcatcgtggacgagaccctagattttgggggactgagcccctcagatagtagggaggaagaggacatcacagtactggtcacccctgaaaaacccctgcgcaggggcctgagccatcgctccgatccaaatgccgtcgctcctgcgccccaaggcgtccggctttctctgggaccgctcagtcccgaaaagctggaagaaatcttggacgaggcaaataggttggccgcccagctcgaacagtgtgcattacaggatcgggaaagcgctggcgaagggctcggtcccagaagggtgaaaccctcgccacggcgcgagacatttgtgctgaaagactcacctgtgcgggatttgttgccaactgtgaacagcttgacacggagcacaccatcacctagcagtcttaccccacgccttcggagcaatgatcgcaaggggtctgtgagagccctacgggctaccagcggcaagcgacccagtaacatgaaaagagagtcccccacctgtaatttatttccggctagtaaaagccctgcctcaagccctctgaccagaagcacacctccagtccggggaagagcaggccccagtggacgtgccgccgcgagtccgcctacaccaatccggagcgttctagctccccagccatctacatctaatagccagcggctcccccgcccccagggcgctgcggccaagagctcatcccagctgccaatcccgtcagcaatacctcggcctgcttctagaatgccgctaacaagtcggtctgttcctcctggccgaggcgccttgccccctgactccctgtcaacaagaaagggcctgccccgtcctagtactgcgggccaccgagtaagagagagtggccataaggttccagtctcccagaggctaaatctgcccgtaatgggagctactcgttctaatctccagcctccccgaaaagttgccgttccaggtcccacccgctag

SEQ ID NO: 200815 - DNA, 1002 bp, synthetic construct
  misc_feature 1..1002: note = Description of Artificial Sequence: Synthetic coding sequence
  source 1..1002: mol_type = other DNA
atggaggacctggaggaggacgtgcggttcatcgtggacgagaccctggactttggcggcctctcacctagcgatagtcgcgaggaagaggacataaccgtgttggtcactccagaaaaacccctccggagagggctttcacaccgatccgatcccaatgcggtcgctccagccccacagggagtgagattgagcttgggtcctctaagtcccgaaaaacttgaagagattctagacgaggcgaaccgattagctgctcagctggagcagtgtgcccttcaggatcgtgagagtgccggagagggactgggacccaggcgggtgaaaccatctccgaggagagagactttcgtcctgaaggactcccccgtaagggatctgctaccaaccgttaatagcctgactcgttctacaccgtcaccttcatcactgacaccacgccttcgatccaacgacaggaaagggtcagttcgcgcgttacgggccacttcaggaaagcggccttccaatatgaagcgcgaaagtcctacatgtaacttatttccagccagtaagtcccccgctagcagtcccctgactaggtccactccccctgtcaggggccgagcagggcctagcggccgcgcagctgcgtcccctccgaccccaatccgctcagtgcttgctccccagccaagcacatcaaactcccaaaggttgcctagaccacaaggcgctgcagccaagtcttcatcccaactgcctatcccatccgctataccaagacctgccagtagaatgcccctgaccagccggagcgttcccccaggcagaggggccctgccccccgattctctgtcaacgcgtaaggggttgcctaggccctccaccgccggacaccgtgtccgcgagtccgggcataaagtgccagtatcccagcgactgaacctaccagttatgggcgcgacaaggtctaatctccagcctcctaggaaggttgcagtcccgggccctacacgctag

SEQ ID NO: 200816 - DNA, 1002 bp, synthetic construct
  misc_feature 1..1002: note = Description of Artificial Sequence: Synthetic coding sequence
  source 1..1002: mol_type = other DNA
atggaggacctggaggaggacgtgcggttcatcgtggacgagaccctagactttggcgggctgtctcctagcgactcaagagaagaagaagacatcacagtgctcgtcacccccgagaagccattacgcaggggactgtcccaccgctccgacccaaacgccgtggccccagctccccagggcgtgagactgtcccttggacctctgagtccagagaaattagaggagattctcgacgaggcaaaccggctggccgcacaattagaacaatgcgcgctccaggaccgcgagagcgctggtgagggcctgggaccccgacgggtgaaaccctcccctcgacgagagacgttcgtcttgaaagactcaccagtgagagaccttttacctactgtgaactcgctgacgcggtctacaccctcaccatcaagcctaactccacggctcaggagtaatgaccgaaagggttcagtccgggctctccgagccacctctggaaaacgtccttccaacatgaaaagagagagtccaacctgtaatcttttccctgcgagtaaatcccctgcgtcatccccactgactagaagcactccacccgtgagaggcagagctggcccgtccggcagggcagcagcctcaccccccactcctattcgaagcgttttagcaccccagccctccactagcaatagtcagagactgcctagaccccaaggcgctgcggcaaaatcctcaagccagcttcctatcccatctgctattcctagacccgccagcaggatgcctctcacctcacgctctgtcccacctggtagaggagctttaccacccgacagtctgtccaccaggaagggactgccccgcccctcaacggcaggtcatagggttcgggagtccgggcacaaagtgcccgttagccagcggctcaatctaccagtcatgggagcaacgcggtccaacctccaacctcccaggaaggttgcagtgcctggtccaaccaggtag

SEQ ID NO: 200817 - DNA, 666 bp, synthetic construct
  misc_feature 1..666: note = Description of Artificial Sequence: Synthetic coding sequence
  source 1..666: mol_type = other DNA
atggaggacctggaggaggacgtgcggttcatcgtggacgagacccttgacttcggtgggctctccccaagcgattctcgggaagaggaggacatcaccgtgctggttactccagagaagccactgagaagaggcctgtcccacagaagtgaccctaatgccgtggcgcccgctccacaaggcgtcagattgagcttggggcctctgtcccccgagaagctggaggagatcctggacgaggctaatagactcgccgcacaacttgaacagtgtgccctgcaagatagggaaagcgctggcgagggccttggccctaggcgagtgaagccgtcgccacgacgggaaacttttgtactgaaggatagtcccgtacgggatcttttaccgaccgtgaattccctcacaagatcaaccccttcaccttcttctttgacaccccggcttaggtctaacgacaggaaggggtcagttagagccctgcgcgcgacatccggcaaacgaccgagcaacatgaagagggagtcaccgacttgtaacctgttccctgcctctaagagtcccgcaagctctcccctgaccagatcaacaccccctgttaggggaagagctggaccctccggacgggcggctgcctctgaagagacgcgggctgctaaactcaggtag

SEQ ID NO: 200818 - DNA, 699 bp, synthetic construct
  misc_feature 1..699: note = Description of Artificial Sequence: Synthetic coding sequence
  source 1..699: mol_type = other DNA
atggaggacctggaggaggacgtgcggttcatcgtggacgagaccctggattttggcgggctctcgccatccgactcaagagaggaagaagacatcaccgtcttggttacaccggaaaagccattgagacggggtctatctcaccgttcagatcccaatgccgtagcacccgctccacaaggagttcgactgtccctggggcctctatcccccgaaaagctggaagaaatcctcgacgaggctaataggctggccgctcagcttgagcagtgtgctctccaggatagagaaagcgcaggagaggggctcggtcccagaagggttaaaccatcacccaggcgagagacttttgttttgaaggactcccctgtacgggatcttctcccaacagttaatagtctcacacggtcaactccgtcaccaagctcacttactcctcggctgaggtccaacgatcgaaaaggctcagtccgggccctgcgcgcgactagcggtaagaggcccagcaacatgaaacgggaatccccaacgtgcaatctgtttccagccagcaaatcccccgcatcttcccccctcacacggagtaccccacccgttcggggccgggccggaccctcaggccgcgctgccgcctcacccccaacccctatccggtccgtactggcacctcagccctcaacttctaattcacagcgttag

SEQ ID NO: 200819 - DNA, 1092 bp, synthetic construct
  misc_feature 1..1092: note = Description of Artificial Sequence: Synthetic coding sequence
  source 1..1092: mol_type = other DNA
atggaggacctggaggaggacgtgcggttcatcgtggacgagaccctggactttggaggcttaagcccttctgactccagggaagaggaagacataacagtgctggttacgcccgaaaaacctctaaggcggggactcagccaccggtctgatccaaacgccgtggcccctgcaccccagggagtgcgccttagtttaggccccttgtctcctgaaaagttagaagagattttagacgaagcgaatcggctggctgcccagttggaacagtgtgctctgcaagatagagaaagtgcaggggagggcctgggcccgaggcgggtgaaaccgtccccaaggcgggaaaccttcgtgctcaaggactctcccgtgagggacctgctgccgacagtgaacagcctgacccgctctacccctagccccagtagccttacgccacggcttaggtccaacgatcgcaaggggtccgtgagagccctgcgcgctacgtccggaaagcggccctcgaacatgaaaagagaatcaccaacttgcaacctgtttccagcaagcaaatcccccgctagcagccctttaactagaagcacacctcccgtgcgagggcgcgcgggcccctccggccgggccgccgcctccgaggaaacgcgcgctgctaagctgagagttagcgggagcggggagttcgttggcctgaccctgaagtttttacatccaagccctccaggccccccaactccaatccggtccgtgcttgctccgcaaccttctacatccaatagccaaaggctgccaagacctcagggcgccgcagcgaaatcttcctcacagctacctatcccttccgcaataccgagaccggcctcgaggatgccactaacaagtcgaagcgtgccacccgggcggggtgccctcccccctgattcgctgagcacccggaaggggttacccagaccaagcacagccggtcacagagtgcgggagagcggacataaagttccggtgtcacagagactcaacctgcccgtaatgggcgcaactaggagcaatctacaacctccccgaaaggttgcagtccctggtcctactagatag

SEQ ID NO: 200820 - DNA, 273 bp, synthetic construct
  misc_feature 1..273: note = Description of Artificial Sequence: Synthetic coding sequence
  source 1..273: mol_type = other DNA
atgcggcggctgctgctggtgaccagcctggtggtggtgctgctgtgggaggcgggcgccgtcccagcccctaaggtgcccattaagatgcaggtgaagcactggccttccgaacaggatcccgagaaggcatggggcgctcgcgtcgtcgagccccccgagaaagacgaccagcttgtcgttttgtttcccgttcagaaacctaaactgctcaccacagaggaaaagccccgcgggacaaaagcctggatggagagtcgggctaggccttag

SEQ ID NO: 200821 - DNA, 459 bp, synthetic construct
  misc_feature 1..459: note = Description of Artificial Sequence: Synthetic coding sequence
  source 1..459: mol_type = other DNA
atgcggcggctgctgctggtgaccagcctggtggtggtgctgctgtgggaagctggagccgtgcccgctccaaaagtacctatcaagatgcaggtgaagcattggccgtcggagcaggatccagagaatcgggcatggggggcccgtgtggtggagccaccagagaaggacgatcagctcgtggtgttatttccagtgcagaagcccaaacttctcacgactgaggaaaaacctcgcggccagggccgaggacccattctgccggggacaaaagcctggatggaaacagaggataccctcggtcacgtgctctcgcccgagccagaccacgattcgctgtatcatcccccacccgaggaagatcagggcgaggagcgccctaggctctgggtgatgcctaaccaccaagtgctgctcgggccggaggaggatcaggatcacatttatcatccgcagtag

SEQ ID NO: 200822 - DNA, 456 bp, synthetic construct
  misc_feature 1..456: note = Description of Artificial Sequence: Synthetic coding sequence
  source 1..456: mol_type = other DNA
atgcggcggctgctgctggtgaccagcctggtggtggtgctgctgtgggaagcaggagctgtcccggcacccaaagttccaattaagatgcaagtgaagcattggccctctgaacaggaccccgagaaagcgtggggggctagagtcgtggagccccccgaaaaggacgaccagctggtcgtcctgtttcctgtgcagaagcctaaacttctgaccactgaggaaaagccaaggggtcagggacggggccccatcctgcctgggaccaaagcctggatggagacagaggacactctgggacacgtactcagcccagagcccgatcacgactccttgtatcatcctccacccgaggaagaccagggagaggagaggccgcggctgtgggtgatgcctaaccaccaagtcctgcttggtcccgaggaagaccaagatcacatttaccacccacagtag

SEQ ID NO: 200823 - DNA, 429 bp, synthetic construct
  misc_feature 1..429: note = Description of Artificial Sequence: Synthetic coding sequence
  source 1..429: mol_type = other DNA
atgcggcggctgctgctggtgaccagcctggtggtggtgctgctgtgggaagccggggcagtgccagctcccaaggtccctattaagatgcaggtgaagcactggccgagtgagcaagatcctgagaaggcttggggcgctcgagtggtggagcccccagagaaagacgaccagctagtcgtgctcttccctgttcagaaaccaaaacttctgacaactgaggagaagccacgcggaactaaggcatggatggagaccgaggacaccctggggcacgtgcttagtcccgaaccggatcacgactccctgtaccacccacctccagaggaggaccaaggcgaagaaaggccacgcttgtgggtcatgccaaaccaccaggtcctgcttggacctgaggaggatcaagatcacatttatcatcctcagtag

SEQ ID NO: 200824 - DNA, 6474 bp, synthetic construct
  misc_feature 1..6474: note = Description of Artificial Sequence: Synthetic coding sequence
  source 1..6474: mol_type = other DNA
atgagcgaccggagcggccccaccgccaagggcaaggacggcaagaaatattcctccctgaacttgttcgatacatacaaagggaagtctctggaaatccagaagcccgctgtggctccacggcacggcctgcagagcctgggcaaggtggcaattgcccggaggatgccgcctcctgccaacctccctagtttgaaggccgagaataaaggaaatgaccctaatgtctcattggttcctaaggatggtacgggatgggcctctaaacaggagcagtccgaccctaagtcaagtgacgcaagtaccgcacaacctcccgaatctcagcctctccccgcttcacagacccctgccagtaaccagcctaagcgtcccccggccgcacccgagaacaccccactcgtgcccagtggggttaaatcttgggcgcaggctagtgtgactcacggggcccacggtgacggcgggagggcatctagcctgctgtcccggttctctagggaggaatttccaaccctccaggcggctggcgatcaggacaaggccgcgaaagagcgtgaatctgccgagcagtcttcaggtccaggaccctccctcagacctcagaattccacaacatggcgggatggcggcgggcgcggccctgatgagctagagggacccgactcgaagctccatcacggccatgacccacggggcggcttgcagccctccggacctcctcaattccctccttacagaggtatgatgcctcccttcatgtatccgccctacttgccatttcctccaccctatgggccacaaggcccctataggtacccaactcctgacggtccatcccgcttcccgcgggtcgctggcccccgtggctctggcccaccgatgcgccttgttgaacccgttggccgaccatcaattctgaaggaagataatctcaaggagtttgatcaactggatcaggaaaacgacgacggctgggctggggctcacgaggaggtggactacacagagaaactcaaattttctgatgaggaggacggacgggattctgacgaggaaggggccgaaggtcatcgcgactcccagtccgcctctggagaggagaggccaccagaagcggatgggaagaagggcaattctcctaactccgagccaccaactcccaagaccgcatgggctgagacatctaggcctcccgaaactgagcctggcccccctgctcctaaaccgccattgcctcctccccacaggggccccgccggaaattggggcccacccggggattacccggatcggggtggtcctccatgcaagccacccgcacctgaagacgaagacgaagcgtggagacagaggagaaaacagagctcttcggaaatctctctggctgtggaaagggcccgcaggcgccgagaagaggaggaacgtagaatgcaggaagagcgccgtgcagcttgtgcggagaaactaaaacgcctcgacgagaagtttggagctcccgataaacgcctgaaggctgaaccagcagcccctcccgctgcaccgtccaccccagcccctcctccagctgtgccaaaagaattacctgcccctcctgcccctccccccgcatccgccccgaccccagagaccgagccagaggaaccagctcaggcacccccggcccagtctactccaacgccaggcgtggctgccgccccgactctggtaagtggcgggggttcaacatcttcaacgtcttcaggctctttcgaggcctccccggttgaaccccagctcccctccaaagagggccctgagcctccagaggaagtcccaccgcctacaactccccctgtgccaaaggttgagccaaagggcgacgggataggcccaacacggcaaccccccagtcagggactgggataccccaagtaccagaaaagtctgcctcctaggttccagcgtcagcagcaggagcagttactcaaacaacagcagcaacaccagtggcagcagcaccagcaggggagtgctcctcctacacccgtgccaccttcccccccccagccggttacacttggggccgtgcctgccccccaggccccaccacccccaccaaaagccctataccccggggcacttggccgccctcctcccatgcctcccatgaatttcgacccgcgatggatgatgattccaccctacgtggatcccagactgttgcagggacgtcccccactagatttctaccctcccggagtacaccctagtggcttagttccaagagaacgatcagattccggtgggtcctcttcagaaccctttgacagacacgcccctgctatgcttcgcgaaagaggaaccccaccagtggatcccaagctggcctgggttggggatgtgttcacagccacacccgccgaaccacgtccgctcacatccccattgaggcaggccgctgatgaggacgacaaggggatgagaagcgaaaccccaccagtgccaccgccacctccatatctggcatcgtatccagggtttccggagaacggagcaccaggccccccgatttcccgcttccccctcgaggaacccggtccgcggcctctcccatggcctcctgggtcagatgaggtggcgaagatacagacaccaccccccaaaaaagagccccccaaggaagaaaccgcgcagctgactggcccagaggccggacgcaagcccgccaggggagttgggtcgggcggacaaggccctccgccaccaaggagggagagccgcacggaaacccgatggggccctcgaccgggcagcagccgcagaggaattccacctgaagaacccggtgccccgcccagacgcgcaggcccgataaaaaaaccacccccccctacaaaggtggaggagcttccccctaaaccccttgagcagggtgacgaaacaccaaaaccccccaagcctgaccctttaaaaataactaaaggaaagctgggaggccccaaagagacaccacccaacggcaacctgtcacccgcccctcgcctgagacgcgactatagttacgaaagagttgggcctactagttgcagaggaaggggccgcggagagtattttgccaggggccggggcttccgcggaacttatggcgggcgcggcaggggggctcgatcacgcgagtttagaagctaccgcgagttccggggggacgacggcagagggggagggaccggaggaccgaatcacccacccgcccccagaggacggaccgctagcgagacacgatcagaggggagtgagtatgaagaaattcccaaacgacgcaggcagagaggaagtgaaactggatcagagacccatgaaagcgacctagccccctcagataaggaagcacctacccccaaagagggcacacttactcaggtgcccttagcgccgccaccaccaggtgcaccaccatctcctgcccccgctcgcttcacagcacggggcggtagagtgttcaccccccggggggtgccttccagacgcggccggggaggaggtcgccctcctcctcaggtgtgtcctggctggtcacctccagccaaaagcttagccccaaaaaaaccccccaccggccctctgcctcccagcaaggaaccgctcaaggagaaactgattcctgggcctctgtcccccgtcgctagaggcggttctaatggcggtagcaacgttggcatggaggacggcgaacgccctagacggagacgccatggccgcgcgcagcaacaggacaaacccccgcgctttcgtcgactgaaacaggagagagaaaatgccgctcggggctcagaaggtaaaccctctctcacactgcctgcctccgcccccggccctgaagaagccctcacaactgttaccgtggccccagctccccggcgggctgcagccaagagtcctgatctgagtaatcaaaacagcgaccaggctaacgaagagtgggaaaccgcgtcagagtcttccgattttacttccgagcgacgcggcgataaagaagcaccacctccagtgcttcttacacctaaggcagtggggacacccggcggaggtggcggaggcgctgtgcccggaatctccgctatgtcccggggtgatctctcccagagggctaaagacctctcaaaacgctcgttctctagccaacggccaggtatggagaggcagaatcgaagaccaggacccggaggtaaagccgggagttctggctcttcctccggtggcgggggtggaggccccggggggcgtacagggcccggccgcggggataagcgctcttggcctagccccaagaaccggtcacggccccccgaggagagaccccccggcctccctctccctccccctcccccctctagttccgcagtgtttcgactggatcaggtgattcattccaatccagcgggcatccaacaggcgttggcacaactttcttcacgccagggcagcgtgactgcgcccggtgggcatccgaggcacaaacccggcctgcctcaggccccacagggaccgtcgccgcgccccccaacaagatacgagccacaacgcgtgaactctggccttagttctgacccacacttcgaggaacctggacccatggtgagaggcgtggggggcaccccacgggactcagccggtgtgtcccctttccccccaaagaggagggaaaggccccccagaaagcctgaacttctccaggaagagagcctccctcccccccactcaagtggcttcctcggcagcaagccagaggggcctgggccccaagctgagtcacgggataccgggactgaagcccttactccccatatctggaaccggctgcataccgctacctcgaggaagtcttacaggccctcaagcatggaaccttggatggagcccctgagcccattcgaggatgttgccgggaccgaaatgagccagagtgattctggagtggacttgagtggagactctcaagtgagttcaggcccgtgttcccagagatcaagccccgatgggggattgaagggcgccgcggagggacccccaaagagacctggagggtcttctcccctaaatgccgtgccatgtgaggggccgccaggttcagaaccccctcgtagaccccctcctgccccgcacgatggtgatagaaaggagctgccgcgagagcagcctctcccacccggacctataggcacagaaagatctcagagaacagacaggggcacggagccaggacccatcagaccctcccacagacctgggccccccgtccagtttggaaccagtgacaaggactccgatctaaggctcgtagtgggcgattcattgaaagccgagaaggaactcacagcctccgtgactgaggcaattcccgttagccgagattgggaactgttgccatctgcggctgcctcagcggaaccacagtcaaagaacttggactccggccactgcgtccccgagccatcttcttcaggacagaggttatatcccgaggtcttttatggttcggcaggaccaagtagctctcagatcagtggaggagcgatggattcccagctgcatccgaatagcggggggtttagacctggtacccccagtctgcacccatatagaagtcaaccactgtatctcccccccggtccagctccaccatcagccctgctgtctggactggccttaaaaggacagtttctcgatttctcaactatgcaagcgacagaactggggaaactcccagccggaggcgttttatatcccccacccagtttcctatactcccccgcattttgtcccagtccgctgccagatacatccctcttgcaggtccgccaggacctccccagtcctagcgatttctatagcactcccctccagcccggaggccagtccggtttcctgcctagtggagcgcccgcacagcaaatgctcctgcctatggttgactctcaacttcctgttgtcaattttggaagcttaccccctgctccccctccagccccgcccccactctcccttctgcctgtaggacccgcactgcagcctccatccctcgccgtgagaccaccgccagctccagccaccagggtgcttccttctccggcaagacccttccccgcaagcctcgggagagctgaactgcatcccgtcgaactgaaaccctttcaagactaccaaaagctgtccagtaatctgggtgggcccggctcaagccgtacacccccaaccgggcggagcttttctggtctgaatagcaggttgaaagctaccccctctacgtacagcggggtgttcagaacacagcgtgtagacctgtatcaacaggccagtcctccagatgctctgcgctggatcccgaaaccctgggagaggaccggccctccgccccgagaaggtccttcacgacgagctgaggagcctggctcccggggggataaagagccgggccttcctcctcctcgatag

SEQ ID NO: 200825 - DNA, 4149 bp, synthetic construct
  misc_feature 1..4149: note = Description of Artificial Sequence: Synthetic coding sequence
  source 1..4149: mol_type = other DNA
atgctgcgggagcggggcaccccccccgtggaccccaagctggcctgggtgggagacgtattcacggccacacccgctgagcctcgccccctgacttcacccctgcgccaggctgccgatgaggacgataagggtatgcgctctgagacccccccggttcccccacctccgccttatcttgcctcctaccctggctttcctgagaacggtgctccaggtccaccaatcagcagattcccactggaggagcctggcccaaggcccttgccatggcctccagggtctgatgaagtggccaaaatccagacacccccaccaaaaaaggagcctccaaaagaggagacagcacaactaacgggacccgaggccggccgcaagcccgccagaggtgtcgggtccggaggccagggtccacctccccctagacgggagagtcgaaccgaaacacgttggggcccacgtccaggcagttcccgacgcggcatcccaccagaagagccaggggctccacctcgcagggcaggtccaataaaaaagccaccacctccaacaaaggtggaggagctgccacccaaaccccttgagcagggtgacgaaacccctaagccaccgaaacctgatcctctgaaaataacaaaggggaagttgggtggtcccaaagagacaccacctaacggtaacctgagtcctgcccccagattgcgtcgcgattatagctacgaaagagtgggtcccactagttgtaggggtagaggacgaggagaatacttcgccaggggacgcggcttcagaggaacgtacggcgggagaggccgcggggcccggagcagagagttccgatcctaccgcgagttccggggagatgacggacgtggaggaggcaccgggggacctaatcacccgccagcccctcgcgggcgtaccgcgtctgaaacccgaagcgaagggtccgaatacgaggagataccaaagagaaggcgccagcggggttccgagactggttccgaaactcacgagtccgatctggcaccttcagacaaggaagcgccaacaccaaaagaggggacgctgacccaggtcccgctcgccccgcctcctcctggcgcgcctccatcaccggcccccgcccggtttacagccaggggaggtcgagtcttcacgccgcgcggtgtgccatcacgcagggggagaggtggcggcagaccccctcctcaggtgtgtcctggctggagtccacccgcaaagagcctggctccaaaaaagccccctacgggtccactgccacccagcaaggaacctctgaaagagaaactgattcctggtcccctgtctccggtggcacgagggggttccaatggcggatcaaacgttggtatggaggacggcgagaggcctaggcgccggcgccatgggcgggcacaacagcaagacaaacctccccgctttcgaagactgaagcaggagcgagaaaacgcagcacgcggtagtgaaggcaagccttcactgactctgcctgcttcagctcccggtccggaggaggccctcacaactgtaaccgtggcccccgcccctcggcgtgccgccgctaagtcacctgatttaagcaatcagaactcagatcaggcaaatgaggagtgggagacggcctcggagagttctgacttcacatctgaacgtagaggcgataaggaagcaccacctcccgtgctcctgaccccaaaggcagtggggacccctggggggggaggcggaggggccgtgccgggcatatccgccatgtcccggggcgacctgagtcaacgggccaaagatttaagtaaacggagcttcagctcgcagagacccggcatggaacggcaaaaccgcaggccaggcccaggtggaaaagccggcagctctgggagcagcagcggcggcggcgggggcggcccgggcgggagaactggacctggccgcggagacaagaggtcatggcctagccccaaaaacaggtcccgaccccccgaggaacggcccccaggtctgcccctcccacctcctccccccagctccagtgctgtatttagattagatcaagtgattcactctaatcctgcaggcattcagcaggccctggcccagctgtccagccgacagggcagcgtaaccgccccggggggtcaccccaggcataagcctggtctaccacaggctccccaggggccatcccccagaccaccgacccgctacgaaccacaacgcgtaaatagcggcctgtctagcgaccctcacttcgaagagcccggaccaatggtgaggggagtgggtggaacccccagggactccgcgggcgttagcccattcccaccgaagcgccgcgaacgtccaccaaggaagcccgaactcctgcaggaggagtccctaccgccaccccacagttccggattcctcgggtcaaaacctgagggacccggtccacaggcggagtcccgggacacaggcaccgaggcccttactccccatatttggaacagattgcacactgccacctcccgcaaaagttatcgccccagttcaatggagccttggatggaacctctctcacccttcgaagacgtcgccgggactgaaatgtctcagtccgactcaggtgtagatttgtcaggggactcccaggtctcaagcggcccttgttcccagagatcttcgcccgatggtgggctcaagggggccgcagagggcccacctaagcgtccggggggctcttccccgctaaacgccgttccctgcgaaggccctcctggaagtgagcccccccgcagaccgcctcccgcaccccatgatggtgacaggaaggaacttccccgggaacaacccctcccgcctgggcccatcggcacggaacggtctcagcgaacagacaggggcacggaacccggccccattcgaccatcacatagacctgggccgccagtccagtttggaacatccgacaaagattccgatcttaggctggtggttggagacagtctgaaggctgagaaggagcttaccgccagcgtgaccgaggccatcccagtcagccgggactgggagttgttaccatctgcagcggcctccgctgagccccagtccaaaaacctggattccggtcattgtgtccccgagccgtcttcctccggccaaaggctatatcctgaagtgttctacggtagtgctgggcctagcagcagtcaaattagcgggggagcgatggacagtcagctgcatcctaattctggaggctttcgtccaggcacaccttcgttacatccttacagatcgcaacctttatatctaccacccgggccggctcctccaagcgctctcttgtccggtctggctcttaagggacagtttctggatttttccacgatgcaggcaaccgagctgggaaaactgcccgccgggggagtcttatatccacctcccagctttctgtactccccagcattctgtccttctccattgccagacacttctcttctccaggtgcggcaggacctgcccagcccttcggacttctactctactccactacaacctggaggccagtccgggtttctgcccagcggcgcacccgctcagcagatgttgctgccaatggtcgacagccagttgccagtggtgaacttcggttctctgccaccggctccgcccccagcacccccaccactcagtctgctgcccgtaggtcctgctcttcagccaccgagcttggctgtacgaccccctccggctcctgcaactagggttctgccatcgcctgcacgaccattcccggccagtctcggacgcgccgaactgcacccagttgaactcaaaccctttcaagactaccagaagctcagctccaatctgggagggcccggctcatccaggacccctcctactggccgcagcttctcagggttaaatagccgattaaaggccactccgtcaacttactcgggcgtgtttcgcacacagagggttgacttgtatcagcaggcaagtccccctgatgctcttaggtggatccctaagccatgggagaggacgggcccgccccctagggaaggaccatctcgccgcgccgaggagcctggatcacgaggagacaaggagccaggtctgcctcctccccggtag

SEQ ID NO: 200826 - DNA, 6474 bp, synthetic construct
  misc_feature 1..6474: note = Description of Artificial Sequence: Synthetic coding sequence
  source 1..6474: mol_type = other DNA
atgagcgaccggagcggccccaccgccaagggcaaggacggcaagaagtacagttccctcaacctgttcgacacttacaagggaaaatccctcgaaattcagaagccagccgtagcaccgcgtcacggccttcaatcgctgggcaaggtggcgatcgcccgccggatgcccccacctgccaacctgccttctctgaaggccgaaaacaaggggaacgacccgaatgtgagcttggtgcctaaggatggcaccggctgggcgtcaaagcaggaacagagcgatccgaagtcaagtgacgccagtaccgcccagccacccgagagtcagcctttgcctgcgtctcaaacccccgctagcaatcagcccaagagaccccccgcagcaccggaaaacactccgcttgtccctagcggagtcaaaagttgggcacaggccagcgtaactcatggagcccacggagatgggggaagagcaagcagccttctgtcccggttttctcgggaagagttccctaccctgcaggccgcgggcgaccaggataaagcggctaaggaaagagagtccgccgagcagtccagcggaccagggcctagccttcgccctcagaacagcaccacttggagggatgggggaggacgcggccctgatgagcttgagggtcctgatagtaagttgcatcacgggcacgaccccagaggggggttgcaacccagcggccctcctcaatttcctccatatagggggatgatgccccccttcatgtatccgccatatttaccgttcccacctccctacggcccacagggaccataccggtacccaacgcctgacggcccgagtcggtttccccgagtagccgggccgcgtggttccggcccgccaatgcgcctcgtggagccggttggccggccctcaattcttaaggaagacaatctgaaagagttcgaccagttggaccaggagaatgatgacggttgggctggcgcacacgaggaagtcgattacactgagaaactcaaattttccgatgaggaagacgggcgggattcggacgaggagggagcagagggacatcgcgacagccaatcagcaagtggggaggagcgacctcctgaagctgacggtaagaagggcaactctccaaatagtgagcccccaactccaaaaactgcttgggcggaaacatcccgcccgccagaaacagagccaggacccccagccccaaaaccccccttgccaccaccacatcgcggaccggcaggcaactggggccctccaggggattatcccgaccggggtggtcccccatgcaagcctccggcgcccgaggatgaagatgaggcctggcgccagcggcggaaacagtccagcagcgagatctctctcgccgtggagagagcacgccggaggcgtgaagaggaggaaagaaggatgcaggaagaacgacgggcggcgtgcgcagagaaacttaagagattggacgaaaagttcggcgcccctgacaaaagactgaaagcagagcccgcagctccaccagctgcaccttctacaccagcccctcctccagctgtccctaaggaactgcctgcgcctcctgcacccccccctgctagtgctccgactccggagaccgagcctgaggaacccgcccaggcgccaccagcacagtccacaccgacacctggcgtcgccgctgcaccaaccttggtaagtggagggggctcaactagttcaacttcctccgggtccttcgaagcctcacccgtggaaccacaactccccagcaaagaagggccagagccccccgaggaagtgcctcccccgactaccccccccgtgcccaaagtggagcccaagggtgatggtatcgggcctactcgccagcctccatcacaagggctagggtaccccaaataccagaaaagcctaccaccaaggttccagaggcagcaacaggaacagctccttaagcagcaacagcagcatcagtggcaacagcaccagcaaggatcagcacctccaactccagtcccacccagccccccacagccagtgaccctgggggccgttccagccccacaggcaccaccaccgccacccaaggccctgtatcccggagccctggggaggccacctcctatgccccccatgaacttcgaccccaggtggatgatgatacccccctatgttgatccccggctgctgcagggtcggccccctctggatttttacccgcccggggtgcatccctcagggttggtgccccgtgaacgaagtgactctgggggttcatcctccgaacctttcgacagacacgcacccgccatgcttagggagagaggtacgccaccagtggatcccaagctggcgtgggtgggagatgtgttcaccgccaccccagctgagcctaggcccctaacttcgccgttaagacaggcggcagacgaagacgataaaggcatgcggagcgaaacgccacccgtgcctccccctcccccttatctagcttcataccctggatttccagagaatggagcaccagggcctcctatcagtagattcccactggaggagcctggtcccagacctctcccttggcctcccggctcggacgaggtggccaaaatccagacaccacccccgaaaaaggaaccacctaaggaggagactgctcagctgacaggacccgaggctggtcgtaagccggccaggggagtgggcagcggagggcagggaccaccccctccccgtagagagagcaggacggagactagatggggaccccggccaggatcctcgcgaaggggtatccctcccgaagaacccggggcacctcccagacgggccggccctattaaaaagccaccccctccaaccaaagtggaagaactgccgccaaagccactggagcaaggcgatgagacccctaagcctccgaagcccgatccgctgaagataacaaagggaaaactgggcggaccaaaggagacccctcccaatggaaatttatcccccgcccccagactgaggcgagattatagctatgaacgagtggggcctacttcatgtaggggacgtggccgcggagagtacttcgcccgggggaggggcttcagagggacatatggtggccgcggccgaggagcgcgctcgcgagagtttcggtcgtacagagaattccgaggcgatgacggcaggggagggggcaccggagggccaaaccatccaccagccccccggggaagaacggcctccgagacccgatcagaaggttctgagtacgaagagatccccaaaagaagaaggcagcgtggctccgagactgggtcagaaacccacgaatcagatttggcaccatctgataaggaggcccctactcctaaggaggggaccctgacccaagtccccttggcacccccccccccaggtgcccctccatctcccgcgcccgcaaggtttactgcacgtggggggagggtgtttacaccccgtggcgtaccttccagacggggaagaggaggcgggcgacctccaccccaagtgtgtcctggatggtcgcctcccgccaagagcttggcccccaagaagccccctacagggcctctccctccgagtaaagagccactgaaggaaaagcttatccctgggccgctgtctccggtcgcccgcggggggtctaacggaggctcgaatgttgggatggaagatggcgaaagaccacgccggcggcgacatggaagggcccagcagcaggacaagccaccccggttccgccggctgaagcaggagagagaaaatgcagctcggggctcagaaggcaagccctcccttacactccccgcttctgcacctggtccggaggaagccttgacaaccgttacggtggccccagccccccgcagagctgcagcaaagagtccagatctgagtaatcaaaacagcgaccaagcaaatgaggagtgggagacagcaagcgaaagctccgatttcacctctgagcggaggggcgacaaggaggcgccccctcccgtgctgttgacaccaaaggccgtaggtacgccaggcggcggggggggtggagcggtacccggcataagtgctatgtcccgaggcgatctgagccagagagccaaagatctatccaaacgatccttttcaagccagcgacctggtatggaaagacagaacaggcggcctggacccggggggaaagctggctcctcaggcagctcctccggcgggggaggcggggggccaggagggcgaaccggcccaggtcgtggcgataaaaggtcatggccatcccccaaaaaccgatccagaccacctgaagagaggcctcccggactgcccctgcctcccccccccccttcctctagtgcggtatttcgccttgatcaagtgattcatagtaaccccgcgggcattcagcaagcactcgcccaactctccagccgacaaggcagtgtcacggctcctgggggtcatccacggcataagcctggactccctcaggctccccaaggccctagcccaagaccacctactagatatgagccccagcgcgtaaactcaggtctgtcatccgaccctcacttcgaggaacccggccccatggtccgcggcgtaggcggaacaccccgagattcagccggagtcagcccttttccaccaaagcgacgagagcgaccccctagaaagcctgaactcctgcaggaagagtcactgccaccccctcactcgagtggtttcctggggtctaagccagaaggtccaggccctcaggctgagagtcgtgatactggaaccgaggcactgacaccacacatatggaatcgcttacacactgcaacttcaaggaagtcttatcggcctagcagcatggaaccatggatggaacccctcagtccgttcgaagatgtagcgggcacagaaatgagccaatctgatagtggagtcgacctatctggagactcacaagtgagctcgggtccctgcagccagagatctagtccggatggcggcctgaagggcgccgccgagggacccccaaagcggcctggaggcagttcaccattaaacgcagtgccgtgcgaaggcccccctgggtccgaacctcccagaaggcctccccctgcaccacacgatggtgaccgcaaagagctgcctagagaacaacctctgccccccgggcccatcggtacagaacgctcccagcgaacggaccgcggcaccgaaccaggtcctatccgccctagtcacagaccaggacctccggtccagtttggcacttcagataaagatagcgatcttcgcctagtggtgggggatagcttgaaggctgaaaaggagctgactgcttcggtgacggaagccatacccgtctctcgggactgggagctgctgccatccgccgccgcaagcgcagagccccagtccaagaacctcgactccggccactgtgtgccagaaccctctagttccggccagagactgtatcctgaagttttttacggctcagcagggccatcttcttcgcagatctccggaggggctatggactcacagctccacccaaacagcggaggctttaggccaggcacaccatcccttcatccttatcgttctcagccactgtacctgcctcctgggcctgctcctccgtcagcgctgctgtcgggactggccctgaaaggccagtttctcgactttagcactatgcaggccactgaactgggcaaactgcctgctgggggcgtcctgtatccccctccctccttcctgtactctccagctttttgcccaagccccttgcctgatacatctttactgcaggtccgccaggatcttccctccccaagtgacttctacagcacccctctgcagccggggggccaatctggcttcctaccctctggagcgccagctcaacagatgttactccctatggtcgactcacagctgcccgtcgtcaacttcggaagccttccccccgctcccccgcccgctcccccccccctgtctttacttcccgttggccctgcactccagccccctagtctcgcagtgcgtcctccaccggcacccgccactagagtgttgcctagccccgcccgaccgtttccagcctccctaggtcgcgcagagctccaccctgtggagctgaaaccatttcaggattatcaaaagctgtctagcaatctgggcgggcctggttcaagtagaacacctcccaccggcaggtccttctccggactgaacagccgcctgaaagcaactccctccacttatagtggagtatttcggacgcagcgcgtggacctgtaccagcaggcatctccccctgatgccctgcggtggatcccaaaaccatgggaacggaccgggcctccacctcgagaaggaccatcaagacgagctgaagagccaggctctcgtggagataaagaaccagggctgccgcccccacgttag

SEQ ID NO: 200827 - DNA, 6474 bp, synthetic construct
  misc_feature 1..6474: note = Description of Artificial Sequence: Synthetic coding sequence
  source 1..6474: mol_type = other DNA
atgagcgaccggagcggccccaccgccaagggcaaggacggcaagaaatattcaagcctcaatctgtttgatacatacaagggcaagtcactggagatccagaaaccggcagtggccccaagacatggactgcagtccttggggaaagtcgccatcgcaaggcggatgccaccgccagccaatctacccagcctcaaagctgagaacaaaggtaatgatcctaatgtctcactggtgccaaaggatggaaccggttgggcaagtaaacaggaacagtcagaccctaagtcatctgatgcttccactgcccagccccctgaatcgcagccactccccgcctcacagacacccgccagcaatcagcctaagcgccctcccgccgcccctgaaaatacacccttggtgcccagtggcgtcaaatcctgggctcaagcctcggtcacacacggtgcccatggcgatggtggacgggctagctctctgctatccagattttccagagaggaatttccgaccctgcaggcagccggcgaccaggataaggccgcaaaagagcgagaatcagccgagcagtctagcggccctggaccgtccctaaggccccagaactccactacctggcgggatggcggaggtcggggccctgacgaactagagggccccgatagcaaactccaccatgggcatgacccccgaggtggactgcagccaagcggccccccacaatttcccccgtaccgcggaatgatgcctcctttcatgtaccctccgtatttgccatttcctcccccgtatgggcctcagggtccatataggtaccccactccggacgggcccagccgctttccgcgcgtggctgggccaagggggtctggaccaccaatgaggctggtagaaccggtggggcggcctagcattctgaaagaggacaacctgaaagagtttgaccagctggaccaggagaatgatgacgggtgggcaggagctcacgaagaggttgattacactgagaagctgaaatttagcgatgaagaagatggccgtgatagcgatgaggaaggagccgagggccatagggattcccaaagcgcttccggcgaagagcgtccacctgaggcggatgggaagaaagggaacagtccaaacagtgagcctccaactccaaaaacagcctgggcagaaacaagcaggccaccggaaaccgagccaggacccccagcacctaagcccccactaccaccccctcacagggggcccgctggaaattgggggcctccgggggattaccccgatcgcggtggaccgccttgcaagccacccgcccccgaggacgaggacgaagcttggagacaacgtagaaagcagagcagcagcgagataagcctggcggtagagcgtgccaggagacgacgggaggaggaggaaaggcgcatgcaggaggaacgcagggccgcatgcgctgagaagttaaaaagactcgacgaaaagttcggggcaccagacaagaggcttaaggcagagcctgctgctcccccggccgccccttccacacccgctccccctcccgccgtaccaaaggaactgcccgctccccccgcccctccccccgcttccgcccccacaccagaaaaggagcccgaggagccagcccaggcaccccccgctcagagtactcctacccctggggtagcagccgcacccacactcgtttccggtggaggttctacctcctcaacgtctagcgggtcttttgaagcctccccagtggaaccacagctccccagcaaggagggtcctgaaccgccggaggaagtgcctccccctacaaccccaccggtaccaaaagtggagcctaaaggcgacggcatcggaccaaccaggcaacccccgtcccagggactaggttaccccaagtatcagaaatctttgccaccccgctttcagaggcagcagcaggaacagttactgaagcagcaacaacagcatcagtggcagcaacaccagcaggggtctgctccccccactcctgtacccccctctcccccgcagccagtaaccctgggtgcagtgcctgctccacaggctcccccgcccccgcctaaggctctttacccaggcgctctgggtagacctccccctatgccacctatgaactttgatcctcgatggatgatgataccgccttatgtggacccacgcttgctccagggacgacctccccttgacttctaccccccaggggtgcaccctagcggattagtccctcgggaaagaagcgattccggggggagcagctccgagccttttgacaggcacgcgcccgccatgctaagggagcggggcactccccctgtggacccaaagttagcctgggtgggtgacgtctttactgcaaccccagccgagcccagaccattaacctcgccattacgccaagcagccgatgaggacgacaaaggcatgaggtctgagacccctccggtgccaccgccaccaccgtacttagcctcttatccagggttccccgaaaacggagcaccagggccgccaatttcacgctttccacttgaggaacccgggccgcgtcctctaccctggcccccaggatccgatgaggttgcgaagattcaaactccacctccaaagaaagaacctcccaaagaagagactgctcagctcaccggacctgaggctggaaggaagccagcaagaggcgtggggagcggcggtcagggtcccccgcctcctagaagagagtcccggactgagacccgttggggtccacgccctgggagctccaggaggggcatacccccagaagagcctggtgctcctccccggcgtgcagggcccataaaaaagcctccacctcccaccaaagtagaagaattgccaccaaagccccttgaacaaggtgacgaaaccccaaagcctccaaaacctgatccattaaagatcacaaagggaaagctcgggggtcctaaggagacaccacccaatggtaaccttagtcctgctcctaggttgcggcgggactacagctatgagagggtagggcctacttcctgtcgggggcggggacgcggtgaatatttcgcccgtgggaggggtttccgcggcacgtacggaggcagaggccgtggggctcgttcacgtgaatttcgctcttaccgtgagttcagaggagacgacggtagaggtggcgggactggcggaccgaatcacccacctgcgcctcggggtcggaccgcaagcgaaacaaggagtgagggctccgaatacgaggagattcctaagcggaggagacagcgcggatccgaaactgggagcgagactcacgagagcgatctcgctccaagcgataaggaggcccctacccctaaggagggtacgctgacccaggtacctctcgcgccacccccacctggagcccccccaagcccagccccagcacgctttaccgcgcgcggcggaagagtgttcacgccgcgcggagtgccctccagaaggggaaggggaggcgggcggccccccccccaagtctgtcctggttggtctccccctgcgaagtcattagctccaaaaaaacctcctaccgggccgctccccccttcgaaagaaccgctgaaggaaaagctgattcctggccccttaagtcctgtcgccaggggcgggtctaacgggggtagcaacgtgggaatggaggacggcgaacgtccacgccggagaaggcacggaagagcgcagcagcaggacaaacctcctcgtttccgacgactgaaacaggagcgagagaacgctgcccgcggttcagaaggaaaacccagtctgactctgcctgcgtccgcccctgggccagaggaggccctcactactgttaccgtggccccagccccacggagggcagctgctaagagccctgatctatccaatcagaattccgatcaagcaaacgaggaatgggagaccgcaagcgaatcgtcagactttaccagcgagaggaggggggataaagaggccccaccacctgtattgctgacccccaaggcagtaggaactcccgggggagggggaggtggggccgtgccaggcatcagcgccatgtctagaggagacctgagtcaacgagccaaagatctgtctaagcggtcattcagcagtcagaggcccgggatggaaaggcaaaaccgcagaccgggacctggtggaaaggccggatcatctggatccagtagcgggggagggggcggcgggcccggaggaagaacaggaccaggccgcggggataaaagatcttggccctcacccaagaacaggtctaggccgccggaggaaagaccaccaggtctccctctcccccctccacccccttcctcctcagctgtattccgcctggaccaggtcatccatagcaacccagcaggcatccagcaagccttagcacagctctccagtcgtcagggctcagtcaccgcacctggaggccaccctcggcataaaccagggccgccgcaggcccctcagggtccaagtccccggccgcccaccaggtatgagccgcaaagggttaacagcggattatcttcagacccacactttgaagagcccgggccaatggtgcggggcgtcggagggactcccagggatagcgccggggtcagcccattcccgcctaagagacgtgaacggccaccccggaaacctgaactgctccaggaagaatccctacccccgccccatagctcagggttcttgggtagtaagcccgagggtcctgggccccaggccgagagcagggatacagggacagaagccttaacgccccacatctggaatagactgcacacagcaaccagcagaaagagctatcgccccagcagcatggaaccatggatggaacctcttagtccctttgaagatgtggccggaacggaaatgtcccagagtgatagcggggtggatctctccggggactcacaggtgagcagcgggccttgctcccagcggagctcccccgatggggggctgaagggcgccgcagagggaccgccaaagagaccaggtgggtcctcacccctcaacgcggtgccctgcgagggccctcccggctctgaacctccccgcaggccccctccagcccctcacgatggggaccgtaaagaattacctcgcgagcagcctctcccgcctggtccgatcggcactgagaggtctcagcataccgaccggggcacagagcccggacccattcgaccttctcacaggccaggacccccggtgcaatttggaaccagcgacaaggacagtgacttaaggctcgttgttggggacagcctcaaagcggaaaaggagttaacggcaagtgtcacagaggcaattcctgtgagtagggactgggagctcctcccttctgctgctgccagcgcggaacctcagagtaaaaacctggactccggacactgtgtgccggagcctagcagctccggccaaaggttatatccagaggtgttttatggaagcgccgggccctctagcagtcagatttcaggtggcgcgatggattctcaactgcaccccaacagtggtgggttccggccggggactccctcactgcatccctaccgcagccagcccctgtacctccctcccggaccggccccaccctccgccctgctttctggggtcgctctaaaaggccagttccttgacttttccactatgcaggctaccgagttgggtaaattgccggccggaggtgtgctttacccacccccctccttcctctatagcccggcattctgcccatcacctctacccgacaccagcctgctgcaagtgcggcaagacctgcccagcccttctgatttctattccactccactccagccaggtggccagagcggatttctgccatccggggccccagctcagcagatgctgctgccaatggtcgactctcagttgccagtggtgaacttcggtagccttccgccagccccacctcccgctcctccctcgttgtcgctgctgccagtggggcccgctctgcagcctccgagtctcgctgttcggcctcctccggcaccagccacacgtgtattaccctctcccgccagaccgttcccagccagcctcgggcgggccgagctccacccagtggaattaaagcctttccaggactatcagaaactgtcatctaacctgggtgggccaggctccagccgcacgcctcctaccggacggagcttttctggtctcaacagtcgattgaaagcgacacccagcacctacagcggtgtgttcaggacccaacgtgttgacctgtaccagcaggcctcgccccctgatgcactcagatggattccgaaaccctgggagagaaccggtcccccgccacgcgagggaccaagcaggcgcgccgaggaacccggctccaggggcgacaaagaacccggactgcctccccctcgatag

SEQ ID NO: 200828 - DNA, 6474 bp, synthetic construct
  misc_feature 1..6474: note = Description of Artificial Sequence: Synthetic coding sequence
  source 1..6474: mol_type = other DNA
atgagcgaccggagcggccccaccgccaagggcaaggacggcaagaagtactccagcctgaacctgttcgatacatacaaaggaaagagcttggaaatccagaagccagctgtggctccacgccacggtctgcagtctctggggaaggtggctatcgccaggaggatgccccctcctgccaatctgccttctttgaaggctgaaaacaaaggcaatgaccctaatgttagtttggtaccgaaggacgggaccggatgggccagcaagcaagagcagtcggaccctaagagctctgacgcaagcacggcgcagcccccagaaagccaacctctgccagccagccagacacctgcgtccaatcagcctaaacgtcccccggctgccccagagaatacccctttggtgcccagtggtgtgaagagctgggcccaggcatccgttacccacggcgctcacggagatggcggcagggcctcttccctgctctcaagattttctcgcgaagaatttccaacactccaggcagcaggtgatcaggataaagctgctaaggaacgggagtctgcagaacaatcaagcgggcctggtccctcactcagacctcagaatagtacaacctggagagacggcggcggcaggggcccagatgaactggaggggcctgatagtaaactgcatcacggccacgatccccgcggcgggctccagccaagcggccctcctcagttcccaccgtataggggaatgatgcccccatttatgtaccctccctacctaccgttccctcctccatatggtccacaagggccatataggtacccgacaccagacggccctagtaggtttccccgggtagcaggccctagaggaagtggccctcctatgcgtctggtagaaccggtgggcagaccgtccatccttaaggaagataacctcaaagagttcgatcagctagatcaggagaatgatgacggatgggccggagcccatgaagaggtcgattacacggagaagttaaaatttagtgatgaggaggacggaagggatagcgatgaggagggcgccgagggtcacagggactcccagagcgccagtggagaagaaagaccacctgaggccgatgggaagaaaggaaattccccaaactctgaacctccaacgcccaaaactgcttgggcagaaacctcaagacccccagaaacggagcccggccctcctgcgccaaaaccacctcttccacctccgcaccgaggccctgctggtaattggggtccacctggtgattaccctgaccgcggggggcctccctgcaagccacctgcgccggaagacgaggacgaagcgtggcgacagaggcggaagcagtccagcagtgagatctcactagccgtggagagggctcgtaggcgccgggaggaggaggaaaggagaatgcaagaagaaagacgagccgcctgtgctgaaaagctgaagaggcttgacgagaagtttggagcgccagacaagcggctgaaagccgagcccgctgccccaccagcagcacccagcacacctgcaccccctcccgcagtgcccaaggagttgcctgcgcccccagccccccctcccgcatcagcgcctacacccgagaaggagcctgaggagcctgcccaggcaccacccgctcagagcacgcccacccccggggtagctgccgctcctacccttgttagcgggggcggaagcacctcatcgacgagttccggttcttttgaagcctctcccgtggagcctcagttgccctcgaaagagggaccggagcctccagaggaagtgcccccccccacaactccacccgtcccaaaagttgaacctaaaggggatggtattggccccacccggcagccaccgagccagggtttggggtacccaaaataccaaaaatcattgcctcccagatttcagcggcagcaacaggagcagctcttgaagcagcagcagcagcatcaatggcagcagcaccagcagggtagcgccccaccaacccccgtgccaccgtccccccctcaacccgtgactctcggcgcagtgccagccccccaagctcctccaccaccgccaaaagcgctgtatcctggcgcactcggcagaccaccgcctatgccacccatgaattttgatcctcgttggatgatgatccctccctacgttgacccccgcctgctgcagggccgacctcccctggatttctatcctccaggggttcatccttccggcctggtaccgagggagagatctgacagtgggggaagcagcagcgagccatttgaccggcatgctcctgccatgctccgagaacgcggaaccccaccggtcgaccctaagctcgcctgggtcggagatgtgtttacagcaacccccgcagagccccggccactcacgtctcctctcagacaggctgctgacgaggacgataagggcatgcgatctgagactcctcctgtccccccgccccctccatatcttgccagctatccagggttcccagagaatggagctcctggaccccctatttctaggtttcctttggaggagccaggacctagaccccttccctggccacccggcagcgacgaagtcgccaaaatccagacgccgccccccaaaaaggaaccaccaaaagaggaaacagcccagttgaccggtcccgaggccgggcggaagcctgcccggggcgtaggatctggcgggcaaggccccccacctccaagaagagagtctcgcaccgaaacacgctgggggccccggccaggatcttcacgtcggggaatcccccccgaggagcctggggcccctccaagaagggccgggcccattaagaaaccgcccccacctactaaagtggaggagctaccgccaaaaccgctggaacaaggagacgagacacccaaacctccgaagccggatcctctgaagattacaaaaggcaaattgggcggacctaaagaaaccccaccaaacggcaatctgagtcccgctcctcgccttcgccgagactactcttatgaaagggtgggtccgacatcctgccgcggcagggggcggggtgaatactttgctcgcggtaggggcttccgcggaacctatggaggccggggccgtggcgcgcggtctagagaattccgctcctatcgggagtttcgcggggatgatggacgggggggcgggaccggtggccccaaccacccgcctgccccccggggccggacagcttcggagacccgaagcgagggcagcgaatatgaggagatacctaagcgcagaagacaacgtggctctgagacaggtagcgagactcacgagagtgacttagctccatccgataaagaagcccctacgccgaaggaagggacactgacccaggttccattggcacctccgccaccaggcgctccgccctcaccagcccctgccagatttaccgcccgcggcggccgtgtttttacacctagaggggtcccatccagacgtggaagagggggaggcagaccaccacctcaagtgtgccccggttggagtccccccgccaagtcactggcccccaagaaacctcccacaggacccctgccacccagtaaggaaccgctcaaggagaaactgatcccggggcctcttagcccagttgcaaggggtggttcaaacggaggctccaacgtaggcatggaagatggcgaacgacctcgacggagacggcacggtagagcccagcaacaggataagccgcccagatttagaaggttgaaacaggagagggaaaacgcggctcgtggatctgagggtaaaccatccctaacattacccgcctcagccccaggaccggaggaggcactgacaacggtgacggtcgcacccgccccacgacgcgcggctgccaaatctcctgacctgagcaatcagaactccgaccaggcgaatgaggagtgggagacggcgtccgagtcgagtgacttcaccagtgagcgaagaggcgacaaagaagcaccaccccctgtccttctcacccccaaagcggttggcacccctggaggcggtggagggggggcagtgccagggatttccgccatgtcacgaggcgacctgtcccagcgcgcaaaagatctttctaagcgcagcttctcctcccagagacccggcatggaaaggcaaaacagacggcctgggcccgggggcaaagccggtagctctggatcgtcgagtggtggaggcgggggtggacctgggggccgcaccgggccaggcaggggagacaagcgttcctggccctcacccaagaacaggagccgaccccccgaagaaaggccccccggcctgccactccctccccctcctccaagctctagcgctgtgtttcgccttgatcaggttatccattctaatcctgcaggcatacagcaggccttagcccagctgagttcacggcaagggtctgtaaccgcaccaggagggcaccccagacacaaacccggccctccacaggccccccaggggccttcgcctagacctcccactcgctacgagccgcagagggtgaattctgggcttagttccgaccctcacttcgaggagcctggccctatggttaggggtgtcggcggcaccccgcgagactccgctggagttagccctttcccgccgaagcgtagagagcgtccgccacgcaaaccagaactgcttcaggaagaaagtctccctcctccccactcttctgggtttctaggatcaaaacctgagggacctggcccacaagctgagtcgagagacacgggtacagaggccctgacccctcatatttggaaccgccttcacacagcaaccagtaggaagtcatatagacctagttcgatggagccttggatggagccactttccccatttgaggacgtggccggcacagaaatgagccaaagtgactccggggtggatctgagcggcgacagtcaggtgtctagtgggccctgcagccagcggtcaagccctgacggcgggttaaaaggggccgccgagggacctccaaaacggccgggtggatccagccctctaaacgctgtgccttgtgagggcccccccgggtctgagccacccagacgccctccacccgctccgcacgatggcgatcgaaaggaactgccccgggagcagcctttgccacccggacccataggcaccgaacgcagccagcacacagacagagggacagaacctggtccaatccgcccctcacaccgccccggccctccagtgcagttcggtacgagtgataaagattctgatctgcggctggtagtgggagactcactgaaggcagaaaaagagctgacggcctccgtgacagaggccattcctgtgtcgagggattgggagctgttgcccagcgctgccgcctctgccgagccacagagcaagaacctcgacagcgggcactgcgttcctgagccttccagctccgggcagcgcctgtatcccgaggtcttttacgggtctgctggtccgtcgtcctcccagatctcaggtggagccatggattcgcagctccaccccaacagcgggggctttaggcccgggactccaagccttcatccatatcgttcacagcctctgtacctgcctcccggacctgccccacctagcgccttgctgtctggcgtggcgctgaagggccaattcctcgacttttcgaccatgcaagccaccgagctgggcaaactcccggctgggggcgtgttgtatcctcctccgagcttcctttactctcccgcattctgtccgtccccactgccggacacaagtctcctgcaggttcgccaagaccttccctcgcctagcgacttctattccaccccccttcagcccggaggccagagcggattcctacctagcggtgcgcccgcacagcagatgttactgccaatggtagattcccagctccccgtggtgaatttcggttctctacctccagcccctccacccgctcctccttctctttcactattacctgtgggtcctgcactgcaacccccctcactcgcggtccggcctccccctgcccccgccacaagggtgctgccttctcccgctaggcccttccctgcatctctggggagagctgaactacatcctgtggaactgaaaccctttcaggattatcaaaagctctctagtaacctgggaggaccaggctcatctaggacaccccctaccggaagatcgttttctggattaaactcacgcttaaaggctactcccagtacttactcaggcgtgttccgcacccagcgagttgacttgtaccagcaggcatccccacctgatgcactgcgttggatacccaagccctgggaacggaccggccctccaccccgtgaagggccctcaaggcgggctgaggaacccggatctaggggggataaggagcccgggctcccacctccgagatag

SEQ ID NO: 200829 - DNA, 6474 bp, synthetic construct
  misc_feature 1..6474: note = Description of Artificial Sequence: Synthetic coding sequence
  source 1..6474: mol_type = other DNA
atgagcgaccggagcggccccaccgccaagggcaaggacggcaagaagtactcaagtctgaacctcttcgacacctacaagggaaaatccctagagatccagaagcccgccgtggcgccaagacatggcctgcagtccctggggaaagtcgctattgcccgccggatgcctccgcctgcgaatttaccctccctgaaagccgaaaataaaggcaatgatcctaacgtgtctctcgttcctaaggacgggactggctgggcgagcaagcaagaacagtccgaccccaagagtagcgacgccagcacagcgcaaccacccgaaagccagcctttacctgccagccagacccccgcctctaatcaacctaagaggccccccgccgcacccgagaatacacctttagtgccttctggcgtcaagtcttgggcccaagcgtctgttacccacggcgctcacggggatgggggcagggctagctccctgctgagtcgcttttcacgagaagagttcccgactctacaggccgcaggagaccaggacaaggccgcgaaggagcgcgagtccgcagagcagagttctggcccagggccaagcctgcgcccacaaaattctacgacatggcgtgacggagggggaagaggcccagacgagctcgagggacctgactccaagctgcatcatgggcatgatccaagaggcggactgcaaccaagtggccctccacagtttcccccctaccgaggaatgatgcctcccttcatgtatccgccatacttgccattcccaccgccatatggcccacaaggaccatataggtacccaacacccgatggacctagcagatttccacgcgtcgcgggtccccgggggtcaggacccccaatgcgcttggtggaacccgtcgggcggccgtctattctgaaagaagacaatctgaaggagtttgatcagctggatcaagagaatgatgacgggtgggccggtgcccatgaggaggttgattacaccgagaagctcaaattttccgatgaggaggacgggcgggactccgacgaggagggcgctgagggccatagagacagccaaagcgcctctggcgaggagcggccaccagaggctgatgggaagaagggtaatagtcccaatagtgaaccccccacccctaagacagcttgggcggaaacctctcggccgcctgaaacagagcccgggccccccgcgcctaaacccccattgccccctccacaccggggcccagctggaaactggggcccgccgggcgattaccctgacagaggcggaccaccttgcaagcccccagcacctgaggacgaggacgaggcttggcggcagcgcaggaagcaaagcagctctgaaattagccttgccgttgagcgcgcgaggaggcggcgggaagaggaagaacgaaggatgcaggaggaacggcgggccgcatgcgctgaaaagctgaaaagactggacgaaaagttcggggcaccagacaagagactcaaagccgagcctgctgcaccccccgcagccccatctaccccagcaccccctcctgccgtccccaaggaacttcccgcgccaccagcaccaccccccgcctccgccccaacccccgaaacagaacccgaggagcctgcccaggccccacccgctcagtccaccccaaccccaggtgtggcggcagctcccaccctcgttagcggcgggggctctacaagttccacatcttccggaagcttcgaggccagcccggtcgagccccaactccccagtaaggagggaccagagccgcccgaagaagtgccccctccaacaactcccccggtgcccaaagtcgaacccaagggagacggaatcggacccacccgccagcctccgtcgcagggcctggggtacccaaagtaccagaaaagtctacctccccggttccagcgccaacaacaggagcagctgctgaaacagcagcagcagcaccagtggcaacaacaccagcagggctcagcccctcccacacctgtccccccctcacccccgcagcctgtcacccttggggccgtcccagcccctcaagcgcctcctcctcccccaaaggcactctatcccggagccctgggaagaccgccacctatgcctccgatgaattttgatcctcgatggatgatgataccaccatacgtggaccctcgtttactccagggccgtccgcccttagatttttacccaccaggagtgcacccatccggtcttgtgccgagagagcggagcgattccggcggatctagctccgagcctttcgatcgacacgccccggcaatgctgcgggaaagaggcacaccacccgtcgacccgaaactcgcctgggtcggagatgtgtttacggctaccccagccgagccacggcccctgacgtcccctctgagacaggcagccgatgaagacgataaggggatgaggagcgagactccaccggtccccccgccccctccttacctggcttcctatcccggtttcccagagaacggcgcgccgggcccccccatctctaggttccctctggaggaaccaggccccaggcccctcccttggcctccaggcagcgatgaggtagccaagattcagactcctcccccgaagaaagagcctccaaaagaggagacagctcaactgactgggcccgaggcggggcgaaagcctgcacggggtgtggggtccggaggtcaggggccccccccaccacggagagaatctcggacagaaacgcgctggggtcctagacccgggtcaagcagacgcggcattccccctgaggaacccggtgccccaccacgccgtgctggcccaatcaagaagccaccaccacctacgaaagtggaggaactaccaccaaagccactggaacagggggacgaaaccccgaagccccccaagcccgatcctctgaaaataacgaaggggaagctgggtgggcctaaagaaacacccccgaacggaaatctctcgcctgcaccaagactgcggcgcgattactcttatgaacgggtaggcccaacaagctgccgcggtcgggggcgcggggagtactttgcgagaggccggggcttcaggggtacctatggcggccgtggccgtggcgcaagatcacgcgagtttcggagctatcgcgaattcagaggagacgacggccgcggcggcggaaccggagggcctaaccacccacctgcgccaagggggagaactgcctccgagacgaggagcgaagggtcggaatacgaagagatccctaagcggaggcgccagcggggcagtgaaactggatccgaaacacacgaaagtgatctggccccttccgacaaggaggctccgacccctaaggagggcaccttgacacaggtaccgttggcgcccccccctcctggcgctccaccgtcccccgcgcccgcccgcttcaccgcacgtggaggccgcgtttttaccccccgaggagtaccctccaggagaggaagggggggcggacgacctcctccccaggtgtgtcctggttggtcccctcccgccaaaagtcttgcgcctaagaaaccacccacaggtccactgcccccatctaaggagccactgaaagaaaaacttatccccggtccccttagcccggttgcccgcggtggatctaacggcgggtccaacgtggggatggaggatggagaacgaccgaggaggcgtagacatggccgtgcccagcagcaagacaaaccaccaaggttcagacgcctgaaacaggagcgagagaacgccgctaggggaagtgaagggaaaccttccttgacactgcctgcctctgcgcccgggcctgaggaggccttgacaaccgtcaccgtggcacctgctccaaggagagcggcagccaagagccctgatttatccaatcaaaattcagaccaagccaatgaggagtgggagaccgcctccgagtccagcgactttacgagcgagcgacgcggggataaagaagcccccccaccagtcttactgacccccaaagcagtcggaacccctgggggggggggtggaggcgcagtgcctggcatttcggctatgagtcgtggtgatctctcccagcgcgctaaggacttgagtaagaggagtttttcatcccagcgacctggaatggagaggcaaaaccgtcgacctggacctggaggaaaggctggttcaagtggatcatcatctggcggaggcgggggcggacctggagggcgaaccggtccgggacggggggacaagagatcttggccgtcgcctaaaaaccggtcgcgtcctcccgaagaacggcctccaggtctcccactgccccctccacctccgtcctcttcggccgtttttaggcttgatcaggtcatccactcgaatcccgccgggattcagcaggccctggcccagctgagcagcaggcagggttctgtgacggctcccggagggcacccaaggcataagcccgggctcccacaggcaccacaagggccatccccaaggccgcctactaggtatgagcctcagcgcgtgaatagcggtttatcctctgacccccatttcgaagagccaggacctatggttcgaggggttggtggcactcctagggactcagctggggtgagcccctttccaccaaagagacgtgagaggccaccacggaaacccgagctattgcaggaggagtctctaccccccccccattccagtgggttccttggctcaaagccagagggccccgggccccaagctgagtcccgggacacaggcaccgaggctctgactccgcacatatggaacagattgcataccgccaccagccgtaaatcttaccgcccgagcagcatggaaccttggatggagccgctctccccctttgaggatgttgccggcaccgaaatgagccagtcggattctggagtggatctctctggagacagtcaggtgagtagcgggccttgctcacagagaagctccccggatggcgggttgaaaggtgccgcagaaggccctcccaagcgccctgggggaagcagtcccctgaatgcggtcccctgtgaaggaccccctggcagcgaacctccgcggaggccgcccccagcgccccacgacggtgatcggaaggagttgcctagagagcagcctcttcccccggggcccattggcaccgagcgatcccagaggaccgaccgaggaactgagccgggtcctatcagaccttctcataggcccggtcctcccgtacaattcggtacatccgacaaagactccgatctgcgactcgtggtgggcgattccctgaaggccgagaaggaactgactgcctccgtgacagaggctataccagtctctcgagattgggaacttctgccctccgctgctgcttccgcagagccacagtccaagaatctggattcaggacactgcgtccccgaaccctcctccagcggccagaggttgtatcccgaggttttttacgggtccgctgggccgtcctcctcccaaatctcgggcggtgccatggactcacagctgcatccaaatagtgggggctttcgccccggcacacctagcttacacccctaccggagccagccattgtatctgccacccggccccgcgcccccctccgcattgctgagcggggtggctctcaaaggccagttcctggatttcagtaccatgcaggccaccgagctcgggaagctgcccgctgggggcgtgctttatccaccaccaagctttctgtacagccccgccttctgcccaagccccttacctgacacctcgctgctgcaggtccgtcaggacctcccatcgccaagcgacttttacagtacacctctgcagcctggcggtcagagcggttttctgcctagcggggctcccgctcagcagatgcttctgccaatggtggatagtcagctgccagtagtgaattttgggtcactccctcctgcacccccgccagcgcccccgccactctcattattgccagtcggcccagcactgcagccaccttcactcgcagtgaggccccctcccgcacccgcaacgcgcgtgctcccatctcccgcccgtccatttcccgcctccctgggacgagcagagcttcatccagtggaacttaagcccttccaggactaccaaaagttgtccagtaatctaggtggaccagggagctctagaacacctccaacgggccgatcatttagcggcctgaactctagactgaaggccaccccaagtacttatagcggcgtatttcgaacccagcgggttgatttataccagcaagcctcacccccagacgcattgagatggatcccgaagccctgggaacggactggtccacccccgcgtgagggtccaagccgacgcgctgaggaacctggaagccgcggagacaaggaacccggtttgcccccccccaggtag

SEQ ID NO: 200830 - DNA, 6474 bp, synthetic construct
  misc_feature 1..6474: note = Description of Artificial Sequence: Synthetic coding sequence
  source 1..6474: mol_type = other DNA
atgagcgaccggagcggccccaccgccaagggcaaggacggcaagaagtattcatccctgaatctgtttgatacatacaaagggaagtctcttgaaattcagaagcccgccgtcgcccctcgtcatgggctgcagtccctgggcaaggtggctatcgctcggcgcatgcccccccctgccaatcttccatcattaaaggcagaaaataaaggtaacgatcccaacgtgtctctggtcccgaaagacggcacggggtgggcttccaagcaggagcagagtgaccccaagagcagcgacgcgagcacagcacaacctttagagagccagcctctacctgcttcccagacccctgcctcgaaccagcccaagagaccccccgcagcacccgaaaacaccccgctggtaccctctggggtcaagtcttgggcccaggcatccgtgacccatggagctcacggcgatggcgggagagcctcttccttactgagtcgcttcagcagggaggagttccctacacttcaggcagccggggatcaggacaaagcggcaaaggaacgggagtccgcagaacagtcatccggcccaggacctagcctgcggcctcagaactccactacctggcgggacggcggagggcgcggacctgatgaactcgaaggccccgacagcaagcttcaccatgggcatgatcctagaggcggcctgcagccttctgggccaccacagtttccaccttatcggggtatgatgcctccctttatgtaccctccctacttgccatttccacccccttacgggccacagggaccttatcgctatccaacccctgacgggccctcaaggttcccccgcgtggccggacctcggggttcaggccctccaatgcggctggtggagcctgtcggtcggccatccatcctgaaggaagacaatctgaaggaatttgatcagctcgatcaggaaaatgacgatgggtgggcaggcgcccacgaggaggtggactatactgagaaactaaagttcagtgacgaggaagatggtcgggattcagacgaagaaggtgccgaggggcaccgagacagtcagtcggctagcggggaagagaggccaccggaagccgacgggaagaaaggtaactcccccaacagcgaacccccgactcctaaaactgcttgggctgaaacatcccgcccccccgaaacggagcccggccctccagccccaaaaccacctctgccgcctcctcaccggggccctgccgggaattggggaccaccgggggattatcctgacagagggggccccccctgcaagccgcccgccccggaggatgaagatgaggcttggcggcaacggagaaaacagtcatcttccgagatcagcttggcggtggagcgtgccaggcgaagacgggaggaggaggaacggaggatgcaagaggagaggagggccgcttgtgcggagaagctcaagaggctcgatgaaaaattcggggctccagataagcggttgaaggccgagcccgccgccccccccgccgccccttcaactccagctccacccccagcggtgcctaaggaacttcccgccccgccagcccccccgcctgcttcagcgcctacaccggagaaggaacctgaggagcccgctcaggcccctcccgcacaatctacacccacacccggcgtggctgctgccccaaccctggtgtccgggggaggcagtaccagcagcacctcttccggctcattcgaggcaagccctgtagagcctcaactcccctcaaaggagggtcctgagcctcccgaggaggttcctcctcccactacgccaccagtcccaaaggtggagccaaaaggggacggcattgggcctactcgccagccccctagtcaaggcctggggtaccccaagtaccagaagagcttgccgcccaggttccagagacagcagcaagagcagctcctgaagcagcagcagcagcaccaatggcagcagcatcagcagggctccgcgccacctactcctgtcccgccaagccctccccaacctgttactctcggcgctgtgcccgccccccaggcaccaccaccccctccgaaagccctctacccaggcgcactgggtcggccacccccaatgccccctatgaactttgatcctaggtggatgatgatccctccttacgttgatccgaggttgctccaggggcgccccccccttgatttctacccccccggcgtgcatccaagtgggctggtgccacgcgagcggagcgactcaggaggctcatcgtcggaaccctttgatcggcatgctcccgcaatgctccgggagagaggcactcctcccgtggatccgaagctggcctgggttggcgatgtgttcactgccactccagccgagccacgacccctcacatcgcctcttcgccaggctgcagacgaagatgacaaaggcatgcgtagtgaaaccccgccggttccccctccacctccttacttagccagttacccggggttcccggaaaatggcgcccctgggcccccaattagccggtttcctctggaagaaccaggtccacggcctttaccctggccacccggaagcgacgaggtggcaaagatccagacaccccccccaaaaaaagaaccccccaaagaagagacagctcagttaactggaccagaagccggcaggaaacccgctcgtggtgtcggctctggaggccaagggccaccgcccccacggcgggaaagccgaaccgagacccggtgggggccccgccccggtagttctcggcgcggcatcccaccggaggagccgggcgcaccgccgaggagagctggcccaatcaagaaacccccacctccaacaaaggtggaagaactacccccgaagccactggaacagggcgatgagacgcccaagccacctaagccagacccattgaagataaccaaaggcaagctgggagggcccaaggagacacctcccaatgggaacctgtcgcccgctccgaggctgagacgcgattacagctacgagagggtgggacccacatcctgtcgcggaagaggaagaggagagtacttcgcgagaggccgagggttcagaggcacctatgggggaaggggacgcggagcaaggtcaagagagttcagatcatacagggaatttcgcggcgatgatggtcggggaggtggtactggaggcccgaaccacccacctgcaccaagaggaagaaccgcatctgagacccgctccgagggctctgagtatgaggaaatccctaagagacggcgccagaggggaagcgagacaggttcagaaactcatgaatccgacctcgctccctctgataaggaagctcctacacctaaggagggaaccctgacacaggtgccgcttgcgcctccaccccctggagccccaccctcacctgccccagcccgttttacagcacgaggcggacgcgtgttcacacccaggggtgttccgagtaggagaggtagaggcggcggcaggccgccgccacaagtctgccctggctggtctccccctgccaagtctcttgctcctaaaaagccacccacgggcccactgccaccttctaaagagccacttaaggaaaaactgattccaggcccgcttagtccggttgcgaggggtggtagcaatggaggctccaacgtgggcatggaggacggcgagaggccacgcaggaggcggcacggccgcgcccagcaacaggacaaaccaccaagattcaggagactaaaacaggagcgcgaaaatgctgcacgaggatcggagggaaagcccagtctaacccttcccgcctctgctcctggaccagaggaagccctgaccaccgtgaccgtggctcctgcccccaggagggctgcagctaagagccccgacttgagcaatcagaattctgatcaggccaacgaggagtgggagactgcctctgagagctccgattttacgtccgagcgccgtggagacaaagaggcacctccgccagtactgctgactcccaaagcggttggtacgcccgggggcggaggcggcggggctgtgccgggaattagtgcaatgtctagaggagacttatcacagcgagccaaggacctgtccaaaagatcctttagctctcaacgtcctgggatggagcgacagaacagacgccctgggccaggtggaaaggcaggatcgtccggtagtagttccggcgggggcggcggcggccctggagggaggaccggaccggggcggggagacaagagatcctggccctcacccaaaaatcgctcccgacccccagaggaacgaccccccggtttaccccttccacctccaccgccttcttcttccgccgtattccggcttgaccaggtaatccatagcaacccagcgggcattcagcaagctctcgctcagctcagcagtcggcagggcagtgtgacagctccaggcggacatcccagacacaagcccggccccccccaggccccccaaggcccaagcccgaggccaccgactcgctacgagcctcagcgcgtgaattcagggctgagttctgatccccatttcgaggaacctggccctatggtgaggggggtgggagggacccctagagattcagccggtgtatcaccttttccaccgaaacgccgggaacgtccacctagaaagcccgaactgctgcaggaggagagtctgcctcctcctcattccagcggattccttggatcaaaacccgaaggccccggcccgcaagctgaaagtcgggatactggaaccgaggcacttacccctcatatctggaatagactccacacagctacgagcagaaaatcatatagaccctcgagcatggagccgtggatggaacctctgtcaccttttgaagacgtcgccgggacagaaatgtcacagtccgactctggggtagacctcagcggggactctcaggtgagttctggaccttgttcacagaggtccagcccagatgggggcctaaagggtgcggctgaagggcctcctaagcgccccggtggttctagtccactcaacgcagtcccctgcgaaggcccacctggatcggaaccccccagacggcctccgcctgctccccacgacggagatagaaaggagttaccgcgcgagcagcctctgcctcctggacctattggtacagagcgttctcagaggacggatcgtggtacagagcctggtcccattcgaccctctcatagaccagggccgccagtccagttcgggaccagtgacaaagacagcgatttgagattagttgtcggagattcacttaaagccgaaaaagaacttaccgcaagtgtcaccgaggctatccctgtgtctcgcgactgggaacttctgccttccgccgcagcaagcgcagagccgcagtctaagaacttggacagcggccattgcgtgcctgagccctcaagcagtggacagcgcttgtacccagaagttttctacggtagcgccggtccttcgagctcccaaatctccggcggtgccatggattctcaactgcatcccaactccggcggtttcagacccggcacacccagcctgcatccctaccgtagccagccactatacctccctccagggccagctcctccaagtgccctcctatctggtgtagccctgaagggccaatttctggattttagtactatgcaggctactgagcttggtaaacttcccgccggaggggtgctctacccccctccaagcttcctgtattctccagcattctgtccctctcccctgccagacactagtttgctgcaagtcagacaggatctgccatccccctcggacttctattccacgcctctccagccaggtggccagtcgggctttttaccgtctggagcaccggcacagcaaatgctactcccaatggttgatagtcagttaccggttgtgaactttggttccttgccacccgcgccacctccggcaccgccgcccttgagccttctccccgtgggtccagcgctccaacccccatctttagccgtgagaccacctccagcccccgcaactagagtactgccttcccccgcccgtccctttcctgcatccttgggccgggccgagctacaccctgtggaactgaagcctttccaggactatcagaagctgagctcaaatcttgggggacctggaagctcaaggacgccacccaccggcagaagcttcagcggcctgaactctcgactaaaggcgactccctccacctattctggcgtgttcagaacccagagggtcgacctataccaacaggccagtccacccgacgcccttagatggattccaaagccttgggagcgcaccgggcctcccccaagagaaggaccatcacgtcgagccgaggaaccaggctcgagaggtgacaaagaacccggcctaccaccgcctagatag

SEQ ID NO: 200831 - DNA, 6474 bp, synthetic construct
  misc_feature 1..6474: note = Description of Artificial Sequence: Synthetic coding sequence
  source 1..6474: mol_type = other DNA
atgagcgaccggagcggccccaccgccaagggcaaggacggcaagaaatattctagtttgaatctgtttgatacatacaaaggcaaaagtctcgaaatccagaaacccgctgtggctcctcggcatggtctccagtctctcggcaaagtagccatcgctaggcggatgccaccaccagcaaacctgccctctcttaaggccgaaaataagggcaacgaccccaatgtcagtctggtccctaaagacggaactggttgggcctcaaagcaggaacagtcagaccccaaaagttctgacgctagcactgcccaaccacccgagtcccagccactgcccgctagtcaaactccagccagcaaccaaccaaagcgcccgcccgccgctccggagaacaccccactcgtcccgtctggcgttaagtcctgggctcaggcgtcagtcacacacggcgcccatggagacggaggtagagcttcatctctgctcagtaggttttctcgcgaagagtttcctaccctccaagccgcaggcgaccaggataaggccgccaaagaaagggagtcagccgagcagtcctccggccctggacccagcctgaggccacaaaacagtaccacatggagagatgggggcggtagggggcccgacgagctagagggccctgactctaagctgcaccatggccacgacccacgaggagggctgcaaccatcaggacctcctcagtttcctccctatcgcggaatgatgccgccttttatgtaccctccatatctacctttcccgccaccctatggcccccagggaccgtaccgctatcccacacccgatggaccaagccgttttccccgggtggccggacctcggggctctggtccgccaatgcgtctggttgagccagtgggccggccctctattctgaaggaggataatttgaaagaatttgaccagctggaccaggagaatgacgacggctgggccggggctcatgaagaggtagattatactgagaaattgaagttttcggatgaggaggatggacgggattccgatgaggagggagctgagggccatcgagatagccagtcagcctctggtgaggaaagacctccggaagccgatggaaaaaagggtaactctccaaacagtgaacccccaacaccaaaaaccgcctgggcagagacctctcgcccaccggaaactgaacccgggcctcccgctcccaagccacccctccctccaccacatcgaggccccgcaggaaattgggggccgcctggagattaccctgacagaggaggaccaccttgcaagcctcctgcccccgaagacgaagacgaggcctggagacagagacgaaaacaatcaagttccgaaatcagtttggcagttgagagggcccggcggcgacgggaggaagaagaaaggcgtatgcaggaagaaaggagggccgcatgcgctgaaaagctgaagagattggatgaaaaattcggtgctcccgacaaaagactcaaagcggagcccgctgcccctcccgctgctccctcaacccccgcccccccccctgccgtgcccaaagagctgccggccccccccgcaccaccacccgcgtccgcacctacgccggagaaagagccagaagaacccgctcaagcgccacctgcccaatcgactcctacccccggggtggctgccgctcctaccctcgtgtctggcggaggatcaacctccagtacttcgtctggatccttcgaagcttctcctgttgagccccagctgccctccaaagagggccctgagcctcctgaggaagtgccaccccccaccaccccgcccgtgccaaaggtggagccaaaaggggatggcattggacctacacggcagcccccatcgcagggtctgggataccccaaataccagaagtccctgcctcctagattccagcgccagcagcaggagcaactgctgaaacaacagcagcaacatcaatggcagcagcaccagcagggtagcgccccgcctacccctgtgccccctagtcccccccagccagtgaccttaggtgccgtgcctgcaccacaggcacctccgccccctccaaaggctctttacccaggggcccttggacgtcctccacccatgccccctatgaattttgacccgcggtggatgatgattccaccttacgttgaccctcgtctgctgcaaggccgccccccattagatttttatccaccaggcgtgcatccctctggattggtgccaagagaacggtctgactctggtggctcttcatcagagccctttgatcgccatgcccccgcaatgttgcgcgaacgaggaacgccccctgtggatccaaagcttgcatgggtcggtgacgtatttaccgctacacccgcagaaccgaggcccttgacatcacctctgaggcaggctgctgatgaggacgataagggaatgcgttccgagactcccccagtgccacctccaccgccctatctcgcatcataccccggtttcccagaaaacggcgcccctggcccaccaatttctcgctttcctttagaggagccaggccctaggcccctgccctggcctccggggtccgacgaagtggccaagatccagacaccgcccccgaaaaaggagcccccaaaagaggagacagctcagctcaccggcccagaagccgggcgtaaaccagcgaggggagtgggttccggggggcaggggcctccgccaccccgccgagagagccggaccgagacacgctggggaccccgtccaggcagttcgcgtcggggaattcctcccgaggaaccgggagctcctcctcggagagccgggccaataaaaaagccgcctccaccgactaaggtcgaggagttgccccctaagccccttgagcagggagacgagactcctaagcctccaaaaccagacccattgaagatcacaaaaggcaaactgggcggtcctaaggagacccctcctaacggcaatctctcccctgcgccacgcctaaggagagactactcatacgagagggtggggccgacctcctgccgcggacgtggccgcggcgaatatttcgcccgcgggcgcgggttccgaggcacctacggtgggaggggtcgaggagctcggtcccgcgagtttagatcttatcgcgaattccggggcgacgacgggcgaggcggcggtaccggcggtcctaaccatcctccagccccaaggggtaggaccgcttccgagaccagatccgagggatccgagtatgaggagatacccaaaagacgccgacagagaggaagcgaaacaggctctgaaacacacgaaagcgatctcgcgccgtccgacaaggaggccccaacgcccaaagaaggcacgctgactcaagtcccccttgctcccccacccccaggcgccccaccttctcccgctccggcacgctttacagcccgaggcggtagggtctttacgccgagaggggttccatccaggcgcggccgaggcgggggtaggccacccccacaggtgtgtccaggctggtcgcccccagccaaatccctcgctcccaagaagccccctaccgggcctttgccgcccagtaaggagcccctgaaagagaaactgattcccggcccattgagtcccgtcgcgcgcggtgggagcaacggagggtccaatgtcggaatggaggacggtgagaggccccggcgtagacgtcatggccgtgctcagcaacaagacaagcctcctagattcagacgcctcaagcaggagcgtgagaatgccgccaggggctctgagggcaagccttcccttacactccctgcctcagcgcctggtcccgaggaggcgcttactacggtgaccgtcgctcccgccccccgtagggctgcggccaaaagtcctgatctctcgaaccagaacagcgaccaggctaacgaggaatgggaaacagcaagcgaaagcagcgacttcacttccgagcgcagaggagacaaggaggcaccaccgccagtgctcctgactcccaaggcagtcggaacacccggaggcggagggggaggtgccgttcccggaatcagcgctatgtctaggggcgaccttagtcagcgtgccaaggatctttcaaagcgttccttctcttcccagaggccaggaatggaacgtcagaatcgcagacctggaccaggggggaaggccgggtcgtctggttccagttcaggcggcggtggtggcggccccggtggccggactggtcctgggcgaggagataagcgcagctggccatctccgaaaaaccggagcagaccccccgaagaaaggccgcctggcctgcccctccctccgccacctccaagctcatcggccgtgttcagactggatcaagtgatccacagcaaccccgcgggcatccagcaggcacttgctcagctaagcagcaggcagggttcagtaacagcgccagggggtcatccgcgccataagccagggcctccgcaggctccccagggtccaagcccacggccgcctacccgatatgagccgcagagggtgaatagtggcctcagcagcgacccccattttgaggagccaggacctatggttaggggagtggggggaactccaagagattctgccggggtatctccctttcccccgaaaaggcgcgagaggccaccgaggaaaccggagcttctccaggaagaatcactgcctcccccccattcatccggttttctcggctctaagccggaagggccaggtccacaggcggaatcccgcgatactggaaccgaggccctcacaccccatatttggaaccggttacacactgcgacctctagaaagtcctaccgaccatcctccatggaaccctggatggaaccgctgtcccctttcgaagatgtggcagggaccgaaatgagtcagtctgactccggggtagacctttcgggagacagtcaggtgtcatctggtccttgctctcaacgtagttcacccgacggtggactcaagggggccgcagaaggcccccccaaacgacccggagggtccagccctttgaacgctgtcccatgtgaaggcccacccggttccgagccccccagaagacctcctccagcccctcacgacggggaccgcaaagagctcccccgggaacagcctctccccccaggcccaattgggacagagagatcccagcatacagatcgcggaaccgagccgggacccatcagaccatcccatcggcctgggcccccggttcagtttgggacctccgataaagattctgacctccggttggtagtcggcgacagcctgaaggccgaaaaggagctcacggcttctgtgaccgaagccataccagtctcacgagattgggaactcctcccatctgcggctgcctctgcagagccccagagcaaaaatctcgatagcggccactgtgtccctgaaccaagttcaagcgggcagcggttgtacccagaggtgttctatggatcagccggcccctcaagcagccaaatcagtggtggggcaatggactctcagttacaccccaattcgggcggcttccggccagggactccaagtctccatccttaccggtcccagcccctgtatcttccccctggacctgctcctcctagcgcattgttatccggtgtggctctgaaaggccaatttttggattttagtacgatgcaggctacagaactgggaaagcttcccgctggtggtgttctgtatccgccaccatccttcctctacagtcctgctttttgtccgtctccattgcccgacacttcattgctgcaagtgcgacaagacctgccctcaccttcagatttttactcaactccccttcagcctgggggacaatcagggttcctgccctctggcgcacccgcccagcaaatgctcctgcctatggtcgacagtcaactgccggtggtaaattttggtagcctgcctccagccccaccccctgccccaccctccctgagtctgctgcccgttggtccagcactgcagcctccatctctggcagttcgtccacctccagctccggctacccgcgtgcttccctctccggcaagaccttttccagcctccttaggcagagcagaacttcatcccgtggagctgaaaccatttcaggactatcagaaattaagctccaacttgggtggcccaggcagtagcagaacaccacccaccggccggtcttttagcggactcaactccagactgaaggcaactcccagcacctactctggtgtgttccggacacagcgcgtcgatttatatcagcaggcttcaccacccgacgccttacggtggatacctaagccctgggaacgcacaggacctcccccgcgtgagggccctagccgccgggccgaagaacctgggagtcgtggcgacaaggagccaggccttcccccaccaaggtag

SEQ ID NO: 200832 - DNA, 6450 bp, synthetic construct
  misc_feature 1..6450: note = Description of Artificial Sequence: Synthetic coding sequence
  source 1..6450: mol_type = other DNA
atgagcgaccggagcggccccaccgccaagggcaaggacggcaagaaatatagtagccttaacctgttcgacacctataaaggtaagtcactcgaaatccagaaacctgccgttgcaccaaggcacgggctgcagtcactggggaaagttgctatcgcgagaaggatgccaccgcctgcaaaccttccttcccttaaagccgaaaacaaaggcaatgatcctaatgtctcgctggtccctaaggacggtacagggtgggccagtaaacaagaacagtctgaccccaaaagctctgacgccagtaccgcccaacctcctgaatcccagcccctcccagcctcccaaactccagcctccaaccaaccaaagagacccccagcagcaccagaaaatacgcctctcgtgccatcaggagttaagagttgggcccaggctagcgtgacacacggcgcccatggtgacggtggtcgagccagttctctcctcagtaggtttagcagagaagagtttcccactttgcaggcggccggggatcaggataaggcggctaaggagcgcgagagcgccgagcagtcgtccgggcctggcccaagcctgaggccacagaatagcaccacttggcgggatggcggaggtagaggccctgatgaactcgaagggccggactctaagctgcaccatggccacgacccgagaggtggcctacagccaagcggtccccctcagtttcccccatataggggaatgatgccgccttttatgtacccaccatatcttccattccctcctccatatgggcctcaagggccgtaccgctacccaactcctgacggaccatctagatttcccagagtcgccgggccacgtggctctggtcctcccatgaggcttgtggagccagtagggcggccctctattctaaaggaagacaatcttaaggagttcgaccagttagatcaggagaatgatgacgggtgggcaggtgctcacgaggaagtagattacaccgagaaactgaaattttctgatgaggaggacggtcgtgactctgacgaggaaggcgctgaagggcatcgggattcacagtccgcgtccggggaggaaagacctcctgaggctgacgggaagaaaggaaattctcccaacagcgagcccccgaccccgaaaaccgcttgggctgaaacaagtcgccccccagagaccgagccaggacccccggcccccaagccgccgcttcctcctccccatcggggtccagccgggaattggggccctcctggagattatccggaccgtggagggcccccctgcaaaccccccgccccggaggacgaggatgaggcatggcgccaaagaaggaagcagtccagctccgaaatttccctggcagtggagagagcacgccgaagaagggaggaagaggagcggcgaatgcaggaggagcgcagagcagcatgcgcagagaagctcaagagactcgacgaaaaattcggtgcgcccgacaagaggctgaaagcagaacccgctgcacctcccgccgcccccagtacacccgctccgcccccagcggtgccaaaagagctgcctgccccacctgccccaccccccgcctccgctcccacacccgaaacagagcccgaagagcccgcacaggcgcctcctgctcagagtacccctaccccaggcgtggcggcagctccgacccttgtgagcggaggaggctccacctcctctaccagctctggatcatttgaggcctcacccgtggaaccccaattaccatccaaagaggggcccgagccaccagaggaggtgccacctcctacaactccccctgttcctaaggttgaacccaaaggcgacggcatcggaccaaccagacagcctcccagccagggcttgggttatccgaaataccagaagagcctgcctcctcggtttcaacgacaacaacaggaacagttgctcaaacagcagcagcagcatcagtggcaacagcaccagcaggggtctgcaccccctacccctgtgccaccctcgcctccacagccggtgactctgggagctgtaccggctccacaagctccccccccgccaccaaaagcactctaccccggtgccctgggcagacccccccccatgcccccaatgaacttcgacccccgttggatgatgatacccccgtacgttgatccccgcctccttcaaggtaggccccccctggatttttatcctccgggcgtccacccttccggactggtaccacgtgaacgctccgacagcggagggtcatcaagcgaaccttttgacaggcacgcccctgcgatgttacgtgagcgcggcactccacccgtggaccctaagctcgcgtgggttggcgacgtgttcactgcaactcccgccgagccccgaccattaacatctcccctaagacaggccgcggatgaagacgacaaaggcatgcgcagtgagacaccccccgtccctccacctcccccctatctggcttcctacccgggcttcccagagaacggcgccccaggcccacccatcagtagattccccttggaagaacccggtcctaggcctctcccttggccaccgggttccgacgaagtcgccaaaatccaaacccctcccccaaaaaaggaaccccccaaggaagaaaccgctcaactcacagggcccgaagccggtaggaagcccgcacgcggtgtgggctctggcggtcagggaccccctcccccgcggagggagagcagaacagagactagatggggtcccaggcctgggagttcacgtcgcggaatcccccccgaggaaccaggagctccgcccagacgggcaggccccattaagaaacctcctccgcctaccaaagtggaagaattgcccccaaagcctctagaacagggagacgagacgcccaaaccccctaagccggatccgctaaagattacaaagggaaagttgggcgggcctaaagagacccccccgaacgggaacctgagccccgccccacgccttagacgcgactattcgtacgagcgcgttggacccacatcctgtcgggggcggggccgaggcgagtatttcgccaggggaagaggcttccgcggtacctatggaggacggggacgtggcgcggccggaaacagcgcggtgactgagagctttgaagaaatgatgggtgtagaggtgggccagggtgatcagacaacccttctgctgccggaggctgccttgccagcgagacacggagcaagagtgcagagtatgaggaagtccccttccggcgcaggaagcggagcccaaaaacaggctgcacgaccaatgcgggtgatttggttgttgcagacccgcagactgccccatcctcgtagggagcatagcccgaggtcccgcagtccgacaactagatcacccaccttcccggcaccagccaggtttactcccggcgtgggggagtcctcactgccagaaggtatcagcccaggaccaagacggagagaacctccacaggtgtgcccaggctggtcacccccggcaaagtctctggcccccaaaaagcctccaaccggacctcttccgccttctaaagaaccactgaaagaaaaactgattcccggcccattatcccccgtagctcgtggcggctctaacggagggtcgaatgtcggcatggaggatggcgaacggccccgcagacgccggcacgggagggcccagcagcaggacaagccccctaggttcagacgactaaaacaggaaagggagaacgccgctaggggatcagaaggaaaaccatccctgaccctccctgcgtccgcacctggccccgaagaggcactcacaacagtgacggtggcccccgcacccaggcgtgcagcagctaagagcccagacctgagtaatcaaaattccgatcaggctaatgaggagtgggagacggcaagcgaatcatctgattttacttcagagcgtaggggggacaaggaggcgccccccccagtcttactcacccccaaggcagtggggactcctggcggcggaggcggcggagccgtgccaggcatcagcgcaatgtcaagaggagacctgagccagagagccaaggatttaagtaaaagatcttttagcagccagcgccctgggatggagagacagaaccgccgcccaggaccgggagggaaggccgggagcagcggctcgtcatctggagggggcggtggggggcccgggggtcgtacaggaccgggacgcggcgataaaagatcgtggccctctccaaaaaaccgatccaggcctcccgaagagcgaccgccaggcctcccgctccctccaccacctcccagtagttctgccgtgttccgactcgaccaggttatccacagcaaccctgctggcattcaacaggccttggctcagctctcatcgcggcagggatctgtgaccgctcccggcggacacccaagacacaaaccaggcctgcctcaggcaccgcaaggccccagccccaggccgcccacgagatacgaaccccaaagagtgaacagcggcctgagtagcgacccgcactttgaagaacctgggcctatggttcgcggtgtcggcggcacaccaagagatagtgccggcgtgagtccctttccccccaaaaggagagaacggccccccagaaagccagaattgctccaagaggagagtctgcctccaccacactcatctggattccttggctccaagcccgagggtcccgggccacaggctgagtctcgcgatactggcacagaggcattaacccctcatatatggaatcgacttcataccgctacatccagaaaatcttatcgcccttcctctatggagccttggatggagcctctatcccccttcgaggacgtagctggcacagaaatgagccagtctgactcgggggtagatctctctggcgactcccaggtcagcagcggcccttgttcccagcgcagtagccctgacggaggtctgaagggtgccgccgaggggccccccaaaagacctggtggatcttcacctttgaatgccgtcccttgtgaaggccccccaggcagcgagcccccaaggcgtcccccccctgcaccacacgatggtgaccgaaaggagctgccgcgggagcagcccctgccccccggtcctattggtacagaaagatcccagcgcacagatcgcgggacggagcccggacccatccgccccagtcataggcccggccccccagtgcagtttggaactagtgataaggacagtgacctacggttggtcgtaggtgactccctaaaggccgagaaagagctgaccgcaagcgtcaccgaggcgatccccgtgtctcgcgattgggagctactcccatccgctgccgccagtgccgagccacagtctaagaacctggactcaggccactgcgtgccagaaccttcgtcgagcggacagagactctatcccgaggtgttctatggctctgcagggccaagtagttcacagattagtgggggacacggcctgtccattaccagtaaacaatggcgtaggcccgggactccaagcctgcacccgtatcggtcgcagcccctttacttacctcctgggcccgcgcctcccagtgcgctgctgtcgggcctagctctcaaaggccagttcttagatttctctaccatgcaagctaccgagcttggaaagctccctgccggaggcgtcttgtatccccctccctctttcctctactcccccgccttttgtccctctccactgcctgatacctccctacttcaggtgcggcaggacctgccaagcccgtccgatttctacagcactccattgcagccggggggtcagtctggatttttgcctagtggagcccccgcccagcagatgttactccccatggtggactcccagttaccggtagttaacttcggaagccttccacctgcacctccccctgcaccacctccgctttctcttctcccagtcgggcccgcactgcagcccccttctttagcggtccgacccccacctgcccccgcgaccagggtgttgccgagccctgcgcggcctttccctgcgagtctgggcagggcggaattgcacccggtggaactcaaacctttccaggattatcagaaactgtccagcaacctgggcggacctgggagtagccggaccccacctacaggacggtccttctccggcttgaactctcgtcttaaagctaccccgagtacttacagcggggttttccgcacccagagggtggacctgtatcagcaggcaagtccgcccgacgctcttaggtggatccccaaaccctgggaacgtaccggtcccccccccagagagggcccaagcaggcgcgccgaggaacctggttccagaggggacaaggagcccggcctcccccccccccggtag

SEQ ID NO: 200833 - DNA, 6474 bp, synthetic construct
  misc_feature 1..6474: note = Description of Artificial Sequence: Synthetic coding sequence
  source 1..6474: mol_type = other DNA
atgagcgaccggagcggccccaccgccaagggcaaggacggcaagaagtactcaagtttaaatctattcgatacgtacaaggggaagagtttggagatccaaaaaccagctgtggcacctcggcacgggctgcagtctctggggaaagtggctattgcacgccggatgcctccgcctgctaacctgcctagcttgaaggccgagaataaggggaatgacccaaatgtgagcctggtaccgaaggatgggaccggctgggcgtcaaaacaggaacaaagcgatcctaagtcctcagatgctagtaccgcacaaccccctgagtcccagcctttgccagccagtcaaaccccagctagcaaccaacctaagaggccaccagccgcaccagaaaataccccactcgtcccctcgggagttaaatcctgggcgcaggcctctgtaacacatggggcgcacggagatggtggacgagcatcctcgttgctgtccaggttcagcagagaggagtttcccaccctgcaggctgcgggagaccaagataaggccgccaaagagcgggaatctgcagaacaatccagtggccccggtccatcactgcggcctcagaactctactacctggcgagatggaggcggcaggggcccagacgagctggaaggaccagacagtaaactgcaccatggacacgatccaagaggcggcctgcagccaagtggaccaccacagttccctccataccgcggaatgatgccaccctttatgtacccaccctatttaccattccctcctccttacggacctcaaggtccctaccgttatcccactcccgatggaccgtcacggttcccccgagtggccgggccgcggggcagcggaccaccaatgcgtctggtcgagccagttggcagaccgtcaatccttaaggaggacaacctgaaagagttcgatcagctggatcaggagaatgatgatggctgggcaggagcgcacgaggaagtggattacaccgaaaagctaaaattcagcgacgaggaagacggtagagatagcgacgaggagggggcggagggtcatcgggactcacaaagtgcctcaggagaggaacgacctcccgaagcggacggcaaaaagggcaatagccccaactcagagccaccgactcccaaaaccgcttgggctgaaacgagtaggcccccagaaaccgaaccaggtccgcccgcccccaagcccccactgccgcccccacatcgaggacccgccggcaattggggaccaccgggggactatcctgaccggggcggcccgccttgtaaaccaccggcccccgaagatgaggatgaggcgtggcggcagcgccggaagcaatctagtagtgaaatttccctggccgtcgaacgggccaggaggcgccgtgaggaagaggagaggcggatgcaagaggaaaggcgcgcagcctgtgccgaaaaacttaagcggctcgacgagaaattcggagcccccgataaacggttgaaagcagaaccggcagctcccccagcggctccaagcactccggccccccccccagcggttcctaaggagcttccagcacctccagccccgccgccagccagtgcccccactccagaaaaggagcccgaagagcctgcacaagcccctccggctcagagcactcccacacccggggtggcggctgctcccaccctggtgtcaggcggaggcagcacttcttccacctccagtgggagtttcgaagcatcccccgttgaaccccagctgccttctaaagagggcccggagcctccagaagaggtgcccccgcccacaacccctcccgtaccaaaggtcgaacctaagggcgacggaatcgggccgaccagacagccaccttctcaggggctgggatacccaaagtaccagaaaagcctccccccccgttttcaacgacaacaacaggagcagctactgaaacaacagcagcagcatcaatggcagcagcaccaacagggatctgcgccacctacgccagtgccccccagcccgccccagccagtcaccttgggcgcggtccccgccccacaggccccacccccgcccccgaaagccctttaccccggggctctaggtcggcctccgcccatgcctcctatgaactttgatcctagatggatgatgattcccccctacgtggatccccggctgctgcaagggcgacctcccctggacttctatccaccaggggtgcatcccagcggtctcgtgccacgcgaacggtccgacagcggtggctcctccagtgagcccttcgacagacatgccccagccatgctgagagagaggggaactccccctgtagaccctaaactcgcttgggttggcgatgtcttcactgctacacccgccgaaccgaggcctctgacaagcccccttcgacaggcagctgatgaggatgacaagggaatgcggagcgaaacaccaccagtacctccaccgcccccttacctggcttcataccctgggtttccggagaatggagcaccaggacctcctataagtcgcttccccctggaggaaccaggtcccaggcctctaccatggccgcccgggtccgatgaggttgccaagattcagaccccaccacccaagaaggagccacccaaagaggagaccgcgcaactgacagggccagaggctggcagaaagcctgctagaggtgtgggatcagggggccagggtcctcccccaccaagacgtgagtctagaacggagaccaggtggggacctcgtcccggctccagtagacgagggattccacctgaagagcctggcgcacctccccggcgcgccggccccataaagaagcccccaccccctactaaggtcgaagagctcccacccaagcccttggaacagggagacgagacacctaaacctccaaaaccggaccctctaaaaattaccaaaggcaaactgggaggcccaaaggagaccccacccaacggcaatctctcgcccgcccccaggctgagaagggattattcttacgaacgcgtgggacccacttcatgccgcgggcggggcaggggcgagtacttcgcaagaggtagaggttttcgggggacttacgggggcagaggaaggggagccagaagccgagaattccggagctatcgggaatttcgcggagatgatggtcggggcggtggcacagggggtcccaatcacccgcctgccccacgcggtagaaccgcatcagaaacccggtcagagggctctgagtatgaggaaattcccaagaggcgcagacagcggggttctgagactggctctgagactcatgaatccgatctggcgccgtccgataaggaagcacctactcctaaggagggaactcttacacaagtacctctggcccctcccccaccaggtgccccgccttcacctgcccccgccagatttaccgcccgtggcggcagagtgtttactcctaggggggtgccgtctaggcgcggacgcggaggtggaaggccacctccgcaggtctgtccgggatggagcccccctgctaagagtttggcccctaaaaaaccaccaactggcccgcttccgccatcaaaggaacctttgaaggagaagctgatccccggacccctgtccccggtggccagaggcggatccaacggcggcagtaatgtggggatggaggatggagaaaggccgaggcgaagaaggcatggccgggcacaacagcaggataaaccccctagatttcggcgcctgaagcaggaaagagagaacgctgcacgcggatccgagggcaagccatcactgacgctgccggctagcgcacccggacccgaggaagccctgactacagtaaccgtagccccagcacctcgtcgagctgccgccaaatcccctgacctgtctaatcaaaattccgatcaggcgaatgaagaatgggaaaccgccagtgagtcgtcagattttacctccgagaggcggggagataaagaagctccccccccagtgctgctcacccctaaagctgttgggacccctggcggaggaggcggcggcgctgtacccggtatctccgccatgtcaagaggagatttgtcccagcgggccaaggacctgagcaagaggtccttttcaagtcaaaggcccggaatggaacgtcagaatcgccggccaggccccggcggcaaggccggtagctctggatcttcttctggcggtggcgggggaggtcccggtggccgaactgggcccgggagaggcgacaagcggtcatggccatcccccaagaatcggagccggccgcctgaagagcggcctccaggtctacccctcccacccccccctccatcatcgagtgccgtttttcgccttgatcaggtcattcacagcaatcccgccggtatccagcaggccctcgcccaactctcatctcggcaaggctccgttactgctcccggaggtcacccaaggcacaaaccgggcccgccacaagcaccacagggccccagccccaggccaccaacccgatatgaaccccagagagttaattcaggcctcagtagtgacccgcatttcgaagaaccaggacccatggtgagaggcgttggaggcacgccgagggattccgccggcgtttccccctttcctccaaagcgtagggagcgcccaccccggaagcctgagctcctccaggaggagagcctgcctcctccacattcctcaggctttctcggaagcaagcctgagggccctggaccccaagccgaatcaagggatacaggcaccgaggccctcactccacatatttggaacaggctgcataccgcaacctctaggaagagttatcgcccttcttccatggagccctggatggagcccttatcacccttcgaggacgtggccggcacagagatgagtcagtcagactccggggtagatctgtccggggacagtcaggtttcatctgggccatgctcgcagagaagttctcctgatggaggcctgaaaggggccgccgagggtccaccgaaaagacccgggggaagctctccgctcaatgccgtgccttgtgaagggccgcccgggagcgagccgccccgtagacccccaccagcacctcacgatggcgatcggaaagagttgcccagagagcagccactgcctcccggtccgatcggaaccgaacggtctcaacataccgaccgaggcacagaacctggccccatccgcccgtcccacaggcccggcccaccggtgcagtttgggacatctgataaggattcagatctgagattggtcgttggcgatagcctgaaagcagagaaggaattaactgcatctgtgactgaggcaatcccagtgagcagggactgggagttactgccctctgcagctgcttctgccgagcctcaatctaaaaatctggacagtgggcattgcgtcccagaaccctcttcctccggacagagactctaccctgaagttttttatggctccgctggaccctcatcaagccagatttccgggggtgccatggattcccaactgcatccaaattctggcgggtttagacctggcaccccttcactccacccctaccgctctcagccactgtacctacctcctggccctgcaccccctagtgctcttctgtccggagttgccctcaaggggcagttcctggacttcagtaccatgcaggccacggagcttggtaagctccccgctggaggtgtcctttatccaccgccttctttcttgtacagtccagcattttgcccttccccacttcccgacaccagcttgcttcaggtgcggcaagacctgcctagcccatcggatttctatagcacgcctctccagcccggaggccaatctggtttcctgccgagcggagcaccagcccagcagatgttgctcccaatggtcgactcccagctgccagttgtgaattttggctcactgccgcctgctccaccacctgcacccccttccctaagtctgcttcccgttgggcctgctttacagccccctagtctcgccgttaggccgccaccagcccccgccaccagggtgcttcccagcccagccaggcccttccctgcttctctcggtagggccgaattgcatcctgtagagctgaagccctttcaagattatcaaaagctgtcaagcaatttaggtggtcccggttcaagccgcacaccacctaccggccgcagctttagcggactcaattctaggttgaaagctactccttcgacctacagtggagtgttccgcacccaaagagtcgatctgtatcaacaagcgtcccccccagatgccttgagatggatcccaaagccctgggaacgtacaggtccaccacctcgggaagggccgagtcggcgtgcagaggagcccgggtcaaggggggataaagagccaggtttgcctccgcccagatag

SEQ ID NO: 200834 - DNA, 6474 bp, synthetic construct
  misc_feature 1..6474: note = Description of Artificial Sequence: Synthetic coding sequence
  source 1..6474: mol_type = other DNA
atgagcgaccggagcggccccaccgccaagggcaaggacggcaagaaatactccagcctgaatctattcgacacctataagggtaagtctctggaaatccagaagcccgccgtggcaccccgacatggacttcagtccctcggcaaagtggctatcgctagaagaatgccacccccagccaacctccccagcctgaaggccgagaataagggaaacgatcctaacgttagtctcgtgccaaaagacggcaccggatgggcatcaaagcaggaacagtctgacccaaaatcgagcgatgcctctacggcgcagccacccgagtctcagcccttgccagcatcccagacacccgcgtcaaatcagcccaagcggcctccagctgcccctgaaaatacccccctcgtgccttccggggtcaaatcctgggcccaggcttccgttacccacggcgcccacggcgatggcggacgtgcctcctccctgctgagccgtttttccagagaggaattccccaccctgcaggcagctggagaccaggacaaagccgctaaagagcgggagtcagctgagcagagcagtggacctgggccatcactcagacctcagaactccacgacctggagagacggcggaggaaggggaccagacgagctcgagggaccagatagcaagctgcatcatgggcatgatcctagagggggcttgcagccatcaggacccccccagttcccaccctatagaggaatgatgccccccttcatgtaccccccttacctgccgtttccccctccctatggcccccaagggccctataggtaccctactcccgatgggccgagtcggtttcctcgggtcgcaggtcccaggggaagtgggccccccatgcgtttagttgaacccgtcgggagacccagcattctgaaggaagataaccttaaagagtttgaccaactggatcaggagaacgacgacggctgggccggcgcccacgaagaagtcgactacacagagaagcttaaattttccgatgaagaagatggaagagattcggatgaagaaggggctgagggacaccgcgatagtcaaagtgcgagcggcgaagagcgcccgcccgaggcagatggcaagaagggaaactctccaaattcagagccaccaactcctaaaacagcctgggccgagacctcccgacctccagaaacagaaccgggcccacccgcacctaagccccccctgcccccaccccaccgcggccccgccgggaactggggaccccctggcgattaccccgatcgcggcggcccgccctgcaaaccacccgccccagaggacgaagacgaagcctggagacagcgtcgcaaacagagctctagtgaaattagtctggctgttgagcgcgctcggcgcaggagggaggaagaggagcggcggatgcaggaagagaggagagccgcctgcgccgaaaaactgaagaggctggacgagaagtttggcgcacccgacaagcgcttgaaagcggaacccgcagctccccctgccgctccctctacacccgcaccgcctccagccgtgccaaaggaacttccagcaccacccgccccacctccagcctcagcccctacaccagagaaggagccggaggaacctgcacaggccccccccgctcaatccaccccaacgcctggagtcgctgctgctccaaccctggtatccggcggcggatccacgagctcaacctcctctggcagctttgaagcttcccccgtggagcctcaactccccagcaaagaagggcctgagcctcccgaggaggtcccccctcccacaactcctccggtccctaaggtggagcctaagggggacggcatcgggccgacgcgtcagcctccgtcacaaggtttgggctaccctaagtaccaaaagagcttgccccctcgctttcagaggcagcagcaagagcagcttctgaaacagcagcagcaacaccagtggcaacagcatcagcagggaagcgccccccccactccagtacccccttcccccccgcagcctgtgaccctgggggctgtcccagccccccaggctcccccccccccacccaaagccctttatccgggggctctagggagaccccctcccatgccccctatgaacttcgatcccaggtggatgatgatacccccttatgtggatccgagacttctgcaaggtcgccctcccttggatttctatccacctggcgtccatccctccggcttggtcccacgggaaagaagcgattccggaggctcgtcatcggagcctttcgaccgccatgccccagctatgttgcgggaacgtggcacccctcccgttgatcctaagctggcatgggtcggagatgtgtttactgcaaccccagccgagcctcgtcccctgacttcgcctctcagacaggcggccgacgaagacgacaagggaatgcgatctgaaacccccccagtaccccctccgcccccatatcttgcgagctatccgggctttcctgagaatggcgcccctgggccgccgataagccggttcccactcgaggagccgggccccagacccctcccatggccaccaggctccgacgaggtggccaagatccagacaccgccacccaagaaagaaccgcccaaagaggagaccgcgcagctcaccggacctgaggccggtcgcaaaccagcccgtggagtgggatctggaggccagggcccgcctccgccacgacgcgaaagcaggactgagactcgatgggggccacgaccaggatcttcccggcgcggcattccgcccgaggagccaggggccccaccacgccgcgcaggccccatcaagaaaccaccgccacctaccaaggtggaggaactgcctcccaagccacttgagcaaggagatgagaccccaaaaccccctaagcccgatcctctgaagatcacgaaaggaaaactcggaggccctaaggagactcctcccaacggcaacctgtctccggctcccagactgcggcgggactattcctatgagagagtgggaccaacatcttgcagaggacgtggccgtggggagtacttcgctcgcggacgcggcttcagaggcacttacggcgggagaggccggggcgccaggagccgcgagttcagaagctatcgcgaatttcgcggagatgacggaagggggggcggcaccgggggccctaaccatccccccgcaccccgcggaaggactgcctctgaaacaaggtctgaggggagtgaatacgaagaaatcccaaagcgaagacggcagagggggtccgaaaccgggagtgagactcacgagagcgatctggctccatccgataaggaagcccccacgccgaaagaaggcaccctcacacaagtaccgttagcaccgccgccacctggggcacccccgtcccctgcacctgctaggtttaccgccagagggggaagggtcttcactccccggggcgtgccttcacgcagagggagaggcggcggtcgtccccctcctcaagtatgtcccggctggagcccaccagcaaaaagcctggccccgaagaaacctccaactgggcctcttccaccctctaaagagcctctgaaggaaaaacttatccctggtcccctaagtcccgtggctcggggaggttctaatggtggcagcaatgtggggatggaggacggtgaacgccctagacgcagacggcatgggcgtgcgcagcaacaggacaagccaccccggtttagaaggctgaaacaagagagggaaaatgccgcccgcgggagtgagggtaagccgagcttgaccctcccagcatcagcaccagggcccgaagaggctctaacaactgtgacagttgcccctgccccaaggcgtgcggcagccaagtcacccgatctctctaaccagaacagcgatcaggctaatgaggaatgggagaccgcttcagaatcctctgattttacatcagaacgacggggcgataaagaggcacctcccccagttcttctgactcccaaggcagtggggacccccgggggtggtgggggcggagccgtgccaggcatctcagccatgagccggggggatctgtcccagcgcgccaaagatctctctaaacgatccttttcatctcaaaggccagggatggaaaggcagaacaggaggccagggcccggcggaaaggctggatcaagtgggtcttcgagcggcggcgggggcggcggtcctgggggaagaacaggccccgggagaggggataagcgtagctggcctagtccaaaaaacaggtcgagaccgccagaggagcgcccgcccggcctaccacttccccccccaccaccaagctcatccgccgtgttcaggttggatcaggttattcacagtaaccctgccgggatccagcaggccttggcccagctgtcttccagacaagggtcggtcactgcgccaggcggccacccacgacataagcctggacctcctcaggccccacagggaccttcacctcgccccccgacacgatacgaaccccagcgagttaactctggattgtcctctgatccccactttgaggagcctgggcctatggtgcggggagtaggtggcacgcctcgggatagtgctggagtcagccccttccctccaaaaaggcgtgaacggccacctcgtaaacctgagcttcttcaggaggagtccctacctcccccacatagcagtggtttcctcggctcgaagccagagggccccggtcctcaagctgagagccgtgatacaggcactgaagccctgactccccacatatggaaccggttgcataccgctacctcccggaaatcctacaggcccagttccatggaaccctggatggaaccactgagccctttcgaggatgtggccgggacagagatgagccagtcagatagcggggtggatctgtccggcgactcacaggtttcttccggcccctgttcccagaggtcctcgcccgacggcgggttgaagggagccgccgaggggccccccaaacgacccggcgggagttcaccccttaacgctgtgccatgtgaaggcccgcccggcagcgagccaccaaggcgaccgccacctgccccccatgacggtgacaggaaggagctgccaagggagcaacccctcccacccggccccatcggtaccgaacgcagccaacatacagaccgggggactgaaccaggtcctatccgacccagccatagacctgggccacccgtgcagttcggcactagcgacaaggactccgacttaagactggtggttggcgacagcctaaaggcagagaaagaactgacagcctctgtgactgaagccatacctgtcagccgtgactgggagctgttacctagcgccgctgcttccgctgaaccgcaaagcaagaaccttgattccggtcactgcgtacccgaaccgagctcttctggtcagcggctgtatccagaggtgttttacggttccgctggaccctcttcatcccagatatctggaggagcaatggattcacagctccacccgaactctggtggattcaggcccggcactccatccctccacccatatcgctctcagccattatatctcccccccggcccagcccccccttcagctttgctttccggagtcgcgctgaagggccagttcctcgactttagtactatgcaggctactgagctcggcaaactcccagccggcggggtgctttatccaccaccatccttcctctactcacctgctttctgcccttccccactgcctgacacttcacttcttcaggtccggcaagacctcccgagccccagcgacttttattcaacccctctccaacctggggggcagagtgggttccttccttccggagctcccgcccagcagatgcttctaccaatggtcgattcacagttgccggttgtgaattttggctctctccctccagccccacctccagcccccccaagcttgagtctgctgcccgtgggacccgccctccaaccaccatctcttgcagtccggcctcctcctgcgcccgcaacccgcgtgctgccatctcccgcacgcccatttcccgcatccctgggcagagcagagcttcatccagtggagcttaagccctttcaggattaccaaaagctgtcttctaacctgggtgggcccgggtctagtagaacgccccccaccggccgaagttttagcggactaaacagtaggctcaaagcaactccttccacttatagcggagtgtttcgaactcaacgcgtagatctctaccagcaggccagcccgcctgacgcactcagatggattcccaaaccatgggagaggactggcccaccacctagagaaggaccttctcggcgtgccgaagaacccggttccagaggagacaaggaaccagggctccccccgcccagatag

SEQ ID NO: 200835 - DNA, 6474 bp, synthetic construct
  misc_feature 1..6474: note = Description of Artificial Sequence: Synthetic coding sequence
  source 1..6474: mol_type = other DNA
atgagcgaccggagcggccccaccgccaagggcaaggacggcaagaaatattcatctcttaatctgtttgatacatacaagggaaaaagtctggagattcagaagccggccgttgcccccaggcacggtcttcaatccctaggcaaagttgctattgcccgccgcatgccacctcctgccaacctgcccagtctgaaggccgaaaacaagggcaatgacccaaacgttagcctcgttcctaaggacggcacaggttgggcttcgaagcaggagcagagtgaccccaagagctctgatgcatctaccgcccagcccccggagagccagcccttgcccgcttctcagacacctgcctctaatcagccgaagcgcccacccgcagcgccagaaaacacacccctggtgccctcaggtgtgaaatcctgggctcaggcctccgtaacccatggtgcacacggtgacggtggtcgtgcatcatcactgctgtcacggttctcacgcgaggagtttcccaccctgcaggctgcaggtgaccaagacaaagccgctaaggaacgtgaatccgcggaacaaagcagtggacctggaccctctctaagaccgcaaaactccaccacctggagggacggaggtggcaggggacccgatgagttggagggaccagattctaagttacaccacggtcacgacccacgagggggactccagccttctgggccacctcagttccccccttatcggggcatgatgcctccttttatgtatccaccgtatctcccttttcccccaccttacggtccccaaggcccctaccgataccccactccggacggtccttcacgattccctagggtcgccggcccacgaggatccggcccacccatgagattggtggagccagtcgggagacctagcatcctcaaagaagataaccttaaggaatttgatcaactggatcaagagaacgacgacggatgggcaggtgcacatgaagaagtggactataccgagaaactcaagttctctgatgaggaagacggtcgggacagcgacgaggagggtgctgaggggcacagagactcccagagtgcctctggcgaggagagacctcccgaagccgacggtaagaaaggtaatagccctaattcagaacctcctaccccaaagacagcctgggctgagacatctcgcccgcccgagaccgagcccggaccccccgcccccaaaccgccactgccccctccccacagggggcctgccggcaactggggaccaccaggagactatcccgatagaggcggaccaccttgtaagccacctgcaccggaggacgaggatgaagcatggcgccagcggagaaaacagtccagcagcgagatcagccttgcagtggaacgggccaggcgccggcgggaggaggaggaacgcagaatgcaagaggagaggagagccgcctgcgcagagaagcttaaaagattggatgagaagttcggtgcccccgataagcgcctcaaggcagaacctgctgcacctccagcagcccctagcactcccgccccacctcctgctgtccccaaggaactgccagctcccccggcgcctccgccggcatcagcccctacaccagaaaaagagccagaagagcctgcccaggcaccacccgcacagtccaccccaacaccaggtgtggcagccgccccaacactcgtgtccggaggcggaagtacctcctccacctcttctggctccttcgaagccagtcccgttgagcctcagctgccctcaaaagaagggcccgaaccacctgaggaagtgcctcccccaacaacaccacccgtgcccaaggtggaaccaaagggggacggaatcggtcctacccgacaacccccctcacaaggactaggatacccaaaataccaaaagtccctgccgcccagatttcaaagacaacagcaagaacagctgttaaagcagcagcagcagcaccagtggcagcaacatcagcaaggcagcgctccaccaaccccagtcccccccagccccccacagcccgttacgttgggggccgtgcctgccccacaggccccacctccaccaccgaaagctctgtaccccggggctttaggaaggccacctcccatgcctcctatgaatttcgatccacgatggatgatgatcccaccgtatgttgacccccgcctcctccagggaaggcctcccttagacttttacccacctggggtacatcccagcgggctcgtgcctagagaacgttctgattccggtggatccagttccgagccatttgaccgccatgcaccggccatgctgagagagcggggtactccgccagtggaccctaaactggcctgggtcggcgacgtgtttacagcgacaccagcggaaccaagaccattgactagtcctttaaggcaggccgcggacgaggacgataagggaatgaggagtgagactccaccggtaccacctccacccccttacttggcgtcatatcccggctttccggagaacggcgcgccgggccctccaatctccagattcccgctggaggaacccgggcctagaccacttccttggccacccggctcagacgaggttgcaaaaatccagacacctccgcccaagaaagagcccccaaaagaagagactgctcagctaactggacccgaggcaggtagaaagccagcgcgtggcgtcggctctgggggacaaggtccaccccctccccgcagggagtcaaggactgaaacacgctggggccccagacccggctcaagtagacggggaataccacccgaggagcccggcgccccacctcgccgtgcgggacctattaagaaacccccccctcccacaaaagtggaggagctgcccccgaaacctctagagcaaggcgacgagacccccaagccaccaaagccagaccccttaaagattactaaaggtaagttggggggccccaaagaaactcctcctaatgggaatcttagccctgctcctaggctgaggagggattactcttacgaacgtgtcggtccaaccagttgcaggggtaggggccgcggggaatatttcgctagggggagaggattccgggggacatacggaggtagaggcagaggggcaaggagccgagagtttcgctcctaccgtgaattcagaggggacgacggcaggggagggggaaccgggggacccaaccacccccctgcaccacgggggaggacagcctccgaaactcgtagcgaaggctcagagtatgaggagataccgaaacgccgccgccagagaggttccgaaaccggctcggagacccatgaatcagaccttgctcccagtgacaaagaagccccaacgccaaaggagggtacactgacccaggtgccacttgcccccccccctcctggggcccctcccagtccagcgcccgctcgttttactgctagaggaggaagagtcttcacaccacgcggcgtgcctagccgcaggggtcgtggaggaggccgaccaccacctcaggtttgcccagggtggtcgccgccagccaaatccctggcccccaagaaaccaccaaccgggcccctccccccctccaaggaacccctaaaagaaaaactcatcccgggtcctctctcgcctgtcgcgcgcggcggatcaaatggaggctcaaatgtgggtatggaggatggggagcgtccgaggcgcaggcggcatggacgtgcacagcagcaggacaaaccaccacggttccgacgtctgaagcaggagagggaaaatgcagcgagggggtcagagggcaaacctagcctcacactgcccgcttcagcgccagggcctgaggaagcactcactaccgttactgtggcacccgcacctaggcgcgcggcagccaaatccccagatctgtccaatcagaacagcgaccaggcaaacgaggagtgggaaactgccagtgaatcgagcgacttcaccagtgagaggcgaggtgataaagaagctccaccccccgtcctgctgacaccaaaagccgttggaaccccgggcggaggtggtggcggcgccgttccgggaatatcagcaatgtcacgaggagatctctcccaacgggccaaggatttgtccaaaaggagcttcagcagtcagcgtcctggaatggagcgccagaacaggagacctggtccaggcggtaaagccgggagttctggtagctcttctggaggcggtggcggcgggccggggggaaggactgggcccggccgcggagacaagagatcctggcccagtccaaagaatcgtagccgtcccccagaggaacgcccgcccgggcttccgttaccaccccctccaccttcctcatctgccgtgtttaggctcgaccaggtcatccattccaaccccgcaggtatccagcaggcccttgctcagctgtcttccaggcagggttcagtgacggctccaggagggcaccctcgccataagcctgggccacctcaggccccccagggccctagtcctcgcccgccaacaaggtacgaacctcaaagggtgaacagtgggctgagcagtgacccacacttcgaggaacctggcccaatggttagaggcgtgggcgggaccccacgggactcagccggggttagtccttttccaccaaagaggcgggagagacctccccggaagccggagctattgcaagaagagagtcttcccccacctcattcctccggtttcctcggttcaaagcctgaggggcccggtccacaggcagaaagccgggatacggggactgaagctcttacaccacacatctggaacagactgcataccgctaccagtagaaagtcttacagaccctcttccatggaaccatggatggagcccctgtccccgttcgaggatgtggccggaacggagatgtcacagtccgattctggcgtggacctgtctggtgattctcaggtttcctccgggccttgttctcagaggtcctctcccgacggggggctgaagggagctgcggaggggccaccaaagcgcccaggaggcagtagccccctgaacgccgttccttgcgaagggcctcctggcagtgagcctccacgtcgaccacctcctgcaccgcatgacggagaccggaaagagcttccacgcgagcagcctctccccccaggccctattggaacagagcgaagccagcggactgatagaggtacggagcccggacctatccggccttcccaccgccccgggccccctgtccagttcggcacgagtgacaaagattcagacctgcgcctggtggtgggggatagcctgaaagctgagaaagagcttactgctagcgtgactgaggctatccccgtgtcccgggactgggaactgctccctagtgcagccgcctccgccgagccccagagcaagaacctggattccgggcactgcgtccccgaaccctcttcatccggacaacgcctgtaccctgaggttttctacggatctgctggacctagttcttcgcagatatctggtggagccatggattcgcagttgcacccaaatagtggcggtttccgcccaggtacaccatcacttcacccatatagaagtcagcccttatatctgccaccaggcccggctcctccatccgccctcttgagtggggtggccctgaagggtcagttcctcgacttcagcactatgcaggccaccgaattaggcaaattacccgctggaggcgtcctgtaccctccccccagttttctgtacagccccgctttttgtcctagcccccttccggataccagcctccttcaggtccgccaggatctgccttccccatcggatttttactcaaccccactgcagcctggtggtcaaagcgggttcctgcccagcggggcgccagcacaacagatgttgttgcccatggtcgactctcagctgccagtcgtcaatttcggcagcctgcctcctgcgcctccaccagcccctcctccactgtctcttctgcccgttggacccgctctgcagccacccagcctggctgtcagacccccacctgcccctgcaacccgggtgctaccctcacccgcacgccctttcccggcttctctgggacgggccgaattgcatccagtggaactcaagccttttcaggactaccagaaactttcttccaacttgggtggtccgggaagctccaggaccccccccaccggcaggtcttttagtggccttaactctaggctcaaggctaccccaagtacctactcaggggtcttcagaacccagagggtcgatctgtatcagcaggcttccccgccagatgctcttaggtggattcccaaaccgtgggaacgaacgggccctcctccacgagagggccctagcagacgggcggaggaacctggatctcgaggagataaggagccggggctgcctccacctagatag

SEQ ID NO: 200836 - DNA, 6417 bp, synthetic construct
  misc_feature 1..6417: note = Description of Artificial Sequence: Synthetic coding sequence
  source 1..6417: mol_type = other DNA
atgagcgaccggagcggccccaccgccaagggcaaggacggcaagaaatattcctctttgaatctgttcgatacctataagggcaaaagcttggaaatccagaagccagctgtagcgcccaggcatggtttacagtcattgggcaaggtagcaattgcaagaaggatgcctccccccgctaacctgccttccctgaaggcagagaacaaagggaacgatcccaacgtgtcactagtccctaaagatggaactggatgggccagcaagcaggaacagagtgatccgaagtccagcgacgcctcaacagcgcagccccccgagtctcaacctttgccagcctcccagacacctgcctcaaatcagcccaaaagaccgcccgccgctcctgaaaacaccccccttgtcccttccggcgtcaaaagttgggcgcaagcatcggtgacccacggagctcacggagatgggggtcgcgcctctagcctgctgagccgtttcagtagagaggaatttcctacgctccaggccgcgggggaccaagataaagcagccaaggagcgtgagtctgcagagcagagcagcggtccagggcccagcttgcgcccacaaaacagcacaacatggcgcgatggcggaggtcgggggcccgatgagctggaagggcccgactctaagttgcatcacggacatgacccgcgaggcggcctgcagcctagtggccctccccagtttccaccataccgcggaatgatgcctccctttatgtatcccccctacctcccattcccgcctccgtatggtccccaggggccatatcgataccctacaccagacgggcctagtcgctttccaagggtcgccggcccccgtggcagtggtccacctatgcggcttgtcgagcccgtcggcagaccaagcattctgaaagaagacaacctgaaagagtttgatcaattggaccaggagaacgatgacggttgggcaggtgcacatgaggaggtggactatacagaaaagctgaagttctctgacgaagaagacggcagagactccgacgaagagggggccgaaggacatagagattcccagtcagcctctggggaggagcgacccccggaggcagacggtaagaagggaaactccccaaatagcgagcctcctacccccaaaactgcttgggccgagaccagccgacctcccgagacggagccaggcccacccgccccgaagcctcccttgccccctcccggcgactacccggacagaggcggccctccctgcaaaccaccagctcctgaagatgaagatgaggcttggcggcaaagacggaaacagtcttcatctgagatttccctcgccgtcgaacgagctaggcgacgccgcgaggaggaggagcgtcgtatgcaggaagagagacgggctgcatgcgccgagaaactgaagcggctggacgagaagttcggagcacccgacaagcggctgaaggccgaaccagcggccccacccgcagctccgagtaccccagcacctccacccgctgtccctaaggaattaccagcacccccagcaccgccccctgccagcgccccaacaccagaaacagaaccagaggaacccgcccaagcccctcctgcacaatccacacccacacccggcgttgcagccgctcccactctcgtgtccggaggcgggtccacctcttcaacctcttccggatcattcgaggccagcccagttgaaccacaattgccttctaaggaggggcccgagcccccggaggaagttcctccccccacgaccccgcccgtccccaaggtggaacccaagggcgacggcatcgggcccacacggcaacctcctagtcaggggctgggctatcccaaatatcaaaaaagcttgccacctagattccagagacagcagcaagaacagttgctcaagcagcagcaacagcaccagtggcaacagcatcagcagggctccgctccacccacgcccgtccccccgagcccaccccagccggtaacccttggagccgtgccagccccacaggctcctccacctcctccaaaagcgctctaccccggagctctcggtagacctccgcccatgccacccatgaactttgatccccggtggatgatgatccctccttatgtggaccctaggctgctacaggggcggcctcctctggatttttacccacccggggtgcaccccagcgggctggtgccccgggagcggtctgatagcggcggctcctcctccgagccatttgaccggcatgcgccagcaatgttaagggagcgtggcacgcctcccgtcgaccctaagttagcctgggtcggagacgtcttcacggcaaccccagccgagccccgtccactaacgtcaccactccgacaggccgcagatgaggacgataaaggtatgcgcagtgagacccctccagtcccccctccaccgccttacctcgcttcctaccctggattccccgagaacggcgctcctgggccgcccatctctagattcccactggaagaaccagggcccagaccacttccgtggccccccgggtccgacgaggtggctaaaatccaaacaccacccccaaagaaagagcccccaaaagaggagaccgcccagctcaccggccctgaggcagggcgcaagccagcacggggcgtcggttcaggcggccagggacctcctccacctcgccgcgaatcaagaacagagacccggtggggacctcgccccggaagcagtcgaagaggaatccccccagaggagccgggggccccccctagaagggcaggtccgattaaaaagccacctcctcctacaaaagtggaggaactgccgcccaagcctctcgaacaaggcgatgaaactcccaagccaccgaaacctgatcctctaaagattacaaagggcaaattgggcgggcctaaggagaccccccctaacggcaatctctccccggctcccaggctccgccgcgactacagttacgagcgcgtcggccccaccagttgtcgaggacgcggcaggggagaatacttcgcccgcggaagaggctttcgagggacctacggcggacgcggccgtggtgctgcaggcaactccgccgttactgaatcattcgaggagatgatgggggtagaggtaggccagggggaccaaaccacgctgctgttaccagaggcggctctgcccgcaagacacggggccagggtgcagagtatgcgcaaatcccctagcggtgcaggctctggagcccagaagcaggccgccaggccaatgcgagtcatatggctactccaaaccaggcgtcttccccatccacgtagagaacacagcccgaggtcccgctccccaacaacccgctctccgacattccctgctcccgcccgttttacgcctggggtgggcgaatccagccttcctgaaggcattagtcccggcccccgtcggcgtgaaccaccacaggtttgcccaggatggtcacctcctgcaaagtcgctggccccgaagaagccgcccactggacctttgcccccatccaaagagcctctaaaagagaaattgattcccggccccttaagtcctgtggcacggggggggtcgaacgggggatcaaacgtcgggatggaagatggggaacggcccaggcgaaggcgacatggcagagcccagcaacaggacaaacctccacgcttcagaaggttgaaacaggagcgcgaaaatgctgctcgcggctcggagggtaagccatcgctaacccttcctgcttcagctccaggtcctgaggaggctctcactactgttacggtggcccctgcgccgaggcgggcggccgccaagtcccccgacctgagcaaccagaactcagaccaggcaaacgaggaatgggagactgccagcgaaagctctgactttaccagcgagcggcgaggcgacaaagaggctcctcctccagttctgctgacaccaaaagctgttggcacaccaggaggcggaggcgggggtgcagtgcctggcatctccgccatgagcagaggtgatctgagtcagcgggcaaaggacctgtcaaagcgcagtttctcctcccagcggcctggcatggagaggcagaataggcggcccggtcctggtggtaaagccgggtctagtggcagttcctcagggggtggcggggggggccccggcggcaggaccggtcctggcagaggcgataagaggagttggccatcaccgaagaatagaagccggcctcccgaagaaagacccccagggttgccgctgcctcctccaccaccctctagtagcgctgtgttcagactcgaccaggtcattcactctaaccccgctggcattcagcaggcgttagcccaactttcatccaggcagggaagtgtgactgccccaggcggccacccgcggcataagccaggactcccacaggcccctcaggggccttcgccaagacctcccacgcggtatgagccacaaagggtaaactctggcttatcctcagaccctcatttcgaagaaccagggccaatggttagaggcgtagggggcacaccgcgggattctgcaggcgtaagccctttccctccaaaacggcgggaaagaccaccccgtaaaccagaacttcttcaggaggagtctctccctcctccacacagctctggcttcctaggtagcaagcctgagggccctggacctcaggcagagtctagagacaccggcacggaagcgctaactccacacatatggaataggctacatacagcaaccagtagaaaatcttatcgcccaagtagcatggaaccctggatggaacctttatccccattcgaagatgtagcaggaaccgagatgtctcagtccgactcaggtgtcgacctctctggagatagccaagttagctccggcccctgttcccagcgatccagtcccgatggcggactgaagggggctgcggagggacctcctaagcgccccggtgggagctctccacttaatgctgtgccttgcgagggcccaccggggtctgagccccccagacgcccacctccagccccccacgatggtgaccgcaaagagctgccgcgggaacagcccctgccaccggggcctatagggaccgagcggagccagagaaccgaccgcgggactgagccagggccaatccgtccgagccataggcctggtccgccggtgcagttcggtacgagtgacaaggacagcgacttacgcctggtggtcggcgactcactgaaagctgagaaggagcttacagcaagcgtaaccgaggccatacccgtgagtcgggactgggagctgctgccctccgctgccgcatcagcggagccccagagcaaaaacctggactccgggcattgcgttccagaaccctccagctctggtcagagactgtaccctgaagtcttctatggaagcgccgggccctcctcctcgcagatttccggaggacacggtctgagtatcaccagcaagcagtggaggagacccgggacgccgtcccttcacccctacagaagccagccactctatctgcctccagggcccgcacccccctccgccctgctgtcgggactcgccttaaaaggccaattcctggattttagcactatgcaagccactgagttggggaagctccctgcaggaggcgttctttacccacccccctcttttctgtatagcccagccttctgcccatcccccttgcccgataccagcctgctccaggtccggcaggatctaccctctccttcggatttttactccacaccactgcagcctgggggtcagagcggcttccttccctccggcgccccagcccaacaaatgctgcttccgatggtcgacagtcaactccccgtcgtaaatttcgggagcttaccgcccgcccctcctccggccccacccccattatcactgctgcctgtgggccccgcactacagccgccgagcttggctgtgcgtcctccccctgctcctgccactagggttctgcccagccctgcacggccttttcctgccagtctgggccgcgccgagttgcaccccgtggagcttaagcccttccaggactatcaaaagctctcatccaacctcggtggccccggctcctctcggacaccccctactgggcggtctttttcggggctcaatagccggctaaaggcgacccccagtacatactctggagtgttcagaactcagagggttgacctttatcaacaagcatcacctcccgatgcactgaggtggattcccaagccctgggaaagaacaggccctcctccacgggaaggaccttcgcgcagagccgaagagcctgggagtcgcggtgataaggaacctggactgccccctccccggtag

SEQ ID NO: 200837 - DNA, 6474 bp, synthetic construct
  misc_feature 1..6474: note = Description of Artificial Sequence: Synthetic coding sequence
  source 1..6474: mol_type = other DNA
atgagcgaccggagcggccccaccgccaagggcaaggacggcaagaaatatagctcactcaatctctttgacacatacaaaggaaaatccctcgaaatccagaaaccagctgtcgctccacggcatggtctgcagtcccttggaaaggttgccatcgcacgacgcatgccaccgccagcaaatctgccttcactgaaagctgaaaataagggaaatgatccaaatgtcagcctggtgcccaaggatggaacaggatgggcaagcaagcaggaacagtctgacccaaagagcagcgacgcaagtaccgcccagccgccagagtcccagcccctgcccgcctctcagacccccgcctcaaatcagccaaaacggcccccagccgcacccgaaaatacccccctcgtcccaagcggtgtgaaatcttgggcccaagcttctgtcactcacggggctcacggagatggtggcagggccagcagcctgctttcacgcttttctagagaagagtttcccaccctgcaggcagcaggtgatcaagacaaggcagctaaagagagggaatccgccgaacagagctccgggccaggtcccagcctgagacctcaaaactccaccacctggcgcgatggtgggggaaggggtcccgatgaactggagggccccgattctaagctgcatcatggccacgaccccaggggtgggctccagccttctggccctccgcagttcccaccctaccggggcatgatgcctccttttatgtaccctccctatttgccgtttccccccccatacggacctcagggcccctaccgttatccaacgcctgacggacccagtcggtttccccgcgtagccggtcccaggggcagcggacctccgatgaggttagtggaacccgttgggcgcccctcaatcttgaaggaggataacctgaaagagttcgaccaactggaccaggagaacgacgatggctgggccggtgcccacgaggaggtagattacacagagaaactgaagttctctgatgaggaagatgggcgagattccgatgaagagggagcggagggccacagagattcgcagtctgcttccggcgaagagagaccacctgaggctgatgggaagaagggcaatagtcctaattctgagccccccacccccaagacggcatgggccgaaacctccagacctccagagaccgaacccggacctcctgcccccaagccaccacttcctcccccccacaggggcccagccggaaactggggccctcccggcgattacccagaccgtggtggacccccctgcaaaccaccagcacccgaggatgaagacgaggcatggagacaaaggagaaagcagtcctcttcagagatctctttggcagtggagagggctcgaagaagacgggaagaggaggagcgccggatgcaggaagaacggcgggctgcttgtgccgaaaagctgaaacgcctagatgaaaagtttggagctcctgataagagacttaaggctgaacctgccgcaccccctgctgcaccatccactccagcccctccccctgccgtgcctaaagagctccctgcccctcctgcgccaccccctgctagcgccccgacgccagaaaaggagcccgaggaacctgcccaggcacccccagctcaatccacccccaccccaggagttgccgccgcacccacattagtgtcaggcggaggaagcacctcttccactagctccggctcctttgaggcctcacctgtcgaacctcagttgcctagcaaggaaggcccagagccacctgaggaggttccgccccccacaaccccgcctgttccaaaagttgagcctaagggggacggtatcgggccaactcgacaacccccttcccagggactgggctatcccaaataccagaaaagtctgcctcccaggttccagcggcagcagcaggaacagctgctcaaacagcagcaacagcatcagtggcaacaacatcagcagggctctgctccccccactccagtcccaccgagtccgcctcagcccgttactctgggcgctgtacccgcgccacaagcaccgcccccaccaccgaaagcgctgtacccgggggctctgggtcgtccaccgccgatgcctccaatgaatttcgatcctcgatggatgatgatacccccttacgtagatcctcgcctgttacagggcagacccccccttgatttttacccaccaggcgtgcacccatccgggctggtgcctcgggagcgttccgatagcgggggctcttcctctgagccgttcgacagacacgcccctgccatgctccgggaacggggtactccacccgtggatcccaaattggcgtgggtcggtgatgtgttcaccgcaacgccagctgaaccgcgccccctcacatctccactgcgccaggcagcagatgaagatgacaagggcatgcgctccgaaactcctcccgttcctccccccccgccgtatctggcttcttaccctggatttcccgagaatggcgcccctggcccacccatttcccggtttccactcgaggagccaggtccccgacccctaccatggcctcccggctccgacgaggtcgctaaaatccagacacctccacctaagaaggaaccgcccaaggaagaaaccgctcagctgaccggccctgaagcgggtcgcaaaccggcacgaggggtcgggtctggcgggcagggccctcccccacccaggagagaaagtcggactgagacccgatgggggccaaggccagggtcatctcggagaggaattcctcccgaagaacctggcgctccgcctcgtcgcgccggtcccatcaagaaaccaccacctccgacaaaagtggaggagttaccacccaagccactggagcagggggatgagactccgaaaccacccaaaccagatcccttaaaaatcacaaaagggaagctaggtggccccaaggaaacccctcctaatgggaacctttcaccagctccgagactgcgacgtgattactcctacgaacgggtgggaccgaccagttgtcggggtaggggccggggtgagtattttgcacgcggccgtggattccggggaacctatgggggaaggggaagaggcgcaagaagccgagagttcaggagttatcgtgaatttcgaggggatgatgggagaggcgggggcaccggcggccccaaccatccgcctgctcctcggggtcgaaccgcatccgagacacggtctgaggggtcggagtacgaagagatccccaagcggcggcgccagcgcggatctgaaaccggaagtgagacacacgagtctgacctggccccatccgacaaagaggctcccacaccgaaagaaggtaccctcacgcaggtgccccttgccccacctccccctggggctccccccagccctgctcctgcgaggttcactgcaagaggtgggagggtgtttaccccccgcggcgtccccagccggcggggccgagggggtggtagaccccccccccaagtctgccccggatggagtccacccgccaaaagtcttgccccgaagaaacccccaacggggccccttccccccagcaaggaacccctcaaagagaaattgattccagggccactgtcacctgtagctcgaggagggagtaatggaggttcgaacgtggggatggaagatggtgaacgccctcggcgcagaaggcatgggagagcgcagcagcaggataagcctcctcgatttcgcagactgaaacaggagcgggagaacgccgccagggggagtgaaggcaagcccagcttaaccctacctgcttcagccccaggccctgaagaggcgcttaccaccgtgactgtggcaccagcccctagaagagccgcagctaagagtcctgatttgtccaatcagaattctgatcaggcaaatgaggagtgggaaacagccagcgaatcctccgattttacgagcgaacgaaggggggacaaggaagcaccaccccccgtcctgctcacccctaaggccgttgggacacccggcggcggtggcggcggagctgtccccggcattagcgccatgtctaggggggatctgagccagagagcaaaggacttatcgaagaggagctttagctcacaacgacccgggatggagaggcaaaaccgtcgacccggtccaggtgggaaagccggttcatccggaagttcaagcggtgggggtgggggtgggcccgggggacgcaccggtccgggccggggggacaaaaggtcctggccgtccccaaaaaacagaagccgccctccagaggaacgaccgccggggttaccactcccgcccccacccccttcttcctcagcagttttccgcctggaccaggtgatccactctaacccagctggaatccagcaggcactggctcagctaagttctcgccagggctctgtgacagcccccgggggccacccacgccacaaaccgggtccaccccaggcccctcaggggccctccccccggccaccaacgcgctacgaacctcagcgtgtgaatagtggactcagctctgatccacactttgaagaaccaggtcctatggtgagaggggtaggaggtacacctagggactccgcaggtgttagtccgttccctcctaaaaggagagagcgcccgcctcgcaagcccgagttgctccaggaagagtctctgcccccaccccattcttcaggatttctagggtccaagccagaagggccaggccctcaggctgaaagccgggacactggtacagaagccttgacgccacacatctggaatcgacttcacaccgcaacatcacggaagtcatacaggccttccagcatggaaccctggatggagcctttgagtccatttgaagacgtcgctggaacggagatgtctcagtctgacagcggtgtggaccttagtggggacagccaggtgtccagcggaccctgcagtcagcgctcctccccagatgggggactcaaaggcgccgcagagggaccgcccaaaagaccaggaggatcatccccacttaatgccgtaccatgcgaagggccccccggaagcgaacctccacgccgacctcctccggcaccccacgatggggaccgtaaggagctgcctcgagagcagcctctgcccccagggccaataggtacagaaagatcccagcatacagaccgaggcactgaaccaggtcccatccgcccttcccatagaccagggccccccgtgcagttcggcacatcagataaggactctgacttgcgactcgtggtcggggattctttaaaggccgagaaggagctgacagcctctgtgactgaggcaatccctgtttcaagggattgggagttgcttccctctgcagctgcttctgccgagcctcagtcaaagaacctggatagcgggcattgcgtgcccgagccctcttcatcaggacaacggctgtatcccgaagtattttatgggagcgctggcccctcttcttcccaaatttctggcggcgccatggactcccagttacaccccaacagcggaggcttcagacctggcaccccctcactgcatccttacaggtcgcagcctttgtacctgccaccggggcccgcccctccctctgcactgctgagtggggtcgcgctgaaagggcagtttctggacttctctaccatgcaagctacagaactcggcaagttgccggccggcggggttctgtatcctccacctagtttcctgtatagccccgccttctgcccatcaccactgcctgatacatcattactacaggtcagacaggatttacccagcccttctgatttctactccacaccgttgcaaccagggggccagtctgggttcctgccctcaggggcccctgcacagcagatgctcctgcctatggttgacagccaactacctgtggtgaacttcgggtcactgcctccggcacctccccccgcaccacccagtctgtctctattgccagtggggcctgcacttcagccgcccagcctggcagtccgacctccaccggcccctgcaactcgggtcctccccagccccgcaagaccctttcccgccagtcttggccgcgccgagctgcatcctgtagagttaaagcccttccaggattaccagaagctctcatctaatctaggcggccccggctcatcccgcaccccccccactggtaggtccttttccggcctgaactctaggctcaaagccacgccctctacgtactctggcgtttttagaacccagagggtggacttgtaccaacaggcgtcgccacccgacgcactgcgttggatcccaaaaccctgggaacgaaccggccccccccctagggagggtccttcaaggagagctgaggaaccgggttccagaggcgataaggaacctggcctgcctcctccacgatag

SEQ ID NO: 200838 - DNA, 6474 bp, synthetic construct
  misc_feature 1..6474: note = Description of Artificial Sequence: Synthetic coding sequence
  source 1..6474: mol_type = other DNA
atgagcgaccggagcggccccaccgccaagggcaaggacggcaagaaatatagctccttgaacttattcgatacgtacaaaggaaagagtctggaaatccagaagcctgcggttgctccgaggcacggcctccagtctcttggaaaggtggccattgcccgcagaatgccccctcctgcgaatttgccaagtcttaaggccgagaacaaaggaaacgacccaaacgtatccctggtacccaaggacggcacagggtgggccagcaagcaggaacagagtgaccctaaatcttcagacgcctccaccgcgcagccacttgagtcacagccgctgccggcatcccagactccagcctccaatcagccgaagaggccccctgcggctcctgagaacactcctttggttccatctggggtcaagtcttgggcacaggcttcagtgactcacggtgcccatggggacggaggaagagcctcatccctactgtcccggttctctcgagaagaattcccaacgctgcaagcagcgggtgatcaggacaaggccgccaaagaacgtgaatccgcagagcagagtagcggcccgggaccctccctccggcctcagaacagtaccacttggagagacggcggagggcggggtcctgatgagctggagggacctgattcgaaactgcaccatggacatgacccaagaggcgggctgcagccctcgggcccgccgcagttccccccctatcgcggcatgatgcctcccttcatgtacccaccctacctcccctttccacccccctacggaccacaggggccataccgatacccaacccctgacggaccatctcgatttcctcgagtagccggccctaggggaagcgggccccccatgagactggtcgagcctgtcggtcgaccatctattctaaaagaagacaacctgaaggagttcgaccagctcgaccaggaaaacgacgacggttgggcgggagcccacgaagaggtcgattacaccgagaaactgaagttttccgatgaggaggatggtagagactcagatgaagaaggcgccgagggccacagagactcccaaagcgcctcgggcgaggaacggccgccggaagccgacgggaagaaaggtaactcacccaatagcgaacctcctactcctaagacggcttgggcagagacatccagacctccagaaaccgaacccggacctcctgcaccaaaacctcctctgccgccacctcaccgcggcccagccggaaactggggaccaccaggagactatcctgacagaggcggacctccttgtaagccacccgcaccagaggatgaagacgaggcctggagacagcgtaggaagcaatcaagctcggagataagcctggcagtggagcgggccagaaggaggagagaggaagaggaacggcggatgcaagaggaacgaagggccgcatgtgcagaaaaactaaagcgactggacgagaagtttggagcgcctgacaagcggctgaaagcagaacctgccgctccgcccgcggccccatcaacacccgctccccccccggctgtccccaaagaactgccggcacccccggcccctcctccggcctctgcaccaacgccagagaaagagcccgaggagccggcccaggcccccccagctcagtcaaccccgacccctggggttgctgcagctccgactctggtatcaggtggtgggtcgacaagttcaacaagctccggatccttcgaggcttcacccgttgagccccagctgccttcaaaggaaggccccgagcccccggaggaggtaccccctcctacaaccccccccgtgccaaaagttgagcccaagggagatggaatagggccgacccgacaaccgccctcccaaggcctaggatacccaaagtaccagaaaagtctgcccccacgttttcagcgacaacagcaggagcagcttttaaagcagcagcagcaacatcaatggcagcagcaccagcaagggtctgccccccctacccctgtgcctccctccccaccccaacctgtgactcttggagcggttccagccccgcaggcgccgcctcccccccccaaagccctttatcccggcgcgctcggcagaccgccaccaatgcctccaatgaattttgatccaaggtggatgatgatacctccttatgtagacccaaggctcctccaaggcagacctcctttggatttttatccccccggagttcacccatcaggtctggtcccccgggaaaggagcgattccgggggctcatcgtcagaaccattcgaccgccatgcacccgcaatgctgagagaaaggggtacaccccccgtggaccccaaacttgcatgggtgggcgatgtgttcacagccacccctgccgagccacggcctctgacatcgccattgcgacaggccgccgacgaggacgataagggtatgaggtcagagacaccccctgttcctcctccccccccctacttggctagttacccaggcttccccgagaacggggctcccggaccgccaatttcaaggttccccctcgaagaacccggcccccgtccccttccatggccccctggcagcgacgaagtagctaaaatccagacaccccccccaaagaaagaacctccgaaggaggagaccgcacagctgaccggcccagaggcaggcagaaaaccagcccggggagtgggttctggcggacagggccctccacctccacggcgggagtcccgcactgaaacaaggtgggggccacgaccaggatcttctcgaagaggcattccccctgaagagccaggcgccccacctcgaagggcgggacccataaagaagcccccccccccaaccaaggtggaggagctgccgccgaaaccgctggaacagggcgatgaaacaccgaaaccacccaagcccgaccctctgaagataaccaaaggcaagctaggcggtccgaaagagactccgccaaacgggaacctcagccctgcgcctcggctgcgcagggactattcatacgaaagggtgggccccacttcttgccggggccgcggaaggggcgaatattttgccagggggagagggtttaggggcacatacggtggacgcgggagaggagcacggtctcgggaatttcggagttatagagagttcaggggagatgacggtcgtggcggcgggaccggaggaccaaatcacccacccgctcctcgcggccggactgcttctgaaacgcggtctgaagggtcagagtacgaagaaattcccaaacgacggcgtcaacggggcagcgagacaggaagcgagacccacgagagtgatctggctccttctgataaggaggctccgacgcctaaggaggggaccttgacacaggttccgctggctcccccaccacccggcgctcccccttcccctgcccctgccagattcactgccagaggtggaagagtgttcaccccacgaggtgtgccaagccgaaggggccggggcggaggtcgtccccccccacaggtgtgcccagggtggagcccacctgcaaagagtttggcccctaaaaaacctccaaccggacccttgccgccaagtaaagagccgcttaaggaaaagctaattccgggtcctctatctcccgtggcacgaggtggatcaaatggaggctcgaacgtgggcatggaagacggggagcggccccggaggcggaggcacggccgggcccagcaacaagacaaacctcccagattccgcagactcaagcaagaacgcgaaaatgccgccagagggtccgagggaaagccttccttaaccttgccagcttccgccccaggcccagaagaagccctcaccactgtgacggtggctcccgcgcccagaagagcagctgcgaaaagccccgatctgtctaatcagaattctgaccaggctaatgaggagtgggagacggccagtgaatcttcagacttcactagcgagaggcggggcgataaagaagcgccccccccagttctcctcaccccaaaggctgtgggcaccccagggggtggcggtggtggtgcagttccgggaatatcggctatgtcccggggcgacctgagccagagggcaaaagatttatccaagcgtagcttctcaagccaacgccccggcatggagaggcaaaaccgccggcccggtcccgggggcaaagctggatcttccggatcatcttctggggggggaggcggcggccctgggggcagaactggaccaggccggggtgacaaacgttcctggccatcccccaaaaacagatcccgcccaccagaggaaagaccccccggactcccactacccccaccaccccccagctcaagcgctgtgtttcgcctagaccaggtgatccacagcaatcccgccggcatccaacaggccctcgcccaacttagctctcgtcaggggtcagtgactgcccctggaggccatcctcggcacaaacctggccctccccaagccccacagggaccttcacctcgccctcctacccgatacgagccacagcgtgtgaatagcggactgagcagcgacccgcacttcgaggagcccggacctatggtgaggggtgtgggcgggacacctagggacagtgctggcgtcagcccctttcctcctaagcgacgcgaacggcctccgagaaaaccagaactgcttcaagaagaaagcctgccgccaccacactcctcgggatttctgggcagtaagccagaggggccagggccacaggccgaatctagagatacaggaaccgaggccctcacaccgcacatctggaaccgcctccataccgctacatcacgcaagtcctataggcctagtagtatggagccctggatggagccactctctcctttcgaggatgttgccgggaccgagatgtctcaaagtgactcaggagtcgacctctccggagactcccaggtttcctctggaccctgtagtcaacggtctagtcccgacggaggactgaaaggcgccgccgaaggccctcccaaacgacccggcgggagctcacctttgaacgctgttccctgcgagggcccacccggctccgaacctccacgcagacctccacctgccccccatgacggagatcgcaaagaactccccagagaacaaccactgccaccaggtccaatcggcactgagcggtcacagcgaacagaccgcggaaccgaacctggacccattcgaccaagtcatcgcccaggacccccggttcaatttggcacttcagacaaggatagcgatctgaggctcgtcgttggggatagtctgaaggctgagaaggaactgacggcttccgtgaccgaggcgatccccgtttccagagattgggaacttctccctagtgccgccgcctccgctgagcctcagtcaaagaatctggattcaggacactgtgtgcccgagcctagttcctctggtcagcgtctgtatccagaggttttctacggctccgccggtccatccagtagtcagatctccggcggcgccatggacagccagctgcatccaaattccggtggctttcgccccggcaccccgtccctacacccctaccgctcacagccactctacctgcccccgggcccggctcctccctcagccctgttaagtggggtggcgctgaaggggcagttcttggacttctctacgatgcaggcaaccgagttggggaagttgccagccggcggcgttctgtatccacctcccagctttttatacagtccggctttttgccccagcccattgccggatacttctctccttcaggtgagacaagacctccctagccctagcgacttttatagcacccctctccaaccaggaggccagagcgggttcctgccttctggcgccccagcccagcaaatgctactacctatggtggattcacagctcccggtggtaaactttggaagccttcctccagcgccgcctcctgcaccaccccccttgagcctcttacctgtgggccccgccctccaaccgccttctctggctgtgcgcccccctccagctcccgccacccgggtcttgcctagccctgccaggcccttcccagcaagcttgggccgcgcggaactccacccagttgaattgaagcccttccaggattaccagaagctgtcttctaacctgggcggccctggttcatcccgaacaccgccaacagggagatcattcagtggcctgaattcccgcctgaaggcgacgccaagtacctattccggcgtttttcgcacccaaagggtagatctgtaccagcaggcaagtccaccagacgcgctgaggtggattcctaaaccttgggaaagaactggaccccctcctcgcgaggggccgagccgccgtgccgaagagccaggctccagaggcgacaaggagcctgggctcccccctccccggtag

SEQ ID NO: 200839 - DNA, 6474 bp, synthetic construct
  misc_feature 1..6474: note = Description of Artificial Sequence: Synthetic coding sequence
  source 1..6474: mol_type = other DNA
atgagcgaccggagcggccccaccgccaagggcaaggacggcaagaagtatagcagcctcaatctgttcgacacatataagggtaagagtctcgagatccaaaagcctgcggtggcaccccgtcacggcctgcagagtctcggaaaagtggccatcgcccgtcgtatgcctccgccagctaatctgcccagtttaaaggcggaaaataaagggaatgatcccaacgtgagcctagtgcctaaagatggaacggggtgggcgtctaagcaagagcagtccgacccaaagtcttctgatgcctcaacagcacagccgccagaatcccagccgctgccggctagccagacccccgccagcaaccagcctaagaggccacctgcagctcccgaaaacactcctctggtcccgagcggtgtgaagtcttgggctcaggcttcagtcactcatggggcccatggggatggaggcagggcaagttcactccttagcaggttctcgcgagaggaatttccgacccttcaagctgccggggaccaggacaaagccgctaaggagagggagtccgctgagcagtctagcgggccggggccctctttgcgcccccaaaacagtaccacatggagagacggcggcggacggggaccagatgagttggaaggccccgacagtaaactgcatcatgggcacgatcctcggggggggctgcagccatcaggtccaccccagttcccaccctacagaggaatgatgcctcctttcatgtatcctccttacctccccttccctccaccatacggccctcagggcccttacaggtaccccactcctgatgggcccagccggtttcctcgcgttgccggtccacgggggtcagggcctcccatgcggttggtcgagcccgttggcagacccagtatcctgaaagaggataacttgaaggagttcgatcagctggaccaggagaatgatgacgggtgggctggcgcccacgaagaggtcgattatacagagaagctgaagttctcagacgaggaggatgggcgcgactccgatgaggagggagcagagggccaccgagattcacagtccgcctccggcgaagaacggcccccagaggcagacggaaagaagggcaatagccctaattccgagcccccaacacctaaaaccgcttgggcggaaacatctaggccccccgaaacggagcctggccctccagcccccaagccccccctccccccacctcaccggggaccggctgggaattggggaccccccggcgattacccagacagagggggaccaccttgtaagccccctgccccggaagacgaagatgaggcatggcgacaacgcagaaaacaaagttcaagcgagatctctcttgctgtagagagagcccgtcgcaggagagaggaggaggagcgcagaatgcaggaggaaagacgcgcggcatgtgccgagaaattaaagcgcttggatgagaaattcggggctccagataagagactgaaggcagagcccgccgcccctcccgcagcaccctccacacctgcaccccctcccgccgtgccaaaggagttacccgccccacctgctcccccccccgcgagcgcgccaacacccgagaaggagccggaggagcctgcccaggccccaccagcccagtccacccctacccccggagttgccgctgcccccacactcgtctccgggggggggagtactagttcaacctcctcagggtcgtttgaagcatcccctgtagaaccacagcttcccagcaaggaaggtcccgagccacctgaagaagtgcctcctcctaccacacctcctgttccaaaagtagaacccaagggagacggtataggccccacgcgccaacctccatcccaaggcctcgggtatccaaagtaccagaaatctctgccccccagattccagcgtcagcagcaggagcagctcctgaaacagcagcagcagcaccagtggcagcagcatcagcagggatctgcaccacccactccagtaccaccctcaccccctcagcccgtgactctgggggccgtgcccgcaccacaggcgccacctcccccccccaaagctctataccctggcgccctagggcgaccgccaccaatgcccccaatgaacttcgacccaagatggatgatgattcctccttacgtagacccacgtctgttacagggacgcccaccactggacttctatccgcccggagtccatcccagcggcctcgtgcccagggagcgttccgatagcggcgggtcctccagtgaacctttcgatagacacgctcccgcaatgctgcgagagcgtggtacccctccagtggatccaaagctggcctgggtcggcgacgtcttcaccgccacaccggccgagcctcgccctctgaccagcccactcagacaggccgcagacgaggacgataaagggatgcgcagtgaaacgccccccgtccccccacctccaccctacttagcctcttaccctggctttcctgagaacggcgcaccaggccctcctatctcacggtttcctctggaagagcctggaccccggccacttccttggcctcccggctcggacgaagtggccaagatccagaccccaccaccaaaaaaagaaccccccaaggaggagaccgctcaacttacgggacctgaggccgggcggaaacctgcacggggggtggggagcggcggacaggggcctcccccacctaggagggagagccggacagagacccgatgggggcctcggcccggtagctcccgccgcggcatccccccagaggaaccaggagctccaccacggcgggctgggcctattaaaaagccgccgcctccaactaaagttgaggaacttcccccgaaacccctagagcaaggagatgagacaccgaaacccccgaagccagacccactgaagatcaccaaggggaaactgggagggcccaaggaaactccgcctaacgggaatctgtctccggccccccgcctacggcgggattactcatacgagcgcgttggtcctacatcttgtagggggagaggcaggggggaatacttcgctcgagggcgtggttttcgaggcacctacggcggcagaggccgtggcgcaagatctcgggagttcagatcataccgcgaatttagaggcgatgacggccgcggcggggggactgggggaccgaaccatccgcccgcacctagggggcgaacagcctcagaaaccagatccgaagggtcagaatatgaagagattcccaaacgacgacgacagagagggtcagaaacaggaagtgagacccatgagtctgacctggctcccagcgataaggaggctccaacaccaaaggagggtactttgacccaggtgccattggctccaccaccaccgggtgcccctcccagtccggcccctgctagatttacagcgagaggcggccgggtgtttactcctaggggcgttccttcaaggcggggcaggggtgggggcagaccaccaccgcaggtatgtcccggatggtccccgcccgctaagagcctggcacccaaaaagccacccaccggacccctgccaccctccaaagaaccattgaaagaaaagctcatccccgggcctctgagtccggtagctaggggcggcagtaacggaggctcaaacgtcggcatggaggatggcgagaggcctcggaggaggcggcacggtcgcgcacagcagcaggacaaaccgcctaggtttcgcagactcaaacaggagcgagagaatgccgccaggggctcagagggcaaaccctccttaacactccctgcatctgccccaggacccgaggaggcgcttacgactgtgaccgtggcacccgccccacgcagggccgcagctaagtcacccgatctttccaaccagaactccgatcaggccaatgaagaatgggaaacagcctctgagagctccgactttacttccgagagaagaggggataaggaggctccacccccagtgctcctgactccaaaggctgtggggacccccggcgggggaggcggtggggctgtgcctggaatctctgccatgtcccggggagacctctctcagagagctaaagacctgtccaagaggtccttttccagccaacgtccagggatggaaagacaaaatcggcggccaggcccaggtgggaaggcaggctccagcggctccagctctggcggtggcggaggaggaccaggcggaagaaccgggccggggaggggcgacaagagatcatggccgagtcctaaaaatagaagtcggccacccgaggagcgcccgccaggtctgcctcttccaccaccaccccctagctcctccgccgtcttcaggctcgaccaggtaatccatagcaacccagcgggtatccagcaggcgctggcacagttaagttcaaggcagggctctgtcactgccccaggcggccacccgcgacacaaaccgggccccccacaggctccccaagggccatctccacgaccgcctacaagatacgagccccagagagtgaatagcggtctgtccagtgacccccacttcgaggaacccggtcccatggtccgcggggtcggagggacccctcgcgattccgcaggggttagcccattcccacctaagagaagggagcggccacctcgcaaacctgaattgctgcaggaggagtcccttcccccaccccatagctctggattccttggctctaaacctgaaggaccaggtccccaggccgagtccagagatacgggcaccgaggcacttaccccccatatttggaatcgcctccatactgcaacaagcagaaagtcatatcgacccagctcaatggaaccatggatggagcccctgtccccattcgaggatgtggccgggacagagatgtcacaaagcgactccggggtcgatctctctggagactcacaggtttccagtggaccttgcagccaacgatcaagcccggacgggggcttaaagggggctgccgaagggccacctaaacggcctggagggagctcgcccttaaatgctgttccttgcgaaggacccccagggagtgagcccccaaggcggccaccacccgcccctcatgatggcgatcgtaaggagcttcctcgagagcaaccgctcccccccgggccgattggcacagagcgttctcagcggacagatcgaggtactgagccgggccccatacgaccatcacaccgccctggaccacccgtgcagtttggcacctcagacaaggattcagatctgaggttagtcgtgggtgattctctgaaggcagaaaaagagctcacagcgagcgttaccgaggcaataccagtaagtagggactgggagctactcccctctgccgctgcttccgccgaaccacaaagcaaaaacctggatagcggccattgtgttcctgagccatcttccagcggccagcgcttataccctgaggtgttctacgggagcgcggggccttcctccagtcagattagcggcggcgccatggacagccaactgcaccctaactcaggcggatttcgacctggtacaccctccctacatccttaccgtagtcagcccctgtatcttccacctggcccagcgccaccttccgcactgctttcaggagttgcgcttaaaggccagtttctggacttcagtacaatgcaggctacagagctggggaagttgcccgctgggggggtcctctatcctccaccctcctttctctactcgccggccttctgcccatcccctctccctgatacgtccctcctccaggtgcgacaggacttaccttctccaagtgacttttacagtactcccctccaaccagggggtcagtcaggcttccttccctcaggggctccagctcagcagatgctgttacctatggtggactctcagttacccgtggttaattttggaagcctcccccccgctccaccaccggcaccaccacctctgtctctccttcctgtgggacctgcccttcaacctccaagtctggccgtgagaccccctcctgctcctgcgacaagagtcctgccctctcccgctaggccgtttcccgcgagcctgggccgggcagagctacaccccgttgagctgaaaccattccaagattaccaaaagctgtcctcaaacttggggggcccaggatcctcgcggacacccccaactgggagaagtttcagcgggctaaactcaaggcttaaagccaccccaagtacttattcaggcgtgtttagaacccagcgggtggatctttaccagcaggccagtcccccagatgcgctgaggtggatccctaaaccctgggagcgaaccggaccgccgcctcgggaggggcctagcagacgagctgaagagcccgggtctcgtggtgacaaggagcccgggcttccccctccacgatag

SEQ ID NO: 200840 - DNA, 6474 bp, synthetic construct
  misc_feature 1..6474: note = Description of Artificial Sequence: Synthetic coding sequence
  source 1..6474: mol_type = other DNA
atgagcgaccggagcggccccaccgccaagggcaaggacggcaagaagtacagctctcttaaccttttcgacacatacaaaggtaagagcctggaaatacagaaacccgcagtcgctccaaggcacggccttcagtccctgggaaaggtcgcaatcgctcggaggatgcctccccctgccaatctgccttccttaaaggccgaaaacaagggaaatgatccaaacgtatctcttgttcctaaggacggcactggttgggcttctaagcaggagcagagcgaccctaagagctcggatgcgtctaccgcacagcctcccgagagccagccactgccagcgtctcagaccccagccagcaaccagccaaaacgccctcctgccgcacctgagaacacccctctggtgccttcaggtgtgaaatcttgggcccaagcatctgtaacacatggggcacatggtgacggcggccgagcatcttcactgctcagcagattttcccgcgaggaatttcctaccctgcaagccgccggggaccaggacaaggcggccaaggagagagagagtgccgagcagtcgtctggtcctggtcctagtctgaggccacagaattctactacttggcgggacgggggggggagagggccagatgaattagagggaccggattccaagctgcaccacggacacgacccacggggaggcctacagcctagcggaccaccacagttcccaccttacaggggaatgatgcctccgttcatgtaccccccttacctcccttttcctccaccatacggaccccagggtccgtaccgctaccccactccagacggcccctcaagatttccaagggtcgcaggcccacgcggcagcgggccccctatgaggttagtggagccggtgggcagaccgagcatcctaaaagaggacaatctcaaagagttcgaccaactcgaccaggagaatgacgacggatgggcaggggcccacgaagaagtggattataccgaaaaactcaaattttcagatgaagaagatggccgagactccgacgaagagggcgcagaggggcatcgggatagccagagtgcatccggtgaggagcgaccaccagaagccgatggtaaaaagggcaactctccaaatagtgagccgcccactcctaagacagcctgggcagaaacgtcccggccaccggaaactgagcccgggcctccagcgcctaagccgcctctgccacccccacaccggggtcccgccggaaactggggccctcccggcgactacccagaccgaggggggcccccgtgtaagcctccagcccccgaggacgaggacgaggcttggcggcagcgccgcaaacaaagtagcagtgaaatatccctggctgtcgagagggcgcgcagacgacgtgaggaagaggaacgtaggatgcaggaagagcgcagggccgcatgcgcagagaaactcaagagactggatgagaagttcggtgcaccagataagcgtctgaaagcggagcccgcagctccccctgcagctccatctaccccagccccaccgcccgccgtcccaaaagaactgcctgcgccccccgctcccccgccagcatctgcccctactccagagaccgagcccgaggagccagcccaggcgccccctgcccaatccacacctactcccggcgtagcggcagcaccaaccctggtgtctggtgggggatccacctcgagcacctcaagcggatccttcgaggcaagtcccgtggagcctcagctcccttccaaagagggaccagagcctcctgaggaggtgccgccacctaccactccacccgtccccaaggttgagcccaagggagatggtattgggcccacaagacaaccaccgagccagggtttgggctaccccaaatatcaaaagtcactgcccccgcgattccagcggcagcagcaggagcaactactgaaacagcagcaacaacaccaatggcagcagcaccagcagggaagcgctccacctacacccgttcctccatcaccaccacagccagtcacattgggcgccgtgccagccccgcaagcccctccacctccaccaaaagctctctatcctggcgcccttgggaggccaccacctatgccgccaatgaattttgacccgcggtggatgatgatccccccgtatgtggacccccgcctgttgcagggccgccccccactggatttttatccccctggcgtgcaccctagcgggttggtgcctcgggagcggtctgacagcggtggaagcagttccgaacccttcgatcgccacgcacctgccatgctccgtgaacggggaacacctccagttgatcctaagctggcctgggtgggtgacgtatttacggcaacaccggctgaaccacggcctcttacatcgcctcttcggcaggctgccgacgaggacgacaaaggaatgcgatccgaaacgccgccagtgccaccaccccctccttacctggctagctacccagggttcccagagaatggagcccccggccctccaatttctcggtttccgttggaggaaccaggtccgaggcctctcccatggcctcccggaagtgacgaagttgccaagatccagacacctccacccaagaaggagccacctaaagaggaaaccgcacagctgaccggccctgaagcaggcaggaaaccggcgcgcggagtcgggagtggcggacaggggccacctcccccgagaagagagtctaggactgaaacacgctggggacccagaccaggttcgtcacgtcgaggaatacccccagaagagcccggggcccccccacgcagggctgggccgatcaagaaacccccgcctccaaccaaggtagaagagcttccgccgaagccactggaacagggagacgagacccccaaacccccgaagcctgatccgctcaagatcaccaagggcaaactgggcgggcctaaagaaactccgcctaacggcaatctctctcccgccccaaggctgcgccgcgattatagctacgaaagggttggccctacatcctgtaggggacgcggccgcggagagtatttcgccaggggaagaggctttagagggacttacggcggaaggggtagaggggcgaggagccgtgaatttagaagctacagagaatttcgcggtgacgacggacgtggaggcggcacgggcggaccgaatcatccccccgctccaaggggccggactgcgagtgagacccggagtgagggctctgagtatgaggagattcctaagagacgcaggcagagaggctctgagacgggctccgagacgcacgagtccgacctcgcccctagtgataaggaggcccccacaccgaaggaaggaaccctgacacaggtaccacttgcccctcctccaccaggggcccctccatctcccgccccagctaggttcactgcaagagggggacgcgtattcacgccacggggggtgccctccaggcgcggacggggcggaggtcggccccccccacaggtctgccccggatggagcccaccggctaagagcttggccccaaagaagcctccaactgggcctctgccccctagtaaggagcctctcaaggagaagttgattccagggcctttaagtcccgtagctagaggggggagcaatggtgggtccaacgtagggatggaggacggcgagcggccccgccggagacgacatgggagagcgcagcagcaggacaagcccccgaggttccgtagattaaaacaggaacgcgagaatgctgcccgtggtagcgagggaaagcccagcctaaccttgccggcctcagcgccgggtcctgaagaggccctgaccacagtgaccgtcgctccagcacccagaagagccgccgcaaagtcccctgatcttagtaaccagaacagcgaccaggccaatgaggaatgggagacggcgtctgaaagttcagattttactagtgaacgccggggcgataaagaggcaccgcctcctgttcttctcactccaaaggccgttggaacacctggtgggggcggaggcggggcagtgcctggcattagtgcgatgagtcgcggagacctttcccagagagccaaggacctctccaagagatcattttcctcccagaggcccgggatggaacgccaaaatcggcggcccgggcccggagggaaagccggttcatccgggtcaagctccgggggcgggggcggtggacctggcgggcgcactggtcccgggcgtggggataagcggagttggccctctcccaaaaacaggagtagacctcctgaagagaggccccctggacttcctctcccccctccccctccttctagcagcgccgtatttcgattggaccaggtgatacactcgaaccctgccgggattcagcaggccctcgcccagctgtcaagtcggcaggggtctgttaccgccccggggggccatcccagacacaaacccggcctgccccaggcaccccagggcccttctccacgcccccccacaagatatgagccccaaagggtcaattcaggtctcagctctgacccccacttcgaagagcccgggccaatggtacgcggggtcggaggcacgccccgcgactcagccggggtgtcgcctttcccacccaaacgccgtgaaaggcctcctcgaaagcccgaactgctgcaggaagaaagcctgcccccccctcatagtagtggattcttgggctccaaacccgaagggccaggccctcaggcagagagcagggacaccggaaccgaggcgctgacaccacacatctggaaccgtctgcatacggcgacaagcaggaaatcttatcggccctcctcgatggagccgtggatggagccactgtctcccttcgaggatgtggctggcaccgagatgtcccagagcgactcgggggtggatctctctggggactctcaagtgtcatccggtccgtgcagccaacgtagttctcccgacggcggattgaagggagcagccgagggcccacctaaacggccagggggatcctcccctctcaacgcagtcccctgcgagggacccccgggtagcgaacctcctagacgcccaccacccgctccgcacgatggagataggaaggagctgcctcgagagcagcctctcccccccgggcccatcggtacagaaaggagtcagagaaccgatcgcggaactgagccgggccctatcaggccgtctcatcgccccggtccacccgtgcaattcggaacaagcgataaggactctgatctgcgtctggtggtgggagatagcttaaaggcagaaaaggagctgactgccagcgtgactgaggccatacccgtgtctcgagattgggaactgttaccctctgcagccgcctccgctgaaccgcagagtaagaatttggatagtgggcactgtgtgccagagccctcctcttccggacagcgtttgtatcccgaggtcttttacgggagtgccgggccgtcttcgagccaaatcagcggcggagccatggacagtcagctacatccaaacagcggcgggttccggcctggcacgccgtctctgcatccctatcgttctcagcccctgtacctgccacctggcccagcccccccatccgccctgctcagtggcgttgctctcaagggccagtttctcgacttttcgacaatgcaggctactgagctcggaaagctgccggccgggggagtgttatacccgcccccaagctttctgtactcgcccgccttttgtccttcccccctgccggacacctctctgctgcaggttcggcaggatctgccgtcacccagcgatttttatagcacaccattgcagcctggcggacaatcaggtttcctgcccagcggggccccagctcaacagatgctactgcccatggtggactctcaactgccagtggtgaattttgggtcactgccacctgccccccctcctgctcctcctcccctgtctttactcccggtaggcccagccctgcaaccaccgagcctcgcagttagaccgcccccagctcccgccacaagagtgctgccgtctcctgcaaggccctttcctgccagcctcggccgagcggagttacatcctgtggaacttaaaccattccaagattatcagaaattatcgtccaaccttggtgggcctggctcaagccgtacccctccaacaggccggagcttctctggcttaaacagccgccttaaagcaaccccctccacttatagtggagtgtttagaacacagcgagtcgatctgtatcagcaggccagtcctccagatgcgctgaggtggatcccaaaaccatgggaacggaccggaccccctcccagagaggggcctagccgccgtgccgaggaaccgggcagccggggcgataaagaacccggtctgcctccacctcggtag

SEQ ID NO: 200841 - DNA, 6450 bp, synthetic construct
  misc_feature 1..6450: note = Description of Artificial Sequence: Synthetic coding sequence
  source 1..6450: mol_type = other DNA
atgagcgaccggagcggccccaccgccaagggcaaggacggcaagaaatactcttctctgaatctgttcgacacatacaagggtaaaagcctggagatccagaagcctgctgtggccccccgtcacggactgcagtccttgggcaaggtggctatcgctcgtcgaatgcctccaccggcaaatctgcccagtttaaaggcagagaataaagggaacgaccccaacgtttccctggtgcccaaagatggaaccggatgggcatccaagcaagagcagtctgaccccaagtcttcagatgctagtacggcccagcccccggagagtcagcctctgcctgcctcccagacccccgcttccaatcagcccaagcgccctcctgccgctccagagaataccccactcgtcccgagtggagttaaatcatgggcacaggcgagcgtgacacacggagcccacggggatggaggacgggccagttccctgcttagccgattttcccgagaggagttcccaacacttcaggccgctggagatcaggataaagcagctaaggagagggagtcagcagaacaaagcagcgggccagggccatcgctcagaccgcagaatagtactacctggcgggacggtggagggcgcgggccggatgagttagagggtcccgactcaaagttacaccatggacatgaccctcggggggggctacaaccttctggacctcctcagtttcccccgtatcgggggatgatgcctccttttatgtacccgccctacttgccttttccaccgccatacggaccccaaggaccctatcgatacccaactcccgacggccccagccgcttcccccgtgtcgccggcccacgggggtccgggccacctatgcgcctggtggaacccgtgggccgcccttccattctgaaggaggataatctgaaggagttcgaccagctggatcaggagaatgacgatggttgggctggcgcccacgaagaagtggactatacggaaaaattgaaattctcagacgaggaagacgggcgagattctgatgaagagggtgctgaagggcaccgggactctcaatcggcgagtggggaggagcggccacctgaggctgacggcaagaaaggcaatagccccaactctgagcctcccactcctaagacagcttgggctgaaacttccagaccaccggagaccgagcccggtccgcctgcccctaaaccccctctgccacctcctcacagaggtcccgccgggaactggggaccccccggtgattaccctgacagaggaggaccaccatgtaagccccctgcccctgaagatgaagacgaggcctggcggcagcgtcggaagcagtccagctcagagatatctctagccgtcgagcgggcacggcgcaggagggaagaggaagagcgcaggatgcaagaggagagacgcgctgcctgcgcagaaaaactaaaacgtctggacgaaaagttcggagctccagataaaaggttgaaagccgagcccgccgcccctccggccgccccatcgacgcctgctcctccccctgccgtgcctaaggaactgcccgctccccctgcacccccgccagcaagcgctcctactcccgagactgagcccgaggagccggctcaggctcctccagcacagagtactcctactcctggtgttgctgccgcaccaactctcgtgtctggcggcgggtccactagtagcacctcctccggttctttcgaagcttcacctgttgagccacagcttccatctaaagaaggcccagaaccacctgaggaagtacccccacccacaacacctcctgttccaaaggtggagcccaaaggcgacgggatcgggcctacccggcaaccaccatctcagggcttgggttatccgaagtaccagaagagcctgcccccccgcttccagcgtcaacagcaggaacagcttctgaagcagcagcagcagcaccagtggcagcagcatcagcagggctcggctccccccactcctgtccccccctcccctccccagcctgtaaccttgggcgctgtgccagccccacaggcccccccaccccccccaaaagctttgtacccaggggcgctgggcaggccacctcccatgccaccgatgaatttcgatccaaggtggatgatgatccccccttacgttgaccccagactgctgcagggcaggccacctctggatttctatcctcccggcgttcacccttcgggattggtgccccgtgaacgcagtgatagtgggggttctagcagcgagccgttcgacagacacgccccagctatgttgagagaacgcggcactccccctgtggaccccaagttagcatgggtgggagacgtctttactgcgacacctgctgagccccggccactgacttctccacttcgacaagcagccgacgaggacgacaagggtatgcggtcagagacccccccagtcccaccgccacctccttatctcgccagttacccagggtttcctgaaaacggtgctcctgggccaccgatatccagattccctctcgaggaaccgggccctcgccccctcccctggcctcccggtagcgatgaggttgctaaaattcaaacaccaccgccaaagaaggaacctccgaaggaagaaacggcccaactgacgggccccgaggccggacggaagcccgcacgcggtgtggggtctggtgggcaggggccacctccacctagaagagaatccagaacagaaaccagatggggacctcgtcccggatcttctagacgaggaattccacccgaggaaccaggggctccgcctaggcgagctgggccaattaagaagccgcctccgcccactaaggttgaggaattacctcccaagcctttagaacagggcgatgaaacacctaagccaccgaagcctgaccctctgaaaatcaccaagggaaagctgggcggcccaaaagaaacccccccgaacggtaatctttctccagcgcctcgattgaggcgggattattcctacgaacgggtgggtccaactagttgtcgcggtcggggccgcggtgaatatttcgcccgaggacgtggatttcgcggcacatacggtggccggggtaggggcgcggcaggtaattcagctgtcactgagtcattcgaagaaatgatgggcgttgaagtggggcagggggaccagactaccttacttttgcccgaggcagcactgcccgctagacacggtgctcgggtccagagcatgcgaaagtccccctcaggtgcaggcagtggggctcagaagcaggccgcccgccctatgagagtaatctggttgctgcaaacaagaagattaccccaccctaggcgcgagcactccccccgatctaggagcccaaccacaaggagcccaacatttccagctcctgcacgatttaccccaggtgtgggcgagagctcactgcccgaggggatctcccccggcccccgccgcagggagcccccccaggtctgccccgggtggtcgcctccggcaaagagcctcgctcctaaaaagccacctacaggtccactcccgcccagcaaagaaccactgaaggagaaactgattcccgggcccctatcccccgtcgcacggggtggctccaatgggggcagcaacgtgggaatggaggatggggagcgtccaaggcgtcgcaggcacggaagagctcagcagcaggataaacctcctcgcttccgtcggctaaagcaggagcgcgaaaatgcagctcgaggctccgaaggcaaaccctctctgacgttaccagccagcgctccgggaccagaggaggcccttactaccgtcacggttgctcccgccccaaggcgcgcagccgcaaagtccccggatttgtccaaccaaaacagcgatcaagccaatgaggaatgggagacggctagcgagagcagtgacttcacctcagaacgacgcggagataaagaggccccccccccagttctgctcaccccaaaggctgtcggaacacccggtggaggcgggggcggagccgttccaggcattagcgcaatgtctagaggcgatttgtcccagcgcgctaaggatctatccaagcgcagcttcagcagccagagacctggaatggaaagacagaacaggcgacccggcccaggcgggaaggcaggttcctcgggtagtagcagcggagggggtggtggcggacctggtggcaggacaggcccgggacggggcgacaagcgctcctggccgtcgcccaaaaataggtcccggcctcccgaggaaagacctcctgggctaccattgccccccccgcctccttcttcctccgcagtctttagactggatcaggtgattcactcaaaccctgcagggattcaacaggctctggcccagctgtcttctaggcagggttcggtcaccgcacccgggggtcacccaaggcataagcctggactgccccaagctccacaggggccgtctcctcgcccccccacaagatacgagccacagagggtcaatagcggacttagcagcgatccgcatttcgaggagcctgggccgatggtaagaggggttgggggaaccccacgggattccgccggcgtgagcccatttccaccgaaacggcgagaacggcctccccgtaagccagagctgctgcaggaggaaagtctcccgccgccccacagttctgggttcctcggcagcaagccagaaggacccggacctcaggctgaatcccgggatacgggcaccgaagcacttacgcctcacatctggaaccggcttcacacggccaccagtcggaagagctatagaccatcatctatggagccttggatggaacctctgagcccttttgaggacgttgctgggacagagatgtctcagtccgatagcggtgtggacctatccggtgattcgcaagtgtcctcaggcccttgctcacagaggtcttccccagacggagggctcaaaggagcggcagaaggcccaccaaaacgtccgggcggatcaagcccgctcaatgctgtgccatgtgaaggaccccctggctccgaacctccacggagaccgccccccgccccccacgacggggataggaaagaacttccccgtgagcagcctcttccacctggtccgattggaacagaacgctctcagcggacagaccgaggtactgaacctggtcctattcgaccatcgcatagacccggacccccagtacagttcgggacctcagacaaggacagcgacttaaggctggttgttggtgatagcctgaaggccgagaaggaattgaccgcttcggtaaccgaagccattcccgttagtagggactgggagcttctgccttcagctgccgcctctgcggagcctcagtcaaaaaatctagatagcggacattgtgtgcccgagccaagctccagcggacagaggctctaccctgaggtgttctacggcagcgccggcccgtccagtagccaaatctcggggggacacggcctgtcaatcactagtaagcaatggcgcagaccgggaaccccctctttacacccctaccgctctcagcccctttatttacctcctggtcccgcaccccccagcgcactactgtccggcgttgctttgaagggacagttcctggattttagcaccatgcaggccaccgagctgggaaaactgcccgctgggggtgttctgtaccctcccccaagcttcctgtattctccagcattctgtccatcacctctccctgatacatcactacttcaggtgagacaagacctcccaagcccttcagatttctatagtacaccgttgcagccaggtggacaatcaggctttcttccctccggtgcacccgcccagcaaatgctgctgcctatggtcgatagccagttgccggtcgtaaatttcggctctctgccaccagcaccacccccagcacctccacctttatcactgctccccgtcggtccagcactgcaacccccctctctcgcagtgcgacccccaccagctcccgcaaccagagtgctaccctctcctgctagaccctttcctgcaagcttggggagggctgaattgcatcccgtcgaactaaagcctttccaggattatcaaaaactatcgtcaaacttaggaggccccggaagttccaggactccgcccacaggtaggtctttttccgggctgaattcaaggctcaaagccaccccatccacctactccggggtgttccgcacgcagagggtcgatctgtatcagcaggcgtcaccacccgatgcgctcagatggattcccaaaccttgggagcgcaccggaccacctcccagggagggtccctccaggagagccgaggaacccggcagtcgcggcgataaggagccagggctgccaccacctcgttag

SEQ ID NO: 200842 - DNA, 1650 bp, synthetic construct
  misc_feature 1..1650: note = Description of Artificial Sequence: Synthetic coding sequence
  source 1..1650: mol_type = other DNA
atgagcgaccggagcggccccaccgccaagggcaaggacggcaagaagtacagttctcttaacctgttcgacacttacaaggggaagtctctcgagatacagaagcccgcggtcgcacctcgccatggcctgcaatccctgggtaaagtcgcgatcgctaggcgaatgccacctccggctaacctccctagtctcaaggctgaaaataagggaaacgatcccaatgtttcactggttcctaaggatggcacgggttgggcctccaagcaggaacagtccgatcccaagtctagcgatgcatccacagcgcagcctcccgagtcgcagcccctacccgctagccagacacctgctagcaatcaaccaaaacggcctccggctgcaccagagaatacaccactggtgcccagtggagtgaagtcatgggcccaggccagtgtcactcacggagctcatggcgatggaggtcgcgctagtagtctgttatctagatttagtagggaggagttccctactctgcaggctgcgggtgaccaagataaagccgccaaagagagagagtccgcagagcagtccagtggccccggtcctagtcttaggccacaaaatagcaccacctggcgcgacggcggaggacgcggtcctgatgagctcgaagggcccgacagcaagctacatcacggccatgacccccgcggtggtctccagccctctggacctcctcagtttccgccttatcgtggtatgatgccccctttcatgtaccctccctacctgcccttccctccaccatatggcccccagggaccatacagatatcctacgcccgacgggccttccagattcccacgggtggcgggccccaggggctccggccccccgatgaggctggtagaacctgtgggtcgaccaagcatactgaaggaggacaatctgaaagaatttgatcagctcgatcaagagaacgacgatggctgggcaggagcccatgaggaggtagactacaccgagaagctgaaattttccgatgaagaagatgggcgcgattcagatgaagaaggcgccgaaggacaccgggattcccagtccgctagcggagaggaacgtccccccgaagctgacggcaagaaaggtaattcccctaattccgaaccccccacacccaagacggcctgggccgagaccagcagacccccggaaaccgagcctggaccaccagctcccaagccccctctgccgcccccacatcgcggacctgccggtaactggggaccacccggggattatccagatagggggggtcccccatgcaagccccctgcacccgaggatgaggacgaagcctggaggcaaagacggaaacagtctagtagcgagatctctctggccgtagagcgggccagacgcaggcgagaagaagaggagcgacggatgcaggaggagcggcgcgctgcctgcgcagagaaactcaaacggctggacgagaaattcggtgctcctgacaaacggcttaaggcggagcctgccgctcctccagcagccccaagcactcccgccccgccgcctgctgcctccgaggtgcctttaatggaggacagtcggggtcaacaacgtgatccacctcggggcctggaagcaccgcacccgtag

SEQ ID NO: 200843 - DNA, 6417 bp, synthetic construct
  misc_feature 1..6417: note = Description of Artificial Sequence: Synthetic coding sequence
  source 1..6417: mol_type = other DNA
atgagcgaccggagcggccccaccgccaagggcaaggacggcaagaagtactcctcactcaacttattcgatacgtataaaggaaagtctttggaaatacagaagcccgccgtggcgccccgccacgggttgcaaagcctcggaaaggtagctatagccagacgcatgccgcctccagccaatctgcccagcctgaaggcagaaaacaaaggaaatgaccccaacgtcagcttggtccccaaagatggtaccggatgggcctccaagcaggagcagtctgatcctaagtcaagtgatgccagtactgcccagcctcccgaatcccagcctctccccgcttctcagacacctgctagcaaccagcccaagcgacctccagctgcgcccgagaatacgcccttagtgcccagcggcgtaaaaagctgggctcaggcctctgtcactcacggcgctcacggggacggaggaagagctagtagcctgttaagtcgtttttcaagggaagagttcccaacactccaggcagctggagatcaggataaagccgccaaggagagggagagcgctgaacaatccagtgggcctgggccaagtttacgtccacagaactctactacttggagagatgggggagggcgcggacccgacgaactcgagggtccggatagcaagctgcaccacggtcacgaccccagagggggcctccaaccttctggccctccacaatttcccccatacaggggcatgatgcctcccttcatgtaccccccctatctgccgttcccccctccttatggccctcaagggccttaccgctatcccaccccggacggtccctcgcgcttcccccgtgtggccggacctcggggtagtggtccgcccatgagactagtagagcctgtgggccgccctagcatacttaaggaggataatttaaaggagttcgaccaattagatcaagaaaatgacgacggctgggctggggctcacgaggaagtcgattataccgaaaaacttaagttcagcgacgaggaagatggccgtgacagcgatgaagagggggccgaggggcaccgagacagtcagagcgcctccggggaagaaagaccccctgaggccgatggcaaaaaggggaatagcccaaactctgaaccaccaactccgaaaaccgcgtgggctgagacctctaggcctccggagactgaaccaggccctccagcccctaagcctcctcttccaccacccggcgattacccagaccggggtggacctccttgtaaaccgccagcccctgaggatgaggacgaagcgtggcgccagcggaggaagcagtcatcatctgagataagtctggctgtggagagggcgcgacggcgcagggaggaagaggagcgccgaatgcaggaagagcgaagggccgcatgtgcagagaagttaaagcgtctggacgagaaatttggggctcctgataagagactgaaagctgagcccgcggcgccgcctgccgcacctagtacccccgccccacccccggcagtgccaaaggaactgcctgctccacctgccccaccgccagcctccgcccccacgcccgaaaaagagcccgaagaacccgcgcaagcgccaccagctcagtctacacccacccccggcgtagccgcagctcccaccctggtctcagggggtggctccacatcttccacaagctctggctcgtttgaggcctctcctgtcgaacctcagctgccaagtaaggaaggccctgagccaccggaggaagttcccccgcccaccacccccccagtccccaaagtggagcctaagggggacggtatcggtcccacccggcagccgcctagtcagggacttggatatccgaaataccaaaagtctcttccaccacgttttcagcgccagcaacaggagcagttgttgaaacagcagcagcagcatcagtggcagcagcatcagcagggctcagccccaccaacacccgtgcccccttcccctccacagccagtcaccctcggtgctgtgcccgccccccaggcaccaccgccaccgccgaaagccctttatccaggggctttgggaaggccccctcctatgccgccaatgaattttgatccacgctggatgatgataccaccctacgtggatccacgactgttgcagggaagaccgccccttgacttctatccccccggcgttcaccccagcgggttggtgccaagagagcgctcagatagcggtggctctagctcggagccattcgatcgacatgctccggctatgctccgtgaacgcgggacgcctcctgtcgatccgaaactggcttgggttggagatgtttttacagcaacccccgcagagcctcgaccactgaccagtccgttgcggcaagctgccgacgaggacgataagggaatgagaagtgaaactcctccggtgccccctccaccgccctatctggcaagttatcccggttttccagaaaatggcgccccaggcccccctatctcccggttcccgctggaggagcctggccctagaccgctgccttggccaccaggttccgacgaagtcgctaaaatccagacccctcctcccaaaaaagaaccacctaaggaggagaccgctcaactcacgggccccgaagctgggcgtaagcccgccagaggcgtcggaagtggtggacagggcccacccccgccccgccgcgaatcccgtaccgagactaggtggggtcctaggcccggatcgtcgaggcgaggcatacccccggaagaaccaggagcccctccccggagagctggacccattaaaaagcctcctccgccaacaaaggtcgaagagctcccccctaaacctttagagcaaggagatgagacaccaaagccgcccaaacctgatccactgaaaataaccaagggcaagctcgggggccccaaagagactcctccaaatgggaacctgagccctgccccacgtttaaggagagattattcatatgaacgggtggggcccaccagctgtcggggaagaggacggggtgagtattttgctagaggccgaggcttcagaggcacatacggcggtcgtggccgcggcgccgcgggcaatagcgccgtaacagagtcctttgaggaaatgatgggagtcgaggtggggcagggggaccagacaaccctgctcctaccagaggcggccctgccagctcgccatggcgcgcgcgtccagtctatgagaaagagcccgagcggagccggcagcggagcccagaagcaggccgcacgacctatgcgcgttatctggctgctgcaaacgcgtaggcttccccatccaagacgcgaacactctcctcggtccaggagccctaccactcgctcacccactttccctgcacctgcaaggtttacacccggggtcggcgaaagctccctccctgaggggatctctcccgggcctcgccgccgcgaacctccccaggtgtgccctggctggtcccccccagctaagtccctagcacccaaaaaaccgccaacagggccactgcccccaagtaaggaacctctaaaggaaaaattaatcccaggaccactatccccagtagccagaggtggatcgaatggtgggtccaatgtcgggatggaggacggtgaacgaccaaggcgaaggagacatgggagggctcagcagcaggataagccaccccggttcaggcgcttgaagcaggaacgagagaatgctgcccgtggctcagaagggaagccatccttaacacttcccgcctccgccccaggacccgaggaagccttaaccactgtaaccgtggcaccagccccaagaagagcagccgccaaatcacccgacctctccaaccagaactctgaccaggccaacgaagagtgggagactgcctcagaatcctccgacttcaccagtgagagacggggagataaagaagcgcccccacccgtgctgcttactcccaaggccgtcgggacgccagggggggggggtggcggggcagttcccggtatcagcgcaatgtcccgcggagatttgagtcaaagggctaaggacctgtctaagaggagcttttcgagtcagaggccaggtatggagcgacagaatcgtagaccgggccctggtggaaaggccggtagcagtggcagcagctccggcggcggtgggggcggacctgggggccgcacaggcccgggtaggggagataaaaggagttggccaagccccaaaaaccgatctcgtccacctgaggagagacctccaggactgcccttgccacctccgcctccttcatcctccgctgttttccgtttggaccaagtaatccactctaatcccgcggggattcagcaggccttagcccagctcagctccagacaaggcagcgttaccgccccaggggggcaccccagacacaaacctggcccgccacaggctcctcagggtcccagtccaagacccccaacccgctatgaaccgcagcgcgtaaattcgggtttgagctcagatccccattttgaagaacctggccccatggtcagaggcgtaggcggcaccccaagggatagtgcaggggttagcccattccctccgaagcggcgggagcgccctccccgcaagccagaactcctccaggaagagtcactcccgccgccccactcgagcggatttctgggctccaagccagagggtcctggacctcaggcagagtcccgagataccggcaccgaggcgctgacgcctcacatatggaaccgtttacacaccgccacaagcaggaagtcataccggcccagcagcatggaaccatggatggagcctctgagtcccttcgaagacgtcgctggcaccgaaatgtcacaaagtgacagcggcgtggatttgagcggagattctcaggtatcttcaggaccttgctcccagagaagttcgcccgatgggggccttaagggcgcagctgaagggcctcccaagcgtcccggaggatcctctccactgaacgctgtgccttgtgaaggccctccaggttcggagcctcctaggaggcctccacccgctccgcacgatggtgacaggaaagaattaccgcgggaacaaccgctccctccaggacctatcggcacagagcggtcgcaacacactgacaggggaactgagcctggacctattcgccctagccaccggcccggccccccagtacagtttgggacgagtgataaggattcagacctgcgcttagtggtgggagactccttgaaggctgaaaaggagctcaccgcatctgtgacagaggccatcccggtctccagggattgggaactgctgccatcagctgcagccagcgccgagccacagagcaaaaacctcgatagcggacattgcgtgccagagcccagctcgtcagggcagcgtttgtatcccgaggtattttacggatcagcagggcctagctcttcccagatcagtgggggtcacggcctgtctgttacatccaagcagtggcggagaccgggaactccaagcttgcacccgtatcggagccaaccactgtatcttcctccggggcctgctccaccctctgccttgctgagcggagttgcgctcaaaggtcagttccttgacttcagcacaatgcaggccacagagctgggcaagttaccggcaggaggggtgctctacccgcccccctcattcctgtactcacctgctttttgtccctctcccctccccgatacaagcctcctgcaagtgcgtcaggatctcccaagcccatcggacttttacagcaccccactgcaaccaggtggccaaagtggctttttgccttccggagcaccagctcagcaaatgttactgccaatggtggactctcagctgcccgtagttaactttgggagcttaccacctgcgcccccccctgcacctcctagcctgagcctcctgcctgtcggccccgctttgcagcctccaagcctggccgtacgccctccaccggccccggccacaagggtgctgccatcccctgcccggccgtttccggcttcccttggccgggccgagctgcacccagtcgagctgaaacccttccaggactatcagaagcttagtagcaatctgggaggtcctggttccagtcggacaccgcccaccggcagatcgttctccggactgaacagccggctgaaggccaccccatccacttattccggtgtatttcggacccagagggtggacctgtaccagcaggcctctccccctgacgctctacggtggatacccaagccgtgggaacggacaggtccaccgcctagagaagggcctagcagaagagcagaagagcccgggtcacgaggggataaggagcccggcctgccccctccacgatag

SEQ ID NO: 200844 - DNA, 6450 bp, synthetic construct
  misc_feature 1..6450: note = Description of Artificial Sequence: Synthetic coding sequence
  source 1..6450: mol_type = other DNA
atgagcgaccggagcggccccaccgccaagggcaaggacggcaagaaatactcatctctgaacctgttcgacacatataaaggaaaatctctcgaaatccagaaacctgcagtcgcccctcggcacggactccaatctctcggcaaggtagccattgcccgcagaatgccacctccggccaacctgccgtccttaaaagcagaaaacaaaggcaacgacccaaacgttagcctggtacctaaggatggcacaggatgggcatcaaagcaagagcaaagcgacccaaaatctagtgatgcatccactgctcagccccctgaaagccaacccttaccagcgagtcaaaccccggcctcaaatcagcctaaaaggcccccagctgcgcctgaaaacacgccacttgtgccgagtggggtaaagtcctgggcccaggctagcgtgactcacggagcccacggcgatggaggtcgcgcttcttctcttctgtcccgcttttctcgggaggagtttcccacgctgcaggctgccggggaccaggacaaggctgcaaaggaacgtgagtccgccgagcagagttctggacctggtccttcattgcggccccagaacagcaccacatggcgtgatgggggggggcgcggtccagatgagcttgagggcccggattcgaagttgcatcacggacacgatcctcgcggtgggctgcagccttcagggcccccccaatttcccccttatcgaggtatgatgccgccgtttatgtaccccccctaccttccattcccgccgccctacgggccccaggggccatacaggtatccaactccagacggcccatctcgattcccccgcgtcgcgggaccgcgggggtcaggtcctccgatgagattggttgagccagtcggacggccttcgatcttgaaagaagacaatctcaaggaatttgatcagctggaccaggaaaatgatgatggttgggcaggcgctcacgaagaagtggactacaccgagaagcttaagtttagtgatgaagaagacggtcgggactctgacgaggaaggcgctgaaggtcacagagacagtcagagcgcatcaggcgaggagcgtccgcctgaggccgacggaaaaaagggtaattcaccaaatagtgaacctcctactcctaagaccgcctgggccgaaacttctcgccctccagaaaccgagcccgggccacctgctccaaagcctcctcttccaccgcctcatcgcggcccagctgggaactggggcccacccggtgattaccctgatcggggaggaccaccatgcaagcctcccgcacccgaggatgaagatgaggcctggagacagagacgtaagcagagcagttctgagatctcacttgcggtcgagcgggccaggagacgccgagaggaagaggaaagaagaatgcaagaggagagaagagcagcttgtgccgagaagctcaaacggctggatgaaaagttcggcgcacctgataagcgcctgaaggctgaaccggcagcacctcccgctgcgccaagcactcccgccccaccccctgccgtacccaaggaactgccggccccacccgcccctccccctgcctcggccccaaccccagagaaggagcctgaagaacctgctcaggctccccctgctcagagcacccccacaccaggtgtggctgcagccccgacacttgtatcaggtggcgggtccacatcgtcaaccagttccggttccttcgaggcatcccccgtggaacctcagttaccttctaaggagggaccagagccgccagaggaggttccgccccccactacgccaccggtacctaaagtcgaaccaaagggggacgggatcgggccaaccagacagccccccagccaaggcctggggtacccaaagtaccagaaatctctgcctccacggtttcagcgccaacagcaagagcagctactgaaacagcagcagcagcaccagtggcagcaacaccagcaggggtctgcccccccaacccccgtgcccccctccccacctcagcctgtgacactgggagctgtcccagcgccgcaggctccaccccctccccctaaagctctgtacccgggtgcgttgggaagaccaccccctatgccacccatgaatttcgacccaagatggatgatgatccctccatacgtggatccccggctgttgcaaggtcgcccccctttagacttttatccacccggcgtccatccgagcgggctggtgcctcgggaaagatccgatagcggaggcagttcatcagagccttttgatcggcacgcgccagccatgcttcgagagcgtggcaccccgcctgtcgaccccaaacttgcttgggtaggcgacgtgtttactgccaccccagccgaaccgaggcctctcacgtcccctttgcggcaggcggccgatgaggatgataaggggatgagatctgaaacaccgccggtgccccccccccccccataccttgccagctaccctgggttcccagagaatggggctcccggaccacctattagcaggtttcccttagaggagcccgggccgaggcccctgccctggcctccaggatcggatgaagtggcaaaaattcagactccccctcccaagaaagagccccccaaggaagaaactgcacagttaactggacccgaggccggacgaaagccagcacgcggagtgggcagcggtggccagggcccaccgccccctcggagagagtcccgcacagagacacggtggggtccacggccaggttcctcccgtcggggaatcccacctgaagagcccggggccccgccaagacgcgctgggcccataaagaagcccccaccgcctacaaaagtcgaggagctgccacctaagccgttggagcaaggggatgagacccccaaacctccaaaacccgatcccctcaagatcacaaagggaaaactaggcggccctaaagagacaccccccaatggtaacctgtccccagcaccacgcctgagacgcgattactcttacgagcgagttgggcctacatcttgcagaggtcgtggaaggggggagtattttgctcgggggcggggtttccggggtacatatggagggcgtggaagaggggccgctggcaactccgcagtgactgagagcttcgaggagatgatgggtgttgaagtaggccagggagaccagacgacccttctgctaccggaggcggctctgccggcccggcacggggctcgcgttcaatccatgcgcaagtccccatccggcgctgggtccggagcacagaagcaagccgcaaggcccatgagggtaatctggctgctgcagactcggcgactaccacatccgagacgtgagcacagccctcggtcacgatccccaacaactcggagtccgacctttccagccccagctcgattcactcctggggtgggggagagttcactgccagaaggtatcagcccgggtccacggaggagagagcctcctcaggtgtgccccggttggagtcctcctgctaagtcactcgcaccaaagaaaccgccaaccggacccctgcctccaagcaaagaaccactaaaggagaagctgattcctggcccgttgagtcccgtggccagaggaggatccaatggggggagcaatgtaggcatggaggatggggaacgcccacgccgtcggcggcatggaagagcgcagcagcaggacaaacccccaagattcagacggctgaagcaggaacgagaaaacgctgccaggggctccgaaggcaaaccgtcactcacgctccctgctagcgctccaggccccgaagaggctctgacaacagttaccgtggctccagcccctcggagggccgccgcgaaatctcccgatctgagcaatcaaaattccgatcaggctaacgaggagtgggaaactgccagtgaatcctccgacttcacatcagagcgccggggagacaaggaggccccacctccagtactccttacacctaaagccgtgggaacccctggtggaggcggtggcggagccgtgcccggcatctctgccatgagccggggggacctgtcacaaagggccaaggatctgtctaaaaggtcattttcctcacagcgccccggcatggaacggcagaatcggagacccgggcctggcgggaaagcgggttcctctggaagctcttccgggggggggggaggaggcccagggggtcgtaccggtcccggcagaggcgacaaacgcagctggccctcccccaaaaatcgctcgcggcctcctgaggagcgtccccctggcctgcctcttcctccaccacccccgtcatcgtccgccgttttccgtctggaccaggtcattcatagtaatcccgctggcatccagcaagcgctcgcgcagctgtcatcacgacaaggatctgtaactgcgcccggcggtcaccctcggcacaagccagggccccctcaagcccctcaggggccaagcccaaggcctcctactagatatgaacctcaaagggtcaactccgggctgtccagtgatccacatttcgaggagcccggcccgatggtgagaggcgtagggggtactcccagggatagtgccggcgtgagtccctttccacctaagagacgcgagcgccctcctcgaaagcctgagctcctacaggaagaatctctgcctcctccacactcatccggcttcctggggtctaaacctgaggggcccggaccccaggcagaatcacgtgacaccggtactgaggctctcacaccccatatatggaaccggctgcacaccgccacatctcggaagagttatcgcccaagctcaatggagccatggatggagcctttgtctcccttcgaagacgtggcgggaactgaaatgagtcagtcagacagcggagtggatctcagcggagactctcaggtatctagtggaccttgcagtcagagaagttcccccgatggaggcctgaaaggtgccgctgagggaccacctaaaagacccggtggttcaagtccactgaacgctgtaccctgtgagggtcccccaggctcagagccccccagaaggccacctcccgcgccacacgatggtgaccggaaggaacttccaagggaacagcctctgccccctggtccaatagggacggagcgtagtcagcatacagacagaggcacggagccgggaccaataagacccagtcaccgtccagggccccccgtgcagttcgggacaagtgataaagattctgacctcaggttggttgtgggcgattcattgaaggcggaaaaggaactgaccgctagcgtaaccgaagccatcccggtgagccgagactgggagttactgccttcagccgccgcctctgccgaaccacaatcaaaaaacctcgattctggccactgcgtccccgagccgagtagttccgggcagcggctatatcccgaggtcttctacggctccgcagggccctcatcctctcagatcagcgggggtcacggcctcagtgtgacatccaaacaatggcgtcgtcctggcacaccgtctttacacccataccgctcccagccactctacctacctcccggtccggcccctcctagcgccctgctgtccggggtggctctgaagggtcagttcttggacttttccacgatgcaggccacagaactagggaagctgccggccggcggagttctgtacccgccaccctcttttctgtactctcccgcattttgtccttcgcccctgccagacacaagccttttgcaggtgcgccaggatctccccagcccgagcgatttctattctaccccacttcagccagggggacagtccggtttcctgccttccggcgccccagcacagcagatgctgcttcctatggttgactcacagctgcccgtggtgaattttggttcgcttccccctgccccaccgcccgcgcctccttccctgtctttgctcccggtgggacccgcactgcagcctcccagtctggccgtacggcccccgccagctcccgccacaagggtgctgccgtcacccgctcgtccatttccggcaagtctgggaagagccgaattgcatcccgttgaactgaagcccttccaggactatcagaaactctccagcaacctcggtggacccgggagttcccgaaccccaccgactggccggtctttcagcggactgaacagccggctcaaagccaccccttcaacatacagtggcgtcttcagaactcagagggtggacttgtatcaacaggcctcccctccggacgccctacgatggatacctaagccttgggaaagaaccggtcccccaccccgggaaggcccctcccggcgcgccgaggagcccggatcccgaggcgacaaggagcctggtctccccccacccaggtag

SEQ ID NO: 200845 - DNA, 1650 bp, synthetic construct
  misc_feature 1..1650: note = Description of Artificial Sequence: Synthetic coding sequence
  source 1..1650: mol_type = other DNA
atgagcgaccggagcggccccaccgccaagggcaaggacggcaagaagtatagcagcctaaacctgtttgacacctacaaggggaaatccctggaaatccagaaaccagctgtagcccccagacacgggctgcagtcactgggtaaggtggcaatcgccaggcggatgccccctcccgctaacctgccttctctgaaagctgaaaataagggcaatgatcctaatgttagtttagtccctaaggatggcaccggatgggcttcaaagcaagagcagagcgatcccaagagcagtgacgctagcaccgcacaacccccagaatcccagcccctccccgccagccaaacgcctgcttctaatcagccaaaaaggccccccgccgctccggagaatacgccattagtcccttctggagtcaaatcatgggcccaggcaagcgtcacgcatggggcccacggggacgggggacgggcgagctcattattatctaggtttagtcgtgaggaattccctacactacaagcagctggagaccaagataaggccgcgaaggagagggagagcgccgaacagtcttccggacctggcccctccctgcgcccccagaactccaccacctggagagatgggggcgggcgggggccagacgagctcgagggccccgattctaagctacaccacgggcatgatccgaggggaggactgcagccttccgggccaccgcagttcccaccctacagggggatgatgcccccctttatgtatccaccttacctcccttttccccctccctacggcccacaaggtccatacaggtaccccacccctgacggaccctcccgatttccccgcgtcgcaggaccacggggctcgggcccacccatgaggctggtggagccggtgggccgcccaagcatattaaaagaagacaatctgaaggagtttgatcagcttgaccaggagaacgacgatgggtgggcgggagctcatgaagaggtggactataccgagaagctcaaattcagcgacgaagaggacggtagagacagcgatgaggaaggagcggagggtcaccgcgacagtcagagcgctagtggcgaagagagacctcccgaggccgacggcaagaaaggcaattctcctaattccgagccgccaaccccaaagaccgcctgggcggaaacctccaggcctcctgaaaccgagccagggcctccagcccctaagccaccgttgccacccccgcaccgcggccccgccggcaattggggtccgcccggtgactaccccgaccggggtgggccaccgtgtaaaccacccgcccccgaagatgaagatgaggcctggaggcaaaggcgtaagcaaagtagttccgagatttctcttgcagtcgaaagggccagacggcggcgggaggaggaggagagacggatgcaggaggagcgccgcgcagcgtgtgcagaaaagctgaagagactcgacgagaagtttggggcccctgacaaacgtttgaaggcagaacctgccgctcctccagccgcaccatctacgcccgcccccccacccgcggcctcagaggttccactgatggaagactccaggggccagcagagagaccctccaagagggttggaggctcctcacccatag

SEQ ID NO: 200846 - DNA, 1650 bp, synthetic construct
  misc_feature 1..1650: note = Description of Artificial Sequence: Synthetic coding sequence
  source 1..1650: mol_type = other DNA
atgagcgaccggagcggccccaccgccaagggcaaggacggcaagaagtacagttccctgaacctgtttgacacttacaaagggaaatctctcgagatccaaaagccagcggttgctcctcggcacggtctgcaatccctgggtaaggtggccatcgcacgacggatgcctccacccgccaacctgcccagtctcaaggccgaaaataaaggtaacgacccaaacgtgagtctggtgcctaaagacggtacggggtgggcatcgaagcaggaacaatcagacccaaagtccagcgacgcaagtacagctcagcctcctgaaagccagcccctgccagcatcacagacacccgcctccaaccagcccaaacggccacctgccgctccagagaatacacccctggttccttctggagtgaagtcgtgggcacaggccagcgtcacacacggggcccacggtgacggcgggagggcatcctcattattgtctagatttagcagggaggaatttcctacacttcaggctgctggagaccaggataaggccgccaaagagcgtgagtctgctgagcagtcatctggaccaggaccatctctgcggccccaaaacagcacaacctggcgagatggaggaggaagggggcccgacgaactggaggggcccgattcgaaacttcatcacggacatgaccccaggggaggactacagccaagcggcccccctcaatttccaccataccgaggcatgatgccaccctttatgtaccccccatatctgccctttcctccgccctacggacctcaaggcccatacaggtaccccactcctgacggacccagcaggtttccccgggtggcaggtccacggggcagtggacctccgatgcgtctggtggaaccagtaggcaggccaagtatcttaaaagaagataatctgaaagaattcgatcagttagaccaagagaatgacgatggctgggcgggtgcacatgaggaggtagattacacagagaagctgaagttctctgacgaggaggacggccgagattccgacgaagaaggcgccgagggccaccgagacagccagagtgcttctggcgaagagcgcccaccagaggctgatggaaagaaaggtaatagtccgaattccgagccccccactccaaaaacagcctgggcggagacctccagaccacctgaaacagaaccagggccaccagcacccaaacctccactcccccccccccacagaggccccgccggcaactgggggccccctggagactatcccgacaggggcggcccaccctgtaagccacccgctccggaggatgaagatgaagcttggagacagcgccggaaacagtcatccagcgaaattagcttggcagtcgaacgggctcggcgccggagggaggaagaagagcgccgcatgcaggaagagaggcgggccgcctgtgcagagaagctgaaacgcttggatgagaaatttggagcccctgataaaaggttgaaagcggagccggcggcaccgcctgcagctccatccacacctgctccaccgcctgctgccagcgaagtccctctcatggaagacagccgggggcagcagcgtgaccccccccggggtttggaggctccacatccgtag

SEQ ID NO: 200847 - DNA, 4149 bp, synthetic construct
  misc_feature 1..4149: note = Description of Artificial Sequence: Synthetic coding sequence
  source 1..4149: mol_type = other DNA
atgctgcgggagcggggcaccccccccgtggaccccaagctggcctgggtaggggatgtcttcaccgccactcctgcggagccacgacccctaacctctccacttagacaggccgcggacgaagacgacaaaggcatgagaagcgagacccctccggtcccacctcctcccccatatctcgcgtcttacccgggctttcccgaaaacggcgcgcctggcccaccaatttctcggtttccactcgaggagcccggccctaggcccctgccttggccacccggcagcgacgaagtggctaaaattcaaacaccacctccaaaaaaggagccccctaaagaggagacagctcagctgacagggcctgaagcaggacgcaaaccagctcgtggagtggggagcggagggcagggcccacccccccctagacgcgaaagccggacggagacccggtggggcccccggccaggctcaagcagaagggggattcccccagaagagcccggagctccccctcgaagggccgggcccatcaaaaagccaccaccgcctacaaaggtggaagaactcccgccgaagcctctcgagcagggggatgaaacgccaaaacctcccaagccagatccccttaagatcaccaaggggaagctgggggggccaaaagaaactccccccaacggaaatctgtcacctgccccgcgtttgaggagagactatagttacgagagggtcggccctacctcttgcagagggcgcggacgcggcgagtacttcgcccgtgggaggggattccgcgggacatacgggggtcggggccgaggggctcgaagtcgcgagttcaggtcataccgtgaattccggggagatgacggtagaggtggcggtaccggcggacctaaccacccaccagcccctagaggccgaacagcctctgagactagatctgagggttcagagtacgaggaaattcccaagagacggaggcagagaggatcagaaacaggctctgagacacatgagagtgacctggcaccaagcgacaaagaagcacccactcctaaagagggaaccctgacacaagtgccgctggcccctccaccccccggcgcacctccgagccccgcccccgcacgctttaccgctagaggaggaagggttttcacgcctaggggagtgccatcccggcgtggcagaggcgggggcagacctccccctcaggtctgccctgggtggtctcctcccgccaagagcctcgcgcctaagaagcctccaactggccctttaccacccagcaaggagcccctcaaggagaagctgatacccggaccactgagccccgtcgctcgcggcggttctaatggcggatccaatgtaggaatggaggacggcgaaaggccacgtcgtcgccgtcacggacgggctcagcagcaagacaagcctccacggttcaggaggctgaagcaggagagggaaaatgcagcccggggctcggaagggaagccgagccttacgctgcccgcttcagctccgggccccgaagaggctctaaccaccgttactgtggcacccgcccctagacgggccgcagccaagagccctgatctgagcaaccagaattctgatcaggctaatgaggagtgggaaactgcatctgaatctagcgatttcacgtccgagcgccgcggagacaaagaagccccaccacctgtgctactcacaccgaaagcagtgggtacgcctggcggaggcggcggcggggctgtacccggcatcagcgcaatgagtcgcggagatctgtctcaacgggcgaaagacctgagtaagcgctcgttctccagccagcgcccaggcatggaacgccaaaaccggcggcccgggcccggtggcaaggcagggtcaagcggcagttctagtggcggtggcggaggcggaccaggaggcagaactggaccgggccggggggacaagcgatcctggcccagtcccaagaataggagtaggcctccagaggaacgacccccagggctgcctcttcctcctcccccaccctcaagctccgccgttttcaggctggatcaggtcatccattccaatccagctgggatccagcaggcgttggcacagctcagttctcgccagggcagtgtaaccgcaccgggcgggcatccacgccacaaacccggcccccctcaagcaccacagggcccatcccctaggcctcccactcgttatgaacctcagagagtcaactcaggtctgtcctcagaccctcattttgaggagccaggaccaatggtgaggggcgttggtggcaccccgagggactcagcaggcgtctctccatttcctccaaagaggagagagcgaccacctcgtaagccagaactgcttcaggaagagagccttcccccgccgcatagctcaggatttcttggttcaaagcctgagggaccgggaccgcaggcggagagccgcgataccggcactgaagcactgacccctcatatatggaaccgcctgcataccgcaacctctcgaaaatcttataggccatcctctatggagccttggatggagccactcagcccattcgaagacgtggccgggactgagatgagtcagtctgacagtggggtggatctctccggagattctcaggtctcttcaggcccatgtagccagcggtcatcccccgatggcgggctgaagggcgcggctgaaggtccaccaaagcgccctggaggaagctcacccctgaacgccgttccttgtgagggacccccggggtcagagccaccacggcgaccccctccggcgccccatgatggggacagaaaagagctcccccgcgaacaacctctgcccccaggcccaattggcacagagcggtctcagcacacagatcgggggacagagcccggccctatccggcctagccacagaccagggccacctgtgcagtttggtaccagcgataaagatagcgacctgagacttgttgttggagacagtctgaaagccgagaaggaactgacagcttcagtgacagaggccattccagtgtctcgagactgggagttgctgccgagcgccgctgcatctgctgaaccccagagcaaaaacctggacagcggacactgtgttccagagccaagtagctctggtcaacggctctacccggaagtattttacggctccgcgggaccctccagctctcagatctcaggtggagcaatggattcacagctgcaccctaatagcggtgggttcaggccagggacccccagtttacacccctacagatcccagcctttgtacttgcccccaggtcccgcaccgccatccgcactgctgtccggagtagcgctcaaggggcaattcctcgattttagcaccatgcaagccacggaactgggcaagctaccagccggcggagtcctttaccccccgcctagcttcctgtattcacctgctttttgcccttcccccctgccagacactagcctgctccaggtgagacaggatctgccatctcctagtgacttttacagcactcccctgcaaccaggtggacagagcggtttccttccctccggggccccggcccagcaaatgctgcttcctatggtcgattcacagctgccagtggtgaactttggatcactgccgcccgcgcccccacctgcccccccaagtttgagtctactacccgttggaccggccctacaacctccttcccttgcagtcaggccaccgcctgcgccggctacccgagttcttccgtcgcctgcccggccatttccagccagcctaggtagggccgaacttcatccagtggagttaaagcctttccaggattatcagaagttatctagcaatctggggggcccaggaagctctcggacacctcctacgggacggtctttcagcggtttgaactctcgcctgaaggctacaccctctacatactccggggtgtttaggactcagagagttgacctttaccagcaggccagcccaccagatgccctgaggtggattcccaagccatgggaaagaacaggtccccctcctagagaggggccaagtcgccgcgccgaggagcccggcagccgcggagataaggagcctggtctgcctcccccccggtag

SEQ ID NO: 200848 - DNA, 6417 bp, synthetic construct
  misc_feature 1..6417: note = Description of Artificial Sequence: Synthetic coding sequence
  source 1..6417: mol_type = other DNA
atgagcgaccggagcggccccaccgccaagggcaaggacggcaagaagtattccagcctgaatctgtttgacacctataagggcaagtccctcgagatccagaagcctgcagtagcgccaagacacggattgcagagcctcggcaaggtcgctattgcaagaagaatgccccctccagccaacctccctagtttgaaggccgaaaacaagggcaacgaccctaatgtctctttagtgcccaaagacgggacaggatgggcatccaaacaggagcaaagcgatcccaaatcaagcgacgcgtccaccgcccagccactggagtcccagccgctgcctgccagccaaacgccagctagcaatcagccaaaacggcctcccgctgctccggagaacactcccctcgtgccgtccggagtgaagtcctgggcccaggcgagtgtgacacatggggcccacggtgatggcggcagggccagtagtttgctgagtagatttagtcgtgaggaattcccaaccctccaggcggccggcgaccaggataaggctgccaaagaacgagagtccgcggagcagtcatcaggcccaggaccttcacttaggccccagaacagtacaacctggcgagacggcggcggtagaggtcctgatgaactggaaggccccgactcaaagctccaccacggacatgatccaagaggtggccttcagcccagcgggcctccacagttccccccataccgaggaatgatgccccctttcatgtacccaccataccttcccttccctccgccctacgggccccagggcccctatcgataccccactcccgacggaccctctcgctttccacgcgtggcaggaccaagaggttccgggccacctatgaggctggtggaacccgtcggacgcccctctatactcaaagaggacaacctcaaggagttcgaccaactggaccaggaaaatgacgatggttgggctggagctcatgaagaggtcgactatactgagaagcttaagttcagcgatgaagaagacggaagggattccgatgaagagggagccgaggggcatagagatagtcagtcagccagtggcgaggagcggcctcctgaagctgacggaaagaagggcaattcacctaactctgagccaccaacccccaagacggcttgggctgagacaagccgacctcctgaaacagagccggggccgccagctcccaaacccccccttccacctccaggcgattacccagatcgtggtggcccgccttgcaaaccgcccgcccccgaggacgaagatgaggcctggagacagagacggaagcagtcttccagtgagatctccctggccgttgagagagccagaaggagacgggaggaggaagagcggaggatgcaggaggagaggcgagccgcctgcgccgaaaaactgaagagattagacgaaaagtttggggcccccgacaaaagactgaaagcagagcctgctgccccccctgcagcacccagcacccccgccccaccaccggcagtgcctaaggaactgcccgccccccccgcgccgcccccggcctcggcccctacgcctgagaaggaaccagaagagcccgctcaggcgccccctgcacagtctacccccacccccggtgttgccgcagcgccaaccctggtctctggtggaggtagtacttcctccaccagctctggttcatttgaagccagtcccgtagaaccgcagctgccgagcaaagagggacctgagccgcctgaagaagtgcctccacctactactccgcctgttcccaaggtcgagcccaaaggagatggcatcggccccacccgacagcccccttcacagggtctgggctatcccaaatatcagaagtcactgcctccccgcttccagaggcagcagcaggaacagcttctgaagcagcagcagcagcaccaatggcagcagcaccaacagggttccgcgcccccgactcccgtgcctccttcaccgcctcagcctgtgacactcggggctgttcctgccccccaagcccctccacctcctcccaaggcactgtaccctggtgctttgggccgtcccccacctatgccacccatgaacttcgaccctcggtggatgatgattccaccatatgttgatccccgcttgctgcagggtcggccacccctagacttttacccacctggagttcacccctctggattagtgccacgcgagagatccgatagcggcggcagttcaagtgagcctttcgataggcatgcgccggcaatgctccgcgaacgcggaactccacctgtggatcctaaattggcgtgggtgggggatgtattcacagctactccagccgagccacggcccttgacatcacctttgaggcaggcagccgatgaggatgacaaggggatgaggtctgaaacccccccagttcctcctcctccgccttacctagctagctaccctggatttccagaaaacggagcacccggtcctccaatctctcgattccccctagaggagcctggcccccggccattgccttggcctcctggctctgatgaagtagctaagatccagacacccccccctaaaaaggaaccccctaaagaagagacggcacagctgacgggcccagaagcaggccgcaaaccagcgagaggcgtgggatctggtggccaaggcccacccccgccaaggagagagtcccggaccgagaccaggtggggtcccagaccaggcagttccaggcgggggattccgcccgaagagcccggagctccgcccagacgggcagggcccattaagaagccccctccccccaccaaagtggaggaactgccccctaagcccctcgagcagggggatgagactcctaaacccccaaagccggatccactaaaaattacaaaaggtaaactaggcgggcctaaggagaccccgcccaatggaaacctgtccccagctcctcgactccgccgagactactcttatgaaagggtgggacctacctcatgtcggggacgcggacgtggcgagtacttcgcccgtgggagaggcttccgcggcacttatggaggaagaggacgtggcgcggccggaaactccgccgtcactgaatcctttgaggagatgatgggtgtggaggtcggacagggagatcagaccactctcttgctgccggaggccgctttgcctgcacgccatggtgcgagggtgcagtccatgcgaaaaagcccaagcggggccggatcgggcgcacagaagcaagcagcacgccctatgcgcgtaatctggctgttacagaccaggaggctccctcaccccaggcgggaacactcccccagatcaaggtcccccacgactcgaagtcccacctttcctgctcctgcgagatttacccctggtgtcggagaaagtagcctgcctgagggaatcagtcctgggccaaggaggagagagccaccgcaggtgtgtccagggtggagcccgccagctaagagcctggccccgaagaaacccccaacgggcccattgccgccaagtaaagagcctctgaaggaaaaactgataccaggacctctttctcctgtggccagaggggggagtaatggtgggagcaatgtcggaatggaagatggagaaaggcctaggagacgccgccatggacgggctcagcagcaagataaaccccctagattcagacgcctgaaacaggaaagggagaatgcagctaggggcagcgagggtaagccaagcttgaccctgccggctagcgcccccgggccggaggaggcactcacaactgtgaccgtcgctcctgcacctcggcgcgcggcggccaaaagcccggatctgtcaaatcagaactcagaccaggcgaacgaagagtgggaaaccgcgtccgaatcgtctgattttactagcgaaagacgcggggacaaggaggcaccgcccccagtactgctaacacctaaggccgtgggcaccccaggaggcggcggaggcggggctgtgcctggaattagtgccatgagtcggggcgatttatctcaaagggccaaggatctcagcaagcgctccttcagctcacagagacccggaatggagcgccagaacaggaggcccggccctggaggaaaagcaggttcatctggcagctcgtcaggggggggtggcggggggcctgggggacggaccgggccagggagaggtgacaagagatcttggccttccccaaagaatcggagtcgcccacctgaggagcgaccacccggtctccccctacctcccccgccaccatcttcttccgccgtatttcgtctggatcaggtcattcatagcaatcctgccggaattcagcaggccctcgcccagttgagcagccgccaagggtctgtgaccgcacccgggggccatcctaggcacaagcctggaccccctcaagcccctcaaggcccaagcccaagacctccaactcggtacgagccgcaaagagtgaattccgggcttagctcagacccccacttcgaagagcccgggcccatggtgcgtggagtcggaggaactcctagggatagcgctggtgtgtcacccttcccacccaagcgccgtgaacggccaccccggaagcctgaactgctgcaagaagagagtttgcctccacctcattcttctggctttctcggctctaaaccagaaggacccgggccccaagcagagtcccgcgataccggaacagaagctttaacaccccacatttggaataggctccataccgcaacgagccggaagagttaccgcccctcctccatggaaccctggatggaacctctcagtcctttcgaagacgtggccggcacagaaatgtcccaaagcgacagcggagtggatctgagcggcgattcacaagtctcgagcggaccttgttcccagcgaagctctccagatggggggctcaaaggagcagccgaaggcccacccaaacggccgggaggttcttctccccttaacgcagtgccgtgtgagggcccccctggtagtgagccaccgaggagaccaccccctgccccccacgacggagatcgcaaggagcttcctcgcgaacaacccctgccaccaggcccaatcggcaccgagaggtcacagagaactgaccgcggcacagaacctgggcctatccgaccctctcataggcctgggccacctgtgcagtttggaaccagcgacaaagactcggacctccgcttagttgtgggggactccctaaaggcagaaaaggaattgacagccagtgtgaccgaggccatccctgtgtcgagggactgggaactgcttccctcagcagcggcgtctgctgaacctcagagtaaaaacttagactccggccactgtgtaccagaaccctcgtcctccgggcagagactctatcccgaggtattctacgggtccgccgggccctcctcttcccagatcagcggcggccacgggctgagtatcacttcaaagcagtggcgtcggcccggtacgccgtcactgcacccatataggtcccaaccactgtatcttccccctggtcctgctccaccaagcgccctattaagcggcgtggccctcaaagggcagttcttggatttcagcactatgcaggccaccgagttggggaagttgcccgcaggcggcgtgttatatcctcccccctctttcctctactcccctgccttctgccctagtcctttgccagatacatccctgctccaggtaagacaagatctgcccagtccaagtgacttttattctaccccccttcagccggggggtcagagcggatttttgccttccggcgcaccagctcagcagatgcttctgccgatggtcgactctcagctgccagtcgtgaactttggctctctgccacccgctcccccacctgctcctccgcctctgagcctgctgccagtggggccggccctccagcctcccagtcttgctgtgagaccccctccagcccctgctaccagagtgttaccgtcaccagctaggccctttcctgcttccctgggtagggcagaactgcatccggttgaactgaagccctttcaggactaccagaagctgagctccaacctcggcggccccggatctagcagaaccccgcctacaggcagaagtttcagcgggctgaacagccgcctcaaagctaccccctccacctactccggagtgttccgaacgcagagagtggatttgtaccagcaagcttccccccccgacgctttgcggtggatccccaaaccctgggagagaacaggccctccccctcgagaggggccttccaggagggccgaagaacccggatctcgcggagataaggaacccggcctcccaccccccaggtag

SEQ ID NO: 200849 - DNA, 6417 bp, synthetic construct
  misc_feature 1..6417: note = Description of Artificial Sequence: Synthetic coding sequence
  source 1..6417: mol_type = other DNA
atgagcgaccggagcggccccaccgccaagggcaaggacggcaagaaatatagctccctgaacttgttcgatacgtacaaaggcaaatctctggagattcaaaaaccggctgtggctcctaggcacggcctgcaaagcttgggtaaagtcgcgatagcccgtcgaatgcccccccccgccaacttgcctagcttgaaggccgagaataagggcaatgaccccaacgtgtcactagtgccaaaggatggcaccggctgggcgtccaagcaggagcaatccgaccctaaatctagtgacgcatccacagcccagccacccgagagtcagcccctccctgcctcacaaacccccgcgtctaaccagcctaaaaggccacccgcagctcccgagaacacccccctggtcccttccggggtgaagtcatgggcccaagcttcagtgactcacggagcacacggcgatggaggccgagcctcttcactgttgtcccgcttctcccgcgaggaattcccaacactccaggctgctggtgatcaggataaagccgccaaagaacgcgagagtgctgagcagtcctccggccccgggccttccctgcgtccccagaattcaacaacttggcgggacggaggcggaaggggtcccgatgaacttgaaggtcccgattccaaattacatcatggacacgaccccaggggcggactgcagccgagtggaccccctcaattcccaccctacaggggtatgatgccgccattcatgtatccgccctatctgccctttcccccaccctacggacctcagggcccatacaggtatcccacacccgatggacctagccgctttcctcgggtggccggtcccagaggtagtggaccccctatgaggctggtggaacctgtgggcaggccaagtatcttaaaagaggataacctgaaggaattcgaccaacttgaccaagaaaacgacgatggctgggcaggtgcacacgaagaagtggactacacagaaaaattgaaattcagcgacgaagaggacggccgggatagcgacgaagagggcgccgaagggcaccgggactctcaaagcgccagtggcgaagagcgtcctccagaagcagacggaaagaaaggaaactcccctaactccgaaccacccacccctaaaacagcctgggccgaaactagtagacctcctgagactgaacccggtccccctgctccaaagccaccactgccccctccaggagattacccggataggggaggccctccctgtaaacctcctgccccagaggacgaagacgaggcctggcgccagagaagaaaacagtctagctcagagattagcctggcagtcgagcgcgcccggcgtagacgcgaggaagaggagcggcggatgcaggaggaacggcgcgcagcttgcgccgagaaacttaagaggttggatgagaaattcggagccccagacaaacggctcaaagcagagccagctgcccccccggccgcaccaagcactccggcccctccccctgccgtgccgaaagaactacctgcgccacctgccccacctccagcttctgccccgaccccggagaaggagcccgaggagcctgctcaggctccacctgctcagtctacccccaccccaggggtggccgcagcgcctacgttggtctcggggggaggtagcacttccagcacatccagcggctcatttgaagcctccccggtggagccacaactgcccagtaaggaaggtcccgagccgccagaggaagtgcccccacctacgacacctccggttccaaaggtcgagccaaagggtgatgggattgggcccactcggcagccaccctcccaaggtctaggatatcccaagtatcaaaagagcttgccccctaggttccaacgtcagcaacaagaacagctcctgaagcagcagcagcagcaccaatggcagcagcaccagcagggcagcgcaccaccgactcccgtgcccccttctcccccccaacctgtaaccctcggcgctgtgcccgctccacaggctccacccccaccccctaaagccttatatcctggcgctttagggagacccccccccatgccgccaatgaatttcgaccctagatggatgatgattcctccgtacgttgacccgagattgctccaggggcggccccccctggatttctacccccccggtgtacacccttccggcctggtaccccgggagcggtcagacagcggagggtccagcagtgagccttttgacagacacgccccagctatgctccgcgaaagaggaaccccacccgtcgaccccaaactggcgtgggttggagacgttttcacagccactccagcagagcctcgcccattgacaagccccctgagacaggcagccgacgaggatgacaaaggcatgcgttctgaaacaccgcccgtgcccccccccccaccttatctcgcctcttaccctggattcccagagaacggcgcccccggcccccctatctcccggtttcctctggaagagcctggccccaggcccctgccatggccaccaggctcagacgaggttgccaagattcaaacacctccacccaagaaggagcctccaaaggaggaaaccgctcagctgacaggccccgaggccggtcgtaagcccgctcggggcgtcggatcgggggggcagggcccaccaccgccaaggcgtgaaagtcgcaccgagacccggtggggccctagacccgggtcgtcaaggcgtgggatccccccggaggagcctggcgcgccccctaggagggctgggcctattaaaaagccccccccacccacgaaagttgaggagcttccaccaaagcctctcgagcaaggggacgaaacacccaaacccccaaagcctgacccattgaagattactaaggggaagttagggggaccaaaggaaacgccaccgaatggcaacttatcaccagcacctcgactgaggagggactacagctacgagcgagtgggcccaacgtcctgccggggccggggtagaggcgaatactttgcgcggggaaggggctttcgtgggacctatggagggagggggagaggggcagctggcaattcggctgtaaccgagtctttcgaggaaatgatgggcgtggaagtgggccagggcgaccagaccacactgttgctgcccgaggccgcattacctgccaggcacggtgcgcgagtgcaaagcatgaggaagtctccgagcggtgccggctccggggctcagaagcaagctgcacgcccgatgcgcgtaatctggctactgcaaacgcggcgtcttccccacccaagaagggaacactcgcccaggagccgcagtcccactaccaggagcccgacttttcctgccccagcccgttttactcctggtgtgggagagtccagtctccctgagggtatttctccagggccaaggaggagagagccacctcaggtgtgccccggctggagcccccctgcaaaatcactcgctcccaagaagccaccaacaggacccttgccgcccagcaaagagcctctgaaggagaagcttattcccggcccactctcacccgttgctaggggcggcagcaatggggggtccaatgtcggcatggaagacggtgagaggcccagaaggcggcgccacggcagggctcaacagcaggataaaccaccgagatttagacgattaaagcaggaacgggagaacgccgctaggggttcagagggtaagccaagcctgaccctaccagcctctgctcccggccctgaggaagcattgaccactgttaccgtcgcccccgccccccgcagagccgccgcgaaatccccggacctgtccaatcagaattccgatcaggcaaatgaagagtgggaaaccgcctccgagtcaagtgactttacgtcggagagacggggcgacaaggaggcaccaccaccggtcctactgacccctaaggcagtgggaacccccggcggcggaggcggaggagcggtgcctggaatctctgctatgtcgagaggcgacctgtcccagcgtgcgaaagacctatccaagagaagctttagtagtcagaggccaggtatggaaaggcagaaccgccgacctggccccggcggtaaagcaggcagcagtggctcctcctcaggcggaggtggcggaggtcccgggggccgcacgggaccaggcaggggcgacaaacggtcctggccctccccaaaaaacaggtcgcgccctcccgaagaacgccctcccgggctgcctctgccaccaccacctccatcatcctcggctgtattccgtcttgaccaggtaatccactcaaacccagccgggatccagcaggccctggcccagctctcgagtaggcagggtagcgtcaccgcccccggcggacacccaagacacaagccgggacctccacaggcaccccagggtccatctccaagacctccaacccgatatgaaccgcagcgcgttaatagcggcctctctagcgacccacactttgaggagccaggccctatggtacggggcgtcggcggcacaccgagggatagcgccggtgtctcacccttccctccaaagagacgcgagcgcccacctagaaaaccagagctcttgcaggaggaaagcctccccccaccccatagcagcggattcctgggatcaaagccagaagggcccggcccacaggctgagtcccgtgacacaggcaccgaagctcttacaccacacatttggaatcgcctgcacaccgccacttcccgcaagtcatacaggccaagtagcatggaaccctggatggagccactcagcccttttgaagacgtagctgggactgaaatgagtcagagcgatagtggagtggatttgtccggcgacagccaggtttcgtctggtccctgttctcagcggagttctccagatgggggattaaaaggggcagcagagggccctcccaagcgcccaggtggctcctcacccttgaatgctgtcccgtgtgaagggcctcccgggtctgagcctcctcgccgaccaccacctgccccgcacgatggggacagaaaagagcttcctcgggagcaacctctgccccccggacccatcggaacagagaggtctcaacacaccgataggggcacggagccagggcccattcgcccatcccacaggccgggtcctcctgtgcagttcgggactagtgataaagactctgacttgaggttggtggtcggggacagtctcaaggctgagaaagagttaactgcctctgtaacagaagcgatccccgtgtcacgcgattgggagcttctgccctcagccgcagccagcgcagaaccacagagcaaaaatctagactcaggtcactgcgttcccgagccatcttcaagcggccagaggctgtatccagaagtgttttacggcagcgccgggcccagcagtagtcagatcagcggcggccacggtctgtcagttacatctaaacagtggaggcggcctgggacaccttcattacatccataccggtcccaaccactttacttgcccccaggaccggcacctcctagcgctttactgtcgggtgtcgccttgaagggccaatttcttgatttttctacaatgcaggctaccgaactcggcaagctgccagcgggaggggtcctttaccctcccccatcctttctgtactcacccgccttctgtccaagcccacttcccgatacaagtctgctccaagtacgacaggatttaccttctccgtccgatttctattctacaccccttcagcccggtggccagtcagggtttctcccttcaggtgcccctgcgcagcaaatgcttctgccgatggtcgatagtcagctccctgtggtcaatttcggctctcttccccctgctccaccacctgctcccccctctctgtcccttttacccgtgggacctgcgctccagccacctagccttgccgtccgtcccccacccgcaccagctacccgtgtgctcccctctcctgccagacccttccctgctagtctgggtcgggctgagttacacccggttgaattgaaaccatttcaggattaccaaaaattaagctctaatctgggagggcctgggtcgtcaagaactccgcccaccggacggagtttttcagggcttaatagtcggctcaaggctaccccttcaacatacagcggcgttttcaggacccagcgagtggacctataccagcaggcttcaccccctgacgcacttcgttggattcccaagccctgggagcgaacgggtccaccacccagagagggacccagtcggcgggccgaagaaccaggcagccgcggagacaaagagccaggcctgccacctccccgctag

SEQ ID NO: 200850 - DNA, 6417 bp, synthetic construct
  misc_feature 1..6417: note = Description of Artificial Sequence: Synthetic coding sequence
  source 1..6417: mol_type = other DNA
atgagcgaccggagcggccccaccgccaagggcaaggacggcaagaaatattcttcattaaacctgttcgacacctacaaggggaaaagccttgagatccagaaaccagccgttgctccaaggcacggacttcaatcactgggcaaggttgctattgcgaggcgcatgcccccacctgctaacctgcccagccttaaagcggagaataagggcaatgacccaaacgtgagcttagtccctaaggacggtaccggatgggcttctaaacaagaacagagcgatcctaagtctagcgacgcctccactgcgcaaccaccggagtcacagccactgcccgcgtcccaaacacccgcctcaaaccaacccaaaaggccaccagcagccccagaaaataccccactggtgcccagtggggtgaagtcgtgggcccaagcaagcgtgacacatggcgcacatggggatggcgggagggccagttctcttttgtccaggttttcacgagaagaatttccaactctccaggccgcaggtgaccaggacaaagccgccaaagagcgtgaaagcgcagagcaatcgagtggaccagggccctccctacgtccacagaactccaccacatggagagacggcggcgggagaggccccgatgagttggaaggacccgacagcaaacttcaccatggtcacgacccgagggggggcttgcagccctccgggccgccacagtttccgccctatcggggcatgatgcctccttttatgtacccgccttatctgccattcccaccaccgtacggaccccagggaccataccgatatcctactcccgacggcccaagccggtttcccagggtagctgggcctcgtgggtccgggcccccaatgagactcgttgaaccagttggccggccaagcattctaaaagaggacaaccttaaggaatttgaccagttagaccaagagaatgacgatggctgggccggtgctcatgaggaggttgattacacggagaagttgaagttctcggacgaggaggatgggcgggactcagacgaagagggggccgaaggacatagagactcgcagtctgcctccggcgaagaacggccaccagaggcagacggaaagaaaggaaactcacctaactctgagcctccaaccccaaagacagcctgggctgagacatcaaggccccccgagactgagccggggcctcccgcccctaagccaccattaccaccccctggcgactatcccgacagaggcggacccccctgcaagcctccggccccggaggacgaggacgaggcttggcgacagcggaggaagcagagcagctcggagatctctttggctgtagagagagcccggaggagaagagaagaggaagaacgacggatgcaggaagagaggcgcgctgcttgtgctgagaagctgaagcgattggatgaaaaatttggcgcacccgataaaagattgaaagctgagcccgctgctccccctgcagcaccttccacccccgcccccccgcccgccgtgcccaaggaacttccagcccccccagctcctccaccagcctccgcaccaacgcctgagactgagcccgaggagccagcccaggccccaccggcgcagtccacgccaacacccggagtcgcagccgctcccacccttgttagcgggggcggttcgacaagttctacgagtagtggctcctttgaggcgagccctgttgaaccccagttaccgagcaaggagggacccgagccaccagaagaggtacccccacctacaacacctcctgtcccaaaagtggagcctaagggcgacggcatcggacccacaaggcagcccccttctcagggcttggggtaccctaaatatcagaagtctctgcctcccagatttcagcgtcagcagcaggaacagctccttaaacaacagcaacagcatcagtggcagcaacatcagcagggttcagctcccccgactcccgtgcctcccagtcctcctcagcccgtcacactgggtgccgtacccgcaccccaggccccacccccccctccgaaagccctataccccggcgcgctggggagacctccaccgatgccaccgatgaatttcgatccccggtggatgatgatccctccctacgtggaccctcggctgctgcaggggcggccacccctcgatttctatccacctggggtgcacccatccggtctagtgccccgtgaaagaagtgacagtggagggtctagcagtgaaccctttgatcgccacgctcccgctatgctccgcgaacgcgggactccgcctgttgatcctaaattagcttgggtgggagatgtgtttaccgccacccccgcagagcccagacctctcacctcccctcttagacaagcggccgacgaagacgacaagggcatgagatcagagacgcctccggtgcctcctccgcccccatatctggcctcgtatcccgggtttcccgagaacggcgcccccggtccgccaatatcccggtttcctctggaggagcctgggccacgccctctcccgtggccacccggtagtgatgaggtcgccaagatccagacacctcctcctaagaaggaaccacccaaagaggaaactgcccagcttacaggcccggaggccgggaggaaaccggcgcggggggtgggttctgggggccaagggccccctcccccaagacgggagtccagaacagagactaggtggggtccaaggcctggatcaagcagacggggaatccctccggaagaacctggagccccaccaagaagagccgggccgatcaaaaaaccaccgcctccaacaaaggtggaagaattacctcccaaaccactggaacagggcgacgagactcccaagccaccgaaacccgaccccctgaaaattaccaaaggaaagctaggcggccccaaagaaactccccctaacgggaacctcagccctgctccccggttgagacgcgattacagctacgagcgcgtgggcccaacttcctgtcgggggcgcggcaggggagaatacttcgccagaggacgcgggttccgcggtacctatgggggacggggccgcggggccgcagggaacagcgctgtgacagagtcgtttgaagagatgatgggggttgaggtcggacaaggcgatcagacaacactactactgcctgaagcggcattacccgcccggcatggcgcacgggttcagtctatgagaaagagcccctctggggctggaagcggggcccagaaacaggcagctcgacccatgcgcgtcatttggctgctccagacccgccgactgccacaccctaggcgggagcattcaccccgcagccggtctccaacaactagaagcccgacttttcccgcgcccgccaggttcacaccgggcgtgggcgaatcttctctcccggagggtattagtcccggaccaagacgacgtgaaccaccacaggtgtgcccaggttggagccccccagccaaaagccttgcccccaaaaaacctcccaccgggccccttccccctagcaaggaaccccttaaagagaaattgatccctggaccccttagcccagttgcccggggcggatcaaacggcggatctaacgttggaatggaggacggtgaaagacccaggcggagaaggcatggacgggctcagcagcaggataagccacctcgcttccggaggctgaaacaggagagggagaacgcggcccgcggctctgaaggcaagcccagcctgaccctgcccgccagtgcaccaggtccggaagaggctctcaccaccgtgacagttgctccagcgccaaggagagccgctgccaagtccccggatctgagcaaccaaaatagcgaccaggccaatgaggaatgggaaacagcatctgagagctcagattttacgtccgagcgtcggggggacaaagaagcccccccgcctgtgctcctgacaccgaaagctgtgggcactcctggaggagggggaggcggcgccgtccccgggatctcagctatgtcccggggtgacctgagccagcgcgccaaagacctgagcaaacggtcgtttagctcccaacggcccggtatggagaggcagaaccggcggcctggaccaggtggaaaggcaggcagcagtggttccagcagtggtggggggggtggtggccccgggggacggaccggcccgggaagaggggacaagaggtcttggccgtccccgaagaatcgctcaagaccgcctgaagaaaggccgccaggattaccactccctcctcctcccccctcatcgtctgctgtgtttcgccttgatcaggtgatccactccaaccccgccggcatacagcaggccctcgctcagctgtcttcacggcagggctccgtgaccgcgccaggagggcaccctcgccacaaacccggtttaccccaagcgccgcagggcccatctcctcgacctccgacccgctatgaaccgcagcgcgtgaattcgggccttagcagcgaccctcactttgaagagcccggtcctatggtgcgtggtgtcggaggtacaccacgagattcagctggagtgtccccttttccgccgaaacggcgggagcgtccgcctcgtaaacccgaactcctgcaggaggagtctctcccgcccccgcactcatctgggtttcttgggtcaaagcccgagggaccagggccccaggcggagagtcgtgacacggggactgaggcgctgacccctcatatatggaaccggcttcacaccgctactagccgcaaatcctatcgaccatcttcaatggaaccctggatggaacctctctccccctttgaagatgtggcgggaaccgaaatgtctcagtccgactctggcgtcgatctgtcgggagatagccaggtgtccagcggcccttgcagccagcgatccagccctgatggaggcctcaagggcgctgccgagggaccacccaagcggcctgggggaagtagtcctctgaatgccgtgccctgtgaggggcctccgggctccgagcctccccgcaggcctccacccgctccacacgacggagaccgtaaggagctgcctcgggaacaaccgctgccccctgggccaattgggacagagaggtcccagcgcacggacagaggtaccgaaccaggccccattagaccaagccaccgccccggcccaccggttcagttcgggacttctgacaaggattctgatttgagactcgtggtcggggattccctgaaggccgagaaggagctgaccgcctccgtgaccgaggccatccctgttagccgagactgggagctgctgccctcggccgctgcttcggctgaaccccagagcaaaaacctggattcaggccattgcgtgccagaacctagctccagcggtcagcggctgtaccctgaagtgttctatgggagcgcggggccttcaagcagccagatcagcggtggtcatggactctctattacctctaaacagtggcgtcgacctgggaccccatctctgcatccgtatcggtcccagccattgtacctgccccccgggcctgcacccccttctgctctgctcagtggtgtggcgctgaagggccagtttctggatttctcaaccatgcaagccacagagttgggaaaactgcccgccggcggggtgttatacccccccccatcttttctttatagcccagcgttctgtccttcccccttgcctgatacttcactcctgcaggtgaggcaggacttaccaagtccatccgatttttacagtaccccattgcagcctggtggccagtccggatttctccctagcggcgcaccggcacagcaaatgcttcttcccatggtagatagccagctgccagtcgtgaactttggttcactgccccccgctccaccacccgcccctcctcccctgtccctgctcccggtcggacccgcattacagccccccagcttagccgtccggccacctcccgcccccgcgacacgagtccttcccagccccgcacggccattcccggcctcactggggagagctgagctccaccctgttgaactcaaacccttccaagattatcagaaactgagttcgaatttaggcgggcccggttcgtcccgaacgccccccaccggtcggagcttttctggattaaactccaggcttaaggccacaccaagcacctattccggggtattccggacccagcgagtggatctgtaccagcaagcctcaccgcctgacgcccttcgctggattccaaagccatgggaaagaacagggccgcccccacgagaaggcccatctcgccgggcggaggaaccggggagcagaggagacaaggagcctggccttccacctccaagatag

SEQ ID NO: 200851 - DNA, 6417 bp, synthetic construct
  misc_feature 1..6417: note = Description of Artificial Sequence: Synthetic coding sequence
  source 1..6417: mol_type = other DNA
atgagcgaccggagcggccccaccgccaagggcaaggacggcaagaagtacagcagcctgaacctctttgacacatataaaggaaaaagcctcgagatacagaagccagccgtagcccccaggcatggcttgcaatctctcgggaaggtggcaatcgctcgtagaatgcccccacccgccaacctcccatccctgaaggcagagaacaaaggaaacgacccaaatgtctctctcgtgcccaaagatggcaccggctgggcctccaaacaggagcagagtgaccctaagagctccgatgcctcaactgcccagccgcctgaaagccagcctttgccagcaagccagacaccagcatctaaccaacctaaaagacctcctgctgccccagaaaacactccactcgtccctagcggagtcaaatcatgggcgcaagcttctgtgacccacggcgcccacggagatggcgggcgcgccagtagcttgctttccaggttttcaagggaggaatttcctaccttgcaggctgcaggcgaccaggacaaggcggcgaaggagcgggagtcggccgagcagtcctccgggcccgggccctctctcaggccacagaacagcaccacatggagggacggcggcgggcgaggtccagacgaactcgaggggccagactcaaaactccatcatgggcatgacccccggggggggctgcagccttcaggccccccccagttcccgccataccgcggcatgatgcccccgttcatgtacccgccgtacttacccttcccccccccctatggtccccagggaccatatcggtatcccactccagatggcccaagtaggtttccgagagttgccggcccgagagggagtgggcctcccatgaggctggtcgagcccgttggaaggccttcaatattgaaagaggataatctgaaagagtttgaccagttggatcaggagaacgacgatgggtgggcaggtgcccacgaggaagtagattacacggaaaaattaaagttcagcgatgaagaggatggtagagattccgacgaggagggtgcagaagggcacagggacagccaatctgcaagtggcgaagaaagacctccggaagccgatggcaagaaggggaactcaccaaattccgaaccccccacccccaagaccgcttgggcagagaccagcagacctccagagaccgagccaggccctcctgcccccaaaccacctctcccaccacccggtgattaccctgaccgcggtggaccaccctgcaaaccccccgcccccgaggacgaggacgaagcttggaggcagagacggaagcaatccagctccgaaattagcctcgcagttgaacgcgccagaaggaggagagaggaggaggaacggagaatgcaggaagagcggcgggcggcatgtgctgagaaactcaagcgtctggacgagaaattcggtgctccagacaaacgcctcaaggccgagccagctgcaccgccggcagcaccatccacgccggctcccccccccgccgtgcctaaggagctgcccgctccacccgctccacctcccgcttccgcaccaaccccagaaaaggaaccggaggaacccgcacaggctcctcctgcccagagcactccgacgcccggagtggccgccgccccaaccctcgtctcaggaggggggagcaccagcagcacctcctccggttcatttgaggcctcccccgtggaaccccagctgcctagcaaagagggacctgagccacctgaggaggttcccccacctactaccccgcctgtcccaaaggtagagccgaagggcgatggaattggaccaaccaggcagccccccagtcaggggctcgggtaccctaaataccagaagtcactgccacccagattccagagacaacagcaggagcagttgctaaagcagcagcaacagcatcaatggcagcaacatcaacaaggtagcgccccgccgacacctgtcccaccctcccccccacagcctgtgacactgggcgctgttcccgctccacaagctcctcctccacccccaaaagccctgtaccccggtgcccttggcagacctcctcccatgccccctatgaatttcgatccccgctggatgatgatccctccttacgttgacccaaggctccttcaagggcgccctccccttgacttctatccacctggagtgcacccgagtggcttggtgcctcgggagagatccgattcgggtggatccagctccgagccctttgatcgacacgctccagcaatgctgagggagcggggtactcctccagtggaccccaaactggcctgggttggcgacgtgttcaccgcgactcctgctgaacctcgcccactcacatcacctctgaggcaggccgccgacgaagacgataagggcatgcgctccgagacccctcccgttcccccaccacccccttatctggcttcctatccaggatttccagaaaatggagctccaggcccacctatttcgcgatttccactggaagagcccggccctagaccgttaccgtggccccccggaagtgatgaggtcgctaagatccaaacgccccccccaaagaaggagccaccaaaagaagaaacggcacaacttaccggccccgaggccggcagaaagcccgccaggggagttggatccggcggtcaaggcccccctcccccaagacgggagtcacgcacagagaccagatgggggcccaggccaggatcctcccgaagaggtattccgcctgaagagccgggggctcccccccgcagagccggcccaatcaagaaaccaccaccgcccacaaaagtcgaagagctcccccctaaacccctcgagcagggcgatgagacgccaaaaccacctaagccagatccgctgaaaatcacaaagggcaaactgggaggccctaaagagacaccgcccaacggtaacctgagtccagccccccgcctacgacgggattattcatatgaaagggtcggacccacatcttgccgaggcaggggccggggtgaatatttcgctagaggcagggggtttagaggcacctatgggggtcgaggccgcggcgccgcaggaaactcagccgttacggaatcattcgaggagatgatgggagtggaggtgggacagggcgaccagaccactttgctgttgccggaagcagcccttccagccaggcatggcgcccgggtccagtccatgaggaagagtcccagcggagcagggtccggtgcacaaaagcaggcagcccggcctatgcgtgtcatttggcttttacagaccagacgcctcccccaccctaggcgggagcactcaccgaggtcgagaagccccacaactaggagcccaacctttcctgctccagctaggttcacacccggtgtgggcgagtcgtctctccccgagggaatctcgcccggaccaaggagacgggaaccccctcaggtctgtcccgggtggtctcccccggctaagtctcttgcccccaaaaaaccaccgactgggcccctgcctccaagcaaggagcccttgaaggaaaagctgattccaggaccactctctcctgtcgctcgtggcggtagtaatggcggatccaacgtaggaatggaagacggcgagcgccctcggaggaggaggcacggtagagcacaacaacaagataaaccgcccagattcaggcgtctcaaacaggagcgcgagaacgccgcccgagggagcgagggcaagccctctctcacgcttcctgcgagcgctccggggccggaggaagctcttaccactgtgaccgtcgcacccgcaccccgccgcgctgcagccaaatctcccgacctcagcaaccagaactcagaccaagccaacgaagagtgggagaccgcctctgaatcttccgatttcactagcgaacgtaggggagacaaagaagccccccctcccgtgcttttgaccccaaaagccgtaggtacaccaggtggcggaggcggcggggctgtgccgggcatctctgccatgagcaggggtgacctaagtcaaagggcaaaggacctgtccaaaaggagctttagctctcagcgccctggtatggagaggcagaatcgcaggcccggccctggaggcaaggccggcagtagcggttcctctagcggtggcgggggagggggccctggcggacggaccggacccggcaggggcgataaaaggagctggccctctccaaagaatcgctcccgaccccctgaggagcgtcctcccggactaccgctgcctcctccacccccatcttctagcgctgtgttccgccttgaccaggtgatacactctaacccagccgggattcagcaagctctggcccaactttctagcagacagggaagtgttacagcccccggaggccatccacgccataagccgggtccaccgcaagcccctcaaggtccatcaccgcgcccccctacaaggtacgagccacagcgggtcaactccggactgtccagcgatccgcacttcgaagaacccggacctatggttcggggcgtcgggggaacccctcgggactccgcgggagtgtcacccttccctccaaaacggagagaacgaccaccacggaagcccgaattgctccaggaggaatccctacctcctccacatagctcaggatttctgggctccaagccagaaggcccgggcccacaagcagagagcagggataccggaactgaagctctgacaccacacatctggaaccggcttcacacagccacgagccggaaaagttaccgtccttcgtccatggaaccatggatggagcccctctcccctttcgaagacgtcgccgggactgagatgtcccagagcgattccggagttgatttatctggcgatagtcaagtcagtagcggtccttgcagccagcggtctagtccagacggaggcttgaagggagcagctgagggacctcccaagcgacctggtggcagctcacccctcaacgccgttccatgtgagggaccacctggatccgagcctcctcgacggcctcccccagccccccatgacggcgatcggaaggagctaccacgagagcaacccctcccccccggacccattggaactgagcgatctcagcatactgatagagggaccgaaccgggacctattagacccagccaccggcccgggcctcctgtgcaattcggcacaagcgataaggattcggatctgaggctggttgtcggtgactccttgaaggcagagaaagaactgactgctagcgtaaccgaggcgatcccagtaagccgtgattgggagctgctaccctcggctgcagcctctgccgagcctcagagcaagaacctcgattcaggacattgcgttccagaacctagttcttcggggcaacggctgtaccccgaagtcttctacggctcggctggcccaagtagtagccagatctccggtggacacggcctttccgttacatcaaaacagtggagacggcctggaacccctagcctccatccataccggtcccagccactgtacctgccgccagggccagcacctccctctgcgctgctgtcaggggtcgctctaaagggtcagtttctggacttctccacaatgcaggcaaccgaactcggaaaactcccagccggcggcgttttgtatccacctccctccttcctctactcacctgctttctgtcctagcccgctcccggacacctctcttttacaggtgcggcaggacctgccctcaccgagcgacttttacagtacccccctgcagcccgggggtcaatccggctttctccctagtggggcgcccgctcaacagatgctgttgccaatggttgattcgcagctgccggtggtgaatttcggctcactgccaccagcaccccctccagctcctccatcactgtctctattaccggtgggccccgcactacagccgccgtccttggctgttcggccccctcccgcaccagctaccagggtgctaccttccccagcccgcccatttcctgcctcacttggtcgagctgaacttcaccccgtggagctaaagccctttcaggattatcaaaaactgtctagtaacctgggaggccctggcagcagccgaacccctcccacagggaggagcttttcaggactcaattctagactcaaagccacaccaagtacctactccggagtgttccgaacacagagggtggatctctaccagcaggcgtcacctcccgatgcattgagatggatccctaagccttgggagcgaacaggcccaccaccacgcgaaggccctagccgccgggccgaggagccgggtagtagaggtgacaaggaacctggcttaccccctccaaggtag

SEQ ID NO: 200852 - DNA, 6417 bp, synthetic construct
  misc_feature 1..6417: note = Description of Artificial Sequence: Synthetic coding sequence
  source 1..6417: mol_type = other DNA
atgagcgaccggagcggccccaccgccaagggcaaggacggcaagaaatattccagcttgaatctattcgatacctacaaaggaaaatccttagagatccagaaacccgctgtggccccacggcacggcttgcagtcgctgggcaaggtggctatcgcgcgaaggatgcctccgccagctaatctcccctccttgaaagcagagaacaaaggtaacgaccctaacgtgtccttggtccccaaggacggtactgggtgggcctccaagcaggagcaaagcgacccaaaatcctcagatgcatcaactgcccagccacctgagagtcagccacttcccgctagtcaaacacctgcatctaatcaaccgaaacgcccccctgccgcaccggaaaacacgcctctcgtgccttccggggtgaagtcctgggcgcaagcttccgtgacccacggtgcccacggcgacggtggcagggcctcatcgctgctgtcacggttttcaagggaggagtttcctaccctgcaggcagccggcgatcaggataaggctgccaaagagagagagagtgctgaacagtcttcggggccgggccccagccttcgtccacaaaattctaccacttggagagacggtggaggtcgcggcccggacgaattagagggaccagatagcaagctgcaccatggacacgatccaaggggcggactacagccatcaggaccgccgcaatttcccccctatagagggatgatgccacccttcatgtacccaccctatctacctttcccacccccctacgggccccagggaccttaccgataccccacgcccgacggcccatcacggttcccccgagtggccggacctagaggtagtggtccacccatgcggctcgtagaacccgtcggaagaccgagcatccttaaggaggataacctgaaggagtttgaccagctcgaccaggaaaatgatgacggctgggctggggcccacgaggaagtggattacaccgagaaattaaagtttagcgacgaggaggatggccgtgatagtgacgaggagggagctgaggggcatagagattcacagagcgcctccggcgaagagagacccccagaagccgacgggaagaagggaaacagcccaaatagtgagcctcccaccccgaagacagcttgggctgagaccagtcggcctccggagaccgagcctgggcccccagctcccaagccgccgctgcctccaccgggggattatcctgatagggggggaccaccttgtaaacctcccgcacctgaagacgaagacgaagcttggcgacagaggagaaaacagtcttcatccgaaatttcgctcgcggtggaaagagcaaggcgcagaagggaggaggaggagagaaggatgcaggaagagagacgtgcagcctgcgccgaaaagctgaaacgtcttgacgagaaattcggagcacccgataaacgtctcaaggcagaacccgccgcccccccagccgctcctagcactcctgcgcccccaccagctgtccccaaagaactccctgctcctccagccccacccccggcatccgcaccaactcccgaaaaggagcctgaggaacctgcccaggctccccccgctcaatccacacccactcctggagtggcagccgctcccactctcgtttcaggcggaggatccactagctcaactagttcaggaagtttcgaagcgtcaccggttgaaccacagctacctagtaaagaaggcccagagccgccagaggaagtgcccccgcccaccacacctcccgtcccaaaagtggagccaaagggtgatgggattggccctacccggcagccaccatctcagggcttaggctacccaaagtaccagaagagcctgccacctaggttccagcggcagcagcaagagcagctactcaagcagcagcaacagcatcagtggcagcaacaccagcagggatccgcccctcctactccagtacccccgtcacctccacaacctgtgaccttgggagctgtacctgccccacaggctcccccacctccacctaaagcactttatccgggcgccttaggtcgcccacctcccatgccgcctatgaatttcgatcctagatggatgatgatacctccctacgttgatcctcggctgttgcaagggagaccccccctggacttttacccccctggcgttcacccatccggcctggtgcctcgagaaaggtctgactcaggaggtagcagcagtgaaccctttgatcgccacgccccagctatgctcagagagcggggtactccgcctgtcgatccaaagctcgcatgggtgggtgatgtgttcaccgccacaccggctgagccaaggccactcacatctcccctgaggcaagccgctgatgaagacgataaagggatgaggtcagaaacgcctcccgtgccaccaccgcccccttacctcgcctcctaccctggattccccgagaatggggcgcctggcccccccatctcgcggtttccccttgaggagcctgggcccaggcccctcccatggccgcctggatcagacgaggtggcaaaaattcagactccccctcccaaaaaagaacccccaaaagaggaaacagcccagctcacagggccggaggccggtcgtaaaccagcgaggggagtcggcagcggcggacagggacccccgccaccgaggcgggaatcgcgcacggaaactcggtggggtcctaggccggggtcctcaagaagaggtatcccacctgaagaacctggcgcccccccgcgacgcgcaggtcccattaagaagccaccacctcctacaaaagtcgaagaactaccccccaagcccctggagcagggagacgagacacccaagcctcccaagcccgatcctctgaaaatcacgaaaggcaagctgggcggccctaaggaaactcctccaaacggcaacctctctccagctcctagactgagaagagattattcctacgagagagtggggcccacatcttgccggggcagagggcggggcgagtattttgccaggggacgtggcttcagggggacgtacgggggcagggggcgcggggccgccggcaattctgcagtgactgagagctttgaagagatgatgggcgtggaggttgggcagggtgatcagactactctcctcctccctgaggctgccctgccagccagacatggggcaagagttcagtcaatgcgcaagagccctagcggggctggcagcggagcacaaaaacaggcagccaggcctatgcgagtgatctggctactgcagacacgcagattgccgcacccaaggcgcgaacattcccctcgaagcagatctcccactacacggtcgcccacctttcctgcgccggctcgcttcacaccgggcgtgggcgaaagctccctgccagagggaatatcgcctgggccgagacgaagggagccaccccaagtgtgccccgggtggtctccaccggccaagagtctcgccccaaagaagccacccacagggccactcccccccagcaaggaaccactgaaagagaagctcattcccggcccattgagcccagtggctcgcggtggtagcaatggggggtccaatgtcgggatggaagatggagagcggccacggcgccggaggcacggccgggcccagcagcaggacaagcccccccgttttaggcggctgaaacaagagcgagagaacgctgctcgcgggtctgaaggcaagccctcactgaccctccccgcctcagctcctgggccagaagaggctctcaccaccgtgaccgtggcacccgcaccccgacgtgcagccgcaaagagccctgatctgagcaaccagaactctgatcaagccaacgaagagtgggagaccgcatccgaatctagcgacttcacctcagagcgacgcggcgacaaagaagccccaccccctgtcttgctgactccgaaagcagtcggaacccccggcggcggagggggaggcgcagtcccgggtattagtgcgatgagtcggggagatctatctcagcgagccaaagatctgagcaaacgttcgttctcttcacaaagacccggaatggagcggcagaataggagacccggtcccggtggaaaagccggtagctcaggctctagtagcggagggggtggtgggggaccaggtggcagaacaggacctgggcggggtgacaaacgatcatggccctcacccaaaaaccggtcccggccgccggaggaaaggccgccaggtctgccactgccccccccgccgccttctagcagtgcagtctttaggctagatcaagttatccactctaacccagctggcatccagcaggcactggctcagctgagttcaaggcagggcagcgttactgcccccggcggtcacccccgccacaagccgggtccacctcaagcaccccagggaccaagcccgcgtccccctactcgctacgagccacagcgcgttaattccggactgagttctgatcctcattttgaagaacctgggcctatggtgcgcggcgttggcggtacccccagagactccgccggcgtgagtcccttccccccaaagcggagagagagacccccgaggaaacccgagttactgcaggaggaatccctccctcctccgcactcttccggttttctggggtccaagccagagggccctgggccacaagcagagtcccgggacacaggcaccgaggcgctcactcctcatatctggaataggctacatactgccactagcaggaagagctaccgaccatcctcgatggaaccttggatggagccgctgtctcccttcgaggacgtcgctggtacagaaatgtcccagagtgactccggcgtggatttgtcaggagattcccaggttagcagtggcccatgttctcagcgcagctcacccgatggaggcctcaagggcgccgcagaggggcccccaaagcgaccaggaggcagctcccccctgaacgcagtgccctgcgaggggccacccggctccgagccgccaagacggcctccgcccgcgcctcatgatggcgatcgcaaggagctcccaagggagcagccactcccaccaggccccatcgggactgagcggagccaacggacagatcggggaacagagcccgggccgattaggccctcacaccgtcccggtcctcccgtgcagtttggtactagcgataaggatagtgatttaagactcgtggtaggtgactcgttgaaggccgagaaggaactcacggcttccgttacagaagccattcccgtatcacgtgattgggaactgttacctagcgccgccgcttcggccgagccccagtctaagaacttagattcaggacactgcgtccctgagcccagctcatctgggcaacgcctgtatccagaagtcttctatggcagcgctgggccctcttcatcacagatatcaggcggccatggcctgagtattacctccaagcagtggcgccggccaggcacaccatctctgcacccgtataggagccagcctttgtatctgccaccaggccccgccccaccttccgccctactcagcggagtggccctgaagggacagttcctggatttctctaccatgcaggctaccgagctgggcaaactccccgctggtggcgtgttgtatccacccccttcatttctctacagtcccgctttctgtccatcacctctccccgacacctccttacttcaggtgcggcaggatctcccctcgccctccgacttctacagcaccccattgcaaccgggcggccagtctggatttctgccgagtggagcccccgcacagcagatgctgctgcccatggtcgactctcagctcccagtggtgaattttggtagtctgccgccagcgcccccaccagccccccccccacttagtctgctgccagtgggacccgccttacagccgccttctctagcagttcggccccccccagcccccgccacccgtgtgctccccagccccgcgcgaccctttcccgcttctttaggtcgagcagagcttcatccagtggaactgaagcccttccaggattatcagaagcttagttctaatctgggggggcccggaagcagccggacccccccaacaggaaggagcttttccggcctcaattcaagattgaaagccacacccagcacatactcaggagtgttcagaacccagcgggtcgacttataccaacaggcttccccccctgacgcattgagatggatacccaaaccgtgggagaggactggaccgccacctcgggaagggccgtctcgcagagctgaggagcccggatctcggggggacaaggaaccaggtctaccacccccgcgatag

SEQ ID NO: 200853 - DNA, 4149 bp, synthetic construct
  misc_feature 1..4149: note = Description of Artificial Sequence: Synthetic coding sequence
  source 1..4149: mol_type = other DNA
atgctgcgggagcggggcaccccccccgtggaccccaagctggcctgggttggtgatgtgtttaccgcaaccccagccgagccacgccctctgacgtctccattgcggcaggcagcagatgaagatgataaaggtatgcgcagcgaaacacccccggtgcctccaccacccccttaccttgcctcttaccccgggttccccgagaacggggctccaggtccccctatcagccgctttccccttgaagagcccggaccacggccgttgccctggcccccagggagtgacgaagtggcaaagatacaaaccccaccccctaagaaggagcctccaaaagaagagaccgcacagctgacagggcccgaggccggacgtaagccagcacgcggcgtgggctcaggcggccagggaccccctccaccaaggcgtgagagtcggaccgagacccgatggggtcctagacctggctcctctcgcaggggcatcccgccagaagagccaggggcaccccccagaagagcgggaccgataaagaagcccccccctcctacaaaagtggaggagctgcctccaaagcccctggagcaaggagacgaaacgccaaaaccaccgaaacctgacccccttaagattaccaagggtaagctcggtgggccaaaggagacgccacccaacggcaaccttagcccggctccacgactccggcgcgattattcctatgagcgcgtgggccctacctcttgtagggggcggggaagaggcgagtattttgccaggggaagggggttcaggggaacttatggtggacggggccgcggcgcgcgctcccgcgaattccggtcgtatcgcgaatttaggggagatgacggacgggggggcggcacggggggacccaatcatccacccgcgcctcgaggccggactgcctctgagactcgaagtgagggctccgaatatgaggagatccccaaacggaggaggcagcggggctccgagacagggtccgagactcacgaatctgacctggccccttcagataaggaagctccaacgcccaaggaggggactttgacccaggtaccactcgctccaccacccccaggcgccccacccagccctgcaccagcaaggtttacagctagaggcggaagggtattcaccccacgaggggtcccatctaggcggggcagggggggcggccgcccccccccacaggtgtgcccagggtggagcccgccagccaaatctctagcccctaaaaaaccaccaactggacctctacccccgagcaaagagcctctcaaggaaaagctcatcccaggccccttaagccctgtggccagaggtggaagcaatggtggatctaatgtggggatggaggatggcgagcgcccccgaagaagacgccacggccgagcacagcagcaagataagccccccagattcagacgcctgaaacaggagcgcgagaatgcagcacggggctcggagggaaagcctagcctgactctcccggcttcagcgcccggccccgaggaagcactgaccaccgtcacagtggcccccgccccgaggagggccgccgctaagtcccccgatctgtcaaatcagaacagcgatcaggcaaatgaggaatgggaaaccgccagcgagtctagcgactttactagcgagagacgtggggacaaggaagccccgcctcctgttctgctaacacctaaggccgtcggcactccgggtggtgggggcggcggagctgtccctggcattagcgccatgtctaggggcgacttgtcacagagggctaaagatctgtccaaacggtcgttttctagccagcgacctgggatggaaagacagaaccgtcgccccgggcccggtggcaaagctggtagcagcgggtcaagttcaggaggagggggaggcgggcctggcggtaggacagggccagggcgaggtgacaaacgtagctggccaagtcccaaaaacaggtcccggccccccgaagagcgtccacctggactgcctcttccccctccacccccctcatcgagcgccgtttttcggctagaccaggtgattcacagcaatcctgcaggcatccagcaggccctggctcagctttcgagccgccaaggatctgtgaccgctccaggtggccaccctagacacaaaccaggccttcctcaggctccgcaggggccaagccctcgacctccaacgagatatgagcctcagcgcgtcaattctggcctgtctagtgatcctcacttcgaagaacctggtccgatggtgcggggggtcggcgggacaccgcgcgactccgccggagtctccccattcccccccaagaggcgagaacggccaccacggaaacctgagttgctccaagaggagtctctgccccctccccactccagtggattcctgggcagtaaaccagaaggacctggcccacaagcagagtctcgtgatactggcacagaagctttaactcctcacatatggaaccggctccacaccgctaccagtcgcaaaagctacagaccctcctctatggaaccttggatggagcccctatccccattcgaggacgttgctggcaccgagatgtcgcagtctgacagtggagtggatttaagcggggactctcaggtttcttctgggccttgtagccagcgctcaagtcctgacggaggattgaagggggctgctgagggtccacccaagaggccgggaggatctagccccctgaacgctgttccctgcgagggcccgcccgggagcgaaccacctcgtcggccccctccggcaccccacgatggggacaggaaagagctcccaagagagcagcccctgcctcccggcccaatcggaacggagaggtcacagaggactgacaggggcacagaaccaggcccaatcaggcctagtcacaggccgggtccaccggtgcagtttgggacctccgataaggactccgacctgcggctcgttgtgggcgatagtttgaaggctgaaaaggaactgactgcctccgtaacagaagctatccccgtcagtcgcgactgggaactgttgccatccgctgcagctagcgccgagccacagtctaaaaatttggattctggccactgcgtaccagaaccatccagttctggccagaggctctaccccgaagtgttttacggctcggcaggaccctcttcttctcagatctcagggggcgccatggactctcagctgcatcctaatagcggcgggtttaggccgggcacaccaagcctccacccatacagatcacagcctctctacctgcccccgggtcctgccccgccctcagctctgctgagtggggttgcgctgaaaggccagttcctagattttagcaccatgcaggcaacggaactgggcaaattgcctgcaggtggcgtactgtacccaccaccctcattcctctactcgcccgcattctgcccatctccactgcccgatactagccttttgcaggtgcgacaggacttgccctcaccgagcgacttctacagcacacctctacagccaggaggccaaagcggattcctgccgtcaggtgcacctgcacagcagatgctgcttccaatggttgatagtcagctcccagtggtgaactttggcagtctaccccctgcacctcctccagcaccgccgcctttgtcattactccctgtgggcccagctctccagcccccatctcttgccgtgaggccccctcctgccccagcgacccgagttcttccgtctccggccagacccttcccggccagtctcggcagggctgagctccatcctgtggagttgaaaccattccaggattatcagaaactctcatctaatctcggtggtcctgggagctctaggaccccgcccacagggcggtctttcagcggccttaacagcagactcaaagccactccttcaacctattccggtgtcttccgtacccagcgagttgacctgtaccagcaagcctcaccacctgacgcccttcggtggattcctaagccatgggaaagaactggcccccctcctagagaggggccaagtagaagggccgaggaaccagggagcaggggtgacaaagagcctggcctccctccccctagatag

SEQ ID NO: 200854 - DNA, 6450 bp, synthetic construct
  misc_feature 1..6450: note = Description of Artificial Sequence: Synthetic coding sequence
  source 1..6450: mol_type = other DNA
atgagcgaccggagcggccccaccgccaagggcaaggacggcaagaaatactctagcctaaatctttttgacacatacaaggggaagtccttggaaatccagaaacctgctgtcgccccccgtcacggtctgcaatcactgggcaaagttgccatcgcccgacggatgccaccgcctgccaacctgccttccctgaaggcggagaacaagggaaacgatcccaatgtttcccttgtccctaaggacggcaccggatgggcaagcaagcaggagcaaagcgacccgaagtcttccgatgcctccaccgcgcagcctccagaatcccaaccactgccggcttctcagacacccgccagcaatcagccaaagcgtccccccgccgctcccgagaacacaccgctcgtgccgagtggggtgaaatcatgggcacaggctagcgttactcacggggcacatggggacggcggcagagcgtcctctcttctgtcccggttcagccgtgaagagttccccaccctccaggctgctggtgatcaggataaagctgcgaaggaacgcgagtccgctgagcagtcaagtggcccggggccctctctccggcctcagaattctaccacctggagagatggtggcggtcgggggcctgacgaactggagggccctgattcaaagctgcatcatggccatgacccccgtgggggccttcagccgtcaggtccaccccagtttcctccgtacagaggcatgatgccccccttcatgtaccctccctatctgccattcccacctccctatgggccgcaaggcccctaccggtatccgactcctgacggcccatcccggtttccacgcgttgcagggcctcgcggctcaggcccacctatgcgcctggtcgagccagttggtcggccttccattctcaaagaagacaatctgaaggaatttgaccagcttgaccaagagaatgatgacgggtgggctggggcacatgaggaagtggattacacagaaaaattgaagttcagcgatgaagaagatggacgcgactctgacgaggaaggcgctgaggggcacagagatagtcaatctgctagtggcgaggaacgaccacctgaagcggacgggaagaagggcaacagcccaaatagtgagcccccaacacccaaaactgcatgggcagagactagccgaccaccagaaaccgagcccggccctccggcccctaaaccccccctcccacctcctcaccgaggtcctgctggaaactggggtccacccggagactaccccgaccggggggggcctccatgcaagccacccgctcccgaagatgaggatgaagcatggcggcagcggcgcaaacaaagcagtagtgaaatatcactcgcagttgagcgagcccggcgcaggagagaggaggaggaacgccgcatgcaggaggagcgcagagctgcctgcgccgagaagctgaaacgcctggatgagaagttcggtgccccagacaagagattaaaggccgagccagcagctcctcccgcagccccaagtaccccggctccccctcctgctgtgccaaaggaattgcctgccccaccagcacctccacccgccagtgcccccacgccagagaaagagccagaggaaccagcccaagctcccccggcccagagtacgccgaccccaggtgtggctgccgctccgactctggtctccggtggcgggtccacctcctctaccagctctgggtcatttgaggctagtcccgttgaaccccagctgccttccaaggagggtcccgaacccccagaggaagtgcctcctcccaccacgccaccggttcctaaggtagagcctaagggggacggtatcggcccaacccgccagccgccatcccaaggcttagggtaccctaagtatcagaaatcgttgcctcctcgattccagaggcaacagcaggaacaactcctcaaacagcagcaacagcatcagtggcagcaacaccaacagggttctgccccgcccactcctgtcccaccatctccgccacagcccgtcacgttgggtgcggtgccagccccccaggctcccccaccacctcccaaagcactgtacccaggggcactgggaaggcctccaccaatgcccccaatgaacttcgatccacgttggatgatgattcccccctacgttgatccacggctgctccaaggccgaccacctctggatttttatcctccaggtgtacacccttcaggtctcgtcccaagagagcggtccgacagcggcgggtcctcgagcgagccttttgatagacacgctcccgcgatgttgcgagagagaggcactcctccagtggaccctaagctcgcctgggtgggcgatgtctttaccgcaacccccgcagaacctaggcccctgactagtccgctcagacaggctgctgacgaggacgacaagggcatgaggtcggagaccccacctgtgccccctcctccaccataccttgcctcgtaccctgggttcccagagaacggcgctccaggaccacccatcagtagatttccccttgaagaacccggaccccgtccactgccttggcctccaggctcagatgaagtagctaagattcagacaccaccccctaagaaggagccccccaaggaggaaactgcccagctcacaggcccagaggctgggcgaaagccagcccgcggggtcggcagtggaggtcaaggaccaccacctccccggcgcgaaagccgaaccgagacccggtggggccctagacccggttcatccaggcgtggcatccctcctgaagaacctggcgcaccgccaaggcgagcgggacccatcaagaagccccccccccctacaaaagtggaggagctgcctcctaaacccctggaacagggggatgagactcctaaaccccctaaaccagaccctctgaaaattacgaagggtaaattgggcggacctaaagagacaccccccaacggcaacctcagcccggccccaagactccgacgagactattcatacgagcgcgtcgggcctacatcctgcaggggaagagggagaggcgagtactttgctaggggtcgcgggtttagaggtacctacggaggcaggggcagaggcgccgcaggcaacagcgccgtaaccgaaagctttgaggaaatgatgggcgttgaagtggggcagggggaccagacaaccctgctcctccctgaggccgccctacctgcacgccatggggcacgtgtgcagagcatgcgtaaatccccatctggggcaggaagcggcgctcagaagcaggccgctaggcccatgcgggttatttggctcctccagactcgccgtctgccacacccacgcagagaacacagcccgcgatcacggagcccgacgactagaagtcctaccttccccgctcctgcacggttcactcccggggttggagagagtagtctgccagaagggatttcaccaggacctagacgccgggaacctccccaggtctgtccgggctggtcgcccccagccaaatcgttggcacccaagaaacccccaactggcccattgcctcccagcaaggagcccctgaaggaaaagctcattccaggccctctgagtcctgtcgcccgagggggatccaacggcggctccaatgttgggatggaggacggggaacgtcccaggaggcgccgccatggtagagctcagcagcaggacaagccaccccgttttagacggctgaaacaggagcgtgaaaatgccgcgcgaggatcagagggaaagccgtccctcacccttcccgcgagcgcgccaggaccggaagaagccctgacaacagtgacggttgctccagcacccagacgcgcagcggccaagagtccagacctgagcaaccagaactcggatcaagcgaatgaagaatgggaaacagccagtgagagctcggactttacgtcggagagaagaggggataaagaagctcctcctcccgtactgttgacgcccaaagccgtgggcacaccaggcggcggaggcgggggagccgtccctggaatcagtgcgatgagccgaggcgatctatcccagcgggccaaggacttgtctaagagatccttttcgtcacagcgtcccggcatggaacggcagaatcgccggcctggccctggggggaaggccggctcgtcaggctccagctctggcggagggggcggggggcccgggggccgcactggccccggcagaggagataaaagaagctggcccagtccaaaaaatcggagcagaccacctgaggagcggccccccggtctccctctgccccctcctcccccatcttcaagcgccgtatttagacttgatcaggtgatccactccaatccggcgggcatacagcaagccctagcccagttatcctccaggcagggctccgtgacagcccccgggggccatccgagacacaaaccagggccaccccaggcccctcagggaccatcaccccggccccctacacgatacgagccacagagagtcaactccggtctgagtagcgatcctcactttgaagaaccggggcccatggtgcgcggtgtgggaggtacccctcgcgatagtgccggggtcagtccttttcccccgaagagacgggagcggccgccacggaagcctgagctgttacaggaggagtctctgcccccaccccatagcagcggcttccttgggagtaagccagaaggccccggcccgcaagccgaaagccgagacactggcacagaggcccttacgccgcacatttggaaccgtctccataccgccactagccggaaatcgtatcgcccttctagcatggaaccatggatggaacccctgagtccttttgaggatgtggctgggacagaaatgagtcaaagcgatagcggggtggacctgagcggcgattctcaggtgagttcagggccttgttcgcagcggagcagtcctgatggcggtctcaagggtgccgccgagggtcccccgaaacggccaggtgggagcagcccgctgaacgcagtcccatgcgagggaccacctggatcagaaccgccgagaaggcccccccccgcaccccacgatggggaccgcaaagagctgccaagagagcagccactgccaccggggccaattggaacggaacggagtcagcggacagaccgggggacggaacccggacctattagacctagtcacaggcctggtcctccagtgcagtttgggacttccgataaggacagcgatttacgactcgtcgtgggcgatagtttaaaagccgaaaaggagttgacagcctccgttacagaagcaattccagtgtcccgggactgggagcttcttccttctgctgcagccagtgcagagccccagtctaaaaacctcgatagtggccactgcgtaccagaaccttccagctcggggcaacggctgtacccagaggtcttttatgggagtgctggaccaagttccagtcagatctcgggcgggcacggcctgtcgatcaccagtaaacagtggaggcgacccgggactccctccctgcacccctatcgcagtcagcctctgtacttgcctccaggaccagctccgccatccgccttattaagcggtgtcgcactcaaaggacagttcctggattttagcacaatgcaggctaccgaactgggaaaactgccagctggtggtgtgctgtatccgccgccctcattcctgtactcccccgctttttgcccttcacctttgcccgacacttctctccttcaggtacgccaggatttgccaagccctagtgatttctacagcacccccctccagccgggagggcagtcaggattcctgccttccggggcccctgcccaacaaatgctgctacccatggtcgactcacaattgccagtggtaaattttggttctctgcccccggcccctccccctgccccaccacccctgtctctgctacccgtgggtcctgccctccagccgccttctctcgccgtgagaccccctccggccccagccaccagagttttgccctcccccgctcggccgtttccagcttctctgggcagagccgaactacatccggttgagcttaagccctttcaggattaccagaagctgtccagcaatcttggcggtccaggatcctcccggactccccctactggacgatcgttctctggactgaattctcgactgaaggccacgccatccacatattctggcgtgttccgaactcagagagttgatctttatcagcaggcatctcccccagatgcactccgctggatccccaagccttgggaacgcacaggtcctccaccacgcgaagggcctagtcggcgggcagaagaacctggatctaggggcgacaaggaacctggtttgccccccccccggtag

SEQ ID NO: 200855 - DNA, 6450 bp, synthetic construct
  misc_feature 1..6450: note = Description of Artificial Sequence: Synthetic coding sequence
  source 1..6450: mol_type = other DNA
atgagcgaccggagcggccccaccgccaagggcaaggacggcaagaagtatagttctctgaatttgtttgatacatacaaagggaaatctctggagattcagaagcctgccgtagcccctcgccacggattgcagtcccttggcaaggtcgcaattgcacgccggatgcccccacctgcaaatctgccttccctaaaagcagagaacaaaggcaatgaccccaatgttagcctggtcccgaaggacggcacggggtgggctagcaagcaagaacagagcgaccccaaatctagcgacgctagcacagcacagccacttgagtcccaacctctgccagccagccaaactccagcgtcaaaccagcctaagcgcccccctgctgcacctgagaacacacctctcgtgccgagcggcgttaagtcctgggctcaagccagcgttactcacggagctcacggcgacgggggtcgggcttcctccctcctctcacggttcagccgcgaggaatttcccacattgcaagccgccggggatcaggataaagcagccaaggagcgtgaatctgctgaacaaagtagcggcccaggtccgagcctcagacctcagaacagcaccacctggcgagacggcggtgggcgcggaccggatgagctggagggcccagactcaaagctgcatcacggccatgatccccgcggcggattgcagccctcagggccccctcagtttccaccctatagaggtatgatgcctcctttcatgtatccaccgtacttgccttttccaccaccctacggtcctcagggaccataccgataccccacgcccgatggtccttcgaggtttccaagagtcgcagggccgcgagggtccgggccaccaatgcgcctggtggagccagtgggacgtccctcgatcctgaaggaggacaacttgaaagagtttgaccagcttgaccaggaaaacgacgacggttgggctggagcgcatgaagaagtagactacactgaaaagctgaaattctccgatgaggaagacggaagggactccgatgaagagggcgccgagggtcacagggacagtcagagcgccagtggagaggagaggccacctgaggctgatgggaaaaaagggaactcaccaaatagcgagccccctactccaaagacagcctgggccgaaaccagtcgcccacctgaaactgaacccggcccacctgctcctaagccacccctgcccccgcctcatcgcgggcccgctggaaattgggggccacctggcgactatcctgatagaggagggcccccctgtaaaccacctgcccctgaggacgaagacgaggcctggcgccaacgccggaagcagtcaagttccgaaattagcttggcagttgaaagagcccgccgaagaagggaggaagaggagcgacgcatgcaggaggaacgcagggccgcttgtgccgaaaagctaaagagacttgacgaaaaattcggagctccagataaacgattaaaagcagagcctgccgctccccctgccgctcctagcacccccgccccgcctccagccgttcccaaggagctccccgcaccacccgcccccccgcccgcaagcgcacccacccccgagaaggaacctgaagagcctgcacaggctcccccagctcaaagcacacccactccaggggtagccgccgcacctaccctggtctccgggggcggatcaactagttctactagttcaggcagttttgaggccagccccgtggagccacagctgcccagtaaggaagggcccgagccccctgaggaggtcccaccgcccacaacaccaccggtaccgaaagttgaaccaaaaggggatggcatagggcctacccgccagccgccgtctcagggcctcggttatccaaaataccagaagagcctgccccccaggttccagcgccaacagcaggagcagctgcttaagcagcagcagcagcaccaatggcagcagcaccagcaggggagcgcaccccccacgcccgttcccccaagtccacctcaaccagtgacccttggcgctgttcctgctcctcaagcaccccccccacctcctaaggccctgtaccccggggctctgggaaggccccccccaatgccacctatgaatttcgatccacgctggatgatgattcctccgtatgtcgatccaaggctgctgcagggcaggccccctctggacttctacccacccggagtgcaccccagcggtctggtgccgagggaacgctctgatagcggaggcagttcgtccgagccatttgataggcacgcgcctgcgatgctgagggaaagaggaactcctcctgtcgaccccaagctggcatgggtgggcgatgtgttcacagctacgcctgctgaaccccggcccctcacctcccctctgcgacaggccgccgacgaggacgacaagggcatgagaagcgagaccccacccgtgccacctccccctccatatctcgccagttatcctggcttccctgagaatggcgcgcccggaccgccgataagccgcttcccactggaggaacccggcccaaggccactcccctggcctcctgggtccgatgaggttgcgaagattcagactccaccgccaaagaaagaaccccccaaagaggagactgcccaattgaccgggcccgaagccggacggaagcccgccagaggggtcggctcgggtggacaagggcctccgccacctcgcagggagtctcgaaccgagactaggtggggaccccggcccggcagttccaggcgaggcatcccacccgaagaaccaggagccccaccgagacgggcaggccccattaagaagccaccaccgcccactaaggtggaagagctgcctcctaaacctctcgaacaaggggatgagaccccaaaacctcctaaaccagatcctttgaaaatcactaagggcaaactcgggggccccaaagagaccccgcccaacggcaacctgtctcctgcgcccagactgaggagggattattcctatgaacgagtaggccctacgagctgcaggggcaggggccggggtgagtacttcgccaggggccgggggttccggggaacgtacggcggtcgcggcagaggcgctgcggggaacagcgctgttaccgagagcttcgaagagatgatgggcgttgaagtgggacaaggcgaccagactactctcttgctcccagaggccgcactgcctgctaggcatggcgcccgggtgcaaagtatgcgcaagagcccctcaggagctgggagtggcgctcagaagcaggccgccagacccatgagggtgatctggttgctccagacccgacgactccctcacccccgtagggaacacagccctcggtcgcgcagccccacaacgcggtcacctaccttccctgcccctgcacgcttcacccctggtgttggagagagctcgcttcctgaaggcatctcacccggccctaggaggcgggaaccaccgcaggtgtgcccgggctggagtccgcccgcaaagtcactggccccaaagaagccaccgaccgggcctctgccgccctcaaaagagcctctgaaggagaagttgattccaggacccctgtcacccgttgcacgcgggggcagcaatggagggtctaacgtgggaatggaggacggcgaacgccctcgacgacgccgtcatgggagagcccagcagcaagataagcctccgcgcttccggagattaaagcaggagagggagaacgccgccaggggcagcgagggtaagccttccctcacgttgcctgcttccgcccctggccctgaggaggccctcacaacggtgacagtggctcctgctccgagaagggccgctgctaaatcccctgatctgtcaaatcaaaatagcgatcaggcaaacgaagagtgggaaactgcttccgaatcaagcgacttcacaagcgagcgaaggggcgacaaagaggccccacctccagtcctccttacacctaaggccgtcgggacccccggaggtgggggtggaggcgccgtgccaggcatctcagctatgagtaggggagaccttagtcagcgagcgaaagatctgtccaaacgcagtttctctagtcaaagacccggaatggagagacagaatcgcaggccaggcccgggaggaaaggcaggctcctcaggctcctcttccggtggcggcggcgggggacctggtgggcgaaccgggcctggccggggcgacaaacggagctggccgagtccaaaaaatcggtcaagacctcctgaagagaggccacctggcctgcctctcccacctcccccgccaagtagttctgccgtgttccggctggaccaggtgatccacagtaatcctgccggcatccagcaggccttggctcagctctcttcaaggcaggggtcagtcacagcacctgggggtcacccgaggcataagccgggccctccccaggctccgcagggccccagcccacggccccccaccagatacgagccacagcgggtgaattccggtctttcaagcgacccccacttcgaggagcctgggcccatggtgaggggcgtggggggaacaccaagagacagtgccggggtctcacccttccctccaaaaagaagggaaaggcccccacgaaagcctgaattgctgcaggaggaatctttaccgcctccccacagttctggtttcctgggaagtaagccggaggggccgggcccccaggcagagtcccgggatacgggcactgaggcacttacgccgcacatttggaaccgcctgcacactgccacatctaggaaatcctatcgtccttcgagcatggaaccatggatggagcctctttccccttttgaagacgttgccgggaccgagatgagtcagtctgatagcggcgttgatctgagcggtgacagtcaggtctctagcggcccgtgtagtcaaaggagcagccccgatggcgggcttaagggggctgccgagggcccaccgaagagaccgggcggctcttcacctttgaatgctgtgccctgtgaagggccaccaggaagtgaaccacctaggcgccctccccccgccccgcacgatggagatcggaaggagctcccgcgggagcagccactgccgcccggcccaattggcacggagcgttcgcagagaactgatcggggcactgaaccaggacccatccggcctagccaccggcctggtcctcccgtccagtttggaacttctgacaaggattctgacctcaggctcgtcgttggtgacagcctcaaggcagaaaaagagttaacagcaagtgtgacagaggctattcctgtgtctcgggactgggagctgctgccctcggccgccgcgtctgctgagccacaatcaaagaaccttgattcaggtcactgtgtgcctgaaccttcctcctccgggcagaggctgtaccctgaagtgttttatgggtccgccggaccatccagctcccagatttctggaggacacggactctcaatcaccagtaagcagtggaggcgcccggggaccccctccttgcacccatatcggtcgcagcctctctatcttccacctggccctgcgcccccaagcgcactgctgtctggcgtcgcactgaagggacagtttctcgatttctctactatgcaggctacagaattaggaaaacttcccgctggcggcgtactttatcctccccccagtttcctgtattcacccgctttttgcccaagcccactgcccgacacatctcttcttcaggtgcgtcaggatcttccctctccatcagatttctattctaccccactccaaccaggaggacaatcaggatttttaccaagcggtgctccggcccagcagatgctgctgcctatggtggattctcagctgcccgtcgttaacttcgggagtctccctcctgcacccccacctgctcctccccccctgtctttactacctgtgggaccagccctgcaaccccccagtctagctgtgagaccaccaccagcccccgcaacccgtgtgttaccgtcccctgcacgaccattccctgcaagtttaggccgagctgagctacaccccgtcgaactcaagccctttcaggactatcaaaagcttagctctaatctgggggggccaggctcctctcgcacgccccctacaggaagatcgttctcaggactgaactcccgcctcaaagccaccccatccacctactctggagtcttccgaacacagcgagttgatttgtaccagcaagcgtccccacccgatgctctccgctggatcccaaaaccatgggaacgcacggggccaccccctagagagggacccagtagacgggcagaggaacctggttcgaggggagacaaggaacctggcctgcctccaccacgatag

SEQ ID NO: 200856 - DNA, 4149 bp, synthetic construct
  misc_feature 1..4149: note = Description of Artificial Sequence: Synthetic coding sequence
  source 1..4149: mol_type = other DNA
atgctgcgggagcggggcaccccccccgtggaccccaagctggcctgggtgggcgatgttttcacagccacaccagcagagccccgaccattgacttcccctctcagacaggccgctgacgaagatgacaaagggatgagatcagaaactccaccggtcccacccccaccgccttacctcgccagttacccaggcttccccgagaatggcgctcctggacctcccattagtcgtttcccattagaggagccaggaccccgacccctcccatggccacccgggtctgatgaagtggcgaagatccagacgcctcctcctaagaaggagccaccaaaagaggaaaccgcccagttgactggccctgaggcagggagaaagcccgccaggggagtgggatctggcggacagggccctccccccccccggagagagtccagaaccgaaactcgctggggtcccagaccaggtagctctcggagaggaatacctcctgaggagcctggcgcccctcccaggagagccggccccatcaaaaaaccgcctccccccacaaaggtcgaagagttgcccccaaaaccccttgagcagggagacgagacacctaagcccccaaaacccgatcctctgaaaattaccaagggtaagttgggaggtcctaaagagaccccacctaatggcaatctatctcctgcgccacggcttagacgagattattcctacgaacgagttggacctacttcctgtagggggagaggcagaggtgagtacttcgctcgtggacgcgggttccgtggcacttatggcgggcgtgggcgaggcgccagatccagggaattcaggtcctaccgggaattccggggcgacgacggccggggcggcgggacaggtggccccaaccatccacctgctccacgggggcgaaccgcttcggagacccgatcagaggggtctgaatatgaagaaatcccaaaacgacgcagacagaggggttccgaaaccggaagcgagactcacgagtctgatctcgcaccttctgacaaggaagctccaacacccaaagagggcactctgacacaagtgccactggcacctcctccccccggagcaccaccgagtcctgcacccgctcgctttaccgcgagaggtggtcgtgtgtttacaccccgaggcgtgccctcacggcgcggaagaggaggaggcagacctcccccccaggtgtgtcccggctggagcccgccagctaagagtttggctcctaaaaaacctcccacaggccctctacccccatccaaggagccgctcaaggaaaaactcattcccggccccttaagccccgttgcgcgcggcggaagtaacggtggcagtaacgttgggatggaggacggagagagacccagacggagaagacacggcagagcgcaacagcaggacaagccaccccgctttcggcggctgaagcaggaacgggagaatgctgcacgtggatcagagggtaagccctctctgactctaccagccagcgccccagggcctgaggaagctctgaccaccgtaacagtggccccagccccccgccgagctgctgccaaatctcctgacttgtctaaccaaaactccgaccaggcaaatgaagagtgggaaaccgcatctgagtcctccgacttcactagtgaacgacgaggagataaagaagccccccctcccgttctcctgactcccaaggcagtcggaacaccggggggtgggggaggaggtgcagtgccagggatctcagccatgtctcgcggcgacttgagtcagcgagccaaagatcttagcaaacgatcattcagcagtcagcggcccgggatggaacggcagaaccggcggcccgggcccggcggaaaagcagggagttccggctccagtagcggcggcggcggcgggggaccagggggccgcaccggccctggcaggggcgacaaaaggagctggccctcccctaagaaccgcagtagaccgcctgaggaaagacccccgggattgcctctccctccaccgccaccaagctcctctgctgtgttcaggttagatcaggttattcatagcaatccagccggaattcagcaggccttggcacagctgagctctcgccagggatccgtgaccgccccagggggacacccccgtcataagccaggacctcctcaagcacctcaggggccttctccaaggccgccaactcggtatgaaccacagagggtgaatagtgggctgtctagcgacccccacttcgaagagcctggtcctatggtccggggtgtcggcggtacccccagggacagcgctggggttagtccctttccacctaagcgtcgcgagaggcctccacgaaagcctgaactcctacaggaggagagcctgcctcctccacactcctccgggttcctagggtctaagccagaaggaccaggaccccaagccgagagccgggacacaggcaccgaggccctaaccccacatatttggaacaggctgcatacagcaacgtcaaggaagtcatacaggcctagctctatggaaccatggatggagccactaagcccctttgaggacgtggctggaacggaaatgtcccagagcgatagtggggtggatctgagcggagatagtcaagtgagcagcggtccctgtagtcagcggagctctcccgacggaggactgaagggtgctgccgagggccccccgaagcgacctggcggaagtagtcccctgaacgcagtgccatgcgagggaccccctggcagcgagcctcctcgaaggcccccacccgcacctcacgacggagaccgcaaggagctcccaagggaacaacccctacctcccggcccgattggcacagagaggagccagcggaccgaccgcggaaccgagcccggcccgataaggccctcacatagacctggcccccctgtgcaatttggcacaagtgataaggactccgatctcagattggtcgttggcgacagcctgaaggctgagaaagagctgacagcatctgtgacagaagcgatccctgtctctcgggactgggagctccttccctctgccgcggcaagcgccgagccgcagtctaaaaatctcgactccgggcactgtgtcccagaaccctcctcctccggacagcgcctgtatccagaagtgttttacgggtccgctggcccaagtagcagccagatctctggaggtgcgatggactctcagttgcatcctaattcaggtggattccgccctgggacccctagccttcatccgtatagaagccagcccctgtacctgccccctgggcctgcccctccgtcagctctactcagtggcgtggccttaaagggccagttccttgactttagcacaatgcaggccacggagttggggaagctgccggcgggcggtgtgctgtacccgcctccatcatttctgtattctcccgctttttgcccatcacctcttccagacactagtctcctacaggtcagacaggacctgccttctccgtcagacttttactctacaccattgcagcctggcgggcaatccggatttcttccatccggtgctcctgcccagcaaatgctgctgccaatggtggacagccagcttccagtcgtgaactttggatccctgccccctgcgccccccccagctccaccacccctgtccctgctcccagttggtcccgccctgcagcctccttctttggccgtccggcctccccccgctcccgccaccagggttttgcctagtcccgcccgcccttttccagcaagtcttgggagagccgagttacatcctgtggagctgaaaccatttcaagattatcagaagctctcatccaacctcggagggcctggctcctccagaacacccccaacgggtaggtcgttcagcggactgaactccaggttgaaggccaccccatcgacatattcgggggtcttccgcacacaaagggtggacttgtatcaacaagcatcccccccagatgccctccggtggattcccaagccatgggagaggactggcccgccccctagagagggacctagtaggcgggccgaggaaccgggctctcggggcgataaagaacccggtttacctccgcctcgatag

SEQ ID NO: 200857 - DNA, 4149 bp, synthetic construct
  misc_feature 1..4149: note = Description of Artificial Sequence: Synthetic coding sequence
  source 1..4149: mol_type = other DNA
atgctgcgggagcggggcaccccccccgtggaccccaagctggcctgggtgggggacgtgttcacagccacccctgccgagcccaggcctctgacctcccctcttcggcaggccgccgatgaagatgataaaggcatgaggtcagaaaccccacccgtgcctccccctccaccttatctcgcgagttaccctggcttccctgaaaacggagctcctggccccccaatctcccgatttccactcgaggagcccggccccagacctctgccatggcctccagggtcagacgaggtggccaaaattcagaccccacctcccaagaaagagccccctaaggaagagactgcccagttgactggtcccgaagccggtcgtaaaccggccagaggtgtggggtcaggaggtcaggggccccctccaccccgaagggaatctcgaaccgagacaagatggggcccccggcctggctccagtcgacgtggaattccacctgaggagccaggagcacctccgcggagggccgggcccataaaaaaacctcctcctccaacaaaagtagaggagctcccccctaagcccctcgaacagggcgacgagacacccaaaccgcccaaacctgatccactcaaaatcaccaaagggaagttaggcggacctaaggagacacctcccaacggcaacctgtcccccgctccccgtctacggagagattactcttacgaacgggtgggcccgacaagttgtcgcggtagggggcggggtgagtatttcgcccgtgggcgtgggttcagaggcacatacggtggacggggacgtggggctcgtagccgcgaatttcggtcttatcgcgaatttcgtggagacgatggacgtggagggggaacaggcgggcctaatcatccccctgctccacgaggcaggacagccagtgagacacggtccgaaggtagcgaatacgaggaaattcccaagaggcgaaggcagcgggggtccgagacgggctcagagacgcacgaatcagacctggctccatctgacaaggaagctccaacaccaaaggagggaactttaactcaagtgcctctggctccaccgcctccaggcgcccccccgtctccagctcccgctcgcttcaccgcccgaggtggaagagtgttcaccccgcgaggcgttcccagtcgtcgaggccgaggcggtggacgtccccctcctcaggtgtgccccggttggagcccacccgcgaaatccctcgctccaaagaagccacccaccgggcccctcccccccagtaaggagcccctgaaggagaaacttattcctggtccactgtctcctgtggcccgtgggggatctaatgggggatcgaacgtcgggatggaagacggagaaaggcctcggcgcaggagacatgggcgcgcccagcagcaagacaagccacctcgcttcagacggttgaagcaagagagggaaaacgcggcgagggggtccgaagggaaaccatccctgacccttcccgccagcgctccgggtcccgaggaggcccttactactgtgactgtggctccagcgccgcgcagagcagcagctaagtctccagacctgagcaatcagaacagtgatcaggcaaacgaggaatgggaaaccgctagtgagagttctgatttcacaagtgagagacggggagataaggaagctccgccgcccgtcttactcacaccaaaggcggtcgggactcctggtggcggtggaggaggagcagtgccagggatcagtgctatgagtaggggcgatctgtctcagagggctaaagacctttccaagcggtcattttcatcccagcgcccaggcatggaacggcagaatagacgccctggtcctggaggcaaagccggatcctctggcagttcatctggggggggaggggggggacctggaggcagaactggtccaggacggggcgataaaaggtcgtggccaagtcccaagaaccggagcaggcctcccgaggagagacctcccggactcccattaccgcctcccccaccgtctagctccgcggtctttagattggaccaagttattcactcgaacccagctggcatccagcaggccctcgcccagctttccagccggcagggatccgttacagcacctggtgggcacccacgacataaacccggcccgccacaggccccacagggccctagtcccagaccccccactcgatacgaaccgcaaagagtgaactccgggctctcctctgaccctcactttgaggaaccaggccccatggtccggggtgtagggggaactccccgtgatagtgccggagtcagccctttcccacccaagagaagagaacgtcccccacgaaaacctgagctgctccaggaggagtcactgcctccaccccattcctccggttttcttggaagcaagcctgaggggccaggaccccaggccgaatcacgggacactggaactgaagccttgactccccatatatggaaccgcctgcataccgcgacttcccgcaagagctaccgcccaagctccatggagccttggatggaacctctgagcccattcgaggatgtagccggcacggagatgtctcagtctgattcgggtgtagacttgtccggagactcacaggtgagttccggaccatgctcacagagatcttcacctgacggtggactgaaaggagctgcagagggccccccaaaacgcccaggtggctcatccccgctcaacgcagtgccctgcgaagggccaccaggatccgaacccccaagacgtccacccccggcacctcacgacggcgaccgaaaagagcttccaagagaacagcccttaccccccggcccaatcggtactgagagatcacagcggaccgaccggggtacagaacccggcccaattcgtccttcccaccgtccaggtcctcccgtgcagttcggcacaagcgataaggactctgatctacggctagtggtgggtgattcccttaaggctgagaaggagcttactgcctctgtaaccgaggccatccctgtttcaagggattgggaactgctgcccagtgccgcagcaagtgcagaacctcagtcaaaaaacctggattccggacactgcgtccccgagcccagtagttctggacagcgattgtacccagaggtcttttacggtagcgcgggcccaagttcctctcagatctctggcggggcaatggacagccaattgcaccctaactctggcgggtttagacccggcactccttccttacacccataccggtcccagcctttgtacctcccacctggccctgcccctccaagcgcgctcctttcgggcgtggcgttgaaaggtcagtttctggactttagcacaatgcaggctactgaattgggtaagctccctgccggcggggttttatatccaccaccctcctttctgtactcgcctgccttctgtcctagtcctctccctgatacctcgctactgcaggtgcggcaggacctgcccagccctagcgacttttacagtactcctctgcaaccgggtgggcagtccggctttctgccgtcgggagcaccagcacagcagatgttacttccaatggtggatagtcagctgccagtagtgaacttcggctctctcccacctgcacccccgccggcccctccgccactctctctcttgccggtgggtccggccctgcagccaccatcactggccgtgcgacccccccccgctccagctacgagggtgctgccaagcccggctaggcccttccctgctagtttgggccgtgctgaactacaccccgttgaactcaagcctttccaggattaccagaaactgtcttcgaacctaggcggccctggatcttctagaactccaccgactggacggtcattctcggggctgaactcacgtctgaaagcgacaccaagcacatacagtggagtcttccggacccaacgggtggacctctaccagcaggcttccccccctgatgcgcttaggtggattcccaagccatgggaacggaccggaccacccccgagggaaggcccttccaggcgcgccgaagagccggggagccgaggcgataaggagccaggacttccccctcctcgctag

SEQ ID NO: 200858 - DNA, 6450 bp, synthetic construct
  misc_feature 1..6450: note = Description of Artificial Sequence: Synthetic coding sequence
  source 1..6450: mol_type = other DNA
atgagcgaccggagcggccccaccgccaagggcaaggacggcaagaagtactccagccttaacctctttgatacctacaaaggaaagtcgctcgagattcaaaaacctgcagtggctcctaggcacggactccaaagtcttggaaaagtcgccatagcccgcagaatgcctcctcccgcaaacctgccatccctgaaggcggagaataaagggaacgatccgaacgtgtccttggtaccgaaggacggaactggctgggcatccaaacaggagcagagtgacccaaaaagttctgatgcctccacagctcagccacctgaaagccagcctctacctgcatctcagacgcctgcttccaaccaaccaaagcggcctcccgcagcgccagaaaatacacctttggtgccttcaggggtaaagtcctgggcacaagcgtctgtcacccacggtgcacacggagacggcggacgcgcctcctcattgctaagtcggttttcgcgggaggagtttcccaccttgcaggccgctggcgatcaggacaaggccgccaaagagcgcgaaagcgcagagcagagcagcggacctggccccagtttgcgacctcagaatagcacaacttggagagatggggggggccggggaccagatgagctggagggtcccgacagcaaacttcatcatgggcacgatccacgagggggtcttcagccctctggaccaccgcagttccccccatacagaggcatgatgccacccttcatgtaccctccgtacttgccatttccccctccctatggaccacaagggccttatcgatatcccacacccgatggccctagtcgcttcccgagggttgccgggccccgtggctccggcccccccatgcggcttgtcgagcctgtggggaggccttctatcctgaaggaagacaatctgaaagaattcgatcaactggaccaagagaatgatgacggctgggctggagctcacgaagaggtcgactacaccgagaagctgaagttttccgacgaagaggacggccgcgatagcgatgaagaaggggccgagggccatcgcgacagccagtccgcttcaggtgaagaaagaccacccgaagccgatggcaaaaagggaaactctcccaacagcgagccacccactcccaagacagcctgggctgagacaagcagacctccggagacagaaccgggcccacctgctccaaagcctcccctaccccccccacatcggggtccagctggaaattggggtccgccgggggactatcctgatcgggggggacctccctgcaagccccccgcacccgaagatgaagacgaagcatggagacaaagaagaaaacagtcttccagcgaaatctcactcgctgttgagcgggctcggcgaagaagagaagaggaggagcgtagaatgcaagaggaacgccgggccgcgtgcgctgagaaactgaagcgtttagatgagaagtttggcgctcccgacaagagactgaaggctgagccagccgcccccccggccgccccatccacaccagctccaccacccgcagttcctaaagagctccctgctcccccagccccacctcccgcctcggctccgacaccagagaaggaacccgaagagcctgcacaagccccgccagctcaatctacccctacccctggggtcgccgcggcccccactctggtgtcaggaggtggatcaacttcttcaacctcatctgggtcattcgaagcctcacccgttgagccccaactccctagcaaagaagggcctgagccccccgaggaagtgcctcctccaacaacaccacctgtgccaaaggtggaacctaaaggtgatggtataggccccacaaggcagccaccctcccaggggctgggttatccaaagtaccagaagtcactacccccccggttccagaggcagcagcaggagcaacttctgaagcagcagcaacagcaccagtggcagcaacatcagcagggctctgccccacctacccccgttcccccgagtcccccccaacccgtaacgctgggggccgttcccgcccctcaggcccccccccctccacctaaagcgttgtaccccggcgcgctgggccgccctccaccaatgccgcccatgaactttgatccgaggtggatgatgatcccgccttatgtcgacccacggctgttgcaggggcggccaccacttgatttctaccccccgggcgtgcatccatccggactggtccctcgggaaagaagcgattcaggcgggtccagctcggaaccttttgaccggcacgcacccgcaatgctgcgggagaggggaacgccacctgtggatcccaagctggcatgggtcggtgacgtctttacagccacccccgctgaacccaggccactcacctcccctttacgccaagcagctgacgaggatgacaaaggcatgagaagcgaaacccctcctgtccctcccccaccaccctatctggcttcttacccagggttccctgagaatggtgccccaggcccacccatctccagattccccttggaagagccaggacctagacccctgccttggccacctggaagtgatgaggtggcaaagatccagacccccccacccaagaaagagcctcctaaggaggaaacagcccaactgacaggccccgaggccgggagaaagcctgcacgaggcgtcggttccggtggtcagggacctcccccacctcggagggaatcaagaactgagactagatggggaccgcgacccggctcttcgcggcgcgggatccctcccgaagagcccggtgcccctccacggagggcaggccccataaagaagccaccaccccctaccaaagtggaagagctcccgccaaagccgctagagcagggtgatgagactcctaagcccccaaagcccgatccgttgaagatcacaaaaggcaaacttgggggacccaaggagacaccgccgaacgggaatcttagcccagcgcctagactgcgccgagattatagttacgaacgggtcggacctaccagctgccgcggaaggggaaggggggagtattttgcgcgcggaagaggcttccgtgggacctacggagggagaggacggggcgcagctggtaattctgcagttacagagtcgttcgaggagatgatgggagtggaagtagggcagggagaccagaccacccttctcctgcccgaggcagctctacctgcacgccatggcgctcgggtacaatcaatgcgtaagagtccatctggcgccggtagcggcgcccagaagcaagctgcccggccaatgagagtcatttggctcttgcagaccaggcgtcttccgcacccccgaagggaacatagcccccgttctcgtagcccaacaacacgcagtcccacctttcccgcgcccgcgagatttacccccggagtgggcgagagttctctccccgaggggattagtcctggcccaagaaggcgcgagccccctcaggtttgtcccggctggtccccccccgccaagagtttagcaccaaaaaagccacccaccggccccctgccaccatcaaaggaacccctaaaagaaaaactgatccctggcccgctgtcacccgttgcaaggggagggtcaaacgggggcagcaatgtgggcatggaggacggagagcgtccacgtagacgtcgacacggtcgggcacagcagcaggataagccgcctagattcagaagattgaagcaggaaagggagaatgctgctagagggtctgaaggtaagccgagcctcaccttgccagcaagtgctccagggccggaagaagccctgacaacagtcaccgtcgcccccgccccaaggagggcagctgctaaatctcctgatctctccaaccagaacagtgaccaagctaacgaagaatgggaaaccgcctccgagagctcagattttacctctgaacgccggggcgacaaagaagcgcctcccccagtccttctgaccccaaaggctgttggaacccctggcggcggcggaggcggcgctgttcccggcattagcgcaatgtcgaggggcgacctgagccagcgcgccaaggacctgtccaagaggtcttttagttctcagagacctggtatggagcgccaaaatcggcggcccggacccggaggaaaagccggtagctccggtagttcttcaggagggggaggggggggccccgggggaaggacgggacctggaagaggggataagagatcttggccatcccccaaaaatcgaagcagacccccagaggaacggccaccgggtctgcccctgccgcccccccctccatcttcctccgccgtctttcggctggatcaggtcatccactcaaacccagccggaattcagcaggccctcgctcagttgtcttctaggcagggtagcgtcactgcacccggagggcacccccgccacaaaccaggtccaccccaagcgcctcaggggccttcgcctagaccaccaacccgctacgagccgcaacgggtcaattcaggccttagcagcgatccgcattttgaggaaccagggcctatggttcgcggcgtcggtggaacgcccagggatagcgccggagtaagcccctttccgcctaaaaggcgtgaacgtccaccccgcaagccagagctcctgcaggaagagagtttacctccaccgcactcaagtgggtttctcggatcaaaacctgagggcccagggccacaggctgagtcaagagacactgggaccgaggctctaaccccacacatctggaatagactgcacaccgccacctcacgaaagagctataggccatcaagtatggagccatggatggaaccgctttcacctttcgaggacgtagccggtactgagatgagtcagtccgacagcggcgtagatctgtccggggactcccaggtgtccagtggaccctgcagccagagatcttcgcccgatggtggtctgaagggggccgcagaggggcctcctaagcgaccagggggttccagcccattaaacgcggtgccatgtgaggggccaccagggtctgagccccctagacgcccaccgcctgcacctcacgatggcgatcggaaggaattgccgagggagcaaccactcccgcctggtccaatcgggactgaacggtcccaacacaccgaccgaggcaccgagcccgggcccatccggccctcacacagacctggcccaccagtccagttcggaacctctgacaaagacagtgacctccgactcgtcgttggtgatagcctgaaagccgaaaaggaactcactgcctctgtgacagaggcaatccccgtaagcagagattgggagctgctacccagtgccgccgcttccgctgagcctcagtccaaaaacttggattccggacactgtgtgcccgaacctagctcaagcggacaacgactttatcccgaagttttttacggaagcgcggggccgagctcttctcagatctcaggtgggcacggattgtctgtaacttctaagcaatggcggcgcccagggaccccatcccttcatccctataggagccagcctttatatctgccgcctgggcctgcaccaccctccgccctgctgagtggggtggccctgaagggccagttccttgatttttccaccatgcaagctaccgagctcggcaagctgcccgcaggaggtgtcttataccctccacctagcttcctgtattcccctgcattctgtcccagcccactacctgacacgagcctgttgcaggtcaggcaagaccttccttctccaagtgacttctattccaccccactccaacctggggggcagtctggtttcttgcccagcggagctcctgcacagcagatgctacttccaatggtagatagccagctccctgtagtgaactttggctccctccctcccgcacctccacctgcacctccaagtctgtcgctgctgcccgtggggcccgcccttcaacccccctccctggccgtgaggccaccccctgcgccagccacacgggttctgccatctccggccaggccattccccgcatccctgggccgcgccgagcttcatccggtcgagcttaagcccttccaggattatcagaaattgtcaagcaacctggggggtcccgggagttctaggacgccgcctaccggccggagcttttcaggccttaacagcagacttaaggcaaccccttcaacatatagtggagtcttcagaactcagcgggtggatctgtaccagcaagccagtccacctgacgcgctccgttggatccctaaaccttgggaacgaacggggccacccccccgagaggggccttcacgcagagcagaagagccaggctctcgcggggacaaggaaccgggcctcccccctcctagatag

SEQ ID NO: 200859 - DNA, 4149 bp, synthetic construct
  misc_feature 1..4149: note = Description of Artificial Sequence: Synthetic coding sequence
  source 1..4149: mol_type = other DNA
atgctgcgggagcggggcaccccccccgtggaccccaagctggcctgggtgggagacgtgttcaccgcaacccccgccgaaccacggcctctgaccagccctctcagacaggccgccgatgaagacgacaaaggaatgagaagcgagaccccaccagtacccccccctccgccctacctggcttcttatccaggatttccagagaatggcgcccctggccctccaataagcagatttcctctcgaggagccaggcccacgcccactgccctggccacctgggagcgacgaggtcgccaaaatccagacccctccgcctaagaaggaaccaccgaaagaggaaaccgcgcagctgacaggacccgaggccgggcggaagccagctagaggcgtcggctccgggggtcaaggccctccacccccccgacgggagagtaggacggaaacacggtggggccccagacctggctcctcaaggagggggatacctccggaagaacccggggctcccccaagacgcgctgggccaataaagaaaccacctccaccaacaaaagttgaagagcttcctcctaaaccactggagcagggggacgagacacccaagcctcccaaacccgaccctttgaagatcaccaagggaaagctcggcggccctaaggagacacccccgaatggtaatttaagccccgctccaaggctccgccgggactatagctacgaaagagtcggccctactagctgccgtgggagaggtcgcggcgaatactttgccagggggcggggctttagagggacatacggaggaaggggtagaggcgcacgctctcgcgaatttcgttcttacagggagttccgcggcgacgatggacggggcggcggtactggcggtccaaaccatcccccagctccccgggggaggacagccagcgaaacccggtccgagggttctgaatatgaggagattcctaaacgccgtcgtcagcgaggtagcgaaactggcagcgagacacacgagagcgacctcgccccctccgataaagaagcgccgactccaaaggagggtacactgacgcaggtgcccttagcacccccacctcccggcgctccaccatcacccgcccccgctcgattcacagctcgcggtggcagagtcttcacaccccgaggagtcccaagccgacgaggtaggggtggagggcgaccccctccccaggtttgcccagggtggtcaccacccgccaagtctttagccccgaagaagccaccaactgggccactgcctccaagtaaagagcctttgaaggagaaattgatcccggggcccctttcccccgtggcccgcggcggctcgaatggaggctccaacgttggtatggaagacggagaacgccctcggcgacgacgacatggtcgcgcacagcagcaggataagcccccgcgtttccgtcgcttgaagcaggagcgggaaaatgccgctagaggcagcgagggcaagccttccctgacattgccagcctcggctccaggaccagaggaagccttgaccactgtgactgtggcccccgcccctcgacgggcggccgccaaaagcccggatctgtccaatcagaacagcgaccaagccaatgaagaatgggaaacagccagtgagtcatcagattttacaagcgaacggcgtggggacaaggaggctcccccccctgtcctgctgacaccaaaggccgtggggacgcccggagggggtggaggcggtgcagtacccggaatcagcgctatgagccgtggcgatctgagtcagcgggctaaggaccttagtaaaagatccttcagctcgcagcgaccaggaatggagcgtcagaatcgacgtcccggacccggagggaaagctgggtcttctggctcaagtagtggagggggaggaggcgggcccgggggtcgcaccggccccggaagaggggataagcgaagttggccatctcctaagaacaggtctcgccctccagaagaacgccccccaggcctgccattgccaccacctcccccttctagtagcgccgtgttccgacttgaccaagtgatacactctaatccagctgggattcagcaggcccttgcccagttgtcctctcgccagggctctgtgactgcacccgggggccatcctagacacaaacctgggcctcctcaggctccccagggacctagtccaagacctccaacaagatacgaaccccagagagtgaattctggactctcctctgacccgcactttgaagaaccagggccgatggtaaggggagtaggcggcactcctcgggatagcgccggcgtgtcccctttcccgcctaagcggagagagagacctcctcgtaagcctgagcttttgcaggaggagtccctgccaccacctcacagtagcggcttcctcggcagtaaaccagagggaccaggccctcaggcggagagtagggatacggggacggaggctcttaccccacacatttggaaccggctgcatactgcaaccagcaggaagtcctatcgtccctcatctatggaaccatggatggagccactgtccccctttgaggatgtggccggaaccgaaatgtcacaaagcgactctggggtggacctgtctggcgatagccaggtgagcagtggcccctgtagtcaacgcagttcacccgacgggggtttaaaaggagccgctgaaggaccccctaagcgcccagggggtagttctccgctgaacgccgtcccttgtgagggcccccctggctctgaacccccccgcagaccaccgccagccccacacgacggcgataggaaagagctgccaagggagcaacctctgcccccaggtccgatcggcaccgaaaggtcccagcacaccgaccgcggcactgagcctggacctattcggccctcacacaggcccggccctccagtgcagtttggcacttccgacaaagattcagaccttaggctggttgtcggcgatagcctgaaagctgaaaaagaactgacagccagtgtgaccgaggccatccccgttagccgtgattgggagctgttgccttctgccgccgcctctgccgagcctcagtctaagaacttggacagcgggcattgcgtgccagagccctcatcaagcggccagcggttgtatcccgaggtcttctacggatccgcaggaccaagtagctcccagatctccggcggggccatggattcccagctgcacccaaattccggcggctttcgccccggcactccctcccttcacccgtataggtcccagcccctgtatctcccccccggtccggcgccacccagcgccctgctatccggagtggccctgaaaggacaattcctcgacttcagtacgatgcaggcgacggaactcggcaagctgccagccggaggggttctctatcctcccccttccttcctctatagcccagcgttttgcccttcacctctacctgataccagtctcttacaggtcagacaagatctcccctcgcccagtgacttctactcaactccacttcagcctggcggacagagtggctttttaccttctggagcacccgcgcagcagatgttgctgccaatggtcgactctcagctgcccgtggtgaacttcgggtccttacctcctgcccctcccccagctcccccgtccttatcactcctgccggtaggacccgccctgcagcctccatccttagcagtccgcccgccccccgcccctgccacccgggttctgccatcacccgctagaccattcccagcttctctggggagagccgaactgcatcccgtcgaactgaagcccttccaggactaccagaagctgtcttcaaatcttggcggcccaggctcgtctcgcaccccacctaccggtcgtagctttagtggcctcaatagtagattaaaggccacaccatctacctattctggcgtttttcggacgcagcgcgtcgacctgtaccagcaagccagcccacccgacgccctgcgctggatccctaagccgtgggagagaacaggccctcccccacgcgagggcccttcccgacgcgcagaagagccggggagcagaggcgacaaggagcccggccttccacccccaagatag

SEQ ID NO: 200860 - DNA, 6450 bp, synthetic construct
  misc_feature 1..6450: note = Description of Artificial Sequence: Synthetic coding sequence
  source 1..6450: mol_type = other DNA
atgagcgaccggagcggccccaccgccaagggcaaggacggcaagaagtactcatcgcttaatctctttgacacttacaagggtaaaagtctggagattcagaagccagctgtagctccccgccatggcttgcagagcctgggcaaagtcgccatcgctcgtcggatgccacctccggcaaacttacccagtctgaaagccgagaacaaaggtaatgatcctaatgtgtcacttgtgcctaaagatggcacgggttgggcaagcaagcaggagcagtctgacccaaaatcctccgacgccagtaccgctcaacctcctgagtcccaacccctgcctgctagccaaaccccagcaagtaatcaacctaaaagacctccagcagcacccgaaaataccccattggtgcctagcggagtgaagagttgggctcaggcaagcgtcacgcacggggcccacggggatggggggcgggcatccagcctgctatcacgattcagtcgcgaggagttccctaccctccaggcagcaggcgatcaggacaaagctgccaaagagcgcgaatccgctgaacaatctagtggaccgggcccttctttacggccacagaactctacaacctggagagatggcggtggacgcgggccagacgaactggaggggccagacagtaaacttcaccatggccacgacccccgaggggggcttcagccatcaggccctccgcagtttccaccctaccgcggaatgatgcccccattcatgtatccgccctacctgccgtttcctcctccatatgggccccagggaccctaccggtacccgaccccagatggaccttcacgcttcccgagggtggccggtccccgcggatcagggcccccgatgcgacttgtggaaccagtcggaagacctagcatcctcaaagaggataatctcaaagagtttgatcagttggaccaggagaatgatgacgggtgggccggcgcgcacgaagaggtcgattacacagaaaagcttaagttttcagatgaggaggacgggagggactctgacgaagagggcgccgagggacatagggacagccagtccgcctcgggagaagagagaccacccgaagcggatggcaagaagggcaactctccaaactccgaacctcccactccaaagacagcttgggcagaaaccagcagacctccagagacagagccggggcccccagctcctaagccccctctgcccccccctcatagaggtccggccggcaactggggaccacccggggattaccccgatcgcggcggacctccttgtaaacctccagcaccagaagatgaagatgaagcttggcgccaacggcgtaagcagagcagctctgaaatctccctcgccgtggaaagagcccgcaggagaagggaggaagaggagagaagaatgcaggaagaacgtagagctgcctgtgctgagaagttaaaacggctggacgaaaaattcggtgccccagacaagagattaaaagctgagcctgccgccccacccgccgccccttccacacccgctcctcccccggctgtgccaaaggagctgccagcacctccagcccctccacccgcgtctgctcctacaccggagaaggaacccgaggagcctgctcaagccccccctgcacagtctacacccacacctggagtggcagctgctccgactctggttagcgggggaggctctacttcctccactagctctggaagtttcgaggcctctcccgttgagccacagttaccatcaaaagagggtcccgagcctcccgaagaggtcccaccacctactacaccacctgtgccaaaagttgagcctaaaggcgatgggattggacccactcggcagccaccatcccagggcctgggctatccaaagtatcagaagtcattgccccccaggttccagaggcagcagcaggagcagctcctcaagcagcaacagcagcaccagtggcagcagcatcagcaggggtcagccccccccactccagtacccccatcgccaccccagcctgtcacacttggcgccgtgccggccccccaagccccgccgcctccccctaaggcgctttatcctggcgctctgggcaggccaccccccatgcctccgatgaacttcgaccctcgctggatgatgatcccaccttacgtggatccccgcctgctacaaggccgcccgccactggacttctaccctccaggagtacatccatcaggccttgttcccagagagaggtccgacagcgggggctcaagcagtgagccctttgacagacatgcccctgccatgcttcgcgagcgggggacacctccagtcgatcctaaactggcatgggtgggcgacgtgtttaccgcaactccggccgaaccgagacccttgaccagccctttgcgccaggcagctgatgaagatgataagggaatgaggtctgagacaccacccgtgcccccaccaccaccctacctcgccagttaccctggctttcccgaaaatggggcccctggtccgcctatcagccgcttccctttagaggaaccggggccgcgcccattgccttggccgcctggctccgacgaagttgccaagattcaaacgccaccgccaaagaaagaaccccccaaggaggagaccgctcagttgaccgggcccgaagccggtaggaagccagcgaggggcgtggggtcaggcggccaggggccgcccccacctcgcagagagtctagaaccgagacgaggtggggccctcgccccgggtcttcgcgccggggcatccctcccgaagagcctggagcccccccacgccgagccggcccgattaaaaagccacctccgcccacaaaagtggaagagctgccacctaagccactagaacaaggagatgagacaccaaaaccaccaaagccagatcccctgaaaatcactaaaggcaaactaggtggtcctaaggagacacctcccaacgggaatctgtcccccgccccgcggctgagacgggactactcctacgaacgtgtgggacctacgagctgccgcggacgtggccgtggggagtacttcgcgcgcggtcgaggtttccgggggacctatggtggccgcggaaggggggctgcaggaaactccgccgtaaccgaatcctttgaagaaatgatgggtgttgaggtgggccagggcgaccagaccaccctgctgctcccagaagctgcgctgccagcgaggcacggggctcgggtacagagcatgcgcaagtcgccaagcggcgcaggtagtggggcccagaagcaagccgccagaccgatgagggtgatctggctacttcagactcgccggcttcctcatccaagacgagagcactctccgaggagcagaagtccgacaactagaagcccaaccttcccagccccagctcgtttcacccccggggttggcgaatcctcccttcctgagggaatttctcctggccccaggcggagagagccgccgcaggtctgccccggctggtcacctcctgccaagtcattagctcccaaaaagccccccactggccccttgccgcccagtaaagagccactaaaagagaaactgatacctgggcccctctctcctgtggcccgaggcggcagcaatggggggagcaacgtgggaatggaggatggggagagaccaaggaggcggagacacggtcgagcccaacagcaggacaagccaccacggtttcgccgcctgaagcaggagagagagaacgcagctcgaggaagcgagggcaaacccagcctgacgctgccagcctcagcgcctggtcctgaggaggcccttacaacggtcaccgtcgcccccgctcctcgccgagctgccgccaagtctcctgatctttctaatcaaaactctgaccaggccaacgaagaatgggaaacagcatccgaatcttcagacttcacaagtgagcgtcgaggcgacaaggaggccccgcccccggtgttgttgaccccaaaggctgtggggactccggggggcggcggaggaggcgccgtcccgggaatttccgccatgagccgcggggatctgtctcagagagcgaaagacctgtcaaagagatcattttcatctcagcggccgggcatggaaaggcagaacaggcgccccgggccaggaggcaaagcaggatccagtggatcctctagcggggggggtggcggcggcccggggggtagaacgggcccaggcaggggtgacaagcggtcttggccctctcctaagaatcgctcaagaccccccgaggagagaccaccaggcttgcctctgcctccccctcctccaagctcttctgccgtgttccgccttgaccaggtgattcatagcaatcccgctggtatacagcaggctcttgcacaactgtcctcaaggcaagggtcggttactgctcccggcggtcaccctcgccacaaacctgggcccccacaagcccctcagggtccatcccccagaccacctactcgttatgagccacagcgtgtgaactccggcctctctagcgatccacatttcgaggagcccggacccatggtgagaggtgtggggggtacccctagagactctgccggcgtcagtccgttccctcccaagcgcagggaaaggccccctcggaagcccgagctgctgcaggaggaatcccttccacccccgcactcttccggattcttgggtagcaagccagagggacctggtccacaggctgagagtagggacacaggcacagaggcactcactcctcacatatggaatcgtctgcacaccgccacgagccgcaagtcgtaccgcccttcaagcatggagccttggatggagcccctgagtccattcgaagatgtggccgggacagaaatgtcccagagcgactctggtgtggatcttagcggagactcccaggtatccagcgggccatgctcacagagatcctcacctgacggcgggttgaaaggcgcagctgagggacctcccaagaggccaggaggctcctcccctctgaacgctgtgccttgtgagggacctcccggtagcgagcctcctcgcagaccacctcccgctccccatgatggggatagaaaggaacttcctagagaacaacctcttccacccggcccaattggtaccgagcggagtcaacatactgaccgcgggaccgagccagggcccatacgccccagtcataggccgggcccaccggttcaatttggcacttctgacaaggactccgatttgcggctcgtggtgggtgattccctcaaagcagagaaagaattaactgcatctgtaaccgaggcgataccagtgtcacgagactgggagttgctgcccagtgctgcggcctctgccgagccccagagtaaaaatcttgattctggacattgtgtcccagaaccctcctcctctggccaaagactgtacccagaggtgttttacggttcggctggtccatcctcctcgcagataagcggggggcatggattgagcgtgaccagcaaacagtggaggcggcccggtaccccatcactgcacccataccgaagccaaccattatacctgccccctgggcccgccccacccagcgccctgttgagcggcgttgcgttgaaggggcagttcttggacttcagcaccatgcaagctacagagttgggcaaactgcccgcgggcggcgtgctctacccgcctccttcttttctctattcacctgccttctgtccatctcctctgcctgacacatccttacttcaggtccgccaagacctgcctagcccaagcgacttttattccacccccctgcagcccggaggccaaagcggcttcttgcctagcggtgcaccagcacagcagatgctgctgcccatggtcgactcgcagctgccggtagtgaactttggttccctgccaccagccccacccccggcccctccgagtctatcattactgcccgtcggccccgcgcttcagccgccctccctggctgtgcgccccccaccggccccggcaaccagggtgcttcctagccccgcccgaccatttccggcctccttggggcgagcagaactgcaccccgttgaactgaaacctttccaagactatcagaagctttcttctaatctgggaggccccgggtcatcgcggactcctcccactggccgatcgttcagcggattaaattctagactcaaagctactccaagcacctattccggcgtattccggacacaaagagtggacctgtaccaacaggctagcccacccgacgcactcagatggatccctaaaccatgggagaggaccggacccccaccgcgggaagggccatctcggcgggcagaagagccaggaagtaggggagacaaagagcctggactccccccccctaggtag

SEQ ID NO: 200861 - DNA, 1650 bp, synthetic construct
  misc_feature 1..1650: note = Description of Artificial Sequence: Synthetic coding sequence
  source 1..1650: mol_type = other DNA
atgagcgaccggagcggccccaccgccaagggcaaggacggcaagaaatacagttcactgaatctgttcgatacctacaaaggcaagtctcttgagatccaaaagcctgctgtggctcctaggcacggcctgcaatccctgggcaaagtggcaatcgccaggagaatgccccctccagccaacctcccttccctgaaagctgaaaacaagggcaacgatcctaacgtttccctggttcctaaagacggaacagggtgggctagcaagcaggaacagtctgatccaaaaagttcagacgcctccactgcccagcccccggaatctcagcctttgcccgcaagccagacgcccgcatccaatcaacctaagcgccctcctgcagcacctgaaaatacaccactggtcccgagcggtgttaagtcatgggcgcaggcctcggtgacacatggtgcccatggagatggcggaagagctagctctctgctatcccggttctcacgcgaagaatttccaaccctgcaggcggcaggagatcaagacaaggccgcaaaggagcgtgaatccgccgaacaaagcagtggaccaggcccttcactccgaccacagaactcaacaacatggcgcgacggaggtgggcgcggtcctgacgaactggagggtcctgatagtaaactccaccacggccatgacccaagaggcggcctgcagccatcggggccgccacagttcccaccatacagggggatgatgccaccattcatgtatccaccttatcttcctttcccaccaccctatggaccacagggaccctatcggtatccgaccccagatggacctagcagatttcctcgcgtcgctggtccacggggttccggcccacccatgcggctggttgagcctgttggacggcctagcatcttgaaagaggataatctcaaagagttcgatcagttggatcaggaaaacgacgacggctgggccggggctcacgaggaggtcgattacacagaaaaactgaaattcagcgacgaggaagatggaagggacagtgacgaggaaggcgctgaagggcatcgggactcccagtctgcatcgggagaggagcgaccccccgaggccgacggaaaaaaggggaacagcccaaactccgaaccaccaactcccaaaaccgcttgggcagagacgagtagacctccggaaacagaaccagggccccctgccccgaagcctccacttccacccccacatcggggtccagctggcaactggggtcccccgggcgactatcccgaccgaggcggtcccccttgtaaaccgcctgcacccgaagatgaagacgaggcgtggcgccagaggcggaaacagtccagttcagaaatcagcctcgccgtagagagagcaagacgccggcgcgaagaagaggagcggcggatgcaggaagagcgtcgtgctgcatgcgctgagaaactgaaacgactggacgagaagtttggcgccccggataagcgtctaaaagctgaacctgctgctcccccggcagccccttcaactcccgcccctcctcccgccgcctcggaagtgcctctcatggaggactcccggggccagcagcgtgacccgcctagaggacttgaggcgccccacccatag

SEQ ID NO: 200862 - DNA, 1650 bp, synthetic construct
  misc_feature 1..1650: note = Description of Artificial Sequence: Synthetic coding sequence
  source 1..1650: mol_type = other DNA
atgagcgaccggagcggccccaccgccaagggcaaggacggcaagaaatatagttccctgaatctcttcgatacttataagggtaaatccttggaaattcagaagcccgccgtggctccgcgacacgggctgcagtccttgggcaaagtggccatagcccgtagaatgccgccgccggcaaatctgccgtctctcaaggcagagaacaagggaaacgaccccaatgtatccctggtgccaaaggatggaacgggttgggccagtaaacaggaacagtcagatccaaaatcttcggacgcctccacagcgcaaccacctgagagtcagcctttgccggcctctcagacacccgcgtcgaaccaaccaaaacgcccacccgctgctccagaaaatacaccattggtgccttctggtgtaaaaagttgggcgcaggcctcagtcactcatggcgcccacggggacggaggacgtgctagtagcttattgtccaggttttcccgtgaggagtttcccactctgcaggctgccggagaccaggacaaagctgccaaggagagggagtctgccgagcaatctagtggaccaggcccatccctccgcccccagaattccaccacttggcgtgatgggggcggccgggggccagatgaactggagggccccgatagtaaactgcatcatggacacgacccaaggggtggtctgcagccctcgggacccccacagtttccgccataccgcggcatgatgccgccgttcatgtatccaccataccttcccttcccacctccatatggtccacagggcccttacagatatccgacacctgacggcccaagtaggtttccacgggtagccggcccgaggggttccggcccccccatgcgtcttgttgagcctgttggccggccgagcatactcaaggaagacaacctgaaggagttcgaccagttggatcaggagaacgacgacggttgggccggtgctcacgaagaggttgactatactgagaagctgaagttcagtgacgaggaggacggcagagacagcgatgaggagggggccgagggccaccgcgattctcagtccgctagtggggaagagcggccgcccgaagctgatggcaaaaaaggtaatagtcccaacagtgagccacccacgcctaaaaccgcatgggccgaaacgagtcgacctcctgagactgagcccggtcctcccgcaccgaaaccaccattgcctcccccacataggggtccagccggcaattgggggcctccaggtgactaccctgacagaggcggccccccctgcaagcctcctgcccccgaggacgaggatgaggcctggcgacagcgacggaaacaatcatcatctgagatttccctggccgtggagcgcgctcggcggaggcgcgaagaggaagagaggcgtatgcaggaagagagaagggccgcctgcgcagagaagctcaaaagattggatgagaagttcggggcgcctgacaaacggctaaaggctgagcccgcagctccccctgcagcccctagtacccccgcacccccccctgccgcctcagaagttcctttgatggaagattcccggggtcaacaaagggatcccccacggggattagaggctccccatccttag

SEQ ID NO: 200863 - DNA, 4149 bp, synthetic construct
  misc_feature 1..4149: note = Description of Artificial Sequence: Synthetic coding sequence
  source 1..4149: mol_type = other DNA
atgctgcgggagcggggcaccccccccgtggaccccaagctggcctgggtcggagatgttttcacggccactccagccgaaccgagaccactcaccagcccactcagacaggcagcggacgaagatgataagggtatgagatctgaaacccctccagtcccacctcctcccccatatctggccagctaccccgggttccctgaaaacggcgcccctggaccacctattagccgcttccctctggaggagcctggaccacgcccgctgccttggccaccaggctccgatgaagtcgcaaaaatccaaacacctccacccaagaaagaaccccccaaggaggagaccgcccagctaaccggaccagaggccggcagaaaaccagcaaggggcgtcgggtcaggaggacagggtccaccccccccgagacgagaatcacgaaccgagactagatgggggcctcgcccagggtcctctcgccggggcatccctcccgaggagcctggggctcccccacggcgcgccggaccgattaagaagcctcctccccccacaaaggtggaggaattgccgccaaagccgctggagcaaggggatgagacacctaaaccgccgaaacctgatccgttgaagattactaaaggtaaactggggggccctaaggagacaccgccgaatggaaacctgtctccagccccacgacttcggagggactattcatatgagagagtaggccctacatcctgtaggggtagggggcggggagagtactttgcaaggggaagaggcttccgtgggacatatggcggacgcggtaggggtgccaggagcagggagttcaggtcttatcgggagtttcgcggcgatgacgggagaggcggcggcactggaggacccaaccatccccctgcacctcgaggtcgaacagcctctgaaaccagaagcgagggcagcgaatacgaagagataccaaagcgacggaggcaaagggggtccgagaccggatctgaaacccatgaaagtgacttggccccatctgacaaggaggcgccaacacccaaggagggcactctaacacaggtgcctctcgcgcctccaccgccaggtgctcccccctctccggcccctgctcgattcactgccagaggaggtcgggtgttcacacctcgaggcgtgccctcccgcaggggccgtggcggcggccgcccgccacctcaggtgtgccccggctggagcccaccggccaagagcctggctcccaaaaaaccacctacaggcccgctccctccgtcaaaggagcccctcaaagaaaagctgatccccggcccattgtcgcctgtggccagaggtggatctaacggcggtagcaatgtggggatggaggacggagagcgccctaggcgcagaaggcatgggagggcacaacagcaggacaaaccacctcgctttcgtaggctgaaacaagagcgagaaaacgcagctcggggatccgaagggaagccttccttgaccctccccgcaagtgcacctggcccggaagaggcccttacaacagttaccgtagctccagctccccggcgggcagcggcgaagtcccctgacctcagcaatcaaaattccgaccaagccaacgaggaatgggaaacagcatcagaatcctccgatttcacttcagagcggcggggggacaaagaagcccccccaccagtcttgcttaccccaaaagccgttggcaccccgggagggggaggcggtggtgctgtgccaggaatctccgccatgtcgcggggggatctctcccagcgcgctaaagaccttagtaagcgctcattttccagccagcgcccaggcatggaacgccaaaaccgtagaccagggccaggagggaaggccggatcatcgggcagtagctccggcggcgggggaggcggcccaggaggaaggacaggccccgggcggggcgataagaggtcgtggcccagtccaaaaaaccggagcagaccaccagaggaacggcctcctgggctccctctgccccccccacccccaagctcttcagctgtgttccgactggaccaagtaatacacagtaacccagcaggcattcagcaagccctcgcacaactgtcaagcagacagggatcggttacagcaccaggaggacaccctaggcataaacctggacctccccaggccccgcaggggccatctccgcggccccccacaaggtatgagcctcagagagtaaactccgggctgtctagtgacccccatttcgaggagcccgggcctatggtacgtggggtgggcggcaccccaagagattcagcaggcgtgagcccttttccccccaaaaggcgagaacgcccacctaggaagccagagctgttgcaggaggaatcccttcctccaccccacagttctgggtttctcggctcaaaacccgaagggccgggcccccaggccgaatcccgcgatactggaactgaagcgcttacaccccacatctggaatagattgcatactgccacaagcaggaagagttaccgcccttctagcatggagccctggatggagcccctcagccctttcgaggatgtggctgggactgaaatgtctcaaagcgactctggcgtggacctatccggcgacagtcaggtgagtagtggcccctgttcccagaggtcttcaccagatggagggctaaagggcgcagcggagggtccacctaagcgacctggggggtcttcccctctcaatgccgttccttgtgagggacccccaggttcagagccacccagaaggccacctcctgccccccatgacggggaccgtaaggagttgcccagagaacagcctttacctccgggccccatcggcaccgaacggtcccagcataccgatcgcggtactgagccgggacctatcagaccatcacaccggcccggcccaccagttcagtttggtacatctgacaaggactctgacttaaggttggtagttggcgactccttgaaggcagaaaaagaactcacagcctctgtcacagaggccatacccgtttcccgagattgggaactcctgccaagcgcagcagcctccgccgagccccagagcaagaatctcgatagcggtcactgcgtccctgagccatctagctcgggtcagaggctgtacccagaagttttctatggctccgccgggccctcatcatcacagatctccgggggcgcaatggacagtcagctccatcccaattccggaggttttcgtccggggaccccttccctccatccatacaggagccaaccactctacctgcctccagggcctgccccaccttccgcccttctcagtggggtggcgctgaaggggcagttccttgacttcagtaccatgcaggctaccgagttgggcaagctgcccgctggcggagtgctgtacccaccccctagcttcttgtattcacccgctttttgtcctagccccctaccagacactagcctcctgcaagtgagacaggatttgcccagcccatcggatttctattccacaccccttcagccaggtggccagtccggtttcctgccatccggtgcacccgctcagcagatgctgctgcccatggttgacagccaactgccagtggtcaatttcgggagtttgcctcccgccccgccccctgcccccccgtccctctccctgctccctgttgggccagccctccaaccacctagcctggccgttcgccctccaccagcccccgctactcgagtgcttccgtccccggccaggccattcccggcatccctaggtcgcgcagaacttcatcctgtggaactgaagccgttccaagattaccaaaaactgagcagcaatttaggtgggcccgggtcctcacgaacacccccaactgggcggagtttctctggcctgaattccagactgaaggctactccaagcacttactcaggagtctttcggactcagagggtcgacctttatcagcaggcaagtcctcctgacgcactgaggtggattccaaagccttgggaaaggaccgggccacctccacgggagggaccttcacggcgagcggaggaacccgggtcacgtggcgataaagaacctggactccccccaccaagatag

SEQ ID NO: 200864 - DNA, 984 bp, synthetic construct
  misc_feature 1..984: note = Description of Artificial Sequence: Synthetic coding sequence
  source 1..984: mol_type = other DNA
atgaccgtggtgagcgtgccccagcgggagcccctggtgctgggcggccgcctcgcaccgctcggtttcagctctagaggttactttggtgcgctgcctatggtgacaacagcgccacccccattgccgaggatccctgaccccagggcacttccacccactttattccttccgcacttcttagggggcgacggcccgtgcctgaccccccagccacgtgcgcccgctgcccttcctaacagatccctcgccgttgcaggtggcacccctcgcgccgcgccgaaaaaacggagaaaaaaaaaagttagagcctcccctgccgggcaacttccttctcgatttcatcaataccagcagcaccgcccttccctggaagggggtcggagtcctgctacaggcccgagcggagcccaggaggtgccaggcccagccgccgcgttagcaccatcccctgccgccgccgccggcactgagggggcatcacctgacctagcacctcttaggccggccgccccaggacagactcctcttcgaaaggaagtattgaaaagcaagatggggaaatccgaaaagatcgccttgcctcacggccagctcgtgcacgggatccacctttatgagcagcccaaaattaacagacaaaaatctaaatacaacctccccttgacgaagatcacctcagctaaaagaaacgagaacaacttttggcaagacagcgtctcaagcgaccggatacagaaacaggagaagaagccctttaagaacactgagaacatcaaaaactcacatcttaagaaatccgcattcctcaccgaagtcagtcaaaaagagaattatgctggcgcaaagttcagcgatccccctagtccaagcgtcctgccaaagccaccctcccactggatgggcagcaccgtggaaaatagcaatcaaaatagagaactgatggctgttcacctcaagacattgttgaaggtgcagacctag

SEQ ID NO: 200865 - DNA, 429 bp, synthetic construct
  misc_feature 1..429: note = Description of Artificial Sequence: Synthetic coding sequence
  source 1..429: mol_type = other DNA
atgggcaagagcgagaagatcgccctgccccacggccagctggtgcatgggatccatctttacgaacagcccaaaattaaccgacagaaaagcaagtataacctcccactaacgaaaatcacaagcgcaaaacggaacgagaacaacttctggcaggatagtgtgtctagcgaccggatccagaagcaggagaaaaagccattcaagaataccgagaacattaagaatagccacctgaaaaagtcggctttcctgactgaggtcagccaaaaggagaattacgccggcgccaagttcagcgacccgccatcccctagcgtgctcccaaaaccaccatcccattggatgggctcgacagttgagaactctaaccagaatagagagttgatggccgtgcatttaaagaccttgttgaaggtccagacctag

SEQ ID NO: 200866 - DNA, 429 bp, synthetic construct
  misc_feature 1..429: note = Description of Artificial Sequence: Synthetic coding sequence
  source 1..429: mol_type = other DNA
atgggcaagagcgagaagatcgccctgccccacggccagctggtgcatgggatccatctgtacgagcaacctaagattaaccgtcaaaaatcaaaatacaacctccccctcactaaaattacctcagccaagagaaatgagaataacttttggcaggattcagtgtcttccgacaggatacaaaaacaggaaaagaagcccttcaagaataccgagaacataaagaactcccacctcaagaaaagtgctttcctgaccgaagtgtcacagaaggagaactacgcgggcgcaaagttctccgatccaccatcaccgtcggttctgcctaaacctccctcccactggatggggagcactgtcgaaaactctaaccagaatcgcgagctgatggccgtccacttgaagacccttctaaaggttcaaacctag

SEQ ID NO: 200867 - DNA, 420 bp, synthetic construct
  misc_feature 1..420: note = Description of Artificial Sequence: Synthetic coding sequence
  source 1..420: mol_type = other DNA
atgggcggcggcgagcggtacaacatccccgccccccagagccggaatgtcagcaagaaccagcagcaactgaaccgccaaaaaaccaaggaacagaattcacagatgaaaatcgtccacaaaaagaaagagcggggtcacggctacaactcgtctgcagcagcctggcaggccatgcagaatggaggcaagaacaaaaactttccaaataatcaatcctggaattcctctctttcaggacccagattgctgttcaagtctcaggccaaccagaactacgccggtgccaagttctcagagccccctagtccaagcgtcttgcctaaacctccaagccactgggtcccggtgtcattcaatccgtccgataaggaaatcatgacatttcagctgaaaacccttctaaaggttcaagtgtag

SEQ ID NO: 200868 - DNA, 420 bp, synthetic construct
  misc_feature 1..420: note = Description of Artificial Sequence: Synthetic coding sequence
  source 1..420: mol_type = other DNA
atgggcggcggcgagcggtacaacatccccgccccccagagccggaacgtgagtaaaaatcagcagcaactcaatcggcagaagacaaaggagcagaactcccagatgaagatcgttcacaagaagaaggagcgaggccacgggtataactccagcgccgccgcctggcaggcaatgcagaatggcggcaaaaacaagaatttccccaacaaccagagctggaattcatctctgagcgggcctcgactcctgttcaagtctcaggcaaaccagaactacgccggagctaagttctctgagcccccatccccaagcgtcctgccaaaacccccaagtcactgggttcccgtcagttttaatccttccgataaggagatcatgacgtttcagctgaaaactcttctgaaggttcaagtgtag

SEQ ID NO: 200869 - DNA, 597 bp, synthetic construct
  misc_feature 1..597: note = Description of Artificial Sequence: Synthetic coding sequence
  source 1..597: mol_type = other DNA
atgctgctgatcctgctgagcgtggccctgctggccctgagcagcgctcaaaacctgaatgaagacgtgtcacaggaggagagccctagtctcattgccggtaatccacagggtccctccccgcaggggggcaataaaccgcaaggtccccctcctcccccaggcaagccccagggcccgccgcctcaggggggtaacaaaccccaggggcccccccctcctggtaagccccagggtccccctccgcaaggggataaatcccggtccccccgcagtcccccgggcaaaccgcagggcccacctcctcaggggggcaagccccaaggccctcctccacagggcggcaacaagcctcaggggccacctccaccaggtaagcctcaaggccccccagcacagggtggctctaaatcacagagtgctcgctcgccacctggaaaaccgcagggccccccacaacaggagggaaacaaccctcagggccccccccctccggcaggaggaaacccccagcagcctcaggccccccctgctggccaacctcaggggcccccacgcccaccacagggcgggcggcctagtaggccacctcaatag

SEQ ID NO: 200870 - DNA, 537 bp, synthetic construct
  misc_feature 1..537: note = Description of Artificial Sequence: Synthetic coding sequence
  source 1..537: mol_type = other DNA
atgctgctgatcctgctgagcgtggccctgctggccctgagcagcgcgcagaatctgaacgaagatgtctcccaagaagaaagtccctcgttaatcgcaggcaatccacagggcccgagcccccagggaggcaacaaaccccagggaccacctcctccacctgggaagccacaaggcccaccaccccaaggcggaaataagccacagggacctccacccccgggcaaacctcagggtcccccccctcaaggggacaagagcagaagtcccagatctcctccagggaagccacaaggccctccacctcagggcggcaagcctcagggccctcctgcacagggagggagtaaaagccagtctgctcgcagcccccctgggaaaccacagggaccaccacagcaggaaggcaataacccccagggacccccccccccagcaggaggcaatccacagcagccgcaggctcctccagctggtcagccacaagggccgccccgccccccgcagggaggtcgaccgagcagacctccacagtag

SEQ ID NO: 200871 - DNA, 597 bp, synthetic construct
  misc_feature 1..597: note = Description of Artificial Sequence: Synthetic coding sequence
  source 1..597: mol_type = other DNA
atgctgctgatcctgctgagcgtggccctgctggccctgagcagcgcccagaaccttaacgaagatgtcagtcaggaagaaagtccgagcctgatcgctggaaacccacaaggcccctcgcctcaggggggtaataagcctcagggcccgccccctcctcctgggaagccgcagggtcctcctccccaggggggaaacaagccacaggggccgcctccccctggaaaacctcagggacctcccccacaaggcgacaaaagtaggagccccagatcaccgcccggtaagccccagggcccgccgccacagggggggaagccacagggtcctcccccacagggaggaaacaagcctcaggggcctccaccccctggcaagccccagggtcccccagcgcaggggggctcgaagagccagagtgcgcgttccccccccggcaagccgcagggcccccctcagcaggagggaaataacccgcagggcccccccccaccagccggcgggaatccacaacagccacaagccccacccgcaggccagccgcagggcccacccagacctccccagggagggagaccttcgaggcccccacaatag

SEQ ID NO: 200872 - DNA, 1251 bp, synthetic construct
  misc_feature 1..1251: note = Description of Artificial Sequence: Synthetic coding sequence
  source 1..1251: mol_type = other DNA
atgctgctgatcctgctgagcgtggccctgctggccctgagcagcgcccagaacctgaatgaagacgtgtcgcaggaggagtcgccttccctcatcgccggaaatcctcagggggcaccaccccagggtggtaataagccccagggccctccatcaccaccaggtaaaccccagggacctccgccacaaggcggtaaccagcctcaaggtcctccaccaccccccggcaaaccccaggggccaccaccccaaggcggcaacaaaccacaggggccacccccaccgggcaaacctcagggccctccgccacagggtgataagtctcgcagccctaggtcccctcccggcaaaccgcagggccccccgccgcagggcggaaaccaaccccaaggtccccccccccctccaggcaagccacagggaccgccaccccaaggagggaataaaccccaggggccccccccaccaggtaaacctcaaggccctcccccccaaggcgacaacaaatcaagatcctcgagatcccctcccggaaagccccagggaccacctccgcagggagggaaccagccccaaggtccgccacccccgcctggaaagccgcagggccccccaccacaaggaggcaataagccacaaggacctcctcctcctgggaagcctcagggccctccaccccaaggagacaacaaatcgcagtcggctcgatccccgcctgggaaaccacagggaccaccgccacagggtgggaatcagcctcaagggcctcctccacctcccggcaagccacaaggaccgcctccgcagggcgggaacaaacctcagggcccgcccccaccaggaaagcctcaaggccccccccctcagggtggcagtaagtctcgctctagtcggagccctcccgggaagccccagggcccacccccgcagggagggaatcaaccccaaggcccaccaccacccccaggaaagccccaaggcccgccaccacaaggggggaataaaccccaggggccccctccacccggtaagccacaggggccccctccccagggcggctctaagagcaggtcagcgcggtcaccacccggaaagccccaaggcccccctcagcaggagggaaacaatcctcaagggcccccacccccggccgggggtaatccccagcagccccaggccccccctgccggacaaccccagggaccacctaggccacctcaggggggcagacctagccgccccccccagtag

SEQ ID NO: 200873 - DNA, 744 bp, synthetic construct
  misc_feature 1..744: note = Description of Artificial Sequence: Synthetic coding sequence
  source 1..744: mol_type = other DNA
atgctgctgatcctgctgagcgtggccctgctggccctgagcagcgccgaaagttctagtgaggatgtaagccaagaggagagcctgtttcttatcagcggcaagcccgagggtaggcggccccagggcgggaaccaaccacagagaccaccaccaccaccagggaaaccccagggaccacccccccagggaggcaaccaatctcagggacccccacctccacccggaaagcctgagggacggccccctcaagggggcaatcagagtcaaggtccgccaccacatcccggaaagcccgagaggccgcccccgcagggcggaaatcagagccagggtaccccccctccccccgggaaacccgagagaccccctcctcagggaggcaatcaaagccatcgcccaccaccccccccgggaaagcccgagcggccaccaccccaggggggcaaccagagccaggggccccccccccaccccggaaagcctgaaggcccccccccacaagagggcaataaaagtcggagtgcccgttcccccccgggcaagccccagggcccacctcaacaagaagggaataaaccacagggcccccctccgcccgggaaacctcagggccctccaccagcaggaggaaatccacagcagcctcaggctccacccgctgggaaaccgcagggtcctccaccccctcctcagggaggccgtccaccccgtcccgcgcaggggcaacagccccctcaatag

SEQ ID NO: 200874 - DNA, 744 bp, synthetic construct
  misc_feature 1..744: note = Description of Artificial Sequence: Synthetic coding sequence
  source 1..744: mol_type = other DNA
atgctgctgatcctgctgagcgtggccctgctggccctgagcagcgcggagtcaagctcagaggatgtcagccaagaggagtcccttttcttgatctctggaaaaccagaaggcaggcgcccccagggagggaaccagcctcaacggccacctcctccccctggaaagccacagggtcccccaccccagggaggtaaccagtctcagggtccacctcctcccccaggaaaaccggaaggccgccccccccaaggcggtaaccagtcacaggggccgcctccccatccagggaagccagaacgcccacctccccagggtggtaaccagagccagggaactccaccacctcccgggaaacccgaacgaccgcccccccagggaggcaaccagtctcatcggcccccaccgccccctggcaaacccgaacgacctcctcctcagggtggcaatcaaagtcagggccctccgccgcacccggggaagccggaagggccaccaccccaggagggtaacaaatcacgaagcgcgcgcagtccgccaggcaagccacaagggcctccgcagcaggaaggtaataaaccccagggtccccctccccccggaaagccacaggggcccccccccgcaggtggcaaccctcagcagcctcaggccccccctgccgggaaaccccaggggccccctcctcctcctcagggcggacggccgcctaggccggcccagggccaacagcctccacagtag

SEQ ID NO: 200875 - DNA, 537 bp, synthetic construct
  misc_feature 1..537: note = Description of Artificial Sequence: Synthetic coding sequence
  source 1..537: mol_type = other DNA
atgctgctgatcctgctgagcgtggccctgctggccctgagcagcgccgagagctccagcgaagacgtttcccaggaggagtccctgttcctgatctctggaaaacctgaaggccgacggccacaaggtgggaatcagcctcaaagacctccccccccaccaggtaagccgcagggaccccccccgcagggtggcaatcagagccagggaccccctccccctccagggaagccagagggcagacctccccagggcgggaaccagagccaaggcccccccccccaccctgggaagccagagcggccacccccgcagggtggaaaccaatcacagggcaaaccccaaggaccccctcagcaagaaggaaacaagccccagggcccccccccccccggtaagccccagggtcctccccctgctggcggcaacccccagcaaccccaagcaccccctgcaggcaagccgcagggaccccctcctcctccccagggcgggaggccaccccgtcctgctcaggggcaacagccccctcagtag

SEQ ID NO: 200876 - DNA, 501 bp, synthetic construct
  misc_feature 1..501: note = Description of Artificial Sequence: Synthetic coding sequence
  source 1..501: mol_type = other DNA
atgctgctgatcctgctgagcgtggccctgctggccttcagcagcgcccaggacctgaacgaggacgtttcccaggaagacgtgcctcttgtgatcagtgacggcggtgacagcgagcagttcctcgacgaagagcgacagggtcctcctctggggggacaacagagtcagccctcagccggggacggaaatcaggatgacggaccacaacaaggtcccccacaacagggaggtcagcaacaacagggccctcctccacctcaggggaagccccaaggccccccacagcaagggggtcatcccccaccacctcagggaagaccccaggggcctcctcagcaggggggccatccacgtccgcccaggggaagacctcagggtccaccccagcaaggcgggcaccaacaaggtcccccccccccacctcctggtaaaccacagggacctcccccgcagggcggacgaccccaggggcctccacagggccaatccccccagtag

SEQ ID NO: 200877 - DNA, 291 bp, synthetic construct
  misc_feature 1..291: note = Description of Artificial Sequence: Synthetic coding sequence
  source 1..291: mol_type = other DNA
atgctgctgatcctgctgagcgtggccctgctggccttcagcagcgcccaagatcttgacgaggacgtatctcaagaggacgttccccttgtcatcagcgacggcggcgacagcgaacagttcatcgatgaggaagggcacaaagaccacccaaatcgcgaagccatttctaaggtcttgcctcatcttctgctggaatcaccacgggaccatttgcctaagggcgccgcgcacaaagatctgcacaggggtagtctgttatccaacttaggatttaacgacagaaagtag

SEQ ID NO: 200878 - DNA, 501 bp, synthetic construct
  misc_feature 1..501: note = Description of Artificial Sequence: Synthetic coding sequence
  source 1..501: mol_type = other DNA
atgctgctgatcctgctgagcgtggccctgctggccttcagcagcgcccaggatctcgacgaggatgtctctcaggaagatgtccccttggtgatttccgatggcggggacagtgaacagttcatcgatgaggagcggcagggacctccgctgggcggtcagcaaagccaaccttctgccggggacggcaaccagaatgacgggccgcaacagggacccccacaacagggaggacagcaacaacaaggtccgcctcctcctcaaggcaaacctcaaggtcccccacagcagggggggcaccctcccccaccccaggggcggccacagggccctccgcagcagggagggcaccctaggccaccacgaggtcgccctcagggaccacctcagcaaggtgggcaccaacagggcccaccaccccccccacccggcaaaccacagggcccgccccctcagggagggcgtccccagggcccacctcaggggcagagccctcagtag

SEQ ID NO: 200879 - DNA, 501 bp, synthetic construct
  misc_feature 1..501: note = Description of Artificial Sequence: Synthetic coding sequence
  source 1..501: mol_type = other DNA
atgctgctgatcctgctgagcgtggccctgctggccttcagcagcgcacaggacctggatgaggacgtttcccaagaagacgtacctttagttatatccgacggcggcgatagcgagcagtttatagatgaagagcggcagggcccccccctgggaggccagcagagccagcctagtgctggcgacggtaaccagaacgacggtccgcagcaggggccacctcaacaggggggccagcagcaacagggtcctcctcccccccagggaaagccgcaagggcccccccagcaaggaggccaccctccaccgccacagggcagaccacagggtccaccacaacagggcggccacccccggccgccaaggggccggccgcagggacctcctcagcagggcggacaccagcagggcccccccccgccaccccctggtaaacctcagggcccgccgccacagggcgggaggcctcagggcccccctcagggacagtcaccacagtag

SEQ ID NO: 200880 - DNA, 900 bp, synthetic construct
  misc_feature 1..900: note = Description of Artificial Sequence: Synthetic coding sequence
  source 1..900: mol_type = other DNA
atggccgccagcagcagcgagatcagcgagatgaagggcgtggaggagagcccaaaggtgccaggagagggccctgggcatagcgaggccgagactggaccacctcaagtgttggctggggtgcccgaccaacccgaagccccgcagcccgggccaaatacaacagccgccccagtcgatagtggccctaaggccggtctggcccctgagacaacggaaacacccgccggggcatcagagacagcacaagctaccgacctgtctctgtccccaggaggcgaatctaaggccaactgctcccccgaggatccgtgtcaggagactgtgagcaagcccgaagtcagtaaagaggctacagcagatcaagggtccagactggagtccgccgcccccccagagccggcgcctgaacccgctccccagccagaccccaggcctgattctcagccgactccaaaacctgccctgcagccggagctgcccacccaagaggatccaaccccagaaattttatccgagtctgtgggcgaaaaacaggagaacggggcggtggtccctttgcaggccggagatggcgaggaggggccagcccccgagcctcactcccccccctccaagaagtcccctccggctaatggcgcaccccctcgagtcttgcagcaactggtggaagaagatcgcatgcgcagggcccattccggccaccctggctctcctcggggcagcctgtcccgacatccttctagccagctggcagggcctggagtggaggggggtgaaggtactcagaagccaagagactacataatcctggcaatattgtcatgtttctgccctatgtggccagtcaacatcgtagcatttgcgtacgccgttatggtttcacccatgggaccatag

SEQ ID NO: 200881 - DNA, 1023 bp, synthetic construct
  misc_feature 1..1023: note = Description of Artificial Sequence: Synthetic coding sequence
  source 1..1023: mol_type = other DNA
atggccgccagcagcagcgagatcagcgagatgaagggcgtggaggaatcgcccaaagttcccggcgaaggacccggtcacagtgaggccgaaaccgggcctccccaggtactggctggtgtgcccgaccagccagaggccccgcagcccgggcccaacacgacagccgcacccgtggatagcgggcctaaggcaggcctcgcacccgaaactacagagacccctgcaggcgcaagtgagacagcccaggcaaccgacttgagtctctctcctggaggtgagtccaaagcaaactgcagccccgaagacccctgtcaggagactgtgtctaaacctgaagtgagtaaagaggccaccgcggatcagggtagccggctggagtccgcggccccacctgaaccagccccggagccagcaccacagccggacccgagacccgactcccagcccaccccgaaacccgccctacagcctgaactgccaacacaggaggatcccactccagagattctctcggagtctgtcggagagaaacaggaaaacggcgcagtcgtccctcttcaggctggtgacggggaagagggtccagcccctgagcctcactctccaccttcaaagaaatcaccaccagcaaatggggcaccaccacgagtcctgcaacagctcgtggaagaggatcgtatgaggagagcccactcaggccacccaggttcaccacggggaagcctatccagacatccgtcttcccagctcgctggacctggcgttgaaggcggggagggaactcagaaaccacgcgactatatcatactggccattctctcttgtttctgccccatgtggcctgtcaacattgttgcctttgcgtatgccgttatgtcccgcaattctctccagcagggagacgtggatggggctcaacgcctcggccgagtggcaaagctcctgtccattgtggccttggtcggcggcgtgctgatcattatagcctcctgcgtgatcaacttgggggtatacaagtag

SEQ ID NO: 200882 - DNA, 1191 bp, synthetic construct
  misc_feature 1..1191: note = Description of Artificial Sequence: Synthetic coding sequence
  source 1..1191: mol_type = other DNA
atgccccagctgcagttcaaggacgccttctggtgccgggacttcactgcccatactggttacgaggtcttactgcaacgactattggacggcagaaaaatgtgcaaagatatggaggagcttcttaggcagagggcccaggccgaagagaggtacggcaaagagctggtgcagatcgcgcggaaggctggcgggcagacagagatcaatagccttcgagccagcttcgattcacttaaacagcaaatggaaaacgtggggagcagccatattcagttggcgcttactctgcgagaagagctgagatctctggaggaatttagggagcggcagaaagaacaacggaaaaaatatgaagcagtgatggaccgggtccagaagtccaagctctcgctttacaagaaagccatggaatctaagaagacttacgaacagaagtgccgtgacgccgatgatgccgagcaggctttcgaaagaataagcgcaaacggacaccagaaacaagtggagaaatcccagaacaaggccaggcagtgtaaggatagcgctactgaggccgagagagtctacagacagtctattgctcaattagaaaaagtgagagccgagtgggagcaggagcacaggaccacctgcgaggcctttcagctacaggaatttgatcgccttacgatactacgcaatgctctgtgggttcactcaaaccaattgagtatgcagtgcgtcaaagatgacgagctgtacgaggaggtgcggctgaccttggagggctgttccatagatgctgatatagactccttcatccaggccaaatctaccggtacagagccacccggcgaggtcaggctcgctgactcagcggctagccgcttcagcggccttctccacggaagtcctaaaactacgtccctggctgccagcgccgcttctacagaaacactgactccaacccccgagcgcaacgagggcgtctatacagccattgcagttcaagaaatccagggcaaccccgcttctcctgctcaagaatacagggctctatatgattacaccgcccagaacccagatgagctggacttgtccgctggtgacatcctggaagtgattctggaaggggaggatggttggtggaccgttgaaaggaacggacagagggggttcgtgccaggcagttacctggaaaaactctag

SEQ ID NO: 200883 - DNA, 1251 bp, synthetic construct
  misc_feature 1..1251: note = Description of Artificial Sequence: Synthetic coding sequence
  source 1..1251: mol_type = other DNA
atgatgccccagctgcagttcaaggacgccttctggtgccgggacttcactgctcatacaggctatgaagtcctcctgcaaaggctccttgatggccgcaaaatgtgcaaggacatggaggagctccttaggcagcgcgcccaggctgaggagagatacggtaaagagctggtgcaaattgctaggaaggccggcggccaaaccgagatcaacagcttaagggcatcgtttgacagcctgaaacaacaaatggagaatgtcggcagctcgcacatccagctagcacttactcttcgcgaggagttgagatccctggaagagtttagggaacgccagaaggagcaacgcaaaaagtatgaggcggtgatggaccgcgtgcagaagtccaaactgtcactgtataaaaaggccatggagtctaagaagacctacgaacagaagtgcagagatgccgatgacgcagaacaggctttcgagagaatatcggccaacggacaccagaagcaggttgaaaaaagtcaaaataaagcccgacagtgtaaggactctgctacagaggcggaacgtgtgtaccgacagtccattgcacagttggaaaaagttagagcagaatgggagcaagaacatcgcacaacttgtgaagccttccagctacaggaatttgatcgcttgaccattctaagaaatgctctctgggtgcactctaaccaactgagcatgcagtgcgtcaaggacgacgaattgtacgaggaggtgcggttgactctcgaaggatgtagcattgacgcagatatcgacagttttatacaggccaagagcactgggaccgagcctccagctccggtaccgtaccagaattactacgaccgcgaggtgacgccactaactagctcccccggcattcaaccttcgtgtgggatgattaagcggttttcgggactcctgcatgggtctccaaaaactacctcgttagccgcgagtgcggcaagtacagaaacactgactcccaccccagaacgaaacgagggggtgtatacagccattgctgtgcaggaaatccaggggaatccagctagcccggctcaggagtacagggctctctatgattataccgcacaaaatccagatgagcttgatctcagtgcgggggacatcctcgaagtgattctggagggcgaagatggctggtggacagtcgagaggaacgggcagcgcggcttcgtccccgggtcctatctagaaaaactttag

SEQ ID NO: 200884 - DNA, 1605 bp, synthetic construct
  misc_feature 1..1605: note = Description of Artificial Sequence: Synthetic coding sequence
  source 1..1605: mol_type = other DNA
atgatctggtacatcctgatcatcggcatcctgctgccccagagcctggcccatcccgggttcttcacgtctatcgggcaaatgactgatctgatacacacagagaaggatcttgtgacctccctaaaggattatattaaggccgaagaggacaaactggagcaaatcaaaaaatgggctgaaaaactggaccgtctcacgtccactgccacgaaagatcctgaaggttttgtgggtcatccagtgaacgccttcaaattaatgaagcgccttaacaccgaatggtcagaactggagaatctggtgttgaaagatatgtctgacggcttcatcagcaacttgacaatacaacgtcagtactttcccaacgatgaggatcaggttggtgccgcaaaggccctgctccggcttcaggacacttataatctggacactgacacaattagcaaaggtaatctgcccggtgtcaagcacaagagctttttgaccgctgaggactgtttcgagctaggcaaggtggcttatacggaggccgattactatcatacggaactttggatggagcaagcactgagacaactggatgaaggagaaatctctactatcgacaaagtgtctgtgctggactatctctcttacgccgtttatcagcagggggacttggataaggccctgttactgaccaaaaagttgctcgagctagatccagagcaccaacgggccaatggtaacctaaaatattttgaatatatcatggccaaggagaaggatgtaaacaaatccgctagtgatgaccagagcgaccagaagacgacccctaagaagaagggcgtggctgtggactaccttccagagcggcagaaatatgagatgctgtgccgcggagaaggaataaagatgactcctcgccgccagaaaaagctgttttgtagataccacgacgggaatagaaaccctaaatttatcctggcgcctgctaagcaagaggacgaatgggacaagcctaggattatccgctttcatgacattatctctgatgccgagatcgagattgtgaaggatctggctaagcccaggctgtccagagccacggtgcatgacccagagactggcaagctgactacagcacagtaccgcgtgagtaagagcgcctggctctcgggatatgaaaacccagtcgtgtcccgcataaatatgcgaattcaagatctcacaggcctggatgtaagtacagctgaggagttgcaagtggccaactatggcgtgggcgggcaatatgagcctcactttgacttcgcccgtaaagacgagcctgatgctttcaaagagttgggaacgggcaatcgcatcgcaacttggctgttctacatgtccgacgtctccgctgggggcgctacggtgtttcccgaagtgggtgcgtccgtttggcccaagaagggaaccgcagtgttttggtacaacctgttcgccagtggggagggagactattctacacggcatgctgcatgcccagtgctggttggaaacaagtgggtctccaataagtggttgcacgagcgagggcaggagtttcggcgcccctgtaccttatcagagctggaatag

SEQ ID NO: 200885 - DNA, 1605 bp, synthetic construct
  misc_feature 1..1605: note = Description of Artificial Sequence: Synthetic coding sequence
  source 1..1605: mol_type = other DNA
atgatctggtacatcctgatcatcggcatcctgctgccccagagcctggctcatcccggcttttttaccagtattgggcagatgaccgatctcatccatacggagaaggacctggtgacttccctcaaagattacattaaggccgaggaggataagctggaacagattaagaagtgggcggagaagcttgaccgtctcacatcgacagccaccaaggaccccgaggggttcgtgggtcaccccgtgaacgcattcaagctgatgaagagactgaacacagagtggtcagagctcgaaaatttggtgctgaaagacatgtcagacgggtttattagtaacttgacaatccaaagacaatattttcccaatgacgaagaccaagtgggcgccgcgaaggccctgctgcgcctgcaggacacatataaccttgacaccgacaccataagtaagggaaatctccccggtgtgaaacataagagcttcctaaccgctgaggattgcttcgaacttgggaaggtggcatacacagaagctgactactatcacacagaactctggatggaacaggctcttcgccagctggacgaaggcgaaatctcaacaatcgataaggtgagtgtgctcgattacctatcttacgcagtgtaccagcaaggagatctggataaagccctccttctgaccaaaaagttgcttgagctggaccccgaacatcagcgggcaaacggcaatctcaaatactttgagtatatcatggctaaggagaaagacgttaacaaatccgcctccgatgaccagtccgatcagaaaacaactccgaagaagaagggagtggcggtagattatctccctgagagacagaagtatgaaatgctttgccggggagagggaattaaaatgacgcccagacggcagaaaaagcttttctgtcgttatcacgacggcaacaggaatccaaagttcatcctcgcacctgccaaacaggaagacgagtgggacaagccccgaatcatccggttccatgacatcattagtgacgccgagatcgaaattgtcaaggatttggccaagcctcggctgcgccgcgctacaatttcaaaccccatcactggagacctcgagaccgtgcactaccggatttcaaagagcgcatggctttccggctacgagaacccggtggttagtcgcattaacatgagaatccaggacttgacaggcctagatgtaagtacagccgaagagctccaggtggccaactacggggtgggcgggcagtatgaaccacactttgactttgcccgcaaagatgagcctgatgcctttaaagaactcggtactggaaatcgaattgcaacttggcttttctacatgtccgacgtgtcagcaggtggggcaactgtgtttccagaagttggggccagtgtttggccgaaaaaagggacagccgttttttggtacaacttattcgctagcggagaaggcgactatagtaccagacatgcagcctgcccagtgctggttggaaataagtgggtcagcaacaaatggctacacgaaaggggtcaggagtttaggcgcccatgtaccctttcagaactggagtag

SEQ ID NO: 200886 - DNA, 1605 bp, synthetic construct
  misc_feature 1..1605: note = Description of Artificial Sequence: Synthetic coding sequence
  source 1..1605: mol_type = other DNA
atgatctggtacatcctgatcatcggcatcctgctgccccagagcctcgcacaccccggcttttttacgagtatcgggcaaatgactgatctgatccataccgaaaaagatcttgtcacttctctgaaggactatatcaaggccgaagaagacaaactagagcagattaaaaagtgggctgaaaagctcgaccgcctgacaagtaccgccaccaaagatcctgagggctttgtgggccaccccgtcaatgcctttaaactgatgaagagactgaatacagaatggtccgagcttgagaatctggtactgaaggatatgtctgatggcttcatttcgaacctaactattcaacgacagtactttcccaatgatgaagaccaggtaggcgccgcaaaggcgctgctaagactccaggatacttacaatctggacacagacaccatatctaaggggaatttaccaggcgttaagcataagtcttttctgactgccgaggactgttttgaactcggtaaagtagcttataccgaagctgactactaccacaccgagttgtggatggagcaagccctgcgtcagctggatgaaggggagatctccaccattgacaaagtgagcgtcctggactacctctcgtatgccgtttaccagcagggagacctcgacaaggccttgctcctgacaaaaaagttgctggagctcgacccagagcaccagcgagctaacggcaatctgaagtacttcgaatatattatggcaaaagagaaagatgtaaataagagcgcaagtgacgatcaatcggaccagaagactacacctaaaaagaagggagtggctgtggactatctgccagagaggcagaaatatgagatgttatgccggggtgagggaatcaagatgacgcccaggcgccagaagaagcttttttgtcgctaccatgacggcaaccggaacccaaaattcattctcgcaccagccaaacaggaggacgagtgggataagccacgcattatcagatttcacgatattatttcggatgcagaaatagaaattgtgaaagaccttgctaagcctagactttcaagggccaccgtgcacgaccccgagacagggaaattaactaccgcccagtatagggtgagtaagagcgcatggctgtccggctacgaaaatccggtcgtgtcccggataaacatgcgtatccaggacctgaccggccttgacgtgtccacagctgaggagctccaggttgcgaactacggagtgggcggacagtatgaacctcactttgattttgccagaaaggatgagcctgacgcttttaaggaactggggactggaaacagaatcgcaacctggttgttttacatgagcgatgtttcagcaggtggggctactgtgtttcccgaggtcggagcatccgtatggcccaagaaagggacggccgtgttctggtataatctgttcgccagtggggaaggcgattatagtacccggcacgcggcctgtcctgtgcttgtgggcaacaaatgggtgtctaataagtggttgcatgagagaggccaggagtttaggaggccgtgcacattatcagagctcgagtag

SEQ ID NO: 200887 - DNA, 1605 bp, synthetic construct
  misc_feature 1..1605: note = Description of Artificial Sequence: Synthetic coding sequence
  source 1..1605: mol_type = other DNA
atgatctggtacatcctgatcatcggcatcctgctgccccagagcctggctcacccaggtttctttactagcattggacaaatgacagacctcattcatactgaaaaggatctggtcactagtctcaaagactacataaaagccgaggaagataaattggagcagataaaaaaatgggctgagaaactcgaccgtctgacaagcacggcaaccaaagatcccgaaggctttgtcgggcaccctgttaacgcctttaaactgatgaagaggctaaacaccgaatggtctgagctagaaaatctggtcctaaaagatatgtcagacggtttcatctctaatcttacaatccagcgccaatattttccaaacgacgaggatcaagtgggagcggcaaaggccctgttaagactacaggacacatataacctagatacggacaccattagcaagggcaatctcccaggggtaaagcacaagagctttttgacagctgaggactgctttgagctcgggaaagtggcctatactgaggccgactactaccacaccgaactgtggatggagcaggccctccgccagctcgacgaaggcgaaattagcactatcgataaggtgtccgtgctggactatctttcctacgctgtgtatcagcagggggatctcgataaggctttgctactgacaaagaaactccttgagctggacccagagcaccaaagggcgaacggaaacttaaagtattttgagtatatcatggccaaggaaaaagatgtgaacaaatccgctagtgatgatcaatctgaccagaagactacccctaaaaaaaaaggggtcgccgtagactatctcccggagcggcagaagtatgaaatgctctgtcgtggagagggaataaaaatgacgcccagaaggcagaagaagctgttctgcagatatcatgacggcaacagaaaccccaaattcattcttgcccctgcaaaacaggaggacgaatgggataagcctcgtatcatacgctttcatgacatcatttctgacgccgaaattgaaatcgtaaaggatctggccaaacccaggctgcgccgggctacgatctctaaccccatcaccggggacctggaaaccgtgcattacagaatctctaagagtgcatggctgtcaggctatgaaaatccggtagtgtctcgtataaatatgcggattcaagatctcaccggactcgatgtgtctaccgccgaggagctgcaggttgcaaattacggtgtcggaggccaatacgagcctcatttcgacttcgccaggaaggatgagccagacgcgttcaaagagcttggcaccggtaatagaattgcaacttggctgttctatatgtccgatgtgtccgcaggcggagctacagtgtttcctgaagtgggagcctcagtatggcctaagaaagggactgctgtcttttggtacaacttgtttgcatctggggaaggcgactactcaacacggcacgccgcgtgccctgttctggtaggcaataagtgggtctcaaataaatggctccacgagcgcgggcaggagttcaggcggccatgtacactgagcgagttggagtag

SEQ ID NO: 200888 - DNA, 1605 bp, synthetic construct
  misc_feature 1..1605: note = Description of Artificial Sequence: Synthetic coding sequence
  source 1..1605: mol_type = other DNA
atgatctggtacatcctgatcatcggcatcctgctgccccagagcctggcccaccctggattttttacctccattggacaaatgaccgacctcatccacacagagaaggacctggtaacgagtctgaaagattacatcaaagcagaggaggataagcttgaacagattaaaaagtgggcagagaagctggatcggctgacttccacagctacaaaagatcctgagggttttgtagggcaccctgtgaatgcttttaaactgatgaaacgtttaaacaccgagtggtccgagcttgaaaatctcgttttgaaggatatgagtgatggtttcatttctaatttaactatccaacggcagtattttccgaacgacgaagatcaggtcggcgccgccaaggccctgctgagactccaggacacatataacctcgataccgacactattagcaaaggcaatctgcccggcgtgaagcacaaatcatttctgactgccgaagactgctttgagctcgggaaagtggcctacacagaggcagattattatcacacagaactgtggatggagcaagcactgcggcagttagatgaaggtgaaatctcgactatagacaaggtctctgtcttggattacctgagttatgcagtttaccagcagggtgacctcgacaaggccctcctgctgactaaaaagctactggaactggaccccgagcatcagagggctaatggtaatctgaagtacttcgagtatattatggctaaggagaaagacgtgaataagtcagcctcagacgaccagtccgaccaaaagactaccccaaaaaaaaagggggtagcggtggattacctgccagagaggcaaaaatacgagatgctttgcagaggagaaggaatcaagatgaccccacgccgtcagaagaaacttttctgtcggtaccacgacggcaatagaaacccaaaattcattcttgcccctgcaaagcaagaggacgagtgggacaagcctaggattattcggttccacgacattatatccgatgctgagattgaaatagtgaaagacctggccaagccccgtctccgccgggcaaccatcagtaatcccattacaggcgatctagaaactgtccattatagaatatctaagtcagcctggctgtctggctacgagaatcctgtggtttctagaattaatatgaggattcaggatctgaccggactggacgtttccaccgccgaggagcttcaggtagcaaattacggcgtaggtggacagtatgagccacatttcgactttgccagaaaagatgagcccgatgccttcaaagagctgggcacaggaaatagaattgctacttggctgttctacatgagcgacgtcagtgctgggggcgctactgtgttccccgaggtaggtgcttccgtgtggccaaagaaagggaccgccgtcttctggtacaatctgtttgcatctggagagggtgattactctacgaggcatgcggcatgccccgtcctcgtcggaaataagtgggtgtccaataagtggctccacgaaagaggacaagaatttcgcaggccctgcacccttagcgagttggaatag

SEQ ID NO: 200889 - DNA, 1551 bp, synthetic construct
  misc_feature 1..1551: note = Description of Artificial Sequence: Synthetic coding sequence
  source 1..1551: mol_type = other DNA
atgatctggtacatcctgatcatcggcatcctgctgccccagagcctcgctcaccccggatttttcacttccataggccagatgacagaccttatccatacggaaaaggatttagtcacctctttgaaggattacatcaaagccgaggaagacaagctcgaacaaatcaaaaaatgggctgagaaattggaccggctgacatccaccgccaccaaggatcccgaggggtttgtgggccacccggtgaacgccttcaaattaatgaaaagactcaacacggaatggagcgagctcgaaaatcttgttcttaaggacatgtcggatgggttcatcagcaacctgacaatccagagacagtactttcctaacgacgaggatcaagtaggagccgctaaagccctgctgaggctgcaagacacatacaacctcgacacagacaccatctccaaagggaatctccccggggtgaaacataagagtttccttactgcagaagactgcttcgagctcgggaaggtggcctatacggaggccgactactaccatactgaactctggatggaacaggccctgagacagctggacgaaggggagatatcaacaatcgacaaggtgtctgttctcgactatctgagctacgctgtctaccagcaaggagatctggataaggctctgttgttaaccaaaaaactattggagctcgatcccgaacaccagagagccaacggcaatctgaagtactttgaatatatcatggcgaaagagaaagacgtgaataagtctgcctctgatgatcagagcgatcaaaagaccactcccaagaagaaaggcgtggctgtcgactatctgccggaacggcagaaatacgagatgctttgccggggagagggtatcaagatgaccccccggaggcaaaaaaaactcttttgtagataccatgatggcaatagaaatccaaagtttattctcgcccctgctaaacaggaagatgaatgggataaaccccgtatcattagatttcacgatatcatttcggatgcagagatcgagatcgtgaaagacctggctaagccccgcctcagcagggctactgttcacgaccccgagacgggcaagcttaccactgctcagtacagagtttcgaagtccgcctggctatcaggttacgagaatccggtcgtgtctagaatcaatatgcgaatccaagatcttacgggcctggatgtctctactgccgaagaactgcagaaggatgaacccgatgcctttaaggaactggggacagggaataggattgccacttggcttttctatatgtcagacgttagtgccgggggagctaccgtgtttcccgaagtaggggctagcgtctggcctaagaaggggacggccgtgttctggtacaacctgtttgcctccggcgagggcgattactccacacggcatgccgcctgccccgttcttgtgggaaataagtgggtgagtaataaatggcttcacgaaagaggccaggaattccggcgaccatgcactttaagcgagttggagtag

SEQ ID NO: 200890 - DNA, 1608 bp, synthetic construct
  misc_feature 1..1608: note = Description of Artificial Sequence: Synthetic coding sequence
  source 1..1608: mol_type = other DNA
atgaagctgtgggtgagcgccctgctgatggcctggttcggcgtgctttcctgcgtgcaggccgagttcttcacctccataggtcatatgaccgatttgatttatgccgagaaagaacttgtgcagtcccttaaggagtacattctggtcgaggaagccaaactctccaagatcaaatcatgggcaaataagatggaggccctcaccagcaagtctgcggccgacgcagaaggctacctggctcacccagtgaacgcctacaagctggtgaagcgcctcaatactgactggccagccctggaggacctcgttctgcaggacagtgctgcaggtttcattgctaatctgagtgtccagcgacagtttttcccgactgatgaggacgaaattggggccgccaaggccttgatgcgcctgcaggacacatatcgcctagacccaggaactatctcacggggggagctgcccgggactaagtatcaggccatgctgtccgtggacgactgttttggcatgggccgctcagcatacaacgagggggactattaccataccgtgttatggatggagcaggtgttgaagcagcttgacgctggtgaggaggcaacaaccaccaaaagccaggtcctggactaccttagctacgccgtgttccagctgggggacctgcacagggctttggaactcaccaggagattgctgtccctggacccttctcatgagcgggcaggcgggaacctgcggtactttgaacagttactcgaagaggagagagaaaagaccctgaccaaccagaccgaggccgaactggctacgccagagggcatatatgaaagaccggttgactatcttccggaacgagatgtctatgagtcactctgtagaggcgagggggtgaagctgaccccacgccgccagaaaagactgttctgtcgctatcatcacgggaaccgcgcgccccagttactgatagcccctttcaaggaagaggacgaatgggattcgccacacatcgttcggtattacgatgtcatgtctgacgaagagatagaaaggataaaggagatcgcgaaacccaaattggcacgggccacggtgcgcgatcctaagacaggtgtgcttacagtggcctcctacagagtgagcaagtcttcgtggctggaagaggacgacgatcctgttgtagcccgtgtcaatagacggatgcagcacattaccggtcttactgtcaaaacagccgagctgctccaggtcgccaactacggtgttggcggacagtatgagccacacttcgacttttccagaaacgatgagcgggatacatttaagcacctgggaaccggaaacagggtcgctacatttttgaactatatgagtgacgttgaagcagggggggcaacagtgttccctgatcttggggcagcaatttggcctaaaaagggaaccgccgtcttttggtacaatctactgcggagcggcgagggtgattaccgcactcgccatgcagcttgtccggtgctggtaggctgtaagtgggtgagcaataagtggtttcacgagaggggtcaagagtttctgaggccatgcggatctaccgaagtcgactag

SEQ ID NO: 200891 - DNA, 1602 bp, synthetic construct
  misc_feature 1..1602: note = Description of Artificial Sequence: Synthetic coding sequence
  source 1..1602: mol_type = other DNA
atgaagctgtgggtgagcgccctgctgatggcctggttcggcgtgctcagctgcgtgcaggcggaattctttaccagtattggacacatgaccgacttgatatacgcagagaaagaattggtgcaaagtctgaaagaatatattttggtagaggaggcaaagctctccaaaattaagagttgggcaaataagatggaggcacttaccagtaaaagcgcggccgatgccgagggctacctcgcccaccccgtaaacgcgtacaaactggtaaagcgcctgaatactgactggccagccctggaggacctggtgcttcaagacagcgccgctggatttattgcaaacctgtccgtgcaacggcaattctttcccaccgacgaggacgagatcggcgccgctaaggctctgatgaggttacaagacacttacaggttagacccgggcactatttccagaggcgagctgcctgggacgaaatatcaggctatgctttccgtcgacgattgctttggcatgggtaggagcgcctataatgaaggtgattattaccacaccgtgctgtggatggaacaggtgctgaaacagctggatgcgggggaggaggctacaaccaccaaatctcaagttctggattacttatcctacgctgtttttcagctgggcgatcttcacagagcattggaactgacccgcaggctgctctctcttgacccctcacacgaacgcgccgggggaaacctgcgttattttgaacagttactggaggaggagcgggaaaagacactcaccaatcagaccgaggctgaacttgcgacacccgaaggaatctacgagcgacccgtcgactatctgccggagcgggatgtctacgaaagcctttgcagaggagagggagtgaaactcacccctcgccggcagaagcgactgttctgtaggtaccatcacggaaatcgagccccccagttgctgatcgctccgttcaaagaggaagacgaatgggattctccacatatcgttaggtattatgatgtgatgagtgacgaagagatcgaacgaatcaaagagatagcaaaacctaagcttgcgcgggcaactgtgcgcgaccccaagacgggagtacttacggttgcgtcatatcgggtgagcaagagtagctggctggaagaagatgacgatcccgttgtggctagggtgaacagaagaatgcagcacatcacaggtctgacggttaaaactgccgagctgctccaagtcgccaattatggggtgggtggtcaatatgagccacacttcgacttctctcggaggcccttcgacagcgggctgaagactgaggggaatagattagccacctttcttaactacatgtctgacgtggaggccggtggcgctactgtatttccggacttaggcgcagccatctggccgaaaaaaggcaccgctgtcttctggtacaacctgcttagatctggcgagggggactaccggaccagacacgccgcatgccccgtccttgtcgggtgtaaatgggtgagcaacaagtggttccacgagaggggtcaggaattcctcaggccatgtggttctactgaggtcgactag

SEQ ID NO: 200892 - DNA, 1602 bp, synthetic construct
  misc_feature 1..1602: note = Description of Artificial Sequence: Synthetic coding sequence
  source 1..1602: mol_type = other DNA
atgaagctgtgggtgagcgccctgctgatggcctggttcggcgtgctgagctgtgtgcaggcagagtttttcacgagtattgggcacatgactgacctgatctatgccgaaaaggaactggttcaatctttgaaagaatacatcttggtggaagaggccaaactctcaaagattaagagctgggctaacaagatggaggccctgaccagcaagagcgcggccgatgcagaaggatatctagctcaccctgtcaatgcttacaaattggtaaaacgtctcaacacagactggccagccctcgaagacctggtgctgcaggactcagccgcaggattcatcgcaaatcttagcgttcagagacagttcttccctacagacgaggacgagataggggcagctaaggcgctgatgcgcctgcaagacacatatcgactggatcccggcaccatctcccgcggggagttgcccggcacgaagtatcaggccatgctttctgtcgacgactgcttcggcatggggcggtccgcctataacgagggagattattaccataccgtgctgtggatggagcaggtcttgaaacaacttgatgccggcgaggaggccacaacaacaaaatcacaggtgcttgattacttaagttatgcagtgttccagttaggcgatttacatagagcgcttgaattgacccgccgcctgctgtctcttgatcctagccacgagagggccggagggaatcttcgatacttcgaacagttattggaggaggaaagggaaaagactctcactaaccagacagaagctgagttggctacccccgagggtatttacgaacggcccgtggactacctgcccgagagggacgtgtacgagagcttgtgtaggggcgagggggtgaaattgactcccaggcggcagaagcgtctcttctgccgttaccatcatggtaaccgtgcgccacagctcttgattgcaccatttaaggaggaagatgagtgggatagcccacacatcgtgcggtattacgatgtcatgtcagacgaggaaatagagcgcatcaaggagattgctaaaccaaaacttgctagggccacagtgcgggacccaaagacaggcgtgctgaccgtagcttcctacagagtgagtaagtcaagctggcttgaagaagacgatgatccagtcgtggccagggtgaatcgtagaatgcagcacatcacagggctgacagtgaaaaccgcagagctgctgcaggtggctaattatggcgtgggagggcagtacgagcctcacttcgattttagcagacggccgtttgactccggcctcaagacggagggaaacaggctggctacttttttgaattatatgtcagacgtggaggctggcggagctaccgtcttcccagacctcggcgccgctatatggccaaaaaaagggactgccgtcttctggtacaacctgcttagatccggggaaggtgattaccggacaaggcacgcagcatgtcctgttttagtcggatgtaagtgggtgtcaaacaagtggttccacgaaaggggccaggagttcctccgaccttgtggaagtaccgaagtagactag

SEQ ID NO: 200893 - DNA, 1602 bp, synthetic construct
  misc_feature 1..1602: note = Description of Artificial Sequence: Synthetic coding sequence
  source 1..1602: mol_type = other DNA
atgaagctgtgggtgagcgccctgctgatggcctggttcggcgtgctctcatgtgtgcaggcagagtttttcacctcaatcggacacatgacggaccttatctatgcggagaaagagctcgtccagtccttgaaggagtacatactggtggaggaggcaaaacttagtaagataaagtcgtgggctaataaaatggaggccttaacaagtaagtccgcagccgatgctgagggctacctggctcacccagtcaacgcgtataaactggtgaagaggttaaatacggactggccagctcttgaggatctggtccttcaggatagcgccgctgggttcattgctaatctctccgtgcaaagacagttctttcccacagacgaggatgaaatcggcgcagcaaaagccctgatgcggcttcaagatacctataggcttgacccaggtacgattagcaggggggagctgccaggaaccaaataccaggccatgctgtccgtagatgattgttttggaatggggcgttccgcctacaacgagggggattactatcatacggtcctctggatggaacaagtgcttaaacaactggacgctggcgaagaggccacgactaccaaatctcaagtgctggactacctgagctacgcggttttccagctgggggatcttcatcgggctctggaattaacccggcgtctgctgtctttagatccctcgcatgagcgcgccggaggaaacctgcgctacttcgagcagcttctggaagaggaacgggagaagaccttgacaaatcagaccgaggccgagctggctacccctgaagggatctacgaacggcctgtggattacctgccggagcgtgatgtctacgagtcactgtgtaggggcgaaggagttaagctcacaccacgccgtcagaaacggcttttctgccgctaccatcacgggaacagagcccctcaactgctgatagctccctttaaagaggaggacgaatgggattctccccatatcgtacggtactatgacgtgatgtccgatgaggaaatcgaaaggatcaaagaaatcgccaaaccgaagctggccagggcgactgttcgggatccaaaaactggggtgctaaccgtggccagctacagagtttcgaaaagctcttggctggaggaggacgacgacccagtcgtggcccgcgtcaacaggaggatgcagcacataacagggttaactgtcaagaccgcagaattgcttcaggttgcgaattacggtgtcggcggccagtacgaaccccattttgatttcagcaggcggccttttgatagtgggctgaagacagaaggcaacaggctggctacattcctcaactacatgtctgatgttgaggccgggggggcaaccgtgtttccagatctcggagccgctatttggcccaaaaagggaacagcagtcttttggtacaatttattacgcagcggggagggcgactatcggactcgccacgctgcctgccccgtgctggtgggatgtaagtgggtctctaataaatggtttcacgagagaggtcaggagttcctgaggccttgcggcagcaccgaggtggattag

SEQ ID NO: 200894 - DNA, 1608 bp, synthetic construct
  misc_feature 1..1608: note = Description of Artificial Sequence: Synthetic coding sequence
  source 1..1608: mol_type = other DNA
atgaagctgtgggtgagcgccctgctgatggcctggttcggcgtgctgtcgtgtgttcaggctgaattcttcactagtataggccatatgactgacctgatctacgcagagaaggaacttgtacagtccctgaaggagtatatcctggtcgaagaggccaaactatccaagatcaagagctgggccaacaaaatggaggccctgacctcgaaatcagccgctgatgctgaagggtatttagctcaccccgtcaacgcctacaaattggtgaagcgcctgaacactgattggcctgccctggaagacctggtgttgcaggactccgccgcggggttcattgccaatctctccgttcaacgccagtttttccccacagatgaggatgaaatcggcgctgctaaggccctgatgcgcctgcaggatacctacaggttagatcccggtaccatttcccgcggagaactgccaggcacgaagtatcaggcaatgctgtctgtggacgactgctttgggatgggaaggtctgcctataatgagggggattattatcatacggtgctgtggatggaacaggtgcttaagcagctggatgcaggcgaggaagccactactacaaagagtcaggtcctcgattacctgtcctacgccgtgttccagttgggtgacctacaccgggctctggagctgacccgacggctcttgtctttagacccttcacacgagagagcaggaggcaatctcagatatttcgagcagctgctggaagaggagagagaaaagaccttgacgaatcagacggaggctgaactggcaacaccagagggcatttatgagcgccctgtagattatctccccgaacgtgatgtgtacgagtctctgtgcaggggagagggggtgaagcttaccccccggagacagaagaggctgttttgtagatatcatcacggcaaccgcgcccctcagctgctcatcgcgcccttcaaggaggaggatgaatgggattctccccatatcgtcagatactacgatgttatgagtgacgaagaaatcgagagaatcaaagaaattgccaaacccaagctggcaagagcaaccgtccgggatcctaagacaggtgtgttaacagtggcctcatatagggtctcgaaaagtagttggctggaagaggacgacgatcctgttgttgctcgggtcaaccgcagaatgcagcacatcacgggacttacagtcaagactgccgagttgcttcaagtggcaaactacggggttggggggcagtacgagcctcattttgattttagcaggaatgacgagcgtgatactttcaagcatctcggcactgggaatcgagtcgccaccttcctgaattacatgtcggatgtggaggcgggaggcgcaaccgtgtttcctgatctgggcgctgctatttggccaaagaagggcactgcggtattttggtacaatctcttgcgcagcggagagggagactacagaaccagacacgcagcatgtcccgttttggtaggttgcaagtgggtttcaaacaagtggtttcatgagcgtggccaggagtttttgagaccgtgtggttctaccgaggtggattag

SEQ ID NO: 200895 - DNA, 504 bp, synthetic construct
  misc_feature 1..504: note = Description of Artificial Sequence: Synthetic coding sequence
  source 1..504: mol_type = other DNA
atgaagctgtgggtgagcgccctgctgatggcctggttcggcgtgctcagctgcgtgcaggccgagtttttcacctccatcggccatatgacagatcttatttatgctgaaaaggagttggttcagagcctgaaggagtacatcctcgtggaagaagcgaagctctctaaaataaagagctgggcaaacaaaatggaagccctcacttccaaaagcgcagccgatgctgaaggctacctcgctcacccggttaatgcgtacaagctggtgaagaggctgaatacggactggcctgccctggaagacctggtgctgcaggactcggctgcaggcttcatcgctaacctcagcgtccaacgtcagttttttccaacagatgaggacgagattggggctgccaaagctctgatgcgccttcaagatacgtacagacttgatccaggcactatcagcaggggggagctccctgggacaaagtatcaggctatgctgtctgttgattag

SEQ ID NO: 200896 - DNA, 1608 bp, synthetic construct
  misc_feature 1..1608: note = Description of Artificial Sequence: Synthetic coding sequence
  source 1..1608: mol_type = other DNA
atgaagctgtgggtgagcgccctgctgatggcctggttcggcgtgctttcatgtgtgcaagccgagtttttcacctctattgggcacatgacagatctgatttacgccgaaaaagaacttgtgcagtctctgaaagaatatatcctggttgaggaggctaaactgtcaaaaatcaagagctgggccaacaagatggaagcactaacttctaaatcagccgccgatgcagaaggctacctcgcgcaccctgtgaatgcatacaaattggtgaaaagattaaatacagattggccagccctggaggaccttgtgcttcaggattctgccgctggttttattgccaatttgagcgtacagaggcaatttttcccgacggacgaggacgagattggagccgcaaaggccctaatgcggcttcaagacacctacagattagacccaggcacgatctctcggggggaattgcccggcacaaaataccaggcaatgctttccgtggatgactgctttggtatgggccgtagtgcttacaacgagggcgactactatcatacagttctgtggatggaacaagtccttaaacagctggacgcgggtgaggaagccactactaccaagagccaggtgctggactatctaagttatgccgtttttcagctcggcgacttacatcgggctctggaactgactcgcagacttctgtctctggacccgtctcatgagcgcgcaggcggcaatcttcggtatttcgagcagctgttggaagaagaacgggaaaaaactctgacaaaccagactgaggctgagctggccactcctgaaggcatctacgagaggcctgtggactatctcccagaacgggatgtctatgaatccttatgtcgcggagagggcgtcaaactcaccccacggcgtcagaagcgcttattttgtaggtaccaccatggcaatcgcgctcctcagctgctgatagcaccttttaaagaagaggacgagtgggatagtccccatattgttaggtactacgacgttatgtcggacgaagaaatcgagcgtattaaggaaatcgcgaagcctaagctcgctcgggccaccgtccgggatccgaaaaccggtgtgctcacagtggcttcctatagggtgagtaagagcagctggctggaagaggatgatgatccggtggtggcacgagtcaacagacgcatgcagcatataacaggtctcacagtcaagacagccgaacttctccaggtggccaattacggcgtgggtggtcaatacgagccccacttcgatttctcacgcaacgatgaacgggacacttttaaacacctcgggaccggaaatagagttgccacattcctgaattacatgagcgacgtagaggccgggggcgccactgtctttcccgacctcggggctgccatctggcccaaaaagggcactgcagtattctggtataacctgcttagaagcggggagggcgattaccgtacccgtcatgctgcctgcccggttctggtgggctgtaaatgggtgtctaacaagtggttccatgaaaggggccaggagtttctgcgcccatgtggaagtactgaagtggactag

SEQ ID NO: 200897 - DNA, 306 bp, synthetic construct
  misc_feature 1..306: note = Description of Artificial Sequence: Synthetic coding sequence
  source 1..306: mol_type = other DNA
atgaagctgtgggtgagcgccctgctgatggcctggttcggcgtgctgagctgcgtacaggcagagttctttactagcataggacatatgaccgatctgatctacgccgagaaggagcttgtgcagtcactcaaggagtacatcctggtggaagaggctaaattgtcaaagattaagtcatgggcaaacaagatggaggcgttgacttcgaagtccgccgcagacgccgagggctacttggcacacccagtgaatgcctataaactcgtcaagcgattgaatacagattggccagccctagagtag

SEQ ID NO: 200898 - DNA, 615 bp, synthetic construct
  misc_feature 1..615: note = Description of Artificial Sequence: Synthetic coding sequence
  source 1..615: mol_type = other DNA
atgaagctgtgggtgagcgccctgctgatggcctggttcggcgtgctgtcttgcgtgcaggccgagtttttcacctctatcggacatatgacggatctcatatacgccgagaaagagttggttcagtcattgaaggaatatattctggtggaggaagcgaagttatccaagattaaatcctgggcgaataagatggaggctttaaccagcaagtccgctgccgacgcggaaggctacctggcacaccccgtgaatgcttacaaactcgtgaaaagacttaacacagattggcccgccctggaggacctggtcctccaagattcagcggccgggtttattgcgaacctgagcgtacagagacagttctttcccactgatgaagatgagattggggccgctaaagcactgatgaggctgcaggacacctacagactggatcccggcacaatctcccggggtgagttaccgggcacgaaatatcaggcaatgctttctgtagacgattgctttggtatgggcaggtccgcttataatgaaggagactattaccataccgtgctttggatggaacaagtgctgaaacagctagacgcaggcgaggaggctacaacctag

SEQ ID NO: 200899 - DNA, 345 bp, synthetic construct
  misc_feature 1..345: note = Description of Artificial Sequence: Synthetic coding sequence
  source 1..345: mol_type = other DNA
atgaagctgtgggtgagcgccctgctgatggcctggttcggcgtgttgtcctgcgtccaggccgagtttttcacgagcatcggacacatgaccgatctgatctacgctgagaaggagctggtgcagagcctcaaggagtacatacttgttgaggaggccaagctgtcaaagattaagagctgggccaacaaaatggaagctctgacatctaaatctgcggctgacgccgaagggtatctcgcacaccctgtgaacgcatataaactcgtcaagcgactgaatacggactggcccgccctggaagacctggtcctccaagacagtgccgcgggatttatcgcctag

SEQ ID NO: 200900 - DNA, 444 bp, synthetic construct
  misc_feature 1..444: note = Description of Artificial Sequence: Synthetic coding sequence
  source 1..444: mol_type = other DNA
atgaagctgtgggtgagcgccctgctgatggcctggttcggcgtgcttagttgcgtccaagccgaattcttcacttctattggacacatgaccgatctgatctatgctgagaaagaactcgtacagagcctcaaagagtatatactggttgaggaagcaaagctgagcaagatcaagtcttgggccaacaagatggaggctctaacgtcgaaatctgccgctgatgctgaggggtatctggcccatcccgtgaatgcttacaagctggtgaagagactgaatacagactggcccgccctagaggacctcgtcctccaggatagtgccgcgggatttatagctaaccttagtgtgcaacgtcagttttttccaaccgatgaagatgagatcggggctgccaaggccctgatgcgcctgcaggacacatacaggcttgatccctag

SEQ ID NO: 200901 - DNA, 153 bp, synthetic construct
  misc_feature 1..153: note = Description of Artificial Sequence: Synthetic coding sequence
  source 1..153: mol_type = other DNA
atgaagctgtgggtgagcgccctgctgatggcctggttcggcgtgctaagctgtgtccaggctgaattctttacttcaattggacatatgacagatttgatctacgccgagaaggagctggtgcagtccctaaaagagtacattctggtgtag

SEQ ID NO: 200902 - DNA, 555 bp, synthetic construct
  misc_feature 1..555: note = Description of Artificial Sequence: Synthetic coding sequence
  source 1..555: mol_type = other DNA
atgaagctgtgggtgagcgccctgctgatggcctggttcggcgtgctgagctgtgttcaggcagagttcttcacttccatcggtcatatgacagatctcatctacgcggagaaggagctggtccagtccttgaaggagtatattctggtggaggaagctaagctgagtaagatcaaatcgtgggctaacaagatggaggcactaacatcgaaatccgcggccgacgctgaaggatatctcgcccaccctgtgaacgcatacaagttggtaaaaaggcttaataccgactggcctgccctggaagaccttgtgctccaggattctgccgcgggcttcatcgccaacctgtcggtccagagacaattctttcctactgacgaggacgaaatcggcgctgccaaagccctaatgcggttacaagatacttaccggctggaccccggtactatatcaagaggcgagctgccaggtaccaaatatcaggccatgctctccgtcgacgactgttttggtatgggccgatctgcttacaatgagggggattactatcactag

SEQ ID NO: 200903 - DNA, 462 bp, synthetic construct
  misc_feature 1..462: note = Description of Artificial Sequence: Synthetic coding sequence
  source 1..462: mol_type = other DNA
atgaagctgtgggtgagcgccctgctgatggcctggttcggcgtgctctcctgtgtgcaggctgaatttttcaccagcattggccacatgaccgacctcatttatgcagaaaaagagctggtccagtctctcaaggaatatatcttggtcgaggaggcaaagttatctaagattaagtcttgggcgaacaaaatggaagcactgacctctaaatctgcggcggacgccgagggataccttgcccaccccgttaatgcctataagctggttaaaagactgaacaccgactggccggctcttgaggatctcgtcctgcaagactctgccgcaggttttattgctaatctgagcgtgcagaggcagtttttccccaccgatgaagatgaaatcggagccgccaaggcccttatgcgcctccaggatacttaccgactcgatccgggtacgatttccaggggttag

SEQ ID NO: 200904 - DNA, 1635 bp, synthetic construct
  misc_feature 1..1635: note = Description of Artificial Sequence: Synthetic coding sequence
  source 1..1635: mol_type = other DNA
atgggccccggcgcccggctggccgccctgctggccgtgctggccctaggcacaggcgatccggaacgcgcggccgctagaggggataccttctcagcacttacctccgtggcacgggctttggccccagaacgccggctgcttgggctgttgagacgctatctaaggggagaggaagcacgcctacgcgacctgactcgattctacgacaaggttctcagcctccacgaagatagcacaacccccgtcgctaatcccttattggcctttacactgattaaaagattacagtctgattggcgcaacgtggtccattccttagaagccagcgagaatattcgtgctctgaaagacggttatgagaaagtcgagcaggatctgcccgctttcgaggacctcgaaggtgctgccagggcacttatgcggctgcaggatgtgtacatgctaaatgtgaagggcctggcccgcggtgtgttccagagagtaacaggcagcgctatcactgatttgtatagtccgaagcggttgttctctctgacaggcgatgattgttttcaggtgggcaaggtagcttacgatatgggggactactatcatgccatcccatggctcgaggaggcagtcagcctgtttcgggggtcctatggggaatggaagacagaggacgaagcgagccttgaagacgcactcgaccacctggccttcgcctactttagggcgggcaacgtatcttgcgccctgagcttgtccagggaatttctgctatacagtcccgataacaaacgaatggcgaggaatgtcttgaaatacgagagactgctggccgaatctcccaatcacgtcgtcgcagaggccgtaatccaaagacccaacataccgcacctccaaactcgcgacacatacgagggactttgccagactctgggctcacaacccaccttgtatcagattccctcgttatattgcagctacgagaccaattctaatgcatacctacttctgcagcctattcgaaaagaggttattcatcttgagccctacatcgctctttatcacgactttgttagcgattctgaggcgcagaaaattagggagttagccgagccctggttgcagagatctgtggtggcttcaggagaaaagcaacttcaggtcgagtatagaattagcaaaagcgcctggctcaaagatacggttgatcctaaactggtcactctcaaccaccgcattgccgctctgacaggcctagacgtgaggccaccctatgccgaatacctccaggtcgtaaactatggcatcggtgggcattacgagccccattttgatcacgctacttcccccagctcacccttatatcgaatgaaaagcgggaatagggttgctactttcatgatatatctgagctccgtggaggccggaggcgcgacggcctttatatacgctaacctttcagtgcccgtggtgcggaatgcggcattgttctggtggaatctgcacaggtcgggcgaaggggacagtgacacgctgcacgcaggctgccctgttttggttggcgataaatgggtagccaataaatggatccatgagtatggccaggaattccggcggccttgttcatctagtccagaagattag

SEQ ID NO: 200905 - DNA, 1815 bp, synthetic construct
  misc_feature 1..1815: note = Description of Artificial Sequence: Synthetic coding sequence
  source 1..1815: mol_type = other DNA
atgggccccggcgcccggctggccgccctgctggccgtgctggcccttggcacaggtgaccccgagcgagccgccgcccgaggggacaccttttccgcccttacctccgtggccagagccctggcgcccgaaaggagactcctgggcctgcttaggcggtatctccgcggagaagaggcccgtctgcgcgacttgacacgattctacgacaaggtgctgtctctccacgaggacagcaccactcctgttgctaatccgttgttagcatttaccctgatcaaacgcttgcagagcgactggcgcaacgtcgtgcactccctggaggcctctgaaaatatccgtgctctgaaggatggatatgagaaggtggagcaagacctgcccgcctttgaggacctggaaggtgccgccagagcactaatgagactgcaggatgtttatatgttaaatgttaaaggactggcccgaggcgtgtttcagagggtcaccgggtcagctatcacagacttatattcgcccaaacggctgttttcactgacaggagatgactgctttcaggtgggaaaggttgcatatgatatgggagactactaccacgcgatcccttggctggaggaggcggtaagtctctttcggggcagttatggagagtggaaaacagaggatgaagcaagtttggaggacgcccttgatcacctagcgttcgcatattttcgagccggaaacgttagttgtgccttgtccctctcacgtgagttcctgctgtactcacctgacaataaacgcatggcccgtaatgtactgaaatacgaaaggttgctggcagagtccccgaatcacgtggtggcggaagcagtcatccagcgacctaatataccccacctgcagacaagggacacttatgaaggactctgccagactttgggctcacagcctaccctgtaccagattccaagcctgtattgctcatacgagactaatagcaatgcttacctcctgcttcaacccataagaaaggaagttattcacctggaaccctatatcgcgctgtaccacgatttcgtgagcgactcagaggctcagaaaattagggaactggcagagccatggctgcagagatctgtcgttgcttccggggagaaacagctacaggtcgaatacaggattagcaagagtgcttggctgaaagatactgtcgatcctaaactggttactctgaaccaccggattgctgccttaactggacttgacgtacgccccccgtacgcagagtacttacaggttgtcaactatggtatcggtgggcactacgagccacacttcgaccatgcaactagtccaagctcgcccttgtatagaatgaaatctggcaaccgcgtggcgacctttatgatttacctgtcgtccgttgaggccgggggggctactgcctttatttacgctaatctcagtgtccctgtcgtgcgccattgctttggaggaacttgcactggcgtcgtcaaaggaacagtcacacacttcatgcttgccgtcctatcctggtgggagatttctggctggcccacatctggctatatgtctatggaccggaactccgcagacccagccgcgcccgccctaaagactgaattactggctgagcggagttggtggagccccgttgcctttcagcggagtcaggaacctaaggctggagtgggtgaggagaaggccgaacaacccccgggcaggagaccttgtcaactttgcctctgtctcgccaatcaaagacaggggagaggctgttatcagggaacactgaggatgtatatttag

SEQ ID NO: 200906 - DNA, 1527 bp, synthetic construct
  misc_feature 1..1527: note = Description of Artificial Sequence: Synthetic coding sequence
  source 1..1527: mol_type = other DNA
atgctgcggcgggccctgctgtgcctggccgtggccgccctggtgcgggcagatgctccagaggaagaagaccacgttttggtgttgagaaaaagtaatttcgcagaggcacttgccgctcataagtatctgctcgtggaattctatgccccgtggtgtgggcattgtaaagctctggctcccgaatatgccaaggccgcggggaagttgaaagcagagggaagcgagattaggctagcaaaggtagatgccacagaggagtccgacttagcccaacagtacggcgtgcgcggatatcccacaatcaaatttttcagaaatggagataccgctagccccaaggagtatacagccggcagggaggccgacgatattgtgaactggctcaagaaacgcacggggcctgcagccactactcttcccgacggagccgcagccgagagcctggtcgaatcttctgaggtcgcagtcatcggcttcttcaaagacgtcgagagcgactccgctaaacagttcctgcaggccgctgaagctatagatgatatcccatttggcatcacctcaaatagcgatgtgttcagtaaataccagctggacaaggacggggtggtactgtttaagaagtttgacgagggcagaaataattttgagggagaggttaccaaggaaaatcttttggatttcatcaagcacaatcagttaccattagtcattgaattcactgaacagactgcgccaaaaatcttcggtggtgagattaagacccatatccttctgtttctgcccaaatccgtctctgattacgatgggaaacttagtaatttcaagacggccgccgagtcgttcaaaggcaagatcctgttcattttcatcgatagcgatcatacagataaccagaggattctggaattttttgggctgaaaaaggaagaatgccctgccgtgcgcctaattactctagaagaggaaatgactaagtacaagcctgaaagcgaggaattaaccgccgaacggattacagagttttgccaccggttcctggaagggaaaataaaaccacatctgatgagccaagaactgccagaagactgggataaacagccagttaaggtcctagtgggcaagaatttcgaggacgtggctttcgatgaaaagaaaaatgtgttcgtggagttttatgccccctggtgcggccattgtaagcagctggcaccaatatgggataagctcggcgaaacatataaggatcacgagaatatcgtgatcgccaaaatggactccacagcaaacgaggtcgaggccgtgaaggtgcacagcttcccaacgctgaagttttttcccgcgtcagctgaccgtacagtcattgactacaatggcgagcgcaccttggatggattcaaaaaatttctggaaagcggtgggcaggacggagcgggcgatgacgacgacttggaggacctggaggaggccgaggaaccagatatggaagaggatgatgaccagaaagccgtaaaggatgagctgtag

SEQ ID NO: 200907 - DNA, 1479 bp, synthetic construct
  misc_feature 1..1479: note = Description of Artificial Sequence: Synthetic coding sequence
  source 1..1479: mol_type = other DNA
atgctgcggcgggccctgctgtgcctggccgtggccgccctggtgcgtgccgatgccccggaggaggaagatcacaagtacctgttggttgagttctacgcaccatggtgtggccactgtaaggcgctggcccctgaatacgcaaaggccgcaggtaaactaaaagccgaaggttcagaaatccggcttgccaaggtcgatgctacagaggagagtgatctggcccagcagtacggagtgcgtgggtacccaacaatcaaattcttcagaaatggcgacactgctagccctaaggaatacaccgctggcagggaggctgatgacatcgtcaactggctgaagaagcgcaccggccctgcagccaccactctgccggacggggccgcagccgaatctctggttgagagctctgaggtggctgttatcggcttcttcaaggacgttgagtcggactctgctaagcagtttttgcaggcagctgaggctattgatgacattccattcggcatcaccagtaatagcgatgttttcagcaagtatcagctggataaagatggggttgtattgtttaagaaatttgacgagggtagaaataattttgagggagaagtgacaaaagagaacctgcttgattttattaaacacaatcagcttcccctcgtgatcgagtttactgagcaaactgcccctaagatctttggcggggagatcaaaacccacatcctgctcttcttgccaaagtccgtgagtgactacgatggcaagttgagtaatttcaagaccgctgccgaatctttcaaggggaagatcttatttatatttatagactccgatcataccgacaatcagaggatccttgagttttttgggctgaaaaaagaagaatgcccagccgtgagacttattaccctcgaagaggaaatgactaagtataagcctgaaagcgaggagcttaccgcggagcgtattaccgagttttgccacagattcctagaaggtaaaattaagcctcacctgatgtctcaggagctccccgaggactgggacaaacagccggtgaaagtcttggtgggcaaaaatttcgaggatgtggcttttgatgagaagaagaacgtgtttgtggagttttatgctccctggtgcggccactgtaaacagctagcaccaatatgggataaactcggtgaaacctacaaagatcacgaaaatatcgtcattgcaaagatggattcaactgctaatgaggtcgaggctgttaaggtgcactctttcccaactctgaaattctttcctgcgagtgccgatcggactgtcattgactacaatggggaaaggacactggatggcttcaagaaattcctggagtccggcggacaagacggcgcaggcgatgacgatgatctcgaagatcttgaggaggcagaagagcctgacatggaggaggacgatgaccagaaagctgttaaagatgaactgtag

SEQ ID NO: 200908 - DNA, 1356 bp, synthetic construct
  misc_feature 1..1356: note = Description of Artificial Sequence: Synthetic coding sequence
  source 1..1356: mol_type = other DNA
atgctgcggcgggccctgctgtgcctggccgtggccgccctggtgagagccgatgctccggaggaagaagatcatgtcctcgtactacgaaagtcaaacttcgccgaggccttggcagcacacaagtatctgcttgtcgaattctatgccccatggtgcggacattgcaaggccctggcccctgagtatgctaaggcagctgggaagttgaaggcggaggggagcgagataaggctggccaaggtggacgccactgaggagtccgacttggcccagcagtatggggtgagaggctaccctacgattaagttcttcaggaatggcgacacggccagtcccaaggagtataccgcagggcgggaggctgacgacatcccgtttggcattacttcaaatagtgacgtgtttagcaagtaccaattggacaaagatggagtggtgcttttcaagaaattcgacgagggtcggaataattttgagggggaagttactaaagaaaacctattggactttatcaagcacaatcaactgccacttgtgatcgagtttaccgagcagaccgcacctaagatttttggcggcgaaattaagactcacatattgttgtttctgccaaagtctgtgagcgactatgatgggaagttgagtaattttaagaccgccgctgagtccttcaagggaaagattctgtttatcttcatcgactccgaccacaccgacaatcaacgaatcctggagttttttggacttaaaaaggaggaatgtcccgcggtgcgcctgatcacgctggaggaggaaatgaccaagtacaagccggaaagcgaggaacttacggcagaaagaatcactgaattttgtcatcggtttctggaagggaagatcaagccacacctcatgagccaggaactgcccgaagattgggataaacagcctgtgaaggttctcgtgggtaagaatttcgaggacgtcgcctttgatgaaaaaaagaacgtcttcgtagagttctatgcaccctggtgtggccactgcaagcagctcgcccctatctgggacaaactcggcgaaacctataaggaccatgagaatattgtgatcgcaaagatggattcaaccgcgaatgaggtggaagccgtcaaagttcacagcttccccacactgaagttcttccccgcatcagctgatcgcacagtcatcgattacaacggcgagcgcacacttgatgggttcaagaagttcctggagtccggcggccaggatggggctggagatgatgacgacctcgaagacttagaggaggccgaagagccagatatggaggaagatgatgaccagaaggccgtgaaagacgaattgtag

SEQ ID NO: 200909 - DNA, 2133 bp, synthetic construct
  misc_feature 1..2133: note = Description of Artificial Sequence: Synthetic coding sequence
  source 1..2133: mol_type = other DNA
atgctgagcctgcagtaccccgacgtgtaccgggacgagaccgccgtgcaagactaccatggccacaaaatctgcgacccatacgcgtggctggaagatcccgactctgaacagaccaaggccttcgttgaggcccaaaataaaataacggtaccattcttggagcagtgccctattaggggtctgtataaggagaggatgacagaactgtacgactatccaaaatacagttgtcacttcaagaagggcaagaggtacttttacttctataatacaggtttgcagaatcagcgggtgttatatgtacaagattcactagagggcgaagccagggtattcctcgacccaaatatacttagcgatgatggtaccgtcgctcttagaggttatgcattttccgaggatggagagtacttcgcgtatgggcttagcgcttctggaagcgattgggtgacgattaaatttatgaaggtggacggagcgaaagagctgccagacgtgcttgagagagtaaagttcagttgcatggcatggactcatgacggcaagggaatgttttacaatagctacccccagcaggatggcaagtcggacggcaccgagacaagtaccaatctacatcagaagctgtactaccatgtgcttggaaccgatcagtccgaggacatcttgtgcgctgagtttcccgatgagcccaagtggatggggggggctgagctgtcagacgacggaagatatgtactgctgtctattagagagggttgtgatcccgtaaatcggctttggtactgtgatctgcagcaggaaagctcaggcattgccggcatcctgaagtgggtgaagctaatcgataatttcgaaggcgaatatgactatgtaaccaatgaagggacagtgtttacctttaaaactaaccggcaaagtcccaattatcgagtgattaatatagatttcagagatcccgaggagagcaagtggaaggttttggtccccgaacatgaaaaggatgttctcgagtggattgcgtgtgttcgatccaattttcttgtgctgtgctatctgcatgatgtgaagaacatcctgcagctgcacgacctgaccactggggctcttttgaaaaccttccccctggatgttggaagcatcgtcggatactccggccagaagaaggacacggaaatcttctaccagtttacaagtttcctgagccctggaattatctaccactgtgatctgacgaaagaagagttggagccacgagtctttcgcgaagtaacggtcaaaggaattgacgcttcggactatcagacagtgcagatcttttaccccagcaaggacgggactaagatccctatgttcattgttcataaaaaagggattaagctagacggcagccatcctgcttttttgtatggctacggtggtttcaatatatccattactcctaactattcggtcagccggctaatcttcgttagacacatggggggcattctcgctgtcgcaaatattcggggcggcggagagtatggagaaacctggcacaagggcggcatactagcaaacaagcagaattgcttcgacgacttccagtgtgcagccgagtatctcatcaaggaagggtacacgagccctaaacgcctaactatcaacggaggaagcaatggcggactgttggtggctgcgtgtgcaaatcagcggccagatctgtttggatgcgtgatagcccaggtgggcgtcatggacatgctcaagtttcacaaatacacaataggtcatgcatggaccaccgactatggatgttccgattctaagcagcactttgagtggcttgttaagtattctccactccataatgtcaaactgcccgaggcagatgatatccaatatccaagcatgttgttgctgacggctgatcatgacgatcgcgttgtgccactccatagcctaaaattcattgccacgctacagtacatcgtggggaggtcaagaaagcagtccaacccgctgctgatccatgtggacacgaaagctggacacggagccggcaagccgacagcaaaagtcatcgaagaggtctccgatatgtttgcgttcatcgctcgttgtctgaacgtggactggataccatag

SEQ ID NO: 200910 - DNA, 138 bp, synthetic construct
  misc_feature 1..138: note = Description of Artificial Sequence: Synthetic coding sequence
  source 1..138: mol_type = other DNA
tgaatcatctaccactgcgacctgaccaaggaggagctggagccccgagtgtttagggaagtcactgtgaagggcattgacgcatcagactatcagaccgttcaattacctaagggcaccgaaagttcgcgcaattag

SEQ ID NO: 200911 - DNA, 135 bp, synthetic construct
  misc_feature 1..135: note = Description of Artificial Sequence: Synthetic coding sequence
  source 1..135: mol_type = other DNA
atcatctaccactgcgacctgaccaaggaggagctggagccccgggttttccgggaggtgaccgtgaagggcattgatgcgagcgactatcagactgtgcagctacccaagggtacggaatcttccagaaattag

SEQ ID NO: 200912 - DNA, 2184 bp, synthetic construct
  misc_feature 1..2184: note = Description of Artificial Sequence: Synthetic coding sequence
  source 1..2184: mol_type = other DNA
atgcagcagaagaccaagctgttcctgcaggccctgaagtacagcatcccacacttagggaaatgcatgcaaaaacagcatttgaatcattacaatttcgccgatcattgctacaataggattaaactgaagaagtaccatctgacaaagtgcctgcagaataagcctaagatttccgaacttgcgcgcaacattccaagcaggagcttttcatgcaaggacctgcagcctgttaagcaggaaaatgagaagcccttaccagaaaatatggatgcattcgagaaggtccgtacaaaactagaaacgcagccccaggaggaatacgagatcatcaatgtggaggttaagcacggcgggtttgtatactaccaggagggatgttgtttagtccggtccaaagacgaggaggccgataatgacaattacgaggtgctgtttaacctggaagagttgaagctggaccaacctttcatcgactgcattcgggtggcacccgacgaaaagtacgtcgctgccaagataagaacagaagattccgaggccagcacgtgtgtcattattaaactgtccgaccagcctgttatggaagcgtcattcccaaacgtgtcatcgttcgagtgggtgaaagatgaagaggacgaagacgtactgttctacacctttcagcgaaatctgcgttgccacgacgtgtatcgggctaccttcggagataataagcgcaatgagcggttctacacagagaaggacccaagctattttgtattcctatatcttaccaaggacagccggttcctgaccattaacataatgaacaagacaacgagcgaagtctggctcatcgatggactgtccccttgggatccccccgtcttgatccagaaaaggatacacggggtactgtactacgtggaacaccgtgacgacgagctgtatatcttgaccaatgtgggggagcccacggaatttaaactgatgcgaaccgcagctgatacgccggcaataatgaactgggacctcttttttactatgaagagaaacaccaaagtcattgatctggatatgtttaaagaccattgcgtgctgttcctgaagcactcaaacctgctctatgtcaacgtgatcggactggccgatgactccgtaaggagcttgaaacttccgccatgggcctgcgggtttattatggacacgaacagtgatccaaagaactgtccattccagctctgttcacctatccgaccacctaagtattacacctataagtttgccgagggcaagctctttgaggagaccggacacgaggaccccataaccaagacatctcgcgtgttaagactagaagccaaatccaaagacggaaaactggttccaatgactgtgttccataaaaccgatagcgaagatctgcagaagaaaccactcctcgtccatgtctacggcgcatacggcatggaccttaaaatgaactttagacccgagcgcagggtgctagtagacgatggctggattctggcctattgtcacgttagaggaggaggcgaattaggactacaatggcacgccgacggcagactcaccaagaaattgaacgggctcgcagacctcgaggcctgcattaaaacactgcatggccaaggcttttcacaaccctcattaaccactctgacagccttttctgcagggggtgtactcgcaggggcactctgcaactccaatcccgaactcgtgcgcgccgtgacactggaagcaccttttctggatgttctgaatacaatgatggatacaacattgcccctgaccctggaggaattggaagagtggggcaacccctcctctgacgagaaacataaaaactacattaaacggtattgtccgtatcagaacatcaagccgcagcactacccatcaatccacattaccgcttatgaaaacgatgagagagtgcctctgaagggcatcgtcagctataccgagaagctcaaggaagcgatcgctgagcacgctaaagatacaggcgaaggataccagacacctaatatcattctcgacatacagcccgggggtaatcatgtgatcgaggactcccacaagaaaattacagctcagattaagttcctgtacgaggagcttgggcttgacagtacctccgtgtttgaggacctcaaaaagtacctgaaattctag

SEQ ID NO: 200913 - DNA, 1998 bp, synthetic construct
  misc_feature 1..1998: note = Description of Artificial Sequence: Synthetic coding sequence
  source 1..1998: mol_type = other DNA
atgcagcagaagaccaagctgttcctgcaggccctgaagtacagcatcccccatctgggaaagtgcatgcagaaacagcacctgaaccactataacttcgcggatcactgctataataggatcaaactcaagaagtatcacctcaccaaatgtcttcagaataaacccaaaatttccgagctggccaggaacatcccctcacggagcttcagttgtaaagacctgcagcccgtgaaacaggaaaatgagaagcctctcccagagaatatggacgccttcgagaaagtacgcacgaaattagagacgcaaccgcaggaagagtatgagatcatcaatgtggaggttaaacacggaggctttgtctactaccaagagggctgctgcctggttaggtccaaggacgaagaggcagacaacgacaactacgaggtcttatttaatttggaggagctgaaacttgaccaaccattcattgattgcattcgcgtggcacctgatgagaaatacgttgctgccaagattaggacagaagattcagaggcttccacctgcgtgatcatcaagctatccgatcagcctgtgatggaggcatcatttccgaacgtctcgagcttcgagtgggtcaaggacgaggaggacgaagatgtgctgttttacacgttccagcgcaatttgcgctgccacgacgtgtatagggctacgtttggggataacaaacgcaatgagcgattctacacagaaaaggacccctcatacttcgtatttctctatctgactaaagattctcgctttctcaccatcaatatcatgaacaagactacctctgaagtctggctaattgacgggttgtcaccatgggacccgcctgtactcattcagaaacgaattcacggggtcctttactacgtcgaacaccgtgacgacgaattatatatcctcactaacgtaggtgagcccacagaattcaaactgcctccatgggcatgtggctttatcatggatacaaatagtgaccccaaaaactgtccatttcaactttgcagtccaatacgacctcccaagtattatacatataagttcgcggaaggcaaactctttgaagaaaccgggcacgaggatccaatcactaaaactagtagggtgttaagactcgaagccaaatccaaagatggcaaacttgtgccaatgaccgtttttcacaagactgacagcgaggatctccagaagaagcctcttctcgtgcacgtttatggggcctacggtatggatttgaaaatgaacttccgtcccgaacgccgcgtactggtagacgatggctggatactggcctattgtcacgtgagaggcggtggcgagctgggattgcagtggcacgcagatggtaggctaaccaagaaacttaacggcctcgcagacctggaggcctgcataaagacactccatggccaggggtttagccagccttccctcaccacgctcacagcctttagtgccggaggggtgctggccggcgctctttgcaatagcaaccctgagttagtgagggccgtgactctcgaggcgccatttcttgatgttcttaacaccatgatggataccacattgccactgacccttgaggagctggaggagtgggggaaccctagttccgacgagaagcataagaattatatcaaaaggtattgcccttatcagaatatcaagccccagcactatccttctatccatatcaccgcctatgaaaacgatgagagggtgccactaaagggcattgtctcttacaccgaaaaacttaaggaggccatcgccgagcacgccaaagacactggggagggttaccaaacaccaaatatcatacttgacatccagcctggcggaaaccatgttatagaggatagccacaagaagatcaccgcccagatcaaattcctctatgaggagctcggcctcgattctactagtgtcttcgaagacctcaagaaatatctgaaattttag

SEQ ID NO: 200914 - DNA, 1986 bp, synthetic construct
  misc_feature 1..1986: note = Description of Artificial Sequence: Synthetic coding sequence
  source 1..1986: mol_type = other DNA
atgcagcagaagaccaagctgttcctgcaggccctgaagtacagcattccacatttggggaaatgtatgcagaagcaacatctcaatcattacaattttgccgaccactgctacaatcgaattaagttaaagaaatatcacctgacaaaatgccttcagaacaaaccaaagattagcgaattggccagaaatatcccatcccgttcattctcctgcaaggacctccaacctgtgaagcaggagaacgagaaacccctgcctgagaatatggacgcttttgaaaaagtgagaactaagctcgagactcagcctcaagaagaatacgagatcattaatgtagaagtgaaacacggcggttttgtgtattatcaagaagggtgttgcctcgtgcgctccaaggatgaggaagccgacaacgacaattatgaggttctttttaacctggaggaactgaagctcgaccagccttttatcgactgtatcagagtggctcccgacgaaaaatatgtcgctgccaagattagaacagaggactcggaagcctccacgtgtgtcatcataaaactgagcgatcagccagtgatggaagcctcctttccaaacgtttctagtttcgaatgggtgaaagatgaagaggatgaggatgttttgttctatacctttcagcgcaacttgcggtgtcatgacgtgtacagggctactttcggggacaacaaacgtaatgagcgattttatactgagaaagatccaagttactttgtgttcttatatctcaccaaggatagccggtttttgaccatcaacatcatgaataagaccacctcggaggtgtggctcatcgacggtctgagcccatgggatccccccgtgctcatccagaagcgaatccatggcgtactgtactacgtggaacatcgggacgatgagctttatattctaaccaacgttggagagcctacagagtttaagctcatgcgcacagccgctgacacaccagcgattatgaattgggacctgttctttactatgaaaagaaacacaaaggtaatcgaccttgatatgtttaaggatcactgtgtgctgttcctcaagcattccaatctgttgtatgtcaacgtcatcggactagcggatgatagcgtgcgtagtcttaaggacggcaagctcgtccccatgaccgtcttccacaagacagatagcgaagatctgcagaagaagccactccttgttcatgtctatggcgcttacggcatggatctcaagatgaatttcaggcccgagagacgagtgctcgtcgatgacggttggatcctggcctactgccatgtccggggcgggggggagttgggtctgcaatggcacgcagatgggcggctgacaaaaaagctgaacggtcttgcggacctggaggcatgcattaaaacactacatggtcaaggtttttcacaaccctccctaacgaccctcaccgctttctcagccggcggcgtcctggccggagctctctgtaacagcaatcccgagctcgtgcgcgctgtaacattggaggcaccttttctggatgttctgaacacgatgatggacactactttgcccctgaccttagaggagctggaagagtggggtaatcccagctctgacgaaaagcacaaaaactacatcaaaaggtattgtccctaccaaaacataaagccccaacattatccatccattcacattaccgcgtacgagaatgatgaacgggtgcccctgaaaggaatcgtgagctatactgagaagctgaaagaagccattgcagaacatgctaaggataccggagaaggataccaaacgcctaacattatcctggatatccagccaggcggaaatcacgtgatcgaggacagtcacaaaaagatcaccgcccagatcaaattcctgtacgaagagctgggcctcgattctacctcagtgttcgaggacctgaaaaagtaccttaagttttag

SEQ ID NO: 200915 - DNA, 2184 bp, synthetic construct
  misc_feature 1..2184: note = Description of Artificial Sequence: Synthetic coding sequence
  source 1..2184: mol_type = other DNA
atgcagcagaagaccaagctgttcctgcaggccctgaagtacagcatacctcatctgggtaagtgtatgcagaagcaacacctcaaccactataactttgccgaccattgctataatcgcataaagctgaaaaaataccacctgacaaagtgcctgcagaataagccaaaaatcagcgaactagcccgaaatattccgtctcggagcttcagctgcaaggatctccagcccgtgaagcaggaaaacgagaagccactcccggagaacatggacgcctttgaaaaggtgcgcacgaaactggagacccaaccacaggaggagtacgaaataattaacgtagaagtcaaacatggggggttcgtgtattatcaggaagggtgttgcctcgtcagatcaaaggatgaggaggctgataacgacaactacgaggttctgttcaacctcgaagaactcaagctggaccagccatttattgactgcatccgcgttgccccggatgagaaatatgtcgcagcaaagatccggacagaggatagcgaagcctcaacatgtgtgattatcaagctctccgatcagcccgtgatggaggccagctttccgaacgtttcttccttcgaatgggtaaaagacgaggaggacgaggacgtactcttctatacattccagagaaatctccggtgtcatgatgtgtacagggctacattcggtgataataagcggaacgagaggttttacactgagaaagatccctcatacttcgtgttcctgtatctcaccaaggactctcgctttcttactatcaacatcatgaacaagacaacttcagaggtgtggcttattgatggcctcagcccctgggatccgcccgtgttgattcagaaacgaattcacggagtgctgtactacgtcgaacaccgagacgatgagttgtacatcttgaccaatgtgggcgagcccacagaattcaagttaatgcgtactgccgctgacactccggcgatcatgaactgggatctcttcttcacaatgaaacgcaatacaaaagtcatcgatctcgatatgttcaaagatcattgcgtgctgtttttgaagcactctaacctgctgtatgtcaatgtgatcggtcttgctgatgatagcgtaagatctctcaaactgccaccctgggcttgcgggtttatcatggacactaatagtgacccaaaaaactgcccgttccaactgtgttctcctatccgcccaccaaagtactacacttataaattcgctgaggggaagctttttgaggagaccggacacgaggacccaataactaagacaagtagagtgctacgcctggaagccaaaagcaaggacgggaaattggtgcccatgactgtgttccataagactgactctgaagacctccagaaaaaaccactcctagtgcacgtgtacggcgcctacgggatggacctcaaaatgaactttaggcccgaaaggagggtgttggttgatgatggatggattctcgcttactgccacgttagaggggggggcgaactgggtttgcagtggcatgcagacggtcgcttaacaaaaaaactgaacggtctggcggacctggaggcatgtattaaaacactacacggccaggggttttcgcagccttccttgacaaccctcactgcattctctgctggaggggttctggccggcgcactctgcaattccaatcctgagctcgttagagccgtgacactggaggccccctttctggacgtgcttaacaccatgatggacactacattacctctcacactggaagaactggaagagtgggggaacccatcgtcagacgagaagcacaaaaattatatcaagcgttactgtccttatcagaatattaagccacagcattatccaagtatccatatcactgcatacgaaaatgatgaacgggtgcctctgaagggtatcgtgtcatataccgagaaacttaaggaagctatcgccgaacacgccaaagatactggggagggataccaaacacctaacatcatcctggatatccagcctggcggcaaccatgtgatcgaggattcacataaaaaaattaccgcccaaatcaagtttttatacgaagaactggggctcgatagtacaagcgtgttcgaggacctcaagaagtatctaaagttttag

SEQ ID NO: 200916 - DNA, 2184 bp, synthetic construct
  misc_feature 1..2184: note = Description of Artificial Sequence: Synthetic coding sequence
  source 1..2184: mol_type = other DNA
atgcagcagaagaccaagctgttcctgcaggccctgaagtacagcataccacaccttggcaagtgtatgcagaaacagcacctcaaccactataattttgccgatcattgttataaccggattaagctgaaaaaataccacttgaccaaatgcctccagaataaacctaaaatatccgagctcgctcgaaatatcccgagcagatctttttcatgcaaggacctccaacctgtaaaacaggagaacgaaaaacctctccccgagaatatggacgccttcgagaaagtgcggaccaaactagagactcagcctcaagaagagtatgagattatcaacgtcgaagtgaaacatggaggctttgtgtactaccaggagggttgttgtctggtgagatctaaggacgaagaggcagacaatgacaattacgaagttctgttcaatctggaagagctcaaactggaccagcccttcatcgattgtattcgcgttgcaccggacgaaaaatacgttgcagcaaaaatcagaaccgaggacagtgaggcatctacttgtgtgatcattaagctctctgatcaacctgttatggaagcaagctttcctaacgtgtcctctttcgagtgggtaaaggacgaagaagacgaggacgtcttattttataccttccagcgtaaccttcgttgccacgacgtttacagagccacattcggtgataacaagcggaatgagcggttttatacagagaaggacccctcctacttcgtctttctgtacctcaccaaggactcacgctttctcactattaatattatgaataagactacttctgaggtgtggttgattgatggcctgtctccatgggaccctcctgtcctcatccagaagcgcattcatggtgtcttatattacgtggagcatcgtgacgacgagttatacattctgaccaacgtgggcgagccgacggagttcaaattgatgcggactgccgcagacactcccgcaataatgaactgggatttattcttcacgatgaagagaaatactaaggtgatagatcttgacatgtttaaagaccattgcgtcttgtttctaaagcacagcaacctgctttatgtgaacgtgatcgggctggccgatgactctgtgcggtccctcaagctgccaccttgggcttgcggcttcattatggataccaacagcgatccaaagaattgccccttccagctgtgttctcctatacggccccctaagtattacacttataagttcgccgagggtaagctgtttgaggaaacagggcatgaggaccctatcacgaagaccagccgcgtcctgcgcctagaagccaaatccaaggacggtaaattggtacctatgaccgtctttcataaaactgattcagaagacttgcagaaaaaacctctcttagtccacgtatatggagcttatggaatggacctgaagatgaattttcggccggaaagacgcgtgctcgttgacgatggatggattttagcttactgccatgtgaggggaggaggggagctcggcctccagtggcatgccgacggtagattaacaaaaaaactgaatggcctggcagaccttgaagcttgtatcaaaactctgcacggccagggcttctcccagccctcattaactacccttacagcttttagcgcaggtggagtactggcaggcgccttgtgcaattccaacccagaactggtgcgagcagtgacactcgaagctcccttcctagacgtgctcaacaccatgatggataccactctgcccctaaccctagaggagctggaagagtggggaaacccttcgtccgacgagaaacacaaaaactacatcaagcgttattgtccgtatcagaacattaagccacaacactatccttccatacatattacagcatatgaaaacgacgaacgagtaccgctgaaaggaatagtgtcatatactgagaaattgaaggaagccattgccgaacacgccaaagatacaggagaaggataccagactccaaatatcattctggatatacagccaggcggtaaccatgtgatcgaagattctcacaaaaagatcaccgcacagattaaatttctgtatgaggaactcggcctggatagcacatccgtttttgaagacctcaagaaatacctcaaattttag

SEQ ID NO: 200917 - DNA, 2184 bp, synthetic construct
  misc_feature 1..2184: note = Description of Artificial Sequence: Synthetic coding sequence
  source 1..2184: mol_type = other DNA
atgcagcagaagaccaagctgttcctgcaggccctgaagtacagcatacctcacctcggaaagtgcatgcagaaacaacacctgaatcattacaattttgctgaccactgctataaccgcattaagcttaaaaagtaccacctcaccaagtgcttgcagaataaaccgaagatttccgagctggccagaaatattccatctcgctctttcagttgtaaggacctccaacccgttaagcaagaaaacgagaaacccttaccggagaatatggacgcctttgagaaggtgagaaccaaattagagacgcagcctcaggaggaatacgagatcatcaatgtagaagtcaagcatggcggcttcgtttattaccaagaaggatgttgcctcgtcaggagtaaagacgaagaggccgacaatgacaactacgaggttctatttaacctggaggagctcaagttagaccagccgttcattgattgcatcagggtcgctccggatgagaagtacgtggccgctaagatcagaaccgaagattctgaggccagcacatgcgttattattaaactcagcgaccaacctgtgatggaagcttccttccctaacgtcagctcgtttgagtgggttaaggatgaagaggacgaggacgtgctattttacactttccagaggaacctcagatgtcacgacgtgtacagagctacctttggagacaacaagaggaatgagcggttttacacggagaaagaccctagctacttcgtatttctttacctgactaaggattccagattcctgaccatcaacatcatgaacaaaaccacatccgaggtctggttaatcgatggactgtcaccttgggatcctccagttctgatccagaagcgaattcacggggtgctgtattatgtcgagcacagagatgatgagctctatatcttaactaatgtgggggagcccacagaatttaagctgatgcgaactgctgcggatacccccgccattatgaactgggatttgttcttcacaatgaagagaaacacgaaggtgatcgatctggacatgttcaaggaccactgtgtgctttttctgaaacattctaatcttctatacgtgaatgtgatcggcctggcagacgacagcgtacgttctctgaaattgcctccttgggcctgtggctttatcatggacacaaactctgaccccaaaaattgtcctttccagttgtgcagccctatacgccctccgaagtattatacctataagtttgcagagggcaagttgttcgaggaaacaggtcatgaagatcctataaccaagactagccgcgtcctcagactggaggccaagagcaaggatggcaaactagtgcccatgacagtgttccataaaaccgactcagaggatctgcagaagaagcctctcctagtccacgtatacggggcttatggaatggacctgaagatgaacttcaggcctgaaagacgggtcttggtagacgacggatggattttagcttactgtcacgtccgtggggggggggagttagggcttcaatggcacgccgacggcagactgactaaaaaattaaacggcctagctgacttagaggcctgtatcaagacactgcacggccagggcttttcccagccatccctgacaaccttgacagcatttagcgcgggtggcgtgctggctggtgccctgtgcaactcaaatcccgaattagtaagagcagtgacgttagaggcaccttttctcgacgtcctgaacacaatgatggatacaactttacccctgaccctcgaggagctggaggagtggggcaatccatccagcgatgagaagcacaagaattatatcaagcgttattgcccataccagaatatcaaaccgcaacattatccatccatacacatcacagcatacgagaacgatgaaagagtgccactgaaaggcatcgtgtcctacaccgagaaactgaaagaagcaatagctgagcatgctaaggataccggagaaggatatcagactcctaatattattcttgacatccagccaggcgggaatcacgtgatcgaggattctcataagaagataaccgcacagatcaaattcctgtacgaggagctaggcctggacagtacctcagtgttcgaggatttgaaaaagtacctgaagttttag

SEQ ID NO: 200918 - DNA, 2184 bp, synthetic construct
  misc_feature 1..2184: note = Description of Artificial Sequence: Synthetic coding sequence
  source 1..2184: mol_type = other DNA
atgcagcagaagaccaagctgttcctgcaggccctgaagtacagcattccacaccttgggaaatgtatgcaaaagcagcacctgaaccattataactttgctgatcactgttataaccgcatcaagctgaaaaagtaccatttgacaaagtgcctgcagaataagcccaaaatcagcgagcttgcaaggaacatcccatctcggagtttttcgtgcaaggatctgcagccagttaagcaggagaatgagaagcccctgcctgaaaatatggacgcttttgagaaggtgcgaactaagctggaaactcagccccaggaggaatatgagatcatcaacgtggaagtgaagcacgggggattcgtatactaccaggagggttgctgtttggtcaggtccaaagatgaggaggcagacaacgacaactacgaggttctgtttaatctggaagagctcaaactggaccagcccttcattgattgcatacgtgtggcaccagacgaaaaatatgtagcggcaaaaatcagaaccgaagactccgaggcatctacctgtgtcattattaaactgtctgaccagcctgtgatggaggcctcttttcccaacgtatctagtttcgagtgggtgaaggatgaagaggacgaagacgttctgttctacactttccaaagaaacctccgatgtcacgacgtgtatagagcaaccttcggagataacaagagaaatgaacgcttctatacggaaaaagatccaagttactttgttttcctttacctgacaaaagactcccgctttctgaccattaacattatgaacaaaacaacctcagaagtttggttaattgatggactatccccttgggacccgcctgtgcttattcagaagaggattcacggagtgctgtattatgtggagcatcgagatgacgagttatatatcctgacgaacgtgggagagccaactgagttcaagctgatgagaaccgcagcggatacccctgctattatgaattgggatttgttttttacaatgaagaggaatacaaaggtcatcgacctcgacatgttcaaggaccattgtgttctgttcttgaaacattccaaccttttgtacgtcaacgtaatcggcttggctgatgacagtgttagatcactgaagctgccaccgtgggcttgcggtttcatcatggacactaattccgacccgaaaaattgccccttccagctctgttcgcctattagaccaccaaaatattacacttacaaattcgcagaagggaagctttttgaggagactggccacgaggaccctatcacaaagactagcagagtgctccggctcgaggcaaagtcaaaagacggaaagctagtgcccatgactgtgtttcataaaactgattccgaggacctgcagaagaagccattgctcgtgcatgtgtacggcgcatacgggatggatttaaagatgaacttccgcccggagaggcgggtgctcgtggatgacggatggatcctcgcctactgccacgtccgcggtggcggcgagcttggactccagtggcacgcggatggcagactgactaaaaagcttaatggcctggcagatctggaggcctgcatcaagactctgcacggacagggattttcgcagcctagcctgaccactctcactgccttcagcgctggaggtgtcctagccggtgcactgtgcaacagtaacccggaactggtgagagcggtaacgctggaagccccctttttggatgtgctaaataccatgatggacacaactctgcctcttaccctggaagaactggaggagtggggtaacccatcttccgacgaaaaacacaagaattatattaaaaggtactgcccgtaccaaaatataaaaccccagcactacccctccatccatatcaccgcttacgagaacgacgaacgggtaccactcaagggcatcgtttcttataccgagaagcttaaagaggcgattgcggagcacgccaaggatacgggcgaaggctatcagacccccaatataattctcgatatccaacctggggggaatcatgtcattgaagacagccacaaaaaaatcacagctcagattaagttcctgtacgaagaactggggttagacagtacttccgttttcgaggatctcaagaagtacctgaaattctag

SEQ ID NO: 200919 - DNA, 2184 bp, synthetic construct
  misc_feature 1..2184: note = Description of Artificial Sequence: Synthetic coding sequence
  source 1..2184: mol_type = other DNA
atgcagcagaagaccaagctgttcctgcaggccctgaagtacagcatccctcacttaggcaagtgcatgcagaagcagcatttgaaccactacaatttcgctgatcattgttataatagaatcaagctcaagaagtaccacttaaccaaatgtctgcagaacaaacctaagatttcagaattggcaagaaatattcccagcaggagcttcagttgcaaggacctccagcccgtgaaacaggagaacgagaaaccgctccccgagaacatggatgcttttgaaaaggtaaggaccaagcttgagacccagccgcaggaagaatatgaaatcataaatgttgaggtgaaacacggagggttcgtctattaccaggagggttgttgcctggtgaggagtaaagacgaagaggccgataatgataactacgaagttctgtttaatctcgaggaactgaaactggatcaacccttcatagactgcattcgggtggcaccagatgaaaagtatgttgcagcaaagatcaggactgaagacagcgaggccagtacttgcgtgattatcaagctcagcgaccagccagtgatggaagcttcttttcccaatgtatcctcttttgaatgggttaaggatgaggaagacgaagacgtgctgttctacacctttcaaagaaacttaagatgtcatgatgtgtaccgagctactttcggggataataagagaaatgagcggttctacacagagaaggaccctagttacttcgtgttcctgtatctaactaaagacagccggttcctcaccattaatatcatgaataagaccacatcggaggtttggctgattgacgggctgagtccctgggacccccctgtcctgatccagaaaaggattcacggggtgctctattatgtggagcatcgtgacgatgagctgtatattttaactaacgtgggggaacctaccgagttcaaacttatgcgaacagccgccgatactccggctattatgaactgggaccttttcttcactatgaagcgaaatacaaaggtgatcgaccttgacatgtttaaggaccattgtgtgctgtttctgaaacacagcaatctgttatatgtaaacgtcatcggactagctgacgactctgtgagaagccttaagctgccaccgtgggcctgcggcttcatcatggacacaaactccgatcccaaaaactgcccttttcagctctgttcaccgatccgaccccctaaatactacacctacaagttcgctgaaggcaagctatttgaggagaccggtcacgaggaccctattaccaagaccagtcgcgtactgcgcctggaggctaagtcgaaggatgggaaattagtgccaatgacagttttccataagaccgactctgaagatctgcagaagaagccactcttggtccatgtctatggagcctatgggatggatctgaaaatgaattttagacctgaacgcagagtgctcgtagacgacggatggattctggcctattgtcacgtgcgggggggcggcgagctggggttgcagtggcatgcagacgggcgacttacaaagaagctgaatggccttgccgatctagaagcttgcatcaagacactccatgggcagggattttcacagcccagcctgactacactcaccgctttcagcgccggaggcgttctggccggggctttgtgcaacagcaaccccgaactggtacgagctgtcaccctggaagctccctttctagatgtgctgaacaccatgatggacacaactctgccgctcactctggaggagctagaggagtggggcaatcctagctctgacgagaagcacaagaattacattaaacgctattgcccttatcagaacataaaaccacagcattacccctctatccatatcaccgcatatgaaaacgacgagcgggttccattgaagggcatagtgtcttacactgaaaagctgaaggaagctatcgcggaacacgccaaggataccggggaaggatatcagactccaaacataatcttagacatccagcctgggggaaaccacgtgatcgaggactcgcataagaaaattacagcgcagatcaaatttctatacgaagaactgggactcgactccacctctgtgtttgaggatcttaagaagtacctgaagttctag

SEQ ID NO: 200920 - DNA, 456 bp, synthetic construct
  misc_feature 1..456: note = Description of Artificial Sequence: Synthetic coding sequence
  source 1..456: mol_type = other DNA
atgcagcagaagaccaagctgttcctgcaggccctgaagtacagcattccacatcttgggaaatgtatgcagaaacagcatctgaaccattataattttgctgaccattgctataaccgcataaagctgaagaagtaccatcttaccaaatgtctgcagaacaaaccaaagatttcagaactggcacggaatattccgtccaggagcttctcatgcaaggatcttcagccggtgaagcaggaaaacgagaagccactgcccgaaaacatggatgcattcgaaaaggtgcgtactaagctagagacgcagccccaagaggaatacgaaatcataaatgtggaggtgaaacacggcggcttcgtgtactatcaggagggatgctgtcttgtgagatctaaggatgaagaggcagacaacgacaactacgaggtcctttttaacctggaagagctgtag

SEQ ID NO: 200921 - DNA, 1917 bp, synthetic construct
  misc_feature 1..1917: note = Description of Artificial Sequence: Synthetic coding sequence
  source 1..1917: mol_type = other DNA
atggacgccttcgagaaggtgcggaccaagctggagacccagccccaggaggagtacgagatcattaatgtggaggtcaaacacggagggtttgtctactaccaggaaggctgttgccttgtaaggagtaaggatgaggaggctgataatgataactatgaggtactctttaatttagaagagttgaagttagaccaaccattcatagactgcatcagggtggcccccgatgagaagtacgtggctgcgaaaattcgaaccgaagactctgaagctagtacatgtgtgatcattaaactatccgatcagcctgtcatggaagcttctttccccaacgtgtcttccttcgagtgggtcaaagatgaagaggatgaggacgtgttgttttatacttttcagcgcaatctacgatgtcatgacgtttatagggccaccttcggcgacaataaaaggaacgaacggttctatacagagaaagatccaagctactttgtgttcctgtatctgacaaaggacagcagattcttgaccatcaatattatgaataaaactacttccgaagtatggctgatcgatgggctgtccccttgggaccctcccgtgctgattcagaaaagaatccatggtgtcttgtactacgttgagcaccgggacgatgagctctatattctgaccaacgtcggtgaacctacagaattcaagctcatgcggacggcagccgacacccctgcaattatgaactgggacttgtttttcacgatgaaaagaaatactaaggtcattgacttggatatgttcaaagaccactgtgtgctatttctcaaacactcaaatcttctctacgtcaacgtaattgggctggccgacgactctgtccgctctctcaaactgcctccttgggcctgtggtttcataatggatactaatagtgacccaaaaaattgcccctttcagttgtgctctcccattcggcctccaaaatattatacctacaagttcgccgaaggcaagttatttgaggagaccggacacgaggatccaatcaccaagacgtcacgagtcctaagactggaagcaaagagcaaggacgggaagctggtgcctatgaccgtctttcacaaaactgactccgaagacctacagaaaaagccactgctcgtccacgtttatggagcatacgggatggatttgaaaatgaactttcgcccggaaagaagggtactcgttgacgatgggtggattttggcctattgccacgtgagggggggcggagaactcggtctgcagtggcacgctgacggcagactaaccaaaaaattaaatgggcttgccgatctcgaggcctgcattaaaacgctgcacgggcaggggtttagccagccttcactcaccactctgacggccttctccgccggcggtgttttagctggggctctgtgcaattctaatcccgagctcgtgagagctgtgacactggaggcaccatttctggatgttttaaatacaatgatggataccaccctgccactgacacttgaagagctggaagaatggggcaacccgtcatctgatgagaaacacaaaaattacatcaagcggtactgcccctatcagaatatcaaacctcagcattacccgagtattcatataaccgcctacgaaaatgacgagagagtccctctgaaggggatcgtctcatacacagaaaagttaaaagaagcaatcgctgagcatgctaaggacaccggcgaagggtatcagacccccaatattattctggacattcagccaggaggtaaccacgttattgaggattcacataagaaaatcaccgctcagatcaagtttctgtacgaggagctgggcctcgactctacttcggtctttgaggatctgaagaaataccttaagttctag

SEQ ID NO: 200922 - DNA, 1491 bp, synthetic construct
  misc_feature 1..1491: note = Description of Artificial Sequence: Synthetic coding sequence
  source 1..1491: mol_type = other DNA
atgggccggcgggccctgctgctgctgctgctgagcttcctggccccctgggctacaattgccctgcgacctgctctgcgcgcacttggatccctgcacctgccaacaaacccgacctcactgcccgcagttgctaaaaactactccgttctttacttccagcaaaaagtcgaccactttggattcaataccgtaaagaccttcaaccagagatacctagtggctgataaatactggaagaagaatgggggcagcatactgttttacaccggcaacgagggggatattatctggttctgtaataataccgggttcatgtgggatgtggccgaagagctgaaggccatgctggtgtttgcagagcatcgttattatggggagagtctcccttttggggataattcattcaaggattctagacacctgaatttcttaactagcgaacaggccctcgcagactttgctgagctgatcaagcacttgaaaaggacgataccaggagccgagaaccagccagtgattgcaatcggaggaagctacggggggatgttagcagcctggttccgcatgaagtacccgcacatggtagtaggagcgctggccgcgtccgccccaatctggcagttcgaagacctggtaccttgtggcgtgtttatgaagatcgtgaccacggatttcagaaagtccgggccccactgttctgagtctatacaccgctcctgggatgctattaacagactaagcaatactggatcagggttgcaatggctgaccggtgcattacatctctgtagcccattgaccagccaggacatacagcatctgaaagactggatctcggaaacatgggtgaatttagctatggtggattacccatatgcctcgaacttcctgcagccattaccggcttggcccattaaggtggtttgtcagtacctaaagaaccctaacgtctctgattccctactccttcagaatatattccaggcactgaacgtttattataattactccggacaggtgaagtgcctcaatatttctgaaaccgcaacgagctctctgggaacactgggctggagctatcaagcgtgtacagaggtggtcatgcccttctgcaccaatggtgtcgatgacatgttcgagccccactcttggaacctgaaggagttaagcgacgattgttttcagcaatggggcgtaagaccacgaccatcatggatcaccactatgtacggtgggaagaacatttcttctcacaccaatattgttttttcaaatggggaactggatccgtggagcggaggtggggtaaccaaagacataactgatacccttgttgccgtcaccattagtgaaggggcgcaccatctcgacctcagaaccaaaaacgcactagatcccatgagcgttctgttggctcgctctcttgaggtgcggcacatgaagaattggatccgagacttctatgactctgccggcaaacagcactag

SEQ ID NO: 200923 - DNA, 1554 bp, synthetic construct
  misc_feature 1..1554: note = Description of Artificial Sequence: Synthetic coding sequence
  source 1..1554: mol_type = other DNA
atgggccggcgggccctgctgctgctgctgctgagcttcctggccccctgggcaacgattgcattgcgtcccgccttgagggcattaggttctctacatctgcctactaatcccaccagcctgccggctgttgccaaaaattattctgtgctgtactttcagcagaaagcactggctgcgggacagctgcatatttgtattattcagctgaaccactacaaaacaccactcgtcgatcatttcgggttcaatacagttaaaacgtttaaccaacgttatttggtggccgataagtactggaaaaaaaacggaggttctatcctgttttacactggaaacgagggagatatcatttggttttgtaacaacaccggctttatgtgggatgtcgccgaggaattgaaggctatgctagttttcgctgagcacaggtactatggagagtccttgccgttcggggataactcgttcaaagactcgcgtcacctcaattttctgacttccgagcaggctctggccgacttcgcagagctcattaaacatcttaagagaacaatcccaggagccgagaatcagccagtgattgccattggcggttcatatggcggaatgctcgctgcttggttcaggatgaagtacccccatatggtcgtcggagcactggcagcttctgcaccaatatggcaattcgaggatctggttccctgtggcgtgttcatgaaaattgtgaccaccgactttcgaaaaagtggaccacattgcagtgagtctattcaccgaagttgggatgcaatcaaccgactgtctaatactggctcaggactccagtggttgacgggggcacttcacctgtgcagccccctcaccagccaagatatacagcacctgaaagattggatctctgagacttgggtgaaccttgcaatggtcgactacccttatgcctcaaacttcctccagcctctccccgcttggcctattaaagtggtctgtcagtacctgaaaaacccgaacgtgtccgactctctgctgctgcagaacatatttcaggcactgaacgtttactacaactattcaggacaagttaaatgcctgaacatttctgagactgccacctcctccctgggaacactgggctggagctaccaagcctgtaccgaggtcgtcatgccgttctgtactaacggcgtcgacgacatgttcgagcctcattcttggaatctgaaagaactttccgacgactgctttcagcagtggggagtgcggcctcgaccgagttggatcaccaccatgtatggagggaagaatatctcaagtcacacaaacatcgtttttagcaatggggaactggacccatggtctggagggggcgttaccaaggacatcaccgatacattagtggcagtgacgatcagcgaaggagcccaccatctcgacctgcgcaccaagaacgctcttgatcctatgagcgtcttactagcacgatcactagaagtccgacacatgaaaaactggatccgcgacttttacgattcagccggtaaacagcattag

SEQ ID NO: 200924 - DNA, 1176 bp, synthetic construct
  misc_feature 1..1176: note = Description of Artificial Sequence: Synthetic coding sequence
  source 1..1176: mol_type = other DNA
atgtgggacgtggccgaggagctgaaggccatgctggtgttcgccgagcataggtattacggagaatctctccccttcggcgataactccttcaaagactctcgccacctgaattttcttacctccgaacaggcgctggccgattttgctgagttgataaaacatttgaagcgaaccatcccaggcgccgagaatcaaccagtcatagctattggaggaagttatggaggtatgctggctgcctggttcaggatgaaatatccacatatggtcgttggcgccttggccgcatccgcccccatctggcagttcgaggacctagtgccttgtggcgtgtttatgaagattgtgacaacagatttccgcaaatcgggcccccactgtagcgagtccatccatagatcttgggacgcaatcaatcgactctctaacaccgggtctggcttacagtggctaacgggtgccctgcatctttgtagccccctgacttctcaagacatccagcaccttaaggattggatcagtgaaacttgggtcaacttagctatggtcgattacccatacgcgagtaacttcctccaacccctaccagcctggccgatcaaggtggtctgccagtatcttaagaatcccaacgttagtgattccttgctgcttcagaacatttttcaggctctgaatgtgtactacaactatagcggacaagtaaaatgtctcaatataagcgaaacggccacatctagccttggaacgctgggctggtcttatcaagcctgtacggaagtggtaatgccattctgcaccaacggcgtggacgacatgtttgagccacactcgtggaatcttaaggaactgagtgatgattgctttcagcagtggggcgttcggcctcgccctagttggatcacgactatgtacggcgggaaaaatatatcaagtcacacgaacatcgtattttcaaacggtgagctggacccttggtccggaggaggtgtcactaaagatataacagacaccctagtggcggtgaccatctccgaaggtgcacaccacctggatctgcggacaaagaacgctctggaccccatgagcgtactcctggcacgctccctggaagttcgccatatgaagaattggataagggatttctacgactcagccggcaaacagcattag

SEQ ID NO: 200925 - DNA, 1428 bp, synthetic construct
  misc_feature 1..1428: note = Description of Artificial Sequence: Synthetic coding sequence
  source 1..1428: mol_type = other DNA
atggagggcctgctgacccggtgccgggccctgcccgccctggccacttgtagcagacaactgagtggatatgtgccatgcaggtttcatcactgtgctcctagacggggcagacgcttgctgctgagccgggtattccagccccagaacctcagggaagaccgagtgctgagcctgcaggacaagtctgacgacctgacctgcaagagtcagagattgatgctgcaggttggcctcatatatcccgctagccccggatgttatcatctgctgccctatacagtccgggctatggagaaactggtgcgcgtcatcgatcaggagatgcaagctatcggaggtcagaaggtgaatatgccctccttatcacccgccgagctgtggcaggcaacaaacaggtgggatctaatgggcaaggaactgctgagactccgagatagacatgggaaagagtactgtctggggccaacccacgaagaagccattaccgcactcatcgcttctcagaagaagctgagctataaacagttgcctttcctgttataccaggtgacgcgcaagtttagggacgaacctcgccccagatttgggctattgagaggtagagaattctacatgaaggatatgtacacattcgactcgtcacccgaggcggcccagcagacatactccttagtgtgcgacgcctattgttccctcttcaataaactgggactgccttttgttaaggtacaggccgatgtcggcaccattggcgggaccgttagccacgagtttcaactgcccgttgatattggggaggacagacttgctatatgtcctcgctgtagtttctctgccaatatggagacattagatctttcccagatgaattgtccagcgtgccaaggccctctgaccaaaacaaagggcatcgaagtaggccatacattttacctgggcacaaagtacagctcaattttcaatgctcagtttacgaatgtgtgtggaaaacctactcttgcagaaatgggctgctatggcctgggagtcacgaggatactcgcagccgccattgaagtactatccaccgaagactgtgtcaggtggccctcactgctggctccttaccaggcatgcctcatcccccccaagaaaggtagcaaagagcaggcagccagcgaattgatcggccaattatatgaccatattaccgaagcggtaccacagctgcacggggaggttctgctcgatgatcggactcacctgacaatcggaaataggctcaaagacgcgaataagtttgggtaccctttcgttataattgccggaaagagagcgttggaggatccagcacactttgaagtctggtgtcagaatacaggcgaagtggccttcttgactaaggatggggtaatggacttactgacaccagtacagacagtgtag

SEQ ID NO: 200926 - DNA, 498 bp, synthetic construct
  misc_feature 1..498: note = Description of Artificial Sequence: Synthetic coding sequence
  source 1..498: mol_type = other DNA
atggccaagatgaacctgagcagctacatcctgatcctgaccttcagcctattcagccagggtattcttcttagcgcctcgaagtctatacggaacctggatgatgatatggtctttaatacctttcgactaggaaaggggtttcagaaggaagataccgcagagaaatctgtgatcgctcctagcctggagcagtataaaaacgacgagtcatcattcatgaatgaagaggaaaacaaggtgtccaagaacacaggctctaagcataattttctgaatcatggtctccccttgaacctggctattaagccttacctcgcccttaaaggttcggtggccttcccagccgaaaacggggtgcagaacacagaaagcacccaggagaagcgtgagatcggcgacgaggagaactccgcaaaattccctatcggtcggagggactttgacatgctgcgctgtatgcttggtagggtgtatagaccctgctggcaagtttag

SEQ ID NO: 200927 - DNA, 2598 bp, synthetic construct
  misc_feature 1..2598: note = Description of Artificial Sequence: Synthetic coding sequence
  source 1..2598: mol_type = other DNA
atggccctggtgctgggcagcctgctgctgctgggcctgtgcggcaattcattttcgggcggtcagcccagtagcactgatgcccctaaggcttggaactacgaattaccagccactaattacgagacacaggatagccacaaggcagggccaataggaattctcttcgaacttgtgcacatatttctgtacgtggttcagcctagggatttcccagaggacaccctgagaaagttcctgcagaaggcctacgaaagcaagatcgactatgacaagcccgagacagtgattttggggctgaagattgtctactatgaagccggaatcattctgtgctgtgtgctggggttattatttatcatcctgatgccactcgtaggctacttcttttgcatgtgccgctgctgtaataagtgcggaggtgaaatgcatcagcgtcaaaaggaaaatggcccatttctgcggaaatgttttgcaatctcactgctggtgatatgtatcattatctcaatcgggatattctacggttttgtggcaaaccaccaagttcgcacgagaattaagagaagccgcaagctggccgattcgaattttaaagacttgagaaccctcctgaacgagacccccgaacaaattaaatacattctagcccagtacaacaccacaaaggataaggctttcacagatctcaatagcattaactctgtgcttggcggcggaattctggatagactgagacccaacatcatccccgtcctggacgaaatcaagtccatggcaactgctattaaggaaacgaaggaagcccttgagaacatgaattctactctcaaatcactccatcagcagagcacacaactctcctcgtctctgacctcagtgaagacgagtctgaggtcctctctgaatgaccccctgtgcctggttcacccatcttctgagacttgtaatagcattagactgagcctgagtcagctaaattccaaccctgagctgcggcaactaccacccgttgatgccgagctcgacaatgtcaacaacgtgttacggaccgatcttgacgggcttgtgcaacaagggtaccagtctcttaacgatattcccgaccgggtgcaaagacaaacaacaacagtagtcgcggggatcaagcgtgttctgaattccatcgggagtgacatcgataatgtgacccagcgactgcccatccaggacatactgagcgccttctcggtgtacgttaataacactgaatcgtacattcacaggaacctgcccaccctggaggaatacgatagctattggtggttgggagggctcgtcatttgttccctgcttactctgatcgtcatcttctactatttaggacttctgtgtggcgtgtgtgggtatgacagacatgcaacacccacaacccgtggatgtgtgagcaacacagggggagtttttctcatggtgggggtcgggcttagctttttgttctgctggatcctaatgatcatagtggttctaacatttgtctttggggcaaatgtcgaaaaacttatctgcgaaccctatacgagcaaggaactgttccgggtgctggatactccctatctgctcaacgaagactgggagtactacctctcgggaaagctgttcaataaaagcaaaatgaagctgacgttcgaacaagtgtattccgattgcaagaaaaatcgtgggacttacggaacactgcaccttcagaacagcttcaatataagcgagcatctgaatattaatgagcacactggctcgatctcatctgaactagaaagcctgaaggtgaatctgaatatattcctgcttggggccgccgggcgtaagaacctgcaggactttgccgcctgtggaatcgatcggatgaactacgattcttacctggcacaaaccggcaagtcaccagcaggcgtaaaccttctcagttttgcatatgatctcgaggccaaggccaactcccttccgccagggaacttgaggaacagtctcaagcgagacgctcaaacaatcaagactatacaccagcagagggtgctgccaatcgaacagagccttagcacgctgtaccaatctgtgaaaatattgcagcgcaccggcaatggcctgctggagcgcgttacacgcatcttggcgtcacttgatttcgcgcaaaattttattactaataacacgtcgagcgtaattatcgaggagaccaagaagtatgggaggacaattatcgggtatttcgagcattacctgcaatggattgaatttagtatttcagagaaggtcgcgagttgcaagccagtggcaacagcactggacacggcggtggatgtgtttctgtgttcctacatcatcgacccattgaacctcttctggtttgggattggtaaggccacagtgttcctcctcccagcacttatctttgcagtcaagctcgctaagtattacagaagaatggattctgaagacgtgtacgatgatgtcgagacaattcctatgaaaaatatggagaatggtaataacgggtaccataaagatcacgtctatggtattcataacccagttatgacttccccctcacagcattag

SEQ ID NO: 200928 - DNA, 2571 bp, synthetic construct
  misc_feature 1..2571: note = Description of Artificial Sequence: Synthetic coding sequence
  source 1..2571: mol_type = other DNA
atggccctggtgctgggcagcctgctgctgctgggcctgtgcggcaatagtttctccggcggccagccctcaagtacggacgccccaaaggcatggaactacgaattgcccgccactaactacgagacccaagattctcacaaagcaggacctatcggtattctctttgagcttgtgcatatttttctatacgtggtccagcccagagacttccccgaagacacgcttcgtaaattcctgcagaaggcctatgaaagcaagatcgactacgataaaatagtgtattatgaggctggtatcattctgtgctgcgttttggggctgcttttcattatcctgatgcctctagtgggctacttcttctgtatgtgtcgctgctgtaataaatgtggcggggagatgcaccagcggcagaaggaaaatggcccattcctccgcaaatgcttcgccatctctctgctggtcatttgcatcattatttcgattggcattttctacgggttcgttgccaaccaccaggtgagaactcgaattaaaaggtcccgaaagctcgccgattccaacttcaaggacctccgcaccctgctgaacgagacaccagaacagatcaaatatattctggcccagtacaataccaccaaagacaaggcttttaccgacctgaactcaattaacagcgtcctgggcgggggtatattggatcgattacgtcctaacatcatacccgtgctggatgaaattaagtcaatggcaaccgcaatcaaagaaaccaaggaagcattggagaacatgaattccaccctgaaaagcctgcatcagcagagcacccaactgtcttcctcactaacttctgttaagaccagcctcagatcctctctaaacgaccctctatgcctggttcatccctctagcgagacctgcaactctatacgcctgagtttatctcaacttaacagcaaccccgaattgaggcagctcccccccgtcgatgcagagctcgacaatgtcaacaacgtcctaaggaccgatcttgatggactagtccagcagggctatcaatctcttaacgacatacccgatcgcgttcaacggcaaaccaccacagttgtggccggcatcaagcgcgtgctcaactccatcggcagcgatatagataacgtcactcagcgactgccaattcaagacatcctctctgcgttttcagtgtacgtcaacaacacggagtcctacattcacagaaacctgcccacactagaggagtatgatagctattggtggctaggcggccttgtaatctgttcattactaaccctcattgtaattttctattatctgggacttttgtgcggcgtttgtggatacgatcgtcatgcgacgccaaccacacgaggttgcgtctcaaacacgggcggtgtgtttctgatggtgggagtgggtttgtccttcctcttctgctggatcctcatgatcattgttgtgctgacctttgtgtttggagccaatgtcgagaagctgatctgcgaaccctacacaagcaaagagctttttagagttttggatacaccatacctgctgaatgaggattgggagtactatctcagcggcaaactcttcaataagagcaagatgaaactcaccttcgagcaagtatactcagattgtaagaaaaaccgcgggacatatggtactcttcacctgcagaacagttttaatatctccgagcacctgaatatcaatgagcacacaggctcaatcagttccgagctagagtcccttaaggtgaaccttaacatattcctcttgggtgcagcaggacggaaaaatctccaagacttcgctgcctgtggtatcgacagaatgaattatgatagttatttggctcagaccgggaaaagccccgccggggtgaacctcctttcatttgcctacgacctcgaggcaaaagctaatagtctgccgcctgggaacctccgcaactccctaaagagggatgctcagactataaaaactattcatcagcaacgggttctgcccatcgaacaaagcctgagtacactctaccagagcgttaagatcctgcagcggacgggtaacggtctgcttgaacgggtaaccagaatactcgcatcactggacttcgcccagaactttataaccaataacaccagctctgttattattgaagagaccaagaaatatggcaggaccataattggttacttcgaacactatctccagtggatcgaattttctataagtgagaaggtcgcctcgtgtaaaccagtagccaccgcactggacaccgcagtagatgtctttctctgcagttacatcattgaccccctgaatctgttctggtttgggattggcaaagcaacggtgtttctgctgcccgcacttatctttgccgtgaaacttgctaaatactacaggcggatggatagcgaagacgtctatgatgatgtggaaactatccctatgaaaaatatggaaaatgggaataacggctaccacaaagatcacgtgtacggaattcacaatcccgtgatgacctccccaagccagcactag

SEQ ID NO: 200929 - DNA, 2571 bp, synthetic construct
  misc_feature 1..2571: note = Description of Artificial Sequence: Synthetic coding sequence
  source 1..2571: mol_type = other DNA
atggccctggtgctgggcagcctgctgctgctgggcctgtgcggcaattctttttccggcgggcagccatcttctaccgacgcccccaaagcctggaattacgagctgcccgcgactaattatgaaacacaagattcgcataaggctgggcctataggcatcttgttcgaattggtgcacatcttcctatacgttgttcaacctagggacttcccggaggataccttacggaagttcttacagaaggcctacgaaagcaaaattgactacgacaagattgtctattacgaggcaggcataatactctgctgtgttctgggactgctattcatcatcctgatgcccctggttgggtatttcttctgcatgtgtagatgttgtaacaaatgcggaggagagatgcatcagcgacaaaaggagaatggcccatttctgaggaagtgcttcgccatcagcctgcttgtcatttgcatcattatctctatcgggatattttacgggtttgtggcaaaccaccaggttcggactagaataaagagatctcgtaagctcgccgactcaaacttcaaagatctgaggaccctcttgaacgaaacacctgaacagatcaagtacatcctggcccagtacaacaccaccaaagacaaagcgtttaccgacctcaattcgattaattctgttttaggaggcggtatcctggatcgccttcggcctaatattattcctgtgcttgacgagatcaaatccatggcgacagccattaaggaaacaaaggaagctctggagaatatgaatagcaccttaaaatctcttcatcaacagagtacccagctgagttcttctctcacaagtgtaaagactagcctgcgcagctctctcaacgaccccttatgtctagtgcatccttcctcagaaacttgcaattccatcaggctcagtctttctcagctgaatagtaatcctgagcttaggcagctaccaccagttgatgctgagcttgataacgtgaataatgtcctgaggactgacctggacggattggtacagcaaggctaccaatcgcttaatgatatccccgatagagtacagcgacagaccaccacagtcgtagcagggattaagcgcgtgttgaattccattggttcagatatcgacaacgttacacaaagattgccaattcaggacatcctgtcggctttctcggtttatgtgaacaatacagagagctatatccaccggaacctcccgacgctggaagagtacgattcgtattggtggctcggcgggctggttatttgctccctactgacactgatcgtgattttctattacttggggctattgtgcggggtgtgtggctatgatcggcatgccactccgaccacccggggttgtgtgtctaatactggcggggtgtttctgatggtgggcgtcgggcttagctttctcttctgttggattctcatgattatcgtggtgctgaccttcgtttttggtgcgaatgtggaaaagctgatatgcgaaccctatacatctaaggagctgtttcgagtccttgatacaccctatctcttaaatgaggactgggaatactatctgagtggcaagctgttcaataaaagtaaaatgaagctgaccttcgagcaggtgtattcagattgtaaaaagaatagaggtacttacggcactctgcatctgcaaaatagctttaacatctctgaacacttaaacatcaacgagcacaccggttcaatcagcagcgagctggagagcctgaaagtaaatctgaatatctttctgttaggagccgctggccggaaaaatttacaggacttcgccgcctgcggaatcgataggatgaattacgattcttatctcgcccagacggggaaaagccccgcaggggtgaacctgctgtcattcgcctacgatctggaggccaaagcaaactccctgcctcctggaaatctaaggaacagccttaagagagacgcccagactataaagactatccatcagcagagggtcctcccgatagaacaaagcctttccaccctctaccaatccgtaaaaatcctccagaggaccggcaacggcctgttagaacgcgtcactcggatcctcgccagtcttgacttcgctcagaacttcattacgaataacacctcgagcgttatcatagaagaaacgaagaagtatggcaggaccattattgggtactttgagcactacctacagtggatcgaattttcaatctcagaaaaggtcgcatcatgtaaaccagttgcaacagccctggacaccgcagtagacgtgtttctgtgtagctacatcatcgatcccctgaacctgttttggttcggaattggaaaagctacagtcttcctgctgcccgccttgatatttgctgttaagctcgccaaatattacaggcgcatggattccgaagacgtgtatgacgacgtggaaaccatcccaatgaagaacatggaaaatggaaataatggataccacaaagaccacgtctatggcattcacaaccctgttatgaccagccccagtcagcattag

SEQ ID NO: 200930 - DNA, 177 bp, synthetic construct
  misc_feature 1..177: note = Description of Artificial Sequence: Synthetic coding sequence
  source 1..177: mol_type = other DNA
atggccctggtgctgggcagcctgctgctgctgggcctgtgcggcaactcattctccggcgggcagccatcatccaccgacgcacctaaagcctggaattacgagctgccagcaactaattacgagactcaggattctcataaggctgggccaatcggcattctctttgagttatag

SEQ ID NO: 200931 - DNA, 123 bp, synthetic construct
  misc_feature 1..123: note = Description of Artificial Sequence: Synthetic coding sequence
  source 1..123: mol_type = other DNA
atggccctggtgctgggcagcctgctgctgctgggcctgtgcggcaattcatttagtggcggacagcccagcagtactgacgcaccaaaagcatggaactacgaattgccagctacaaactag

SEQ ID NO: 200932 - DNA, 2598 bp, synthetic construct
  misc_feature 1..2598: note = Description of Artificial Sequence: Synthetic coding sequence
  source 1..2598: mol_type = other DNA
atggccctggtgctgggcagcctgctgctgctgggcctgtgcggcaattccttcagtggtggacaaccttcatccaccgatgcgcctaaagcctggaattatgaactgcccgcgacaaactatgagactcaggatagccataaagccggaccaattggcattttattcgaacttgtacatatcttcctctatgtcgtccaaccgcgagattttccagaagatactcttcggaaatttctgcagaaagcatacgaatccaaaatcgactatgataagcctgaaacagtaatccttgggctgaagattgtatattatgaagcggggattattctctgctgcgttctcggactgctctttattattttgatgccgctcgtgggatatttcttctgcatgtgtcggtgctgtaataaatgcggaggggagatgcaccagagacagaaagaaaacggccccttcctaaggaagtgttttgctatctctctgttagtgatatgcattatcatcagcatcggcattttttacggatttgtcgctaaccaccaggtgagaacccgcattaaacggagcaggaaattggccgactccaacttcaaagatctgagaaccctgttgaacgaaacgcctgagcagattaagtatatcctagcgcagtacaataccacaaaagataaagcgttcactgatttgaactccatcaatagcgtgctcgggggtggaattctcgataggctgcgtcccaacattatcccagtgctggatgagataaagagcatggctaccgccattaaggaaacaaaggaagcccttgagaacatgaacagtaccttgaagtctctgcaccagcagtccactcaactgagctcaagtctcacttccgtgaagaccagcctgcgatcctcccttaacgatccactttgtctagtgcatccttcttctgaaacttgtaatagcattcggttgtctttgtcccagctcaattccaatccggaactaaggcagctgcccccggtcgatgcggaactggataacgtaaataacgtgctcagaaccgacctggatggactggtgcaacagggttatcagtcgctgaacgacattccggaccgggtgcagcgccagacaacaaccgtggtcgccggcataaagagggtgcttaacagcattgggagcgacatagataacgtgactcagcgcctgcctatccaggacattctatctgccttcagcgtgtacgtgaataataccgaatcctatatccacaggaatcttcctacactggaagaatacgatagctactggtggctcgggggcctggtaatttgcagtttacttaccctgattgtgattttttactacctcgggctactttgcggagtttgcgggtatgatcgccacgcgacaccgacaaccaggggttgcgtcagcaacaccggaggtgtcttccttatggtgggcgtgggcttgtccttcctgttttgctggattctaatgatcatcgtggttcttacctttgtttttggtgcaaacgtcgagaaactgatttgcgagccctatacgtcgaaggagctgttccgggtcctggatactccttacctgcttaacgaagattgggagtattacctgagcggaaaactgttcaacaagtctaaaatgaaactgacctttgagcaggtttacagcgattgtaagaaaaacagagggacttacggaaccttacatctacagaattcctttaacatatctgagcacctcaatattaatgaacatacgggctcaattagcagtgaactggagtccctcaaggttaacctcaacatatttttattgggcgccgccggccggaaaaacctgcaggacttcgctgcatgtgggattgaccgcatgaactatgattcataccttgcacaaacagggaagagccccgcaggggtgaacctgctctcgttcgcctacgatctagaagccaaggccaactccctcccgcctgggaatcttaggaacagtctcaagcgggatgcacagacaattaagaccattcaccaacaacgggtcctgccaatcgagcaatcactatccacactttatcagtcagttaaaatcctccaacgcacaggcaatgggctgctagaacgagttactaggatcctcgcttcccttgatttcgctcagaatttcatcacaaataacaccagttccgtgattatcgaggaaaccaagaagtacgggagaaccatcataggttatttcgaacattacctccagtggatcgagttttctatttccgagaaagtcgcatcttgcaagcccgtggcaaccgcactggacactgcggtggatgttttcctctgcagctacatcatagatccactcaatcttttctggtttggcatcggtaaggccaccgttttcctgctgcccgcactcatattcgcggtgaagctcgcaaaatactaccgacgtatggatagcgaggacgtgtacgatgacgtggaaactatcccaatgaaaaacatggagaacggtaacaacggctaccacaaggatcacgtgtacggcattcacaatccagtaatgacctctcctagccagcattag

SEQ ID NO: 200933 - DNA, 45 bp, synthetic construct; identical to SEQ ID NO: 94739
  misc_feature 1..45: note = Description of Artificial Sequence: Synthetic coding sequence
  source 1..45: mol_type = other DNA

SEQ ID NO: 200934 - DNA, 2505 bp, synthetic construct
  misc_feature 1..2505: note = Description of Artificial Sequence: Synthetic coding sequence
  source 1..2505: mol_type = other DNA
atggccctggtgctgggcagcctgctgctgctgggcctgtgcggcaattcattctcaggtgggcagcctagcagtacagatgcaccaaaagcgtggaactacgagcttccagccaccaactatgaaacccaggactcgcataaggccggcccaatcggtatcctgttcgagctcgtacacatcttcttgtacgtcgtccagcccagggactttcccgaggacacactgcgaaaattcctgcagaaggcttatgagtctaaaattgactatgacaagcctgagacagtcatcctgggcctcaagatagtctattacgaagccgggatcatactttgctgtgttctggggttgttattcataatattaatgccactcgtgggctacttcttctgcatgtgtagatgctgtaacaaatgtggcggagagatgcatcagcgtcaaaaagagaacggtcccttcctgcgtaagtgttttgcaatctccttactcgttatctgcatcattatttccattggcatcttctatggattcgtggctaatcatcaagtgcgcacgcggatcaagcgctccagaaaacttgctgactctaatttcaaggacttgagaacactcttaaacgagacccccgagcaaatcaagtacattttagcacagtacaacacaacgaaggataaagcttttaccgacctcaattccatcaacagtgtgctcggggggggtatcctagacaggctgcgacccaatatcatcccagtgctggacgagatcaaaagcatggccacagccatcaaggaaacaaaggaagccctggaaaacatgaactcaactttgaagagcctacaccagcagagtacacagctgtcctcgtccctgacgagcgttaagaccagcctcaggtcgtccctgaatgatccgctctgcttggtccatccctctagcgaaacgtgcaatagtattagactgagcctgagtcaactgaattccaacccagaacttagacagcttccccctgtggacgctgaacttgacaacgtcaacaacgtgttgcgcacagatttagacgggttagtgcagcagggttaccagagcctaaacgacatcccagacagggtgcagcgccaaacaacaactgtggtggccggcatcaagagggtgctcaactctattggaagcgacatagataacgtcacgcagcgcctgccaatccaggacatactctcagcattcagtgtgtatgtgaacaatacggagagctatattcatcggaatctgcccacactggaggagtatgattcttattggtggctgggcggacttgtcatttgtagccttctcactctgatcgtgatcttctattatctgggcctgctctgtggagtctgtggttacgacaggcacgccacaccaactaccaggggttgcgtatccaataccggcggcgtgtttctcatggtcggagtgggcctgtcctttctcttctgttggatattgatgatcatcgtcgtgctcactttcgttttcggcgccaacgtagagaaattgatctgcgagccctacacaagtaaagaactgtttcgggtgttggacacaccctatctccttaatgaggactgggagtactatctgagcggtaagctctttaacaagagcaagatgaagctaacatttgagcaggtgtacagcgattgtaaaaaaaatcgcggaacctacggtactctgcatcttcagaatagctttaacatatctgaacacctgaatatcaacgagcacaccgggagtatcagcagcgagctggaatccctgaaagtcaaccttaacatttttcttctgggcgccgctggaagaaagaaccttcaggattttgctgcttgcggtattgatcgcatgaactacgactcctatctggcccagaccggcaagagtcccgctggagtgaacctgttgtctttcgcatacgatttagaagccaaagcaaatagtctccctccggggaatttacggaactctctaaaacgcgacgcccagacaattaaaacaatccaccagcaaagagtactccccatcgaacagtccctttcaacattataccagtcggtgaagatcctgcagcgtactggcaatggtctgctggagagagtgacaagaattttagcgtctctggactttgcccagaactttataactaacaacactagctccgtgatcatagaggagaccaagaaatacgggcggaccattattggatatttcgagcattatctccagtggatcgaatttagcatttctgagaaagtcgcaagctgcaagcccgtggccacggccttggacaccgccgttgatgtgttcctctgttcatacatcattgaccctctcaacctgttctggtttggaattgggaaagccacggtcttcctcctgcctgcactcatcttcgccgtaaagttggccaaatattaccgtaggatggactccgaagatgtgtacgacgacccaagccaacactag

SEQ ID NO: 200935 - DNA, 2529 bp, synthetic construct
  misc_feature 1..2529: note = Description of Artificial Sequence: Synthetic coding sequence
  source 1..2529: mol_type = other DNA
atggccctggtgctgggcagcctgctgctgctgggcctgtgcggcaactcattctccggtggccaacctagtagcacagatgcgcctaaggcatggaactacgaattacccgccacaaattatgagacccaggacagtcataaagctgggccaataggcattctcttcgagttggtccacatctttctttacgtggtccaacctcgcgacttccccgaagatactttgcgaaaattcctgcagaaagcatatgaatcaaaaatagattacgataagcccgagaccgtaattttgggcctgaagattgtctactacgaagcaggaatcatcctgtgctgcgtattaggcctcttattcattatcctgatgccactggtgggatatttcttctgtatgtgccggtgctgtaataagtgtggaggagaaatgcaccaacgacaaaaggagaacggaccattcttaaggaaatgctttgctatcagcttactggtaatttgtattattatcagtatcggcatcttctatgggttcgtcgccaaccatcaggtgcgcacacggattaagaggtctcgcaagcttgcagattctaacttcaaagatctgcgaaccctgctgaacgaaaccccagagcagatcaagtatattctggctcagtataatacaacaaaggacaaggcattcacagatctaaattccatcaacagtgttcttggcggcggcattctcgataggctgagacccaacataatcccggtgttagacgagatcaaatctatggcgaccgctataaaagagaccaaagaagctttagaaaatatgaacagcactctgaaatcactgcaccagcagagtacgcagctgagtagcagcttgacctctgtgaagacctccttacggtctagcttgaatgaccctctctgcctggtgcacccgagctctgaaacttgtaactctataaggctgtcactctcacagctaaactcgaaccctgaactgaggcagctgccacccgttgatgccgagctggataatgtgaataatgtcctgagaactgatctcgacggactggtgcagcaagggtatcagtccctgaacgatatccccgaccgggttcaaagacagacaacaaccgtggttgcggggattaaaagggtgctcaatagcatcggcagtgatatcgataacgtgacccagagattgccaatccaagacatactgtcagctttttctgtgtatgttaataacacggagtcttacattcatcgcaatttgccaacgctcgaggagtacgacagctattggtggttaggaggcctggtcatatgtagcctcctgaccctgattgtaattttctattacctcggcttgctgtgcggagtctgtggctatgatcggcatgccactcccaccaccagggggtgtgtgtcaaataccggaggagtttttctaatggtcggcgtcggtctgagttttctcttctgttggatactgatgattatcgtggtcctcaccttcgtgttcggcgctaatgtagaaaagctgatctgtgagccctacacttccaaggagcttttccgcgtcctggacaccccgtacctcctaaacgaggactgggaatactatctctcggggaaattgtttaataaatcgaagatgaagcttactttcgaacaggtgtatagcgattgcaaaaagaatcgtggaacatatggcacacttcacttgcagaatagctttaacatctccgaacatctgaacattaacgagcacaccgggtccataagcagcgagctcgagtcgctcaaggtgaatcttaacatatttttgctgggagccgccggcaggaagaatctgcaagactttgcagcttgcggcatagatcggatgaattacgactcatacctcgcccagacgggtaagtccccggccggtgtcaatctgctttcctttgcatacgacctggaggccaaagccaatagcctaccccccggaaatctccggaacagcctgaagcgtgatgcccaaacaatcaagacgattcatcagcagagggtcctcccgatcgagcagagcctgagtaccctgtaccaatctgtcaagattcttcagagaactggcaatggcctcttggaacgggtcactagaatactcgccagcctcgactttgcccagaacttcatcacaaataacacaagcagtgtgataatagaggagacgaaaaagtacggcagaacgatcatcggctacttcgagcactacctgcagtggattgaattcagcatctctgaaaaggttgcatcttgcaaacccgtggcaactgccttggatacagcggtcgacgtctttctttgctcctacataattgatcctctgaacctgttttggtttggtatagggaaggccaccgtcttccttctgcccgccctgatttttgctgtcaaacttgctaagtactatcggcggatggactccgaagatgtgtatgatgatgtcgaaactatcccaatgaagaatccctcacaacactag

SEQ ID NO: 200936 - DNA, 2493 bp, synthetic construct
  misc_feature 1..2493: note = Description of Artificial Sequence: Synthetic coding sequence
  source 1..2493: mol_type = other DNA
atggccctggtgctgggcagcctgctgctgctgggcctgtgcggcaattcgttttccggcgggcagccatcgagcaccgatgccccgaaagcttggaactatgagttgcctgccaccaactacgagacgcaagactctcataaagctggtcccatcgggatcctctttgagctggtacacatctttctgtatgtggtccagccccgggactttcccgaagacaccctgaggaagtttctacagaaggcctatgagagcaaaatcgactacgataaaattgtctactacgaggccggcattattctgtgctgtgtgctcggactcctcttcattattctgatgccattggtgggatattttttttgtatgtgcaggtgctgcaataagtgcgggggagagatgcatcagcgacagaaagaaaacggtccttttctccgcaagtgtttcgctatcagcttgctggtgatctgcatcattatttcaatcggtattttctatggattcgtggcgaaccatcaggtgaggactcgaattaaacgcagccgcaaactcgccgattcaaactttaaggacctgagaacactgctgaacgagacccctgaacagatcaaatacatactggcacagtacaacaccaccaaggacaaagcatttactgatttgaactctattaacagcgtcctggggggcggcattctggatagattacgaccaaacataattccagtgctggacgaaatcaaaagcatggcaaccgccataaaagagaccaaagaagcccttgagaacatgaacagcaccctgaagagcctgcatcaacagtccacgcagctctccagcagtttaacatctgtaaagaccagccttaggtcatccttgaatgacccactttgcctcgtgcatccctcgtctgagacctgcaattctattaggctgtccctcagccagctcaactcgaatcccgagttgcgacagctgcctcccgtagatgccgagttggacaacgtgaacaacgtcctgcggacagatttggacggcctcgtccagcagggctaccagagccttaatgatatccccgatcgggtgcagcgtcagacgactacagtcgtggccggtataaagagagtcctgaatagcatcggttcagatattgacaatgtcacacagagactcccaatccaagatattctgagcgccttcagtgtctatgtcaacaatactgaaagctatatccaccgtaacttgccaactctggaggagtacgatagctattggtggctggggggattggtgatttgcagcctcctcaccctgatagtaattttctattacctgggattgctgtgcggagtttgcgggtatgacagacacgccacgccaaccacaagaggatgtgtgtcaaataccggcggagtatttctgatggtgggcgttggcctgagcttcttgttctgctggattctcatgattatcgtggtgctgacctttgtgttcggagcaaatgtggaaaagcttatctgcgaaccatatacgtccaaagaactgttcagagtcctcgataccccctatcttctcaacgaggactgggaatattatttaagcgggaagctgtttaataagtcgaagatgaaactcacttttgaacaagtgtattcagattgcaaaaaaaataggggcacgtacggaactcttcacctgcagaattcattcaacataagtgaacatctcaatattaacgaacataccggctcgatttcttcagaactcgaaagtctaaaggtgaacttaaatatttttctgctcggtgcagctgggagaaagaatctccaggactttgctgcctgtggcatagataggatgaactatgacagctatctcgcgcagaccgggaaaagtccagcgggagttaatctactgtcattcgcgtatgacctggaggcaaaagccaattccttgccaccggggaatttgcgtaatagcctcaaacgggacgctcagaccattaagaccattcatcagcaaagagttctgcctatcgaacagtccctgtctacgctgtaccagagtgttaagatcttacagaggaccggtaacggcctgttggaaagagttacacgaatacttgcaagtttagacttcgcgcagaatttcatcaccaataatacaagttcagtcatcatagaagagactaaaaagtacggcagaaccattatcggatacttcgaacactatctccagtggatagaattcagcatttctgagaaggtagctagttgcaaacccgtggcaaccgcattagatacagctgtggacgtgttcctctgtagttacatcatagatcctctgaacctgttttggtttgggattggcaaggcgacagtgtttctcctaccggctctgatatttgccgtgaagctcgcaaagtactacagacgcatggactccgaagacgtgtacgatgacagctcttgggtaacctcagttcaatgctag

SEQ ID NO: 200937 - DNA, 681 bp, synthetic construct
  misc_feature 1..681: note = Description of Artificial Sequence: Synthetic coding sequence
  source 1..681: mol_type = other DNA
atggaggccgagcggcggcggcaggccgagaagcccaagaagggcagggtgggttccaatctgcttcccgaaagacatccggccaccggaacacctactactaccgttgactctagcgcgcccccctgcagaaggcttcctggagcaggaggcgggcggtctagattcagtccacagggtggccagcgggggaggccgcacagccgcaggcgacatcggacaaccttctctcctgtgcaactcgaacagctggaatcagctttcggccgtaaccagtacccggatatctgggcacgcgagtcattggcacgcgacactgggctgtctgaggctcgcatccaggtctggttccagaacagaagagccaagcagcggaagcaggagcggtcccttcttcagccattggctcatctgtctcccgccgcctttagctcattcctgcctgagagtaccgcttgcccgtacagctacgctgcccctccaccccccgtgacctgtttcccccacccatacagccatgccctcccgtcacagccatcgaccggaggcgcgtttgcattatcccatcaatccgaagattggtacccaacactgcaccctgctcctgccggccatcttccctgccctcccccgcctcccatgctccctttgagcctggagccttctaaatcatggaattag

SEQ ID NO: 200938 - DNA, 417 bp, synthetic construct
  misc_feature 1..417: note = Description of Artificial Sequence: Synthetic coding sequence
  source 1..417: mol_type = other DNA
aacatcagcctgtgccccgagatctgcttccagaagatcgagagccaggtctactttgtcagggtggatagtgggatccagcctggctctgacatcagtatttactatgacccaatgatctcgaaactgatcacttatggcagtgacaggacggaggcgctcaaacggatggcggatgctctcgataactacgtgattcggggtgtgacccacaacattgcccttctgagagaagtgatcattaacagtcggttcgtcaagggcgatatctcaactaagttcctatccgacgtgtatcccgacggctttaaggggcatatgctgaccaagagcgaaaagaatcagttactggccatcgccagctcactctttgtcgccttccagctacgggctcagcatttccaagagaattcttag

SEQ ID NO: 200939 - DNA, 363 bp, synthetic construct
  misc_feature 1..363: note = Description of Artificial Sequence: Synthetic coding sequence
  source 1..363: mol_type = other DNA
atgagcatccagttcctgggcaccgtgtacaaggtgaacatcctgacgaggctcgcagctgagctgaataagttcatgctagaaaaggttactgaggacacctccagcgtcctgcggtccccgatgcctggagttgttgtggcggtctccgtgaaaccgggtgacgctgctacctcgagcctgagtgtcgagatatgcttgttttggacctttcaagtggctgagggacaggaaatttgtgtgatcgaggcaatgaaaatgcagaactccatgactgccggtaagaccgggactgtgaagtccgtgcactgccaggccggcgatactgtaggggaaggagaccttctggtggaattggagtag

SEQ ID NO: 200940 - DNA, 2046 bp, synthetic construct
  misc_feature 1..2046: note = Description of Artificial Sequence: Synthetic coding sequence
  source 1..2046: mol_type = other DNA
atggccggcttctgggtgggcaccgcccccctggtggccgccggccgcagaggccgatggccccctcagcagctcatgctctcagccgctcttcggaccctaaaacacgtcctctactattccagacagtgtctgatggtctcgaggaacctgggttcagtgggctacgaccctaatgagaagaccttcgacaagatcctggtggctaaccgtggagagatcgcatgccgtgtgatccgcacctgtaagaaaatgggcataaaaaccgtggccatacattcagatgtggacgcatcctctgtgcacgtgaagatggcagatgaggcggtgtgcgtcggcccagcacccacgtctaagagctacctgaatatggatgccatcatggaggctattaagaagacaagggcccaagcagtgcacccaggatacggcttcctgtcagagaataaagagtttgcgaggtgccttgctgctgaggatgtagtgtttattggacctgatacacacgccattcaggctatgggtgacaaaatcgaaagcaagttgctggccaagaaggctgaggttaacaccataccgggcttcgatggcgtagtgaaggatgcggaggaggctgttcgtattgctagggaaatcgggtacccggtgatgattaaagcctctgccgggggcggtggtaaagggatgagaatcgcctgggatgacgaggagacgagagacgggttccgactgagctctcaggaggctgcctcatcattcggcgacgacaggctgttaattgagaaattcatagacaacccccgccacatcgaaatccaagtgctgggtgataagcatgggaacgccctgtggctgaatgaacgtgagtgctccatccaacggaggaatcagaaagtggtcgaggaggctccaagcatcttcctcgatgctgaaacaagaagagctatgggggaacaggccgtggcacttgcccgcgccgtgaagtacagttccgccggaacagtagaattcctggtagattctaagaaaaacttctatttcctggagatgaatacccgattgcaggtcgagcatcctgtgactgaatgtattacgggtctcgatcttgttcaagagatgattagggtagccaaaggatatcctctccggcataaacaggccgatatacggatcaatggctgggccgtcgaatgccgggtttacgccgaggatccttacaagtccttcgggctgccctccattggacgcctgagtcagtatcaggaaccactgcacctgcccggggtgagagttgacagcgggattcagcccgggtctgatattagcatttattacgacccaatgattagcaagctgatcacctatggcagtgaccggacggaggcactcaaaaggatggcagacgccttggacaactatgtgatccggggggttacgcataacattgccttgctaagggaggtaattatcaactcccgatttgtgaaaggcgacatcagcacaaaatttctgagcgatgtgtacccggatggatttaaaggacacatgctcaccaaaagtgagaagaaccagctgcttgccattgcatcatctttgtttgtggcctttcagttgcgggctcagcattttcaggagaattcccgcatgccagtgattaaacccgatatcgcgaattgggagcttagcgtcaagctccacgataaagtccatacagttgtggcgtcgaacaacggttctgtgtttagcgtggaagttgatgggtcaaaactcaatgtaacctctacctggaatctggcttcccccctgcttagtgtaagtgtggatggaactcaaagaaccgtccagtgtctttctcgtgaggcaggaggcaatatgtctattcagttcttgggtactgtcgtagcagagggccaggagatttgtgtgatagaagcaatgaagatgcagaatagcatgacagccgggaaaactggaactgttaagagcgttcactgccaagctggggatactgtcggcgaaggggatctgctcgtcgagttggaatag

SEQ ID NO: 200941 - DNA, 2187 bp, synthetic construct
  misc_feature 1..2187: note = Description of Artificial Sequence: Synthetic coding sequence
  source 1..2187: mol_type = other DNA
atggccggcttctgggtgggcaccgcccccctggtggccgccggccggcgtggccggtggccaccacagcagcttatgctgtccgcagcactgagaactttaaagcacgtgctgtattacagtcgccaatgcctcatggtgtcacgcaacctggggtccgttggctatgatcctaacgagaagacatttgacaagatcctggtggcaaatcgtggagagatcgcatgccgggtgattcgtacatgcaagaaaatgggcattaaaaccgtggcaatccactctgacgttgatgctagcagcgtgcacgtgaagatggctgatgaagccgtttgtgtgggccctgcccccactagcaagagctatctcaacatggacgctatcatggaggcgattaaaaagactagggcccaggccgtgcaccccggttacggattcctgtcagagaacaaggagtttgcccgatgtctggcggccgaagacgtcgtgttcatcggaccggacactcatgccattcaagctatgggtgacaagatcgagagtaaacttctggcaaagaaagccgaagtcaatactatccccggcttcgatggcgtggtaaaagacgctgaagaggcagtgcggatcgctagagagatcggctatccggtgatgattaaagcatctgccggtggcgggggtaaggggatgcgaattgcctgggacgatgaggaaacccgagacggttttcggctcagtagtcaagaggctgcatcatccttcggggacgacaggctgctaatagagaagtttattgataacccacgtcacatagaaatccaggttctcggcgataagcatggcaatgccctgtggctgaatgagagagaatgtagcatacagaggcggaaccagaaggtggtcgaagaagcgccctctatcttcctggacgccgaaacacgccgcgccatgggcgaacaagctgtggccctggcgcgtgctgtaaaatacagctccgcggggacagtggaatttctagtagacagcaaaaagaacttttatttcctggaaatgaataccagactgcaggtggaacaccccgtaacagagtgcataaccggcttggacctggtgcaggaaatgatccgcgtggcaaagggttatcccctgcgccacaaacaagccgatattaggataaacggctgggcagtcgagtgccgagtttacgccgaagacccctacaagagctttgggcttccttcaattggccggttgtcacagtaccaagagcccttacacctgcctggcgttcgcgtggatagtggaattcaacccggttccgacatcagcatctattacgacccaatgatctctaaactgataacgtacggatcggataggactgaggcactgaagcggatggccgatgccttggataattatgttatacgcggagtgacacataatattgccctgctcagagaagtgattatcaacagcagattcgtgaaaggcgatatctccaccaagtttttatccgacgtgtaccccgacggttttaagggccatatgcttacaaaatctgagaagaatcaattactcgccattgcatccagtctctttgtagctttccagttgcgtgctcagcacttccaggaaaactcccgaatgcccgtgatcaaaccagacatcgctaattgggagctctccgtcaagctgcacgacaaggtgcataccgtggtcgccagcaataacggaagcgtcttttccgttgaagttgatgggagtaagttgaacgtgacgagtacgtggaatcttgctagtccattgctctccgtatccgtggatggcacccagaggacagtgcagtgcctttccagagaagcggggggtaatatgagcatccaatttctgggcaccgtgtacaaagtgaatattctaaccaggctcgccgccgagctcaataaattcatgctggaaaaggtaacagaggatacatctagcgtgctcaggtcacccatgcctggagttgtggtggcagtctccgtaaagccgggcgacgcggtagccgaaggacaggagatatgcgttatagaggctatgaaaatgcagaactccatgaccgctggcaaaaccggcacggttaagtctgtgcattgtcaagccggagacacagtgggagaaggagatctgcttgtggaactagagtag

SEQ ID NO: 200942 - DNA, 2109 bp, synthetic construct
  misc_feature 1..2109: note = Description of Artificial Sequence: Synthetic coding sequence
  source 1..2109: mol_type = other DNA
atggccggcttctgggtgggcaccgcccccctggtggccgccggccggcggggccgctggcctcctcagcagttgatgctgagcgctgcgctgcgaaccctgaaaacctttgataagattttggtggcaaacagaggggagatcgcctgcagagtgattcggacttgcaaaaagatgggcataaaaaccgttgctattcatagcgacgttgatgcttcttcagtgcacgtcaaaatggctgatgaagccgtttgcgtcgggccagcacccacctctaagagctacttgaacatggacgccattatggaggcaatcaagaaaactagggcccaagctgtgcacccagggtatgggtttctgtccgaaaacaaggaattcgctaggtgcctcgctgcagaggatgtggtcttcattggaccagacacgcacgctatccaggccatgggggataagatcgagtctaagctgctggcaaaaaaagctgaggtgaataccatccccggattcgacggcgtcgttaaagacgccgaggaggccgtacgcatcgctagggagatcggctacccagtgatgatcaaggcttctgcaggcggaggtggaaagggcatgcgcatcgcatgggatgatgaagagacccgtgatggattccgtctctcatctcaggaggccgcatcatcattcggggacgaccgtctgctgatcgaaaagtttattgataacccccggcatattgagatccaggtactcggggacaagcacggtaatgccttgtggttaaatgagcgtgagtgttcgatccagcgacgcaatcaaaaggtggtagaggaagccccttctatattcctagatgccgaaactcggcgtgccatgggggagcaggcggtcgctctagccagagccgtgaaatactcttccgccggcactgttgaattcctcgtggactcaaaaaaaaacttctattttctcgaaatgaataccaggctgcaggtagagcaccctgtgacggagtgtattaccggccttgacctagtgcaggaaatgatcagagtagcaaaaggataccctctccgccacaagcaggcagacatcaggataaatggctgggccgtcgagtgtcgcgtgtacgcggaggatccgtataagtcctttggcttgccttcaataggacgcctaagccagtatcaggaacctctgcatctaccaggtgtgcgagtcgattctggcattcaaccaggaagtgacattagcatctactacgaccctatgattagtaagcttattacgtatgggagtgatcgcacagaggcgttgaagcgtatggctgatgccctagacaactacgttatccggggtgtgacccacaatatcgccctactcagagaagttataattaacagtcgcttcgtgaaaggggatatctctacaaaattcctgagcgacgtgtatccagatggctttaaaggacacatgctcaccaagtcggaaaaaaaccaattgctggccatagccagtagcctctttgtagcattccagcttagagcccagcactttcaagaaaatagtcggatgccggtcattaagcccgatatcgctaattgggaacttagcgtgaaactgcacgacaaggtgcacactgtagtcgcgagtaataatgggagtgttttcagcgtagaggtggacgggtctaaattgaatgtcacatcaacctggaatctcgcatcccctctgttatcagtgagcgtggacggtacccagcgtacggttcagtgtctgtcccgggaggccggcggcaacatgtccatacagtttctcggtactgtgtataaggtgaatattctgacaagactggccgcagagctcaacaaatttatgctagagaaagtcaccgaggatacctcttctgttctgcggagtcccatgccaggtgtagtggtggcggtgtctgtgaagcccggggacgcggttgcggagggccaggagatttgcgtgatcgaagccatgaaaatgcagaatagtatgacagccggcaagaccgggacagtcaagtccgttcactgccaagccggagacaccgtgggagaaggtgacctattggtggaattggaatag

SEQ ID NO: 200943 - DNA, 255 bp, synthetic construct
  misc_feature 1..255: note = Description of Artificial Sequence: Synthetic coding sequence
  source 1..255: mol_type = other DNA
tgaaactgggagctgagcgtgaagctgcacgacaaggtgcacaccgttgttgcttccaataatggatcagttttctctgttgaggtcgatggctctaagttaaacgtaaccagcacatggaacctcgccagccccctgctgtccgtaagcgtggatggcacccagagaaccgtccagtgtctcagccgtgaggcaggtggtaacatgagtatccagtttctgggtacagtgccctggagaaaattgctggactag

SEQ ID NO: 200944 - DNA, 336 bp, synthetic construct
  misc_feature 1..336: note = Description of Artificial Sequence: Synthetic coding sequence
  source 1..336: mol_type = other DNA
tacaaggtgaacatcctgacccggctggccgccgagctgaacaagttcatgctcgaaaaggtgaccgaggacacctcttcagttctgcgatctcccatgcctggagtggtggttgctgtgtccgtgaagcctggagatgcagctacttcatccctcagcgtagagatctgcctgttctggacattccaggtggccgagggtcaagagatatgcgtgatcgaagccatgaagatgcaaaattccatgacagcgggaaaaactggtaccgtgaagtcagtgcattgtcaagctggagacacggttggggaaggagatctgttggtggaactcgaatag

SEQ ID NO: 200945 - DNA, 405 bp, synthetic construct
  misc_feature 1..405: note = Description of Artificial Sequence: Synthetic coding sequence
  source 1..405: mol_type = other DNA
tgaatgcccgtgatcaagcccgacatcgccaactgggagctgagcgtgaagctccacgacaaagttcataccgttgttgcttcaaacaatggctcagtgttctccgtcgaagtggacggcagcaagttaaacgttacctcaacctggaacctggccagcccactgttgtccgtgtcggttgacggcacccagcgtacagtgcaatgccttagcagggaagcagggggaaacatgtctatacaattcctaggtacagtggttgccgagggccaagaaatttgtgtgattgaagcaatgaagatgcagaactccatgaccgccgggaaaacaggaaccgtgaagagcgtgcactgccaggctggcgacacagtgggcgagggcgatctgctcgtcgaactggagtag

SEQ ID NO: 200946 - DNA, 309 bp, synthetic construct
  misc_feature 1..309: note = Description of Artificial Sequence: Synthetic coding sequence
  source 1..309: mol_type = other DNA
agcgacgtgtaccccgacggcttcaagggccacatgctgaccaagtccgagaagaatcagctgttggccattgcaagctcgttgttcgttgcattccagctcagggcccaacacttccaagagaattctcggatgcctgtgataaagccggatattgccaattgggagctctccgtaaaactgcacgataaagtccatactgtggttgcaagcaataatggaagcgtctttagcgtcgaggttgatggttcaaagcttaatgtcacctccacatggaatctcttcgctctgatcgtatgccaacggtag

SEQ ID NO: 200947 - DNA, 1620 bp, synthetic construct
  misc_feature 1..1620: note = Description of Artificial Sequence: Synthetic coding sequence
  source 1..1620: mol_type = other DNA
atggccgccgccctgcgggtggccgccgtgggcgcccggctgagcgtcctggcatcaggactgcgcgccgccgtacgttctctctgttcccaggccacttcagttaatgagagaatcgaaaataagagacggactgcgcttctaggaggcggacagaggaggattgatgcccagcacaagcggggaaaactgaccgcccgggagcggatctctctactgttggaccccgggtccttcgtggagtccgacatgtttgttgagcacagatgcgcagacttcgggatggctgccgacaagaacaaatttcccggcgattctgtagtgacaggcagaggtaggattaacggccggctggtgtacgtgttcagtcaggatttcactgtctttggcgggagcctcagcggagcacacgcccagaaaatatgcaagattatggaccaggccattaccgtcggcgcacctgtgattggactgaatgatagcggtggagcccggattcaagaaggggtagagtctcttgcgggctatgctgacatcttcctccggaatgtgaccgcctctggggtcattccacagatctctctgatcatgggaccgtgtgcaggaggagctgtttactccccggcattgaccgatttcacgtttatggtgaaggatacatcatacctgtttatcaccgggcctgatgtggtcaagagcgtaaccaacgaggacgtcactcaggaagagctcgggggtgccaagacgcacacaacgatgtccggagtcgcacaccgggcgtttgagaatgacgtcgacgcattgtgcaacctccgggatttttttaactatctgcccctttctagccaggaccccgctcccgtgagagagtgccatgaccctagcgatcgcctggtgccggagctcgataccatcgtccccctggagtctactaaggcatataatatggtggatattattcactcagtcgttgacgaacgggagttttttgaaattatgcctaactatgctaagaacatcatcgtcggattcgctaggatgaatggacggaccgtggggatagtcgggaaccagcctaaggtggcgagcgggtgtctcgatataaattctagcgtgaaaggggctagattcgtgcgattctgtgacgcctttaacatccccttaatcacatttgtggacgtgcccggcttcctgcctggcactgctcaggaatatgggggaatcatccggcacggggctaagcttctttacgcatttgctgaggcaacagtgcctaaggttaccgttatcaccagaaaagcctatggaggagcctacgacgtcatgtcttctaagcacttgtgcggcgatactaactacgcttggccaactgcagagatcgccgtgatgggagccaagggcgccgtagagatcatttttaagggacatgagaacgtggaggcagcccaggcagagtacatcgagaaattcgccaatccctttcccgcagctgtgcggggcttcgtcgatgatattatccagcctagctcaactcgggctcgcatctgttgcgacctggacgtcctcgcatccaaaaaagttcagcgtccctggagaaaacatgccaacattccactctag

SEQ ID NO: 200948 - DNA, 1680 bp, synthetic construct
  misc_feature 1..1680: note = Description of Artificial Sequence: Synthetic coding sequence
  source 1..1680: mol_type = other DNA
atggccgccgccctgcgggtggccgccgtgggcgcccggctgagcgtgctcgccagcggactccgcgcagctgtgagatctctgtgttctcaagcaacttctgtgaacgagcgtatagaaaacaagcgcaggactgccctcttgggaggtggtcagcggaggattgacgcccagcacaagcggggtaaacttacagccagggagaggatctcattactactggaccctgggagctttgtagaaagtgacatgtttgttgaacataggtgcgccgatttcggtatggccgctgacaagaataagttccccggggactctgttgtcacaggtaggggcagaataaatggccgcttagtatatgtgtttagccaacagatcatcggttgggcccagtggctgcctctcgtgatctctgccttatgggaagctgaagacttcactgtttttggtgggtctctgagcggcgcccacgcccagaaaatatgcaaaatcatggaccaggctatcacagtcggtgcccccgtcattgggctgaacgattctggcggggcccgcatccaggagggagtggagtcgctcgcaggttatgccgacatttttctacgcaacgtcacagcgagtggggtgatccctcagatttctcttattatgggcccctgcgcagggggcgctgtgtattcacctgctcttaccgactttacatttatggtcaaagatacgtcttacctgttcataactggcccagatgtggtaaagagtgtcaccaatgaagacgtgacacaagaagaactcggcggcgctaagactcatacgacaatgagtggagtcgcacaccgcgcattcgaaaacgatgtcgatgccctctgcaacctccgggactttttcaactacctccctttgagttcccaggacccagcccccgtgcgggaatgccatgatccctctgacaggcttgtgcctgagttggacactattgtaccactggaatccacgaaggcatacaacatggtggatatcattcacagtgtggtggacgaacgagagttcttcgagattatgccgaactacgctaagaacattatcgtcggctttgcgaggatgaacggtagaaccgtgggaatagtgggaaaccaacccaaggtcgcttccgggtgtctggacattaattcttccgtgaaaggtgcaagatttgtaaggttttgcgatgcattcaatataccgctaattactttcgttgacgtccctggatttctgcctgggactgctcaggagtacggcggtattatccggcatggcgctaaactgctatatgcattcgcagaggcaacggtgcccaaggtgactgtgatcactaggaaggcttacggcggcgcctatgatgttatgtcatcgaagcacctttgcggggatacgaactatgcatggccaacagccgaaatcgctgttatgggggccaaaggagcagtggagattattttcaaggggcatgagaacgttgaagccgcacaagccgagtatatagagaaatttgcaaatccattccccgctgccgttaggggcttcgtggacgatataatccagcccagctcaacccgggccaggatttgttgcgatctggacgtgctcgcttctaaaaaagtccaaagaccctggaggaagcacgctaatatacccctctag

SEQ ID NO: 200949 - DNA, 1653 bp, synthetic construct
  misc_feature 1..1653: note = Description of Artificial Sequence: Synthetic coding sequence
  source 1..1653: mol_type = other DNA
atggccgccgccctgcgggtggccgccgtgggcgcccggctgagcgtgcttgccagcggattaagagccgcggtcaggagtctctgttctcaagccacgagcgtcaacgagaggatcgaaaacaagagacggacagcccttctgggcggcggccaaaggaggattgacgcacagcacaaacgcgggaaattaacggctcgggagcggatctctctcctgctcgacccaggatccttcgttgagagcgacatgtttgtagaacacaggtgcgcggatttcgggatggcagccgataaaaacaagtttccaggagactctgttgttacgggacggggcagaatcaacgggcggctcgtttatgtgttttctcaggatttcacagttttcggtgggtctctctcaggagcccacgcccagaagatctgtaaaatcatggatcaggccatcacagtgggggcccctgtaatcggcttaaacgactcaggtggtgctaggatccaagaaggggtcgaatctttggcaggctacgctgacattttcttacgaaatgtgacagcctcgggcgtcattcctcagatttccctgattatgggcccctgtgcaggtggcgccgtgtacagtcctgctctcaccgacttcacttttatggtgaaagacacttcctacctgttcatcacaggcccagacgtagttaagtcagtcactaacgaggacgtgacacaggaagagctgggcggtgccaagacccatacaaccatgagcggagtagcacatcgcgcttttgaaaatgatgttgatgcattatgtaatctgcgggattttttcaactacttaccactgtccagccaggacccagcacccgtgagagagtgccacgacccctccgacagactggtacctgagctggatacaattgtgccattagagagtacgaaggcttacaacatggtggacattatccactcagtcgtggatgagagagagttcttcgagatcatgcccaactacgccaagaatatcatcgttggatttgccaggatgaacgggcggactgtggggatcgtggggaatcagcccaaggtggcgtcaggttgtctggacattaacagctccgtaaagggagcccggtttgttcggttttgcgacgcgttcaatattccactcatcacgtttgtggacgtccccgggtttttacctgggacagcacaggaatatgggggcattatccggcacggagctaagttgctctacgctttcgcagaggccacagtccccaaagtgaccgtcatcacccgcaaagcctatggcggggcatacgatgtaatgtcttcaaagcacttatgtggagacactaactacgcctggcctacagctgaaatcgccgtcatgggagcaaaaggagccgtggagatcatctttaaaggacatgagaacgtcgaggccgcacaagcagaatacattgagaagttcgctaacccctttcctgccgccgttaggggattcgttgatgacataatacagcccagtagtactagagcacggatttgctgtgatttggacgtactcgcctctaagaaagtgcgtgtgcaggaagtgttccatcaggttgtgcagagcggacaccgggatgggaggggagcagtgcggtggtag

SEQ ID NO: 200950 - DNA, 387 bp, synthetic construct
  misc_feature 1..387: note = Description of Artificial Sequence: Synthetic coding sequence
  source 1..387: mol_type = other DNA
atgagcctgcggctggacaccacccccagctgcaacagcgcccggccactccacgcccttcaggtccttctgctgctctcactccttttaacggcactggcctcttcaaccaaaggacaaacaaaacgtaatctcgccaagggcaaggaagaaagtctcgattccgatttgtacgccgagctgagatgcatgtgtattaaaactacctcggggatccatcctaaaaacatacagagcctggaagtcatcgggaaaggaacccactgtaaccaggtcgaggtgatcgccactttaaaggatggacggaaaatctgcctggaccccgacgcccccaggatcaagaagatcgtgcagaaaaaactggccggagacgagagtgctgactag

SEQ ID NO: 200951 - DNA, 2262 bp, synthetic construct
  misc_feature 1..2262: note = Description of Artificial Sequence: Synthetic coding sequence
  source 1..2262: mol_type = other DNA
atggagcggcgggcctggagcctgcagtgcaccgccttcgtgctgttttgcgcctggtgcgccctgaatagcgcaaaggcaaagcggcaatttgtgaatgaatgggccgctgaaattcccggtgggccagaggctgcgtcggctattgccgaggagttaggttatgacctgctggggcaaattggatcgctggagaaccactatctttttaagcacaaaaaccaccctcgaaggtctaggcgcagcgctttccatatcacaaagcggctcagcgacgatgatcgcgtgatctgggcggaacagcaatacgaaaaagagcggtccaagcggtctgcgctcagagatagcgcgctgaacctcttcaacgacccgatgtggaaccagcaatggtatctacaggacacccgaatgacggcggccctcccaaagttagaccttcatgttatccccgtatggcagaagggcattactggcaaaggcgtcgttattaccgtattagacgatggactagagtggaaccatacagacatttatgctaactatgatcccgaggccagctatgattttaacgataacgaccacgacccatttccaaggtatgatccaacaaacgaaaataagcacggaactcgctgcgccggggaaatcgcaatgcaggctaataaccacaagtgtggggtgggagtggcctataactctaaagtggggggaattcgtatgctggatggaattgtgacagacgctattgaagcctctagcatcggcttcaatcctggccatgtcgacatatatagcgcaagctgggggcctaacgatgacggaaaaactgttgaaggaccaggacgacttgctcaaaaagcatttgagtacggagtgaaacaaggccgccagggaaagggaagtatttttgtctgggcatcaggaaatggagggcgccagggggataattgtgactgcgatggctacactgacagtatttacacaatcagcatcagctcagccagtcagcaagggctaagcccctggtatgcggagaagtgcagctcaacacttgctacatcctattcttcaggggactacaccgatcagagaattacttcagcggacctccacaacgactgcactgaaacccatactggaacgtctgcgtcagcaccgctcgccgccggtattttcgccctggccttggaagcgaacccaaacctgacttggagggacatgcagcatctggtggtttggaccagcgagtacgaccccttagctaacaacccaggatggaaaaagaacggcgccggcttaatggttaactcacgatttgggtttgggttgctgaacgcaaaagccctcgtagacttggccgatccacgcacttggcgcagtgtgcccgaaaaaaaagagtgcgtggtcaaggacaatgatttcgaaccacgcgcactcaaggctaacggcgaggtgataatcgagatacccacacgggcttgtgagggccaggagaacgcgatcaagtcactggagcacgtacagtttgaggccacgatagagtactcaagaaggggtgatctgcatgttacattgacctcggcagccggaacatctacagtcttactagccgagcgagaacgtgatacctcacccaacgggttcaagaattgggatttcatgagcgttcacacctggggcgagaaccccataggcacttggacacttcggattacggacatgagcggaaggattcaaaatgaggggagaattgtgaactggaagcttatactgcacggcacatcctcccagcccgagcatatgaaacagccaagagtgtacacgagttacaatacggttcagaacgacaggcgtggcgttgagaaaatggttgaccctggcgaggagcaacccactcaggaaaatcctaaggaaaatactttagtctccaagtcaccaagcagttccagtgtgggcggccgcagagacgagctggaggaaggggccccgtcccaggctatgctgcgactgctccagtcagcattttctaaaaactccccgcccaagcagtcccccaaaaagagcccctccgctaaactaaacatcccctatgagaatttctacgaggccttggagaaactcaacaaaccctcccagctcaaagactctgaagactccttgtacaatgactacgtcgatgttttctataacaccaaaccatataagcacagagacgatcgtttactgcaggccttagtggatatactgaacgaagagaattag

SEQ ID NO: 200952 - DNA, 477 bp, synthetic construct
  misc_feature 1..477: note = Description of Artificial Sequence: Synthetic coding sequence
  source 1..477: mol_type = other DNA
atggagcggcgggcctggagcctgcagtgcaccgccttcgtgctgttctgcgcctggtgtgccctgaactccgccaaggcaaagaggcagttcgtgaatgagtgggccgcagagattcctggagggcccgaagctgcctccgccatcgccgaagaattgggctatgatctccttggccagattggttcactcgaaaaccattatctcttcaagcacaagaaccatcctagacgcagtcgaagatctgcctttcacataactaagaggctatcagacgacgacagggtgatctgggccgagcagcagtacgagaaagagaggagcaaacgctccgcattgagggactcagcgctaaacctgttcaacgatcctatgtggaatcaacagtggtacctgcaggacacaagaatgactgcggccctgcctaagctggatctccatgttatacccgtgtggcaaaaggggatcacggggtag

SEQ ID NO: 200953 - DNA, 2121 bp, synthetic construct
  misc_feature 1..2121: note = Description of Artificial Sequence: Synthetic coding sequence
  source 1..2121: mol_type = other DNA
atgggcaagggcagcatcagcttcctgttcttcagccagatcggctccttggaaaaccactacctttttaagcataagaatcacccccggcgatccagacgcagcgccttccatattacaaagcggttgtccgacgatgaccgcgtgatttgggcagaacagcagtatgagaaggaacgaagcaaacggtccgccctgcgcgattccgccctaaacttgttcaatgatcctatgtggaatcaacagtggtacctgcaggatacgagaatgactgccgcccttcccaaattagacctgcacgtcatacccgtgtggcaaaagggcataacaggaaagggagttgtgattaccgtcctggatgacggactcgagtggaaccatacagatatctacgcaaactatgatccggaagcttcttacgacttcaacgataatgaccatgacccatttccccggtacgatcctacaaatgaaaataagcacgggacccggtgcgctggcgagattgcaatgcaggctaataatcacaaatgtggggtaggggtcgcatacaatagtaaggtggggggaatcaggatgctcgatggcatcgtgacggacgccatcgaagcttcctccatcggtttcaatccaggccacgtggacatttatagtgcaagctggggcccaaacgatgatggaaaaacggtggaagggcccggccgcctcgcacaaaaagcatttgaatatggcgtgaaacagggccgacagggtaaagggtcaattttcgtttgggcctctggaaatggcggacgacagggcgataactgtgattgcgacgggtatacagatagtatctacactattagtatctcttcagctagccagcagggcttaagcccctggtacgcagagaagtgcagttccaccctggctacctcatactcatccggagactacaccgatcaacggattacctccgccgatttgcataatgactgcactgagacacacaccggtacatctgcgagtgctccactggcggccggaatttttgctctcgctctggaagccaatcccaatttgacctggcgcgacatgcagcacctcgtggtatggaccagcgagtatgatccactcgcaaacaatcccgggtggaagaaaaacggtgccggcctgatggtgaacagtcggttcggatttggcctgctgaatgcgaaagcattagtggacctggccgacccgcgtacatggcgcagcgtgcctgaaaaaaaggagtgtgtagtcaaagacaacgatttcgaacccagggccctgaaagccaacggggaggtgataattgaaatacccacgcgcgcatgtgagggccaggaaaacgccatcaagagcttggagcatgtgcaattcgaggctaccatcgaatactccaggagaggtgacctgcacgtgaccctgacttctgcagccggtacaagcaccgtgttgctggccgagagagagagggacacctctcctaacgggttcaaaaactgggacttcatgtctgtccatacatggggcgaaaatccaataggaacctggacactgcgcatcacagacatgtctggtagaatccagaacgaaggtagaattgtgaactggaagctgatcctgcacgggacctccagccagccagaacatatgaaacagcctcgggtgtacacttcttataacacagtgcagaacgacagacgaggggtggaaaaaatggtggatcccggggaagagcagcctacacaggaaaacccgaaggagaacaccctcgtttcaaagtccccttctagtagcagcgtcgggggccgccgggacgagctcgaggaaggcgctcccagccaagctatgcttcggctgcttcagtccgccttttctaagaatagccctccaaagcagtcccccaagaaaagtcctagtgcaaagctaaacattccttacgaaaatttttacgaagccctagagaagcttaataagcctagccagctcaaggactctgaagattctttatataatgattatgtagatgttttttataataccaaaccatataaacaccgtgacgaccgattactgcaggctctggtggatatcctgaacgaagagaattag

SEQ ID NO: 200954 - DNA, 798 bp, synthetic construct
  misc_feature 1..798: note = Description of Artificial Sequence: Synthetic coding sequence
  source 1..798: mol_type = other DNA
atgcccctgcccgtggccctgcagacccggctggccaagcggggcattctgaagcatctcgaacctgagccagaagaggagatcatcgctgaagattacgacgatgacccagtggattacgaagcaacacggctagaagggctgcccccatcctggtacaaggtgtttgacccctcctgtggtctgccgtattactggaatgcggacaccgacttggtcagctggttatcaccgcacgaccctaacagtgtagtgaccaagtctgcaaaaaagctcagaagttctaatgcagacgcggaggaaaaactagataggagccacgacaagagtgataggggccatgataaatcagaccgctcacacgagaagctggatcggggacacgataagtcagatagggggcacgacaaatctgaccgggatcgtgagcggggctacgacaaagtcgaccgcgaacgtgagcgcgacagagaaagggatagggacagggggtatgacaaggctgatcgcgaagaggggaaagaacgtcggcatcatagacgtgaggagctcgctccttatccgaaaagcaaaaaggccgtgtctaggaaggatgaagagcttgatccgatggaccctagctcctacagtgatgcccctagagggacttggtccaccgggcttccaaaacgaaacgaggcaaaaacaggcgccgacacaaccgccgctggtccactgttccaacaacgtccctaccccagccctggtgcagtcctccgagccaacgctgaggcctccaggacaaaacagcaggattag

SEQ ID NO: 200955 - DNA, 1917 bp, synthetic construct
  misc_feature 1..1917: note = Description of Artificial Sequence: Synthetic coding sequence
  source 1..1917: mol_type = other DNA
atgaagggcggctgcgtgagccagtggaaggccgccgccggcttcctattctgcgtaatggtgtttgcctcggcagagagacccgtgtttaccaaccacttcctcgttgagctccataagggcggagaggataaggccagacaggtcgccgccgaacacggctttggggtcagaaagctgcctttcgccgaaggcctgtatcacttttaccataacggtcttgctaaagcaaagaggaggcggagtctgcatcacaagcagcagttagagcgtgatcctagggtgaagatggcacttcagcaggaaggcttcgacaggaagaagaggggatatcgagacatcaatgagatcgacataaatatgaacgatcctttgttcacaaaacagtggtatctgatcaacacgggacaggccgacggtactcccggattggatctgaacgttgcagaggcttgggagcttgggtatacaggaaagggagtgactatcggcatcatggatgatggcatcgactacctgcatccagatttggctagcaactacaacgctgaagctagctatgatttctccagcaatgatccatatccttatccgcggtataccgacgattggtttaattctcatggcacaagatgtgccggggaagtctccgccgcagctaacaacaacatctgcggcgtgggagtggcctataatagcaaagtggcagggatcagaatgttagatcagcccttcatgacagacatcatcgaagcttctagtatttctcatatgcctcagctgatcgatatatatagtgccagctggggcccaacagacaacggcaaaacagttgacgggcccagagagctgacactacaggccatggcagacggagtgaacaagggccgaggaggaaaaggatccatatatgtgtgggccagcggagatggagggagctatgacgattgcaactgtgatgggtatgcctctagtatgtggaccatttccatcaacagtgcaattaatgatgggaggaccgctctctacgatgaatcgtgcagctccactctcgctagcacctttagcaacgggcggaagcggaatcccgaggctggcgtggccactaccgatctgtacggcaattgcacgctgagacatagcggcacctccgccgcagcgcctgaagctgccggggtgttcgccttggctttggaagcgaacctgggcctcacttggcgcgatatgcaacacctgaccgttctgacatcaaagcggaatcagctgcacgacgaggtccaccagtggcggaggaacggagttggactggaattcaaccacctgtttgggtacggagtattagacgctggcgcaatggtcaagatggctaaggactggaaaacagtgccagagcgatttcattgtgtgggcgggagcgtgcaggatccagagaagattccatcgactggaaaactggttctgacattaacaacagatgcctgtgaaggtaaggaaaattttgtccggtatctcgagcacgtccaggcagtgatcacggttaatgccactcggaggggtgacctgaacatcaatatgactagcccaatgggaaccaagtccatcctgctgtcccgcagacccagagatgatgattcaaaggtaggatttgacaagtggcccttcatgactacccatacctggggcgaagatgcgagaggaacctggaccctcgagttgggcttcgtgggctctgcaccacagaagggagttctcaaagaatggacccttatgctgcacggcactcagtccgctccttatatcgatcaggtggtgagggattaccagagcaagctcgcaatgagcaagaaagaagagctggaagaagagctggatgaggcggtcgaacgctcactcaagtcaatcttgaacaaaaattag

SEQ ID NO: 200956 - DNA, 1860 bp, synthetic construct
  misc_feature 1..1860: note = Description of Artificial Sequence: Synthetic coding sequence
  source 1..1860: mol_type = other DNA
atggtgttcgccagcgccgagcggcccgtgttcaccaaccacttcctcgttgaactccacaaagggggagaagataaggcccgccaggtagccgccgagcatggcttcggtgttcgtaaactccccttcgccgagggtctctaccacttctatcacaatggtctggcaaaagccaaacgtcgtaggagtctacaccataagcagcagctggagcgcgaccccagagtgaagatggccctccaacaagagggattcgataggaagaaaagaggttatcgagatattaatgagatcgatattaatatgaacgatccgctgttcacaaagcaatggtatctgatcaatactgggcaggccgatggcacgccagggctggatttaaatgtggccgaggcttgggaactgggctatacaggtaagggggttaccatcggaatcatggacgacgggatcgattacctccaccctgatcttgcttcaaactacaatgcggaagcctcgtatgacttcagcagcaacgacccttacccctacccgcgttacacggacgattggtttaacagccatggtacaagatgcgcaggtgaagtctccgcggcagctaataacaacatctgcggcgtaggcgtggcttacaattcaaaggttgccggcatcagaatgctcgatcagccatttatgactgacatcatcgaagcttcttctatttcccacatgccccaactgattgatatctatagtgcttcctggggccccaccgacaatgggaagaccgttgacggccctagggagctgaccttgcaggccatggccgatggcgtgaacaaaggcaggggaggtaagggctctatatatgtatgggcaagtggagatgggggaagctacgatgactgcaattgtgacggctatgccagctccatgtggaccatctccataaactctgccattaatgacgggagaacagccctgtacgacgaaagctgcagcagcacattggctagcacattctctaacggaaggaagaggaatcccgaagccggggtggcaactactgacctctacgggaactgtacacttaggcactcaggcacaagcgccgcagctcccgaggctgcaggcgtgtttgctttggctctagaggccaatctggggctgacatggcgcgacatgcaacatttaactgtattgacctctaagcgcaaccagttacacgatgaagtccaccaatggcggcgtaacggtgtgggactcgagtttaaccatctttttggttatggggttctggacgctggggcgatggtgaagatggccaaagactggaagaccgttccagaacggtttcattgcgtgggtggatcagtgcaggatcctgagaagattccctcaacaggaaaactggtgcttactctgactaccgacgcctgcgagggaaaagagaactttgtgcggtacctggaacatgtgcaggcggtaatcaccgttaacgcgactagaaggggggacctaaatattaacatgactagccctatgggcacaaaaagcatcttgttgtcccggagaccccgtgatgacgactccaaagtagggtttgacaagtggcccttcatgaccactcacacctggggcgaggacgcccgcgggacgtggacactggaattaggctttgtgggctctgctccacaaaaaggagtgctcaaagagtggacactaatgcttcacggcactcagtctgcaccttacattgaccaggtagttcgggattaccaatccaagctggccatgagtaagaaagaagagctggaggaagagcttgatgaagccgtggaaaggagcttgaagagtattctgaacaaaaattag

SEQ ID NO: 200957 - DNA, 1812 bp, synthetic construct
  misc_feature 1..1812: note = Description of Artificial Sequence: Synthetic coding sequence
  source 1..1812: mol_type = other DNA
atgaagggcggctgcgtgagccagtggaaggccgccgccggcttcctcttttgtgtgatggtctttgccagcgccgagagaccagtttttactaaccatttcttggtcgaactgcacaagggcggggaagataaggcaagacaggtggcagcggaacacggcttcggggtgaggaaagttaagatggcgcttcaacaagaaggttttgataggaagaaacggggctacagggacattaacgagatagacattaatatgaacgacccccttttcactaagcagtggtatttgatcaatacaggacaggccgatggcacacctggtctggatctgaatgtcgccgaggcatgggagcttggctacactggcaagggagttacaattggtataatggatgacggtatagactacctgcaccccgaccttgcgagcaactataacgcagaggctagctacgacttctcctctaacgatccttacccctaccctaggtatacagacgattggtttaatagccacggcaccagatgcgcaggggaggtctctgcagccgccaataataatatttgtggcgtgggcgtggcctataatagcaaggtagccggaatccggatgctcgatcagccttttatgacagatatcatagaagccagctcgatctcgcacatgcctcaattgatcgacatctactccgctagttgggggcccaccgataatggaaagactgtggacggtcctagagagctgacgttgcaagcgatggccgatggggtcaacaagggccgaggaggcaaaggatcaatctacgtgtgggcttccggtgatggcgggtcatatgacgactgtaattgcgatggttacgccagtagcatgtggactattagcatcaatagcgccataaacgacggacggactgcgctgtatgacgagagttgtagctcaacactggcgtctaccttctctaacggccgaaaaagaaatcccgaggctggcgtagccactaccgacctgtacgggaactgcacactcagacatagcgggacaagcgccgccgctccagaagccgccggagtcttcgccctcgcactggaggctaacttgggtctaacatggcgtgacatgcaacatctgaccgtgctcacatctaagaggaatcagttgcacgacgaagtccaccaatggcgccgcaatggcgtgggtctggagttcaaccacctgtttggctatggcgtgcttgacgctggtgccatggtaaagatggccaaggactggaaaaccgtgccggaaaggtttcattgtgtcggagggtcagtgcaggaccctgaaaagattcccagtacaggaaagctggtgttgacgctgacaacagacgcctgtgaaggaaaggaaaattttgtgcgatatctagaacatgtccaggcagtgattaccgtgaatgccactagaagaggagacctcaacattaatatgacaagtccaatgggtacaaagtcgattttgctgagcaggcgacccagggatgatgactcaaaggtaggctttgacaagtggccctttatgacaacccatacttggggcgaagatgctcggggcacgtggactcttgaactcggctttgtggggtcggccccgcaaaagggcgtcttgaaggagtggacgctgatgctgcatggaacacagtcggcaccatatattgaccaggtggttcgggactatcaatctaaactggccatgtcgaaaaaggaggagctggaagaggaactggacgaggcggtagagagaagtcttaaatctatcctgaacaaaaattag

SEQ ID NO: 200958 - DNA, 2268 bp, synthetic construct
  misc_feature 1..2268: note = Description of Artificial Sequence: Synthetic coding sequence
  source 1..2268: mol_type = other DNA
atgcggcccgcccccatcgccctgtggctgcggctggtgctggccctagctctcgtgcggccccgggccgtcgggtgggcaccagttcgggcgccaatttacgtctcaagctgggcagtccaggtcagtcaaggcaatcgcgaggtggagcgtcttgcccgtaaattcggttttgtgaatcttgggccaattttccccgatggtcaatattttcacctgcgccataggggggtggtacagcagtcgctaactccgcattgggggcacagactgcacctaaagaagaatcctaaggtgcagtggtttcagcagcagacccttcagagacgggtcaagagatccgtagtagtgccaacagatccgtggtttagtaagcaatggtacatgaactccgaggcccagcctgacctgtcaatcctacaggcctggtcgcaggggctatcaggccagggcatcgtggtttctgttttagacgacggtatcgagaaggatcatccagatttgtgggctaactatgatcccttggcctcctacgacttcaacgactacgacccagatccgcagcctaggtataccccctctaaggaaaaccgacacggaacccgttgcgcaggggaggtcgctgctatggcaaataacggcttctgtggcgtcggcgtcgctttcaatgcccgcatcggcggtgttagaatgctggatggaaccatcaccgacgttatagaggcccagagccttagcctgcagcctcagcatattcatatttacagcgctagttgggggcccgaagacgacggcagaaccgttgacggaccaggtattcttactagagaggcctttcgccgaggcgtaactaaaggacgggggggattagggaccctgtttatttgggcttcaggcaatgggggacttcattatgataattgcaattgcgacgggtacacaaacagcattcataccctgtccgtcggatctacaactcagcaaggaagggtcccttggtactctgaggcgtgcgcatccacccttaccacaacctactcctcaggggttgctaccgatccacaaatcgtcaccaccgacctgcaccacggttgtactgaccaacacacaggaactagcgcctctgcacctctggcggcaggcatgatagctctggccctagaagcaaatcctttcctcacatggagagatatgcagcatctcgttgtgcgggctagcaagccggcccaccttcaagccgaggattggaggaccaacggcgtcggacgacaggtgtcacatcactatggctatgggttgctagacgccgggctgctcgtcgatacggctaggacatggctgcctacccaacctcagcgaaagtgcgctgttagagttcagagccggcccaccccgatccttccccttatttatattagggaaaacgttagtgcctgcgccggccttcataattccatacggagcctggagcacgtacaagctcagctcactttatcttactccaggaggggggacctcgaaattagcttgacctcacctatgggtacccgctctacattggtcgccatcagaccgctcgacgtgagcactgagggatataataattgggttttcatgagtacacatttttgggacgagaatccacagggggtttggacccttggcctagaaaacaaaggctactattttaatacgggtaccctctatagatataccctgctgctctatggcacagccgaggatatgactgctcggcccaccggaccccaggtgactagctccgcgtgcgtacagagggatactgagggcttgtgtcaggcctgcgacgggcccgcctacattctgggacaactatgtctggcttattgtccacctaggttttttaaccatacgcgccttgtaactgccggtcccggacataccgcagctcccgctcttcgcgtatgtagctcttgccatgctagctgctatacttgtagaggtggcagcccgcgtgactgtacaagctgtccccccagttcaacactcgaccagcaacaggggagctgcatgggcccgaccacacccgattcacgaccccgcctccgtgccgctgcgtgcccacaccaccggtgcccagcttcagccatggtgttgtctctgctcgccgtcacgctgggggggcctgtactttgtggaatgtccatggatctgcccctttacgcttggttgtcaagagctcgcgcaactcccacaaagcctcaagtgtggctgcccgcaggaacgtag

SEQ ID NO: 200959 - DNA, 1137 bp, synthetic construct
  misc_feature 1..1137: note = Description of Artificial Sequence: Synthetic coding sequence
  source 1..1137: mol_type = other DNA
atggccagccggcggaccacccggaccagcggccccaccaccaccccgtggccagccatgaccagcatgactacgactcgaacaccctcacccgccactccgcctgcaaaacgtacaggagttagaatgctcgacggaaccatcactgatgtgattgaggcacagagtctcagcctgcaacctcaacacatacacatttattctgctagctggggccccgaagatgatggaaggacagtagacggtcctggcatcctgaccagagaagcctttcgcaggggcgtcacaaaaggccgcggtgggttgggcactctgtttatctgggcttctggcaacggtggactgcactacgataactgcaactgcgatgggtacacgaactctattcataccctgagcgtcggctcaacgactcagcagggcagagtgccttggtacagtgaggcatgtgcatccactctgactaccacatattcatccggagtggccacggatccacaaatcgtcaccacagatctgcatcacggctgtacggaccaacacaccggtacttctgcctctgctcctttagccgctggcatgatcgccctggccttggaagcaaatcccttcctgacctggagggacatgcagcatctggtggtgcgggcatctaagcccgcccacttacaggccgaagactggaggacaaatggcgtcggcaggcaagtgagtcatcactacggatacgggttactggacgctggcctgttagtggacaccgcacgaacttggctgcctactcagccacaaaggaaatgtgcagtaagggtgcagagccgccccacgcctattttgcccctcatttacatccgggaaaacgtgtccgcctgtgccggcctccacaattcaattcggtctttagaacatgtgcaagcccagctaaccctgtcttactcacggcgcggtgatcttgagattagcctcacctccccaatggggacgaggtcaacactggttgctattcgcgatgtcgtccctctgcacgcggccgcgttgtgggacggcagaggccacgacagtgcggcatacagaccccctggcgatcagcagcgggtgtgcgccgccggtcataggggtgctgtgcctggcgtgtag

SEQ ID NO: 200960 - DNA, 2742 bp, synthetic construct
  misc_feature 1..2742: note = Description of Artificial Sequence: Synthetic coding sequence
  source 1..2742: mol_type = other DNA
atgggctggggcagccggtgctgctgccccggccggctggacctgctgtgtgttcttgcactattggggggctgcttactcccggtatgtaggacccgggtatacaccaaccactgggcggtcaaaatagctgggggatttccggaggctaatcgaatcgcttcgaagtacggcttcattaacatcggccagataggcgccctgaaagattattaccacttctaccacagccggacaattaagagatcggtgataagctctcggggcacgcatagctttattagcatggaaccaaaagtcgaatggattcaacagcaggtggttaagaagaggactaaaagagattacgatttcagcagagcacagagtacttattttaacgatcccaaatggccgagtatgtggtatatgcactgtagcgataatacacacccatgtcagtccgacatgaatatcgaaggagcttggaagcgcggatatacaggcaaaaatatcgttgtgaccatcctggatgacggtatcgagcgaactcacccagatttgatgcagaattatgatgctctcgccagctgtgacgttaacggcaacgacttggatcctatgcctagatacgacgcgagtaacgaaaataagcacggaacccgatgcgctggcgaggtcgccgctgcagcaaacaacagtcattgcaccgtaggcattgctttcaacgctaagatcggaggtgtgaggatgcttgatggcgatgtcaccgatatggtggaagctaagtctgtgtcgtttaatccccaacacgttcacatttatagtgcttcttggggacccgacgatgatggaaagacagtcgatggccccgctccactgaccagacaggcctttgagaacggcgtgcggatggggagaaggggattgggatccgtattcgtttgggcttctggaaatggaggtagatccaaggaccactgttcatgcgacggctataccaattccatttatacaatttccatatcctcaaccgcggagagtggcaagaagccttggtatttggaggagtgctcttctacactagccaccacatactcctccggcgagtcgtatgataagaaaattatcacaacagatctgcgccaacgctgtacagataaccacaccggcacatccgcttcagcccccatggccgctggtattatcgcgctcgctttagaagcaaaccccttcttgacttggcgtgatgtgcagcacgtgattgtacgaacctcacgggcagggcatttgaacgcaaacgactggaagacaaacgccgccggtttcaaagtatcacacctatacggattcgggctcatggatgccgaagccatggtgatggaggccgagaagtggaccacagtgcccagacagcacgtctgtgtcgagagtaccgaccgacagatcaagacaatccggccaaacagtgccgttcggtctatctataaagcaagcggctgctcagataatcctaaccgccatgtgaactatctggagcatgtggtagtcagaatcactattacccatcccaggaggggagatcttgccatatatctgacctccccttctggtaccagatctcagcttctcgcgaatcgactgtttgatcactccatggagggctttaagaactgggaatttatgaccattcattgttggggtgagcgggccgccggcgactgggttctcgaagtttatgatacaccgagccagctcagaaattttaagacaccaggcaagcttaaagaatggtcactggttttgtacggcaccagcgtgcagccatactcccctaccaacgaattccccaaagtggaacgctttcgctactcacgcgtggaagacccaactgacgattacggaacggaggactatgctgggccgtgtgacccagaatgcagcgaggtggggtgtgacggcccggggcccgaccattgcaatgattgcctgcattactactataagcttaaaaataacacccggatttgtgttagtagctgtccacctgggcactaccacgccgacaagaagcgctgtcgcaaatgcgccccaaattgtgagtcttgcttcggatcccacggggaccagtgtatgtcttgcaaatatggttattttctgaacgaagaaacaaacagttgcgttacacattgccctgacgggagctatcaggatacaaagaagaacctgtgcagaaaatgttcggagaactgcaagacctgtactgagtttcacaattgcacagaatgcagggacgggctctccctccagggcagtcggtgtagcgtaagttgtgaagatgggcggtatttcaatggtcaggattgccaaccttgtcatcgattttgcgccacatgcgcgggcgctggagctgatggctgcattaactgcaccgaggggtacttcatggaagacggtagatgtgtgcagtcatgctctatctcgtactatttcgatcatagttctgaaaatggctacaaatcctgcaagaagtgcgatatctcatgcctgacgtgcaatgggccgggcttcaaaaactgcaccagttgcccctctggttatttgctggatctggggatgtgccagatgggtgcgatctgtaaggacgccactgaagaaagctgggccgaaggcggattttgtatgctggtaaagaaaaataacctctgccagcggaaagtcctccagcaactttgctgcaaaacttgcacctttcaaggttag

SEQ ID NO: 200961 - DNA, 4773 bp, synthetic construct
  misc_feature 1..4773: note = Description of Artificial Sequence: Synthetic coding sequence
  source 1..4773: mol_type = other DNA
atgggccggcggggcctgggcagcgtgttcgtgtgggccagcggcaacggcgggcggagtaaggatcattgcagctgcgacggatacaccaactctatctataccatcagcatctcctctacagcagaaagcggaaagaagccctggtacctggaggaatgttcttcaacattagccacgacttattcatctggagagtcttatgataagaaaatcataactactgatcttagacagcggtgcacagacaaccacacggggacttccgcttccgcacctatggccgctggcataattgcacttgccctcgaggccaacccattcctgacgtggcgcgacgttcagcacgtgatagtgagaaccagtcgggctggacaccttaacgcaaacgattggaaaaccaacgccgccggcttcaaggtgagccacctgtacgggtttgggttaatggacgccgaggcaatggttatggaggccgagaagtggaccacggtgcctagacagcatgtgtgcgtggagagtactgaccgacagatcaagacaatccgccccaatagcgcagtaaggtcaatctacaaggcctccggatgcagcgataatcctaacagacacgtaaattacctggaacacgtggtggtcaggattaccatcacccaccccagacgaggcgacctggctatctacctgacaagcccttcgggcaccaggtctcaactcctagcaaatcgcctttttgaccactccatggagggcttcaagaattgggagtttatgacaatccattgctggggggaacgggcagcaggggattgggtgcttgaggtttatgacaccccatcccagctccggaacttcaagacccctggtaagctcaaggagtggtccctggtgctttacggcacttccgtgcaaccttatagcccaactaacgagtttcctaaggtcgaaaggttccggtattcgcgcgtggaagaccccacagacgactacggcactgaggattacgctggaccgtgcgatcctgagtgcagtgaggttggttgtgacggccccggcccagaccattgtaacgactgcctgcactactattacaagctgaagaataacacaaggatctgcgtatcaagctgtcccccggggcactatcatgcagataagaaaagatgtcgaaaatgcgcacccaattgtgagtcgtgtttcggctcccacggagaccaatgcatgagttgtaagtatggatatttccttaacgaagagactaattcctgtgtgacccactgcccggacggctcttatcaggacaccaagaagaacctttgtcggaagtgttccgagaattgcaagacttgtaccgaattccacaattgtaccgagtgtcgcgacggactctctctccaaggatccaggtgctcagtcagctgtgaggacggccggtacttcaatggccaggattgccaaccttgtcatagattctgtgctacatgcgccggagctggcgcggatggctgcattaactgcactgagggctactttatggaagatggtcgatgtgtgcaatcatgctccatcagctattacttcgatcatagctctgaaaacggctacaaatcatgtaagaagtgcgacatttcgtgcctgacttgtaacggacctgggttcaaaaattgtaccagctgcccttcagggtaccttctggatttaggtatgtgccagatgggcgctatttgcaaggacggggaatacgttgacgagcatggccattgccagacctgcgaagcctcttgtgctaagtgccagggcccaacccaggaggattgcacaacttgcccaatgacaaggatcttcgacgacgggcgatgtgtgtctaattgccctagctggaagtttgagtttgaaaaccagtgtcatccttgccatcacacctgccagagatgccagggatcgggccccacccattgtactagctgcggcgccgataattatgggcgcgaacatttcctgtaccagggtgaatgtggcgactcctgccccgaaggccattatgctactgaggggaatacatgccttccctgtcctgataactgtgagctttgtcactccgtccatgtttgtacacggtgcatgaaagggtactttatcgcccccacaaaccacacctgtcaaaagctggaatgcggccaaggggaggtgcaggaccccgattatgaggaatgcgtgccgtgcgaggaaggttgtctcggttgcagcctagacgacccaggcacatgcacctcctgcgccatgggatattacagatttgatcatcactgttacaagacgtgtcctgaaaaaacttatagtgaagaagtggagtgcaaggcctgcgactctaattgcggtagctgtgatcagaatggttgctactggtgcgaagaggggttttttctcctgggtggcagttgcgtcagaaaatgcggcccggggttctacggcgatcaggaaatgggagaatgtgaaagttgccacagggcttgtgagacatgcacaggaccaggccacgatgaatgttcctcctgccaggaaggattgcagctcctgcgggggatgtgcgtgcatgctaccaagacccaggaggaagggaagttctggaacgaggccgtctccactgctaacttaagtgttgtgaaaagccttctccaagagcgaaggcgttggaaggttcagattaagagggatattctacgcaagctgcagccttgccacagcagctgtaagacttgcaatggctcagccaccctctgtacttcgtgtcccaagggggcttacctgcttgcacaggcgtgtgtctccagctgcccacagggaacctggccatccgtacgcagcggatcctgcgagaactgcactgaggcttgcgctatctgctctggggcagacctctgtaaaaaatgccagatgcaaccaggacatccactgttcctgcatgaagggcggtgttatagcaagtgtcccgagggtagttacgctgaggatgggatatgtgagcgctgttcctcaccttgtagaacctgcgaaggtaatgctactaattgccattcttgcgaagggggtcatgtgctgcaccacggtgtttgccaggaaaattgccctgagcggcatgtcgccgtgaagggcgtctgcaaacactgccccgagatgtgccaggactgtattcatgagaaaacatgtaaggaatgcacaccggaatttttcctccatgatgatatgtgtcaccagagctgcccacgcgggttctatgccgacagccggcactgcgttccatgccataaagattgtttggagtgctccggcccgaaggctgatgattgtgaactgtgtttggagagtagttgggtactctatgacggactgtgtttggaggaatgccctgcgggaacatactatgaaaaggaaacaaaggagtgcagggattgtcacaagagttgcctcacctgttccagcagtggtacttgcacaacatgccagaagggacttatcatgaatccaagagggtcttgcatggctaatgaaaagtgcagccctagcgaatactgggacgaagatgcaccgggttgtaaaccctgtcacgtgaagtgcttccactgcatgggcccagccgaagaccagtgccagacctgccccatgaattcgttgctactgaacacaacatgtgttaaagattgtcctgaagggtactacgccgatgaagatagcaacaggtgcgcacactgtcatagctcttgccgaacatgtgagggcagacatagtcgtcaatgtcatagttgcaggccaggctggtttcagcttgggaaagagtgtcttcttcagtgtcgcgaaggatactacgctgataattccacaggtcggtgcgagcgatgcaacaggtcgtgcaaaggatgtcaaggccctaggcccaccgactgcctctcatgcgatcgcttcttcttcctccttagatcaaagggcgaatgtcacagatcttgtcccgatcattattacgtggagcaaagcacacagacctgcgaacgctgtcacccaacttgcgaccagtgcaaaggcaagggtgccctaaactgtctttcttgcgtctggtcatatcacctcatgggcggaatctgtacctctgattgccttgtgggggagtatcgggtaggagagggtgagaagttcaactgtgagaaatgtcacgagtcttgtatggagtgtaagggacctggagctaagaattgtactctgtgtccagccaacctagtgcttcacatggacgattctcattgtcttcattgttgcaatacctcggacccccctagtgcccaggaatgctgcgactgccaggataccactgacgagtgcattctgaggacttcaaaggtacgccccgccacagagcacttcaagaccgccctgttcatcacctcttctatgatgctagtgctactgctgggggcagcggtagtggtgtggaagaagagtaggggcagagtgcaaccagcagctaaggccggttacgagaagctcgctgacccaaataagtcttattcatcctacaaaagcagttacagagaatctactagtttcgaagaggatcaagtcattgaatatcgcgatagagactatgacgaagacgatgacgacgacattgtatacatgggacaggatggaacagtgtataggaaatttaagtacggtctccttgacgatgacgacatcgatgagctggaatatgacgatgagagttacagttattatcagtag

SEQ ID NO: 200962 - DNA, 2073 bp, synthetic construct
  misc_feature 1..2073: note = Description of Artificial Sequence: Synthetic coding sequence
  source 1..2073: mol_type = other DNA
atgggctggggcagccggtgctgctgccccggccggctggacctgttatgtgtgttggccctccttgggggctgcttgctgcctgtgtgtcgcacccgggtctacaccaatcactgggctgtgaagatcgccggagggttccccgaagccaataggatagcttccaagtatggcttcattaatataggccagattggggcgctcaaggactattatcacttctatcattcccgcactattaagcggtcagtgatctcctctagaggaacccacagttttatctccatggaaccgaaggtggaatggatccaacaacaggtcgtgaaaaagagaacaaagcgggattacgatttctcaagggcgcagagtacctacttcaacgatcccaagtggccatcaatgtggtacatgcattgcagcgataacacccacccttgtcagtcagatatgaacatcgaaggcgcatggaagaggggctatacaggaaagaatattgtcgtaacaatactcgacgatgggattgaaaggactcaccctgatctgatgcagaactacgacgccctggcatcatgtgatgtgaatggaaacgatctcgaccccatgccaagatacgatgccagcaatgaaaacaagcacgggacccgatgtgccggggaggtggccgcagccgcgaacaactcacattgcacagtaggcattgcctttaacgcaaaaatcgggggggtgcggatgttggacggcgatgtgacggatatggtcgaggccaagtccgtgagtttcaacccgcagcatgtccatatctactctgcctcatggggtccggatgatgatggtaagacggttgacgggcctgcccctctgacgaggcaggcttttgaaaacggcgttcgtatgggaaggcggggacttgggtctgtgtttgtgtgggcttccgggaacggaggcagaagcaaggatcattgttcctgcgacggttataccaattctatctataccattagcatcagttctactgccgagtccgggaaaaaaccatggtacctggaggagtgtagcagtacactcgccacgacctattcaagcggcgagtcctacgataagaagatcataaccactgatctgcggcagcgatgtacagacaaccacacggggacgagcgcttcagcccccatggccgctggcatcatcgcacttgcactggaggccaacccattccttacctggagggacgtgcaacatgtaattgtgcgcacctcccgcgccggccatcttaatgccaatgactggaagaccaatgcagccggctttaaggtatcgcacctgtacggatttggactgatggacgcagaagcgatggtcatggaagccgagaaatggacaactgtgccccgccaacacgtgtgcgttgaaagcaccgatcggcagataaagacaattcggcctaacagtgctgtgcggagcatttacaaggcctccgggtgcagtgataacccaaaccgacacgtgaactaccttgagcacgtggtcgtgagaattacaattacccacccccgtaggggggatctggcgatctacctcacatccccgtccggaacacgctcacagttactggccaacagactgttcgatcacagcatggaaggttttaagaactgggaatttatgacaatccactgctggggggaaagagcagctggcgattgggttctagaagtttatgatactccatctcaactcagaaacttcaagacaccaggtaagctgaaggaatggtcattggtgctttacggaacaagtgtccagccgtactctcctacaaacgagtttcctaaagtggagagattccggtatagccgcgttgaggatcccaccgatgactacgggacagaggactacgccggtgagctggcgagtagcggaacacaggctaaaaagagacagctcatgcatcatcccacaacatgggagaaccggatggaatggaatgggatgaagtggaatggtatgaagtggaacgggatggaatggaatgggatggaatggaataggattgaatctaaccgtattgaatag

SEQ ID NO: 200963 - DNA, 2073 bp, synthetic construct
  misc_feature 1..2073: note = Description of Artificial Sequence: Synthetic coding sequence
  source 1..2073: mol_type = other DNA
atgggctggggcagccggtgctgctgccccggccggctggacctgctgtgcgtactggccctactgggaggctgcctcctgcctgtctgtcgtactcgggtgtataccaaccactgggccgtaaaaattgccggcggcttcccggaagctaaccggattgccagtaagtacggatttattaacatcggtcaaattggtgccctcaaggattattaccacttttatcactcccggaccattaagcgctccgtcatcagttcgagaggcactcactccttcatttccatggagcctaaggtggaatggatccaacagcaggtagtgaaaaagcgcaccaaaagagactacgactttagcagggcacagtcgacctattttaatgatcccaagtggcctagcatgtggtatatgcactgttccgataatacgcacccctgccaatctgacatgaacatcgaaggggcctggaaaagaggctataccgggaagaatattgtggtcactattctcgatgatggcatcgagaggacccaccccgacctaatgcagaactatgatgctctggcatcttgcgatgttaatggcaacgaccttgatccaatgccacgatatgatgcgtccaatgagaataagcatggaacaaggtgcgccggcgaggtggccgcagctgcgaataactcccactgtacagtgggtatagcattcaatgccaaaatcggcggtgttaggatgttggacggcgacgtgaccgatatggtggaagcaaaatcggtgagcttcaatcctcagcatgtgcatatctactccgcttcctgggggcctgatgacgacgggaagaccgtggatggacctgcacctttaacccgtcaggcctttgagaacggcgtgcggatgggaagaagggggcttggcagtgtgttcgtgtgggcatcaggcaatggcggacggagcaaggaccattgtagctgtgacggatatactaatagtatttataccatttctatcagtagcacagccgagagtggaaaaaagccatggtatctcgaagaatgctcgtccactctagcaaccacatatagttccggggagagttacgataaaaaaataatcactaccgatctgcgacagaggtgcacagacaatcacaccggaacaagtgcaagcgccccaatggccgccggcattattgcactcgcgctcgaggccaacccatttctcacttggagagatgtacaacacgttattgtgaggactagcagagcggggcaccttaacgccaatgattggaaaacaaatgcagctggttttaaggtatctcacctatatggatttggactcatggacgccgaagccatggtcatggaagctgaaaaatggactaccgtccccagacagcacgtgtgcgtggagagtacagatcgccagattaagacaatacgacccaactcggccgtccgctccatatataaagcatctggctgctctgacaacccaaaccgccacgtcaactaccttgagcacgtcgtagtgcggatcactatcacccaccctcgacgaggtgacctggccatttatttgactagtccatcaggtacccgatcccagcttcttgccaacaggctcttcgaccacagcatggagggatttaaaaactgggaattcatgactatccattgttggggggagcgcgcagctggagattgggtactggaggtttatgatacaccaagccaactgcgcaactttaaaacccccggcaagcttaaagagtggtccctagttctgtatggcacatccgtgcagccgtactcccccactaacgagtttcctaaggtagagagattcaggtacagcagggtcgaagaccctacagatgactatggtactgaggactacgccggagagctggcatccagcgggactcaggcaaaaaagagacagctcatgcatcaccctactacatgggagaaccgcatggagtggaacggaatgaagtggaatggcatggaatggaatggcatggaatggaacggaatggagagtaacaggattgaatctaatcgtatagagtag

SEQ ID NO: 200964 - DNA, 4683 bp, synthetic construct
  misc_feature 1..4683: note = Description of Artificial Sequence: Synthetic coding sequence
  source 1..4683: mol_type = other DNA
aacagcatctacaccatcagcatcagcagcaccgccgagagcggcaagaagccctggtacttagaggagtgttcttctacactagctaccacctactctagcggcgaatcttatgataaaaagatcatcacgaccgacctcagacagcgatgcacggataatcatacaggtaccagcgctagcgctccaatggctgcagggattatagcattagcactggaagctaatccatttcttacttggagagacgttcagcacgtcattgtccgtacttctcgggccggacatcttaatgccaatgattggaaaaccaacgcggcaggctttaaggtaagccacctgtatggctttggcctgatggacgctgaggccatggtgatggaagctgagaagtggacaaccgtgcccagacagcatgtctgcgttgaatcgacggacagacagatcaagacaataagaccaaacagcgcggtgcggtccatttacaaggccagcgggtgcagcgacaatccaaacagacacgtcaattatttggaacatgtggtcgtgagaattacaatcacccaccccagacgcggtgatcttgctatctatcttacaagcccctccggaacaagatcacagcttcttgcaaaccgcttgtttgatcacagcatggagggattcaaaaactgggagttcatgacaattcattgctggggcgagcgtgcggccggggattgggtgctggaggtgtatgacactccaagccaactccgtaattttaagactcctggaaagctaaaggaatggtctctggtgctgtatggaacctctgttcaaccatacagccctacaaatgaattccccaaagtcgaacggtttagatactcacgggtagaggatccaactgacgattacggtactgaggactacgcaggcccatgcgatcctgagtgtagcgaggtgggatgcgatggcccgggtcccgaccactgcaacgattgtctccattattattacaaactgaagaataacacccgtatatgcgtctccagctgtccccccggccactatcacgccgacaagaagcggtgtagaaagtgtgccccaaactgtgaaagctgcttcggaagccacggcgatcaatgcatgagttgtaaatatggttatttcctaaatgaggaaaccaatagctgcgtgacccactgccctgacggcagctatcaagacaccaagaagaacctgtgtcgaaaatgtagcgaaaactgtaagacttgcaccgagttccacaactgtacagaatgcagggatggattatctctgcagggatcacgatgtagcgtcagctgcgaggacggcagatactttaacgggcaggactgtcaaccttgccaccggttctgtgctacctgtgcaggcgcaggggccgacggatgcatcaactgcacagaaggatacttcatggaagacgggaggtgcgtgcagtcatgctccatctcatactatttcgaccacagtagtgagaacgggtacaaaagttgtaaaaaatgtgacatctcgtgtctcacttgtaatgggcctgggtttaagaactgcacgagttgcccgtcgggttatttgttggacctgggcatgtgccagatgggcgccatctgtaaagacggggagtacgtggacgagcacggccattgccagacctgtgaggcatcttgcgcaaagtgtcaggggccaacacaggaggactgtaccacttgtccaatgacacggatctttgacgacggacgttgtgtgagcaactgtcctagttggaagtttgagttcgaaaatcaatgccacccatgccatcacacttgtcagaggtgtcaggggtctggacctacacactgcaccagctgcggtgccgacaactacgggcgcgaacattttctttaccagggcgaatgcggagacagttgtccagaaggccattatgccaccgagggcaatacgtgcttaccgtgtcccgataattgtgaactgtgccactctgtccacgtctgcacccggtgcatgaaggggtacttcatcgctccaaccaaccacacctgtcagaagttagagtgcggccagggcgaggtccaggaccccgactatgaggaatgcgttccatgcgaggaaggatgcctgggatgtagtctggatgacccaggaacctgtaccagctgcgcaatgggttattatcgctttgatcaccactgctacaagacctgtccagagaagacttattccgaggaggtggagtgcaaagcctgcgacagcaattgtggaagctgtgaccagaatggatgttactggtgtgaagagggatttttcctcctcggtggctcttgcgtgcggaagtgcgggcccggcttctatggtgaccaagagatgggggagtgtgagagctgccacagagcatgtgagacttgcaccggccctggccacgatgagtgttcctcctgtcaggaaggcctgcagctactgcgggggatgtgcgttcacgctacaaaaacacaagaggaggggaagttttggaacgaagcggtgtcaaccgccaacttatctgtggtcaaaagcctgttacaagaacggcggagatggaaggtgcagattaagcgggatatcctaaggaaactgcagccctgccactccagctgtaagacgtgtaacggctccgctactctgtgcacctcatgcccaaaaggggcttacctcctggctcaggcgtgtgtatcatcctgccctcaagggacatggccttctgtacgcagtggatcatgcgagaattgcacagaggcttgcgcaatttgctcaggggcagacctttgcaagaagtgccagatgcagcctggacaccctctgtttctgcacgaaggtcgttgctacagcaaatgcccagaggggagctatgccgaggacgggatttgcgagagatgttcttcaccatgccgcacctgtgagggaaacgccactaattgccactcttgtgaaggtggtcatgtgctgcaccatggagtgtgtcaggaaaattgtccggagcgccacgtggctgtcaaaggagtgtgcaagcactgtcctgaaatgtgtcaggattgcatccatgaaaagacctgtaaagagtgcacaccggaatttttcttgcacgacgacatgtgtcatcagtcttgccctagaggattctatgccgacagtaggcactgcgtgccatgtcacaaggactgtctcgaatgttcgggtcccaaggctgatgactgtgaactctgtcttgaaagctcctgggtcctgtatgacggcctatgcttggaggagtgccctgcaggaacttactacgagaaggagaccaaggaatgtcgggactgtcataaatcctgcctaacctgctcatcctctggcacctgcacaacatgtcaaaaaggactaattatgaatcctaggggctcgtgcatggcaaacgagaaatgtagccctagcgaatattgggacgaggatgcccctggatgcaaaccatgtcacgttaaatgcttccattgtatgggaccagctgaagaccagtgtcagacatgtccaatgaactctctgttgctaaataccacttgcgtaaaggactgccccgaagggtattatgccgatgaggattcgaaccgctgtgctcactgccactcttcgtgtcgaacatgcgaggggagacactcgaggcagtgtcattcttgtcgcccaggatggttccagctcggcaaagagtgtcttctgcaatgtcgggaggggtactacgccgacaatagcaccgggaggtgcgaacgctgcaaccggtcctgtaaaggctgccagggaccacgcccgactgactgtttatcttgcgaccggtttttcttccttctgagatccaagggcgagtgtcaccggagctgccctgatcattactacgtggagcagtccacccagacttgtgaacgatgccaccccacctgtgaccagtgtaagggtaagggggctttaaattgcttatcttgtgtgtggagttatcaccttatgggcgggatctgcacctcagattgcctggtgggggaatacagggtgggggaaggcgagaaatttaactgcgaaaaatgccacgagtcgtgcatggagtgtaagggacctggggccaagaattgcactctctgtcccgcgaatctcgtactgcacatggacgatagccactgtctgcattgttgcaatacgtcggacccccccagcgcgcaggaatgttgtgattgccaggatactacggacgagtgcatccttcgcacttctaaggttaggccagctacggagcattttaagactgcattgtttatcaccagctcaatgatgcttgtgctcctactgggagcagcggtggtcgtgtggaagaaaagtcgcggaagggttcagccagcggccaaggccggctacgaaaagctagctgatcctaataaatcatatagcagttataaatctagctatcgtgaatccacctcattcgaagaagatcaagttattgagtatcgagaccgcgactatgatgaggatgacgatgacgatatagtctatatgggccaggatggtaccgtgtatcgaaagttcaagtatgggcttctggatgacgacgatatagacgagctggagtacgatgacgagtcctattcttattatcaatag

SEQ ID NO: 200965 - DNA, 306 bp, synthetic construct
  misc_feature 1..306: note = Description of Artificial Sequence: Synthetic coding sequence
  source 1..306: mol_type = other DNA
tgccagccctgccaccggttctgcgccacctgcgccggcgccggcgccgatggctgcatcaactgtaccgaaggctactttatggaggacgggagatgtgtgcagtcctgttcaatctcctactacttcgatcatagttcagagaatggctataagtcgtgcaaaaagtgtgatataagctgtctgacatgcaacgggcctggtttcaaaaattgcacatcttgcccttcaggctatttactcgacctgggaatgtgccagatgggggctatatgtaaggatgtatcattgtttcgtggcgcctag

SEQ ID NO: 200966 - DNA, 5583 bp, synthetic construct
  misc_feature 1..5583: note = Description of Artificial Sequence: Synthetic coding sequence
  source 1..5583: mol_type = other DNA
atgggctggggcagccggtgctgctgccccggccggctggacctgctgtgtgtcttagctctcttggggggctgcttgctgcctgtatgtcgcacacgtgtatatacgaaccactgggcagtgaagatcgcagggggcttcccagaagccaaccgaatcgcttctaaatacgggttcattaacatcgggcaaataggcgctttaaaagattactaccatttttatcatagtcggaccattaagagaagcgtcatcagcagcaggggaacgcactccttcatctcaatggagcctaaagtagagtggattcagcaacaggtggtgaagaaacggactaaacgcgactacgacttcagtagggcacaatctacctacttcaatgatcctaaatggcccagtatgtggtacatgcattgtagtgataacactcatccctgtcagtccgatatgaatattgaaggtgcttggaaaagaggctacacgggcaagaacatcgtggtgaccatccttgacgacggcattgaaaggacacacccggatctgatgcagaattacgacgctttggcctcttgcgatgttaacggcaacgatctggacccaatgcctaggtacgatgccagtaatgagaataaacacggcacacggtgtgccggagaggttgcagcagctgcgaataactcacattgcactgtggggattgccttcaatgctaaaattggaggtgtgaggatgctggatggggatgttacagatatggtcgaggcaaaatctgtctcctttaatccccaacacgtccacatttactccgcatcttggggccctgacgacgatggtaagactgtggacggtcccgcccccctgaccagacaggccttcgaaaatggggtcagaatggggagacgaggtcttggcagtgtgttcgtttgggctagcggcaatggcggacgctccaaagaccattgttcctgcgatggctatacgaattcaatatacacgattagtatttccagtacagcagaatctggcaagaagccttggtacctggaagagtgctcatccaccctcgccaccacctacagcagcggcgaaagctatgataagaaaataattacaaccgacctgcggcaacgttgcaccgataaccatacaggtacctctgcaagcgcccctatggcggccgggattatcgcactggccttggaggcgaatcctttcctgacgtggagagatgttcaacacgtgattgtgcgcactagccgtgccgggcacctgaacgccaatgattggaaaacaaacgcggcaggcttcaaggtgagccacctgtacggtttcggtctgatggacgcagaggccatggttatggaagctgaaaagtggacgacagtgccacgtcagcacgtgtgtgttgaatcaaccgacaggcagatcaagaccataaggcccaacagtgctgtacggagtatctataaagcctctggatgctctgacaaccccaatagacatgtgaactacctggagcatgttgtagtcagaatcactatcacccatccacgccgcggagacctggctatttacctcacttccccctctggcacacggtctcagctgttggctaatagattgttcgaccactccatggagggtttcaaaaactgggagtttatgaccattcattgctggggggagcgtgctgcaggtgattgggtgcttgaggtctatgatactccatcacagctgcggaatttcaaaacccccgggaagctgaaggaatggtcgctggtgctgtatgggacttcagtgcagccatacagccccacgaatgagtttcccaaggttgaacgctttagatattccagagtggaggaccctacagatgattatgggaccgaggactacgccggtccttgtgatccagagtgcagcgaagtcggctgcgacggcccaggccccgatcattgcaacgactgcctacattattactacaaactgaagaacaatactcggatatgcgtgagctcttgtcctcctgggcattaccatgccgacaagaagcgctgtcgtaagtgcgctcctaactgtgagtcctgctttgggtctcacggcgaccagtgcatgagttgcaagtacggatatttcctaaatgaagagacaaactcatgtgtgactcactgtcctgacgggtcttaccaggacaccaagaaaaatctgtgtcgaaagtgctccgaaaactgtaaaacatgtacagagttccacaactgcacagagtgccgcgacggtttatcactccagggaagtaggtgctctgttagttgtgaagatggacgttacttcaacggacaggattgccagccatgtcataggttttgcgctacttgtgctggagccggagctgacggctgcattaattgcacggaggggtactttatggaagatggccggtgcgtccaatcttgctcaatttcatattactttgatcactcaagcgagaatgggtacaaaagttgtaagaagtgtgatattagctgcctgacatgtaacggaccggggttcaaaaactgtacctcctgcccctccgggtacctccttgacctcggaatgtgtcagatgggtgcgatttgtaaggatggagagtacgtggacgagcatggtcactgtcagacttgtgaggccagttgcgcaaaatgtcagggcccaacccaggaggactgtaccacctgccctatgactagaatcttcgacgacgggcggtgtgtgagcaattgcccatcctggaaattcgaattcgaaaaccagtgtcacccttgtcaccatacgtgccagcgatgtcaggggtccggaccgactcattgcacatcttgcggcgccgataactacggacgggagcattttctgtaccagggcgagtgtggagattcctgtccggaggggcattacgcaacagaggggaatacctgcctgccttgtccagataattgcgaactctgccattccgttcacgtgtgcacacggtgcatgaaaggttatttcattgcacctactaatcacacctgccagaaactggagtgtgggcaaggtgaggtgcaggatcctgactacgaggaatgcgtgccctgcgaagaaggctgtttaggctgcagtcttgatgacccagggacctgtacctcttgtgccatggggtattaccgctttgaccaccactgctacaaaacgtgccccgagaaaacatacagtgaggaggtcgaatgcaaagcctgtgactctaactgtggcagctgcgatcagaatggatgctactggtgcgaagaaggctttttccttctgggaggtagctgcgtgcgcaagtgtggaccgggtttttacggcgaccaggagatgggtgaatgcgaaagctgtcatagagcttgtgaaacgtgtaccggtcccggccacgacgagtgcagtagctgccaggaggggctgcaactccttcggggcatgtgcgttcatgccactaaaacccaggaggaagggaaattctggaacgacattttgcggaagctacaaccctgccatagtagctgcaagacctgcaacgggagcgccactctgtgcacgtcttgtcccaagggtgcttatctgctggctcaggcttgcgtatcgagctgcccacagggcacttggcctagtgtgaggtccggatcctgcgagaactgcacagaagcttgtgccatctgtagcggtgctgatctatgtaaaaagtgccagatgcagcctggacacccgctgtttctccacgagggtagatgttacagtaaatgtcctgagggctcctacgccgaagacggcatttgcgagcgttgcagttctccctgcagaacttgcgaagggaatgcgaccaattgccacagctgcgagggtggccatgtgctgcatcacggcgtctgtcaggagaactgccctgagagacacgttgcagttaagggagtgtgtaaacactgccccgaaatgtgccaagactgcatccacgaaaaaacttgtaaggagtgtactcccgaatttttcttgcacgatgatatgtgtcatcagagttgtccccgggggttctatgccgacagcagacactgcgtgccatgtcataaagattgtctggagtgtagcggcccgaaagctgacgactgtgagctgtgtctcgagagctcctgggtcctctacgatgggctctgcctggaagaatgccctgccgggacctactacgagaaagagacaaaggagtgccgggattgtcataagagctgcctcacatgttccagcagcgggacatgcactacgtgccagaagggcttgataatgaatcctagaggcagttgcatggccaatgaaaaatgttctccgagcgagtactgggacgaggacgcccctggctgcaagccctgccatgttaaatgttttcattgtatggggcctgcagaagatcagtgccagacctgcccaatgaactcactgttgttaaataccacatgtgtcaaggactgtccagaggggtactatgccgacgaagactccaaccgctgcgctcactgccactcctcatgtcgaacctgcgaaggaaggcactcgcgccagtgccattcctgcaggccaggatggtttcagttgggcaaggagtgcctgttgcaatgtcgtgagggctattatgcggataacagcactggacggtgcgagagatgtaatcgttcttgtaaggggtgccaaggcccgcgccccaccgattgcctttcatgcgaccgattcttcttcctgttgcgctccaaaggagaatgccataggagctgccccgatcactattacgtggagcagagtacccaaacgtgtgaacggtgccaccctacatgtgatcagtgcaagggaaaaggagccttgaactgcctttcgtgcgtgtggtcatatcacttaatgggcggaatttgcacaagcgactgtttggtgggggaatatcgggtgggcgaaggtgaaaaattcaactgcgagaagtgccatgagtcatgtatggagtgtaaggggcccggtgccaagaattgtacactctgtccagcaaacctcgtgttgcatatggacgattcacactgtcttcactgttgtaacacctcagaccctccatcagctcaggagtgttgcgattgtcaggacacaaccgacgaatgcatcttgaggactagcaaagtgaggcctgcaacagaacatttcaagaccgcccttttcatcacttctagtatgatgctagtgcttctattgggggccgcggtcgtggtgtggaaaaagtcccgcggtcgtgtgcaaccagccgcaaaggcaggctatgagaagctggcagatcctaacaagtcgtattcaagctataagtcttcatatcgcgaatctactagcttcgaggaggaccaggtgatcgaatacagggaccgagattacgacgaggacgacgacgatgacatcgtgtacatgggacaagacggcaccgtatatcgcaagtttaagtatggccttcttgacgatgacgacatcgacgagctggaatacgatgacgagtcctatagctactatcagtag

SEQ ID NO: 200967 - DNA, 1497 bp, synthetic construct
  misc_feature 1..1497: note = Description of Artificial Sequence: Synthetic coding sequence
  source 1..1497: mol_type = other DNA
atctggaacgtgcaccactgcggcgacaagaacagccggtgccggagcgagatgaatgtccaagccgcctggaagagaggctacactggtaaaaatgtggtggttacaatcctggatgatggaattgagcgaaatcacccagatcttgctccaaactatgattcctatgccagctatgatgtgaacggcaacgattacgacccatcccctcgatatgatgcatctaacgagaacaaacacggcaccaggtgtgccggagaggtcgcggcttctgcaaataatagttactgtatcgtgggcattgcatacaatgccaaaattggggggatcaggatgttagatggcgacgtgacagatgtggtcgaggctaaatcccttggaatccgtccaaattacatcgacatctatagtgcatcttggggccccgatgacgacggcaagaccgtggacgggcctgggcgcctggctaagcaggcctttgagtacggaatcaagaagggcaggcagggcttggggtctatattcgtgtgggccagcggcaacggggggcgggagggggactactgcagctgcgatgggtacaccaattccatatacaccatctctgtgagctctgctaccgagaatggttacaaaccatggtacctggaagaatgcgcgtccacgctcgctaccacatactcaagtggtgccttttatgagaggaaaattgtgactaccgacttgcgacaaagatgtacggatggtcacaccggaacatccgtgagcgcgccaatggtcgcaggtattatcgccctggctttggaggctaactcccagctgacatggcgcgatgtgcaacacctactggtgaagacatcgcgaccagcccatctgaaagcctctgattggaaagtcaacggtgcaggccataaggtctcccacttctatggctttggccttgttgacgctgaggccctggtggtagaggccaaaaagtggacagcagttccgtcccagcatatgtgcgtggcagcctctgacaagagaccgcggagcattcccctcgtgcaggtgctgcgaacaactgctcttacttcagcctgcgccgagcacagcgatcaacgggttgtttatcttgagcatgtggtggtgagaaccagcatttctcatccccggcgcggcgacctgcagatctacttggtgtctccgagtggcacaaaatctcagctcttggccaagcggctgctggatctgagcaatgaggggtttaccaactgggagttcatgactgtgcactgttggggagaaaaagccgagggccagtggactctcgagattcaggacctgcctagccaggttagaaaccccgagaagcagggcgatcttgagactcctgttgcaaaccagctgaccacagaagaaagatttgtgagtaccctgtctatcctttttcactggtccgtgtacctgtcttggagccagtaccacatcgttcttattactgtggccctgtag

SEQ ID NO: 200968 - DNA, 1956 bp, synthetic construct
  misc_feature 1..1956: note = Description of Artificial Sequence: Synthetic coding sequence
  source 1..1956: mol_type = other DNA
atgcccccccgggccccccccgcccccggcccccggcccccccccagggctgccgcggcgactgacactgccgcgggcgccgggggggcaggcggagccggcggtgctggaggccctggatttcgcccactggcccctagaccttggcggtggctgctgctgttggcactaccagccgcatgcagtcccccaccccgaccggtttacacgaatcattgggcggtgcaggttctcgggggaccggcagaagcagaccgcgtcgccgcagcccatggctacctgaacctgggacagatcggaaatctagaggattattaccacttctatcactccaaaacatttaaacgctccactcttagctcacgcggccctcataccttcctccgcatggatccacaagtgaagtggttgcagcagcaagaggtaaagagaagggtaaagagacaggtcagatcagatcctcaggctttgtactttaacgatcccatatggtccaatatgtggtacttgcactgcggggacaagaatagccgctgccgctccgaaatgaacgtccaagctgcctggaaaaggggctacacagggaagaacgtggtggttaccatcctagacgatgggattgaaaggaatcatccagatctcgctccgaactacgacagctatgcgagctacgacgtaaacggaaacgactatgatccaagcccgcgctacgacgccagcaacgaaaataagcacgggacacggtgcgccggggaagtcgcagcttcagccaacaattcatactgtattgtcggcatcgcatacaacgcaaagattgggggcatccggatgctggacggcgacgtgaccgacgttgtggaggccaagagtcttgggatcagacctaactacattgacatctacagtgcctcctggggccccgatgatgacggcaagacagtcgacgggcccggccgactcgccaaacaggcttttgaatatggaatcaaaaagggacggcagggactcgggtcgatttttgtttgggcatcagggaatgggggccgagaaggagattactgtagttgtgacggctacactaattccatctatacaatttcagtctcctccgctacggaaaacggctataaaccttggtatctcgaagagtgtgcgagcacgctggcaaccacatattcatcaggagcattttacgaaaggaaaatcgtgacgacagacctgcggcagaggtgtaccgacggtcacactggaactagtgtttccgcaccgatggtggctggcatcattgccctggcattggaagcaaattcgcagctgacctggcgcgatgttcagcacttactagtgaagactagcaggcctgcccatttaaaggcaagcgactggaaagtcaatggagctggacacaaggtgtcacatttttacggtttcgggcttgtagatgcagaagcactggtggtggaggctaaaaagtggaccgcagttccctcacagcacatgtgcgtggcagctagcgataagcgcccacggtccatcccgctcgtgcaagtcctccgcactacagcactgaccagcgcatgcgccgagcattctgatcagcgggtcgtgtacctggaacatgtcgtggtgaggacctcaatctcacatcctcgccgaggggacctgcaaatttacctggtgtccccatcagggactaagagccagttactcgccaagagactgctggacttgagtaacgagggttttactaattgggagttcatgacggttcactgttggggcgaaaaggctgaaggacagtggacactggagatccaggacttaccgagtcaggtcagaaatccagagaagcagggtgacctggaaaccccagttgctaatcaactaacaacagaagaaagggaacccggcctcaagcacgtgtttcgatggcagatagaacaggagctctggtag

SEQ ID NO: 200969 - DNA, 2907 bp, synthetic construct
  misc_feature 1..2907: note = Description of Artificial Sequence: Synthetic coding sequence
  source 1..2907: mol_type = other DNA
atgcccccccgggccccccccgcccccggcccccggcccccccccagggccgccgccgccacagacacagcggccggcgctggtggagccggaggggcaggcggcgctgggggcccaggctttaggccgctggcccccaggccatggcgctggcttcttcttctcgcactccctgccgcctgctcgccaccaccacggccggtttatactaatcactgggctgtgcaggtgctgggcggccctgctgaggcagaccgggtcgcagcagctcatgggtatcttaatctgggacagatagggaacctcgaggattactaccatttctatcatagcaaaaccttcaagcgctccactctgtcttccagggggccccacacattcttaagaatggacccacaagtgaagtggctgcagcaacaggaggtcaaacgtcgagtgaaaagacaggtgcggtctgacccacaggccctctattttaatgaccccatctggagcaatatgtggtacctgcattgtggcgataaaaattcccggtgtagaagcgagatgaacgtgcaggccgcttggaagaggggttacaccggaaagaacgtggtagtgaccattctagatgatggcatcgagaggaaccatcccgatctggcccccaattatgacagctacgcaagttacgacgtcaatggcaacgattacgaccctagcccccgttatgatgcatctaacgagaacaagcatggtactagatgtgcaggtgaagtggcggctagcgctaacaactcctactgtattgtcgggatcgcatacaacgccaagatcggagggatcaggatgctggacggcgatgtgacagacgtcgtcgaagctaagtccctgggaatacgacccaactatattgacatttattccgcctcatggggacctgacgacgatggtaagacagttgatggaccaggtaggctggccaaacaggcatttgaatacgggattaaaaaggggaggcaggggttggggagcattttcgtttgggcctcgggtaatgggggtcgagagggcgactactgtagttgcgacgggtatacgaactctatttacactatttctgtgagctctgccacggaaaacgggtataaaccctggtatcttgaagagtgtgctagcacccttgctactacctactcaagcggggcattctatgagcgaaagatcgtaactaccgatctccgacagagatgcacggatgggcataccggcacaagcgtgagtgcaccaatggtggctggtatcatcgcactggctcttgaagcaaatagtcaactgacgtggagagacgtgcaacacctgttggtcaagacttctcggcccgcacacctaaaggcgagtgactggaaagtcaacggcgcaggacacaaggtatcacacttttatggtttcgggctggtggatgcagaggcgctggttgtcgaggcgaagaaatggacagccgtaccatcgcagcatatgtgtgttgccgcctcagataaacgcccccggtcaatcccactggtacaagtgctgcgaaccaccgctcttacctccgcgtgcgcggaacactctgatcagagagtcgtgtaccttgagcacgtcgtagtgagaactagtattagccaccctcgtagaggagatctgcaaatctacctcgtatccccaagtggcaccaaatcccaactgctggcgaagagactccttgacctctccaatgagggatttaccaattgggaatttatgacagtacattgctggggcgagaaagccgaaggccagtggaccctggaaatccaggacttaccctcacaggtcaggaacccggaaaagcaggggaagcttaaagaatggagccttatcttatatggcactgccgaacatccctatcatacctttagcgcccaccagagccggtcacggatgctggaactctcagcacctgaattggaaccccctaaagccgccctgagcccttcccaggtggaagtgccagaagacgaagaggattacaccgctcagagtaccccaggttcggcaaacatcctgcagacgtcggtgtgtcaccccgaatgtggtgacaagggatgtgatggtcctaacgctgatcaatgtctcaactgtgtacactttagtttaggctctgtaaaaacaagtcgcaagtgcgtgagcgtgtgtcctctggggtattttggtgatacggccgcccggaggtgccgccggtgccacaagggctgtgagacatgttcgtcaagggccgcaacacagtgcttgtcttgcaggcgggggttctaccatcatcaggaaatgaatacatgcgtgacactgtgtcctgccgggttctatgccgacgaatcacaaaaaaattgtcttaaatgccacccatcatgcaaaaaatgcgtcgacgagcctgagaagtgcactgtgtgcaaggaaggcttctctctcgccagagggagttgtattcctgactgcgagccaggcacttacttcgacagcgagttgattaggtgcggtgaatgtcaccacacctgtggaacctgtgtaggccccggcagggaggaatgtattcactgtgccaagaattttcacttccatgattggaaatgcgtgcctgcctgtggtgagggcttttaccccgaagagatgccaggccttccccacaaagtttgccgcagatgcgatgagaattgtctctcctgtgccggctcctcccgcaactgtagcaggtgtaaaacaggttttactcagctaggaacgtcatgcatcactaaccatacctgtagtaatgcggatgagaccttctgcgaaatggtcaagtcaaatagactgtgtgaacggaagttgtttatacaattctgctgccgcacatgtctcttggccgggtag

SEQ ID NO: 200970 - DNA, 2868 bp, synthetic construct
  misc_feature 1..2868: note = Description of Artificial Sequence: Synthetic coding sequence
  source 1..2868: mol_type = other DNA
atgcccccccgggccccccccgcccccggcccccggccccccccccgggcagccgctgctacggacacagcggcaggggctgggggcgccgggggtgcaggcggcgccggcgggcctggctttaggccactggccccacgcccctggaggtggctcctactgcttgcccttcctgctgcctgcagtccaccaccaagacctgtgtacacaaaccactgggccgttcaggtgctgggcgggcctgcggaggctgatcgtgtggctgccgctcacggatacctgaatctggggcagattgggaacctggaagactactaccatttttatcactcgaagacattcaagcgttcgaccctctcctcgcgcggaccccacacctttctgcgcatggacccccaagtcaagtggctgcagcaacaggaggtgaagcgccgggttaagaggcaagtgcggagcgatccacaggccctttatttcaatgaccccatatggagcaatatgtggtacctacactgcggagacaagaactctcgctgcagatccgagatgaacgtgcaggcggcttggaaaagaggctacaccgggaagaatgttgtggtaaccatcctggacgacggaatcgaaaggaaccacccggatctagctcctaactatgactcctatgccagctatgatgtaaacggcaacgactatgatccgtcgccaaggtacgatgcatcaaacgaaaataagcatgggaccaggtgcgcaggggaagtggccgcatcggccaacaacagctactgcattgttgggattgcgtacaatgcaaaaattggggggattaggatgctggacggcgacgttactgacgtggtcgaggcgaagtccctgggaatccgacccaactatattgacatctattctgccagttggggcccagatgatgacgggaagactgtggatggaccaggtcgactcgcgaagcaggcttttgagtatggcatcaagaagggccgccaggggctgggaagcatatttgtgtgggcttcgggaaatggtggtcgcgaaggagattattgttcctgcgacggctatacgaactcaatttatacgatctctgtaagttctgcgacggaaaatggctacaaaccttggtatctagaggaatgcgcctctacacttgcaaccacatacagttccggcgctttttacgagcgcaagatcgtcaccacagacttgagacagaggtgcaccgatggtcacactggcacaagcgtctcagcccccatggtggccggcatcatcgcgttggcattagaggcgaacagtcagctcacctggcgagatgtgcagcatctgttggtgaagacctcacggccggcacacctgaaggcatctgactggaaagtgaacggagcagggcacaaagtgtcccacttttacgggttcggtctggttgacgcagaggctttggtggtggaagccaaaaagtggacggcagtgcccagccagcatatgtgtgttgcggcatccgacaaacgtcctaggtccatccccctcgtacaagtgctccgcactaccgcccttactagtgcatgcgctgaacactccgatcaacgggtagtctaccttgaacacgtcgttgttcgcacttctatttctcatccaagacgaggagacctccagatctatctggtctcacccagcgggacaaaatcccagttgctagctaagcggctgctggacctctctaacgagggattcacaaactgggagtttatgactgttcactgttggggcgaaaaggccgaaggccaatggacattagaaattcaggacttacctagtcaggtccggaacccagaaaagcagggcaaactgaaggaatggtccctgattctgtatggaacagcagagcatccatatcatactttttccgctcaccagtccagaagccgaatgctggaattaagtgcaccagaactcgagccgcccaaggctgccctgtcccctagtcaggtggaggtcccagaagacgaggaggactataccggagtgtgccaccccgaatgtggagacaagggctgtgacggtcccaatgccgaccagtgcttgaactgtgttcacttttctcttgggtcagtcaagacgtcacgaaagtgtgtttccgtgtgtcccttggggtacttcggggataccgccgcccgcaggtgcaggcgatgccacaagggatgcgagacttgcagcagccgcgccgctacacaatgcctaagttgccggcgcggattttatcatcatcaggaaatgaatacttgcgttactctgtgtcccgcagggttctatgcggatgagtcccagaagaactgcctgaaatgtcacccgtcttgtaagaaatgcgttgatgaacccgaaaaatgcacagtatgtaaagagggtttctctctggcaagggggtcctgtatccccgattgtgaacctgggacgtacttcgattcagagctgatccgctgcggcgagtgtcatcacacttgtgggacatgcgtgggacccggcagggaagaatgtatccattgcgccaagaacttccatttccatgactggaagtgcgtcccagcatgcggtgagggcttctatcccgaagagatgccaggcctccctcacaaagtgtgccgccgatgcgatgaaaactgcctgagctgcgcgggctcctctcgtaattgttcccgttgcaaaaccggttttacacagcttggcacatcttgtattacaaatcatacttgtagcaatgccgacgagacattttgcgagatggtaaaaagcaatcgtctctgcgagcgtaaactattcatccagttctgttgtagaacctgcttattagcgggatag

SEQ ID NO: 200971 - DNA, 1869 bp, synthetic construct
  misc_feature 1..1869: note = Description of Artificial Sequence: Synthetic coding sequence
  source 1..1869: mol_type = other DNA
atgcccccccgggccccccccgcccccggcccccggcccccccccagggcggccgccgcaacagacacggctgccggggctggaggcgctggaggggcgggtggagctggaggcccaggttttaggccactcgctccacgcccgtggcgctggcttctgctcttggcacttcctgcagcttgtagcgccccaccaaggcccgtgtacaccaaccactgggccgtgcaagtcctcggcggccccgccgaggccgacagagttgccgccgctcacggctatctgaacctcggccaaattggaaatctggaagattactaccacttctaccacagtaaaacctttaagcgctctacgctgagcagcagaggcccgcatacctttctgagaatggatccgcaggtcaagtggctgcaacagcaggaggtcaagaggcgcgtgaagagacaggtgcgcagcgatccccaggcactgtatttcaatgacccgatctggtcaaatatgtggtatctgcactgcggtgataagaactctcgttgtcgctccgaaatgaacgttcaggcggcgtggaaacgcgggtacaccggtaagaacgtagtggtaacgattcttgacgacggaatagaaaggaaccatcccgaccttgcaccgaattacgactcctacgccagttacgatgtgaacggtaatgactatgacccatcgccccgttacgatgcctctaacgaaaataagcatggcacacgatgtgctggagaagtagcggcctcggcaaacaattcctattgcattgtcgggattgcttataacgccaagatcgggggcattcggatgttggacggagacgtgacggacgtagtggaagcaaaaagcctaggaatccggcccaactatattgatatctactctgcgagttggggccctgatgacgacgggaagaccgtggacgggcctgggaggcttgccaagcaagcattcgaatacggcattaagaagggtcgtcagggcctaggatccatttttgtttgggcttccggcaacggcggtcgcgagggcgactattgctcatgtgacgggtataccaacagcatctacaccatctccgtgagcagcgccaccgagaatggctacaagccctggtacctggaggagtgcgcttcaacgctcgccaccacatacagctccggcgcattttatgagagaaaaattgtgacaactgatttgcggcaaagatgcactgacggccacaccgggacaagtgtctctgcacccatggtggctggaataatcgccctggctctggaggcaaatagccagctgacatggcgggatgttcagcacttacttgtgaagacatcaaggccagcccatctgaaggcaagtgattggaaagtgaacggcgccggccacaaagttagtcatttttatggcttcggccttgtcgatgcagaggccctggtagtggaagcgaaaaagtggaccgctgtaccctctcaacatatgtgcgtcgccgcatccgataagcgtcctaggtctatacctttggtgcaggtactgcgcaccacagcgctcacctccgcatgtgccgagcactctgatcagcgggtcgtgtatctggagcacgtcgttgtccgaacatccattagccacccccgacgtggggacctccagatctacctggtctcaccttctggcaccaaaagccaattattagcaaagcgattgctcgacctgagtaatgagggatttaccaactgggaattcatgaccgtgcactgttggggagagaaggccgaggggcagtggaccctggagatccaggatttaccaagtcaggtgaggaacccagagaaacagggcaaccttgattag

SEQ ID NO: 200972 - DNA, 1584 bp, synthetic construct
  misc_feature 1..1584: note = Description of Artificial Sequence: Synthetic coding sequence
  source 1..1584: mol_type = other DNA
atgtacgccctgttcctgctggccagcctgctgggcgccgccctggccgggcctgtccttggcttaaaggagtgtacgcggggcagcgccgtgtggtgccagaatgtgaagacagcttctgactgtggagccgttaaacactgccttcaaaccgtgtggaataaacccactgtcaagtcactgccttgtgatatctgcaaggatgtggtgaccgctgctggggacatgctcaaagataacgctacggaagaggagattttggtgtacctagagaagacctgcgattggctgcctaagcctaatatgtctgcctcttgtaaggaaattgtcgacagttacctgccagtgatcctcgacatcataaagggagagatgtctaggcccggcgaagtctgcagcgcccttaatttgtgcgagagcctgcagaaacacctggctgaactgaatcaccagaagcaactggaaagtaacaaaatccctgagcttgatatgaccgaggtggtggccccatttatggccaatatacctctgcttttgtaccctcaagacgggccacgtagcaaaccacagccgaaggataatggtgatgtgtgccaggactgcatccaaatggtgacagacatccagaccgcagtgcgaaccaattcaacatttgtgcaggcccttgtggagcacgtaaaagaagaatgtgatcggctcggccccggaatggccgacatatgtaaaaattatatcagccagtacagcgaaattgccatccagatgatgatgcacatgtccgccgaacagccgaaggaaatctgtgctctggtgggcttctgcgacgaggtcaaagagatgcccatgcagacactggtgccggcaaaggttgcctccaagaatgttattcctgccctcgagctcgtcgagcccatcaagaagcatgaggtgcccgccaaatctgatgtctattgtgaggtttgtgagttcctcgtgaaggaggtgactaaactgattgataataataaaacagagaaggagattctagacgccttcgacaagatgtgctcaaagttgccaaaaagtctatccgaagaatgtcaggaggtggtggacacatatggtagctctatactgagcatcctgcttgaggaagtgtcgccggagttagtgtgcagtatgctccacctctgctctgggacacgccttccggcacttactgttcatgtaactcagcctaaagacggaggtttttgcgaggtctgcaagaaactggtaggttacctcgaccgcaatctggaaaagaactctaccaagcaggaaatccttgccgctctggagaagggatgctccttcttgcccgacccctaccaaaaacaatgcgaccagtttgtcgctgaatatgagccagtcctcatcgagattctggtggaagtgatggaccccagttttgtatgccttaaaattggagcatgcccctcagcgcataaacctctcctgggtacagagaagtgcatttggggtccgtcctactggtgccaaaacacagagacagccgctcagtgtaatgcagtggaacattgtaagaggcatgtgtggaactag

SEQ ID NO: 200973 - DNA, 1680 bp, synthetic construct
  misc_feature 1..1680: note = Description of Artificial Sequence: Synthetic coding sequence
  source 1..1680: mol_type = other DNA
atgtacgccctgttcctgctggccagcctgctgggcgccgccctggccggaccggtgcttgggctgaaggaatgcactagggggagtgctgtatggtgccagaacgtaaaaactgcctccgactgcggcgccgtgaagcactgcctgcagacggtgtggaacaaaccaaccgtcaaatctcttccatgcgatatctgtaaggacgtcgtcacagccgctggggacatgctgaaagacaatgccacagaggaagaaattctggtttacctcgagaagacatgcgactggttaccaaagcccaatatgtccgcgagctgtaaggagatagtagatagctacttgcctgttattctggacatcatcaaaggcgaaatgtctcgacccggggaggtctgttctgctcttaacctgtgtgagtctttgcagaagcatttggctgagctgaatcaccagaagcagcttgagtctaacaagatccctgagttagacatgacagaagtcgtcgccccatttatggcaaacatccccctgttactgtacccgcaagacggtcctaggtcaaagccccagcccaaggataatggcgatgtctgtcaggactgtattcagatggtgaccgatatacagaccgccgtgcggaccaattcaacattcgtgcaggctctagtagaacacgtgaaggaagaatgcgatagacttggccctggtatggcggacatttgcaaaaattacatctctcagtattctgagattgctatccagatgatgatgcatatgcagcctaaggagatatgtgcgctggttgggttctgcgacgaggtgaaagagatgcccatgcagaccttggtgcccgctaaagtcgcttctaagaacgtgataccagcattagaactagtagagcctataaagaagcacgaggtgccagcaaagtcagacgtctactgcgaggtttgcgaatttcttgtcaaggaagtcaccaaactcatcgacaataacaagaccgaaaaagagattctggacgcatttgataagatgtgctcaaaattacctaaatctctctcagaggagtgccaagaggtagtggacacttacggctccagcatcttgagcattctgttagaagaggtctctccagagctcgtgtgttcgatgctccacttatgcagcgggacaaggctgcccgccttgaccgtccacgtaacgcagcctaaggacggaggcttctgtgaagtgtgtaagaagctggtaggctatctagaccgcaatctagaaaaaaactcaaccaagcaggagatcctggccgccctggagaaaggctgttcatttctgcctgatccataccagaaacaatgcgatcaatttgtggctgagtacgaaccggtgctgattgagattctggtggaggtgatggatcccagcttcgtatgtctgaagattggagcctgtccctcagctcacaaacccctgctcggaacggaaaaatgtatctgggggccttcctactggtgccaaaacaccgaaactgccgcccagtgtaatgctgtggaacactgcaagagacacgtgtggattggatgttggggagtaggggtgggcagttgtctttggcctacatgggctcccactctcctctctaccagcgggtgtcaggagactgcatcaaaggcatcccgaacttag

SEQ ID NO: 200974 - DNA, 723 bp, synthetic construct
  misc_feature 1..723: note = Description of Artificial Sequence: Synthetic coding sequence
  source 1..723: mol_type = other DNA
atgtacgccctgttcctgctggccagcctgctgggcgccgccctggccggaccagtacttggcctgaaagagtgtacacgaggaagcgccgtgtggtgtcaaaacgtaaagacagccagcgactgtggtgccgtgaagcactgcctccagactgtgtggaacaagccaaccgtcaagtctttgccctgcgatatctgcaaggatgtagtcacagcagccggcgatatgctcaaagataatgctaccgaagaagaaatccttgtgtatttggaggtgagcccggagctggtgtgctccatgctccacctgtgttccggtactcggttacccgcgctgactgtgcatgtgacacaaccgaaagacggtggattttgcgaggtatgtaagaagctggtcggatatctggacaggaatttggagaagaacagtactaagcaggagattctcgccgctctggaaaagggatgcagctttctgccagatccctaccagaagcagtgtgatcagttcgtggctgagtacgagcctgtgctgatagaaatcctggtcgaggtgatggacccgtctttcgtatgtctgaagattggtgcatgcccaagcgcccacaagccgcttctcggcactgagaagtgcatttggggacccagttactggtgtcagaatacagaaaccgcggctcaatgcaatgctgtggaacactgtaaacggcatgtgtggaattag

SEQ ID NO: 200975 - DNA, 1581 bp, synthetic construct
  misc_feature 1..1581: note = Description of Artificial Sequence: Synthetic coding sequence
  source 1..1581: mol_type = other DNA
atgtacgccctgttcctgctggccagcctgctgggcgccgccctggccggaccagtgctcgggctgaaagagtgtaccaggggctctgcggtctggtgccaaaatgtaaagacagcaagcgattgtggagctgtgaaacattgcctgcagacggtctggaataaacctaccgtcaagtctttaccttgcgatatttgtaaggatgtggtgaccgctgccggcgacatgttaaaggataatgccaccgaagaggagatcctggtgtaccttgaaaaaacatgcgactggctgcctaaaccaaacatgagcgcctcctgcaaggaaattgtggatagctatctacccgtaatccttgacattatcaagggggaaatgtcccgcccgggcgaagtttgcagcgcgctgaacttgtgtgagtctctgcagaaacacctcgcggaactgaaccaccagaaacaactggaaagcaacaaaattcctgagctagatatgactgaggtggttgcacccttcatggcaaacattcctctgctactctacccccaagatggcccacgcagcaaaccacaacctaaggacaatggggatgtgtgtcaggattgtatacagatggttaccgacatccagaccgccgtgcgtactaactccactttcgtacaggcactcgttgagcacgttaaagaggagtgcgatcgccttggaccaggcatggcggacatctgtaagaattacatttcgcagtacagcgaaatcgccatccagatgatgatgcacatgctgcaacagcccaaagagatctgtgccttggtgggcttctgcgatgaggtcaaggagatgccgatgcagactcttgtgccagccaaggtggccagcaaaaacgtgattcccgcacttgagctggtggaacctatcaaaaaacacgaagtgcctgccaagagcgacgtctactgtgaggtctgtgaatttctggttaaggaggtgacaaaactcatcgacaataataagacagaaaaggagatactggacgcctttgataagatgtgcagcaaactccccaagagtctgagcgaagaatgccaggaagtcgtggatacgtacggctcctccatcctatcgatcctgctcgaagaggtctcccccgaacttgtctgttccatgttacatctttgcagcgggacacgcctgccagccctcactgttcacgttacacagcccaaggacggaggcttttgcgaggtgtgtaaaaagctggtgggatacttggacagaaatctggagaaaaactccaccaagcaggagattctcgcagcactcgagaaagggtgttcatttctcccggatccttaccaaaagcagtgcgaccaattcgtcgctgaatacgagccagtgctgattgagattctggtggaggtcatggatcccagtttcgtgtgcttaaaaatcggcgcatgcccttcagctcacaagcctctgctgggcaccgaaaagtgtatatggggcccgtcctactggtgccagaacactgagacagctgcacaatgtaacgccgtcgagcactgtaaacggcatgtttggaattag

SEQ ID NO: 200976 - DNA, 1575 bp, synthetic construct
  misc_feature 1..1575: note = Description of Artificial Sequence: Synthetic coding sequence
  source 1..1575: mol_type = other DNA
atgtacgccctgttcctgctggccagcctgctgggcgccgccctggctgggcccgtgctgggtctcaaagagtgtacaagagggtccgccgtgtggtgccagaatgtgaagaccgcctcagactgtggcgccgtcaagcattgcctgcaaaccgtttggaacaagcccaccgttaagtccctaccgtgtgacatttgcaaagacgtggttacggctgcaggcgacatgctgaaagacaacgctacggaggaggaaatactagtgtaccttgaaaagacctgtgattggctcccaaaacccaacatgtcagcttcatgtaaggaaatcgttgatagctacctccctgttatcctggacataataaaaggggaaatgtcccggcctggtgaggtatgctcagctctgaatttgtgtgagagtctgcagaaacacctggctgaattaaatcatcagaagcagctcgagagcaacaaaataccggaactggatatgacagaggtcgtggcaccatttatggccaacatcccactcctgctgtatcctcaggatggcccccggagcaagccgcagccaaaagataatggtgacgtgtgccaagattgcatccagatggtgaccgacatacagaccgccgtcaggaccaattctactttcgtacaggctctggtagaacacgttaaggaggagtgcgacaggctgggccctggaatggctgacatctgcaagaactatatttcccagtattctgagattgcaattcagatgatgatgcacatgcagcccaaagagatctgcgcgttagttggtttctgtgacgaagtgaaagagatgcctatgcagaccctggttccggccaaagtggcttctaaaaacgtgattccagccctggagctggttgaacctataaagaaacatgaggttcccgcaaaaagcgatgtgtattgtgaggtgtgcgagttccttgtcaaggaggtaaccaaacttattgacaataataaaacggaaaaagagatacttgatgcgtttgataaaatgtgttccaagcttccgaaaagtctgtctgaggaatgccaggaagtggtggacacttacggctcctcgatattgagtatactgctcgaagaagttagtcctgagctggtttgttcgatgcttcacctttgctcaggaacgcgtttacccgctctcaccgtgcatgttacccagccgaaagacggtggattctgcgaagtctgtaagaagctcgttggttatttggacagaaaccttgagaaaaatagcactaaacaggagatcctggcagccttggagaaaggatgctcattcctgcctgatccgtaccagaagcagtgcgaccaatttgttgccgaatacgagcctgtgctgatcgaaatcttggtcgaggtaatggacccttcctttgtgtgcttgaagattggagcctgtccaagcgcccataagcctctgcttgggacagagaaatgcatatggggccctagttactggtgccagaacacagagacggctgcccaatgcaacgccgtggagcattgtaaacgccacgtttggaattag

SEQ ID NO: 200977 - DNA, 1353 bp, synthetic construct
  misc_feature 1..1353: note = Description of Artificial Sequence: Synthetic coding sequence
  source 1..1353: mol_type = other DNA
atgctgaaggacaacgccaccgaggaggagatcctggtgtacctggagaagacctgtgattggctcccaaagcccaatatgagcgctagttgcaaggagattgtagatagttacctccctgtaatactagacatcatcaagggtgaaatgtccaggccaggggaagtatgctctgcgttgaatctctgtgaaagcctgcagaagcatttagctgaattgaatcaccagaagcagctagagagtaacaagattcctgagttagatatgacggaagtcgtcgccccattcatggcaaacattcctctgctcctctaccctcaagacggccccaggtccaaaccccagccaaaagacaacggcgatgtttgtcaggactgtatccagatggtcaccgacattcagacggccgtcaggactaattcaacttttgtgcaagctcttgtagaacatgtgaaggaagagtgcgaccgactcgggcctggaatggctgatatctgcaagaattatattagtcagtacagtgagattgctattcagatgatgatgcacatgcagcagcccaaggagatttgtgccctagtaggcttctgcgacgaggtaaaagagatgccaatgcagaccctagtaccagctaaagttgccagtaagaacgtcatccccgctttggagctcgtcgaacctattaaaaaacacgaagttccagccaaaagcgatgtttactgcgaggtctgcgaattcctcgtgaaggaagtgaccaaactgatagacaacaacaaaaccgagaaagagatcctggatgctttcgacaaaatgtgcagtaagcttccaaagtccctgtcagaagagtgtcaagaggtggttgacacttacggctcaagcattttaagcatcctgttagaagaggtaagtcccgagttggtttgttccatgctacacctctgctcaggcacacgcttacctgccctaacagttcacgtcacccagccaaaggatgggggattctgtgaagtgtgcaagaagctggtgggatacctggaccgcaacctggagaagaattccacaaagcaggaaatcctcgcagctttggagaagggctgttccttcctccctgacccttatcagaaacagtgcgatcagtttgtggctgagtatgagcccgtactgatcgaaatcctggtggaggtgatggatcccagttttgtgtgccttaaaatcggggcatgccccagcgctcacaagccacttctcggcactgagaagtgtatctgggggcccagttattggtgccagaatacagaaactgctgcccagtgtaatgccgtcgaacactgtaagcgacatgtctggaattag

SEQ ID NO: 200978 - DNA, 1593 bp, synthetic construct
  misc_feature 1..1593: note = Description of Artificial Sequence: Synthetic coding sequence
  source 1..1593: mol_type = other DNA
gacggcgccatgtacgccctgttcctgctggccagcctgctgggcgccgctttagctggacctgtactgggtcttaaggagtgcacccgtggtagtgccgtgtggtgtcagaatgtgaagactgcctccgactgcggggccgttaaacactgcctccagaccgtctggaataaacccactgtgaagagtttgccatgcgacatctgtaaagacgttgtgaccgccgcaggggacatgctgaaggacaacgcgacagaggaggaaattctagtatatctggagaagacctgtgactggctccccaagcctaatatgtctgctagctgcaaagaaatcgtggatagctatttgccggtgatcttggacatcatcaagggagagatgtcccggcctggggaggtgtgttcagccttaaatctctgtgagagtctccaaaagcatcttgcagagcttaaccaccaaaagcagttggagagcaacaaaattccggaactggatatgactgaggtggtcgccccgtttatggccaatattcccctgctgctctacccacaggatggaccaagatctaaaccacagcccaaggataacggggacgtgtgtcaagactgcattcaaatggtcaccgacattcagactgccgtccggacaaatagcaccttcgtccaagccctggtggagcacgttaaagaagaatgcgatcggctaggacccggcatggcagatatctgcaaaaactacatcagtcagtactctgagatcgccattcagatgatgatgcatatgtctgcagaacagccaaaggaaatttgcgctctggtcgggttttgcgacgaggtgaaagagatgccaatgcagaccctcgtgccagccaaagtcgcttcaaagaacgtaatcccagccctggagctggtcgagccaataaaaaagcacgaggttccagctaagagcgacgtttattgtgaggtgtgtgagttcctggttaaggaggtgacaaagctgattgacaataataagactgagaaagagatcctggacgccttcgataagatgtgctccaaattacccaaaagcctgtctgaagagtgccaggaagtggtggacacatacggttcaagcatactgagtattctgcttgaggaggtgtccccggaactcgtctgttctatgctccatctttgcagcggaaccagacttcccgctcttacagtgcacgttacccagcccaaagatggcggcttttgtgaagtgtgcaagaaactcgttggctacctggaccgcaatctcgagaaaaacagcacaaaacaagaaattctggcggctcttgagaaaggctgctcatttctgccagatccttaccagaagcaatgcgaccagttcgtagccgaatacgagccagtcttaatagagatcctcgtggaggtgatggacccaagctttgtgtgtctaaaaataggagcctgtcccagcgctcacaaaccattactggggaccgagaagtgtatctggggaccatcgtattggtgtcagaatacagagaccgccgctcagtgcaacgccgttgaacattgcaagagacacgtgtggaactag

SEQ ID NO: 200979 - DNA, 2214 bp, synthetic construct
  misc_feature 1..2214: note = Description of Artificial Sequence: Synthetic coding sequence
  source 1..2214: mol_type = other DNA
atgcccgaccacgacagcaccgccctgctgagccggcagaccaagcggcggcgagtggacatcggtgtgaaaaggacagtcggaacagcctcggccttcttcgccaaagcccgggcgacatttttctcagcaatgaacccccagggatccgagcaggatgtagaatactccgttgtacagcacgccgatggcgagaagtctaacgtacttcggaagttgcttaaaagagctaactcctacgaggatgcaatgatgccatttccaggagcaactatcatcagccagttgttaaagaataatatgaacaagaacggaggaacagagccatccttccaggcctcagggctaagcagcaccggaagcgaagtgcaccaggaggacatatgtagcaacagctccagggactctccaccagagtgtctgagtcctttcggacggccaactatgagccagtttgatatggaccggttatgcgatgagcatcttcgtgcaaaacgcgcacgagtagaaaatattatccgcgggatgagtcactccccatcagtggccctgagggggaatgagaatgaacgcgagatggctccccaatccgtcagtcctcgagagtcttacagagagaataaacggaaacagaaactacctcagcagcaacaacagtcctttcagcagttggtttccgcgcggaaagagcagaaacgtgaggagcgtcgccagttgaagcagcagctagaagacatgcaaaaacaactaaggcagctccaggaaaagttttatcagatttacgactccacagacagcgaaaatgatgaggacgggaatttatcagaagactctatgcggtcagagattctggatgcccgagcccaggacagcgtgggcaggtccgataacgaaatgtgcgagttggacccagggcagtttatcgatcgggcccgtgccctaatccgggagcaggaaatggctgaaaataaacccaagagggaaggaaataataaagaacgggaccatggcccaaactccctgcagccagagggaaagcatcttgctgagaccctgaagcaagaattaaacacggccatgtctcaggtggtggacactgtggtgaaggtattttcagcgaagccatctcggcaggttccccaggtgttccctcccctgcagattccccaagcgcgcttcgccgtgaacggtgaaaatcataacttccataccgccaaccaacgtctgcagtgtttcggtgacgtcatcatacctaatccgctcgacaccttcggaaacgtgcagatggccagctcaaccgatcagacagaggctctgcccttagtcgtgaggaagaatagtagcgaccagtctgctagcggcccggctgcaggggggcaccatcagcctcttcaccagtctcctctgtctgcaaccacaggttttacaacaagcacatttaggcatccatttccgctgccactgatggcatatcccttccagtctcccctcggagccccttccggctcattcagcggaaaagaccgtgcatcccctgagagtctggacttaacacgagataccacatcactgagaaccaagatgtctagccatcacctgtctcaccatccctgttcacccgcacacccacccagcacagctgaaggactgtctctaagcctcataaagtccgagtgtggtgacctacaggatatgagcgaaatttcaccttattcgggcagcgcaatgcaggagggactgagtccaaaccacttgaaaaaagcaaaactgatgtttttttatacgcgctacccctctagcaacatgctgaagacatatttcagtgacgtcaaattcaatcgctgcatcacatcccagctgatcaaatggtttagtaacttccgtgaattttattatatccagatggagaagtacgcccgccaggccatcaatgacggggtgactagcactgaggaactgtctatcacaagggactgcgaactctatcgcgccctgaatatgcactacaacaaagcgaatgattttgaagtcccagagcgctttcttgaggttgctcagattaccctgagggaattcttcaacgcgatcattgcgggaaaggatgtggatccatcctggaagaaagcaatctacaaagtcatttgtaaactggattctgaagtgcccgagatattcaagagccctaactgtctgcaggagcttctgcatgagtag

SEQ ID NO: 200980 - DNA, 2031 bp, synthetic construct
  misc_feature 1..2031: note = Description of Artificial Sequence: Synthetic coding sequence
  source 1..2031: mol_type = other DNA
atgcccgaccacgacagcaccgccctgctgagccggcagaccaagcggagacgggtcgatatcggagttaagcgcacagtcggaaccgctagcgccttttttgcaaaagcaagggctacctttttcagtgccatgaatccacaggggtctgagcaggacgtggagtacagcgtggtccaacatgccgacggcgaaaagtccaatgtactgagaaagctgctcaaacgggctaactcatacgaggatgcaatgatgcctttccccggggcaactatcattagtcagctcctgaagaataacatgaataagaacggaggaaccgagcccagttttcaggcgtctggcctctctagcacaggatccgaagtccatcaggaggacatctgttccaattcctctagggattctcctccagagtgcttaagtcctttcgggagaccaacaatgagtcagttcgatatggataggctgtgcgatgagcatctacgagccaagcgggcacgcgtcgagaacatcataagggggatgtctcacagcccttctgttgctctaagaggcaatgaaaacgagagagagatggccccacaatccgtgagtccccgggagtcctaccgcgagaataaacgtaagcagaaactgccccagcagcagcaacagagttttcagcagctggtttccgccaggaaggagcagaaacgcgaggaaaggaggcagctgaagcagcagctggaggacatgcagaagcagcttcgacaactccaggaaaagttctatcagatttacgactctactgactctgaaaacgatgaagacggcaatctgagcgaagatagtatgaggtcggaaattttggacgccagggcgcaagacagtgtgggcaggtcggataacgagatgtgtgagctagatcctggacagttcattgatagagccagggctctgattagagagcaggaaatggctgagaacaaacctaagcgggaaggaaacaacaaagagcgggaccacggcccgaacagcctgcagcccgaggggaaacatttagctgagacgcttaagcaggagttgaacaccgcaatgtcccaggtggtggatacagtggtcaaagtattctcggctaaaccttcacggcaggtcccacaggtgtttcctcctctccaaattcctcaggcgaggtttgcagtgaacggagaaaatcacaattttcacaccgccaaccagaggttgcaatgcttcggggacgtgattatccccaaccctctggacacttttggtaatgtccagatggcgtccagcactgatcaaactgaggcacttccattagtagtccgtaagaacagcagcgatcagtccgcttctggacctgcggcaggaggtcaccaccagccgcttcatcaatcccctctgtctgccaccacagggttcaccacatcgacgttccgtcatccatttcccctgcctcttatggcctatccgttccagtctcctttaggagccccctctggctcattcagtggcaaggatagagcgtcccctgagagtttggatttgactcgagacacaacctcactgaggactaagatgtctagccaccatttgagccaccacccctgttctcccgcacatccaccttctaccgcagaagggctcagcctgtctcttatcaaatcagaatgtggggacctacaggacatgtccgaaattagcccatattcagggtccgcgatgcaggagggcctgagccccaaccaccttaaaaaggcaaagttaatgtttttttatacccggtacccaagttccaatatgctgaagacctattttagcgatgtgaaatttaatagatgcataaccagccagctgatcaagtggtttagcaacttccgggaattctattatatccaaatggagaagtatgcccgccaagcgatcaacgatggggtgacaagcactgaagaactctcaattacacgcgattgtgagctctaccgggccctaaatatgcactacaataaagcaaacgacttcgagtag

SEQ ID NO: 200981 - DNA, 2214 bp, synthetic construct
  misc_feature 1..2214: note = Description of Artificial Sequence: Synthetic coding sequence
  source 1..2214: mol_type = other DNA
atgcccgaccacgacagcaccgccctgctgagccggcagaccaagcgtaggagagtggacatcggtgtgaaaaggactgtcggtaccgccagtgcgttttttgctaaggccagggctacgttcttctctgctatgaaccctcagggaagtgagcaggatgttgaatactctgtggttcagcacgcagacggagaaaagtcaaacgtgttacgcaaactgctgaaaagggccaatagctacgaagatgctatgatgcctttccctggtgctaccatcatctcccagctgctgaagaacaacatgaataagaatggagggaccgagcccagtttccaagctagtggcctgtcatcaaccgggtcagaggtgcatcaagaggacatttgttccaatagttcacgcgactctcctcccgagtgtctgtcacctttcgggcggcctacaatgtctcaatttgacatggacagattatgtgatgagcatctccgcgctaaacgtgccagggttgagaatattattagaggaatgagtcattctccatcggtggccctgaggggaaacgaaaatgaaagggagatggctcctcagagtgtttccccacgggagagttaccgggaaaataagcgcaaacagaaactgccacaacagcagcaacagtcttttcaacagttggtttcggctaggaaagagcaaaagcgagaagagagacgacaactgaaacagcagctggaagatatgcagaagcagctgcgccagctccaagagaaattctatcaaatttatgattccacagattccgagaacgatgaagacggcaatctgagcgaagactctatgcgctccgagatactggacgctagagcgcaggacagtgttgggcgctccgacaatgagatgtgcgagctcgaccccggacagtttatcgacagagcacgagccttaatcagggagcaggagatggctgagaataagccaaagagagagggcaataataaagagcgcgaccacggaccaaactccttgcaacctgaaggcaagcatttggctgagacactcaaacaggaactgaataccgccatgagccaggtggtcgacaccgtcgtaaaggtgttttctgctaagcccagccgacaggtgcctcaggtcttcccccccttgcaaatccctcaggcccgatttgccgtcaatggcgaaaaccacaacttccacaccgctaaccagaggctccagtgtttcggcgatgtcatcatccccaacccactcgataccttcgggaatgttcagatggcttccagtactgatcagaccgaggccctgccgctagtggtgcggaaaaacagctccgatcagtcagcttcgggccccgcagcgggagggcatcaccaaccactgcatcagagtcctctaagtgcaacaaccgggttcacaacctctaccttcagacatcccttccccctgccattgatggcttatccttttcagtcaccccttggggcaccttcagggtccttctccggtaaagacagggctagtccagagtccctggatctgacaagagataccacgtcccttcgcacaaaaatgtcttcacaccacctgtcacaccacccctgtagcccagcgcacccaccttcgaccgctgagggcctaagtctttcccttatcaaatctgagtgcggcgacctgcaggatatgtctgagatctccccctactccggctctgctatgcaggagggcctatctcctaatcatttgaaaaaagccaagctgatgttcttttataccaggtacccatcatccaacatgctgaagacctatttctcagacgtaaagttcaacagatgcatcacgtcgcaactgattaagtggttcagtaacttccgggagttttactacatacaaatggaaaagtacgctaggcaggcgattaatgacggcgtgacatctaccgaagagttgtctattactcgggactgcgagctttatcgggctctgaacatgcactacaacaaggccaatgattttgaggtccccgagcgctttctggaggtcgctcaaattacactccgggagttcttcaatgccattatcgctggaaaggatgtggatccttcatggaaaaaagccatatataaagttatatgtaagctcgactctgaagtgcccgagatttttaaatctcctaattgtcttcaggaattactgcacgagtag

SEQ ID NO: 200982 - DNA, 693 bp, synthetic construct
  misc_feature 1..693: note = Description of Artificial Sequence: Synthetic coding sequence
  source 1..693: mol_type = other DNA
atgcccgaccacgacagcaccgccctgctgagccggcagaccaagcgtaggagagtggacatcggcgttaaacgaacagtaggcacggcctctgcattctttgccaaggcaagggctacttttttttccgccatgaatccccagggctctgagcaggacgtcgaatatagtgtggttcagcacgcggatggtgagaagtcaaacgtgctccgtaagcttctgaagagggcaaactcctatgaggatgctatgatgccgtttcctggggccaccatcatctctcagctgctgaagaataacatgaacaagaacgggggaaccgaaccaagttttcaggcatccggactctcctcaaccgggtccgaggtgcaccaggaagacatttgctccaacagtagccgtgacagccccccagaatgcctgagccccttcggacgacccactatgagccaatttgatatggatagactctgtgatgagcacctgagagccaaaagggcacgcgtggagaatatcattcgcggcatgtctcactccccatcggtggctctgcgtggtaatgaaaacgagcgtgagatggccccccaatcagtgagccctcgtgaaagttatcgggaaaacaagaggaagcagaaattaccacagcaacagcagcaatcattccagcaactagtgtccgcacggaaggaatag

SEQ ID NO: 200983 - DNA, 2214 bp, synthetic construct
  misc_feature 1..2214: note = Description of Artificial Sequence: Synthetic coding sequence
  source 1..2214: mol_type = other DNA
atgcccgaccacgacagcaccgccctgctgagccggcagaccaagcggagacgagtggatattggcgtaaagagaacagtgggtacagcttccgcctttttcgcaaaggcccgggccacctttttctccgccatgaatccgcaggggagtgaacaggacgtcgaatattctgtggtacaacacgccgacggggagaaatcaaacgtgctaagaaaactgctcaagcgggccaacagctacgaggacgccatgatgccgtttcccggtgctactattataagccagctcctgaagaataatatgaataaaaacggagggaccgagccatccttccaagcctcggggttgtcaagtacaggctccgaggtacaccaggaagacatctgcagcaactcttcccgcgactcccctccagaatgcctgtcaccgtttggccgtcctaccatgagccagtttgatatggacagactgtgcgatgagcatctgagagctaaacgcgcccgggttgaaaatattattcgggggatgtcccactcacccagcgtggcactacgcggtaacgaaaacgaaagagagatggctccccagagcgtcagtcctcgggaatcttaccgagagaataagaggaagcagaaactgccccagcagcagcagcagtcattccagcagctggtgtccgcccgcaaagagcaaaagagagaggagaggagacagcttaagcagcagctggaagatatgcagaagcagctgcggcagcttcaggaaaaattctaccaaatttatgattccactgattccgaaaacgatgaggacggaaacctatctgaggacagcatgcgcagtgaaattctcgatgctagagcgcaggattccgtggggcggagtgacaacgaaatgtgtgaactcgaccctggccagtttatcgaccgggcccgggccctgataagagaacaggaaatggctgagaataagccgaaacgagaaggaaacaacaaggagcgggaccacggccctaactcgctccaacccgaagggaagcacctggctgagactctgaagcaggagctaaacaccgctatgtcccaggtcgtggacaccgtggtcaaagtgttctcggccaagccatcccggcaggtaccccaggtgttcccaccattgcagatcccacaagcacgctttgccgtgaatggcgaaaatcacaacttccacacggccaaccagcgtctgcagtgcttcggcgacgtgattatccccaaccccctggacaccttcgggaacgtgcagatggcctcctctacggaccagacggaagcacttcccctggtggtgaggaagaatagtagtgatcaaagcgcttctgggcctgctgcaggtggccatcaccagcccttacaccagtcaccactgtccgccacaactgggttcaccacatcgacttttcgacacccattccccctgccactgatggcttacccattccagtctcctttgggcgcacccagcggcagtttctcgggaaaggatcgcgcgtcacctgagtctctcgacttaacgagggatactacaagcctcagaaccaagatgtccagccatcaccttagccatcatccctgctcccccgcccatccaccctcaactgccgaagggctttctctctcactgatcaagtcagaatgcggtgatctccaggacatgtcagagattagcccttattctggaagcgccatgcaagagggtctcagtccgaaccacttgaaaaaagcaaagctgatgttcttctacacacgctacccaagctctaatatgctcaagacatatttttccgatgttaagttcaaccgatgtataactagccagctgattaagtggttctctaattttcgagagttctactacatccagatggagaaatacgcaaggcaagctatcaacgatggagtgacttctacagaggaactgagcataactcgcgactgtgagctgtatagggctctgaacatgcactacaataaagctaatgattttgaagtacctgagcgtttcctagaggttgcccaaatcacacttagagagttctttaacgccattatagccggaaaggatgtcgacccatcttggaaaaaagcaatttacaaagtgatttgtaagctggactctgaggtgccagagatctttaagtcccctaattgtctgcaggagctgctccatgagtag

SEQ ID NO: 200984 - DNA, 930 bp, synthetic construct
  misc_feature 1..930: note = Description of Artificial Sequence: Synthetic coding sequence
  source 1..930: mol_type = other DNA
atggccagcagcaccgaccagaccgaggccctgcccctggtggtgcggaaaaattcaagcgaccagtctgcgtccggccctgccgccggtggtcaccatcagcccctgcatcagtcccccctttcagccaccacaggcttcactacgtccacatttaggcatcccttccccctgcccctcatggcatatccatttcagagtcctttgggggcaccaagtggatcttttagcggtaaggatcgagcttctcccgagtccctggacctgacccgcgatactactagcctgcggactaagatgtcatctcatcatctgtcccatcatccctgcagcccagcccaccctccatcaactgccgagggattaagcctgagcctcattaagtccgagtgtggcgatctccaagatatgtctgagatctccccgtatagcggaagtgctatgcaggagggtctgtctcccaatcatctgaaaaaggccaagttgatgttcttctacacccgttatccgtcaagtaacatgcttaagacctacttctctgacgtaaaatttaaccgctgcatcacgtctcagttaattaaatggttttcaaacttccgtgaattctactacatacagatggaaaaatatgcaagacaggcgatcaacgacggcgttacttccaccgaggaattgagcatcacacgggactgtgaattgtacagagccctcaacatgcactacaacaaggccaatgatttcgaggtgccagaacggtttctagaggtggcccagataactctgagggagttcttcaacgccattatcgcagggaaggatgttgacccttcctggaagaaggccatctacaaagtgatatgcaaactggacagtgaagtgcctgagatattcaagtcccccaactgtctccaggaactgttgcacgaatag

SEQ ID NO: 200985 - DNA, 1080 bp, synthetic construct
  misc_feature 1..1080: note = Description of Artificial Sequence: Synthetic coding sequence
  source 1..1080: mol_type = other DNA
atgaagagccccttctaccggtgccagaacaccaccagcgtggagaaaggcaatagcgccgtgatgggcggcgtattatttagcaccggccttctggggaacctgctagccctggggctgctcgcacgttcagggcttggatggtgtagcaggcgtcctctaagaccactccccagcgttttctatatgttggtgtgcgggctcactgtgacggatttgcttggaaagtgcctcttaagccctgtggtgctagctgcctacgctcaaaacaggtcactacgagtactggcaccagctctggataattctctgtgtcaagcctttgctttctttatgagtttttttggactgagttccacattgcaattgctggccatggccctggaatgctggcttagcctgggccatcctttcttttaccgcagacatatcacattgcgcctcggggctctggtcgcccccgtagtatctgcgttcagtctggcattctgcgccctgccatttatggggtttgggaagttcgtccagtactgtcccgggacctggtgctttattcaaatggtacacgaggagggatctttatctgtgttagggtatagcgttctctactcatcactgatggctctgctcgtgctggcaactgttttatgcaacctgggagctatgcgcaacctatatgcgatgcatcgtaggcttcaaaggcatccacgctcttgcactcgggactgtgctgagccacgggccgacggacgtgaagcatcaccacaaccactggaggaactggaccacctgctcctgttggccctcatgactgtgctgttcactatgtgcagcttgccagtaatctatagagcatactacggcgcgtttaaggatgtgaaagagaaaaaccggaccagcgaagaggcggaagacctccgcgccctcaggttcctgagcgtgatttctatcgtcgacccttggatctttatcatcttccgaagccctgtgtttcggatcttctttcacaagatattcattaggcccctgagatatcgatcccggtgctcaaattcaacaaacatggagtcctcattatag

SEQ ID NO: 200986 - DNA, 8034 bp, synthetic construct
  misc_feature 1..8034: note = Description of Artificial Sequence: Synthetic coding sequence
  source 1..8034: mol_type = other DNA
atgagcacctgctgctggtgcacccccggcggcgccagcaccatcgactttctcaaacggtacgcctcaaatactccaagcggcgagttccaaactgcagatgaggatctttgttattgcttagagtgcgtggcagagtaccataaggcccgagatgagttacctttcctgcacgaagtgctttgggagctcgaaactctgcggctgatcaatcattttgagaagagcatgaaagccgaaattggggatgacgatgaattgtacatcgtggataacaacggggaaatgcctctctttgatatcacgggccaagacttcgagaataagctccgggtccctctcctcgagatcctcaagtacccataccttcttcttcacgagagggtgaatgagctctgtgtggaagccctatgtcggatggaacaagcaaattgtagcttccaggtgttcgataaacaccccgggatttacctgttcctggtacaccccaatgaaatggtacgtcggtgggccattctcaccgctagaaaccttggaaaagttgacagagacgactactacgaccttcaggaagtgttactctgccttttcaaagtgatcgagctgggccttttggagagccctgacatatatacctcctctgtgctggagaagggaaagttaatcctcctgccatctcacatgtacgatacaacgaactacaagagctattggttagggatttgtatgttgctgactattttggaagaacaggcgatggattctttgctgctaggaagtgacaaacaaaacgacttcatgcagagcatcctgcatacaatggagcgtgaggccgacgatgactccgttgaccccttctggcctgcactgcactgctttatggtcattttggatcgcctggggtcaaaggtctgggggcagctgatggaccccattgtggcttttcagactattatcaataacgcctcttataaccgtgagatcaggcatattcgaaattctagcgtgcgcactaagctggagcccgagagctatctcgacgacatggttacctgctcccaaatagtgtataactataatccggagaaaacaaagaaagactctggctggaggaccgccatttgtccggactactgccctaatatgtatgaggagatggaaacactcgcatctgttctgcagagcgacataggccaggatatgagggtccacaatagtacattcttgtggtttattcctttcgtgcagtcgcttatggacttaaaggatcttggcgttgcgtatattgcacaggtggtcaatcacctgtacagcgaagtaaaggaggtgctaaatcagactgatgctgtgtgcgataaagttactgaattttttttactcattctcgtttcggtgatcgagctgcaccggaacaaaaaatgcctacaccttttgtgggtgtcaagccagcagtgggtagaagctgttgtaaaatgtgctaagctaccgaccaccgcctttaccaggtcctcagagaagtccagcggcaattgctcaaagggcactgctatgatctcttccttaagtttacattctatgccgagcaacagtgttcagctggcgtatgtccagcttattaggagtcttctgaaggaaggctaccagctgggccagcaatccctatgtaaaaggttttgggacaaattaaacttgtttctgagggggaatttgagtctggggtggcagctgacatctcaagagacacatgaattgcagtcttgtctgaagcagattattcggaacatcaagtttaaggctcctccttgtaacacattcgtggacctcacctcagcctgtaagatctccccagcctcatacaataaggaagaatctgaacagatgggtaagacctctaggaaggacatgcactgtctggaggcttctagccctactttctccaaggaacctatgaaagtacaggactccgtgttaattaaggctgataataccatcgagggggacaacaacgagcaaaactatatcaaagacgtcaaattagaggaccaccttctggcaggttcttgcctgaagcaaagtagcaaaaatatcttcacagaacgagccgaggatcaaattaagatatcaacgcgaaagcaaaagtccgtaaaagagatcagctcatacacacccaaggattgtacaagtcggaatggacccgagcggggctgcgaccggggaatcattgtcagtactaggctgctcacagattcgtccactgacgctctcgaaaaagtaagcaccagtaacgaggacttctccctcaaagatgatgccctcgccaagactagcaagcgcaagacgaaagttcaaaaggacgagatttgtgccaagctgtctcacgtcattaagaaacaacataggaagtccacgctagtggacaacactatcaacctggatgagaacctgacagttagtaacattgagtcattctatagccgaaaggatactggcgttcagaagggggatggattcatccacaatctgagcctggacccttctggcgtgctggatgacaagaatggtgagcaaaaaagccaaaacaatgttctgcctaaagagaagcagttgaagaatgaggaattggtgatattttcatttcacgaaaataactgcaagatccaggagttccacgtggatgggaaagagttgattccgtttactgagatgacgaacgcttcggagaagaagagcagcccgtttaaagacctgatgaccgttccagaatcacgcgacgaggaaatgtcgaacagtacctccgtgatctactcaaaccttactagggaacaggctccagacatttcaccaaagtccgacactttgaccgattcccaaattgacagagacctccacaagctcagcttgctcgcccaggctagcgtgatcaccttcccttcagacagcccccagaacagttcccagctgcaaagaaaagtgaaggaagataagaggtgtttcaccgccaaccagaataatgtcggagatacctcacggggccaagtaatcatcatctccgactcagacgatgatgatgatgagcgtattctaagcctggagaagctcaccaagcaggacaagatttgcctggaaagggaacaccccgagcaacacgtatcaactgtaaattcaaaagaggaaaaaaatcctgtgaaagaggagaagacagagaccctgtttcagttcgaggagagcgattcccagtgctttgaatttgagtcatccagtgaggttttcagcgtttggcaagaccatcctgatgacaacaactccgtacaagatggagaaaagaaatgcctggcacccatagctaatactacaaatggccagggatgcactgactatgtgtccgaggtcgtcaagaaaggagccgaggggatagaggaacacaccagacccagaagtatttcagtcgaggagttttgcgaaattgaggtgaaaaaacccaagagaaaaagaagtgagaaaccaatggccgaggatcctgtgaggcccagcagttccgtgagaaatgaaggacagtccgacactaataaacgggatctggtgggcaacgatttcaagagcatagaccggcggacatccacccctaacagcaggatacagagggctacgactgtgagtcagaagaaaagcagcaagctctgtacttgcacagagcccattcgtaaggtgcccgtaagcaagacccccaagaagacccacagtgatgccaagaaagggcagaaccgctctagcaattacctgagttgccgaaccactcctgcaatagtccctccaaaaaagttccggcagtgtcccgagccaacgtctacagccgagaaattgggcctgaagaagggtccaagaaaggcttacgaactttcccaacgctctctggattacgttgcacagctcagagaccacgggaaaacagtcggggttgtggatacacgaaaaaagactaagctcatttctcctcagaaccttagcgtgcggaacaacaaaaagctactgacttcccaggaactacaaatgcagcgccagatcagacctaagtctcaaaagaatcgtcgccggttatctgattgcgagtctacggacgttaaaagggcaggcagtcacaccgcccaaaattccgatatattcgtgcctgaaagcgatcggtctgattacaactgcaccggcggcacagaagtgctggccaattcaaataggaagcagctgataaagtgcatgcctagcgaacccgaaacaatcaaggccaaacacggtagcccagccaccgacgatgcatgcccacttaatcaatgtgactccgtggtgctgaacggtactgttccaaccaatgaagttatcgttagcacgagcgaggaccccctggggggcggggacccaacagcccgccacatagagatggcggccttgaaggagggtgaaccggattcctcctccgatgccgaagaggataatctgttcctgacacagaatgatcccgaagatatggatctgtgtagccagatggaaaacgataactataaattgatagagcttattcatggcaaggatactgtcgaagtggaagaagattctgttagccgtcctcagttggagagcctgagcggaactaagtgtaaatacaaggactgtctggagacaacgaagaaccagggagaatactgccccaaacattctgaagtgaaagctgcagacgaagatgttttccggaagccggggctcccaccacctgccagcaaaccactgcgaccgactaccaagatcttcagcagcaagagtacatcccgaatcgccgggctttcaaagagtttagagaccagcagcgccctttcgccgtctcttaagaacaagtccaagggaatccagagcattttgaaggtgcctcagcccgttccgctcatcgctcaaaaaccggtaggggaaatgaagaactcctgcaatgtgttgcatccacagagtccgaacaatagtaaccgccagggatgtaaagtcccttttggcgagtcaaaatactttccttcttcatctcccgtgaatatccttctgagctcccaatcagtgagcgatactttcgtcaaggaggtattgaagtggaagtacgagatgtttttaaactttggccagtgcggaccaccagcgagcttgtgtcagtccatcagtagaccggttcctgtgcggtttcacaactacggagactactttaacgtcttcttccctctgatggtgctcaatacattcgaaactgtggcacaggaatggctgaacagccctaatcgtgaaaacttttaccagttgcaggtaagaaaattccccgcagattatattaaatattgggagtttgcagtatacctggaggaatgtgaattagcaaagcagctgtatccaaaggagaatgacctggtattcctggccccagagaggattaatgaagaaaaaaaggataccgagcggaacgatatccaagacctgcacgaataccactccggatatgtgcataagtttcgtagaacaagcgtgatgagaaatggcaaaacagaatgttatctgagcattcagactcaggagaactttcccgcgaacctgaacgaactcgttaattgtatcgtcattagctccttggtaactacccaaaggaagctgaaggctatgtccctgctggggagtagaaatcaactggctcgggcggtcctgaacccaaatccaatggacttttgcacaaaggacctgctaactaccacaagtgagagaataatcgcctatctgcgcgactttaacgaggaccagaagaaggctatcgagacagcttacgcaatggtgaaacactcaccctctgtcgctaaaatttgtctcatccacggtcctcccggcacgggaaagagtaagactatcgtagggctcctctaccgcctgttgaccgaaaaccagcgcaaaggacacagtgacgaaaacagtaacgccaagataaaacagaatagagtcctggtgtgcgcaccatccaacgctgccgtagacgaattaatgaaaaaaatcattctcgagtttaaagaaaagtgcaaggataagaagaaccctctgggaaactgcggcgacattaacctggtccggctcggaccagagaagagtatcaacagtgaagtcctgaagtttagcttggacagtcaagtgaaccacaggatgaaaaaggagcttccatctcacgtgcaggccatgcataagagaaaggagtttttagactaccagctcgatgagctctcccgtcagagagccctgtgcaggggcgggagggagattcagcggcaagagctggatgagaatatatccaaagtctctaaggagaggcaggaattggcttccaaaatcaaggaggtacaaggtcgaccacagaaaacccagtccataattatcttggaaagtcacattatctgctgcaccctcagcacttctgggggactcctgctggagtccgctttcagaggccagggaggtgtcccattctcttgcgtgattgtggatgaagcgggccagtcctgcgaaatcgagactctgacccctttaatccaccggtgcaataagctcatcctggtcggagatccaaaacagttaccccctaccgtcatttctatgaaagctcaagagtacggctacgatcagagtatgatggccagattttgtcgccttctcgaagagaacgtcgagcacaatatgatatctcgcttgcctatcttgcagcttaccgtgcagtaccgcatgcaccccgacatttgtctgtttccttcaaattacgtgtacaaccggaacttgaaaactaaccggcagaccgaggccattcgctgtagttcggattggccctttcagccctatctggtattcgatgtgggtgacggcagtgagcgtcgggacaatgatagctacattaatgtgcaggagatcaaattagtgatggaaattatcaagctgattaaggataagcgaaaggacgtgtcatttcggaacattggcataatcactcattacaaggcccaaaagaccatgatccagaaagacctcgacaaagagttcgatcgaaaggggccagccgaagtcgatacagtagacgccttccagggccgccagaaggattgtgtgatcgtcacttgtgtccgcgcgaactcaattcagggctctattgggtttcttgcctctctgcagcgactaaacgtcaccataactagggcaaagtatagcctcttcatcctgggacacctgcgtacgctgatggagaaccaacactggaaccaacttatacaagatgctcagaagaggggggccattataaaaacctgtgacaaaaattacagacacgacgccgtgaagatcttaaaactgaagcccgttcttcaaagatccttgacacacccacccaccattgctcccgagggaagccgaccccagggcgggctaccctcgtccaagttagattctggctttgccaaaacatctgtcgccgccagcctgtaccatacaccttctgacagcaaggaaatcaccctgacggtgacctccaaagatcccgaacgaccgcccgtccacgatcagctacaggaccctaggctgcttaaaaggatggggatcgaggtgaagggcggaattttcctttgggacccacaaccatcatctccacagcatccgggtgccacaccccccacaggcgaacctggctttccagttgtccaccaggacctgagccacatacagcagcccgcagccgttgtagcagctttgtcctctcacaaacctcccgtgagaggcgagccacccgccgctagtccagaggctagcacctgtcaatctaaatgtgatgacccagaggaagaactatgccaccgcagagaggctcgtgctttctctgaaggtgaacaggagaaatgtggctccgagacacaccacaccagaaggaattccagatgggataaaaggaccctggagcaggaggattccagctcgaagaagcgaaagctgctgtag

SEQ ID NO: 200987 - DNA, 483 bp, synthetic construct
  misc_feature 1..483: note = Description of Artificial Sequence: Synthetic coding sequence
  source 1..483: mol_type = other DNA
atggccacccaccacaccctgtggatgggcctggccctgctgggcgtcttgggggacctgcaggctgccccagaggcgcaggtgagcgtccagccaaattttcaacaggacaaatttctcggccggtggtttagcgccggactggcatccaacagttcctggctcagagaaaagaaggcagcactgtccatgtgtaagagcgttgtcgcaccagccaccgacggcggactgaacttaacgtccacattcctgcgcaagaaccagtgtgagacaaggaccatgctcctccagcccgccggcagcttgggttcctactcatatcggtctcctagggaatgggggctccaccgcccacctggcccttctcttggagccaccttagcaggtactacactgggccagccacctgctgccgagatccacggcgttggaggcgatggttgccccacaagcgtgcgcgggaagggacaagcctgggcctag

SEQ ID NO: 200988 - DNA, 573 bp, synthetic construct
  misc_feature 1..573: note = Description of Artificial Sequence: Synthetic coding sequence
  source 1..573: mol_type = other DNA
atggccacccaccacaccctgtggatgggcctggccctgctgggcgtgttaggagatctgcaggccgcccctgaagcccaggtctccgtgcaacctaacttccagcaagacaaattcctgggtcgttggttctccgcgggcctggccagcaattcttcctggctgcgtgagaagaaagccgccctttcaatgtgtaagtcagtagtcgctcctgccactgatggtggtctcaatctcacaagcaccttccttcgcaaaaaccagtgcgagacccgaacaatgttactccagccagctggtagtttgggcagctactcctatcgcagtcctcattggggatcaacatactcagtttcagttgtggaaacagattacgaccagtatgccctgctgtactcacaaggctcaaagggaccaggtgaggacttccggatggcaaccttatattctaggacccagacacctcgcgctgagttgaaagaaaagtttacagcattctgcaaggctcagggtttcaccgaggataccatcgtgttcctgccacaaactgacaagtgtatgaccgagcagtag

SEQ ID NO: 200989 - DNA, 189 bp, synthetic construct
  misc_feature 1..189: note = Description of Artificial Sequence: Synthetic coding sequence
  source 1..189: mol_type = other DNA
tgaggctaccactgcctgcccgcccccaaccgggcccagggcgaggtcggcggcgatggtggttcagtccaattcggcggtagtgtaaaaacgagtagcgcacttcgggaagagcaagaggcccagtgggaaaactggcctaaatctggtgttctcactacggcaccaggctttttcctgggacgctag

SEQ ID NO: 200990 - DNA, 642 bp, synthetic construct
  misc_feature 1..642: note = Description of Artificial Sequence: Synthetic coding sequence
  source 1..642: mol_type = other DNA
tgactgcggggcggcggccagttcctgggccggggcgtgcggggcgtcgccgcgcgcggtatcggacgcggaggaggtgccggactggaaactggaggtgtggatggaagaggtgctcccgcaggacgacgaaggtgggtaaggcgcgtgcttgcagatgccggaggcggcagaagtccccaattcctcggccgctggttctcagccgggttagcgagcaattcttcatggctgagagagaaaaaggccgccttgtccatgtgcaagagcgtggtggccccagctaccgacggaggcctcaacctcaccagtacctttctgcggaaaaaccagtgcgagacccggaccatgctgctccagcctgcagggagccttggctcctacagttacagatctcctcactggggatccacttactccgtaagtgtggtcgagactgattacgatcagtacgccttgctttattctcaaggcagcaagggaccaggtgaggactttagaatggcaaccctttactccagaactcagactcctcgagccgagctgaaggagaagttcactgcattttgcaaggcgcaagggttcacggaagacacaattgttttcctaccccagacagacaaatgtatgaccgagcaatag

SEQ ID NO: 200991 - DNA, 588 bp, synthetic construct
  misc_feature 1..588: note = Description of Artificial Sequence: Synthetic coding sequence
  source 1..588: mol_type = other DNA
atggccacccaccacaccctgtggatgggcctggccctgctgggcgtgctcggggacctccaggccgcccccgaagctcaggtgtccgtacagccgaattttcagcaggataagttcctgggacgctggttttccgccggcctggcctccaactcctcctggcttagggagaagaaagctgcactctcaatgtgtaagtcagtagtcgcccctgcgaccgacgggggcttgaatctgacttctaccttcctgaggaaaaaccaatgcgagactcggacgatgctgctacagcctgcaggaagcctgggaagttactcttatcggtcacctcgggagtgggggcttcacaggccccctggtccatcccttggagccactctggccggcactacccttggacagccccctgccgccgaaatccatggcgtgggagattggggaagcacatattctgtttctgttgtcgaaacagactacgatcagtacgctctgctgtactctcagggttcaaaaggacccggcgaggactttcgtatggccactctttacagtcgaacccagacccccagggccgaacttaaggaatag

SEQ ID NO: 200992 - DNA, 573 bp, synthetic construct
  misc_feature 1..573: note = Description of Artificial Sequence: Synthetic coding sequence
  source 1..573: mol_type = other DNA
atggccacccaccacaccctgtggatgggcctggccctgctgggcgttcttggagacctacaagccgctcccgaggcccaggtaagtgttcagccaaacttccagcaagataaattcctgggcagatggttcagcgccggacttgcctctaactctagttggcttagagagaagaaggcggccctgagcatgtgcaaatcagtcgtcgctcctgctactgacggcgggttgaacttaacatctaccttcctgagaaagaaccagtgtgaaacacggactatgctgctccagccagccgggagcctgggcagctactcgtatcgcagtccccactggggctcaacttactcagtctccgtggttgagaccgactatgaccagtatgccctactgtatagccaagggagcaaaggtcccggggaagacttccgaatggccaccttgtactcacgcacacagacccctagggccgagctcaaggagaagttcactgctttctgtaaagcacagggatttactgaggacactattgtattcctgcctcagaccgacaagtgtatgacagaacagtag

SEQ ID NO: 200993 - DNA, 1209 bp, synthetic construct
  misc_feature 1..1209: note = Description of Artificial Sequence: Synthetic coding sequence
  source 1..1209: mol_type = other DNA
atgagcccctgcggccccctgaacctgagcctggccggcgaggccaccacctgtgccgccccctgggtaccaaatacctcagccgtgcctcccagtggagcttcacctgcgttgcctatcttctccatgacccttggcgccgtttccaaccttctggcattagcgcttctggcccaggccgcaggacgcctcaggaggcgcaggtcagccgccacattcctcttatttgtggcttccttattggccaccgatctcgccggccatgtgattcccggagcactggtgctgcgactgtacacagctgggcgcgcacctgcaggtggcgcatgccactttcttggtggttgtatggtcttctttgggctttgcccccttcttctgggatgcggaatggctgtggaacggtgtgtgggtgtaacacgtccactcctgcacgctgctagagtttccgtagctcgggctagactcgcactagccgccgtagccgccgtcgcccttgcagtagccctcctgcctctggcccgcgtaggacggtatgagctgcagtatcctggtacctggtgttttattggtcttggaccacccggcggatggcggcaggctctgctagcaggtctattcgcctcactaggcctggtggccctgctggctgctctcgtgtgtaacaccctcagcggactggccctgttgagggccagatggcgccgccggagcagaagaccaccacccgccagtggcccagacagtaggcggagatggggagcgcacggccctcgttccgcttctgctagcagtgctagttccatcgcttcggccagcacatttttcgggggctcccgctcgtctggctcggccagacgagccagagcccacgatgtggagatggtgggccaactcgtggggatcatggtagtctcctgtatttgctggagccctatgctagtgctcgtggcgttggctgttggagggtggagctcaacgtctcttcagcggcctcttttcctggccgtccggctcgcctcttggaatcagattctcgatccctgggtatacattctcctgagacaagctgtgctcagacagctgctgaggctgctgcctccccgcgctggcgctaaagggggaccagccgggctgggtctgaccccctcggcctgggaggctagcagcctgaggtctagtcgtcacagtggtctgtcacatttttag

SEQ ID NO: 200994 - DNA, 1077 bp, synthetic construct
  misc_feature 1..1077: note = Description of Artificial Sequence: Synthetic coding sequence
  source 1..1077: mol_type = other DNA
atgggcaacgccagcaacgacagccagagcgaggactgcgagaccaggcagtggcttcctcctggggagtcccccgctattagctccgttatgttttccgctggcgtgttgggaaacctgatcgccctcgccctccttgcacggcgatggaggggtgacgtcggctgctccgccgggcgtcggtctagccttagcctatttcacgtgctcgttactgagctcgtatttacggatctcttgggcacttgccttatttctccagtggtgctggcatcctacgccaggaatcaaaccttggtcgccctcgctcctgaatcccgagcatgcacatactttgcattcgccatgacctttttctccctggcgactatgctgatgctatttgccatggcgcttgagcgatatcttagtattggccatccttacttctatcagcggcgagtgtcacgctcaggcggactcgccgtcctgccagtaatatatgcagtcagcctcctcttttgttcactcccactgttggattatggacagtacgtccaatattgtccgggcacctggtgttttatcaggcacgggcggactgcatacctgcagctgtacgccactctcctactactgctgatagtctcagtgctcgcctgcaatttttccgtgattctgaatctgattcggatgcaccgaaggagtcgacgaagcaggtgcggaccatccctcggctctggccgcggagggcccggtgctaggcgaaggggggaacgggtttccatggctgaggagaccgatcacctgattctccttgctatcatgacaattaccttcgcggtgtgtagtctgcccttcaccattttcgcctacatgaatgaaactagtagcaggaaagagaagtgggacttacaggctctgaggtttctgagtatcaactcaataattgacccctgggtgttcgcaatcttgcgtccaccagttctgcggttgatgcgcagcgtgctgtgctgtcgaatcagcttgcgaacacaggacgcaactcagacatcgtgctccactcagagcgatgcttccaagcaggccgatctctag

SEQ ID NO: 200995 - DNA, 1173 bp, synthetic construct
  misc_feature 1..1173: note = Description of Artificial Sequence: Synthetic coding sequence
  source 1..1173: mol_type = other DNA
atgaaggagacccggggctacggcggcgacgcccccttctgcacccgtctgaatcacagttacaccggcatgtgggctcccgagcgttcagctgaggctcgcggtaacctgaccagaccacccggctctggtgaagactgcgggagcgtgtctgtggcattccctattactatgcttctcaccggttttgtcggaaacgctttagccatgctgttggtgtcccgttcttacagacgaagagagtcaaagcgcaagaaatcattcttactatgcatcggatggttggcactgacggacctggtcggacagctactgactactcccgtagtcatagtggtgtatctgtcaaaacagcggtgggaacacattgatcccagcgggcgcttatgtaccttctttgggctgactatgaccgtctttgggttgagctcactgttcatagctagtgccatggccgtagaaagggccctcgctatcagggccccacattggtacgcgagtcatatgaagaccagggcaactagggctgtgctgcttggcgtgtggctggccgtcctggcatttgctttactgccagttcttggggtcggacaatacacagtccagtggcccggtacctggtgcttcatatcaactgggaggggggggaatggtacaagcagttctcacaactggggcaatctctttttcgcctcagctttcgcgttcctgggactactcgctctgaccgttactttttcctgtaacctggccactattaaagcgctggttagccgctgtcgcgccaaggccacagctagccaatcttctgcccagtggggccggattactactgagactgcaatccagctcatggggatcatgtgcgtgttgtccgtgtgttggtctcctctgctcatcatgatgctgaaaatgatattcaaccagaccagtgtcgaacattgtaagactcacaccgagaaacagaaagagtgtaatttttttctgattgcggtacgacttgccagcctgaatcaaattttggacccttgggtgtaccttctgctcaggaagatcctactgcgcaaattttgtcagatcagataccatactaataattatgctagctcttccacgtcactgccctgtcagtgttcatccacacttatgtggtctgaccacctggaacgttag

SEQ ID NO: 200996 - DNA, 1260 bp, synthetic construct
  misc_feature 1..1260: note = Description of Artificial Sequence: Synthetic coding sequence
  source 1..1260: mol_type = other DNA
atgaaggagacccggggctacggcggcgacgcccccttctgcaccaggcttaatcattcctatacaggaatgtgggcccctgaacgatccgcagaagcccggggaaacctgacccggcctcctggctccggcgaggactgtgggagtgtcagtgtcgcatttccaatcaccatgctgcttactgggtttgtcggaaacgctctcgccatgctgctagtttcccgaagctaccggcgcagggagtctaagcggaaaaaaagcttcctgttgtgcatcggatggctggccctcaccgatctggtgggacagttgctaaccactcccgttgttattgtggtgtacctcagtaaacagcgttgggagcacatcgacccctccggacgcctgtgcacattctttggattgaccatgacagtgttcggtttatccagcctcttcattgcctcagccatggctgtcgaaagggctttagccatcagagcaccccattggtatgccagtcatatgaagactagggccactagggctgtgcttttaggcgtctggttagctgtgctggcattcgcactcctgcccgttctaggagtcggccagtatacggttcagtggccagggacgtggtgttttatcagcaccgggagagggggaaacggaacttccagctcacacaattggggcaaccttttctttgcaagcgctttcgcgttcctggggctgttagctttgaccgtgacctttagctgtaacttggccaccatcaaggcccttgtgtcccgctgcagagccaaggccaccgccagccagagcagcgcccagtggggccgaatcaccacagaaaccgcaatccagcttatggggataatgtgcgtgctgagtgtgtgttggtcccctctcctgatcatgatgctgaaaatgatctttaaccagaccagtgtggagcattgtaagacgcacacggaaaaacagaaggagtgcaacttcttcttgattgcagttcgcttggcctcactcaaccaaattttggatccctgggtttatttgctcctgcggaaaattcttctgcgtaaattctgccaggtcgctaacgccgtcagcagctgcagtaacgatggtcagaagggtcagcctattagcttgagtaacgagatcattcagacagaggccatccgctatcacaccaataactatgccagcagcagcactagccttccatgtcagtgctcctccaccctgatgtggtccgaccacctggagcgctag

SEQ ID NO: 200997 - DNA, 1290 bp, synthetic construct
  misc_feature 1..1290: note = Description of Artificial Sequence: Synthetic coding sequence
  source 1..1290: mol_type = other DNA
atgaaggagacccggggctacggcggcgacgcccccttctgcacccgcctgaaccattcttacacggggatgtgggcaccagaacgatcagctgaagcaagagggaatttgaccagacctcccggctctggcgaagactgtgggagtgtgtcagtggcttttcctataacaatgcttctgactgggttcgtcggcaacgcccttgccatgttgctagtctctcgctcctataggagacgcgagtccaagcggaaaaaatccttccttctgtgcattgggtggctggccctgacagacctggtcggacagctgcttactacccctgtggtgattgttgtgtacttgtcaaagcaacgctgggagcatattgacccatctggtaggctgtgtactttctttggtctgaccatgacagtgttcggcctttcaagcctgttcattgcgtcggcgatggccgttgagagggccctggctattcgcgccccccattggtatgcatctcacatgaaaacccgcgctacccgcgcggtgctcctgggtgtgtggctggctgtgttggccttcgctctccttcccgtcctgggagtgggccaatataccgtgcagtggcccggtacttggtgcttcatttctaccgggcgtggaggcaatggaacttcgagtagtcataattggggtaatctgtttttcgcaagcgcatttgcctttctgggattgctggccttgaccgtaacattcagctgtaacctggccaccatcaaggctcttgtgagccgatgcagggccaaagcaaccgcttcacagtcatcagcgcaatggggtcgcatcactaccgagacagctattcagctcatgggtattatgtgtgtgctgtctgtgtgctggagccccctcctgatcatgatgctgaagatgatctttaaccagacaagtgttgagcactgcaaaacacatacggaaaaacagaaggagtgtaacttcttcctgatagcggtgcggttggcaagtctgaatcaaatccttgacccctgggtgtacttgctgctccgcaagatcctcctgagaaagttttgccagatgcgcaagagaagattgcgagaacagttttggcggcctgcttcttctgggtcaggatgccagcagataagatgtctaatggagtcttgttcactgacacagaccggcgtgcagtggagcgacttccgatctttacagcccagcccacctcctctgaccgccatattcgcgtcatgggtgcaggtaatccttctaccacagcctccaaaatag

SEQ ID NO: 200998 - DNA, 1257 bp, synthetic construct
  misc_feature 1..1257: note = Description of Artificial Sequence: Synthetic coding sequence
  source 1..1257: mol_type = other DNA
atgaaggagacccggggctacggcggcgacgcccccttctgcacccgcctgaatcacagttacactggaatgtgggcacctgagcggtcagcagaggctaggggtaatctgacacggcccccaggctctggggaggattgcggaagtgtctccgtggcattccccatcaccatgcttctgaccggtttcgtagggaatgctctcgctatgttgctagtttctaggtcttatagacggcgggagtccaagcgaaaaaagagtttcttgctctgcatcgggtggctggcactaactgatctcgttgggcaactcctaaccaccccagtggtgattgtagtgtacctatccaagcagcgctgggagcacatagatcccagcggcaggctctgcaccttctttggccttaccatgacagtgtttgggttgtcgagtctttttattgcgagcgctatggcggttgagagagccctggccatccgggctccgcactggtatgcttcccacatgaagactagagcaactcgcgctgtactcctgggagtctggctcgccgtcctagcctttgccctgctgcccgtgctcggcgtcggccagtacaccgtgcagtggcctgggacttggtgctttatcagcaccggccgcggcggcaacgggaccagctcttcacacaactggggcaacttgtttttcgcatctgcgttcgcttttctgggcctgctggcattgactgtcacgttcagttgcaatctggcgacaataaaagccttagtgtcacggtgtcgtgcgaaggcaacagctagccagagcagtgcccaatggggccgcatcacgactgagacggccatccaactgatggggatcatgtgtgtgttgtccgtgtgctggagtcctcttctgatcatgatgctgaagatgattttcaaccagacttcagtggaacactgcaagacacacaccgagaaacaaaaggaatgcaactttttccttattgcggtgcggctggcctcactgaaccagatccttgatccctgggtgtatctgttgctgcgcaaaattcttttaaggaagttttgccaaatgcggaagcgaagacttcgcgagcagttaatttgctctcttcagaattcacaaattcagcgagcaaccgctcattgtggccaggtgcagacatacagggtactgaatcgagaggagatggaagttctagtctctagcattaatgtctatacccgcatcagtacagtgaagaccgagtag

SEQ ID NO: 200999 - DNA, 1209 bp, synthetic construct
  misc_feature 1..1209: note = Description of Artificial Sequence: Synthetic coding sequence
  source 1..1209: mol_type = other DNA
atgaaggagacccggggctacggcggcgacgcccccttctgcacccgcctgaatcattcatacacagggatgtgggccccggagcggtccgccgaagcaagaggcaacctgaccagaccccccggctccggagaggactgcgggagtgttagcgtggcatttcctattaccatgttgcttaccggttttgttgggaacgccctcgccatgctgctggtgtcacgcagctataggcgtcgggaaagcaagcggaaaaagtcattcttgctgtgcatcggctggttggcactcactgatctcgttggccaattgctcactacaccggttgtcattgtcgtctacctgagcaagcagcgctgggagcacatcgatccttcaggcaggctttgcacattcttcgggctcaccatgaccgtcttcgggctatccagtctgttcatcgcctccgccatggcagtagagcgggcacttgccattcgtgcgcctcactggtatgcttcccatatgaagacaagggccacccgtgccgtattgctcggggtctggttagctgtccttgcgtttgccttgctccctgtgttaggcgtcggacagtacaccgtgcaatggcctggcacgtggtgtttcatctcaacaggccgtggcggcaacggcacctccagcagtcataattgggggaacctgttctttgcgtcagcctttgctttcctggggctgttagcccttacggtgacattttcatgcaatctcgctacgattaaagcgctggtgtccagatgccgtgcgaaagcgactgcctcacagtccagtgcacagtggggacggatcacgaccgagaccgctattcagctgatgggcatcatgtgcgtcctgtctgtttgctggtcacctttgttgattatgatgcttaagatgattttcaatcagacgtctgtggaacactgcaagactcatacagagaagcaaaaggagtgcaatttcttcttgattgcggttaggctggcatcactgaaccagatcctggacccctgggtttatttattactgcgcaagatactgctgcgcaaattttgccagatgagaaaacgccggctcagggagcaggagatgggacctgacggacgctgcttttgccatgcctggcgccaagtcccccgcacttggtgtagctcacacgaccgagagccttgctctgtgcaactctcttag

SEQ ID NO: 201000 - DNA, 1167 bp, synthetic construct
  misc_feature 1..1167: note = Description of Artificial Sequence: Synthetic coding sequence
  source 1..1167: mol_type = other DNA
atgaaggagacccggggctacggcggcgacgcccccttctgcaccagactgaaccatagttatactggtatgtgggcccctgagcgctcagccgaggcccggggtaacctgacccgaccccctggtagcggtgaagactgcggttctgtatcagtggcctttcctatcactatgctgctcacgggattcgtgggaaatgctctggctatgctcctcgtcagtaggtcttacaggcggcgcgagtctaaaaggaagaagtcattcctactgtgcatcggctggctcgcactgaccgatcttgtcggccagctgctcactactcccgtagtaatcgtggtgtacttatccaagcaaaggtgggagcatattgaccccagcgggcggctctgtacattttttggactaactatgacagtgttcggcctatcctctctgtttattgccagtgctatggccgtggagcgagctttggccatcagagcgccacactggtatgcctctcatatgaaaactagggccactcgggctgtccttcttggggtctggctggctgtgctggccttcgcgctcctccccgtgttaggagtaggccagtatactgtgcagtggcccggtacctggtgctttatcagcactggaaggggcggcaatggtacctccagctctcacaattggggaaatttatttttcgcaagcgcattcgctttcctggggctcctcgcactaaccgtgactttcagctgcaatctggcgaccatcaaagcgttggtctctaggtgtagggctaaggctaccgctagccaaagtagcgcacagtggggtcgaattacaacggagaccgcaatccagctaatggggatcatgtgcgtactgtccgtctgttggagtcctctgctgatcatgatgttaaagatgatatttaatcagacatcagtggagcattgcaaaacccacacagagaagcagaaagaatgcaatttctttcttattgccgtcagactggcttccttaaatcagatcttggatccttgggtctatctgctgctgcggaagatcctgctccggaagttctgtcaagtggctaatgctgtcagtagttgctccaatgacgggcagaaaggacaacccatctccctgagtaacgaaatcatccagaccgaagcatag

SEQ ID NO: 201001 - DNA, 1173 bp, synthetic construct
  misc_feature 1..1173: note = Description of Artificial Sequence: Synthetic coding sequence
  source 1..1173: mol_type = other DNA
atgaaggagacccggggctacggcggcgacgcccccttctgcaccagactgaatcactcatacacaggcatgtgggcccccgagaggtccgctgaggcacgaggtaacctgacaaggccaccgggcagcggcgaagattgtggctcggtttctgtggcgtttccaatcacaatgctcttaaccggcttcgtcggtaacgccctggccatgctgctggtgtccagaagctaccggcggcgggagtccaagcgtaaaaaatcttttcttctctgtataggatggctagccttgaccgatctcgttggacagctgctgacaacccctgtggtgattgtagtttacctgagtaagcaacgttgggaacacattgatccgagcggaaggctgtgtacttttttcgggcttactatgacagtttttggcctcagttccctgttcattgcttccgctatggctgtggagagagccttagctatacgcgctcctcactggtatgccagtcatatgaagacacgggccacacgtgccgtcctcctgggggtgtggctggcggtcttagcatttgcgctgctccctgttctgggagtgggacagtacaccgtgcaatggccaggcacctggtgctttatttccacaggcagaggtggaaacggcacctcgtcttcccacaactgggggaatctgttcttcgcaagcgcgtttgcctttctgggactacttgcgcttaccgtaactttctcatgcaatctagcgaccattaaggctcttgtgagccgctgtcgcgctaaagctacagcgtctcagagcagtgcccagtggggacggataactacagagactgcaattcagctgatggggatcatgtgtgtcctctccgtgtgttggtctccactgctgattatgatgctaaagatgatctttaaccagacatctgttgaacattgcaaaacccatactgagaaacagaaggaatgcaacttttttctgattgccgtgcgtctggctagccttaaccagatcctggacccatgggtttacttgcttctgcgaaagatattgctgaggaaattttgccaaatccgctaccacacgaacaactatgcctcttcctctactagcttgccgtgccagtgttccagcaccctgatgtggtccgatcacctggaacggtag

SEQ ID NO: 201002 - DNA, 1098 bp, synthetic construct
  misc_feature 1..1098: note = Description of Artificial Sequence: Synthetic coding sequence
  source 1..1098: mol_type = other DNA
atgaaggagacccggggctacggcggcgacgcccccttctgcacccggttaaaccattcgtatacaggtatgtgggctccggagcgctctgcagaggcgcgcggcaacctgacaaggccccccggctccggcgaggactgtggctccgttagcgtggcgtttccaattaccatgctgttgactggtttcgtggggaatgctttagcaatgctgctggtaagcagaagttacaggaggcgcgagtccaagcgcaagaaatccttcctgctctgtatcgggtggcttgccctgactgatttagtcggccagttactcactactccggtggtcattgtcgtgtacctgtccaagcagagatgggagcacatcgatccaagcggtcggctgtgtaccttcttcggcctcacaatgacagtgttcggactgtcatccctcttcattgcgagtgccatggcagtggaaagagcgctggctatcagagcccctcactggtacgctagccacatgaaaacaagggcaacaagggccgtcctcctgggggtgtggttggcggtgctggcgttcgccttgcttcccgttcttggcgtcggccaatataccgttcagtggcccggcacctggtgctttatctccacagggcgcggtgggaatggtacttctagtagtcacaattggggcaatctctttttcgctagtgcctttgcctttttaggcctcctcgccctgaccgtgacctttagttgcaacctagccacaatcaaggctttagtgtcccgatgtcgggccaaggccaccgcgtcccaatcctcagcccagtggggacgcataactacagaaacagcaatccagctcatggggattatgtgtgtgctgtccgtctgctggagccccttactgatcatgatgctgaaaatgatcttcaaccagacgagcgttgagcattgcaagacccacacagagaaacagaaggagtgcaattttttcctgatcgctgtcagactggcatcgcttaaccaaatattagatccttgggtttatcttttactgaggaagatcctgttacgtaagttctgtcaagaggagttttggggaaactag

SEQ ID NO: 201003 - DNA, 1365 bp, synthetic construct
  misc_feature 1..1365: note = Description of Artificial Sequence: Synthetic coding sequence
  source 1..1365: mol_type = other DNA
atgaaggagacccggggctacggcggcgacgcccccttctgcacccgtctgaatcactcctacaccgggatgtgggccccagagagatcggccgaggcaagaggtaacctgacccgccctccaggctctggagaagattgcgggtctgtgtcggtcgctttccctattacgatgctgctgaccggattcgtaggtaatgcactggcaatgctcctggtctcgagatcatacagacgaagagaatcaaaacgcaaaaagtcctttcttctgtgcattggctggctggcgctgaccgacctggtggggcagcttctcacaactcctgtggtgattgtggtgtacctgtccaagcagcgttgggagcacatcgaccctagtggaagactatgcactttctttgggctgactatgaccgtatttgggctgtcctccctgttcatcgcaagtgcaatggcggtggagagggctctggcgatcagagcccctcattggtacgcctcgcatatgaaaacaagagccactcgtgccgtgctgcttggggtgtggcttgccgttcttgcctttgccttgttgcccgtcttgggcgtcggacagtacacagttcagtggccaggcacctggtgtttcatttcaacgggccgcggcgggaatggaaccagcagcagccacaattggggaaacctgttctttgcgtccgcttttgcctttctcggattgctggccttgactgttaccttttcatgcaaccttgccaccattaaggccctcgtcagcagatgtcgggcaaaggccaccgcttctcagagttctgcccagtggggcagaataacaacagaaacagcaatccagctcatggggattatgtgcgtgctgtcagtgtgctggagccccttgttgataatgatgctgaaaatgatattcaaccagacatccgtcgagcattgtaagacgcacaccgagaagcagaaggaatgcaactttttcctgatcgcagttaggctagcttctttaaatcaaatcctggacccctgggtgtacttgctgcttcgtaaaatactgctacggaaattctgtcaggttgccaacgcggtgtctagttgctcaaatgacggacagaaggggcagccaatttccctgagcaacgagatcatccagactgaagcaatgcgcaagcgacgacttagagagcaggcccctttgctgccaacaagcaccgttatcgatccatctcggttttgcgcacagcctttcagatggtttctggatctgagttttccagcgatgtcaagttcccaccctcagctgccactgaccctcgctagctttaaattactgcgagaaccgtgctccgttcagttgtcctag

SEQ ID NO: 201004 - DNA, 1173 bp, synthetic construct
  misc_feature 1..1173: note = Description of Artificial Sequence: Synthetic coding sequence
  source 1..1173: mol_type = other DNA
atgaaggagacccggggctacggcggcgacgcccccttctgcaccaggttgaatcattcctacaccgggatgtgggctcccgagcgctcagccgaagccagggggaatctgaccaggcccccgggttcgggagaggactgtggaagcgtttccgtggcctttcccatcaccatgcttctgactggatttgtgggtaacgctcttgctatgctcctggtaagccgcagctatcgccggcgtgagtccaagcggaaaaagtcctttctgttgtgcataggatggttggctctcaccgatctagtggggcagctgctaaccacccccgtggtgatcgtggtatacctgtctaaacagcggtgggaacacattgacccatccggccgtctgtgcacattctttggtctcacgatgaccgtgttcggtctcagctcattatttatcgccagtgcaatggctgtggaacgagcactggccatccgtgccccacactggtatgccagccatatgaaaactcgtgcaactagagccgtgttgctgggcgtgtggctggctgtcctagctttcgccctgctaccggtgctcggggtcggacagtacactgttcaatggccaggcacgtggtgtttcatttctaccgggaggggtggtaatggcaccagctcatcacacaattggggaaacctcttctttgctagcgcctttgcgtttctggggctcctagcactcactgtaaccttcagctgcaatttggctaccattaaagccctcgtgtcgaggtgccgggccaaggccacggctagtcagtcgtcagcccagtgggggcggattacgacagagacggctatccagcttatgggtatcatgtgcgtgctgtccgtgtgctggtcccctctcctgataatgatgctgaagatgatatttaaccagactagtgtggaacattgtaaaactcacaccgaaaagcagaaagaatgtaactttttccttatcgcggtgcggctggcctccctgaatcagatcctggatccctgggtctacctgttactgcgaaaaatactgcttcgcaagttttgccagatccggtaccacactaataactacgcctctagcagcacttcattgccgtgtcagtgctcatctacgcttatgtggtccgaccatctagaaaggtag

SEQ ID NO: 201005 - DNA, 1125 bp, synthetic construct
  misc_feature 1..1125: note = Description of Artificial Sequence: Synthetic coding sequence
  source 1..1125: mol_type = other DNA
atgaaggagacccggggctacggcggcgacgcccccttctgcacccgcctcaaccacagctataccggcatgtgggcacctgaaagatcagccgaagcgcgcggcaatttgacaagaccacctggctccggagaggattgtggatccgttagcgtcgcctttcctattaccatgctgctgaccggtttcgtaggcaacgctcttgccatgctgctcgtgtcccgatcatataggcgccgcgagagcaagcggaagaaatcgttcctcctttgtattgggtggcttgctttgacggacctggtggggcagctgctcacaacaccggtggtgatcgtggtctacttgtcaaagcagcggtgggagcacattgatccatccggccgcctgtgcactttcttcgggctgacaatgacagtgttcggtctgtcaagcctctttatcgcatccgccatggccgtcgagcgtgcactcgcaattcgggcccctcactggtacgcttctcacatgaaaaccagagccactagagccgtccttctgggcgtatggctggcagttctcgcatttgccctgctgccagtgttgggggtaggccagtacactgtgcagtggccgggaacatggtgcttcatcagcactgggagaggtggtaatggcacaagctcttcacacaactgggggaacctgttctttgcaagtgcattcgcattcctggggcttctggccctcacagtgacattctcatgcaacctcgccactatcaaagctctggtgagccggtgccgagcaaaggctaccgcgagccagtcctccgcacaatggggtcggattacgaccgagactgcaatccagcttatgggcattatgtgcgtgctcagtgtgtgctggagtcccctattaattatgatgcttaaaatgatattcaaccagacttctgtggaacactgcaaaacccacaccgaaaaacagaaagagtgtaactttttcctgatcgccgtcaggctggccagcctgaatcagattctggatccttgggtctacctccttctccgcaagattctactgcgcaaattttgccaaatgcggaaacggcggcttcgcgagcaggaggaattttgggggaattag

SEQ ID NO: 201006 - DNA, 1467 bp, synthetic construct
  misc_feature 1..1467: note = Description of Artificial Sequence: Synthetic coding sequence
  source 1..1467: mol_type = other DNA
atgagcacccccggcgtgaacagcagcgccagcctgagccccgaccgccttaactctccagtcaccatccccgcagttatgttcatctttggcgtagtcgggaatttagtagccatcgtagtgttatgcaagtctcgaaaagaacagaaggagacaaccttctacactctcgtgtgcggtctggccgttactgatcttctgggaaccctactcgtgtctccagtcacaatcgctacatacatgaaggggcagtggccaggaggacagccactgtgtgaatacagcacattcattctgcttttcttttccctgtccggtttgagtatcatctgcgctatgagtgttgagagataccttgctatcaatcacgcctacttctattctcactacgtggacaaaagattagcaggacttaccctattcgccgtctacgcaagtaatgtgctgttttgtgcccttcccaatatgggcctgggcagctctaggctccagtaccctgacacttggtgttttatcgactggaccaccaacgtgaccgcgcacgcagcatattcttacatgtatgctggattctcctcattcttgatcctagctactgtgctgtgcaacgtcctggtgtgcggtgctttgttgcggatgcaccggcagtttatgagacggacatcattgggaaccgagcagcatcatgcagcggccgcagcatcagtcgccagcagaggacatccagccgcgtctcctgctctgcctcggctttcagactttagacgtaggcgctcttttcgcaggatagccggggctgagatccaaatggtgattctcctgatcgcaacttctcttgtggtcctcatatgttccatccccttggttgtcagggtgttcgtgaaccagctgtaccagcccagcctagagcgcgaagtatccaaaaatcctgatctgcaggcaatcaggatagcgtctgtcaaccccatcctggatccatggatttacatcttgctcagaaagaccgtactgagtaaggctatcgagaagatcaaatgcctcttctgccggatcgggggctcccgcagagaaagaagtgggcaacattgcagcgattcccagcggacctcttctgctatgtctggtcattcaaggagctttatatccagagaactgaaagaaatttcctcaacgtctcagaccctcctgcccgatctaagtctgccagacctctctgagaatggactcggcgggaggaatctgttacccggagtgcccggcatgggactagctcaggaagatactacaagtttgcgaacattacggatctctgaaactagcgactctagtcagggacaggactcagaaagtgtcctcctcgtggacgaagcaggtggctcggggcgagctggaccagcccctaagggatcaagtctacaagtcacttttccctcagagactctgaacctgtctgagaagtgcatctag

SEQ ID NO: 201007 - DNA, 459 bp, synthetic construct
  misc_feature 1..459: note = Description of Artificial Sequence: Synthetic coding sequence
  source 1..459: mol_type = other DNA
atgcccgcccacagcctggtgatgagcagccccgccctgcccgccttcctgctctgttcaactctcctcgtcattaaaatgtacgtcgtggctattatcacggggcaagtgaggctgagaaaaaaggcatttgctaatcccgaagatgccttgagacatggaggcccacagtactgcaggtctgaccccgacgtagagcgttgcctgcgcgcgcacaggaatgatatggaaaccatttaccccttcctcttcctgggatttgtatacagttttttgggtcctaatcctttcgttgcctggatgcacttcctcgtgtttctggtgggaagggtcgcgcacaccgtagcttacctgggcaaactgcgagcaccaattagatcagttacatacacactggctcagcttccatgtgctagcatggccctccaaattttatgggaggccgctcgacacctctag

SEQ ID NO: 201008 - DNA, 561 bp, synthetic construct
  misc_feature 1..561: note = Description of Artificial Sequence: Synthetic coding sequence
  source 1..561: mol_type = other DNA
atgaaggccgtgaacgagcagggcaaggaggtgaccgagttcggcaataagtactggctgatgttaaatgagaaagaggctcagcaagtatatgggggaaaggaggctagaaccgaggaaatgaagtggcgacagtgggccgatgactggctggtccatctgattagtcctaatgtgtatcggaccccaacagaggctctggcttctttcgattacatcgtgcgggaaggcaaatttggagccgtggagggcgctgtcgcgaagtatatgggggccgccgccatgtacttgatcagtaaaaggctcaagtctagacatcgcttgcaagacaatgtgagggaggatctgtatgaggctgctgacaagtgggtggctgctgtaggtaaggatcgtcctttcatgggcggacaaaaacctaacctggcagatctagcggtgtacggtgtattgcgtgtgatggaagggcttgacgccttcgatgacttaatgcagcacacccatatccagccatggtatcttcgggtcgagcgggcaattaccgaggctagtcctgcccattag

SEQ ID NO: 201009 - DNA, 1134 bp, synthetic construct
  misc_feature 1..1134: note = Description of Artificial Sequence: Synthetic coding sequence
  source 1..1134: mol_type = other DNA
atggaccccgccgcccgggtggtgcgggccctgtggcccggcggctgcgcacttgcatggcgcctcggggggcgtcctcagcccctgctgcccacacaatcccgagctggatttgccggcgcggccggtggtcccagcccagtcgcagctgcccgaaagggcagcccaagattgctcggagctgctgccctcgctctggggggagccctgggactgtatcatactgctcgatggcatttacgcgcccaggatctgcacgctgagagatcggctgcccaacttagtctatcttcacggctacagctcactctttatcagtacaagacgtgtccattttgctctaaagtgcgtgcatttctcgacttccacgcactcccttaccaggtggtagaagtcaacccagtgcgaagagcagaaatcaagttcagcagctatcgcaaggtgcctatactggtcgcccaggagggcgagtcgtctcagcaattgaatgacagttctgtgatcattagcgccttaaagacctatttggtgtcagggcagcccctggaagagataattacatattacccagcgatgaaggctgtcaatgagcaaggaaaagaagttacagaattcgggaataagtattggttaatgctgaatgagaaagaagcgcagcaggtgtacggcggcaaggaggcacgcacggaggaaatgaagtggcggcagtgggccgacgattggctggtacatctgatatctcccaatgtttataggactcccacagaagctctggcgtcatttgactacatcgtgcgcgaaggaaagttcggtgccgtcgagggtgccgtggctaagtacatgggcgcagctgcaatgtacctgatcagtaaacgcctgaaaagcaggcaccggcttcaggataacgtgcgcgaagatctgtatgaggcggcggataaatgggtggcagcagtcggaaaagaccgtccttttatgggaggacaaaaaccaaatctcgctgacttggctgtctacggtgtcttgagggttatggagggactagatgcgttcgatgacctgatgcagcatactcacatccaaccatggtatcttagagttgagagagccattacagaggcatcccctgcccactag

SEQ ID NO: 201010 - DNA, 894 bp, synthetic construct
  misc_feature 1..894: note = Description of Artificial Sequence: Synthetic coding sequence
  source 1..894: mol_type = other DNA
atgagcatgaacaacagcaagcagctggtgagccccgccgccgccttgctgtcaaataccacctgccagactgaaaatcgcctgtcggtgttcttctctgtaattttcatgactgttgggatactctccaatagtttggctatcgcaattcttatgaaggcctatcaacggttcagacagaaatctaaagctagtttccttctgctcgccagcgggctggtaattaccgatttcttcggccatctgataaatggagccatcgccgtcttcgtgtatgcatcagacaaggaatggattcgctttgaccagtccaatgtcctctgtagtatctttggcatttgtatggttttctcagggctctgtcccctgctcctcgggagtgtcatggcaattgagcgctgcattggagtcactaaaccgatttttcattcgactaaaatcacctccaagcatgttaagatgatgctttccggagtgtgcctgttcgccgtgtttatagcactgctccccatccttgggcaccgcgattataaaatccaggcctctaggacctggtgtttttacaacactgaagacattaaagattgggaggaccgattttatctgttactgttctcctttctgggcttgctggcgttgggggtgagtttactgtgtaacgcaatcacgggcataactttgctcagggtcaagttcaagagccagcagcaccgccagggacgctcccatcacctagaaatggtgatccaattattagcaattatgtgtgtaagttgtatatgctggtcgccctttttaggttatagaatcatcctcaatggcaaggaaaagtacaaggtgtatgaagaacagtctgactttctccaccgtctgcagtggcctacgcttgagtag

SEQ ID NO: 201011 - DNA, 1080 bp, synthetic construct
  misc_feature 1..1080: note = Description of Artificial Sequence: Synthetic coding sequence
  source 1..1080: mol_type = other DNA
atgagcatgaacaacagcaagcagctggtgagccccgccgccgccctcttatccaacaccacctgtcagaccgagaatcggctgagcgtgttcttttctgtgatcttcatgactgtcggaattctcagtaactctcttgcgatcgcgatcctcatgaaggcctaccaacgattcagacagaaatccaaagcctcgtttctgctgctagctagcggcctggtgatcactgatttctttggacatcttattaatggggccatcgctgttttcgtgtacgccagcgacaaagaatggatcaggtttgaccaatcgaacgttctgtgctccattttcggcatctgtatggtcttttctggcctctgccccctattgttaggtagcgtgatggctatcgaaaggtgtatcggggtaacgaagcctattttccacagtaccaaaattacaagcaagcacgtgaaaatgatgctgagtggcgtatgccttttcgcagtctttattgcccttttacccatcctgggccaccgagactacaagatccaggcctcccgcacctggtgcttttataataccgaagatatcaaggactgggaggatagattctatctgttactgttcagcttccttggactccttgccctgggggtgagcctgctgtgtaatgccatcacaggcatcacccttctcagggtgaaatttaaaagtcagcaacaccgccaaggccgatcccaccacctggaaatggtcatccagctgctggccatcatgtgtgtcagctgcatctgctggtcgccatttttagttacaatggcaaatattgggattaatggaaaccattcactggagacctgcgagaccaccctattcgcgttacggatggccacttggaaccagatcctggatccatgggtctacattttgctgaggaaagccgtgctgaaaaacctctacaagctcgctagccagtgttgcggcgtccatgtgatctccctgcacatatgggagttatcttccatcaagaattctttgaaggtggcggccatctccgaatctccggtagcagagaagagcgcctctacctag

SEQ ID NO: 201012 - DNA, 1080 bp, synthetic construct
  misc_feature 1..1080: note = Description of Artificial Sequence: Synthetic coding sequence
  source 1..1080: mol_type = other DNA
atgagcatgaacaacagcaagcagctggtgagccccgccgccgccctactgtctaataccacctgccaaaccgagaacagactgtccgttttcttctcagtcatcttcatgactgtcggtattctgtccaactccctcgccattgccatcttaatgaaggcataccagaggtttcgccagaagtcaaaggcctcatttctgttgctggcctctggactcgtcataaccgacttcttcggccacctaataaatggtgccatcgctgttttcgtgtacgccagcgataaagaatggatcaggttcgatcagtccaacgtgctgtgcagcattttcggcatatgcatggtgtttagcggcctgtgcccactccttcttggcagtgtaatggccatcgaaagatgcataggagttaccaaacctattttccattctacaaaaatcactagcaagcatgtgaaaatgatgctgtctggcgtatgtctgttcgccgtctttatcgccctgctgcccatcctgggacaccgcgactacaaaatccaagccagcaggacatggtgcttctataatacagaggatatcaaggattgggaggatcgcttttatctcttgctgtttagcttcctgggattgcttgcgctgggcgttagccttctctgcaatgccattactggaatcactttactcagggtgaagttcaagtcccaacagcatcggcagggacgaagccaccacctcgaaatggtgattcagttgctggctatcatgtgcgtgtcctgtatctgctggtccccattcctggtgacgatggccaacatcggaattaatgggaatcattcattggaaacttgcgagacgaccttgttcgcactacgtatggctacatggaaccaaatactggatccttgggtctatattctgttacgtaaggcagtgctcaaaaacctgtataaacttgccagtcagtgttgcggggtgcacgtcatctctttacatatttgggagctctctagtataaagaactccttaaaggtggccgcaatttcagagtcccctgtcgcagaaaaatccgcttcaacctag

SEQ ID NO: 201013 - DNA, 2640 bp, synthetic construct
  misc_feature 1..2640: note = Description of Artificial Sequence: Synthetic coding sequence
  source 1..2640: mol_type = other DNA
atgggccggctggccagccggcccctgctgctggccctgctgagcttggctttgtgtcgaggcagggtagtgagagttccaaccgcgacgctggtacgagtggtgggcacagagctagtgatcccgtgcaacgtttccgattatgacggcccctctgagcagaactttgattggagcttctcatccttaggctcttcctttgttgagcttgcgtcgacttgggaagtcggtttccccgctcaactctaccaggagaggctacaacgaggcgaaatcctgctccggcggactgcaaacgatgcagttgagctgcatatcaagaatgtgcagccatctgatcagggccactataagtgtagcacgccttctaccgatgcaactgtccaaggcaattacgaagacaccgtgcaggtgaaggtactggcagactcccttcacgtcgggcccagtgcaagaccacccccatcgctgagcctcagagaaggggaacccttcgagctcagatgtacggcagccagtgcctccccgctgcatacacaccttgctctgctctgggaggttcaccgcggacccgctcgacgctcagtcctggctcttactcacgaggggaggttccacccaggcctgggctatgagcagagatatcattccggggacgtcagactcgacactgtgggcagcgatgcctaccggctgtccgtctcacgcgctttaagtgccgatcagggcagttatcggtgtatcgttagtgagtggattgcagagcaagggaactggcaagagatacaggaaaaggcagtggaagtcgcaaccgtggttatacagccgtccgtcctgcgggctgccgtgcccaagaatgtgagcgtggccgagggtaaagaattggacctgacttgcaacattacgacggacagagccgatgacgtgaggccagaagtgacgtggtcattctctcggatgcccgattccacactccccgggagccgcgtgctcgctagactggatagagattctttagtgcactcctccccccacgtggccctgtcccatgtggacgccaggtcataccatttgctcgttcgggatgtttctaaagaaaactctggctattattattgccatgtgagtctgtgggccccaggccacaacagatcctggcataaggtggccgaggcggtttcttcacctgccggggttggcgtcacctggttggagcctgattatcaggtctatctcaacgcctctaaagtacccggtttcgccgatgaccctacggagcttgcctgcagggttgtagatactaaaagtggagaggccaacgttaggttcaccgtcagttggtattatcggatgaacaggcggagcgataacgtggtcacaagcgagctacttgctgttatggacggcgattggacattaaaatacggggagcgctccaagcagcgcgctcaagacggagacttcatcttttccaaggagcacacagacactttcaattttcgcatccagagaacaacggaggaggatagagggaactactactgcgtggtctcggcatggacgaaacagcggaacaattcttgggtgaagagtaaggacgtgttctccaaacccgtgaacatcttttgggcactcgaggactcagttttagttgtaaaagctcggcagcctaagccctttttcgctgctggcaatacctttgaaatgacctgcaaagtgtcatccaagaatattaaaagcccccggtacagcgtcttgatcatggcagagaagccagtgggcgatctcagctccccaaacgaaactaaatatatcatatcactggatcaggattccgtagtcaagctggaaaattggacagatgcatctagagtcgacggggtagtattagagaaggttcaagaagacgagttccggtatagaatgtatcaaacgcaggtctccgatgcgggactgtaccgctgtatggtaacagcttggagccccgtgaggggtagcctgtggcgcgaggcggcaacatctcttagtaatcctatagaaatcgattttcagacatcgggacccatcttcaacgcctcagtgcattcagataccccctctgtgattcggggagaccttataaaactgttttgcattatcaccgtcgaaggcgccgccctggaccccgacgacatggcctttgatgtttcttggttcgctgttcattcctttggcctggacaaagctccagtcctgctgtcttctctagatagaaagggcatcgtaaccactagccgaagggactggaagtctgacctctctctcgaaagggtttccgtgcttgagtttctgttgcaagtacacggaagcgaggatcaggactttgggaattattactgttcagtcacaccatgggtgaaaagtccaaccggcagctggcagaaggaggccgaaatacacagtaagcccgtgtttattacggtgaaaatggatgtcctgaatgcttttaagtatccactgttaatcggagttggactctctacagtcataggcctgttaagctgtctcattggctactgttcgtcgcattggtgctgtaagaaggaggtgcaagagacaaggcgggagcgtagaaggctgatgtccatggagatggactag

SEQ ID NO: 201014 - DNA, 2217 bp, synthetic construct
  misc_feature 1..2217: note = Description of Artificial Sequence: Synthetic coding sequence
  source 1..2217: mol_type = other DNA
agcggcgccgccggcgccggccggggcggcggcggcgaggccgccggcaaagaggaagagggcgaaccctttgagctacgctgcactgcggccagtgcctcgcccctgcacacacacctcgcactgctatgggaggttcaccggggccctgctaggcgctccgtccttgccctgacccacgagggaaggtttcatccaggcctcggttacgagcaacggtaccattcgggggacgttagactggataccgtgggcagcgatgcttacaggctatccgtctctagggcactgagtgcagatcagggaagctataggtgcatagtatccgaatggattgcagaacaaggaaattggcaggagatccaggaaaaggccgtggaggtggctaccgtggttattcagccaagcgtcctgcgcgcagctgtgccaaaaaatgtgtctgtcgcagagggtaaggaacttgatttgacatgtaacattaccactgaccgtgcagatgacgtaagacccgaggtgacttggagcttcagcagaatgcccgacagcaccctccccgggagccgggtgctggcaaggctcgatcgagattctctcgtgcattcatcacctcacgtcgcattatctcacgtggacgcccggtcatatcacttgcttgtcagagatgtgtccaaggaaaacagcgggtactattactgtcacgtctcattgtgggccccagggcataatagatcctggcataaagttgcagaagctgtatcatcaccagctggagtgggggtaacatggctggaaccggactatcaagtatatctcaacgccagcaaggtgccagggttcgcagacgacccaaccgagctggcatgccgggtcgtagataccaaatctggtgaagctaacgtgcgctttacggtgtcttggtattacaggatgaatcggcggagtgataatgtggttacgagtgagctgctggcggtgatggatggtgactggacactgaagtatggagagagatccaaacaacgcgctcaggatggagattttatattcagtaaggagcacactgataccttcaattttaggatccagaggacgaccgaagaggaccgcgggaactattactgtgtcgtctcagcctggacaaagcaacgcaataactcatgggtcaagtccaaagacgtgtttagcaagcctgtgaatatcttctgggctctggaagacagcgtgctcgtggtgaaggcgcggcagcctaagcctttcttcgccgccggaaacaccttcgaaatgacatgtaaagtctccagcaaaaacattaagtctccgcgttactcagtgttgattatggctgagaagcctgtcggagacctgtctagcccaaatgaaaccaaatacattatcagcctggaccaggactccgtggtgaagcttgaaaactggactgacgcttcacgggtggatggggtcgtgttggaaaaggtgcaggaagatgagtttcgctaccgcatgtaccagacacaggttagcgatgcaggcctttataggtgcatggtgactgcctggagcccagtgcggggctccctgtggcgagaagctgcaacttcgctatccaatccgattgaaatcgatttccagacatccggaccgatatttaatgctagcgtccactccgataccccgtccgtgatcaggggcgacctgatcaaactattctgtatcatcacagttgagggcgccgccctcgacccagacgacatggcattcgacgtatcatggttcgccgtacattcattcggcctggataaggcccctgtgttgctctctagtctcgatagaaaagggattgtgacgacttcacggcgagactggaaatctgatctctcactggaaagggtttcggtcctagaattcctcctgcaggttcatgggtcagaggatcaagatttcggcaactactattgcagtgtgacgccttgggtgaagagcccgacaggatcttggcaaaaagaggcggaaattcactcgaaaccagtattcattactgttaaaatggatgtccttaacgctttcaagtacccactgctgataggggtaggtctgagtaccgtgattggcctgctgagttgcttgatcggttactgcagctcacactggtgttgtaaaaaagaggtgcaggaaacacgaagagaacgacgaaggctcatgtccatggagatggactag

SEQ ID NO: 201015 - DNA, 1161 bp, synthetic construct
  misc_feature 1..1161: note = Description of Artificial Sequence: Synthetic coding sequence
  source 1..1161: mol_type = other DNA
atggccgacagctgccggaacctgacctacgtgcggggcagcgtggggccggccacctccaccctgatgtttgtagcaggcgtcgtagggaatggattagctttgggcatcctgtccgccagaagacccgctagaccttccgctttcgccgtgctggttaccgggctggccgcaaccgatctcctgggtacaagcttcttatccccggcagttttcgtagcttacgcaaggaacagttctctcctaggtctcgcgcgtggaggccctgctctgtgcgacgccttcgctttcgcgatgacctttttcggcctcgcatccatgctgatcctgttcgctatggctgtggagaggtgtctcgcgctgtcacatccttacttgtacgcccagctggacggccctaggtgtgcacgcctcgccttacctgccatctatgctttctgcgtcttattttgcgcgcttcccttgctcggactgggccagcatcagcagtactgtccaggaagttggtgctttctgcggatgcgatgggcccagccgggcggcgccgctttttcactcgcttatgctggtctggtggccctattggttgcggccatattcctatgcaatggatctgtcactctttcactgtgtaggatgtatcggcagcagaagcgccatcagggcagccttggcccacgaccacggacaggggaggatgaggtggaccacttaattctgctggcccttatgacagtggttatggcggtctgtagcctgcccttgacaattcgatgctttacacaggccgtcgccccggacagcagtagtgaaatgggagacttgttggcttttagattttatgcctttaatccaattctcgatccatgggtgtttattctcttcaggaaagctgtttttcaaaggctgaagctatgggtttgttgcctgtgcttgggcccagctcacggggactctcagacgcccctgtcccagctagcctctggaaggcgggacccccgagcaccctctgcgcccgtcggaaaggaaggatcctgtgtgcctctgtcagcctggggcgaaggacaggtagaaccattacctccaacacaacagagctctggtagcgccgtcggaaccagctcaaaggctgaggcctctgtggcttgttccctctgttag

SEQ ID NO: 201016 - DNA, 1503 bp, synthetic construct
  misc_feature 1..1503: note = Description of Artificial Sequence: Synthetic coding sequence
  source 1..1503: mol_type = other DNA
atggcctgggccgccctgctgggcctgctggccgccctgctgctgctcctgctattgtccaggagacggacaagacgacccggggaacctcctcttgacctggggagcataccttggttagggtacgctcttgactttgggaaagatgctgcaagctttctcaccagaatgaaggagaaacatggcgacatttttaccattctcgtgggtggtcggtatgtgacggtactgcttgatccacatagctacgacgccgtagtatgggaaccccgcacccggcttgactttcatgcctatgcaatatttctgatggaacggatcttcgacgtccagcttccccactacagccctagcgatgaaaaggccaggatgaagctgaccctgctgcacagggagctgcaggccctaaccgaagcaatgtacaccaatcttcacgccgtactactgggggatgcaaccgaagccggaagcgggtggcatgagatgggtctgctcgacttttcctatagttttctgcttcgtgctggatatctcacgctgtacggaattgaggcccttcctcggactcatgagagccaggcacaggacagagtgcactccgccgacgtctttcatacgttccgtcaattagaccgactgctcccaaagctggcacgggggagtctgagtgttggtgacaaagatcacatgtgctcagtgaaatcgagactttggaaactgcttagtccagcacgtcttgcaaggcgtgcacacaggagcaaatggttggaatcttacctcctccatttggaggagatgggcgtatccgaagaaatgcaggctagagcactggtcctgcagctctgggctacgcagggaaacatggggcccgccgcattctggttgctgctttttttgttaaagaacccagaagcgctggctgcagtgcgcggagagttagagtctatcttgtggcaggctgagcagcctgtgtcccagactacgactctgccacaaaaggtgcttgacagtacaccagtcctggatagcgtgctgtccgagtctttgcggttgactgcagcaccgtttattacccgcgaagtggtagtggacctggctatgcctatggccgacggcagggaattcaacctacgacgcggggacagactgctgctgttcccctttttgtcaccccagagagaccccgagatctacactgaccctgaagttttcaagtataatcggtttttaaatccggatggaagtgagaaaaaagatttttacaaggacggcaagaggctgaaaaactataacatgccatggggagccggtcataaccactgcttaggcaggtcatatgccgtgaactccatcaagcaatttgtcttcctggtgcttgttcacctcgatctcgagctcataaatgccgatgtggaaattcccgagtttgatctttcacgctatgggtttgggctgatgcaaccagagcatgatgtgccagttaggtacaggattcggccatag

SEQ ID NO: 201017 - DNA, 408 bp, synthetic construct
  misc_feature 1..408: note = Description of Artificial Sequence: Synthetic coding sequence
  source 1..408: mol_type = other DNA
atgcgggccttcctgcggaaccagaagtacgaggacatgcacaacattattcacatactgcagatcaggaaattgcgccaccgcctgagtaacttccctcggctgccaggcatcctggcgcctgaaaccgttttactgccattctgttacaaggttttccgcaaaaaggagaaggtgaagcgcagccagaaggcaacggagttcatcgactatagcattgagcagagccatcatgccatccttacacctctacagacccacttaactatgaagggctcatccatgaagtgttctagcctttctagcgaggccattttgtttacattgacactgcagcttacacagactctgggacttgagtgttgtctcctctatctatctaagaccattcaccctcagatcatctag

SEQ ID NO: 201018 - DNA, 345 bp, synthetic construct
  misc_feature 1..345: note = Description of Artificial Sequence: Synthetic coding sequence
  source 1..345: mol_type = other DNA
atggccggcctggccctgcagcccggcaccgccctgctgtgctactcctgcaaggcgcaggtgagtaacgaggattgcctccaagttgagaactgtacgcagctgggagaacaatgctggacagcacgcatcagagctgtcggcctgctaacggtgatctcaaagggatgcagcctgaactgcgtggacgatagccaggattactacgtaggaaaaaaaaatatcacctgctgcgacaccgatctttgtaatgcctctggggcccacgccctgcagcccgccgccgccatccttgccctgctgcccgcccttggtctcctgctctgggggccaggacagctgtag

SEQ ID NO: 201019 - DNA, 714 bp, synthetic construct
  misc_feature 1..714: note = Description of Artificial Sequence: Synthetic coding sequence
  source 1..714: mol_type = other DNA
atgatggtgatggtggtggtgatcacctgcctgctgagccactacaaactctccgctagaagctttatatcccgccacagtcagggccgtcgtagagaggacgccctcagctcagagggctgtctgtggccatcagagagtacagtgagtggtaatggaatcccagagccccaggtctatgctcctccgagacccactgacagactcgctgttcctcccttcgcccagcgcgagagattccataggttccagcccacctacccctatctccaacacgagattgacttgccaccaacgatcagcctgtcagatggggaagaacctcctccgtaccagggcccgtgcacactgcagcttagagaccccgaacagcagctcgaactcaatcgggagtctgtcagagcaccacctaaccgcacaatattcgactctgacttaatggacagtgctcgcctcggagggccttgtccaccctcgtctaattctggaatcagcgctacttgttacggttccggcggacggatggaggggcctccaccaacgtatagcgaggtaattgggcactatcctggctctagttttcagcaccaacagagtagcggcccccccagcctcctggagggaactcggctgcaccatacccatattgcccccctcgagtctgccgcaatctggtcaaaggagaaggataagcagaaaggccaccccttatag

SEQ ID NO: 201020 - DNA, 864 bp, synthetic construct
  misc_feature 1..864: note = Description of Artificial Sequence: Synthetic coding sequence
  source 1..864: mol_type = other DNA
atgcaccggctgatgggcgtgaacagcaccgccgccgccgccgccggccagcctaacgtctcgtgcacttgcaattgcaagcgcagcctcttccagtcaatggaaatcaccgagttggagtttgtgcagataatcatcattgttgttgttatgatggtgatggtggttgtcattacgtgtttgctgagccactataagctgtccgcaagatctttcatctcaaggcactcccaggggcgccggagggaagatgccctgagctccgaaggctgcctgtggcccagcgagagcactgtgagcgggaatggcatccccgaacctcaggtatacgcgccaccccgcccgactgatcgacttgcggtgcctcccttcgcacagcgcgagcggtttcataggttccaacccacatatccgtaccttcagcacgagattgatctcccacctaccatttccctcagcgatggagaggagccacctccgtaccagggcccctgtacgcttcaactgcgagatcccgagcagcaactcgaactcaatagggagagtgtgagagcccctccaaacaggacgatcttcgactcagaccttatggattccgctcgacttggcggaccatgtccaccctcaagcaatagcggcataagcgctacttgttacggcagcggaggacgaatggaaggcccaccccctacctattcagaagttatcggccactaccccggtagttcatttcagcaccaacaaagtagtggcccaccaagtctactcgagggcacacgactgcaccatacccacatcgcgcctttggaaagcgcagccatttggtccaaagaaaaggataaacagaaaggccacccgctgtag

SEQ ID NO: 201021 - DNA, 759 bp, synthetic construct
  misc_feature 1..759: note = Description of Artificial Sequence: Synthetic coding sequence
  source 1..759: mol_type = other DNA
atggccgagctggagttcgtgcagatcatcatcatcgtggtggtgatgatggtgatggtggttgtgattacatgcctccttagtcactacaagctatccgctcggtccttcatcagccgccacagccaggggcggaggcgggaggatgccctgtcaagtgagggctgcctgtggccctcagaatcaactgtgagcgggaacggcatccccgagccacaggtttacgcgccacctaggccaactgacagactggccgtgcccccctttgctcagagggaaagattccatcgttttcagcctacctacccctacttacagcacgagattgacctaccgccaactatcagtctgagcgatggggaggaaccgcctccttatcagggaccctgtaccttacagttgagggaccccgaacagcagctggaactgaacagggaatccgtgcgagccccacccaatagaaccatcttcgactctgaccttatggactcagccaggctcggaggaccatgtccacccagttcaaacagcggtatctctgctacctgttatggcagcggaggaaggatggaggggccgccacccacatacagtgaagtgatcggccactatcctggcagcagctttcagcatcagcagagtagcggccctccttctctgctggagggtacacgactgcatcacacccatattgccccccttgagtctgcagccatttggagcaaggaaaaggataaacaaaagggacacccgttatag

SEQ ID NO: 201022 - DNA, 714 bp, synthetic construct
  misc_feature 1..714: note = Description of Artificial Sequence: Synthetic coding sequence
  source 1..714: mol_type = other DNA
atgatggtgatggtggtggtgatcacctgcctgctgagccactacaaactgagtgctagaagcttcatttcccgccacagccaagggcgccgcagggaggatgccctgtcctctgaaggctgtttgtggcctagcgaaagtacagtgtcagggaatggaattccagagccacaagtctatgcgcctcctcgacccaccgaccgcctggctgtcccacccttcgcacagcgcgagcggtttcatagattccagcccacgtatccttacctccagcatgagattgatctgcccccgacgatcagcctatccgatggtgaagaaccacccccctatcagggtccttgtactctgcagctgcgggatcccgagcaacagcttgaattgaacagggaatcagttagggccccccccaatcggaccatcttcgatagtgatcttatggatagcgcacggctgggcggaccttgcccaccctcatccaattctgggatctctgctacttgttacggatctggcggccggatggagggcccaccccccacctactccgaggttatcggtcattatcccggctctagcttccaacatcagcagagctccgggcctccctcattgctcgaagggacgcgacttcatcatacacatattgcgcctctggagagtgcagcgatttggtcaaaggagaaagacaagcagaagggacaccccctttag

SEQ ID NO: 201023 - DNA, 714 bp, synthetic construct
  misc_feature 1..714: note = Description of Artificial Sequence: Synthetic coding sequence
  source 1..714: mol_type = other DNA
atgatggtgatggtggtggtgatcacctgcctgctgagccactacaagttgagtgcacgcagcttcatctctcgccattcacagggaagacggagagaagatgctctgtcctccgagggctgtttatggccttcagaaagcactgtgtctggtaacggcattcctgagccgcaggtgtatgcacccccaagacctactgataggctcgctgtgccacctttcgcgcagcgcgagcgctttcacaggtttcagcctacatatccctacctgcagcatgagatcgatcttccccctactatttcactgtctgatggagaagagcccccgccgtaccaggggccatgcacactgcaactgagggatcctgaacagcagttggagttgaatcgtgagtcggtccgagctcctccaaatagaacaattttcgatagcgatctgatggactccgcgaggctgggcggaccctgtcctccttcttcgaattccggcatctcagctacatgctatggctccggggggagaatggaaggcccgccgccaacctactcggaagtcatcggtcactacccaggatcctcttttcagcatcaacagtcgtccggacccccaagcctgctggaggggacccgcctgcatcacacccacattgccccccttgagtccgccgccatctggagtaaagaaaaggacaaacaaaagggccacccactgtag

SEQ ID NO: 201024 - DNA, 684 bp, synthetic construct
  misc_feature 1..684: note = Description of Artificial Sequence: Synthetic coding sequence
  source 1..684: mol_type = other DNA
atgcaccggctgatgggcgtgaacagcaccgccgccgccgccgccggccagcctaatgtgagctgtacatgcaattgtaaacgatccctgtttcagtccatggagattagctgtcatggtttcccagtttgtaagtctcaccaacatcaggaatggaagtccctgtgttggagtctcaggagtccaggcggtgcaagtagtattaccgggttcgggtcaatgaaagtaaccaatcctgccatgaacctcccggaatgtcagtggcttcgcattcagaaagctgaactcgagtttgtccaaataattatcatcgtggtggtgatgatggtaatggtggtcgtgatcacttgcctcctgtctcattataagctgtctgctcgctccttcatcagcagacacagtcagggtagacgacgagaagacgccctcagtagtgaagggtgcctgtggcccagtgagtcaacagtatcgggcaacgggattcccgagcctcaagtgtacgctcccccaaggcctacagatagactggctgtaccccccttcgcacagcgggaacgctttcatcgatttcagcccacttacccgtacctgcagcacgagattgatctgccacctaccattagcttgagtgacggggaagaacctcctccatatcagggtccctgtaccttgcagctgcgatag

SEQ ID NO: 201025 - DNA, 627 bp, synthetic construct
  misc_feature 1..627: note = Description of Artificial Sequence: Synthetic coding sequence
  source 1..627: mol_type = other DNA
atgcccgccatccccgcccacggcgccgagctggagttcgtgcagatcatcatcatagtcgttgtgatgatggtgatggtggtcgtgataacatgcctgctgagtcactataagctgtcagcccgcagcttcatctcgaggcacagtcagggtaggcggagagaggatgccttgtcatccgaaggttgtctatggccttctgagagcactgtcagcgggaatggaatcccggaaccccaagtgtatgcccctccaaggcccacggacaggcttgccgttcctccctttgcccaaagggagcggttccacagatttcagcctacttatccctatttgcagcacgaaattgacctgcctcccacgatctcactgagcgatggggaggagccccccccttatcagggcccctgtactctccaattacgggatcctgaacagcagctcgaacttaatcgcgagtcagtccgcgcccccccgaaccgcaccattttcgacagtgatttgatggattctgcccgcttgggaggtccatgccctccatcttcaaattctggcatctcagccacatgttatgggagtggcggacgaatggagggcccaccccccacctattctgaggtgatttag

SEQ ID NO: 201026 - DNA, 156 bp, synthetic construct
  misc_feature 1..156: note = Description of Artificial Sequence: Synthetic coding sequence
  source 1..156: mol_type = other DNA
atggcccggtaccggtgctgccggagccagagccggagccggtactataggcaaaggcaacgatcaaggcgtaggcggagaaggagctgtcaaacccgcagacgcgctatgaggtgctgccgccctagataccgaccccggtgtcgcaggcattag

SEQ ID NO: 201027 - DNA, 309 bp, synthetic construct
  misc_feature 1..309: note = Description of Artificial Sequence: Synthetic coding sequence
  source 1..309: mol_type = other DNA
atggtgcggtaccgggtgcggagcctgagcgagcggagccacgaggtataccgacagcagcttcatgggcaggaacagggccaccacgggcaggaggagcaagggctgagccctgaacacgtggaagtgtacgaacggactcacgggcaatctcattatcggcgtaggcattgctctagaaggaggctgcaccgtattcatcgacgccagcaccgctcctgcaggcgtcggaaaaggcgcagctgtcggcatagaaggagacacagacggggatgccggactaggaaacgcacatgccggcgccattag

SEQ ID NO: 201028 - DNA, 423 bp, synthetic construct
  misc_feature 1..423: note = Description of Artificial Sequence: Synthetic coding sequence
  source 1..423: mol_type = other DNA
atggtgcggtaccgggtgcggagcctgagcgagcggagccacgaggtctaccggcagcagctccacgggcaggagcaagggcatcatggccaggaggagcagggcctgagccctgaacacgtggaggtgtatgaaagaacccatggccagtcccattaccggcgccgccattgttcccggaggcgtttacatcgtattcatcggcgccaacaccggtcgtgtcgtcgaagaaagaggcggtcctgccggcaccgccgccgtcaccggcgggaatccctcggagatccgcttaatcagaattttctgagccagaaagccgctgagcctggacgcgagcatgctgaaggaaccaaattgcccgggcctcttacccccagctggaaactaagaaagagcaggcctaaacatcaggttcgaccgtag

SEQ ID NO: 201029 - DNA, 657 bp, synthetic construct
  misc_feature 1..657: note = Description of Artificial Sequence: Synthetic coding sequence
  source 1..657: mol_type = other DNA
tgactggccctgctgctggcccgggccggcctgcggaagcccgagtcacaggaggctgcaccattgtctggaccatgtgggaggagggtgattacctcaaggatcgtaggtggagaggatgcggagttaggacgctggccatggcagggctctctccggttgtgggattcccacgtttgcggagtcagcctactgagtcatagatgggccttaactgccgcgcactgtttcgagactgatctttcagacccttccggttggatggtgcaattcggacagctgacctctatgccttccttttggtctttgcaggcctactacacacggtacttcgtatccaacatttacttgtcaccacgctatctagggaactcaccctacgacatcgctctggtgaaactctcggctcccgtaacatatactaagcatatccagccaatctgcttacaagcatctacattcgagtttgagaaccggacagattgttgggtgaccgggtggggctacatcaaggaagacgaaggcagctccggacgccatcacaagcagctttatgtacaaccacccctgccccaagtgcagtttcctcaaggccatttgtggcggcacggactttgctggcagtgccctcgtcgggaagggtgtttgctgcgatag

SEQ ID NO: 201030 - DNA, 744 bp, synthetic construct
  misc_feature 1..744: note = Description of Artificial Sequence: Synthetic coding sequence
  source 1..744: mol_type = other DNA
atgaaccccctgctgatcctgaccttcgtggccgccgccctggccgctccattcgacgacgacgacaagatagttggcggctataattgtgaagaaaactccgtgccttaccaggtttcattgaactcgggctaccatttctgcgggggtagcctgatcaacgagcagtgggtggtgagcgctggtcattgctataaaagcagaatccaggtgcgcctcggcgaacacaatatcgaggttctggagggaaatgagcagtttatcaatgctgctaaaattataaggcacccacaatacgaccgtaaaacactgaacaatgatatcatgctgatcaaactgtcgtcacgggccgtgatcaatgctagagtttccacaatctccctgcccaccgctccccccgcaaccgggacaaaatgcctgatttccggttggggtaatacagctagctctggcgcagattatccggacgagctacagtgtctggacgcccccgtgctgtctcaggcaaaatgcgaagcctcgtacccgggaaagatcaccagtaacatgttttgtgtaggcttcctagaggggggaaaggacagctgtcagggcgattcaggaggacctgtagtgtgcaatggacagcttcagggcgttgtgtcttggggggacgggtgcgctcagaagaacaaacctggcgtatatacgaaggtctataattatgtgaagtggattaagaatactattgccgctaattcttag

SEQ ID NO: 201031 - DNA, 714 bp, synthetic construct
  misc_feature 1..714: note = Description of Artificial Sequence: Synthetic coding sequence
  source 1..714: mol_type = other DNA
atgaaccccctgctgatcctgaccttcgtggccgccgccctggccgcaccatttgatgatgatgataagatcgtaggcgggtacaactgcgaggagaattccgtaccataccaggtgagcctgaattctggctatcatttttgtggtgggtccttgatcaacgaacagtgggttgtcagcgccgggcactgctacaaatctagaattcaggtgcgtttaggcgagcacaacattaatgcggcaaagatcattagacaccctcaatacgacaggaagaccctgaataatgacatcatgctgataaagctgtctagcagagcagttattaacgctcgggtgagcactatctcccttcccaccgctccacctgccactggaacaaaatgcttaatcagcggctggggaaatactgccagctccggggccgactatccggatgagttacagtgtctcgacgctcccgttctcagccaggccaagtgtgaagcatcctaccctggaaagattaccagtaacatgttctgtgtcggcttcttggagggaggtaaagattcctgtcagggggactctggtggcccagttgtatgcaatggacagctgcagggtgttgtgagctggggtgacggatgtgcccagaagaacaaaccaggggtttatactaaggtgtacaattatgttaaatggattaagaacaccatcgccgccaattcatag

SEQ ID NO: 201032 - DNA, 2628 bp, synthetic construct
  misc_feature 1..2628: note = Description of Artificial Sequence: Synthetic coding sequence
  source 1..2628: mol_type = other DNA
atgaccctggcccggttcgtgctggccctgatgctgggcgccctgcctgaagtggtggggttcgacagtgtcctgaacgacagtttgcatcattctcatagacactccccccctgctggccctcattatccttactatttaccaactcagcagcgccctccgcgaacccggccgccccctccactacccagattccctcggccaccccgtgccctgccagcccagaggccgcacgcgcttcaagccggacacactccccgcccgcacccatggggatgccccgctggtgagccatgggtatctgtcacagacttcggagcaccctgcttgcgatgggctgaggtgcctccattcctcgagcggtctccccccgcctcctgggcgcagttgaggggacagaggcataacttttgcaggagcccagacggtgccggacggccttggtgtttctatggcgatgcccgaggaaaagtcgactgggggtattgtgattgtagacatggctccgtacggttgcggggtggaaagaacgagtttgaaggcacagtagaggtctacgcaagcggagtgtggggtaccgtctgttcctctcactgggatgacagcgacgcctcagtgatctgccaccaactgcagctgggggggaagggcatagcaaaacagacaccattttcaggcttggggctgatccccatttactggagcaatgtgcggtgcagaggggatgaggagaatattctcctgtgtgagaaggacatctggcaggggggcgtttgccctcagaagatggccgctgcagttacctgtagcttcagccacgggcccacttttccgataatcaggctggctggaggctcctcagtccacgaaggcagggttgaactgtaccacgctggacaatggggcaccgtgtgcgatgatcagtgggacgacgctgacgcagaagttatctgccgtcagctgggactgtctgggatcgccaaagcatggcatcaggcatactttggggaggggagcgggcccgtgatgctggatgaggttaggtgcacaggaaacgagctgtcaatcgagcagtgtcccaagagcagttggggagaacataactgcgggcataaagaggatgctggagtcagttgtaccccccttaccgatggagtaatcagactcgctggtggaaaaggatctcacgaagggcgcttggaggtttactacagaggccaatgggggactgtgtgtgacgacgggtggacggaactcaatacttatgtggtgtgccgccagttgggcttcaagtacgggaagcaagcctcggccaaccacttcgaggaatccactggccccatttggcttgacgacgtgtcctgctccggcaaagaaacccgcttccttcagtgttcacggcgacaatggggaaggcatgattgtagtcaccgcgaggatgtttcaatcgcttgttacccgggcggagagggtcataggctcagcttagggtttcccgtgcgtctaatggatggggaaaataaaaaagaaggccgcgtggaggtgtttattaacggccagtggggcacaatctgcgacgacgggtggactgacaaagacgcagccgtgatttgcaggcagctcggttacaaaggcccggcccgagcccgaacaatggcgtacttcggcgaagggaaaggacccatacatgtggacaatgtgaaatgtacaggaaacgaaaggagccttgccgactgtatcaagcaggatatcggcaggcataactgtcgccatagtgaagatgccggagtgatctgtgattacttcggcaagaaggcgtctgggaattccaataaagagagcctttccagcgtttgtggcctcaggttgctgcaccggcgacaaaagcgtatcatcggtggcaaaaattccttacgggggggttggccttggcaagtgtccttgaggctgaagtcatcccatggcgacggaaggctgctatgtggcgcaacactgctgtccagctgttgggtgctgacagccgcccactgctttaagagatatggaaacagtactcgttcatatgccgtgcgcgtcggtgattatcatacgctcgtgcctgaggagttcgaggaggaaattggggtgcagcagattgtcatacaccgcgagtaccggcctgaccggtctgattacgatatcgcccttgtgagacttcagggccctgaggagcagtgcgccagattttcatctcacgttttgcctgcctgtctgccattgtggagggagcgtccacagaaaacagctagcaattgttatattacagggtggggggacacaggacgtgcctacagtcgcacattgcagcaggctgccatcccgttactgcccaaaagattttgcgaggagcgctacaagggccggttcaccggtaggatgttatgtgccggaaacctgcatgagcacaagcgggtggacagttgccagggagattcggggggtcccctaatgtgcgaacgccccggggaaagttgggtggtgtacggtgtcacatcctgggggtacggctgtggagtaaaagattccccaggtgtgtatacaaaggtaagtgcatttgtgccctggatcaaatccgtgactaaactctag

SEQ ID NO: 201033 - DNA, 489 bp, synthetic construct
  misc_feature 1..489: note = Description of Artificial Sequence: Synthetic coding sequence
  source 1..489: mol_type = other DNA
atgaagggcttcaccgccaccctgttcctgtggaccctgatcttcccttcttgcagtggcggcggcgggggaaaggcctggcccacccacgtggtctgcagcgatagcggactggaagtgctgtaccagagctgcgatcctttacaggacttcggtttttccgttgaaaagtgtagtaagcagctgaagtctaacatcaatatccggttcggtatcatcctgagggaggacattaaggaactgtttcttgacctggctctcatgagccagggcagtagcgtgttgaacttttcctatccaatttgcgaagctgcattgcctaaatttagtttctgcggaaggcgcaagggagaacaaatctactacgctggaccagtaaataaccccgaatttacaatcccccagggagaataccaggtgttgttggaactgtatactgaaaagagatccactgtcgcgtgcgccaatgccactatcatgtgcagttag

SEQ ID NO: 201034 - DNA, 822 bp, synthetic construct
  misc_feature 1..822: note = Description of Artificial Sequence: Synthetic coding sequence
  source 1..822: mol_type = other DNA
atggccgtgtggctggcccagtggctgggccccctgctgctggtgagtctgtggggactgcttgcgcccgctagtctactgagacgactgggggagcacattcaacagtttcaggaatccagtgcccagggcttaggattgagcttgggccccggggctgctgccctaccaaaagtggggtggttggaacagcttctggatcctttcaatgtgtctgatagaaggtcgttcttacagaggtattgggtaaacgatcagcattgggtgggacaggatggtcctatcttcctccatctgggcggcgaagggtccttggggcccggatccgtcatgcgcgggcatccggctgcgcttgcacccgcctggggtgctctggtcatctctctggaacaccgcttctatgggctcagcatccccgctgggggtctcgaaatggctcaactgaggttcctcagtagtaggctggccttggcagacgtggtgtcggcccggctggcactgtcacgtttatttaacatcagtagttcctccccctggatctgcttcggcggctcctatgcaggctcactcgctgcatgggcccgcctcaagttccctcatctcatctttgcctccgtagccagttctgcccctgtccgtgccgtgctggattttagtgaatataacgatatagtgcttcattcattgggccagaagtgtctcagttttagccgagctgaaacggtcgcccagttgaggtccaccgagccccagttatccggggtgggcgatcgccagtggctctatcagacttgtacagaattcggattttacatcacctag

SEQ ID NO: 201035 - DNA, 501 bp, synthetic construct
  misc_feature 1..501: note = Description of Artificial Sequence: Synthetic coding sequence
  source 1..501: mol_type = other DNA
atggccgtgtggctggcccagtggctgggccccctgctgctggtgagtctgtggggtctgctggctcctgctagcttgttaaggaggctaggcgaacacatccagcagttccaggaaagttcggcccaggggctcggactatccttagggcccggcgctgctgccttgccaaaggttggatggctggagcagctccttgacccctttaatgtctcagatagacgatcttttctgcagaggtactgggtaaatgaccagcactgggtgggccaagacggccccatttttctgcacttgggcggcgagggaagcctgggacctggatcagtgatgcgaggacatcctgcagcactggcacccgcttggggggcgttggtgattagtttagagcatagattttacggcttgtccattcctgcagggggactcgagatggcccagttgcgcttcttgtcaagtcgactggcgctctcctgtaccgcctgggcaaggtcggtgtag

SEQ ID NO: 201036 - DNA, 498 bp, synthetic construct
  misc_feature 1..498: note = Description of Artificial Sequence: Synthetic coding sequence
  source 1..498: mol_type = other DNA
tgagtgatgcggggccaccccgccgccctggcccccgcctggggcgccctggtgatatccttagagcatcggttctacggccttagtattccggcaggcgggcttgaaatggctcagttaagatttctgtccagccgcttggcgctggcagatgtagtgtccgccaggctggccctgagtagacttttcaacatctcaagcagttccccatggatttgtttcggaggttcctatgcagggtccttggctgcatgggccagactcaagttccctcacctgatttttgcctctgtagcttcgagcgctcccgtgagagcagttttggattttagcgagtataacgacattgtgcttcactccttgggtcaaaagtgcctgagtttttcccgagccgaaacagttgcccagctgcgctccaccgaacctcagctctctggggtaggagatcgccaatggctgtaccagacctgcaccgagttcggattttacgtcacctag

SEQ ID NO: 201037 - DNA, 945 bp, synthetic construct
  misc_feature 1..945: note = Description of Artificial Sequence: Synthetic coding sequence
  source 1..945: mol_type = other DNA
atgggcgcccggggcgccctgctgctggccctgctgctggcccgggcaggcctgcggaagcccgaaagccaggaggcggcaccattgagtggcccttgcggccgcagagtcatcaccagtagaattgtggggggcgaagacgccgaactggggcggtggccctggcagggttctttgaggctgtgggactctcatgtgtgtggagtgagcctgttgagtcaccggtgggctttaacagcggctcattgtttcgagacgtatagcgacctgtcagaccccagtggttggatggttcagtttggccagctgacatctatgccctccttttggagcttgcaggcatattatacacggtacttcgtgtcgaacatttatctcagtcccaggtatttgggaaactccccttatgacatcgccctggtcaagctcagcgcgcctgtgacatataccaaacatattcagcccatctgtctccaagctagcacctttgagtttgaaaaccgtacggattgttgggtgactggctgggggtacatcaaagaggacgaagccctgccctccccccacacgcttcaagaagtccaagtggcaattattaacaactccatgtgcaaccatctgttcttgaagtattccttcaggaaggatattttcggcgatatggtgtgcgctgggaatgcccaggggggcaaggacgcatgctttggggactccggcggtcctctggcctgcaataagaatggactgtggtatcagataggagtcgtttcctggggcgtggggtgcggccggccgaatcgccccggcgtctatactaacataagccatcacttcgaatggatccaaaagcttatggcacagtcagggatgtctcagcctgacccctcctggccacttctctttttccccctgttatgggcactccctctattggggcctgtgtag

SEQ ID NO: 201038 - DNA, 903 bp, synthetic construct
  misc_feature 1..903: note = Description of Artificial Sequence: Synthetic coding sequence
  source 1..903: mol_type = other DNA
atgggcgcccggggcgccctgctgctggccctgctgctggcccgggctgggctccgaaagcctgaatcacaagaggctgcgccattatctggtccttgtggtcgtcgggtcattacttcacggatcgttggaggggaggatgccgaattaggtcggtggccttggcaaggcagccttcgtctgtgggacagtcatgtttgcggcgtcagtcttctgtcccatcgctgggcacttaccgccgcacattgtttcgagacctactctgacttgtctgacccctctgggtggatggtacagttcggacaacttacaagtatgccatcattttggtccttgcaggcctattatacccgctactttgtcagtaatatctatctgtcgccccggtatctgggcaactccccttacgacattgccttagtgaaactaagtgctcctgtaacctacaccaagcatatccagcctatatgcctgcaggcatccacattcgagtttgaaaatcgcacagattgctgggttactgggtgggggtatatcaaagaagacgaagcactcccctccccccacactctacaggaagtgcaggtggcgattattaataattccatgtgcaaccacctctttctgaagtattcctttcgaaaggacatttttggtgacatgggagactcgggcggaccactcgcttgcaacaaaaacggcttgtggtaccaaatcggtgttgtgtcatggggcgttggatgtggccgacctaacagaccaggagtgtatacaaacatttcacaccatttcgagtggattcagaaactgatggctcagagcggcatgagtcaacccgatccttcctggccactgcttttttttccattgctgtgggccctacctctgttaggtcctgtgtag

SEQ ID NO: 201039 - DNA, 939 bp, synthetic construct
  misc_feature 1..939: note = Description of Artificial Sequence: Synthetic coding sequence
  source 1..939: mol_type = other DNA
atgggcgcccggggcgccctgctgctggccctgctgctggcccgggcaggcttgcggaaacctgagtcccaagaagcagcccctttaagcgggccctgcggtcggcgagtcattacaagtcgtatcgtgggtggcgaagacgcggagctaggtcggtggccttggcaggggagcttgcggctctgggacagtcacgtctgcggcgtatccctcctttcccaccgctgggccctgactgctgctcactgcttcgagactgacctgagcgatccctcagggtggatggtgcagtttgggcagcttacttctatgcccagtttctggagcctccaggcgtattacacacggtactttgtcagcaatatatacttatccccaaggtacctcggcaattcaccttacgatatcgctttggttaaactatccgcacctgtcacctacaccaagcacatacagcccatctgtctgcaggcaagtacgtttgagtttgaaaataggaccgattgctgggtgacaggctggggttatataaaggaagacgaagcattacccagccctcatactctgcaggaggtccaggtagcaataattaacaatagcatgtgcaaccatttatttctgaaatactcatttcgtaaagacatcttcggcgacatggtttgcgctggaaatgctcagggcggcaaagatgcctgttttggagactccggcggccctctggcctgcaataagaatggcctgtggtaccaaatcggagtggtttcgtggggggtggggtgcgggcgccccaataggccaggcgtttataccaatatctcccaccatttcgagtggatacaaaagttgatggcccagagcggcatgagtcagcctgatccatcctggccattgctgttcttcccattgttatgggccctccccctcctggggccagtctag

SEQ ID NO: 201040 - DNA, 954 bp, synthetic construct
  misc_feature 1..954: note = Description of Artificial Sequence: Synthetic coding sequence
  source 1..954: mol_type = other DNA
atggtggtgagcggcgccccccccgccctgggcggcggctgcctggggacctttactagcctgctgctgctagcaagtacagcaatactcaacgcagcacgcattcctgtcccccctgcttgtggcaagcctcaacagctgaatcgcgtggtcggaggcgaagactctacagatagcgagtggccttggattgtgtccatccagaagaatgggacacaccactgcgcagggagccttctgacaagccgctgggttatcacagcggcccactgcttcaaggataatcttaataaaccatacttgttctctgtgctcctgggcgcatggcaattgggaaatcctggttcacgctcccagaaagtcggcgtagcttgggttgaaccgcatcctgtgtacagctggaaggagggagcttgcgcagatattgcattagtccggctggagagatctattcagttctccgaaagagtgttgccgatttgtctgcctgatgcaagtatacacctcccgcctaacactcactgctggatttctggctggggttctatccaggatggtgtgccactcccccatccccagaccctgcaaaagctgaaggtcccaatcattgacagcgaagtctgttcacatctctattggcgcggtgcggggcagggccctataactgaggatatgttgtgtgccggctacctggagggcgaaagagacgcctgcctgggggacagcggcggaccactgatgtgccaagtcgatggcgcttggctcttggcgggaattatttcatggggcgaggggtgtgctgagaggaaccgtccaggagtgtatatctcattgtctgcacataggagctgggttgagaaaatcgtgcagggtgttcagctgcgcgggagagcccaggggggcggcgctttgcgagctccatcgcaggggtctggcgcagccgcacggtcgtag

SEQ ID NO: 201041 - DNA, 786 bp, synthetic construct
  misc_feature 1..786: note = Description of Artificial Sequence: Synthetic coding sequence
  source 1..786: mol_type = other DNA
atgcacatgcgggagaccagcggcttcaccctgaagaagggccggagcgcccctctggttttccatccccctgatgccctcatcgctgtgccattcgatgatgatgataaaatcgtgggcgggtacacatgcgaagagaacagtctgccttaccaggttagcctgaattccggttcgcacttctgtggcggatctttaattagtgagcaatgggtcgtcagtgccgcgcactgctataaaactaggatacaagtgcggttaggcgaacacaacataaaggtcctcgagggaaatgagcagtttataaatgcagccaagatcatacgccaccccaagtacaaccgtgacactcttgataacgacattatgctgataaaattatccagcccagccgtcataaacgcgcgggtatctacgattagcctgcccactactccccctgcagctggcacggaatgtctgatcagtggctggggaaataccctaagtttcggagcagattacccggacgagctcaaatgtcttgatgcccctgtgctgactcaggcagaatgtaaggcctcctaccctggcaaaatcactaactcgatgttctgtgtaggtttcctggagggggggaaagacagctgtcagcgcgactctgggggccccgtggtctgcaacggtcagctgcaaggtgttgtcagctggggacacggctgcgcttggaaaaacagacctggcgtatacaccaaggtgtataattacgtcgattggattaaggacaccatcgccgctaattcctag

SEQ ID NO: 201042 - DNA, 915 bp, synthetic construct
  misc_feature 1..915: note = Description of Artificial Sequence: Synthetic coding sequence
  source 1..915: mol_type = other DNA
atgtgcggccccgacgaccggtgccccgcccggtggcccggccccggtcgcgctgtgaagtgtggaaagggcctcgcagctgcaagacccggtcgcgtggaacgtggcggagcacagagagggggggcagggctggagttgcaccctctcctaggaggccgcacgtggagagcggcccgggatgcagatgggtgtgaggccttggggaccgttgccgtgccttttgatgacgacgataaaatcgtgggagggtacacatgcgaggaaaattctctgccgtaccaggtgtctcttaatagcgggtcccacttctgtggtggatctctgatctcggaacagtgggtcgtctcggccgcccactgctataaaaccagaatccaagtccgcctgggagagcacaacatcaaggtgctcgaaggcaacgaacaattcattaacgccgccaaaatcatcagacaccccaaatataatagggataccctcgataacgacattatgcttattaagctctcgtctcccgccgtcattaacgctagagtttccactatttctctgccaaccacccctcctgctgctggaaccgagtgtttgatctctgggtgggggaacactctcagcttcggagccgactaccccgatgaactgaagtgcctcgatgctccagtgttaactcaggcagagtgcaaggcaagctacccagggaagatcactaatagcatgttttgtgtgggtttcttggaggggggaaaagatagctgtcagcgcgactccgggggccccgtggtatgtaacggccaactgcagggcgtggtgtcctggggacatggatgcgcctggaagaaccgtcccggggtttataccaaagtctataactatgtggactggattaaagatactatagcagccaacagctag

SEQ ID NO: 201043 - DNA, 744 bp, synthetic construct
  misc_feature 1..744: note = Description of Artificial Sequence: Synthetic coding sequence
  source 1..744: mol_type = other DNA
atgaaccccttcctgatcctggccttcgtgggcgccgccgtggccgtcccttttgacgacgatgacaagatcgtagggggctatacttgcgaagagaactctttgccatatcaggtgagcctgaactctggatcccacttctgtgggggctcgctgatatcggagcagtgggtggtgagcgctgcccactgctacaagactaggatacaggtgagactcggggaacataacatcaaagtgctggaagggaacgagcagtttatcaatgccgctaaaattattcgccatccaaagtacaatcgggacacccttgataatgatatcatgttaatcaaattaagctcgccagccgtaataaacgctagggttagcacaatttctttgcctactactcccccagctgcgggtacagaatgcctcatttctggctggggtaacacgctcagcttcggtgccgattacccagacgaacttaaatgtctagacgcccccgtactgacacaggccgagtgcaaggcgagctatccaggcaagattaccaactccatgttctgtgttggttttctcgaaggaggtaaggatagctgtcagagggactctggagggccagttgtgtgcaacgggcagttgcaaggggttgttagctggggccatgggtgtgcttggaagaatcggcctggtgtgtatacaaaagtctataactacgtagactggatcaaggacaccatcgctgctaactcttag

SEQ ID NO: 201044 - DNA, 723 bp, synthetic construct
  misc_feature 1..723: note = Description of Artificial Sequence: Synthetic coding sequence
  source 1..723: mol_type = other DNA
atgggccccgccggcgaggtggccgtgcccttcgacgacgacgacaaaatagttgggggttacacttgcgaggagaactcccttccctaccaagtatcacttaattcagggtcacacttttgcggcgggtctttgatatccgagcagtgggtggtaagcgccgcccactgttacaagacccgtattcaggtgcggctgggggaacataatatcaaagtcctggagggcaacgagcagttcatcaatgcagcaaagatcattagacacccaaaatataatagagatactctggacaacgatatcatgcttatcaagttgtcctcgccagctgttattaacgcaagggtgtcaaccatcagtctcccaacaacgccaccagccgcaggtaccgagtgcctaataagtggttggggcaatacactttcatttggcgccgactacccagacgaactgaagtgtctcgatgccccggtactgacgcaggccgagtgcaaagcgtcctaccctggaaagattactaactctatgttctgtgtgggctttctggaagggggaaaggattcgtgccagagagattctggagggcctgttgtgtgcaatgggcagctccaaggcgtggtctcttggggccacggctgtgcctggaaaaatagaccaggggtgtatactaaggtgtacaactacgtcgactggatcaaggacacaatcgccgccaactcctag

SEQ ID NO: 201045 - DNA, 537 bp, synthetic construct
  misc_feature 1..537: note = Description of Artificial Sequence: Synthetic coding sequence
  source 1..537: mol_type = other DNA
atgcgggagaccagcggcttcaccctgaagaagggccggagcgcccctctcgttttccatccacccgacgcgttaatcgccgtacccttcgacgatgatgataaaatcgtggggggatacacctgcgaggagaacagcctgccatatcaagtcagcctcaattcaggatcacacttttgtggcggatccttgatatctgaacagtgggtagtgtcggccgcccattgttataaaacgaggattcaagtccggttaggagagcataacatcaaagtgttggagggaaacgagcaatttatcaatgccgccaaaatcattaggcacccaaaatataaccgcgataccctggataatgatataatgttgatcaaactgagcagccccgcagtcattaacgcccgtgtgtctactatctctctgccaactactcctccagctgcgggcacagaatgccttatttcgggatggggaaacacgctgagtttcggggcggattacccagacgagctgaaatgcctggatgccccagtgctgtag

SEQ ID NO: 201046 - DNA, 843 bp, synthetic construct
  misc_feature 1..843: note = Description of Artificial Sequence: Synthetic coding sequence
  source 1..843: mol_type = other DNA
atgcggggcgtgagctgcctgcaggtgctgctgctgctggtgctgggcgctgccggaacccagggtcggaaatccgcggcatgtggccagccccgtatgtcttctcgtatagtgggcggtagggacgggcgggacggcgagtggccatggcaagcttcaatacagcatcgtggagcccatgtatgtgggggcagtctcattgctccacaatgggtgctgaccgctgcccactgtttcccacgcagagctcttcccgctgaatatagagtgcggctcggtgctctcaggttgggaagcacaagcccacgcacactctcagtgcccgtgagaagagttctccttcctccggattactcggaggacggagctaggggagatttagcccttctccagctgcggagaccagtccctctgtccgcccgcgttcagcccgtatgcctccccgtgccaggagcacgacccccacccgggacgccatgccgggtcaccggatggggcagcttgagacctggcgtcccccttcctgagtggcgccctctgcaaggggtgagagtgcccctgctggacagtcgtacttgcgacggattgtatcatgtaggcgcagacgttcctcaagctgaacgcattgttctcccaggtagtctgtgcgcgggctacccccaaggacacaaggacgcatgccaaggcgactcaggtggccctttgacatgtttgcagtccggtagttgggtcctcgtcggagtcgtgtcctggggcaaaggttgcgcacttccaaacagacccggagtttatacttcggtggccacctacagcccatggatccaagctagggtcagcttttag

SEQ ID NO: 201047 - DNA, 1032 bp, synthetic construct
  misc_feature 1..1032: note = Description of Artificial Sequence: Synthetic coding sequence
  source 1..1032: mol_type = other DNA
atggcccagaagggcgtgctgggccccggccagctgggcgccgtggcaatcctgctgtacctcgggcttctgcgctccggaaccggcgccgaaggagccgaggccccttgcggagtggctcctcaggctaggatcaccggcggcagttctgctgtggctggccagtggccatggcaggtgagtatcacctatgaaggcgtgcacgtctgcggaggctctcttgttagcgagcagtgggtgttgagcgccgcccactgctttccgagcgaacatcacaaggaggcatacgaagtcaaactgggcgcccaccaacttgactcttatagcgaggatgccaaagtgtctactctgaaggacataattccccatccaagctaccttcaagaggggtctcaaggagacattgcactgctgcagctttcccggcctatcacgttctcgagatatattagaccaatttgtcttcctgctgccaatgcaagctttcccaacgggcttcactgtacggtgactggctggggacatgtagcgccatctgtgagtctcttgacaccaaaacctctacagcagcttgaggtcccactaatcagtagagaaacctgcaactgcttatataacattgacgccaaacctgaagagcctcacttcgtgcaggaggacatggtatgtgccggatatgtggaaggcggtaaagacgcctgtcagggggattccggcggtccactctcctgcccggtcgagggcctctggtatctgacaggaatagtgtcttggggtgatgcttgtggcgccaggaaccgccccggtgtgtacaccctggctagttcgtacgctagctggattcagagcaaagtgactgagcttcagccccgcgtcgtcccccagactcaagagtcccagcccgatagcaacctgtgcggctctcatttggccttcagcagtgctcctgcccaggggttactccgtcctatcttgttcctgcctctcggtttggcacttggactcctgtcaccttggctctccgagcactag

SEQ ID NO: 201048 - DNA, 504 bp, synthetic construct
  misc_feature 1..504: note = Description of Artificial Sequence: Synthetic coding sequence
  source 1..504: mol_type = other DNA
atggcccagaagggcgtgctgggccccggccagctgggcgccgtggccatcctcctttacctgggcctgctgaggagcggaactggcaaagagggagcagcagctccgtgtggcgtagctccgcaggcaagaataacaggaggatcctccgctgttgccggacagtggccttggcaggtcagtattacattctcgaggtatatacgtccaatttgtctgcctgctgcgaatgcgtcatttcccaacgggttacactgtactgtaacaggatggggacacgttgccccatcggtgtcactgctgacccctaagccactgcagcagcttgaggttccgttgatctcaagagaaacttgcaattgtttgtataatatcgatgcgaaacctgaagagccgcactttgtccaagaagacatggtctgcgctggctacgtggagggcgctttgctgcgggtgaccctgggtgctcactctcctgccctttggcgcgtctcagggacctag

SEQ ID NO: 201049 - DNA, 1197 bp, synthetic construct
  misc_feature 1..1197: note = Description of Artificial Sequence: Synthetic coding sequence
  source 1..1197: mol_type = other DNA
atggagctggaggagggcaaggccggcagcggcctgcggcagtactatctaagcaaaatcgaggaactccagctcatcgttaacgataaatcacagaaccttcggcgactgcaggctcagaggaacgagcttaatgctaaagtgaggttgctccgcgaggagcttcagctccttcaggaacagggatcctatgtcggcgaagtcgttagagccatggataaaaagaaagtcctggtgaaggtgcatcctgagggaaagtttgttgtcgacgtggacaaaaacattgatattaatgacgtcacacccaattgcagagttgctttgaggaatgactcatataccctacacaaaatcctgccaaataaggttgaccccttggtctcactgatgatggtagaaaaggtccctgactctacctacgagatgatcggcgggctcgataagcaaattaaagagataaaagaggtaattgagctcccagtcaaacacccagaactttttgaggccctaggtatcgcacagccaaaaggcgttctcctttacgggcctcccggcacaggaaaaaccctcctggcacgcgctgtggcccaccacaccgattgtacgtttatacgcgtctcaggcagcgagctggtgcagaagtttatcggggagggggcccggatggtccgagagctgtttgtgatggctcgcgagcacgcaccgtcgattattttcatggacgaaattgacagcataggtagcagcaggttagagggaggctccggcggagatagcgaggtacagcggaccatgttagaactcttaaaccagttggatgggtttgaggccactaagaacattaaagtgatcatggcaaccaaccggattgacattctggacagtgcactgctaaggccaggtcgcatcgacagaaagatcgaattcccacctcccaatgaggaggctcggttggacatcctcaaaattcactctcgaaagatgaacctcacacgagggattaatctacgcaaaattgcggagttgatgcctggagcatcaggcgcagaagtgaagggcgtgtgcacagaagcgggcatgtacgccctgagggaacggagagtccacgtgacacaggaggacttcgagatggcggtcgccaaggtgatgcagaaggacagcgaaaaaaacatgtcgatcaaaaagctatggaaatag

SEQ ID NO: 201050 - DNA, 765 bp, synthetic construct
  misc_feature 1..765: note = Description of Artificial Sequence: Synthetic coding sequence
  source 1..765: mol_type = other DNA
atggccagcctgctgaaggtggaccaggaggtgaagctgaaggtggacagtttccgagaaagaatcacctcggaggctgaagatctcgtggctaatttctttcccaagaaattgctggagttggacagttttttaaaggagcccatcctcaacatacacgacctcacccagattcattcggacatgaatctccccgtccccgatcccatactgctgactaactctcacgacggcctcgacggacctacatataagaagagacgcctcgatgagtgtgaggaagcattccaggggacaaaggtgttcgtcatgccgaatgggatgctaaagtcgaaccagcagttggtggatatcattgaaaaagtcaagcctgaaatcaggctgcttatcgaaaagtgcaatactgtcaagatgtgggtgcaactactgatcccccgtattgaggacggcaacaacttcggagtctccatacaggaggaaacggtcgccgagctgagaaccgttgagtctgaagccgcgtcctaccttgaccaaatcagtcggtactacattactcgagcgaagctggtgagcaaaatcgctaaatacccccacgtcgaggattacaggaggacagtgacagaaatcgatgaaaaggaatacatatctctgcgacttattatcagcgaactacggaaccaatatgtcaccctgcatgatatgatcctgaagaatatcgagaaaatcaagcgccccagaagctccaacgctgagaccctatactag

SEQ ID NO: 201051 - DNA, 1323 bp, synthetic construct
  misc_feature 1..1323: note = Description of Artificial Sequence: Synthetic coding sequence
  source 1..1323: mol_type = other DNA
atgggccagagccagagcggcggccacggccccggcggcggcaagaaagatgataaagataaaaaaaagaagtacgaaccacccgtgcctactcgcgtgggcaagaagaagaagaagacaaagggtcctgacgccgcctcaaaactccctcttgtgaccccgcatactcagtgtagactcaaactgctgaagctggagcgcataaaagattacctgctgatggaagaagagttcattcggaatcaggaacaaatgaagccattggaagagaagcaggaggaggagcggagcaaggtggacgacctcagggggacacccatgtcagtcgggactctggaagaaatcatagatgataatcatgctattgtgtctaccagcgtgggttcagaacattatgtgtcaatcctgtccttcgtagataaagatctgttagagcctgggtgtagcgtccttctgaaccacaaagtccatgccgttatcggcgtgctcatggatgacaccgaccctttagttactgtcatgaaagtggaaaaagccccccaggagacctacgccgatatcggggggctggataatcagatccaggaaataaaagagtccgtggagttgccgctaacacatcccgaatactacgaagaaatgggaattaaacccccaaagggcgtaattctgtatggacctccaggaactggtaagacactccttgccaaagccgtggctaatcagacctctgcaacttttctgcgagtcgtgggtagcgagctcatacagaaatacctaggtgatggaccaaaactagtgagagagctcttccgagtagccgaagagcacgccccctctatcgtcttcatagatgaaatagacgcaattgggaccaagaggtacgattctaactctggcggcgagcgggaaatccagcgaacaatgctcgaactgttaaaccagttagacgggttcgactctcgcggcgatgttaaagttattatggcgacaaacagaatcgagactctggaccctgccttaattagaccaggtagaatcgaccggaaaatcgagtttcctctgcccgacgaaaaaaccaaaaaaaggatctttcagatccacacaagccgtatgactctagctgacgacgtgaccctagatgacctgatcatggcaaaggatgacctctctggcgccgatatcaaggccatttgtaccgaggcagggctcatggctttacgagagaggcgaatgaaggtaacgaacgaagactttaagaagtcaaaagagaatgtgctatataaaaagcaggagggaaccccagaagggttgtacttgtag

SEQ ID NO: 201052 - DNA, 1104 bp, synthetic construct
  misc_feature 1..1104: note = Description of Artificial Sequence: Synthetic coding sequence
  source 1..1104: mol_type = other DNA
atggaggaggagttcatccggaaccaggagcagatgaagcccctggaagagaagcaagaagaggaaaggtcgaaggtggacgatctgcgcggtacccctatgtcagtgggcacccttgaagagattatcgatgataatcacgcaatagtgtcgacttcagtaggtagcgaacactatgtgtccatcctgtccttcgtcgataaagacttactcgagcccggatgttccgtgctgttaaatcataaggtccatgctgtgatcggagtgttgatggacgacaccgatcctctagtcaccgtgatgaaggtggagaaagctccacaggagacctatgcagacataggtggcttagacaaccagattcaagagatcaaggagagcgttgaacttcccctaacccacccagagtattatgaggagatggggatcaagccaccaaaaggtgttatcttgtacgggcctcctggaaccggtaagacgctgctcgctaaggccgtggccaatcagacctctgctacatttcttcgtgtggtagggagcgagttaattcagaagtacttgggagatgggcctaagctagtccgggagttgtttcgggtggccgaagagcacgcaccgtccatcgtcttcattgacgagattgatgcaataggaacaaaacgctatgattccaatagtggcggcgagcgggagattcaacggacaatgttggaactccttaatcagttggacggcttcgattcaagaggagatgttaaggtgattatggccactaaccgcatcgaaacactggaccctgccctcattcgacccggacgtatcgaccgaaaaattgaatttccgctgccggacgagaagacgaaaaagcgcattttccagatccacacttcacgaatgaccctggcagatgatgttacgctagatgatctgatcatggctaaagatgacctaagtggagcggatatcaaagccatctgtaccgaggcgggactcatggcattaagagagagaaggatgaaggttacaaacgaagattttaaaaaaagcaaagaaaatgtgctatataagaagcaggaaggaactccagagggcctgtacttgtag

SEQ ID NO: 201053 - DNA, 1302 bp, synthetic construct
  misc_feature 1..1302: note = Description of Artificial Sequence: Synthetic coding sequence
  source 1..1302: mol_type = other DNA
atgcccgactacctgggcgccgaccagcggaagaccaaggaggacgaaaaagacgataagcctattagagcactggatgaaggggatattgccctcctgaaaacctatgggcagtctacctattcaaggcagataaaacaagtagaggatgacatacagcagctgctcaaaaagatcaatgagctcactggaatcaaggaaagtgacacgggcttggcacctcccgccctctgggacctggccgcggacaaacaaactctccaatctgagcaaccattgcaagtggccaggtgcaccaagattattaatgcggactcagaggacccgaagtacatcatcaacgtgaaacagtttgccaagtttgtggtggacctgtctgaccaggtggcccctacggacatcgaggaggggatgagagtgggtgtggaccgcaataaatatcaaatccacatacccctgcctccgaagatcgacccaaccgtgacaatgatgcaggtggaggagaaacccgatgtaacatattcagatgtgggtgggtgtaaggaacagatcgaaaagctcagagaagtggtggagacaccccttttacaccccgagcgcttcgtgaacctgggcatcgagccacctaaaggtgtacttctgttcggtccaccaggcaccggaaagacactctgtgctcgggccgtcgcaaacagaactgacgcttgtttcatccgcgtgatcggttccgagttagtccagaaatacgttggcgaaggtgctcggatggtcagggagctgtttgaaatggctcgtaccaaaaaggcgtgcctgatcttctttgacgaaatcgacgcaataggcggcgctcgctttgatgatggagccggcggagataatgaagttcagcggactatgctggaattgattaaccaattagacggattcgatcccagaggaaatatcaaagtgcttatggctacaaaccggcccgacaccctcgaccccgccctgatgcgacccgggagacttgataggaaaattgaattctccttgcctgacctcgagggtagaacccatatctttaagatccacgcacgctcgatgtctgtggagcgtgacattagattcgagctcttagccaggttgtgccccaactccactggcgccgaaatccgctcagtgtgcaccgaggccggaatgtttgctatcagagcccgccggaaaatcgctacggaaaaggacttcctggaggcagtgaataaggtgatcaagagctacgctaagtttagtgccacacccagatatatgacatataactag

SEQ ID NO: 201054 - DNA, 393 bp, synthetic construct
  misc_feature 1..393: note = Description of Artificial Sequence: Synthetic coding sequence
  source 1..393: mol_type = other DNA
atgcccgactacctgggcgccgaccagcggaagaccaaggaggacgaaaaggatgacaaaccaataagagccttggatgagggggatatagctctcctgaagacctatggacagagcacttacagccggcagatcaagcaggtggaggatgatattcaacagctgttgaagaagattaacgagttaacagggatcaaagaatccgataccggtctcgccccacctgccctctgggacctggcagcagataaacaaacactccagagtgaacagcctctgcaagtggccagatgcacaaaaatcatcaacgccgacagcgaggaccctaagtatatcattaatgtaaagcagttcgccaaattcgtcgttgacctgtctgaccaggtcgcatag

SEQ ID NO: 201055 - DNA, 1302 bp, synthetic construct
  misc_feature 1..1302: note = Description of Artificial Sequence: Synthetic coding sequence
  source 1..1302: mol_type = other DNA
atgcccgactacctgggcgccgaccagcggaagaccaaggaggacgagaaagacgacaagcctattagagccttggatgagggtgatattgctctcctgaaaacatatggccagagtacttacagccgtcagattaagcaagtcgaagatgatatccagcagttgttaaaaaaaatcaatgaactgactggcatcaaagaatcagacacggggttggcaccccctgccctgtgggacctggcagccgataaacaaaccctacagtccgagcagcccctgcaggtggctcggtgtacaaagataataaacgctgacagtgaagatcctaagtatatcatcaacgttaagcagtttgcaaagttcgtggtcgatctatcagatcaggttgccccaacagatatcgaagaaggtatgagggtgggggttgatagaaataagtaccagattcacatcccacttccacctaaaatcgatcccacagtcacaatgatgcaggtcgaggagaagccagatgtcacctactccgacgtcggcgggtgcaaagagcaaatagaaaagttgcgcgaagtggtggagactccactccttcatcccgagagattcgtcaatctgggcatagagcctccaaagggcgtgttgttgtttggccctccgggaaccggaaagaccctgtgcgcccgggcagtggccaatcggactgacgcctgcttcatccgcgtaatcggctccgaattagtccagaaatatgtcggagagggtgccaggatggtgcgagagctatttgaaatggcgcgcactaagaaggcatgcctcattttctttgacgagatcgatgccattgggggcgcccggtttgatgatggagcaggcggcgacaacgaagttcagcggacaatgctcgagcttatcaatcagctcgacgggtttgacccccgtgggaacattaaagtgctcatggccacaaatcgtccagacacacttgatcctgcgctcatgagaccagggagactggacagaaaaattgagtttagcttacccgatctggagggaagaacacatattttcaagatccatgcaaggtccatgagtgtggaacgggacattagattcgaattgctggcccggctgtgcccgaatagcactggagccgaaatcagaagcgtctgtaccgaggcaggcatgttcgcaatacgcgccaggagaaagattgccacagagaaagatttccttgaggccgtcaacaaagtgatcaagtcttacgctaagttttccgctactcccagatacatgacatataactag

SEQ ID NO: 201056 - DNA, 393 bp, synthetic construct
  misc_feature 1..393: note = Description of Artificial Sequence: Synthetic coding sequence
  source 1..393: mol_type = other DNA
atgcccgactacctgggcgccgaccagcggaagaccaaggaggacgaaaaggacgacaagcccataagagcattagacgaaggggatattgctctgcttaaaacgtatggtcagtccacttacagcagacagattaaacaagtggaggacgatatccagcagctgctgaaaaagataaatgaactcactggcattaaagaaagcgacacgggtctagcaccccctgccctgtgggatctggccgcagataaacagaccctgcagagcgaacaacccctgcaggttgctcgatgcacaaaaattatcaacgctgacagcgaggatcccaagtacattattaatgtcaagcagttcgccaagttcgtggtcgatctctctgatcaggtggcatag

SEQ ID NO: 201057 - DNA, 891 bp, synthetic construct
  misc_feature 1..891: note = Description of Artificial Sequence: Synthetic coding sequence
  source 1..891: mol_type = other DNA
atgcgggtgggcgtggaccggaacaagtaccagatccacatcccccttcccccaaagattgatcctactgtcacaatgatgcaggtagaagaaaagccagatgtgacttactccgacgtgggcgggtgtaaagagcaaatagaaaaactgcgggaagttgtggagacccccttactgcaccccgagcgctttgtcaatctgggcatagagccccctaagggcgtactcctcttcggacctccaggaactggtaaaactctgtgtgctagagccgtagctaacagaaccgatgcatgctttatcagggtgatcggcagcgaactcgtgcagaaatacgtgggggagggagccaggatggtgagggaactcttcgagatggccagaacaaagaaagcatgtctgatttttttcgatgagattgatgccatcggtggggcgaggtttgatgacggcgctggaggcgacaatgaggtgcaacggaccatgctggagttgatcaaccaactggatggtttcgatcctagaggaaacatcaaagtgttaatggctaccaacaggcccgatacactcgaccccgccctgatgagaccaggtagacttgaccgcaagatcgaattctccctgccagatctcgaaggcagaacacatatctttaagatccatgcccggagcatgtcagttgaacgcgacatccgcttcgaattgctggcgcgcctttgccccaattctacgggggccgagattaggtctgtgtgtaccgaggcggggatgttcgcaatccgggctaggcgtaaaatcgctacagagaaggactttcttgaggcagtcaataaggttatcaaatcttacgcaaagttttctgcaaccccacgttatatgacatataattag

SEQ ID NO: 201058 - DNA, 1320 bp, synthetic construct
  misc_feature 1..1320: note = Description of Artificial Sequence: Synthetic coding sequence
  source 1..1320: mol_type = other DNA
atgaacctgctgcccaacatcgagagccccgtgacccggcaggagaagatggcaaccgtttgggacgaggccgagcaggacggaataggggaggaggtgctcaagatgtccaccgaggaaataatccagagaacgcgtttgttggattccgaaatcaagatcatgaaaagcgaggttcttcgtgtgacccatgagttacaggccatgaaagacaagatcaaagagaacagcgaaaaaattaaagttaacaagactctcccctatcttgtttctaacgtcatcgagctgttagatgttgatcccaacgatcaggaggaggatggcgcaaacatcgatctcgatagccagcgtaaaggaaaatgcgcagtgatcaaaacatcaaccagacagacttattttctgcccgtgatcggcctagtagatgccgaaaagctgaaacctggcgatctcgttggcgtaaacaaggacagctacctgatcctggaaacactgcccaccgaatacgattccagggtgaaggccatggaggtcgacgagcgacctaccgaacagtattccgatatcggaggactggataagcagatacaggagctcgtggaggccattgtgctgcccatgaaccacaaagagaaattcgagaacttagggatccagcctcctaagggcgtcctcatgtatggaccccccggaaccggcaaaacattgttggcaagggcctgtgctgcacagactaaggccactttcttaaagctagctggtccccagcttgtccagatgtttattggggatggggccaaactggtgagggacgcattcgccctcgcgaaggaaaaggccccatcgatcattttcattgatgagttggacgctattgggaccaagaggttcgacagtgaaaaagcaggcgacagggaggtgcagcgaactatgctggaactgctgaaccaactcgacggctttcagcctaatacccaggtgaaggtgatagcggccacgaatagggtagatatactggacccagctctccttcggtccgggagactggacagaaaaatcgagttcccgatgccaaacgaggaagcccgcgccaggatcatgcaaattcacagcaggaagatgaacgttagcccagacgtgaactatgaggaactggcacgatgcaccgacgacttcaacggcgcacaatgtaaagctgtgtgtgtagaagctggcatgattgcgctaaggcgaggcgccaccgaactaacacatgaggattacatggaggggatactagaggtgcaggccaagaaaaaggcgaaccttcaatattacgcctag

SEQ ID NO: 201059 - DNA, 1257 bp, synthetic construct
  misc_feature 1..1257: note = Description of Artificial Sequence: Synthetic coding sequence
  source 1..1257: mol_type = other DNA
atggaggagatcggcatcctggtggagaaggcccaggacgagatcccagcactcagtgtatctagacctcagactgggttatcttttctcgggccggagcccgaggaccttgaagacctctattcccggtacaagaaattgcaacaggaactggaattcttggaagtgcaggaagaatatattaaggatgagcagaagaacctcaaaaaagagttcttgcacgctcaggaagaggtaaaaaggatccagtctattcccctcgtgatcgggcagttcctagaggcagttgaccagaacacagccatcgtgggttcaacgaccggctcaaactactacgttcgcatactttccacaattgatcgagaactgctgaaaccaaacgcatcagtggcactccataaacattctaatgccttggtggatgttctcccgccagaggccgattcctctatcatgatgttaacatcagaccagaagcctgatgtgatgtatgctgatattggcggaatggacatacagaaacaggaagtgcgggaagctgtcgagctacccctcacccatttcgaactgtataaacaaataggcattgacccacccaggggcgtgctgatgtacggcccaccagggtgtgggaagaccatgcttgcaaaagctgtggcgcaccatacgacagcggccttcatccgcgtcgtgggaagcgagttcgtgcagaagtacctaggcgaagggccgcgaatggtaagagacgtctttcgcttggccaaggagaatgccccagctatcatttttattgacgaaattgacgcaattgccactaagcgctttgatgcccaaacaggcgccgaccgcgaggttcagcggatcctgctggagctgttaaatcagatggacggcttcgaccagaatgtgaacgtgaaagttataatggctaccaatagggctgatacgttagatcccgccttgctaagaccagggagactggaccgaaaaatagagtttcctcttcccgaccgccggcagaagaggttgattttttcaaccattaccagtaaaatgaacttatcagaagaagttgacttggaggactacgtagcacgtcccgacaagatttcaggggcggatattaatagcatctgtcaggaaagcggcatgctggccgtgcgggaaaatcggtatattgtcctggctaaagacttcgagaaggcgtataagacagtaataaagaaggacgagcaggagcacgagttctataagtag

SEQ ID NO: 201060 - DNA, 1164 bp, synthetic construct
  misc_feature 1..1164: note = Description of Artificial Sequence: Synthetic coding sequence
  source 1..1164: mol_type = other DNA
atggaggagatcggcatcctggtggagaaggcccaggacgagatccccgccctgtcagtgtctcgccctcagacgggcttgtcctttctcggcccggagccagaagatctggaagacctttacagccgatataaggaagaggtcaaaaggatccagtctatacccctcgtgatcggacaatttcttgaggctgtggaccagaacaccgctattgttggttcaacgactgggtccaattattatgtgcgcattctgtccacaatcgatcgagaactcctcaagccgaatgcttctgttgctctccacaaacattcaaatgcactggtagacgtgctgccacctgaagctgatagttcaatcatgatgcttacctcagaccaaaaaccagatgtgatgtatgcggatattggagggatggacatccagaaacaagaggttcgggaggccgtggaactgcctttaacacacttcgaattgtacaaacagatcgggatagatcctccgaggggtgtcctcatgtacggtcccccagggtgcggcaagaccatgcttgcaaaggccgtggcccatcacacaacagcggcgtttatcagggtggttgggtccgaattcgttcagaagtacctgggcgaggggccaagaatggtgagagatgtgttccggctggcaaaggaaaatgcccccgctattattttcattgacgagatcgacgctatcgccacgaagcgcttcgacgcacagaccggagccgatagggaggtacagaggatattgttggagctgctgaatcaaatggatggctttgaccagaatgttaacgtgaaggtgattatggctaccaaccgggctgacacactcgaccccgccctgctgcgccctgggcgcttagacaggaaaattgagtttccactcccagatagaagacagaaacggctgatttttagtaccatcacttccaaaatgaatctgtcggaggaggttgatctcgaagactatgtcgcccgacccgacaagatttccggcgccgatatcaactccatttgccaggaaagcggtatgctggcagtgcgcgaaaaccgatatattgtgctggcaaaagattttgagaaggcctacaagactgtcatcaagaaggacgagcaggagcatgagttttacaagtag

SEQ ID NO: 201061 - DNA, 1221 bp, synthetic construct
  misc_feature 1..1221: note = Description of Artificial Sequence: Synthetic coding sequence
  source 1..1221: mol_type = other DNA
atggccctggacggccccgagcagatggagctggaggagggcaaggctggctccggcctcagacagtactacctgtcaaaaatcgaagaactgcaactgatcgtcaacgacaaaagtcagaatctaagacggctgcaagcccagagaaacgagttaaatgctaaggtaagactgttgagagaggaactgcagctgctccaggagcagggaagttatgtaggggaagtggtacgcgcgatggataaaaaaaaggtgctcgttaaagtgcaccctgaagggaagtttgtggttgacgtagataaaaatatcgacatcaacgacgtgacgcccaattgtcgtgtggcattgcggaatgactcctacacactgcacaaaatactccctaacaaagtcgacccccttgtctcccttatgatggtcgagaaggtccccgacagtacctatgagatgatagggggcctggataaacagatcaaagaaattaaggaggtgatcgagcttcccgtcaaacaccccgaactatttgaagctttgggtatagcacagccgaagggtgtactcctttatgggcccccaggcactggaaaaaccctcttggcccgtgccgtcgcccaccatacagactgcacgtttattcgcgtgtcgggatctgaactagttcagaaatttatcggtgaaggggctcggatggtcagggaactcttcgtgatggctcgagaacatgccccttccatcatatttatggatgagattgattccatcggctccagtcggctggaggggggctctggaggagattctgaagtccaacgcaccatgcttgagttactcaatcaactcgatggatttgaggcaaccaaaaatattaaggtgatcatggcaaccaacaggatcgacattctggattcagctctgcttcggcccgggaggatcgatagaaagattgaattcccacctcccaacgaggaggcacgcctggatattctgaagatacactctaggaagatgaatctcacacggggcatcaacctgcggaagatcgctgagttgatgccaggtgcatccggagcagaagttaaaggcgtgtgtaccgaggccgggatgtacgctttgcgggaacggcgggtacatgtcacccaggaagatttcgaaatggctgtggctaaagtcatgcagaaggatagcgagaaaaacatgtccataaagaaactttggaagtag

SEQ ID NO: 201062 - DNA, 1197 bp, synthetic construct
  misc_feature 1..1197: note = Description of Artificial Sequence: Synthetic coding sequence
  source 1..1197: mol_type = other DNA
atggagctggaggagggcaaggccggcagcggcctgcggcagtactacttgtcaaaaattgaggagctgcagctgatcgtcaacgacaagagccagaacctccggagactacaagcacagaggaacgagcttaatgcgaaagtgcggttgctcagagaagagttgcagctgctgcaggagcagggttcctatgtcggagaggttgttagagcgatggataagaaaaaagtgctggtgaaggttcacccagagggtaagttcgtggtggatgtcgataagaacattgacattaacgacgtgacgcctaactgccgcgttgctctgagaaatgacagctatactctgcataagattctccctaataaagtggacccgctggtgagcctcatgatggtcgagaaggtaccagatagcacgtatgagatgatcggcggcctggacaagcagattaaggaaatcaaggaggtgatcgaattgccagttaagcaccccgagctattcgaagcccttggcatagcacagcctaaaggagtactcctctacgggccgcctggcactggcaaaactctgttggcccgagccgtggcgcatcacaccgactgcaccttcattcgtgtgtccggctctgagctggtacagaaatttattggcgaaggcgctcgcatggttcgcgagctcttcgttatggctagagagcacgctccgtctatcatcttcatggacgagatagactctatcggtagcagccgtctggagggaggaagtgggggcgactctgaagttcaaaggacaatgctcgagctccttaatcaactggacgggtttgaagccacaaagaacattaaagtgataatggccacaaaccgcattgacatcttagactccgccctgctaagacccggtcgcatcgacaggaagatcgaatttccgccacccaacgaggaggcacgcctggatatccttaagatccactctcgtaagatgaacctcacgagggggattaaccttcgaaagattgccgagctgatgccgggtgcgtctggcgctgaagtgaaaggggtctgcacggaggctggaatgtatgcattgcgcgagagacgtgttcacgtaactcaagaggactttgagatggccgtggccaaggtaatgcagaaagattctgaaaagaacatgtccatcaagaagctatggaaatag

SEQ ID NO: 201063 - DNA, 1212 bp, synthetic construct
  misc_feature 1..1212: note = Description of Artificial Sequence: Synthetic coding sequence
  source 1..1212: mol_type = other DNA
atggccatccccggcatcccctacgagcggcggctgctgatcatggctgatccaagggataaagctttgcaggactatcgtaaaaaactacttgagcataaggaaatagacgggaggctcaaggaactacgcgagcagttaaaagagctgaccaaacagtatgaaaagagtgagaatgatctgaaggccttacaatctgtgggccagattgttggggaagtcctgaaacagctgaccgaagagaaatttatcgttaaggcgacgaacggtcctcggtacgtagttgggtgcagacgacagctggataaaagcaagctgaagcccgggactcgcgtcgcgctcgacatgacgacccttacaattatgaggtacttgcctcgggaagtcgaccctcttgtgtacaacatgtcccatgaagatccggggaacgttagctatagtgaaattggcggcctgtccgagcaaatcagggaactgcgggaagtaattgagctgcctctgacgaacccagaactgtttcaacgggtgggcataatccctccaaaaggctgcctgctttacggtcctcccggaacaggcaaaactcttttagcgagggcagttgcctctcagttagactgcaactttctgaaggtggtcagctcttcgatcgtcgataaatacatcggcgaaagcgccaggctcattcgcgaaatgtttaattatgcccgtgatcaccagccttgtatcatttttatggacgaaatagatgcgatcggtggccgccgcttttctgaaggcacttctgccgaccgagaaatccagaggactctcatggagctcctgaaccagatggacggattcgataccctgcacagggttaagatgatcatggccacaaatagacctgataccctagaccctgctctgttaagaccgggcaggttagacagaaaaatccacattgatttaccgaacgagcaggccaggcttgacattttgaaaatacacgccgggcccatcaccaagcacggcgagatcgactacgaggccattgtgaaactgtcagacggattcaacggtgcggatttgcggaatgtgtgtacagaagccggcatgttcgcaattcgggctgatcacgattttgtggtccaggaggatttcatgaaagcagtcaggaaggttgctgattctaagaagctcgagagcaagctggattacaaaccagtgtag

SEQ ID NO: 201064 - DNA, 933 bp, synthetic construct
  misc_feature 1..933: note = Description of Artificial Sequence: Synthetic coding sequence
  source 1..933: mol_type = other DNA
atggaccggctgctgcggctgggcggcggcatgcccggcctgggccagggtccccctactgacgctcccgcagtcgatactgccgagcaggtgtacatctcatctcttgctcttcttaagatgctgaagcacggcagggccggcgtgccgatggaggttatgggattgatgctcggtgagttcgtggacgattataccgtgagagtgatcgacgtgttcgccatgccgcaaagtggcacaggcgtcagcgtggaggcagtggacccggtatttcaggctaagatgcttgacatgcttaagcagaccggccggcccgaaatggttgtagggtggtatcatagccaccctgggttcggttgctggttgtccggagtggatattaacacccagcagtcattcgaagctctgtcggaaagggccgttgcggtggtggtagaccccatccaatctgttaagggtaaggtcgttattgatgccttccgcctgattaacgctaatatgatggtattagggcatgaacccagacagaccaccagcaacctgggccacctcaataagccttccattcaggccttgatccacggtctcaaccggcactactactcaatcaccattaattacaggaaaaacgagctggagcagaaaatgttgctgaatctgcacaaaaagagctggatggaaggtctcactctgcaggattactcagagcactgtaagcataacgagagtgttgtgaaggagatgcttgagcttgcaaagaattataacaaagctgtcgaagaagaggataagatgacccctgaacaattggccatcaaaaatgtgggcaaacaagaccctaagaggcacctggaagaacacgtggatgtgctgatgacctccaacattgttcagtgtcttgcagccatgctggatacagtcgtgtttaaatag

SEQ ID NO: 201065 - DNA, 255 bp, synthetic construct
  misc_feature 1..255: note = Description of Artificial Sequence: Synthetic coding sequence
  source 1..255: mol_type = other DNA
atggaccggctgctgcggctgggcggcggcatgcccggcctgggccagggccctccaactgatgctccggcagtggatacagcagagcaggtgtacatctccagtttagcgcttctgaagatgcttaaacacgggcgagccggcgttcctatggaggtgatggggctgatgcttggggagtttgtcgatgactacacagtgagggtgattgatgtttttgcaatgccccagtccggaaccggagtctctgtttag

SEQ ID NO: 201066 - DNA, 2727 bp, synthetic construct
  misc_feature 1..2727: note = Description of Artificial Sequence: Synthetic coding sequence
  source 1..2727: mol_type = other DNA
atggaggagggcggccgggacaaggcccccgtgcagccccagcagagtccagccgccgctcccggcggcaccgatgaaaaacccagcggcaaggaaagaagagacgcaggcgataaggataaagaacaagagttgtctgaggaggacaagcagctccaggacgagcttgaaatgctggtcgaacgattaggcgagaaggacaccagcttgtatcggcctgctctggaggaactaagacggcagattcgctcttccacgacgtcaatgacctcagtaccaaagcccctgaagtttctacgtcctcactatggtaagcttaaagagatttatgagaacatggcgcctggcgagaataagcgatttgctgctgatatcatttctgtgctcgccatgacaatgtccggggagcgcgagtgcctgaagtatcggcttgtggggtcccaggaggaactagcgagctggggacacgagtacgtgaggcatcttgccggagaggttgccaaggaatggcaggaactggacgatgctgagaaagttcagcgggagcccttgctgacactggtcaaggagatagtgccgtacaatatggcccacaacgccgaacatgaggcttgcgatctgctgatggaaattgagcaggtggatatgctggaaaaggatatagacgagaacgcatatgccaaagtatgtctttatctgacatcctgtgtaaattacgtgcccgagcccgagaattccgcgctgcttaggtgtgccttaggagtattccgcaagttcagtagatttcccgaagcattgaggcttgccttaatgctgaacgatatggagctagttgaggacatctttacctcctgcaaagacgtggtggtacaaaaacagatggccttcatgctgggcagacacggagtgttcctagaactgagcgaggacgttgaagagtacgaggacctcacagagattatgagtaacgtgcaactgaattcgaactttcttgccctggcccgcgaattggatattatggagcctaaggtccctgacgacatttataaaacccatcttgagaacaatcggttcggagggagcggatctcaggtcgacagtgcgaggatgaatcttgcatccagctttgtgaacggattcgtgaatgctgcatttggccaagacaagctgctcacagacgacggcaacaaatggctgtataaaaacaaggaccatggcatgttatcagcagccgcctcgctgggtatgattctgctatgggatgttgatggcggcctaactcagattgacaagtacttgtattccagcgaagattacatcaagtcaggtgcactactggcttgtggcatcgtgaactctggtgtgagaaacgagtgtgaccccgcccttgccttgctttcagattacgtcttgcacaattctaataccatgcgcctaggatctatctttggtcttggcctcgcctacgcgggctcaaaccgagaggacgtgctcaccctactgctgcctgttatgggagatagcaaaagttcaatggaagtggccggtgtgaccgctttggcatgcggcatgatagccgtcggcagttgtaatggggacgttacttcgaccatcttgcagaccatcatggagaaatccgaaacggaacttaaagacacttatgcccgctggttacccctggggctgggcctgaaccatttgggaaaaggggaagccatcgaagccattttagccgccctagaagtggtctctgagccgttcagatctttcgccaacacccttgttgatgtatgtgcttacgccgggtccgggaacgtacttaaggtgcaacagttgctccacatctgcagcgagcacttcgattccaaggagaaagaggaagacaaggataagaaggaaaagaaagacaaggataaaaaggaagcgcctgcagatatgggggctcaccaaggtgtagcggtactcgggatagccctgattgcgatgggcgaagaaatcggtgcagagatggcactccgtacatttggtcacctcctgcgctacggagagcctacgctccgcagggctgtgcctctcgccctggctctgattagtgtgtctaacccaaggctgaacatccttgatactctatccaagttttcacacgacgctgaccccgaagtcagctataattcgatattcgcaatgggaatggtgggttcaggcactaataacgctcgcctggccgctatgctccgccaactcgcccagtatcacgctaaggatcctaacaacctgttcatggtgcgactggcacaggggctgacccatctgggcaagggaactctgacgctgtgtccttaccattcagacaggcagttgatgagccaggtggctgtcgctggccttctcaccgtcctggtatctttcctggacgttcgcaacattattcttggcaagtctcactacgtgttatacggtctagtggccgccatgcagccaaggatgctggtgacattcgacgaggaactccgccctcttcctgtttcagtgcgagtggggcaggctgtggacgtggtgggccaagccggcaagccgaagaccatcacaggtttccagactcacactacacctgttttattggcacacggagagcgcgcagaactcgctactgaggagtttttgccagtcacacccatcctagaaggcttcgtcattctcaggaaaaatcccaattacgacctctag

SEQ ID NO: 201067 - DNA, 1743 bp, synthetic construct
  misc_feature 1..1743: note = Description of Artificial Sequence: Synthetic coding sequence
  source 1..1743: mol_type = other DNA
cagtgcaccgcccagcagcagctgctgggcctgagcagcggcgccggccaccatggggcccagctgatgctgcagaatccccccagggagcaacaagtttggggacagtggctgtcagggggactttgccctcatgagcccggcctgctgttctgtgaatggctgtgcgaatgtagcttttgggataaactgttgaccgacgacgggaacaagtggctatacaagaacaaagaccacggcatgctatctgccgccgcctcactcggaatgatcctactgtgggatgtggatggcgggctgacgcagattgataaatacttgtattctagtgaggactacattaaatctggcgcccttctggcttgcgggattgtaaattccggcgttcgtaatgaatgcgacccagcactggccttgctcagcgactatgtactgcataacagtaatactatgagacttggctccatctttggactggggctagcttacgcaggtagcaatcgcgaggacgtcttaactctcttactccccgtaatgggtgattccaagtcaagcatggaggtggccggcgtcacagccctggcttgtggaatgatcgccgttggctcctgtaatggcgacgtgacttctacaatcctgcagactattatggaaaaatcagagaccgaactgaaagacacttacgctcgatggcttcccctgggcttaggactcaaccacctgggcaaaggtgaggcaatagaagcaatactggcggccctcgaagtagtgagtgagccatttaggagcttcgctaacacattagtagacgtgtgtgcctacgcaggatccgggaacgtccttaaggtgcaacagctactgcacatctgtagcgaacacttcgatagcaaagagaaggaagaagataaagacaaaaaggagaagaaggataaggacaaaaaagaggcaccggcagatatgggcgcccatcagggtgttgccgtcctcggcccgcttttgctgtggggtaggcggctggttcagcgctggcattatgagccatatcaccaacttcgctatggcgaaccaaccttaaggcgggctgtgccgctagctttggccttgatttcagtgtctaatcccagactcaacattctcgatactctgtccaagttttctcacgacgctgacccagaagtgtcatacaattcaatctttgccatgggaatggttggatccggcactaacaacgcacgcctcgcagcaatgctgaggcaactggcacaataccatgctaaggaccccaataacctctttatggttcgccttgctcaaggcttgacacacttaggcaaaggaacactcacactgtgcccttaccattctgatagacagttaatgagccaggtggccgtcgctggcctgctgactgtgctcgtctcatttctagacgtgcggaacatcatcctgggcaagtcgcattatgttctctacgggctcgtggctgcaatgcaacctcggatgctagttaccttcgatgaggaactgcgacctctgcccgtaagtgtgagggtcgggcaggccgtagacgtagtcggtcaagctgggaagcccaaaacgattaccggcttccaaacacacacgacaccagtgttgctggcccatggagagcgcgcagaactggctacagaggaatttctccccgtaactccgatcctggaaggttttgtcttcggtaggacccctatcatgatctcgaagtag

SEQ ID NO: 201068 - DNA, 2703 bp, synthetic construct
  misc_feature 1..2703: note = Description of Artificial Sequence: Synthetic coding sequence
  source 1..2703: mol_type = other DNA
atggaggagggcggccgggacaaggcccccgtgcagccccagcagagcccggctgcggcaccaggtgggaccgatgagaagccttcaggcaaagacaaggagcaggaactctctgaggaagacaagcaactccaggatgagctagaaatgctcgtcgagaggttgggagagaaggatacatcgttatatcgacccgccctggaggagctgcgacggcagattcgatctagcaccacctccatgacctcggtccccaagcccctgaagttccttagacctcactacggaaaactgaaagaaatttatgagaacatggccccgggggagaacaaaagattcgccgcggatatcatatctgtccttgccatgactatgtcgggggagagagagtgtctgaaatatcgcctggtgggcagtcaagaggagctggccagctgggggcacgagtatgttcggcacctggctggcgaagtggcaaaggaatggcaggaactggacgacgccgaaaaagtccaaagggagcccctgttaacattggtaaaagaaatagtaccgtataacatggcccataacgccgaacacgaagcgtgtgatttgctcatggagattgaacaggtcgatatgctggagaaggatatagatgagaacgcctatgccaaggtgtgcctgtacctgacatcttgtgtgaattacgtgcctgaacccgagaactccgctctcctgcgttgcgccctgggagtgttccgcaagttcagcagattcccagaggccctccgcctggccctgatgcttaatgacatggaactggtggaggatatttttacatcctgtaaggacgtggtagtccagaaacaaatggcttttatgctggggcgccacggagtatttctggagctttcggaggacgtggaagagtacgaggatctgacagaaatcatgtccaacgttcaactaaactccaatttcctggccttagccagagagctggacataatggagcccaaggtgccggacgacatctacaaaacccacctagagaataacagatttggtggctcgggcagccaagttgacagtgctagaatgaacttggcaagctcctttgtgaatgggttcgtgaatgccgcgtttggccaggataagctgcttaccgacgacggcaacaaatggctctacaaaaataaggaccacgggatgctcagcgcagctgcgtccttaggaatgatattgctctgggacgtggatgggggactcacacaaattgataaatatctgtatagcagtgaggattacatcaagagtggagccctgctggcatgcggcatcgtcaactccggggtgaggaatgagtgtgaccccgccctggcccttctgagcgattacgtactacacaactcaaacaccatgcgtctgggcagtatcttcgggctgggtctcgcgtatgccggctctaaccgtgaggatgtgctcacactcttactccccgtaatgggcgacagcaaaagctctatggaggtcgccggcgtaacagcccttgcgtgtggaatgatcgccgtcggctcctgcaatggggatgtgacctcaacaattctccagactatcatggagaaatctgagactgagctaaaagatacctatgcccgctggttacccctggggctgggcctgaaccatctgggtaagggtgaggccattgaggctattctcgccgctctagaagtggtcagcgagccctttcggagcttcgccaacaccctcgtcgacgtgtgtgcctacgcaggcagcggtaacgtccttaaggtgcaacaactgctccacatttgttctgagcactttgacagcaaagagaaggaggaggataaggataagaaggaaaagaaggacaaagacaaaaaggaagcacctgcagatatgggggcgcaccagggtgtggccgttctgggcattgccctgattgccatgggggaggagatcggggccgaaatggcattgagaacctttggccatctgctgcgctatggtgagcccactctgcggcgtgctgtcccgctggcccttgccctgatatccgtgagtaatcccagacttaatatattggataccttgtctaagttttcacatgatgctgatcctgaggttagctataactcaattttcgcgatgggaatggtcggcagtggcaccaataacgcacggctggccgctatgttaagacagctggcacagtatcacgcgaaagacccaaataacttattcatggtgcggcttgcccagggcctgacacacttgggaaaggggactctgaccctgtgcccctatcatagcgacaggcagcttatgtcgcaggtggcagtcgcaggcttgctcactgtgctggtgtccttcctggacgttaggaacattatcctgggaaagtcccattatgtcttgtatggcttggtcgccgccatgcagccgaggatgctggtgactttcgacgaagaacttcgaccactgccagtgtccgtccgcgtggggcaggctgtggatgtggtcgggcaggccggcaaaccaaagacgatcacaggatttcagacacatactacccccgttctgctggcgcacggtgagagagctgagctcgcaaccgaggaattcctccccgttacccctatcctggaggggtttgtaatccttaggaagaacccaaattacgacttgtag

SEQ ID NO: 201069 - DNA, 552 bp, synthetic construct
  misc_feature 1..552: note = Description of Artificial Sequence: Synthetic coding sequence
  source 1..552: mol_type = other DNA
atggacgccagccccagccccttcagcctgcccaagaagctgaacgaactgtctgcgagacggggatctgatgaactgctatcctcagggatcatcaacgggcccttcactatgaatagctcaactccctcaacagctaatgggaacgacagtaaaaagttcaaacgagaccgccccccgtgttccccctctcgcgtgctacaccttcgtaaaataccttgtgacgtgactgaagccgagatcattagtctcggactgccattcggcaaggttacgaatctgctgatgttaaaaggaaagtcccaggcattccttgagatggctagcgaagaggcagccgtaacgatggtaaactactacacccccattacgcctcatctgcgatcccagcctgtctatattcagtatagcaatcatagggagttgaagacagataatctccctaaccaagcaagagcgcaggcagccttacaggccgtctctgccgttcaatccggttctctggcattgtctggcggaccttcaaatgaggggaccgtgctgcccgggtag

SEQ ID NO: 201070 - DNA, 474 bp, synthetic construct
  misc_feature 1..474: note = Description of Artificial Sequence: Synthetic coding sequence
  source 1..474: mol_type = other DNA
atggtgaccagcctggcctacacccaccacggccggcagtacctggcacaagaaggagtcattgatcaaattagtaatatcatcgttggagccgacagcgacccatttagctctttctaccttcctggctttgtgaagttttttgggaatctcgcggtgatggattcgcctcagcaaatttgcgagcggtatcccatattcgtagaaaaggtgtttgaaatgatcgaatcgcaggaccctactatgattggcgtggccgtagacacagttggcatcttgggaagcaatgtggaaggtaagcaagttttacagaagactgggtggtacgatctcgccctgttccgagacattctgatattcgaccgaggcagtatatgtaagttcatctgctggtgggtgaactacatcgtcgaaaccatcctgtgggtcgccgtgctcttaaccatgacactgtattcctgcctgaagatttag

SEQ ID NO: 201071 - DNA, 1386 bp, synthetic construct
  misc_feature 1..1386: note = Description of Artificial Sequence: Synthetic coding sequence
  source 1..1386: mol_type = other DNA
atggccgcccaggccctggccctgctgcgggaggtggcccggctggaagcccctctagaggagctcagagctctgcacagcgtgttacaggccgtgccgctcaacgaactgcggcagcaggcagccgagttgagactggggccattattctccctattaaacgagaatcatcgtgaaaaaactactctctgcgtgtctattctggaacgtctcctgcaggctatggagcccgtgcacgttgcacgcaatctgcgcgtggatctgcagaggggactgatccatcccgacgacagtgtcaaaattctcacccttagtcaaatcggacgaatagtggaaaactcagacgccgttaccgaaattctcaataatgctgagctcctcaagcagatcgtctattgcatcggcggtgagaacctctcagtcgccaaggcattgatcatagagattagctccgtgagcccagaatctctcaactactgtaccacctcaggacttgtgacacagctgctgcgcgaactgaccggcgaggatgtgctcgtgcgggccacctgcatcgaaatggtgacttctttagcttatacccaccatggtcggcagtatctcgcgcaagaaggggttattgaccagatctccaacataattgttggcgctgacagtgatccgttttcatcgttttacctaccaggtttcgtaaagttctttggcaatcttgccgtgatggattcgccccagcaaatctgtgaacggtatcctatcttcgtcgaaaaggtgtttgagatgatcgagtctcaggacccaaccatgattggcgtcgccgtcgacactgtagggatccttggctcaaatgtggaaggtaaacaggtactccaaaagactggtacccgcttcgaaaggttgctgatgaggatcggtcatcagagcaaaaacgccccagtcgagttaaagatccggtgcttggacgccatatctagcctgctttacctgccgccagagcaacaaactgacgatctcttgagaatgaccgagagttggttttcttccttatcaagggatccattagagctttttcggggcattagctctcagcccttccctgagctgcattgcgccgccttaaaagtgtttactgctattgccaaccaaccatgggcccagaagctgatgttcaattcacctggattcgtggaatacgtggtagaccggagcgtggaacatgacaaagcttccaaggatgcgaaatatgagctagtaaaggcactcgctaattctaagacgattgcagaaattttcgggaatccaaactacctccggctccggacatacctctccgaggggccttactacgtgaagcccgtttctaccaccgcagtggagggtgcagagtag

SEQ ID NO: 201072 - DNA, 294 bp, synthetic construct
  misc_feature 1..294: note = Description of Artificial Sequence: Synthetic coding sequence
  source 1..294: mol_type = other DNA
atgcggatcggccaccagagcaagaacgcccccgtggagctgaagattcggtgcctggacgcaatatctagcctcctctacctgccacccgagcagcagaccgacgatctgctgaggatgactgaaagttggttttcatctctgtctcgcgatccattggagctgtttcgcggcatctcaagtcagccctttcccgaattacattgtgctgctctcaaagttttcaccggacggaagcatctccaccttgaggaactggtgggggggaatcaggtgaaaaataccgtcgagtag

SEQ ID NO: 201073 - DNA, 510 bp, synthetic construct
  misc_feature 1..510: note = Description of Artificial Sequence: Synthetic coding sequence
  source 1..510: mol_type = other DNA
atgatctgcctggtgctgaccatcttcgccaacctgttccccgccgcctgtacaggcgcccacgagcgcacatttttggccgtgaagcctgatggagtgcagcgtcggctggtgggggagatcgtacggcgcttcgaacgaaaaggctttaaacttgttgccctgaagctcgtccaggcaagcgaggagctgttgcgagagcactatgcagagctaagagagcgtcccttttacgggcgtctagtaaaatatatggccagtgggcccgtggtcgccatggtgtggcagggactggatgtggtgcgtacgagtcgcgccctgattggtgccacgaacccggccgacgcgccccctggaaccattcgcggggatttctgcattgaggtgggcaagaatctgatccatgggtcagattccgtagaatccgctcgtagggagatcgccctgtggttcagagctgacgagcttctgtgctgggaggattccgctggccactggctatatgaatag

SEQ ID NO: 201074 - DNA, 744 bp, synthetic construct
  misc_feature 1..744: note = Description of Artificial Sequence: Synthetic coding sequence
  source 1..744: mol_type = other DNA
atgtacggcatgttcaagaaggtgaacgcccgggagcggatcgtgggatggtaccacactggccccaagctccataaaaatgacatcgccatcaatgagcttatgaagagatattgcccaaacagcgttttagtgatcattgacgtgaaaccaaaggacctcgggctccctaccgaagcctatatctccgttgaggaggttcatgatgacggtacacctacttccaagacatttgaacatgtaacatcagaaatcggggccgaggaagccgaagaggttggggttgaacatctgctccgagatattaaggataccactgtgggcactctgagtcagcggattaccaaccaggtccacggtctcaaggggcttaactccaaattactggatatacgctcgtatctggagaaagttgcaaccggcaagctgcctataaatcaccagatcatctaccagttacaggatgtgtttaacctgctgccggacgtctctctccaggaatttgtgaaggctttctacctgaaaactaacgaccagatggtagtggtctacttggcgtcgctcattcgttcagttgttgcgcttcacaacctcattaataacaaaatcgcaaacagagacgctgaaaaaaaggagggtcaggagaaggaagaatctaagaaggatcgcaaggaagataaagaaaaagataaggataaggaaaagtctgatgtgaaaaaagaggagaagaaggagaaaaagtag

SEQ ID NO: 201075 - DNA, 624 bp, synthetic construct
  misc_feature 1..624: note = Description of Artificial Sequence: Synthetic coding sequence
  source 1..624: mol_type = other DNA
atgagcgacgaggaggcccggcagagcggcggcagcagccaggccggcgtggtgacagtgtccgacgtccaggaactgatgcgccgcaaagaagaaatcgaggcacagatcaaagccaattatgacgtcctagagtctcagaagggaattggcatgaatgaaccgcttgtggattgtgagggctaccctcgttccgatgtagacctctatcaggtgagaaccgccagacacaacatcatctgcttgcaaaatgaccataaggccgtaatgaaacaggtcgaggaagccctgcaccaattacatgcaagggataaggagaagcaggccagagatatggcagaagcccacaaagaggccatgagcaggaaattgggtcaatctgaatctcagggaccaccgagggcgttcgccaaagttaactctatctccccaggtagccccgcctcgatagcaggcctccaagtagatgacgaaattgtggagttcggctcagtgaacacccagaattttcagtccctgcataacattggctcagttgtacagcacagcgaaggagcactggcgcccaccatactgctctcagtctctatgaaccttaccacccccggcacatcatcacgatag

SEQ ID NO: 201076 - DNA, 672 bp, synthetic construct
  misc_feature 1..672: note = Description of Artificial Sequence: Synthetic coding sequence
  source 1..672: mol_type = other DNA
atgagcgacgaggaggcccggcagagcggcggcagcagccaggccggggtggtgacagtgtccgacgtgcaagaactcatgaggcgaaaggaagagattgaggctcagataaaggccaactatgacgtgctcgaatcacagaaaggcatcggcatgaatgagcctcttgtcgattgcgagggctaccctcgctcggatgtcgatctgtaccaggtgcgtaccgcaaggcacaacataatttgcctgcagaacgaccataaagcagtgatgaaacaggtagaggaggcccttcaccaactccacgcacgcgataaggagaagcaggctcgcgacatggcggaggcccataaagaggcaatgagtcgcaaactcgggcagagcgaatctcaaggacctcctagagcttttgctaaggttaacagcatctcaccaggtagtcctgcatcaattgccggactgcaggtggatgatgagatcgtggagtttggatctgtgaatacccagaacttccagtccttgcacaacattgggagtgtggtgcagcacagcgaaggcaagccgttgaacgtcaccgttattcgacgtggagagaaacaccagctgcgcctggtgcctacacggtgggcggggaaggggctcctgggctgcaacattatccccctccagcgttag

SEQ ID NO: 201077 - DNA, 411 bp, synthetic construct
  misc_feature 1..411: note = Description of Artificial Sequence: Synthetic coding sequence
  source 1..411: mol_type = other DNA
atgctgctgaagctgaaggagaaggccagcctgaccctggccgtgggcaccctaccttttccatctcagttcaacttcgtgccaccaggtcggatgtgcagggtggctggctggggtcgcaccggtgtcctgaaacctgggtcagacaccctgcaggaagtaaagctgagacttatggatccacaggcgtgctcacactttcgggatttcgatcacaacttacagctgtgcgttgggaatccacgcaagacaaagagcgcttttaaaggagatagtgggggacccctattatgcgcgggtgtcgcccaggggatagtgtcgtacggtcggtctgacgcaaagccccctgcggtgttcaccaggatctctcactaccggccctggattaatcagatactccaggctaactag

SEQ ID NO: 201078 - DNA, 753 bp, synthetic construct
  misc_feature 1..753: note = Description of Artificial Sequence: Synthetic coding sequence
  source 1..753: mol_type = other DNA
atggccatgctgcgggtgcagcccgaggcccaggccaaggtggacgtgttcagggaggacctgtgcaccaagaccgaaaacctgttagggtcttactttcccaagaaaatctctgagctagacgcctttctgaaggaacccgctctcaacgaagcaaatttgtccaatttaaaagctcccctcgatattcctgtgccggaccctgtaaaggaaaaagagaaggaggagcgcaagaagcagcaggaaaaggaggacaaagacgagaaaaaaaaaggcgaagacgaggataaggggccaccatgcggtcctgtcaattgcaacgaaaaaatagtggtgctgctccaacgtctgaagccggagatcaaggatgtcatcgaacagctgaatctcgtaaccacgtggctgcaattgcagataccgaggattgaagacgggaataactttggcgtagctgtgcaagagaaagtgtttgaacttatgacttctctacacaccaaacttgagggctttcatactcaaattagtaaatacttctccgagagaggggacgcagttacaaaggccgcaaaacagccccatgttggcgattatcggcaattggtgcatgagctcgatgaggcagaataccgagatatacgcctcatggtcatggagatacgcaacgcttacgtgcgacggcaggggcagggaagagggggacagcgtcagctctcccaagctacccatagcctcaccctgcaggcgcggggttag

SEQ ID NO: 201079 - DNA, 627 bp, synthetic construct
  misc_feature 1..627: note = Description of Artificial Sequence: Synthetic coding sequence
  source 1..627: mol_type = other DNA
atgggcgaggtggagatcagcgccctggcctacgtgaagatgtgcttacatgccgcccgttaccctcacgctgccgttaacggactgtttctcgctccagcccctagaagtggggagtgtctctgccttaccgactgtgtgccactgttccattcacatcttgccctctctgtgatgctggaggtcgcgctcaatcaggttgatgtatggggcgcccaggctggcttggtggtagcagggtactaccacgcaaacgctgcagttaatgaccagtccccaggaccactcgccctgaagatcgccgggcggatcgcggagttctttcctgacgccgtcctgatcatgctcgacaaccagaagttggtgcctcaaccccgtgttcctccagtaattgtcctcgagaatcaggggctgaggtgggtgccaaaggacaagaacctcgtgatgtggagggattgggaggagagtcgccagatggttggggccctgctggaggatagggctcaccagcacctcgtcgatttcgactgccacctggatgatattaggcaagattggaccaatcagaggcttaatacacagatcacccagtgggtggggcccaccaacgggaacggaaatgcttag

SEQ ID NO: 201080 - DNA, 804 bp, synthetic construct
  misc_feature 1..804: note = Description of Artificial Sequence: Synthetic coding sequence
  source 1..804: mol_type = other DNA
atggccagcctgctgaaggtggaccaggaggtgaagctgaaggtggactcatttcgggagcgcatcacgtcagaagccgaagatctcgtcgctaatttctttcccaaaaagctgctggagttggatagcttcttaaaagagccgatcctgaacattcatgaccttactcaaatccacagcgacatgaatctccctgtgcccgatcccatcctgctgaccaactctcacgatggattggacggtcctacgtacaagaaacgacgactcgacgagtgcgaggaagcttttcaaggtacaaaagtatttgtcatgccaaatgggatgctgaagtctaaccaacaactggtcgatattatcgaaaaggtgaaacccgaaatccgattactcatcgaaaaatgcaacactccttctggtaagggtccccacatctgttttgatctacaagtgaaaatgtgggtccagctgctgattccccggatcgaagacggaaacaactttggcgttagcatccaggaggagactgtcgccgagctgagaactgttgagagcgaggccgcgagttatctggaccagatcagtcggtactacattacgagagccaaactagtctccaaaatcgctaagtatccccacgtagaagattacaggaggacagtgacggagatcgatgaaaaagagtatatcagccttcgcctcatcatttcagagcttcggaaccagtacgttaccctgcacgatatgatactaaagaatatagagaagattaagaggccacggtcctcaaacgcagaaaccctgtattag

SEQ ID NO: 201081 - DNA, 765 bp, synthetic construct
  misc_feature 1..765: note = Description of Artificial Sequence: Synthetic coding sequence
  source 1..765: mol_type = other DNA
atggccagcctgctgaaggtggaccaggaggtgaagctgaaggtggattccttccgggagagaataacgtcagaagctgaggatctggtcgcaaacttcttcccgaagaagttgcttgagctcgactcctttctcaaagagcccatcctcaatatccacgacctgacacagatccactccgatatgaacttaccggtccctgatccgatattgctcaccaatagccacgatggcctcgacggccccacttataaaaagcgccgcctggatgagtgcgaagaggcattccaggggaccaaggtcttcgtgatgccaaacggaatgctgaaaagcaatcaacagctggtggacattatcgagaaggttaagcccgaaatacgcctcctgatcgaaaaatgcaatacagtcaagatgtgggtgcagctgcttatcccccgtatcgaggacggcaataatttcggggtcagcatccaggaagaaaccgtggccgagctcagaacagtggaatcggaagccgcttcatatttggaccaaatctctcgctactatatcaccagggcgaagctggtgagtaaaatagctaaatatccccacgtggaggactataggcgaacagtgacagagattgacgaaaaagagtacatatcccttcggctgataatctctgagctgcgaaaccagtacgtcacccttcacgatatgatcctgaaaaacatagagaagatcaaacgaccccgatctagcaacgcagagactctgtattag

SEQ ID NO: 201082 - DNA, 48 bp, synthetic construct; identical to SEQ ID NO: 94888
  misc_feature 1..48: note = Description of Artificial Sequence: Synthetic coding sequence
  source 1..48: mol_type = other DNA

SEQ ID NO: 201083 - DNA, 393 bp, synthetic construct
  misc_feature 1..393: note = Description of Artificial Sequence: Synthetic coding sequence
  source 1..393: mol_type = other DNA
atggccagcctgctgaaggtggaccaggaggtgaagctgaaggtggacagctttcgcgaaaggattacgagcgaagccgaggatctagtcgccaacttctttcctaagaaactgttggagctcgacagcttcctgaaggaaccaattctcaatattcatgacctgacacagatccattccgacatgaacctgcccgtgcccgatccgatattactgactaattcacatgatggactggatggacctacttataagaagcgcaggctggatgagtgcgaggaagccttccagggtcagaacgttggtacggcacctgatagccaagacagaaggtggaaacagctttggggagtgcatagcggggggaacagttgtagggctaagaactgttag

SEQ ID NO: 201084 - DNA, 582 bp, synthetic construct
  misc_feature 1..582: note = Description of Artificial Sequence: Synthetic coding sequence
  source 1..582: mol_type = other DNA
atgaacctgcccgtgcccgaccccatcctgctgaccaacagccacgacggcctcgacggaccaacctataagaagcggagattggatgaatgcgaggaagcattccaggggaccaaggtattcgtgatgccaaatggaatgcttaaatcaaatcagcaacttgtggacatcattgaaaaagtcaagcccgaaatccggctgctcatagaaaaatgcaataccgtcaagatgtgggtgcaacttctcatccctaggatagaggatggcaacaattttggcgttagcattcaggaggagaccgtggctgagttgcgaacagttgaaagcgaagccgcgtcgtacctcgaccagatttcccggtactacattacaagggccaaactagtgtctaagattgccaaatacccacacgtggaggactatcgaagaaccgtgactgagatcgacgagaaagaatacatctcccttcggctaatcatcagcgaactgagaaatcaatacgtgacactccatgacatgattcttaagaatattgaaaagatcaaacgccccagatctagtaatgcagagacactgtactag

SEQ ID NO: 201085 - DNA, 5532 bp, synthetic construct
  misc_feature 1..5532: note = Description of Artificial Sequence: Synthetic coding sequence
  source 1..5532: mol_type = other DNA
atggagcccgccgagcgggccggcgtgggcgagccccccgagcccggtggtcgcccagaacctgggcctagggggttcgtccctcaaaaagagatagtgtataacaaactcctcccgtacgccgagaggctggacgcggaaagtgatctgcagcttgcccagatcaaatgcaacctgggacgggccgttcaactacaggagctctggcccggaggcctgttttggacccgtaaactgtcaacttatatccgtctgtacggccgcaagttctctaaggaggaccacgttctatttataaaactgctgtacgaactggtgtctatccctaagttggagattagcatgatgcagggttttgcacgcctgctaataaacctgctgaagaagaaagagctgctgtcaagagctgaccttgagctaccatggcgaccactgtacgatatggtggaacgaattctgtattcaaagactgaacatcttgggttgaactggtttccaaattccgtcgaaaacatactgaagactctcgtgaagtcttgtagaccttatttccccgcggacgcaacagccgaaatgctggaggagtggcgccccctcatgtgcccttttgacgttaccatgcagaaggctatcacatattttgaaatcttccttcctaccagcctcccaccggagctgcatcacaagggattcaaactttggtttgacgaactgataggactttgggtgtcggtgcagaatttacctcagtgggaaggccaactcgtgaatctcttcgcccgcctggccactgacaatatcggttacatcgattgggacccttacgtgcccaagatcttcacacgtatcttgcggagtctcaatctgccagtgggctcctcccaggttctagtacctcgatttctcacgaatgcctacgacattggacacgcagtgatctggattaccgccatgatgggggggccaagcaaactggttcagaaacatctggcaggactgttcaatagtattacctcattttatcacccctctaataacggcaggtggttgaacaaactgatgaaactcctgcagcgactgcccaactccgtcgtccggcgcctccacagagaacgatacaagaagccaagctggcttacgcctgtacctgactcccacaaactgaccgaccaagacgttacagacttcgtacagtgtatcatacaacccgtgctgctggctatgttttccaagactggcagcctcgaagcagcccaggcccttcagaacttggccctaatgcgtcccgagctggtgattcctcctgtgctggagagaacataccccgccctggagacactgaccgaacctcaccagcttaccgcgacgctgtcatgcgttatcggcgttgcccggagcctggtctccggaggcagatggttccccgaaggcccgacacacatgctccctcttctaatgagggccctgcctggggtggatccaaacgatttctccaagtgtatgattacttttcagtttattgctacctttagcacactggtgcctctcgttgattgcagctctgttctgcaggagagaaacgatctaaccgaagtggagagagaactctgtagcgccaccgctgagttcgaagatttcgtgctccaattcatggatcgttgtttcggcttaattgaaagctccactctggaacagacccgcgaggagaccgaaactgagaagatgactcacctagaatccctcgtggagttggggctcagctctacgtttagcaccatcttgactcagtgctccaaggagatattcatggttgcgctacagaaagtctttaattttagcacctcccatatattcgagacgcgggtagccggccggatggtagcggacatgtgcagggcagccgtgaaatgctgcccagaagaaagcctaaaactctttgtaccccactgttgttccgtgattacccagctgaccatgaacgacgacgtgctcaatgacgaagaactggataaggaactactgtggaacttgcagctcttatccgagataactagggtggacggcaggaagctcctgctctaccgagagcagctagtgaagattttgcagcggactttgcacctgacatgtaagcaggggtacactctcagttgcaatctcctgcatcacctcttacgctcgacaacattgatctacccgaccgaatattgcagcgtgccagggggttttgacaaacctccctcagaatacttccctattaaagattggggcaagcccggggatttgtggaacctgggcatccagtggcacgtgcccagcagcgaggaagtgtccttcgcgttctatcttctcgacagtttcctgcagcctgagctcgtaaaactgcagcattgtggcgatgggaaactggagatgagccgcgacgatattctgcagtctttgaccattgtgcataactgcctgattggctcagggaatctgctgccgccactgaaaggggagccggttactaacctcgtgcccagcatggtaagtcttgaagagaccaaactgtataccggcctggagtacgatttgtcacgtgaaaatcaccgggaggttatcgccacagtgattagaaaattgctcaaccacattcttgacaattcggaggacgacacaaaatcactcttcctgatcatcaagattatcggggatctgctccaatttcaggggagccataagcatgagttcgatagccgctggaaatcctttaaccttgttaagaaaagcatggagaaccggctgcacggtaaaaagcaacacattagagcccttctaattgatcgggtaatgttgcaacacgagctcagaactcttacagttgaaggttgcgaatacaaaaagattcatcaggatatgatacgggatctactgagactgagtacatcctcctattcgcaggtgcgaaacaaggcccagcagaccttttttgccgcccttggcgcttacaacttctgctgtcgcgatatcatcccactggtactggaattcctaaggccagatcggcagggcgtgacacaacaacagtttaagggggctctgtattgcctgttgggcaaccattccggggtttgcttagctaacctgcatgactgggattgtattgtccagacatggccagctattgtgagttccggtctaagtcaggcgatgtcgctggaaaagccaagcatcgtgagactgtttgatgatctggccgagaaaattcaccgacagtacgagactattgggctggactttaccatccccaagtcttgcgtggagattgctgagctgttgcagcagtctaaaaacccctccattaatcagatactgctctcgccagaaaaaattaaggagggtatcaaaaggcagcaggagaaaaacgccgacgccctccgcaactacgaaaatctggtggatactctgctggacggcgtggaacaacgcaatcttccttggaagtttgaacacatagggatcggcctcctttctttgttgctgcgcgatgatagggtccttccattgcgcgccatcaggtttttcgtggagaatctcaatcatgatgccattgtggtccgcaaaatggccatctccgctgttgccggaatacttaaacagctcaagagaacacacaaaaaactgacaatcaacccttgcgaaattagtgggtgccccaagcccactcagataattgctggtgataggcctgacaatcattggctgcactacgattccaagacgatccctcggactaagaaggagtgggagtcctcctgctttgtcgaaaaaacgcactggggctattatacatggccaaaaaacatggtggtttacgctggagtggaggaacagcctaagctaggccgaagcagagaagacatgacggaggcagagcagattatctttgatcacttcagcgatcccaagtttgtggagcagctgatcaccttcctctccctggaagacagaaaaggcaaggacaagtttaatccacgcaggttttgcttgtttaaagggatctttaggaattttgacgatgcgttccttcccgtgctcaaacctcacctggaacatctcgtggcagacagccatgagagcacccagcgctgtgtagcagagataatcgcaggacttatcagaggttcaaagcactggacttttgagaaggtagaaaagctgtgggagttactttgccctctgctgaggaccgctctgtctaatatcacagtggagacgtacaatgactggggcgcgtgcatcgctactagctgcgaatcgagggacccgcgcaagttgcactggttgttcgagttgctgttggaatctcctctctcaggtgagggcggttcattcgtggacgcatgtcgcctgtacgtgctgcagggagggctcgcacagcaggagtggcgcgtgcctgagttattacatcgtttgctcaagtatctggagcctaagctgactcaggtgtataagaatgtgcgagagagaattggctctgtccttacttatatctttatgatcgacgtatctttacccaatactaccccaaccatttccccgcatgtgccagagttcacggctagaatcttggagaagctcaaacccttgatggatgttgatgaggaaatccagaaccatgtaatggaggaaaatgggatcggtgaagaggatgagcggacccagggcatcaaattacttaagacaatcctgaagtggctgatggcttccgccggcagaagcttttctaccgcagtgactgagcagctgcagctgttacccctgttttttaagatcgcgcccgtggaaaacgataacagttacgatgagctcaaacgggacgccaagttgtgcctgtcactcatgtcacaggggctgctctatcctcaccaggtgccactcgttctgcaggtattgaaacaaacagcacgctcatcatcctggcacgcaaggtacacggtgctgacatatctgcaaaccatggtattttataacctctttatttttctcaacaacgaagatgccgtcaaagatatccgttggcttgtgatcagtttgctggaggatgagcaactcgaggtcagagagatggccgctaccacactgtccggtcttctccagtgcaacttcctcaccatggactcaccaatgcagattcacttcgaacagctgtgcaaaacaaaacttcccaaaaagcggaagagagaccctggttcagtcggtgataccatccctagcgcagagctggtgaaaagacatgccggggttctcggattaggcgcatgcgtcctgagttccccctacgacgtgcctacatggatgccacaattacttatgaatttgtccgcccacctgaacgacccccaacctatcgagatgactgtgaagaagacactctcaaacttccggcgtacccatcacgacaactggcaagagcacaaacagcagttcaccgatgaccagctcttagtattgactgacttgctggtttccccttgttactatgcatag

SEQ ID NO: 201086 - DNA, 2964 bp, synthetic construct
  misc_feature 1..2964: note = Description of Artificial Sequence: Synthetic coding sequence
  source 1..2964: mol_type = other DNA
atgggcgagaacctggccaagaagatcatgttcttcctgctgaccatcaaactgatactgaatcacattctcgataactctgaagacgatacaaaaagtctgtttctgattataaagataatcggtgatctgttacagttccagggatcccataaacatgaatttgactctcggtggaagagcttcaatctggtgaagaaatctatggagaaccggctccatggtaaaaagcaacatatacgagccctgctcatcgatcgagtgatgctccagcacgagctgcggacactgacagtggaaggctgcgagtacaaaaaaattcaccaggatatgatccgggatctactgaggttgtctaccagctcctattcgcaggtgaggaataaggcccagcagacttttttcgccgctctgggcgcatataacttttgttgtcgcgatatcattcccctggtcctggagttcttgagacctgaccggcagggcgttacacagcagcaatttaagggggccctgtactgtttactgggcaaccatagtggtgtttgtcttgctaacctacatgactgggattgcattgtgcagacctggcctgccatagtgtcaagcgggctgagccaggccatgtctctggagaaaccctcaatcgtacggctcttcgacgatctggctgaaaaaatccaccggcagtatgagacgattggcctggacttcaccattcctaagagctgtgttgagatcgccgaactcctccagcagagcaagaaccccagtataaatcagattttattaagccctgaaaagatcaaagagggcataaaaaggcagcaagagaaaaacgctgatgctctgcgtaattacgagaatctggttgacacactcttggacggcgtcgagcagcgcaacctgccctggaaatttgaacatattggaatagggctgctgtccttgcttctgcgagacgatagagtgctgcccttgcgggctattcggttcttcgtggagaatcttaatcatgacgcaatagttgttcgtaaaatggcaatctcggccgtggccggtattctgaagcaactcaagagaacccacaaaaagctcaccatcaatccttgcgaaataagcggctgtcccaagccgacccaaatcatcgccggcgaccggcccgacaaccattggttacattatgattccaaaaccatcccgcgcacaaagaaggaatgggagtcctcgtgcttcgttgaaaagactcactggggctactacacatggcctaaaaacatggtcgtctacgccggcgtggaggagcagcctaaacttggccggtccagggaagacatgaccgaggctgaacagattatcttcgaccatttctcagatccaaaattcgtggaacagctcattacatttcttagcctggaggataggaaaggcaaagacaaattcaatcccagacgcttttgtctgttcaaaggaattttcaggaacttcgatgatgcgtttttgcctgtgctgaagccacatttagagcacttagtcgccgactcacatgaaagtacacagcgatgcgtggccgagattatagcaggcctcattcgcggctccaaacactggaccttcgaaaaagtggaaaagttgtgggaactgctgtgtccactgctcaggacagccctgtcgaacatcacagtcgagacctataacgactggggcgcttgcatcgccacttcctgtgagtcgcgggatcctcgaaagttgcattggctgtttgaattgctactcgaatccccccttagcggtgaaggaggatcgttcgtagatgcatgtcgtctgtatgttctgcagggtggactcgcccagcaggaatggcgagtgcctgagcttctccaccgtctgcttaagtacctagagccaaagcttacccaggtgtataagaacgtgagggaacgtatcggttctgtcctgacttatatctttatgatcgatgtttccctacctaataccactcctaccatctcgccccatgttcctgaatttaccgcccggatactcgaaaaactgaagcctcttatggacgtcgacgaagaaatccagaatcacgtaatggaagagaatggaatcggcgaggaggacgagcgtacacagggcataaagctcctgaagacaatccttaagtggttgatggcctctgccggacgtagtttttctactgcagtgaccgaacagcttcagctgcttcctctgtttttcaaaattgcacctgtggaaaacgataactcttacgacgagctgaagcgcgatgcaaaactgtgcctgtcccttatgagccagggattgctgtatccccaccaggtgccactggtgcttcaggtgctgaagcagaccgcacgctcatcctcctggcacgccagatacacagtgctcacatacctgcagactatggtcttctacaacctgtttatcttcctgaataacgaggatgctgtgaaagacatcagatggctcgtgatatcactgttagaggacgagcagctagaggtcagagaaatggcagcgacgacactctccggtctgttgcagtgcaacttccttactatggatagtcccatgcagattcactttgagcagttgtgtaagaccaagctgccaaaaaaacgcaaacgagaccctggtagtgtgggcgacacaattccctctgcagaactggttaaacgtcatgccggagtgctgggtctaggggcatgcgtgttatcttccccttacgacgttccaacatggatgcctcagcttcttatgaatttatcagcccatctcaatgaccctcagcccatcgagatgaccgtaaaaaaaacgctgagcaacttccgacgcacacatcatgataactggcaggaacataagcagcagtttactgacgaccaactgctggtcctgaccgatctgttggtgtcaccatgttactatgcatag

SEQ ID NO: 201087 - DNA, 867 bp, synthetic construct
  misc_feature 1..867: note = Description of Artificial Sequence: Synthetic coding sequence
  source 1..867: mol_type = other DNA
atggccgccaccttcttcggcgaggtggtgaaggccccctgccgggctggaaccgaggacgaagaggaagaggaagaggggaggcgagagacccccgaagaccgcgaggtgagattgcaacttgccagaaagcgagaggttcggctgctcaggagacagaccaagactagcctagaagtgtctcttctcgaaaagtatccatgcagcaagtttataattgcaataggcaacaatgctgtagccttcttgtcatccttcgtaatgaactcaggcgtttgggaagaggtcggttgcgccaaactctggaacgaatggtgtcgcaccaccgatacgacccacctgagcagcaccgaagctttttgtgtgttttatcacctgaagtcaaacccctctgtgttcttatgtcagtgctcctgctacgtggccgaagatcagcagtaccaatggctggagaaggttttcggctcttgcccgcggaagaatatgcagataaccattttgacttgtcgtcatgtgaccgattacaagacttccgagagtaccggatcactgcccagtccattcctgagggccctcaaaactcagaacttcaaggatagcgcctgctgtccgctgttggagcaaccaaacatcgttcacgacttacccgcagccgtcttaagctactgtcaagtttggaaaatacccgccattctttatctctgttatacggacgttatgaaattagacctgatcacagtcgaggcatttaagcctatactgtccacccgaagtttaaagggcctggttaagaatataccgcagtccaccgagatattgaagaaactgatgaccacaaacgagatccaatcaaacatctacacttag

SEQ ID NO: 201088 - DNA, 804 bp, synthetic construct
  misc_feature 1..804: note = Description of Artificial Sequence: Synthetic coding sequence
  source 1..804: mol_type = other DNA
atggccgccaccttcttcggcgaggtggtgaaggccccctgccgggccgggaccgaagacgaggaggaggaggaagagggccgccgggagactccggaggacagggaagttcgcttgcagcttgcccgaaaacgggaagttcggcttctgcgtcgacagaccaagacctctctcgaagtgtcgctgttagaaaagtatccttgcagcaagttcattatcgctatcggtaacaacgccgtggcgtttctgtcaagcttcgtcatgaacagtggcgtgtgggaggaggttggatgcgctaagttgtggaacgagtggtgcagaacaaccgatacgacacatctaagttccaccgaggctttttgtgtattctaccacctcaaaagcaatccttccgtgtttggctcatgcccacgcaagaacatgcagataacgatccttacttgccgacacgtgactgattacaagaccagcgagtcgacggggagcctgccatcccccttcctgcgcgccctgaaaacccaaaattttaaagattcggcctgctgccctctcttagagcagccaaacatagttcacgatctgcccgctgctgtcctatcctattgccaggtctggaagatccctgccattctgtatttgtgctacactgacgtcatgaagttggacctgatcactgttgaagctttcaagcccatacttagcacccggtctctaaaagggctggtgaaaaacatcccgcagtcaaccgagatcttaaaaaaacttatgacaacgaacgaaattcagtccaatatctatacctag

SEQ ID NO: 201089 - DNA, 795 bp, synthetic construct
  misc_feature 1..795: note = Description of Artificial Sequence: Synthetic coding sequence
  source 1..795: mol_type = other DNA
atgttcgtgccctgcggcgagagcgcccccgacctggccggcttcacactgctaatgccagctgtcagcgtgggtaacgtagggcagctggctatggatctgatcatttcaaccctgaacatgagcaaaattggttatttttacactgactgcctggtgcccatggttggtaacaacccctatgctacaactgagggtaattcaaccgaattatctattaacgccgaagtatattcccttcctagccgaaagctcgtggctctccagctacgatctattttcatcaagtacaagagtaagccattctgtgagaagctgctgagttgggtgaaatcatctgggtgcgcgagagtgatcgtgctctcctcatctcattcttaccagcgaaatgatcttcagctgcgctccactcctttcagataccttctgactccgagtatgcaaaaatccgtgcagaataagattaaatctctaaattgggaagagatggagaaaagtcggtgtataccagagattgatgattcggagttttgtattcgcataccaggcggcggaattacaaaaacgttgtacgacgaaagctgttccaaagaaatccagatggctgttctcctgaagtttgtgtctgagggcgataacatccccgacgctctgggcttggtggagtacctgaacgagtggttgcagatacttaagcctctttccgatgacccaacagtgtccgcctcacgctggaaaattcccagctcttggcggttattgttcggtagcggcttaccgccagctctgttctag

SEQ ID NO: 201090 - DNA, 459 bp, synthetic construct
  misc_feature 1..459: note = Description of Artificial Sequence: Synthetic coding sequence
  source 1..459: mol_type = other DNA
atgcccgccgtgagcgtgggcaacgtgggccagctggccatggacctaattatctctactctgaacatgtccaagatcgggtacttttataccgactgtctggtgccaatggtgggcaataacccatacgctaccactgaaggaaattccaccgaactctcgatcaacgcagaggtctacagtctccccagtaggaagctggttgcactgcaacttaggagtatcttcatcaaatacaaaagtaagccgttctgtgagaaacttctaagctgggtgaaatctagcggttgtgctagggtcatcgttctgtcttcatcacacagttaccagcgtaacgacctccaactgagaagtaccccttttcggtatttgcttaccccttcgatgcagaagtctgtgcagaataaaataaaatcgctgaactgggaggagatggaaaaaggggccttcctcaagtag

SEQ ID NO: 201091 - DNA, 792 bp, synthetic construct
  misc_feature 1..792: note = Description of Artificial Sequence: Synthetic coding sequence
  source 1..792: mol_type = other DNA
atgttccggaaccagtacgacaacgacgtgaccgtgtggagcccccaggggcgtatccaccaaatcgaatatgccatggaagctgtgaaacaggggtcagccaccgtcgggctaaaaagcaaaacgcacgccgtgctcgtggccctcaaaagggcccagagcgagttggcagcccaccaaaagaaaatccttcatgtcgataatcatattggaatcagcatcgctgggctgaccgccgacgctcgacttctgtgtaatttcatgagacaggagtgtctcgactctaggtttgtgttcgaccgcccccttcccgtgtctcgtttagtctcattaattggctcgaagactcagatccccacgcagagatatgggagacgtccctacggcgtgggattgctgatagctggatatgacgatatgggccctcacatattccagacatgcccttccgcaaattacttcgattgtcgggctatgagtatcggcgcccgcagccaatccgctcgaacttatttggagaggcacatgtccgagttcatggagtgtaacctgaatgagctggttaagcacggtcttagggctctcagggagaccctacccgcggaacaggacctcaccactaaaaatgttagtatcggtattgtgggcaaagacctagaatttactatatatgacgacgatgatgtcagccctttcctcgagggattggaggagcgacctcagagaaaagcacagccggcccagcccgctgatgaacccgccgagaaagctgatgaacctatggaacattag

SEQ ID NO: 201092 - DNA, 792 bp, synthetic construct
  misc_feature 1..792: note = Description of Artificial Sequence: Synthetic coding sequence
  source 1..792: mol_type = other DNA
atgttccggaaccagtacgacaacgacgtgaccgtgtggagcccccaaggtagaatccaccagatagagtacgccatggaggccgtcaagcagggatctgcgaccgtgggcttgaagtctaaaacgcacgccgtcctggtggctctaaagcgggcacagagtgagcttgctgcacatcaaaaaaagatactgcatgtcgataaccatatcggaatttcaattgcggggcttacagcagacgcccgactgctctgtaactttatgcggcaggagtgcttagattcacggtttgtgtttgacagacctcttcctgtttcaaggctggtgagccttattgggtcaaaaacccagatcccgacacagcgctatgggcgtcgcccttacggcgtgggcctccttatcgctgggtatgatgacatggggccccatatttttcagacctgtcctagcgccaactacttcgattgtcgagccatgtctataggggccaggtcccagtccgctaggacttacctggagcgtcacatgagcgagttcatggaatgtaaccttaatgagttggtcaagcatggtttaagagccctgagagagacactacccgccgagcaggatcttactacaaagaatgtcagcattggaatcgtcggcaaggatctggagttcaccatttatgatgatgacgacgtgagccccttcttggaagggctggaagagaggccccagcgtaaagcccagcctgcacaaccagctgacgagcctgccgagaaggccgatgagcccatggaacactag

SEQ ID NO: 201093 - DNA, 810 bp, synthetic construct
  misc_feature 1..810: note = Description of Artificial Sequence: Synthetic coding sequence
  source 1..810: mol_type = other DNA
atgcagctgagcaaggtgaagttccggaaccagtacgacaacgacgtgactgtgtggtccccccagggacggattcaccagattgaatacgctatggaggccgtcaaacagggatccgctactgttggattaaagtccaaaacccacgctgtactggtggctctgaaacgcgcccagagcgagctggctgctcaccagaagaagattttacacgtggacaaccacattgggatttccatagcagggctgaccgccgatgctaggctcctttgtaattttatgaggcaggagtgcttagacagcagattcgtgttcgatcggcctctacctgtatctcggctggtcagcctaattggcagcaagacccagatcccaacacagcggtatggtaggagaccatacggagtgggcctcttaatagcgggctacgatgacatgggaccccacattttccagacctgcccatctgccaactatttcgactgccgcgccatgagtatcggagcgcgaagtcaaagtgctcgtacatatttagagcgacatatgtcagaatttatggaatgcaacctgaatgaactcgtcaagcatggcctgagagctctgcgggaaaccctgcccgctgaacaggacttgaccacaaagaatgtgtctatcgggatagtcggaaaggatctcgagtttacaatatatgatgatgatgatgtgtctccttttctcgaaggtctcgaagagagacctcagagaaaagcccagcccgcacagccggccgatgaacctgcagaaaaggcagacgagccaatggagcactag

SEQ ID NO: 201094 - DNA, 495 bp, synthetic construct
  misc_feature 1..495: note = Description of Artificial Sequence: Synthetic coding sequence
  source 1..495: mol_type = other DNA
atgttccggaaccagtacgacaacgacgtgaccgtgtggagcccccagggtcgcattcatcagattgagtatgccatggaagctgttaagcagggtagtgcgactgtcggtctcaagagcaagacacatgccgtgctggtggctcttaaaagggcacaaagcgagttagctgctcatcagaaaaagatactccatgtcgacaatcacatagggatttcgatagcagggcttacagcagatgcacgccttctgtgtaacttcatgcggcaggagtgtttagattccaggttcgtattcgaccgccccttaccggtctctagactagttagtcttatcgggtcctccatcctgtttatgatttgggcattaaccttctcaaagcctgtccacctgctgacaatcctcactgcggagccctgtcctttagaaccggtgcctaaccagctggtgctaacatggcgagatatatgtctcaacctatggagcgtgatttag

SEQ ID NO: 201095 - DNA, 1014 bp, synthetic construct
  misc_feature 1..1014: note = Description of Artificial Sequence: Synthetic coding sequence
  source 1..1014: mol_type = other DNA
atggaccagaacgagcacagccactggggcccccacgccaagggccagtgtgccagccgtagtgagctcaggatcatactggtaggtaaaactggaacaggtaaaagcgccgcggggaattcaattctcagaaagcaggcctttgaaagcaagctaggcagccagacactcacaaaaacttgctctaagtcacagggtagctggggcaatcgggagattgtaattatcgatacacccgacatgtttagctggaaagatcattgtgaagccctttacaaggaggtgcagcgttgttacttgctgtccgcacctggaccgcacgtgctgctgctagttactcagctagggcggtacactagtcaggatcagcaggctgctcaacgggtaaaggaaatttttggggaggacgcaatggggcacaccattgtgctctttacccacaaggaggacctgaacggcgggtctttgatggattatatgcacgattcagacaataaggcattgtctaagcttgtcgccgcttgtggtggccgcatatgtgcctttaacaaccgcgccgagggctccaatcaggatgaccaggtaaaggagctcatggactgcatcgaggaccttttgatggagaaaaatggcgatcactatactaatggtctctactctctgattcaaagatccaagtgtggtcctgtgggctcggacgaacgcgtgaaggagttcaagcagtccctgatcaagtatatggaaactcagaggagttatactgccctagcagaggctaactgcttgaaaggggcattaattaagacacaattatgtgtgctgttctgtattcagctctttttgcgattaatcatcctctggctttgcatactccacagcatgtgtaacctattttgctgtctgctcttctcgatgtgcaatttgttttgctcactgctcttcataatcccgaagaagctgatgatattcctgcgaacggtaattaggctagagcggaagactcccagactctag

SEQ ID NO: 201096 - DNA, 300 bp, synthetic construct
  misc_feature 1..300: note = Description of Artificial Sequence: Synthetic coding sequence
  source 1..300: mol_type = other DNA
atgggccccgactaccgggtgctggtgcaccgggcccggaagctggcccaacagtattatcttgtctaccaggagccgataccaacggctcagctggtgcaacgtgtggccagcgtgatgcaggagtacacacagtctgggggcgtgagaccttttggagtaagcttgttgatttgtggctggaacgaaggccgcccctaccttttccagtcagatcctagcggtgcgtactttgcatggaaagcgactgctatgggtaagaattatgtgaatgggaaaacttttcttgagaaaaggtag

SEQ ID NO: 201097 - DNA, 465 bp, synthetic construct
  misc_feature 1..465: note = Description of Artificial Sequence: Synthetic coding sequence
  source 1..465: mol_type = other DNA
atgctgtactgcgaggccgagagcccccccaccgtggagaaggtgaagccggcgagggagaattcagagacagacctcgagatcgagggcgagcacggccacctaggggccgtgcgagccgcttcaccacaaaagcttgagaaatctggcttccaggagctcagctcccactcattccctgagtcagcgctgcgcatggcctgcggcgggaatgtggcggagagacccgcccgcttttgcttggaatcctcctcaggcttggctggtgagtcttcctgctctttcccccggctcagccccgcctccggcgccgtccccagcagacggctcgtgaaatcgggcattaatacccaaacacggtttagcaatctgctaaacgtgtcaacctggggtatcttatgtaacctctgtaattctccgaggtcctttcctaaaaaagggagcaccgaacgtgaacatctttag

SEQ ID NO: 201098 - DNA, 747 bp, synthetic construct
  misc_feature 1..747: note = Description of Artificial Sequence: Synthetic coding sequence
  source 1..747: mol_type = other DNA
atgagcagcatcggcaccggctacgacctgagcgccagcaccttctcccccgacggacgcgtgtttcaagtggaatatgctatgaaagcagtagagaatagctctaccgccatcggcataagatgcaaggatggggttgtttttggggtggagaaactggtactgtctaagctgtatgaggagggctctaacaagaggctattcaacgttgaccggcatgtgggtatggcggtggccggactgctggcagacgcgcggtcattggcggacatcgcccgggaagaggcttcaaattttcgctccaactttggatataatattccgttgaagcatctggctgacagagttgccatgtacgtgcacgcatacacgctgtactccgcagtgaggcccttcggatgctcagtgaacgatggagctcagttatatatgatcgatcccagcggggtgtcatatgggtactggggctgcgccatagggaaagctaggcaggcagccaagacagagatcgagaagctacagatgaaagagatgacgtgtcgcgacatcgtgaaggaggtcgcaaaaatcatatatatcgttcatgatgaggtgaaagacaaagcgtttgagctcgagctgagctgggtcggtgagctgactaacggccgacacgaaattgtcccaaaggacatccgtgaagaagccgagaaatacgcaaaggaaagtctgaaggaggaggacgagtcggatgatgacaacatgtag

SEQ ID NO: 201099 - DNA, 786 bp, synthetic construct
  misc_feature 1..786: note = Description of Artificial Sequence: Synthetic coding sequence
  source 1..786: mol_type = other DNA
atgagccggcggtacgacagccggaccaccatcttcagccccgaggggcgactgtaccaggtcgagtatgccatggaggcaatcggtcacgctggaacctgcctgggtattctggccaatgacggagtgctgctggccgcagagagaaggaacattcataagctgctcgacgaagtgttcttctcagaaaagatttataaactgaacgaagacatggcctgttcagtggccgggattaccagcgacgccaacgtgctcacgaatgaactcaggctgatcgcacagcggtatctgcttcagtatcaggaacccattccatgtgaacagctggtcactgccctgtgtgacattaagcaggcttacacccagttcggcggaaagcgaccattcggcgtctccctgttgtatatcggctgggacaagcattacggctttcaattgtaccagtctgatccaagtggcaactatgggggatggaaggctacctgcattgggaataacagcgcagcagccgtttccatgctgaaacaggattacaaggaaggcgaaatgacgttaaaaagtgccctggcactggccataaaagttctcaataaaaccatggacgtgtccaaactgtccgcggagaaggtggaaattgctacattgactcgggaaaacggaaagacagtgattcgtgtcctgaaacagaaggaggtcgagcagctgatcaagaagcatgaggaagaggaagctaaggccgagcgggaaaaaaaggagaaagagcagaaagaaaaggacaagtag

SEQ ID NO: 201100 - DNA, 573 bp, synthetic construct
  misc_feature 1..573: note = Description of Artificial Sequence: Synthetic coding sequence
  source 1..573: mol_type = other DNA
atggcctgcagcgtggccggcatcaccagcgacgccaacgtgctgacgaacgagctgaggctgatagcccagaggtacctcctgcagtaccaggagccaattccctgcgagcagctggtgacagccctgtgcgacattaagcaggcctacacccaattcggcggcaagaggccatttggcgtgtctttgctctacattggttgggataagcattatggcttccagttataccagagtgacccaagcggcaattatgggggatggaaggcaacttgtataggaaataattccgccgccgcagtaagtatgctgaagcaggactataaagagggtgagatgaccctgaagtcggctctggcactggcaattaaagtattaaacaagaccatggatgtctccaagctgtccgcagagaaagttgagatagcaacgcttactcgggagaacggtaagactgtgataagagtcctaaaacagaaagaagtcgagcagttgattaaaaagcacgaggaagaagaggcaaaggccgaaagagagaaaaaggaaaaggagcagaaggaaaaggacaaatag

SEQ ID NO: 201101 - DNA, 786 bp, synthetic construct
  misc_feature 1..786: note = Description of Artificial Sequence: Synthetic coding sequence
  source 1..786: mol_type = other DNA
atgagccggcggtacgacagccggaccaccatcttcagccccgagggcaggctatatcaggttgagtatgcgatggaagccatcggacatgccggaacctgtctcgggatcctggcgaatgacggagtcctgctggctgctgagagaaggaatatccacaaattactggacgaggtcttttttagtgagaaaatctataagcttaatgaggacatggcatgtagtgtggccgggatcactagtgacgctaacgttttgacgaatgaactccgactgatagcgcagagatacctgttacagtatcaggagccgattccctgtgagcagctagtgaccgccttatgcgacatcaaacaagcctacacacagtttggaggaaagagaccttttggggtctccctgctgtatattggatgggataagcattacgggttccaactctaccagtctgacccctcaggtaactatggaggatggaaagcgacttgtatcggaaacaactccgctgcggccgttagcatgctcaaacaggattataaggagggagaaatgacactgaaatccgcgctggctctggcgattaaagtgctcaataagaccatggatgtctccaaattgtcagccgaaaaggttgaaatagcaacactgaccagagagaacggtaagacagtcatccgcgtactcaaacagaaggaagtcgagcagttgatcaagaagcatgaggaagaggaggcgaaggcggagcgcgagaagaaggaaaaagaacaaaaggagaaggataagtag

SEQ ID NO: 201102 - DNA, 666 bp, synthetic construct
  misc_feature 1..666: note = Description of Artificial Sequence: Synthetic coding sequence
  source 1..666: mol_type = other DNA
atgagccggcggtacgacagccggaccaccatcttcagccccgagggaaggctgtatcaggttgaatatgctatggaggctatcgggcatgctggtacctgcctcggaatcctagcgaatgacggagttcttttggccgccgaaaggagaaacatccacaagctcctcgatgaggtcttcttctctgaaaagatctataagctcaatgaggatatggcttgttcagtggcaggcatcacaagtgatgcaaacgtgctgaccaacgaattgaggttgatcgcccagaggtatttactgcagtatcaagagcccatcccatgtgagcagctggtgaccgctctttgtgatattaaacaagcttatacccagtttggggggaagcggccatttggggttagcctcctctacattgggtgggataaacactacggattccaactgtatcagtcagaccccagtggtaactatggcggatggaaagccacctgcattggtaataactccgccgcagccgtgtccatgctgaagcaggactacaaggagggcgagatgacattaaagtccgctcttgccttggccattaaggtcctgaacaagactatggacgtatctaaacttagcgctgagaaggtggagattgcgaccctcacaagggagaatggttag

SEQ ID NO: 201103 - DNA, 630 bp, synthetic construct
  misc_feature 1..630: note = Description of Artificial Sequence: Synthetic coding sequence
  source 1..630: mol_type = other DNA
atgagccggcggtacgacagccggaccaccatcttcagccccgagggccgcctataccaagtcgagtatgccatggaagcaattggccatgctgggacatgcttagggatcctcgccaatgacggagtgctgcttgccgctgaacggcgtaacatccacaagctgttggacgaagtgttcttttcggaaaaaatctataagctgaacgaagacatggcttgtagtgtggccggaatcacaagcgatgccaatgtcctgaccaatgaattacgcctcatcgctcaacggtaccttttacagtaccaagagcctatcccttgtgagcagctggtgactgctctgtgtgacatcaagcaagcatacacccagtttgggggtaaacgtccttttggtgtctcattgctgtacatcggatgggataagcactacgggtttcagttataccagtctgatccaagcggcaactacggcggatggaaagccacctgtataggcaacaatagcgctgctgcagtcagtatgctgaagcaagactacaaagagggggaaatgaccttaaagtcagctctggccctagctatcaaagtcctcaacaagacaatggacgtttctaaactgagcgcagagtag

SEQ ID NO: 201104 - DNA, 693 bp, synthetic construct
  misc_feature 1..693: note = Description of Artificial Sequence: Synthetic coding sequence
  source 1..693: mol_type = other DNA
atgagccggcggtacgacagccggaccaccatcttcagccccgaggccgaacgccgcaatattcacaaattactggatgaagtgtttttctcagagaagatttacaaacttaacgaagacatggcatgttcggtggccgggattacctcagatgccaacgttctgacaaatgagctaagattgattgctcagcggtatctgctgcagtatcaggaacccatcccatgcgagcaattggtaaccgccctgtgtgatattaagcaggcttatacacagtttggtggtaagcgcccgttcggtgtttcccttctctatatcgggtgggacaaacattatggcttccaattgtatcaatccgatcctagtgggaactacggaggctggaaagccacctgtatagggaataatagcgccgcagctgtgagtatgctaaagcaagactataaagaaggcgagatgacgttaaaatccgccctggccttggctatcaaggtgctgaacaagaccatggacgtgtcgaagttatcagccgagaaagtggaaatcgcaaccctaacgcgagagaacggcaagactgtcattcgggtcctaaagcagaaggaagtagagcagctgattaagaagcatgaggaggaggaagccaaggcagaacgggagaagaaggagaaagaacagaaagaaaaagacaaatag

SEQ ID NO: 201105 - DNA, 711 bp, synthetic construct
  misc_feature 1..711: note = Description of Artificial Sequence: Synthetic coding sequence
  source 1..711: mol_type = other DNA
atgagccggcggtacgacagccggaccaccatcttcagccccgagggacggttatatcaagtggaatacgccatggaggctatcgggcacgccggcacatgcctcggcatcttggcaaacgatggagttttactcgctgcggaacggagaaacatccacaagcttctagacgaggtgttttttagtgagaagatttataagctgaacgaggacatggcttgtagcgttgccgggatcacctccgatgccaacgtcctgacaaacgagctccgcttgattgctcaacggtatttgctacagtatcaggaaccaatcccgtgcgaacaactagtgacagcgctgtgtgacataaaacaagcttatacgcaattcggcgggaagagaccatttggtgttagcctgttgtatattggctgggataagcattatggatttcaactgtatcagtctgatccctctggcaattacggcggctggaaggctacgtgcataggtaacaacagcgcagccgcagttagcatgcttaagcaggactacaaagaaggggaaatgacactgaagagcgccctggccctcgctatcaaagtgctgaacaaaactatggacgtaagcaagctcagcgccgaaaaggtcgagatcgctaccctgacacgcgaaaacggaaagaccgtgattcgagtgctcaagcaaaaggaggtggaacaactttag

SEQ ID NO: 201106 - DNA, 726 bp, synthetic construct
  misc_feature 1..726: note = Description of Artificial Sequence: Synthetic coding sequence
  source 1..726: mol_type = other DNA
atgttcctgacccggagcgagtacgaccggggcgtgaacaccttcagccccgagggtcggctgttccaggtcgaatatgccatcgaagccattaagctggggagcaccgcgatcgggatacagaccagcgaaggagtgtgccttgccgtcgagaagcgtattacctcgcccctgatggaaccctcttcaatcgaaaagatcgtcgagatcgatgcccatatcgggtgtgcaatgagcggcctcatcgccgatgctaagaccctcatcgataaggccagagttgagacacaaaaccactggtttacatataacgagaccatgactgtggagtccgtgactcaggcagtcagcaatctggccctccagttcggcgaggaggacgctgatcctggcgccatgtcgcgcccgtttggggtggcactgctgttcggcggggtggacgagaaaggccctcagctttttcacatggatcccagcggcacctttgtccagtgcgatgccagagcaattggtagtgccagcgaaggagctcagtcctcacttcaggaagtataccacaaaagtatgaccctcaaagaggcaattaagtcctccttgatcattctaaagcaagtgatggaagagaaattgaatgcgactaacattgagctggctacagtgcagcccgggcagaatttccacatgttcactaaggaggagttggaagaggttatcaaggacatttag

SEQ ID NO: 201107 - DNA, 552 bp, synthetic construct
  misc_feature 1..552: note = Description of Artificial Sequence: Synthetic coding sequence
  source 1..552: mol_type = other DNA
atggagcccagcagcatcgagaagatcgtggagatcgacgcccacataggatgtgccatgagcggactgatcgccgatgccaagacacttatcgacaaggccagagtcgagacacaaaatcactggttcacatataatgagacaatgacggttgagagcgtcacccaagctgtctcaaatctcgccttacagttcggcgaggaagacgctgaccccggggccatgagcaggccgttcggagtggccctgctgttcggaggggtggatgaaaaggggcctcaactgttccatatggatccgagtggtacgtttgtgcagtgtgacgcccgcgcgattggttccgccagcgaaggcgctcagagcagtctgcaagaggtctatcataaaagcatgacactaaaggaagccattaagagctctcttatcatcctaaaacaggtcatggaagagaagctgaacgctactaacatcgagctggcgaccgtgcagccaggccagaattttcatatgttcaccaaagaggagttagaggaggtgataaaggacatctag

SEQ ID NO: 201108 - DNA, 741 bp, synthetic construct
  misc_feature 1..741: note = Description of Artificial Sequence: Synthetic coding sequence
  source 1..741: mol_type = other DNA
atgagccggggcagcagcgccggcttcgaccggcacatcaccatcttttcacccgaggggcgtttatatcaagtggaatacgccttcaaagcaatcaatcaggggggcctcacctcagtagctgtgagaggaaaggattgcgccgttatagttacacagaagaaagtacctgacaaactgcttgatagctcaacagtgacacatctttttaaaatcactgagaatattggctgcgtgatgactggtatgacggccgattcacgcagtcaggtccaaagggcgcgatatgaagccgcaaattggaagtataaatatggctacgagattccagtggatatgttatgcaagcgaattgccgacatcagccaagtgtacacccaaaatgccgagatgcgcccactgggctgctgtatgattctgataggaatcgatgaagaacaaggcccacaggtgtacaaatgcgatcccgctggctactattgtggattcaaagcgactgcagcaggagtgaagcagaccgaaagcactagcttcttagaaaaaaaagttaagaaaaagttcgattggacttttgaacagacggtggaaactgctatcacttgcctgagcaccgttctcagtatagactttaaaccaagcgaaattgaggttggggtggtcacagtggagaacccgaagtttcggattctcaccgaagccgagatcgatgcacatttggtggctctcgcggagagagattag

SEQ ID NO: 201109 - DNA, 684 bp, synthetic construct
  misc_feature 1..684: note = Description of Artificial Sequence: Synthetic coding sequence
  source 1..684: mol_type = other DNA
atggccggcctgcggcgggagtacgccttcaaggccatcaaccagggcggtctcaccagtgtggccgtgagaggcaaggactgtgcggtgatcgtgacacaaaagaaggtccctgataaactactggatagtagcactgtcacacatctgtttaagatcacggagaatattggctgcgtgatgaccggcatgacagccgacagccgtagccaagtgcagcgcgctaggtatgaggcagcaaactggaagtataagtatggctatgagattccagttgatatgttatgcaagagaattgctgacatctcccaggtttacacacaaaacgccgagatgcggcctttggggtgttgcatgatcctgatcggcatagacgaagaacagggcccccaggtatacaaatgcgaccccgctggctattactgcggcttcaaggctactgcggcaggcgtaaaacagactgagagcacttcatttctggagaaaaaagtcaagaagaaattcgattggactttcgagcagacggtggagacagcaatcacgtgcctctccacagtgctgagcatcgacttcaagcctagtgagattgaggtgggtgtcgttaccgtcgagaaccccaaattccgtatcctcaccgaggccgagatcgatgcacatcttgttgccctggctgaacgggactag

SEQ ID NO: 201110 - DNA, 759 bp, synthetic construct
  misc_feature 1..759: note = Description of Artificial Sequence: Synthetic coding sequence
  source 1..759: mol_type = other DNA
atgagccggggcagcagcgccggcttcgaccggcacatcaccatcttttcaccagaaggcaggctgtaccaggtcgagtatgctttcaaagccatcaatcaaggaggcttgacttctgtggcagtgagagggaaggattgcgccgtgatcgtcacacagaagaaagtgcccgacaagctcctggattcttccacggtgacacacctttttaagattaccgagaatatcggttgtgtgatgaccggcatgacagccgactccagaagccaggttcagcgcgcccgctatgaagcagctaattggaagtacaagtatggctacgaaatcccagtggacatgctctgcaagaggatcgctgatatctcccaggtatacacccaaaacgcagagatgagaccactgggatgctggtcgttcctgtttctggggatgattctcataggaattgatgaggaacaaggaccccaggtgtacaagtgtgatccagccggctattattgtggtttcaaggcaactgccgccggagtgaagcagaccgagagtacgagtttcctggagaaaaaagtgaagaagaaattcgactggacctttgagcagacagtcgaaacagctatcacctgtctgtccacggttctgagtatcgatttcaaaccgagtgagatcgaggtgggcgtcgtcacagtggagaatcctaaatttcgaattttgaccgaggctgaaatagatgcacatttggtggcccttgctgaacgcgattag

SEQ ID NO: 201111 - DNA, 324 bp, synthetic construct
  misc_feature 1..324: note = Description of Artificial Sequence: Synthetic coding sequence
  source 1..324: mol_type = other DNA
atgagccggggcagcagcgccggcttcgaccggcacatcaccatctttagtcccgaagggcgactctatcaggtggaatacgcctttaaagccatcaatcagggcgggctaacttctgtggctgtgaggggaaaagactgcgctgtaatagtgacgcagaagaaagtcccagataaactcttagatagctccactgttactcacctcttcaagatcacagaaaatatcggctgtgtgatgactggtatgacagtgtccctttgtcgaccaggatgcagtgccagctgggtgcaggccatcttggtgcctcagccccccaggtag

SEQ ID NO: 201112 - DNA, 447 bp, synthetic construct
  misc_feature 1..447: note = Description of Artificial Sequence: Synthetic coding sequence
  source 1..447: mol_type = other DNA
atgagccggggcagcagcgccggcttcgaccggcacatcaccatcttctcacctgagggccgactttatcaagtggagtatgcttttaaggctatcaaccaaggcggtcttacctctgtggccgtgcgtggcaaggactgtgctgtcatcgtgacccaaaaaaaagttcccgacaagttgctggactcaagtacggtgacccacctgttcaaaatcactgaaaacattggttgtgtcatgactggaatgaccgccgatagtaggtctcaggttcagagggctcggtatgaagcagccaactggaaatataagtacgggtacgagatccctgtggacatgctctgcaagcggatagctgatatctcgcaggtttatacccagaacgccgaaatgcgacctcttggctgttactgcaactacatgccagtctactgctccataaactag

SEQ ID NO: 201113 - DNA, 504 bp, synthetic construct
  misc_feature 1..504: note = Description of Artificial Sequence: Synthetic coding sequence
  source 1..504: mol_type = other DNA
atgaccggcatgaccgccgacagccggagccaggtgcagcgggccagatacgaagcggccaattggaagtacaagtacggttatgaaattccagttgacatgctgtgcaaacggattgctgatatcagtcaagtctacacacagaacgcagagatgagaccccttggttgttgcatgattctgattggaattgatgaggagcaaggcccccaggtgtacaaatgcgatcctgcaggctattattgcgggtttaaggccactgccgccggcgtgaagcaaacggagtccacctccttcctcgaaaaaaaggtgaagaagaagtttgattggacttttgagcagaccgttgaaacagctatcacttgtctgtctactgtgctgtcgattgattttaagccttccgagatagaagtcggcgttgttacagttgagaaccccaaattccgtattctcactgaggctgaaatcgacgctcatctagtggccctggcagaaagagactag

SEQ ID NO: 201114 - DNA, 612 bp, synthetic construct
  misc_feature 1..612: note = Description of Artificial Sequence: Synthetic coding sequence
  source 1..612: mol_type = other DNA
atgagccggggcagcagcgccggcttcgaccggcacatcaccatctttagccccgaaggtaggctttaccaggtcgaatatgccttcaaggctatcaatcagggcggcctgacaagcgtggcggtaaggggcaaggactgcgccgtaatcgtaacacagaaaaaggtccctgacaaactgttagatagttctaccgtgactcatctgttcaaaatcactgaaaatatcggctgcgtcatgacagggatgacggcagatagccggagccaggtgcaaagagccagatatgaggcagcgaattggaaatacaagtacggatacgagatccctgtcgacatgttgtgcaagagaattgcggacatcagccaggtctatacccagaatgcagaaatgcgccccctcggctgctgtatgatcctgattggcatcgatgaagaacagggaccccaggtatacaagtgtgatccagccgggtactattgcggattcaaggccacagcggcaggggtgaagcagactgaaagcacgagcttcctggagaagaaggtaaaaaagaagttcgactggacatttgagcagactgtggaagattcctatagatctagagattag

SEQ ID NO: 201115 - DNA, 450 bp, synthetic construct
  misc_feature 1..450: note = Description of Artificial Sequence: Synthetic coding sequence
  source 1..450: mol_type = other DNA
atgagctacgaccgggccatcaccgtgttcagccccgacggccacctctttcaggttgaatacgcacaggaggccgttaagaaagggagcactgcggtaggtgtgcgcggacgggacatcgtggtcctgggcgtcgagaaaaaatcagttgcaaagttacaggacgagcggaccgtgaggaagatctgcgcgctcgacgataatgtttgtatggccttcgcaggcctgactgccgatgcacgcattgtgatcaatagagccagggtggaatgtcagtctcacaggttgactgtcgaggaccctgtgaccgtcgagtacattacccgctatattgcctcactaaagcaagttggagcatgccctctggcgtgttccccactggcagctgggcaaagtcgcctccgacacggagggagttgccacgtgacaagcggagaatcagaaaattag

SEQ ID NO: 201116 - DNA, 537 bp, synthetic construct
  misc_feature 1..537: note = Description of Artificial Sequence: Synthetic coding sequence
  source 1..537: mol_type = other DNA
atggccttcgccggcctgaccgccgacgcccggatcgtgatcaacagagctcgggtggagtgtcagagccatagactaaccgtagaggacccagtgacagttgagtacattacaagatacatcgctagtctgaaacaaagatacacacagtcgaacggacgccgccccttcggaatttcggccctcatcgtgggcttcgattttgacggcactccgcgtctttaccaaactgacccctccggcacctatcatgcctggaaagcgaacgctatcggccgcggcgccaagtccgtgcgcgaatttctggagaaaaactacacggacgaagctattgagacagacgatctaactattaagttggtcatcaaggcactcctggaggtggttcagtctggtgggaagaatatcgagctggccgtgatgcgaagggatcagtcactcaaaatcttaaaccctgaagaaattgagaagtatgtggccgagatcgaaaaagaaaaagaagagaacgagaaaaaaaagcagaaaaaggcgtcatag

SEQ ID NO: 201117 - DNA, 747 bp, synthetic construct
  misc_feature 1..747: note = Description of Artificial Sequence: Synthetic coding sequence
  source 1..747: mol_type = other DNA
atgagctacgaccgggccatcaccgtgttcagccccgacggccacctttttcaggttgagtatgcccaggaggcggttaagaaaggtagtaccgccgttggggtgagaggtcgggacattgtcgtcctcggcgtcgaaaaaaagagcgtcgccaaactgcaggatgagaggacggttcggaaaatttgcgccctagatgacaacgtgtgtatggcattcgccggcctcactgccgacgcacgcattgtcattaatcgggcacgtgtggagtgtcaaagccaccgcttaacggtagaagatcccgtcacagtggaatacatcacccgatatatagcgagccttaaacaaaggtacacccagtctaacgggaggcgcccatttggcattagtgctctgatagtgggctttgacttcgatggcacaccccgcctgtaccaaaccgatcccagcggaacctatcacgcctggaaagccaatgcaatcggccggggggcaaaatccgtcagagagtttttagagaaaaattacactgatgaggctattgagaccgatgacctcaccattaagctggttatcaaggctcttctggaggtggtgcaatccggcggaaagaatatcgagcttgcggtgatgaggcgtgatcagagtctcaagattctaaatcccgaggaaattgagaaatatgtagccgaaattgagaaagagaaagaggaaaatgagaagaagaagcagaagaaggcctcttag

SEQ ID NO: 201118 - DNA, 564 bp, synthetic construct
  misc_feature 1..564: note = Description of Artificial Sequence: Synthetic coding sequence
  source 1..564: mol_type = other DNA
tgactgaccgccgacgcccggatcgtgatcaaccgggcccgggtggaatgccagtcccatcgtctgactgtagaagatcccgttactgtcgaatacataaccaggtacatagctagtctcaaacagaggtacacacagtcaaacggccgacggccctttggcatttctgctctgattgtgggtttcgatttcgatggtacacccagactgtatcagactgatccttcaggcacttaccacgcatggaaagcaaatgctatcgggaggggcgccaagtctgtgcgtgaatttttggaaaagaactatactgatgaagcaatagaaactgacgaccttacaatcaagctggtcattaaagctttgcttgagggaaaggtggtcaatgcccccgtgttttgcccatttaaggtcgttcagagcggcgggaagaatatagagctcgctgtcatgcgaagagaccagagcctcaagatactgaatccagaggaaatagaaaagtacgtggccgaaattgagaaggaaaaagaagagaacgagaaaaagaagcagaagaaggcaagctag

SEQ ID NO: 201119 - DNA, 726 bp, synthetic construct
  misc_feature 1..726: note = Description of Artificial Sequence: Synthetic coding sequence
  source 1..726: mol_type = other DNA
atgctgagcagcaccgccatgtacagcgcccccggccgggacctgggcatggaaccccacagggcagccggtcccctgcagctcagattctcaccctacgtctttaatggaggcaccattctggcgatcgctggcgaggacttcgcgatcgtcgcatccgacaccagattaagcgagggcttctccattcacacacgcgattcccctaaatgctacaagctcacagataagacagtaatcgggtgctccggctttcacggcgactgcttgaccctgaccaagatcattgaagcccgcctcaaaatgtacaagcattccaacaataaggccatgaccaccggtgccattgctgcaatgctctccaccattctgtattcaaggaggttttttccatactacgtgtacaatatcatagggggacttgatgaggaaggtaaaggcgcagtctactccttcgaccctgtcggttcatatcagagagactctttcaaggccggtggttctgcatctgccatgctgcagccgctgctagacaaccaggtcggattcaaaaacatgcagaacgtggaacacgtgcccctgtctttggaccgggcgatgcgcctagtcaaggatgtcttcatctcagcagctgaaagagacgtttacaccggcgatgctctccgcatatgcatcgtgacgaaggagggcattcgggaggagaccgtaagcctgcgcaaagattag

SEQ ID NO: 201120 - DNA, 591 bp, synthetic construct
  misc_feature 1..591: note = Description of Artificial Sequence: Synthetic coding sequence
  source 1..591: mol_type = other DNA
cggcggagccgggccatgctgagcagcaccgccatgtacagcgccccgggtcgcgacctaggtatggaaccgcacagggccgccggcccgctccagctgagattcagtccctacgttttcaacggtggaacaatactcgcgattgcgggcgaggattttgcaatcgtcgcttcagataccaggttgagcgaggggttttccattcatacacgggattcacctaagtgttataaactaactgacaaaaccgtgatcggctgttccggttttcacggagactgcctcacgctgacaaagatcattgaggctagactgaaaatgtacaagcatagcaataataaggcgatgactactggtgccattgctgccatgttgtctacaattctttatagccggagattcttcccatactacgtgtacaatattatcgggggcctggatgaggagggaaaaggagctgtctattcctttgaccccgtggggagctatcagcgagatagctttaaagcagggggatccgcttcagcaatgttgcagcctctgctggataatcagtacatttcctcgaactcagtttccttatgcgtttag

SEQ ID NO: 201121 - DNA, 822 bp, synthetic construct
  misc_feature 1..822: note = Description of Artificial Sequence: Synthetic coding sequence
  source 1..822: mol_type = other DNA
atgctgaagcccgccctggagccccggggcggcttcagcttcgagaactgccagcgcaatgcgtcgctggagcgagtgctgcctggccttaaggtgccccacgctcgcaagaccggaaccaccattgctggtctagtttttcaggatggggtgattctcggagcggataccagggctacaaacgacagcgtcgtagccgataagtcttgcgaaaagatccattttatcgcccccaaaatctattgttgtggggcgggtgtggctgctgacgcagaaatgacgaccaggatggtggcgagcaagatggagttgcatgctctttcgaccgggcgcgagccaagagttgcaaccgttacaaggattctccgccagactttatttcgttatcagggtcatgtgggggcttcccttatcgtcggaggcgttgatctcacaggccctcaactctacggggtacaccctcatggctcatattctaggttacccttcacagctcttggaagtgggcaggatgcagctctggcagtgctggaggatcgttttcagccaaatatgacactcgaagccgcgcaaggactgctggtggaggccgtgaccgcaggaatccttggggatctggggtctggaggcaatgtggatgcatgcgtgattaccaaaacaggggcaaaactcctgcgcactttgtcttctccaacggagcctgtgaagcggagtggaaggtaccactttgtccctggaaccaccgcggttctcactcaaacggtcaagccactgaccctcgagttggtagaagaaacagtgcaagctatggaggtcgagtag

SEQ ID NO: 201122 - DNA, 903 bp, synthetic construct
  misc_feature 1..903: note = Description of Artificial Sequence: Synthetic coding sequence
  source 1..903: mol_type = other DNA
atggccctgcaggacgtgtgcaagtggcagagccccgacacccagggaccaagtccgcatttgccccgcgccggaggatgggctgtgcctaggggttgtgatccgcagacttttctacagattcatggcccacggttagcccatgggacaacaaccctcgctttccggtttcgccacggagtgattgccgcggctgacacccggagcagctgtggcagctatgtggcatgccccgccagctgtaaggtgattccagtacaccagcacttgcttgggaccacatctggcacgtctgctgactgtgccacctggtatcgtgtgctgcaacgcgagctgcgacttcgggaactacgcgaagggcagctcccaagcgtggcttctgcagccaagctgctgtcagccatgatgtcccagtaccggggcctggatctgtgcgttgcgaccgccctgtgcggctgggatagatctgggcccgagctgttttatgtgtattctgatgggacaagattgcagggggatatcttcagcgttggctccggctctccctacgcgtacggagtgctggaccgtggctatagatatgatatgtccacacaagaggcctatgcccttgcccgctgcgcagtcgcccatgcaacacacagagacgcatacagcggcgggagcgtcgatctattccacgtgagagaatcaggatgggaacacgtgtccagatctgacgcttgcgtcctgtatgtcgagctgcagaagctgctggagcccgagcccgaggaggacgcaagccacgctcaccctgaacctgctacggctcaccgagccgccgaggaccgggagctatcggtgggtcctggcgaagtgactccgggtgacagcagaatgccagcaggcacagagacagtgtag

SEQ ID NO: 201123 - DNA, 606 bp, synthetic construct
  misc_feature 1..606: note = Description of Artificial Sequence: Synthetic coding sequence
  source 1..606: mol_type = other DNA
atggagtacctgatcggcatccagggccccgactacgtgctggtggcaagcgatagagttgctgctagtaacatcgtccagatgaaagacgatcatgataagatgtttaagatgtcagaaaaaatacttctgctttgtgtgggagaagctggggacactgtgcagtttgcggagtacatccagaagaacgtgcaactatacaaaatgcgtaatggctatgagctcagtcccaccgctgcggccaactttaccaggcgtaacctggccgactgtctgaggagccgcacgccataccacgtaaatttattgttagcagggtatgatgagcatgaggggcctgcactgtactatatggattatctcgccgccctggcgaaggcccccttcgcggctcatggctatggcgcctttctcactcttagcattctagaccgctattacaccccaacgatcagcagagagcgagccgttgagctcctgcgcaagtgcttagaagagcttcagaaacgatttatcctgaacctccccacattttccgtgcgcatcatagataaaaatgggatccacgacctagataatattagcttcccaaaacaagggagttag

SEQ ID NO: 201124 - DNA, 468 bp, synthetic construct
  misc_feature 1..468: note = Description of Artificial Sequence: Synthetic coding sequence
  source 1..468: mol_type = other DNA
atggccagcctgaagtgcagcaccgtggtgtgcgtgatctgcctggagaaacccaaataccgctgccctgcctgcagggtgccttattgttctgtggtctgtttccggaagcacaaagagcagtgcaacccggagacccggcccgtggagaagaaaatacgatcggctttgcctacaaagacagtgaaacccgtggagaacaaggacgatgatgactcaatcgcagacttcctgaatagtgacgaggaggaggatagggtgtcgttgcagaacctgaaaaatctgggtgagagtgcgacactgcgctcccttttgctgaatccgcatctgcgccagctgatggtcaatttggaccaaggagaagacaaggcgaaactgatgagggcatatatgcaggagccactttttgtcgaattcgctgattgttgtctcggcattgtagagccaagccaaaacgaagagtcctag

SEQ ID NO: 201125 - DNA, 795 bp, synthetic construct
  misc_feature 1..795: note = Description of Artificial Sequence: Synthetic coding sequence
  source 1..795: mol_type = other DNA
atggaggccttcctgggcagccggagcggcctgtgggccggcggccccgcccccggacagttctatagaattccatccacacctgactcatttatggacccggcctccgccctgtatcgcggccctatcacaaggacacagaacccaatggttacgggcacatccgtcctcggcgtgaagttcgaggggggggtggtgattgccgcagacatgcttggctcctacgggagtctggcccgattcagaaacatctctagaattatgcgagtcaataattccacaatgctgggcgcttctggggattatgccgatttccagtatttgaagcaggttttgggacagatggtgatcgatgaggagctattgggcgacgggcacagttactcaccccgagcgatccattcttggctgacccgagctatgtactcaaggagatcaaagatgaaccccctgtggaatacgatggtcataggagggtatgccgatggcgagagttttctaggctacgttgatatgctgggagtcgcttacgaggctccctctctggccaccgggtacggggcttatctcgcgcagcccttgctccgcgaggtgttagagaaacagcccgtgctgtcacagaccgaagctcgggacctggtcgagcgctgtatgcgggtactgtattatagggacgcaaggagttataataggttccagatcgccacggtcactgaaaagggtgtagagatagagggccccctgagcactgagacaaattgggacatcgctcacatgatctccggtttcgagtag

SEQ ID NO: 201126 - DNA, 792 bp, synthetic construct
  misc_feature 1..792: note = Description of Artificial Sequence: Synthetic coding sequence
  source 1..792: mol_type = other DNA
atggccctggccagcgtgctggagcggcccctgcccgtgaaccagaggggattttttgggctcggcggccgcgccgaccttctagacctgggccccggcagcctgagtgatgggctcagcttagccgcccctggatggggcgttcccgaggagcctgggatagagatgctgcacggtacaactaccctcgcctttaaatttagacacggggtgattgtggccgctgattcaagagcgactgcgggcgcctatatagcctcccagaccgtgaaaaaggttatagagatcaacccgtatctgcttggaactatggcaggcggagccgccgactgctcattctgggaaaggttgctcgctcgacaatgtagaatatacgaactcagaaacaaagagaggattagcgtggcagccgcctctaagctactggcgaatatggtctatcagtataagggcatggggttgagcatggggacaatgatctgtggctgggataagaggggtccagggctctattacgtggattcagaaggaaaccgcatctccggcgcaactttttctgtcggatccggttccgtatatgcttatggggtcatggatagaggctattcatacgacctggaggtggaacaggcttatgacctggctcgaagggccatataccaagcgacatatcgcgacgcttatagtggtggagctgtaaacctgtaccacgtgagggaagatggatggattcgcgtcagctctgacaatgttgctgacttgcacgaaaaatattctggctcgacaccgtag

SEQ ID NO: 201127 - DNA, 483 bp, synthetic construct
  misc_feature 1..483: note = Description of Artificial Sequence: Synthetic coding sequence
  source 1..483: mol_type = other DNA
atggccggcggcgccgccgactgcagcttctgggagcggctgctggctcgccagtgtagaatctatgaattacggaacaaagaacggatttcggtcgccgctgccagcaaactattggccaacatggtttaccagtataagggcatgggactctctatgggaactatgatttgcggatgggataaacgaggaccaggactctactatgtagacagcgagggaaaccgtatcagcggagccacattctccgtggggagcgggtccgtgtacgcatacggagttatggaccgcgggtactcatacgatttagaggtggagcaggcatacgatctcgcaaggcgagcgatctaccaggcgacttaccgcgatgcgtactctggtggcgccgtgaatctctatcacgtaagggaggacggctggatacgtgtttcctccgacaatgttgcagacctgcatgagaagtactcgggctccaccccatag

SEQ ID NO: 201128 - DNA, 612 bp, synthetic construct
  misc_feature 1..612: note = Description of Artificial Sequence: Synthetic coding sequence
  source 1..612: mol_type = other DNA
atggccctggccagcgtgctggagcggcccctgcccgtgaaccagcgagggtttttcgggctgggaggtagagctgatttgctcgacttgggccctggctctctgtcggacggcctctcactggctgcccccggctggggcgtccccgaggagccgggtatcgagatgctgcacgggaccacaactctcgcctttaaatttagacatggtgttatcgtggctgcggactctagggcaactgccggagcctacattgccagccagacggtgaagaaggtcatcgaaatcaatccatatctactgggaacaatggccggtggtgccgcggactgcagcttctgggagcgactgctagctcgccaatgccgcatctacgagttgcggaataaggaacgtatttccgtggctgctgctagtaagctgctggcgaatatggtgtatcaatacaaaggaatgggcctgtctatgggcacaatgatctgcggctgggataagcgcgggcccgtgtcagaggtactttgccttaagcccaagtcgttcggaatgtatctattctgcggttgcgctgagaggatcggaaacatggcacggccactgcttaggggccagtag

SEQ ID NO: 201129 - DNA, 834 bp, synthetic construct
  misc_feature 1..834: note = Description of Artificial Sequence: Synthetic coding sequence
  source 1..834: mol_type = other DNA
atggccgccgtgagcgtgtacgccccccccgtgggcggcttcagctttgacaactgtagacggaacgccgtgctggaggcagacttcgctaaaagaggatacaagttgccgaaggtccgaaaaaccggtacaaccattgcgggggtcgtatataaggacggcattgtactcggcgcagacacaagggccactgaagggatggttgtagcagataagaattgctccaagattcactttatatcacccaatatttattgctgtggtgccggtactgccgcggacactgacatgacaacccagctgatctcatcaaatctggaactccactcgttgagtacagggagactgcctcgcgtcgtcacagccaatagaatgcttaagcagatgctcttcagatatcaagggtacataggagccgccttagtgctgggcggcgttgacgtgacaggacctcacctgtacagtatttatccgcatgggtctaccgataaactgccctatgttactatgggctctgggagcttagccgctatggccgtgttcgaggacaagttccgtcccgacatggaagaggaagaggccaaaaacttagtgtccgaggccatcgccgccgggattttcaacgatctgggatcaggttctaatatcgacctctgtgttataagcaagaataagttagactttctgaggccctacaccgtgccaaataagaaggggacacgcctgggcaggtaccgctgcgaaaagggcactactgcagtgctgacagagaaaatcacgccgctggagattgaggtcctcgaagagacagtacaaaccatggacactagctag

SEQ ID NO: 201130 - DNA, 633 bp, synthetic construct
  misc_feature 1..633: note = Description of Artificial Sequence: Synthetic coding sequence
  source 1..633: mol_type = other DNA
atggccgccgtgagcgtgtacgccccccccgtgggcggcttcagctttgacaattgtcgccgaaacgctgtgcttgaggctgatttcgccaagcggggctacaaactcccgaaagtcaggaaaactggcaccactatagccggggttgtgtataaagacggtatagtcttaggggcagatactcgcgccactgaagggatggtcgtcgctgacaaaaactgttctaagatccattttatcagtcccaatatctactgctgtggcgctggtaccgccgcagatactgacatgactacacaactaatttcctctaatttggagctccacagcctcagtaccggtaggctgccccgggtcgtgactgcaaataggatgcttaaacaaatgctgttccggtatcagggatatattggtgccgccctagtgttaggcggagtcgacgtgaccgggccacacctgtatagcatttatccccatgggtctacggacaagttgccctatgttaccatggtgcactgtgaagaagaactctttactgagaacctgttcttcattcggcaggctgaagtggtgagcgaagaagcctggggccccagcttcgctatatccttagctgtctttctggtggcctag

SEQ ID NO: 201131 - DNA, 429 bp, synthetic construct
  misc_feature 1..429: note = Description of Artificial Sequence: Synthetic coding sequence
  source 1..429: mol_type = other DNA
atggccgccgtgagcgtgtacgccccccccgtgggcggcttcagcttcgataactgcaggcgcaacgctgtgctggaagcggactttgccaagcgcggatacaaactgccaaaagtgagaaagactggcactaccatagctggtgtagtgtataaggacggcattgtattaggcgccgacacccgggcgacagagggtatggttgtggcggacaaaaactgttccaagatccatttcatctcgccaaacatctattgctgcggagccggcactgcagccgacacagatatgactacacagctgatctcttcaaatctcgaattgcattctttaagcacgggccggctaccccgggtcgtgaccgccaatcgtatgctgaaacagatgctgtttagattttggctgctcgggagcaatggctgtatctag

SEQ ID NO: 201132 - DNA, 819 bp, synthetic construct
  misc_feature 1..819: note = Description of Artificial Sequence: Synthetic coding sequence
  source 1..819: mol_type = other DNA
atgctgatcggcacccccaccccccgggacaccacccccagcagctggctgacctctagcctgttggtggaagcagctcctcttgacgataccactttacctacgccagtctctagcggatgtccaggactcgaaccaacggagttctttcagtcattgggtggcgatggggagaggaacgtccagatcgagatggcccacggcaccaccactttggcctttaaattccaacacggcgtcatcgcagctgtggatagtcgagcttccgctgggagctatatatcagcattgcgggtaaataaggtgatcgagattaatccttacctgctgggcaccatgtccgggtgcgccgctgattgccaatactgggaaagactactcgcaaaggagtgtaggctttactatctccggaacggcgaaaggatatcagtcagtgcagcctctaagctgcttagcaatatgatgtgccagtaccgcggcatgggattgagtatgggaagtatgatttgcgggtgggacaagaagggcccggggttgtactatgtggacgagcatgggacccgcctcagcgggaatatgttttcgaccggatctggtaatacatacgcctacggagttatggattcggggtacagaccaaatttatctccagaagaagcctatgacttgggtagacgcgcaatagcttacgctacccatcgcgactcctattcggggggtgtggttaacatgtaccacatgaaggaggatggatgggtgaaagtggaatccacagacgtctcagacttactgcatcagtaccgagaagccaaccaatag

SEQ ID NO: 201133 - DNA, 831 bp, synthetic construct
  misc_feature 1..831: note = Description of Artificial Sequence: Synthetic coding sequence
  source 1..831: mol_type = other DNA
atggccctgctggacgtgtgcggcgccccccggggccagcggcccgaatcagctctgcccgtggcaggatctggtcgaagatcggatccgggtcactacagcttttctatgagaagcccagagctcgctctgccccgcggcatgcagccaacagaattcttccagtctctgggcggagacggagagcgtaatgttcagatagaaatggcacatgggaccaccacactggctttcaagtttcagcacggcgtgattgccgccgtggatagtagagcatctgccgggtcttatatcagtgcactgagagtgaacaaagttatcgaaatcaatccttacctcctggggacgatgagcgggtgcgccgcagactgtcagtattgggagaggctgttggccaaggaatgccggctgtactacctgaggaatggggagcgaatttctgtatccgccgcgagtaaactgctgagtaacatgatgtgccagtataggggcatgggcttaagtatgggtagcatgatctgcggatgggacaagaaaggtcctggcctgtactacgtcgacgaacatggaaccagactcagcgggaacatgtttagtaccggctccgggaacacctacgcttacggggtgatggactccggataccgaccaaacctctcgcctgaggaagcctatgatctggggcgacgggccatcgcttacgccacccatcgcgatagctatagcggcggagtggtcaatatgtatcacatgaaggaagatggctgggttaaagtggaaagtacagacgtatcagatctgctccatcagtatagagaggcaaatcaatag

SEQ ID NO: 201134 - DNA, 831 bp, synthetic construct
  misc_feature 1..831: note = Description of Artificial Sequence: Synthetic coding sequence
  source 1..831: mol_type = other DNA
atggccctgctggacgtgtgcggcgccccccggggccagcggcccgagtccgccctccctgtggcgggatccggtcgccggagcgaccccggtcattactccttttctatgaggtcccccgagctggcactaccccggggcatgcagcctacggagttctttcagagtctgggaggcgatggtgagagaaatgttcaaattgagatggcccatgggacaacaacgttggcatttaaattccagcacggcgtgatcgcagccgtggattcccgggcttccgctggtagttacatctcagccctgcgggtgaataaagttattgagatcaacccgtacctgctcggcacgatgtcaggttgcgctgctgactgccagtactgggaaaggctactggccaaggagtgccggctatactacttgaggaacggagagcgcatctcagtcagtgccgcatccaagcttctgtccaacatgatgtgccagtatagaggtatgggcttgtccatggggagcatgatctgcggttgggataagaaaggacctggcctgtactacgtagacgagcatggcacacgactgtcgggaaacatgtttagtactgggtcaggcaatacctacgcctacggcgtcatggactcgggttacaggccaaatctttccccggaggaagcgtacgacttggggcgaagagccatcgcctacgcaacccacagagatagttactcaggaggggtcgtgaacatgtaccatatgaaagaggacgggtgggtgaaagtagagagtacggatgtgagcgatctgctgcaccagtacagggaagccaatcaatag

SEQ ID NO: 201135 - DNA, 819 bp, synthetic construct
  misc_feature 1..819: note = Description of Artificial Sequence: Synthetic coding sequence
  source 1..819: mol_type = other DNA
atgctgatcggcacccccaccccccgggacaccacccccagcagctggctgaccagtagtctgcttgtggaggctgccccacttgatgacaccacgctccccactccagtgagctctggatgtccggggctggaaccaactgaattctttcagagtctgggtggtgacggcgaacggaatgttcagattgaaatggcacacggtaccaccacattagcttttaaattccagcatggcgttatcgctgctgtcgactctcgggcttctgctggcagttatatatcggctttacgggtgaataaagtgatagaaattaacccttatctcctgggcactatgagtgggtgcgccgccgactgtcagtattgggagcgtctgctagcaaaggaatgtcggctatactacttacggaatggggagaggatcagcgtatccgcggcttcaaaactgctaagtaacatgatgtgtcagtataggggcatgggactgtcaatgggatccatgatctgtgggtgggataaaaaagggccaggcctgtattatgtcgacgaacatggaacccgcctcagcgggaatatgttttccacaggtagtgggaacacatacgcttatggagtgatggatagtgggtaccgccctaatctgagcccagaggaagcgtacgatttagggcgccgggcaatcgcatacgctacacacagagattcatattccggcggagttgtgaacatgtaccatatgaaagaggatggatgggtgaaggtggagtccactgatgtttccgatctgctccaccagtacagggaggctaaccaatag

SEQ ID NO: 201136 - DNA, 759 bp, synthetic construct
  misc_feature 1..759: note = Description of Artificial Sequence: Synthetic coding sequence
  source 1..759: mol_type = other DNA
atggccctgctggacgtgtgcggcgccccccggggccagcggcccgaatcagctctcccagtcgccgggtcaggacgtcgttctgatccggggcattacagtttcagtatgcgcagccccgagctggccctccccaggggtatgcaaccgaccgaatttttccagtcccttggcggcgatggagaaagaaacgtgcagatcgagatggctcatggcactacgaccctggcctttaagttccagcacggagttattgcggctgtcgattctcgagctagcgcaggcagttacatcaactgccagtactgggaaagacttctggcaaaagaatgcaggctgtattacctcaggaacggcgagaggatctccgtttcagccgcatcaaaactgctgagcaacatgatgtgccaatatcggggtatgggtctatctatgggcagcatgatttgcggctgggacaaaaaaggaccagggctatactatgtagatgagcacggaacaaggctgtctggaaacatgttcagcaccggctccggaaacacctacgcttatggagtgatggactcagggtaccggccaaacttaagtccagaggaagcctatgatctcgggcgcagagcaatcgcctacgccacccatcgagactcatacagcggcggggtggtgaacatgtaccatatgaaggaggacggatgggtgaaagttgagagtacggatgtgtccgacctcctgcaccaatacagggaagcaaaccagtag

SEQ ID NO: 201137 - DNA, 759 bp, synthetic construct
  misc_feature 1..759: note = Description of Artificial Sequence: Synthetic coding sequence
  source 1..759: mol_type = other DNA
atggccctgctggacgtgtgcggcgccccccggggccagcggcccgaatccgcacttccggttgcgggtagcggtaggcggtctgatccagggcactattcattttccatgaggtctccggaactcgcacttccgagagggatgcaaccaacagagttttttcaatctctgggaggggatggcgagagaaacgtacaaattgaaatggcccacggcaccaccactctggcattcaagttccagcatggggtgatcgccgccgtggacagtcgcgcttctgctggcagctacatcaattgtcagtactgggagcggctgctggctaaggaatgtcgcttatattatcttaggaatggggaacggattagtgtgagtgcggctagtaagttgttgagtaacatgatgtgtcaatatcgcggcatgggactgagcatggggtccatgatttgcggatgggataaaaaaggtcccggcttgtattacgtggatgaacacggaaccaggctgtccggcaatatgttctcaacaggtagcgggaatacctacgcttacggagtcatggactctgggtatagaccaaacctcagcccagaagaggcgtacgacctcggtcgccgcgcaatcgcatacgctacccacagagactcttactccggcggagtcgtgaatatgtaccacatgaaggaggacggatgggtaaaagttgaaagtaccgatgtgtcagatctgctgcaccagtacagagaagccaaccagtag

SEQ ID NO: 201138 - DNA, 819 bp, synthetic construct
  misc_feature 1..819: note = Description of Artificial Sequence: Synthetic coding sequence
  source 1..819: mol_type = other DNA
atgctgatcggcacccccaccccccgggacaccacccccagcagctggctcactagcagcttactggtcgaagccgccccactagacgacacaacgttgccgactcccgtttcgagtggatgccccggtctagagccaaccgaattcttccagtcactcggcggagacggagagagaaacgtgcagatagaaatggcacacggaacaacaactctcgcctttaagttccagcacggagtaatcgccgcggtggactcacgagcctctgccggttcctacatttcagcactcagagtgaacaaggtcatagagattaatccatacctccttgggaccatgtctggctgtgccgcagactgccagtactgggaacgcttgctcgctaaggagtgcaggctttattacctcagaaatggggaaaggatctcggtgtcagcagcatctaagctgctcagcaatatgatgtgccagtacagaggcatgggacttagcatggggtctatgatttgcggctgggataaaaagggccccggcctgtactatgttgacgagcacggcacgaggctgtcaggtaatatgttctctacgggctctggcaacacctacgcttacggggtgatggatagcggttatcgtcctaatttaagtccagaggaggcctacgacctgggtcgcagagctatcgcttatgcaacacatagggatagctattcgggtggcgtggtgaatatgtatcatatgaaagaagacgggtgggtcaaggtcgagtccactgatgtgagtgacctgctgcatcaatatagggaagccaatcaatag

SEQ ID NO: 201139 - DNA, 819 bp, synthetic construct
  misc_feature 1..819: note = Description of Artificial Sequence: Synthetic coding sequence
  source 1..819: mol_type = other DNA
atgctgatcggcacccccaccccccgggacaccacccccagcagctggctgaccagctccttgctcgtagaggcagcaccactggacgataccacgcttccaacacccgtgagctcgggctgtcccggcctggagcccacggagttctttcagagtctgggtggggatggcgaaagaaacgttcagatcgaaatggcacacggaacaacgactctggcttttaagttccagcacggagtgatcgcagccgtagatagcagggccagcgcgggatcttatatcagcgcactgagagtaaacaaagtgatcgagatcaacccctatctgcttggcacaatgtccggctgcgccgcggactgtcagtactgggagagacttctggcaaaggagtgccgtctgtactacctaaggaacggggaaaggatctccgtgagcgccgcaagtaaattactgtcgaatatgatgtgccagtatcgaggtatgggcttgagcatgggctctatgatctgcggatgggataaaaaggggcccggtttgtattacgtcgatgagcatggcactcgcctctccgggaatatgttctccacaggaagcgggaacacttatgcgtacggcgttatggattctggttaccggcccaacttatcgccagaggaagcgtacgatcttggcagaagggccatagcctatgcgacccaccgcgactcctattctggcggtgttgtcaacatgtaccacatgaaagaagatggctgggtgaaagtggagtccaccgacgtgtccgaccttctacatcagtaccgggaggctaaccagtag

SEQ ID NO: 201140 - DNA, 831 bp, synthetic construct
  misc_feature 1..831: note = Description of Artificial Sequence: Synthetic coding sequence
  source 1..831: mol_type = other DNA
atggccctgctggacgtgtgcggcgccccccggggccagcggcccgaatccgctctgcctgtggccggttcaggtcggagatcggaccctgggcattattcctttagtatgcgctcccctgaactggctctgccacgtggcatgcagcccactgaattctttcagtctctgggaggggatggtgaacgcaacgtgcagattgagatggcccatgggactacaaccctcgccttcaagtttcagcacggcgtgatcgctgctgtagattctagggcatctgcagggtcctatatctccgcattgcgcgtgaacaaggtgatcgagattaatccctatctcctgggcacaatgtccggctgcgctgcagattgccaatactgggaacggcttcttgctaaagagtgccgtctttactacttgcgaaatggtgaacggatctccgtctcggccgctagtaagctcctgtccaacatgatgtgccagtaccgcggtatggggttaagcatgggctcaatgatatgtggctgggataaaaaaggacctgggctgtattatgtggacgaacatggcactcgcctttctgggaacatgttctccactggttcgggcaacacttatgcatacggcgttatggatagtggatataggccaaaccttagcccagaggaagcttatgatctggggaggcgcgccatcgcctacgcaacccaccgagattcctacagtggtggggtcgtgaacatgtaccacatgaaagaagatggttgggtgaaagtggagagcactgatgtgagcgatcttttacaccagtacagggaggctaatcagtag

SEQ ID NO: 201141 - DNA, 759 bp, synthetic construct
  misc_feature 1..759: note = Description of Artificial Sequence: Synthetic coding sequence
  source 1..759: mol_type = other DNA
atggccctgctggacgtgtgcggcgccccccggggccagcggcccgaatctgctctgcccgtcgccggctcggggcggcgctcagaccctggccattactctttctccatgcgctcccccgagctggcattgccccgcggaatgcaacctaccgagtttttccagagtttgggcggggatggcgaacgcaacgttcagattgagatggcccacggcacaactacccttgcctttaaatttcagcacggggtgatcgccgctgtagactcacgggctagtgcaggaagttatatcaactgccagtattgggagcgactgttggcaaaagagtgtaggctttactatctgcgtaacggagaacggatcagcgtgtcagctgcatctaagcttctgagcaatatgatgtgccagtatcgcgggatgggcttgtccatggggtcaatgatttgtggctgggataagaagggcccaggactctattatgttgacgaacatggaacgcgactttctggcaacatgttcagcacaggaagcggaaacacatacgcctacggcgttatggactctgggtacaggccaaatctcagtccagaagaggcctatgatctcggcagaagagccatcgcatatgccacacaccgcgatagctatagcggtggggtagtgaacatgtatcatatgaaagaggacggctgggtgaaagtcgagtcaaccgacgtctcagatctgcttcatcagtatcgggaggctaaccaatag

SEQ ID NO: 201142 - DNA, 759 bp, synthetic construct
  misc_feature 1..759: note = Description of Artificial Sequence: Synthetic coding sequence
  source 1..759: mol_type = other DNA
atggccctgctggacgtgtgcggcgccccccggggccagcggcccgaatccgcgctcccagtggccgggtccggtaggaggagcgatccaggccattatagctttagtatgagatccccagagctggccttgccccgggggatgcagcctaccgaatttttccagagtttaggcggggacggcgagaggaacgtgcagatcgagatggcgcatggcacgaccactcttgccttcaaatttcagcatggtgtgatcgccgcagttgactcgagagcatccgcaggaagctacattaactgccagtattgggagcggctcctagcaaaagagtgccgcttgtattatctacgcaacggcgagcggatctcagtttctgccgcttccaagctgctgtccaacatgatgtgccaatatcggggaatgggtctgtcaatgggatctatgatatgcggctgggacaagaagggccctggcctctactatgtggatgaacatggaacccgcctgtctggtaatatgttctccactgggagcggcaacacatacgcttacggagtgatggatagcggctatcgccccaacttgtcacctgaggaggcttatgacctgggcaggcgagccatagcgtacgccacacacagagattcttactccggtggcgtggtaaatatgtaccacatgaaagaggatggatgggtgaaggttgagagcacagatgtcagcgatcttctgcaccaatatcgtgaggctaatcagtag

SEQ ID NO: 201143 - DNA, 831 bp, synthetic construct
  misc_feature 1..831: note = Description of Artificial Sequence: Synthetic coding sequence
  source 1..831: mol_type = other DNA
atggccctgctggacgtgtgcggcgccccccggggccagcggcccgagagtgcactgccggtcgccggttctggccgcaggtccgaccccggccactatagctttagcatgcggagcccggagttggctctgcccagaggaatgcaacctaccgaattttttcagagcctaggcggtgatggagagaggaacgtacagatagagatggctcacgggaccactacactggcattcaagtttcagcatggggtcattgcggctgttgatagccgggctagtgccggatcctacatttccgctttaagagtgaacaaggttattgagatcaatccatatctgctgggcaccatgtccggctgtgccgccgactgccagtactgggagcggttgctggcaaaggagtgcaggttatactacctcaggaacggagagcggatcagtgtgagcgctgccagcaagctgctgtccaatatgatgtgtcaatacagagggatgggcctcagcatgggatcgatgatctgtgggtgggacaaaaagggtcctggtctgtattacgtggatgagcacggtacgcggctaagtggcaatatgttctctaccggaagcggcaacacatatgcatacggtgttatggattctggatatcgacccaacctcagccccgaagaagcatacgacctgggacgtcgcgctatcgcctatgctacacacagggattcttactccggcggggtggtgaatatgtatcatatgaaggaggacggttgggttaaagtggagagtacagatgtgtcagatctgctacaccagtatagggaagctaaccagtag

SEQ ID NO: 201144 - DNA, 819 bp, synthetic construct
  misc_feature 1..819: note = Description of Artificial Sequence: Synthetic coding sequence
  source 1..819: mol_type = other DNA
atgctgatcggcacccccaccccccgggacaccacccccagcagctggctgacgagctctctgctagtggaagcagcccctctcgatgataccactctgcccacccccgtgtcatcgggatgtcccgggttggaaccaacggaattttttcaaagtctgggcggcgatggggagcggaatgtacaaatagagatggcccacggcactacaacattggcttttaagttccagcatggagtgattgcggcagtggactcacgagcgtctgccgggtcgtacatttccgcccttagagtgaataaggtcatcgagattaacccttatctgcttggtactatgagcgggtgtgccgcagattgccagtactgggagcgactgcttgctaaggaatgccgcttgtattacctgagaaatggggagaggatatcagtgtcagccgcatccaagctgttatccaatatgatgtgtcagtaccgggggatgggcttgtccatggggagcatgatttgcggatgggataagaaaggcccaggtttatattatgtcgacgaacatggcaccaggctgagtggcaatatgttcagcaccggctctggcaatacttatgcttacggggttatggattctggatatcgtcctaacctgtcacccgaagaggcctatgacctggggcgaagggcgatcgcctatgccacccatagagacagttacagtgggggcgtggtgaacatgtaccacatgaaagaagacggctgggtaaaggtagagtctacagacgtgtctgacctcttgcatcagtatagagaggcaaaccagtag

SEQ ID NO: 201145 - DNA, 819 bp, synthetic construct
  misc_feature 1..819: note = Description of Artificial Sequence: Synthetic coding sequence
  source 1..819: mol_type = other DNA
atgctgatcggcacccccaccccccgggacaccacccccagcagctggttgacctccagtttgctggtcgaggcagcccctctcgacgacaccaccttgcccacccccgtgagttccgggtgcccagggttggagccaaccgaattcttccagtctttaggaggagacggggaacgcaacgtgcagattgagatggcacacggaacgacaacactggctttcaagttccagcatggggtgattgcagcagtggactcccgggccagcgcgggaagttacattagcgccttacgagtgaacaaagtgattgagatcaatccttatctcctgggaacaatgtcgggctgcgcagccgattgtcagtattgggagcgcttactggccaaggagtgtcggctttactacttaaggaatggcgagaggatcagcgtatctgccgcgtctaagctgctgagcaacatgatgtgtcagtaccgcgggatgggactgagcatgggatctatgatatgtggctgggataagaaaggtccaggtctctattacgtggatgagcacgggacccgcctctcaggaaacatgttctctacgggttccgggaatacgtacgcctatggagtgatggattctgggtacagaccaaacctgtctcccgaagaggcgtacgatctgggccggagggctattgcctacgccacacacagggactcctactccgggggggtggtcaacatgtatcatatgaaggaggacgggtgggtcaaggtggagtccactgacgtttcggatctactacatcagtatcgtgaggcaaatcagtag

SEQ ID NO: 201146 - DNA, 831 bp, synthetic construct
  misc_feature 1..831: note = Description of Artificial Sequence: Synthetic coding sequence
  source 1..831: mol_type = other DNA
atggccctgctggacgtgtgcggcgccccccggggccagcggcccgagtcagcgcttccagtagctggctcaggacgacgcagtgaccctgggcactatagttttagcatgcggtccccggaactggcgctcccacgagggatgcagccgactgagttcttccagtcgctcgggggtgacggcgagcggaatgtccaaattgaaatggcccatggcactacaacacttgcctttaagttccagcatggggtgatcgcggctgtcgacagcagggcctctgccgggtcttacatcagtgccctgagggtcaataaagttatcgagataaatccctacctcttgggcactatgtcggggtgcgcagctgactgccagtattgggagagattgcttgccaaggagtgtaggctgtactacctccgcaacggggaacgcatttctgtcagtgctgcgagcaaactgttgtccaatatgatgtgccaatacagggggatgggcttgagtatgggaagtatgatctgcggctgggacaaaaaaggtcctggactctactacgtcgatgagcacgggacccgcctgagcggcaatatgttttcgaccgggagcggcaacacctacgcttacggggtgatggacagtgggtacagacctaatctgtctcccgaggaagcatatgatctgggaagacgtgcaatcgcgtatgctactcacagggactcctattcgggaggggtggtgaacatgtatcacatgaaagaggatgggtgggttaaagtggaaagcactgacgtctctgatctgttgcaccaatatagagaggctaatcagtag

SEQ ID NO: 201147 - DNA, 819 bp, synthetic construct
  misc_feature 1..819: note = Description of Artificial Sequence: Synthetic coding sequence
  source 1..819: mol_type = other DNA
atgctgatcggcacccccaccccccgggacaccacccccagcagctggttgacctcttcacttcttgttgaggcggccccattggatgacaccaccctcccgacccccgtttcgtctggctgcccaggactggaaccaactgagttcttccaaagcctggggggcgatggtgagaggaacgtgcagatagaaatggcccatggcaccaccacactggcctttaaatttcagcacggagtgatcgcggcagtcgactcgcgcgcatctgcaggttcatatatttccgcactgcgcgtgaataaagttattgaaataaatccttacctgctaggaacaatgtctggctgcgccgctgactgtcagtattgggagcgcttgctagccaaggagtgtcgcttatactatttaaggaatggcgagagaatctccgttagcgccgcatccaaacttctgtcgaacatgatgtgtcagtataggggcatggggctttctatgggtagtatgatctgcggatgggataagaagggccccggcttgtattacgttgatgagcacgggacccgtctgagtgggaatatgttcagcaccggcagtggcaacacatacgcttatggagtgatggattccggctaccgaccaaacctctcacctgaggaggcgtacgatcttggaagacgagccattgcctacgccacccaccgagactcgtactccggaggagtggtaaatatgtaccacatgaaagaggatgggtgggtgaaggtagaaagcactgacgtgagcgacctactgcatcaatatcgcgaagccaaccagtag

SEQ ID NO: 201148 - DNA, 831 bp, synthetic construct
  misc_feature 1..831: note = Description of Artificial Sequence: Synthetic coding sequence
  source 1..831: mol_type = other DNA
atggccctgctggacgtgtgcggcgccccccggggccagcggcccgagtctgctctgcctgtggcagggtccggtaggcgttccgatcctggacattacagcttctctatgaggtcaccagagctagccctgcctcgcggcatgaagcccactgaattttttcaatccctggggggcgacggagagcggaatgtccaaatcgaaatggcacacgggaccactacccttgctttcaaattccagcatggagtgattgcggctgtggacagcagagcctccgctggctcttatatctccgccctgcgcgtcaacaaagttatagaaataaacccctacctgctggggacgatgagtggctgcgccgccgactgtcagtattgggagagactcttggctaaggagtgtaggctctactaccttcgcaacggcgagaggatttctgtgtccgctgcctcgaagcttctgtctaacatgatgtgccaatatagagggatggggctgtccatggggtctatgatctgtgggtgggacaagaagggtcctgggttgtactatgtggatgagcatggaacccggctgagcgggaatatgttctccaccgggagtgggaatacttacgcatacggggtgatggactccggctatagacctaacctctcgcccgaggaggcttacgacctcggccgcagagcgatcgcttatgctacacacagagattcctacagtggcggagtggtgaacatgtaccatatgaaagaggatggttgggtcaaagttgaatcaaccgacgtgtcagacctgctccaccagtatcgggaagccaaccaatag

SEQ ID NO: 201149 - DNA, 759 bp, synthetic construct
  misc_feature 1..759: note = Description of Artificial Sequence: Synthetic coding sequence
  source 1..759: mol_type = other DNA
atggccctgctggacgtgtgcggcgccccccggggccagcggcccgaaagcgccctgcccgtcgcaggatctgggcgacgaagtgatccagggcactatagcttctctatgaggtcccccgagctggccctgcctagggggatgcagcccactgaattctttcagtcactcggtggagacggcgaacgtaacgtacagatcgaaatggcacatggaaccacaaccttggcgttcaagttccaacacggtgtgatagcggccgtggacagcagggcttccgccggaagctacatcaattgccagtattgggagcggttgttagcgaaagagtgtaggctgtattacctccgaaacggtgaaaggatatcggtgagcgctgccagtaaattgctgagtaacatgatgtgtcaatatcggggcatggggctctcaatgggctcgatgatctgtggatgggacaagaaggggcccgggctctattatgtggatgagcatggcacacgactgtccggaaacatgttttccaccgggtccggaaatacatacgcatacggggtcatggatagtgggtataggcccaacctgagtccggaagaagcgtatgacctggggcgacgggctatcgcttatgccacccaccgagactcatacagcgggggggtagtgaacatgtatcatatgaaggaggatggatgggtgaaagtcgagtctaccgacgtttctgacctcttacaccagtatcgcgaggcaaatcagtag

SEQ ID NO: 201150 - DNA, 759 bp, synthetic construct
  misc_feature 1..759: note = Description of Artificial Sequence: Synthetic coding sequence
  source 1..759: mol_type = other DNA
atggccctgctggacgtgtgcggcgccccccggggccagcggcccgaatctgctctgcctgtggccgggtctggaaggcgctctgatccgggacactattctttcagcatgcgctcccccgagttggctttaccccgcggcatgcagccgaccgagttctttcaatccctcggcggtgatggcgagagaaatgtacaaattgagatggcccatggtacaactacccttgccttcaagtttcaacacggggtaattgcggcagtggactcccgcgcgagcgccggttcctatatcaactgccagtattgggaacggctgctcgctaaagaatgccgcttgtattacctgaggaacggagagcgcattagcgtttctgctgccagtaagcttctttcaaatatgatgtgccagtaccggggcatgggtctgagcatggggtcaatgatctgtggttgggataagaagggaccaggcctctactacgtggacgagcacggtactagattgtccggaaatatgttctctacaggcagcggcaatacctatgcgtatggggtcatggattccggttaccgacccaatctgtcgccagaggaagcctatgatcttggaaggcgcgctatcgcctacgccacccacagagactcctactcgggcggggtggtcaatatgtaccatatgaaggaagatggatgggtgaaagtggaatctactgacgtttccgatctgctgcatcagtatcgagaggctaaccagtag

SEQ ID NO: 201151 - DNA, 759 bp, synthetic construct
  misc_feature 1..759: note = Description of Artificial Sequence: Synthetic coding sequence
  source 1..759: mol_type = other DNA
atggccctgctggacgtgtgcggcgccccccggggccagcggcccgaaagcgcccttcccgtggcgggaagcggtcgaaggagcgaccccgggcattattccttttccatgcggagccccgaactggccctgcctaggggtatgaagccaacagagttcttccaatctctgggcggggacggcgaaagaaatgtgcagatagagatggctcacggtaccacaacacttgcgttcaaattccaacatggggtgatcgccgccgtcgactcccgggctagtgcaggcagttatatcaattgtcagtactgggagcgcctgctcgcgaaagagtgcagactctactaccttagaaatggggaacgtatctcagtgagtgctgccagcaagctgctctctaatatgatgtgccagtaccgaggaatgggtctgagcatgggttctatgatctgtggctgggataagaagggccccggattgtattacgtcgatgaacacgggacccgactctccggaaatatgttttccactggctctggaaatacatatgcatacggtgtgatggactccggataccgcccaaacttgtccccggaggaggcatatgacctgggaaggcgcgcaattgcctacgcaacgcacagggactcttatagcggaggcgtggttaacatgtatcatatgaaagaggatgggtgggttaaagtggagtccaccgatgtgagcgacttgcttcatcagtatcgggaggcgaatcagtag

SEQ ID NO: 201152 - DNA, 819 bp, synthetic construct
  misc_feature 1..819: note = Description of Artificial Sequence: Synthetic coding sequence
  source 1..819: mol_type = other DNA
atgctgatcggcacccccaccccccgggacaccacccccagcagctggctgacctcctctcttcttgtggaggccgctcccctggatgacaccaccttaccgacacctgtctctagcggatgccctggcttggagcctactgagttcttccagtctttggggggtgatggcgagcggaatgtacagatagagatggcacatggtaccacaacactggccttcaagtttcagcacggggtcattgccgccgttgattctcgcgcatcagcagggtcctacatatctgccctccgcgtcaataaggtaattgaaataaacccatacctgcttggcacaatgagtgggtgcgctgctgactgccagtactgggaacggttactggccaaagagtgtaggctttactacctccgaaacggggagcgcatatccgtttctgctgcctccaagctcctgagtaacatgatgtgtcaataccgggggatgggcctgtctatggggagcatgatctgcggatgggataaaaagggccctggtctgtactatgtcgatgagcatggcacccgactatctggcaacatgttctccaccggttctgggaacacatacgcctacggtgtgatggatagtggatatcggcccaatctatccccagaagaagcatacgatctgggtaggagggccatcgcctatgctacgcacagggacagctattccggaggcgtggtgaatatgtatcacatgaaagaggacggctgggtcaaggtggagtccaccgacgtatccgatttattgcatcagtatcgcgaggcaaaccagtag

SEQ ID NO: 201153 - DNA, 831 bp, synthetic construct
  misc_feature 1..831: note = Description of Artificial Sequence: Synthetic coding sequence
  source 1..831: mol_type = other DNA
atggccctgctggacgtgtgcggcgccccccggggccagcggcccgagtcggcattacctgtggccgggtccggacgacggagtgaccctggccattactcatttagtatgaggagccctgagcttgcccttccacgcggaatgcagcccaccgaattcttccaatcgttaggaggagacggcgaacggaatgtccaaatcgaaatggcccacggcacgactacactcgccttcaaattccagcacggcgttatagccgctgtagattcacgagccagcgccggatcttatatttcagccctgagagtaaacaaggtcattgagatcaacccataccttttagggacaatgtctggatgcgcagctgactgccaatactgggagcgcttattagctaaggagtgccggctctactatctgcgcaacggcgagaggatcagcgtaagtgccgcaagcaagctgctgtccaatatgatgtgccagtatcgcgggatgggcctgtcaatgggctctatgatctgtgggtgggacaaaaaggggcctggcctgtattacgtggatgaacacgggacccggttatcagggaacatgttctccaccggctccgggaacacctacgcttacggagtgatggacagtggctataggcccaacctttctcctgaagaggcctatgatctaggtaggagggcaatcgcttatgcgactcacagagatagctactccggcggggtagtgaatatgtaccacatgaaagaggacgggtgggtaaaggtcgaatcaaccgatgtgtccgatctactccaccagtacagagaggctaaccagtag

SEQ ID NO: 201154 - DNA, 831 bp, synthetic construct
  misc_feature 1..831: note = Description of Artificial Sequence: Synthetic coding sequence
  source 1..831: mol_type = other DNA
atggccctgctggacgtgtgcggcgccccccggggccagcggcccgaaagcgctttgcctgtggcaggcagtggtagacgaagcgatcccggccactattcattttcaatgcgaagcccagaactggccctcccacgtgggatgcagcctacagaattcttccaaagcctgggaggggatggcgagcgcaatgtccagattgagatggctcatggaacaacaactctcgctttcaagttccagcacggcgtcattgcagctgtggactctcgcgcttctgcgggaagctatatatccgctctcagggttaacaaagttattgaaatcaacccttacttattaggaacaatgtctggctgcgctgccgactgtcaatattgggagcgcttgcttgctaaggaatgtcgcttatactatctccggaacggcgagcgtattagcgtgtccgcagcatcaaagctgctcagcaacatgatgtgtcagtacagaggaatgggcctttccatgggcagcatgatttgtgggtgggataagaaagggcccgggctgtactatgtagatgagcacgggactcgactctccggcaacatgttttccacaggctccggaaacacctacgcttacggagttatggattcaggctacaggcctaacctatccccagaagaggcttacgacctcgggcggagggcaatcgcatatgccacacaccgcgactcctacagtggaggcgtagttaacatgtaccacatgaaggaggacgggtgggttaaggtggagagtacagacgtgtccgaccttctgcatcaatatcgcgaagccaaccaatag

SEQ ID NO: 201155 - DNA, 759 bp, synthetic construct
  misc_feature 1..759: note = Description of Artificial Sequence: Synthetic coding sequence
  source 1..759: mol_type = other DNA
atggccctgctggacgtgtgcggcgccccccggggccagcggcccgaaagtgccctgcctgtggcggggtcaggaagacgttcagatccaggccactactctttcagcatgaggtcgcctgaacttgctctccctcggggaatgcagcctacagagtttttccagtccctgggaggcgacggtgagcgtaacgtgcaaatcgaaatggctcacggcaccaccactttagcattcaagtttcagcatggcgtgatcgccgctgtggactcccgcgcctccgctggaagctacataaactgtcagtactgggaaaggttgttagccaaggaatgtcgactgtactacctgcgcaacggagaaagaatttcggtgtctgcagcatctaagctgctctcgaacatgatgtgccagtacagaggaatgggcctgagtatgggctccatgatttgtggctgggacaaaaaagggcctggactgtactatgtcgacgagcacggcacaagattgtccggcaacatgttctctacaggctccggcaatacgtatgcctacggcgtcatggattccgggtacagacccaatctgtcccctgaagaggcttatgacctgggccgacgagccattgcctatgccactcatagggactcttacagtgggggtgtggtgaatatgtatcacatgaaagaggacggctgggtgaaagtagagagcacagacgtgagcgatttattgcaccagtatagggaggcaaaccagtag

SEQ ID NO: 201156 - DNA, 831 bp, synthetic construct
  misc_feature 1..831: note = Description of Artificial Sequence: Synthetic coding sequence
  source 1..831: mol_type = other DNA
atggccctgctggacgtgtgcggcgccccccggggccagcggcccgagagcgcccttcctgtcgccggcagcggtcggagatctgaccccggacattattctttctccatgcgttccccagagcttgctctgccacgtggaatgcagcctaccgaattttttcaatccctcggaggtgacggggaaagaaatgtgcagatcgaaatggcccatggaacaacgaccctggccttcaaattccagcacggagttatcgccgcagtggattctagagcgagtgctggaagctacatcagcgccctgagagtcaataaagttattgagatcaatccatatttgctgggcacgatgtcgggatgcgccgcagattgccagtactgggaaaggctgctcgcgaaggagtgcagactctattacttacggaatggcgaacggatcagcgtgtctgcagcaagcaaactgctctcaaatatgatgtgtcagtatcgaggcatgggattgtccatggggagcatgatttgcgggtgggataagaaaggccccggactgtattatgttgacgagcacggcaccagattgtcaggcaatatgtttagtaccggatcaggaaacacgtacgcatatggggtgatggacagcggatacagaccaaacttgtcacccgaagaggcctacgatctcggtagaagggctattgcttatgccactcaccgggactcatattctgggggtgtggtcaacatgtatcacatgaaggaggatgggtgggtaaaagtcgagagtacagatgttagcgacttgctgcatcaatacagggaagcaaatcaatag

SEQ ID NO: 201157 - DNA, 660 bp, synthetic construct
  misc_feature 1..660: note = Description of Artificial Sequence: Synthetic coding sequence
  source 1..660: mol_type = other DNA
atgctgcgggccggcgcccccaccggcgacctgccccgggccggcgaggtgcacacaggaactaccattatggctgtggaattcgacgggggggtagtcatgggctctgactcgagagttagcgcaggggaagccgtcgtcaacagggtttttgataagctcagccccttacatgagcgcatctattgcgctttatctggctcagcagcagacgctcaggctgtagctgacatggccgcctatcagttagaactacacggaattgagctcgaggaaccacccctagtcctagccgccgcaaatgtagtaagaaacatctcttataaataccgggaagatctgtcagctcacctgatggtggcaggctgggaccagagggagggaggacaggtttatggcactctcggtggcatgctcacgaggcagccatttgccattggcggatccggttctaccttcatctacggctatgtggacgcagcttacaagccaggtatgtctccggaggaatgtcgaaggtttacgaccgacgccatcgcactggcaatgtcccgcgacgggtcaagcggcggagtgatatacttggtgacaattaccgctgcaggcgtggaccacagggtgatattgggcaatgagctcccaaagttttacgatgagtag

SEQ ID NO: 201158 - DNA, 660 bp, synthetic construct
  misc_feature 1..660: note = Description of Artificial Sequence: Synthetic coding sequence
  source 1..660: mol_type = other DNA
atgctgcgggccggcgcccccaccggcgacctgccccgggccggcgaagtccatactggcactactattatggcagttgaatttgatgggggcgtcgtaatgggctccgattcccgtgtctctgctggcgaagccgtggtcaacagagtgttcgataagctgagtcctctgcatgagagaatttactgcgccctgtctggtagtgcagctgatgctcaagcggtggccgatatggccgcttaccagctcgaactccatggcatcgaactggaagagcccccactcgtgctggccgccgctaacgtagtcaggaacatatcgtacaagtaccgcgaggatctcagcgcacacttgatggtggcagggtgggaccaacgagagggcgggcaggtgtatggcacgttggggggaatgttgactaggcagccctttgccatcgggggctcagggtcaaccttcatttacggctatgttgacgctgcatacaagcccggcatgagcccagaagagtgtaggcgatttactactgacgccattgcactggctatgagtcgggacggcagtagcgggggggttatctacttggtaacaatcaccgcggccggtgtcgaccatcgggtcatcctgggcaatgaactccccaagttctatgatgagtag

SEQ ID NO: 201159 - DNA, 660 bp, synthetic construct
  misc_feature 1..660: note = Description of Artificial Sequence: Synthetic coding sequence
  source 1..660: mol_type = other DNA
atgctgcgggccggcgcccccaccggcgacctgccccgggccggcgaggtgcacacagggaccactatcatggctgtggagttcgatggaggagtcgtgatggggtcagattccagagtgtctgctggggaggctgtggttaaccgagtatttgacaaacttagcccactgcatgaacgcatatactgtgctctcagtggctctgcggccgatgcacaggcggtggcagacatggcggcctaccagctggaactgcatggtattgagctggaggagccaccactagtgctggccgctgccaacgtggtgaggaacatatcctacaaataccgggaagatctcagcgcccatctgatggtcgccgggtgggaccaacgagagggggggcaggtgtatggaaccttggggggtatgcttaccagacagcccttcgcaattggagggagcggatcaacattcatatatggctatgtggatgctgcctacaagccaggcatgtctccggaagaatgtagacgttttactacagacgccatcgcactcgccatgtcaagagatggctccagtggaggagtaatctacttagtgacgattacagcagcaggggtcgatcaccgtgtgatactgggaaatgaacttcctaaattttacgatgaatag

SEQ ID NO: 201160 - DNA, 591 bp, synthetic construct
  misc_feature 1..591: note = Description of Artificial Sequence: Synthetic coding sequence
  source 1..591: mol_type = other DNA
atggccgtggagttcgacggcggcgtggtgatgggcagcgacagcagagtttcagcaggtgaggccgtggttaatcgggtgttcgataagctcagcccactccatgaacgcatttactgcgccctgagcggttcggctgccgacgcccaggcagtagctgacatggcagcctatcagctggagttacacgggatcgagctggaagaaccgcctttggtgctggccgctgccaacgtggtgcggaatatttcttacaaatatcgagaggatctgtctgctcatctgatggtagcagggtgggatcagagagagggcggacaggtttacggtactctgggtggcatgttaaccaggcagccttttgccataggtggtagtggatccaccttcatttacggttacgtggacgccgcgtacaagcctggaatgtcgcctgaggagtgtagaaggtttaccaccgatgcaattgccctggctatgagcagggatgggtcatctggaggtgtcatctatctggttacaataaccgccgccggagtggaccaccgtgtcattctgggaaatgagcttcctaagttttacgacgagtag

SEQ ID NO: 201161 - DNA, 537 bp, synthetic construct
  misc_feature 1..537: note = Description of Artificial Sequence: Synthetic coding sequence
  source 1..537: mol_type = other DNA
atgctgcgggccggcgcccccaccggcgacctgccccgggccggcgaagttcacaccggaacaacgatcatggcggtggagtttgatggaggcgtagtgatggggtctgactccagagtctctgccgggattgagcttgaagaacccccacttgtattggctgcagcgaacgttgtcagaaacattagctataaataccgggaggatctgagcgcccacctgatggtggccgggtgggatcagcgtgagggagggcaggtgtatggcaccctgggaggtatgctgaccagacagccttttgccatcggcgggagtggatccacctttatttatgggtatgtcgacgccgcttacaaacctggaatgagtcctgaagaatgccggcgctttaccacagacgccacatcaacaaaaaggagagtgtgcggctactttctgcggacccaaaaaagagagaatcagaaccagcgggtccacgaatacatgtgtacaggcgagagaagcctttctagctctcctctgctgagctgctcttag

SEQ ID NO: 201162 - DNA, 591 bp, synthetic construct
  misc_feature 1..591: note = Description of Artificial Sequence: Synthetic coding sequence
  source 1..591: mol_type = other DNA
atggccgtggagttcgacggcggcgtggtgatgggcagcgacagccgcgtaagcgcaggagaggcagtggtaaatagggtctttgacaagttgagcccccttcacgaaagaatatactgtgccttgtcgggatcagccgctgacgctcaggctgtggctgatatggcagcctaccagctggaattgcatggcatcgaattagaggaaccccctctggtattagccgccgccaacgtagtcagaaatatcagttacaagtatcgtgaagacttaagtgcacatcttatggttgccggatgggaccagcgggaagggggccaggtatacggcaccctgggaggaatgctaacgagacagccctttgccatcggcggctccggctccacattcatatacggctacgtggatgccgcctataagccaggcatgtctcccgaagaatgcagacgcttcacgacggacgccatcgcccttgcaatgtcccgagatggatcttcaggaggcgtaatttacttagtgacaatcacggctgccggggtggaccatcgggtcatactgggcaatgagctgcctaagttctatgacgaatag

SEQ ID NO: 201163 - DNA, 537 bp, synthetic construct
  misc_feature 1..537: note = Description of Artificial Sequence: Synthetic coding sequence
  source 1..537: mol_type = other DNA
atgctgcgggccggcgcccccaccggcgacctgccccgggccggcgaagtacataccggaaccaccataatggccgtggagttcgacggtggggtggtgatggggtcggatagtagagtttccgccggaatagaattggaggaaccacccctagtcctggcggccgctaatgttgtccgaaacatcagttataagtatcgggaagatttgagcgctcatctcatggttgctgggtgggaccagcgagagggagggcaggtatacggaaccctgggaggaatgcttactcgacaacccttcgcaatcgggggttccggctcgacgtttatctacggatacgtggacgcagcttacaagccggggatgagcccagaggagtgtcgaagattcacgacagatgccacgagcacaaaaagacgggtgtgtggctacttcctgcgcacccagaaacgcgagaaccagaatcaacgggtgcatgaatacatgtgcacaggggagcgctctctctcttcttcccctctgctcagctgttcctag

SEQ ID NO: 201164 - DNA, 591 bp, synthetic construct
  misc_feature 1..591: note = Description of Artificial Sequence: Synthetic coding sequence
  source 1..591: mol_type = other DNA
atggccgtggagttcgacggcggcgtggtgatgggcagcgacagcagagtttctgcgggtgaagcagtggttaatcgtgtattcgataaactcagtcccctccacgagaggatctactgtgcccttagcgggagtgccgcagacgcgcaggctgtcgcagatatggccgcctaccagcttgagctccacggcatcgagcttgaggaaccccccctggtccttgccgctgccaacgtagtgcgcaacatttcctataagtatagggaggatctgtctgcccacctgatggtggccggatgggaccagcgcgagggcgggcaagtctatggtacactcggaggcatgctcactcggcaacccttcgccatcggggggtcggggtcaacattcatctatggatacgtggatgccgcatacaagcctggcatgagcccagaggaatgcaggaggttcacaaccgacgctattgccttggcaatgagcagagacggtagttccgggggcgtgatctaccttgtgaccatcacagctgctggggtcgatcatcgggtcatcctcggaaatgaactgcccaaattttacgacgagtag

SEQ ID NO: 201165 - DNA, 537 bp, synthetic construct
  misc_feature 1..537: note = Description of Artificial Sequence: Synthetic coding sequence
  source 1..537: mol_type = other DNA
atgctgcgggccggcgcccccaccggcgacctgccccgggccggcgaggttcatactggcaccactattatggctgtggagtttgatggtggcgttgttatgggctccgatagcagggtaagcgcgggcatcgagttggaggagccaccactggtgttggcggccgcaaatgtcgtgcggaacatctcgtataagtacagggaagacctgagtgcacacctgatggtggctggatgggaccaacgggagggtggacaagtctacgggactcttgggggcatgttgacgcgccaaccatttgccatcggaggcagcgggtcaaccttcatttacggttatgtcgacgccgcctacaagcctggaatgtctcctgaagaatgtcgcagatttacaactgatgccacgtctaccaaacgcagggtgtgcggctacttcttgagaacccagaagcgcgaaaaccaaaaccaacgagtgcatgaatatatgtgtaccggagagcgcagtctttccagtagtcccctcttgtcatgctcctag

SEQ ID NO: 201166 - DNA, 396 bp, synthetic construct
  misc_feature 1..396: note = Description of Artificial Sequence: Synthetic coding sequence
  source 1..396: mol_type = other DNA
atggccgtggagttcgacggcggcgtggtgatgggcagcgacagcagggtttcagccggcgaagccgttgtcaatagggtgttcgacaagttgagcccactgcatgagcggatctattgtgccttgagcggatccgcagcagatgcccaggcggttgcagatatggctgcttaccagctggagttacatgggatcgagctcgaggagcctcccctggtgcttgcagcggctaatgtcgttcgtaacatatcttacaaatacagggaagacctatccgcacacctgatggttgcaggctgggaccagcgagagggcggccaggtctatggcactttgggcggtatgcttacccgccagccttttgccatcggcggttcgggtagtacattcatctag

SEQ ID NO: 201167 - DNA, 396 bp, synthetic construct
  misc_feature 1..396: note = Description of Artificial Sequence: Synthetic coding sequence
  source 1..396: mol_type = other DNA
atggccgtggagttcgacggcggcgtggtgatgggcagcgacagcagagtctcagccggtgaggcagtcgttaatcgcgtcttcgacaagttgtcccccttgcacgagaggatttactgcgccctgtctggaagcgccgccgacgcccaggcagtcgctgacatggcagcctatcagctggagttgcacggaattgagcttgaggagccaccactggtcctagctgcagccaacgtggtgaggaatatatcatacaagtatcgcgaggatctttccgctcatctgatggttgccgggtgggatcagagagaaggcgggcaggtgtatggaaccctggggggtatgttaacacggcagccgtttgctattggagggtcaggaagtacatttatctag

SEQ ID NO: 201168 - DNA, 396 bp, synthetic construct
  misc_feature 1..396: note = Description of Artificial Sequence: Synthetic coding sequence
  source 1..396: mol_type = other DNA
atggccgtggagttcgacggcggcgtggtgatgggcagcgacagccgcgttagcgccggagaagcagtggttaatcgggtattcgataaactgagcccactgcacgagaggatttactgtgctctgtctggaagtgcggctgacgcacaagcagtggcagacatggccgcctatcagctggaattgcacggaatagagctggaagaaccgcccctagtgctggccgccgcaaatgttgtcaggaacataagttacaaatacagagaggacctcagtgcccatctgatggtcgcagggtgggaccagcgggagggcggccaggtatacgggactctgggcggcatgctcaccaggcagccctttgcaatcgggggatcaggatctacgttcatttag

SEQ ID NO: 201169 - DNA, 396 bp, synthetic construct
  misc_feature 1..396: note = Description of Artificial Sequence: Synthetic coding sequence
  source 1..396: mol_type = other DNA
atggccgtggagttcgacggcggcgtggtgatgggcagcgacagccgagtttctgctggggaggctgtggtgaatcgggtgtttgataaactgtcaccgctccacgagagaatttactgtgcgctttctggctctgctgccgatgctcaggcagtggccgacatggcagcttaccagctcgagctccacggtatcgaactcgaggagccccccctcgtgttggcggccgctaacgtcgtccggaacatctcatacaaatacagagaggatctctcagcccatctcatggtagctggatgggaccagcgtgaaggaggacaggtctacgggaccctcggcgggatgctcacaaggcaaccattcgctatcggaggctcagggagcacgtttatttag

SEQ ID NO: 201170 - DNA, 537 bp, synthetic construct
  misc_feature 1..537: note = Description of Artificial Sequence: Synthetic coding sequence
  source 1..537: mol_type = other DNA
atgctgcgggccggcgcccccaccggcgacctgccccgggccggcgaggtccacactggaacaacaataatggcggtagagtttgatggaggcgtggtgatggggagcgactcaagggtatcagccgggattgaactggaggagccaccgctagtgctggcggctgccaatgtggtgcggaacataagctacaaatatagagaagacctgtcagcacacctgatggtagctggctgggaccaacgtgagggggggcaggtctatggcacattgggcggtatgcttactaggcagccattcgcaatcggagggtcggggtccacatttatttacgggtatgtggatgctgcgtataaacccggcatgagccctgaggaatgccgcagatttaccaccgatgctacctccacaaagaggcgcgtatgtggatacttcctgagaacacagaagagggagaatcaaaaccaacgcgtgcacgaatatatgtgcacctccgaacggtcactctcatcaagtcctctgctaagctgttcgtag

SEQ ID NO: 201171 - DNA, 396 bp, synthetic construct
  misc_feature 1..396: note = Description of Artificial Sequence: Synthetic coding sequence
  source 1..396: mol_type = other DNA
atggccgtggagttcgacggcggcgtggtgatgggcagcgacagccgtgtctccgccggggaggcggttgtcaatagggtatttgacaagctctcaccgctgcatgagcatatttactgcgccctgtccggtagcgccgccgacgctcaggctgtcgctgacatggctgcctaccagctcgagctgcatgggattgaactggaggagccacccttagtgctggcagctgccaatgtggtgcggaacatcagctataaataccgggaggacttatcggcgcatctcatggtggctgggtgggaccagcgcgagggtggtcaggtttacgggaccctggggggcatgctaacaagacagcctttcgctatcggaggttccggtagcacgttcatctag

SEQ ID NO: 201172 - DNA, 591 bp, synthetic construct
  misc_feature 1..591: note = Description of Artificial Sequence: Synthetic coding sequence
  source 1..591: mol_type = other DNA
atggccgtggagttcgacggcggcgtggtgatgggcagcgacagcagggtgtccgccggcgaggcagtggtcaacagggtatttgacaaactgtcccctttacatgagcgaatttattgcgccctgagcggatcagctgctgacgctcaagctgttgcagatatggctgcctaccagctagagctgcatgggatcgagctagaggagccaccactggtactagctgccgcaaatgtggtgagaaatattagctacaagtacagagaagacctgtcagctcatctgatggttgcagggtgggaccaacgcgaaggaggacaggtgtacgggacactgggtggcatgctgacaagacagccatttgccattggcggctctgggtctactttcatttacggatatgtggacgcggcgtataaaccagggatgtcccctgaggaatgtcggcgattcacaacagacgccattgctctcgccatgagcagggatggctcatctggtggagtgatatacctggttacaataactgccgctggtgtcgaccatagggtcatcctgggcaacgagcttccgaaattctatgacgaatag

SEQ ID NO: 201173 - DNA, 660 bp, synthetic construct
  misc_feature 1..660: note = Description of Artificial Sequence: Synthetic coding sequence
  source 1..660: mol_type = other DNA
atgctgcgggccggcgcccccaccggcgacctgccccgggccggcgaagttcataccggcacaacgattatggcagtggaattcgatggaggcgttgtgatgggtagcgattcaagggtgagtgccggcgaggcggtggtcaacagggtgtttgataagctcagtccactccacgaacgaatctactgcgccctctcaggaagcgcagctgacgcgcaagctgtggctgacatggcagcatatcagctggagctccatggaatagagctagaggagcctcccctggtgctggctgccgcaaacgtagtgaggaatatatcatacaagtatcgagaggatctgtccgctcatttaatggtggctggctgggatcagcgcgagggcggtcaagtgtacgggacccttggaggcatgcttacacgccagccatttgctattgggggttctggttcaaccttcatttacggatacgttgatgccgcatataagccaggaatgtcccccgaagagtgcaggcggtttactacggacgcaatcgcactggccatgtcacgcgatgggtcttccggaggggtcatatatctggtaacaatcaccgctgctggggtcgaccatagagtgattctgggtaatgagctccccaaattctatgacgagtag

SEQ ID NO: 201174 - DNA, 591 bp, synthetic construct
  misc_feature 1..591: note = Description of Artificial Sequence: Synthetic coding sequence
  source 1..591: mol_type = other DNA
atggccgtggagttcgacggcggcgtggtgatgggcagcgacagccgcgtttctgccggagaagcggttgtcaacagggtcttcgataaactgtccccgctgcacgagcacatctactgtgctctctccggaagtgcggcggatgcccaggctgtagcagatatggcagcttaccagcttgagctccacggcatagaacttgaggagcctcccctggttcttgccgcggcaaatgtcgtccgtaatatcagctacaagtaccgggaggatcttagcgcccatcttatggtggccggttgggaccagagggaaggcgggcaggtgtacggaaccctgggcgggatgctaacccgccaacccttcgcaatcggcggcagcggatcaacatttatctacggctatgtcgatgctgcgtacaagccaggaatgagcccggaagaatgccgcaggtttaccactgacgctatcgcccttgctatgagccgagatgggtctagcggaggagtaatttatctcgtgactattacagcagcaggcgtcgatcaccgggtgatcctcggtaatgaattacctaaattttatgatgaatag

SEQ ID NO: 201175 - DNA, 537 bp, synthetic construct
  misc_feature 1..537: note = Description of Artificial Sequence: Synthetic coding sequence
  source 1..537: mol_type = other DNA
atgctgcgggccggcgcccccaccggcgacctgccccgggccggcgaggttcatactggtacaactatcatggcagttgaatttgacggcggtgtagttatgggaagcgactccagagtgtcggccgggattgagcttgaggaacctcctctggtgctggctgcagctaacgtggtccggaatatatcctacaagtaccgagaagacctctccgcacacctgatggttgcagggtgggatcagcgggagggcggacaggtgtacggaactctgggcggcatgctaacaaggcagccctttgccatcggcggaagcggctcaactttcatctacggttacgtggatgcggcttacaaacctggcatgtctcccgaagaatgccggaggtttactacagacgccacatctactaaacggcgagtatgtggatactttctacgcacacagaaacgcgagaatcagaaccagagagtgcacgagtacatgtgtacttctgagcgtagcttgtcctccagtccactgctgagctgctcatag

SEQ ID NO: 201176 - DNA, 537 bp, synthetic construct
  misc_feature 1..537: note = Description of Artificial Sequence: Synthetic coding sequence
  source 1..537: mol_type = other DNA
atgctgcgggccggcgcccccaccggcgacctgccccgggccggcgaggtgcacaccggaacaaccattatggcagtggagttcgacggtggcgtagttatgggatctgacagccgggtgtccgcagggatagaactggaggaaccaccacttgtgcttgccgctgctaacgttgtcaggaatatttcttacaagtatcgggaggatctgtctgcccaccttatggtagcaggctgggatcaaagggaaggaggccaagtgtacggcactctgggagggatgttgacccgacaaccctttgccatcggcggctccggatctacgttcatctatgggtatgttgacgcagcatacaaacctggaatgagtcctgaagagtgccgacggttcaccaccgatgctacctcgaccaaacggagagtgtgtggctatttcctcagaacacagaagcgcgagaaccagaaccagcgggttcacgaatacatgtgtacgtcagagagaagcttgtcatcaagtcctctcctaagttgtagctag

SEQ ID NO: 201177 - DNA, 660 bp, synthetic construct
  misc_feature 1..660: note = Description of Artificial Sequence: Synthetic coding sequence
  source 1..660: mol_type = other DNA
atgctgcgggccggcgcccccaccggcgacctgccccgggccggcgaggtgcacacaggtactactatcatggccgtcgaattcgatggcggggttgtcatgggttcagatagccgcgtcagtgccggggaggccgtggtcaatagggtttttgataagctgagtcccctgcacgagcatatctattgtgccctaagtggatcagcagcagacgctcaggccgtagccgatatggccgcctatcagttagagctgcacggaatagagctcgaggagccgccactggtcctagctgccgccaatgtcgtacgaaatataagctacaaatacagagaggacttgagtgcacacctcatggtggccggttgggaccaacgggaagggggtcaagtctacggcaccctgggaggaatgctgacgagacaaccctttgctatcggtgggtcaggctcaacattcatctacggttacgtggacgcagcttataaaccagggatgtctccggaagagtgtagaaggttcaccacagatgcaatcgcgctggctatgagccgggatggcagctccggtggggtgatttatctcgttacaattaccgcagccggcgtggaccaccgtgtcattctcggcaatgagcttcctaagttctatgatgaatag

SEQ ID NO: 201178 - DNA, 591 bp, synthetic construct
  misc_feature 1..591: note = Description of Artificial Sequence: Synthetic coding sequence
  source 1..591: mol_type = other DNA
atggccgtggagttcgacggcggcgtggtgatgggcagcgacagccgagtgagcgccggcgaggccgtggtgaacagggtgttcgacaaactttcccccctacacgagcacatctactgcgctctctctgggtcggccgcagatgcccaggccgtggctgatatggctgcctaccaacttgagctccatggcatcgagcttgaagagccacctctggtgctcgccgccgccaacgtggtgcggaacattagttacaagtatagagaagatctcagcgcgcaccttatggttgcgggctgggaccaaagggaaggtggacaggtttacggaacgttgggcggaatgctgacccggcaacctttcgcaattggggggtcgggcagcacttttatctatggctacgtggacgctgcctacaagccggggatgagccccgaagagtgcaggcggttcactacagacgccatcgcgttagcgatgtcccgagatggatcgagcgggggagtaatatacctggtgactattactgctgctggagtggaccaccgcgtgatcctcgggaacgagctgcccaaattctatgatgagtag

SEQ ID NO: 201179 - DNA, 660 bp, synthetic construct
  misc_feature 1..660: note = Description of Artificial Sequence: Synthetic coding sequence
  source 1..660: mol_type = other DNA
atgctgcgggccggcgcccccaccggcgacctgccccgggccggcgaggtacacaccggcaccactattatggccgtagagttcgatggtggagtggtgatgggctctgattccagggtgagtgcaggcgaggcggtagtcaatagagttttcgacaagctgtcgccgctccacgagcacatctactgcgccctgagcggcagtgccgcagacgcccaggctgtcgcagacatggccgcatatcaactggaattgcatggcattgaactggaggagccacccctcgtgctcgctgccgccaatgtggtccgaaacatctcttataagtacagagaggatctctcagcacaccttatggtggccgggtgggaccagagagaaggaggtcaggtgtacggaacacttggcggtatgctgaccagacagccctttgccattgggggctcggggtcaacgttcatctacgggtatgttgatgctgcctacaagcccggaatgtccccagaagagtgccgccgcttcactacagacgccatcgccttagccatgtcgcgcgacggttcttctggaggcgtgatctatttggtgacaatcacagctgccggtgtcgatcaccgggttatcctaggaaatgagctgcctaagttttatgacgaatag

SEQ ID NO: 201180 - DNA, 396 bp, synthetic construct
  misc_feature 1..396: note = Description of Artificial Sequence: Synthetic coding sequence
  source 1..396: mol_type = other DNA
atggccgtggagttcgacggcggcgtggtgatgggcagcgacagcagagtctcagccggggaggcggtggtcaacagagtcttcgataagctgagccctctgcacgagcgaatttactgtgctctgtccggtagcgcggccgatgcacaagccgtcgccgacatggctgcctatcagttggagttgcacgggattgagctcgaggaaccacctctggtcctagccgccgcaaatgtcgtgaggaacattagctacaaataccgtgaggatcttagtgcccacctgatggtagcgggctgggaccagcgggaaggggggcaggtttacggcacccttggggggatgttgacccggcagccattcgcaattggagggagcgggagtacctttatatag

SEQ ID NO: 201181 - DNA, 396 bp, synthetic construct
  misc_feature 1..396: note = Description of Artificial Sequence: Synthetic coding sequence
  source 1..396: mol_type = other DNA
atggccgtggagttcgacggcggcgtggtgatgggcagcgacagccgggtgtctgccggtgaggcagtcgtgaatcgggtatttgacaaattgtctccactccacgagcatatatactgcgcactgagcgggtcagctgcagacgcacaggccgtcgctgatatggccgcctaccagcttgagctgcacggtattgagctcgaggagccaccattggttctggctgcagccaatgttgtgaggaatatcagctataagtaccgggaggacttgtccgcccatctcatggttgcgggctgggaccagcgagaaggcggccaggtctacggaactctcggaggtatgctcactcgccagcccttcgccatcggaggatctggttccactttcatttag

SEQ ID NO: 201182 - DNA, 591 bp, synthetic construct
  misc_feature 1..591: note = Description of Artificial Sequence: Synthetic coding sequence
  source 1..591: mol_type = other DNA
atggccgtggagttcgacggcggcgtggtgatgggcagcgacagccgcgtctcagctggagaagccgttgtcaatagggtgtttgataagctgtctcccctacacgagcacatttactgtgccctgagcggctccgccgcagacgcacaggcagtggccgacatggctgcgtaccaactcgagctccacgggatagaactagaagaaccacccttggtgctggctgctgctaacgtggttaggaatatcagctacaagtatcgggaagatctcagtgcacatttgatggtggcaggatgggatcaaagggagggcgggcaggtgtacgggaccctgggaggcatgctgaccagacagccatttgccataggcggcagtggaagcaccttcatctatggatatgtggatgccgcatacaagcccggcatgagcccggaggagtgtaggcgattcaccaccgacgctattgcactggctatgtcgagagatggcagctctggcggcgtcatttatctggtgacgataacagctgcgggggttgatcaccgcgtgatcctcggaaacgagctccctaagttctatgatgaatag

SEQ ID NO: 201183 - DNA, 660 bp, synthetic construct
  misc_feature 1..660: note = Description of Artificial Sequence: Synthetic coding sequence
  source 1..660: mol_type = other DNA
atgctgcgggccggcgcccccaccggcgacctgccccgggccggcgaagtccatacgggaaccaccattatggccgtcgagtttgatggcggggtcgtgatgggctcagactcgagagtctcggcaggggaggctgtggtcaacagggtatttgataagctcagcccactacatgagaggatttactgcgctttgtcaggcagcgccgctgacgcgcaggccgtggctgatatggccgcataccagctggagttgcatggtattgaacttgaggaacctcccctggtgttagcggcagccaatgtggtcaggaacatcagttataagtatcgtgaggatctctccgcccacctgatggtcgcaggatgggatcagcgcgagggcggacaggtatatgggaccctgggcggcatgttaactcggcagcccttcgccataggcgggtctggcagtacctttatttacggctacgtggacgccgcatacaaaccggggatgtcccctgaagagtgtcggcgattcacgacagacgccattgctctggctatgtccagagacggatcatcaggcggagtgatctacttagtgacgatcacagctgccggagttgaccatagagtgattctgggtaatgagttgccgaagttctacgacgagtag

SEQ ID NO: 201184 - DNA, 537 bp, synthetic construct
  misc_feature 1..537: note = Description of Artificial Sequence: Synthetic coding sequence
  source 1..537: mol_type = other DNA
atgctgcgggccggcgcccccaccggcgacctgccccgggccggcgaggtgcatactgggaccaccattatggccgtcgaatttgatggcggtgtcgtgatgggctcggattctagggtgtccgccggtattgagctcgaagaaccccctctggtgcttgctgcggcaaatgtggtgaggaacatttcttacaaatacagggaggatttgtcagcccatctcatggtggctggctgggaccagcgcgagggtgggcaggtctatggaactctcgggggaatgctaacgcggcaaccttttgccattggcgggtcaggtagtacatttatctatggatatgtcgacgctgcttataagcctggtatgagccccgaagagtgcagacgctttactaccgacgctacctcaactaagcggcgagtctgtggttactttctcagaacgcagaagcgagaaaatcagaatcagagagtacacgaatacatgtgtactggcgagagatccctgagctcgtcccccctgctgtcctgttcctag

SEQ ID NO: 201185 - DNA, 537 bp, synthetic construct
  misc_feature 1..537: note = Description of Artificial Sequence: Synthetic coding sequence
  source 1..537: mol_type = other DNA
atgctgcgggccggcgcccccaccggcgacctgccccgggccggcgaggtgcacacaggaacaacgattatggcggtcgagtttgacggtggggtcgttatgggttctgattccagggtgagcgctggaatagaacttgaagagccgcctttagttttagccgcagctaacgttgtgagaaacatcagctataaataccgtgaagatttgtctgcacacctcatggtcgcagggtgggaccagagggagggtggccaggtctacggtacactgggcggcatgctgacacgccagccattcgccattggagggagcgggtcgacttttatctatggttatgtagacgccgcctataagcctggaatgagcccggaagagtgccgcaggttcacaactgatgccactagcaccaagcggcgagtgtgtggttacttcttaaggacccagaaaagggaaaaccagaaccaaagagtgcacgagtatatgtgtaccggcgaaagaagtctttcctcttctcctctgctgtcatgctcatag

SEQ ID NO: 201186 - DNA, 591 bp, synthetic construct
  misc_feature 1..591: note = Description of Artificial Sequence: Synthetic coding sequence
  source 1..591: mol_type = other DNA
atggccgtggagttcgacggcggcgtggtgatgggcagcgacagccgggtttcggccggggaagccgtcgtgaaccgggtgttcgataagctgtcccctttacatgaaagaatctattgcgctctctcaggttccgccgccgacgcacaagcagtggccgatatggccgcttaccaactggagctccatgggatcgaactggaagaacctcctctagtccttgcggctgcgaacgttgtacggaatatctcctataagtacagggaagacctgtccgcccacctgatggttgctggctgggaccagcgagagggtggccaggtgtatgggacgctcggcggcatgctcacgcgacaaccttttgccattggagggagtggtagcacattcatctacggatacgtcgacgctgcgtacaagccaggtatgagtcccgaggaatgtaggcgctttactacagatgctattgccttagcaatgtcccgggatggctcctcgggaggagtgatctacctggtgacgatcactgccgccggagttgaccacagagtgatcctgggaaacgagctacctaagttttatgacgaatag

SEQ ID NO: 201187 - DNA, 660 bp, synthetic construct
  misc_feature 1..660: note = Description of Artificial Sequence: Synthetic coding sequence
  source 1..660: mol_type = other DNA
atgctgcgggccggcgcccccaccggcgacctgccccgggccggcgaggtgcacaccggcaccacaatcatggctgtcgaattcgatggcggagtggtgatgggctcagattcaagggtgagcgccggggaagctgtagtaaatagggttttcgacaaactatctccactgcacgagcacatttactgtgctcttagtgggtcggcagcggacgcacaggcagtcgccgacatggcagcctatcagctggagctccacggcattgaactggaggaacccccgttggtactggccgcagcaaatgtagttagaaacatctcatataaatacagagaggatctatcggcacaccttatggtggctgggtgggatcaaagagagggcggtcaagtttatggaacactcggcggaatgctcacacgccagccattcgccataggaggttcagggtctactttcatttatggatacgtagacgcggcttacaagccggggatgtccccagaagagtgccggcgatttaccacggatgccatcgcattagcaatgtcccgcgacggcagttcaggaggtgttatctatctggtcactattactgctgcaggcgtagaccacagggtgatcctgggtaatgagctgcccaaattctacgacgagtag

SEQ ID NO: 201188 - DNA, 465 bp, synthetic construct
  misc_feature 1..465: note = Description of Artificial Sequence: Synthetic coding sequence
  source 1..465: mol_type = other DNA
atgctgcgggccggcgcccccaccggcgacctgccccgggccggcgaggtacacaccggaaccactattatggcagtcgaatttgacggcggcgtggtgatgggaagtgattccagggtgagcgccggtatcgagctggaggagcctccgcttgtcctggctgctgcaaacgtggttcggaacatctcatacaaataccgagaggatttatctgctcacttaatggtcgctgggtgggatcaaagggaaggaggccaagtctacggaacgctgggcgggatgctgacacgtcagccctttgctatcggtggttccggaagcactttcatctacggatacgtggatgccgcctacaaaccagggatgtccccggaggagtgcagacgcttcaccaccgatgggaaccagccgagcggaagagtgccaggagaggggtttgaaacttgggaagggagtcgcctgtag

SEQ ID NO: 201189 - DNA, 396 bp, synthetic construct
  misc_feature 1..396: note = Description of Artificial Sequence: Synthetic coding sequence
  source 1..396: mol_type = other DNA
atggccgtggagttcgacggcggcgtggtgatgggcagcgacagcagggtaagcgccggcgaagcagtggtgaaccgtgtcttcgacaaactgagcccacttcacgaacatatctactgcgccttgtcaggatctgctgcagatgcccaggctgtggcagacatggctgcctatcagcttgaactgcatggaatcgaactggaggaaccacctctggtgctcgcggcggccaacgtcgtgagaaatatatcctacaagtacagagaagatttgtcagcccatttgatggtggcagggtgggatcagcgagaaggagggcaggtgtatggcacactaggcggtatgttgaccagacagccgttcgctattggagggtctgggtctacattcatttag

SEQ ID NO: 201190 - DNA, 465 bp, synthetic construct
  misc_feature 1..465: note = Description of Artificial Sequence: Synthetic coding sequence
  source 1..465: mol_type = other DNA
atgctgcgggccggcgcccccaccggcgacctgccccgggccggcgaggtccatacaggaacaaccattatggccgtagagttcgatggcggcgtagttatgggctcagacagccgggtgtctgcaggaattgaactcgaggagccacccctcgtgttggccgcagctaatgtggtgaggaacatctcttacaagtaccgtgaggatctgtcggcacacttaatggtggccgggtgggaccagagagagggaggccaagtgtatggtacgctaggcggcatgcttacgagacaacccttcgcgatcggcggtagcggtagcacctttatctacggttacgtggacgccgcctacaagcccggcatgagccctgaggaatgtagacgttttacaaccgacggaaatcaacccagcggaagggttccaggtgaggggttcgagacctgggagggatctaggttgtag

SEQ ID NO: 201191 - DNA, 465 bp, synthetic construct
  misc_feature 1..465: note = Description of Artificial Sequence: Synthetic coding sequence
  source 1..465: mol_type = other DNA
atgctgcgggccggcgcccccaccggcgacctgccccgggccggcgaggtccacacagggacaaccatcatggctgtggagtttgatggcggagtagtgatgggatcagacagccgggtatcagccgggattgaactcgaggaacctccccttgtccttgccgcagctaacgtagttagaaatatttcctataagtaccgagaggacttaagtgcacatttgatggtggcagggtgggatcagcgcgagggcgggcaagtttatgggaccctggggggcatgctgacaaggcagcctttcgcaatcggaggatctggcagcaccttcatctacggttacgttgacgccgcatacaagcccggcatgagtcctgaagaatgcaggcgcttcacaaccgacggcaatcagccatctggtagagtgccaggtgagggctttgaaacatgggagggaagccggctgtag

SEQ ID NO: 201192 - DNA, 465 bp, synthetic construct
  misc_feature 1..465: note = Description of Artificial Sequence: Synthetic coding sequence
  source 1..465: mol_type = other DNA
atgctgcgggccggcgcccccaccggcgacctgccccgggccggcgaagtgcatacaggaactactatcatggctgtagaatttgatggcggagtagttatgggcagcgattctcgagtatccgctggtattgagttggaagaacccccattggttcttgctgccgcgaacgtggtgcgaaatatcagctataaatatagggaagacctctcagcccatctgatggttgccggttgggaccagcgagaaggcggacaggtatacggcactttgggtgggatgctgacccgccagccattcgctatcgggggtagtggcagcacatttatatacggctacgtggacgcagcatacaaacccgggatgtctcccgaagagtgtcggaggttcactacggacggcaaccagccatcagggagggtgcccggagaaggatttgaaacatgggaaggttccagactctag

SEQ ID NO: 201193 - DNA, 465 bp, synthetic construct
  misc_feature 1..465: note = Description of Artificial Sequence: Synthetic coding sequence
  source 1..465: mol_type = other DNA
atgctgcgggccggcgcccccaccggcgacctgccccgggccggcgaggtgcacaccggcactacgataatggctgtcgaattcgatggcggagtagtcatgggatcagacagtcgggtgtccgcaggcattgaactggaagaaccaccgcttgtgctggccgctgcaaacgttgtccgcaacatctcgtacaagtatagggaggacctgagcgctcatttgatggtagcaggttgggatcagcgagagggaggccaggtatatgggaccctgggggggatgctgactaggcaaccgtttgcaataggcggaagcggctcaactttcatttacggttatgtggatgctgcctacaaacccgggatgagtcctgaagaatgccgccggtttaccacggacggcaaccagccaagcggtcgggtgccaggagaaggattcgaaacttgggaaggcagtcggctgtag

SEQ ID NO: 201194 - DNA, 465 bp, synthetic construct
  misc_feature 1..465: note = Description of Artificial Sequence: Synthetic coding sequence
  source 1..465: mol_type = other DNA
atgctgcgggccggcgcccccaccggcgacctgccccgggccggcgaggtgcacaccggcaccactataatggccgtggagtttgatggcggcgtggtcatgggatcggactcgagagtgtcagccggcatagaattggaggagcctcccctcgtacttgctgcagcaaatgtggtgcggaacataagttataaatatcgtgaggacctctctgcccatttaatggtagccgggtgggaccagcgggaagggggccaggtgtatgggactttggggggtatgctgactagacagccattcgcgattggtggaagtggaagcacattcatctacggctacgtggacgccgcctacaagccagggatgagccctgaagaatgtaggcggtttaccaccgatggaaatcagcccagcgggcgggtacccggagagggcttcgagacatgggagggtagccgtctctag

SEQ ID NO: 201195 - DNA, 465 bp, synthetic construct
  misc_feature 1..465: note = Description of Artificial Sequence: Synthetic coding sequence
  source 1..465: mol_type = other DNA
atgctgcgggccggcgcccccaccggcgacctgccccgggccggcgaggtccacactggaaccacaatcatggccgtggaattcgatgggggggtggtgatgggcagtgacagccgggtctccgccggtatcgaactcgaagagccaccactggtcctggccgcagctaacgtcgtaaggaatatctcttacaagtaccgcgaagacctgtccgcgcatttaatggttgcgggttgggaccagcgggaaggcggtcaggtgtatggaaccctgggaggcatgctcacacgccaaccttttgcgattgggggatcgggctcaacgtttatctacggttatgtggatgccgcttataagcccggcatgtccccggaagaatgccgtcggtttactactgacggcaatcagccgtccggccgtgtacccggggagggctttgagacttgggaggggtcccgactgtag

SEQ ID NO: 201196 - DNA, 465 bp, synthetic construct
  misc_feature 1..465: note = Description of Artificial Sequence: Synthetic coding sequence
  source 1..465: mol_type = other DNA
atgctgcgggccggcgcccccaccggcgacctgccccgggccggcgaggtgcacaccgggacgacaattatggccgtggaattcgacggtggggttgtgatgggctccgactcacgcgtgagtgcaggcatcgaactggaagagcccccactggtcctggctgcagccaacgtagttcgaaacatcagctataagtatagagaggatctctcggctcaccttatggtggccggatgggaccagcgagaaggtgggcaggtgtatggcacccttggtggaatgctcactaggcagccttttgcaatcggcggttccggatcaacgtttatttacggctatgtggatgccgcatacaaacccgggatgtccccggaggaatgcagaagatttacgacggatgggaatcagccctccgggagggtccctggcgaaggatttgagacatgggaaggatccagactatag

SEQ ID NO: 201197 - DNA, 426 bp, synthetic construct
  misc_feature 1..426: note = Description of Artificial Sequence: Synthetic coding sequence
  source 1..426: mol_type = other DNA
atgaacgcccggggcctgggcagcgagctgaaggacagcatccccgtgacagaattgtccgcaagtggccccttcgaaagccacgatttgctcagaaaaggcttttcctgcgtgaagaatgagctgctgccctcccatccactggagttgagtgagaaaaattttcagctgaaccaagataagatgaacttctccaccctccgtaacatccaggggttgttcgcccctctcaaactgcagatggaattcaaagctgtacagcaggtccagcgactgccatttctatctagtagcaatttaagcctcgacgtcctgagaggcaatgacgaaaccatcgggtttgaagacattctcaatgacccgtctcagagcgaagttatgggggagccccacctgatggtggaatacaaactcgggcttctctag

SEQ ID NO: 201198 - DNA, 471 bp, synthetic construct
  misc_feature 1..471: note = Description of Artificial Sequence: Synthetic coding sequence
  source 1..471: mol_type = other DNA
atgcccatggccggcctgctgaagggcctggtgcggcagctggagcggttttcagtgcagcagcaagcgtctaaaatgccccctaagggcaaatctgggtctggtaaagcgggcaaagggggagccgctagtggctccgacagcgctgacaagaaggctcagggccctaaaggcggggggaatgctgtcaaggttcgccacatcctttgtgagaaacacggaaagattatggaggctatggaaaaacttaagtctgggatgcgatttaatgaggtagccgcacagtactctgaagacaaagcccgccaaggaggggacttagggtggatgacgcgcgggtccatggttggaccctttcaggaagcagcttttgctctccctgtcagcggcatggataaaccagtttttacagatccacccgttaagacaaaattcggataccacattattatggttgaaggacggaaatag

SEQ ID NO: 201199 - DNA, 402 bp, synthetic construct
  misc_feature 1..402: note = Description of Artificial Sequence: Synthetic coding sequence
  source 1..402: mol_type = other DNA
atgcccatggccggcctgctgaagggcctggtgcggcagctggagcgcttctcagtacagcagcaggcgtctaagatgcctcctaaaggtaagagtggctcaggaaaggcaggcaaaggaggggccgcctcgggcagcgactcggccgataaaaaggcccaggggccaaagggcggaggcaatgctgttaaagtacggcacattctctgcgagaagcacggaaagatcatggaggccatggagaagctcaaaagtggtatgcggttcaacgaggttgccgcccaatatagcgaggacaaagcgcggcaagggattccaagtttgcaacaacatgctggtcaccatcgcgacctccggtccaccctgatttccctcgtatcctacttacagactactccatag

SEQ ID NO: 201200 - DNA, 1062 bp, synthetic construct
  misc_feature 1..1062: note = Description of Artificial Sequence: Synthetic coding sequence
  source 1..1062: mol_type = other DNA
atggccgccgccgaggccgccaactgcatcatggaggtgagctgcggacaagctgaatccagtgagaagccaaacgcagaggacatgacatcaaaggactattactttgattcctacgctcacttcggtatacatgaggagatgttgaaagatgaggtaaggaccctgacatacaggaactccatgttccataatagacatctcttcaaggacaaggtcgtgctggacgtcggctccggcactggaattctctgtatgtttgcagcgaaggctggagcgcgtaaggtgatcggaatagagtgtagttcaattagtgattacgctgtgaagattgtgaaagcgaacaagctggaccatgttgtaaccattatcaaaggtaaagtagaagaggtggagctccctgttgagaaggtggatatcatcatctccgaatggatgggctattgcctgttctacgagagcatgttgaacaccgtgttatacgctcgggacaagtggctggcacccgatggcctaatcttccccgatcgggcgacgctttatgttacggccatcgaagatcgccagtacaaggactacaagattcactggtgggaaaacgtctatggatttgacatgagctgcataaaggacgtggccattaaggaacccctggtggacgtggtcgatcctaagcagcttgtcacaaatgcttgtctcatcaaagaggtggacatttatacagtgaaggtggaagatctgacctttacctcccctttctgtctgcaggtaaaacggaatgattacgtgcacgcgttggtagcctactttaatattgagttcacccggtgccataagcggacaggattttcaacttccccggagtccccttacacacactggaaacaaacagttttctatatggaggactatcttacagtcaaaactggggaggagatttttggcacaatcggtatgcgccccaacgcaaagaataatagagacctggactttactattgatctagattttaagggacagttgtgcgagctctcatgtagcacagactaccggatgcgttag

SEQ ID NO: 201201 - DNA, 882 bp, synthetic construct
  misc_feature 1..882: note = Description of Artificial Sequence: Synthetic coding sequence
  source 1..882: mol_type = other DNA
atggtgggcgtggccgaggtgagctgcggccaggccgagagcagcgagaaaccgaacgcggaagatatgacttccaaagattactacttcgatagctacgcgcattttggcatccatgaagaaatgttgaaggacgaggttcgcacactgacctacagaaattccatgtttcacaaccgccacctgttcaaggacaaggttgttctggacgtgggttctggcacggggatattatgtatgttcgccgccaaggcgggcgctcggaaagtgatcggcattgaatgtagttctatctccgactacgctgtcaagatagttaaggccaataagttggatcacgtggtgaccatcataaaaggtaaagtagaagaagtggagttgccggtggagaaagtcgatataatcatttccgaatggatggggtactgcctgttttatgaaagcatgctgaacaccgtgctgtacgcaagagacaaatggctggcacctgacgggctgatctttcccgacagagccactttgtatgttaccgccatcgaggacaggcagtataaagattacaaaattcactggtgggagaatgtgtacggctttgacatgtcctgcataaaggacgtggccattaaggaaccactggttgacgttgtggaccccaaacaactggttaccaacgcttgcctcattaaagttcgagggtgggcctggccaggagctccctgggtcgagacaaaagagaggcctagcccagggccgggcatggggctttgggggccagagtgctggccagaagtgagcgaacccgacttaccggctagagggggcgcccgaggcccagggaaaacactccggccactgaacatctttgtaagcgcagccgtgtag

SEQ ID NO: 201202 - DNA, 1116 bp, synthetic construct
  misc_feature 1..1116: note = Description of Artificial Sequence: Synthetic coding sequence
  source 1..1116: mol_type = other DNA
atggccgccgccgaggccgccaactgcatcatggagaacttcgtggctaccctcgctaatgggatgtcactacaaccgccacttgaggaggtttcttgcggccaggctgagagcagcgagaagccaaatgctgaggacatgacctccaaagattattactttgacagctacgctcactttggaattcacgaggagatgttgaaggatgaggtccgaaccctgacctaccggaactccatgtttcacaatcggcatctattcaaggataaggtggtcctggatgtgggctccggcacgggcatattgtgtatgtttgctgcaaaggcaggagccagaaaggtcatagggatagagtgctcgtctatcagtgattacgcagtgaaaatcgtaaaggccaataagctcgatcacgtggttactattattaaaggtaaagtggaagaagtggagctgcctgtagaaaaggttgacatcatcatatctgagtggatgggttactgccttttttatgaatccatgctgaacacagtgttatatgcccgcgataagtggctcgcgcctgatggcctaatttttccggaccgggctacgctatatgttactgccatagaggatagacagtataaggactacaagatccactggtgggagaacgtttacggatttgatatgagctgcatcaaggatgtggccatcaaagagccactggtcgatgttgtggatcccaaacagttagtcactaacgcatgcctcataaaggaggtggacatctacactgtgaaggtcgaagatctgactttcacaagtccattctgcctgcaggtcaaaagaaacgactacgtgcacgccctcgtggcttattttaacattgagttcactcgctgtcacaagagaactggctttagcacttcaccagagtccccatacacccattggaaacagaccgtcttttatatggaagactatttgacagtcaagaccggggaagagattttcggcaccattggcatgcggccgaacgctaagaataatcgcgatctggactttacaattgatctggacttcaaggggcaattatgtgagctgagctgttcaacggactataggatgcgttag

SEQ ID NO: 201203 - DNA, 483 bp, synthetic construct
  misc_feature 1..483: note = Description of Artificial Sequence: Synthetic coding sequence
  source 1..483: mol_type = other DNA
atgaccagcaaggactactacttcgacagctacgcccacttcggcatacatgaagagatgctaaaggatgaagtccgaacactgacctatcgcaacagcatgtttcataaccgtcatctcttcaaggataaagtcgtcttagacgtagggagtggcaccggaattttatgtatgtttgcagctaaagcaggagcacgaaaggtgatcgggattgaatgtagttcaattagcgactacgcggtgaaaatcgtaaaggctaataaactggaccatgttgtaaccatcataaaaggaaaggttgaagaagtagagctcccagtcgaaaaggtggacatcattatttctgagtggatgggctactgccttttctacgagtctatgctcaataccgtgctgtacgcccgagataagtggttggcccctgatggccttatttttccagaccgggccacactttacgtgactgctatcgaagaccgctag

SEQ ID NO: 201204 - DNA, 618 bp, synthetic construct
  misc_feature 1..618: note = Description of Artificial Sequence: Synthetic coding sequence
  source 1..618: mol_type = other DNA
atgaccagcaaggactactacttcgacagctacgcccacttcggcatccacgaggagatgctgaaggacgaagtccggaccctaacatacaggaattcaatgtttcacaatagacatctttttaaagacaaggtcgtgctagatgtcggttctggaacaggtatcctctgtatgttcgctgcaaaggctggagctaggaaagtgatcgggattgagtgctcctccatatcagactacgcagtgaaaatcgtcaaagccaacaagctggaccacgtcgtgactattatcaagggtaaggtggaggaggtcgaactgcccgtcgagaaggtggacattatcatctcagaatggatgggatactgcttgttctatgagagtatgctaaacactgtcttatacgcccgagacaagtggctggcccctgatggccttatttttccagaccgtgccactctgtatgtgactgctatagaggaccgccagtataaagattacaagattcactggtgggagaacgtttacggctttgacatgagctgcataaaggacgtggcaattaaggagccgctagtcgatgtggttgacccaaagcagcttgtgaccaacgcctgcctgtag

SEQ ID NO: 201205 - DNA, 483 bp, synthetic construct
  misc_feature 1..483: note = Description of Artificial Sequence: Synthetic coding sequence
  source 1..483: mol_type = other DNA
atgaccagcaaggactactacttcgacagctacgcccacttcggcatacatgaggagatgctaaaggatgaggtgaggacattaacatacagaaactcaatgttccacaataggcatctttttaaagacaaggttgtgctggatgtgggaagtggtaccggcatactgtgcatgttcgccgctaaggctggagcacgtaaggtaatcggtatagaatgtagcagcatatctgattacgcggtgaagattgttaaagccaacaaattggatcacgtcgtgaccatcatcaaggggaaggttgaagaggtcgaactgcccgtggagaaggtggatatcataatttccgagtggatgggatactgtttgttttacgagtctatgctcaataccgttttgtatgcacgggataaatggctggcacccgatggacttatttttcctgatcgagctaccctgtatgtgacggcaattgaggacaggtag

SEQ ID NO: 201206 - DNA, 630 bp, synthetic construct
  misc_feature 1..630: note = Description of Artificial Sequence: Synthetic coding sequence
  source 1..630: mol_type = other DNA
atgaccagcaaggactactacttcgacagctacgcccacttcggcatacatgaagaaatgctgaaggatgaagtgcgcactctgacttaccggaattctatgtttcataacaggcatctgtttaaagataaggtggtcttagacgtaggctcgggcacagggatcctgtgcatgttcgccgctaaagcaggggcacgcaaggtcatcggcatcgagtgctcaagtatctccgattacgcggtgaaaatagtgaaagccaataaactcgatcacgtggtgaccatcataaagggtaaggttgaagaggtcgagctgccagtggagaaagtagatattattatctccgagtggatggggtactgtctgttttacgagtccatgttgaacacagtgctgtacgctagggataagtggcttgcacccgatggtctgatcttccctgatcgcgctaccttatacgttaccgccatcgaggaccggcaatacaaagactataaaatccactggtgggagaatgtgtacgggtttgacatgagttgtattaaggacgtggccattaaagagcctctggtggatgtggttgatcctaagcagctcgtgactaatgcttgcctcattaaggttcggtag

SEQ ID NO: 201207 - DNA, 687 bp, synthetic construct
  misc_feature 1..687: note = Description of Artificial Sequence: Synthetic coding sequence
  source 1..687: mol_type = other DNA
atggccaccagcggcgactgcccccggagcgagagccagggcgaggaaccagctgagtgttccgaggctggtctgctgcaggagggcgtgcagccagaggaatttgttgccattgcagattacgcagctaccgacgaaactcagctgtctttcttgcggggcgagaagatcctgatcctgcgacagactactgccgactggtggtggggcgagcgggcgggctgttgcggctacattcccgcaaatcacgtgggtaagcatgtcgacgagtatgatcctgaggatacctggcaggacgaagagtatttcggcagttacggcacactgaagctccatctcgaaatgctggcagatcaaccacggaccacaaagtaccactcggtcatcctccagaataaggagtcactaacggacaaggtaatcctagacgtggggtgcggtacaggcattatctccctcttttgcgcccattatgccagaccccgtgccgtttacgccgtcgaagctagcgagatggcacaacatacgggccagctggtgttgcagaacgggttcgccgacattattacagtttaccagcaaaaagtcgaagatgtggtgttgcctgagaaagtggacgttctggtatccgaatggatgggaacatgcctcttagtgggagagaaggtgttccctatttggagatag

SEQ ID NO: 201208 - DNA, 855 bp, synthetic construct
  misc_feature 1..855: note = Description of Artificial Sequence: Synthetic coding sequence
  source 1..855: mol_type = other DNA
atggccaccagcggcgactgcccccggagcgagagccagggcgaggagcccgccgaatgctccgaggcaggacttctccaggagggcgtgcagccagaggaatttgtggccattgcagactatgcagcaactgacgagacacagctgtcgtttctgagaggtgagaagattctcatcctccgtcaaacaaccgccgattggtggtggggagaaagggccggatgttgcggttacatcccagccaatcacgtcggcaaacatgtggatgagtatgatccagaggacacctggcaagacgaggagtattttggatcttatggcacattaaagttgcatctggagatgttggctgaccaaccccgcactaccaagtaccacagcgttatactgcagaacaaggagagcctcaccgataaagtcatccttgacgttgggtgcggaaccgggatcatcagccttttttgcgcacattatgccaggcctagggccgtctatgctgtggaagctagcgagatggcgcagcacacgggacaactggtgctgcagaacgggttcgccgacatcatcacagtttaccaacagaaagttgaggatgttgtacttcccgaaaaagttgacgtccttgtgagcgagtggatgggcacttgcttgcttgcggcccccctcctctcatgccgtatcttgccgtgcacctgtgcctccggcccactgcacgtgttgctggcttgttgtctgcccctcccttgcacatgtgcaagtgtgccactgcatgtcttgctcgcctgttgtcttcctgttcttagggcaccacagccgtccggcctgcatctgtcctggcccatctttctcctatag

SEQ ID NO: 201209 - DNA, 1302 bp, synthetic construct
  misc_feature 1..1302: note = Description of Artificial Sequence: Synthetic coding sequence
  source 1..1302: mol_type = other DNA
atggccaccagcggcgactgcccccggagcgagagccagggcgaggaaccagctgagtgtagcgaggccggtcttttgcaggagggagtccagcctgaggagtttgtcgccattgccgactacgctgctacagacgaaactcagctcagctttctaagaggggaaaaaatcctgatcctacgccagactacggccgactggtggtggggcgagcgggcaggctgctgcgggtatatccccgctaatcatgtgggcaaacacgtggatgaatacgatcctgaagatacttggcaggatgaagagtatttcggttcttacggaactctcaagctgcacctggagatgctggccgaccagccgcgcaccactaagtatcactctgtcatcctgcagaacaaggaaagtctcacagataaggtgatcttggatgtggggtgtggaaccggtataatatcactattttgcgcccactatgcacggcctagagccgtgtatgctgtggaagcttccgaaatggctcagcacacgggccagttagtgctacagaatggattcgctgacattataacagtgtaccagcagaaagtcgaagacgttgtgctccctgaaaaagtggatgtactagtctccgagtggatgggcacatgtctgctatttgaattcatgatagagagtattctgtatgccagagatgcctggctgaaggaagacggggttatctggcccactatggccgccctccaccttgtaccgtgctcggcagacaaggattatcggagtaaggtactgttctgggacaacgcttacgagtttaacctgtccgctctgaagagcctggcagttaaagaattttttagtaagcccaaatacaatcacattttaaagcccgaagattgcctgtctgagccatgcacaatcctccaacttgatatgagaacagtccagatcagcgatctcgaaacactgagaggtgagctgcggtttgatatccgcaaggcaggaacgctccatggcttcaccgcatggttttcagtccattttcaaagcctgcaggaagggcagcctccacaggtcttgtccactggccctttccatccaactactcattggaaacagacattgttcatgatggacgatccagttcccgtacataccggagatgttgtaacaggctcagtggtgcttcaaaggaacccggtgtggagacggcacatgagtgtcgcactgtcttgggccgtgacatctcgccaggatccaacctcccagaaagtgggggagaaggtctttcctatatggcgctag

SEQ ID NO: 201210 - DNA, 486 bp, synthetic construct
  misc_feature 1..486: note = Description of Artificial Sequence: Synthetic coding sequence
  source 1..486: mol_type = other DNA
atgctggccgaccagccccggaccaccaagtaccacagcgtgatcctacaaaataaggaatctctgcgcatcaagagctcctggacctgggccgtgggtctgggctccagtgttagttctgtgcacaccatgagggggctcgagagggtgtacgccgtggaggcaagcgagatggcccagcacaccggtcagttggttcttcaaaacggtttcgctgacataattactgtataccagcagaaagtcgaagatgtggttctgccagagaaggtggacgtgctggtgtctgagtggatgggtacctgtcttctattcgagttcatgattgagtccatcctatatgcaagggatgcctggttaaaagagacaggtagctttggtcctccttggttaagatgcactctgtgtcccgccgtgctaattcggattattgttgccagatgttccagcggaactacgcgcaccagcagcaccagcgccctttag

SEQ ID NO: 201211 - DNA, 1302 bp, synthetic construct
  misc_feature 1..1302: note = Description of Artificial Sequence: Synthetic coding sequence
  source 1..1302: mol_type = other DNA
atggccaccagcggcgactgcccccggagcgagagccagggcgaggaaccagcagaatgttccgaagccggattattacaggaaggggtccagccagaggagttcgtcgctattgctgactatgcagccactgacgagacccaactatcttttctgagaggtgagaaaattctcatcctccgacaaaccacggccgactggtggtggggcgagagggcaggctgctgtggatacattcctgcaaaccatgtcggaaagcacgtagacgaatacgatccagaggacacttggcaggacgaagagtatttcgggtcgtatggaaccctcaagctccacctggaaatgctggcagatcagcccaggactactaagtaccactctgtgatcctgcagaacaaggagtctcttacagataaagtgattctggatgtgggatgtggcaccggcattatctcacttttttgtgcacattatgccagacctcgtgcggtatacgccgtggaagctagtgagatggcccaacacaccgggcagctcgtcctacagaacgggtttgcggatatcatcacagtgtatcaacagaaggtcgaggatgtcgtgctgcctgaaaaggtcgatgtgctggtctctgagtggatgggtacctgccttttatttgaattcatgattgagagtatcttatacgcccgggatgcttggcttaaggaagatggagtgatctggcccactatggctgctcttcacctagtgccatgtagcgctgataaggattataggtcgaaggtcttgttctgggacaatgcctatgagtttaacctgagtgctctgaaatccctcgcggtaaaggagtttttttccaaaccaaagtacaaccacattctaaagccagaagattgcctgagtgaaccgtgcactatcctgcagctcgacatgcgaactgtgcagatttccgatctcgagactctgaggggcgaacttcggtttgacatcagaaaagccggcactctccacggctttaccgcttggttcagcgttcatttccagagtttacaagagggacagcccccacaggttctaagtacaggcccttttcatcccaccacccactggaagcagaccctgtttatgatggatgaccccgtgccggtccatacaggtgacgtggttactggatccgtcgtgttgcagcgaaatccggtgtggaggcgccacatgagtgtggccctctcttgggctgtaacatctcgccaggatcccacaagccagaaggtcggagagaaagtgttccccatatggcgttag

SEQ ID NO: 201212 - DNA, 1302 bp, synthetic construct
  misc_feature 1..1302: note = Description of Artificial Sequence: Synthetic coding sequence
  source 1..1302: mol_type = other DNA
atggccaccagcggcgactgcccccggagcgagagccagggcgaggagcctgccgaatgctctgaagctgggctattacaggaaggagtgcagcccgaagagtttgttgccatagcggattatgccgctacggatgaaacccaactgagctttctcagaggagaaaaaatacttattctgcggcagaccactgcggactggtggtggggggaacgagccggatgttgtggctatattcctgcgaaccacgtgggaaagcacgtggatgagtacgatcccgaggacacttggcaggatgaagaatactttggctcatacgggacgctcaaactgcacctggagatgctcgccgaccagcctagaaccacaaaataccactccgttatcttacagaacaaagagtctctgaccgataaggtgatccttgacgtcggctgcggaacgggcataatcagtctattctgcgctcattacgccagacctcgtgccgtgtatgccgtagaggcaagtgagatggcgcagcataccggccagcttgtgctgcagaacggctttgccgatatcatcacagtgtaccagcaaaaagttgaggatgtggtcttgccagaaaaggtagatgtgctggtaagcgagtggatgggaacctgccttttatttgagttcatgatcgaatcaatactttacgccagggacgcatggctgaaagaggacggagtgatctggcctacaatggccgcgttacatttggtgccttgttctgccgataaagattaccgctcaaaagtgttgttttgggataatgcttatgagtttaatctgagtgccttgaagagtctggccgtgaaggagttcttctctaagccaaagtataatcacatcctgaagccagaggattgcctttcagagccttgcacaatccttcagcttgatatgaggacagtccagatctctgacctggaaaccctcaggggggaactgaggttcgacatcaggaaagccggcacattgcatggcttcacggcatggttctctgtacattttcaatccctccaggaggggcagcctccccaggtgctgtcgaccgggccattccatccaaccacgcattggaaacaaaccctgttcatgatggacgatccagtgcccgttcacaccggggacgtggtaacaggctccgtcgttttgcagaggaacccagtctggagacgccatatgtccgtggcactgtcatgggctgtcacaagccgccaggatccaacatctcagaaagtgggagagaaggtatttcccatctggcggtag

SEQ ID NO: 201213 - DNA, 996 bp, synthetic construct
  misc_feature 1..996: note = Description of Artificial Sequence: Synthetic coding sequence
  source 1..996: mol_type = other DNA
atggccaccagcggcgactgcccccggagcgagagccagggcgaggaacctgcagaatgctccgaagcaggcttgcttcaagaaggggtacagcccgaggagtttgtcgcaatcgccgactacgctgcaaccgatgagacccagcttagttttctcaggggagagaagatattaatcctgcgacagactaccgcagactggtggtggggagagcgggctggctgctgtggctatatccccgctaatcatgttgggaaacatgttgacgagtacgacccagaagacacttggcaagacgaggagtactttggctcatatggcactctgaagttgcacctggaaatgctggccgaccagccaaggactacaaagtaccattccgtgatcctgcagaacaaggagtctctgaccgacaaggtgatcttggatgtgggatgtggtactggtattataagcctcttctgcgctcactatgccagacctcgtgctgtgtacgccgttgaggcgtcagaaatggcccaacacacaggccagctggtactccagaatggctttgccgatatcatcacggtttaccaacagaaggtcgaagacgtggtgcttcctgaaaaagtggacgtcctggtaagcgaatggatgggcacatgtctgctgacattgaggggcgagctgaggttcgacatcagaaaagctggaactctccacgggtttactgcctggtttagtgttcattttcagtctctgcaagaaggacagccgccacaggttcttagcacaggtcctttccaccccacaacacactggaagcagaccctcttcatgatggatgatcctgtgccagtccataccggtgatgtggtgaccggcagcgtggttctgcaacgtaatcctgtgtggcgtcggcatatgtctgtggccttaagctgggcggtgacaagtcgacaagacccgacatctcagaaagtgggtgagaaggtgttccccatttggcgatag

SEQ ID NO: 201214 - DNA, 870 bp, synthetic construct
  misc_feature 1..870: note = Description of Artificial Sequence: Synthetic coding sequence
  source 1..870: mol_type = other DNA
atggccaccagcggcgactgcccccggagcgagagccagggcgaggagccagcagaatgttccgaggccggactactgcaggagggcgttcagccagaggaattcgtcgccatcgctgactatgcggctaccgatgagactcaactgagctttcttcggggggaaaagatcctcattttgcgtcagacaactgcagactggtggtggggtgagcgggcaggctgctgcggttatatcccagctaatcatgttggcaagcatgtggacgagtatgatcctgaggacacctggcaggacgaagagtacttcggaagttatggaaccttaaagctccacttagagatgttggcggatcagcccaggacgaccaaataccacagcgtgatactgcagaacaaggagtcattaaccgataaggtgatattggacgttgggtgtggcaccggaattatttccctgttctgtgcccattacgcaaggccccgtgccgtgtatgccgtggaagctagcgaaatggctcagcacacgggacaattagtgctgcaaaatgggtttgcggacataatcacggtttatcagcagaaagtcgaggatgtggtcctgcctgagaaggtggatgtcctggtctccgagtggatgggcacgtgtttgttatttgagttcatgatcgagtccattctgtacgctagagatgcctggcttaaggaggacggcgtcatctggcccacgatggctgctcttcatcttgtgccttgtagtgcagacaaagattatcgctccaaggtccttttttgggataacgcatacgagttcaacctgtccgctctcaagcttgagaaaaaatctagcccctccggagacgatagttag

SEQ ID NO: 201215 - DNA, 906 bp, synthetic construct
  misc_feature 1..906: note = Description of Artificial Sequence: Synthetic coding sequence
  source 1..906: mol_type = other DNA
atggccaccagcggcgactgcccccggagcgagagccagggcgaggagccagcagagtgttcggaggccggcctgctccaggaaggggtccagccggaagaatttgttgcaattgctgactatgccgccactgacgagactcagctgagcttccttagaggagaaaagattctgatcctgagacagaccactgccgattggtggtggggcgagcgagcaggttgctgcgggtatatcccggctaaccatgtaggcaaacacgttgacgagtacgatcctgaggatacctggcaggacgaagagtacttcggcagctatggcacactgaaactgcacctagagatgctggccgatcagcctcgtaccaccaagtaccattcggtgatacttcagaacaaggagtcactgacagacaaggtgatcttggacgttggatgcgggaccggcatcattagcctcttctgcgcgcactacgcaagaccccgcgccgtatacgccgtcgaagccagtgagatggcccaacacaccggacagctggtgctacaaaatgggttcgcagatatcatcactgtttatcagcagaaagtggaggatgtcgtgctgcctgaaaaagtggatgtgctggtgtcagaatggatgggcacatgcttgctacatcacacgctggaagctgacgccgtgcatgacggccggccgagcccatgtccctatcgtagaagaggccatggcttttcttgtgtggccgagaaaccaagcgttgaaaaggcacatgtgtgtggatccgagctgggctgtcacttccagaccaggccccacatttccaagtcatggaggaagtctctgcctcatctcgagatgacagtggatgctctgtttggcaagcagtgtgcctacctggagggttag

SEQ ID NO: 201216 - DNA, 951 bp, synthetic construct
  misc_feature 1..951: note = Description of Artificial Sequence: Synthetic coding sequence
  source 1..951: mol_type = other DNA
atgatcgccgaccgggtgcggaccgacgcctaccggctgggcatcttgaggaactgggccgccttgcgtggtaagaccgtgctagacgtcggcgctgggaccggtatcctcagtattttctgcgcccaggcaggggccaggcgcgtttacgccgtggaagcgagcgcaatttggcaacaggcaagagaagtggtgcggttcaacggcctagaagaccgagtccacgtgttaccagggcctgttgagaccgttgaattgcccgaacaggtcgacgctatcgtatccgagtggatgggctatggcctcctgcacgagtccatgctctcatccgtcctccatgccaggacaaagtggctgaaggaagggggcctcctcctgccagcttctgccgaactttttatcgcgcccatcagtgatcagatgctggagtggcggttggggttttggtctcaggtaaaacagcattatggagtagacatgtcttgccttgagggattcgctacccgttgtctcatggggcactccgaaatcgtcgtgcaaggtctgtcaggggaggatgttctcgcccgaccacagcgctttgcacagctcgagctcagtcgggccggactagaacaagaactggaggctggagtgggcggcagattccggtgcagctgttatggaagcgctcccatgcatgggttcgctatctggttccaggttaccttccctggcggtgaaagcgagaaacctctagtcttatcaacttccccattccatccggcaactcattggaaacaggccctcctttacctgaacgaaccagtccaagtggaacaggacaccgacgtctcaggcgaaatcactctgttgccaagcagagacaatcccaggaggctgcgggtgctgttacggtataaggtgggtgatcaggaggaaaagaccaaggattttgccatggaggattag

SEQ ID NO: 201217 - DNA, 1128 bp, synthetic construct
  misc_feature 1..1128: note = Description of Artificial Sequence: Synthetic coding sequence
  source 1..1128: mol_type = other DNA
atgagccagcccaagaagcggaagctggagagcggcggcggcggcgagggtggagaaggcacggaagaggaagacggcgcagagcgagaggccgccttagagcggccacgaagaacaaaacgcgagcgcgatcagctgtattacgagtgctattcagacgtcagcgtccacgaagagatgatcgcagatcgcgtacgcacggatgcatacagactgggaatcttgcgcaattgggccgctctccgggggaaaacagtcctcgacgtgggcgccggaactggcatccttagtattttttgcgcgcaggcaggcgcaagacgggtctacgctgtagaagccagcgccatctggcaacaggccagggaagtggttaggttcaatggactggaagacagagtccatgtcctgcccggcccggtcgaaaccgtggagctgcctgagcaagtcgacgccatcgtctctgagtggatgggatatggtctcctgcacgaatccatgttgtcctcagtcttacacgcacggaccaaatggctgaaagagggcgggctacttttaccagccagcgctgaactgttcatcgctccgatttctgatcagatgctggagtggcgcttaggattctggtctcaggtgaagcaacactacggcgttgacatgtcgtgccttgaggggtttgcaaccaggtgtctgatggggcattctgagattgtagttcagggtttaagtggagaggacgtgcttgccagaccccagagattcgcccagttagagcttagccgcgcggggcttgagcaggaactcgaggcaggcgtgggcgggagattcagatgttcttgctatgggtcagcacccatgcatggttttgccatttggttccaggtgacattccctgggggcgaatctgaaaaacccctcgtcctgtctactagccctttccatccagctacacattggaaacaggctctcctgtatttaaacgagcctgtacaggttgaacaagacaccgatgtgtcgggagagatcaccttgctcccatccagagataacccaagacgcctgcgggtgctactccgctataaagtgggagatcaggaggagaagaccaaggattttgctatggaggactag

SEQ ID NO: 201218 - DNA, 936 bp, synthetic construct
  misc_feature 1..936: note = Description of Artificial Sequence: Synthetic coding sequence
  source 1..936: mol_type = other DNA
atggcccggagcggccggcggccctggagcgaccccggcggcctgagcggcgccgtgcaaagagccggaggtcccggcgctaggcctgccggtacctctggggattgtcgagtagccggtaccggaggttgccaccgcgaaagagtagatgggctccgtaccccggctagggttcacgcagagttgagacccccgagagccaaccaggtggccgaggggggccggtccagcccggcaggcctgcgtagagcactacacagcccccaccagcggcccgatgctggaatggcccctggactgctggaaccaggcgaggcagctctatggtgtggacacgaactgccaggtggcctccgacatgctcttagccacggaccactaggcgaccgctgtgcgggcatcgtgcgccgcggaagggccggtcccgccgctgccctttgcagcgcccgtgcattgccgaggcggctgggagcaggtgccggcgggcggtctggtagagcactacccctccaattgttgtggctgggtgcgcacgcctggctttgccatctcgtgccaggagacctgccttggcggggtgtgggagagactcccggggccgtgcacctggcgttttcacccggacacagcttggagacgggggcaccgctgcccgaacgagcaggagctagcggtgctcgccacgggaggttccgcagggatcatgccgccgcactgccggggcagcccccttcaccagccagggccgccgctctgcagtccggcaggccgggcggtgaggatcaaagactgtgccacgggggactaagcgtcgcttttagtccttcatacctccccaaacagcctgatctgcggggacgcggggttgcccggtccgagggaaagggtcgcagtcacgttcaggttggaggcatatcccctcctttcccatcctag

SEQ ID NO: 201219 - DNA, 2532 bp, synthetic construct
  misc_feature 1..2532: note = Description of Artificial Sequence: Synthetic coding sequence
  source 1..2532: mol_type = other DNA
atggccaagcccctgaccgacagcgagaagcggaagcagatcagcgttaggggcttggccggtctaggggatgttgccgaggtcaggaagtcctttaaccgccacctccactttaccctagtaaaagaccgaaatgtcgcaaccccaagagactactttttcgcgttggcacatacagtccgcgatcacctggtagggcgctggattcgcactcagcagcactattacgaaagagatccgaagcggatctattacctgtccctcgagttctatatgggcaggactctccagaacaccatggtcaatttgggattgcagaatgcttgtgacgaagcaatctaccagctaggcttggacctggaggagctggaagagatcgaggaggatgccggcctgggcaacggcggtctgggtaggttggcagcctgctttttagatagcatggccacacttggcttggccgcgtacggttatggaataaggtatgagtttggaatttttaaccagaaaatcgtgaacggatggcaagttgaagaggccgacgactggctgcggtacggtaatccgtgggagaaagcacgccccgagtacatgctgccggtccatttttacgggcgagtggagcacactcctgacggcgtgaagtggctggacacacaagttgtgctggccatgccctacgacacgccagtgccggggtataagaacaacaccgttaataccatgcgcctctggtctgccaaagccccgaatgacttcaaactgcaagatttcaatgtgggggactatatcgaggcagttcttgaccgcaatctggccgagaacatttcacgcgtgctatatccgaatgacaacttcttcgaaggaaaggagttgcgactgaaacaggagtatttcgtcgtggccgcaactttacaagatattatcaggaggttcaagtctagcaagtttgggtgcagggatcctgtgagaacatgcttcgagaccttcccagacaaggtggccatacagttgaatgatacacatcctgcgctgagtatacctgaactgatgcggatcttggttgatgtcgaaaaggtcgattgggacaaagcgtgggagataacgaaaaagacgtgtgcttatacaaatcatacagtactgccggaagccctggagcgctggcctgttagcatgtttgaaaaactgctgccccgccacctcgagattatctacgctattaatcagcgtcatcttgaccatgttgccgcactgtttcctggagacgtggacagacttcgccggatgagcgtgatcgaagaaggtgattgcaaacgtatcaacatggcacatctttgcgtgatcggctctcatgctgtcaacggagttgcacgaatccattcggagatagtcaagcaatccgtgtttaaggatttctacgaactcgaacccgagaagttccaaaacaaaaccaatggcatcacacccagacgatggctgctgttgtgtaatcccggccttgccgacactattgtggaaaaaattggcgaagaatttttaacggatctgtcgcagctcaaaaagctcctccccctggtttccgacgaagtctttatccgtgatgtggccaaagtcaagcaggaaaataagctgaaattcagcgccttcctcgaaaaggagtacaaggtcaagatcaatcctagttccatgttcgatgtccacgtgaagagaatccacgagtataagcgacaactgttgaattgcctacacgtggtgacactttacaatcgcataaaacgtgaccctgccaaagcgtttgtgcccagaactgtgatgataggaggcaaagctgcccccggatatcacatggcaaagctaattataaagcttgtgacctcaattggtgacgtggtcaatcacgatccggtagtgggcgacaggctcaaagtgatttttttagagaactaccgtgtctccttggcagaaaaagtaattcccgcggctgacctcagccagcagatcagtactgctggtacggaggcctcgggtaccggcaacatgaagttcatgctgaatggagctctcacaattgggaccatggacggcgctaacgtagagatggctgaagaagcgggtgcagagaatttattcatcttcggtttgagagtggaggatgtcgaagccctagatagaaaaggctacaacgcccgcgaatattacgatcatctccccgagttaaagcaggctgttgatcagatctcttccggtttcttctcacccaaagagccagattgtttcaaggacatagtaaacatgttgatgcatcacgacaggtttaaggtcttcgccgattatgaggcctatatgcaatgtcaggcacaagtggaccagctgtaccgaaaccctaaagaatggaccaagaaggtaatcagaaatatcgcctgctccggtaaattttcctctgatagaacaatcaccgaatacgcccgcgaaatctggggcgttgagcctagtgacctgcaaataccgccgcccaacattcctagagattag

SEQ ID NO: 201220 - DNA, 717 bp, synthetic construct
  misc_feature 1..717: note = Description of Artificial Sequence: Synthetic coding sequence
  source 1..717: mol_type = other DNA
atgctgaccaccctgctgcccatcctgctgctgagcggctgggccttctgcagtcaggatgccagtgatggcctacagcgcctgcatatgcttcaaatctcctactttagggacccttaccacgtatggtaccagggaaatgcatctctagggggtcatctgacccatgtcctggagggcccggacaccaacaccactattatccagctccagccgctgcaggaacctgaatcttgggcgcgcacgcagagcggattgcagtcctacctgttgcagttccacggccttgtcaggcttgtgcaccaggagaggacactggcctttcctctgaccattagatgtttccttggttgtgagctgccgccagagggctctcgggcgcatgtcttcttcgaggtggcggtgaacggatcttccttcgtctccttccggccagagagagcactgtggcaagccgatactcaggtaacttccggggtcgtaacttttaccctgcagcagctcaacgcatacaatagaacacgttatgagctacgggagtttctggaggacacctgtgtgcagtatgtgcagaaacatatttccgcggaaaataccaagggttcccagacctcccgaagctatacatcactggtgctgggcgtcctagtgggtagctttattatagctggcgtggccgtgggaatctttctatgcaccggcggtaggcgttgctag

SEQ ID NO: 201221 - DNA, 4551 bp, synthetic construct
  misc_feature 1..4551: note = Description of Artificial Sequence: Synthetic coding sequence
  source 1..4551: mol_type = other DNA
atggacaaccagcaggacaaggccatcgtggccagcgccaacggcgagaacaccctgatcaacggcgtgaaagaaaacgactcagaggaccaggacgtggctatgaagtcatttgcagcccttgaagcagcggccccaatccagcccacaccggtggctcagaaggaaacactcatgtatccacgtggactcctgccgttgccttctaagaaaccttgtatgcagagtccacccagcccgctcgggctgattgaggcccctgagcatgccgccaactccgcctctgtgaatgctatcagcctaacatcggggatcgcaaaggggctgaacacctggagccttcctaacgaatgcgagaaggctccattcgccataatggagcccgctggaatgagtgcgttaaatggggattgtcttatgcagccatcaagaacatgccttggatgcttcatggaatccaaggatgccgtggatccagagcccggcataagcctgaaagttggtgatctgaatagggattatgagacctgtgccgtgtccgacattggcatccagtgcattaatgcgggtgaaaatatgaaatacggggaacaattgttgagcgaccagcttcttggcttccctctgcacaaatcaagagccggcgaccgtcgggagactgagaaacctgatatcgatcttgaagaccccgcccagaagagctattacgaggccctgttactggataaatgtaataccgaggaagccctgctagcaaattccaaccaggactggggttattttgagactttcatcagcgaatcgaaaatcgagcttttagatttgtgtagtaaaaatgaactgagcgtgaacctgttttcagaagaagatgtcgacaactatatgtttgatgacgacgaatctaccctcggatccgatgtttgcagcttaaagatccgatacgagtcatttcaagacaacgtgcgggacaagacgacactgctcatgcaggaagatgctcagtttaatttttttccgagcgtcttcacaacctgcccgaagagagagtccaagtctggggccctgaaacaatcatctgacttctctcagttcaaagtgccagacgtgtccattatttggggggaggaagataagaacttagacaagaaaaagggtaaggaggagggacaggaggataagggggtggagaagaaagacggcaaagataatggcgaaaaacccgctcttaacaaaccctgctcaggtaccgaggtcgagcagctaaagaatcccaaacaagggcatttagccaatagtcttgagaccagtgggagcttcagcgacgattcctcttttatagaaatctcctacgacgccatgggcgagattaaagactgctcgcgctacatggcccgtgatacaaattccggatcaagctcctcacaacagaactacggtctgagggcgaaaagaaaggtgagatactcagaggactacctgtatgatgtggattccctcgaaggggaaaaagtaaatgaaagaaaggagtggttacccgttggaagtaaagaggaggatgacgacgaatggtgtcccaagaagcgacgcaaggtgacgaggaaggaacctccagtgataatcaagtacataattatcaacaggtttaaaggggaaaagaacatgctcgtgaagctggggaaagtggacgcgagcgagaccaccgtgaatctgtcagagaaccagctgaacaaatacgcaaagctggcgccactgaaagggttctggcagaagaagaagaagcaaagaaacaccaataccgatagtatcaaaacccccttctcgcaaaagcagagcttcgaaccaggctccttcgaagtatccttccttccccccgcgcgcaaaaggaaaagtaagctcggcaaccgccaccggatacagaggatcccatccatcgaaatcagcgcatcgtcaaagcagatctctttgtgtaatgaccagcgacatgcctccaaccacaaagaagatgggggtctgaaaggcactctgaaatccgctccccttggggcccctagttgcgccaatggttctcacttgaacgacattactggacctgattcggtgaaagtgaaggcccaggatacagagtttaagggccccgagaggaaggtgctcaacaagataaagttcaagagtgaggctcgactcaaaagtaagaaagttaaggcagccggtcaggagtcgaagcctatcgttcaaatgtctccacttctggaaaatcaaagcagcaaggctaatctcaaaaatgaggtgatccccggtacttctaatagtagtcgactttcagagttccacgaagcaaaagccgcgaaatcctcaacgttcctgccaactacctgttcctctgagatgcccctgtcatcagcaaatgtgacaacaaacatccctgtgatccccggcggttaccttcagaccctgttagacgctagcgatttaagcaacaatacaagtatatcttatttttcccaccattcaccggaacagaatgagggctcactgacacagacagaaaaatcgtttgtgccccttcaacctacacaggactgcgtcctgactagctcatctgactctgagttacagcagagctcccataatttcaagatggaatcctctaactacagaaacgtctggcctaataaggccacctcaggaacccaggagtttatggccgaagtgtcccgagaaattgcacccactcagagcagcgaattcggggcctcccaggtggtcagcatggagaacaacctcaccccaacaacatacaatccaatttgtctgaactctggagggtccaactgtaataaggttttgtacgactccatgcaagacacgcagcttccctccgacgactcctaccagttatgtcactttaacaacggtgagatttgttttccattccagcaaggtcctgttaatatggacgatggccggttgttcagcttcgactccatggccccactgagcgtatcttcgtcaaactactgttccctatccctgaaatcatgcgaaaaggatggggatgatgacatcaccgatgattttctggctcactgctctcccaagctggtgatccaacagagcattgatgagattgcccccctaaaggaaagcacagacctgctggacatcagcaactttacaccggacaaatttcggcacagcagtctgtccgagatgtcgccaccagacacgccctccctgagtcctcagatcaccagatgtgagtctatgaagacgctggggaccctcaagggattccaggaaggggtgcccggccctctcgatagcgttgagaagattaaatgggactgttctactttaagccgacaggttcagatggaagatggcttcactctgaacaatcaccagtttcagtttcacatgttcaacgatgaagattccgttagcttgctccagaaaaatccttgcctgtccaccttcaacgatccctcagggcaaatttctacaaacaacaaggtctccaagtctagaaaaaaatcctcacccagcaaatccggggccatgaaccaatcttcttcgcaaaagaacaccagaaagaagtctttgaaaggcaataataaggggatagagaaaccgcctggaaagaacagtcgacaggtccccaagtccacaaagaagggaaagtacatggcagcaataaatggcgagaagatgcagatcggaattgggcggggaggttcacagaccaatacaatctctagcacggggaaaacactcgccgagtgtattcagcatggcgggccaatggcaagtatgaaaatgccttctcagaaagggctgtccggggactgggccctcgggaaggagtcaagccctggctggtctgatatgtctatgggcacaaacaccaattccctcctggacgatgatcagcgggaatttcaggagccatcatacatcctgtctaatatcgcctcaggcatggccgatgtacagaggttcatgatggcatcgatcgagcccctctgggagccgatggaacaccacggggatcccaacatattctattcaccagaaagcaacagtcttaaattgaagacccttaaaattctagcaggcaccccccaagaatcgaagaaaaaaattaactcaggtagtcagggagcgacgaagaaccacagaagcatcaagggggtgtcaaaatctaacggaaaaacagccatcggcgacccaggtcgcgcgaacatgcccggatataacgaagattcccgaagcactttcttcgataagaaatatagcaacatgtctaccctcggtaacaatgggccaacccataaaaaactataccggcataaaagttcaagtaaggcactgcgggatgagaaatgcaaagggaagcacatggaacgagagcaggtgcacaaagacgaatcaggcactgcgagctttgagaagttgagagacagtgactacaatctcctgaaggcagaaaccacattttgggtcctgcccgtgtttgaggaagaaacgaggatattccagaaggatatttag

SEQ ID NO: 201222 - DNA, 1008 bp, synthetic construct
  misc_feature 1..1008: note = Description of Artificial Sequence: Synthetic coding sequence
  source 1..1008: mol_type = other DNA
atgtgggccaccctgcccctgctgtgcgccggcgcctggctgctgggagttccagtatgtggggccgcggaactttgtgtgaacagcctggagaaatttcattttaaatcatggatgtccaagcatcggaagacctactctaccgaggaatatcatcaccgcttacagacatttgcatccaattggagaaaaatcaacgcgcacaacaacgggaaccacaccttcaaaatggcacttaatcagttctctgatatgtcttttgcagaaataaaacataagtatctgtggtcagaaccccaaaactgttctgctacaaagtctaattatttacgcggcaccggaccgtatcccccatcagtggattggcgtaaaaagggcaactttgtctctcctgtgaaaaaccagggtgcatgcgggtcttgttggactttcagcactaccggagcactggaatctgctattgctattgccacaggcaaaatgcttagcctcgccgagcaacagttagtagactgtgcccaggattttaacaatcatgggtgccaggggggactgccatcccaggcatttgagtatatcctttataacaaggggattatgggagaagacacatatccgtatcagggcaaagatggctactgtaagttccagcctggcaaggcaattggctttgtgaaggatgtcgcaaatataacaatctacgacgaggaggctatggtggaggcagttgctctttataatccggtcagcttcgccttcgaggttacccaggattttatgatgtatcgcactggcatttattctagcacctcgtgccataaaacccctgataaggttaatcatgcagtgttagcagtaggatacggggagaagaatggaattccctactggatagtaaagaactcttggggaccgcaatggggcatgaacggatatttcctcattgagcggggaaagaatatgtgtggattggctgcatgcgcatcttatccgattccgctggtctag

SEQ ID NO: 201223 - DNA, 5655 bp, synthetic construct
  misc_feature 1..5655: note = Description of Artificial Sequence: Synthetic coding sequence
  source 1..5655: mol_type = other DNA
atgcactgcaccaaccccgccctgatcttcctgatcgacgagctgtccccggagcaacataatctgtcgctgtactcaatggaactagtgctgaaaaaatcgaccggccattccgcggcccaagtagctctgacagaaaccgctccgggatcccagcatagctctcccctgcacgtgacggcacctccatctgctaccacctttgacacagcgttttttaaccaggggaaacagactaagagcactgccgatccgtccatatttgttgccacctatgtctcggtgaccagtaaggaggtcgccgtcaatgacgacgaaatggacaatttcctgccagacacacattggacgactcctaggatggtatctccaatccagtatataacggtgtcgccacccggcctgccacgcgaagccttggagcccatgctgacgccaagcttgcccatggtgtctctgcaggacgaggaggtgacttcaggctggcagaacaccacccggcagccagctgcctatgccgaatcagcctctcacttccatactttcagaagcgcattccgcacatccgagggaatcgttcctactccagggaggaatctggttctgtatcctactgatgcttattcccatttaagctccaggaccctgccagagattgtggcttctctgaccgaaggagttgagactaccctcttcctttcctcccgaagcctaatgccacagccactgggagacggcataaccatccctctgccgtctctgggggaggtctctcagcctcccgaggaggtgtgggccaccagcgccgatagatacaccgatgtgacaacagtgttgtctcagagtctcgaggaaacaataagcccccgcacgtaccccactgtgaccgctagccatgctgcgttagccttctcccgtacccacagtccactgctgtccactcctctggcatttgctagcagcgcctctccgacggacgtctccagtaatccgttcctccccagtgacagctctaaaacatctgaactccactctaactccgcactccccgggccggtggataacactcacattctctcccccgtttcttcattccggccttacacctggtgtgccgcctgcaccgtaccaagcccacagcaggtcctggctacgtccctcatggaaaaagacgttggctctggagacggagcagagaccctgtgcatgacggtgctggaggaatcatccattagcttgatgtcatcagtggtggccgacttcagcgagtttgaagaagatccacaggtcttcaacaccctgttcccaagcaggcccattgtccccctaagctctaggagcatggaaatcagcgaaacatcagtgggaataagcgccgaagtggacatgtcatccgttacgacaactcaggtccccccagctcacgggaggctgtccgtgcccgcctctcttgatcctacagcagggagtctctctgtggccgagactcaggtaacaccatcaagcgttacaacagccttttttagcgttatcacatcaattttactggactcctccttctctgtgatagctaacaagaacaccccaagcctagccgtaagggacccatctgtgtttactccctactctctggtgccaagcgtggagagttccctcttttccgaccaggagaggtcctccttctctgagcacaagccgaggggagccttagactttgcttcctcatttttctcgacgcccccactagaactgtctgggagcatctcgtccccgtccgaagctcccgcatccttaagcctaatgcctagcgacctgtctccatttactagccagtcattcagccctcttgtagagacatttaccctcttcgacagcagcgacctccagagctcccagttgtctctgccttcctccacaaacctggagttcagtcagctccaaccctccagtgaactccctttgaatacaatcatgctcctcccctcacgatcagaggttagtccttggtcaagctttcccagcgattctttggaattcgtggaagctagcacggtgtccctcactgattcggaagctcatttcactagcgcgttcatcgagactacaagctatctagaaagctcactgatttcccatgaatcagccgtgaccgccctagtgcctccagggtctgagagtttcgacatccttaccgccggaatacaggccaccagcccactcacgacagtgcacacaacacctattcttacagagagctccctcttttccacgctgacgccccctgacgaccagattagtgctctcgatgggcacgtttctgttttggcctctttcagcaaggctatccctacaggcacagtcctaattaccgacgcatatctcccctctggcagcagcttcgtaagtgaggccacacccttccccctccccactgaattaaccgtcgtaggaccatcgctaacgccaacagaggttccacttaatacatctaccgaggtaagtaccaccagcaccggagctgctactggtgggccattggactcgacactcatgggtgatgctgcatcccagagccctcccgaaagtagtgccgcccctccgctgccctctctgcggccggtgactgcatttaccctggaggcaactgtggacactccaacactagccaccgccaagcccccctacgtatgtgacattacagtccctgacgcctatcttatcactacagtgcttgctcgccgggccgtccaggagtacatcatcacggcaatcaaggaagtgctgagaatccactttaaccgcgccgtggaactcaaagtgtatgagctctttaccgatttcacttttctcgtaacgtccggaccatttgtatataccgccatttctgttataaacgtattaattaacagcaaactggttagagatcagacgcccctcattttgagcgtcaaaccttcttttcttgtccccgagagtcgtttccaggttcaaaccgtgctccagtttgtgcctccctcagtagacacaggtttttgtaacttcacacaaaggatcgagaaaggcctcatgacggcactgtttgaggtgcgcaaacaccatcagggcacctataatttgaccgtgcaaatcctgaatataacaatatctagctcccgagtgacaccccggagaggcccagtgaacataatttttgctgtcaaaagtactcaaggtttcttaaacgggagcgaagtgagtgagctgcttcggaacctctctgtagtcgagttctccttttacctgggttatccggttctgcaaattgctgaacctttccagtacccacaactgaatctgagccagctgctgaagtcctcttgggttcgaactgtgctgctgggagtgatggagaagcaacttcagaacgaagtgtttcaagccgaaatggagaggaagttggcccaactcctaagcgaagtgtccacacgacggcgaatgtggcgacgcgcgaccgttgcagccggcaattccgtcgtgcaggtcgttaatgtctcacggcttgagggggacgacaatccagtccaactgatctacttcgtggaggatcaggacggagaaaggttaagtgcagtgaaatcgagtgatctgatcaacaaaatggatctgcagcgcgccgcaatcatattaggatatcggatacagggcgtaatcgctcagcctgtggacagggtaaagaggcctagcccagaatcacaatccaataacctgtgggtgatcgttggcgtggtgatccctgtactcgtggtaatggtcatagtggtgatcctttactggaagctttgccgaacagataaactggacttccaaccagacacagtcgctaacatccaacagcgtcaaaagctccagatcccatcggtgaaaggcttcgactttgccaagcaacacctgggccaacacaataaagatgacatcctgataatccatgaaccggcaccattgcccggtcctctgaaggatcacacaacccctagcgagaacggcgacgtgccatcacctaagtctaagatcccatcaaagaacgtcagacaccgaggcagagttagtcccagtgacgccgatagcactgtgtctgaagaatcatcggagagggatgctggggacaaaactccaggcgccgtaaacgatggtagaagtcatagagcaccacaatccggacctccgctgccctcgtccgggaacgagcagcactccagcgcctccatcttcgagcatgtggatagaatctctagaccacctgaagccagtcgacgcgtaccatcaaaaatacagctgatcgccatgcagccaatccctgctccgcccgttcagagaccatctccagccgatcgcgtggccgagagtaacaagattaataaggagatccagacagccctcagacacaagtccgagatagagcaccataggaacaaaatccgtctgcgggcaaaaagaagggggcattacgaatttcctgtggtcgatgacttgtcctcaggggacaccaaggagcggcatagggtgtacaggagagcccaaatgcagattgataaaattttagaccccactgcttcggtgcccagcgttttcatagagccacggaaaagctcccgcattaagcgcagtcctaaacctcgccgcaagcaccaggtgaatggatgtccggccgatgcagagaaagacaggctgatcactactgacagtgatggtacatacaggcggccccccggtgtccacaacagcgcctacattggctgtccctccgaccccgacctgcccgccgatgtgcagacgccttcttcggtggagttgggcaggtaccccgcattgccatttccagcctcacagtatatccccccccagcctagcatcgaggaagcccgccagactatgcattccctcctcgacgacgcttttgcgttagtcgcaccatcatctcagcccgcctccaccgctggcgtgggcccgggggtgccccctggactgcctgctaactcaactcccagtcaagaagaacgaagggcaacgcaatggggctccttttattccccagcccaaaccgcgaataatccttgtagcaggtacgaggattacggaatgacccccccaaccggtccactgcccagacctggattcggtcccggcctcctgcagagcacggagttggtaccccccgatccccaacaaccacaggcgagcgcagaagcgccttttgccgctaggggtatctactccgaggagatgccatctgtggcccggcctaggcccgtgggaggcactaccggttctcagatccagcatctgacccaggtggggatagccagcaggatcggggctcaacctgtggaaattccaccttccagaggatctcagtatgggggcccaggctggccttcttacggcgaagatgaggcgggccgaagagaggctgtaccaaggacaagtgggcgtgagcctagtgccccttcaggcaacctcccacataggggtctgcagggtcctgggcttggctacccgacaagtagtaccgaagaccttcagcctggacactccagtgcatccctgatcaaagctattagagaggagctgctgcggttgtctcaaaagcagagtacggttcagaactttcattcctag

SEQ ID NO: 201224 - DNA, 1236 bp, synthetic construct
  misc_feature 1..1236: note = Description of Artificial Sequence: Synthetic coding sequence
  source 1..1236: mol_type = other DNA
atggagacccccgaggtgcccgtgggcagcctgatcgacttcggccctgaggctcccacctccagcccacttgaagcgccgcccccggtgcttcaggacggcgatggcagtttaggcgacggagctagcgaatcagagacaaccgaatccgccgattcagaaaatgatatgggcgaatcgccatcccatccaagctgggatcaagatcgacggagttcatctaacgagagcttttcgagtaatcagtcgaccgagagcactcaagatgaagaaactttagctctgagagactttatgaggggctatgtggaaaaaattttcagtggtggtgaggacctcgaccaagaggagaaggctaaatttggagagtattgtagcagtgagaacgggaaggggagagagtggtttgcccgatatgtgagcgctcaacgatgcaacagtaagtgcgtgtcagaggcaaccttctaccgactggttcagagcttcgcggtagtgctcttcgagtgccaccagatggacgattttggtccagcaaagaacttgatgactatgtgctttacctactaccacattggaaaaccccagctgctgccaccagaaagtcgggaaaagcccgccgggagtattgactcttacctcaagagtgccaactcctggttggcggagaaaaaggacattgctgagcgattgctgaaaaatacaagtgctcgcacggaaaatgtgaaaggcttcttcggtggacttgagacaaaactgaagggccccctggcgcggagaaacgaggaggacgaaaacaagccacaggaaaagcgtccgagagcggtcactgcctacagccccgaagacgagaaaaagggcgagaagatatacctgtacacacatctcaagcagcagccaatctggcacacacttcgcttttggaacgccgccttcttcgatgcagtgcactgtgaacggacgaaaaggagtcctactacgagaggggacgccggggaggaagaggaaaagcgtgagaaatggtgccatatgactcaagaggagagagatgacagccttagattcaatgaaaatatcacattcggccagctgggaactttcacgcacaatatgctggcctttggcttgaataagaaattgtgcaacgactttttgaagaaacaggctgtgatcgggaacttggacgaagagcagtataagctgcttagcgatcatattgagcagatggccactgaatag

SEQ ID NO: 201225 - DNA, 15018 bp, synthetic construct
  misc_feature 1..15018: note = Description of Artificial Sequence: Synthetic coding sequence
  source 1..15018: mol_type = other DNA
atggaccagcggaagaacgagagcatcgtgcccagcatcacccagctcgaagattttctgactgaacataattccaacgtggtttggttacttgtagctacaattctttcttgcggctggatcatttatcttacctattataattcccgcaatgtgggtctgatactaaccctggtcctcaaccggctgtacaaacacgggtacattcatatcggatcattttccttctcagtgttgtccggaaaggttatggttagggagatttactacatcactgaagatatgtcgatacggattcaggacgggttcataatttttcgctggtggaagatgtacaatccaaagcaaaagcaacacgacccgaaagccgagacccgcctgtacatcacagtgaacgacttcgagttccacgtgtacaaccgaagcgatctgtacggaaggctgcaggagctgtttgggctcgagccaacaattattccacccaaaaaagatgatgacaagactcgcgaaatagggagaacacgtacccagtctaaaattgaaagagtaaaagtgaagacagagtcacaggatccaactagcagttggcggagtctaatcccagtcatcaaagtcaacgttagcactggccgcttggctttcggaaatcattaccaaccccaaacattatgtatcaatttcgacgatgccttcctaacgtacactacaaagcctccctcgagccacctcgaccaattcatgcacatcgtgaagggcaagcttgagaatgtgcgggttatgttagtgcctagcccacgttatgttggattgcagaatgacgagcccccacgccttatgggagaaggcttcgtcgtgatgcagtctaatgatgtagacatttattattacatggatgaacccggcctcgtacctgaggagacagaggaaaatatagagggtgagatgtcatctgaggattgtaaactgcaagatctcccgccgtgttggggactggatatcgtatgtgggaagggcaccgattttaattacggtccgtgggccgaccgacagagagactgtctttggaaattcttttttcctcctgattaccaggtgttaaaagtgagcgagatcgctcaacctggacggccacggcagattttagccttcgagcttaggatgaatatcatagcagacgccacaattgacctcctgttcactaaaaaccgcgagactaatgcagtgcacgtgaacgtcggcgccggctcatacctcgaaattaacatccccatgactgtcgaagagaacgggtacacgcctgccatcaagggccaattgctgcacgtggacgctacaacctctatgcagtatagaaccctactggaagctgagatgctggcatttcacataaacgctagctacccacgaatatggaacatgccacagacctggcagtgcgagttagaggtctacaaggcgacctaccattttattttcgcacagaaaaacttttttactgacctcattcaggattggtccagcgacagtcctccagacatttttagcttcgttccatatacgtggaacttcaagattatgtttcatcagttcgagatgatctgggcggcgaatcagcataattggattgattgctcgactaagcaacaggagaacgtctacctcgcggcttgtggggagaccctcaatatcgatttttccctgcccttcaccgattttgtgcctgccacatgcaatacaaagttcagcctgcgcggagaggacgttgatctgcatttgttccttccagactgtcaccccagtaaatatagtctgtttatgctagtgaagaactgccatcccaacaaaatgatccacgataccgggattcccgccgaatgtcaatccggccaaaaaaccgtaaagcctaaatggcgcaatgtcacccaggaaaaatccgggtgggtggagtgctggacagtgcccagtgtgatgctcacaatcgattacacgtggcacccaatttatcctcagaaggctgatgaacagctgaagcagtctcttagcgagatggaagaaactatgctgagcgtcctgcgaccctcccagaagacatccgatagggtggtgagcagtcctagtaccagctctcgtcccccaatcgacccttccgagctaccccccgacaaactgcacgtcgagatggagctcagtcctgactctcaaattaccctctacggtccactgctcaatgcttttctctgtatcaaggaaaactacttcggtgaggacgatatgtacatggactttgaggaggtcattagcagccctgtgctgtcactgagcactagctcatccagcggctggactgccgtaggaatggagaacgacaaaaaggagaatgaaggttctgctaagagcatccatccgttagccttacgaccctgggacatcactgtccttgtaaacctttacaaggtccacggaagacttccggtgcatgggacaacggacggtccagagtgtcccacagccttcctcgagaggctttgcttcgaaatgaagaagggttttcgcgaaacaatgctgcagctgatcctcagtccgttgaacgtgtttgtatcagacaactaccagcagcgtccgcctgttgatgaggttctgcgggagggacacatcaacctatctgggctgcagctgcgcgctcacgccatgttctcagctgagggcttaccactgggctccgactcccttgaatatgcctggttgatagacgtgcaggccggtagtctgactgctaaagttaccgctccacagctggcctgcctactcgaatgggggcagaccttcgtgttccatgtggtgtgtcgcgagtacgagctggagcgccccaagtcagtgatcatttgccaacacggaatagacaggagattttgcgagagcaagctctcctgcattccaggcccgtgcccaacctctgacgacctgaagtacactatgataagactggcagtcgacggggcggatatttatatcgttgagcacggttgcgcaacaaacatcaagatgggggcaatccgagtggcaaactgtaacctacataatcagtctgtaggggaggggatcagtgccgccatccaggacttccaggtgaggcagtatattgagcagctgaataattgtaggatcgggctacagcccgccgtccttcgcagggcttactggttggaggctggaagcgccaatctcggtctaatcacagtcgacatagccctggctgccgatcaccactcaaagcacgaagcacagagacatttcttggagactcacgacgcacgcacaaagcggctttggttcctgtggcctgatgacatccttaagaataagcgatgtcgcaacaagtgcggctgtttgggcgggtgcagatttttcggaggtacagtaactggcctcgattttttcaagctggaagagctgacaccctcaagctcttcagccttctcttccacttccgccgaatcagatatgtattatggacagagcctcctccagccaggagaatggatcattactaaggaaatcccaaagattatcgacggcaacgttaacggaatgaaaaggaaggaatgggagaacaagtctgttggtattgaggtcgagcggaaaacacagcacttgagtctgcaagtgccacttcgctcacacagcagttcctcgtccagtgaggaaaatagtagctccagcgccgcacagccactgctggccggagagaaagaatccccttcttctgtggcggacgaccacttggtccagaaagaattcctgcacggtactaaaagggacgacggccaggcatctataccgactgagatttctggcaactccccagtgtcacccaacacccaggataaaagtgtcggccagtcacctttacgcagccctctgaagaggcaggcttccgtctgctctacccgattgggatccaccaaatccttgactgctgcgttctacggggacaagcagccagtgactgtgggcgttcaatttagttctgatgtatcacgcagcgacgagaatgtcctagacagccccaaacaaaggcggagtttcgggagttttccttacacacccagcgccgacagcaacagtttccaccagtataggagcatggattcgtccatgagcatggccgattcagaggcatattttagcgccgcagaagagttcgagccgatttcatcagatgagggcccagggacataccccggtcggaagaagaaaaaaaagcaaacgcagcagatagactatagcagaggttctatctatcactctgtcgaaggcccattgacggggcacggggagagtatccaggattcgcgtactctgcccttcaagacccatccatctcaggcttccttcgtgtcagcactcgggggcgaggacgatgtcatcgagcatctgtacatcgtggaaggagagaaaaccgtcgaatccgagcagattacacctcaacagcctgtgatgaactgctatcaaacgtatctaactcagttccaggtcataaattggtccgtcaaacaccccacgaataaacgaacttccaaatcttccctgcatcggcccctggacctggacacccccacaagcgaggaatcaagctcttcatttgaacagctttccgtcccaacattcaaagtcattaaacaaggcctgactgctaattcccttctcgacagggggatgcagctgtctggcagcaccagtaatacgccatatacaccactcgaaaagaagctagcggataatactgacgacgagaccctcaccgaggagtggacactggaccagcctgtgagtcagactagaaccaccgccattgtggaagtcaaagggaccgtcgatatagtcctcacccccctggtcgcggaagcgctggataggtatatcgaggctatggtgcactgcgcctctacaaggcatcccgctgccattgttgacgacctccatgccaaagttctgcgggaggccgtgcagaacagcaagacaacatttagtgaaaatctatctagtaaacaggacatccgaggaacgaagacagaacaatctacgatcggaaccacaaaccaaggacaggctcagactaacttaactatgaaacaggacaatgtcaccatcaagggtctgcagactaacgtgtctatacccaaggtgaacctgtgtttactccaagcctccgtggaagagtcaccgaccacagccccgtctcggtcagtcactcatgtgtccttggtggctctgtgttttgaccgcatagcaactcaggtcagaatgaaccggggcgtcgtcgaggaaacctccaataatgctgagcccggacgcacaagcaactttgacaggtacgtgcacgcgaccaaaatgcagccccagtccagcgggtccttgaggtccaacgctggcgctgaaaaaggaaaggagattgcagcgaagcttaacatccacagagtccacgggcaactaagaggccttgacaccaccgacattggcacttgcgccattaccgctattccattcgaaaaatcaaaggtcctgtttactctggaggagctggacgaattcactttcgtcgatgaaaccgaccaacaggctgtgcctgacgtcactagaattgggcctagccaggagaaatgggggtggattatgtttgagtgcgggctagagaacttaaccatcaaaggtggacgtcagtcaggcgcagtgctctataattcattcggcattatgggcaaggcctccgataccgaaagaggaggcgtattgaccagcaataatagtagcgactctccaactggctcaggctacaacacggacgtgtctgacgacaacctgccatgcgacaggaccagccccagttccgaccttaatgggaactcagttagcgacgaacaggatgagggagtcgaatccgatgatttaaaaaaggacctgccactgatgcctccacctccagatagttgcagcatgaaactcaccatcaaagagatttggtttagcttcgctgcgcctacaaacgtgaggtcccacactcatgccttctcaaggcaactcaacctactaagcacggcgactccggctgtcggcgcttggttggtcccaattgaccagctgaagagcagtttgaataagctggagacagagggcacactgaggatctgcgcagttatggggtgcattatgacagaggccctagagaataagagtgtgcactttcctctgcgcagcaaatacaaccgcctcacaaaagtcgctcgctttctgcaagagaatccctcttgtttactttgtaacatcctgcatcactatctgcatcaagcgaattattcgatcatcgatgatgccacgatgtcagacggtcttccagccctggtcactctaaaaaagggcctcgtagcactagctaggcagtggatgaagttcatcgtggtgactcccgccttcaagggtgtgtcattgcatcggcccgcccaacctctcaagccccagatcgctatggatcatgaacacgaggatggcctcggactggacaatgggggggggctgcagtctgatacatcggctgatggcgccgaattcgagttcgacgcagcaacagtgtctgagcacacaatgctgctggagggcacagcaaaccgcccccctcctggaagctctggtccagtcacaggtgccgagattatgaggaagctcagtaagacgcatactcactcagactctgcccttaaaatcaagggcattcacccctatcactcactgagctatacgtccggagataccgccactgacagccccgtccacgtcggaagagcaggtatgcccgtgaaggatagcccacgaaaggaaagcctgttaagctacctgaccgggtcttttccctccctccacaacttgctggaaggaactccccagcggagtagtgcggccgtgaagtcatcttccctgacccggacaggaaacactgtcgctactgatatgctatccgagcatcctctcctgagcgagccctccagcgtgtcattctataactggatgtctaacgcagtaggcaacagaggtagtgttctacaagagtctccagtcacaaagtcaggtcataactctctgccaacgggagtagcccccaatttgccaacaatacccagtgccagcgatttcaacacggtgctaagttcagatcagaacactctggacggaactcattcacagcactcgaccagccaggacgacgtggctggggtcgaggaggcaaaccagggtttccccgccgtccagctcgcagatgcacaggtcgtatttaagccattgcttagccatacaggcattcagtcgcaggacaccatgcctttctgctaccggatgtacttcggggagcacttatctttttcagggaccctggactgtcttagagcagatatcgtggactcagacaccgccaaagagcgaaaagggaagcgcgcccggcgacagggccatgtgaatttacctccactcgaattcaagccagcccttatgctgggtactttttctatcagcgccgtcgtgatggagaaatccgtttgcacaccgcaaaactccacttccgctttgagcttccacgacctatccaaaagatattacaatacgttccactgtaatttcacaatcagttgtcaaagcatttcgcagcatgtggacatggcactggtgcgacttattcaccaattctcaactatgatcgatgatattaaggcaacccagactgatatcaaactgagccgctacaccgccggtagtgctagtcccactcccacatttaagacacgaaaacatcgggattttaggagctcggatttttcacggagcagcaggggctccctgaacggtgggaaccgcgtgaataatgctaagaacaagcgaaccaataacgagaacaacaaaaaggaatcccgaaacaagaatagcttggggagatcagagaggcggacatctaaggtctccagaaagggaagcaaagacgttgtggaccatatgacaatccacatggacgactctgacagcatcacagtttctgagcaaagcgagccctccgctgagtgctggcagaatatgtataagctcttaaacttctacagcttgattagcgatcctaccggcatcttggaaaaatctagcgagaccttcggcccagccggggtgaggagccccactgagcctacatgcaaagtggtattcgaaaacgaacaggataatagttccttaactaagacacagcgaaagagatcactggtaaccagcgaaccacagcacgttaccctaattgtgtttgggatcggcatggtaaaccgcacacacctggaggcagacattggcggcctaaccatggagtctgagctgaaacgaattcatggctcattcaccctgaaagagaagatgaaagacgtgctgcatcagaaaatgacagagacctgcgccaccgcacacatcggtggggtgaacattgttctcttggagggcatcactcccaatattcagctcgaggacttccctacttctccgacgagcaccgccaagcaggagttccttacagtggtgaagtgctccatcgccaaatcccaagcactatactctgctcaaaggggactcaagactaacaacgccgccgtgttcaaggtgggggcgatatcaataaacattcctcagcacccagctactttgcattctatgatggtcaggagttcccatcagttatccaagcagatttccgatttgattaggcaacccagtaccgccccacagccagtgaaagaggatatcgcaacccctctaccctccgaaaagacacctacaagtgtgaaccagacgcctgttgagactaatgagttcccccagctccctgaggggctcgaaaaaaagcctatcgttttgaagttttcagcaatgctggatgggatcgccatcggtgctgctcttctcccatcactgaaagctgaatataagatgggacgcatgcgctcccacggcatgacaggggcccagactaggttcacctttgaactcccaaaccaccggctgaggttcacaagtaaagtgtcggcgacggacatgtctacaatccctccctccgcctcgctcaatctgcccccagtcaccatgtcaggtaagtacattatggaagaacatgactcctattctgaccaggtgtggtcaatcgacgaactccctagcaaacagggctactatctccagggaaattacctgaggtgtgtcgcggaggtcggatccttcgagcataaccttactaccgacctgctgaaccaccttgtatttgtgcaaaaggtgttcatgaaagaagtcaacgaagttatccagaaagtgtctggcggcgagcaaccgatccccctgtggaacgagcacgatggcactgcagatggagacaagccaaagatcctgctgtactccctaaatctccagttcaagggaatccaggttacagccaccacaccgtccatgcgcgccgtgcgtttcgaaactggcctcattgagctcgagctgagcaacaggcttcagactaaagccagtccaggatcctctagctatcttaaattgttcggcaagtgccaggttgacctcaatttggccctgggccagatcgtgaaacatcaagtgtacgaagaagctgggtccgacttccaccaggtcgcctacttcaaaactagaatcggacttcggaacgccctgagagaggaaattagtgggtcctcagatagggaggcggtgctgatcaccctcaataggcccatcgtttacgcccagcctgttgcatttgaccgggccgtgctcttctggttaaactacaaggctgcatacgataattggaatgagcagcgcatggccctgcacaaggatatccatatggccaccaaggaagtggtagacatgctgcctgggattcagcagacgtccgcacaggcttttggaacattgtttttgcagctcactgtcaacgacctgggcatttgtttgccgatcaccaatacggcccaaagcaaccacactggggacctagatacaggcagcgccctcgtgctgaccatagagagcaccctgatcacagcatgttcctccgaatctttggtgagcaaaggccattttaaaaatttttgtatcaggtttgcagacgggttcgaaacctcctgggacgactggaaacccgaaattcacggagacctggtcatgaacgcgtgcgtagtgccagacgggacttacgaggtgtgttcaaggacaacagggcaggccgctgccgaatcttctagtgctggtacatggaccctcaatgtgctgtggaagatgtgcggtattgatgtccatatggatccaaacatcggaaagagattgaacgcgctcgggaacaccctcacaactctgacaggagaggaggacatcgacgacattgctgaccttaacagcgttaatatagctgacttgtcagacgaggacgaggtcgatacaatgagcccaacgatccacactgaagccaccgattatcgcagacaggccgcgtccgcttcccagcccggagaacttcgtgggagaaaaattatgaaacgtatcgtcgatatcagagagctgaacgaacaggccaaagtgattgacgatctgaagaagctcggggcgtccgaaggaacaatcaaccaggaaattcagcgctaccaacagctggaatctgtagccgtgaatgacattcgccgcgacgtcagaaaaaaactcaggaggagctccatgagggcagctagcctcaaagacaagtggggactatcctacaagccatcctacagccgcagtaagtcaattagcgcgtctgggagaccaccccttaagcggatggaacgggcctcatcccgggtgggcgaaactgaagaactgcctgagatcagggtggacgcggccagtccaggaccaagagtgaccttcaatattcaggatacatttcctgaggagactgagcttgaccttctgtccgttaccatcgagggacctagccactacagctccaactctgagggaagctgttcagtgttcagctcgcccaagacgcctggaggcttcagccctggtatcccgtttcagacagaggagggccgtcgagacgactccctatctagcacgtccgaggattctgagaaagacgaaaaagatgaggatcatgagcgagaacggttttacatttaccggaaaccttcgcacacaagccggaagaaggccacaggttttgccgcagtccatcagctgtttactgaaagatggcccaccacacctgtgaatcgctctctgtcaggaacggctacagaacggaatattgacttcgaactagatatccgcgtcgaaattgattccgggaagtgtgtgttgcaccctactactttgctgcaggagcacgatgacatcagtctcagaaggagctacgataggtccagtaggagcctggatcaagattctcccagtaaaaaaaagaagttccagacaaattatgcttcaactacacacctgatgactggtaaaaaagtgccttctagtctacaaacgaaaccatccgatctggagaccacggtgttctacatcccaggcgtagatgttaagctgcactacaatagcaaaactctcaagactgaatctcctaacgccagccgcggtagcagcctgcccaggactttatcaaaagagagcaaactgtacggaatgaaagacagcgctacatcgccccccagtccccctcttcccagcacggtgcaatctaagactaataccctgctgcctccccagcctcccccgatcccagcagctaagggtaaagggtcgggcggggttaaaaccgccaagctctatgcctgggttgcccttcagtcccttcccgaagaaatggtgattagtccttgtctgctcgatttcctggagaaagctctggagacaattcccatcacacctgttgagagaaattacacagccgtgtctagccaggatgaggatatgggccattttgaaatcccagatcctatggaagagagtacgacttcgttggtgtccagttccacttcggcctacagtagctttcccgtggacgtcgtggtatatgtgcgggtgcagccgagtcagattaaattcagttgtctgcccgtctcccgggtcgaatgtatgctcaagctgccttctctcgatctcgtgttctctagtaacaggggcgagttagaaacactgggcacaacttaccctgccgagacactgagcccaggcggcaacgctacacagtccggtactaagacgtctgcctccaagactggtattccaggctcctcagggctcgggtcccctctggggcgatcacggcactcaagctctcaatctgatctgacttcttcctcctctagcagctcagggctcagttttaccgcctgcatgtctgacttctccctctatgtatttcacccttacggggccggcaaacaaaaaacagccgtgagcggcctcacccccggatccggcggacttggtaacgttgacgaggaacctacaagcgtcacagggaggaaagacagcttatctattaacctggagttcgtgaaggtgtcacttagccggatccggcggtctgggggggcttctttcttcgagagccagtctgtgtcgaagtcagcctctaagatggatactacacttatcaatattagtgccgtatgtgacatcggaagcgcttcctttaagtacgacatgcgtaggttgagtgaaatactggcattccctcgggcttggtatcggaggagcattgcccgcagactgtttttgggagatcagacgattaacctgcccactagtggcccagggacaccagacagcatcgaaggagtgagccagcacctgtcgcctgagtctagcaggaaggcatactgtaagacatgggaacaacccagtcagagcgcatcattcacccacatgccacagagccccaacgtatttaatgagcatatgactaactcaacaatgtccccgggcaccgtggggcagtccctgaaaagcccggcctcgattcggagccgtagtgtttctgatagtagtgtcccacgccgggattccctctctaagacctccacgccatttaacaagtccaataaagccgcctcccagcaagggacaccctgggagacattggtggtatttgccattaacctcaagcaactgaacgtgcaaatgaacatgagtaacgtaatgggcaataccacctggactactagtggccttaagtcccaggggagacttagcgtagggtctaatcgcgaccgggagattagtatgagcgttgggcttgggcggtcccagctggactcgaagggtggggtggtcggtgggacgatagacgtgaatgccctggagatggttgcacatatcagcgaacatcccaaccaacaaccaagtcataagatccagattacaatggggtctacagaagcccgcgtggactacatgggaagttcaattttaatgggcatcttcagcaacgcagatttgaagctgcaggatgagtggaaggtgaacctgtacaacaccctggattccagcataactgacaagagcgaaatttttgttcatggtgacctgaagtgggatatttttcaggttatgattagcagaagtacaactccggacctgattaagatagggatgaagcttcaggagttctttacccagcagttcgacacgtctaaaagagcactcagtacctggggaccagtgccctatctaccacctaaaacaatgacgagtaatttagagaaatccagccaggagcagctgctggatgcagcacatcaccgccactggcccggcgtcttgaaggtcgtgtctgggtgccacatctcattgttccagattcctttgcctgaagatgggatgcagttcggcggaagcatgtcactccacggaaatcatatgaccttggcctgtttccatggccctaattttcgaagcaaatcatgggcactcttccacttagaggagcctaatatcgccttttggaccgaggcacagaaaatctgggaggacggatcttccgatcactcaacttatatcgttcagactttagactttcatctgggacacaatactatggtcacaaaaccttgcggcgcactcgagtctcctatggctaccattaccaagattacacggagaagacacgagaaccccccccacggggttgcaagcgtgaaggagtggttcaactacgttaccgctacgaggaacgaagaacttaatctgctgagaaacgttgacgctaacaacacagaaaactctacaaccgttaaaaatagcagcctactcagtgggttccggggaggctcctcttataaccacgagactgaaacaatttttgccctgccgagaatgcagctcgattttaagtccattcatgtgcaggagccgcaggagccaagcctacaggacgccagccttaagcccaaagtggaatgttcagtggtcaccgaattcaccgaccatatttgtgttacaatggacgcagaattgattatgtttctgcacgacctggtatcagcttacttgaaggaaaaagagaaggccatctttcctcctagaatcctcagtactcgccctggccagaagagtccaatcataatacacgatgataacagctcagacaaagaccgggaggatagcattacttacacaactgtggattggcgcgacttcatgtgcaatacctggcatctggagcccactctgcggctaatttcctggactggccgcaagatagaccccgtgggagtcgactatatcttgcagaaacttggctttcaccacgctcgcacaaccatcccaaaatggctgcaacggggtgtgatggatcctctggacaaggtattaagtgtcctgattaaaaagctgggtacagccttgcaggacgagaaagagaaaaaagggaaggacaaggaagaacattag

SEQ ID NO: 201226 - DNA, 1287 bp, synthetic construct
  misc_feature 1..1287: note = Description of Artificial Sequence: Synthetic coding sequence
  source 1..1287: mol_type = other DNA
atgggcggcctgttcagccggtggcggaccaagcccagcaccgtggaggtcctggaaagtatcgataaggaaattcaggcgcttgaagaattccgtgaaaagaaccaacgactccagaaactatgggttgggagactcatcctctatagctcagtcctgtatttgttcacgtgtctgatcgtgtacctctggtacctgcccgatgagtttactgccagactagcaatgacactgcccttcttcgcgttccccctgattatctggagcatcaggaccgttattattttttttttctccaaacgtaccgagaggaataatgaggccctggatgacctcaagagccagagaaagaaaattctagaagaggtcatggagaaagagacttacaaaaccgctaagcttatacttgagcgattcgacccagacagcaagaaagccaaggaatgcgaacctccgagcgccggagccgcagtcaccgccaggccaggtcaggagattagacagaggacagccgcccaaaggaatttaagcccaacgcccgcatcacctaatcaaggccctcccccccaagtaccagtgagccccggccctccgaaggattcgtccgcccctgggggacctcccgaacgcacagtcacaccggccctgtccagtaacgttttaccccgtcatctaggatctccagccactagtgtccccggcatgggcctgcacccacccggaccgcctctcgccagaccaatactgccccgcgagagaggagcgctagatcgcatcgtggagtacctcgtgggggacggcccacagaatcggtatgcgctgatctgtcagcagtgcttcagccataatgggatggccttaaaagaagaatttgagtacatcgcattcaggtgcgcttactgtttttttcttaatcccgcccgaaagaccaggccacaggctccccgcttgccagagtttagtttcgaaaaacggcaagtggtggaaggatcctcgtccgtgggacccctgccttccgggagcgtgctgtcttcagataaccagtttaacgaagaaagcttggaacacgatgttcttgacgataacacggaacagactgatgacaaaatcccagctactgaacagacgaatcaggtgattgaaaaagcaagtgactccgaggagcccgaagagaagcaggaaaccgaaaatgaggaggcatcagtcattgaaaccaacagtaccgtgcccggtgccgattccatccccgaccctgagttgagcggcgagtcattgacagcagaatag

SEQ ID NO: 201227 - DNA, 2718 bp, synthetic construct
  misc_feature 1..2718: note = Description of Artificial Sequence: Synthetic coding sequence
  source 1..2718: mol_type = other DNA
atggacagcaccgcctgcctgaagagcctgctgctgaccgtgagccaatacaaagcagtcaagtcggaggcaaatgccacacaactgctgagacatctggaagtgatatctgggcaaaaattgaccagactgtttactagcaatcagattctgacttccgagtgcctgtcctgtcttgtggagttactggaagaccctaacatctctgccagcttgattttatccatcatcgggctactgtcgcagttggccgttgatatcgagactcgggactgcttacaaaatacctataatctcaattccgtgctggcaggagttgtatgcaggagcagtcataccgatagcgtgtttctgcaatgcatccagcttttacagaaactcacatataatgtcaagatcttctatagtggcgccaatatcgatgaactgatcacttttttaattgatcacatccagtcgtctgaagacgagctgaagatgccttgtctcggattgctggcaaatttgtgcaggcacaacctgtcagtgcagacacacataaaaacacttagcaatgtgaagagcttctatcgcactttaatcacccttctagcccactcctccctgaccgtcgtggtgtttgctttatcaatcttgtcgagtcttacactcaacgaagaggtcggagaaaagctgttccatgccaggaatattcaccaaactttccagctcatcttcaatattctcattaacggggacggcactctcacccggaagtattctgttgatttgcttatggatctgctgaagaatcccaaaatcgcagactatctgacacggtacgagcatttctcaagttgccttcaccaggttctgggcctgctcaacggaaaagatccagattccagtagcaaagtcctagagttgctactggctttctgttccgttacgcaactgcgccacatgttgacccagatgatgtttgagcagtctccacctgggtcagcaaccctaggaagccacactaagtgtttggagccaacggttgctctcttaaggtggctgtcacagccactggacggctccgaaaattgttcagtgcttgccctggaactcttcaaagaaatttttgaagacgtgatcgatgctgcgaattgcagctctgctgatcggttcgtgacgctcctgctgcccacaattctggaccagctgcagttcacagaacagaaccttgatgaagcgctgactaggaaaaaatgtgaaagaattgccaaggccatagaggtgcttctgacactgtgtggagacgatactctgaaaatgcacatcgctaaaatcttgaccacagtgaagtgcacaaccctcattgagcagcaattcacttacggcaagattgaccttgggttcggtacaaaggttgctgacagcgaattatgcaaattggcagccgatgttatcttaaaaaccctggacttgattaataagctcaagcccctcgttcctggcatggaggtgagcttctacaagatcctgcaggacccacgtttgattacacccctagctttcgcgttgacaagcgataacagggaacaggtgcaatctggtcttcgcattctcttagaagccgcacctctgcctgacttccccgccttagtgctgggcgagtcaatagcggcaaataacgcctacagacagcaggagacagaacacatccctaggaagatgccttggcagtcttctaatcatagctttcccacctccatcaagtgtctgactccccatctcaaggatggagtgcctggattgaatattgaagaactcattgagaagctgcagtccgggatggtggtaaaagatcagatttgtgatgtgcgaatttctgatattatggacgtttacgagatgaagcttagcacactcgcctctaaggagagccggctgcaggacctcctcgagacaaaagctttggcgctcgcccaggccgacaggcttatcgctcagcacaggtgccagaggacccaggccgagaccgaggctagaaccttggcatctatgctcagggaggtagaacgcaagaacgaagaattatctgttttgcttaaagctcagcaggtggagagtgagagggctcagtccgatattgaacacctattccagcataaccgcaaactcgaaagcgtggccgaagagcacgaaatacttaccaagagctatatggagttactgcagcggaatgaaagcacggagaagaaaaacaaggatctgcagataacatgtgactccctaaataagcagattgagactgtgaagaaactcaatgagagccttaaagagcagaacgagaaatcaattgcccagctgattgagaaggaggagcagaggaaagaagtgcaaaatcagctggttgacagagagcataagctcgccaatttacatcagaagaccaaagtgcaagaggaaaaaatcaagacactgcagaaagagagggaggacaaagaggagactatcgatatcctgcggaaggagctaagccggacagaacagatccgaaaagagctgtcgattaaggcaagctctctggaagtgcagaaagcacagctggagggccggctcgaagaaaaggagtctcttgttaagctgcagcaggaggagcttaataaacattctcacatgattgccatgatccactcgctaagcgggggcaagattaatcccgagaccgtcaacttaagtatctag

SEQ ID NO: 201228 - DNA, 2370 bp, synthetic construct
  misc_feature 1..2370: note = Description of Artificial Sequence: Synthetic coding sequence
  source 1..2370: mol_type = other DNA
atgctggagggcaactaccaggtgatgctgaagagcggcaccaacatcttgtactggcgcactaccgggatcttaatgggcagtaaggcggtcaagcccgtgctcgtcaaaaacatcactattgaaggcgtggcttacaccagcgagtgctttccttgtaaaccaggaacgtttagcaataagcctggttcattcaactgccaggtttgtcccagaaatacatactccgaaaaaggggccaaagagtgtatcagatgtaaggatgatagccagttttcggaggaggggagttctgaatgcacagagagaccaccatgtacgaccaaagactattttcagatccacaccccctgtgatgaggaaggaaaaactcagataatgtataaatggatcgaaccaaagatttgcagggaagatttgacggatgcaataagattaccacccagcggagagaaaaaagactgccctccttgcaatccaggcttttataacaatggctcctccagctgtcacccttgtcctccagggacattctccgacggcaccaaagaatgcagaccctgccccgccggtaccgagcccgctctgggctttgagtacaagtggtggaatgtgctgccaggaaacatgaaaactagctgttttaacgtcgggaactctaagtgtgacggaatgaatggctgggaggtggccggggatcacatccagagcggcgccggaggatccgacaatgactacctgatcctgaatctgcacatccccggctttaagcctcctacttctatgactggcgcgacaggatcggaacttggtagaattactttcgttttcgagacactgtgctctgccgactgtgtgctctacttcatggtggacataaacagaaagagcaccaacgtggtcgaaagctggggcggcacaaaagagaaacaggcgtatactcacatcatattcaaaaatgccacctttactttcacgtgggccttccagagaaccaatcagggccaggataacaggcgctttattaatgatatggtgaaaatctactccatcacagcgactaacgccgtagacggagttgcctcctcttgcagagcctgtgccttagggtctgagcagagtgggagttcatgcgtcccttgtccccccggtcactacatcgaaaaggaaactaatcagtgcaaggagtgtccacctgacacgtacctgtccattcaccaggtctatgggaaggaggcatgcattccttgtggccctggatccaagaataaccaggaccattctgtttgctacagtgattgtttcttctatcacgaaaaagagaaccagtccttgcattatgacttttcaaatctatcctcggtgggatccctcatgaacggaccatcattcacctccaagggaactaagtacttccacttcttcaacatatccctttgtggccatgagggcaagaaaatggccttgtgcactaacaacatcacagactttaccgttaaagaaatcgtggccggctcagatgactataccaatctggtcggtgcatttgtatgccagagcactataatcccgtcagagtctaaagggtttcgggctgcactatcaagccagtcaatcattctcgcagacaccttcataggggttactgttgaaacgacactgaagaacatcaacatcaaagaagacatgtttccagttccaacctcccaaatacccgatgtccacttcttttacaagtcttcgaccgcaaccacaagctgcatcaacggacggagtacggcagtgaaaatgaggtgcaatccaaccaagagtggcgccggcgtaataagcgtgccatccaaatgtcctgctggcacatgcgatggctgcacattttattttctgtgggaatctgccgaagcctgccccctgtgcaccgagcatgacttccatgaaatcgaaggggcctgtaaacggggttttcaggagactctttatgtgtggaacgaacccaagtggtgcataaaaggcatctctctgcccgaaaaaaagcttgcaacgtgcgaaaccgtggacttttggctaaaagtgggcgcaggcgtgggcgcttttactgctgtgctccttgtcgcccttacatgttatttttggaaaaagaatcaaaagcttgaatacaaatactccaagctggtgatgacaacaaattccaaagagtgtgagctgccagctgctgactcttgcgcaatcatggaaggcgaagataacgaggaagaagtggtgtactccaataagcagagtctgctcggaaagctcaaaagccttgcgacgaaagagaaagaggatcattttgagagcgtccagctaaagacctcccgttcccctaatatatag

SEQ ID NO: 201229 - DNA, 336 bp, synthetic construct
  misc_feature 1..336: note = Description of Artificial Sequence: Synthetic coding sequence
  source 1..336: mol_type = other DNA
atggtgcggaccaaggccgacagcgtgcccggcacctaccggaaggtcgtggctgcaagagctccccggaaggttttggggtcttcaacatcagctaccaactcaacatcagtgtctagccggaaagctgaaaataagtacgccggagggaacccagtgtgtgtgagaccaacccctaagtggcaaaagggcatcggggagttttttaggttgtcacctaaagactcagagaaagagaaccagataccagaggaggccggtagctcaggcctcggtaaagcaaaaaggaaagcatgtccactgcaaccggaccacacaaatgacgagaaggaatag

SEQ ID NO: 201230 - DNA, 2772 bp, synthetic construct
  misc_feature 1..2772: note = Description of Artificial Sequence: Synthetic coding sequence
  source 1..2772: mol_type = other DNA
atgagccagttcaagcggcagcggatcaaccccctgcccggcggccgaaacttttctggtacagccagtacatccttgctcggtccgccgccagggctgctgacccccccggtagccaccgagctaagccagaatgcccggcatttacaaggaggtgagaaacagagggtgttcacgggaattgtgacaagtctgcacgactatttcggggtggttgacgaggaggtgtttttccaactcagtgtggtgaaggggagacttccccagctgggagaaaaagtgcttgtcaaggccgcttacaatcctgggcaggcggtaccttggaacgccgtgaaggtgcagaccctcagcaaccagccactccttaaatcccctgccccccctttattacatgtcgcagcgttagggcaaaaacagggcatcctcggcgcccaacctcagctcatcttccagccccacaggatccctcccttgtttcctcagaaacccctctcccttttccaaacaagtcacacccttcatctctctcatctaaaccgcttccctgctcggggaccacatgggcgcttagaccaggggagaagcgatgactacgactccaaaaagaggaagcaacgggctggcggcgaaccatggggcgcaaagaagccgagacatgacctgcctccgtatcgcgtgcacctgacaccatatacggttgacagccccatctgcgattttttagaattgcagcggcgctaccggagccttttagtcccatcagacttcttgtctgttcatctgagctggctgtctgcattccccctaagtcagccttttagtctccaccatccaagcagaatacaagtaagtagtgaaaaagaagccgcacctgatgcgggagccgagccgatcaccgccgactctgaccctgcttattctagcaaggtgctgcttctctcgagccccgggctggaggagctgtacagatgctgtatgcttttcgtggatgatatggccgaacctcgcgaaacccctgaacacccactgaagcagattaaattcttgctgggcaggaaggaggaagaagccgtgctggttgggggcgagtggtccccctcacttgatggacttgacccccaggccgacccacaggtgctcgttagaacagctatccgatgtgcgcaggcccagactggaattgatctgagcggctgcactaaatggtggcggttcgctgagtttcaatacttacaaccaggacctccacgcaggctccagaccgttgtggtttacctaccggatgtatggaccataatgcctaccttggaagagtgggaggcgctgtgccaacagaaggctgccgaggcggcacctcctacacaggaggctcagggcgagacagagccaactgaacaggcacccgatgccctggagcaggcagcagacacctctaggcggaatgcggagaccccagaagcaaccacacagcaggaaaccgacaccgatttacccgaggccccgcctccccccctggaacctgccgttatcgcaagaccaggatgcgtcaatttatccctgcatgggattgttgaggaccggagaccaaaggagcggattagcttcgaagttatggtactcgccgagctctttcttgagatgcttcagagagacttcggttacagggtctacaagatgcttctttctctccctgagaaggtggtcagccctcccgaacccgagaaggaggaggcggctaaggaggaggctaccaaggaggaggaagccataaaggaagaggttgtgaaggagccaaaagatgaagcccagaacgaaggacctgcaaccgagtcagaagcccccctgaaagaagacggcctgcttcccaagcccctctcctccggcggcgaggaagaggagaaacctcgaggcgaagcgtctgaggacctctgcgaaatggccttagacccggaactcctcctcttgagggacgatggagaggaggaatttgctggagccaaacttgaggactcagaggtgcgctcagtcgcctctaatcagagtgaaatggagttctcctctctgcaggatatgccaaaggagctggacccaagcgcagtactgcctctggactgcctgcttgcattcgtctttttcgatgccaactggtgtggttacttgcaccgaagagatctagaacgtatattactaaccctgggcataaggctgagcgccgagcaggctaaacagttggttagcagagttgtgactcaaaacatctgtcaatataggagcctccagtatagcagacaggaaggattggacggcggacttccagaagaagtcctgttcggaaacctcgatctcctcccaccccctgggaagtccactaagccaggcgctgccccaaccgaacataaagcattggtatctcataatggctcacttattaacgtcggcagcctgctgcaacgagcggagcaacaggattccggtcggctttatttggagaacaaaattcacacactcgaattaaagttggaggaatcacataaccggttctcagccacagaggttaccaataaaacgctggcggccgaaatgcaagaattgcgcgtgaggttggctgaggctgaggagactgctaggactgctgaaaggcagaagtctcagctgcaaaggttgctccaggagctccggcgtagactcacccccctgcagctcgaaatccagagggtggtggagaaggccgactcctgggtcgagaaggaagagcctgcaccctccaattag

SEQ ID NO: 201231 - DNA, 3480 bp, synthetic construct
  misc_feature 1..3480: note = Description of Artificial Sequence: Synthetic coding sequence
  source 1..3480: mol_type = other DNA
atgctggacttcctggccgagaacaacctgtgcggccaggccatcctccggatcgtcagctgcggcaatgctattattgccgagctcctgagactgagcgagttcattccagccgttttcagactgaaggatagagcagaccaacagaagtacggggatattatctttgacttttcttatttcaaggggccagaactctgggaaagcaagctagatgctaaaccagagctgcaagatcttgatgaggaattccgagagaataacatcgagattgtgacacggttctatctggcttttcagtccgtgcataaatatattgtcgacctcaatcgttaccttgatgacttaaacgagggtgtctacatccaacagactctcgagaccgtcctcctaaacgaggacggaaaacagctgctctgtgaagctctgtacctgtacggggttatgttactcgtgattgaccagaaaatagaaggtgaagtgcgggaacggatgctggtctcctactataggtacagcgctgcaaggtcttcggctgactctaacatggatgacatttgtaaactgctgagaagcaccggatacagttcgcagcctggagcgaaaaggccatcaaattaccctgagagttattttcagcgcgtacctattaatgagtcgtttatttctatggtaattggccggttaaggtcagacgacatctataatcaggtgagtgcgtatcccttgcccgagcatcgatccactgcactggccaaccaggcagctatgctctacgtaatcctgtattttgagccctcaattctgcatactcaccaggctaaaatgcgagaaattgttgacaagtactttccagacaactgggtgatcagcatttacatgggaattacagtgaatctcgttgatgcttgggaaccctataaagcggccaaaacggctctgaataacaccctcgacttgagcaacgtgcgggagcaggcttccagatacgcaacggtctccgaaagagtacacgctcaggtgcagcagtttttgaaggagggttatctacgcgaggaaatggtgctggacaacatccctaagctactgaattgtctgcgggactgtaatgtagcgatacgctggcttatgctccataccgctgactcagcctgcgacccaaataataagcggctgcggcagatcaaggatcaaatcctgaccgattcacgctacaaccctcgcatcctgtttcagctcctgcttgacaccgctcagttcgagtttatcctgaaagagatgtttaaacagatgctgtctgaaaaacagaccaagtgggagcattataaaaaggagggctctgaacgcatgacagagctggctgacgtgttctccggggtgaagccgcttacccgggtggagaaaaacgagaacctgcaggcatggttccgcgagatctccaaacagattctgagcctgaactacgacgactctaccgccgcaggtagaaagaccgtccagttgatccaagctttggaggaggtgcaggaatttcaccagttagagtctaatctgcaggtgtgtcaatttttggctgacactcggaaattcctgcatcagatgattagaacaatcaacattaaggaggaagttctcattactatgcaaattgttggcgacctttcctttgcctggcaactcattgactcttttaccagcattatgcaggaatcgattagagtgaatccttccatggtaacgaaattgcgagccacctttctcaaattagcgtcagccttagacttgcctctcttgcggatcaaccaggcaaattcccccgacctcctctctgtctctcaatactactccggcgagctggtttcttatgttcgtaaggtgctccagatcattcctgagtcgatgtttacatctcttctgaaaataatcaagttacaaacgcacgatattatcgaggtgcctactcgcttagataaggataagctgagagattacgcccagctcggcccccggtatgaggtggctaagctgactcacgccatatccatatttactgaaggtatactgatgatgaaaacaactctcgtggggatcatcaaggtggatcccaaacaactcttagaagatggcatccggaaagagctggtgaagagagttgccttcgcattgcaccgtggactgatttttaatccacgggccaaacctagtgaactgatgccaaagctgaaggagctgggtgccacaatggacggctttcacaggagtttcgagtacatccaggattatgttaatatttatggcctgaaaatttggcaggaagaagtgtctaggataattaactataacgtggagcaggagtgtaataatttcctgcgcacgaagattcaggactggcaatctatgtatcaatccacacacatccctatccctaagttcacccctgtcgatgagtcggtgactttcataggcagactatgtcgcgagatccttcggatcactgatccaaaaatgacctgtcacatcgaccagttgaatacttggtatgacatgaaaactcatcaggaagtgacctcgagtcgactcttcagtgagatccagacaaccctgggcacctttggtctaaatggcctcgatcggctcctatgtttcatgatcgtgaaggaattgcagaatttcctgtcaatgtttcagaagattatcctaagggatagaaccgtgcaagacaccctcaagacccttatgaacgcagtctctccccttaaaagtatcgtggcgaattccaataagatttacttcagcgcaatcgccaaaacccagaagatttggaccgcttatctcgaagccattatgaaagtcgggcagatgcagatcttacgccagcaaatcgctaatgaactgaactacagttgccggttcgacagcaaacaccttgcagctgccctcgaaaatttaaacaaggctctgctcgctgatatcgaagcacactatcaagatcctagcctcccctatccaaaggaagataacaccctcctatacgagatcaccgcctaccttgaagctgctggcattcataacccacttaacaagatttatattaccactaaaaggctcccttattttccaatcgttaactttttattcttaattgctcaactccctaagcttcagtataacaagaatctgggtatggtatgcagaaaacccaccgatcctgtggactggccccccctggtgctgggcctgctgaccttgctgaaacagttccactcacgctacaccgaacagtttctcgcactgatcggccagtttatttgctcgacggtggagcagtgcacatcccagaaaatccccgagatccctgccgacgtggtcggagccttacttttcctggaagactatgttcgatacacaaagctcccacgtcgggtagcggaagcacacgtgccgaatttcatattcgacgaatttcgtacggtcctttag

SEQ ID NO: 201232 - DNA, 2424 bp, synthetic construct
  misc_feature 1..2424: note = Description of Artificial Sequence: Synthetic coding sequence
  source 1..2424: mol_type = other DNA
atgttcagcgccggcgccgagagcctgctgcaccaggcccgggagattcaggacgaagagcttaaaaaattttgttcccgaatttgtaagctgctgcaggcagaggacctagggcctgacacactcgacagtctccagcgactgttcctaatcatctctgccacaaagtattcgagaagattggagaagacctgtgtggacctgctgcaggccaccttgggactgcccgcatgtcccgagcagctgcaagttctctgtgctgcgatcttgcgggagatgtccccaagtgactccctctcccttgcttgggaccacacccagaattcgcgacagctgtcactggtggcaagtgttttgttggcccagggggatagaaacgaagaagttcgggctgtgggacaaggcgtgctacgggctttagaaagcagacaacctgaaggccccagcctccgccacttactgccggtgatggctaaggtcgtagtcctctcccccggcacgcttcaggaggaccaagcgacactcctaagcaaacgtttggtcgattggttaagatacgcctctctgcagcaagggcttccacacagcggagggttcttcagcactcccagagccaggcagccgggacctgttaccgaagtggacggcgctgtagcaactgacttcttcactgtcctgtcctccggccatcgttttactgacgaccaatggctgaatgtgcaggctttctcgatgttgcgtgcatggctactgcacagtggacccgaaggtcccggtacactggatacagacgaccgctctgaacaagaggggagcacactctcagtcatttccgcaacttcgagcgccggcaggctgttgcctcctcgggagaggttaagagaggttgcatttgagtattgccagaggttaattgaacagagtaaccgtagagccctccgaaagggcgactctgatttgcaaaaggcttgcctggtggaagctgtgctagtgctcgatgtgctgtgccgccaggatccaagttttctgtacaggtctctgtcctgcctgaaagctctccacggacgggtaaggggcgaccccgcttccgtcagggttctccttcctcttgcccatttcttcctttcccatggcgaggcggctgccgtcgacagcgaggccgtgtaccagcacctgtttaccagaatacccgtggaacagttccatagccccatgttagcttttgagttcatccagttctgccgcgacaacctgcacctgttttcgggtcacctttccaccctgcggctgagttttccaaatctattcaaatttttggcctggaacagcccacctctaacatccgagttcgtcgcactcctgcccgctctggttgatgccggtaccgctctggagatgttgcatgcactcctcgacttgccttgcctgaccgccgtgctggaccttcagttacgatcagccccggccgcttcggaaaggcctctttgggatacgtccctgcgggcaccttcatgcctggaggcttttcgtgatcctcagttccaagggctgtttcagtatctgctcaggcccaaggcaagtggcgccactgaacgacttgctcctttgcaccaattactgcaaccaatggctggatgcgcgagagttgctcaatgtgcccaggccgtgcccacactgcttcaggcatttttcagcgccgtgacacaggtcgctgatggatctctgattaaccagctggccctactgctgctggggcggtcagatagcctttaccccgcccctggctacgcggcgggggtgcactcagtcttatctagccagttcctggccctttgcactttaaagcctagcctcgtagtggagctcgctcgggatctgcttgaattcctgggtagcgtgaacggcctgtgcagccgggcgagtctggtgacgagcgtagtttgggcgatcggtgaatatctgagcgtgacctacgacaggaggtgcaccgtcgaacaaatcaacaagttctttgaggccctggaagcattactgtttgaggtgacccaatgccgaccaagcgccgcgcttcctcgatgtccccctcaggtggtgacggtgctgatgactacactgaccaaactggcctccagaagtcaagacctgatccccagagcaagcttgttactgtccaagatgcgcacactggcccatagccctgctacttccagcacccactctgaggagggggccgaggcgatcaggacaagagctacggagttattgaccctcctgaagatgccgagtgtggcccagttcgtactgacgccatccacagaagtgtgcagtccgagataccatagggacgccaacactgccttacccctggcccttcggaccgtgtcccgccttgtggaaagagaggccgggctgatgcccggctag

SEQ ID NO: 201233 - DNA, 4086 bp, synthetic construct
  misc_feature 1..4086: note = Description of Artificial Sequence: Synthetic coding sequence
  source 1..4086: mol_type = other DNA
atgggcgccgccggccggcaggacttcctgttcaaggccatgctgacaatctcatggctgacactgacctgttttcctggtgcgacgtccacagtcgccgctggatgtccagatcagtctcctgaactgcagccttggaacccaggacatgaccaggatcatcacgttcacatcgggcaaggaaagacgttgcttttgacgagctccgccactgtttacagcatccatatctctgagggtggcaagttggttattaaggatcatgatgaacctattgtgttacgcacaaggcatattctcattgataacggaggagagctccatgccgggtcagcgttgtgtcctttccagggtaatttcaccataatactatatggaagagcagatgaaggaatccaacccgacccatactacggcctgaagtacattggtgtgggcaagggtggcgccctggagctgcatggccaaaagaagctgtcttggacgtttctcaataagacactccaccctggcggaatggctgaaggcggctacttttttgaaagatcatgggggcatcgcggagtgatcgttcacgtgatagatccaaagtcggggaccgtgatccacagtgacaggtttgacacataccgctccaagaaggaaagtgaacggttagttcagtatcttaatgcagtgcccgacggtagaatactgtccgttgcagtcaacgacgagggatctaggaacctcgacgacatggcacgaaaagcgatgacaaagttaggaagtaagcactttctgcacctaggatttagacacccttggagctttctgacagttaagggcaacccttcttcaagcgtggaagaccacattgagtatcacgggcacaggggctctgccgcggccagggtgtttaaactgttccagacagagcatggagagtattttaacgttagcctgtcctctgagtgggtccaggacgtagaatggactgagtggttcgatcacgataaggtgtctcagacgaagggcggcgaaaagatctctgatctctggaaggcccatccaggcaaaatctgtaatcgccctattgatatacaagctactaccatggacggggtgaatctgtctaccgaggtggtgtacaagaagggccaggactacaggttcgcctgctacgatcggggcagggcctgccggagctatagagtgcgcttcctgtgtgggaaacctgtgaggccaaagcttactgtcacaatcgacacaaacgtgaactccactatcctcaatttagaggacaacgttcagtcttggaaaccaggcgacaccctcgtaatcgcttcaacagactacagcatgtatcaggcagaggaatttcaagtgctgccatgcagatcttgcgctcctaaccaggtgaaggtagctggcaagccaatgtacctgcatataggtgaggaaattgacggggtcgatatgcgagccgaggttggcctgctatctcgtaacattatcgtgatgggtgaaatggaagacaaatgctacccataccgaaatcacatctgcaattttttcgattttgacacctttggcggtcatattaaattcgcgctaggctttaaagcagcccatcttgaaggcaccgagctgaagcacatgggccaacagttagtgggccagtaccctatccacttccatttggcaggtgacgtcgatgagagaggaggctacgatccccccacctacattagagatctctccatacaccacacattttctaggtgtgttacagtccacggcagcaacggactcctgatcaaagatgtcgttgggtacaattctctgggccactgtttcttcaccgaagacgggcccgaggagcgaaacacattcgaccattgcctcggactgttggtgaaatctggaactttgctgccttccgaccgggattccaagatgtgtaaaatgattaccgaagattcgtaccccgggtatattccaaagccacggcaggactgcaacgcggtatctaccttctggatggctaatcccaataacaaccttataaattgcgccgctgctggttctgaagagactggcttctggttcatttttcatcatgtacccaccgggccgtctgtgggcatgtactcccctggttatagcgagcatatcccgctcggcaagttctacaacaatagggctcactcaaactacagggcaggtatgatcatagacaatggtgtgaagacaacagaagcctcagccaaggacaaacgaccgttcctctccataatttccgcacgatatagcccccatcaggatgcagatccgcttaagccgcgggagcccgccatcatcaggcacttcattgcctacaagaaccaggaccatggcgcctggctgaggggaggggatgtttggctcgactcatgtaggtttgccgacaacggcatcggcctcaccctggcctctgggggtaccttcccctatgacgacggctccaagcaggaaattaaaaattccctgttcgtgggggaatccggtaacgtggggaccgaaatgatggacaatcgcatctggggcccaggtggtctcgatcacagtggaaggacattaccgatcggtcagaatttcccaatccggggaattcagctgtacgacggcccaatcaacattcagaactgtactttccggaagtttgtggctttagaaggtaggcatactagtgccctggcctttcgactcaacaatgcttggcagtcatgccctcacaacaatgtgaccggtatcgcctttgaagacgtaccaatcacttcaagagtgttctttggcgaacccggtccctggtttaaccagctggatatggatggggataagacctcggtgtttcacgacgtggatgggtctgtttccgagtatcccggttcttacttaaccaaaaatgataactggttagtaaggcatcccgattgcattaatgtgcctgactggcgaggggctatttgtagcggatgttacgctcagatgtacatccaggcttacaagacatcaaatctccggatgaagattattaagaatgacttcccgtcccatccattatatttggagggtgctttgacccgctcaacccactaccaacaataccaaccagtagtcaccctgcaaaagggatacactatccactgggatcaaacggcccctgccgaactggccatctggctcattaactttaacaagggcgactggatccgggtcggcctctgttacccaagaggaactaccttctctattcttagcgatgtccataataggctcctgaagcaaacttcaaaaaccggcgtgtttgtgcgtacacttcagatggataaggttgaacagagttaccctggccgaagccattactattgggatgaggactctgggctcctttttctgaaactgaaggcacagaacgagcgagaaaaattcgcgttctgttccatgaaaggatgtgagagaattaaaataaaggcactgatacccaagaatgcaggggttagcgattgcactgccaccgcctaccccaagttcacagagcgcgccgtggtcgacgtgccgatgcccaagaaactcttcggatcccagttgaagaccaaggatcacttcctggaggtcaagatggaaagttccaaacagcacttctttcacttgtggaatgatttcgcctacattgaggttgacggtaaaaaatatccaagttctgaggatggtatccaggtcgtggttattgacggcaatcagggcagagtagtcagtcacacgtcctttagaaacagcatcctccaggggatcccttggcagctgttcaactacgtcgctacgataccagataatagtattgtgctgatggccagcaaaggtaggtacgtttcaagaggcccgtggaccagggtgctagaaaagctcggagctgatagaggtctcaagctaaaggaacagatggcctttgtggggttcaaaggatccttcagacctatctgggtgactctggacaccgaggatcacaaagcaaaaatctttcaggtcgtacccattccagtggtgaaaaagaaaaagctgtag

SEQ ID NO: 201234 - DNA, 1866 bp, synthetic construct
  misc_feature 1..1866: note = Description of Artificial Sequence: Synthetic coding sequence
  source 1..1866: mol_type = other DNA
atggccaacgtgccctgggccgaggtgtgcgagaagttccaggccgctcttgccttaagcagagtggaactgcataaaaaccccgagaaggagccttacaaatccaagtatagcgcccgcgcactgctcgaggaagtgaaggcccttttaggtcctgctccagaggacgaggacgaaaggcccgaggctgaagatggccccggcgccggcgatcatgccctggggctaccagcggaggtggttgaacccgaaggacctgtagcacagagagcagtgcgtctggctgtgattgagttccaccttggggtcaaccatatcgacaccgaagaactgtctgcaggggaggaacacctggtgaagtgtctgagattgctgcgcagatacaggctcagtcatgactgcatctcactgtgtatccaggcgcagaataatctaggaattctttggtcagaaagggaggagattgagacagctcaggcctaccttgagtcatctgaggccctgtacaatcaatacatgaaggaggtgggatctccacctctggacccaactgaaaggtttctaccggaggaggagaagctcaccgaacaggagaggagcaagcgcttcgagaaagtgtatacacacaacttgtactatttggctcaagtataccagcacctggagatgtttgaaaaggcagcccactattgtcactctacgctgaaacgacagctggagcataatgcctaccatcccattgaatgggcgattaacgcagcaactctgtcccagttttatattaacaaactttgcttcatggaggctcggcactgtttatcagcagccaacgttattttcggacaaacgggcaagatctcagcaaccgaggatactcccgaggccgagggagaggtgcctgagctctatcatcagaggaaaggtgaaatcgccagatgttggatcaagtactgtctgactttgatgcagaacgctcagctgtcaatgcaggacaacatcggggagctggatcttgataaacagagcgaactgagggctcttcggaagaaagagcttgacgaggaggaatccattcggaagaaagccgtccaatttggtaccggcgagctgtgtgacgcaatctctgccgtagaggagaaagtcagctatctccgacctttagacttcgaggaagccagagaattgttcctgctcggacagcactatgtttttgaggccaaggagttctttcagatagacggctacgtgacggatcacattgaggttgtgcaggaccactcagccctattcaaggtgttagccttcttcgagacagatatggaacgccgctgtaaaatgcataaacggcgaatcgccatgctggaaccactgacagttgatctcaatccccagtactacctgctggtgaaccggcagatccagttcgagattgcccatgcctactacgacatgatggatctcaaagtggccatcgcagacagattgagagacccagatagccacatcgtcaagaagatcaataacctgaataagtccgctctgaaatattaccaactctttctggatagcttgcgggatcctaataaagtgtttcccgagcatattggtgaggatgtcctgcggccagccatgctggccaaattccgtgtcgccaggctatatggaaaaattatcaccgcagatccaaagaaagagcttgaaaatctcgctacaagtctcgaacactataagtttatcgtggactactgtgaaaaacacccagaagcagcacaggaaattgaggtcgagctcgaactcagcaaagagatggtgagcctgctccccaccaagatggaacgctttcgaaccaagatggcgctcacatag

SEQ ID NO: 201235 - DNA, 4551 bp, synthetic construct
  misc_feature 1..4551: note = Description of Artificial Sequence: Synthetic coding sequence
  source 1..4551: mol_type = other DNA
atggacaaccagcaggacaaggccatcgtggccagcgccaacggcgaaaatactctgatcaatggtgtcaaagagaacgatagcgaggaccaagatgtggctatgaagagctttgccgccctcgaggccgctgccccaatccagccaacccctgtcgcccagaaagagactctgatgtacccgcgtgggctgctacccttacccagcaaaaagccgtgtatgcagtcacccccaagccccctgggacttattgaagctcccgaacatgccgctaacagtgcttccgttaacgctatttcattgactagtggcatcgccaagggcctgaacacgtggtctttgccgaatgagtgtgaaaaagccccttttgccattatggaacccgctgggatgagcgctctaaacggagactgtctgatgcagccgtccaggacatgcctcggatgctttatggaaagcaaagacgccgttgaccccgaacccggcatttccctcaaggtcggagacctcaaccgagactacgaaacatgcgccgtgagtgatattggaattcaatgcattaatgccggggaaaatatgaagtacggtgagcagcttctcagcgaccaattgctgggctttccactccataaatccagggccggagataggcgcgagacagagaaacccgacatagacctggaagaccctgcccagaagtcttattatgaggctctgcttctggataagtgcaacacggaggaagccctgcttgccaacagcaaccaggattggggctatttcgagacattcatcagcgagtccaagatcgagctcctggatttgtgctccaaaaatgaactctccgtgaatctgttttccgaggaggacgtggacaattacatgtttgacgatgatgagtccactcttggctccgatgtgtgctcactgaagatccgatacgaaagtttccaagacaacgtgagggacaaaactacgctgctcatgcaggaggatgcacagttcaatttcttcccaagcgtcttcactacctgtccaaaaagggagtcaaaaagcggcgctctgaaacagagcagtgacttttcacaattcaaggtgccagacgtgagcatcatctggggcgaggaagataaaaacctcgacaagaaaaagggcaaggaagaagggcaggaggataagggcgtagaaaagaaggatggtaaggacaacggcgaaaagcccgctctcaacaagccctgcagtggtacggaggtggagcaacttaagaacccaaaacagggccatctggccaacagtctggagacatcaggttccttctctgacgactccagtttcatagaaattagctacgacgcgatgggtgagatcaaagactgctcacgttacatggcccgtgacaccaactccggaagcagttcctcccagcagaattacgggctccgcgctaaacgcaaagtcaggtacagcgaagactacctgtacgatgtagacagtctggagggggagaaggtcaacgagcggaaggaatggctccccgttggatccaaagaggaggatgatgacgagtggtgtcctaagaaaaggagaaaagtgactcgcaaggaaccaccagtgatcatcaaatatattatcatcaaccggtttaaaggagaaaagaatatgctggtgaaactcggcaaggtcgacgccagtgaaactaccgtgaatctttccgagaaccaactcaataagtatgcgaaattagcccccctgaaaggtttttggcagaaaaagaagaaacaacggaacacaaacactgattcgatcaaaacgcccttctcacaaaaacaaagctttgagcccgggtctttcgaggtgtcttttctacccccagccaggaagaggaaaagcaaactcggaaatcggcacagaatccagaggatacctagtatcgagatctccgcaagctccaaacagatttctctctgcaatgaccagcgacatgcatctaatcacaaggaggatggaggtttgaaaggcaccttgaagagcgccccactgggagcccccagttgtgccaacggctcacatctcaatgacatcacggggcctgacagcgtcaaggtcaaagctcaagacactgaattcaaggggcctgaacggaaggtcctgaacaagatcaaattcaagtccgaggctagattgaagagcaagaaggtcaaagcggcgggtcaagaatctaaacccatagtgcagatgtctcctctgcttgaaaatcagtcctcaaaggctaacctcaaaaacgaggtgattcccggaacatctaattcatccagattgagcgagttccacgaggcgaaagctgctaaatccagcacattcctgccgacaacatgcagttccgaaatgccactctctagtgccaacgtaacaactaacattccagtgatccccggcggctacttacagactttgctggacgcttctgacctgtcaaacaacacttctattagttatttttcccatcactctccagagcagaacgaaggtagtttaacgcagactgagaagagctttgtgccccttcaaccaacccaggattgtgtcctgacctcaagcagtgattctgagctacagcagtcatctcacaactttaagatggaatcatctaattacagaaacgtctggcctaataaggctacttcgggcacgcaggaattcatggctgaagtgagccgcgagattgctcccacccagagttcagagttcggggcaagtcaggtcgtctcaatggagaacaacctgactccgacaacttataacccgatctgcttaaattcggggggaagtaattgtaacaaagtattatacgactccatgcaggacacacagctccctagcgatgatagctaccagctgtgccattttaacaatggtgagatatgctttccattccagcaggggccagttaacatggacgacggccggctcttctcgtttgactcaatggcccccctgagtgtgtcgtcatccaattactgtagtctgtccttaaaatcttgtgaaaaagatggtgatgatgatatcaccgatgactttctcgcccattgttcacctaaactcgtcatccagcaaagcatcgatgagattgcacctctgaaggaatctactgacctcctggacattagcaactttactccagacaagtttcgtcactcaagtttaagcgagatgtccccgcccgacactccgtcactgtctccccaaattaccaggtgtgaaagcatgaagaccctcgggactctaaaggggtttcaggagggcgtcccagggccccttgatagtgtcgagaagattaaatgggattgtagtactctgtcaaggcaggtccaaatggaagacggctttaccctgaataaccatcagttccaatttcatatgtttaacgacgaggacagcgttagcctgctgcaaaagaacccctgtttatctactttcaacgacccatccggtcaaatcagtactaacaacaaagtgtcaaagagtcggaaaaagtcctccccatccaagagcggtgcaatgaatcaaagctcttctcagaagaataccagaaaaaagtcacttaaaggtaacaataagggaatcgaaaaaccgcccgggaaaaactcaaggcaggtgccaaagtccacaaaaaaggggaagtatatggcggctattaatggggaaaagatgcagattggcatcggacggggtggtagccagaccaacacgatcagtagtaccggaaagacattggcggaatgtatacagcacggcggtcccatggcatccatgaaaatgccatcacagaagggactgagcggggactgggcgctggggaaggagtctagccctggatggagtgacatgtcaatgggcaccaacaccaatagcctgctggatgatgatcagcgggagtttcaagaaccgtcttatatcctttcaaacattgcctccgggatggctgacgtccagcggttcatgatggctagtatcgaacctctgtgggaacctatggaacaccacggggatcctaatatcttttactcgcccgagagtaatagtctgaaactgaaaacactcaagatcctggctgggaccccacaggagtccaaaaaaaagataaactcaggctcccagggcgctacaaaaaaccacaggtccatcaaaggtgtgtctaaatctaacggaaagactgcaatcggtgatccaggtcgggctaacatgccaggctataacgaagactctcgatcgactttcttcgataagaagtatagtaatatgagtaccctgggaaataacggtccaacacacaagaaactgtacaggcacaagagcagtagcaaagccctgcgtgatgaaaaatgcaaggggaagcatatggagcgggaacaagtgcataaggacgaaagcggcactgcctcgttcgagaagctccgggattccgattacaaccttctaaaggccgaaactaccttttgggtgctgcctgtcttcgaggaagagaccaggatcttccaaaaagatatctag

SEQ ID NO: 201236 - DNA, 4080 bp, synthetic construct
  misc_feature 1..4080: note = Description of Artificial Sequence: Synthetic coding sequence
  source 1..4080: mol_type = other DNA
atgtacagcgtggaggacctgctgatcagccacggctacaagctgagccgagacccacccgccagcagggaggataacccaaaaggtaggcaggctgcgaggaccggcactagagctggccaggggttgcagaatggacacgaagacggacccgccgcccttgcgcatcggaagacatcagccggcaaagggcacgtgtctgacagcgaaagccgacgcagtacccccaggggacatggtgagcctcaatctacaagtgctagtcgtacaagtgaagctggattttgtaaccaacccccctctgcctggagttctcacccccctactggaaatgaccaggcttatagacggcgcggtcgccaggaggcgcgttcccagaagccgcgtgaacacgagaacctggaagccagggggatggctcaggctcactcactccccgtgcacgttagggaaggtccctgggaagtcgggggccgaagcgaacatgttatgaaaaagcccgtttgggaggaagagttgaggatgtccggaccagccaaatggcagaacgtgtccttggagtcatggaatcaaccgcgaaagctgggcaggcaaatgtccgacggtgacggggaaaggcttttccaggacctgtatccgttcattcagggggagcacgtgctaaattcgcagaacaagggcaaatctcggtccttacccagagtactgagtccggagtcactgagctgtaccgagatcccaatccccctcaacgaaaggcactcacctaaaatgcctccgtacccgcctacctgcgcccctaacctagatagtacgcgcaatagcgaaaagagcgggtgctctgctccctttccaaggccaaaattcggccgccctcttaagcccccaagttatagctcccaccaacagagccgcggcggagctgattcatcagatagccaggattctcagcagatggatgcttatgtcccaaggcatgagctatgtttgtccgacccgggattagagccgcccgtatacgtgccccctccttcttatcgcagccccccccagaatatcccaaacccttatttggaagatacagtgcccatcaacgtgtgtgggggccacagtcagcagcagtctccaacagaaaaagccggagcatcgggacagccacccagcgggccccctggcacaggcaacgaatacggggtctcccctcggctgcctcaggggctgcctgcacatccaagacctgtgactgcctacgacggattcgtgcagtatataccttttgacgacccgcgactccgccacttcaagctagcacagccccaagggttctgcgaggacataaaacttgatgacaaatcttacaacagctcccccgttaccgcccaggaaccagcgcacgggggcatgcaacccgacggtgctatttggaacccacagtctctgatcccgccttctggcgatgagcggggattggtattagctgattccagtccgaggtggctgtgggggcaacctccaggcgacggcgaaaattccgggttgccgaaccagcgggataggtgcgtggcccgaggccaatggccagatgtgcgaggctcccaacacggccacaccggcagacaggtgagcagcccctattcccagggcgaaagcacatgcgagacacagaccaaactgaaaaaattccaaactgggacccggaccaagaagtcctcaaagaagaaaatgaatgaaacgatcttctgccttgtctcaatcccagtgaaatctgagagccatctccccgacagggatatggataataatgacttgaaaccgtctgcggatcaaaaaaacggcagtgataagtcacccgctctgcaagagcagtcccttcttagcatgtcatcaacagaccttgagctgcaggccctcactggaagcatgggcggtcgtacagaatttcagaaacaggatctgggcgaaccagaggaagaccggcaaactaatgacttgtcattcatccacctgactaaacaccgagaattgaaacacagcggctcttggcctggacatcgttatcgcgaccagcaaacacaaacctccttctccgaagaaccacagtcttcacagttgctgccaggtgccaaactcggtggcccttccagagctgctctgagtccaaaatgctctgatcccgctgccagcgaggcccaaactcacaccgcttttcctactggagaccataagcagcgtcccagtgcacgtaacctgaagggacaccggagtctgagccctagtagcaattccgccttcagtagaaccagcctgtccgtggatcaagcaccaacacccaaagcgggtcggtctcagccatgcgtcgatgtgcatggcctgggggcccatccggggcccaaacgcgaggttgtgaaaggcgagcctacggggccttgtaatagcaaacagctatttggtcaattccttctgaaacccgtctcacgcagaccatgggacctgatctcccagctcgaatcctttaacaaggagctgcaggaagaagaggaatcttcatcttctagcagtagcagctcctcctcctccgaagagagcgaagctgaaccacagcaggagaacagagcacactgtcggcaggaagatgtgggcttccgtggtaattctccagaaatgcgggttgagccccagccacggatgtgggtgcccgagagtcccgtctgcagatctggccggggtgaatcaaagtcagagagttggtctgaggaacttcagccagggcatcctagggcttggccaccctctccaggcagattccgggtggaagaaggagggggagcccccttttgctcggctgacgggtcaactagcgcagagaaacgtcaccttgaagtatcaaatgggatggatgaactggcaggaagtccatttcccgtcacccggatgtcgtcaaggtcgtctgatgccaagccacttcctgctagttaccccgccgagcctagagagcctcaggaatcacctaagataacttccgcattcagtagtgttaaaccttctgaagcagttcctcgcaaattcgactccggtggagaacgtggagccgggctgcccctcagcctgagcaacaagaaccgtggactgtccgcgcccgatttgcggtctgtgggattaacccccggacaggagcagggagcttctgaactggagggttcattaggggaggcaagtacgatagagatacccccgggggagtctcttcaggcacgggcggcgagaatcttgggaatcgaggtggccgtcgagagcctgctgcccggtatacggcgcgcaggacagaatcagcccgcagagccagacgcttccgcttgcacacccgagagcccacaggaggagttactgtctaggccagcccccgccgatgtcccccgggtatccaccgacgccttttatggacgacgcaaatgtggatggacaaagtccccattattcgttggggatcgcgacagcgctaggcgggcacctcaggcttttgagcattccgatgtggatggcgtagtcacgtcgacagacccagtgccggaaccagagcctagcccactggaatctaaattttttgaacagaaagacgtggagactaaaccccccttcagatccaccttgttccactttgttgagcgaactcccagtgtagccggcagcgaaaaacgcctgcgtagcccaagcaaggtaattgagagtctgcaggagaagctggcttccccgcccaggcgcgccgatcctgacaggctgatgagaatgaaggaagtcagctcggtctctaggatgcgggttctgtcattcaggaatgctgactcccaagaggacgctgaggaactgaaggccaccacccgcgggcaggctggtttacctggaggattggtgtcacctggaagtggcgacagagcgcaacgtctaggacacagcctcagtgtatcaaaggattcaatatcaagggaggagaaagaacatcccgcagcacagaaggagaaaagcatggatcaggacttttggtgccccgattcttacgatcctagcagggtggaacgggtgtag

SEQ ID NO: 201237 - DNA, 3219 bp, synthetic construct
  misc_feature 1..3219: note = Description of Artificial Sequence: Synthetic coding sequence
  source 1..3219: mol_type = other DNA
atggccccccccaccggcgtgctgagcagcctgctgctgctggtgactatagcgggttgtgctcgcaagcagtgctcggagggcagaacatacagcaatgctgtaatcagtcccaatcttgaaactactagaatcatgagggtcagccatacttttcccgtggtcgactgcaccgctgcctgctgtgacctgagttcatgcgacctggcttggtggttcgaggggcgctgctacttggtcagctgtcctcataaagagaactgcgaaccgaagaaaatgggacctatcaggtcgtatttgacctttgttctccgacctgtccagagaccggctcaactgctggactatggcgatatgatgctaaatcgcgggtcaccatctggaatatggggtgacagcccagaggacatccgaaaggacctgaccttcctggggaaggactgggggctcgaagagatgagcgagtatagcgatgactatagagagctcgaaaaagacctcctgcagccgtccggaaagcaggaaccacgaggttccgctgagtataccgattggggtttgctaccaggcagcgaaggggcctttaacagtagcgtgggtgatagccctgctgtgccagccgaaacccaacaggacccggaactgcactatctgaacgagtccgcgtctactcccgcccctaagctgccggaaagatccgtgctgttgccactgcctacaaccccttccagtggggaagtactggaaaaggagaaggctagtcagctgcaggagcaaagcagcaatagcagtggcaaggaagttttgatgccctcccacagcctgcctcccgcttcattggaactgagctccgtcacagtggagaagagtcctgtcctcactgtgacccctggctccaccgagcattccatcccaactccccctactagtgctgctcccagcgagagcaccccctctgaacttccaattagtcctaccaccgcgccacgcacagtgaaggaacttacggtctccgccggcgacaatctgattattacactgcctgataacgaggtggagttgaaagcctttgtggccccagcgccaccggtggagacaacatacaactatgagtggaacctaattagtcatcctaccgattaccaaggagagattaaacagggccacaaacagactttgaacctcagccagctttcagtcggtctgtatgtgttcaaagtcacagtgtcttctgaaaacgccttcggcgaagggttcgtcaacgtgaccgtgaagcccgctcggcgagtgaatctgccccctgtggccgtagtttccccacagctccaggagctgacgcttcctctgacgagtgcactgatagatggaagccagagcactgatgatactgagattgtaagctaccattgggaggagattaatggccccttcatcgaagagaaaacatccgtcgatagtccagttctgcggctgtccaacctcgaccccggaaactactcatttaggctgaccgtcacagacagcgatggggcaactaatagcaccaccgcagcactcatcgttaacaacgccgtggattaccctcccgtcgctaatgccggaccgaatcataccattaccctcccgcagaatagcatcacattaaatggaaaccagtcctccgatgatcaccagatcgtgctttatgaatggagtttaggtcccggctccgaaggcaagcacgtcgttatgcagggggtgcagactccgtacttgcacctctctgccatgcaagagggagattacactttccaactgaaggtgacagactcttcacggcaacagagcaccgctgtcgtgactgtcatagtccagcccgagaacaaccgcccacccgtagccgtggccgggcccgacaaggagttaatctttccagtcgagtcagccaccttagacggctcatcttcctccgatgaccatggcatcgttttctatcactgggagcatgttcggggccctagtgcagtggaaatggagaacatcgacaaggctatcgcaacggtgactggactacaagtgggcacttaccacttccgcctgaccgtgaaggaccaacaggggctttcctcaacatccactctgaccgtggccgtgaagaaggaaaacaacagcccacccagggccagagccgggggaaggcacgtgcttgtacttcccaacaactctattaccctggatgggagtaggagcactgatgatcagcgcatagtctcgtatctgtggatcagggacgggcagagccctgcagccggcgatgtgatcgatggaagcgaccactccgttgcattgcagctcactaatcttgtggaaggcgtatacacatttcatctcagggtgaccgattcacaaggtgccagtgacaccgacacagcgacagtcgaggtccagccagacccaaggaagagtggtcttgtagagctgacactgcaagtgggcgtaggacagttaacagagcaaagaaaggataccctggtgcgccaactcgccgttctgcttaatgtccttgactcagatatcaaggtccagaaaattcgggcccatagcgatctgagcacggtgatcgtgttctatgtccagagccgacccccattcaaggtgctgaaagcagcagaggttgctagaaacttacacatgcgtttatccaaggagaaagccgactttctgcttttcaaggtgcttagggtggatacagcaggatgtctgctgaagtgttcggggcatgggcattgcgatccgctcaccaaaaggtgcatctgctcccatctatggatggaaaacctgattcagagatacatctgggacggagagtcaaactgcgagtggtcaatcttttatgtcaccgtgctggccttcacattaattgtgctcacaggggggttcacttggctctgcatctgttgctgcaagagacagaagcgcaccaaaattcggaagaagaccaagtatacaatcctcgacaacatggacgagcaggagcggatggagcttagaccaaaatatgggattaagcacaggagcaccgaacacaattcatctctaatggtgtctgaaagcgaattcgactcggatcaagacaccatcttctccagagaaaagatggagcgcggcaaccccaaggtgtcgatgaatggcagcattaggaatggagcctcctttagctattgttccaaagaccgctag

SEQ ID NO: 201238 - DNA, 918 bp, synthetic construct
  misc_feature 1..918: note = Description of Artificial Sequence: Synthetic coding sequence
  source 1..918: mol_type = other DNA
agccagctgcccgtgcgggccgaggagcggaccgagagctgcctgtggggctgctgggcttcttccagagtaaggcggacttcagacgcctgtagttcacctttagcaacatcccgctcagccaggtcctgcggagtgctcacagctccggtgaaaggggcctcctctagtctggtggtgaaacttgctgataccgaccgagagcgggctttaagaaggatgcagcagatggccggccatctgggcgccttccacccagccccgctgccactgggtgcctgcggtgcctatacaacagcaattctgcaacaccaagcagctctgctcgccgcagcgcagggcccagggctcgggcccgtggctgctgtagccgcccaaatgcaacacgtggcagccttttccctagtggccgcccctctgctgcccgcagccgcagccaacagtccaccagggtcaggtcccggaactttacccggcctccctgccccgataggggtgaacggcttcggcccactgactcctcagacaaatggacaacccggatcagataccctgtataataatgggctgagcccctacccagcgcaatctccaggcgtagccgatccactgcagcaagcatacgcaggaatgcatcactacgcaggccccgagggctgtaacttgttcatttaccacctgccccaggaatttggggatgccgagttaatccagacctttctgccatttggggccgtggtgagcgccaaagtttttgttgaccgagccaccaatcagagcaagtgtttcggattcgtaagcttcgataatcccacaagtgctcagaccgctatccaggccatgaacgggtttcagatcggaatgaaacggttgaaagtgcagttgaagaggcccaaggatgctaaccgcccttactag

SEQ ID NO: 201239 - DNA, 198 bp, synthetic construct
  misc_feature 1..198: note = Description of Artificial Sequence: Synthetic coding sequence
  source 1..198: mol_type = other DNA
atggtgcggaccaaggccgacagcgtgcccggcacctaccggaaggtggtggccgcaagagctccaaggaaggtgttgggatcttcaacaagcgccaccaactccacatccgtctcctcccgaaaagagcatgttctgtgcaacctgataacacaaatgatgaaaaaaaatcgcactttctcattcatttttgaatag

SEQ ID NO: 201240 - DNA, 15018 bp, synthetic construct
  misc_feature 1..15018: note = Description of Artificial Sequence: Synthetic coding sequence
  source 1..15018: mol_type = other DNA
atggaccagcggaagaacgagagcatcgtgcccagcatcacccagctcgaagactttcttacagaacacaactcaaacgtagtttggctgctggtggcgacaattcttagctgtggatggattatatacctgacctattataacagcaggaacgtggggcttatcctcactctcgttctcaacaggctctacaagcacggatatatacacattggatccttttcattcagtgtccttagcgggaaggtaatggtccgggagatatactacatcacagaagacatgagcatccggatccaggacggatttatcatttttagatggtggaaaatgtacaatcctaagcaaaagcagcacgatcccaaggcagagacaagattgtatataacagttaacgactttgaatttcatgtatacaacagaagcgatttatacggaaggctccaggaattgtttggccttgagcctaccataatccctcctaaaaaggacgacgacaaaacccgggagataggtcgtacacgaacgcagtccaaaattgagcgggtcaaggtgaagacggagtctcaggacccaacctcctcttggcgtagcttaattccagttattaaggtgaatgtcagtaccgggaggttagcatttggaaatcattaccagccccagactctgtgcattaacttcgacgatgcattcctcacttacaccacaaagccaccctcctcacatctggatcagttcatgcatattgtcaagggcaagctcgagaacgttagggtcatgctagtcccaagcccaagatacgtgggactccaaaatgatgagcccccgagactgatgggcgagggcttcgtggtgatgcagtcaaatgacgtggatatttactattatatggacgagcctgggctagttcccgaggagacagaggagaacatagagggcgaaatgagctctgaggactgcaagctgcaagatctccctccatgctgggggttggacatagtatgtggtaagggcaccgacttcaactacggtccatgggccgatagacagagagactgcctgtggaagttctttttcccccctgactatcaggtgctgaaggtcagtgagattgcccagcctggccgtccgagacagatcctcgccttcgaactgaggatgaacattatcgccgacgctacaattgacttgttattcacaaagaacagagaaactaacgcagttcacgtgaatgttggagctgggtcatatcttgaaatcaatatcccaatgacagtagaagagaacggctacaccccagccattaaagggcaactactgcatgttgacgcaacaacctccatgcaataccgaactcttctggaagcggaaatgttggcctttcatatcaacgcctcctatccgaggatttggaatatgcctcagacatggcagtgtgagctcgaagtttacaaagcaacgtaccacttcatctttgcccagaaaaatttcttcactgacctaatccaggattggtcctctgattctcctcctgacattttctcatttgtgccttatacctggaactttaagattatgtttcaccagtttgagatgatatgggcagctaaccagcacaattggatcgattgttccaccaagcagcaggaaaacgtctaccttgctgcctgtggcgagactttgaacatagatttctcactcccttttaccgattttgtgcctgcaacatgcaacacaaagtttagcttgagaggagaggacgtggacttgcaccttttcctgcccgattgtcacccgtccaagtactccctgtttatgttggtgaaaaactgtcatccgaataaaatgattcacgatactggcatccccgctgaatgtcagagcggacagaagaccgtgaaacccaagtggcgcaatgttactcaagagaaatctggctgggttgaatgctggacagtaccaagtgtaatgttaactatcgattacacatggcaccccatatatcctcagaaagctgacgagcaactgaaacagtcgctgagcgagatggaggagacgatgctgagtgtgttaaggccatcccagaagaccagcgacagggtcgtgtcctctccctctactagtagtcgcccacctattgaccccagcgaactcccccctgacaagctccacgtggagatggagctgtcacccgattcacaaatcactctctatggacccttactgaatgcctttctctgtatcaaggagaactattttggcgaagatgatatgtatatggattttgaggaggttatctcctcacccgtcctgtctttatctaccagctcgagctccggctggactgcggtgggtatggaaaatgataagaaagagaacgagggtagcgcaaagtcaatacacccactggctcttaggccctgggatattaccgtcctagttaatctgtataaagtgcacggcaggctccctgtgcacggtaccacagatgggccggaatgcccaacggccttcctagagcgcctgtgctttgagatgaagaaaggctttagggagactatgttgcagctgattttgtcacccctcaatgtatttgtgtcagataattaccagcagaggccgcctgtggatgaggtcttgcgagaaggacatattaatctaagcggtttgcagctacgcgcacacgccatgttctccgctgagggacttccactgggttctgactccctcgagtatgcctggctgatagatgtgcaggcagggtcgctgactgcaaaggtcaccgcaccacagttagcctgcctgttagaatgggggcaaaccttcgtgtttcacgttgtatgtcgcgagtatgagctggaacgccctaagagcgtaattatctgccagcatggcatagatcgccgcttttgcgaatctaaattaagttgcattcccggtccttgccccaccagtgacgatctgaagtatactatgatcaggcttgccgtcgatggcgctgatatttatattgtggaacatggatgtgccactaacattaaaatgggggctattcgtgtggcaaattgtaatctgcataaccagtccgtgggtgaaggaattagcgctgccatccaggactttcaagtacgccagtacatcgaacagttgaacaactgtagaatcggtctccagccagccgtgttacgccgagcctactggttagaggccggaagtgccaatttgggactcataacagtcgacatagctctcgcagccgatcaccatagtaagcatgaagcccagcgccattttctggagactcacgatgctcgcaccaaaagactatggtttctgtggccagacgacattctgaagaacaaacgttgtcggaacaagtgcgggtgcctgggcggctgccgcttttttggaggtacggtgactggccttgatttctttaagctcgaagagttgaccccgtcaagcagtagcgccttcagctctacttcagccgaatctgacatgtattatggccagagtctgctgcagccaggcgaatggattattaccaaggagattcccaagatcatagatgggaacgtcaatggcatgaagagaaaagagtgggagaacaagagcgtaggtatcgaggtcgagcgaaagacgcaacatttaagtttacaggtgcccctccgttcacacagttccagttccagttcagaagaaaattctagcagctcagcagctcagccgctgctggccggagaaaaggagagtccctcttcagtggctgatgaccacctggtgcaaaaggagtttctgcacggaaccaagagagacgacggccaggcaagcattcccaccgagatatccgggaactctcctgtgtcaccaaacacacaagacaagagcgtcggacagagtccactccggagccctctcaagaggcaggcatccgtctgttccacccgcttaggcagtactaagagccttaccgctgcgttctacggtgataagcagcccgtgactgtgggagtccaatttagctctgatgtgagtaggtctgacgaaaacgtcttggatagccccaagcagcgccggtctttcggtagctttccttacacgccatcggccgattctaacagctttcaccagtaccgatcaatggatagctccatgagcatggctgatagtgaagcctatttcagtgcagcagaagagtttgaacccatcagttccgatgagggacccggcacatatcccgggaggaaaaagaaaaaaaagcagacccaacagatcgactattcaagaggttcaatctatcacagtgtcgagggccccctgaccgggcacggcgaaagcatacaggactcacgaactcttccatttaaaacacatccatcacaagccagtttcgtctccgcgctgggcggtgaagatgacgtgatcgagcacctatatatcgtggaaggagaaaaaactgtcgaaagtgaacagatcactccccagcagcccgtaatgaactgttatcagacctacttgactcagtttcaagtcataaactggtctgtgaaacatcccacgaacaaaagaacctccaaaagtagcctccacaggcccttagaccttgatactccaacatcagaagagtccagctcaagctttgaacagctgtcagttcctacattcaaggtgatcaagcagggcctaacagcgaattcattgctggaccgggggatgcaactgtcgggttctacatccaacaccccatatacacccttggaaaaaaaactggcggataacactgacgacgagactctcaccgaggagtggacgctggaccagccagtttcacagacaaggacaactgccatcgttgaagtgaagggaaccgtggacattgtgctgacgccactggtcgctgaagctctggatagatacattgaggccatggtgcactgcgccagcacaagacaccccgccgctattgtcgatgacctgcacgccaaggtgcttcgagaggctgtgcagaatagtaaaactactttctccgagaatctcagctctaagcaggatattcgtggtacgaaaaccgaacagagcaccatcggcacgaccaaccagggccaggctcagacgaacttgaccatgaaacaggacaacgtgactatcaagggcctgcaaaccaatgttagcattccaaaagtcaacttgtgcttactgcaggccagtgtggaagagagtcccacaacagcacctagccgttcagtcacccatgttagcctggttgcactatgctttgacagaatcgccactcaggtcaggatgaataggggcgtcgtcgaagagaccagtaataacgcggagccggggcgtacttcaaatttcgaccgttacgtacatgctaccaaaatgcaacctcaatctagtggcagcttgcggtctaacgcaggggccgagaaggggaaagagattgccgctaaactcaatatccatcgtgtgcatggtcagctcagagggttagataccaccgacattggcacctgcgccatcactgccataccttttgaaaaatctaaggtactgtttaccctagaggagctggacgaatttacattcgtagacgaaactgaccagcaggccgtacccgatgtgacaagaatcggtccttcacaggaaaagtggggctggatcatgttcgagtgcggcctggaaaacctgacaatcaaaggaggccgccaatcgggcgcggtcctgtacaattctttcggcatcatgggaaaggcctcggacactgaaagaggcggcgtcctgacatctaacaatagctctgattctcctaccggctcagggtataatacagatgtgagcgacgataaccttccatgtgatcgcactagtccatcaagtgaccttaacggcaactcagtcagtgatgagcaggatgaaggagtcgagtctgatgacttgaagaaggacctgccactgatgcccccaccacccgatagctgctctatgaaactgactattaaagagatatggttttcctttgcggcacctacaaacgtacggtcacacacacatgccttttccaggcagctgaatttgctgtctacagcgactccagcggtgggggcgtggctcgttccgattgaccagctgaaatctagcctgaacaaattagagaccgaaggaaccctgcgaatatgtgccgtcatggggtgcattatgaccgaggccctcgagaacaaaagcgttcactttcctcttaggtccaagtacaacaggctcaccaaagtagcccggtttctccaggaaaacccgtcttgcctgttgtgcaacattctccaccattacctgcatcaggcaaattacagcatcatcgatgacgcaactatgagcgacggattgcccgcccttgtgacacttaaaaagggcctggtggctctcgcccggcagtggatgaagtttatcgtagttacgcccgcgtttaaaggagttagtttgcaccgccctgcccagccccttaagccccagattgctatggaccatgagcatgaagacgggctcggtctggataacggcgggggcctccagagcgacacatcagccgatggcgccgaattcgagtttgatgctgcaaccgtcagtgaacacactatgttgctcgagggaactgctaaccgtccccctccgggatctagtggtccagtgaccggagcggagatcatgcggaaattaagcaaaactcatacacactccgattccgccctgaaaattaaaggtattcatccctatcacagtctcagttatacttctggagacaccgcaactgactcccccgtgcatgtcgggcgagccgggatgcctgtcaaagactcacccaggaaggagtcactgctgtcctatctgactgggagctttcccagcctgcacaatttacttgaggggacccctcagaggtcgtcagccgctgtgaagagctccagccttactaggactggcaacaccgtggctacggacatgctaagcgagcaccccctattatccgaacccagcagcgtaagcttctacaactggatgagcaatgcagtgggcaaccggggaagcgttctgcaggaatcgcccgtcactaagtctgggcataactccctgcctactggcgttgctccgaacttgccaacgatcccttctgcctcagatttcaacaccgtgctgagttcagatcagaacactctggacggcacgcactcccaacactctacctcccaggatgatgtggccggagttgaggaggccaaccaggggtttcccgcagtccaactggccgacgcgcaggttgtgttcaagcccctactgtcacacacaggcattcaatcacaggacacgatgcctttctgttatcggatgtacttcggcgaacatctgtccttctccgggaccctggattgtctacgcgctgacatcgtcgatagtgatactgccaaggaaagaaaaggaaagagagccagaaggcagggacacgtgaatctccccccattggaattcaagccggcactgatgttaggtacattctctatctcggctgtggtcatggaaaagagcgtgtgtactccgcagaatagcacttcagccctcagttttcacgacctgagtaaacggtattacaataccttccactgtaactttacaatcagctgtcagtcgatctctcagcacgtcgatatggcattggtcaggctgatccatcagttttccacgatgatcgacgatatcaaggccacacagaccgacatcaagttgtcccggtacaccgccggctccgcgtctccgacccctactttcaaaactagaaaacatagagattttaggtctagtgactttagtaggagctctcggggctcactgaatggagggaacagggtgaataacgccaaaaacaagagaaccaacaacgagaacaacaagaaggaaagtcgcaataaaaactccctcggacgaagcgaaagaagaactagcaaggttagtcggaaggggtccaaagatgtagtcgatcatatgactatacacatggacgactccgactcaataactgtatccgagcagagtgaaccctccgccgagtgttggcaaaacatgtacaagctgctcaacttctacagtctgattagcgacccaaccgggatcctggaaaaatcttcagaaaccttcggtcctgccggggtgcggtcccctacagagccaacttgcaaggtcgttttcgagaacgagcaggataattctagtctgacaaaaacgcagagaaagaggtcccttgtgacatccgagccccagcacgtgaccttgatcgtattcggtattggcatggtgaatagaactcaccttgaagccgacatcggcggccttacaatggaatctgagttgaagagaatacatggaagctttacactgaaagaaaaaatgaaagatgtactgcaccaaaaaatgaccgaaacatgtgcgaccgctcacatcgggggcgtcaatatcgtcttgctggaaggcatcactcccaacatccagctggaggacttccccacttcgccgacatcaacagccaaacaggaatttctgacggtggttaagtgcagcattgctaagtcgcaggccctgtacagcgctcaaaggggcctgaagaccaataacgctgccgtgttcaaagtcggcgctatcagtataaacataccacagcacccagccacccttcactccatgatggtcagaagcagccatcagctctctaagcaaataagtgatctaatccgacagccaagtaccgcacctcaaccggttaaagaggacatcgcgaccccactgccgtcagagaaaactcccacttcagtgaatcagacacccgtggaaacgaatgagtttccacagctcccagagggactggaaaagaagccgatagtgttgaaattttccgcgatgctggacggaatagcgattggcgccgccctgctcccctccttaaaagccgaatacaaaatgggccgaatgagatcccacggcatgaccggcgcccagacccgcttcacttttgagctgccaaaccatcgcctgcgcttcacatctaaggtgtccgccacagacatgagcactatccccccatcagcgtcgcttaacctgcccccagtaacgatgtctggtaagtatatcatggaggagcacgactcctatagtgaccaagtgtggtccatcgatgagcttccttccaaacaagggtattaccttcaggggaactatctccggtgcgtagccgaggtcggatcctttgaacataacctcacaaccgatcttctaaatcatctcgtgtttgtgcagaaagtgtttatgaaggaggttaacgaggtaatccaaaaggtctctggtggagagcagcccattccactttggaacgagcacgatggcaccgccgatggagacaagcctaaaatcctgctgtattctctgaatctgcagtttaaagggatccaggttaccgctaccacaccttccatgagagctgtgcggtttgaaaccggccttatcgagctcgaactgtccaaccggctgcagaccaaggcctctccgggatcctcctcatatctgaaactgttcggcaagtgtcaggtagacctgaatttggccctcgggcagattgtgaaacaccaggtatacgaggaggctggctccgatttccaccaggtggcctattttaagacacgaatcggattacggaatgctctgcgggaagagatttcaggttcctccgaccgggaagccgtgttaatcacactgaacagacccatcgtgtatgcgcaaccagtagcattcgaccgggctgttctgttctggctaaactacaaggctgcgtacgataactggaacgaacagcgaatggcactgcacaaggatattcatatggccaccaaagaggtggttgacatgctccctgggattcagcaaacttctgctcaggctttcggaaccttgtttctgcagctaacagtgaacgacctgggtatctgtctgccaataacaaacaccgcccagagcaatcacacaggtgatttggatactggctcagccctagtgctcaccattgagagtactctgattactgcctgtagttccgaatccttggtatccaaggggcactttaagaatttttgcatcagattcgcagatgggttcgagacttcctgggatgactggaagccagagattcacggcgacctggttatgaatgcctgcgttgtgcccgacggtacgtatgaggtctgctcccgtacaactggtcaggctgctgccgaaagctcgagtgctggaacatggacgctgaatgtgttatggaagatgtgtggaatcgacgtgcacatggatcccaatattggaaagcgcttgaacgccctgggaaacaccctcaccaccttaaccggggaagaggatatcgacgatatcgcggacctgaactcggtcaatatagccgatcttagcgatgaggatgaggtcgatacaatgtctcctaccatacatactgaagcaacagactaccgtcgccaagcagccagtgcaagtcaaccgggggaactcagaggtcggaagattatgaagaggatcgtggacatcagagagcttaacgagcaggcgaaggtaattgacgacctgaagaagctgggtgcgagtgaggggacgattaatcaggaaatccagcggtatcagcagcttgaatctgtggctgttaacgacatccggcgggacgttcgaaaaaagctgagacggtcctccatgcgggcagccagcctcaaagacaagtgggggctttcttataaaccgtcgtattcccgctccaagtctatctctgcttctgggcgcccacccttaaagcggatggagagggccagctctagggtcggtgagaccgaagagttacctgaaatccgagtcgatgccgccagtccagggccccgggtgacgtttaatattcaggatacttttcctgaggagacagaattggacctgttgagcgtaacaattgaggggcccagtcattatagttccaactcagagggctcctgttccgtgttctctagccccaagacacccggaggctttagtccagggatcccatttcagaccgaggaaggtcggcgggacgattccttgtctagcacctccgaagactcagaaaaggacgaaaaggatgaagatcacgaaagggaaaggttttatatctatagaaagccctcgcacacatccagaaaaaaggctaccggttttgccgcggtgcaccagctgtttactgagaggtggccgacgacaccggtgaacaggtccttgagcggcaccgctacagagagaaatatcgacttcgagctcgacatccgggttgagattgacagcggcaaatgcgtcctgcatccaacgaccctgctgcaagagcacgatgatatatcacttaggcggagctatgaccggtcttcccgcagtctcgaccaagacagcccctcgaagaaaaagaagttccagactaactacgcgtctaccacccacctgatgaccggtaagaaagtcccctccagtttgcagacaaaaccatcagacttggagactacggtgttctacatcccaggcgtggacgtgaagctccactataactccaaaactctgaagaccgaatcccctaacgcttccaggggatcctcacttccacgcactctatcaaaggagtctaaactgtacggaatgaaggactctgccacgtccccaccctccccccctctgccgagcacagtgcagtctaaaaccaataccctgctacctccccagcccccccctattcccgctgctaaggggaagggttctggtggcgtaaagaccgcaaaactttacgcctgggtggccctccaatctttacccgaggaaatggttatctcaccttgcctccttgattttttggagaaggccctagaaaccatacctattacgcccgttgaacggaactacaccgccgtgagtagtcaggacgaagatatgggccacttcgaaattcctgacccaatggaggagagtaccacgagtctggtctcatcctccacgagcgcgtatagctcttttccagtcgacgtggtcgtgtacgtgcgggttcagccatcacagattaaattctcatgccttcccgtgtcccgtgttgagtgtatgctaaagttacctagtctggacctggtattctcttctaatcgtggggaactcgagacactgggcacaacttacccagctgagaccttgagcccgggaggcaacgctacacagagcgggaccaagacatctgcatccaagaccggcataccagggtcaagtggactcggatccccattaggtagatcacggcactccagctcacagtctgacctgacatcctccagttccagcagcagcgggttgtcattcaccgcctgcatgagtgacttttctctgtatgtatttcatccctatggggcgggtaagcagaagactgctgtgtctggactaaccccgggctctgggggtctcggaaacgttgatgaggagccgacctcggtgacaggacggaaggactctctcagcattaacctggagttcgtcaaagtctctctcagccggatcaggcgctcgggcggcgcctcatttttcgagagccaatctgtctccaaaagtgcatccaagatggacactacactaatcaacatttccgcagtgtgtgatatcgggagtgcaagcttcaagtatgacatgcgtaggctgtccgagatactggcctttcctcgagcatggtaccgccgaagtattgccaggcggctgtttttgggagatcaaacgataaaccttcccacaagcggcccgggtacccctgattcaattgagggggtctcccagcatctgtccccagaatcaagtagaaaagcttactgtaaaacatgggaacaacctagccaatctgcctcttttacacacatgccacagtcaccaaacgtgtttaacgagcatatgacaaatagtactatgagccccgggaccgttggacagtcactaaagagccccgcctcaattcggtcccggagcgtaagcgattcctccgtacctcggagggacagtctgtcaaaaacttcaactccatttaataaaagtaacaaggccgctagccagcagggtacaccatgggagacactggtggtgtttgctatcaatctcaagcagcttaatgtgcagatgaatatgtccaacgtcatgggcaacacaacctggacaacatccggattaaagtctcaaggccgactgtcagtgggaagcaaccgggacagggagattagcatgagcgtcgggctgggccgtagccagttggattctaaaggcggagtggtgggcggcaccatcgatgtcaatgccttggagatggtggcccacatatccgaacatccaaaccagcagccttcacacaaaattcagataacaatgggctccacagaggctcgggtggattatatgggatcctctatcctgatgggcatcttttccaatgcggacttgaagttgcaggatgagtggaaagtcaacctgtacaataccttagattcctctatcaccgacaaatccgagatcttcgtccacggcgatctgaagtgggacatctttcaggtgatgatcagtagaagtactacccctgatcttataaaaatcggaatgaaattgcaggagttcttcacccaacagtttgacacctccaagagggcgcttagcacctggggaccagtgccttatttacctcccaaaactatgaccagcaaccttgagaagagctctcaggagcagttactcgatgcagcccaccatcgacactggcccggcgtcctgaaggttgtgtctggctgccatataagcctttttcaaatcccccttcccgaagatgggatgcagttcggtggatcaatgtcactgcatggcaaccacatgactctagcgtgtttccacgggccaaactttcggagcaagagctgggcactgttccacctggaagagcctaacattgcgttttggacagaagcccagaaaatctgggaggatggcagttccgatcacagcacctatatagtgcaaacattggatttccacctgggacataacaccatggtgaccaagccttgcggggccctggaatccccaatggccactataaccaagatcacgcggcgacggcatgaaaaccccccccacggcgtggcgtccgtcaaggagtggttcaactatgtcaccgcaactcgaaacgaggagctgaacctcctgaggaatgtggacgccaacaataccgagaactccaccactgtgaagaattcttctctgctgagtggctttaggggcggtagctcatataaccatgagacagagacaatctttgctcttcccaggatgcaactggatttcaagtcgatccacgttcaagaaccccaggaaccttctcttcaggatgcttcactaaagcctaaagtggaatgctccgtggtcaccgagtttaccgatcatatctgcgtgacgatggacgcagagctaatcatgtttctgcatgatctggtgtccgcatatctaaaggaaaaggagaaggcaatatttcccccccggatcctgagcacccgccctgggcaaaaatctcctatcattattcatgacgacaatagttccgataaagacagagaggacagcataacgtacactactgtcgactggagggacttcatgtgcaacacctggcacctggagccaaccctgcgcctgattagctggactgggcgcaaaattgatcccgtaggcgttgactacatactccaaaaattgggattccaccacgctagaaccaccatccccaaatggctccagcgtggggtcatggatcccctcgataaagtcctgagtgtgctgatcaagaagctgggcacagctttgcaggacgagaaggagaaaaaaggaaaggataaagaagagcactag

SEQ ID NO: 201241 - DNA, 2772 bp, synthetic construct
  misc_feature 1..2772: note = Description of Artificial Sequence: Synthetic coding sequence
  source 1..2772: mol_type = other DNA
atgagccagttcaagcggcagcggatcaaccccctgcccggcggccgaaatttctcgggcacagcgtccacttcactgctgggaccccctccaggtttacttaccccacctgtggctacggagctcagccagaacgcccgacaccttcaaggtggtgagaaacagagagtcttcactgggatagtgacttctttgcatgattacttcggtgtggttgacgaggaggtgtttttccagctgtcggttgttaagggccgcttacctcaactgggagagaaggtgcttgtgaaagccgcttacaatccagggcaggccgttccatggaatgctgtgaaggtgcagactctgtctaatcagcccctcctgaaatcgccagctccgccacttcttcacgtcgctgcactgggtcaaaaacaaggtatcctcggcgcacagcctcagctaattttccagccgcaccgtattccccctttgtttccacagaaacctctttctctgttccagaccagccataccctccatttgtcacatctcaacagatttcctgcgagaggtccccacggacgcctggatcagggaagatcggatgactatgactcgaaaaagagaaaacagcgagcaggaggcgaaccatggggggctaagaaaccccgccatgacctgcccccctaccgcgtgcatctgactccctatacagtagactcacctatctgcgacttcctggaactccagcggcgatatcgctccctgttggtgcccagcgactttttgagtgtccatttgtcgtggctgagtgcgtttccactgtctcagcctttctccctacaccatccgagtcgcatccaggtaagttctgagaaggaggccgcgcccgatgccggtgctgaacctattacagctgactcagaccccgcatactccagcaaggtcctgttactgtcttcaccaggtctagaggagctctaccgctgctgcatgctattcgtcgatgacatggctgaaccccgcgaaaccccggagcaccctctgaaacagatcaagtttctgctgggtagaaaggaagaagaggccgtccttgtcgggggagaatggtcccctagcctggacgggctggatccacaagcagacccacaagtcttggtccgcacagccatccggtgcgcccaggctcagacggggattgatttgtccggttgcacaaaatggtggcgattcgccgagttccaatacctgcagccaggacctccaaggagattgcagaccgtggtggtctatctgccggatgtttggacaattatgcctacattggaggagtgggaggctctttgtcagcagaaagcagcggaagctgctcctccgacacaagaggctcagggtgagacagagcctaccgagcaggcaccagatgcccttgagcaggccgctgatacctctaggcgaaatgcggagactcccgaagccacaactcagcaggaaactgatacagacctgcccgaagctccccctcccccacttgagcccgcggtgattgcccgtccaggctgcgtaaaccttagcctgcacggtattgtcgaggaccgcaggccaaaagagaggattagcttcgaggttatggtgttagccgagctctttctagaaatgctacagagggactttggctaccgggtgtacaagatgctcctgtctctacccgagaaggttgtatcaccgcctgagccggaaaaggaagaggccgcaaaggaggaagccactaaggaggaggaagcgattaaggaagaggtggtgaaagaaccaaaagacgaggcccagaatgagggaccagcgacagaatccgaggctccactgaaagaagatggcctgctgcccaaaccactctccagcggaggggaagaggaagagaaacccaggggcgaggcaagcgaggacctgtgcgagatggcactggaccctgagctgcttttgttgagggatgacggagaagaggaattcgccggagccaaactggaggactctgaagtaagatccgtggcctccaatcaatccgaaatggaattttcgtcactgcaggacatgccgaaggagttagatccatccgccgtgcttccactcgattgtctcctggcctttgtgttctttgatgccaactggtgcggatatctgcaccgaagagatctggaacgcattcttcttaccttgggtatccgtctgtctgccgagcaggctaaacaactggtgagtcgagtggtcactcagaatatttgtcagtaccgtagtctccagtattcaaggcaagaaggcctggacgggggactcccagaggaggtgctcttcggcaatctcgatctgctgccaccacctgggaaaagtactaaaccaggagcagcccccacagagcacaaagctcttgtgagtcacaacggatcactaattaacgtcggcagcctgttgcagcgggccgagcagcaggactcaggacggctctacctggaaaataagattcatactcttgagttaaagttagaagaatcacacaatagattctctgcgacggaggttacgaataaaacactggccgccgagatgcaggagctccgcgtaagactggccgaagccgaggagactgctcggacggctgaacggcagaaatctcaactccagcgtctgcttcaagagctgaggaggagattaactccactgcaactggagatccaaagggttgtggaaaaggcagatagctgggtggagaaggaggagccagcccctagtaactag

SEQ ID NO: 201242 - DNA, 2982 bp, synthetic construct
  misc_feature 1..2982: note = Description of Artificial Sequence: Synthetic coding sequence
  source 1..2982: mol_type = other DNA
atgggcgccgccggccggcaggacttcctgttcaaggccatgctgaccatcagttggttaaccctgacctgtttccccggagccacatctactgttgccgcgggatgccctgaccaatcaccagaattacagccatggaatccgggccatgatcaggatcatcacgtgcatattggccaggggaagaccctgctgctgacatcctctgccaccgtctacagtatacacatttctgaaggtgggaaactggtcattaaagaccacgatgagccaatcgtccttcgcactagacatattctgattgacaacggcggtgaactgcatgcagggagtgccctatgccccttccagggcaacttcacaatcatactttacggacgcgcagacgaagggatccagcccgacccctactacgggctaaagtatataggcgtcggcaagggaggcgctctggagttacatgggcaaaagaaactgtcttggacgttcttgaataagaccctgcaccccgggggcatggctgaagggggatattttttcgagcgctcttggggacatagaggggttatcgtacatgtgattgaccctaagagcggaaccgtgattcactcagatcgatttgacacctacagatctaagaaagagtcggaacgccttgtacagtatttaaatgccgttccagacggtaggattcttagcgtagctgttaacgacgagggcagccgaaacctggatgatatggccaggaaagccatgaccaaactgggcagcaaacacttcttacacctgggtttcagacatccatggtcgtttttaaccgtgaaaggtaacccatctagctcagtagaagatcacatcgaataccacggtcatcgcggaagcgctgcagcacgggtgttcaagttgtttcaaacagaacacggcgagtattttaacgtgtccttgtcatcagaatgggtgcaggacgtagagtggaccgagtggttcgatcatgacaaggtgagccagacgaaaggcggggagaagatcagtgacctctggaaggcacaccccggaaagatttgtaatcggccaatcgacattcaggctacaacaatggacggagtcaatctgagcacagaggtggtctacaagaaaggacaggattatcgcttcgcctgttatgatcgaggcagggcttgcagatcgtatcgcgtgaggttcctgtgtggcaagccagtaagaccaaagctcacagtgactatcgatacaaatgtcaattccacaatcctgaaccttgaagataacgttcaaagctggaagcctggcgacaccttagttatcgcgtcaactgactactctatgtaccaggccgaggaatttcaagttttgccatgtcgaagttgtgccccgaatcaggtgaaggtagcgggaaagcctatgtatctgcacattggcgaagagattgacggagttgatatgcgagctgaagttggccttttaagcaggaatattatcgttatgggtgaaatggaggataagtgctacccttaccggaatcacatttgcaatttttttgatttcgatacgtttggaggccacataaagttcgcactggggtttaaggcagcccacctggagggcaccgaactcaaacacatgggccagcagctcgttggccagtatcccatccatttccatctggctggcgacgtggatgagcgaggtggctacgatcctcctacgtatattagagacctgagtatacatcacaccttttcacgctgtgtgacagtgcacggaagcaacggactgcttattaaggatgtcgtggggtacaattccctgggacactgcttctttacagaagacggaccagaagagaggaacacctttgaccactgcctgggccttttagttaaaagcggaacacttctgccatctgatcgggactccaagatgtgtaaaatgattactgaagactcctatccggggtatatccccaaacctaggcaggactgcaacgctgtctcgaccttttggatggcaaaccccaataataatttgataaattgcgccgccgcgggtagcgaagagaccggcttctggttcatttttcatcatgtccctacaggaccctcggtcggcatgtactcacctgggtactccgaacatattccattgggcaagttctacaataaccgggcacattcaaactacagggccggcatgattatcgataacggagttaagaccacagaggcaagtgccaaggacaagcgcccatttctctccatcatttcagccaggtatagccctcaccaggacgctgaccccctcaagcccagggagcctgctattatcagacactttatagcctacaagaaccaggatcatggtgcttggctacggggcggagacgtatggttggacagctgtcgttttgcagataatgggatcgggctcaccttggccagtgggggcaccttcccgtacgacgacgggtctaagcaggagattaagaattctctgtttgtgggcgaatctgggaacgtcggtacagagatgatggataaccggatttgggggcctggggggctcgatcactctggtcggaccctgcccatcgggcagaattttcccattcgcggcattcagttatatgacggtcccatcaatattcaaaactgcacctttagaaagtttgtggccctggagggcaggcatacctccgctctggcatttcgcttgaataacgcctggcagtcgtgtccacacaataatgtcacaggcattgctttcgaggacgtccctatcacaagccgggtgttcttcggagagccaggcccctggttcaaccaactcgacatggatggcgacaagacttctgttttccacgatgtggatggatcagtgtcagagtaccccggttcctacctgaccaagaatgacaacaaatggcatagtctggcatcaaaggctgctagcggacctagcggctag

SEQ ID NO: 201243 - DNA, 4086 bp, synthetic construct
  misc_feature 1..4086: note = Description of Artificial Sequence: Synthetic coding sequence
  source 1..4086: mol_type = other DNA
atgggcgccgccggccggcaggacttcctgttcaaggccatgctgacgattagttggttgacactgacatgtttccctggggccactagcaccgttgcggcaggctgccccgatcagtcacccgagctgcagccttggaatcctgggcacgatcaggatcaccatgtgcacatcggacaggggaagacactcctattgacctccagcgctaccgtgtattccatacatattagcgaaggaggcaagctggtcattaaagaccatgacgagcctatcgttctgaggacacggcatattctgattgacaacggcggggaattgcatgccggctcagctctctgtccgttccaagggaacttcaccatcatcctttacgggagagccgacgaaggcattcagccggatccttattatggtctcaaatatattggcgttggcaaagggggagcactggaactgcacggtcagaaaaagctatcttggaccttcttaaataagaccctacatcctggaggaatggctgagggcggttactttttcgagcgctcttggggccatagaggcgtcatcgtgcacgtgattgatcctaagtcaggcacagttattcactctgacagatttgacacctacagaagtaagaaggagagcgaacgactagtgcagtatctgaatgctgtgcccgacggtcggattctctcagtggctgttaatgatgagggttccaggaacctggatgacatggcacgcaaagccatgacaaagttaggctccaagcactttctacatttgggtttccgacacccgtggtcctttctaacagtaaagggcaacccatcgtccagcgttgaagaccacatcgaatatcatgggcacagagggagcgctgctgcacgggtgttcaagctttttcagactgagcacggagagtacttcaacgtgtcactttcgagcgagtgggttcaggatgtcgaatggaccgaatggttcgatcacgacaaggtgagtcaaaccaagggaggggagaaaatttccgatctctggaaggcccatccaggcaaaatatgcaataggcctattgacatccaggccactaccatggatggcgtgaatctgagtaccgaggtcgtctacaaaaaaggccaggactacaggttcgcttgttatgaccgcggccgagcgtgtcgtagttatagagttagattcctgtgtgggaagcctgtgaggcctaagcttacagtcacgattgacaccaacgtgaacagcacaatcctgaacctcgaagataatgtgcagagctggaaaccaggcgacacattggtcattgcatccacagattattcaatgtaccaagcagaggagttccaggtgctgccgtgccgctcctgtgctcctaaccaagtaaaggtggccggcaaacccatgtatcttcatattggggaggaaatcgatggagtcgatatgcgggccgaagttgggttgttgagtcggaacatcattgtgatgggagagatggaggacaaatgttacccctacagaaaccacatttgtaacttttttgactttgatacgtttggagggcacataaaatttgctctcggatttaaggcagcccacctggaaggcacggagctcaagcatatgggccagcagctggtgggtcaataccctatccactttcatctggccggcgatgtagatgagcgaggaggttacgatccgcctacctacatcagagacctgagcatacatcacaccttctctaggtgtgttacagttcatgggtcgaatggcctgctaatcaaagacgttgtgggatataacagtttggggcactgtttttttaccgaggacgggcccgaagagagaaatacctttgaccattgtctgggtctactggtgaagagcgggaccctgctccctagtgatcgagactcaaagatgtgcaaaatgatcactgaagattcctatccaggatacattccgaagcccagacaggattgtaatgcagtctctactttctggatggccaatcctaataacaaccttattaactgcgctgctgctggatcagaggaaacaggattttggtttattttccaccatgtgcccactggcccctctgtggggatgtatagcccaggatactccgagcacatccccttgggaaaattttacaacaacagggcgcacagcaactaccgggccggtatgatcatcgacaacggtgtgaaaactacagaggcctctgccaaggataagagaccattcctgtccatcatctctgcccggtattcgccccaccaggacgcggatcccctcaaaccaagagagcctgctataatcaggcattttatcgcatataaaaaccaagaccacggtgcctggctacgggggggagacgtctggttagatagctgccggttcgccgataacggcatcggtcttaccctcgccagcggtggcacatttccttatgacgacggtagcaagcaggagataaagaattctctgtttgtgggagagagcgggaacgtgggcactgaaatgatggacaacagaatctggggcccaggaggattggaccattccggacgcaccctgccgattgggcagaactttcctatccgcggtatccagttgtacgatgggcccatcaatattcagaactgcacttttcgcaaattcgtggctctggaaggacgtcatacatccgctctggcttttcggttaaacaacgcttggcagtcgtgccctcacaataacgttacaggcatcgcgtttgaggatgtaccaataacctcgagggtgttttttggagagccggggccttggtttaatcagctggatatggacggtgataagacgagtgtatttcatgatgtagacggtagcgtgagcgaataccccgggagctacctcaccaagaatgataactggctcgtgcggcatcctgattgcatcaacgtgccagattggcgtggggctatatgcagcgggtgctacgctcaaatgtatatccaggcttacaaaacaagcaacttgcgcatgaagatcatcaaaaatgattttccaagccatcccctgtatctggaaggcgcgttaacgagaagcacacattatcagcagtatcagcccgtggtgacactccagaaaggttatacaatacactgggatcagacagctccggcagagctggcaatatggctgattaatttcaacaagggcgactggatccgcgtgggcctgtgctatcctcgcggcactactttttctatcctatccgatgtgcataaccgactcctgaagcaaacaagcaaaacaggagtatttgtccgtacattgcagatggacaaagtggagcagtcgtatccagggaggagtcactactattgggatgaggactctggtctgctgtttctgaagttaaaagcacagaacgagcgcgagaagtttgccttctgctccatgaagggctgcgaacggatcaaaattaaagctcttatcccaaaaaatgcgggcgtgtcggactgcaccgcgaccgcatacccaaagtttacagaacgagcggtggtagatgtaccaatgcccaaaaagctctttggatcccaactgaagaccaaggaccacttcctggaagtcaagatggagtcttcaaagcaacatttctttcatctgtggaacgactttgcgtatatcgaagtcgatggcaaaaagtatcctagcagtgaagatggtattcaagttgttgtgattgatggaaatcaggggagagtggtttcacacacgtcgttcaggaatagcatcctgcagggcatcccgtggcagttatttaactacgttgccactatcccagacaattcaattgtcctcatggcttctaaaggacgctacgtgagcaggggcccatggactagggtgttggaaaaactaggggcagatcgtgggctcaagctgaaggaacagatggcttttgttggatttaaaggcagctttcgcccaatctgggtcacactggacaccgaggaccacaaagctaagattttccaggtggtgccgattcctgtggtgaagaaaaagaagttgtag

SEQ ID NO: 201244 - DNA, 1947 bp, synthetic construct
  misc_feature 1..1947: note = Description of Artificial Sequence: Synthetic coding sequence
  source 1..1947: mol_type = other DNA
atggaggtgaagggcaagaagcagttcaccggcaagagcaccaagactgctcaggagaagaatagattccacaaaaattcagatagcggtagttctaaaacctttcctactcgaaaggtcgccaaagaaggggggcccaaggtgacttcacgcaacttcgaaaaatctataaccaaacttggtaaaaagggggtaaagcagttcaagaataaacaacaaggagacaaatcaccaaaaaataagttccagccagcaaataaatttaataaaaagcggaaatttcagcccgatggtcgatccgatgaatccgcagccaagaaacctaaatgggatgattttaagaagaagaaaaaagagctcaaacagagtaggcagctcagcgataagactaactatgacatcgtggttcgagcgaaacagatgtgggaaattctgagaagaaaggactgtgacaaggagaaaagagtcaagcttatgagcgacttgcagaagcttattcagggcaagatcaagacaatcgcttttgcccatgactcaacaagggtcattcagtgctatatacagtacggtaatgaggaacagcgaaagcaggcatttgaagagctccgcgatgacctcgtagagctgtccaaagccaaatactctcggaacatcgtgaaaaaatttcttatgtacggatcaaaacctcagatagctgaaatcattcggtccttcaaggggcacgtgaggaagatgctgagacacgccgaagcctccgcgatagtggaatatgcctacaacgacaaggctattctggaacagcgcaatatgcttaccgaggagctgtacggaaatacttttcagctctacaagtccgcagaccaccgaacgctggacaaagtcctggaggtgcaacccgagaagctagagctgataatggatgagatgaaacagatcctcaccccaatggctcagaaggaggcggtcattaagcacagtctcgtgcataaagtatttctggacttcttcacgtacgccccacccaaactccggagcgaaatgatagaggcaatccgtgaagctgttgtgtatctggcccacacacatgatggggcccgtgtggcgatgcactgcctttggcacgggacacccaaggaccggaaggtgattgtgaaaactatgaagacctacgttgagaaggtcgctaacgggcagtatagccacctagtgcttctagcggccttcgattgtattgatgacactaagctcgtgaagcaaatcattatttcagaaattatcagctccctgcccagcattgtgaatgataagtacggtcgaaaggtgctgctctacctactcagccccagagaccctgcccacaccgtgagagagataatcgaggtcctgcagaagggtgatgggaatgctcacagcaaaaaagacactgaggtccgccggcgtgagcttctggaatcaatcagccctgcactgctctcatatctgcaggagcacgctcaggaggtcgttttggacaaatctgcttgtgttctggtgagtgatattcttggttcagctacaggtgacgttcaaccaacaatgaatgccatcgcctctttggctgcgacaggtttgcatcctggagggaaggatggcgagctgcacatcgcagagcaccccgcaggccatctcgtactcaagtggcttattgagcaggataagaagatgaaggagaatgggcgcgaaggatgttttgctaagacactcgtcgagcacgtgggcatgaagaatctaaaatcttgggcctccgtaaaccgtggagcaattatcctctctagcctgctgcaatcgtgcgatctggaagtggctaataaggtaaaagccgccctgaagagcctgattcctaccctggagaagactaagtccacttctaagggcattgaaatactcttggagaaactgtccacatag

SEQ ID NO: 201245 - DNA, 339 bp, synthetic construct
  misc_feature 1..339: note = Description of Artificial Sequence: Synthetic coding sequence
  source 1..339: mol_type = other DNA
atgaagaaccaggtgtgcagcaagtgcggcgagggcacctacagcctcgggtcgggtatcaagttcgatgagtgggatgaactgccagcaggtttttcaaacattgcaacattcatggatactgtggtgggtccttcggactcaaggccagacgggtgcaataactcatcatggatccccagaggtaactacattgaatccaatagagacgactgcaccgtgagtctgatttacgcagtgcatctgaagaaatctggatacgttttttttgagtaccagtatgtggacaataacattttcttcgaattcttcatccagaatgatcagtgccaggaatag

SEQ ID NO: 201246 - DNA, 1842 bp, synthetic construct
  misc_feature 1..1842: note = Description of Artificial Sequence: Synthetic coding sequence
  source 1..1842: mol_type = other DNA
atgttcagcgccggcgccgagagcctgctgcaccaggcccgggagattcaggatgaagaactgaaaaaattttgtagcagaatttgtaagttactgcaagccgaggatctgggccccgacactttggacagcctccagaggctcttcttgataatcagcgccactaaatatagtagaaggcttgaaaaaacctgcgtcgatcttctccaggcaacattaggattgcctgcttgtcccgagcagctgcaggtcctttgtgcagcaattttgagagaaatgtcgccttcagatagcctatctctcgcctgggatcatacccaaaattcgcggcagttgtctctggtcgcttcggtcctcctcgcccaaggagacaggaatgaggaggtgcgtgctgttggacagggcgtgctgcgcgctctcgaatcccggcagcccgaaggccctagcctgcgccaccttcttcctgttatggccaaagttgtggtgctttctcctggtacactacaagaagaccaagcaaccctgctgtctaaacgtttggtcgactggctacggtatgcctcactgcaacaggggttaccacactcagggggctttttcagcacgccgcgcgcgcgacagcctggaccagtgactgaagtggacggcgcggtcgccactgacttcttcaccgtattgtcgagtggtcaccggttcacagatgatcagtggctgaatgtgcaggccttttcgatgttgagggcctggctgctccattccggcccagagggacccggaacactcgacactgacgatcgctcagagcaagagggttctacactgtcagtaatcagcgctacatcaagtgcaggaagattactgcctccaagagagcggctgcgggaggtcgccttcgagtattgtcagaggcttatagagcaatccaatagacgcgcgctccggaaaggagattctgacctgcagaaggcttgcctggtggaggcagtgctcgtgctggatgttctgtgtcgccaggatccgtctttcctatacagaagcctgtcgtgtctgaaggcattacacggtagggtgcgtggtgatcctgcgagcgtccgagtgcttttacctctcgctcacttttttctgagccacggagaggccgcagccgtcgattctgaggctgtgtatcagcatctcttcacaaggatcccagtggaacagttccacagccccatgctcgccttcgagttcatccagttttgtcgggacaatctgcacctttttagcggacacttatccacgttaagactgtccttcccgaatctatttaaattcctagcatggaatagcccgcctttgacttccgaattcgtcgccctgttgccggcgctggtcgacgcaggtacagccctggaaatgcttcatgcccttctggacctgccctgtctgaccgcagtgcttgacctgcagctgcgctccgcaccagccgcctcagaacgcccactatgggatacgagcttgagggccccgtcctgcctggaagcattcagagacccccagtttcagggactctttcagtatctgctccgccctaaagcatctggcgctaccgaaaggctcgctcctctgcaccagctgctccaacctatggctggctgcgcaagagtcgcacagtgtgcccaggccgtccctacgctactgcaggcctttttctctgccgtaacacaagtcgcggatggaagcctgataaaccaactggccctgctactgctgggaagatccgactccctctacccggcccctggatacgccgcgggcgtgcaccgacccgatgcctgcagaccaatactcgttcctttatag

SEQ ID NO: 201247 - DNA, 918 bp, synthetic construct
  misc_feature 1..918: note = Description of Artificial Sequence: Synthetic coding sequence
  source 1..918: mol_type = other DNA
atggagaaggagacctacaagaccgccaagctgatcctggagcggtttgatcccgattcaaagaaggccaaggagtgtgagcctcccagcgcaggggctgccgttacagcccggcctggacaagagatccgccaacgcaccgcggcacagcgcaatctgtcacctacacccgccagcccaaaccaaggacctccaccacaggttcccgtgtctcccggcccccccaaagattcatcggcacccggaggaccaccggagagaaccgtgaccccagctctgtcgagtaatgtcctgcctcggcacctgggttctcccgcaacctctgttccgggaatgggactgcaccccccaggcccacccttggcccggccaatcctgccacgagagcggggcgcgcttgataggattgtggaatacctcgtgggcgatggcccgcaaaacagatatgccctgatctgtcagcagtgtttcagtcataacggcatggcgctcaaagaggaatttgagtacatagctttccggtgtgcatactgtttcttcctgaacccagcacgcaagaccagaccccaagctcctaggctccccgagttcagcttcgagaagaggcaggtcgtggaaggatcgtcttcggtagggccacttccatctggatcagtcctttccagtgataatcagttcaatgaggaaagtcttgaacacgacgttctggatgacaacaccgagcagaccgacgacaagatccctgctacggagcagactaaccaggtgatcgagaaggcctccgactcagaggaacctgaggagaagcaggaaacggagaatgaggaagctagtgtaatcgagactaatagtactgtccccggagcagattccatcccagatcccgagctgtctggggaaagccttactgctgagtag

SEQ ID NO: 201248 - DNA, 2589 bp, synthetic construct
  misc_feature 1..2589: note = Description of Artificial Sequence: Synthetic coding sequence
  source 1..2589: mol_type = other DNA
atgcacagcagctggatcccccggggcaactacatcgagagcaacagagatgactgtacggtgagtcttatttacgctgttcacttaaagaaatccggctatgttttctttgaataccaatatgtcgataataatatattctttgaatttttcatccagaatgaccagtgccaagagatggatacaaccaccgacaagtgggtgaaactgactgacaacggggaatggggtagccacagtgtcatgctcaaaagcggtacaaacattttgtattggcgaactactggtatcctgatgggatcaaaggcagtgaagcctgtgctggttaagaatataacaatagaaggggtagcctacacctccgaatgctttccatgcaagcctggtacctttagtaacaagccagggagcttcaactgccaggtttgcccaagaaacacatactctgaaaagggcgcaaaagaatgcatccgctgcaaggacgactcgcagtttagcgaagaagggtcttctgagtgtacagagcgcccgccctgtaccaccaaggactacttccagatccatacaccctgtgacgaagaaggaaagacccaaatcatgtataaatggatcgaaccaaagatatgtagggaggaccttaccgacgcaataagactgcctccgtccggcgagaagaaggactgtcctccttgtaaccctgggttttacaataacggctcgtcatcatgccacccttgtcctcctggaacattcagtgacggaacaaaggaatgtcgtccatgccccgctgggaccgaacctgctcttggattcgagtataagtggtggaatgtgctgccaggaaatatgaagacaagctgcttcaacgtgggcaattccaagtgcgacggcatgaatgggtgggaagtagctggcgaccacattcaaagtggcgctggaggttccgacaacgattatctcatccttaatctacacattcctgggtttaaaccccccactagcatgacgggggcaactgggagcgagctaggccgcataacctttgtgtttgagacactgtgttccgctgactgtgtgctgtatttcatggtcgacatcaatcgcaagtccaccaatgtggtggagtcgtgggggggtaccaaggaaaagcaagcctacacacatatcatttttaagaatgccactttcacattcacatgggctttccaaagaacaaatcaggggcaagataaccgtcgcttcatcaatgatatggtgaaaatctacagtattaccgcaaccaacgccgtggatggcgtggctagcagctgccgggcgtgtgccctaggctccgaacagtccggctcatcatgcgtgccttgccctccagggcactatattgaaaaggagaccaaccagtgcaaagaatgccctcccgacacttatctctccatccaccaggtgtatggcaaagaagcatgcataccctgcggacccggctcaaagaataaccaggatcacagcgtttgctattccgactgctttttctatcatgaaaaggaaaaccaatctctgcattatgattttagtaacctgagcagtgtgggctctctgatgaacggaccaagcttcacttctaaaggtactaagtattttcactttttcaacatcagtctctgtgggcacgaggggaaaaaaatggccttatgtaccaacaatataaccgattttaccgtaaaggagatcgtggcaggaagtgatgactacactaatctggtcggagctttcgtgtgccagtccacgattatcccaagcgagagtaaggggtttagggctgccctgagtagccagtccatcatcttggcggacaccttcattggagtcacagtcgaaacaacccttaaaaacattaatattaaggaggatatgtttccagtgccaacctctcagattcccgacgtacactttttttataagtcatctacagccacaaccagttgtattaatggccggtctactgccgtgaaaatgcgctgcaaccccaccaagagcggcgctggagtgatatcagtgcctagtaagtgtcccgccggcacctgtgacggttgtaccttttacttcctttgggaatctgcagaggcctgccccttgtgcacagaacatgactttcacgaaattgagggcgcatgcaagcgcgggtttcaggaaactttgtacgtctggaatgagccaaaatggtgtattaagggcattagtctgccagagaaaaaacttgctacttgtgagaccgttgatttctggctgaaggtgggggctggagtgggcgccttcacagcagtcctgttggtcgccttgacatgctatttctggaagaaaaatcagaaactggagtacaaatacagtaaactcgtcatgacaactaactctaaagaatgcgaactccctgccgctgactcttgtgccatcatggagggggaggacaatgaagaagaagtggtgtacagcaataagcagtctctcctcgggaagctcaaaagcttagccacaaaggagaaagaagaccatttcgagtccgtccaactgaagacaagcagatcccctaatatctag

SEQ ID NO: 201249 - DNA, 5853 bp, synthetic construct
  misc_feature 1..5853: note = Description of Artificial Sequence: Synthetic coding sequence
  source 1..5853: mol_type = other DNA
atgcccggcgcccggcggcggcggcggggcgccgccatggagggcaagccacgcgctggagtggctctggcccccggcccctctggccggcgacctagcgcaagatgcgcacgacgtcgacgtcctgggctgctcctaccaggactctggttgctgctgctggctcggcctgcctcctgtgctcctgacgaattgtcccctgagcagcacaatctgtcattgtacagtatggagctagtacttaagaagtcaactggtcacagcgccgcccaggtggcattgacggagaccgcgccaggaagccaacactcatccccccttcatgtgactgcaccaccatcagcaaccacattcgacactgccttcttcaaccagggaaagcaaaccaaatccactgctgaccctagtattttcgtggctacttacgtgtcagttacctcaaaggaggtagcggtgaacgatgacgagatggacaacttcctcccagacacacattggacaacgcccagaatggtctcaccgatccagtacatcacggtgtctccacctgggctgcctagggaagctctcgagcccatgctgacgccctctctcccaatggtgagtctacaggatgaggaagtgaccagcggctggcaaaacactactagacaacctgccgcttacgccgaatcagccagccacttccacaccttcagaagtgcgtttaggacctcagagggaattgtgcccacacccggtagaaatctggttctgtacccaacagacgcttactcacacttgagctctaggaccctgccggagatcgtggcctctttgacagaaggcgtggagactaccctttttctctcctccagatccttaatgccacagccacttggggacgggatcacaatccccctgcctagcctgggtgaagtgtctcagccccccgaagaggtttgggctactagcgccgatagatacacggacgtgactactgttctcagccaatccctggaagagacaatctctcctagaacctatccaactgtaacagcatctcacgcagccctcgctttctccagaactcacagcccgctcctgtctacaccactggcatttgcctcctctgcatctcccactgatgttagctcgaatccttttctgccttctgattcatcaaagacaagcgaactacactctaacagcgcactccccggtcctgttgacaatacccacattctgtccccagtgtcctcattccgcccatatacttggtgcgccgcctgtactgtgccttccccccagcaggtcctggcgacctcgctgatggagaaggacgtcggtagtggcgacggcgctgaaaccctttgcatgacagtgctagaagaaagcagtatctctttgatgagcagcgtggtggctgatttctccgagtttgaagaggacccacaggtttttaacacactttttccttcacggcctatcgttcccctctcaagtcgctccatggaaatctctgaaacgtcagtgggtatttcagccgaggtcgacatgtcatcggtcacgaccacccaggtaccccctgcccatgggcggctcagcgttcctgcatcgttggatcccacggcaggcagccttagcgtggcagaaacccaggtgacaccctcatctgtcaccacagcttttttttccgtcatcaccagtattctgctcgacagctccttctctgtgatcgctaacaagaacaccccatctctcgctgtccgagatccatccgttttcacaccttatagtttagttccgtcagtggagtccagcttgttttccgatcaggagcggtcaagtttttccgagcacaagccacgaggcgcactcgacttcgcctcttcctttttctctaccccaccgctcgagctctcaggatccatatcctccccatcagaggcacccgcttcactcagcctgatgcccagcgatctgagtccttttacaagccagagcttttcacccctggtggagaccttcacgttgttcgattcctctgacttacaatctagccaactgagtctacctagttcaaccaatcttgagttttcacagttacagcccagtagtgaattacctctaaacacaattatgctgctgccttcacggtctgaggtgtctccctggagttcttttcctagtgactctctcgagttcgtggaggcgtctacagtgtctctgaccgactccgaagctcattttaccagtgcctttatcgagactactagctatctggagtcaagcttgatctcccatgaaagcgccgtaactgccctggttcccccaggaagcgaaagttttgacattttgacagccggcatccaagcgacaagcccactcactacagtgcatactaccccgattctcaccgaaagctcgttgttctcgactctaaccccaccggacgatcagataagcgccctagacggccatgtctctgttctggcttcttttagcaaggccattcccactggaacagtccttatcactgatgcatacctgccatctgggagtagcttcgtctccgaagctacaccgtttcctctccccaccgagttgacggtagtagggccttccctcacccctactgaggtcccattaaatacatctaccgaagtgtccacgacatccaccggagccgctacaggcgggccactcgattctactctcatgggagacgccgctagccaatcccccccggaatccagcgccgccccgcccctgcctagcctcagaccagtcacagcatttacccttgaagccactgtggatactcccaccttagccaccgctaagccaccatacgtctgcgatattaccgtgcctgacgcctacctgatcaccactgttctagctaggagagccgttcaggagtatatcatcaccgccatcaaagaggtactgaggattcactttaatcgggcagtggaactaaaggtatacgaattgtttacagactttacatttctggtcacctcaggtccatttgtgtatactgcaatttcagtcatcaatgtgctcatcaattctaagctcgttcgtgaccaaacaccactgatcctgagtgtgaagccgtccttcctcgtgcctgaaagtagatttcaggttcagacagtactccagtttgtgcctccttcggtcgacactggcttttgcaatttcacccaacgaatcgaaaaaggcctgatgaccgccctctttgaggttagaaaacaccaccagggtacctataaccttaccgtacaaattcttaacataaccatctcctcaagtcgtgtgacacctcggcgcggcccagtgaacatcatatttgcagtgaagtcaactcaggggttcctgaatggcagcgaagtttcagaactgctgcgtaacctgtccgtcgtggagtttagtttctatttggggtaccctgtgttacaaatcgccgaaccctttcaataccctcaattgaacctgtctcaactcctcaagagtagttgggttagaacagtactcctgggggtgatggagaaacagttgcaaaacgaggtctttcaagccgagatggagagaaagctggcacaattactatctgaggtttctacacgccggagaatgtggcggagagctacggtcgctgccggcaattccgtcgtgcaggttgttaatgtttctcggctggaaggggacgataacccggtgcaattgatatattttgtggaagatcaggacggcgagaggcttagtgccgttaaatcttcagaccttattaataagatggacctgcagagagccgccatcattctgggttataggatccagggagtgatcgctcaacctgtggatcgcgtaaaaagaccgagccctgaaagccagtccaataatctgtgggtaattgttggcgtagtaattcccgttctagtggtgatggtgatcgtggtgatcctctactggaaactctgtcggacagataaactcgactttcagccagatactgtagccaacattcaacagcggcagaagctgcaaatcccaagtgtcaaggggttcgacttcgccaaacaacacctcggacagcacaacaaagacgacattctgattattcatgaaccagcccccctgccgggcccattgaaagaccacaccaccccatctgaaaacggcgacgtgccgtcccccaagagtaaaatccccagtaagaacgtccgacatagaggtagggtttcgcccagcgatgcggactctacagtgtcagaggaatcctccgagcgcgatgccggcgacaagactcctggggctgtaaacgatgggcgaagtcatcgggcgccacagtctgggcctcctctccccagttcgggcaatgaacaacacagctcagcctctatcttcgagcacgtagataggatcagcaggccccctgaagcgagtcgccgagtgccctccaaaatccagctaatcgccatgcagccaatcccagcgccaccggtgcagcggccgtctcctgcggatcgggtggccgagtctaacaagattaataaggagattcagacagcccttcgtcataaatcagaaattgagcaccacaggaataagattcggctgcgcgctaagcgacgcggacactatgaattccccgtggttgatgacctgtcctcaggcgatacaaaggagaggcatcgagtctaccgccgagctcaaatgcagattgataaaatactggatccaacagcgtccgtacctagcgtattcatcgaacccaggaagtcttcgagaataaagcgtagcccaaaacctcggaggaagcatcaagttaatggttgtccggccgacgcagaaaaggatcgcctgataactacggacagcgacgggacttatcgtaggcccccaggcgttcacaattccgcatacataggttgcccttcagacccagacttgcccgccgacgtccaaacaccttctagcgtggagctgggccggtatcccgcgctaccatttcccgcgagccagtatatccctcctcagccttcgatagaggaggcccgccagacaatgcacagtctgcttgatgatgctttcgccctcgtcgccccaagctctcaaccagcctctactgcaggggtgggccccggggtcccccctggattgcctgctaactcaaccccgtcacaagaagagaggagggctactcagtggggtagcttctattcccccgcccagaccgcaaataatccgtgctcaaggtatgaggattacgggatgacaccacctacgggcccgttaccccggcctggctttggcccgggcctgctccagtccactgaacttgtgccccccgatccccagcaaccccaggctagcgccgaggccccattcgccgctcgagggatatactccgaggagatgccctccgtggcaagacctcgacccgtcggaggcaccacaggtagtcagattcaacatttaactcaagtgggtattgcctcaagaataggtgcacagcctgtcgagatacccccctctagggggagccaatatggagggcccggctggccaagttacggcgaggatgaggcgggccgcagagaagcgacacatatgttaggacatcaggagtactcatcctcccccctctttcaggtaccaaggacttccggaagagaaccttctgctcccagcgggaatctgccacaccgcggccttcaggggcccggccttggctatcctactagctcgacggaggatttacagcccggtcattccagtgcctcattgattaaggccattcgcgaggagttgctcaggctctcccaaaaacaatctactgttcaaaattttcattcgtag

SEQ ID NO: 201250 - DNA, 357 bp, synthetic construct
  misc_feature 1..357: note = Description of Artificial Sequence: Synthetic coding sequence
  source 1..357: mol_type = other DNA
tgaaagagcaacggcaagaccgccatcggcgaccccggccgggccaatatgcctggctataacgaggactcccggagcactttttttgacaaaaagtattccaacatgagcaccctgggtaataacggaccaacacacaagaagttgtaccgtcacaaaagctcctccaaagctctgagggatgagaagtgtaagggcaaacacatggagagagagcaggtacataaggacgaatccggcacggcaagttttgaaaagctcagagacagcgactacaatctgctaaaagccgaaaccaccttttgggtcctgccggtctttgaagaggaaaccaggattttccagaaggatatttag

SEQ ID NO: 201251 - DNA, 3084 bp, synthetic construct
  misc_feature 1..3084: note = Description of Artificial Sequence: Synthetic coding sequence
  source 1..3084: mol_type = other DNA
atgcgggtgagccacaccttccccgtggtggactgcaccgccgcctgttgcgatctctccagttgcgatcttgcatggtggttcgagggtcgttgctacctggttagttgtccccacaaggaaaactgcgagcccaaaaagatggggccgattagatcctaccttacatttgtattgcgacccgttcagcgccccgcccagctgcttgactatggcgatatgatgctgaacagaggctcccctagcggcatctggggtgacagccccgaagatattcgcaaggatctgacctttctgggtaaggattgggggttggaggaaatgtcagaatattcagacgattacagagagctggagaaggacctgctgcagccctctggcaaacaggagccacgggggtctgctgaatataccgactgggggctgctgcccggaagtgagggggcatttaactccagtgtgggtgacagccccgctgtgcccgctgagactcaacaggatcccgaattgcattatctgaacgagtccgcaagcacacctgcgccaaagcttcccgagcggagtgttctgcttccattgcctaccacccctagttcgggcgaggttttggaaaaggagaaggctagccagcttcaggagcaatcctcaaatagctccgggaaagaagtgctaatgccttcccattccctaccacccgccagcttggaactttcctctgtgactgtggagaagtctccggtgctaactgtgacgcccgggagcacggaacactccatccccacaccacccacgtccgcagcaccgtcggaaagcaccccgtctgagctacctatttcacctacaactgcccctagaacagtgaaggaattaacagtcagtgccggggataacttaatcatcaccctaccagataatgaggtggagttgaaggccttcgttgccccagctccaccagtggagactacttataactacgaatggaatcttatatctcacccgaccgactatcaaggggaaatcaaacaggggcacaaacagacccttaatctgtcccagctgagtgtcggtctatatgtctttaaagtgactgtctccagcgagaacgccttcggtgaagggttcgtcaatgtcactgtcaaacccgcccgcagggtgaacttaccccccgtcgctgtagtgagcccccagctgcaggagttgaccctgcccctgacatcggctttaatcgatggatcacaatccacagacgacaccgagattgtgagctatcattgggaagagatcaacggaccattcatcgaggagaaaacgtctgtagatagccccgtactcagactaagtaatctggacccgggtaattatagtttccgcctgacagtgaccgattctgacggtgctaccaatagtaccaccgccgctcttattgttaacaacgctgtcgattatccccccgtggctaatgctggccctaaccacacgataaccctaccacagaattccatcaccttaaacggaaaccagagttcagacgatcatcagattgtgctgtacgaatggtcgttgggcccgggaagtgagggtaaacacgttgtaatgcaaggagtccagaccccatatctgcatctctctgccatgcaggagggagactacacgtttcagctgaaggtcactgattcttcaaggcagcagtccactgcggtggtgacagtgatcgttcagcctgagaataaccgacctccagtggctgttgcgggccctgacaaagagctgatattcccagtggagagtgcaaccttggacgggagctcgtccagtgatgatcacggcattgttttctaccattgggagcacgttcgcggtccgtcagctgtcgaaatggaaaacatcgataaagctatagctactgttaccggactgcaggttggaacctaccacttcagattaacagttaaagatcagcagggcctctctagtacttctaccttaaccgtggccgttaaaaaggagaataactctccacctcgtgcaagagctggagggaggcatgtcctggtgttgccgaacaacagtatcactttagacggaagccgctctaccgatgatcagcggattgtatcatatctgtggatccgggatggccagagtcctgcagctggcgatgttatcgatggtagcgaccactctgtggccttgcagctgaccaacctggtggagggcgtctatacctttcatcttcgtgtaactgattctcaaggcgcgtcggacactgatactgctaccgtggaggttcagcctgatccacggaaatcaggcctggtagagcttacactacaggtcggagtgggccaattgaccgagcagcgaaaggataccctggtacggcagctcgcggtgctcctgaatgttctagattccgatatcaaagtgcagaagattcgggcccacagtgaccttagtacagtgattgtattctacgtgcagagccgccccccttttaaggtgttaaaggccgcagaagtggcccggaatctgcatatgcgtttgtccaaagagaaagcggacttcctgctctttaaagtcctgagggtcgatacagcaggctgcctgctgaagtgctccggccacggtcactgtgaccccctcacaaaaaggtgcatatgcagccatctctggatggagaatctgattcaaagatacatttgggacggcgagtccaattgcgagtggagcatcttttacgtgaccgtacttgcttttacacttatcgtgctgactgggggctttacctggctgtgtatctgctgctgcaaaagacagaagcgtacaaagatcagaaaaaaaactaaatataccatcctcgacaacatggacgagcaggaaagaatggagctaagacctaaatacggcataaaacatcgaagcaccgagcacaactcaagtcttatggtgagcgagtctgaatttgattccgatcaagatacaatcttttctcgtgagaagatggagcgcgggaatccaaaagtgtctatgaacggatcaatcaggaatggggctagcttcagctattgctcaaaagacaggtag

SEQ ID NO: 201252 - DNA, 1821 bp, synthetic construct
  misc_feature 1..1821: note = Description of Artificial Sequence: Synthetic coding sequence
  source 1..1821: mol_type = other DNA
atgggcaacacctgccgggtgtgctaccagctggaggccatcaagaggtcaaacgaaatgagcaacgttatgggtaacacaacgtggactacctccggcctgaagagccagggacgactttctgttggatctaaccgagaccgggaaattagtatgtcagtgggattgggcaggagccaactcgacagtaagggcggtgtagttggaggcaccatcgacgtcaacgcactggagatggtcgcacacatctccgagcaccctaatcagcagccaagtcataaaatccagatcacaatgggctcaacagaagcccgggttgattatatgggatcttctattttgatggggattttttccaatgccgacctgaaactccaagacgagtggaaggtgaacctatacaataccctagactcatccattacggataagtccgaaatcttcgttcacggcgaccttaaatgggatattttccaggtgatgatctcccgcagtaccactcccgatttgatcaagattggaatgaaactgcaggagttcttcacacagcagtttgacacttccaagagagcgttaagcacatggggtccggtaccgtatctccctcccaagacaatgacctcaaaccttgaaaaatctagtcaggagcagttactcgacgccgcccatcatcgacactggcctggcgtgctcaaagtcgtgagcgggtgtcatattagcctgttccagatcccccttcctgaagacggcatgcagttcggaggttccatgtcactccatgggaatcacatgaccttagcctgtttccacgggcctaattttcgctctaaaagttgggcgctcttccacctggaggaacccaacattgccttctggacagaggcacaaaaaatttgggaagacggctcgtccgatcattcaacatacatagtgcagacattagatttccatctgggccataacacgatggttactaaaccctgtggtgcgttagagtcccccatggcgactatcactaagataacccgccgacgtcacgagaaccccccgcacggcgtggcttctgtgaaggagtggtttaactacgttactgccacaaggaatgaagaattgaatttattacgaaacgtcgatgctaacaacacagaaaattcaactacagtcaaaaacagcagtctgctgtctggattccgggggggctccagctacaatcacgagactgagaccatctttgccttgccccgtatgcaactcgactttaaatcgattcatgtgcaggaaccccaggaacctagcttacaggatgctagcctgaagcctaaagtagagtgttctgtcgtcaccgaattcaccgaccatatttgcgttacgatggatgctgagctgatcatgttcctgcacgacctggtttccgcgtacctgaaggaaaaggagaaggccattttccccccaaggattctgtctaccagacccggacagaaaagtcctatcatcatccatgatgacaactcctccgacaaggatagagaggactcaatcacctacaccacggttgattggagggattttatgtgcaacacctggcacctggagcctaccctgcgcctcatatcctggactggccgcaagattgacccagtgggagtcgactacatattgcagaaactgggtttccaccacgcaagaactaccatcccaaagtggttgcagcggggcgttatggatccacttgacaaggtgctaagcgtccttattaagaagttaggcactgccctccaggacgagaaggagaaaaagggaaaagataaagaggaacattag

SEQ ID NO: 201253 - DNA, 5805 bp, synthetic construct
  misc_feature 1..5805: note = Description of Artificial Sequence: Synthetic coding sequence
  source 1..5805: mol_type = other DNA
atgcccggcgcccggcggcggcggcggggcgccgccatggagggcaagccccgcgctggggtcgcccttgctcctggcccctctggccgaagaccgtctgcacgctgtgcccggaggcgccggcctgggttgctgcttccagggctgtggcttcttctcctcgcgcgacctgcctcttgcgcacctgatgaactgtctcccgaacagcacaatctctccttatactcgatggagctggttctgaagaagtctacagggcactcagcagcccaggtggcacttactgagacagcccccggctcccagcattcctctcccctccatgtgacagccccaccatcagcaaccacatttgacacagctttcttcaatcagggaaagcaaacaaagagtacggccgacccctctatcttcgttgcaacttatgtctcagtaactagcaaagaggtggctgtgaacgacgatgagatggataactttctgccagacacccactggactaccccccggatggtcagcccaatacagtacatcacggtttcccctcctgggctgccaagggaggcactggagcctatgttgacgccatccctgcccatggtcagccttcaggatgaggaggttacatcaggatggcagaataccacacggcaaccagccgcttatgcggaaagcgcaagccacttccacacatttcgatctgcatttcgaacctccgagggtattgtccctactcccggtcggaacttagtgctgtaccccactgatgcttatagtcacctctcatcccgaaccctacccgaaattgtggctagtctcacagagggcgtcgagactaccctgtttttaagtagcagatctctgatgccacagcccttgggtgatggtatcactatcccgctgccttctctgggtgaggtctcccagcctccagaagaggtatgggccacaagcgccgatcggtatactgatgtaacaacggttcttagtcagtctctggaagaaacgatttccccgcgcacataccctactgtcacagcctcccacgccgcgctcgctttctcacggacgcatagcccattactcagtacaccgttagctttcgcttcgagtgcttccccaacggacgtttccagcaacccattcctccccagcgatagtagcaagacgagcgaactccatagtaattctgcactccctggtcctgtggacaacactcatatcctgagtcccgtctcgtcttttcgcccctacacctggtgcgccgcatgcaccgtaccctctccccaacaagttttggctacctcactcatggagaaggatgtcggatcgggagatggggctgagaccttgtgtatgactgtgctggaggagtctagtattagtctgatgtcttctgtcgtggctgacttctctgagttcgaggaagatccccaggttttcaatacgctgtttccttctagaccaatcgtccctcttagcagtagatcgatggagatatctgagacctccgtagggatttcagccgaggtcgatatgtcaagcgtgactaccactcaagtccctcccgcccatggaaggttatctgtccctgccagcctcgaccctacagccggatctctgtcggtcgccgagactcaggtcacaccaagctctgtcactaccgccttcttcagcgtaattacgagtattctactcgatagctcatttagtgtaatcgctaacaagaacactcccagcttggctgtgagggacccatccgtgttcaccccctactccctggttccaagcgtggagtcttcactattctctgaccaagaaagaagttcctttagcgaacacaagccacggggtgccttagactttgcttcaagctttttttctacgcctcctctggagcttagcgggagcataagctccccttccgaggccccagcttccctgtcacttatgccgtcagatctgtcacctttcacctcacagagttttagtcctctggtggaaacatttactctctttgattcatctgacctccagtccagccaactgtcgctgccttcctcgaccaatcttgagttcagccagctgcaaccgtcaagtgaattgcctctgaacacgataatgttgttgccttcgcggagtgaagttagcccatggtcctcttttccctcagattccctcgagttcgtagaggcctccaccgtgtccctgacggactcagaggcacatttcacttctgcctttatcgaaaccaccagttacctcgaaagtagcttgatcagccacgagtccgccgtgaccgccctcgtcccgcccggctccgaatcatttgatattcttacggccggcatccaggcaacctctcccctgaccaccgtacacaccaccccaatactcactgagtcatccctgtttagcaccctgacccctccagacgaccaaattagtgccctagacggccacgtcagcgtactggcaagtttctcgaaggcaatacccactggcactgtgctgataaccgacgcctacctacccagcggtagtagttttgtttccgaagcaacaccttttcctctgcctacggaattgaccgtcgtaggtccctccctaactccaactgaagttccactgaatacaagtactgaggtgagcacaacaagcactggtgccgctactgggggaccactcgactccactcttatgggcgatgccgcttcacaatcaccacccgaaagctctgcagcgccaccattaccttccctgaggcccgtcactgcatttactctggaagcaactgtggacaccccgacactcgcaacagccaagcccccctatgtctgtgatattacggtgcctgatgcgtacttgattacaacggtattggctagaagggccgtacaggaatatataataacagcaataaaagaggttctgaggatccatttcaatagagccgtagagctaaaggtctatgagctgttcactgacttcactttcctggtcacttccggaccattcgtgtatacggctattagcgtaattaatgttctaatcaacagcaagctggtgagggatcagacaccactcattctcagcgttaagcccagttttctggtgccggagtcccgattccaggtacagactgtcctccaattcgtcccaccctccgttgacaccggcttttgcaacttcacacaaagaattgagaagggtctgatgacagcactgtttgaagtgcgcaaacaccatcaaggcacctataacctcaccgtgcaaatcctgaacataaccatcagttcatcaagagtgacgcccaggagaggacccgtgaatattatcttcgccgtgaaaagtactcagggttttttgaacggctctgaggtgagtgagctgctcagaaatctctccgttgtggaattcagcttttacctgggatacccagtgctgcaaatcgccgagccgttccagtatcctcaacttaacctcagtcagctgctgaagagctcatgggtcaggacagtgctgctaggagtcatggagaaacagctgcagaatgaggtttttcaggccgagatggagcgaaaactcgcacagctgctttccgaagttagcaccagaaggaggatgtggcgcagggcaactgtggcagccgggaacagcgtcgtgcaggtggtaaatgtgtcacggctagagggtgatgataatcccgtgcagttgatatacttcgtggaggatcaggatggagagcgtctcagcgctgtgaaaagcagcgatctgattaacaagatggacctacaacgggcagccataattcttgggtataggatacagggtgtgatcgcgcagcccgtcgatcgcgttaagcggccctcgccagaaagtcagtcaaacaatttatgggtgattgtgggcgtggtgattccagtgctcgtggtgatggtgattgtggtcatcttatattggaaattgtgcaggacagacaagctcgactttcaacctgataccgttgcgaacatccagcagagacagaaactgcagatcccctctgtcaagggctttgactttgccaagcagcacctgggccagcataacaaagacgacatcctaataattcacgagcccgctccacttccagggcctctcaaagatcacaccacaccatctgaaaatggtgatgtgccaagccctaaatcaaaaatcccttctaagaacgtacgacatcggggcagagtttctcccagtgacgccgactctaccgtcagcgaggagagttccgagagagatgccggcgacaaaacgcctggagctgttaacgacggaaggagccatcgcgccccccagagtgggcccccgctaccctcctctgggaatgaacagcacagttctgctagcatctttgagcacgtcgaccgtatcagtaggccccccgaagcaagcagacgggttcccagtaagatccagttgattgcaatgcagccaatacccgccccgcctgtgcaacgcccctcccctgccgacagagtggcagaatctaataagatcaacaaggagatccagactgcattgcggcacaagtccgaaattgagcatcataggaacaagattcgtctgcgggccaagcgtcggggacattatgaattcccagtcgtggacgaccttagttccggagataccaaagagcggcacagggtctatcggagagcccaaatgcaaatcgacaaaatcctcgatccaacagccagtgtgccgtccgtgtttatagaacctaggaaatcatctagaattaaacgttctccgaagccccgccgaaaacatcaagtaaacggctgcccagccgacgccgagaaggacagacttatcacgaccgatagcgacggaacctatcgcaggccgcccggggtgcataattccgcctacattggttgtccttcggaccccgacctgcccgccgacgttcagactccaagttcggtggaacttgggagataccccgcactgccatttcccgcctcacagtacataccgcctcagccgtctattgaagaagccagacaaactatgcatagtctcctcgacgatgcgtttgcccttgtggctccctctagtcagcctgcctccactgccggtgtggggcccggagttccacctggcctgcctgccaattccaccccctcccaggaagaaaggagggctacccagtggggctcattctattccccagctcagactgcaaacaacccatgttctagatacgaagattatggtatgacccctcccactggcccgttgccgaggcctggattcggccccggtttgctccagtctactgaactggtccctccggatccacagcagccacaagcatcggctgaagcccccttcgcagctcggggcatctattccgaagagatgccaagtgtcgcaaggcccagaccagtgggcggcacaaccggcagtcaaattcagcacctgacgcaggttggcatcgcctctagaattggcgctcagcccgtagaaattcccccaagccgcgggagtcagtacgggggtcccgggtggcctagctatggcgaagatgaagcaggccgccgggaagcagtgccacggacaagtgggagggagccatcggccccaagtggaaatctgcctcacaggggactccagggtccaggactggggtaccctacaagtagtactgaagaccttcaacctggacattccagcgcctccctgataaaagccatccgtgaagaattgctgcggctttcccaaaagcagagcaccgtccaaaactttcactcttag

SEQ ID NO: 201254 - DNA, 252 bp, synthetic construct
  misc_feature 1..252: note = Description of Artificial Sequence: Synthetic coding sequence
  source 1..252: mol_type = other DNA
atgggcggcctgttcagccggtggcggaccaagcccagcaccgtggaggtgctggagtctattgacaaggaaatccaagccctagaagaatttcgcgaaaagaaccagcgtctgcagaagctctgggtagggagactcattctctactctagcgttctgtaccttttcacctgcttgatcgtgtacctgtggtacctgccagacgagttcaccgctcgacttgctatgacgcttccattttttgcattttag

SEQ ID NO: 201255 - DNA, 3090 bp, synthetic construct
  misc_feature 1..3090: note = Description of Artificial Sequence: Synthetic coding sequence
  source 1..3090: mol_type = other DNA
atgctgttccgggcccggggccccgtgcggggccggggctggggccgccccgctgaagcccccaggagggggcgtagtcccccatggtctcctgcttggatatgttgttgggcactggcaggatgccaagcagcttgggcaggtgacctgcccagcagcagcagcaggcccctgcctccttgtcaggagaaggactatcactttgagtacaccgaatgcgattctagcggaagcaggtggagagtggccatccctaacagcgcagtggattgcagcggactccccgatccagtgagaggaaaagagtgcaccttctcgtgcgcttctggcgagtatctcgaaatgaaaaaccaagtttgctccaaatgtggggagggtacttacagcctgggttcaggtatcaagttcgatgaatgggatgaactgcccgccgggtttagcaatatcgctacattcatggataccgtcgtgggcccttcggattcccggcctgatggctgtaataatagctcttggatcccacggggtaattacatcgaatccaaccgagacgactgcaccgtttccctgatctatgccgttcacctgaagaagtccgggtatgtgttcttcgagtatcaatacgtggataacaacatattctttgaattttttattcaaaacgaccaatgccaagagatggacacgaccaccgataagtgggtgaagctgactgataacggggagtggggctcacactccgtgatgctgaaaagcgggacaaatatcctctactggaggacaacggggatcctcatgggcagtaaagccgttaagccagtcctcgtgaaaaacataaccatagaaggcgtcgcttatacgagcgaatgtttcccatgtaaacccggaaccttctccaacaaaccaggttcatttaactgtcaggtctgcccacgcaacacttatagtgaaaaaggagccaaggaatgcatccggtgtaaggacgacagccagttttcagaagaggggtcatctgaatgcactgagcgccccccttgtaccactaaggactacttccaaatacacaccccatgcgatgaggaaggcaaaacccagattatgtacaaatggatagagcctaaaatctgccgcgaggaccttacagacgcgattcgcctgccgccgagtggtgagaaaaaggattgccctccatgtaaccctggcttttacaataatggctcgagctcatgccacccctgcccccccggcacgtttagcgatggaaccaaagaatgccggccttgcccagctgggaccgagccagctctcggcttcgaatataaatggtggaacgtgctcccgggaaacatgaaaactagctgtttcaatgttggtaactccaagtgcgacggaatgaatggctgggaggtggccggagatcacattcagagcggtgcgggaggctcggataacgattacttaattctaaacctgcatataccggggttcaaaccacctacatccatgaccggcgcaactggtagcgagctggggcggatcacattcgtgttcgaaacactctgttctgctgactgtgttctttactttatggtggatatcaaccggaagagcactaacgtcgtggagtcatggggtggaacaaaggagaaacaggcttacacacatattatttttaagaatgccacgttcaccttcacgtgggctttccagagaacgaatcaggggcaggataatagaagattcatcaatgatatggtgaaaatttactctatcactgccacaaatgccgtggatggcgtggccagctcgtgcagagcttgtgcccttggctccgagcagagcggctcatcatgtgtgccttgtccaccaggccactatatcgagaaggagaccaatcagtgcaaagaatgcccacctgacacatatctcagcattcatcaggtctacggaaaggaagcttgtatcccctgcggaccagggagtaagaacaatcaggaccactccgtctgctacagtgattgcttcttctaccacgagaaggagaatcagtccctccattacgatttttcaaacttgagcagcgttggcagcctaatgaatggtccatctttcacatccaagggtacaaagtactttcatttctttaacatctctctgtgtggacatgagggaaaaaagatggccctctgcaccaataacatcaccgatttcaccgtgaaagaaattgtcgcaggcagcgacgattataccaatctggtgggcgcatttgtatgtcagtcaacaatcatcccttccgagtccaagggatttcgggctgccttgtcatcacagagcattatcctggccgacacattcattggagtgacggtggagactaccttgaaaaacatcaacattaaggaagatatgtttccagtgccgacatcccagatcccagatgtacattttttttacaaaagctccaccgccacaaccagctgtatcaacggacggtcaacagccgtcaagatgagatgcaaccctaccaagtcaggggcaggagttattagcgttccctcaaagtgtcctgcggggacatgcgatggctgcaccttctactttctctgggagagtgctgaggcctgtcccttatgcactgagcacgactttcacgagattgagggagcttgcaagagaggatttcaggagactctctacgtttggaatgaacctaaatggtgtatcaaagggattagtctgcccgaaaagaagttggccacgtgcgaaaccgtggatttttggctgaaggtaggggctggcgtaggcgcttttaccgctgtcttgcttgtggctttaacctgctacttctggaaaaagaaccagaaactcgaatataaatatagcaagcttgtgatgaccaccaacagcaaagaatgtgagctgcccgccgccgattcttgcgccataatggagggcgaggacaatgaggaggaggtggtgtacagcaataaacagtcccttctcggaaagctaaaatcccttgccaccaaggaaaaagaagaccattttgagagcgtgcagctgaagacgtcaaggagccctaacatttag

SEQ ID NO: 201256 - DNA, 11043 bp, synthetic construct
  misc_feature 1..11043: note = Description of Artificial Sequence: Synthetic coding sequence
  source 1..11043: mol_type = other DNA
atggaccagcggaagaacgagagcatcgtgcccagcatcacccagctggaggacttcctgactgagcataattctaacgtggtttggctcctagtcgccactatcctgagctgcggctggataatatatctaacatactacaacagcaggaatgtcggactcatactgaccctagtgctgaaccgcctctacaaacacgggtatattcatatcgggtcttttagcttctctgtcctgagcggtaaggttatggtccgggaaatatattacatcaccgaagatatgagtattcggatccaggacggattcattatctttcgttggtggaagatgtacaacccaaagcagaagcagcacgatcccaaagctgagacaagactttacataaccgttaacgattttgagttccacgtctacaacaggagcgatctctatggaaggttgcaagagctgtttggactggagccgaccatcataccacctaaaaaggacgacgacaagactagggaaatcggccggacccggacacagagtaagattgaacgcgtaaaggtcaagacggagagtcaggacccaacgtcttcgtggcggtcattgatcccagtaattaaagtgaacgtttctacaggcaggttagcttttggaaaccactatcagcctcagaccctctgcatcaacttcgatgacgcctttttgacttacaccacaaaacctcctagttcccatctggatcagtttatgcacattgtcaaaggcaaattagagaatgtgcgcgtcatgctggtgcctagcccccgctatgttggccttcaaaacgatgagccaccgcggctgatgggagagggctttgtcgtgatgcaaagcaatgatgtggatatttactactacatggacgagcctggcctcgtccctgaggagacagaggaaaacatcgaaggtgaaatgtccagtgaggattgtaaattacaggacctgccaccttgctggggactagatatcgtctgtggaaagggcactgattttaattatggcccttgggccgataggcagcgcgattgtttatggaaattcttctttccccctgattatcaggtgcttaaggtatccgagattgcccaacctgggcggcccaggcaaattctcgcctttgaattgcgcatgaacattattgcggatgcaactatagatttgctgtttaccaagaatcgcgaaactaacgccgtccacgtgaacgtcggagccggatcatacctagaaatcaatattcccatgaccgttgaagaaaatggttacacaccggcgattaagggacagctgctacacgttgatgccaccacctccatgcagtatagaaccttacttgaggcagaaatgctggccttccatatcaacgcgagttatccacggatctggaacatgcctcaaacatggcagtgtgagctcgaggtgtataaggccacgtatcactttatcttcgctcagaagaacttctttacagaccttatccaggactggagctccgattcacctccagacatcttcagttttgtgccctacacctggaatttcaagatcatgttccaccaattcgagatgatttgggctgctaatcaacacaattggattgactgtagtacgaagcagcaagagaacgtttaccttgcagcttgtggcgagaccctgaacatcgacttctcactcccattcactgacttcgtcccggccacttgtaacacgaagttctcactgaggggcgaagacgtagatctgcacctgttcctgcccgattgtcatccatcaaagtactccctgttcatgttggtgaaaaattgtcatccaaataaaatgatacacgacaccggtattcccgccgagtgtcaatcaggtcagaagaccgtgaagccaaagtggaggaatgtgacccaggaaaagtctggatgggtcgagtgctggacggtcccaagcgtgatgctgaccatcgattatacgtggcaccccatctacccacaaaaggctgatgaacagctcaaacagagtttgtctgagatggaggagacaatgctttcagtgttacgacccagtcaaaagacatccgacagggtggtgagcagccctagtacttccagccgtccaccaattgacccaagcgagttaccaccagacaagcttcatgttgagatggaactgtctcccgattcccaaatcacactgtatggccctcttctcaatgcgttcctgtgtataaaggaaaattactttggggaggacgacatgtacatggactttgaagaagttataagctctccggtattgtcactgtccacgtcttcatcatccggctggactgcagtcggtatggaaaatgacaagaaggagaacgagggatcagcgaaatcaattcatccccttgctttgcgcccatgggacatcactgtgctggtgaatctgtacaaggtccacgggcgccttcccgtgcacggtacgaccgacggtccagagtgtcccaccgcgttcctggagcggttgtgcttcgagatgaagaagggctttcgcgagacaatgctccaactcatactgtcccccctcaatgtgtttgtcagcgataattaccagcagcgccctcccgtggacgaggtcctgcgggagggccatataaacctgtctgggctccagctccgcgctcatgcaatgttcagcgctgaaggcctgcctctgggatcggactcacttgaatatgcttggctgattgatgtgcaggcagggtctctaactgccaaagtgacagctcctcagctcgcctgtttgctggagtggggtcagacgtttgtcttccacgtagtttgtagagaatatgaactagagcgaccaaaaagcgtgattatctgccagcatggtatagacagaagattctgtgaatctaaactgagttgtataccaggcccctgccctacgagtgatgacttaaagtatacaatgattcgactcgccgtggacggggctgacatctatatcgtcgagcatggttgtgccacaaacataaagatgggggctattagagtcgctaactgcaacttgcataaccagtctgttggtgagggaatctcagccgctattcaggacttccaggttaggcagtacatcgaacagctaaacaactgtaggattggattgcagccggctgtgctccgaagagcatactggctcgaagccgggagtgccaatctggggttaatcacagtggacatcgccctggctgcagaccaccattccaaacacgaagcacaacggcatttcctagaaactcacgatgccaggaccaaacggctctggttcctgtggccagacgacatcctgaaaaacaagcggtgtcgtaacaagtgtggatgtctgggcggatgccgtttcttcggtggcacggtgaccggacttgatttcttcaaactggaagagctgacacccagtagcagcagcgccttttctagcaccagtgctgagtctgatatgtactatgggcaaagtttattgcagcccggcgagtggataattacgaaagagatacctaaaatcatcgatgggaatgtgaatgggatgaaaaggaaggagtgggaaaacaaatccgtgggcatcgaggtcgagaggaaaacgcagcacttgagccttcaggtcccattaaggagtcactcctctagcagctcatcagaggaaaatagttcttcatctgcagcacaaccactattggcaggggagaaggagtccccaagctccgttgccgatgaccacctagtccagaaagagttcctccacgggacaaaaagggatgacgggcaggcctcaattccaacggagatcagcggaaattccccggtgtcgccgaatacccaggataagtcagtcggtcagtctcctctgcgcagccccttgaagcgccaggctagtgtttgctctaccagattgggctcaacaaaaagcctcaccgcagccttttacggggacaaacaaccagtaaccgtcggggttcaattttcatcagacgtgtcccggtcagatgagaatgtgctggacagcccaaaacagcggaggtctttcggatccttcccatatacgccatctgcggactcaaacagcttccaccagtaccgctcaatggactcctcaatgtctatggctgatagcgaggcatacttctcagcggcggaagagttcgagccaatctccagcgatgagggccccgggacttacccaggacgcaagaagaagaaaaaacagacccagcagattgactactcaagaggctccatttaccacagcgtcgaggggccactgacagggcacggcgagtctatccaggactcccgcaccctgccctttaaaactcacccttcacaagccagcttcgtaagtgccctcggcggggaggacgacgtgatcgagcacctgtacatcgtggagggagagaaaaccgtggaatctgagcagattacaccacagcagccggtcatgaactgttaccagacttacctgacacagtttcaagtcattaactggtcggttaagcaccctaccaataagcgtacttctaagtcgtccctgcaccggccattggatctggatacaccaacctcagaggaatccagcagctcttttgagcaactcagcgtgcccacatttaaagtgataaaacaggggttgacagcaaactccctgctggataggggcatgcagctctcgggcagcacttctaataccccatatacccccctcgaaaagaagttagccgacaacaccgacgatgagacactcacagaggaatggacactggaccaacccgtgtcccaaacgaggaccacggccatagtggaggtgaaggggaccgtcgatatcgtgctgactccactggtcgccgaggccctggatagatacatcgaggccatggtccattgcgcatccacacgccaccccgcagccatcgtggatgatctgcacgccaaggtcctccgggaggccgtccagaacagcaagaccactttcagcgagaatctctcaagcaagcaggatattcgaggtaccaaaaccgagcagtctactatcgggacgaccaaccagggacaggcccagacgaacctaacaatgaagcaagataacgtgacaatcaaggggcttcagactaatgttagcatccccaaagtcaacttatgcctccttcaggccagcgttgaagaaagcccaacaacagccccttcccgctctgtcacccatgtctcgctggtggctctctgttttgaccggatcgcgactcaggtacggatgaaccgtggggtggtggaggagacctcaaacaacgctgagccaggcagaacttctaactttgacaggtatgttcacgcaaccaagatgcagccccaaagctctggttctctgcgcagcaatgctggtgccgagaagggcaaagaaatcgctgctaaactgaatatccatcgggtgcatggccagttgcgtggcttagataccacagatattggaacatgtgcaatcaccgccatcccctttgaaaagtcaaaggtgctgtttactctcgaggaactagacgagttcacgttcgtcgacgagactgaccagcaggcagtaccggacgtcacgcgaattggtccatcacaggagaaatggggatggatcatgttcgagtgcgggctggaaaatttgactattaaaggaggtcggcaatctggagcagtcctttacaacagctttggtatcatggggaaggcaagtgacacagagagaggcggggttctgacgagcaacaattctagcgattctcctaccggtagtggatacaacacagatgtcagcgatgacaatctgccctgcgataggacctctcccagctctgacttaaatggcaattccgtcagtgatgaacaggatgagggtgtggagagtgacgatttgaagaaggatctgccattaatgcctccaccccctgattcatgttccatgaagctaaccatcaaagagatctggttttccttcgcagcgccaacgaatgtgcgcagccatactcacgccttttctcggcagctgaatctgctgagtaccgctacaccagcagttggagcatggttggttccgatcgatcaactgaaatcaagccttaataagctggagaccgaaggaacactccggatttgcgcagtgatgggctgtattatgaccgaggccttggagaacaaaagcgtgcacttccccctcagatcgaaatataacagactgactaaggtcgcccgttttctgcaggagaatccctcttgcctactgtgtaacatcctacaccattatctgcaccaggctaactacagtatcattgacgacgcaaccatgtctgatggcctgcctgccttggttacacttaagaagggcctcgtcgcactggccagacagtggatgaagtttatagttgtaacacccgcatttaagggggtcagcctgcacaggccagctcaaccactaaaacctcagatcgcaatggatcatgagcacgaggacggattggggctggataacggagggggtctgcaatcagataccagcgccgatggtgccgagtttgaatttgacgcggccactgtgtctgaacacaccatgctgctggaaggtacggctaatcggccaccacctggtagcagtgggcctgtgaccggggcggaaatcatgaggaagcttagcaagacacacacacactcagattcagcccttaaaatcaaggggatccacccttatcactctctgagttacacctcgggggacacagccacagactcccctgtgcacgtgggaagagcaggaatgcccgtgaaagacagccccagaaaggagtccttgctgtcatatttaaccggatcattcccttcactccataatctgctcgagggaactcctcagagaagctctgcagcagtgaaatcctcttcactgacccgaacgggaaacactgtggccaccgacatgctgagcgagcaccctctcctgagtgagccgtcgtcggtatccttctacaactggatgtccaatgccgtgggcaatcggggaagcgtgctccaagaaagtccggttactaaaagtggtcacaattccctgccaaccggagtggcccctaacttgcctacgatcccctccgccagcgattttaacactgtgctctctagtgatcaaaacaccctggacggcacacactcacagcatagcacttcccaagatgacgttgccggggtggaggaagccaaccaaggatttccagctgttcaactggctgatgcccaggtcgtatttaagcctcttctaagccatacagggatccagtcccaggacacaatgcccttctgctaccggatgtacttcggggagcatctgagcttttctgggacactcgactgtttgagagccgacatcgtggatagtgacacagcgaaagaacgaaagggcaagagggctcgccggcaaggacacgtcaatctcccacccctcgaattcaagcctgcactgatgctgggcacttttagcatcagcgccgtggttatggagaaatctgtgtgtacccctcagaatagtacctccgctctgtcttttcacgatctgtcaaaaaggtattataatacattccattgcaactttaccatctcctgccagtccatctcacagcatgtggacatggcactcgtcaggttgatccaccagttcagcacaatgattgacgacattaaggctacgcagaccgatataaagttatctaggtatactgcgggaagtgcttctccaacaccaactttcaagactcgcaaacacagagacttccgtagttctgactttagccgtagtagcagaggaagcctcaacggtgggaatcgtgtaaataacgctaaaaataaacgtactaacaacgaaaataataaaaaggaaagtagaaataagaattcactcgggaggagcgagaggcggacatccaaggtgagtagaaaaggttccaaggacgttgtggatcacatgacgatccatatggacgactctgattctattactgtgagcgagcagtctgaaccaagtgccgaatgttggcagaatatgtataaattgcttaatttctattcacttatttccgatcccactggcatcctggaaaagtccagtgagacattcggacccgctggagtgcgctctcccactgaaccaacttgtaaagtggtgttcgagaatgaacaggataattcttccctgactaagacgcaacgcaagcgctcactggtgacctccgagccccagcatgtcactctgatcgtgtttggaattgggatggtcaaccgcacccacttagaggccgatatcggagggttaactatggagtctgagctgaaacggattcatggaagcttcaccctgaaagaaaaaatgaaagatgttcttcaccagaagatgactgaaacttgtgcaacagcgcatattggaggcgttaatattgtgctcctcgaagggatcactcctaacatacagttagaggactttccaacctcccccacctctaccgctaagcaggagttcctgaccgtcgttaagtgctctatcgcgaagtcccaggcgttgtatagcgcccagcggggactgaaaactaataatgccgccgtgttcaaggtcggcgccattagcatcaatatccctcagcacccagcgactcttcactccatgatggttcgcagcagccatcagttgtcaaagcagatatcagatctcattcggcagccaagtacagccccgcagcctgtaaaagaagacatcgctaccccccttccttccgagaagacacctactagcgtcaaccagaccccagttgaaaccaatgaattcccacagttacctgaaggcctggagaaaaaacctatagtgctaaaattctccgcaatgctggacggtatcgcaatcggcgcagcgctactgccttctcttaaggccgaatataaaatgggcagaatgcggtcacacggaatgacaggcgcccagacacggtttacgttcgagctacctaaccaccgtctaagattcacgagtaaagtgtccgcaactgatatgagcacgatcccacctagcgcctccctgaacctgccacccgtgacaatgtctgggaaatacattatggaggagcacgattcatactcagaccaggtgtggtcaatcgacgagctcccctcgaaacagggatattaccttcaaggcaactaccttcggtgtgttgccgaggtagggagcttcgaacataatctgaccactgatctgttgaaccacctggtgttcgtccaaaaagtgtttatgaaagaggtgaatgaagtcatccagaaggtctccggtggcgagcagcccatccctctctggaacgagcatgacggaactgccgatggcgataagccaaaaatactgctttattccctcaacttacaattcaaaggaatccaggtcacagcgactactccttctatgcgcgcagtacgcttcgagacagggttaatagaactggaactgagcaatagattgcagaccaaggccagcccaggcagttcttcatacctgaagctgtttgggaagtgccaggtcgatctcaacctggcccttggacagattgtgaagcaccaggtctacgaggaagctggctccgatttccaccaagttgcctacttcaagacccggatcggcttgcggaacgcccttcgcgaagagatttccgggtcttccgacagggaggcagtgttaataaccctgaaccggcctatcgtttacgctcagccagttgcctttgaccgcgccgtgttgttttggctgaactacaaggccgcatatgataattggaatgagcagcgtatggccctccataaggacatacacatggccacaaaagaggtggtggacatgctgcccggaatacagcagacatccgcacaagcctttggaactctgttcttgcaactcacagtaaacgatctcggaatctgtctccctattactaacaccgcgcagtctaatcacacaggtgatctagataccggaagtgctctcgtcctgaccatcgagagtactctgattacagcctgctcctccgagagcctggtgagtaaaggtcattttaagaacttttgcatccggttcgccgacgggtttgaaacgtcctgggatgattggaagcctgagatccatggggaccttgtgatgaacgcttgcgtggtacctgacggcacttacgaagtgtgtagccgcacaacgggccaggccgccgccgagtcttcgtctgcaggcacgtggacattgaatgtgctgtggaagatgtgcggtatcgacgtgcacatggacccaaatatcggcaagagactgaatgctttagggaatacccttaccactctgacaggcgaggaagatattgatgacatcgccgatctgaacagtgttaatatagctgatctgtctgatgaagacgaagtggatacaatgtctcccacaatccatacagaggctaccgattatcgcagacaggccgcatccgcttcacagccaggggagcttcgtggaagaaagattatgaagcgaatcgtcgatattagagagctgaatgagcaagccaaggtgatcgatgacctgaaaaaattgggcgcttctgaggggaccattaaccaggagatacaacgttatcagcagcttgagagcgttgccgttaatgatattagaagggacgtgaggaaaaagctccggagaagtagcatgcgagcagcctcacttaaggataagtggggtttgtcctataagccctcctattctaggtccaaatcaatctcggcatcaggacgtcctcctctcaagaggatggaacgtgctagcagtagggtcggagaaaccgaagaactcccagagataagagtggatgccgcctcacctgggcctagagtaacctttaatatccaggacactatcgcggagattcgacgaaaaaaaatctcatttaaggtcgtgttctag

SEQ ID NO: 201257 - DNA, 2241 bp, synthetic construct
  misc_feature 1..2241: note = Description of Artificial Sequence: Synthetic coding sequence
  source 1..2241: mol_type = other DNA
atgccctgcctgggcctgctggccaacctgtgccggcacaacctgtccgttcagacacacattaaaactctgagtaacgtgaaatcattctataggaccttgatcacactgctggcacactccagcctgacggtcgttgtgttcgcactgtccatcctgtcctccttgaccctcaacgaagaggttggcgagaaactctttcacgccagaaatatacaccagactttccagttaatttttaacattctcattaacggggacggcacattaacgcggaagtatagcgtcgaccttctgatggacctgttgaagaatccaaagatcgctgattatctcacgcggtacgagcacttctcctcctgtttgcaccaggtgctaggattgcttaacggcaaagaccctgacagctcttctaaagttctggaattgctgctcgcattctgcagcgtgacgcagctccggcacatgctgacacagatgatgttcgaacagtctccccctggctctgccactctggggtcgcacactaaatgtcttgaaccaacagttgccctccttcgatggttgtcacaacccttggatgggagtgagaattgcagcgtgcttgccctcgagcttttcaaggaaatcttcgaggacgtcatagacgccgccaactgtagctccgccgataggtttgtgacactgctgctgccaacaattctcgatcagctgcaatttacggagcagaatttggacgaagctcttacaaggaagaaatgtgagagaatcgcgaaggccattgaggtcctgctgactttgtgcggtgacgacacccttaagatgcatattgcaaaaatactaacaacagtgaagtgcacgaccttaatcgagcagcagtttacctatggcaaaattgacctggggtttggcacaaaggtagctgatagtgagctatgcaagctagctgctgatgtgattctgaagacactcgatctgataaataagctgaaaccactcgtgcctggcatggaagtgagtttttataaaatcctccaggaccctagactgattaccccacttgcgtttgcgttgacctctgataatcgagaacaggtccagtccgggctccgaatattactggaggctgctcccctgcccgatttcccagcccttgtcctgggcgagtccatcgcagccaacaacgcataccggcagcaagaaactgaacacatccccaggaagatgccttggcaatcgtctaatcactcctttcccacatctattaaatgcctgacaccccaccttaaagatggcgtgcccggcctcaacattgaggaactgatcgaaaagctgcaatctggcatggtggtcaaggatcagatctgcgatgtcagaattagcgacataatggacgtatacgagatgaaattgtctacattagcgagcaaagaaagtcggctgcaagatctactggagaccaaagcacttgcattagctcaggctgatcggcttatcgcacagcatcgctgccagcggacacaggcggagacggaagcacgcaccctggcgtcgatgttacgggaggtggagcggaaaaatgaggaattatctgtacttctgaaagcccagcaggtagagtcagaacgggcccagagcgacatagagcacctgttccagcacaaccgaaaactcgagtccgtggcagaagaacatgagatcctgactaagtcttatatggaactgttgcaaagaaacgaatcaaccgagaaaaaaaataaggatctgcagatcacgtgcgatagtctcaacaaacagatcgagacggttaagaaactcaacgaatcgctaaaggagcagaatgagaaaagcatcgcacagctcatagagaaagaagagcagcggaaagaagttcagaatcagctcgtggaccgcgagcacaaactagccaatcttcaccagaaaaccaaagttcaggaggaaaagatcaagactctacagaaagagagagaggataaggaggagaccatcgacatcctgcgcaaagaactctccaggaccgagcagattcgcaaagagcttagtattaaagcttcctctctggaagtccagaaggcccaacttgaaggtaggcttgaggaaaaggaatccctcgtcaaattgcaacaggaggaattgaataagcacagccacatgatcgctatgatccactccctgtctggcggaaagatcaacccggagaccgtgaacttatctatttag

SEQ ID NO: 201258 - DNA, 840 bp, synthetic construct
  misc_feature 1..840: note = Description of Artificial Sequence: Synthetic coding sequence
  source 1..840: mol_type = other DNA
atgaccctgcccttcttcgccttccccctgatcatctggagcatccgaaccgtgataattttcttcttctcaaagcggactgaaagaaacaacgaggcattagacgacctcaagagccaacgcaaaaagatactcgaagaggtcatggagaaggaaacgtacaaaacagccaaactgatattagaacgcttcgatcccgactctaagaaggctaaggagtgcgagcctccatctgcgggggctgcggtcaccgcaaggccaggccaggaaattcgccagcggaccgccgcccaacggaatctctccccaaccccggcctccccaaaccaaggacctcccccacaggttcccgtgagcccaggaccgcctaaagacagcagcgcccccggtggaccccccgagagaaccgtgacgccagccttgtcatcaaacgtgctgcctcgccacttaggatcaccggcaacctccgtgccaggaatggggcttcacccccctggtccgccgctggcaagacccatcctgcctcgagagcgcggagctctcgaccgcattgtggagtacctggttggagacggcccccagaatcgctatgcgttgatttgtcaacaatgcttctcccacaacggcatggcactgaaagaagaatttgagtatatcgctttcaggtgtgcatattgcttttttctgaacccagcacggaagacaagaccacaggccccacgcctccccgaattcagtttcgaaaagaggcaggtcgtggaagggagctccagcgttggaccccttccgagtggttccgtgctttcaagtgataaccagttcaacgaggtgcagtactag

SEQ ID NO: 201259 - DNA, 3192 bp, synthetic construct
  misc_feature 1..3192: note = Description of Artificial Sequence: Synthetic coding sequence
  source 1..3192: mol_type = other DNA
atgacccggctgggctggcccagcccctgctgcgcccggaagcagtgctcagagggtcgcacttattcaaacgcagtgatatccccgaaccttgagactacacgcattatgcgggtaagccatacttttcccgtcgtcgactgtactgctgcctgctgtgatctgagtagttgtgatctggcctggtggtttgagggccggtgctacctcgtgagttgccctcacaaagaaaactgtgaaccaaaaaagatgggacccatccgatcgtacctgacttttgtcctccggcctgtgcaacggcccgctcagcttcttgactacggcgatatgatgcttaaccgggggtcgccctcgggaatttggggagactcgcccgaggatatccgaaaagatctgaccttcctgggtaaggattggggcctggaggaaatgagcgagtactcagacgactatcgggaactggagaaagacctgcttcagccgtcaggaaagcaagagcctcgcggctctgccgaatacaccgactgggggttgctgccaggctctgagggcgcattcaatagctcagtcggtgattcacctgctgtacctgccgagacccagcaggaccctgagctgcattacctgaacgagtccgctagcacccctgcacctaagctgcccgaaaggtccgtgttgctgcccttacccacaacaccctcatctggtgaggtgcttgagaaggagaaagcctcacagcttcaagagcagtcatctaacagcagcgggaaagaagtgcttatgccaagccatagtctgccgcccgcaagcctggagctatcatctgtgaccgtggagaaaagcccagtactcactgtcacaccaggcagcactgagcattcaattcccaccccacccacaagcgccgcgcctagcgaatctacccccagcgaactgcctatttctccaaccactgcacctaggacagtaaaggagctaacggtctccgctggggataatcttataattaccctgcccgacaacgaagttgagttgaaagcgtttgtcgcccctgccccacccgttgagaccacatacaactatgaatggaacctgatctctcatcccactgactaccagggagagattaaacagggccataagcaaactctcaacctgtcccaattgtccgtcggcctgtatgtgtttaaggtgaccgttagtagcgaaaacgcgtttggggagggcttcgtaaacgtcaccgtcaagccagccagaagggtcaatttgccaccagttgccgtagtctccccacagttgcaggagttgaccctgccactaactagcgctctaattgacggttcccagagcaccgacgacactgagatcgtgtcttatcattgggaggagatcaacggccctttcatcgaggagaaaacttcagtcgattctcctgtgctaaggctttctaatcttgacccaggcaactactccttccgcctcacagtgactgatagcgacggcgctaccaattctacaacggccgccctgatcgtcaataatgctgttgattaccctcctgtggcaaatgccggacccaaccatacaatcactctgccacaaaacagtataacattgaacggtaaccaatcctcagatgaccatcagattgtcttgtacgagtggagcctaggccccggttcagagggtaagcatgttgtgatgcaaggggtacaaaccccgtatctgcatctttcggccatgcaggagggagactatacattccagcttaaggtgaccgattcctctagacaacagagcaccgccgttgtcaccgtcatcgtgcaacccgaaaacaacaggccacccgtcgccgtagccggaccagataaggaactgatctttccagtggaatctgctaccttagatggctccagctcatcagacgatcatggcattgtgttctaccattgggaacacgtgcgcggcccgagcgccgtggaaatggaaaatatagacaaagcaattgctacggtgaccggtttacaggtaggcacttatcatttccgcctcaccgtgaaagaccagcagggtctttctagcacatccaccctgaccgtcgcggtgaagaaagaaaacaattccccacctcgagcgcgggccggaggccgacatgtgctcgtgttgcctaataattcgataacccttgacgggagccgctctactgacgaccagcggattgtttcttacctgtggatacgcgacgggcaaagcccagccgccggagatgtgatcgacggctccgaccatagtgtggctctacagctgaccaatctggtggagggggtttatacgttccatctgagagtgactgattcccaaggcgcaagtgacaccgataccgccacagtagaggtgcagcccgacccccggaaaagtgggctggtggagttgacacttcaagtgggggtcggacagctgactgaacagcgaaaggatacgcttgttaggcagttagcagtgctactgaacgtgttggactccgatatcaaagtgcaaaaaatcagagcccattcggacctgagtaccgtgatcgtgttttatgtgcagtcgcgccccccttttaaagtgctgaaagcagccgaagtggctcggaacttacacatgcgcctaagcaaagagaaagcagatttcctgctgttcaaggtgctgcgcgtggatactgctggctgcctgttaaaatgctccggccatgggcattgcgaccctctaacaaaaagatgtatctgtagccacctgtggatggaaaatcttatacagcgttatatttgggacggtgaatctaattgcgagtggtccatcttctatgtcaccgtgctagcgtttaccttgattgtcctgaccggggggtttacatggctgtgtatctgctgctgtaagagacagaagcgcaccaagatcaggaagaaaactaagtacacaattttagataacatggatgaacaagaaaggatggagctccgtcccaagtacggcatcaagcaccgctctacggagcataacagctcactcatggtaagcgagagcgagttcgactccgatcaggatactattttcagtcgggagaagatggagagggggaatcccaaagtttctatgaatggcagcattcggaacggagctagtttcagctactgttccaaggataggtag

SEQ ID NO: 201260 - DNA, 1293 bp, synthetic construct
  misc_feature 1..1293: note = Description of Artificial Sequence: Synthetic coding sequence
  source 1..1293: mol_type = other DNA
atgggccggagctggcccggcctgagcctgtgccagtggcggctgctgccagctctagaggctggatgggctgtcgccgccgagactggcggaggcggcaggcctggtagagcagccccagcctcttgctcttgtgaatttctgtggacaatcgacgacatctaccactgcgcacagtttcttcagattaaagatggatggatcattttctcaatggaggctcgcctcgccatgactttgcccttctttgcctttccccttatcatctggtctattcgtaccgtcattatctttttcttctccaagcgcaccgagagaaataacgaggccttagatgatttgaagtctcaaagaaaaaaaatcctcgaggaggtcatggaaaaggagacatacaagactgccaaactaatcttagagcgttttgaccccgactcgaaaaaagctaaggagtgcgagcccccgagtgcaggagcagcggtaactgctcggccaggccaggagatcagacagaggacagcagcccagaggaatctgagccccacaccggcgagcccgaatcaggggccacccccgcaagtccccgtgtcccccggaccaccaaaggactcctcagccccagggggtccgccagaaagaacagtaactcctgccttatcttccaatgtcttaccacggcatcttggctccccagcgacatctgtgcccggcatgggactgcacccacctggccctccgttggccaggcccatacttcctagagagcgcggcgctctggacagaattgtggagtacttagtgggcgacggtccccagaaccgttatgcgctgatctgtcaacagtgtttttcacacaacggaatggcattgaaagaggagttcgaatacattgcttttaggtgtgcttactgttttttcttgaaccctgcgaggaagacgagaccccaagccccccgtctgcccgagttttccttcgagaagcgccaggtggtggaaggctcatcctcggttggtcccctgccatcaggctctgtactttcatctgacaatcagttcaatgaggaatcgctggaacatgatgtactcgacgacaatacggaacaaacggatgataaaatacccgcaactgagcagactaatcaggttattgagaaggcatctgacagtgaagagcccgaagagaaacaggagactgagaatgaagaagcatccgtgatcgagaccaacagtaccgtgccgggcgctgattcaattcctgaccccgagttgtcaggggagagtctgactgcagaatag

SEQ ID NO: 201261 - DNA, 3036 bp, synthetic construct
  misc_feature 1..3036: note = Description of Artificial Sequence: Synthetic coding sequence
  source 1..3036: mol_type = other DNA
atggccccccccaccggcgtgctgagcagcctgctgctgctggtgaccattgctggatgtgcccggaaacagtgctctgaggggcgtacatactctaatgccgtgattagcccaaacctagaaacaacacgaattatgagggtgtcacacacttttccagttgtggactgtacagccgcctgttgcgatctgtcgagttgtgatttggcatggtggtttgagggtagatgctatttggtgtcctgtccccacaaagaaaactgcgagcctaagaagatgggcccaatccgaagttacctaacttttgtgttgcgccccgtgcaaagacctgcacagctactggattacggtgacatgatgctgaacagagggagccccagcggcatttggggggactcacccgaggacatcagaaaggatctgaccttcctcggcaaagactggggactagaagaaatgagcgaatactcagatgactaccgagagctagaaaaggacctcttgcagccctctggcaagcaagaaccccgggggtctgccgagtatacagattggggcttgcttcctggctccgagggcgcatttaacagcagcgtgggagattccccagctgtgcccgcggagactcaacaggaccctgaactgcattatctcaacgaatccgcttcaactcccgcgcccaagttaccagagcggagcgtgctcctgcctttgccaacgaccccatcctccggcgaggtactggaaaaggagaaggcttcccagctgcaggaacaaagttcaaactcatccgggaaagaagtccttatgcccagccacagcctcccacctgcctcactcgagctaagcagcgtgacagtggagaagtctccggtgttgactgtaacccccggctctacggaacacagcatccccacacccccgacaagcgccgcacccagcgagtctactccctcagagcttcctatctctccaactaccgcacctcgcacggtcaaagaactgaccgtttcagcgggcgataatctgatcattaccctgccggataacgaagtggaacttaaggcttttgtagcccccgccccccccgtagagaccacctacaattatgagtggaatctcatatcacatccaaccgattaccagggtgagatcaaacagggccacaaacagaccctcaatctgtcacaactgtctgttgggttgtacgtctttaaggtcactgtgtcttccgagaacgcatttggcgaaggcttcgttaacgttacggtgaagcccgcaagaagggtgaatcttcccccagttgcggtcgtttcacctcagttgcaggagctgactctgccactgacttcagccctgattgatggctcacaatccaccgacgacacggagatcgtgtcgtatcattgggaagagatcaatgggccgtttatcgaggaaaaaacctccgtcgactcacccgttctgcgcctgtccaatctggatcctgggaactacagtttccggcttaccgtgactgatagcgatggtgcaactaatagcacgaccgctgctctgatcgttaacaacgcagtcgattatccacccgtggccaatgctggaccaaatcacactatcacacttccacagaactctatcacgttaaacggcaaccagtcgtccgacgaccaccagattgtcctatacgaatggagcttaggtccaggctccgaaggaaagcacgtggtcatgcagggcgttcagactccatacctccacctgtccgcaatgcaggaaggagattatacctttcaactgaaagttactgactccagtaggcagcagtccacggcagttgttaccgtgatagtgcagcctgaaaataaccgccctcccgtggcggtggccggaccggacaaagaacttatattccccgtcgaaagcgccactttggacggtagcagctccagcgacgaccatggaatcgtgttctaccactgggaacacgtccggggacccagtgccgttgaaatggaaaacatcgataaggctatcgcaacggtgactggactgcaggtgggaacataccactttaggctgacagtgaaggaccaacaaggattatcgtctacatccaccttgacagtggccgtgaagaaagagaataatagtcctcctagagctagagctggagggagacacgtcctggtcctgccaaacaacagtattaccctcgacggatccaggagcacagatgatcagcgaatcgtcagttatctgtggatccgcgatggccagagcccagctgcgggggacgtgattgacggcagcgatcacagtgtcgcactgcaactcactaacctagtggagggagtctatacttttcacctgcgggtaactgacagccagggagcaagcgacactgatacggccaccgtggaggtccaaccagacccgagaaaatccggactggtcgagctgacgctgcaggttggtgtgggacagctgacggaacagaggaaggatacgctcgtgcggcagcttgccgtcctcctgaacgtgctcgattctgacatcaaagtgcagaaaatccgggctcactcggacctgtctaccgtcatcgtgttttatgtgcaaagcaggcctccgttcaaagtgctgaaggcagccgaagtagcaagaaatttgcacatgcggctatctaaggagaaggctgacttcctcctgttcaaagtcttgcgcgtcgacaccgccggctgcctgctcaaatgctccggccatgggcactgtgatcctctaacaaaaagatgtatttgttctcacctatggatggagaaccttatacagagatatatatgggacggagagagcaactgcgggatcaagcaccgctcaacggagcacaattcttctctgatggtatctgagagtgaattcgattctgatcaggataccatcttctcacgagagaagatggaaagaggaaaccccaaagtatcaatgaacggatccattcgcaacggggcctccttctcatactgctcaaaggatcggtag

SEQ ID NO: 201262 - DNA, 1206 bp, synthetic construct
  misc_feature 1..1206: note = Description of Artificial Sequence: Synthetic coding sequence
  source 1..1206: mol_type = other DNA
atggagacccccgaggtgcccgtgggcagcctgatcgacttcggcccagaggcacccacctctagccccctggaggcaccaccccccgtccttcaggatggcgatgggagcctcggcgatggggcatcagagtccgaaactacagaaagcgctgactccgagaacgatatgggagagtctccctcccacccatcatgggaccaggaccgtaggtcttcctccaatgagagtttctcatctaaccagagcaccgaatccacacaggatgaagagaccttagctctgcgggatttcatgagaggttatgtagagaaaattttttcagggggtgaagatctggatcaggaggaaaaggcaaagttcggagagtactgtagctcagaaaacgggaagggacgagagtggttcgctcgctatgtgtctgcccaacgatgcaacagcaagtgcgtgagtgaggccaccttttacaggcttgtacagagctttgcggtggtccttttcgagtgccatcagatggacgattttgggccggccaagaatctaatgacgatgtgcttcacatattatcatattggtaagccacagctgctgccccctgaaagtcgggagaagccagctggctccatagatagttatctgaagtcagccaatagctggctcgccgagaagaaggatatcgctgagcgcttgctgaaaaacactagtgcccggacagaaaatgtaaaaggatttttcggtggactcgagactaaactgaaaggtcccctagctcggaggaatgaagaagatgaaaacaaaccccaggagaagagaccaagggctgttactgcgtatagtcccgaggatgagaaaaagggagagaagatctacctgtacacacatttgaaacaacaacctatttggcacaccttaagattttggaatgctgctttctttgatgccgttcattgtgagagaacaaagagatcgccgacaactagagagaagtggtgccatatgacccaagaggaaagggacgatagcctgagattcaatgaaaacatcacatttggacaactcggtaccttcactcacaatatgttagcctttggtctcaacaagaaactgtgtaacgattttctgaagaagcaggcggtgattggcaatctcgatgaggaacagtataaacttctgtccgaccatatcgagcaaatggctacagagtag

SEQ ID NO: 201263 - DNA, 3219 bp, synthetic construct
  misc_feature 1..3219: note = Description of Artificial Sequence: Synthetic coding sequence
  source 1..3219: mol_type = other DNA
atggccccccccaccggcgtgctgagcagcctgctgctgctggtgactattgcggggtgcgcgaggaagcagtgttctgagggacggacctacagcaacgccgtcataagtcccaacctagagaccaccaggattatgcgcgtgtctcacactttccccgtggttgattgcacggcggcctgttgcgatctgtcttcatgcgacctcgcctggtggtttgagggtaggtgttacttggtaagttgtcctcacaaagaaaactgtgagccaaagaagatgggacctatccgctcttatcttacctttgtcctgcgccctgttcagagacccgcacaactcctagactatggcgacatgatgttaaaccgagggtccccatccggcatatggggcgactccccagaggacattcgcaaggaccttaccttcctcggtaaggattggggcctggaggagatgtctgagtactctgacgattatcgcgaacttgaaaaagatctcttacaaccttcaggcaagcaggaaccaagggggtcagccgaatacactgattggggcctgctaccaggatcagagggagcgtttaactcttccgtgggggactctcctgccgtgccagctgaaacgcagcaggaccctgaactgcactatctgaatgagagtgcgtctactccagcccccaagcttcctgaacgttcagtgctcctgccactcccaactacgccatcatctggagaagtattggaaaaagagaaggctagccagttacaggaacagagtagtaactcctccggcaaggaggtacttatgcctagccacagtttaccacccgcctctttggagctgtccagtgtgaccgtcgagaagtcccccgtcctgacagtgacgcctggcagtaccgagcactctatcccaaccccaccaacaagcgctgcacccagcgagagcaccccttcggagcttccaatctctccaaccaccgcccctaggaccgtgaaggaattgaccgttagcgccggtgacaatctaattatcacactgcccgacaacgaagttgaactgaaagcctttgtggcccccgccccgcctgtagaaactacatacaattatgagtggaacctgataagccaccccacagattaccagggtgaaatcaagcagggacataagcagactctcaacctttcccagctgtctgtgggtttatatgtattcaaggtgaccgtctccagcgagaacgccttcggagaggggtttgtgaatgtaacggtcaaacccgcccgccgcgttaacctgcctcctgtcgcggtcgtgtctccgcagctgcaagaactcacactccccttaacttccgccttgattgacggcagtcagagtaccgacgatacagaaattgtctcctaccactgggaggagataaatggcccttttatagaggaaaaaacaagtgtcgactctcctgtgttacgcttaagcaacttagatccaggcaactactcattcaggctgacagtcacagattcagacggagccactaattctacaaccgcagctctcatcgtgaacaatgccgtcgactatcctcccgtggcgaatgctggacccaatcatacaattaccctgccgcaaaattctataacactcaacggtaaccagagtagcgatgaccatcagatcgtcctgtatgaatggagtttggggcctggcagtgagggaaaacatgtggttatgcaaggggtgcaaaccccctaccttcatctaagcgccatgcaggaaggggattacaccttccagcttaaagtgaccgattcttctagacagcagtctaccgctgttgttactgttattgtacagccagagaacaacaggccccccgtggcggtcgctgggccagataaggagttgattttcccagtcgaatccgctacactcgacggatcctcatcatccgacgaccacggaatcgtgttttatcattgggagcatgtgcgcggccccagcgccgtcgaaatggagaatatcgataaggcaattgctaccgtgacaggtctgcaggttggcacctaccactttcgattgacggtgaaggaccagcaggggctctcttccaccagcaccctgacagtcgccgtcaagaaggaaaacaatagtcctcctcgcgcacgtgccggaggcaggcacgtgcttgtactgccaaataacagcataacactggacggaagccgctcaacagacgatcagagaattgtcagctatctttggattcgagatggccagtctccagccgccggcgatgtcatcgatgggagcgatcatagtgtggccctccagctgaccaatctggtggagggggtttatacttttcacctgagagtcaccgactcgcagggggcttctgatacagataccgccacagtggaggtccagcccgatcctcgtaaaagcggtctggtcgaattgaccttgcaggtgggtgtcggccagctcacggagcagcgaaaggataccctggtgcgacagcttgccgtgttattaaacgtgcttgactccgacatcaaggtgcagaagattcgagctcatagcgatctcagcaccgtgattgttttttatgtgcagagtcgacctccattcaaggttctcaaggctgcggaggtggcccggaacttacacatgagattatctaaggagaaggcggacttcctattatttaaagtgctccgcgtggataccgccggatgtctgttgaaatgtagcgggcatgggcactgcgacccactaaccaaaaggtgcatatgcagccacctgtggatggaaaatctgatacagaggtatatttgggacggggagtcgaactgcgaatggagcattttctacgttacggtgcttgcatttaccctcatcgtgttgaccggcggatttacctggctgtgcatctgttgttgtaaacgccagaaacgcaccaaaatccggaaaaaaaccaaatacaccattcttgacaacatggacgagcaggagagaatggaacttcgccctaagtatgggatcaagcatcgatcaactgagcacaattccagcctgatggtgtcggagtcagagtttgactccgaccaggatactatcttcagtcgagaaaagatggagcgagggaaccccaaggtcagtatgaacggctccattagaaacggagccagcttttcatactgcagcaaggatcgctag

SEQ ID NO: 201264 - DNA, 1380 bp, synthetic construct
  misc_feature 1..1380: note = Description of Artificial Sequence: Synthetic coding sequence
  source 1..1380: mol_type = other DNA
atgggcggcctgttcagccggtggcggaccaagcccagcaccgtggaggtactggaatctatcgacaaggagatccaggctttggaagagtttagagagaaaaaccaaaggctgcagaagctttgggtgggccgactgatcctgtactcaagcgtactgtaccttttcacctgcctgatcgtgtacctatggtacctgcccgatgagttcacagctcgactggcaatgacactgcccttcttcgctttccccctgattatatggtctatccgcacagtcataatattcttttttagcaagcgcactgagaggaacaacgaagcccttgacgatttgaaatctcaacggaagaagattctggaggaagtgatggaaaaagagacctacaaaaccgccaagttaatcctcgaacgttttgatcccgactctaaaaaagccaaggagtgtgaacctccatctgcaggcgccgccgttacggccagacccgggcaagagatccggcagaggacagcagcgcagcggaatctgtcccccacccctgcatccccgaatcaggggccaccacctcaagtgcccgtgtcccctgggccccctaaagactcgtctgcacctggtggcccccccgaaaggacagtcacccctgccttgtcctcgaatgtgttaccacgtcatctgggcagcccagcaacatccgtcccagggatggagatgggccttcctcacatagcgcaagcgggcctcgaacacttgagcagctctgacctgagcacatccacttctcagagtgccggcatcactggcctgcatccccctgggccaccccttgccaggcccatccttccccgcgagagaggggccctggataggattgtggagtacctggtcggagacggcccacagaatagatacgctttgatctgccagcagtgctttagccataatggtatggccctgaaggaagagttcgaatacatcgcttttcgttgcgcctattgcttcttcctgaatccagccaggaaaacaagaccacaggcccccaggctgcctgaattttcattcgagaagaggcaggtcgtggagggctctagctcagtggggccactcccttctgggagtgtgctgagctccgataaccagtttaatgaggagtctctcgaacacgacgtcctcgatgacaacaccgagcagactgatgacaaaattccggctaccgagcagaccaaccaggtcatcgagaaggcctccgactccgaagagccagaggaaaaacaggaaaccgagaacgaggaagccagtgttattgaaacaaattccaccgtccccggcgccgacagcattcccgacccagaattgtctggtgaaagcctcacagctgagtag

SEQ ID NO: 201265 - DNA, 240 bp, synthetic construct
  misc_feature 1..240: note = Description of Artificial Sequence: Synthetic coding sequence
  source 1..240: mol_type = other DNA
atgcaccccgacctgagcccccacctgcacaccgaggagtgcaacgttttgattaatttgctgaaagaatgccacaagaaccacaatattctgaagttttttggttactgtaatgatgtagatagggagttgcggaagtgcctcaagaacgaatacgtggaaaacaggactaaatccagagagcacggaatagccatgcgaaagaaactgtttaatccaccggaggaaagtgaaaaatag

SEQ ID NO: 201266 - DNA, 1569 bp, synthetic construct
  misc_feature 1..1569: note = Description of Artificial Sequence: Synthetic coding sequence
  source 1..1569: mol_type = other DNA
atgagccggcagctgctgcccgtgctgctgctgctgctgctgcgggcatcctgcccctggggacaggagcagggtgcacgatctcctagtgaagaaccgccagaagaggagataccgaaggaggacgggattttggtgctaagtaggcacacattaggccttgccttgcgggagcatcctgctctactggtagagttttatgctccctggtgtggtcactgccaggcccttgccccagaatactcaaaagctgccgctgtcttggccgcagagagcatggtagtcactctggccaaggtggacggacctgctcagcgggagcttgcagaagagttcggagtaaccgagtatccaacactgaagttctttagaaacgggaataggacccaccccgaagaatatactggtccccgggatgcggaagggattgctgagtggctccgcagaagggtgggaccttctgcaatgcgcctggaggatgaagcagcagctcaagcgctgatcgggggccgtgacttggtcgttataggtttctttcaagatgaagacgtggctacttttctcgctttggcgcaggacgcccttgacatgacctttgggctgaccgataggcccaggctgttccagcagtttgggctaaccaaagatactgtggtgctgttcaaaaagtttgacgagggccgcgctgacttccccgtggatgaagaacttggtctggacttgggggatctctcgcgattcctagtgactcacagcatgcgtctcgtgaccgagttcaattctcaaacatctgcaaagatatttgcagctcgaattttgaatcacctgttactgtttgtgaaccagacgcttgcagcccatcgagaactgcttgccggctttggtgaggccgcgcctaggtttagggggcaggtgctctttgtggtggtcgacgttgctgctgataatgaacatgtgctgcagtattttggactgaaggctgaagctgcaccaacactgcgcttggtgaatctggaaactactaaaaaatacgcaccagtcgatggaggccctgtgaccgcggcgagcataaccgccttttgtcacgccgtgctgaacggccaggtcaagccctacctcctttcccaggagattcctcctgactgggaccagaggccagtcaaaacactagttggcaaaaattttgaacaggtcgcctttgacgagactaagaacgtgtttgtgaagttttacgctccttggtgcacacattgcaaagaaatggcccccgcctgggaagccctcgctgaaaagtatcaagatcacgaagacatcatcattgcagagctggacgcaacagcgaacgagctggacgctttcgccgtgcatggatttcctacactgaagtacttcccggcaggtccgggacggaaggtaatagagtataaatctacccgggatctcgagacctttagcaaattccttgataacggaggggtgctccctaccgaggagcctcctgaagagcccgccgctccatttccagagccccccgcgaattcgacaatgggcagcaaagaagagttgtag

SEQ ID NO: 201267 - DNA, 1485 bp, synthetic construct
  misc_feature 1..1485: note = Description of Artificial Sequence: Synthetic coding sequence
  source 1..1485: mol_type = other DNA
atgggcagcggcaccggcagcgaggagcccctgggcggcgccagcaggggcggcaatccgcaaggggggtgggatcttggcgccgagcccccacatcccggccctggacccgccggcgctccctgccctgctggggggatcctttgccccgtggtatgggctctgcctggacccggaccccgagtgcaacaaggtagctgtcgagcgaggggccgggtcaatggaggtcacgcagaagagtttggggtgacagaataccccactcttaagttctttaggaatggcaacagaacgcatccagaggagtatacagggccaagggacgcggaaggcattgccgagtggctaagacgcagagtcggacctagcgccatgcggctcgaagatgaggccgcagcccaggctctgattggagggagggatttagttgtgatcggcttttttcaggacctgcaggatgaggacgtggctaccttccttgccctggcccaggacgcgctcgatatgacttttggtctgactgacagaccccgtctctttcagcaattcgggcttaccaaggatactgtggtgctgtttaagaagttcgacgaagggcgagctgactttccagtcgatgaggagctaggcctcgacttgggcgacctgtcaaggttcctggttacccattccatgcggctcgtcacagaattcaactctcagacctctgcaaagatctttgccgccagaattcttaatcaccttttgctgtttgttaaccaaacattagccgcccaccgggagctgctggcgggtttcggcgaggctgctccacgttttcgcggtcaggtgctgttcgtggtggtcgatgtggcagccgataacgaacatgtcctgcagtattttgggttgaaagctgaagcagctcctacactgcggttagtgaatctggaaactaccaagaaatatgctccagtcgacggtggcccagtcacagcagcttcgatcactgctttttgtcacgcagtgctaaatggccaagtcaagccatatttactgtcacaggagattccccctgattgggaccagaggccagtaaagacgctggtgggaaaaaacttcgagcaagtggcgtttgatgagactaaaaacgtgttcgttaaattctacgctccatggtgcacccactgtaaggagatggcacccgcctgggaagccctcgccgagaaataccaagatcacgaggatattattatcgctgagctggatgccactgcaaacgagttggacgcgttcgctgtacacggatttccaacattaaaatatttccctgctggacccggacggaaggtgattgaatacaaaagcacacgcgacctcgaaacattttctaagtttctggataacgggggcgttttgcccaccgaggagccacccgaggagcctgccgccccttttccagaaccacccgccaattcaactatggggtccaaggaggagctttag

SEQ ID NO: 201268 - DNA, 1323 bp, synthetic construct
  misc_feature 1..1323: note = Description of Artificial Sequence: Synthetic coding sequence
  source 1..1323: mol_type = other DNA
atggccctgctggtgctgggcctggtgagctgcaccttcttcctggcagtgaacggattgtacagtagctccgatgacgtcatagagctcactccttcaaatttcaatagagaggtaatccagagtgattcactgtggcttgtggaattttacgcgccatggtgcggccattgccaacgcctgacaccggaatggaaaaaggccgccactgctcttaaggatgttgttaaagtcggagccgtggatgcggataagcaccactcactgggcggccagtatggtgttcagggctttcccaccattaagatcttcggttctaacaagaaccgaccagaggattaccagggagggcgaacaggtgaagccatcgttgacgcggcactttcagcgctgaggcagctcgtgaaagaccggctggggggtcgctctggaggctacagtagcggcaagcaaggccgatctgacagtagttccaaaaaagatgtaatagagctgactgacgattctttcgacaagaacgtgctggactccgaagatgtgtggatggtagaattttatgcaccttggtgcgggcactgcaaaaatctggagccggaatgggcagcagccgcgtctgaagtgaaggaacagactaaggggaaggtgaaactcgctgccgtggacgctacggtcaaccaagttttagctagtcgatacggaatccgaggatttccgactattaaaattttccagaaaggcgaatcccctgtggactacgatggtggaagaactcgctccgacatcgtcagccgagccctcgacttattctcagacaatgccccccctcccgagctcctggagattattaatgaggatattgccaaacgaacgtgcgaggaacatcagttgtgcgtagtcgccgtgctgccccacatactagacacaggggctgctggccgaaactcctatctggaagtcctgctcaagctagcagataagtacaaaaagaaaatgtggggttggctttggacagaagccggggcacagagcgaactggaaactgctctgggcattggtggcttcgggtaccccgcaatggccgccattaacgcccgcaagatgaaattcgctctccttaaaggctccttctcagagcagggcattaacgagttcctgcgggaactaagcttcgggcgcggaagcacagcgccagtgggtggcggtgcctttccaacaatcgtcgaaagagaaccctgggatggtcgggacggagagttgccagtagaggacgacattgacctgtccgatgttgagctggacgatttgggaaaggacgagctgtag

SEQ ID NO: 201269 - DNA, 1338 bp, synthetic construct
  misc_feature 1..1338: note = Description of Artificial Sequence: Synthetic coding sequence
  source 1..1338: mol_type = other DNA
atgtaccccagcaccaccatggccaacgcccccggcctggtgagctgtaccttcttcttggctgtgaatggcctctacagctccagtgacgacgttattgagcttaccccgtccaacttcaaccgagaagttattcagagtgattcattatggctggtggagttttacgccccttggtgcgggcactgtcagcgcctgacacccgaatggaagaaggcagcgaccgcactgaaagatgtcgtaaaggtgggagcagtcgacgccgataagcaccattctctcggtgggcagtatggcgtgcaaggcttccctacgataaagatcttcggatccaacaagaaccgacccgaggattaccaaggtggtcgcacgggtgaggcgatagtggatgctgccctcagtgccctgaggcagctggtaaaggaccggctggggggcagaagcggaggctacagctccggcaagcagggtcgatcagatagctcgagtaaaaaagacgtcatagagcttacagatgactcattcgacaagaatgtgctggatagcgaagatgtgtggatggttgaattttatgctccttggtgcggtcattgtaagaatctggagccggaatgggctgcagctgcttctgaagtgaaggaacagactaagggcaaggtcaaattagctgctgtagatgcgacagttaatcaagtcctggcatctcgttacggcattcgcggttttcctaccatcaaaatattccagaaaggggagtcgccagtagattacgacgggggacgcacacgcagtgacatagtgtcccgtgcactggatctgtttagtgacaatgcaccccccccagaactgttggagataattaatgaagacatcgccaagcgtacatgcgaagaacatcaactgtgtgtggtggccgtcctcccccatatcttggacaccggcgctgccggaagaaactcttatctggaggttctcctgaaactagccgataagtacaaaaaaaaaatgtggggttggctgtggaccgaggcaggcgcccagtcagaactggagaccgcactgggtattggtggctttggttatcctgccatggctgccatcaacgcccgtaaaatgaagtttgccctgctgaagggctccttcagtgagcagggcatcaacgagtttttgagggagctgtctttcggacgggggagtaccgctccagtagggggtggcgccttcccaacaatagtggaacgtgagccctgggacggtcgggatggtgagctgcccgtagaggatgatatcgacctgagcgacgtcgaactagacgatctgggtaaggacgagctctag

SEQ ID NO: 201270 - DNA, 36 bp, synthetic construct; identical to SEQ ID NO: 95076
  misc_feature 1..36: note = Description of Artificial Sequence: Synthetic coding sequence
  source 1..36: mol_type = other DNA

SEQ ID NO: 201271 - DNA, 1314 bp, synthetic construct
  misc_feature 1..1314: note = Description of Artificial Sequence: Synthetic coding sequence
  source 1..1314: mol_type = other DNA
atgatcctgggcctggtgagctgcaccttcttcctggccgtgaacggactctactcttcctctgacgatgtcatagagttgactccatcgaatttcaacagagaagtgattcaatctgactctttgtggctagtggaattctatgcaccctggtgtggacactgtcagcgcttaacccccgaatggaagaaagcagctacagctctgaaagatgttgtgaaggtgggggccgtcgatgccgataagcaccactcactgggggggcaatacggtgtgcaaggcttccccactatcaaaatctttggtagcaacaagaaccggcccgaagattatcagggcggaagaaccggagaagccatcgtggacgcagcacttagcgcactcaggcagttggttaaggatcgactgggaggaaggtccgggggctattccagcggcaaacagggccgatccgatagtagcagtaagaaggatgtgatagagttgaccgacgacagcttcgacaaaaacgtccttgacagtgaggatgtctggatggtggaattttatgcaccgtggtgtggacactgcaaaaatttggagcctgagtgggccgccgctgcctcggaagtcaaggagcaaactaaagggaaagtgaaactggccgccgtggatgcaactgtcaaccaagtgctcgctagtcgatacggaatcagagggtttcctacaatcaagatctttcagaagggcgaatctccagttgattatgacggtggtcgcacaaggtcagacatcgtctcccgcgcattggacctcttttctgacaatgcacctcctcccgaactgcttgagattatcaacgaagacatcgctaagaggacatgcgaagagcaccaactgtgtgtagtggctgtgctaccacacattctagatacaggcgccgctggcagaaattcatacctagaggtgctactgaaattagcagacaagtacaagaagaagatgtggggatggctgtggaccgaggcaggagcacagagcgaattggagactgctctgggcatcggtggatttggatatccggcgatggctgcaatcaacgctcgcaaaatgaagttcgccctactgaagggttcattctctgaacagggaatcaacgagtttcttcgagaactctcgtttgggaggggctccacggctcccgtgggtgggggagcatttccaactattgtcgaaagggaaccctgggatgggcgagatggagagcttcctgtggaagatgatattgacctgtccgatgttgagctggatgacctcggtaaagatgaactatag

SEQ ID NO: 201272 - DNA, 1956 bp, synthetic construct
  misc_feature 1..1956: note = Description of Artificial Sequence: Synthetic coding sequence
  source 1..1956: mol_type = other DNA
atggccgacagcgccgagctgaagcagatggtgatgagcctgcgggtgagtgagctccaggtcctgctcgggtacgccggccggaacaaacatggccgcaagcatgaactcctcaccaaggcgctgcaccttctgaaagctggatgctccccagccgtgcagatgaaaattaaagaactctaccggcgccgcttcccccagaaaatcatgactcccgctgacctttccattcctaatgtgcactcttctcctatgcctgcaacactgtctcctagcaccatcccccaactcacatatgacggacaccccgcttccagccctctgctgcctgtgtcattgcttgggcccaagcatgagctcgagctgccacatttaacctctgccctgcacccggtgcatccggacattaaattgcagaagcttcccttttacgatctgctggacgaactgataaagcctaccagcctggcctcagacaattcacagcgctttcgggaaacctgcttcgccttcgcccttactcctcagcaggtgcagcagataagttcgtctatggacatctctggcaccaaatgcgatttcacagtgcaggttcagctgcgattttgcctgtccgagacctcctgtccgcaggaggatcatttccccccgaatctctgcgtgaaagtgaacaccaaaccttgtagcttacccggataccttccaccaaccaaaaatggggtggagccgaaaagaccctcaagaccgatcaatatcactagtctggtgcgtctgagcacaactgtgcccaatacaatcgtggtctcttggacagccgaaattggacgaaattactcaatggcggtttatttagtcaaacagctctcctccaccgtgctgcttcaacgcctgagggccaaggggatcagaaatcccgaccattccagggccctgattaaggaaaagctcacggctgatcctgacagcgaaattgccactacatccctaagagtaagcctgttatgcccactcgggaaaatgcggctcaccattccttgccgagctttgacctgcagccacctgcagtgcttcgacgctaccctgtatattcaaatgaatgagaaaaagcctacgtgggtctgcccagtgtgcgacaagaaggccccgtatgagcaccttattatagacggactttttatggagatccttaagtactgcacggactgtgatgagatacagtttaaggaagatggcacctgggccccaatgagatcaaagaaggaggtgcaagaagtctcggcttcatataacggggtggatgggtgcttgtcaagtaccctcgaacatcaggtggcaagccatcatcagagctctaacaaaaacaaaaaagtggaggttatcgacttaaccatcgactcttcatcagacgaagaggaagaagaacccagcgcaaaacggacctgtccgagcttgtcccccaccagtcccctgaacaacaagggtattcttagcctgccgcatcaggcctccccggtgagtcgtactccctcacttccagctgtggatacaagttacattaatacgtcgctgattcaggattacaggcatccttttcacatgacaccaatgccatatgaccttcagggtttagatttctttcctttcctgagtggtgataatcagcattataatacctcattgttggctgctgctgctgctgctgtcagtgatgaccaggatctgctccactccagccggttctttccctatacctcctcccagatgttcttggaccagctgagcgccggggggagcacctccctgcctaccaccaatggatcctcctctggatcgaacagcagtctggtgtcctcaaattccctccgggagagccatagccatactgtcactaaccggtcttccactgacacagcgagcatattcgggataattccagatatcatatctctggactag

SEQ ID NO: 201273 - DNA, 1962 bp, synthetic construct
  misc_feature 1..1962: note = Description of Artificial Sequence: Synthetic coding sequence
  source 1..1962: mol_type = other DNA
atgttcaccctgcaggacagctacgtgaagcagatggtgatgagcctccgggtgtccgagctacaggtgctgcttggctatgcaggccggaataagcatggacgtaagcacgagcttctcacaaaggccctgcatcttctgaaagcgggctgttctcccgcagtccagatgaaaatcaaggaactgtatcgaagacgctttccccaaaagattatgaccccggccgatctatccatccctaacgtccactcttcaccaatgcccgccaccctttcgccgtctactattccacagctcacctacgatggacatcctgctagctctccactgctgccagtgtccctcctcggtcccaagcatgaactggaattgccccatctcacgtctgcactgcatcctgttcatcctgacattaaactacagaaactccctttctatgacctgctggatgaactgatcaaacccaccagtctggcatcagataactctcaaagattcagggagacctgtttcgcctttgcgctgacccctcagcaagtgcaacaaatcagttcatctatggatatctcaggtaccaaatgcgactttactgtccaggttcaactgcgcttttgcttgtctgaaacatcctgcccacaggaggaccactttcctcctaacttgtgtgttaaagtcaataccaagccgtgttccctacctggatacctgccgccaactaagaacggagtggagcctaagaggccgtcgagacccatcaacattacatctttggtgagactatccactactgtgcctaacacgatcgtggtgagttggactgcggaaataggtagaaattactctatggccgtctacttggttaaacagctttcctccaccgtattactacagcgtctgcgagccaaggggatcaggaatcccgatcattctcgggctttgattaaagaaaagctgaccgccgatccggatagcgaaatagcgacaaccagtcttcgggtctccctcctgtgccccctgggcaagatgaggctaaccatcccgtgcagggctcttacctgttcccacctgcaatgtttcgatgctaccctgtatatacagatgaacgaaaaaaaaccgacttgggtatgtcccgtgtgcgataaaaaagccccatacgagcatctgatcatcgatggcttattcatggagatcctcaagtactgtacggattgtgacgagattcagtttaaagaagacggcacatgggcccccatgcggagcaagaaggaggttcaagaggttagtgcctcgtacaatggcgttgatggatgtctgtctagcaccctggaacatcaagtagcctcacatcatcaatccagtaataaaaataagaaggtagaagtcattgatctcactattgattcgtcctcagatgaggaggaagaggagccttctgctaaacggacatgtcctagtctcagtccaacctccccactgaataacaaaggaatactgtctctcccccaccaggcctctcccgtgagtagaacaccctcgctgcctgctgtcgacaccagttacattaatacatcgcttatacaagattataggcacccctttcacatgacgcctatgccttacgacctgcagggcctcgacttctttccctttttaagcggcgataatcagcactacaacaccagtctacttgcggctgcggccgctgcagtgtcagatgatcaggatctgttacactcgtctcgattctttccatacacgtcctcccagatgttcttggatcagctgagtgccggaggcagcacttcactgcctaccactaacggtagctccagtggcagtaattcatcactcgtgagctctaatagtctgcgggagtcccatagtcacaccgtgacaaaccggagtagtaccgatacagcctccattttcgggattatccccgacattattagcctggactag

SEQ ID NO: 201274 - DNA, 1782 bp, synthetic construct
  misc_feature 1..1782: note = Description of Artificial Sequence: Synthetic coding sequence
  source 1..1782: mol_type = other DNA
atggccgagctgggcgagctgaagcacatggtgatgagcttccgggtaagcgagctgcaggttctccttggcttcgctgggcggaacaaatctggccggaaacatgagctcctcgcgaaagccctgcatctgctgaagagttcctgcgcaccaagtgtacagatgaaaattaaagaactctatagaagacgatttcctcgtaagaccctggggcccagcgacttgtctctgctcagcctcccacctgggactagtcctcccgtacaccccgatgtcaccatgaaacccctcccattctatgaagtgtacggcgaacttatccgacccaccacccttgcatcgacgtcatcgcagcgatttgaagaagcccacttcacgtttgcgctcactcctcagcaggttcagcagattctgacctctagggaggtgctgccgggggcaaaatgcgactatacaattcaggttcagctgagattctgtctgtgcgaaacttcgtgcccccaagaggattactttcccccaaacctgttcgttaaagtgaacggcaagctctgccctctgccaggatacctgccacctaccaagaatggggcggagcctaagaggccaagccgcccaattaatatcaccccgctggctaggctgagcgcaaccgtgcctaatactatcgtggtgaactggtcttctgagtttgggcggaattactcgttgtcagtttacctcgtcagacagctgaccgccgggaccctgttgcagaagctgcgcgccaagggaatacgtaatcccgaccactcacgtgcacttatcaaagagaagctgactgccgaccccgacagtgaggtggccaccacctccttgagggtgtctctgatgtgccccctcggaaagatgcgattgaccgtgccatgcagagcacttacatgtgcccacctccaaagttttgacgctgcactttacctgcagatgaacgaaaaaaaacccacttggacctgccccgtatgcgacaaaaaagccccatacgagtccctgataatagatggccttttcatggagatcttgtcctcgtgttctgattgtgacgaaatccagttcatggaagatgggtcctggtgccctatgaaaccaaaaaaagaagccagcgaggtgtgtccaccacctgggtatggactggatgggctccaatacagtccagtgcaggggggagaccccagtgagaataagaagaaagtggaggtgatagaccttacaatcgaaagttcctcagatgaggaagatcttccgcctacaaagaagcattgttccgtcacttcagccgccattcctgctctccctggatctaagggcgtgctgacctctggccaccagccctcaagcgtcctgagatcgcccgccatgggcaccctaggaggggactttctgtctagtctgcctctccacgaatatcccccggccttccctctcggcgccgacatccagggtttggacctattttccttcctccagaccgagagccagcactatggtccttccgtcatcacatccctggatgagcaggacgccttgggtcacttcttccagtaccgaggcaccccctctcacttcctgggacctctcgcacccacgttgggaagctctcactgcagcgcaacccctgccccgccccccggaagggttagttccattgtggcacccggtggggctctgagggaaggccacggagggcctctgccgtccggcccaagtttaacaggctgtcgctccgatatcattagtctagattag

SEQ ID NO: 201275 - DNA, 873 bp, synthetic construct
  misc_feature 1..873: note = Description of Artificial Sequence: Synthetic coding sequence
  source 1..873: mol_type = other DNA
atggtgatgagcttccgggtgagcgagctgcaggtgctgctgggcttcgccggaagaaataaaagcggccgaaaacatgagcttcttgcaaaagccctgcatctgctgaaaagctcctgtgccccctccgtgcagatgaaaatcaaagagctttacaggcggcgcttcccaagaaaaactttggggccttccgatttatctctccttagcctgccccccggtacatcgccagttggatcccccggtcctctggcaccaatccctcccactctcctagcccccgggacccttctcggccctaaacgcgaagtggacatgcacccaccgctgccccagcccgtacatcccgatgtgaccatgaagccccttccattctacgaagtgtacggcgaactcatacgaccaaccaccttggcctccactagtagtcagcgctttgaggaggcccacttcactttcgccctcaccccacagcaggtccagcagatcttgacctcccgagaggtgctccccggggcaaagtgtgattatacaatccaggtgcagctaagattttgcctgtgtgagacatcttgtccacaagaagactacttcccaccaaacttgtttgtgaaagtgaatgggaagctgtgccccctgcctgggtacctgccccctaccaaaaatggagccgagccaaagagaccttctagacctataaatattacccccctcgctcggttgagcgcgactgttcctaacaccatcgtggttaactggagctcagagttcggaagggtgtctactgcgaaagcgggcgcctggaagtctcttctgagagtgaaggggaatcatcctgtctcttgggtcggagaggcctttagcagcctgtag

SEQ ID NO: 201276 - DNA, 1887 bp, synthetic construct
  misc_feature 1..1887: note = Description of Artificial Sequence: Synthetic coding sequence
  source 1..1887: mol_type = other DNA
atggccgagctgggcgagctgaagcacatggtgatgagcttccgggtcagcgaactgcaggtactgcttggattcgcgggcaggaataaatcaggaaggaagcacgagctgctggcaaaggccttgcacctgctaaagagttcttgtgcgccctccgtccagatgaagattaaagagctgtatcggcggcggtttccacgcaaaactcttggcccgagtgacttaagtctcttatctttacctccaggtaccagtcccgttggctctcctggtcccctggccccaataccacccaccctgctggcgcccggaacactgcttggcccaaagcgtgaggtggacatgcatcctccactaccccagcctgttcacccggatgtaacgatgaaacctctgccattttatgaggtttatggggaactgattcgaccaacaaccttggcaagcaccagttctcaaagattcgaggaggcccacttcacttttgcactcacccctcagcaggtgcagcagattctcacctcaagagaagtgctgcctggggcaaaatgcgactacaccatccaagtccagctaaggttctgcttgtgtgagacgagttgccctcaggaagactacttcccaccaaatctctttgtgaaggtcaacgggaagttgtgcccactgcccggctatctgcctcctaccaaaaacggcgccgaacccaaaagaccaagtagacccatcaacattactcctcttgcgaggctctccgccaccgtccccaacacaatcgtcgttaattggagttcagaattcggcagaaattacagcttaagtgtgtatctggtgaggcaactgactgctgggactcttctccagaaactaagggctaaaggcattcgcaaccccgaccatagtagagcgctgataaaggaaaaactcacagcggatcccgattccgaagttgcaacaacgagcctgcgggtctccttaatgtgcccactcggcaaaatgaggctgaccgtaccatgccgcgcacttacctgcgcccacttgcagtcttttgatgccgccctgtacctgcagatgaacgagaagaagcccacttggacttgccccgtgtgcgataagaaggccccttacgagtcgttaattattgatggtttgttcatggaaatcctctcaagctgttctgactgcgacgaaatccagttcatggaggatggctcctggtgtccaatgaagcccaaaaaggaagcctccgaggtttgtcctcccccaggctacgggctagacgggctccagtatagccctgttcagggcggcgacccaagcgagaacaagaagaaggtcgaggtcattgacctgacaatagagtcctcaagtgacgaagaagacctgcctccaaccaagaagcattgcagtgtcaccagtgcagcaatacccgcacttccaggatctaaaggagtgttaactagcggccaccagccatcaagcgtgctcaggagtcctgccatgggaaccctgggaggcgattttctgtcatcactcccgcttcacgaataccccccggctttcccattaggtgccgatatacagggactcgacctcttcagcttcctacagacagagagtcagcactatggcccaagtgttattactagcttggatgagcaggacgcattgggacattttttccaataccgggggacacctagccatttcctcggccctcttgcgcccacacttgggagctcacattgctccgcaacaccagctcctcctccagggagggtgagttctattgtcgcccctggaggagcccttcgagagggtcacggcggacctctcccaagtggtccatcattgactggatgtaggagtgacattataagtttagattag

SEQ ID NO: 201277 - DNA, 780 bp, synthetic construct
  misc_feature 1..780: note = Description of Artificial Sequence: Synthetic coding sequence
  source 1..780: mol_type = other DNA
atggtgatgagcttccgggtgagcgagctgcaggtgctgctgggcttcgccggcaggaacaagtcaggcagaaagcatgagttgctggcaaaggccttacacctactcaagtctagctgcgcacccagtgtccaaatgaaaattaaagaactctaccgcaggcgttttcctcgtaaaacgcttggccccagcgacctgagcttgctgtcccttcccccaggtaccagtcctgtagggtctcctggtcctctggcccctattcctcccaccctactggctcccggaaccctgctgggccctaaaagagaggtagatatgcacccccccttaccccagcccgtgcacccagatgtcacaatgaaacccctgcccttttacgaggtttatggtgaactaatcagacccacaacgctagcatctacgtcttcccagcgcttcgaagaggcccacttcaccttcgctctgacccctcagcaagtccagcagatccttaccagccgcgaggtcctgccgggtgccaaatgtgattacacaatccaggttcaacttaggttctgtctgtgtgagaccagctgtcctcaggaggactactttcccccgaacctgtttgtgaaagtgaacggaaagctttgtcccctgcccgggtatctcccgcccacaaaaaatggcgccgaacctaagaggccaagccgaccgatcaatatcacacccttggcacggctcagcgcaacggtgccaaataccatcgtcgtgaattggtcttccgagttcggccgctag

SEQ ID NO: 201278 - DNA, 1248 bp, synthetic construct
  misc_feature 1..1248: note = Description of Artificial Sequence: Synthetic coding sequence
  source 1..1248: mol_type = other DNA
atgttcgccgacctggactacgacatcgaggaggacaagctgggcattcctacggtacccgggaaagtgaccctgcagaaggacgcccaaaatctgatcggcattagtatcgggggcggagcgcagtactgtccctgcttgtacattgtccaggtgtttgataatactccggctgcccttgacggtaccgttgcagctggcgatgaaataactggtgttaacggcaggagcatcaagggaaagaccaaggtcgaagtcgccaagatgattcaagaagttaaaggtgaggtgactatccactacaacaaactgcaagcggaccccaagcaaggcatgtcacttgacatcgtcctcaaaaaggtgaagcacaggttagtcgaaaatatgagtagtggaactgcagacgccctgggtttatcccgagctatcttatgtaatgacggtctggtgaaaagactggaggagctcgagcggactgccgaactgtacaaaggcatgacagagcacacaaagaacctgctacgcgccttctacgaactgagtcagacccatcgcgcatttggcgacgtcttttcagtgattggcgtgcgagagccccagcccgcggccagtgaagccttcgttaagttcgccgatgcccatagaagtatagagaaattcggaatacgactgctcaaaacgataaaacctatgctcaccgatttgaacacatacttgaacaaggctattccagacactaggctaacaatcaagaagtatctggatgtcaaatttgaatatctgtcctactgtttgaaggtcaaggaaatggacgacgaggagtactcatgtatagctcttggtgagccactctacagagtgagtactggaaattacgagtaccggttgattctgagatgcaggcaggaggccagggcccgcttcagtcagatgcggaaagatgtgcttgaaaaaatggaattgttggaccaaaagcatgtgcaagatattgtcttccagctccaacgcctggtaagtactatgtccaaatactataatgactgttacgccgttctccgcgacgctgatgtttttcctattgaggtcgatttggcccacacaacactcgcttacggactgaaccaggaggaatttaccgacggggaggaggaggaggaggaggaggatacagctgctggagagccttctagagatacaaggggcgccgccgggccattggataagggggggtcgtggtgcgattcctag

SEQ ID NO: 201279 - DNA, 1248 bp, synthetic construct
  misc_feature 1..1248: note = Description of Artificial Sequence: Synthetic coding sequence
  source 1..1248: mol_type = other DNA
atgttcgccgacctggactacgacatcgaggaggacaagctgggcatcccaacggtccctggcaaggtgacattacagaaggacgcccagaatttaatcggaatctcaatcggaggcggggcacaatattgcccctgtctgtacattgttcaggtgttcgataacacacccgccgccttggatggtactgtggctgccggggacgagatcaccggtgtgaacgggaggtctatcaaaggcaagactaaagtagaagtggctaagatgattcaggaagtgaagggagaagtaaccatacattacaataagctgcaggcggatcccaaacaggggatgtcccttgacatcgtccttaagaaagtgaagcatcggctcgtcgagaacatgagttcgggaacggccgacgctttgggactttctcgggcaattctgtgcaacgatggactcgtgaagcggcttgaggagctcgagagaacagcagaactgtataagggtatgaccgaacacacgaagaacttactccgcgcgttctatgagctcagccaaacccacagagcattcggagatgtgtttagcgtgataggcgtgcgggaaccccagccagctgctagcgaggcgttcgtcaaatttgccgatgctcatcgcagtatcgagaaatttggcattagactgttgaagactatcaagcctatgttgactgacctcaatacctacctgaataaggccattccagatacaaggctgactatcaaaaaatacttggacgtaaagtttgagtacctctcgtattgtctcaaggtgaaggaaatggatgacgaagaatactcgtgcatcgcactgggggagcccctgtatcgggtgagcaccgggaattacgaatacaggctgattttacggtgcaggcaggaggcacgcgctcgattcagccaaatgcgaaaagatgtgctggagaagatggaactgctcgaccagaaacacgtgcaggatatcgtcttccagttgcaacggctggtaagcactatgtccaagtactacaacgattgttatgccgtgttgagggatgccgacgtcttcccaatcgaggtcgaccttgctcacactactctggcttatgggctgaaccaagaagaattcactgatggcgaagaagaggaggaggaggaggataccgcggctggtgaaccctctagagatactcgcggagctgccgggccccttgacaagggtgggtcatggtgtgattcctag

SEQ ID NO: 201280 - DNA, 690 bp, synthetic construct
  misc_feature 1..690: note = Description of Artificial Sequence: Synthetic coding sequence
  source 1..690: mol_type = other DNA
atgttcgccgacctggactacgacatcgaggaggacaagctgggcattcctactgtccccggaaaggtgacattgcagaaagacgctcagaacctcattggaatctctattggaggtggtgcacagtattgtccctgcctgtatatcgtgcaggttttcgacaatacgccagccgctcttgacggaactgtcgcggcaggagacgagatcactggcgtgaatggccggagcattaaaggcaagaccaaggttgaggttgccaagatgattcaggaggtgaaaggagaggtgacaatacactataacaaactgcaggccgatcctaagcagggaatgtctttggatatcgtgctgaagaaggtcaaacacaggcttgtggagaacatgtctagcggcaccgctgatgccctgggtctgtcccgtgccattctgtgtaatgacgggctggttaaaaggctggaggaattggagaggactgctgaactgtacaaaggcatgacagaacataccaaaaacctattgcgtgctttttacgagctgagccagactcatagggccttcggggacgtgttctctgtgatcggggtgcgtgaacctcagcccgccgcgtcagaagctttcgtgaaattcgctgatgctcatcgaagtatagagaaatttggcatccgcctgttaaaaaccataaaatag

SEQ ID NO: 201281 - DNA, 405 bp, synthetic construct
  misc_feature 1..405: note = Description of Artificial Sequence: Synthetic coding sequence
  source 1..405: mol_type = other DNA
atgttcgccgacctggactacgacatcgaggaggacaagctgggcatccccacggtccctggtaaggtgacccttcagaaagacgcccagaacctcatcggtatctccatcgggggaggagcccagtactgtccatgtctctacattgtgcaggtgttcgacaatacacccgctgccctcgatgggacagtggctgctggcgatgagataactggggttaatggcagatccataaaggggaaaacaaaagtcgaagtggccaagatgatacaagaagttaaaggagaagtcactattcactacaataagttgcaagcagaccccaaacaaggtatgtcccttgatatcgtgctgaaaaaggtgaaacatcgcctagtcgagaatatgagctccggcaccgcgtag

SEQ ID NO: 201282 - DNA, 393 bp, synthetic construct
  misc_feature 1..393: note = Description of Artificial Sequence: Synthetic coding sequence
  source 1..393: mol_type = other DNA
atgttcgccgacctggactacgacatcgaggaggacaagctgggcattcccaccgtgccggggaaggtgaccctgcaaaaggatgcgcagaacttaattggcatctcaattggagggggagctcagtattgcccgtgcttgtacatcgtgcaggtgttcgacaacacacctgcagcgctagatggcactgtggccgccggagacgagataactggcgtcaacggccgatctatcaagggtaaaactaaggttgaggtggcaaaaatgatccaggaagttaagggggaggtaaccattcattacaacaagcttcaagccgaccctaaacaaggtatgagcctggacataggccagaggctgggctttcacgggcccggcccacactcctcctag

SEQ ID NO: 201283 - DNA, 117 bp, synthetic construct
  misc_feature 1..117: note = Description of Artificial Sequence: Synthetic coding sequence
  source 1..117: mol_type = other DNA
atgttcgccgacctggactacgacatcgaggaggacaagctgggcatccctaccgtgcctggaaaggtgactctccagaaagacgcccagaatcttatcggtattagtatcgggtag

SEQ ID NO: 201284 - DNA, 231 bp, synthetic construct
  misc_feature 1..231: note = Description of Artificial Sequence: Synthetic coding sequence
  source 1..231: mol_type = other DNA
atgaccgacgtggagaccacctacgccgacttcatcgccagcggccgcacgggccgtagaaatgcaatccacgacatcctggtgagcagcgcgtcaggtaattcgaacgagctagccttgaagctggccggcttagacatcaacaaaactgagggagaggaagatgcacagcgatcatccaccgaacagtctggtgaagctcaaggagaagccgccaaaagcgagtcatag

SEQ ID NO: 201285 - DNA, 231 bp, synthetic construct
  misc_feature 1..231: note = Description of Artificial Sequence: Synthetic coding sequence
  source 1..231: mol_type = other DNA
atgaccgacgtggagaccacctacgccgacttcatcgccagcggccgcactgggcggaggaacgccatacacgacatcctggtgtctagcgcttccggcaattctaacgagctggctttgaaactggccggcctggacattaataagaccgagggagaagaagatgctcagagatcgagcacagaacagtcaggggaagctcagggtgaagcagcaaaatcggaaagctag

SEQ ID NO: 201286 - DNA, 231 bp, synthetic construct
  misc_feature 1..231: note = Description of Artificial Sequence: Synthetic coding sequence
  source 1..231: mol_type = other DNA
atgaccgacgtggagaccacctacgccgacttcatcgccagcggccgaactggccggcggaacgccatccatgacatcctggtctcaagcgctagtgggaacagcaacgaactggccctcaagctcgctggattggatattaataagacagagggtgaagaagatgctcaaaggagttctacagagcaatctggcgaagctcagggtgaagccgccaagtcggagtcttag

SEQ ID NO: 201287 - DNA, 258 bp, synthetic construct
  misc_feature 1..258: note = Description of Artificial Sequence: Synthetic coding sequence
  source 1..258: mol_type = other DNA
atgagccaccaggacgtggccatgcggaccgacagcagcaagatgaccgacgtggagtctggcgtcgccaacttcgcctcaagtgctagagcaggacgaagaaacgcacttcctgatatccagagttcagccgccactgatggcacttctgatctgcccctgaaattagaagccttgtccgtaaaggaggacgctaaggaaaaggatgaaaaaacaactcaggatcagttagaaaagccccagaacgaggaaaagtag

SEQ ID NO: 201288 - DNA, 237 bp, synthetic construct
  misc_feature 1..237: note = Description of Artificial Sequence: Synthetic coding sequence
  source 1..237: mol_type = other DNA
atgcggaccgacagcagcaagatgaccgacgtggagagcggcgtggcgaactttgcttcaagcgctcgtgctggcagaagaaacgccctgccagatattcaatcctctgctgctacggatgggacgtcagatctgccactgaagctagaagccctctcagtgaaagaggacgcaaaagagaaggatgaaaagaccacccaggaccagttagaaaagccgcagaatgaagaaaaatag

SEQ ID NO: 201289 - DNA, 264 bp, synthetic construct
  misc_feature 1..264: note = Description of Artificial Sequence: Synthetic coding sequence
  source 1..264: mol_type = other DNA
atgcacatcctgttcgtggacgtggccatgcggaccgacagcagcaaaatgaccgatgtggagagcggagtcgccaacttcgcctctagtgccagggcagggagacggaatgctttgcccgacattcagtcttccgccgccactgatggcactagtgatttgccactcaagctggaggcactgagtgtgaaagaagacgcgaaggagaaggatgagaaaaccactcaagatcagctcgaaaagcctcaaaacgaggaaaaatag

SEQ ID NO: 201290 - DNA, 237 bp, synthetic construct
  misc_feature 1..237: note = Description of Artificial Sequence: Synthetic coding sequence
  source 1..237: mol_type = other DNA
atgcggaccgacagcagcaagatgaccgacgtggagagcggcgtggccaacttcgcctctagcgcccgagctgggagacggaatgccttgcctgacatacaaagcagtgccgccaccgacggcacatccgacttacctttgaaactggaagctctttcagtcaaagaggatgctaaggagaaggatgaaaagactactcaggaccagttagagaagcctcagaatgaagagaaatag

SEQ ID NO: 201291 - DNA, 237 bp, synthetic construct
  misc_feature 1..237: note = Description of Artificial Sequence: Synthetic coding sequence
  source 1..237: mol_type = other DNA
atgcggaccgacagcagcaagatgaccgacgtggagagcggcgtggctaactttgcttcatccgccagagccggaagacgtaacgcgttacctgacattcagagttcggcggccaccgacggcacttccgatctgccactgaaacttgaagctctgtctgtaaaagaggacgcgaaggagaaagacgagaagactactcaggaccagctggagaagccacaaaacgaggagaagtag

SEQ ID NO: 201292 - DNA, 237 bp, synthetic construct
  misc_feature 1..237: note = Description of Artificial Sequence: Synthetic coding sequence
  source 1..237: mol_type = other DNA
atgcggaccgacagcagcaagatgaccgacgtggagagcggcgtggccaatttcgcctcctcagctcgcgccggtcggcggaatgctttgcccgatattcagagtagcgcagccaccgatggaacgtccgacctgccactcaaactggaagccctatccgtgaaggaggacgctaaggaaaaggacgaaaaaactacccaggaccagctggaaaagccccagaacgaggagaagtag

SEQ ID NO: 201293 - DNA, 237 bp, synthetic construct
  misc_feature 1..237: note = Description of Artificial Sequence: Synthetic coding sequence
  source 1..237: mol_type = other DNA
atgcggaccgacagcagcaagatgaccgacgtggagagcggcgtggctaactttgcatcatctgccagagccgggaggcgtaacgccctgcccgacatccaaagctcggctgccaccgacggcacgagtgatcttccattaaaattggaggcactttccgtgaaggaggacgccaaagaaaaggatgaaaagactacccaggaccagctcgagaaaccccagaatgaggaaaaatag

SEQ ID NO: 201294 - DNA, 231 bp, synthetic construct
  misc_feature 1..231: note = Description of Artificial Sequence: Synthetic coding sequence
  source 1..231: mol_type = other DNA
atgatggaggtggagagcagctacagcgacttcatcagctgcgaccgcacaggccgcagaaatgccgttcccgatattcagggggactctgaagcagtctccgtgcgcaagctggcaggggacatgggagaactggcgcttgagggtgcagagggtcaggttgaaggaagcgctccagataaggaggcagggaaccagcctcagtcatctgatggtactacaagcagttag

SEQ ID NO: 201295 - DNA, 195 bp, synthetic construct
  misc_feature 1..195: note = Description of Artificial Sequence: Synthetic coding sequence
  source 1..195: mol_type = other DNA
atgatggaggtggagagcagctacagcgacttcatcagctgcgacagaaccggacggcggaacgcagtgccagacattcagggcgactccgaagccgtgagcgtcaggaagcttgcaggagatatgggtgagcttgcgcttgagggagcagagatggacttaacaatgttgccatggctcgtgagcaactcttag

SEQ ID NO: 201296 - DNA, 231 bp, synthetic construct
  misc_feature 1..231: note = Description of Artificial Sequence: Synthetic coding sequence
  source 1..231: mol_type = other DNA
atgatggaggtggagagcagctacagcgacttcatcagctgcgaccgcacaggcagacggaacgcagttcccgacatccaaggcgacagcgaagccgtcagcgtaaggaagctggcaggcgacatgggagagctggccctagaaggagctgagggccaagttgagggatcagcgccagacaaagaggcaggcaaccaaccgcagtcctctgatggcacgacctcttcatag

SEQ ID NO: 201297 - DNA, 231 bp, synthetic construct
  misc_feature 1..231: note = Description of Artificial Sequence: Synthetic coding sequence
  source 1..231: mol_type = other DNA
atgatggaggtggagagcagctacagcgacttcatcagctgcgacaggacaggcagaagaaatgctgttcccgacattcaaggtgactctgaagcggttagcgtgagaaagttagccggagatatgggggaattagcgttggaaggggccgagggtcaggtggaaggcagcgcacctgacaaggaagcgggaaaccagccccagtccagtgacgggaccacctcttcgtag

SEQ ID NO: 201298 - DNA, 231 bp, synthetic construct
  misc_feature 1..231: note = Description of Artificial Sequence: Synthetic coding sequence
  source 1..231: mol_type = other DNA
atgatggaggtggagagcagctacagcgacttcatcagctgcgacaggacaggacggcggaatgcagtccccgacattcagggcgatagcgaggctgtcagcgtgcggaaacttgcaggtgatatgggggaactggcactggaaggcgctgaaggccaagtggagggaagcgcgcccgacaaggaagccggcaaccagcctcaaagttccgacggaacaacaagctcctag

SEQ ID NO: 201299 - DNA, 231 bp, synthetic construct
  misc_feature 1..231: note = Description of Artificial Sequence: Synthetic coding sequence
  source 1..231: mol_type = other DNA
atgatggaggtggagagcagctacagcgacttcatcagctgcgacagaactggccgacgaaatgccgtccctgatatccaaggggattcggaagcagtatctgtgagaaagctagcaggtgacatgggagagcttgccctagagggcgcggagggccaggtcgaaggatccgcaccggacaaggaggccggtaaccagcctcagtcttccgatggtaccacgtcttcctag

SEQ ID NO: 201300 - DNA, 231 bp, synthetic construct
  misc_feature 1..231: note = Description of Artificial Sequence: Synthetic coding sequence
  source 1..231: mol_type = other DNA
atgatggaggtggagagcagctacagcgacttcatcagctgcgaccgcacggggcgccgcaacgctgtgcctgacatccaaggcgattctgaggcagtgagtgtccgcaagctcgcaggggatatgggggaactcgccttggagggtgccgaaggacaggtcgaagggagtgcccctgacaaagaggccggcaatcagccccagtctagtgacggaactacctcttcctag

SEQ ID NO: 201301 - DNA, 1578 bp, synthetic construct
  misc_feature 1..1578: note = Description of Artificial Sequence: Synthetic coding sequence
  source 1..1578: mol_type = other DNA
atgcccctgctggacggcgacctggagggcagcggcaagcacagcagtcggaaggtggattcccctttcggacccggctcacctagcaaaggtttcttcagcagggggcctcagcctaggccgagtagccctatgagcgcccctgtgcgacccaaaacatcccctgggtcgcccaaaaccgtgtttccttttagctaccaggaaagtccacccaggtcacctcgcagaatgtcgttctccgggatcttccggtcctcatctaaggagagctcacccaattctaatcctgctacctcacccggaggcatccggtttttttcacgttctagaaagacatctggcttaagctctagcccatcaacgccaactcaggtgacaaagcaacatacattcccactggagtcttacaagcatgagccagaacgactggagaataggatttacgcatcctcttctccccccgacactggacagagattttgcccttcttcctttcagagccctacacgacctcctctagccagtccaacccactacgctccatctaaggccgctgcactcgctgcagctttgggtcctgccgaggctggtatgctggaaaaactggaatttgaagacgaggctgtagaagactcggaaagtggggtgtacatgaggtttatgcggtctcataaatgttacgatatagtgccgacttcgtcaaaattggtggtcttcgacacaacactgcaggtgaaaaaagctttttttgctctggttgccaatggggtgcgggccgccccactttgggaatctaaaaaacaaagcttcgtgggcatgctgactattaccgattttatcaacattctgcatcgttactacaaaagtccgatggtacagatctacgagctcgaggagcacaagatcgaaacctggcgagaactatacctccaagaaacatttaaacccctcgtgaacataagccccgacgcgagtctttttgatgccgtgtactccctgatcaagaataagatccatcgattgcctgtcattgatcccattagcggcaacgccctgtacattctcactcataagcgtatactgaaattcctgcagcttttcatgagtgacatgcccaagccagcctttatgaaacagaatcttgatgaactcgggatagggacctaccataacatagcattcatccatccagatacgccaattatcaaggctcttaatatcttcgtcgagcgacggatttccgccctccctgtggtggacgagagtggcaaggtcgtggatatatattctaagttcgatgtcattaacctagcagctgagaagacgtataacaacctggatattaccgtgactcaagctctccagcacagatcacaatacttcgagggagtggtgaagtgcaacaagctggaaatattggagacaatcgtggacagaatagttcgggccgaggtgcacagactggttgtggttaacgaagccgacagcattgtcgggataatctctctctcagacattcttcaggccttaatcctaacccctgccggcgctaaacagaaggagaccgagacggagtag

SEQ ID NO: 201302 - DNA, 987 bp, synthetic construct
  misc_feature 1..987: note = Description of Artificial Sequence: Synthetic coding sequence
  source 1..987: mol_type = other DNA
atgctggagaagctggagttcgaggacgaggccgtggaggacagcgagtccggggtttatatgaggttcatgagaagccataagtgttatgacattgtccctacgtcgtccaagctggttgttttcgacacaacactccaggttaaaaaggccttctttgctctcgttgctaatggcgtgagagccgcccccttgtgggagtctaaaaagcagtcatttgtggggatgctcactataactgactttataaatatcctgcatagatattataagtcacccatggtgcagatatacgagcttgaggagcataaaatagagacctggcgcgaattgtatctccaagagactttcaagccgcttgtgaacattagccccgacgccagtctgttcgacgctgtctattccctgattaagaataaaatccacaggctgcccgtaatcgacccgatctctggaaatgctctctatattctgacacataagcggattctcaagttcctgcaactgttcatgagtgatatgccgaagcctgcctttatgaagcagaatcttgacgagctggggatcggtacctatcataatattgctttcatccacccagatacacccattatcaaggccctcaatatcttcgttgaaaggaggatttctgccctgcctgtcgttgacgagagtggtaaggtagtagacatttattccaagtttgacgttattaacctggccgccgagaagacctacaataatttggacatcacggttacacaagcgctccagcataggtcccagtacttcgagggtgtggttaagtgtaacaaacttgaaattcttgaaaccatcgtggatcgaattgtgcgggccgaggtgcacaggttagtggtggtgaatgaggccgactccattgtgggtattattagtctgagcgacattctacaggctctgatcttgaccccggctggggccaaacagaaggagaccgaaacagaatag

SEQ ID NO: 201303 - DNA, 1335 bp, synthetic construct
  misc_feature 1..1335: note = Description of Artificial Sequence: Synthetic coding sequence
  source 1..1335: mol_type = other DNA
atgagcagcagctacgacgaggccagcctggcccccgaggagaccaccgactctttctgggaagtcggtaactacaaaagaacggtgaaaaggatcgacgacggacataggttatgcaatgacctgatgaattgcgtgcaggaacgggcaaagatagaaaaggcgtacggacagcagctgactgattgggcgaagcggtggcgacagctcattgaaaagggtccacagtacggatcacttgagcgggcctggggggccattatgaccgaggccgataaagtgtccgagcttcaccaggaggtaaaaaataaccttctgaacgaggatctggaaaaggtcaaaaattggcaaaaggatgcatatcacaagcagattatgggtggttttaaagagacaaaggaggccgaggacggatttaggaaagcccagaagccttgggctaagaagatgaaggagctagaggccgccaaaaaggcttaccatttagcctgtaaagaagagaagctcgctatgaccagagaaatgaacagcaagacggagcagtccgtgacccccgagcagcagaagaaactgcaggacaaggtggacaagtgtaagcaagacgtgcagaaaacacaggaaaagtacgaaaaagtgcttgaggacgtcggtaaaaccactccgcagtacatggaaaacatggaacaggtgtttgaacagtgccagcagtttgaggagaagagattggtgtttttaaaggaggtgctgctggacattaaaagacatctgaacctcgccgaaaacagcagttatattcatgtttacagggagctcgagcaggcaattaggggggccgacgcccaagaagatctgcgctggttccggtctacatcaggccctgggatgccgatgaactggcctcagttcgaggaatggaaccccgatctaccacataccacgaccaaaaaggagaaacagccgaagaaggctgagggagtggctctcacaaacgcaactggggccgtggaaagcacatcacaagctggagaccgcgggagcgtttcaagctatgatcgcggtcagccttacgccacagagtggtctgatgacgagtccggcaacccatttggtgggtccgaaactaacggcggcgccaacccctttgaagatgactccaagggtgtgcgggttagagcactgtacgattacgacggccaagaacaggatgagctttcttttaaagcgggcgacgagttaaccaagctgggcgaagaagacgagcagggatggtgcagaggaagactggattctgggcagctggggctttatccagctaactatgtggaggcaatctag

SEQ ID NO: 201304 - DNA, 1281 bp, synthetic construct
  misc_feature 1..1281: note = Description of Artificial Sequence: Synthetic coding sequence
  source 1..1281: mol_type = other DNA
atgagcagcagctacgacgaggccagcctggcccccgaggagaccacagactctttttgggaggtcgggaattacaagaggactgttaaacgcatagatgacggtcatcgtctttgcaatgacctgatgaactgcgtgcaggaacgggccaagatcgagaaagcttatgggcagcaactcactgactgggccaaacggtggcgacagctgatcgaaaaggggcctcagtatggatcactagagcgagcctggggggctattatgacagaggccgacaaggtcagtgagctccaccaagaagtcaaaaataatctcctcaacgaggatcttgaaaaagtcaagaattggcagaaggatgcatatcacaagcagattatgggtgggtttaaggagaccaaggaagcggaagatggcttcagaaaggcgcaaaagccatgggctaagaaaatgaaggaactggaggctgcgaagaaggcctaccaccttgcatgcaaggaggaaaaattagcaatgaccagagaaatgaactcaaagactgagcagtcggtgacccctgagcagcagaagaagctgcaagacaaagtcgataagtgtaaacaggatgtgcagaaaacccaagagaagtacgaaaaggtactggaggacgtggggaagacaacaccacagtatatggagaacatggagcaggtgtttgagcagtgccaacaatttgaggagaagcgccttgtttttctaaaagaggtgctgctggacattaaacgccaccttaacctcgcggagaatagttcatacattcatgtctacagggaactcgagcaggctatccgtggtgctgatgcacaagaggatctaagatggttcagatccacatctgggccggggatgcccatgaattggcctcagtttgaagaatggaatcctgacctgcctcacaccacgactaagaaggaaaagcagccaaagaaagccgagggcgtggccctgaccaatgccactggcgcagtcgaaagcacctcgcaggccggagatcgtggaagtgttagctcctatgaccgcggtcagccgtatgcaaccgagtggagcgatgatgaaagtggaaatccattcggcgggtcggaaacgaacggcggcgctaatccatttgaggacgattccaaaggcgtgcgcgtgcgcgcactctacgactacgatggacaggaacaggatgaactgtctttcaaggccggggatgaattgaccaagctgggtctctaccccgctaattacgtggaggcaatatag

SEQ ID NO: 201305 - DNA, 1335 bp, synthetic construct
  misc_feature 1..1335: note = Description of Artificial Sequence: Synthetic coding sequence
  source 1..1335: mol_type = other DNA
atgagcagcagctacgacgaggccagcctggcccccgaggagaccacagactctttctgggaagttggcaattacaagcgaactgtaaagaggatcgatgacgggcaccgcctgtgcaacgacctgatgaactgtgtccaagagagggccaagatcgagaaggcctacggtcagcaactcacggactgggctaagagatggcggcagctgattgaaaagggaccacagtatgggtccctggaacgcgcttggggagcaatcatgaccgaagccgataaggttagtgagctgcatcaagaagtaaagaataatctgctcaatgaagacctggaaaaagtgaagaactggcaaaaggacgcataccacaaacagatcatgggcggatttaaagagactaaggaggcagaggatggttttcggaaggcgcagaagccgtgggccaaaaagatgaaggagttagaggccgccaaaaaagcgtatcatctggcctgtaaggaggaaaagctggctatgacgcgtgagatgaattcaaaaactgagcagtccgtgactcccgagcagcagaaaaagttgcaggataaggtggacaaatgtaagcaggatgttcagaagactcaagagaagtacgaaaaagtgttggaagatgtaggcaagaccactcctcagtatatggaaaatatggaacaggtatttgaacaatgtcaacaatttgaagagaaacggctagtgttccttaaggaggtcctattagatatcaagagacacctaaacctggccgagaatagctcatacattcatgtataccgggaactagagcaggcgatcagaggggcggatgcacaggaagatctgcgttggttccgaagcacaagtggcccaggtatgcctatgaattggccgcagtttgaggagtggaatccagacctacctcacacgacaactaaaaaagaaaagcagcccaagaaggccgagggcgtggcactgaccaacgcaaccggcgccgtggaatctactagtcaagcaggcgatagaggctctgtatccagttacgatagggggcagccatatgcaaccgaatggtcagatgatgaatctggaaaccctttcggcggtagtgagacaaacgggggcgctaacccctttgaagacgactcaaaaggcgtgcgcgtgcgagcattgtatgactacgatggccaggagcaggacgaacttagctttaaggctggcgatgaactaacaaaactgggtgaagaagacgaacaagggtggtgccgcggcagactggacagcggacaactgggcctgtatccagcaaattatgtggaagcaatatag

SEQ ID NO: 201306 - DNA, 1275 bp, synthetic construct
  misc_feature 1..1275: note = Description of Artificial Sequence: Synthetic coding sequence
  source 1..1275: mol_type = other DNA
atggcccccgaggaggacgccggcggcgaggccctgggcggcagcttttgggaagctggcaactaccgaagaaccgtacagcgcgtggaagatggccaccgcctatgcggggatctggtatcatgtttccaggaacgagcgaggatcgaaaaagcatacgcccaacagctcgctgattgggctcgaaagtggcgtggcactgtggaaaaggggcctcagtatggcactctggaaaaagcatggcacgctttctttactgccgctgagcgcctctccgcactgcatctcgaagtccgcgagaagctgcaagggcaggactctgagcgggtgcgggcctggcagagaggcgcctttcacagaccggtgttggggggttttagggagagccgagctgcagaggacggattcagaaaggcccaaaaaccatggttaaagagacttaaggaggtggaggctagcaaaaagagctaccacgccgccaggaaagacgagaagaccgcgcagactcgcgagagccacgccaaggctgattcagccgtcagccaagaacagctgcgcaagcttcaggaacgcgtggagaggtgcgctaaagaggctgaaaaaacgaaggctcagtacgaacagactttggctgaattgcaccgatatacacctcgctacatggaggatatggagcaagcctttgagacttgccaggcagccgaacggcaaaggttactgtttttcaaggatatgctgttgaccttacatcagcatcttgacctctcctcatccgaaaaatttcatgagctgcacagggacctgcaccagggaatagaggcagcgagtgacgaggaggatctcaggtggtggaggtctactcatggacccgggatggccatgaactggccccagttcgaagagtggagtctggacacacaaagaaccatctctcggaaggaaaagggaggccgtagtcccgacgaagtgactcttacaagcatcgtacccacccgcgatggaacagctcctccaccgcagagccccggctccccaggaacgggccaggatgaagaatggtccgacgaggagagtccaagaaaagctgcaaccggagtcagggtcagagcactctacgactacgctgggcaggaagcagacgagttatccttccgcgccggggaggaattactcaagatgtcggaagaggacgagcagggctggtgccaggggcaactgcaatccggcagaattggactctaccccgccaattacgtcgaatgtgtaggcgcgtag

SEQ ID NO: 201307 - DNA, 879 bp, synthetic construct
  misc_feature 1..879: note = Description of Artificial Sequence: Synthetic coding sequence
  source 1..879: mol_type = other DNA
atggcccccgaggaggacgccggcggcgaggccctgggcggcagcttctgggaggcaggcaattaccgtcgaacagttcagagagtcgaggacggacatcggttatgcggcgatttagtgtcctgcttccaagagagagccagaatcgagaaggcctatgcgcaacagcttgcagactgggctcgcaaatggcggggtacagtagagaaaggacctcaatacggtaccctggagaaggcttggcacgcctttttcactgccgcggagcggctttctgccttgcatctggaggtgcgcgaaaaacttcagggtcaggacagcgagagagttcgggcctggcagcggggtgcctttcacaggcccgtactaggaggatttcgggaatccagggcggccgaagacgggttccggaaggcccagaagccctggttgaaaaggctcaaggaggttgaagcttcaaaaaaatcctatcatgctgcccgtaaggacgagaaaaccgctcagacacgagagacacaacgacagacagctccatcccctcggtccagctgtgctaattgtaggaacggatggaacgctgttccccgccggcctaggaggcagaagctgtcaatgagcagaaggtggcagtcttgtatagctactttgcatgcgacatggcggacatggaataggccacttagaccagctcggcctcctagcgccagtggcttcttctccagccgtatctgctgtagtccgtacacaagcacctggaccttccctgccgtccgctccagtatgaattccaccgtcacctgcactagggctctgcgccaacccgttacgaagcggatctgcgcaggcggagctgcacctacagggcaggcatggccatag

SEQ ID NO: 201308 - DNA, 210 bp, synthetic construct
  misc_feature 1..210: note = Description of Artificial Sequence: Synthetic coding sequence
  source 1..210: mol_type = other DNA
atggcccccgaggaggacgccggcggcgaggccctgggcggcagcttctgggaggcaggtaactatagaagaaccgttcagagggtcgaagacggccaccgactctgcggcgacttagtcagttgcttccaggaacgcgcacggatagagaaggcatacgcccagcaattggcagactgggctagaaaatggcgagggacggtggagtag

SEQ ID NO: 201309 - DNA, 429 bp, synthetic construct
  misc_feature 1..429: note = Description of Artificial Sequence: Synthetic coding sequence
  source 1..429: mol_type = other DNA
atggcccccgaggaggacgccggcggcgaggccctgggcggcagcttttgggaggccggcaattatagaagaacagtgcagagggtcgaggacggacaccgtctgtgtggagatttggtcagctgttttcaggagcgggcaaggattgagaaggcttacgctcagcagctcgcggactgggctcgcaaatggcggggtaccgtggagaaggggccacaatatggaactctcgagaaggcctggcacgctttctttaccgcagccgagcgtctgagcgccctccatctagaagtgagggagaaattgcaaggacaggattctgagcgcgtgcgcgcatggcaaaggggcgcctttcatcgtcctgtcctcggaggcttccgcgagtctcgcgccgccgaggacggcttccgtaaagcccagaaaccttag

SEQ ID NO: 201310 - DNA, 1218 bp, synthetic construct
  misc_feature 1..1218: note = Description of Artificial Sequence: Synthetic coding sequence
  source 1..1218: mol_type = other DNA
atggcccccgaggaggacgccggcggcgaggccctgggcggcagcttttgggaggccgggaactaccgccggacagtacagcgcgttgaggatggacaccggctgtgtggtgacttggtcagttgctttcaggagcgagctagaatcgaaaaagcctatgctcagcagctcgccgattgggcaaggaaatggcgcggaaccgtggagaagggtccccaatacggtaccctggagaaagcttggcacgcttttttcaccgccgctgagaggctgtcagcattacacctggaggtccgggaaaagctccagggccaggactccgagcgcgtacgagcatggcagcgaggtgccttccatcgacctgtactcggcgggtttcgggaaagccgagcagctgaggacgggttccgcaaagcccaaaagccatggcttaaaagactgaaagaggttgaggcgagcaagaagtcttaccacgccgctcggaaagacgagaaaactgctcagacacgagagtctcacgccaaagcagacagcgccgtgagtcaggagcaactccgcaagctacaggaacgagtggagcgatgtgccaaagaagcagaaaaaacgaaagctcagtacgaacagactctggctgaattgcatcgatatacaccccggtatatggaggatatggaacaggccttcgagacgtgtcaggctgccgaacgccagcggctgctgttcttcaaggatatgctcctgactcttcaccagcatctcgatctcagcagttcagagaagttccatgaattgcaccgggatttgcaccagggcatagaagcggcttctgatgaagaagacctaaggtggtggaggagcacccatggacctgggatggctatgaactggccacagttcgaggagtggtccctggacacccaaagaacaatcagtcgaaaagaaaagggcggccggtctccagatgaagtgacactaacaagtatagtgccaaccagagatgggactgctcccccccctcagagcccaggttctcccggcaccggccaagatgaggagtggtcggatgaagagagtcctaggaaagcagctaccggagtgagggtgagagcactatacgactacgcaggacaggaagccgatgagctcagctttagggccggcgaagagcttttaaaaatgtccgaggaggacgagcagggttggtgtcagggacagtag

SEQ ID NO: 201311 - DNA, 210 bp, synthetic construct
  misc_feature 1..210: note = Description of Artificial Sequence: Synthetic coding sequence
  source 1..210: mol_type = other DNA
atggcccccgaggaggacgccggcggcgaggccctgggcggcagcttttgggaggccggtaactatcggcgaaccgtgcagcgagtcgaggacggccatcggctatgcggggacctcgttagttgtttccaggagagggccagaatagagaaagcctatgcgcagcaacttgccgattgggccaggaagtggagaggcacggtggagtag

SEQ ID NO: 201312 - DNA, 447 bp, synthetic construct
  misc_feature 1..447: note = Description of Artificial Sequence: Synthetic coding sequence
  source 1..447: mol_type = other DNA
atggcccccgaggaggacgccggcggcgaggccctgggcggcagcttctgggaagcaggtaattatcgtcgcacagtacagcgggtggaagacggacatcgcctttgtggtgacctggtgagctgtttccaggagagagcccggattgagaaagcatacgcccagcaattggcagattgggctaggaagtggagaggaacagtcgagaagggcccacagtacggaaccctggagaaagcctggcatgctttctttacggcggcggagcggctgagcgccctgcatctggaagtgcgggagaaactacaggggcaggatagcgaacgggttagggcctggcagcggggagcctttcacagaccagtgctcggcggatttcgggaatctcgcgcagcagaggacggattcagaaaggcacagaaaccgtggctcaagaggttgaagtag

SEQ ID NO: 201313 - DNA, 1275 bp, synthetic construct
  misc_feature 1..1275: note = Description of Artificial Sequence: Synthetic coding sequence
  source 1..1275: mol_type = other DNA
atggcccccgaggaggacgccggcggcgaggccctgggcggcagcttttgggaagctggaaactatcgccggacagtccagagggtcgaagacgggcacagactctgcggggatctggtgtcttgctttcaggaaagggcacggattgaaaaggcatacgctcagcagctggcagattgggcgcgtaagtggagaggcactgtggagaaaggcccacagtacggtaccctggagaaggcctggcacgcattttttacggctgcagaacgtctgtctgccctccacttggaagtgagggagaagcttcagggccaggattctgaacgcgtccgggcctggcagcgcggtgccttccaccgacctgttttgggcggattcagggagagccgggccgccgaagatggttttaggaaagcccagaaaccgtggttgaagaggctgaaggaagtggaggcttcaaaaaagtcttatcacgccgcaaggaaggatgagaaaaccgcccagacccgagaaagccacgcaaaggccgacagcgccgtgagccaagagcaattgaggaagttacaggaaagggtggagcgttgtgccaaagaagctgagaagactaaagcacaatacgaacagacgctggccgaactccaccgctacaccccacggtatatggaagatatggagcaggcctttgaaacatgtcaagcagcagagcgacagaggcttctgttctttaaagatatgcttttaaccctccaccaacaccttgatctaagctccagcgaaaagtttcatgagctgcatcgtgacttacatcaggggatcgaggcggcaagcgatgaagaagatttgagatggtggagaagcactcatggccccgggatggcaatgaattggccacagtttgaggaatggtccctagatacgcagcggacgatttcccggaaggaaaagggagggagaagcccggatgaagtaacactcacttctatagtgcccacaagggatggaaccgccccaccccctcaatctcccggaagtcccgggacaggccaggacgaagaatggtcagacgaagagagtccacggaaagccgccacaggggtgcgtgtccgcgctctgtatgattacgctggtcaggaggccgacgagcttagcttcagggctggagaggaattgctcaagatgtctgaagaagacgagcagggctggtgccaggggcagttgcagtccgggcgcattggcctgtaccctgctaattatgtggagtgtgtcggcgcttag

SEQ ID NO: 201314 - DNA, 1587 bp, synthetic construct
  misc_feature 1..1587: note = Description of Artificial Sequence: Synthetic coding sequence
  source 1..1587: mol_type = other DNA
atgctgctgcccctgctgctgctgctgcccatgtgctgggccgtggaggttaagaggccccgcggcgtgagtttgacaaaccaccatttttatgacgaaagcaaaccgtttacatgtctcgatggttctgcaaccatcccattcgaccaagtaaacgacgactactgtgactgtaaagacgggagcgacgaacctggcaccgccgcctgtcctaacggttctttccattgtacaaataccgggtacaagccactttatattcctagcaatcgcgtcaacgacggagtctgtgattgctgcgatgggacagacgagtataactcaggcgtcatctgtgagaacacatgtaaagagaaaggcaggaaagaacgcgaatctctccagcagatggcggaagttacacgcgagggcttccggctcaaaaaaatattgattgaagactggaaaaaagctagagaggagaaacagaagaagctgatcgagctgcaggcagggaagaagtccttggaagatcaagtggaaatgctcaggaccgtaaaggaagaggcggaaaagccggaacgcgaagccaaggaacagcatcagaaactttgggaggagcagctggctgctgcaaaggcccaacaggaacaagaactcgccgccgatgcattcaaggagttggacgatgacatggacgggactgtctcagtaaccgaattacagacccatcctgagctcgataccgatggagatggagctctcagcgaagcggaggcccaagcactcctttctggagacactcaaacggatgcaaccagtttttacgaccgggtttgggccgccatccgggataagtacagatccgaagctctgccaaccgatcttccagcaccaagtgccccagacttaacggagcctaaagaagaacagccacccgtgccgtcctctcctaccgaagaagaagaagaagaagaagaagaagaagaggaagaagcagaggaggaggaggaagaggaggattcagaagaggcccctcctcctctgagtccgcctcagccagcgtctccagccgaagaggataaaatgcctccatacgatgagcagactcaggcatttatagacgcagcacaggaggcccgcaataaatttgaagaggccgaacggtctctgaaagacatggaggaaagcattaggaaccttgaacaagagattagctttgacttcggtccaaatggtgagtttgcttatctgtattcacagtgttacgagctcacaactaatgaatatgtctacagactgtgtccgtttaagctagtcagccagaagcccaaactcggaggatccccgacatcccttggcacatggggatcttggatcggaccagaccacgacaagtttagcgccatgaagtatgaacaagggactggctgttggcagggacctaaccggagtactactgtacgcttactgtgcgggaaggagactatggtgacttcaaccaccgaacctagtcgttgcgagtatcttatggaacttatgactcccgcggcttgcccagagccccccccagaagcccccacagaggacgaccatgacgagttgtag

SEQ ID NO: 201315 - DNA, 1578 bp, synthetic construct
  misc_feature 1..1578: note = Description of Artificial Sequence: Synthetic coding sequence
  source 1..1578: mol_type = other DNA
atgctgctgcccctgctgctgctgctgcccatgtgctgggccgtggaagtcaagaggccccggggcgttagcctcactaatcatcatttctatgacgagtcaaagccttttacttgtctcgatgggagcgcaaccatcccattcgaccaggtaaatgatgattactgcgattgcaaggatgggtctgacgagcccggaacagccgcctgtcctaacggtagctttcactgtactaacaccggatataaaccactgtatattccttctaaccgggtgaacgacggggtctgtgactgctgcgacgggaccgatgagtacaattccggtgtcatctgcgaaaatacatgcaaggagaaaggcaggaaggaaagagaatcacttcaacagatggcagaggtcacaagggaaggttttcggctgaagaaaatactcatcgaagactggaaaaaggcacgcgaggagaaacagaaaaagctcatcgagcttcaggctggaaaaaagtccctcgaggatcaggtggagatgctcagaacagtgaaggaagaagccgaaaagcctgagagagaagccaaggagcagcaccagaaactgtgggaggagcagcttgccgcggcaaaggcacaacaagaacaagaactggcggcagacgccttcaaggagctggatgatgacatggacggcactgtgtccgtaacagaactgcagacccatcctgagctcgatacagacggtgatggggcactgtccgaagccgaagctcaggctcttttgagcggagatactcaaacggacgctacatccttttacgaccgggtatgggctgctattagggataaatatcgtagtgaggcgttgccaacagatctgcctgcccccagcgcgccggatctcaccgagcctaaggaagaacagccccccgtgccatcctctccaaccgaggaggaagaagaggaagaggaagaagaggaagaagaagccgaggaggaggaagaggaagaggatagcgaggtgcagggggagcagcccaagcccgccagcccagctgaggaggataaaatgccgccttacgatgagcaaactcaggctttcattgacgcagcacaggaggcccgcaacaaattcgaagaggccgagagatcactgaaggacatggaggaatcgatccggaatttggaacaagaaatctccttcgactttggccctaatggcgagttcgcatacctatactcccaatgttatgagctgaccaccaatgagtatgtgtacaggctctgccctttcaaactagtgagccagaaaccaaaactgggcgggtccccaactagtctgggcacatggggtagttggattggcccagaccacgataaattcagtgccatgaaatacgaacaggggaccgggtgttggcagggtcccaaccgttctaccaccgtgcggctcctttgcggtaaggaaaccatggtgacgtccacaacagagccctcgcgatgtgagtacttaatggagctcatgacccctgcagcctgccccgaacctcccccggaagcgccaaccgaagacgaccacgacgaattgtag

SEQ ID NO: 201316 - DNA, 2031 bp, synthetic construct
  misc_feature 1..2031: note = Description of Artificial Sequence: Synthetic coding sequence
  source 1..2031: mol_type = other DNA
atggcccccttcctgcggatcgccttcaacagctacgagctgggctccctacaggcagaggatgaagctaatcaacccttctgtgccgtgaagatgaaggaggccctgtctacagagagagggaagaccctcgtacagaaaaaacctaccatgtaccctgagtggaagagtactttcgatgcacatatatatgaaggccgggttatccagatcgtcctgatgagagccgccgaagagccagtgtccgaggtgaccgtgggcgtcagcgtgctcgcagagcgttgtaaaaagaacaatggtaaggcagaattctggctcgacctccaaccccaagccaaggtactcatgagcgtccaatatttcttggaggacgtcgattgtaaacagagcatgagatctgaggacgaggccaaattcccaacaatgaaccgccggggcgcgattaaacaggccaagatacactatattaagaaccacgaatttatcgcaacattcttcggccaacctaccttttgcagcgtgtgtaaagatttcgtttggggcctaaataaacaaggctataagtgtcggcaatgcaacgctgccatccataagaagtgtatagacaagataatcgggagatgcactggcactgcagctaatagtagagatactatatttcagaaagaaaggtttaatattgacatgccccatcggtttaaggtccataactacatgtcacccacattctgcgatcattgcggctccttattgtggggcttggtgaaacaggggctgaaatgcgaggactgtggaatgaacgtgcaccacaagtgtagagagaaagtggccaatctgtgtggaatcaaccagaagctgctggcggaggccctgaatcaagtcacgcaacgagcctctcggcggtcagattcggcatcatctgaacccgtaggaatataccagggttttgagaagaagacaggagtggctggcgaggacatgcaggataactctggcacatatgggaaaatctgggaggggtcctccaagtgcaacatcaacaacttcatctttcacaaagtgctgggaaagggctcattcggcaaagtgctgctcggcgaactgaagggcaggggcgaatacttcgcaattaaagcattgaagaaggatgtggtcctgatcgacgatgacgtggagtgcactatggtggagaagcgggtcctcaccctggctgccgagaatccattccttacgcacctgatctgcaccttccaaaccaaggaccatctgttctttgtgatggagttcctcaacggcggcgacctcatgtatcatatccaggacaaaggcaggttcgaattatatagagccactttttatgccgccgagatcatgtgcggcctgcaattcttgcattctaaaggtattatctatcgggacctgaaactggataatgttttgctcgatagggacggacatattaaaattgcggacttcgggatgtgcaaagaaaacatcttcggggagagccgcgcaagtactttttgtggcacccctgactatatcgctcctgagatactacaaggtctgaaatacaccttttctgtggattggtggagctttggtgtcctgctgtacgagatgctaatcggccaatccccattccacggggatgacgaggatgaattgtttgagagcataagggtagatacacctcactaccccagatggatcacgaaggaatccaaggacattcttgagaagctgtttgagcgagaacctaccaagagattgggtgtcactggaaacattaaaatccacccattctttaaaacaataaattggacgctgctagagaagcgtcggctggaacctccgtttcgccctaaggtgaaatctcctcgagactactcaaatttcgaccaggagtttctgaacgaaaaggctagactgtcgtattccgataagaacctgatcgactccatggaccagtcggcctttgctggattttctttcgttaacccaaagttcgaacacttactagaggactag

SEQ ID NO: 201317 - DNA, 2031 bp, synthetic construct
  misc_feature 1..2031: note = Description of Artificial Sequence: Synthetic coding sequence
  source 1..2031: mol_type = other DNA
atggcccccttcctgcggatcgccttcaacagctacgagctgggcagcctccaggccgaagatgaagccaaccagcccttctgcgcagtgaagatgaaggaagctttgtctacagaacggggcaagactcttgtgcagaaaaaacctactatgtaccccgagtggaagagtacttttgacgcacatatttacgaaggaagagtcatccagatagtcctgatgagggccgcagaagaacccgtgtccgaggttacggtcggagtgagcgtcctcgcagagcgctgcaaaaaaaacaatggtaaggcggaattttggctggatcttcagccacaggcaaaagtgctaatgtccgtgcagtatttcttggaggatgttgactgcaaacagagcatgaggtctgaggacgaagcaaaattcccaaccatgaataggaggggagccataaagcaagccaaaattcactatatcaaaaaccatgagttcattgctactttcttcgggcagcccacattttgtagcgtctgcaaggactttgtttggggccttaataagcagggatataaatgtaggcagtgcaacgccgccatccataagaagtgcatagacaaaattatcgggaggtgtacaggcacagcagccaacagccgagacaccatttttcagaaggaacgatttaatatcgacatgccccatcgatttaaagtccacaattatatgagtccaacgttttgcgatcactgcggtagccttttatgggggctggtgaagcagggcttgaagtgcgaggattgcggcatgaatgtccaccacaagtgccgggagaaggtcgccaacctctgtggaataaaccaaaagctgttggcggaggccttaaaccaggtgacccagcgagccagtcgacgcagtgattccgcttcttccgagcctgtgggcatctaccagggcttcgagaaaaaaaccggagtcgctggcgaagacatgcaagataactctggaacatacggaaaaatctgggaggggtccagcaaatgcaatattaacaatttcatcttccacaaggtgttaggcaagggttcctttgggaaggtcctcctgggggaactgaaaggcaggggcgagtacttcgcaatcaaagctttaaaaaaggacgtagtcctcatcgatgacgacgtagagtgcacaatggtggagaagcgtgtgctgacgctggccgccgagaacccttttctgacccacctgatctgcacgtttcaaaccaaagaccacctattctttgttatggagttcctaaacgggggcgatttaatgtaccatattcaggataaagggcggttcgagctgtaccgtgccacattttatgcagccgagattatgtgcgggctccagtttctccactccaagggaattatctaccgtgacctcaagttggacaatgtgctcctcgaccgcgatggccatattaaaatcgctgacttcggcatgtgcaaggagaacatcttcggcgagtcccgagcctctacattctgtggaaccccagactacattgctcccgagatactccagggactgaaatatacgttttcagtggattggtggtcatttggggtgttgctgtacgagatgctgatcgggcaatctccctttcacggagatgatgaggacgagctgttcgaatccatacgtgtcgacaccccacactatccgcgttggatcaccaaggaaagcaaagatatcctggagaagcttttcgagcgcgagccgacaaagagactgggagtgacaggaaacataaagattcatccctttttcaaaacaattaattggacactcctggaaaagagacggttagaaccaccttttagaccaaaagtgaagtctcctagggattattctaacttcgaccaagaattcctgaatgagaaggccaggctcagttacagcgataaaaatctgattgactccatggatcagagcgcttttgccggtttttccttcgtcaatccaaagttcgagcacctgcttgaggattag

SEQ ID NO: 201318 - DNA, 234 bp, synthetic construct
  misc_feature 1..234: note = Description of Artificial Sequence: Synthetic coding sequence
  source 1..234: mol_type = other DNA
atggcccccttcctgcggatcgccttcaacagctacgagctgggctcgctgcaagctgaggatgaggctaaccagcctttctgtgctgtaaaaatgaaagaagctctctccacagagagagggaagactctggtccagaaaaaaccaactatgtacccggaatggaaatcaacatttgacgctcacatatacgaagggcgggttatacagattgtcctcatgcgggctgcctag

SEQ ID NO: 201319 - DNA, 378 bp, synthetic construct
  misc_feature 1..378: note = Description of Artificial Sequence: Synthetic coding sequence
  source 1..378: mol_type = other DNA
atggcccccttcctgcggatcgccttcaacagctacgagctgggcagtctccaagccgaggatgaagcaaatcaacctttctgtgccgtgaagatgaaggaggctttatctaccgaacgaggtaaaacactggtccaaaagaagcctacgatgtatcctgagtggaagagcactttcgatgcacacatatatgaaggacgcgtgatccagattgtgctgatgcgagcagcagaggaacctgtgtccgaggtgaccgtaggggtgagtgtgctcgctgagcgttgtaagaagaataacggaaaagcggagttctggcttgatctccaaccgcaggcgaaagtgcttatgagcgtacaatattttctcgaagatgtttag

SEQ ID NO: 201320 - DNA, 2052 bp, synthetic construct
  misc_feature 1..2052: note = Description of Artificial Sequence: Synthetic coding sequence
  source 1..2052: mol_type = other DNA
atgagcagcggcaccatgaagttcaacggctacctgcgggtgcggataggcgaggcagtgggcctgcagcccacaagatggtccctgaggcactccctgttcaaaaagggtcaccaactgttagacccttacctgaccgtgagtgtagatcaggtaagagttggccaaacttcaacgaagcaaaaaacaaacaaaccaacctacaacgaggaattctgcgctaacgtgactgacggaggacacttagaattggcagtatttcacgaaacgcctttggggtacgatcactttgtcgccaattgtacacttcagttccaagaactcctgcgcactactggcgcttccgatacctttgaggggtgggtagacctcgagcctgaagggaaggtgttcgttgtgattaccctgacaggctcattcaccgaggccacgctgcagcgagataggatcttcaaacacttcacaaggaaaaggcagcgcgctatgagacgccgagtgcatcaaatcaacggccacaaatttatggccacatatttgcggcagcccacatattgctcccactgtagagagttcatatggggtgtgttcgggaagcaggggtaccagtgccaagtctgtacatgcgtcgttcacaaaagatgtcaccaccttatagtcactgcctgtacatgtcagaataatatcaataaagtagatagtaagatcgcggagcagcggtttgggatcaacattcctcacaaattcagcatacacaattacaaagtgccaaccttctgtgatcattgtggcagcctgctgtggggaatcatgcggcagggcttgcagtgcaagatttgtaagatgaatgtgcacatcagatgccaggcaaatgtggcacccaattgtggtgtgaatgcagtcgaactagctaaaacccttgcagggatgggactgcagccgggcaatattagccccaccagcaaattggtttcacggtccacactgcgtcgacaagggaaggagagcagcaaggaaggtaacggaatcggggtaaactctagtaacaggcttggaattgacaacttcgagttcatccgggtcctgggtaagggatcatttggaaaggtcatgcttgcgcgcgtgaaagaaaccggagatctttatgctgttaaagtgttgaagaaggatgtgattctacaggatgacgatgtcgaatgtactatgacggaaaagcggattttgtccttggctaggaaccatccctttctcacacagctcttttgctgtttccagacacccgatcggttgtttttcgtcatggagtttgtaaacggaggtgatctgatgtttcacatccagaagtccaggcggtttgatgaggctagggctcgcttctatgcagcggaaatcatttccgcgttgatgttcctacatgacaaaggtatcatctatagagatttgaagttggacaacgtgctgctggaccatgagggccattgcaagttggccgactttggcatgtgcaaggagggaatctgtaatggcgttaccaccgctactttctgtggtactccagattacatcgcaccagagatcctgcaggagatgttgtatgggcctgccgttgattggtgggcaatgggagtgttactgtacgaaatgttgtgcggacacgcccccttcgaggctgagaacgaggacgacctatttgaggcaatcctgaacgatgaggttgtctaccctacttggttgcacgaagacgctaccggaatcctgaaatctttcatgaccaagaacccaacaatgcgactaggtagtcttacccaagggggggagcatgcgattcttaggcaccctttttttaaggagatcgattgggctcagcttaatcaccggcaaatagaaccacctttcagacctagaattaaatccagggaagatgtgtcaaattttgatcccgatttcattaaagaggagcctgtgctcactcccatcgacgagggtcacctgcctatgattaaccaggatgaattcaggaattttagctacgtatcacccgagcttcaaccctag

SEQ ID NO: 201321 - DNA, 357 bp, synthetic construct
  misc_feature 1..357: note = Description of Artificial Sequence: Synthetic coding sequence
  source 1..357: mol_type = other DNA
atgagcagcggcaccatgaagttcaacggctacctgcgggtgcggattggcgaggccgtgggactccagccgacacgttggtctttacgacacagcctgtttaaaaaggggcatcagctgttggatccatacctcaccgtgtctgttgatcaggtcagagtcggccagaccagcacgaagcagaagaccaataaacccacatataacgaagagttttgcgctaatgtcaccgacggcgggcacctggagctcgctgtcttccacgagactcccctgggatacgaccacttcgtggccaattgcaccctgcagtttcaggagctgctgaggacaacaggagcaagtgacaccttttag

SEQ ID NO: 201322 - DNA, 1791 bp, synthetic construct
  misc_feature 1..1791: note = Description of Artificial Sequence: Synthetic coding sequence
  source 1..1791: mol_type = other DNA
atgcccacccagcgggacagcagcaccatgagccacaccgtggccggcggcggctctggggaccactctcatcaggtgcgggtcaaagcctattaccggggggatattatgattacccattttgagccgtctatctcatttgaaggattgtgtaacgaagtcagagatatgtgctcctttgacaatgaacagctgttcaccatgaagtggattgacgaagagggggatccttgtaccgtcagtagccagctggagttagaagaggcattccgcttgtatgaattgaataaggattcggaacttctgatccacgttttcccatgtgttccagaaagacctggtatgccctgcccgggtgaagataagtccatttataggcggggcgcgcgccgctggaggaagctatattgtgccaacgggcatacctttcaggcaaagcggttcaacaggagggctcactgcgcaatctgtactgacaggatctggggcctgggtcgacagggctacaaatgtatcaattgtaagttgctggtgcacaagaaatgtcataaactggtcaccattgagtgcgggagacatagcttgcctcaggaaccagtgatgccgatggatcagagtagtatgcactccgaccatgcccagaccgtcattccctataatccgtcctcccacgaatcactggaccaagtgggtgaggagaaagaagcgatgaacacccgggagagtgggaaagcgagcagcagtctggggctgcaggatttcgatctattgagggtgatcggaagaggatcgtatgccaaggtactcctggtgaggctgaaaaaaactgatcggatctatgccatgaaagtcgtcaaaaaggaactggtgaatgacgacgaagacattgattgggtccagactgagaaacacgtctttgagcaggcttcaaaccaccctttcctggtaggcctgcattcatgctttcagactgaaagtcggctgttctttgtcatcgaatatgtcaacgggggtgacctgatgttccacatgcagcgccagcgcaagctgcctgaggaacacgcgcgcttttacagtgcagaaattagtctggctctgaattacctacatgagcgcggcataatctatcgcgatctgaagctcgataacgtcctattggattcagagggccacataaaactgacagattacggcatgtgtaaagagggcctccggcccggcgacaccacttccaccttttgcggcactcccaactacatcgcaccggagatactccgcggggaagactacgggttctctgtggactggtgggcccttggcgtccttatgttcgaaatgatggctggcagatctccttttgatatcgtgggctccagcgacaatcctgatcagaataccgaggattacttgtttcaggtcatcctcgagaaacaaatcaggatccctaggagcttgtccgtgaaggccgcctctgtgcttaagtcttttctgaataaagaccctaaagagcgcctggggtgtcatccccagacgggtttcgcagatattcagggccacccattcttccgtaacgttgactgggacatgatggagcagaaacaggtggtgcctcccttcaagccaaacattagtggtgaattcggattggacaattttgactctcagttcaccaatgaaccagtccagctgacacctgatgatgacgacatagtgaggaagatagatcagtcggagtttgaaggttttgagtacattaatcctttactgatgagtgcagaggagtgcgtttag

SEQ ID NO: 201323 - DNA, 2121 bp, synthetic construct
  misc_feature 1..2121: note = Description of Artificial Sequence: Synthetic coding sequence
  source 1..2121: mol_type = other DNA
atgagccccttcctgcggatcggcctgagcaacttcgactgcggctcctgccagtcatgccagggcgaggctgtgaacccttactgcgccgtgctcgtgaaggagtacgttgagagcgagaatggccagatgtacattcagaagaaacctaccatgtacccgccatgggacagcacctttgatgcccacatcaataaagggagggtcatgcaaatcatcgtgaaagggaagaatgtggatctcatatctgaaacaacggtcgagctgtactcattagccgagcggtgccgaaaaaataacgggaagacagagatatggctcgagctgaaaccccaggggcgcatgctgatgaatgctagatactttctagaaatgtccgatacaaaagacatgaacgagtttgagaccgagggtttctttgccctgcaccagcgtaggggagctatcaagcaggctaaggttcaccatgttaagtgtcacgagtttactgccacatttttccctcaacctactttctgctctgtctgtcatgagtttgtttggggattgaacaagcagggttaccagtgtagacagtgcaacgccgcaattcataagaagtgtatcgataaagtcatagctaagtgcacagggagcgctataaatagccgggagaccatgttccataaggagagatttaagatcgacatgccgcacagatttaaggtgtacaactacaaatcccccacgttttgcgagcattgcggaacgctgttgtggggtctggccaggcaagggctgaagtgtgacgcttgcggcatgaatgtgcaccacagatgtcaaactaaggtggccaacctgtgtggtataaaccagaaactaatggcggaagccttggctatgatcgaaagcacgcagcaagcaaggtgcctgcgtgacaccgaacagattttccgagaaggccccgtggagatcgggctgccctgctctatcaagaacgaagctaggccaccttgtctgcctacacctggaaagcgggagccccaggggatttcctgggaatctcccctggacgaggtggacaagatgtgtcaccttccagaacccgaattaaacaaggaacgcccaagtctgcagattaagctcaagatcgaggattttatattgcataaaatgctggggaaggggtccttcggcaaagtgttcctggcggagttcaaaaagaccaaccagttttttgccattaaagctctcaagaaagacgtggtgttgatggatgacgacgtggaatgtacaatggttgaaaagcgtgtgctgtccctggcatgggaacacccattcttaacgcatatgttctgcacctttcagaccaaggaaaatctatttttcgtgatggaatacctgaatggcggggatttaatgtaccatattcagtcctgccataaatttgatctcagccgggcaactttctacgctgccgaaatcattctcgggctgcaattcctccattctaagggcatcgtgtatcgggacctcaaactggataacatcctgctcgataaagacggccacatcaagatcgcagatttcgggatgtgcaaggaaaacatgctgggggacgccaaaactaatacgttctgtggaactcctgattacatagctccagagatcctgcttgggcaaaagtacaatcattccgttgattggtggagctttggggtcttgttatacgagatgctcattggccagagcccatttcatggccaggatgaggaggagctattccatagtatccgcatggacaacccgttttacccgagatggctcgaaaaagaagcaaaggacctgctggtaaagctctttgtgcgggaacccgaaaaacgcctgggcgtgagaggagacattcggcaacatcctctctttcgagagataaactgggaggagctggaacggaaagaaattgaccccccatttcggcctaaggtcaagagcccttttgactgtagcaatttcgacaaagaatttttgaatgaaaagccaagactctcatttgcagaccgggctcttatcaatagcatggaccagaatatgtttagaaatttcagcttcatgaatcccggtatggaacgattgatttcatag

SEQ ID NO: 201324 - DNA, 1932 bp, synthetic construct
  misc_feature 1..1932: note = Description of Artificial Sequence: Synthetic coding sequence
  source 1..1932: mol_type = other DNA
atgagccccttcctgcggatcggcctgagcaacttcgactgcggctcatgtcagagttgccagggcgaagccgtcaatccttactgcgccgtcctcgttaaggagtatgtggaatctgaaaacggccagatgtacattcagaagaagcctacaatgtatcctccctgggatagcacattcgatgctcatataaacaagggacgagtgatgcagatcattgtcaaagggaaaaacgtagacctcatcagtgagactaccgttgagctatactcactggctgaacgttgccggaagaataatgggaaaaccgaaatctggctggaactgaagccacagggcagaatgctaatgaatgcaagatatttccttgaaatgtcagacaccaaggatatgaatgagttcgagacagaagggttttttgctttacatcaaagaaggggtgcaatcaagcaagctaaagtgcatcatgtgaaatgccatgaattcactgccacattctttcctcaacctaccttttgctctgtctgtcatgagttcgtgtgggggctgaataaacaaggatatcaatgccgacaatgcaatgcagccattcacaagaagtgtatagacaaggtgattgctaaatgcacaggtagtgctattaattcgagagagactatgtttcacaaggagagatttaagatcgacatgccccaccgttttaaggtatataattacaagagccccacattctgtgaacattgtgggacattgctgtggggccttgcacgccagggtctgaagtgcgacgcttgtggtatgaatgtccaccacaggtgccagacgaaggtggccaacctctgcgggattaaccagaaactgatggcagaggcgctcgcgatgattgagagtacccaacaggctcgctgcttaagggatacggagcaaatcttcagagaaggacctgtagaaatcggtctgccatgttctattaagaatgaggctcgtcccccttgcttgcccacaccaggcaagcgggaaccgcaggggatttcctgggaaagtccgctggacgaggtggataagatgtgtcacctgcctgaacccgaactgaacaaggagcgcccttcgctccagataaagttgaagattgaggactttatcctccacaagatgcttgggaagggaagtttcggcaaggtgtttctggccgagtttaagaaaactaaccagttcttcgccatcaaagctctcaaaaaggatgtggtgctgatggatgatgatgtggagtgcacaatggtggagaagagggtcctcagtttagcctgggaacacccttttctgacacatatgttctgtacttttcaaaccaaggagaatttgtttttcgtgatggaatatcttaacggcggagacctgatgtatcatattcaaagctgtcacaaattcgacctctctcgggccaccttttatgctgccgaaatcatacttggattgcagttcctgcattcgaaaggtatcgtttatagggaccttaagctggataacatcctcttggacaaggacggtcacattaagatagcggatttcggcatgtgcaaggaaaatatgctcggggacgccaagacaaacacattttgcggtaccccagactacattgcccctgaactgttcgtgagggagccggagaaacgcttaggcgtgcggggggatattcgccagcaccccctcttcagagagatcaattgggaggaattggagcgcaaggaaattgaccctcctttcaggcctaaggtgaagagtccctttgattgctcaaacttcgataaggaattcttaaatgagaaacctcgattaagtttcgccgatcgagccctcattaattccatggatcagaacatgttcagaaatttttccttcatgaatccggggatggagcgtctcatctcatag

SEQ ID NO: 201325 - DNA, 1440 bp, synthetic construct
  misc_feature 1..1440: note = Description of Artificial Sequence: Synthetic coding sequence
  source 1..1440: mol_type = other DNA
tgactgagcctgctgccctgcctgctgttcctgcccaccatcatcccaaagaaaattgtcatccagcgggattctctgccatctaagaaactgtcttacgggctgatagcttgcgggatgaacgtgcatcatcggtgccagacaaaagtggccaacctgtgcggtatcaaccaaaagctgatggctgaggctctggcaatgatcgaatcaacgcagcaggcccgttgcctgcgggacacagaacagatatttcgcgaaggcccagtcgaaattgggttgccatgttccattaagaatgaagccaggccaccgtgtcttcccacacccgggaaaagagaacctcagggcatcagctgggaaagccctttggatgaggtcgataaaatgtgtcatctgccagaacctgagctcaacaaagaacgcccatctctccaaattaagctaaagattgaggacttcattctgcacaaaatgctgggcaagggttcttttgggaaggtttttctcgcagaatttaaaaagacgaatcagttctttgcaataaaggccttgaagaaagatgtggtgcttatggatgacgatgttgaatgcaccatggtagagaagcgggtcctctcactggcatgggaacatccgttcctgacccatatgttttgcacattccagactaaggagaacctgttcttcgttatggaatatctgaatggcggcgatctgatgtaccatatccagtcatgccacaagttcgacctgtcacgagccaccttctacgctgccgagataattctcggcctccaatttttacacagcaaaggcattgtgtatcgggatcttaagctggacaacattctccttgataaggacgggcatatcaagattgctgatttcgggatgtgcaaagagaacatgttgggcgatgcaaagacaaatacgttctgcggtaccccagattatattgcacccgaaatattactgggtcagaaatacaatcattccgtggactggtggagttttggtgtcctcctgtatgaaatgcttatcggccagtcccccttccatggccaggacgaagaggagcttttccactcaatccggatggacaatcccttctacccacgctggttggaaaaggaggctaaagacctgctggtgaaactcttcgtaagagaacctgaaaagaggcttggagttcggggagacatcaggcagcaccccctgttcagagagataaactgggaagagcttgaaaggaaggagattgaccccccatttcgccctaaggtgaagtcaccttttgactgctccaactttgataaagaattcctcaatgagaaaccgcggctgagcttcgccgatagggcccttatcaattcaatggaccagaatatgttcagaaatttcagctttatgaatcccgggatggagcggctcattagctag

SEQ ID NO: 201326 - DNA, 1746 bp, synthetic construct
  misc_feature 1..1746: note = Description of Artificial Sequence: Synthetic coding sequence
  source 1..1746: mol_type = other DNA
atggacaccaaggacatgaacgagttcgagaccgagggcttcttcgccttgcatcagagaagaggtgcaattaagcaagctaaggttcatcacgtgaaatgccacgagttcactgccactttctttccccagcccactttctgttccgtttgtcacgagttcgtgtgggggctaaacaaacagggctaccagtgtagacagtgcaatgctgccatccacaaaaaatgtatagacaaggtgatcgccaagtgtaccgggagcgcaattaacagccgtgaaaccatgttccacaaggaaagatttaagatcgacatgcctcatcggtttaaagtctacaattataaatccccaacattttgtgaacattgcggtacgttactttggggattagcgcgtcaaggtctgaaatgtgacgcctgtggcatgaatgtccaccacaggtgccagaccaaggttgccaacctttgcggcatcaatcagaagcttatggccgaggccctggcaatgatagagagcactcaacaggcccgctgcctccgtgacaccgagcagatcttccgcgaaggacctgtcgaaatcggtttgccctgctccatcaagaacgaggcccgtcctccgtgtcttcctacgcccggtaaaagagaaccacaaggcatcagctgggagagccctcttgacgaagtcgataaaatgtgtcacctcccagaaccagagttgaacaaagagaggccaagccttcagatcaaactgaagattgaagattttattctacacaagatgctcggcaaggggtcatttggtaaggtgttcctagccgaatttaagaagacaaaccagttcttcgcgatcaaagccctgaaaaaggatgtggtattaatggacgacgatgtagaatgcacaatggttgagaagagggtgttgtcgctcgcttgggagcacccgtttctgacacacatgttctgcacttttcagacaaaggagaaccttttcttcgttatggagtacttgaacggaggcgacctcatgtatcacatccaatcctgccacaaattcgatctgagccgcgcaacattttacgccgctgagatcatattaggcttacagtttttgcactctaagggcattgtgtaccgtgacttgaaactagataacatactgctagacaaagatggacatatcaaaattgcagactttgggatgtgcaaggagaatatgctcggcgacgcaaaaactaatactttctgcggcactccggactacatcgcccccgaaatcctcctcggacagaaatataatcatagtgtggattggtggagctttggcgtgctgctgtatgagatgctgatcggccagtctccctttcatggccaggatgaggaagagctctttcactcaatcaggatggacaatcctttttacccacggtggctcgagaaggaagccaaggacctgctggtgaagctattcgttcgagagcccgagaaacggctgggagttaggggggacattcggcagcatccgcttttccgggagattaattgggaagagctggagagaaaggagatcgacccaccattccgccccaaagtgaaatccccgttcgactgcagcaatttcgataaagagttcttgaacgagaagccaagattgtctttcgctgaccgcgcactgattaacagcatggaccagaatatgttccgcaacttctctttcatgaacccgggcatggaacgcctgatttcttag

SEQ ID NO: 201327 - DNA, 1032 bp, synthetic construct
  misc_feature 1..1032: note = Description of Artificial Sequence: Synthetic coding sequence
  source 1..1032: mol_type = other DNA
atggccagcaacagcagcgacgtgaaggagttcctggccaaggccaaggaagactttctgaaaaagtgggaatctcctgctcaaaacactgcccaccttgatcagttcgagagaataaagacgttaggcacagggtcctttgggagggtgatgctggtgaaacacaaggagaccggaaaccactatgccatgaagatcctcgataagcagaaagtagtcaagcttaagcagatcgagcacactctcaatgaaaagaggattttacaggctgtgaattttccattcctggtgaagctagaattcagtttcaaggataactcaaacttatatatggtcatggagtatgtcccaggtggcgaaatgttttcccacctgaggcggatcgggaggttctctgaacctcacgctaggttctacgcagcacagattgtgttgacattcgagtatctacattcactggatctgatctatagagacctaaagccagaaaaccttctgattgatcaacaaggctacattcaggtgaccgacttcgggttcgctaagcgtgtgaaaggcagaacatggaccctatgtggcactcctgaatacctcgctcccgagatcattctctctaaaggctataataaggctgtggactggtgggcactgggtgtgctgatctacgaaatggccgccggctatcctccattcttcgcggatcagcccatccagatatacgagaagattgtctccggtaaggttaggtttccatcccactttagctctgacctcaaggacctccttaggaaccttcttcaggtggacctgacaaagcggtttggaaatttgaagaacggagtaaatgacatcaaaaaccataaatggtttgccactaccgactggattgcaatctaccagagaaaagttgaagccccctttatcccaaaatttaagggtcccggcgatacctcaaacttcgatgattacgaagaggaagaaattagagtctcaatcaatgaaaaatgcggtaaggagttttcagagttctag

SEQ ID NO: 201328 - DNA, 1146 bp, synthetic construct
  misc_feature 1..1146: note = Description of Artificial Sequence: Synthetic coding sequence
  source 1..1146: mol_type = other DNA
atggagagcggcagcaccgccgccagcgaggaggcccggagcctgcgagaatgcgagctgtatgtccaaaaacacaatatacaggctctgctgaaggactctatcgtgcagttatgcaccgctcgacccgaacgaccaatggccttcctccgggaatactttgaacggctcgaaaaggaagaagccaaacagattcaaaatctgcagaaggccggtactcgtaccgacagccgggaggatgaaatctctccacctcctccgaacccagtcgtgaagggacggcgccggaggggggccatcagtgccgaagtgtacaccgaagaggatgctgctagctacgtcagaaaggttataccaaaagattacaagacaatggctgcactggcaaaagccattgaaaaaaacgtgttgttcagtcatctggacgataatgagagatctgatatttttgacgccatgttctccgtgagcttcattgccggagagaccgtcatacagcagggggatgaaggggataacttttacgtcatcgaccagggagagaccgacgtttacgttaacaacgaatgggcaacttccgtcggagagggcggatcgtttggcgagttagccttgatttatgggacacccagggctgccaccgtcaaggccaagacaaatgtgaaactatggggcattgaccgcgattcctatcggaggatccttatggggtccacattgaggaaacgaaagatgtatgaggagtttctgtccaaagtgagtattctggagagcctggacaagtgggagaggcttaccgtcgctgatgccctcgagcccgtacagtttgaggacggacaaaaaatcgtcgttcagggggaacctggcgatgaatttttcattattctggagggctccgcagcagtactccagagacggagtgaaaacgaagaattcgtcgaggtcggtcggctgggaccttctgactacttcggcgaaatagctttgttgatgaataggcctcgagccgccaccgtggtggccagaggtccattgaaatgtgtaaaacttgaccgacctagatttgagcgcgtgctgggtccatgctctgacatactcaagcggaacatccagcagtacaacagcttcgtctccctcagtgtgtag

SEQ ID NO: 201329 - DNA, 2739 bp, synthetic construct
  misc_feature 1..2739: note = Description of Artificial Sequence: Synthetic coding sequence
  source 1..2739: mol_type = other DNA
atgagcgccccccccgtgctgcggccccccagccccctgctgcccgtcgctgccgccgccgccgcagccgcagccgcacttgtcccgggttccggtccaggtccggctccttttttggcgcccgttgccgcccccgtaggtggaatatccttccacctgcagatcggcctttctagagagccggtgctgctcctgcaagattccagtggcgactactccctcgcccacgtgcgagagatggcttgcagcattgtggatcagaagtttcctgagtgtgggttttacggaatgtacgacaaaatcttgctgttccgccacgaccctacatcagaaaacatcctacagctagtgaaggccgcatctgatatccaggaaggggatctcattgaggtcgtgctttcggcttcagctacattcgaagactttcaaatacggccacacgctttattcgtacactcctatcgggcccccgccttttgcgatcactgtggggaaatgctttggggtctggtcagacagggcctgaaatgtgagggttgtggtttgaattatcacaaaaggtgcgcgttcaaaattccaaataattgtagtggcgtgcgtaggcgacgtttgagcaacgtaagcctgacaggagtgtccacaataaggaccagcagcgctgaactcagtacgtcagcgccagatgaacctctcctccagaaatctccatccgaaagcttcatcggtcgagagaagaggagcaactctcagtcttatatcgggcgtccaatccacttggataagattctcatgtcaaaagttaaagtgccccacacattcgtcattcattcctacactcgaccaacagtttgccagtattgcaaaaaactgctgaagggattgtttcgccagggtctgcagtgtaaagattgtaggttcaattgtcataagcgatgcgcccccaaagtccctaacaactgtcttggcgaagttactatcaacggcgacctcttatcacccggagccgaaagcgacgtggtgatggaggaggggtctgacgataacgacagcgaaaggaacagtggcctgatggatgatatggaagaggcaatggttcaagacgcggagatggcaatggctgagtgccaaaatgattcaggcgagatgcaggatcctgatcccgaccacgaagatgctaataggacaatttcaccctccaccagtaacaatattcctttgatgcgcgtcgttcaaagcgtcaagcacaccaagagaaaaagctccacggtcatgaaggaaggttggatggtgcattatactagcaaagacactttgcgaaagcggcattattggagactggactcaaagtgcatcactctgttccagaatgacactgggtctagatactacaaagaaattccactcagcgagatcctctctctcgaacccgtgaaaacaagtgccttgattcccaatggggcaaacccacactgctttgagatcaccactgcgaacgttgtatattacgtcggtgagaatgtggttaatccatcctcacctagtccgaataacagcgtcctcacctcaggtgtgggcgccgatgttgctcggatgtgggaaattgcgatccagcatgcactcatgccagtgattcctaaagggtccagcgttggtacagggaccaacctgcacagagatattagcgtcagtatttctgtgagcaattgccaaatccaggaaaatgtggacatctccaccgtttaccaaatattccccgatgaggtactgggaagcggccagttcggtattgtgtacggcggcaaacacaggaagactggccgggatgtcgctattaagatcatcgataaactgaggttccccaccaagcaggaaagccagttgcgcaatgaagttgccattcttcagaatctgcatcaccccggggtcgttaacttagaatgtatgttcgagacgcccgagagggtgttcgtcgtgatggaaaagctgcatggtgacatgcttgagatgatcctgtcaagcgagaagggcagactccctgaacacatcaccaagtttttgattacccagatattagtcgctctgagacatcttcatttcaagaacattgttcattgtgaccttaagcctgagaacgtgctgttggccagcgccgaccccttcccacaggtaaaactgtgtgacttcggctttgccagaatcataggcgagaagtcttttcgtcgcagcgtggtcgggacacccgcctacctggccccggaagtgctcaggaataaaggatacaataggtccctagacatgtggagcgtcggcgtcataatctatgttagcctgagcggaacgttccccttcaatgaggatgaagacattcatgaccagatacaaaatgcggcctttatgtatcctcccaatccctggaaggagatttcccatgaggccatcgatttgataaataacctactgcaggtgaaaatgcgcaaaaggtatagcgtggataagacactgtcccacccatggttgcaggactatcaaacttggctggacttgagagagctggaatgtaagatcggagaacggtacattacgcatgaatccgatgacctgcggtgggaaaaatacgccggagaacaaggcctgcagtacccgacccacctgataaatccgagcgcatctcactcagatacacctgagacagaggaaacagagatgaaagccctgggagagcgcgtgagcatcctgtag

SEQ ID NO: 201330 - DNA, 2637 bp, synthetic construct
  misc_feature 1..2637: note = Description of Artificial Sequence: Synthetic coding sequence
  source 1..2637: mol_type = other DNA
atggccaccgcccccagctaccccgccggcctgcccggcagccccgggccaggcagcccgcccccaccaggaggccttgagttacagtcaccgcccccgctccttccacagatccccgccccaggtagtggagtcagctttcacattcagatagggctgacacgggaatttgtcctcctgcctgctgcctcggaactggcgcacgtaaagcagcttgcttgttccatagtggaccagaaattccctgagtgtggcttttacggcctgtatgataaaatactgctgtttaagcacgatcccacttccgccaatctgcttcagcttgttcgcagctcaggtgatattcaggagggcgatttggtcgaggtcgtgctctcagcttctgcgacatttgaggacttccaaatcagaccccatgctctgaccgtccacagttatagagccccagctttctgtgatcattgtggcgagatgcttttcggcctggtgaggcaggggctgaagtgcgacgggtgcgggctaaattatcataagcgctgcgccttctccatccccaataactgtagcggcgctcgtaagcgcaggctctcatccactagtttggccagcgggcatagtgttagacttggtacatccgagtccctgccctgtacggctgaggagctctccagaagtaccacggagctcctgccacgccggccaccgtcaagcagctcttcttcttccgcttcaagctacactggtcgaccgatcgagctagacaaaatgctcctctccaaagtgaaggtcccccacaccttcctaatccatagctacactcggcccaccgtttgtcaggcgtgcaagaaactgctgaagggtctgtttcgtcaggggctacagtgcaaggactgtaaattcaactgccacaagcggtgcgccacacgggtgccaaacgattgtctcggggaggccctcatcaacggcgacgtcccaatggaggaggcgaccgacttcagtgaggcagataaaagtgccctcatggatgaatcagaggactctggagtgatcccaggcagccatagtgaaaatgcactccatgccagcgaagaggaggagggcgaggggggaaaagcccagagcagcctagggtacatccctctgatgcgcgttgttcaaagcgtccggcatactacacgaaagtcttctacgacgctcagagagggatgggtagtgcactactctaataaggataccctgaggaagcgtcattattggaggttggactgcaaatgcatcacgctgttccaaaacaataccacaaaccgctattacaaggagattccactcagtgagatcttgaccgtggagtctgcacagaacttcagcttagtgccccctggcacaaatccacactgcttcgagatagtaaccgctaatgcaacatattttgtgggcgagatgccaggcggtacacctggcgggccttccggccaaggcgcggaagctgctagaggttgggagacagcaatcagacaggccctgatgcccgtgatcctgcaggacgccccaagtgcccctggacacgctcctcatcgccaggcatcactgagcataagcgtgagtaattcccagatacaagaaaacgtcgacatcgctaccgtgtaccagatctttcccgacgaagtgctggggagcggccaatttggggtggtgtatgggggtaaacatagaaaaacagggcgcgacgtcgcagtcaaggtgattgacaagctcaggtttccaaccaaacaagaaagccagcttcgtaatgaagtggccattctgcagtctttgagacacccagggattgtcaacctggagtgtatgttcgaaactcctgaaaaggtatttgtcgtgatggaaaagcttcacggggatatgttagagatgattctgtcttcagagaaaggccgcttaccagagaggttgactaaattcctcattacacaaattcttgtcgccctccggcatctgcactttaaaaatattgtgcattgcgatttgaaacctgagaatgtgctccttgcctctgccgatcccttccctcaggtgaaattatgtgacttcggtttcgcaaggatcattggagaaaaaagctttcgtaggagtgtagtgggaacacctgcatatctcgctcctgaggtgctcctgaaccagggctataatcgatcattagacatgtggtctgtgggggttatcatgtatgtgtccctgtcaggcacctttccattcaatgaggacgaagatattaatgaccagatccagaatgcggcgttcatgtacccagcttctccatggagtcacatatccgctggtgctattgacctcatcaataatctgctgcaggtgaaaatgcgaaagagatattccgtggacaagtccttgagccatccatggcttcaggagtatcagacatggttagacctgagggagctggaggggaaaatgggtgagcgatacatcacgcatgaatccgatgatgtaagatgggagcagtttgcagccgaacatccattaccaggaagtggcctccctacggaccgcgacctgggcggcgcctgccctccacaggaccacgatatgcagggattggcagagcggatcagtgttttgtag

SEQ ID NO: 201331 - DNA, 2637 bp, synthetic construct
  misc_feature 1..2637: note = Description of Artificial Sequence: Synthetic coding sequence
  source 1..2637: mol_type = other DNA
atggccaccgcccccagctaccccgccggcctgcccggcagccccggtccgggcagcccccctccccccggaggattggagcttcagtcacctcccccactgttgccacagattcccgcacccggtagcggcgttagctttcacattcagatagggcttactagagagttcgtgctcctgccagcagcttccgagctagcccacgtaaagcagctggcctgttccatagtggaccaaaagttccccgaatgtggcttctacggactatatgacaaaatactgctcttcaagcatgaccccacaagtgcaaatctgctgcagctggtgagatctagcggggatatccaggagggagatcttgtcgaagtagtgctgagcgcaagcgctacgttcgaagactttcagataagacctcacgccttaacggtgcactcctaccgtgcacccgctttctgcgatcactgcggcgaaatgctattcggcttggtcaggcagggcttaaagtgtgacggctgcggactgaactatcataagcgctgtgctttctcaattcctaataattgctcaggagctagaaaaagacgcctgtcaagcaccagccttgcttctggtcacagtgtgcggctcggtacctctgagagtctgccatgcaccgcagaagaattatcacgcagcacaactgaattgctgccccgccgccctcctagttcaagctcctcctcatcggcttcctcttatactggaaggcccattgaattagataagatgctactgtccaaggtgaaggtgccccatactttccttatccattcatatacccgacccactgtttgccaagcctgcaagaaactgctcaagggcctgttccgccagggcttacagtgtaaggattgtaagtttaattgtcacaaaaggtgtgcaacgcgagtgcccaatgactgtctgggtgaagccttgattaacggggatgtgccgatggaagaagcaacagatttttccgaggcagataagtccgcactgatggacgagagtgaagactctggcgtaatcccaggatctcattctgaaaacgcattacacgcttcggaagaggaggagggagaaggagggaaggcgcagtcttcactggggtacattcccttaatgcgggtggtgcagagcgtaaggcacaccactcgcaagagcagcactacactccgcgaggggtgggttgtacattacagcaacaaggatacactccgcaaacgacactattggagactggactgtaagtgtatcacactgtttcagaataatacaaccaacaggtattataaggaaatccccctgagtgaaatcttgactgtggagagtgcacagaacttcagcctggttcctccaggaacaaatccgcactgttttgagatcgtcacggctaatgccacatacttcgtcggtgagatgcccggagggacaccaggtggaccatcaggacagggagctgaggctgcgcggggctgggaaacagccattcggcaggccctcatgcctgtgattctgcaggacgcaccttctgccccgggacatgctcctcaccggcaggccagcctgtctatctccgtgagcaattcacagatccaggagaacgtcgatattgcaacagtttatcagattttccccgatgaagtcctggggtctgggcaattcggcgtcgtctacggcggaaaacacaggaaaacaggacgcgacgtagcagttaaggtcatcgacaagttacgcttcccaactaagcaagaaagtcagctcaggaacgaggtggcaattcttcaatcccttagacaccccgggattgtcaacttggaatgtatgtttgagacccctgaaaaggtctttgttgtcatggaaaagctgcatggggacatgctggaaatgatcctgagctcagagaagggccggctacctgagcgtctgactaagttcttgatcactcaaattctggttgcactcaggcatctgcatttcaagaacatagtgcattgtgacctgaagcctgaaaacgtcttgctcgcgtcagccgacccatttcctcaggtcaaactgtgtgacttcggatttgccaggattatcggcgaaaagtctttccgccggagcgtggtcggtacccccgcttatctggcccccgaggtgctcctgaaccagggctataaccggagcctagacatgtggtcagtgggagttattatgtatgtcagcctttctggaactttccccttcaacgaagacgaggacattaatgatcagatccagaacgctgcctttatgtatccagccagcccctggagccatatctccgcaggggcaatcgatctgattaataacctgctgcaggtcaagatgcggaagcgctacagcgtagacaagtcgctaagtcacccatggctgcaggaatatcagacttggctcgatctgcgcgagctcgagggtaaaatgggcgagcgatatataacgcacgaaagcgacgacgttcggtgggaacagtttgccgcggaacacccactgccaggcagtggcctgccaaccgatcgcgatctgggaggtgcctgtccccctcaggaccatgatatgcagggcctcgccgaacgaatttccgttctttag

SEQ ID NO: 201332 - DNA, 2166 bp, synthetic construct
  misc_feature 1..2166: note = Description of Artificial Sequence: Synthetic coding sequence
  source 1..2166: mol_type = other DNA
atgctgttcggcctggtgcggcagggcctgaagtgcgacggctgcgggctgaattatcataaacggtgcgccttttctatccccaacaattgttccggagccaggaagcgccggctgagttccacctccctagcgagcggtcattcagttcgcctgggcacatccgagtcactgccctgcacagcagaggaactaagccgatcaacaactgaactgctgccgaggaggccccccagtagttctagtagttctagcgcgtccagttatacgggacgacctatagagctggataagatgttactgtctaaagtcaaggttccccatacattcttgatacacagctacactagacctaccgtgtgccaggcctgtaagaaactgttgaagggactctttcggcaaggtctgcagtgcaaggactgcaagttcaactgtcataagcgttgtgctacacgcgtgcccaacgactgtctcggggaggcacttatcaacggggacgtacctatggaggaggcgaccgacttcagcgaggcggacaagagtgcattaatggacgagtcggaggatagcggcgttataccaggcagccactccgaaaatgctcttcatgcctcggaggaagaggagggcgagggcgggaaggcccagtcatccttgggatatattcccctgatgcgtgtggttcaaagcgtgcgacacactacccgtaagagtagtacaacgttacgcgagggctgggtggtccactacagcaataaagataccctccggaagcgtcattactggaggctcgattgtaagtgcattacgctgtttcaaaacaacaccaccaaccgctactataaagagattcctcttagcgagatcctgaccgtcgaatccgcccaaaacttcagtctcgtgccccccggcaccaatccacactgttttgagatcgttactgccaatgcgacatatttcgtcggagaaatgcctggcggcaccccaggcgggccaagtgggcagggtgcagaggctgctcgaggctgggaaacagccatccgccaagcactgatgcccgtgatcctacaggatgctccctctgctcctggacacgccccccatcgccaggctagtctatctatcagtgtgagcaatagccagattcaagagaatgtggatattgccacagtgtaccagatcttcccggatgaggtgctggggagtggccagttcggcgtggtgtacggtgggaaacacagaaagacaggtagggacgtcgccgtgaaggtgattgacaaattgagattccccacaaagcaggagagtcaattgcgcaacgaagtcgccattcttcagtccctgagacatccaggcatcgtcaacttggaatgcatgtttgagaccccagagaaagtgttcgtggtgatggagaagctgcacggggacatgttagagatgatactgtcaagtgagaaaggacgcctgccagagcgactcaccaaatttctgattacacagatacttgtagccctgagacatctgcacttcaagaacattgtacattgtgacctgaaacccgagaacgtgctacttgctagtgccgatccgtttcctcaggtcaagctgtgtgattttggttttgcgagaataatcggcgaaaagagcttcaggaggtctgtcgtcggcacccccgcctatctggctcccgaggttttgctcaaccaagggtacaatcgatcccttgatatgtggtcagtgggcgtgatcatgtatgtgtcactctccgggacatttccgtttaatgaggatgaagacattaacgaccagattcagaatgcagcgttcatgtacccagccagtccatggtcacatatctctgcgggagcgattgacctcataaacaacctgctgcaggtgaaaatgcgaaagaggtatagcgtggacaaatccctctctcacccctggttgcaggagtatcagacctggctcgacctcagagagctcgaaggcaaaatgggcgagcgctacattactcatgaaagtgacgacgtgcgctgggagcagtttgccgccgaacatcctctgccaggaagcgggctgcctaccgatcgagaccttggcggtgcatgcccaccgcaggatcacgacatgcaggggctcgccgaacgtatatccgtgctttag

SEQ ID NO: 201333 - DNA, 1482 bp, synthetic construct
  misc_feature 1..1482: note = Description of Artificial Sequence: Synthetic coding sequence
  source 1..1482: mol_type = other DNA
atgcggcggcggcgggccgccgtggccgccggcttctgcgccagctttttgctagggagcgtgctgaacgttctctttgcgccagggtcagagccacctcgccccggccagtcccctgaaccaagccccgcccctggtccggggagaagggggggacgcggcgaactggcaagacagataagagccagatacgaagaagtgcaacgatatagcagggggggccccggccccggcgcgggtcgacccgagcgcagaaggttgatggacctcgccccaggtggtcccgggctgccaagacctcgtcctccttgggctcggccactgtccgacggggcacctggctggccgcctgcccctgggccgggctcaccaggccccgggcccagactgggctgtgcagcattgagaaatgtctcgggcgctcagtacatgggcagtggctacacaaaagctgtgtatagagtgagactccctggaggcgcggccgtggctctgaaagctgtggacttttccggacacgatctgggatcctgcgtaagagagttcggtgtccggaggggctgttacagactggcggcacacaagctgcttaaagaaatggtcttgctggagcggcttaggcatcctaatgtcctacagttgtatgggtattgttatcaggactcagaggatatccccgacactttgaccacgatcactgagctgggagcccccgtcgagatgattcagttgctgcagaccagctgggaggacagattcaggatctgtctgtcactgggtagactgctgcatcatttagcccattcaccacttggatcggtgacactgttagatttccgcccacgacagttcgtgcttgtggatggcgagctgaaggtgactgatctcgatgacgctcgagtcgaagaaacaccgtgtgcaggctctacggactgcatcttggagttccccgctcggaactttacactgccttgctcagcccagggctggtgtgaggggatgaatgaaaaacgcaacctctataacgcttaccggttcttttttacttacctgctccctcactccgcccctccctccttgcgacctctgctcgatagtatagtgaacgctacaggggagcttgcctggggggtcgacgagacacttgcacagctggagaaggtgctgcatctgtatagaagtgggcagtatctgcagaatagtacggcctcctctagtactgagtatcagtgtatcccagactccactattcctcaagaggattaccgatgttggccgtcctatcatcatggaagctgcctcctttccgtgttcaatctggcggaggccgtcgatgtttgcgaatcacatgctcagtgcagagcttttgtcgtgacaaaccagaccacttggactgggagacagctggtctttttcaaaaccggttggagtcaggtcgtgccagatccaaataagactacctatgtcaaggcctcggggtag

SEQ ID NO: 201334 - DNA, 2829 bp, synthetic construct
  misc_feature 1..2829: note = Description of Artificial Sequence: Synthetic coding sequence
  source 1..2829: mol_type = other DNA
atggccagcgacgccgtgcagagcgagccccggagctggagcctgctagaacagctgggactggcgggggccgatctggccgctccaggggtgcaacagcagttggagctggagagagagcggctgcgacgtgagattagaaaggagctgaaattgaaggaaggcgctgaaaacctgaggcgggccaccaccgatctcgggcgttctctgggtccagttgagctactcttacgcgggagttcccggaggctcgatttgctacaccagcagctccaggaactgcacgcacatgtggtactgcctgatccggccgccacacacgacgggccccagagcccaggcgccggaggaccaacctgctccgcaaccaatctgtccagggtagccggtctggagaagcaactggctatagagttgaaagtcaaacagggcgctgagaacatgattcagacttactctaacgggtcaaccaaggatagaaagcttctgttaacagcacagcagatgctccaggatagcaagactaaaatagatattatacgaatgcagctgcgtagagccctgcaggccgggcagctagaaaaccaggctgcaccggatgacacacagggctcccctgacctgggcgccgtggagttacgcatcgaggagttgcgtcaccactttcgtgtcgagcacgcagtcgctgaaggcgcaaaaaacgttctcaggttgttatcggccgccaaggcaccggaccgcaaagccgttagtgaagctcaagaaaagctcaccgagtcaaatcagaagctgggacttctgagggaggccctggaacgacgtctgggtgagctgccagctgaccatcctaaaggtaggttgctgcgagaagaactcgccgccgcaagttcggcagccttcagcaccagactagcgggcccctttcccgctacccattactccactttgtgtaagccagcacctctaacagggaccctcgaggttagggtcgtaggctgtagggatctgccagaaactatcccttggaatccaaccccttcaatgggaggacccggtactccagactcaaggcccccatttctatctcggccagccagaggactgtattctcggtctggcagcctgagcggccggagcagtctgaaggctgaggcagaaaacacgagcgaagtgtctaccgtgctaaagttggacaacacagttgttgggcagacatcatggaagccttgtggcccaaacgcctgggatcaatcattcactttggaacttgaacgtgcacgcgagcttgagttggcagtgttttggagagatcagaggggactctgcgcactgaagtttctaaagcttgaggacttcctcgacaatgaaaggcatgaggtgcagcttgacatggagcctcaaggctgcctcgttgcagaggtgaccttcaggaaccctgtcatcgagcgcattccacgcctacggcgacagaaaaaaatttttagcaaacaacaggggaaggccttccagcgggcacgtcaaatgaacatcgacgtggcgacatgggtacgcttgctgcgcaggctgatacctaacgcaacaggcactggaaccttcagcccaggggcaagcccaggcagtgaggcccgcacaactggcgacatctctgttgagaaactaaatctcggaaccgactccgatagctctccccagaagagctctagggatccacctagcagcccgagcagcctgtccagcccgatccaagaatccaccgcccccgaattaccgtccgagactcaggaaaccccaggccccgctctctgttcccctttgagaaagagccctcttactctcgaggattttaagttcctcgccgttctggggcgcggacactttgggaaagttctgctgtccgagtttaggccgtccggggagttgttcgcgattaaagcgctgaaaaaaggggacatcgtggcccgagatgaggtggagtccctgatgtgtgaaaaacggatcttggcggcagtcacgtcggcagggcatccattccttgttaatctgtttgggtgcttccagaccccggagcacgtgtgcttcgtcatggagtatagcgccggcggggacctgatgcttcatattcatagcgacgtattttccgagccaagggctattttttattcagcctgtgtggtgctggggcttcagttcctgcacgagcataaaatcgtgtatagagatctcaagctggacaatctcctgctggacaccgaaggttacgtaaaaattgcggattttgggctttgcaaagaaggaatgggatatggcgatcggaccagtacattctgcggaaccccggagttcctcgcaccagaagtgctcacagacacctcctacacgagggctgtcgattggtggggactgggagtattactgtatgagatgctggtaggggaatcccctttccctggtgatgacgaggaagaggtctttgattcaatcgtgaatgatgaagtgcggtacccacggttcctttctgctgaagccatcggcataatgagaagactgctcaggagaaatcccgagcgccgcctggggagctctgaacgagatgcagaggacgtgaaaaaacaaccattttttcgcaccctggggtgggaggctttgttagcgcgcaggctgccccccccattcgtgcctaccctctccggacggacagatgtgagcaatttcgatgaggaatttaccggagaagcacctacactgagtccacctcgcgatgcaaggccactgaccgcagctgaacaggccgcgtttctggactttgactttgtggctggcggatgctag

SEQ ID NO: 201335 - DNA, 2847 bp, synthetic construct
  misc_feature 1..2847: note = Description of Artificial Sequence: Synthetic coding sequence
  source 1..2847: mol_type = other DNA
atggccgaggccaacaaccccagcgagcaggagctggagagcgagccgcggagctggagtctgctcgagcagctggggctggccggggccgatctcgcagcccctggcgtgcagcagcagcttgagttggagcgagagagactgcgaagagagattcgaaaagaacttaagttaaaggagggagctgagaatctgagaagagccaccacagacctcggccggtccctgggaccagtcgaactgttgctgcgtggttccagccgccgactggatctgttgcatcaacagctccaagagctgcacgcccatgtagtgctgcccgacccagccgctacacacgacgggcctcagtctccaggggcggggggcccaacgtgcagcgccaccaacctcagcagagtcgcaggcttggaaaagcaactggccatcgagctcaaagtcaagcagggagccgagaatatgatacagacttacagtaatggttccactaaggaccggaagttgctccttaccgcacagcaaatgctgcaggactcgaagaccaaaatcgatataatcaggatgcagctccgcagggccctccaggccgggcagttggaaaaccaagccgcccctgacgacactcagggtagcccggatctgggcgcagttgagttgcgaatcgaggaattgcgccaccatttcagggtcgagcacgccgtggcagagggtgccaaaaatgtgcttaggctgctgagtgccgccaaagcacctgatagaaaggctgtttccgaggcgcaggaaaagttaaccgagtctaatcagaagctcggcctgctccgtgaggcccttgaaaggaggttgggggaactgcccgctgatcaccctaagggcagactgctcagagaggagttagctgctgcctcttccgctgcgttctcgacgagattagcaggtcctttccctgccactcattatagcactctttgcaaaccagcaccgctgacagggacattggaagtccgcgtcgtcggatgcagggatttgcctgagaccatcccctggaaccctacaccctccatgggtgggccaggcacgcccgactcacgccctcctttcctgagtaggcctgccagggggttgtatagcagatcgggctccttgtcaggccgaagttctctcaaggccgaagcagaaaatactagcgaagtctctacagtgctgaagctggacaatacggttgttgggcaaacatcttggaagccatgcggacccaacgcatgggatcagagctttaccttggaactggaacgcgctagggagctggagctggccgtgttttggagagaccaacgggggttatgcgccttaaagttcctcaagctggaggattttcttgataacgaaagacacgaggtgcaactggacatggagccccagggctgcctcgtagcagaggtaacattcagaaatcctgtgattgagcgcataccaaggctccggaggcagaagaaaattttctccaagcagcagggcaaggcgttccagagggcccggcaaatgaatatcgacgtcgccacttgggtgcggctcttaaggcgtctaatccccaatgctaccgggaccggcaccttctcaccaggagcttctcccgggtcagaggcacgcaccacaggtgatatctccgtggaaaagcttaatctcgggaccgattccgattcctcacctcagaagtccagtagggaccctccaagttcaccttcatctctgagttcaccaatacaggaatctaccgcccctgagctaccttccgaaacgcaagagacccctggaccagctctctgctcaccgctacggaagtcacctctcacactcgaagacttcaaatttctcgctgtcctgggaagagggcatttcggcaaagtgcttctcagtgagttccggccttcaggagaactgttcgctatcaaggcacttaaaaaaggcgatattgtagcccgagatgaggtggagtctctgatgtgtgaaaagagaattctcgccgcagtgacaagtgctggccacccctttctggtgaacctattcggctgctttcagactccggaacacgtctgcttcgtaatggagtatagcgcaggcggagatctgatgctccacattcattcagacgtcttctccgagcccagagcaatattctactcagcctgcgtggtactgggcctccagttcctgcacgaacacaaaatagtttacagggaccttaagttggataacctgttacttgacacagaaggctatgtgaagatagccgacttcgggctgtgcaaggaagggatgggttatggggatcgaacttctaccttttgtggcacacccgaattcctagcacccgaggtgctgaccgacaccagttatacccgcgccgtagactggtggggtctcggggtcctactgtatgagatgctggtcggagagagcccttttcccggcgatgacgaggaagaggtattcgatagcatcgtgaacgacgaagtgaggtaccccagattcctgagcgccgaggcaattggcataatgaggcgtttgttacggcgaaatcctgaacggaggctgggttcgtccgagcgcgatgctgaggacgtgaagaaacaacccttcttccgcacactgggatgggaagctctgctggctcggcgcctgccccctcccttcgtgcccacgttatctggtcgtactgacgtaagcaactttgatgaagaattcacaggcgaggcgcccaccctgtctccacctagggatgctagacctctgactgctgctgaacaagctgcttttttagatttcgacttcgtcgccggtggttgttag

SEQ ID NO: 201336 - DNA, 1815 bp, synthetic construct
  misc_feature 1..1815: note = Description of Artificial Sequence: Synthetic coding sequence
  source 1..1815: mol_type = other DNA
atggccagcaaccccgagcggggcgagatcctgctgaccgagctgcagggggactctcggtcactcccattttctgaaaatgtgtcagctgtccagaaactggatttctcggacaccatggtgcaacaaaagttagacgatatcaaggataggatcaagcgagagatcagaaaagaactgaagatcaaggaaggcgcggaaaacttacgtaaagtgacaaccgataagaaaagcctggcgtacgtcgacaacatacttaaaaaatcaaataaaaagctcgaagaactccatcataagctgcaagagttgaatgcacatattgtagtctcggaccctgaagacatcaccgattgccctcggacccccgatacgccgaataacgaccccaggtgtagcacgagtaacaatcgcctaaaagccttgcaaaaacagctggacatcgagctgaaggtcaaacagggggcggagaacatgattcagatgtactctaacggttcctctaaggataggaagctgcatggaacagcccagcaactgctgcaggactctaaaacaaagattgaggtaatacgtatgcagattctgcaggccgtgcagacaaatgaattagccttcgacaacgccaaacccgtaattagccctctggagctgagaatggaagaactccgacaccacttccgcatagaattcgcggttgctgagggcgctaagaacgttatgaaactcctgggatctggaaaggtgacggaccggaaagcactgtcagaagcccaggcccggttcaacgagtcgagtcagaaactggacctgcttaaatactctctcgagcagagactgaacgaagtccctaagaatcaccccaagtcacgtatcatcatcgaagagctaagcctcgtcgcggcctccccaactctgagcccgaggcagtccatgatcagcacacagaaccagtactcaaccctctctaaaccggcagcgctgacaggaacgttagaagtcaggctgatgggatgtcaggatatactggagaacgtgcccgggcggtcaaaagccacctcagttgcgctgcctggctggtcaccttctgagacacggtcttcattcatgtcacgtacgtctaaaagtaaaagcggatccagtaggaacctgctcaagaccgacgatctcagcaatgacgtgtgcgccgtcctgaaattggataatacagtggtgggccaaacatcatggaaacctatctccaatcaatcatgggatcaaaaatttaccctcgagttagacagatccagggagctggagatatccgtctactggagggattggaggagcctctgcgccgttaaatttctccgattggaggattttctggacaatcaaaggcatggcatgtgtctgtacctcgaacctcagggcaccctgtttgccgaggtcacttttttcaaccctgtgatcgagagaagaccaaagctgcagcgccagaaaaagatcttttccaaacagcaggggaaaacgttcctccgggctcctcagatgaatattaatatcgctacatgggggcgcctggtccgacgggctatacccactgtgaatcactccggcaccttctctccccaggcccccgtgcccacaacagtgccggtggtagatgtacggataccacagctggccccgccagcacgttacgtcagcgagattctgtccatcagttacaccaagctcctgggccattcctatgttctgattattgccggtgtgctgtcactggcttttttcccgtctagcatcttaaaagttgtgttttgtctactgaagaagtag

SEQ ID NO: 201337 - DNA, 2484 bp, synthetic construct
  misc_feature 1..2484: note = Description of Artificial Sequence: Synthetic coding sequence
  source 1..2484: mol_type = other DNA
atgatccagatgtacagcaacggcagcagcaaggaccggaagctgcatgggacggcacagcaattattgcaagattccaagaccaaaatcgaggtgatcaggatgcagattctgcaagcagtacaaacaaacgagctggcttttgacaacgcgaagccggtaatctcaccgttagaactgcggatggaggaattgagacaccactttaggatcgaatttgccgtggccgaaggagcaaagaatgttatgaaactgctcgggagcggcaaggtgacagataggaaggcactctccgaagcccaggcccgttttaacgagtctagtcaaaaactcgacctgctgaagtactctctcgagcagcgattaaatgaagtgcccaagaaccaccccaagagccgcatcattattgaagagttgagcctggtggcagcctcccctacgctgagtccaagacagagcatgatatcaacacagaatcagtactccactttgtccaagcctgccgctctcacgggcacacttgaggtcagacttatgggatgtcaggacatcctggagaacgtgccgggccggagcaaagcaacctctgtggcccttccagggtggtccccaagcgaaactagatccagctttatgtctcggacaagcaaatccaagtccggttcttcccggaacctcctcaagaccgacgacctgtcaaacgacgtgtgcgctgtactgaagctggataacactgtagtgggccagacttcctggaaacctatttcaaatcaaagctgggatcagaagtttacactcgaactagataggagccgagagcttgagatctctgtttactggagagactggagaagcttgtgcgcagtgaagttcctgaggctggaggactttctggataaccagcgacatggcatgtgcctctaccttgagccccagggtactctgtttgctgaagtgacattttttaaccccgtgattgagaggcgtcccaagcttcaaaggcagaagaaaatctttagcaagcaacagggaaagacctttcttagagccccccaaatgaacattaatattgctacatggggtaggctggtgaggagggccatccctacggttaaccactctgggacctttagccctcaagcccccgtccccacgaccgtgcctgtggttgacgtgcgcatcccccagctggctccacccgcaagtgatagcacggtcactaaactggactttgacctggaacctgagccaccacccgcccctccaagggcttcgtcgctgggcgagattgatgaatcgtctgagcttcgcgttctcgatatcccaggccaggactcagaaaccgtattcgatatccagaatgaccgaaacagcatattgcctaaatcccagtcagaatataagcccgacactcctcaatctgggctggagtatagcggcatccaggaactggaagacagacggtcgcaacagcgctttcagttcaatttgcaggacttcaggtgttgtgccgtcctgggaagaggacatttcggaaaggtactcctggccgagtacaagaataccaacgagatgttcgctatcaaggcactgaagaagggtgacatcgttgctagggatgaagtcgacagtcttatgtgtgaaaaaagaatcttcgagaccgtcaacagcgttcgacatccctttctcgttaatctgttcgcctgttttcagactaaagagcatgtgtgttttgtaatggaatacgccgctggtggcgacctgatgatgcacatacataccgatgtgttctctgaaccacgggccgttttttatgcggcatgtgtagttctaggactacagtatctgcatgagcacaagatcgtctatagggacctgaagctggataacctgttgcttgataccgaaggattcgttaagatcgccgatttcggactctgcaaagaggggatgggttacggtgatcgtacatcgaccttttgcggtactcctgagtttctggcccctgaggtgcttaccgagacttcgtacactcgtgctgttgattggtggggcttaggggtcctgatttatgaaatgcttgttggggagagccccttcccaggtgatgacgaggaagaggtgttcgatagcatcgtcaacgacgaagtgcgatatcctaggttccttagtacagaggctatctccatcatgcggcgactgctgcggaggaaccctgagagacggctaggcgcctctgagaaagatgccgaggacgtgaaaaaacaccccttctttcgcctgatcgattggtccgccctcatggacaagaaggttaagccgccattcatcccaacgataagagggagggaggacgtttctaacttcgacgacgagtttaccagtgaagctccgatcctcaccccaccccgcgagccccgcatactctccgaggaggagcaggagatgttccgggactttgactacatcgctgattggtgctag

SEQ ID NO: 201338 - DNA, 2811 bp, synthetic construct
  misc_feature 1..2811: note = Description of Artificial Sequence: Synthetic coding sequence
  source 1..2811: mol_type = other DNA
atggccagcaaccccgagcggggcgagatcctgctgaccgagctgcagggcgattctaggtctttacccttctcggagaatgtctcggccgttcagaaactggacttttccgatactatggtgcagcagaagttagatgacataaaagaccggatcaaacgtgagatccgcaaggagcttaagataaaggaaggagccgaaaatttgagaaaagtcaccaccgataaaaagagccttgcttacgtcgataacattttgaagaagagcaataaaaaactggaggaacttcaccataagcttcaggagctgaatgcacacattgtcgtcagcgatcccgaggacataactgattgtcccaggacccctgacactcccaataatgaccctcgttgttccacttccaataacagactgaaggccctccagaaacagctggatatcgaactgaaagtcaagcagggcgcggaaaacatgattcagatgtacagtaatggttcgtcgaaagatcggaagctgcatggaacagcccagcagcttttgcaggattccaagactaaaattgaggtcatccgcatgcagatccttcaagccgtgcagacaaacgagctggctttcgacaatgcgaaacccgtaattagtccattagagcttagaatggaagaactgcgacaccattttaggattgaattcgccgtcgccgaaggcgctaaaaacgtgatgaagctcttggggtctgggaaggttacagaccggaaggctctgagcgaggcccaagcccgattcaacgagagcagccagaagttggacctcctgaagtactcccttgagcaaagacttaacgaggtacctaagaatcatcctaagtcccgcatcattatcgaagagttgtccctggtagccgcgtccccgaccttgagtcccaggcagtctatgatttccacccagaaccaatatagtacactgagcaaaccagcagccttgaccggcaccctcgaagttaggctgatggggtgccaggatattctcgagaacgtcccgggccggagcaaggccactagcgtggctcttccaggttggagtccttccgagaccaggtcgtcgtttatgtcaagaacaagtaagtcaaaaagcggctctagccgcaatctgctgaaaaccgacgatctgtctaatgatgtctgtgcagttctcaagctggataataccgtcgtgggtcagaccagctggaaaccaatcagcaaccaaagttgggaccaaaagttcacactggaactcgatagagtcacttttttcaaccctgtgatcgagaggaggccaaagttgcaaagacagaagaaaattttttcaaagcagcaaggtaagacctttcttcgcgccccccagatgaacattaacatcgccacctggggacgcctggttcgtagagctattcctaccgtgaatcattctggtacctttagcccgcaggcaccggtgcccaccaccgttcccgtcgtagatgtccggatcccccagttggccccgcccgcatccgactctacggttacgaaactagatttcgaccttgagcctgaaccccccccggccccccctagagcgagcagcctgggcgagattgacgaaagctccgaacttcgggtactggacatacccgggcaagactctgagacagtcttcgacatccagaatgaccgtaactctattctaccaaaaagccagtccgaatacaagcctgacacaccacaaagtggcctggagtacagtggcatccaggaactggaggataggaggtctcagcagcgattccagtttaacctgcaggactttagatgctgtgccgtcctaggccgcggacattttggaaaggtgctactggctgagtataaaaacaccaatgagatgttcgccataaaagcactgaaaaagggggacattgtcgcccgcgatgaggtggatagcctgatgtgcgagaagagaatattcgagaccgtcaatagcgtgaggcatccattcttggtgaatctctttgcttgtttccagactaaggagcacgtgtgtttcgtgatggaatatgctgccgggggcgaccttatgatgcacattcacactgacgtgttttccgaaccccgcgccgtgttttatgccgcctgtgtcgtcttggggttgcagtatctacacgagcacaaaatcgtctaccgtgatctgaaattggacaatctccttcttgatactgagggtttcgtcaagattgccgactttggtctgtgcaaggaagggatgggctacggcgataggacatctacattttgcggtacaccagaattcttggctcccgaggtcctgaccgagacgtcatatacgcgtgcagtggattggtggggcctgggcgtattaatttacgagatgctcgttggggagtccccatttccgggagatgatgaagaagaggtctttgatagtattgttaacgacgaagtgcgctatccacggttcctgtccaccgaggctatctcaattatgaggagactactgaggcgaaaccccgagcggaggctcggcgcctctgagaaggatgccgaggatgtgaagaagcatccttttttccgactcatcgattggtccgccttaatggataaaaaggtgaaaccacccttcatacctaccattcgtggtcgggaggacgtctctaacttcgatgacgagtttacatccgaagccccaatcttgactccccctagagaaccccgaatcctgtcagaagaggagcaggaaatgttccgggactttgactacatagccgattggtgttag

SEQ ID NO: 201339 - DNA, 2955 bp, synthetic construct
  misc_feature 1..2955: note = Description of Artificial Sequence: Synthetic coding sequence
  source 1..2955: mol_type = other DNA
atggccagcaaccccgagcggggcgagatcctgctgaccgagctgcagggcgacagccgttcactcccattttccgagaacgtcagtgccgttcaaaagttggacttcagcgatactatggtgcaacagaagctggacgatataaaagaccggatcaagcgcgagattaggaaggagctcaaaattaaggagggagccgagaacttgcgaaaggtcacgacagacaagaagagtttggcatatgtcgacaacatcctcaagaaatccaacaagaaactggaggaacttcaccacaaactgcaggagcttaatgcacatatcgttgttagcgatccagaggacatcacagactgccccagaactcccgacactcctaacaacgatcctcgatgctcgacgagtaacaataggttgaaagcattgcagaagcagctggatattgaactgaaggtgaaacagggagctgaaaatatgattcagatgtactctaatgggagttcgaaggataggaagttgcatgggaccgcacagcagttgctccaggattctaagaccaagatcgaagtgatccgaatgcagatcctacaagcagtacagacaaacgagctggccttcgacaacgccaaacctgtgattagccctcttgaattgagaatggaggaactgcgacaccacttccgcattgaattcgctgtcgcagagggggcgaagaacgttatgaagctcctaggaagtgggaaggtaaccgatcgcaaggccctttcagaagcccaagctcgctttaatgagtcgagccagaaactcgatttgcttaagtactccctggagcaacgcctcaatgaggtccccaagaaccatcccaagagccggattatcatcgaggagctttctcttgttgctgcctctcctactttatccccgcggcagagtatgattagtacccagaatcagtacagcacacttagcaaacctgccgcgctgaccggcactctggaggtgaggttgatggggtgccaggatatcctggaaaacgtgccaggacgcagcaaggctacttctgtagccttgcctggctggtcccccagtgagacgagaagctcttttatgagtaggacatccaagagtaagtctggtagtagccgcaacctccttaagactgatgacctctctaacgacgtgtgtgccgtactgaagcttgacaacacggtggttggtcagacgtcttggaagccaatcagcaaccagtcctgggaccagaaattcactttggaactcgatagaagccgcgaattggaaattagtgtctattggagagactggaggagcctgtgtgccgtgaagtttctgcgattggaggactttctggataatcagaggcacggaatgtgtctgtacctggagccccaaggaactctgttcgcggaagttacgttcttcaatccagtcattgagagaagaccaaagctccagcgccagaagaaaattttctctaagcaacagggtaaaacattcctgcgggctccccaaatgaacataaacatcgccacatggggcagattggtacggcgtgcaattcctactgtgaaccacagcgggacgttctctcctcaagccccggtacctacaacagtaccggtcgtggacgtgaggattccccagttggctccaccagcctccgatagcacagtcacaaaactggacttcgatctggaaccagagcccccgccagcccctccgagggccagctctctgggagagatcgatgagtcttcagagctcagggtcctggacattcccggccaagactccgagacagtctttgatatccagaatgacaggaactccattctgcccaagtcccagtcagaatacaagccagacacaccacagtcaggtttggaatactcaggcatacaggagctggaggatagacggtcacagcagcgctttcagtttaacctgcaggacttcaggtgctgtgcagtcttggggcgcggacattttggcaaggtcctattagccgaatataaaaatacgaatgagatgttcgccatcaaggccctgaagaaaggggatattgtggctagagacgaagtggacagccttatgtgtgaaaaaaggattttcgagacggtgaactctgttaggcaccctttcctcgtgaaccttttcgcgtgtttccagacaaaggaacatgtgtgctttgtgatggaatacgctgccggtggtgatctcatgatgcatatacacaccgatgtcttctcagaacccagggcggtgttctacgcagcctgtgtcgtccttggtctgcagtatctgcatgagcacaaaattgtatatcgcgacctgaaactggacaatttgctgctggataccgagggcttcgttaagattgcagattttgggctatgcaaagaaggtatgggctatggagacagaaccagtaccttttgtgggacacccgagttcctggcgccagaggtgctgaccgagaccagctacactcgggcagtggactggtggggcctgggagttcttatttacgagatgctcgtcggcgagtcccctttccccggagatgacgaggaggaggtgttcgattccatcgtgaacgatgaagtgcgataccctagattcttgagcacagaagctatttctattatgaggcgcctgctcagaagaaatcctgagagaagattgggtgccagtgaaaaagacgccgaagacgtcaaaaagcaccccttttttcggctcatcgattggagcgcgctgatggacaaaaaggtgaagcctccatttatcccaaccatccgtggccgcgaggatgtctctaactttgacgacgaatttacatcagaggctcctattctgacaccgcctcgcgagccaagaattctttcggaagaggagcaggagatgttccgcgactttgactacatcgccgattggtgctag

SEQ ID NO: 201340 - DNA, 636 bp, synthetic construct
  misc_feature 1..636: note = Description of Artificial Sequence: Synthetic coding sequence
  source 1..636: mol_type = other DNA
tgagaggagctgcggcaccacttccggatcgagttcgccgtggccgagggagcaaaaaacgtgatgaaactcctcgggtcaggtaaagtgacagacaggaaagctttgtccgaggcacaggcgaggtttaacgagtcaagtcagaaactcgatctgctcaagtacagcctggagcagcgcctaaacgaagtcccaaagaatcatccgaagtcaagaatcataattgaagagctgtcactggtagctgcttctccgactctgtcgccacgccagtctatgatcagtacgcagaatcagtactcaacgctgtccaagccagcagccctgacagacgatgtgtgtgcggtgttaaagttggataatacagtcgtcggccagactagctggaagcccatcagtaaccagagctgggatcagaagtttaccctcgagcttgacaggagccgggaactggaaattagtgtctactggagggattggagatccctgtgtgctgtgaaattcctgaggctagaagacttcctggacaaccagaggcacggcatgtgcctgtaccttgagccccaagggactctgttcgccgaggtgacattcttcaatccagtgatcgagcgtagaccaaagctgcagcgctag

SEQ ID NO: 201341 - DNA, 198 bp, synthetic construct
  misc_feature 1..198: note = Description of Artificial Sequence: Synthetic coding sequence
  source 1..198: mol_type = other DNA
tgaggcttcgtgaagatcgccgacttcggcctgtgcaaggagggcatgggctacggggatcggacctctacgttctgtggtactcccgagttcctggctcctgaagtgctcacggaaacatcctatacccgtgcagtggactggtggggcctgggcgttctcatttatgagatgttggtgggcgagactagtgtgtag

SEQ ID NO: 201342 - DNA, 1977 bp, synthetic construct
  misc_feature 1..1977: note = Description of Artificial Sequence: Synthetic coding sequence
  source 1..1977: mol_type = other DNA
atgaacagcaccctggaggtgcggctgatgggctgccaggacatccttgagaacgtgccgggacggagcaaggccacctcagtcgcactccccggctggagcccatctgagactaggtcttcattcatgagtcgcacctctaagagtaaaagcggcagtagccgcaatcttctaaaaacggacgacttgtctaacgatgtatgcgccgtgctaaagctcgacaatacggtggttggccaaacgtcctggaagccgatttctaaccagtcttgggaccagaaatttacgcttgaactggatcgaagccgcgagctggaaataagcgtgtattggcgcgactggaggtcactctgtgccgttaagttcctgcgcttggaagattttctcgacaaccagagacacggtatgtgcctatatctcgaacctcaggggaccctgttcgccgaagtcactttctttaaccctgtcatcgagaggcgacccaagctacagaggcagaagaagattttcagtaaacagcaaggaaaaacatttctgcgcgctccccagatgaatattaatatcgctacctggggccggttagtgagaagggccatacccacagtgaatcactccgggactttcagcccacaggcccctgtccctacaaccgtgccggtggtggacgtgcgtataccacagctggccccaccagcatcagatagcacggtcaccaagttggatttcgatctggagcccgagcctcctcctgccccaccacgagccagcagcctcggcgagattgacgagagttcggaattgagggtgctggatataccaggccaggattccgaaacagtatttgatattcagaacgatagaaacagtattctccccaaaagccagagtgaatacaagcctgatacaccacaaagcggtcttgagtactctgggatacaggaactagaggataggcgcagccagcagcggttccaatttaacctgcaggacttcagatgttgtgccgtcttggggcgaggacatttcgggaaggtgctgctcgccgaatataaaaacactaatgaaatgttcgcgatcaaggcgctgaaaaaaggggacattgtggcgagagatgaggtggactctcttatgtgtgagaaaagaattttcgagactgtgaatagtgtgcgacaccctttcctggttaaccttttcgcatgctttcaaacaaaggaacacgtgtgcttcgtgatggaatacgccgctggcggcgacctgatgatgcacatacacaccgatgtgttctcggaaccgcgagcagtgttttatgcagcatgcgtagtgctgggccttcagtacttgcatgagcataaaatagtctaccgggacctgaaacttgataacctgctcctggatacagagggattcgtgaagattgctgatttcggactgtgcaaagaggggatggggtacggtgaccgcacaagtacattttgcggcacaccagaattcttggcccccgaagttttgaccgaaacgtcatacacccgagcagtagattggtggggactaggcgtgctgatttatgagatgttggtgggcgagtccccatttcccggtgatgacgaggaagaggtctttgacagcatagtcaatgacgaggtgcgctatccaaggttcctctccaccgaagcaattagtattatgaggaggctcctccggcggaatcccgagcgaagactcggcgccagtgaaaaagatgctgaagatgttaagaagcatcctttcttcagactgatcgactggtccgcactcatggacaaaaaagtgaaaccaccatttattcctacaatccgaggcagagaagacgttagtaacttcgatgatgagttcacgtctgaggcacccatcctaactcctccacgcgaacctcggatactatcggaggaggaacaagagatgttccgtgatttcgattatatcgctgattggtgttag

SEQ ID NO: 201343 - DNA, 336 bp, synthetic construct
  misc_feature 1..336: note = Description of Artificial Sequence: Synthetic coding sequence
  source 1..336: mol_type = other DNA
atgcacatccacaccgacgtgttcagcgagccccgggccgtgttctacgctgcttgtgtggtgttgggcctccagtatctgcatgaacacaaaatcgtatatagggatctaaagctcgataacttgttgctggacaccgaaggattcgtaaaaatagcagacttcggcctttgcaaggagggtatgggatatggcgaccgcactagtacattttgtggaacacccgagttcctggcacctgaggtactgacagaaacatcttacacaagggctgtggactggtggggacttggagttttaatctatgagatgttggtcggggagacctccgtctag

SEQ ID NO: 201344 - DNA, 2670 bp, synthetic construct
  misc_feature 1..2670: note = Description of Artificial Sequence: Synthetic coding sequence
  source 1..2670: mol_type = other DNA
atggaggagggcgccccccggcagcccggccccagccagtggcccccagaagatgaaaaagaggtcattcgccgcgctatccagaaagagctgaaaataaaggagggtgtggaaaatctcagacgcgtggccaccgataggaggcatctgggacacgtgcagcagcttttgcggtcttcgaatcgtcggttggagcaattacacggggaactgagggagcttcatgcacgtattctcttaccgggacccggtcccggtccggccgagccagtggcaagcggaccacgtccatgggccgagcaactcagagcacgacatctcgaggctctgaggcgtcagctgcacgttgaattgaaagtgaaacaaggagctgagaatatgacgcatacatgtgcgtcaggaactcctaaggagcgcaaactccttgctgcagcacagcagatgcttagggattctcagttgaaagtagccctactccggatgaaaataagctcactggaagcatccggatcaccagaaccaggtccagaattactggctgaggagctgcagcatcgccttcacgtcgaggctgctgttgccgaaggagcaaagaatgtggttaaattgttatcttctagaagaacacaggatagaaaagcacttgcagaagcacaagcacagctccaggagtcctctcaaaagctggacctcctccgcctggccctcgaacagctacttgaacagctgccccccgcgcatcctttgcgctctagagtcactcgggaactgagggcagccgtgcccggctaccctcagccctctgggactccagtgaagccgactgccctgaccggcaccctgcaggtaaggctcctgggctgtgagcagctgctgaccgccgtgcctgggcgttcgcccgctgctgctctggcctcctctccttcagaaggatggctgagaacgaaagccaagcaccagaggggccgcggcgagttagcatcagaggtgttggctgtgctgaaggtcgataaccgtgtggtgggacagactggctgggggcaggttgccgaacagtcctgggatcaaacgtttgtgattcccctggaaagggcgagagaactcgaaataggagttcactggagagattggagacagctctgtggggtagctttcttgcgtttggaggatttcctggacaacgcatgccatcagctcagcctgagtttagtgccccagggacttctgttcgcccaggtaacgttctgcgatccagtcattgagcgtagacccagactgcaacggcaggagcggatctttagcaagaggcggggtcaggacttcctgcgcgcttcccagatgaacctgggaatggccgcttggggaaggctggtgatgaatctgctcccaccgtgttcctccccaagcaccatttctcctcccaaaggctgcccacgcacacctacgactcttcgggaagccagtgatccggccaccccttccaactttttgcccaagaagacccctttgggagaagagatgactcccccgcccaagccccctcgcctgtatctcccgcaggaaccaacaagcgaggagacccctcgtacaaaaagaccgcacatggagcctcgtacgaggagaggccccagcccacccgcatcacccacccggaaaccccccaggctccaagatttccggtgccttgccgtgcttggtaggggtcattttggaaaggttttacttgtccaatttaaaggaaccggcaagtactatgctatcaaagccttgaaaaaacaggaggtgttatcgagggatgagatagagtctttatactgtgagaaaagaatcctggaggctgtgggttgtacgggccacccttttctgctttctctcctggcgtgctttcagactagttcccatgcctgcttcgtgaccgagtttgtaccaggtggcgatctcatgatgcagatccacgaggacgtatttcccgagccccaggcgagattctatgtagcatgcgtcgtgctggggctgcagttcctgcatgaaaaaaaaatcatttaccgcgatctgaagctggataacctgctgctcgatgcacaagggtttttgaagatcgcagactttggactgtgcaaggaaggcatcggattcggtgaccggacttcgaccttctgcggcaccccagagtttctggctcccgaggtgcttactcaggaggcctacactagggccgtagattggtggggactgggcgtgctcctgtacgaaatgctcgtgggcgaatgtccttttccaggagacacagaggaagaggtgtttgattgtatcgtgaatatggacgcaccttatccaggctttttgtcagtgcaggggctagaattcattcagaagctgctgcagaagtgccctgagaagcgactgggcgctggtgaacaggatgccgaagagatcaaggttcagcccttcttccgcaccaccaattggcaggctttgctagctcgtacaatccagcctccgtttgtgcccacactctgcggccctgctgatctgagatactttgaaggagagtttactgggttgcctcccgctttgacccctcccgctccccactccttgctgacggctagacagcaagccgcgtttcgagacttcgattttgtgagtgagcggtttctggagccctag

SEQ ID NO: 201345 - DNA, 1725 bp, synthetic construct
  misc_feature 1..1725: note = Description of Artificial Sequence: Synthetic coding sequence
  source 1..1725: mol_type = other DNA
atgcggcggctgagcagctggcggaagatggccaccgccgagaagcagaagcatgatggacgggtgaaaattggccactacatcttaggcgatactctgggcgtcggaactttcggcaaggtgaaagtcggaaagcatgagctgaccgggcataaggtggccgtgaaaatcttaaaccgacaaaagattcgtagtctcgacgttgtcgggaagattagaagggaaatccagaatctgaagctcttccggcatccgcatatcattaagctttatcaagtgatcagcactccgtctgatattttcatggtgatggaatacgtgagtggcggcgagctatttgactacatatgtaagaacggtcgtaaaagtgacgttcctggggtcgtaaaaaccggcagtacaaaggagctggatgagaaagagtcccggcgtttattccagcagattctgtcgggtgtggattattgccaccgtcatatggtggtccaccgggacttgaagcctgaaaatgtgctcctggacgcacatatgaacgctaagattgcagatttcgggctctccaatatgatgagcgatggcgagtttctgaggacaagttgtggcagccccaattatgccgcacctgaagtgatttcaggacgactgtacgccggcccagaagtggatatctggagctctggcgtgattctctacgcccttctgtgtgggaccctgccttttgacgacgaccatgtgccgactctgttcaagaagatctgtgacgggatcttctacactccgcagtacctcaatcctagcgtaatcagcctgctgaagcacatgctgcaggtggaccctatgaaaagggctacaatcaaggatattcgggaacacgaatggtttaaacaggaccttcctaagtacctctttcctgaggatccatcttactctagcactatgattgacgatgaggcattaaaagaagtttgcgaaaaatttgagtgctccgaagaggaggtcctgtcatgtctgtacaaccgaaaccaccaagaccccctggcagtcgcctatcacttgatcattgacaacagacggatcatgaatgaggcaaaggacttttatttagccacaagtcctcccgacagctttttagatgatcatcacctgaccaggccacatcccgagcgcgtaccgttcctcgtggccgagacacctagggctcgccatacacttgacgagctcaacccacagaagtccaaacatcagggcgtgcgcaaagccaagtggcaccttgggatcagatctcaatcacggcctaacgacatcatggcggaagtctgcagggcgattaaacagcttgattatgaatggaaagtagtcaatccctattatctgagagtaagacgcaaaaatccggtgacctcaacatattcaaaaatgagtttacagctatatcaagtggattctaggacttatctgctggactttcgcagtatagatgacgagatcactgaagccaaatccgggaccgctacaccacagagaagcggatcagtttccaactatagaagctgtcagcgttccgacagcgacgctgaggctcaaggaaaaagctctgaggtaagccttacatcaagtgtcaccagcctggattcaagccccgtcgacctgaccccaaggcctggatcccatacaattgagttttttgagatgtgtgctaacctgatcaaaattctggcacagtag

SEQ ID NO: 201346 - DNA, 1680 bp, synthetic construct
  misc_feature 1..1680: note = Description of Artificial Sequence: Synthetic coding sequence
  source 1..1680: mol_type = other DNA
atgcggcggctgagcagctggcggaagatggccaccgccgagaagcagaagcacgacggacgggtgaaaataggtcactacatcctcggggatactctgggcgtcgggaccttcgggaaagtaaaggtaggaaagcatgagttaacaggtcacaaagttgcagtaaagatcctgaaccgtcaaaagattcgtagcttggatgtggtgggaaaaatccgacgggagatccagaatctcaagctctttcggcatcctcatattatcaagctttaccaagttatctccaccccgtcagacatattcatggtgatggaatacgtgagtgggggagagctgttcgattatatatgcaaaaacggccgcctcgacgagaaagagtcgaggagactcttccagcagatcctgtcaggcgtagattattgtcatcggcacatggtggtacacagagacctcaagccagagaacgtcctcctggatgcacatatgaacgctaagatcgctgactttgggctcagcaatatgatgtctgatggcgaatttcttcggacctcatgcggatcaccaaactatgccgctcctgaggtgatcagcggtaggttgtatgccgggcccgaggtagatatatggtcatcgggtgtgattctctacgcactgctgtgtggtacactgcccttcgacgacgaccatgtacccaccctttttaagaagatatgcgacggaattttctacactccacaatacctcaatccatcagtgattagcctattgaagcatatgcttcaggttgaccccatgaaaagagctacaatcaaagacatccgggaacacgaatggttcaagcaggatcttccaaagtatctgttcccggaggatccatcctatagctcgaccatgattgatgacgaagctctcaaggaagtatgcgagaagttcgaatgctcagaagaagaagtgctgagttgcttgtacaatcggaatcatcaggatccccttgccgtggcctaccaccttatcatcgataaccgacgcatcatgaacgaggctaaagatttttatctggccactagccccccagattctttcctggatgatcatcatctcaccaggccacaccctgagcgggtgccgttccttgtcgcagaaaccccgcgtgcgagacacaccctcgacgagctaaacccccagaagtcaaagcaccagggagtacggaaagcaaaatggcatctgggtatcagaagtcagtcccgccctaatgacattatggctgaagtatgccgggctataaagcaattggactacgaatggaaagttgtgaatccctactacctccgcgtcagacggaagaatccggtcacttctacatactctaaaatgtcccttcaactgtatcaggtggactctagaacgtacctgctagattttcgctccatcgatgatgagattacagaagcgaaaagcggaaccgctactccacagaggtcaggctccgtgtcaaattaccgatcatgtcagaggtctgattctgatgccgaggcccaaggaaaatccagcgaggtgagtctgacgagctccgtcacgtcattggacagtagccccgtggacctgactcctcgccctggctctcacactattgaattcttcgaaatgtgcgcaaatctcattaagattctcgctcagtag

SEQ ID NO: 201347 - DNA, 1659 bp, synthetic construct
  misc_feature 1..1659: note = Description of Artificial Sequence: Synthetic coding sequence
  source 1..1659: mol_type = other DNA
atggccgagaagcagaagcacgacggccgggtgaagatcggccactatgtgttgggagacacgctcggggtgggtacatttggaaaagttaagattggagagcaccagctgaccggtcataaggtcgccgtcaagatcctgaacaggcagaagattcgcagcctggatgtcgtgggcaagataaaacgtgaaattcagaatctaaagctttttcgccatccccatattattaagctctaccaagtgatttcgacacccaccgatttcttcatggtgatggaatatgtgagtgggggggagctgtttgactatatatgcaagcatggccgagtggaggagatggaggctagacgtctctttcagcagatcctaagcgcagtggactactgccatagacatatggtcgtgcaccgtgacctcaaacccgaaaacgtcctcttggacgcacatatgaatgcaaagattgctgacttcggactgtctaatatgatgtcagatggagaattccttaggacctcttgtggatcgcccaactacgcagctccagaggttataagcggaagactctacgcagggcccgaagttgacatctggtcatgcggcgtgatcctgtacgcgctcttgtgtggcaccctgccgtttgatgatgaacacgtgcctacattgtttaaaaagatccgggggggggtcttctacatccctgaatacctgaacagaagtgtggccacgctgctcatgcatatgctccaagttgatcccctgaaacgtgcgacgatcaaggacattcgggaacatgaatggttcaagcaggacttgccttcttatctcttccccgaggacccttcgtacgatgccaacgtcatcgatgatgaagctgtgaaggaggtgtgtgaaaaatttgaatgcaccgagtcagaagtgatgaatagcctctactctggtgaccctcaggatcagctcgccgtcgcctaccacctgattatagataatcgacgcatcatgaatcaggcttcagaattttatcttgcctccagtcccccctcaggcagcttcatggacgattcagctatgcatatccccccaggattgaaaccccaccctgaaagaatgcctcccctgatcgcggattcccccaaagcaaggtgccctctggatgcactgaataccaccaagcctaaaagccttgccgtcaagaaagcgaagtggcatctgggcatacgctcccaatccaagccatatgatattatggccgaggtctacagggccatgaagcaattagacttcgagtggaaggttgtgaatgcttaccacctgcgtgttcgacgcaaaaatcctgtgactggtaattatgttaagatgtctcttcaactgtatctcgttgacaatcgcagctatttactggactttaaatccatcgacgatgaagttgtagaacagcgaagcggcagctcaactccgcagcggagctgctcagctgcgggtctccacaggccccgcagctccttcgatagcaccactgctgagagccactccctgagcggttctcttacaggctccttgacaggctcaacactgagctccgtctctccccgcctcgggtcccacaccatggacttttttgaaatgtgcgcatcactaatcactacccttgcaagatag

SEQ ID NO: 201348 - DNA, 744 bp, synthetic construct
  misc_feature 1..744: note = Description of Artificial Sequence: Synthetic coding sequence
  source 1..744: mol_type = other DNA
atgctgaccatcaccgacttcatcaacatcctgcaccggtactacaaaagtgctttggtgcagatctacgaacttgaagaacacaagattgaaacgtggcgtgaagtgtacttacaagattcatttaaacctctggtgtgcatttcacccaacgcgtcactattcgacgccgtcagcagcctaattagaaataagattcacagactcccggtaattgaccctgagagcggcaacaccctttatatcctcacccataagcgcatcttgaaatttctgaaactcttcatcactgaatttcctaagccagagtttatgagcaagagcctggaagagctgcaaatcgggacctacgcaaatatagccatggtaagaaccactacgccggtgtatgtagccctgggcatcttcgtgcaacatcgggtgtccgcactgccggttgtcgacgaaaaagggagagttgttgacatatactccaaattcgacgtgattaacctggccgccgagaagacatataacaaccttgacgtgtcagtgactaaggcactgcagcatcggtcccattattttgaaggagtcctgaagtgttacttgcacgagaccctcgaaactattatcaatcggctcgttgaggcggaagttcaccgcttagtcgtggttgacgaaaacgatgttgtgaaaggcatcgtgtcactcagcgatatcctgcaggcccttgtgctcacaggcggagagaaaaaaccctag

SEQ ID NO: 201349 - DNA, 996 bp, synthetic construct
  misc_feature 1..996: note = Description of Artificial Sequence: Synthetic coding sequence
  source 1..996: mol_type = other DNA
atggagaccgtgatcagcagcgacagcagccccgccgtggagaacgagcacccccaggaaacacctgagtcaaataactccgtgtacacctccttcatgaaatctcaccgctgctatgacctcatacccacttcatcaaaacttgttgtgttcgacaccagcttgcaggtaaagaaagcttttttcgctcttgtgacgaacggagtcagagccgcccctctctgggactccaaaaagcagagtttcgtggggatgcttactattactgacttcatcaatatcctgcatcggtattataaatccgctctggttcagatctatgaactggaggagcacaaaatcgaaacttggcgggaggtgtacctccaggactcttttaagcctctggtgtgcatttctcctaatgcaagcctcttcgacgcagtgtcgagtctgattcggaataagatccacagactgcccgtcatcgaccccgagagtggaaatactctgtacatcttaacacacaaaagaatcttgaaattcttgaaattgtttattacagaattccctaaaccagaattcatgagcaaatcattggaggaactccaaattgggacttatgctaacattgcaatggtccgcacaactaccccagtctatgttgcgctgggtatctttgtccagcatcgcgtgagtgcccttcctgtagtggacgagaaggggcgcgtggtcgatatttattccaagttcgatgtgattaacctggcagccgaaaaaacatataataacctggacgtatccgtcaccaaggcccttcaacaccgcagccactattttgagggcgtgctcaaatgctatctgcatgaaaccctcgagaccattataaataggctagtggaggccgaagtgcacagacttgtcgttgtagatgagaatgatgtggtcaaaggcatagtttctctgtccgacatcctccaggcgctggttctaactggcggggagaaaaaaccttag

SEQ ID NO: 201350 - DNA, 1710 bp, synthetic construct
  misc_feature 1..1710: note = Description of Artificial Sequence: Synthetic coding sequence
  source 1..1710: mol_type = other DNA
atgggcagcgccgtgatggacaccaagaagaagaaggacgtgagctctcctggaggctctggcggaaaaaagaatgccagccagaaacgtagatcacttagagtgcacatccctgatctaagcagcttcgctatgcctctcctagatggggacctcgagggtagcggcaagcatagcagccggaaggtcgacagcccctttggccccgggtcccctagcaagggattttttagcaggggtccccaacctcgaccaagttctcccatgtcagcccctgtgagaccaaagacctctccaggatccccaaaaaccgtgttccctttttcgtaccaagaaagtccgcccagaagccctagaaggatgtcatttagcgggatttttcgcagttcatctaaagagtccagcccgaactcaaaccccgccacctccccgggtggaattagattcttcagtcggtctagaaaaaccagcggccttagctcttccccgtctaccccgacacaagtgacaaaacagcacacttttcccctggagtcctacaagcacgagcccgagaggttggagaaccgcatctacgcctcctccagcccacccgatacgggacagaggttctgcccgagctctttccagtcacctacacgccctcctctggcctcacctacacattatgctccatctaaggctgccgccttagctgctgccctgggacctgccgaggccggcatgctcgagaagctggaattcgaggacgaggctgttgaggacagtgagtcgggtgtgtatatgcgcttcatgcgaagtcacaagtgctacgacatcgtgcccacctcatcgaagcttgtggtgtttgacacaaccctgcaagtcaaaaaggcttttttcgccctggtagctaacggtgttcgcgctgcccctctgtgggaatctaaaaagcagtcattcgttgggatgttgactattactgactttattaatatcctgcaccgatattataagagcccaatggttcagatctatgagctggaggaacacaagattgagacctggagagaactatatctccaagagacatttaaaccacttgttaacatcagcccagacgcaagtctctttgacgccgtgtacagtctgatcaaaaacaaaatccatcgactcccagttatcgaccccatcagcgggaatgcattgtacattctgacacataaacggatccttaagtttctacaactatttatgagcgacatgcccaaaccagcgtttatgaaacaaaacctcgacgagctcggcatcggaacttatcacaacatcgcattcatccaccccgatacgcccattattaaagccctgaacatttttgtcgagcggcggataagcgccctacctgttgtagatgagagcggaaaggtggttgacatctactcgaagttcgacgtgatcaacctggccgcggaaaagacttataacaacttggacattactgtgacacaggctctgcaacatcgctcccagtactttgagggcgtggtcaaatgcaataagctcgaaatactggaaaccattgtcgacagaatcgtcagagccgaagtgcaccgcctcgtggttgtaaacgaggccgacagtatcgtgggtatcatcagcctgtctgatattctgcaggcgttgatcctcacgcccgcaggtgcaaagcaaaaagaaaccgaaaccgaatag

SEQ ID NO: 201351 - DNA, 1335 bp, synthetic construct
  misc_feature 1..1335: note = Description of Artificial Sequence: Synthetic coding sequence
  source 1..1335: mol_type = other DNA
atgaagcggttcggcagcctgcggagcaacaagaagcacaaggaccagaacagaagcactgagaggagacagtcagagcctcacggattatttgcaagcggcctttctagctcgccaagcactccgacacaggtgaccaaacagcacacttttccactggagtcctataaacatgagcccgaaaggttggagaacaggatctatgcttcgtcctcgccaccggatacaggccaacgcttttgccccagtagctttcaatcccctactagacctccccttgcttcgcccactcattatgccccttctaaggccgctgcgctggccgccgccctgggacctgccgaggccggcatgcttgaaaagctggaattcgaggacgaggtggaggattcagaaagcggcgtgtacatgagattcatgaggtcacacaaatgttatgatattgtgccaacgagttctaagctcgtcgtattcgacacaaccctgcaggtgaagaaggccttcttcgcactggtggccaatggggtgcgcgcagcccctctatgggagtctaagaaacagagctttgtgggaatgcttaccattaccgatttcatcaatatcctgcacaggtactacaagagccctatggttcaaatatacgagctggaggagcacaaaattgagacctggcgtgaactgtatctgcaagaaacatttaagcccctggtaaatatctcacctgacgcttctctttttgatgcggtgtactccctgattaagaataaaattcacagactgcctgttatcgatcccatcagcgggaatgccctttacatccttacacataagcgaatccttaagttcttacagttattcatgagcgacatgccaaagccagcgtttatgaaacagaatctggacgagttggggattggcacctatcataacatagcctttatacacccagacactcccatcattaaagccctcaatattttcgtcgagcggcgaatctcagcccttccagtcgttgatgagagtggcaaggtggtggacatctactcaaaatttgatgtgatcaacttggccgcagaaaaaacttacaacaatctcgatatcaccgtgacccaggccctacagcaccgaagccaatattttgaaggagttgtgaagtgtaacaaactggagatccttgagaccatcgtggacagaatagtgcgagccgaggttcataggctggtcgtggttaacgaggccgactctatagtgggaattatcagcctttctgacatactgcaggcactgattttaacccctgccggcgcgaagcaaaaagaaactgaaaccgagtag

SEQ ID NO: 201352 - DNA, 309 bp, synthetic construct
  misc_feature 1..309: note = Description of Artificial Sequence: Synthetic coding sequence
  source 1..309: mol_type = other DNA
atggccggccaggccttccggaagttcctgcccctgttcgaccgggtgcttgtcgaacgcagcgcagctgagacggtcacgaaaggtggcataatgctccccgagaaaagccagggtaaggtactgcaagccactgtggtggccgtcggcagcggaagcaagggcaagggcggagagatccagccagtaagcgtaaaagtaggcgacaaggtcttgctcccagaatatggcggaacaaaggtagtgctggatgataaggactatttcttgtttcgcgatggagacatcctgggcaaatatgtggactag

SEQ ID NO: 201353 - DNA, 1062 bp, synthetic construct
  misc_feature 1..1062: note = Description of Artificial Sequence: Synthetic coding sequence
  source 1..1062: mol_type = other DNA
atggagcccggcctggagcacgccctgcggcggacccccagctggagcagcctgggcggctccgaacatcaggagatgtcatttttggaacaggagaactcttcctcttggccctcccctgcggtgacttcatcctccgaaaggattcgcggcaagaggcgggccaaggctctaagatggactcggcaaaagagtgtggaagagggagaaccacccgggcaaggagaaggtcccaggagtcggcctgcagccgagtcaacaggtctggaggccacgttcccgaagacaaccccccttgcacaagctgatcccgcaggagtgggaactcctccaactgggtgggattgtctcccctccgattgtactgcatctgctgctggatcctccacagacgatgttgaactggctacagagtttcctgctaccgaggcttgggagtgtgagcttgagggtctgctcgaggagagacccgctctgtgcctgtctcctcaggcccccttccctaagttgggctgggatgacgagctgaggaaacccggtgctcagatttatatgaggtttatgcaagaacatacatgctatgacgctatggctacttcttctaagctggtgattttcgatactatgttggagatcaagaaagccttctttgcattggttgcaaatggcgttagagctgctccgctatgggacagtaaaaagcagtcatttgtgggaatgctcacaattacagacttcatcctagtgctgcaccgctactatagaagtccgttgcggtccacatgcaaagccgcttcgtcgctttggagccctagcctgctgatgattgcctgcctgaagttgtcaacaccatctagcaggacaggcagcattgcctgcctatttctgacacgttgtcaagctacatacagcacctcttcccataccaacgcttgctccagttcttgtactagtttagtaccatgctgtccaggaccgccctcttccaccgccctgagcaaaatctgggctagcgcccactctgagacatggctctggtgctggcggcagcaccccagttag

SEQ ID NO: 201354 - DNA, 1395 bp, synthetic construct
  misc_feature 1..1395: note = Description of Artificial Sequence: Synthetic coding sequence
  source 1..1395: mol_type = other DNA
atgagcttcctggagcaggagaacagcagcagctggcccagccccgccgtgaccagcagtagtgagagaatccgggggaaaagacgtgccaaagccctacggtggacgagacagaagagcgtggaggagggcgagcctccagggcagggagagggaccgcggtctagacctgcagcggagagtaccggcctggaggcgactttccctaaaactacgcctctggcacaagccgatcctgctggagtcggaacaccacctacagggtgggactgcctgcccagcgactgcactgctagcgcagctgggagttccacagatgacgtagagctggccaccgagtttcctgctacagaggcctgggagtgcgaactggaaggacttttggaggaaaggcctgctctgtgcctctcaccccaggccccttttcccaaattggggtgggatgacgaactgagaaaacccggagctcaaatctacatgagattcatgcaggagcatacttgctatgacgccatggccacctcatctaagctggtgatcttcgatacaatgctagaaatcaagaaagcgttcttcgctctcgtagctaacggcgtgcgcgctgcccctctgtgggacagcaagaagcaaagtttcgtgggcatgctcaccatcacagactttattctggtccttcaccgctactaccgttcaccgctcgtacagatatatgagatcgagcagcataagattgagacgtggcgggaaatatacctgcaaggatgtttcaaacccctcgtgagcataagccctaatgattcactcttcgaagctgtgtacacccttattaagaatcgaattcaccgactaccagtccttgatcctgtttcaggcaacgtgttgcacatcctcacacataagcgcctgctcaaattcctgcacatctttggaagcctgttacccaggcccagttttctgtatcgcactattcaagatttggggattgggactttcagggatctggccgtcgtcctggagactgcccccatactcaccgccctggatatctttgtggatcggcgtgtctcagccctgcctgtagttaacgaatgcggccaggttgtgggactctattcccggtttgatgtcattcacctagccgcccagcagacttataaccacctggatatgtctgtcggggaggctcttaggcagagaacgctctgtctggagggtgttctcagttgtcagcctcacgagagtctaggagaagtgatcgaccgcatcgcacgagagcaggtccatagactggtgctggtcgatgaaacacagcacttattgggcgttgtctcgctcagcgatatcctccaagcactggtgctgtcccccgccgggattgacgccctgggggcttag

SEQ ID NO: 201355 - DNA, 1470 bp, synthetic construct
  misc_feature 1..1470: note = Description of Artificial Sequence: Synthetic coding sequence
  source 1..1470: mol_type = other DNA
atggagcccggcctggagcacgccctgcggcggacccccagctggagtagtctgggaggaagtgaacaccaggagatgagcttcctggagcaggagaacagcagcagctggccttccccagccgtcacgtcctcaagcgaaagaattaggggcaaaagaagagcaaaagctttgcgatggactcgtcagaaatctgtagaggagggtgaaccccctgggcagggggaggggccccgttctcgaccagctgcagagagtaccgggcttgaagctacattccctaaaaccacccctctggcccaggccgacccagcaggagtgggcacccctccaacgggttgggattgtctgccctctgactgcacagcttccgcagcaggctcaagtactgacgatgtcgaactcgccaccgagtttcctgcaacagaagcctgggagtgcgaactcgaaggacttcttgaagagcgacctgccctgtgcctgagccctcaagccccctttcctaaactggggtgggatgatgaactgcgtaagcccggagcacagatctacatgagattcatgcaggagcacacgtgttacgacgctatggccacgagttcaaagttagtcattttcgacactatgctcgagatcaaaaaggctttttttgccctcgtcgcaaacggggtgcgagccgcacccctttgggactctaagaagcagtctttcgtagggatgctaacaataacggattttattttggttctgcaccgttactaccgctctccccttgtgcagatatacgaaatcgaacaacacaagattgagacgtggcgggagatataccttcaaggctgtttcaagcccctggtgagtatctcccctaacgactcgcttttcgaagctgtctacactctgattaagaaccgaattcatagactacccgtccttgacccagttagtggtaatgtgctgcatattctgacacataaacgactcctgaaatttttgcacatctttggctccctgctcccaagaccgtccttcctgtatcgcaccatacaagatctgggcattggaaccttccgggacctggccgttgtgctggaaaccgcacccattctaactgccctagatatctttgtggatcgtagggtatccgccttgcctgtcgtgaatgaatgtgggcaagttgtggggctttacagcagatttgatgtgatccatctggccgctcagcaaacctacaaccatctggacatgagtgtcggagaggcgctgcgtcagcgcactctatgccttgaaggtgttctcagctgccagccacatgaatctctgggcgaggttatcgacaggatcgcccgcgaacaggttcaccgtcttgtgttggtggacgaaactcagcacctgctcggcgtcgtctcactgagtgatatactgcaagccctagtgttgtctcccgctggtatagacgcactgggggcatag

SEQ ID NO: 201356 - DNA, 918 bp, synthetic construct
  misc_feature 1..918: note = Description of Artificial Sequence: Synthetic coding sequence
  source 1..918: mol_type = other DNA
atgcggttcatgcaggagcacacctgctacgacgccatggccaccagcagcaaactcgtaatcttcgacacaatgctcgagatcaaaaaggcttttttcgcattggttgctaatggcgtccgcgctgctccactgtgggacagcaaaaaacagtcattcgtggggatgctgacaattactgactttatccttgtgctgcatcggtactatcggagccctctggtgcagatctatgaaattgaacagcacaagatcgagacttggcgggagatctacttgcagggctgctttaaaccgctggtgagcatctctcctaacgattccctgtttgaagctgtgtacacgctaataaagaatcgcatacatagattgccggtcttggatccggtctctggaaacgtgctgcacatcctgacgcataagagactcctgaaattcctccacatcttcggatctctactgcctcggcctagctttctgtataggacaatccaggatttaggcattgggacctttcgggacctggcagtcgtcctggagaccgcccctatactgacggccctcgatatattcgttgatagacgtgtgtcagccctgcccgtagtaaacgagtgtgggcaggtcgttggtctgtactcacggtttgacgtgatacacctggccgcccagcagacctataaccaccttgacatgtccgttggtgaggcactgcggcagcgcactctgtgcctggaaggcgttcttagctgtcagccccacgaatcgctaggtgaagtgatcgaccggatcgccagagaacaggttcataggcttgtcctagtcgatgaaacgcagcatctactcggcgttgtgtcgctcagcgacattctccaagccctggttctgagccccgcagggattgatgcccttggcgcatag

SEQ ID NO: 201357 - DNA, 1056 bp, synthetic construct
  misc_feature 1..1056: note = Description of Artificial Sequence: Synthetic coding sequence
  source 1..1056: mol_type = other DNA
atgggcaacgccgccgccgccaagaagggcagcgagcaggagagcgtgaaggaattccttgcgaaggccaaagaggacttcctaaagaaatgggagtctcccgcccagaacaccgctcatcttgaccaatttgaaagaattaaaacattaggtacagggtccttcgggagggtgatgttagtcaagcacaaagagactggaaaccactatgccatgaaaatcttagataagcagaaggttgttaagctgaagcagattgagcacactcttaacgagaagagaattctgcaggctgtgaactttcccttcttggtcaagctggagttcagcttcaaggataattcaaacttgtatatggtgatggaatatgtgcctggcggggagatgtttagtcacctgagacgcattggtaggttctcagagccccatgctcgcttttatgccgcccagattgttcttactttcgagtacctgcatagtctggatctgatctatagggatttaaagccagaaaacctcctcatagaccagcagggatatatacaggtgacggacttcgggttcgcgaagagggttaagggccggacctggacactatgcggcacccctgagtacctggccccggagattattctttctaaaggttataacaaagccgtggactggtgggctcttggggtgctcatctacgaaatggccgccggttatccccctttctttgcagatcagcccatccagatttacgaaaaaatcgtctccggaaaagtccggttcccttcccatttcagctcagacttgaaagatctgttgcgcaacctgctacaagtggacctcacaaaacggtttggtaacctcaaaaatggtgtgaacgacattaaaaatcacaaatggtttgccaccacagattggatcgccatttatcaaaggaaggttgaggcaccctttattccaaaattcaaagggcctggcgatacctcaaatttcgacgactacgaggaggaggagatccgggtcagcatcaatgaaaagtgtggaaaagaattcagtgaattctag

SEQ ID NO: 201358 - DNA, 1032 bp, synthetic construct
  misc_feature 1..1032: note = Description of Artificial Sequence: Synthetic coding sequence
  source 1..1032: mol_type = other DNA
atggccagcaacagcagcgacgtgaaggagttcctggccaaggccaaagaggattttctcaagaagtgggagagccccgcacaaaacacagcccatctggaccagttcgagcggattaaaaccttagggacgggatcgtttgggcgcgtaatgcttgttaagcataaggagaccggaaaccactatgctatgaagatattagacaaacagaaggtcgtgaaactgaaacagattgagcataccctcaacgaaaagaggatcctgcaggctgtgaactttccctttttagtcaaactggagttttcattcaaggataattcaaatctgtacatggtcatggagtacgtcccgggcggcgagatgttttcgcatctcagacgcattggccgtttttcagagcctcatgccagattctacgcagcgcagatagtcttgaccttcgagtacctgcacagtctcgacctgatttacagagacttaaagccagagaatctcctaattgaccagcagggctacatccaggtgacagattttgggtttgccaagcgcgtgaagggtcggacttggacattgtgcggaacacctgaatatctcgcccccgagatcattctctccaagggatataacaaagcggtagattggtgggcactgggtgtgctcatatacgaaatggccgccggctaccccccattttttgcggatcaacccatccaaatctacgaaaagattgtgtcgggcaaggttaggtttccttcacattttagctctgatctgaaagatcttctacggaaccttctgcaagtggatctgaccaaaaggtttggaaatcttaagaacggggtgaatgacattaaaaaccataaatggttcgctaccaccgactggattgccatttatcaacgaaaggttgaagcaccatttatccctaagttcaaggggccgggagatacatctaattttgatgactatgaggaagaggagatcagagtctcaatcaatgaaaagtgtggtaaggaattttcagagttctag

SEQ ID NO: 201359 - DNA, 1056 bp, synthetic construct
  misc_feature 1..1056: note = Description of Artificial Sequence: Synthetic coding sequence
  source 1..1056: mol_type = other DNA
atgggcaacgccgccgccgccaagaagggcagcgagcaggagagcgttaaggagtttttagcaaaagcaaaggaggacttccttaaaaagtgggaaagccccgctcaaaataccgcacacttggatcagttcgaacgcattaagacactggggaccgggtctttcgggcgcgtcatgctggtgaagcataaagaaacagggaatcactacgccatgaaaatcctggataagcagaaagttgtgaagctcaagcaaatcgaacatacactgaacgagaagaggattttgcaggccgtcaattttccattcctggtaaagttagagttttcattcaaagataattcaaatctttatatggtgatggagtacgtgccgggcggtgagatgttctcgcatctgcggcgaataggcagatttagcgagcctcatgcacgcttttatgctgcccagatcgtgctgacatttgagtatttacactccctcgatttaatatatcgggacctgaaacccgaaaatctgcttatcgatcaacagggctatattcaggtgacagatttcggattcgccaagcgggtgaaaggccggacctggacattatgcgggaccccagaatacctggctcccgagatcatactctcaaaaggctataataaagccgtggactggtgggccctgggggtgctcatctatgaaatggccgcaggctacccgccatttttcgcagatcagccgatccagatctatgaaaaaatcgtgagtggtaaagtgcgcttcccaagccatttcagctccgatctgaaagatctactgcgcaatctactccaagtggacttgactaaaaggttcggcaacctcaagaatggtgttaatgacatcaagaatcacaagtggttcgctactactgattggattgccatttaccagcgcaaggtcgaggcccctttcattcctaaattcaaaggcccaggagacacatccaactttgatgactacgaagaagaggaaatccgcgtgagcattaatgagaagtgtggcaaggagttctcggagttctag

SEQ ID NO: 201360 - DNA, 693 bp, synthetic construct
  misc_feature 1..693: note = Description of Artificial Sequence: Synthetic coding sequence
  source 1..693: mol_type = other DNA
atgctggtgaagcacaaggagaccggcaaccactacgccatgaagatattagacaagcaaaaggtagtgaaattgaaacagatcgaacataccctgaatgagaagagaatactgcaggccgtcaatttcccattcctagttaagctcgaattcagttttaaggacaactcaaacttgtacatggtcatggaatacgtgcccggaggcgagatgttcagccaccttagacgtattggccgcttcagcgaaccccatgctcgattctatgcagctcagattgtgctaacttttgaatacctgcacagtttagatctcatctatcgtgatctcaaaccggaaaacctcctcattgaccagcaaggatacattcaggttacggactttgggtttgcaaaacgtgtcaaaggcaggacctggacactttgtggcactccggagtatctggctcccgaaatcattctcagtaagggatacaacaaagctgttgattggtgggcactgggagttttaatttatgaaatggccgccggttatccaccctttttcgctgatcaacctatacaaatctatgagaagatcgtgagcggtaaggtgcggagtggatgtggcgacaccgcactcgaagagactgatcggagcctgctgacgcaccctatcccatggggggccctgttggttgttcggataatatag

SEQ ID NO: 201361 - DNA, 1074 bp, synthetic construct
  misc_feature 1..1074: note = Description of Artificial Sequence: Synthetic coding sequence
  source 1..1074: mol_type = other DNA
atgggcctgagccggaagagcagcgacgccagcgcctgcagcagcagtgagatttctgactttgtcaaggagtttttagcaaaagccaaagaggattttctgaaaaagtgggagaaccctactcagaataacgccggactcgaagactttgagcggaagaagacactcggcactgggtcttttggcagggttatgctggtgaagcacaaggcaactgaacagtattacgctatgaagatcctagataagcaaaaggtggttaaactgaagcaaatcgagcacaccctgaatgaaaagcggatcctgcaagccgttaactttcctttcttggtgcgattggaatatgcatttaaagacaacagcaacctgtatatggttatggagtacgttcctgggggcgagatgtttagccatttaagacggattggacggttttccgaaccccatgctaggttttacgctgctcagatcgtgctcacctttgagtatctccatagtctcgatctgatctacagggaccttaagcccgagaatctgttaatagaccatcaggggtatattcaggtgacagatttcggatttgctaagcgagttaaaggacggacatggaccctatgtgggacgcccgaatatctggctcctgagatcatactgtccaaagggtacaataaggccgtcgattggtgggccctgggcgtgctgatttatgaaatggctgcgggctaccctccattttttgccgatcagccaatccagatctacgaaaagatcgtgtctggtaaagtgcgcttcccttcacacttctcatctgatctcaaggacctgctccggaatctgcttcaggtggatctaaccaagaggttcgggaacctgaaaaacggagtctctgacatcaaaacccacaagtggttcgcgactactgactggatcgcaatctatcagagaaaagtggaggcaccgtttattccaaagttccgtgggtccggtgataccagcaattttgatgattatgaagaagaggatatcagggtgagcatcactgagaagtgtgcaaaagaattcggcgagttctag

SEQ ID NO: 201362 - DNA, 795 bp, synthetic construct
  misc_feature 1..795: note = Description of Artificial Sequence: Synthetic coding sequence
  source 1..795: mol_type = other DNA
atgagcgcccggaagagcagcgacgccagcgcctgcagcagcagcgaaatttctgactccttcgtcaaagaattccttgctaaggcaaaagaagacttcctcaaaaaatgggaaaaccccacgcagaataacgctggactcgaagacttcgagcggaaaaagacacttggcaccggatcctttggccgcgtcatgttggtgaaacacaaggccaccgagcagtactacgccatgaagatcctggacaaacagaaggtggtaaagctaaaacagatagaacacacactgaacgagaagcggattctccaagctgtcaattttccctttttagtgcggttggagtacgcattcaaggataacagcaatctgtacatggtcatggaatacgttcctggaggggagatgttttcccatttgaggcgaatcggtagattctccgaaccacatgcccgtttctacgctgcgcagattgtactgacatttgagtatttgcattcccttgatttaatttatcgggatttgaagcccgagaacttactcatagaccaccaaggctatatccaagtcacagacttcggttttgccaagcgggtaaaagggcgcacttggaccctctgcggaaccccagagtacttggcacctgagatcattctgtccaagggctataacaaggcggttgattggtgggctttaggagtccttatatacgaaatggcagcaggatatcctcccttttttgctgatcagccaattcaaatctatgagaagatcgtctcgggcaaacagaatttctag

SEQ ID NO: 201363 - DNA, 942 bp, synthetic construct
  misc_feature 1..942: note = Description of Artificial Sequence: Synthetic coding sequence
  source 1..942: mol_type = other DNA
atgcccgacctgaagatcctgaagggcaagaccctgggcaccggcagcttcggcagggtaatgctagtcaaacacaaagctacagagcagtactatgccatgaaaatcctcgacaagcaaaaggttgtcaaacttaagcagatagagcataccttgaacgagaagcgaattctgcaagccgtgaatttccccttcttagtgagacttgagtatgcattcaaagataactcaaatctgtacatggtgatggagtacgtgcccggaggtgagatgttcagtcatctccgtcgaatcggcaggttctctgagcctcacgcccggttttatgccgcacagatcgtcctcacgttcgagtacctgcacagcctggatttaatctaccgagacctgaagcccgagaacttactcatcgaccaccaaggttacatacaggtgaccgattttgggtttgcaaagcgggtcaagggccggacatggacactttgcggcacccccgagtacttggctcccgagatcattctatctaagggctataacaaggccgtggattggtgggcactaggcgtgctgatttatgaaatggccgccgggtatcctccctttttcgcagaccagccaattcagatctatgaaaagattgtgagtggaaaggtgcgattcccttcccacttctcatccgacttaaaggacctcctccgaaacctgctccaagttgacctgacgaagcgatttgggaatctgaagaatggggtgtctgacattaagacccacaaatggtttgcaaccacggactggatcgcaatataccagcgcaaggtggaggctccttttattcctaagttcaggggctccggtgacacctcaaatttcgacgactacgaagaggaggacattcgggtcagtatcactgagaagtgtgccaaagaatttggggaattttag

SEQ ID NO: 201364 - DNA, 1068 bp, synthetic construct
  misc_feature 1..1068: note = Description of Artificial Sequence: Synthetic coding sequence
  source 1..1068: mol_type = other DNA
atgggcctgagccggaagagcagcgacgccagcgcctgcagcagctccgagatttctgtgaaggagttcctggccaaagccaaggaggactttctgaagaaatgggaaaatcctactcagaacaatgctggacttgaggactttgagcggaagaaaacattgggtactggtagcttcggcagagtgatgctcgtcaaacataaggcaactgaacaatactatgcaatgaagattctggacaaacagaaggtagttaagctgaaacagattgaacatacactaaacgagaagagaattcttcaagccgtcaacttcccctttctggtgcgacttgaatacgcttttaaggacaattctaatctgtatatggtgatggaatatgtccccggtggggagatgttctcacacctgaggcggattggacgctttagcgaacctcatgctcgattctacgccgcccaaatcgtactgacatttgaatatttgcattccttggacctgatatatcgcgaccttaaacctgaaaacctcctgattgatcaccaaggctacatacaagtgactgatttcgggtttgcaaagagagtgaaaggaagaacatggaccctgtgtggaactcctgagtaccttgcacccgagataatcttatcaaagggctacaacaaagccgtggactggtgggcactgggcgtgttgatctatgaaatggccgccgggtacccaccgtttttcgccgaccaacccatccagatttatgagaagatcgtctccggcaaggtgcggttcccaagccatttttcttccgatcttaaggatttactgagaaacttgctgcaggtggacctcacaaaacgcttcgggaacctgaagaacggtgtgtcagacataaaaactcacaaatggtttgctacaaccgactggatcgctatataccagcgcaaggtcgaggccccattcatccctaagttcaggggtagcggcgataccagtaatttcgatgactatgaggaagaggacatacgcgtgagtattaccgaaaaatgcgccaaggagtttggagaattctag

SEQ ID NO: 201365 - DNA, 738 bp, synthetic construct
  misc_feature 1..738: note = Description of Artificial Sequence: Synthetic coding sequence
  source 1..738: mol_type = other DNA
atgggcctgctgaaggagttcctggccaaggccaaggaggacttcctcaagaagtgggagaaccctactcaaaacaacgccggcttggaggactttgagcgaaagaagactctgggtacgggctccttcggcagggttatgcttgtgaagcacaaagctacagagcaatactacgcaatgaagatcctcgacaaacagaaggtcgtgaaactcaagcagattgaacacaccctcaacgagaagcgaattctgcaagctgtgaattttccattcctggtacgtctcgaatacgcatttaaggataattctaacttgtatatggttatggaatacgtgcctgggggggagatgtttagtcatctaaggcgaattggtcggttcagtgagccacacgcccggttctatgcagcacagatcgtgctaacttttgagtacctacattctctggacctaatctaccgtgacctgaagcccgaaaacctgctgatcgatcatcaggggtatattcaagttactgactttgggttcgctaaaagagtcaagggaaggacatggacactgtgcggcactcccgagtatctagcaccagagattatcctctctaaaggctacaacaaggccgtcgattggtgggccctcggggtattgatctatgaaatggctgccggttacccccctttcttcgccgatcaaccaatccaaatctatgaaaagattgtcagtggaaagaatttttag

SEQ ID NO: 201366 - DNA, 1197 bp, synthetic construct
  misc_feature 1..1197: note = Description of Artificial Sequence: Synthetic coding sequence
  source 1..1197: mol_type = other DNA
atggccgcctaccgggagcccccctgcaaccagtacaccggcaccaccactgcgcttcagaaacttgagggcttcgcttcccggctgtttcaccggcactcgaagggtacagcacacgatcagaagaccgcactggaaaacgatagcctgcactttagcgagcataccgcgctttgggatcgatcaatgaaagagtttctggccaaggctaaggaggattttctaaagaaatgggagaatcccacccagaacaatgcgggacttgaagacttcgagaggaagaaaacattgggaaccggttcatttggcagggtcatgcttgtaaaacacaaggctaccgaacagtactacgcaatgaaaatcctcgataaacagaaggtggtcaaattgaagcaaatagagcatactctcaatgagaaaagaatcctgcaggcagttaactttccattcttggtgcgtctcgagtacgccttcaaagacaattccaacctctacatggtaatggaatacgtgcccggcggcgaaatgttctcacacctccgacgaatcgggcgctttagcgaaccccacgccaggttttatgcggcccaaattgtcttgacattcgagtacctccactccctcgacctaatttacagagatttaaagccagagaacctgttaattgatcatcaggggtatatccaagtgactgacttcggttttgccaaacgggtcaaaggtagaacttggactttgtgtggtacgccagaatacctggcccccgaaattattctgtcgaagggctacaacaaagctgtggattggtgggcactgggcgtgctgatttacgagatggctgccggctaccctccattctttgctgatcagcccattcagatctacgagaaaatagttagtggcaaggtgagatttccttcccacttcagcagcgacctgaaagacttactccgcaatcttttgcaagtggacctaactaagagatttgggaatctgaaaaatggtgtgagcgatatcaaaactcacaaatggttcgctacaaccgactggattgccatataccagaggaaagtggaggctccattcatacccaaattcaggggctcgggtgatacctccaacttcgacgattatgaggaagaggacatccgagtaagtattacggaaaagtgcgccaaagaattcggggagttctag

SEQ ID NO: 201367 - DNA, 774 bp, synthetic construct
  misc_feature 1..774: note = Description of Artificial Sequence: Synthetic coding sequence
  source 1..774: mol_type = other DNA
atgggcaacgccgccaccgccaagaagggcagcgaggtggagagcgtcaaggaattcctggccaaggccaaagaagactttttaaagaaatgggaaaatcccacacagaacaatgccggtctggaagacttcgagcgcaaaaagactctggggacaggttcttttgggcgggtaatgcttgtgaagcacaaggccactgaacagtactacgccatgaagatcctggataagcagaaggtggtgaaactgaagcagatagagcatacactaaatgagaaacgtatcctgcaagccgtgaactttccctttttggtgaggctggaatatgcctttaaagacaatagtaatctttacatggtgatggagtacgtgccaggcggcgaaatgttcagccacctgcggcgaatcggacgcttctcagaacctcacgccaggttctatgccgctcagattgtgcttacgttcgaatacctacactcacttgatctgatatatagggacttaaagcctgagaaccttttgatagaccatcaggggtacattcaggtgacggattttgggttcgcaaagcgcgttaaagggaggacttggacactgtgcggcacacctgagtacttggctcccgaaattatcttatctaagggctataacaaagctgtcgattggtgggcgctcggggtgttaatatacgagatggccgctggatatcctccctttttcgccgaccagccgatccaaatctatgagaaaattgtgagcggcaaaaatttctag

SEQ ID NO: 201368 - DNA, 1056 bp, synthetic construct
  misc_feature 1..1056: note = Description of Artificial Sequence: Synthetic coding sequence
  source 1..1056: mol_type = other DNA
atgggcaacgccgccaccgccaagaagggcagcgaggtggagagcgtgaaggagtttctggcgaaagccaaagaggactttctgaagaaatgggagaacccgactcaaaacaacgcagggctggaggacttcgagcggaagaagacactggggacaggttcatttggacgcgttatgctcgttaagcataaagcaaccgaacagtactacgccatgaaaatactggacaaacagaaggtggtcaaactgaagcagatcgagcacactctcaacgagaagcgaatcttacaggcagtgaactttccgtttcttgtcagactggagtacgccttcaaagacaattctaacttgtatatggtcatggagtatgtgccgggaggcgaaatgttttcccacctccgacgtatagggaggttcagcgagccacatgcacggttttacgcagcccagattgtcctgacgtttgagtacctgcactccttggacctgatctacagagacctaaagcctgaaaatctgctgatagatcatcaggggtacattcaagtgacggattttggctttgcgaaacgcgttaagggccgcacgtggacattatgcggaaccccagagtacctggccccagaaatcatcttatccaaaggttacaacaaggccgtggactggtgggcactgggcgtcttgatctatgagatggcggcggggtacccacctttttttgccgaccagccaattcaaatatacgagaaaatcgtatctggtaaggtcagatttccaagccatttttcctcagatctgaaagatcttctgcggaatctgcttcaggttgacttgaccaagcgattcgggaacctcaaaaacggtgtgagcgatattaagacccacaagtggtttgccacaacagactggattgcaatatatcagcgtaaggtagaggccccctttatacctaagttccgcgggtcaggagacaccagcaactttgatgactatgaggaggaggatatccgggtaagtattacagagaaatgcgccaaggagttcggtgagttctag

SEQ ID NO: 201369 - DNA, 1077 bp, synthetic construct
  misc_feature 1..1077: note = Description of Artificial Sequence: Synthetic coding sequence
  source 1..1077: mol_type = other DNA
atgggcctgagccggaagagcagcgacgccagcgcctgcagcagctctgagatatcagactctttcgtgaaagagttcctagcaaaggccaaggaggattttctcaagaaatgggagaaccccacacagaacaatgccggactcgaagacttcgagagaaagaaaactctcggtaccggaagcttcggacgggtcatgctggttaagcataaggctactgagcagtattatgccatgaaaatcctcgacaaacagaaagttgtcaagctcaagcagatcgagcacacacttaacgagaaacgcatcctgcaggccgtgaatttcccattcctagtgaggctggagtacgcgtttaaggataatagtaacttatacatggtgatggagtacgttcctggtggcgagatgttcagccatctccgccgcataggccggttttcagagccgcatgctaggttctatgcagcccagattgtgttgacatttgaatatctgcactccctcgacctaatctatagagatctcaaaccagagaacttacttatagaccaccagggttacatccaggtgactgactttggatttgccaagcgcgtgaaaggccgcacgtggactctgtgtggcacgcctgagtacttggcaccagagataatactgtccaaggggtacaacaaggccgtggactggtgggccctgggggtgttaatctatgaaatggctgcaggttatcctccgttctttgcggaccaacctatccaaatctacgagaaaatcgtttccgggaaagtgcgcttccccagtcacttcagctctgacctgaaggacctccttagaaacttactgcaggtggatctgacaaaaagattcggtaacctcaagaatggtgtgtctgatataaagactcacaagtggtttgccaccaccgactggatagctatataccagaggaaggtggaggcccctttcatacccaaatttagaggcagtggtgacacgtctaatttcgatgactacgaggaagaggatatcagggtgtccatcaccgaaaaatgtgcaaaggagtttggagagttctag

SEQ ID NO: 201370 - DNA, 966 bp, synthetic construct
  misc_feature 1..966: note = Description of Artificial Sequence: Synthetic coding sequence
  source 1..966: mol_type = other DNA
atgagcgcccggaagagcagcgacgccagcgcctgcagcagcagcgaaatatctgtgaaggaatttctggctaaggccaaagaagattttcttaagaaatgggaaaatcccacgcagaacaacgctgggctggaggacttcgagcggaaaaaaacgttgggtaccggctcctttgggagagttatgctggtgaaacataaggctacggagcagtactacgccatgaagatacttgacaagcagaaggataatagtaacctttacatggttatggagtacgtgccaggtggcgagatgttcagtcacctgagacgcatcgggcgcttctcagaaccccatgcacgattttatgcagctcagattgtccttacttttgaatacttgcattccttggatctaatttaccgggacttgaaaccagagaatctcctcatcgatcatcaagggtatattcaggtcacagacttcgggttcgcgaagagagtcaagggacgaacttggactctgtgcggcacacccgagtacctcgctcccgaaataattctgtcgaagggctataataaagctgtcgactggtgggcactcggcgtcttaatctacgagatggcagcagggtacccaccgttcttcgctgatcagcccattcaaatctacgaaaagatcgtgagcgggaaggttcgcttcccttctcacttctcgtctgacctcaaggacctgctgaggaacctgttacaagttgaccttactaaacggttcggaaatctcaaaaacggtgtctcagacatcaagacacacaagtggttcgctacgaccgactggatcgccatttatcagaggaaggtggaggcaccatttataccaaagtttagaggcagtggcgataccagtaattttgacgactatgaggaggaagatattcgcgttagtatcacggagaagtgcgccaaggagtttggggagttctag

SEQ ID NO: 201371 - DNA, 630 bp, synthetic construct
  misc_feature 1..630: note = Description of Artificial Sequence: Synthetic coding sequence
  source 1..630: mol_type = other DNA
atgagcgcctgcagcagcagcgagatcagcgtgaaggagttcctggccaaggcgaaagaggattttctgaagaagtgggagaaccctacccagaataatgcgggtctcgaagactttgagaggaagaagactctggggacaggaagcttcgggcgagtgatgctcgtcaaacacaaggctaccgaacaatattatgccatgaaaattttagacaagcagaaggtcgtcaagttgaaacagatagaacacactctgaatgaaaagagaatactccaggctgtgaattttccttttctggtcagattagagtatgctttcaaagacaactccaatctttacatggttatggagtatgtgcctggcggggagatgttttcccacctcaggaggatcggtagattttcagaacctcatgctagattctatgcagcacagatcgtgctcacatttgaatatctccactcccttgaccttatttaccgggacttgaaacccgaaaatttactgatcgatcatcagggttacattcaagtgactgattttggatttgccaaacgcgtaaaggggcgcacctggaccctatgtggcaccccggaatacctggctcccgagattattttgtcgaagtag

SEQ ID NO: 201372 - DNA, 594 bp, synthetic construct
  misc_feature 1..594: note = Description of Artificial Sequence: Synthetic coding sequence
  source 1..594: mol_type = other DNA
atgagcgtgaaggagttcctggccaaggccaaggaggacttcctgaaaaagtgggagaaccccacacagaacaatgcgggacttgaagacttcgagcggaaaaagaccctgggcaccggatcatttggccgcgttatgcttgtgaaacataaagccacggagcagtactatgctatgaagatcctggataagcaaaaagtggtgaagttgaagcaaattgagcatacccttaatgagaaacgtattctgcaagctgtgaactttccgtttctggtacgcctggagtatgcttttaaggataactctaacctgtatatggtgatggaatacgtccctggaggcgagatgttcagccacctgaggcgcattgggaggttctccgaaccccacgccaggttttatgcagcccagatcgtgctcactttcgagtacctacatagcctagatctgatctaccgtgaccttaagccagagaatttactcatcgaccaccagggctatattcaggtgacagatttcggattcgctaagcgtgtgaaaggccgtacatggacactatgtggcacacccgagtacctggctccagaaatatag

SEQ ID NO: 201373 - DNA, 645 bp, synthetic construct
  misc_feature 1..645: note = Description of Artificial Sequence: Synthetic coding sequence
  source 1..645: mol_type = other DNA
atgggcctgagctgcagcagcagcgagatcagcgtgaaggagttcctagctaaggccaaggaggatttcctgaaaaagtgggagaatccgacccagaataatgcaggcctggaagactttgaaagaaagaagacactaggaaccggctcttttggtagagttatgctggttaagcacaaggccacagagcagtattatgctatgaagattcttgataagcaaaaagtagtaaagctgaaacagattgaacataccctcaatgaaaagaggatactccaagcagttaattttcccttcttagtacgactggagtacgccttcaaagacaactcgaatctgtacatggtcatggagtacgtacccggaggcgagatgttcagccatctgagaaggattgggcgtttctccgagcctcacgccagattttacgctgcccagatagtcctgacctttgaatacctgcattccctagacctgatctaccgggacctgaagcccgagaatcttcttatcgatcaccaggggtatatccaggtcacagactttggatttgccaaaagggtcaaaggtcggacctggacactatgtggtacccccgaatacctggcaccagaaatcatcttatctaaagggtacaataagtag

SEQ ID NO: 201374 - DNA, 561 bp, synthetic construct
  misc_feature 1..561: note = Description of Artificial Sequence: Synthetic coding sequence
  source 1..561: mol_type = other DNA
atgggcctgagccggaagagcagcgacgccagcgcctgcagcagcagcgagatttccgttaaggaatttttagcaaaggccaaagaggatttcttaaaaaaatgggaaaatccgacacagaataatgcaggcctggaggattttgaaaggaaaaaaacactcggaacagggtcatttggcagagtgatgctagtgaaacacaaagcaacagagcaatattacgccatgaaaatcttggataaacagaaagtcgtcaagttgaagcagatagaacatacactgaacgaaaagagaatcctccaggccgtcaacttcccgtttcttgtgcgacttgaatacgccttcaaggataattctaacttgtacatggtaatggagtacgtgccaggtggtgagatgttcagtcatctccggcggatcgggagatttagcgagccccacgccaggttttacgcagcacagatcgtacttactttcgaatatctgcactcactcgatctgatttatagagatctgaagcctgagaatttgctgattgaccatcaagggtacattcaatag

SEQ ID NO: 201375 - DNA, 528 bp, synthetic construct
  misc_feature 1..528: note = Description of Artificial Sequence: Synthetic coding sequence
  source 1..528: mol_type = other DNA
atgggcctgagccggaagagcagcgacgccagcgcctgcagcagctccgagatttcagatagctttgtgaaagaattccttgctaaagctaaggaggattttctgaagaaatgggagaacccaactcagaataacgcaggcttagaggattttgaaaggaaaaaaacactgggtactggctcctttggccgcgtcatgttagttaagcataaagccaccgaacagtactatgcgatgaagatactggacaagcagaaagtggtgaaactgaagcagatagagcacaccctgaacgagaaaagaatcctgcaggctgtgaacttcccatttctagtccgtttggagtacgccttcaaggacaacagcaatctctatatggtgatggaatacgtacctgggggcgagatgttctcccacctcaggagaatcggtcgattcagcgagccacacgctagattctacgcagctcagattgtgctaacgttcgagtaccttcattccttagacctaatatatcgtgatttgtag

SEQ ID NO: 201376 - DNA, 621 bp, synthetic construct
  misc_feature 1..621: note = Description of Artificial Sequence: Synthetic coding sequence
  source 1..621: mol_type = other DNA
atgagcgcccggaagagcagcgacgccagcgcctgcagcagcagcgagatatctgtgaaagagtttttagctaaagcaaaggaagacttcctcaagaagtgggagaatcccacacaaaacaatgccggtcttgaggatttcgagaggaaaaaaacattgggtacagggagttttggccgtgtgatgctcgtcaagcataaagcaacagagcagtactacgctatgaagattttggataaacagaaagtggtgaaactgaaacagattgagcacaccttgaacgagaaaagaatcttgcaggctgtgaatttccctttcctggtgagactcgaatacgccttcaaggacaactcaaacctgtacatggtcatggagtatgtcccagggggcgagatgttttcgcatctcaggaggatcggcaggttctctgaacctcacgctaggttttacgccgcgcagatagttctgacgttcgagtaccttcacagcttggacttgatctaccgcgacctgaagccagagaatctgctaattgatcaccaggggtatatacaagtgacggacttcgggttcgcgaagagggtcaaaggcaggacatggaccctctgcggcacaccttag

SEQ ID NO: 201377 - DNA, 1056 bp, synthetic construct
  misc_feature 1..1056: note = Description of Artificial Sequence: Synthetic coding sequence
  source 1..1056: mol_type = other DNA
atgggcaacgcccccgccaagaaggacaccgagcaggaggagagcgtgaacgagtttctggcaaaagccaggggcgatttcctgtaccgctggggcaaccctgcccaaaacaccgcctccagcgatcagttcgagagactgcggaccttgggcatgggcagttttggacgagttatgctcgtgaggcatcaagaaacaggagggcattatgctatgaaaattttaaacaaacaaaaagtcgtgaagatgaagcaagtggagcacatcttgaacgaaaaacggatcttacaggctatagacttccccttcttggtaaagttacagttctcatttaaggacaactcgtacttgtacctcgttatggaatatgttccagggggggagatgttttcccgcctccaacgtgtgggaagattcagcgaaccgcatgcttgcttttatgccgcacaagtggtgttggcggtacagtacctccactctctcgacttgatccaccgggacctgaaaccagagaacctgctgatcgatcagcagggctacttgcaagtgaccgacttcgggttcgcgaagcgagtgaagggacgcacctggactctgtgcggtacacctgagtacctggccccagaaattattctgtctaaagggtataacaaggctgtggattggtgggccctaggcgtgttaatttacgaaatggcggtgggtttcccaccattttacgccgatcaaccaatccaaatttatgaaaaaattgtgtccggaagggttagatttcccagtaagctgtctagtgacctgaaacacctcctgcgatccctcctccaggtcgatctgacgaagcgcttcggaaatctgcgaaacggcgtaggcgatattaagaaccacaaatggttcgccaccacgtcctggatcgcgatttacgaaaagaaggtcgaggcaccctttatcccaaagtacacaggccccggcgatgcgagcaactttgacgactacgaggaggaggaactgcgtatcagcattaacgagaagtgcgcaaaagagttttctgagttctag

SEQ ID NO: 201378 - DNA, 1146 bp, synthetic construct
  misc_feature 1..1146: note = Description of Artificial Sequence: Synthetic coding sequence
  source 1..1146: mol_type = other DNA
atggagagcggcagcaccgccgccagcgaggaggcccggagcctgcgggagtgtgagttatacgtgcagaaacacaacattcaggcccttctgaaggattccatcgtacagctttgcacagcaaggcccgagcgacccatggccttcctcagagagtatttcgagagattagagaaggaggaggccaaacagattcaaaacctgcagaaggctggcacacggaccgactcgagagaggatgaaatctccccacctccgcctaatcctgtcgtcaagggacggaggagacgaggagcgattagtgctgaagtgtacacggaggaagacgccgccagttatgtacgaaaagtgatcccaaaagactacaagacaatggccgctctggctaaggctatcgaaaagaatgtgctgttttcccatctggacgacaatgaacgctcagacatcttcgatgccatgttttcggtgtccttcatagccggcgagactgtaatccaacagggagacgagggagacaatttttacgtcatcgatcagggggaaaccgacgtctatgtgaacaacgaatgggccacttccgtgggggaaggggggtcttttggagaactggctcttatttatggcacacctcgagccgctactgtgaaggcaaaaacaaacgtaaagctctgggggatcgaccgggatagctacagaaggatcttgatgggttcaacccttcgtaagaggaagatgtacgaagagttcctcagcaaagtgagcattctagaatcactggacaagtgggagagactcaccgtggccgacgctttagaaccagtgcagttcgaggatgggcagaaaatcgttgtccaaggcgaaccaggcgatgagttcttcatcatcctcgaggggagtgcagctgtgctacaaaggcgttctgaaaatgaggagttcgtcgaagtcggaagactaggtccgtctgattactttggcgagattgcactgttgatgaatcgaccaagggcggctacagttgtggccaggggccccttgaagtgtgttaaactcgacaggcctagatttgaacgtgtgcttggcccatgcagcgatattttgaagagaaatattcagcagtataactccttcgtcagcctctccgtgtag

SEQ ID NO: 201379 - DNA, 1146 bp, synthetic construct
  misc_feature 1..1146: note = Description of Artificial Sequence: Synthetic coding sequence
  source 1..1146: mol_type = other DNA
atggagagcggcagcaccgccgccagcgaggaggcccggagcctgagggagtgtgagctttatgtacaaaagcacaacatccaggcgctgctgaaagactctatcgtgcagctttgtactgcacggcccgagcgccctatggcgttcttgagagagtatttcgaaagactagagaaggaggaggctaagcagattcagaatctccagaaggccggtacaagaacagactccagagaggatgaaatttccccgccccctccgaatcccgtggtgaagggacgaagacgtcgcggtgcaatctccgctgaagtctatactgaggaggacgctgcatcctatgtgaggaaggtgattcccaaggattacaaaaccatggcagccctggccaaagctattgaaaagaatgtgctgttctcacacctggatgacaatgaacggtcagatatcttcgatgctatgtttagcgtgagctttatagccggggagaccgtcatccagcagggcgacgaaggcgataacttttacgtgattgatcagggagagacggatgtttacgtgaataatgaatgggctacatcagtcggcgaaggcggatcgttcggcgagctcgcgctgatctatggaacgcctcgcgccgccacagtcaaagccaagaccaatgtgaagctatgggggatcgatcgcgacagttaccgtagaattctaatggggagcacactgcgcaaacggaagatgtacgaagaatttctctccaaggtttcaattttggagtcattggataaatgggagcgactcactgtggccgatgccttggaacccgtgcagttcgaggacggccagaaaatcgtcgtacagggcgaacctggggatgagttcttcattatcttagaagggtcagctgcagtgcttcagcgcaggagtgagaatgaagagttcgtggaggtaggtcgcctcggcccctccgattatttcggagagatcgccctgctaatgaatcgcccaagggctgcaactgtggtggcgcgaggccctttgaagtgcgtgaaattggaccggccgagattcgaacgcgttctgggtccctgttctgatattctgaagcgtaatatacagcagtataattccttcgtgagtctctctgtttag

SEQ ID NO: 201380 - DNA, 1146 bp, synthetic construct
  misc_feature 1..1146: note = Description of Artificial Sequence: Synthetic coding sequence
  source 1..1146: mol_type = other DNA
atggagagcggcagcaccgccgccagcgaggaggcccggagcctgagagaatgtgagttatacgtccagaaacacaacattcaggctctgcttaaggactctatagtacagctctgcacagcccgccctgagagacctatggccttcttgagagagtacttcgaacggctggagaaggaggaagctaaacaaatacagaacctgcaaaaagctggtacccggacagattctagagaagatgagatctctccacctccaccaaacccggtggtcaaggggagacggcgtagaggcgctatctcagccgaggtgtataccgaggaggatgccgcatcatatgtgaggaaggttattcctaaggactataagacaatggccgcactcgccaaagccattgaaaagaatgtcctgttttctcatctcgatgacaatgaaaggtcagacatcttcgatgctatgttttccgtgtctttcatcgcaggagaaactgttatccaacagggtgatgagggagataatttttatgtcattgaccagggggaaacggacgtctacgtaaataatgaatgggcaacgagcgtcggagaaggaggttctttcggggaactcgcgttaatttatggtacccccagagcagctactgtgaaagcaaagacgaatgttaagttgtggggcattgacagagacagctaccgccgcatcttaatggggagcacactgagaaagagaaagatgtacgaagaattcctgagcaaagtctctattctcgagtccctggacaagtgggagagactgacagtagcagatgctctagaacccgtgcaatttgaagacggccagaagattgtggttcagggtgagcccggcgacgagttttttatcatcctggaggggagcgccgccgttctgcagcgtcgaagcgaaaacgaggaattcgtggaggtggggcgactcgggccaagcgattactttggcgaaattgccctcctcatgaatcgccccagggcagcgactgttgttgcaagagggcctctgaaatgtgtgaaattggacagacctagattcgagagggtgcttgggccatgcagtgacatacttaaacggaacatccagcagtacaattccttcgtctctctttcggtgtag

SEQ ID NO: 201381 - DNA, 1146 bp, synthetic construct
  misc_feature 1..1146: note = Description of Artificial Sequence: Synthetic coding sequence
  source 1..1146: mol_type = other DNA
atggagagcggcagcaccgccgccagcgaggaggcccggagcctgagagagtgtgaattatacgtacagaagcataatatccaagctctcctgaaggactccattgtacagttgtgcactgcaaggccagagagacccatggcgttccttagagaatatttcgagaggctcgaaaaagaggaggctaagcagatccaaaatttacagaaggccggtacccgcacagactcccgagaggatgaaatcagcccacctccaccaaaccccgtcgtgaaggggcgccgaaggagaggggcaatttcggccgaggtatacacagaggaggacgcggctagctatgtgcgcaaggtcattccaaaggactacaagactatggcggccctggccaaagccattgagaaaaatgtgctcttttcacacctggatgacaatgaacgaagcgacatctttgatgcaatgttctccgtatcattcatcgcgggggaaacggtgattcagcagggcgatgaaggtgacaacttctacgtaatcgaccagggcgagaccgatgtgtacgtcaataacgagtgggcgacctccgtgggagagggcgggtcattcggagagctggcattgatttatggcacccccagagcagcaacagtcaaggcgaaaaccaacgtgaaactgtggggcattgatcgcgatagctaccgtaggatcctaatgggatccacactgcggaagcggaaaatgtacgaagagtttctctccaaggtgagtattctggagagcctggataaatgggagcgcttaacagtagctgacgctctcgagcctgtccaattcgaggatgggcagaaaatagtagtgcagggggagcctggggacgagttctttattatcctcgagggttctgccgcggtactgcagcgtcggtccgaaaacgaagaatttgtagaagtggggcgtctgggtccttcagactattttggcgagattgcgctcctgatgaacagaccgcgggccgcgaccgtggtggctcgcgggccacttaagtgtgtcaaactggaccggccccgttttgaacgcgtcttagggccttgttctgacatcttgaaacggaacatacagcagtacaatagcttcgtatccctatcggtctag

SEQ ID NO: 201382 - DNA, 243 bp, synthetic construct
  misc_feature 1..243: note = Description of Artificial Sequence: Synthetic coding sequence
  source 1..243: mol_type = other DNA
atgggcagcaccctgcggaagcggaagatgtacgaggagttcctgtcaaaggtctcaatcttggaatcgctggagaaatgggagaggctcaccgtagctgacgctctggagcctgtgcagtttgaggatggcgaaaagatcgtcgtacaaggcgagcctggcgacgacttttacatcatcacagaaaagaatctgcctggcgtggttgcacacgcctgtaatccttcatacctgggcggctag

SEQ ID NO: 201383 - DNA, 1146 bp, synthetic construct
  misc_feature 1..1146: note = Description of Artificial Sequence: Synthetic coding sequence
  source 1..1146: mol_type = other DNA
atggccagcccccccgcctgccccagcgaggaggacgagagcctgaagggctgcgaactgtacgttcagctccatgggattcaacaggtcctgaaggactgcatagtccacttgtgtatctcaaaacctgaacggccgatgaagtttttacgggaacactttgaaaagctggaaaaggaggaaaatcggcagatcctggctcgccagaagagtaatagccagagtgattcccacgacgaagaggtcagtcccacaccaccgaaccccgtcgtaaaggccaggcggagacgaggtggagtgtcggctgaggtatacaccgaggaagatgcagtttcttacgtaagaaaggtaattccaaaagactacaagaccatgacagcccttgccaaggccatcagtaagaacgtgctttttgcacacctcgacgacaatgaacgaagcgacattttcgacgccatgttcccggttactcacatcgccggggagaccgtgattcagcaagggaatgagggcgataacttctacgtcgtggatcagggcgaggtggatgtgtacgtgaacggcgaatgggtcacgaatatcagtgagggcggttctttcggcgaactcgcccttatctacggtactcctcgcgccgcgacagtaaaggccaagaccgacttgaaactgtgggggatcgatagggacagctaccgcaggattctcatggggagcactcttcgtaaacgcaagatgtacgaggagttcctgtcaaaggtctcaattctcgaatctctggagaagtgggaacgacttaccgttgcggatgcgcttgagccagtacaatttgaggatggagaaaagattgtcgtgcaaggggaacctggggacgacttctatatcattactgaaggtactgcctcagtcctgcagagaagatctcctaacgaggagtacgtggaggtgggcagacttggaccatccgattactttggcgagatcgccttgctgctgaataggcccagagcggccaccgtcgtggctagggggcctctgaaatgtgtcaaattggatcgtccccgcttcgagagggtattgggaccttgcagtgaaatcctcaaaaggaacatccaacggtataattccttcatcagcttgacagtctag

SEQ ID NO: 201384 - DNA, 1146 bp, synthetic construct
  misc_feature 1..1146: note = Description of Artificial Sequence: Synthetic coding sequence
  source 1..1146: mol_type = other DNA
atggccagcccccccgcctgccccagcgaggaggacgagagcctgaagggctgtgagctttatgtgcagttgcacggcatccagcaggtcttgaaagactgtattgtgcacctgtgcatcagtaagccagagaggcctatgaagttcctccgagagcatttcgagaaactggagaaagaggagaaccggcaaattttggccagacaaaagtccaactcccaaagtgattcccacgacgaagaggtttccccaaccccaccaaaccccgtggttaaggcacgccgccgccgcgggggagtctctgccgaagtgtacactgaggaagatgccgtgagctacgtgaggaaagtgataccgaaggattacaagacgatgaccgctctagccaaagccattagcaagaacgttctctttgctcatcttgatgacaacgagcggtccgacatctttgacgcaatgtttccagttactcacattgccggagagacagtgattcagcaggggaacgaaggtgacaatttctatgtcgtggaccaaggtgaagttgacgtctatgtgaatggtgaatgggtgactaatattagcgaaggcgggtcgtttggagaattggcactgatttatggcactcctagggccgctacggtcaaagccaaaacagacctgaagctttggggtatcgacagggacagttacagacgcattctgatgggaagcacgttgagaaagagaaaaatgtatgaggagtttctgtctaaagtcagcatcttagaatcgcttgaaaagtgggagcggctaaccgtcgctgacgcgctggagcccgtgcaattcgaggatggcgagaagatcgtagtccagggggagcctggtgacgacttttacataatcacagaagggactgcctccgtcctgcagcgacggagcccgaatgaggagtatgttgaggtgggtagactgggcccatcagattacttcggagagatcgcgctgttgctgaacagaccccgagctgccaccgtagtggcccggggcccactgaaatgtgttaaactcgacagacccaggttcgagagggtgctcggaccctgtagtgagatccttaagcgcaatattcagcgctacaatagctttattagcctgactgtgtag

SEQ ID NO: 201385 - DNA, 1146 bp, synthetic construct
  misc_feature 1..1146: note = Description of Artificial Sequence: Synthetic coding sequence
  source 1..1146: mol_type = other DNA
atggccagcccccccgcctgccccagcgaggaggacgagagcctgaagggatgcgaactctacgtgcagctccacggcatccagcaagtgttaaaggattgtatcgtccacctgtgcatatccaaacctgaacgccctatgaaatttctgagggagcattttgagaaactcgagaaggaagaaaataggcagatacttgcgcgacagaaaagtaattctcagtcagacagtcatgacgaagaggtgagcccaacaccgccaaatccagtggtcaaggcccggcgacgaaggggtggagtgagtgcagaggtctacaccgaagaagacgctgtgagctacgtccgaaaggtgatccccaaagattacaaaactatgacagctttggctaaggctatcagcaaaaacgtcctctttgcgcacctggatgacaacgaacgatccgatatctttgatgccatgtttccggttacgcacatagccggtgagaccgtaattcagcagggtaacgaaggagataatttctatgtcgtggaccagggcgaggtggatgtgtacgtgaacggcgagtgggttactaatattagcgaaggggggagtttcggagaactcgcactgatctacgggaccccgagagccgctacagtaaaggccaaaacagatctgaagctgtggggcatagatcgggactcttaccgacgaatcctgatggggagtacgctgaggaagcggaagatgtacgaagagtttttgtcaaaggtatcgatcttggagagcctcgaaaagtgggagagactgacagtggccgacgcccttgagcctgtccagtttgaggatggagagaaaatagtcgtgcagggcgaaccaggggacgatttctacataatcactgaggggacagccagcgtgcttcagagacggagccctaacgaagaatatgttgaggtcgggcgcctgggtccttctgactactttggtgaaattgcgctgctgctgaatcgccctcgggctgccactgttgtggcccggggccctctgaagtgtgtaaagttagaccgcccaagattcgagagggtgctgggcccgtgttctgaaatcttgaaaaggaacatccaaaggtacaactccttcatcagtctgactgtgtag

SEQ ID NO: 201386 - DNA, 498 bp, synthetic construct
  misc_feature 1..498: note = Description of Artificial Sequence: Synthetic coding sequence
  source 1..498: mol_type = other DNA
atggccagcccccccgcctgccccagcgaggaggacgagagcctgaagggctgtgaattgtacgtgcagttacacggaattcaacaggtgttgaaggactgcatcgtccacttgtgcatctccaagcctgagcggccgatgaaattcctgcgtgagcattttgaaaagctggaaaaggaggaaaatcgccagattctggcccgccagaaatccaattcccagtctgactctcacgatgaggaggtctccccaacacccccaaacccagtcgtgaaagctaggcgaaggcgtggcggagtgtctgccgaggtgtacacagaagaagatgcagtgagctacgttaggaaggtcatcccgaaggactacaaaaccatgaccgcgctggcgaaggcgatcagcaaaaacgtgctgtttgcccatttggacgacaacgaacggagtgacatctttgatgcgatgttcccagttacgcatatcgcaggcgaaacagttatctag

SEQ ID NO: 201387 - DNA, 894 bp, synthetic construct
  misc_feature 1..894: note = Description of Artificial Sequence: Synthetic coding sequence
  source 1..894: mol_type = other DNA
atggccagcccccccgcctgccccagcgaggaggacgagagcctgaaggggtgtgaactatacgtacagctgcacggaatccagcaagtgctgaaagattgtattgttcacctatgcatatctaagcctgaacggccaatgaaatttttacgggaacactttgaaaagctggagaaagaggagaacagacagattctcgccaggcagaaatccaatagccagagcgacagccacgatgaagaagtgtcacctactcctcctaaccctgtggtaaaggcccgtaggaggaggggaggggtgagcgccgaggtgtacactgaagaagacgccgtgagttacgtgcggaaagtgattcccaaggactataagacaatgacagctcttgccaaagctatttccaaaaacgtgctgtttgcgcaccttgacgacaacgagcgatctgatatttttgatgccatgtttcctgtcacccacatagccggtgaaaccgtcattcagcaggggaatgagggtgataacttctacgtggtagaccagggggaagttgatgtctatgtcaatggggagtgggtgaccaatatcagtgaagggggcagttttggcgagctagccctgatctatgggactccccgagccgccaccgttaaggcaaaaaccgatttgaaactgtggggcattgatagagacagctacaggcgcatccttatggggtctaccctgcgaaaaaggaagatgtacgaggagttcctatccaaggtgagcattctggagagcctcgaaaaatgggagcgactgaccgtggctgacgctttagagcctgtacagttcgaggacggggagaagattgtcgttcagggggaacctggggatgacttttatatcatcactgagtag

SEQ ID NO: 201388 - DNA, 177 bp, synthetic construct
  misc_feature 1..177: note = Description of Artificial Sequence: Synthetic coding sequence
  source 1..177: mol_type = other DNA
atggccagcccccccgcctgccccagcgaggaggacgagagcctgaaagggtgcgagctgtatgtgcaactgcacgggattcagcaagtcttaaaagactgcatcgtgcatctctgtattagcaaaccggagcgtcccatgaaattcttgcgtgaacactttgagaagcttgagtag
